United States Patent Application Publication US 2005/0255487 A1 - sequence listing, part 74

SEQ ID NO: 2032343 - RNA, 19 nt, Homo sapiens
  misc_RNA (1)...(19): siRNA sense strand
gggcccaacuuucagcuuu

SEQ ID NO: 2032344 - RNA, 19 nt, Homo sapiens
  misc_RNA (1)...(19): siRNA sense strand
gaacaacuuccuucuuauc

SEQ ID NO: 2032345 - RNA, 19 nt, Homo sapiens
  misc_RNA (1)...(19): siRNA sense strand
gcagugggcccaacuuuca

SEQ ID NO: 2032346 - RNA, 19 nt, Homo sapiens
  misc_RNA (1)...(19): siRNA sense strand
caaggcagcuacuuagagu

SEQ ID NO: 2032347 - RNA, 19 nt, Homo sapiens
  misc_RNA (1)...(19): siRNA sense strand
agacagcgccucucucauu

SEQ ID NO: 2032348 - RNA, 19 nt, Homo sapiens
  misc_RNA (1)...(19): siRNA sense strand
gaucagcuccaucaaggaa

SEQ ID NO: 2032349 - RNA, 19 nt, Homo sapiens
  misc_RNA (1)...(19): siRNA sense strand
gacuaaagcagauauugaa

SEQ ID NO: 2032350 - RNA, 19 nt, Homo sapiens
  misc_RNA (1)...(19): siRNA sense strand
gcagaaugcagucaugguu

SEQ ID NO: 2032351 - RNA, 19 nt, Homo sapiens
  misc_RNA (1)...(19): siRNA sense strand
gauagaaaaugaaguggaa

SEQ ID NO: 2032352 - RNA, 19 nt, Homo sapiens
  misc_RNA (1)...(19): siRNA sense strand
guucagcacuuaccaguac

SEQ ID NO: 2032353 - RNA, 19 nt, Homo sapiens
  misc_RNA (1)...(19): siRNA sense strand
cucauucagucuuugauua

SEQ ID NO: 2032354 - RNA, 19 nt, Homo sapiens
  misc_RNA (1)...(19): siRNA sense strand
gaagauggagaaguagaaa

SEQ ID NO: 2032355 - RNA, 19 nt, Homo sapiens
  misc_RNA (1)...(19): siRNA sense strand
gcaccucccugucuguagu

SEQ ID NO: 2032356 - RNA, 19 nt, Homo sapiens
  misc_RNA (1)...(19): siRNA sense strand
aggagaacaucuuccagua

SEQ ID NO: 2032357 - RNA, 19 nt, Homo sapiens
  misc_RNA (1)...(19): siRNA sense strand
aaaugaaguggaacucuua

SEQ ID NO: 2032358 - RNA, 19 nt, Homo sapiens
  misc_RNA (1)...(19): siRNA sense strand
gaucgccucugcaaaggau

SEQ ID NO: 2032359 - RNA, 19 nt, Homo sapiens
  misc_RNA (1)...(19): siRNA sense strand
ggaagaagggaucgucugu

SEQ ID NO: 2032360 - RNA, 19 nt, Homo sapiens
  misc_RNA (1)...(19): siRNA sense strand
gagucaaggcagcuacuua

SEQ ID NO: 2032361 - RNA, 19 nt, Homo sapiens
  misc_RNA (1)...(19): siRNA sense strand
agaaugcagucaugguuga

SEQ ID NO: 2032362 - RNA, 19 nt, Homo sapiens
  misc_RNA (1)...(19): siRNA sense strand
ccaggaugcucugugguuu

SEQ ID NO: 2032363 - RNA, 19 nt, Homo sapiens
  misc_RNA (1)...(19): siRNA sense strand
gacagcgccucucucauuc

SEQ ID NO: 2032364 - RNA, 19 nt, Homo sapiens
  misc_RNA (1)...(19): siRNA sense strand
ugacuaaagcagauauuga

SEQ ID NO: 2032365 - RNA, 19 nt, Homo sapiens
  misc_RNA (1)...(19): siRNA sense strand
ugaacaacuuccuucuuau

SEQ ID NO: 2032366 - RNA, 19 nt, Homo sapiens
  misc_RNA (1)...(19): siRNA sense strand
cuuagagucuuacccugua

SEQ ID NO: 2032367 - RNA, 19 nt, Homo sapiens
  misc_RNA (1)...(19): siRNA sense strand
gagugaagauaguccaagu

SEQ ID NO: 2032368 - RNA, 19 nt, Homo sapiens
  misc_RNA (1)...(19): siRNA sense strand
gcacgcaacagaagaaguc

SEQ ID NO: 2032369 - RNA, 19 nt, Homo sapiens
  misc_RNA (1)...(19): siRNA sense strand
caaguguguugacaaaugg

SEQ ID NO: 2032370 - RNA, 19 nt, Homo sapiens
  misc_RNA (1)...(19): siRNA sense strand
guaguaugcaugugugauu

SEQ ID NO: 2032371 - RNA, 19 nt, Homo sapiens
  misc_RNA (1)...(19): siRNA sense strand
cagaacagacuuugugugu

SEQ ID NO: 2032372 - RNA, 19 nt, Homo sapiens
  misc_RNA (1)...(19): siRNA sense strand
ugccauauguguuaucaau

SEQ ID NO: 2032373 - RNA, 19 nt, Homo sapiens
  misc_RNA (1)...(19): siRNA sense strand
caucagcucccuugcaguu

SEQ ID NO: 2032374 - RNA, 19 nt, Homo sapiens
  misc_RNA (1)...(19): siRNA sense strand
gauaguccaaguccuaaga

SEQ ID NO: 2032375 - RNA, 19 nt, Homo sapiens
  misc_RNA (1)...(19): siRNA sense strand
uaccuuauccuccauuuau

SEQ ID NO: 2032376 - RNA, 19 nt, Homo sapiens
  misc_RNA (1)...(19): siRNA sense strand
cgaguuccaugccaagugu

SEQ ID NO: 2032377 - RNA, 19 nt, Homo sapiens
  misc_RNA (1)...(19): siRNA sense strand
aaauuacgaggcccuguua

SEQ ID NO: 2032378 - RNA, 19 nt, Homo sapiens
  misc_RNA (1)...(19): siRNA sense strand
ccauauguguuaucaaugc

SEQ ID NO: 2032379 - RNA, 19 nt, Homo sapiens
  misc_RNA (1)...(19): siRNA sense strand
cuuaacacaugauccuuug

SEQ ID NO: 2032380 - RNA, 19 nt, Homo sapiens
  misc_RNA (1)...(19): siRNA sense strand
gcagauauugaacaacuuc

SEQ ID NO: 2032381 - RNA, 19 nt, Homo sapiens
  misc_RNA (1)...(19): siRNA sense strand
aagcagauauugaacaacu

SEQ ID NO: 2032382 - RNA, 19 nt, Homo sapiens
  misc_RNA (1)...(19): siRNA sense strand
ggagaacaucuuccaguag

SEQ ID NO: 2032383 - RNA, 19 nt, Homo sapiens
  misc_RNA (1)...(19): siRNA sense strand
agaacagacuuugugugua

SEQ ID NO: 2032384 - RNA, 19 nt, Homo sapiens
  misc_RNA (1)...(19): siRNA sense strand
ucuuaucgguucaauccua

SEQ ID NO: 2032385 - RNA, 19 nt, Homo sapiens
  misc_RNA (1)...(19): siRNA sense strand
ggacugacuaaagcagaua

SEQ ID NO: 2032386 - RNA, 19 nt, Homo sapiens
  misc_RNA (1)...(19): siRNA sense strand
ccagcuuacugccauaugu

SEQ ID NO: 2032387 - RNA, 19 nt, Homo sapiens
  misc_RNA (1)...(19): siRNA sense strand
guaccuuauccuccauuua

SEQ ID NO: 2032388 - RNA, 19 nt, Homo sapiens
  misc_RNA (1)...(19): siRNA sense strand
ugccaaguguguugacaaa

SEQ ID NO: 2032389 - RNA, 19 nt, Homo sapiens
  misc_RNA (1)...(19): siRNA sense strand
gcaaagccucguggacuga

SEQ ID NO: 2032390 - RNA, 19 nt, Homo sapiens
  misc_RNA (1)...(19): siRNA sense strand
uuacaggacguaguagaua

SEQ ID NO: 2032391 - RNA, 19 nt, Homo sapiens
  misc_RNA (1)...(19): siRNA sense strand
aagaagggaucgucugucu

SEQ ID NO: 2032392 - RNA, 19 nt, Homo sapiens
  misc_RNA (1)...(19): siRNA sense strand
uaguaugcaugugugauuu

SEQ ID NO: 2032393 - RNA, 19 nt, Homo sapiens
  misc_RNA (1)...(19): siRNA sense strand
ucuagugauccauuucuua

SEQ ID NO: 2032394 - RNA, 19 nt, Homo sapiens
  misc_RNA (1)...(19): siRNA sense strand
uaacaaccaccagucagaa

SEQ ID NO: 2032395 - RNA, 19 nt, Homo sapiens
  misc_RNA (1)...(19): siRNA sense strand
ccagcagaaugcagucaug

SEQ ID NO: 2032396 - RNA, 19 nt, Homo sapiens
  misc_RNA (1)...(19): siRNA sense strand
guugacaaauggcuuaagg

SEQ ID NO: 2032397 - RNA, 19 nt, Homo sapiens
  misc_RNA (1)...(19): siRNA sense strand
gcccaacuuucagcuuuga

SEQ ID NO: 2032398 - RNA, 19 nt, Homo sapiens
  misc_RNA (1)...(19): siRNA sense strand
aagccaacaucacuucuca

SEQ ID NO: 2032399 - RNA, 19 nt, Homo sapiens
  misc_RNA (1)...(19): siRNA sense strand
cuucaggcauguucaguuc

SEQ ID NO: 2032400 - RNA, 19 nt, Homo sapiens
  misc_RNA (1)...(19): siRNA sense strand
cauguucaguucagcacuu

SEQ ID NO: 2032401 - RNA, 19 nt, Homo sapiens
  misc_RNA (1)...(19): siRNA sense strand
aaaucguacuugcccaauu

SEQ ID NO: 2032402 - RNA, 19 nt, Homo sapiens
  misc_RNA (1)...(19): siRNA sense strand
gauauugaacaacuuccuu

SEQ ID NO: 2032403 - RNA, 19 nt, Homo sapiens
  misc_RNA (1)...(19): siRNA sense strand
cagcuuugaauuagaugua

SEQ ID NO: 2032404 - RNA, 19 nt, Homo sapiens
  misc_RNA (1)...(19): siRNA sense strand
ugaaguggaacucuuagga

SEQ ID NO: 2032405 - RNA, 19 nt, Homo sapiens
  misc_RNA (1)...(19): siRNA sense strand
ccagcucccucaccaccaa

SEQ ID NO: 2032406 - RNA, 19 nt, Homo sapiens
  misc_RNA (1)...(19): siRNA sense strand
cuagugauccauuucuuau

SEQ ID NO: 2032407 - RNA, 19 nt, Homo sapiens
  misc_RNA (1)...(19): siRNA sense strand
cccaucauccuccucauuu

SEQ ID NO: 2032408 - RNA, 19 nt, Homo sapiens
  misc_RNA (1)...(19): siRNA sense strand
caaauggcuuaaggcaaau

SEQ ID NO: 2032409 - RNA, 19 nt, Homo sapiens
  misc_RNA (1)...(19): siRNA sense strand
agaagaaguccuccuguca

SEQ ID NO: 2032410 - RNA, 19 nt, Homo sapiens
  misc_RNA (1)...(19): siRNA sense strand
uugcaguucuuaacacaug

SEQ ID NO: 2032411 - RNA, 19 nt, Homo sapiens
  misc_RNA (1)...(19): siRNA sense strand
ccaucauccuccucauuug

SEQ ID NO: 2032412 - RNA, 19 nt, Homo sapiens
  misc_RNA (1)...(19): siRNA sense strand
caggccaguuugucccuuu

SEQ ID NO: 2032413 - RNA, 19 nt, Homo sapiens
  misc_RNA (1)...(19): siRNA sense strand
ccucucucauucagucuuu

SEQ ID NO: 2032414 - RNA, 19 nt, Homo sapiens
  misc_RNA (1)...(19): siRNA sense strand
ggcccaacuuucagcuuug

SEQ ID NO: 2032415 - RNA, 19 nt, Homo sapiens
  misc_RNA (1)...(19): siRNA sense strand
cuuaucgguucaauccuaa

SEQ ID NO: 2032416 - RNA, 19 nt, Homo sapiens
  misc_RNA (1)...(19): siRNA sense strand
ccacaugggauuccacucu

SEQ ID NO: 2032417 - RNA, 19 nt, Homo sapiens
  misc_RNA (1)...(19): siRNA sense strand
cuuacugccauauguguua

SEQ ID NO: 2032418 - RNA, 19 nt, Homo sapiens
  misc_RNA (1)...(19): siRNA sense strand
agugauccauuucuuauac

SEQ ID NO: 2032419 - RNA, 19 nt, Homo sapiens
  misc_RNA (1)...(19): siRNA sense strand
uagugugccuccuccaaug

SEQ ID NO: 2032420 - RNA, 19 nt, Homo sapiens
  misc_RNA (1)...(19): siRNA sense strand
uugccgagcugaugcuuca

SEQ ID NO: 2032421 - RNA, 19 nt, Homo sapiens
  misc_RNA (1)...(19): siRNA sense strand
cuaacaaccaccagucaga

SEQ ID NO: 2032422 - RNA, 19 nt, Homo sapiens
  misc_RNA (1)...(19): siRNA sense strand
gcuuugaauuagauguaga

SEQ ID NO: 2032423 - RNA, 19 nt, Homo sapiens
  misc_RNA (1)...(19): siRNA sense strand
guagugugccuccuccaau

SEQ ID NO: 2032424 - RNA, 19 nt, Homo sapiens
  misc_RNA (1)...(19): siRNA sense strand
ccaauuugccgagcugaug

SEQ ID NO: 2032425 - RNA, 19 nt, Homo sapiens
  misc_RNA (1)...(19): siRNA sense strand
uggcuuaaggcaaaucgua

SEQ ID NO: 2032426 - RNA, 19 nt, Homo sapiens
  misc_RNA (1)...(19): siRNA sense strand
uaacacaugauccuuugca

SEQ ID NO: 2032427 - RNA, 19 nt, Homo sapiens
  misc_RNA (1)...(19): siRNA sense strand
agaagugcaucgggauuca

SEQ ID NO: 2032428 - RNA, 19 nt, Homo sapiens
  misc_RNA (1)...(19): siRNA sense strand
aaaaugaaguggaacucuu

SEQ ID NO: 2032429 - RNA, 19 nt, Homo sapiens
  misc_RNA (1)...(19): siRNA sense strand
gacuuuguguguaguaugc

SEQ ID NO: 2032430 - RNA, 19 nt, Homo sapiens
  misc_RNA (1)...(19): siRNA sense strand
cuaaagcagauauugaaca

SEQ ID NO: 2032431 - RNA, 19 nt, Homo sapiens
  misc_RNA (1)...(19): siRNA sense strand
gaccaagccaacaucacuu

SEQ ID NO: 2032432 - RNA, 19 nt, Homo sapiens
  misc_RNA (1)...(19): siRNA sense strand
gaacagacuuuguguguag

SEQ ID NO: 2032433 - RNA, 19 nt, Homo sapiens
  misc_RNA (1)...(19): siRNA sense strand
acaaauggcuuaaggcaaa

SEQ ID NO: 2032434 - RNA, 19 nt, Homo sapiens
  misc_RNA (1)...(19): siRNA sense strand
uguagaagauggagaagua

SEQ ID NO: 2032435 - RNA, 19 nt, Homo sapiens
  misc_RNA (1)...(19): siRNA sense strand
uugaacaacuuccuucuua

SEQ ID NO: 2032436 - RNA, 19 nt, Homo sapiens
  misc_RNA (1)...(19): siRNA sense strand
gcagcuacuuagagucuua

SEQ ID NO: 2032437 - RNA, 19 nt, Homo sapiens
  misc_RNA (1)...(19): siRNA sense strand
gcacaucccugcuuguagu

SEQ ID NO: 2032438 - RNA, 19 nt, Homo sapiens
  misc_RNA (1)...(19): siRNA sense strand
gcacuuaccaguaccauau

SEQ ID NO: 2032439 - RNA, 19 nt, Homo sapiens
  misc_RNA (1)...(19): siRNA sense strand
ccaaguguguugacaaaug

SEQ ID NO: 2032440 - RNA, 19 nt, Homo sapiens
  misc_RNA (1)...(19): siRNA sense strand
ggagguguccuuuggagua

SEQ ID NO: 2032441 - RNA, 19 nt, Homo sapiens
  misc_RNA (1)...(19): siRNA sense strand
aaucguacuugcccaauuu

SEQ ID NO: 2032442 - RNA, 19 nt, Homo sapiens
  misc_RNA (1)...(19): siRNA sense strand
gggcccaacuuucagcuuu

SEQ ID NO: 2032443 - RNA, 19 nt, Homo sapiens
  misc_RNA (1)...(19): siRNA sense strand
gaacaacuuccuucuuauc

SEQ ID NO: 2032444 - RNA, 19 nt, Homo sapiens
  misc_RNA (1)...(19): siRNA sense strand
gcagugggcccaacuuuca

SEQ ID NO: 2032445 - RNA, 19 nt, Homo sapiens
  misc_RNA (1)...(19): siRNA sense strand
caaggcagcuacuuagagu

SEQ ID NO: 2032446 - RNA, 19 nt, Homo sapiens
  misc_RNA (1)...(19): siRNA sense strand
gaucagcuccaucaaggaa

SEQ ID NO: 2032447 - RNA, 19 nt, Homo sapiens
  misc_RNA (1)...(19): siRNA sense strand
gacuaaagcagauauugaa

SEQ ID NO: 2032448 - RNA, 19 nt, Homo sapiens
  misc_RNA (1)...(19): siRNA sense strand
gcagaaugcagucaugguu

SEQ ID NO: 2032449 - RNA, 19 nt, Homo sapiens
  misc_RNA (1)...(19): siRNA sense strand
gauagaaaaugaaguggaa

SEQ ID NO: 2032450 - RNA, 19 nt, Homo sapiens
  misc_RNA (1)...(19): siRNA sense strand
guucagcacuuaccaguac

SEQ ID NO: 2032451 - RNA, 19 nt, Homo sapiens
  misc_RNA (1)...(19): siRNA sense strand
gaagauggagaaguagaaa

SEQ ID NO: 2032452 - RNA, 19 nt, Homo sapiens
  misc_RNA (1)...(19): siRNA sense strand
gcaccucccugucuguagu

SEQ ID NO: 2032453 - RNA, 19 nt, Homo sapiens
  misc_RNA (1)...(19): siRNA sense strand
aggagaacaucuuccagua

SEQ ID NO: 2032454 - RNA, 19 nt, Homo sapiens
  misc_RNA (1)...(19): siRNA sense strand
aaaugaaguggaacucuua

SEQ ID NO: 2032455 - RNA, 19 nt, Homo sapiens
  misc_RNA (1)...(19): siRNA sense strand
gaucgccucugcaaaggau

SEQ ID NO: 2032456 - RNA, 19 nt, Homo sapiens
  misc_RNA (1)...(19): siRNA sense strand
ggaagaagggaucgucugu

SEQ ID NO: 2032457 - RNA, 19 nt, Homo sapiens
  misc_RNA (1)...(19): siRNA sense strand
gagucaaggcagcuacuua

SEQ ID NO: 2032458 - RNA, 19 nt, Homo sapiens
  misc_RNA (1)...(19): siRNA sense strand
agaaugcagucaugguuga

SEQ ID NO: 2032459 - RNA, 19 nt, Homo sapiens
  misc_RNA (1)...(19): siRNA sense strand
ccaggaugcucugugguuu

SEQ ID NO: 2032460 - RNA, 19 nt, Homo sapiens
  misc_RNA (1)...(19): siRNA sense strand
ugacuaaagcagauauuga

SEQ ID NO: 2032461 - RNA, 19 nt, Homo sapiens
  misc_RNA (1)...(19): siRNA sense strand
ugaacaacuuccuucuuau

SEQ ID NO: 2032462 - RNA, 19 nt, Homo sapiens
  misc_RNA (1)...(19): siRNA sense strand
cuuagagucuuacccugua

SEQ ID NO: 2032463 - RNA, 19 nt, Homo sapiens
  misc_RNA (1)...(19): siRNA sense strand
ugccauauguguuaucaau

SEQ ID NO: 2032464 - RNA, 19 nt, Homo sapiens
  misc_RNA (1)...(19): siRNA sense strand
caaguguguugacaaaugg

SEQ ID NO: 2032465 - RNA, 19 nt, Homo sapiens
  misc_RNA (1)...(19): siRNA sense strand
gcacgcaacagaagaaguc

SEQ ID NO: 2032466 - RNA, 19 nt, Homo sapiens
  misc_RNA (1)...(19): siRNA sense strand
guaguaugcaugugugauu

SEQ ID NO: 2032467 - RNA, 19 nt, Homo sapiens
  misc_RNA (1)...(19): siRNA sense strand
cagaacagacuuugugugu

SEQ ID NO: 2032468 - RNA, 19 nt, Homo sapiens
  misc_RNA (1)...(19): siRNA sense strand
caucagcucccuugcaguu

SEQ ID NO: 2032469 - RNA, 19 nt, Homo sapiens
  misc_RNA (1)...(19): siRNA sense strand
uaccuuauccuccauuuau

SEQ ID NO: 2032470 - RNA, 19 nt, Homo sapiens
  misc_RNA (1)...(19): siRNA sense strand
cgaguuccaugccaagugu

SEQ ID NO: 2032471 - RNA, 19 nt, Homo sapiens
  misc_RNA (1)...(19): siRNA sense strand
aaauuacgaggcccuguua

SEQ ID NO: 2032472 - RNA, 19 nt, Homo sapiens
  misc_RNA (1)...(19): siRNA sense strand
ccauauguguuaucaaugc

SEQ ID NO: 2032473 - RNA, 19 nt, Homo sapiens
  misc_RNA (1)...(19): siRNA sense strand
cuuaacacaugauccuuug

SEQ ID NO: 2032474 - RNA, 19 nt, Homo sapiens
  misc_RNA (1)...(19): siRNA sense strand
gcagauauugaacaacuuc

SEQ ID NO: 2032475 - RNA, 19 nt, Homo sapiens
  misc_RNA (1)...(19): siRNA sense strand
aagcagauauugaacaacu

SEQ ID NO: 2032476 - RNA, 19 nt, Homo sapiens
  misc_RNA (1)...(19): siRNA sense strand
ggagaacaucuuccaguag

SEQ ID NO: 2032477 - RNA, 19 nt, Homo sapiens
  misc_RNA (1)...(19): siRNA sense strand
agaacagacuuugugugua

SEQ ID NO: 2032478 - RNA, 19 nt, Homo sapiens
  misc_RNA (1)...(19): siRNA sense strand
ucuuaucgguucaauccua

SEQ ID NO: 2032479 - RNA, 19 nt, Homo sapiens
  misc_RNA (1)...(19): siRNA sense strand
ggacugacuaaagcagaua

SEQ ID NO: 2032480 - RNA, 19 nt, Homo sapiens
  misc_RNA (1)...(19): siRNA sense strand
ccagcuuacugccauaugu

SEQ ID NO: 2032481 - RNA, 19 nt, Homo sapiens
  misc_RNA (1)...(19): siRNA sense strand
guaccuuauccuccauuua

SEQ ID NO: 2032482 - RNA, 19 nt, Homo sapiens
  misc_RNA (1)...(19): siRNA sense strand
ugccaaguguguugacaaa

SEQ ID NO: 2032483 - RNA, 19 nt, Homo sapiens
  misc_RNA (1)...(19): siRNA sense strand
gcaaagccucguggacuga

SEQ ID NO: 2032484 - RNA, 19 nt, Homo sapiens
  misc_RNA (1)...(19): siRNA sense strand
uuacaggacguaguagaua

SEQ ID NO: 2032485 - RNA, 19 nt, Homo sapiens
  misc_RNA (1)...(19): siRNA sense strand
aagaagggaucgucugucu

SEQ ID NO: 2032486 - RNA, 19 nt, Homo sapiens
  misc_RNA (1)...(19): siRNA sense strand
uaguaugcaugugugauuu

SEQ ID NO: 2032487 - RNA, 19 nt, Homo sapiens
  misc_RNA (1)...(19): siRNA sense strand
ucuagugauccauuucuua

SEQ ID NO: 2032488 - RNA, 19 nt, Homo sapiens
  misc_RNA (1)...(19): siRNA sense strand
uaacaaccaccagucagaa

SEQ ID NO: 2032489 - RNA, 19 nt, Homo sapiens
  misc_RNA (1)...(19): siRNA sense strand
ccagcagaaugcagucaug

SEQ ID NO: 2032490 - RNA, 19 nt, Homo sapiens
  misc_RNA (1)...(19): siRNA sense strand
guugacaaauggcuuaagg

SEQ ID NO: 2032491 - RNA, 19 nt, Homo sapiens
  misc_RNA (1)...(19): siRNA sense strand
aagccaacaucacuucuca

SEQ ID NO: 2032492 - RNA, 19 nt, Homo sapiens
  misc_RNA (1)...(19): siRNA sense strand
gcccaacuuucagcuuuga

SEQ ID NO: 2032493 - RNA, 19 nt, Homo sapiens
  misc_RNA (1)...(19): siRNA sense strand
cuucaggcauguucaguuc

SEQ ID NO: 2032494 - RNA, 19 nt, Homo sapiens
  misc_RNA (1)...(19): siRNA sense strand
cauguucaguucagcacuu

SEQ ID NO: 2032495 - RNA, 19 nt, Homo sapiens
  misc_RNA (1)...(19): siRNA sense strand
aaaucguacuugcccaauu

SEQ ID NO: 2032496 - RNA, 19 nt, Homo sapiens
  misc_RNA (1)...(19): siRNA sense strand
gauauugaacaacuuccuu

SEQ ID NO: 2032497 - RNA, 19 nt, Homo sapiens
  misc_RNA (1)...(19): siRNA sense strand
cagcuuugaauuagaugua

SEQ ID NO: 2032498 - RNA, 19 nt, Homo sapiens
  misc_RNA (1)...(19): siRNA sense strand
ugaaguggaacucuuagga

SEQ ID NO: 2032499 - RNA, 19 nt, Homo sapiens
  misc_RNA (1)...(19): siRNA sense strand
cuagugauccauuucuuau

SEQ ID NO: 2032500 - RNA, 19 nt, Homo sapiens
  misc_RNA (1)...(19): siRNA sense strand
cccaucauccuccucauuu

SEQ ID NO: 2032501 - RNA, 19 nt, Homo sapiens
  misc_RNA (1)...(19): siRNA sense strand
caaauggcuuaaggcaaau

SEQ ID NO: 2032502 - RNA, 19 nt, Homo sapiens
  misc_RNA (1)...(19): siRNA sense strand
agaagaaguccuccuguca

SEQ ID NO: 2032503 - RNA, 19 nt, Homo sapiens
  misc_RNA (1)...(19): siRNA sense strand
uugcaguucuuaacacaug

SEQ ID NO: 2032504 - RNA, 19 nt, Homo sapiens
  misc_RNA (1)...(19): siRNA sense strand
ccaucauccuccucauuug

SEQ ID NO: 2032505 - RNA, 19 nt, Homo sapiens
  misc_RNA (1)...(19): siRNA sense strand
caggccaguuugucccuuu

SEQ ID NO: 2032506 - RNA, 19 nt, Homo sapiens
  misc_RNA (1)...(19): siRNA sense strand
ggcccaacuuucagcuuug

SEQ ID NO: 2032507 - RNA, 19 nt, Homo sapiens
  misc_RNA (1)...(19): siRNA sense strand
cuuaucgguucaauccuaa

SEQ ID NO: 2032508 - RNA, 19 nt, Homo sapiens
  misc_RNA (1)...(19): siRNA sense strand
ccacaugggauuccacucu

SEQ ID NO: 2032509 - RNA, 19 nt, Homo sapiens
  misc_RNA (1)...(19): siRNA sense strand
cuuacugccauauguguua

SEQ ID NO: 2032510 - RNA, 19 nt, Homo sapiens
  misc_RNA (1)...(19): siRNA sense strand
agugauccauuucuuauac

SEQ ID NO: 2032511 - RNA, 19 nt, Homo sapiens
  misc_RNA (1)...(19): siRNA sense strand
uagugugccuccuccaaug

SEQ ID NO: 2032512 - RNA, 19 nt, Homo sapiens
  misc_RNA (1)...(19): siRNA sense strand
uugccgagcugaugcuuca

SEQ ID NO: 2032513 - RNA, 19 nt, Homo sapiens
  misc_RNA (1)...(19): siRNA sense strand
cuaacaaccaccagucaga

SEQ ID NO: 2032514 - RNA, 19 nt, Homo sapiens
  misc_RNA (1)...(19): siRNA sense strand
gcuuugaauuagauguaga

SEQ ID NO: 2032515 - RNA, 19 nt, Homo sapiens
  misc_RNA (1)...(19): siRNA sense strand
guagugugccuccuccaau

SEQ ID NO: 2032516 - RNA, 19 nt, Homo sapiens
  misc_RNA (1)...(19): siRNA sense strand
ccaauuugccgagcugaug

SEQ ID NO: 2032517 - RNA, 19 nt, Homo sapiens
  misc_RNA (1)...(19): siRNA sense strand
uggcuuaaggcaaaucgua

SEQ ID NO: 2032518 - RNA, 19 nt, Homo sapiens
  misc_RNA (1)...(19): siRNA sense strand
uaacacaugauccuuugca

SEQ ID NO: 2032519 - RNA, 19 nt, Homo sapiens
  misc_RNA (1)...(19): siRNA sense strand
agaagugcaucgggauuca

SEQ ID NO: 2032520 - RNA, 19 nt, Homo sapiens
  misc_RNA (1)...(19): siRNA sense strand
aaaaugaaguggaacucuu

SEQ ID NO: 2032521 - RNA, 19 nt, Homo sapiens
  misc_RNA (1)...(19): siRNA sense strand
gacuuuguguguaguaugc

SEQ ID NO: 2032522 - RNA, 19 nt, Homo sapiens
  misc_RNA (1)...(19): siRNA sense strand
cuaaagcagauauugaaca

SEQ ID NO: 2032523 - RNA, 19 nt, Homo sapiens
  misc_RNA (1)...(19): siRNA sense strand
gaccaagccaacaucacuu

SEQ ID NO: 2032524 - RNA, 19 nt, Homo sapiens
  misc_RNA (1)...(19): siRNA sense strand
cgaccaagccaacaucacu

SEQ ID NO: 2032525 - RNA, 19 nt, Homo sapiens
  misc_RNA (1)...(19): siRNA sense strand
agaagauggagaaguagaa

SEQ ID NO: 2032526 - RNA, 19 nt, Homo sapiens
  misc_RNA (1)...(19): siRNA sense strand
aggcuuacaggacguagua

SEQ ID NO: 2032527 - RNA, 19 nt, Homo sapiens
  misc_RNA (1)...(19): siRNA sense strand
gagguguccuuuggaguac

SEQ ID NO: 2032528 - RNA, 19 nt, Homo sapiens
  misc_RNA (1)...(19): siRNA sense strand
uauacauccuccucaccuu

SEQ ID NO: 2032529 - RNA, 19 nt, Homo sapiens
  misc_RNA (1)...(19): siRNA sense strand
gugauccauuucuuauaca

SEQ ID NO: 2032530 - RNA, 19 nt, Homo sapiens
  misc_RNA (1)...(19): siRNA sense strand
agauguagaagauggagaa

SEQ ID NO: 2032531 - RNA, 19 nt, Homo sapiens
  misc_RNA (1)...(19): siRNA sense strand
ucagcuccaucaaggaaca

SEQ ID NO: 2032532 - RNA, 19 nt, Homo sapiens
  misc_RNA (1)...(19): siRNA sense strand
gaacagacuuuguguguag

SEQ ID NO: 2032533 - RNA, 19 nt, Homo sapiens
  misc_RNA (1)...(19): siRNA sense strand
acaaauggcuuaaggcaaa

SEQ ID NO: 2032534 - RNA, 19 nt, Homo sapiens
  misc_RNA (1)...(19): siRNA sense strand
gaagauaguccaaguccua

SEQ ID NO: 2032535 - RNA, 19 nt, Homo sapiens
  misc_RNA (1)...(19): siRNA sense strand
uguagaagauggagaagua

SEQ ID NO: 2032536 - RNA, 19 nt, Homo sapiens
  misc_RNA (1)...(19): siRNA sense strand
uugaacaacuuccuucuua

SEQ ID NO: 2032537 - RNA, 19 nt, Homo sapiens
  misc_RNA (1)...(19): siRNA sense strand
gcagcuacuuagagucuua

SEQ ID NO: 2032538 - RNA, 19 nt, Homo sapiens
  misc_RNA (1)...(19): siRNA sense strand
gcacaucccugcuuguagu

SEQ ID NO: 2032539 - RNA, 19 nt, Homo sapiens
  misc_RNA (1)...(19): siRNA sense strand
gcacuuaccaguaccauau

SEQ ID NO: 2032540 - RNA, 19 nt, Homo sapiens
  misc_RNA (1)...(19): siRNA sense strand
ccaaguguguugacaaaug

SEQ ID NO: 2032541 - RNA, 19 nt, Homo sapiens
  misc_RNA (1)...(19): siRNA sense strand
ggagguguccuuuggagua

SEQ ID NO: 2032542 - RNA, 19 nt, Homo sapiens
  misc_RNA (1)...(19): siRNA sense strand
aaucguacuugcccaauuu

SEQ ID NO: 2032543 - RNA, 19 nt, Homo sapiens
  misc_RNA (1)...(19): siRNA sense strand
gggcccaacuuucagcuuu

SEQ ID NO: 2032544 - RNA, 19 nt, Homo sapiens
  misc_RNA (1)...(19): siRNA sense strand
gaacaacuuccuucuuauc

SEQ ID NO: 2032545 - RNA, 19 nt, Homo sapiens
  misc_RNA (1)...(19): siRNA sense strand
gcagugggcccaacuuuca

SEQ ID NO: 2032546 - RNA, 19 nt, Homo sapiens
  misc_RNA (1)...(19): siRNA sense strand
caaggcagcuacuuagagu

SEQ ID NO: 2032547 - RNA, 19 nt, Homo sapiens
  misc_RNA (1)...(19): siRNA sense strand
agacagcgccucucucauu

SEQ ID NO: 2032548 - RNA, 19 nt, Homo sapiens
  misc_RNA (1)...(19): siRNA sense strand
gaucagcuccaucaaggaa

SEQ ID NO: 2032549 - RNA, 19 nt, Homo sapiens
  misc_RNA (1)...(19): siRNA sense strand
gacuaaagcagauauugaa

SEQ ID NO: 2032550 - RNA, 19 nt, Homo sapiens
  misc_RNA (1)...(19): siRNA sense strand
gcagaaugcagucaugguu

SEQ ID NO: 2032551 - RNA, 19 nt, Homo sapiens
  misc_RNA (1)...(19): siRNA sense strand
gauagaaaaugaaguggaa

SEQ ID NO: 2032552 - RNA, 19 nt, Homo sapiens
  misc_RNA (1)...(19): siRNA sense strand
guucagcacuuaccaguac

SEQ ID NO: 2032553 - RNA, 19 nt, Homo sapiens
  misc_RNA (1)...(19): siRNA sense strand
cucauucagucuuugauua

SEQ ID NO: 2032554 - RNA, 19 nt, Homo sapiens
  misc_RNA (1)...(19): siRNA sense strand
gaagauggagaaguagaaa

SEQ ID NO: 2032555 - RNA, 19 nt, Homo sapiens
  misc_RNA (1)...(19): siRNA sense strand
gcaccucccugucuguagu

SEQ ID NO: 2032556 - RNA, 19 nt, Homo sapiens
  misc_RNA (1)...(19): siRNA sense strand
aggagaacaucuuccagua

SEQ ID NO: 2032557 - RNA, 19 nt, Homo sapiens
  misc_RNA (1)...(19): siRNA sense strand
aaaugaaguggaacucuua

SEQ ID NO: 2032558 - RNA, 19 nt, Homo sapiens
  misc_RNA (1)...(19): siRNA sense strand
gaucgccucugcaaaggau

SEQ ID NO: 2032559 - RNA, 19 nt, Homo sapiens
  misc_RNA (1)...(19): siRNA sense strand
ggaagaagggaucgucugu

SEQ ID NO: 2032560 - RNA, 19 nt, Homo sapiens
  misc_RNA (1)...(19): siRNA sense strand
gagucaaggcagcuacuua

SEQ ID NO: 2032561 - RNA, 19 nt, Homo sapiens
  misc_RNA (1)...(19): siRNA sense strand
agaaugcagucaugguuga

SEQ ID NO: 2032562 - RNA, 19 nt, Homo sapiens
  misc_RNA (1)...(19): siRNA sense strand
ccaggaugcucugugguuu

SEQ ID NO: 2032563 - RNA, 19 nt, Homo sapiens
  misc_RNA (1)...(19): siRNA sense strand
gacagcgccucucucauuc

SEQ ID NO: 2032564 - RNA, 19 nt, Homo sapiens
  misc_RNA (1)...(19): siRNA sense strand
ugacuaaagcagauauuga

SEQ ID NO: 2032565 - RNA, 19 nt, Homo sapiens
  misc_RNA (1)...(19): siRNA sense strand
ugaacaacuuccuucuuau

SEQ ID NO: 2032566 - RNA, 19 nt, Homo sapiens
  misc_RNA (1)...(19): siRNA sense strand
cuuagagucuuacccugua

SEQ ID NO: 2032567 - RNA, 19 nt, Homo sapiens
  misc_RNA (1)...(19): siRNA sense strand
gagugaagauaguccaagu

SEQ ID NO: 2032568 - RNA, 19 nt, Homo sapiens
  misc_RNA (1)...(19): siRNA sense strand
gcacgcaacagaagaaguc

SEQ ID NO: 2032569 - RNA, 19 nt, Homo sapiens
  misc_RNA (1)...(19): siRNA sense strand
caaguguguugacaaaugg

SEQ ID NO: 2032570 - RNA, 19 nt, Homo sapiens
  misc_RNA (1)...(19): siRNA sense strand
guaguaugcaugugugauu

SEQ ID NO: 2032571 - RNA, 19 nt, Homo sapiens
  misc_RNA (1)...(19): siRNA sense strand
cagaacagacuuugugugu

SEQ ID NO: 2032572 - RNA, 19 nt, Homo sapiens
  misc_RNA (1)...(19): siRNA sense strand
ugccauauguguuaucaau

SEQ ID NO: 2032573 - RNA, 19 nt, Homo sapiens
  misc_RNA (1)...(19): siRNA sense strand
caucagcucccuugcaguu

SEQ ID NO: 2032574 - RNA, 19 nt, Homo sapiens
  misc_RNA (1)...(19): siRNA sense strand
gauaguccaaguccuaaga

SEQ ID NO: 2032575 - RNA, 19 nt, Homo sapiens
  misc_RNA (1)...(19): siRNA sense strand
uaccuuauccuccauuuau

SEQ ID NO: 2032576 - RNA, 19 nt, Homo sapiens
  misc_RNA (1)...(19): siRNA sense strand
cgaguuccaugccaagugu

SEQ ID NO: 2032577 - RNA, 19 nt, Homo sapiens
  misc_RNA (1)...(19): siRNA sense strand
aaauuacgaggcccuguua

SEQ ID NO: 2032578 - RNA, 19 nt, Homo sapiens
  misc_RNA (1)...(19): siRNA sense strand
ccauauguguuaucaaugc

SEQ ID NO: 2032579 - RNA, 19 nt, Homo sapiens
  misc_RNA (1)...(19): siRNA sense strand
cuuaacacaugauccuuug

SEQ ID NO: 2032580 - RNA, 19 nt, Homo sapiens
  misc_RNA (1)...(19): siRNA sense strand
gcagauauugaacaacuuc

SEQ ID NO: 2032581 - RNA, 19 nt, Homo sapiens
  misc_RNA (1)...(19): siRNA sense strand
aagcagauauugaacaacu

SEQ ID NO: 2032582 - RNA, 19 nt, Homo sapiens
  misc_RNA (1)...(19): siRNA sense strand
ggagaacaucuuccaguag

SEQ ID NO: 2032583 - RNA, 19 nt, Homo sapiens
  misc_RNA (1)...(19): siRNA sense strand
agaacagacuuugugugua

SEQ ID NO: 2032584 - RNA, 19 nt, Homo sapiens
  misc_RNA (1)...(19): siRNA sense strand
ucuuaucgguucaauccua

SEQ ID NO: 2032585 - RNA, 19 nt, Homo sapiens
  misc_RNA (1)...(19): siRNA sense strand
ggacugacuaaagcagaua

SEQ ID NO: 2032586 - RNA, 19 nt, Homo sapiens
  misc_RNA (1)...(19): siRNA sense strand
ccagcuuacugccauaugu

SEQ ID NO: 2032587 - RNA, 19 nt, Homo sapiens
  misc_RNA (1)...(19): siRNA sense strand
guaccuuauccuccauuua

SEQ ID NO: 2032588 - RNA, 19 nt, Homo sapiens
  misc_RNA (1)...(19): siRNA sense strand
ugccaaguguguugacaaa

SEQ ID NO: 2032589 - RNA, 19 nt, Homo sapiens
  misc_RNA (1)...(19): siRNA sense strand
gcaaagccucguggacuga

SEQ ID NO: 2032590 - RNA, 19 nt, Homo sapiens
  misc_RNA (1)...(19): siRNA sense strand
uuacaggacguaguagaua

SEQ ID NO: 2032591 - RNA, 19 nt, Homo sapiens
  misc_RNA (1)...(19): siRNA sense strand
aagaagggaucgucugucu

SEQ ID NO: 2032592 - RNA, 19 nt, Homo sapiens
  misc_RNA (1)...(19): siRNA sense strand
uaguaugcaugugugauuu

SEQ ID NO: 2032593 - RNA, 19 nt, Homo sapiens
  misc_RNA (1)...(19): siRNA sense strand
ucuagugauccauuucuua

SEQ ID NO: 2032594 - RNA, 19 nt, Homo sapiens
  misc_RNA (1)...(19): siRNA sense strand
uaacaaccaccagucagaa

SEQ ID NO: 2032595 - RNA, 19 nt, Homo sapiens
  misc_RNA (1)...(19): siRNA sense strand
ccagcagaaugcagucaug

SEQ ID NO: 2032596 - RNA, 19 nt, Homo sapiens
  misc_RNA (1)...(19): siRNA sense strand
guugacaaauggcuuaagg

SEQ ID NO: 2032597 - RNA, 19 nt, Homo sapiens
  misc_RNA (1)...(19): siRNA sense strand
gcccaacuuucagcuuuga

SEQ ID NO: 2032598 - RNA, 19 nt, Homo sapiens
  misc_RNA (1)...(19): siRNA sense strand
aagccaacaucacuucuca

SEQ ID NO: 2032599 - RNA, 19 nt, Homo sapiens
  misc_RNA (1)...(19): siRNA sense strand
cuucaggcauguucaguuc

SEQ ID NO: 2032600 - RNA, 19 nt, Homo sapiens
  misc_RNA (1)...(19): siRNA sense strand
cauguucaguucagcacuu

SEQ ID NO: 2032601 - RNA, 19 nt, Homo sapiens
  misc_RNA (1)...(19): siRNA sense strand
aaaucguacuugcccaauu

SEQ ID NO: 2032602 - RNA, 19 nt, Homo sapiens
  misc_RNA (1)...(19): siRNA sense strand
gauauugaacaacuuccuu

SEQ ID NO: 2032603 - RNA, 19 nt, Homo sapiens
  misc_RNA (1)...(19): siRNA sense strand
cagcuuugaauuagaugua

SEQ ID NO: 2032604 - RNA, 19 nt, Homo sapiens
  misc_RNA (1)...(19): siRNA sense strand
ugaaguggaacucuuagga

SEQ ID NO: 2032605 - RNA, 19 nt, Homo sapiens
  misc_RNA (1)...(19): siRNA sense strand
ccagcucccucaccaccaa

SEQ ID NO: 2032606 - RNA, 19 nt, Homo sapiens
  misc_RNA (1)...(19): siRNA sense strand
cuagugauccauuucuuau

SEQ ID NO: 2032607 - RNA, 19 nt, Homo sapiens
  misc_RNA (1)...(19): siRNA sense strand
cccaucauccuccucauuu

SEQ ID NO: 2032608 - RNA, 19 nt, Homo sapiens
  misc_RNA (1)...(19): siRNA sense strand
caaauggcuuaaggcaaau

SEQ ID NO: 2032609 - RNA, 19 nt, Homo sapiens
  misc_RNA (1)...(19): siRNA sense strand
agaagaaguccuccuguca

SEQ ID NO: 2032610 - RNA, 19 nt, Homo sapiens
  misc_RNA (1)...(19): siRNA sense strand
uugcaguucuuaacacaug

SEQ ID NO: 2032611 - RNA, 19 nt, Homo sapiens
  misc_RNA (1)...(19): siRNA sense strand
ccaucauccuccucauuug

SEQ ID NO: 2032612 - RNA, 19 nt, Homo sapiens
  misc_RNA (1)...(19): siRNA sense strand
caggccaguuugucccuuu

SEQ ID NO: 2032613 - RNA, 19 nt, Homo sapiens
  misc_RNA (1)...(19): siRNA sense strand
ccucucucauucagucuuu

SEQ ID NO: 2032614 - RNA, 19 nt, Homo sapiens
  misc_RNA (1)...(19): siRNA sense strand
ggcccaacuuucagcuuug

SEQ ID NO: 2032615 - RNA, 19 nt, Homo sapiens
  misc_RNA (1)...(19): siRNA sense strand
cuuaucgguucaauccuaa

SEQ ID NO: 2032616 - RNA, 19 nt, Homo sapiens
  misc_RNA (1)...(19): siRNA sense strand
ccacaugggauuccacucu

SEQ ID NO: 2032617 - RNA, 19 nt, Homo sapiens
  misc_RNA (1)...(19): siRNA sense strand
cuuacugccauauguguua

SEQ ID NO: 2032618 - RNA, 19 nt, Homo sapiens
  misc_RNA (1)...(19): siRNA sense strand
agugauccauuucuuauac

SEQ ID NO: 2032619 - RNA, 19 nt, Homo sapiens
  misc_RNA (1)...(19): siRNA sense strand
uagugugccuccuccaaug

SEQ ID NO: 2032620 - RNA, 19 nt, Homo sapiens
  misc_RNA (1)...(19): siRNA sense strand
uugccgagcugaugcuuca

SEQ ID NO: 2032621 - RNA, 19 nt, Homo sapiens
  misc_RNA (1)...(19): siRNA sense strand
cuaacaaccaccagucaga

SEQ ID NO: 2032622 - RNA, 19 nt, Homo sapiens
  misc_RNA (1)...(19): siRNA sense strand
gcuuugaauuagauguaga

SEQ ID NO: 2032623 - RNA, 19 nt, Homo sapiens
  misc_RNA (1)...(19): siRNA sense strand
guagugugccuccuccaau

SEQ ID NO: 2032624 - RNA, 19 nt, Homo sapiens
  misc_RNA (1)...(19): siRNA sense strand
ccaauuugccgagcugaug

SEQ ID NO: 2032625 - RNA, 19 nt, Homo sapiens
  misc_RNA (1)...(19): siRNA sense strand
uggcuuaaggcaaaucgua

SEQ ID NO: 2032626 - RNA, 19 nt, Homo sapiens
  misc_RNA (1)...(19): siRNA sense strand
uaacacaugauccuuugca

SEQ ID NO: 2032627 - RNA, 19 nt, Homo sapiens
  misc_RNA (1)...(19): siRNA sense strand
agaagugcaucgggauuca

SEQ ID NO: 2032628 - RNA, 19 nt, Homo sapiens
  misc_RNA (1)...(19): siRNA sense strand
aaaaugaaguggaacucuu

SEQ ID NO: 2032629 - RNA, 19 nt, Homo sapiens
  misc_RNA (1)...(19): siRNA sense strand
gacuuuguguguaguaugc

SEQ ID NO: 2032630 - RNA, 19 nt, Homo sapiens
  misc_RNA (1)...(19): siRNA sense strand
cuaaagcagauauugaaca

SEQ ID NO: 2032631 - RNA, 19 nt, Homo sapiens
  misc_RNA (1)...(19): siRNA sense strand
gaccaagccaacaucacuu

SEQ ID NO: 2032632 - RNA, 19 nt, Homo sapiens
  misc_RNA (1)...(19): siRNA sense strand
gaacagacuuuguguguag

SEQ ID NO: 2032633 - RNA, 19 nt, Homo sapiens
  misc_RNA (1)...(19): siRNA sense strand
acaaauggcuuaaggcaaa

SEQ ID NO: 2032634 - RNA, 19 nt, Homo sapiens
  misc_RNA (1)...(19): siRNA sense strand
uguagaagauggagaagua

SEQ ID NO: 2032635 - RNA, 19 nt, Homo sapiens
  misc_RNA (1)...(19): siRNA sense strand
uugaacaacuuccuucuua

SEQ ID NO: 2032636 - RNA, 19 nt, Homo sapiens
  misc_RNA (1)...(19): siRNA sense strand
gcagcuacuuagagucuua

SEQ ID NO: 2032637 - RNA, 19 nt, Homo sapiens
  misc_RNA (1)...(19): siRNA sense strand
gcacaucccugcuuguagu

SEQ ID NO: 2032638 - RNA, 19 nt, Homo sapiens
  misc_RNA (1)...(19): siRNA sense strand
gcacuuaccaguaccauau

SEQ ID NO: 2032639 - RNA, 19 nt, Homo sapiens
  misc_RNA (1)...(19): siRNA sense strand
ccaaguguguugacaaaug

SEQ ID NO: 2032640 - RNA, 19 nt, Homo sapiens
  misc_RNA (1)...(19): siRNA sense strand
ggagguguccuuuggagua

SEQ ID NO: 2032641 - RNA, 19 nt, Homo sapiens
  misc_RNA (1)...(19): siRNA sense strand
aaucguacuugcccaauuu

SEQ ID NO: 2032642 - RNA, 19 nt, Homo sapiens
  misc_RNA (1)...(19): siRNA sense strand
gggcccaacuuucagcuuu

SEQ ID NO: 2032643 - RNA, 19 nt, Homo sapiens
  misc_RNA (1)...(19): siRNA sense strand
gaacaacuuccuucuuauc

SEQ ID NO: 2032644 - RNA, 19 nt, Homo sapiens
  misc_RNA (1)...(19): siRNA sense strand
gcagugggcccaacuuuca

SEQ ID NO: 2032645 - RNA, 19 nt, Homo sapiens
  misc_RNA (1)...(19): siRNA sense strand
caaggcagcuacuuagagu

SEQ ID NO: 2032646 - RNA, 19 nt, Homo sapiens
  misc_RNA (1)...(19): siRNA sense strand
gaucagcuccaucaaggaa

SEQ ID NO: 2032647 - RNA, 19 nt, Homo sapiens
  misc_RNA (1)...(19): siRNA sense strand
gacuaaagcagauauugaa

SEQ ID NO: 2032648 - RNA, 19 nt, Homo sapiens
  misc_RNA (1)...(19): siRNA sense strand
gcagaaugcagucaugguu

SEQ ID NO: 2032649 - RNA, 19 nt, Homo sapiens
  misc_RNA (1)...(19): siRNA sense strand
gauagaaaaugaaguggaa

SEQ ID NO: 2032650 - RNA, 19 nt, Homo sapiens
  misc_RNA (1)...(19): siRNA sense strand
guucagcacuuaccaguac

SEQ ID NO: 2032651 - RNA, 19 nt, Homo sapiens
  misc_RNA (1)...(19): siRNA sense strand
gaagauggagaaguagaaa

SEQ ID NO: 2032652 - RNA, 19 nt, Homo sapiens
  misc_RNA (1)...(19): siRNA sense strand
gcaccucccugucuguagu

SEQ ID NO: 2032653 - RNA, 19 nt, Homo sapiens
  misc_RNA (1)...(19): siRNA sense strand
aggagaacaucuuccagua

SEQ ID NO: 2032654 - RNA, 19 nt, Homo sapiens
  misc_RNA (1)...(19): siRNA sense strand
aaaugaaguggaacucuua

SEQ ID NO: 2032655 - RNA, 19 nt, Homo sapiens
  misc_RNA (1)...(19): siRNA sense strand
gaucgccucugcaaaggau

SEQ ID NO: 2032656 - RNA, 19 nt, Homo sapiens
  misc_RNA (1)...(19): siRNA sense strand
ggaagaagggaucgucugu

SEQ ID NO: 2032657 - RNA, 19 nt, Homo sapiens
  misc_RNA (1)...(19): siRNA sense strand
gagucaaggcagcuacuua

SEQ ID NO: 2032658 - RNA, 19 nt, Homo sapiens
  misc_RNA (1)...(19): siRNA sense strand
agaaugcagucaugguuga

SEQ ID NO: 2032659 - RNA, 19 nt, Homo sapiens
  misc_RNA (1)...(19): siRNA sense strand
ccaggaugcucugugguuu

SEQ ID NO: 2032660 - RNA, 19 nt, Homo sapiens
  misc_RNA (1)...(19): siRNA sense strand
ugacuaaagcagauauuga

SEQ ID NO: 2032661 - RNA, 19 nt, Homo sapiens
  misc_RNA (1)...(19): siRNA sense strand
ugaacaacuuccuucuuau

SEQ ID NO: 2032662 - RNA, 19 nt, Homo sapiens
  misc_RNA (1)...(19): siRNA sense strand
cuuagagucuuacccugua

SEQ ID NO: 2032663 - RNA, 19 nt, Homo sapiens
  misc_RNA (1)...(19): siRNA sense strand
ugccauauguguuaucaau

SEQ ID NO: 2032664 - RNA, 19 nt, Homo sapiens
  misc_RNA (1)...(19): siRNA sense strand
caaguguguugacaaaugg

SEQ ID NO: 2032665 - RNA, 19 nt, Homo sapiens
  misc_RNA (1)...(19): siRNA sense strand
gcacgcaacagaagaaguc

SEQ ID NO: 2032666 - RNA, 19 nt, Homo sapiens
  misc_RNA (1)...(19): siRNA sense strand
guaguaugcaugugugauu

SEQ ID NO: 2032667 - RNA, 19 nt, Homo sapiens
  misc_RNA (1)...(19): siRNA sense strand
cagaacagacuuugugugu

SEQ ID NO: 2032668 - RNA, 19 nt, Homo sapiens
  misc_RNA (1)...(19): siRNA sense strand
caucagcucccuugcaguu

SEQ ID NO: 2032669 - RNA, 19 nt, Homo sapiens
  misc_RNA (1)...(19): siRNA sense strand
uaccuuauccuccauuuau

SEQ ID NO: 2032670 - RNA, 19 nt, Homo sapiens
  misc_RNA (1)...(19): siRNA sense strand
cgaguuccaugccaagugu

SEQ ID NO: 2032671 - RNA, 19 nt, Homo sapiens
  misc_RNA (1)...(19): siRNA sense strand
aaauuacgaggcccuguua

SEQ ID NO: 2032672 - RNA, 19 nt, Homo sapiens
  misc_RNA (1)...(19): siRNA sense strand
ccauauguguuaucaaugc

SEQ ID NO: 2032673 - RNA, 19 nt, Homo sapiens
  misc_RNA (1)...(19): siRNA sense strand
cuuaacacaugauccuuug

SEQ ID NO: 2032674 - RNA, 19 nt, Homo sapiens
  misc_RNA (1)...(19): siRNA sense strand
gcagauauugaacaacuuc

SEQ ID NO: 2032675 - RNA, 19 nt, Homo sapiens
  misc_RNA (1)...(19): siRNA sense strand
aagcagauauugaacaacu

SEQ ID NO: 2032676 - RNA, 19 nt, Homo sapiens
  misc_RNA (1)...(19): siRNA sense strand
ggagaacaucuuccaguag

SEQ ID NO: 2032677 - RNA, 19 nt, Homo sapiens
  misc_RNA (1)...(19): siRNA sense strand
agaacagacuuugugugua

SEQ ID NO: 2032678 - RNA, 19 nt, Homo sapiens
  misc_RNA (1)...(19): siRNA sense strand
ucuuaucgguucaauccua

SEQ ID NO: 2032679 - RNA, 19 nt, Homo sapiens
  misc_RNA (1)...(19): siRNA sense strand
ggacugacuaaagcagaua

SEQ ID NO: 2032680 - RNA, 19 nt, Homo sapiens
  misc_RNA (1)...(19): siRNA sense strand
ccagcuuacugccauaugu

SEQ ID NO: 2032681 - RNA, 19 nt, Homo sapiens
  misc_RNA (1)...(19): siRNA sense strand
guaccuuauccuccauuua

SEQ ID NO: 2032682 - RNA, 19 nt, Homo sapiens
  misc_RNA (1)...(19): siRNA sense strand
ugccaaguguguugacaaa

SEQ ID NO: 2032683 - RNA, 19 nt, Homo sapiens
  misc_RNA (1)...(19): siRNA sense strand
gcaaagccucguggacuga

SEQ ID NO: 2032684 - RNA, 19 nt, Homo sapiens
  misc_RNA (1)...(19): siRNA sense strand
uuacaggacguaguagaua

SEQ ID NO: 2032685 - RNA, 19 nt, Homo sapiens
  misc_RNA (1)...(19): siRNA sense strand
aagaagggaucgucugucu

SEQ ID NO: 2032686 - RNA, 19 nt, Homo sapiens
  misc_RNA (1)...(19): siRNA sense strand
uaguaugcaugugugauuu

SEQ ID NO: 2032687 - RNA, 19 nt, Homo sapiens
  misc_RNA (1)...(19): siRNA sense strand
ucuagugauccauuucuua

SEQ ID NO: 2032688 - RNA, 19 nt, Homo sapiens
  misc_RNA (1)...(19): siRNA sense strand
uaacaaccaccagucagaa

SEQ ID NO: 2032689 - RNA, 19 nt, Homo sapiens
  misc_RNA (1)...(19): siRNA sense strand
ccagcagaaugcagucaug

SEQ ID NO: 2032690 - RNA, 19 nt, Homo sapiens
  misc_RNA (1)...(19): siRNA sense strand
guugacaaauggcuuaagg

SEQ ID NO: 2032691 - RNA, 19 nt, Homo sapiens
  misc_RNA (1)...(19): siRNA sense strand
aagccaacaucacuucuca

SEQ ID NO: 2032692 - RNA, 19 nt, Homo sapiens
  misc_RNA (1)...(19): siRNA sense strand
gcccaacuuucagcuuuga

SEQ ID NO: 2032693 - RNA, 19 nt, Homo sapiens
  misc_RNA (1)...(19): siRNA sense strand
cuucaggcauguucaguuc

SEQ ID NO: 2032694 - RNA, 19 nt, Homo sapiens
  misc_RNA (1)...(19): siRNA sense strand
cauguucaguucagcacuu

SEQ ID NO: 2032695 - RNA, 19 nt, Homo sapiens
  misc_RNA (1)...(19): siRNA sense strand
aaaucguacuugcccaauu

SEQ ID NO: 2032696 - RNA, 19 nt, Homo sapiens
  misc_RNA (1)...(19): siRNA sense strand
gauauugaacaacuuccuu

SEQ ID NO: 2032697 - RNA, 19 nt, Homo sapiens
  misc_RNA (1)...(19): siRNA sense strand
cagcuuugaauuagaugua

SEQ ID NO: 2032698 - RNA, 19 nt, Homo sapiens
  misc_RNA (1)...(19): siRNA sense strand
ugaaguggaacucuuagga

SEQ ID NO: 2032699 - RNA, 19 nt, Homo sapiens
  misc_RNA (1)...(19): siRNA sense strand
cuagugauccauuucuuau

SEQ ID NO: 2032700 - RNA, 19 nt, Homo sapiens
  misc_RNA (1)...(19): siRNA sense strand
cccaucauccuccucauuu

SEQ ID NO: 2032701 - RNA, 19 nt, Homo sapiens
  misc_RNA (1)...(19): siRNA sense strand
caaauggcuuaaggcaaau

SEQ ID NO: 2032702 - RNA, 19 nt, Homo sapiens
  misc_RNA (1)...(19): siRNA sense strand
agaagaaguccuccuguca

SEQ ID NO: 2032703 - RNA, 19 nt, Homo sapiens
  misc_RNA (1)...(19): siRNA sense strand
uugcaguucuuaacacaug

SEQ ID NO: 2032704 - RNA, 19 nt, Homo sapiens
  misc_RNA (1)...(19): siRNA sense strand
ccaucauccuccucauuug

SEQ ID NO: 2032705 - RNA, 19 nt, Homo sapiens
  misc_RNA (1)...(19): siRNA sense strand
caggccaguuugucccuuu

SEQ ID NO: 2032706 - RNA, 19 nt, Homo sapiens
  misc_RNA (1)...(19): siRNA sense strand
ggcccaacuuucagcuuug

SEQ ID NO: 2032707 - RNA, 19 nt, Homo sapiens
  misc_RNA (1)...(19): siRNA sense strand
cuuaucgguucaauccuaa

SEQ ID NO: 2032708 - RNA, 19 nt, Homo sapiens
  misc_RNA (1)...(19): siRNA sense strand
ccacaugggauuccacucu

SEQ ID NO: 2032709 - RNA, 19 nt, Homo sapiens
  misc_RNA (1)...(19): siRNA sense strand
cuuacugccauauguguua

SEQ ID NO: 2032710 - RNA, 19 nt, Homo sapiens
  misc_RNA (1)...(19): siRNA sense strand
agugauccauuucuuauac

SEQ ID NO: 2032711 - RNA, 19 nt, Homo sapiens
  misc_RNA (1)...(19): siRNA sense strand
uagugugccuccuccaaug

SEQ ID NO: 2032712 - RNA, 19 nt, Homo sapiens
  misc_RNA (1)...(19): siRNA sense strand
uugccgagcugaugcuuca

SEQ ID NO: 2032713 - RNA, 19 nt, Homo sapiens
  misc_RNA (1)...(19): siRNA sense strand
cuaacaaccaccagucaga

SEQ ID NO: 2032714 - RNA, 19 nt, Homo sapiens
  misc_RNA (1)...(19): siRNA sense strand
gcuuugaauuagauguaga

SEQ ID NO: 2032715 - RNA, 19 nt, Homo sapiens
  misc_RNA (1)...(19): siRNA sense strand
guagugugccuccuccaau

SEQ ID NO: 2032716 - RNA, 19 nt, Homo sapiens
  misc_RNA (1)...(19): siRNA sense strand
ccaauuugccgagcugaug

SEQ ID NO: 2032717 - RNA, 19 nt, Homo sapiens
  misc_RNA (1)...(19): siRNA sense strand
uggcuuaaggcaaaucgua

SEQ ID NO: 2032718 - RNA, 19 nt, Homo sapiens
  misc_RNA (1)...(19): siRNA sense strand
uaacacaugauccuuugca

SEQ ID NO: 2032719 - RNA, 19 nt, Homo sapiens
  misc_RNA (1)...(19): siRNA sense strand
agaagugcaucgggauuca

SEQ ID NO: 2032720 - RNA, 19 nt, Homo sapiens
  misc_RNA (1)...(19): siRNA sense strand
aaaaugaaguggaacucuu

SEQ ID NO: 2032721 - RNA, 19 nt, Homo sapiens
  misc_RNA (1)...(19): siRNA sense strand
gacuuuguguguaguaugc

SEQ ID NO: 2032722 - RNA, 19 nt, Homo sapiens
  misc_RNA (1)...(19): siRNA sense strand
cuaaagcagauauugaaca

SEQ ID NO: 2032723 - RNA, 19 nt, Homo sapiens
  misc_RNA (1)...(19): siRNA sense strand
gaccaagccaacaucacuu

SEQ ID NO: 2032724 - RNA, 19 nt, Homo sapiens
  misc_RNA (1)...(19): siRNA sense strand
cgaccaagccaacaucacu

SEQ ID NO: 2032725 - RNA, 19 nt, Homo sapiens
  misc_RNA (1)...(19): siRNA sense strand
agaagauggagaaguagaa

SEQ ID NO: 2032726 - RNA, 19 nt, Homo sapiens
  misc_RNA (1)...(19): siRNA sense strand
aggcuuacaggacguagua

SEQ ID NO: 2032727 - RNA, 19 nt, Homo sapiens
  misc_RNA (1)...(19): siRNA sense strand
gagguguccuuuggaguac

SEQ ID NO: 2032728 - RNA, 19 nt, Homo sapiens
  misc_RNA (1)...(19): siRNA sense strand
uauacauccuccucaccuu

SEQ ID NO: 2032729 - RNA, 19 nt, Homo sapiens
  misc_RNA (1)...(19): siRNA sense strand
gugauccauuucuuauaca

SEQ ID NO: 2032730 - RNA, 19 nt, Homo sapiens
  misc_RNA (1)...(19): siRNA sense strand
agauguagaagauggagaa

SEQ ID NO: 2032731 - RNA, 19 nt, Homo sapiens
  misc_RNA (1)...(19): siRNA sense strand
ucagcuccaucaaggaaca

SEQ ID NO: 2032732 - RNA, 19 nt, Homo sapiens
  misc_RNA (1)...(19): siRNA sense strand
gaacagacuuuguguguag

SEQ ID NO: 2032733 - RNA, 19 nt, Homo sapiens
  misc_RNA (1)...(19): siRNA sense strand
acaaauggcuuaaggcaaa

SEQ ID NO: 2032734 - RNA, 19 nt, Homo sapiens
  misc_RNA (1)...(19): siRNA sense strand
uguagaagauggagaagua

SEQ ID NO: 2032735 - RNA, 19 nt, Homo sapiens
  misc_RNA (1)...(19): siRNA sense strand
uugaacaacuuccuucuua

SEQ ID NO: 2032736 - RNA, 19 nt, Homo sapiens
  misc_RNA (1)...(19): siRNA sense strand
gcagcuacuuagagucuua

SEQ ID NO: 2032737 - RNA, 19 nt, Homo sapiens
  misc_RNA (1)...(19): siRNA sense strand
gcacaucccugcuuguagu

SEQ ID NO: 2032738 - RNA, 19 nt, Homo sapiens
  misc_RNA (1)...(19): siRNA sense strand
gcacuuaccaguaccauau

SEQ ID NO: 2032739 - RNA, 19 nt, Homo sapiens
  misc_RNA (1)...(19): siRNA sense strand
ccaaguguguugacaaaug

SEQ ID NO: 2032740 - RNA, 19 nt, Homo sapiens
  misc_RNA (1)...(19): siRNA sense strand
ggagguguccuuuggagua

SEQ ID NO: 2032741 - RNA, 19 nt, Homo sapiens
  misc_RNA (1)...(19): siRNA sense strand
aaucguacuugcccaauuu

SEQ ID NO: 2032742 - RNA, 19 nt, Homo sapiens
  misc_RNA (1)...(19): siRNA sense strand
gggcccaacuuucagcuuu

SEQ ID NO: 2032743 - RNA, 19 nt, Homo sapiens
  misc_RNA (1)...(19): siRNA sense strand
gaacaacuuccuucuuauc

SEQ ID NO: 2032744 - RNA, 19 nt, Homo sapiens
  misc_RNA (1)...(19): siRNA sense strand
gcagugggcccaacuuuca

SEQ ID NO: 2032745 - RNA, 19 nt, Homo sapiens
  misc_RNA (1)...(19): siRNA sense strand
caaggcagcuacuuagagu

SEQ ID NO: 2032746 - RNA, 19 nt, Homo sapiens
  misc_RNA (1)...(19): siRNA sense strand
gaucagcuccaucaaggaa

SEQ ID NO: 2032747 - RNA, 19 nt, Homo sapiens
  misc_RNA (1)...(19): siRNA sense strand
gacuaaagcagauauugaa

SEQ ID NO: 2032748 - RNA, 19 nt, Homo sapiens
  misc_RNA (1)...(19): siRNA sense strand
gcagaaugcagucaugguu

SEQ ID NO: 2032749 - RNA, 19 nt, Homo sapiens
  misc_RNA (1)...(19): siRNA sense strand
gauagaaaaugaaguggaa

SEQ ID NO: 2032750 - RNA, 19 nt, Homo sapiens
  misc_RNA (1)...(19): siRNA sense strand
guucagcacuuaccaguac

SEQ ID NO: 2032751 - RNA, 19 nt, Homo sapiens
  misc_RNA (1)...(19): siRNA sense strand
gaagauggagaaguagaaa

SEQ ID NO: 2032752 - RNA, 19 nt, Homo sapiens
  misc_RNA (1)...(19): siRNA sense strand
gcaccucccugucuguagu

SEQ ID NO: 2032753 - RNA, 19 nt, Homo sapiens
  misc_RNA (1)...(19): siRNA sense strand
aggagaacaucuuccagua

SEQ ID NO: 2032754 - RNA, 19 nt, Homo sapiens
  misc_RNA (1)...(19): siRNA sense strand
aaaugaaguggaacucuua

SEQ ID NO: 2032755 - RNA, 19 nt, Homo sapiens
  misc_RNA (1)...(19): siRNA sense strand
gaucgccucugcaaaggau

SEQ ID NO: 2032756 - RNA, 19 nt, Homo sapiens
  misc_RNA (1)...(19): siRNA sense strand
ggaagaagggaucgucugu

SEQ ID NO: 2032757 - RNA, 19 nt, Homo sapiens
  misc_RNA (1)...(19): siRNA sense strand
gagucaaggcagcuacuua

SEQ ID NO: 2032758 - RNA, 19 nt, Homo sapiens
  misc_RNA (1)...(19): siRNA sense strand
agaaugcagucaugguuga

SEQ ID NO: 2032759 - RNA, 19 nt, Homo sapiens
  misc_RNA (1)...(19): siRNA sense strand
ccaggaugcucugugguuu

SEQ ID NO: 2032760 - RNA, 19 nt, Homo sapiens
  misc_RNA (1)...(19): siRNA sense strand
ugacuaaagcagauauuga

SEQ ID NO: 2032761 - RNA, 19 nt, Homo sapiens
  misc_RNA (1)...(19): siRNA sense strand
ugaacaacuuccuucuuau

SEQ ID NO: 2032762 - RNA, 19 nt, Homo sapiens
  misc_RNA (1)...(19): siRNA sense strand
cuuagagucuuacccugua

SEQ ID NO: 2032763 - RNA, 19 nt, Homo sapiens
  misc_RNA (1)...(19): siRNA sense strand
ugccauauguguuaucaau

SEQ ID NO: 2032764 - RNA, 19 nt, Homo sapiens
  misc_RNA (1)...(19): siRNA sense strand
caaguguguugacaaaugg

SEQ ID NO: 2032765 - RNA, 19 nt, Homo sapiens
  misc_RNA (1)...(19): siRNA sense strand
gcacgcaacagaagaaguc

SEQ ID NO: 2032766 - RNA, 19 nt, Homo sapiens
  misc_RNA (1)...(19): siRNA sense strand
guaguaugcaugugugauu

SEQ ID NO: 2032767 - RNA, 19 nt, Homo sapiens
  misc_RNA (1)...(19): siRNA sense strand
cagaacagacuuugugugu

SEQ ID NO: 2032768 - RNA, 19 nt, Homo sapiens
  misc_RNA (1)...(19): siRNA sense strand
caucagcucccuugcaguu

SEQ ID NO: 2032769 - RNA, 19 nt, Homo sapiens
  misc_RNA (1)...(19): siRNA sense strand
uaccuuauccuccauuuau

SEQ ID NO: 2032770 - RNA, 19 nt, Homo sapiens
  misc_RNA (1)...(19): siRNA sense strand
cgaguuccaugccaagugu

SEQ ID NO: 2032771 - RNA, 19 nt, Homo sapiens
  misc_RNA (1)...(19): siRNA sense strand
aaauuacgaggcccuguua

SEQ ID NO: 2032772 - RNA, 19 nt, Homo sapiens
  misc_RNA (1)...(19): siRNA sense strand
ccauauguguuaucaaugc

SEQ ID NO: 2032773 - RNA, 19 nt, Homo sapiens
  misc_RNA (1)...(19): siRNA sense strand
cuuaacacaugauccuuug

SEQ ID NO: 2032774 - RNA, 19 nt, Homo sapiens
  misc_RNA (1)...(19): siRNA sense strand
gcagauauugaacaacuuc

SEQ ID NO: 2032775 - RNA, 19 nt, Homo sapiens
  misc_RNA (1)...(19): siRNA sense strand
aagcagauauugaacaacu

SEQ ID NO: 2032776 - RNA, 19 nt, Homo sapiens
  misc_RNA (1)...(19): siRNA sense strand
ggagaacaucuuccaguag

SEQ ID NO: 2032777 - RNA, 19 nt, Homo sapiens
  misc_RNA (1)...(19): siRNA sense strand
agaacagacuuugugugua

SEQ ID NO: 2032778 - RNA, 19 nt, Homo sapiens
  misc_RNA (1)...(19): siRNA sense strand
ucuuaucgguucaauccua

SEQ ID NO: 2032779 - RNA, 19 nt, Homo sapiens
  misc_RNA (1)...(19): siRNA sense strand
ggacugacuaaagcagaua

SEQ ID NO: 2032780 - RNA, 19 nt, Homo sapiens
  misc_RNA (1)...(19): siRNA sense strand
ccagcuuacugccauaugu

SEQ ID NO: 2032781 - RNA, 19 nt, Homo sapiens
  misc_RNA (1)...(19): siRNA sense strand
guaccuuauccuccauuua

SEQ ID NO: 2032782 - RNA, 19 nt, Homo sapiens
  misc_RNA (1)...(19): siRNA sense strand
ugccaaguguguugacaaa

SEQ ID NO: 2032783 - RNA, 19 nt, Homo sapiens
  misc_RNA (1)...(19): siRNA sense strand
gcaaagccucguggacuga

SEQ ID NO: 2032784 - RNA, 19 nt, Homo sapiens
  misc_RNA (1)...(19): siRNA sense strand
uuacaggacguaguagaua

SEQ ID NO: 2032785 - RNA, 19 nt, Homo sapiens
  misc_RNA (1)...(19): siRNA sense strand
aagaagggaucgucugucu

SEQ ID NO: 2032786 - RNA, 19 nt, Homo sapiens
  misc_RNA (1)...(19): siRNA sense strand
uaguaugcaugugugauuu

SEQ ID NO: 2032787 - RNA, 19 nt, Homo sapiens
  misc_RNA (1)...(19): siRNA sense strand
ucuagugauccauuucuua

SEQ ID NO: 2032788 - RNA, 19 nt, Homo sapiens
  misc_RNA (1)...(19): siRNA sense strand
uaacaaccaccagucagaa

SEQ ID NO: 2032789 - RNA, 19 nt, Homo sapiens
  misc_RNA (1)...(19): siRNA sense strand
ccagcagaaugcagucaug

SEQ ID NO: 2032790 - RNA, 19 nt, Homo sapiens
  misc_RNA (1)...(19): siRNA sense strand
guugacaaauggcuuaagg

SEQ ID NO: 2032791 - RNA, 19 nt, Homo sapiens
  misc_RNA (1)...(19): siRNA sense strand
aagccaacaucacuucuca

SEQ ID NO: 2032792 - RNA, 19 nt, Homo sapiens
  misc_RNA (1)...(19): siRNA sense strand
gcccaacuuucagcuuuga

SEQ ID NO: 2032793 - RNA, 19 nt, Homo sapiens
  misc_RNA (1)...(19): siRNA sense strand
cuucaggcauguucaguuc

SEQ ID NO: 2032794 - RNA, 19 nt, Homo sapiens
  misc_RNA (1)...(19): siRNA sense strand
cauguucaguucagcacuu

SEQ ID NO: 2032795 - RNA, 19 nt, Homo sapiens
  misc_RNA (1)...(19): siRNA sense strand
aaaucguacuugcccaauu

SEQ ID NO: 2032796 - RNA, 19 nt, Homo sapiens
  misc_RNA (1)...(19): siRNA sense strand
gauauugaacaacuuccuu

SEQ ID NO: 2032797 - RNA, 19 nt, Homo sapiens
  misc_RNA (1)...(19): siRNA sense strand
cagcuuugaauuagaugua

SEQ ID NO: 2032798 - RNA, 19 nt, Homo sapiens
  misc_RNA (1)...(19): siRNA sense strand
ugaaguggaacucuuagga

SEQ ID NO: 2032799 - RNA, 19 nt, Homo sapiens
  misc_RNA (1)...(19): siRNA sense strand
cuagugauccauuucuuau

SEQ ID NO: 2032800 - RNA, 19 nt, Homo sapiens
  misc_RNA (1)...(19): siRNA sense strand
cccaucauccuccucauuu

SEQ ID NO: 2032801 - RNA, 19 nt, Homo sapiens
  misc_RNA (1)...(19): siRNA sense strand
caaauggcuuaaggcaaau

SEQ ID NO: 2032802 - RNA, 19 nt, Homo sapiens
  misc_RNA (1)...(19): siRNA sense strand
agaagaaguccuccuguca

SEQ ID NO: 2032803 - RNA, 19 nt, Homo sapiens
  misc_RNA (1)...(19): siRNA sense strand
uugcaguucuuaacacaug

SEQ ID NO: 2032804 - RNA, 19 nt, Homo sapiens
  misc_RNA (1)...(19): siRNA sense strand
ccaucauccuccucauuug

SEQ ID NO: 2032805 - RNA, 19 nt, Homo sapiens
  misc_RNA (1)...(19): siRNA sense strand
caggccaguuugucccuuu

SEQ ID NO: 2032806 - RNA, 19 nt, Homo sapiens
  misc_RNA (1)...(19): siRNA sense strand
ggcccaacuuucagcuuug

SEQ ID NO: 2032807 - RNA, 19 nt, Homo sapiens
  misc_RNA (1)...(19): siRNA sense strand
cuuaucgguucaauccuaa

SEQ ID NO: 2032808 - RNA, 19 nt, Homo sapiens
  misc_RNA (1)...(19): siRNA sense strand
ccacaugggauuccacucu

SEQ ID NO: 2032809 - RNA, 19 nt, Homo sapiens
  misc_RNA (1)...(19): siRNA sense strand
cuuacugccauauguguua

SEQ ID NO: 2032810 - RNA, 19 nt, Homo sapiens
  misc_RNA (1)...(19): siRNA sense strand
agugauccauuucuuauac

SEQ ID NO: 2032811 - RNA, 19 nt, Homo sapiens
  misc_RNA (1)...(19): siRNA sense strand
uagugugccuccuccaaug

SEQ ID NO: 2032812 - RNA, 19 nt, Homo sapiens
  misc_RNA (1)...(19): siRNA sense strand
uugccgagcugaugcuuca

SEQ ID NO: 2032813 - RNA, 19 nt, Homo sapiens
  misc_RNA (1)...(19): siRNA sense strand
cuaacaaccaccagucaga

SEQ ID NO: 2032814 - RNA, 19 nt, Homo sapiens
  misc_RNA (1)...(19): siRNA sense strand
gcuuugaauuagauguaga

SEQ ID NO: 2032815 - RNA, 19 nt, Homo sapiens
  misc_RNA (1)...(19): siRNA sense strand
guagugugccuccuccaau

SEQ ID NO: 2032816 - RNA, 19 nt, Homo sapiens
  misc_RNA (1)...(19): siRNA sense strand
ccaauuugccgagcugaug

SEQ ID NO: 2032817 - RNA, 19 nt, Homo sapiens
  misc_RNA (1)...(19): siRNA sense strand
uggcuuaaggcaaaucgua

SEQ ID NO: 2032818 - RNA, 19 nt, Homo sapiens
  misc_RNA (1)...(19): siRNA sense strand
uaacacaugauccuuugca

SEQ ID NO: 2032819 - RNA, 19 nt, Homo sapiens
  misc_RNA (1)...(19): siRNA sense strand
agaagugcaucgggauuca

SEQ ID NO: 2032820 - RNA, 19 nt, Homo sapiens
  misc_RNA (1)...(19): siRNA sense strand
aaaaugaaguggaacucuu

SEQ ID NO: 2032821 - RNA, 19 nt, Homo sapiens
  misc_RNA (1)...(19): siRNA sense strand
gacuuuguguguaguaugc

SEQ ID NO: 2032822 - RNA, 19 nt, Homo sapiens
  misc_RNA (1)...(19): siRNA sense strand
cuaaagcagauauugaaca

SEQ ID NO: 2032823 - RNA, 19 nt, Homo sapiens
  misc_RNA (1)...(19): siRNA sense strand
gaccaagccaacaucacuu

SEQ ID NO: 2032824 - RNA, 19 nt, Homo sapiens
  misc_RNA (1)...(19): siRNA sense strand
cgaccaagccaacaucacu

SEQ ID NO: 2032825 - RNA, 19 nt, Homo sapiens
  misc_RNA (1)...(19): siRNA sense strand
agaagauggagaaguagaa

SEQ ID NO: 2032826 - RNA, 19 nt, Homo sapiens
  misc_RNA (1)...(19): siRNA sense strand
aggcuuacaggacguagua

SEQ ID NO: 2032827 - RNA, 19 nt, Homo sapiens
  misc_RNA (1)...(19): siRNA sense strand
gagguguccuuuggaguac

SEQ ID NO: 2032828 - RNA, 19 nt, Homo sapiens
  misc_RNA (1)...(19): siRNA sense strand
uauacauccuccucaccuu

SEQ ID NO: 2032829 - RNA, 19 nt, Homo sapiens
  misc_RNA (1)...(19): siRNA sense strand
gugauccauuucuuauaca

SEQ ID NO: 2032830 - RNA, 19 nt, Homo sapiens
  misc_RNA (1)...(19): siRNA sense strand
agauguagaagauggagaa

SEQ ID NO: 2032831 - RNA, 19 nt, Homo sapiens
  misc_RNA (1)...(19): siRNA sense strand
ucagcuccaucaaggaaca

SEQ ID NO: 2032832 - RNA, 19 nt, Homo sapiens
  misc_RNA (1)...(19): siRNA sense strand
gaacagacuuuguguguag

SEQ ID NO: 2032833 - RNA, 19 nt, Homo sapiens
  misc_RNA (1)...(19): siRNA sense strand
acaaauggcuuaaggcaaa

SEQ ID NO: 2032834 - RNA, 19 nt, Homo sapiens
  misc_RNA (1)...(19): siRNA sense strand
uguagaagauggagaagua

SEQ ID NO: 2032835 - RNA, 19 nt, Homo sapiens
  misc_RNA (1)...(19): siRNA sense strand
uugaacaacuuccuucuua

SEQ ID NO: 2032836 - RNA, 19 nt, Homo sapiens
  misc_RNA (1)...(19): siRNA sense strand
gcagcuacuuagagucuua

SEQ ID NO: 2032837 - RNA, 19 nt, Homo sapiens
  misc_RNA (1)...(19): siRNA sense strand
gcacaucccugcuuguagu

SEQ ID NO: 2032838 - RNA, 19 nt, Homo sapiens
  misc_RNA (1)...(19): siRNA sense strand
gcacuuaccaguaccauau

SEQ ID NO: 2032839 - RNA, 19 nt, Homo sapiens
  misc_RNA (1)...(19): siRNA sense strand
ccaaguguguugacaaaug

SEQ ID NO: 2032840 - RNA, 19 nt, Homo sapiens
  misc_RNA (1)...(19): siRNA sense strand
ggagguguccuuuggagua

SEQ ID NO: 2032841 - RNA, 19 nt, Homo sapiens
  misc_RNA (1)...(19): siRNA sense strand
aaucguacuugcccaauuu

SEQ ID NO: 2032842 - RNA, 19 nt, Homo sapiens
  misc_RNA (1)...(19): siRNA sense strand
gggcccaacuuucagcuuu

SEQ ID NO: 2032843 - RNA, 19 nt, Homo sapiens
  misc_RNA (1)...(19): siRNA sense strand
gaacaacuuccuucuuauc

SEQ ID NO: 2032844 - RNA, 19 nt, Homo sapiens
  misc_RNA (1)...(19): siRNA sense strand
gcagugggcccaacuuuca

SEQ ID NO: 2032845 - RNA, 19 nt, Homo sapiens
  misc_RNA (1)...(19): siRNA sense strand
caaggcagcuacuuagagu

SEQ ID NO: 2032846 - RNA, 19 nt, Homo sapiens
  misc_RNA (1)...(19): siRNA sense strand
gaucagcuccaucaaggaa

SEQ ID NO: 2032847 - RNA, 19 nt, Homo sapiens
  misc_RNA (1)...(19): siRNA sense strand
gacuaaagcagauauugaa

SEQ ID NO: 2032848 - RNA, 19 nt, Homo sapiens
  misc_RNA (1)...(19): siRNA sense strand
gcagaaugcagucaugguu

SEQ ID NO: 2032849 - RNA, 19 nt, Homo sapiens
  misc_RNA (1)...(19): siRNA sense strand
gauagaaaaugaaguggaa

SEQ ID NO: 2032850 - RNA, 19 nt, Homo sapiens
  misc_RNA (1)...(19): siRNA sense strand
guucagcacuuaccaguac

SEQ ID NO: 2032851 - RNA, 19 nt, Homo sapiens
  misc_RNA (1)...(19): siRNA sense strand
gaagauggagaaguagaaa

SEQ ID NO: 2032852 - RNA, 19 nt, Homo sapiens
  misc_RNA (1)...(19): siRNA sense strand
gcaccucccugucuguagu

SEQ ID NO: 2032853 - RNA, 19 nt, Homo sapiens
  misc_RNA (1)...(19): siRNA sense strand
aggagaacaucuuccagua

SEQ ID NO: 2032854 - RNA, 19 nt, Homo sapiens
  misc_RNA (1)...(19): siRNA sense strand
aaaugaaguggaacucuua

SEQ ID NO: 2032855 - RNA, 19 nt, Homo sapiens
  misc_RNA (1)...(19): siRNA sense strand
gaucgccucugcaaaggau

SEQ ID NO: 2032856 - RNA, 19 nt, Homo sapiens
  misc_RNA (1)...(19): siRNA sense strand
ggaagaagggaucgucugu

SEQ ID NO: 2032857 - RNA, 19 nt, Homo sapiens
  misc_RNA (1)...(19): siRNA sense strand
gagucaaggcagcuacuua

SEQ ID NO: 2032858 - RNA, 19 nt, Homo sapiens
  misc_RNA (1)...(19): siRNA sense strand
agaaugcagucaugguuga

SEQ ID NO: 2032859 - RNA, 19 nt, Homo sapiens
  misc_RNA (1)...(19): siRNA sense strand
ccaggaugcucugugguuu

SEQ ID NO: 2032860 - RNA, 19 nt, Homo sapiens
  misc_RNA (1)...(19): siRNA sense strand
ugacuaaagcagauauuga

SEQ ID NO: 2032861 - RNA, 19 nt, Homo sapiens
  misc_RNA (1)...(19): siRNA sense strand
ugaacaacuuccuucuuau

SEQ ID NO: 2032862 - RNA, 19 nt, Homo sapiens
  misc_RNA (1)...(19): siRNA sense strand
cuuagagucuuacccugua

SEQ ID NO: 2032863 - RNA, 19 nt, Homo sapiens
  misc_RNA (1)...(19): siRNA sense strand
ugccauauguguuaucaau

SEQ ID NO: 2032864 - RNA, 19 nt, Homo sapiens
  misc_RNA (1)...(19): siRNA sense strand
caaguguguugacaaaugg

SEQ ID NO: 2032865 - RNA, 19 nt, Homo sapiens
  misc_RNA (1)...(19): siRNA sense strand
gcacgcaacagaagaaguc

SEQ ID NO: 2032866 - RNA, 19 nt, Homo sapiens
  misc_RNA (1)...(19): siRNA sense strand
guaguaugcaugugugauu

SEQ ID NO: 2032867 - RNA, 19 nt, Homo sapiens
  misc_RNA (1)...(19): siRNA sense strand
cagaacagacuuugugugu

SEQ ID NO: 2032868 - RNA, 19 nt, Homo sapiens
  misc_RNA (1)...(19): siRNA sense strand
caucagcucccuugcaguu

SEQ ID NO: 2032869 - RNA, 19 nt, Homo sapiens
  misc_RNA (1)...(19): siRNA sense strand
uaccuuauccuccauuuau

SEQ ID NO: 2032870 - RNA, 19 nt, Homo sapiens
  misc_RNA (1)...(19): siRNA sense strand
cgaguuccaugccaagugu

SEQ ID NO: 2032871 - RNA, 19 nt, Homo sapiens
  misc_RNA (1)...(19): siRNA sense strand
aaauuacgaggcccuguua

SEQ ID NO: 2032872 - RNA, 19 nt, Homo sapiens
  misc_RNA (1)...(19): siRNA sense strand
ccauauguguuaucaaugc

SEQ ID NO: 2032873 - RNA, 19 nt, Homo sapiens
  misc_RNA (1)...(19): siRNA sense strand
cuuaacacaugauccuuug

SEQ ID NO: 2032874 - RNA, 19 nt, Homo sapiens
  misc_RNA (1)...(19): siRNA sense strand
gcagauauugaacaacuuc

SEQ ID NO: 2032875 - RNA, 19 nt, Homo sapiens
  misc_RNA (1)...(19): siRNA sense strand
aagcagauauugaacaacu

SEQ ID NO: 2032876 - RNA, 19 nt, Homo sapiens
  misc_RNA (1)...(19): siRNA sense strand
ggagaacaucuuccaguag

SEQ ID NO: 2032877 - RNA, 19 nt, Homo sapiens
  misc_RNA (1)...(19): siRNA sense strand
agaacagacuuugugugua

SEQ ID NO: 2032878 - RNA, 19 nt, Homo sapiens
  misc_RNA (1)...(19): siRNA sense strand
ucuuaucgguucaauccua

SEQ ID NO: 2032879 - RNA, 19 nt, Homo sapiens
  misc_RNA (1)...(19): siRNA sense strand
ggacugacuaaagcagaua

SEQ ID NO: 2032880 - RNA, 19 nt, Homo sapiens
  misc_RNA (1)...(19): siRNA sense strand
ccagcuuacugccauaugu

SEQ ID NO: 2032881 - RNA, 19 nt, Homo sapiens
  misc_RNA (1)...(19): siRNA sense strand
guaccuuauccuccauuua

SEQ ID NO: 2032882 - RNA, 19 nt, Homo sapiens
  misc_RNA (1)...(19): siRNA sense strand
ugccaaguguguugacaaa

SEQ ID NO: 2032883 - RNA, 19 nt, Homo sapiens
  misc_RNA (1)...(19): siRNA sense strand
gcaaagccucguggacuga

SEQ ID NO: 2032884 - RNA, 19 nt, Homo sapiens
  misc_RNA (1)...(19): siRNA sense strand
uuacaggacguaguagaua

SEQ ID NO: 2032885 - RNA, 19 nt, Homo sapiens
  misc_RNA (1)...(19): siRNA sense strand
aagaagggaucgucugucu

SEQ ID NO: 2032886 - RNA, 19 nt, Homo sapiens
  misc_RNA (1)...(19): siRNA sense strand
uaguaugcaugugugauuu

SEQ ID NO: 2032887 - RNA, 19 nt, Homo sapiens
  misc_RNA (1)...(19): siRNA sense strand
ucuagugauccauuucuua

SEQ ID NO: 2032888 - RNA, 19 nt, Homo sapiens
  misc_RNA (1)...(19): siRNA sense strand
uaacaaccaccagucagaa

SEQ ID NO: 2032889 - RNA, 19 nt, Homo sapiens
  misc_RNA (1)...(19): siRNA sense strand
ccagcagaaugcagucaug

SEQ ID NO: 2032890 - RNA, 19 nt, Homo sapiens
  misc_RNA (1)...(19): siRNA sense strand
guugacaaauggcuuaagg

SEQ ID NO: 2032891 - RNA, 19 nt, Homo sapiens
  misc_RNA (1)...(19): siRNA sense strand
aagccaacaucacuucuca

SEQ ID NO: 2032892 - RNA, 19 nt, Homo sapiens
  misc_RNA (1)...(19): siRNA sense strand
gcccaacuuucagcuuuga

SEQ ID NO: 2032893 - RNA, 19 nt, Homo sapiens
  misc_RNA (1)...(19): siRNA sense strand
cuucaggcauguucaguuc

SEQ ID NO: 2032894 - RNA, 19 nt, Homo sapiens
  misc_RNA (1)...(19): siRNA sense strand
cauguucaguucagcacuu

SEQ ID NO: 2032895 - RNA, 19 nt, Homo sapiens
  misc_RNA (1)...(19): siRNA sense strand
aaaucguacuugcccaauu

SEQ ID NO: 2032896 - RNA, 19 nt, Homo sapiens
  misc_RNA (1)...(19): siRNA sense strand
gauauugaacaacuuccuu

SEQ ID NO: 2032897 - RNA, 19 nt, Homo sapiens
  misc_RNA (1)...(19): siRNA sense strand
cagcuuugaauuagaugua

SEQ ID NO: 2032898 - RNA, 19 nt, Homo sapiens
  misc_RNA (1)...(19): siRNA sense strand
ugaaguggaacucuuagga

SEQ ID NO: 2032899 - RNA, 19 nt, Homo sapiens
  misc_RNA (1)...(19): siRNA sense strand
cuagugauccauuucuuau

SEQ ID NO: 2032900 - RNA, 19 nt, Homo sapiens
  misc_RNA (1)...(19): siRNA sense strand
cccaucauccuccucauuu

SEQ ID NO: 2032901 - RNA, 19 nt, Homo sapiens
  misc_RNA (1)...(19): siRNA sense strand
caaauggcuuaaggcaaau

SEQ ID NO: 2032902 - RNA, 19 nt, Homo sapiens
  misc_RNA (1)...(19): siRNA sense strand
agaagaaguccuccuguca

SEQ ID NO: 2032903 - RNA, 19 nt, Homo sapiens
  misc_RNA (1)...(19): siRNA sense strand
uugcaguucuuaacacaug

SEQ ID NO: 2032904 - RNA, 19 nt, Homo sapiens
  misc_RNA (1)...(19): siRNA sense strand
ccaucauccuccucauuug

SEQ ID NO: 2032905 - RNA, 19 nt, Homo sapiens
  misc_RNA (1)...(19): siRNA sense strand
caggccaguuugucccuuu

SEQ ID NO: 2032906 - RNA, 19 nt, Homo sapiens
  misc_RNA (1)...(19): siRNA sense strand
ggcccaacuuucagcuuug

SEQ ID NO: 2032907 - RNA, 19 nt, Homo sapiens
  misc_RNA (1)...(19): siRNA sense strand
cuuaucgguucaauccuaa

SEQ ID NO: 2032908 - RNA, 19 nt, Homo sapiens
  misc_RNA (1)...(19): siRNA sense strand
ccacaugggauuccacucu

SEQ ID NO: 2032909 - RNA, 19 nt, Homo sapiens
  misc_RNA (1)...(19): siRNA sense strand
cuuacugccauauguguua

SEQ ID NO: 2032910 - RNA, 19 nt, Homo sapiens
  misc_RNA (1)...(19): siRNA sense strand
agugauccauuucuuauac

SEQ ID NO: 2032911 - RNA, 19 nt, Homo sapiens
  misc_RNA (1)...(19): siRNA sense strand
uagugugccuccuccaaug

SEQ ID NO: 2032912 - RNA, 19 nt, Homo sapiens
  misc_RNA (1)...(19): siRNA sense strand
uugccgagcugaugcuuca

SEQ ID NO: 2032913 - RNA, 19 nt, Homo sapiens
  misc_RNA (1)...(19): siRNA sense strand
cuaacaaccaccagucaga

SEQ ID NO: 2032914 - RNA, 19 nt, Homo sapiens
  misc_RNA (1)...(19): siRNA sense strand
gcuuugaauuagauguaga

SEQ ID NO: 2032915 - RNA, 19 nt, Homo sapiens
  misc_RNA (1)...(19): siRNA sense strand
guagugugccuccuccaau

SEQ ID NO: 2032916 - RNA, 19 nt, Homo sapiens
  misc_RNA (1)...(19): siRNA sense strand
ccaauuugccgagcugaug

SEQ ID NO: 2032917 - RNA, 19 nt, Homo sapiens
  misc_RNA (1)...(19): siRNA sense strand
uggcuuaaggcaaaucgua

SEQ ID NO: 2032918 - RNA, 19 nt, Homo sapiens
  misc_RNA (1)...(19): siRNA sense strand
uaacacaugauccuuugca

SEQ ID NO: 2032919 - RNA, 19 nt, Homo sapiens
  misc_RNA (1)...(19): siRNA sense strand
agaagugcaucgggauuca

SEQ ID NO: 2032920 - RNA, 19 nt, Homo sapiens
  misc_RNA (1)...(19): siRNA sense strand
aaaaugaaguggaacucuu

SEQ ID NO: 2032921 - RNA, 19 nt, Homo sapiens
  misc_RNA (1)...(19): siRNA sense strand
gacuuuguguguaguaugc

SEQ ID NO: 2032922 - RNA, 19 nt, Homo sapiens
  misc_RNA (1)...(19): siRNA sense strand
cuaaagcagauauugaaca

SEQ ID NO: 2032923 - RNA, 19 nt, Homo sapiens
  misc_RNA (1)...(19): siRNA sense strand
gaccaagccaacaucacuu

SEQ ID NO: 2032924 - RNA, 19 nt, Homo sapiens
  misc_RNA (1)...(19): siRNA sense strand
cgaccaagccaacaucacu

SEQ ID NO: 2032925 - RNA, 19 nt, Homo sapiens
  misc_RNA (1)...(19): siRNA sense strand
agaagauggagaaguagaa

SEQ ID NO: 2032926 - RNA, 19 nt, Homo sapiens
  misc_RNA (1)...(19): siRNA sense strand
aggcuuacaggacguagua

SEQ ID NO: 2032927 - RNA, 19 nt, Homo sapiens
  misc_RNA (1)...(19): siRNA sense strand
gagguguccuuuggaguac

SEQ ID NO: 2032928 - RNA, 19 nt, Homo sapiens
  misc_RNA (1)...(19): siRNA sense strand
uauacauccuccucaccuu

SEQ ID NO: 2032929 - RNA, 19 nt, Homo sapiens
  misc_RNA (1)...(19): siRNA sense strand
gugauccauuucuuauaca

SEQ ID NO: 2032930 - RNA, 19 nt, Homo sapiens
  misc_RNA (1)...(19): siRNA sense strand
agauguagaagauggagaa

SEQ ID NO: 2032931 - RNA, 19 nt, Homo sapiens
  misc_RNA (1)...(19): siRNA sense strand
ucagcuccaucaaggaaca

SEQ ID NO: 2032932 - RNA, 19 nt, Homo sapiens
  misc_RNA (1)...(19): siRNA sense strand
gaacagacuuuguguguag

SEQ ID NO: 2032933 - RNA, 19 nt, Homo sapiens
  misc_RNA (1)...(19): siRNA sense strand
acaaauggcuuaaggcaaa

SEQ ID NO: 2032934 - RNA, 19 nt, Homo sapiens
  misc_RNA (1)...(19): siRNA sense strand
gaagauaguccaaguccua

SEQ ID NO: 2032935 - RNA, 19 nt, Homo sapiens
  misc_RNA (1)...(19): siRNA sense strand
uguagaagauggagaagua

SEQ ID NO: 2032936 - RNA, 19 nt, Homo sapiens
  misc_RNA (1)...(19): siRNA sense strand
uugaacaacuuccuucuua

SEQ ID NO: 2032937 - RNA, 19 nt, Homo sapiens
  misc_RNA (1)...(19): siRNA sense strand
gcagcuacuuagagucuua

SEQ ID NO: 2032938 - RNA, 19 nt, Homo sapiens
  misc_RNA (1)...(19): siRNA sense strand
gcacaucccugcuuguagu

SEQ ID NO: 2032939 - RNA, 19 nt, Homo sapiens
  misc_RNA (1)...(19): siRNA sense strand
gcacuuaccaguaccauau

SEQ ID NO: 2032940 - RNA, 19 nt, Homo sapiens
  misc_RNA (1)...(19): siRNA sense strand
ccaaguguguugacaaaug

SEQ ID NO: 2032941 - RNA, 19 nt, Homo sapiens
  misc_RNA (1)...(19): siRNA sense strand
ggagguguccuuuggagua

SEQ ID NO: 2032942 - RNA, 19 nt, Homo sapiens
  misc_RNA (1)...(19): siRNA sense strand
aaucguacuugcccaauuu

SEQ ID NO: 2032943 - RNA, 19 nt, Homo sapiens
  misc_RNA (1)...(19): siRNA sense strand
gggcccaacuuucagcuuu

SEQ ID NO: 2032944 - RNA, 19 nt, Homo sapiens
  misc_RNA (1)...(19): siRNA sense strand
gaacaacuuccuucuuauc

SEQ ID NO: 2032945 - RNA, 19 nt, Homo sapiens
  misc_RNA (1)...(19): siRNA sense strand
gcagugggcccaacuuuca

SEQ ID NO: 2032946 - RNA, 19 nt, Homo sapiens
  misc_RNA (1)...(19): siRNA sense strand
caaggcagcuacuuagagu

SEQ ID NO: 2032947 - RNA, 19 nt, Homo sapiens
  misc_RNA (1)...(19): siRNA sense strand
agacagcgccucucucauu

SEQ ID NO: 2032948 - RNA, 19 nt, Homo sapiens
  misc_RNA (1)...(19): siRNA sense strand
gaucagcuccaucaaggaa

SEQ ID NO: 2032949 - RNA, 19 nt, Homo sapiens
  misc_RNA (1)...(19): siRNA sense strand
gacuaaagcagauauugaa

SEQ ID NO: 2032950 - RNA, 19 nt, Homo sapiens
  misc_RNA (1)...(19): siRNA sense strand
gcagaaugcagucaugguu

SEQ ID NO: 2032951 - RNA, 19 nt, Homo sapiens
  misc_RNA (1)...(19): siRNA sense strand
gauagaaaaugaaguggaa

SEQ ID NO: 2032952 - RNA, 19 nt, Homo sapiens
  misc_RNA (1)...(19): siRNA sense strand
guucagcacuuaccaguac

SEQ ID NO: 2032953 - RNA, 19 nt, Homo sapiens
  misc_RNA (1)...(19): siRNA sense strand
cucauucagucuuugauua

SEQ ID NO: 2032954 - RNA, 19 nt, Homo sapiens
  misc_RNA (1)...(19): siRNA sense strand
gaagauggagaaguagaaa

SEQ ID NO: 2032955 - RNA, 19 nt, Homo sapiens
  misc_RNA (1)...(19): siRNA sense strand
gcaccucccugucuguagu

SEQ ID NO: 2032956 - RNA, 19 nt, Homo sapiens
  misc_RNA (1)...(19): siRNA sense strand
aggagaacaucuuccagua

SEQ ID NO: 2032957 - RNA, 19 nt, Homo sapiens
  misc_RNA (1)...(19): siRNA sense strand
aaaugaaguggaacucuua

SEQ ID NO: 2032958 - RNA, 19 nt, Homo sapiens
  misc_RNA (1)...(19): siRNA sense strand
gaucgccucugcaaaggau

SEQ ID NO: 2032959 - RNA, 19 nt, Homo sapiens
  misc_RNA (1)...(19): siRNA sense strand
ggaagaagggaucgucugu

SEQ ID NO: 2032960 - RNA, 19 nt, Homo sapiens
  misc_RNA (1)...(19): siRNA sense strand
gagucaaggcagcuacuua

SEQ ID NO: 2032961 - RNA, 19 nt, Homo sapiens
  misc_RNA (1)...(19): siRNA sense strand
agaaugcagucaugguuga

SEQ ID NO: 2032962 - RNA, 19 nt, Homo sapiens
  misc_RNA (1)...(19): siRNA sense strand
ccaggaugcucugugguuu

SEQ ID NO: 2032963 - RNA, 19 nt, Homo sapiens
  misc_RNA (1)...(19): siRNA sense strand
gacagcgccucucucauuc

SEQ ID NO: 2032964 - RNA, 19 nt, Homo sapiens
  misc_RNA (1)...(19): siRNA sense strand
ugacuaaagcagauauuga

SEQ ID NO: 2032965 - RNA, 19 nt, Homo sapiens
  misc_RNA (1)...(19): siRNA sense strand
ugaacaacuuccuucuuau

SEQ ID NO: 2032966 - RNA, 19 nt, Homo sapiens
  misc_RNA (1)...(19): siRNA sense strand
cuuagagucuuacccugua

SEQ ID NO: 2032967 - RNA, 19 nt, Homo sapiens
  misc_RNA (1)...(19): siRNA sense strand
gagugaagauaguccaagu

SEQ ID NO: 2032968 - RNA, 19 nt, Homo sapiens
  misc_RNA (1)...(19): siRNA sense strand
gcacgcaacagaagaaguc

SEQ ID NO: 2032969 - RNA, 19 nt, Homo sapiens
  misc_RNA (1)...(19): siRNA sense strand
caaguguguugacaaaugg

SEQ ID NO: 2032970 - RNA, 19 nt, Homo sapiens
  misc_RNA (1)...(19): siRNA sense strand
guaguaugcaugugugauu

SEQ ID NO: 2032971 - RNA, 19 nt, Homo sapiens
  misc_RNA (1)...(19): siRNA sense strand
cagaacagacuuugugugu

SEQ ID NO: 2032972 - RNA, 19 nt, Homo sapiens
  misc_RNA (1)...(19): siRNA sense strand
ugccauauguguuaucaau

SEQ ID NO: 2032973 - RNA, 19 nt, Homo sapiens
  misc_RNA (1)...(19): siRNA sense strand
caucagcucccuugcaguu

SEQ ID NO: 2032974 - RNA, 19 nt, Homo sapiens
  misc_RNA (1)...(19): siRNA sense strand
gauaguccaaguccuaaga

SEQ ID NO: 2032975 - RNA, 19 nt, Homo sapiens
  misc_RNA (1)...(19): siRNA sense strand
uaccuuauccuccauuuau

SEQ ID NO: 2032976 - RNA, 19 nt, Homo sapiens
  misc_RNA (1)...(19): siRNA sense strand
cgaguuccaugccaagugu

SEQ ID NO: 2032977 - RNA, 19 nt, Homo sapiens
  misc_RNA (1)...(19): siRNA sense strand
aaauuacgaggcccuguua

SEQ ID NO: 2032978 - RNA, 19 nt, Homo sapiens
  misc_RNA (1)...(19): siRNA sense strand
ccauauguguuaucaaugc

SEQ ID NO: 2032979 - RNA, 19 nt, Homo sapiens
  misc_RNA (1)...(19): siRNA sense strand
cuuaacacaugauccuuug

SEQ ID NO: 2032980 - RNA, 19 nt, Homo sapiens
  misc_RNA (1)...(19): siRNA sense strand
gcagauauugaacaacuuc

SEQ ID NO: 2032981 - RNA, 19 nt, Homo sapiens
  misc_RNA (1)...(19): siRNA sense strand
aagcagauauugaacaacu

SEQ ID NO: 2032982 - RNA, 19 nt, Homo sapiens
  misc_RNA (1)...(19): siRNA sense strand
ggagaacaucuuccaguag

SEQ ID NO: 2032983 - RNA, 19 nt, Homo sapiens
  misc_RNA (1)...(19): siRNA sense strand
agaacagacuuugugugua

SEQ ID NO: 2032984 - RNA, 19 nt, Homo sapiens
  misc_RNA (1)...(19): siRNA sense strand
ucuuaucgguucaauccua

SEQ ID NO: 2032985 - RNA, 19 nt, Homo sapiens
  misc_RNA (1)...(19): siRNA sense strand
ggacugacuaaagcagaua

SEQ ID NO: 2032986 - RNA, 19 nt, Homo sapiens
  misc_RNA (1)...(19): siRNA sense strand
ccagcuuacugccauaugu

SEQ ID NO: 2032987 - RNA, 19 nt, Homo sapiens
  misc_RNA (1)...(19): siRNA sense strand
guaccuuauccuccauuua

SEQ ID NO: 2032988 - RNA, 19 nt, Homo sapiens
  misc_RNA (1)...(19): siRNA sense strand
ugccaaguguguugacaaa

SEQ ID NO: 2032989 - RNA, 19 nt, Homo sapiens
  misc_RNA (1)...(19): siRNA sense strand
gcaaagccucguggacuga

SEQ ID NO: 2032990 - RNA, 19 nt, Homo sapiens
  misc_RNA (1)...(19): siRNA sense strand
uuacaggacguaguagaua

SEQ ID NO: 2032991 - RNA, 19 nt, Homo sapiens
  misc_RNA (1)...(19): siRNA sense strand
aagaagggaucgucugucu

SEQ ID NO: 2032992 - RNA, 19 nt, Homo sapiens
  misc_RNA (1)...(19): siRNA sense strand
uaguaugcaugugugauuu

SEQ ID NO: 2032993 - RNA, 19 nt, Homo sapiens
  misc_RNA (1)...(19): siRNA sense strand
ucuagugauccauuucuua

SEQ ID NO: 2032994 - RNA, 19 nt, Homo sapiens
  misc_RNA (1)...(19): siRNA sense strand
uaacaaccaccagucagaa

SEQ ID NO: 2032995 - RNA, 19 nt, Homo sapiens
  misc_RNA (1)...(19): siRNA sense strand
ccagcagaaugcagucaug

SEQ ID NO: 2032996 - RNA, 19 nt, Homo sapiens
  misc_RNA (1)...(19): siRNA sense strand
guugacaaauggcuuaagg

SEQ ID NO: 2032997 - RNA, 19 nt, Homo sapiens
  misc_RNA (1)...(19): siRNA sense strand
gcccaacuuucagcuuuga

SEQ ID NO: 2032998 - RNA, 19 nt, Homo sapiens
  misc_RNA (1)...(19): siRNA sense strand
aagccaacaucacuucuca

SEQ ID NO: 2032999 - RNA, 19 nt, Homo sapiens
  misc_RNA (1)...(19): siRNA sense strand
cuucaggcauguucaguuc

SEQ ID NO: 2033000 - RNA, 19 nt, Homo sapiens
  misc_RNA (1)...(19): siRNA sense strand
cauguucaguucagcacuu

SEQ ID NO: 2033001 - RNA, 19 nt, Homo sapiens
  misc_RNA (1)...(19): siRNA sense strand
aaaucguacuugcccaauu

SEQ ID NO: 2033002 - RNA, 19 nt, Homo sapiens
  misc_RNA (1)...(19): siRNA sense strand
gauauugaacaacuuccuu

SEQ ID NO: 2033003 - RNA, 19 nt, Homo sapiens
  misc_RNA (1)...(19): siRNA sense strand
cagcuuugaauuagaugua

SEQ ID NO: 2033004 - RNA, 19 nt, Homo sapiens
  misc_RNA (1)...(19): siRNA sense strand
ugaaguggaacucuuagga

SEQ ID NO: 2033005 - RNA, 19 nt, Homo sapiens
  misc_RNA (1)...(19): siRNA sense strand
ccagcucccucaccaccaa

SEQ ID NO: 2033006 - RNA, 19 nt, Homo sapiens
  misc_RNA (1)...(19): siRNA sense strand
cuagugauccauuucuuau

SEQ ID NO: 2033007 - RNA, 19 nt, Homo sapiens
  misc_RNA (1)...(19): siRNA sense strand
cccaucauccuccucauuu

SEQ ID NO: 2033008 - RNA, 19 nt, Homo sapiens
  misc_RNA (1)...(19): siRNA sense strand
caaauggcuuaaggcaaau

SEQ ID NO: 2033009 - RNA, 19 nt, Homo sapiens
  misc_RNA (1)...(19): siRNA sense strand
agaagaaguccuccuguca

SEQ ID NO: 2033010 - RNA, 19 nt, Homo sapiens
  misc_RNA (1)...(19): siRNA sense strand
uugcaguucuuaacacaug

SEQ ID NO: 2033011 - RNA, 19 nt, Homo sapiens
  misc_RNA (1)...(19): siRNA sense strand
ccaucauccuccucauuug

SEQ ID NO: 2033012 - RNA, 19 nt, Homo sapiens
  misc_RNA (1)...(19): siRNA sense strand
caggccaguuugucccuuu

SEQ ID NO: 2033013 - RNA, 19 nt, Homo sapiens
  misc_RNA (1)...(19): siRNA sense strand
ccucucucauucagucuuu

SEQ ID NO: 2033014 - RNA, 19 nt, Homo sapiens
  misc_RNA (1)...(19): siRNA sense strand
ggcccaacuuucagcuuug

SEQ ID NO: 2033015 - RNA, 19 nt, Homo sapiens
  misc_RNA (1)...(19): siRNA sense strand
cuuaucgguucaauccuaa

SEQ ID NO: 2033016 - RNA, 19 nt, Homo sapiens
  misc_RNA (1)...(19): siRNA sense strand
ccacaugggauuccacucu

SEQ ID NO: 2033017 - RNA, 19 nt, Homo sapiens
  misc_RNA (1)...(19): siRNA sense strand
cuuacugccauauguguua

SEQ ID NO: 2033018 - RNA, 19 nt, Homo sapiens
  misc_RNA (1)...(19): siRNA sense strand
agugauccauuucuuauac

SEQ ID NO: 2033019 - RNA, 19 nt, Homo sapiens
  misc_RNA (1)...(19): siRNA sense strand
uagugugccuccuccaaug

SEQ ID NO: 2033020 - RNA, 19 nt, Homo sapiens
  misc_RNA (1)...(19): siRNA sense strand
uugccgagcugaugcuuca

SEQ ID NO: 2033021 - RNA, 19 nt, Homo sapiens
  misc_RNA (1)...(19): siRNA sense strand
cuaacaaccaccagucaga

SEQ ID NO: 2033022 - RNA, 19 nt, Homo sapiens
  misc_RNA (1)...(19): siRNA sense strand
gcuuugaauuagauguaga

SEQ ID NO: 2033023 - RNA, 19 nt, Homo sapiens
  misc_RNA (1)...(19): siRNA sense strand
guagugugccuccuccaau

SEQ ID NO: 2033024 - RNA, 19 nt, Homo sapiens
  misc_RNA (1)...(19): siRNA sense strand
ccaauuugccgagcugaug

SEQ ID NO: 2033025 - RNA, 19 nt, Homo sapiens
  misc_RNA (1)...(19): siRNA sense strand
uggcuuaaggcaaaucgua

SEQ ID NO: 2033026 - RNA, 19 nt, Homo sapiens
  misc_RNA (1)...(19): siRNA sense strand
uaacacaugauccuuugca

SEQ ID NO: 2033027 - RNA, 19 nt, Homo sapiens
  misc_RNA (1)...(19): siRNA sense strand
agaagugcaucgggauuca

SEQ ID NO: 2033028 - RNA, 19 nt, Homo sapiens
  misc_RNA (1)...(19): siRNA sense strand
aaaaugaaguggaacucuu

SEQ ID NO: 2033029 - RNA, 19 nt, Homo sapiens
  misc_RNA (1)...(19): siRNA sense strand
gacuuuguguguaguaugc

SEQ ID NO: 2033030 - RNA, 19 nt, Homo sapiens
  misc_RNA (1)...(19): siRNA sense strand
cuaaagcagauauugaaca

SEQ ID NO: 2033031 - RNA, 19 nt, Homo sapiens
  misc_RNA (1)...(19): siRNA sense strand
gaccaagccaacaucacuu

SEQ ID NO: 2033032 - RNA, 19 nt, Homo sapiens
  misc_RNA (1)...(19): siRNA sense strand
gaacagacuuuguguguag

SEQ ID NO: 2033033 - RNA, 19 nt, Homo sapiens
  misc_RNA (1)...(19): siRNA sense strand
acaaauggcuuaaggcaaa

SEQ ID NO: 2033034 - RNA, 19 nt, Homo sapiens
  misc_RNA (1)...(19): siRNA sense strand
uguagaagauggagaagua

SEQ ID NO: 2033035 - RNA, 19 nt, Homo sapiens
  misc_RNA (1)...(19): siRNA sense strand
uugaacaacuuccuucuua

SEQ ID NO: 2033036 - RNA, 19 nt, Homo sapiens
  misc_RNA (1)...(19): siRNA sense strand
gcagcuacuuagagucuua

SEQ ID NO: 2033037 - RNA, 19 nt, Homo sapiens
  misc_RNA (1)...(19): siRNA sense strand
gcacaucccugcuuguagu

SEQ ID NO: 2033038 - RNA, 19 nt, Homo sapiens
  misc_RNA (1)...(19): siRNA sense strand
gcacuuaccaguaccauau

SEQ ID NO: 2033039 - RNA, 19 nt, Homo sapiens
  misc_RNA (1)...(19): siRNA sense strand
ccaaguguguugacaaaug

SEQ ID NO: 2033040 - RNA, 19 nt, Homo sapiens
  misc_RNA (1)...(19): siRNA sense strand
ggagguguccuuuggagua

SEQ ID NO: 2033041 - RNA, 19 nt, Homo sapiens
  misc_RNA (1)...(19): siRNA sense strand
aaucguacuugcccaauuu

SEQ ID NO: 2033042 - RNA, 19 nt, Homo sapiens
  misc_RNA (1)...(19): siRNA sense strand
gggcccaacuuucagcuuu

SEQ ID NO: 2033043 - RNA, 19 nt, Homo sapiens
  misc_RNA (1)...(19): siRNA sense strand
gaacaacuuccuucuuauc

SEQ ID NO: 2033044 - RNA, 19 nt, Homo sapiens
  misc_RNA (1)...(19): siRNA sense strand
gcagugggcccaacuuuca

SEQ ID NO: 2033045 - RNA, 19 nt, Homo sapiens
  misc_RNA (1)...(19): siRNA sense strand
caaggcagcuacuuagagu

SEQ ID NO: 2033046 - RNA, 19 nt, Homo sapiens
  misc_RNA (1)...(19): siRNA sense strand
gaucagcuccaucaaggaa

SEQ ID NO: 2033047 - RNA, 19 nt, Homo sapiens
  misc_RNA (1)...(19): siRNA sense strand
gacuaaagcagauauugaa

SEQ ID NO: 2033048 - RNA, 19 nt, Homo sapiens
  misc_RNA (1)...(19): siRNA sense strand
gcagaaugcagucaugguu

SEQ ID NO: 2033049 - RNA, 19 nt, Homo sapiens
  misc_RNA (1)...(19): siRNA sense strand
gauagaaaaugaaguggaa

SEQ ID NO: 2033050 - RNA, 19 nt, Homo sapiens
  misc_RNA (1)...(19): siRNA sense strand
guucagcacuuaccaguac

SEQ ID NO: 2033051 - RNA, 19 nt, Homo sapiens
  misc_RNA (1)...(19): siRNA sense strand
gaagauggagaaguagaaa

SEQ ID NO: 2033052 - RNA, 19 nt, Homo sapiens
  misc_RNA (1)...(19): siRNA sense strand
gcaccucccugucuguagu

SEQ ID NO: 2033053 - RNA, 19 nt, Homo sapiens
  misc_RNA (1)...(19): siRNA sense strand
aggagaacaucuuccagua

SEQ ID NO: 2033054 - RNA, 19 nt, Homo sapiens
  misc_RNA (1)...(19): siRNA sense strand
aaaugaaguggaacucuua

SEQ ID NO: 2033055 - RNA, 19 nt, Homo sapiens
  misc_RNA (1)...(19): siRNA sense strand
gaucgccucugcaaaggau

SEQ ID NO: 2033056 - RNA, 19 nt, Homo sapiens
  misc_RNA (1)...(19): siRNA sense strand
ggaagaagggaucgucugu

SEQ ID NO: 2033057 - RNA, 19 nt, Homo sapiens
  misc_RNA (1)...(19): siRNA sense strand
gagucaaggcagcuacuua

SEQ ID NO: 2033058 - RNA, 19 nt, Homo sapiens
  misc_RNA (1)...(19): siRNA sense strand
agaaugcagucaugguuga

SEQ ID NO: 2033059 - RNA, 19 nt, Homo sapiens
  misc_RNA (1)...(19): siRNA sense strand
ccaggaugcucugugguuu

SEQ ID NO: 2033060 - RNA, 19 nt, Homo sapiens
  misc_RNA (1)...(19): siRNA sense strand
ugacuaaagcagauauuga

SEQ ID NO: 2033061 - RNA, 19 nt, Homo sapiens
  misc_RNA (1)...(19): siRNA sense strand
ugaacaacuuccuucuuau

SEQ ID NO: 2033062 - RNA, 19 nt, Homo sapiens
  misc_RNA (1)...(19): siRNA sense strand
cuuagagucuuacccugua

SEQ ID NO: 2033063 - RNA, 19 nt, Homo sapiens
  misc_RNA (1)...(19): siRNA sense strand
ugccauauguguuaucaau

SEQ ID NO: 2033064 - RNA, 19 nt, Homo sapiens
  misc_RNA (1)...(19): siRNA sense strand
caaguguguugacaaaugg

SEQ ID NO: 2033065 - RNA, 19 nt, Homo sapiens
  misc_RNA (1)...(19): siRNA sense strand
gcacgcaacagaagaaguc

SEQ ID NO: 2033066 - RNA, 19 nt, Homo sapiens
  misc_RNA (1)...(19): siRNA sense strand
guaguaugcaugugugauu

SEQ ID NO: 2033067 - RNA, 19 nt, Homo sapiens
  misc_RNA (1)...(19): siRNA sense strand
cagaacagacuuugugugu

SEQ ID NO: 2033068 - RNA, 19 nt, Homo sapiens
  misc_RNA (1)...(19): siRNA sense strand
caucagcucccuugcaguu

SEQ ID NO: 2033069 - RNA, 19 nt, Homo sapiens
  misc_RNA (1)...(19): siRNA sense strand
uaccuuauccuccauuuau

SEQ ID NO: 2033070 - RNA, 19 nt, Homo sapiens
  misc_RNA (1)...(19): siRNA sense strand
cgaguuccaugccaagugu

SEQ ID NO: 2033071 - RNA, 19 nt, Homo sapiens
  misc_RNA (1)...(19): siRNA sense strand
aaauuacgaggcccuguua

SEQ ID NO: 2033072 - RNA, 19 nt, Homo sapiens
  misc_RNA (1)...(19): siRNA sense strand
ccauauguguuaucaaugc

SEQ ID NO: 2033073 - RNA, 19 nt, Homo sapiens
  misc_RNA (1)...(19): siRNA sense strand
cuuaacacaugauccuuug

SEQ ID NO: 2033074 - RNA, 19 nt, Homo sapiens
  misc_RNA (1)...(19): siRNA sense strand
gcagauauugaacaacuuc

SEQ ID NO: 2033075 - RNA, 19 nt, Homo sapiens
  misc_RNA (1)...(19): siRNA sense strand
aagcagauauugaacaacu

SEQ ID NO: 2033076 - RNA, 19 nt, Homo sapiens
  misc_RNA (1)...(19): siRNA sense strand
ggagaacaucuuccaguag

SEQ ID NO: 2033077 - RNA, 19 nt, Homo sapiens
  misc_RNA (1)...(19): siRNA sense strand
agaacagacuuugugugua

SEQ ID NO: 2033078 - RNA, 19 nt, Homo sapiens
  misc_RNA (1)...(19): siRNA sense strand
ucuuaucgguucaauccua

SEQ ID NO: 2033079 - RNA, 19 nt, Homo sapiens
  misc_RNA (1)...(19): siRNA sense strand
ggacugacuaaagcagaua

SEQ ID NO: 2033080 - RNA, 19 nt, Homo sapiens
  misc_RNA (1)...(19): siRNA sense strand
ccagcuuacugccauaugu

SEQ ID NO: 2033081 - RNA, 19 nt, Homo sapiens
  misc_RNA (1)...(19): siRNA sense strand
guaccuuauccuccauuua

SEQ ID NO: 2033082 - RNA, 19 nt, Homo sapiens
  misc_RNA (1)...(19): siRNA sense strand
ugccaaguguguugacaaa

SEQ ID NO: 2033083 - RNA, 19 nt, Homo sapiens
  misc_RNA (1)...(19): siRNA sense strand
gcaaagccucguggacuga

SEQ ID NO: 2033084 - RNA, 19 nt, Homo sapiens
  misc_RNA (1)...(19): siRNA sense strand
uuacaggacguaguagaua

SEQ ID NO: 2033085 - RNA, 19 nt, Homo sapiens
  misc_RNA (1)...(19): siRNA sense strand
aagaagggaucgucugucu

SEQ ID NO: 2033086 - RNA, 19 nt, Homo sapiens
  misc_RNA (1)...(19): siRNA sense strand
uaguaugcaugugugauuu

SEQ ID NO: 2033087 - RNA, 19 nt, Homo sapiens
  misc_RNA (1)...(19): siRNA sense strand
ucuagugauccauuucuua

SEQ ID NO: 2033088 - RNA, 19 nt, Homo sapiens
  misc_RNA (1)...(19): siRNA sense strand
uaacaaccaccagucagaa

SEQ ID NO: 2033089 - RNA, 19 nt, Homo sapiens
  misc_RNA (1)...(19): siRNA sense strand
ccagcagaaugcagucaug

SEQ ID NO: 2033090 - RNA, 19 nt, Homo sapiens
  misc_RNA (1)...(19): siRNA sense strand
guugacaaauggcuuaagg

SEQ ID NO: 2033091 - RNA, 19 nt, Homo sapiens
  misc_RNA (1)...(19): siRNA sense strand
aagccaacaucacuucuca

SEQ ID NO: 2033092 - RNA, 19 nt, Homo sapiens
  misc_RNA (1)...(19): siRNA sense strand
gcccaacuuucagcuuuga

SEQ ID NO: 2033093 - RNA, 19 nt, Homo sapiens
  misc_RNA (1)...(19): siRNA sense strand
cuucaggcauguucaguuc

SEQ ID NO: 2033094 - RNA, 19 nt, Homo sapiens
  misc_RNA (1)...(19): siRNA sense strand
cauguucaguucagcacuu

SEQ ID NO: 2033095 - RNA, 19 nt, Homo sapiens
  misc_RNA (1)...(19): siRNA sense strand
aaaucguacuugcccaauu

SEQ ID NO: 2033096 - RNA, 19 nt, Homo sapiens
  misc_RNA (1)...(19): siRNA sense strand
gauauugaacaacuuccuu

SEQ ID NO: 2033097 - RNA, 19 nt, Homo sapiens
  misc_RNA (1)...(19): siRNA sense strand
cagcuuugaauuagaugua

SEQ ID NO: 2033098 - RNA, 19 nt, Homo sapiens
  misc_RNA (1)...(19): siRNA sense strand
ugaaguggaacucuuagga

SEQ ID NO: 2033099 - RNA, 19 nt, Homo sapiens
  misc_RNA (1)...(19): siRNA sense strand
cuagugauccauuucuuau

SEQ ID NO: 2033100 - RNA, 19 nt, Homo sapiens
  misc_RNA (1)...(19): siRNA sense strand
cccaucauccuccucauuu

SEQ ID NO: 2033101 - RNA, 19 nt, Homo sapiens
  misc_RNA (1)...(19): siRNA sense strand
caaauggcuuaaggcaaau

SEQ ID NO: 2033102 - RNA, 19 nt, Homo sapiens
  misc_RNA (1)...(19): siRNA sense strand
agaagaaguccuccuguca

SEQ ID NO: 2033103 - RNA, 19 nt, Homo sapiens
  misc_RNA (1)...(19): siRNA sense strand
uugcaguucuuaacacaug

SEQ ID NO: 2033104 - RNA, 19 nt, Homo sapiens
  misc_RNA (1)...(19): siRNA sense strand
ccaucauccuccucauuug

SEQ ID NO: 2033105 - RNA, 19 nt, Homo sapiens
  misc_RNA (1)...(19): siRNA sense strand
caggccaguuugucccuuu

SEQ ID NO: 2033106 - RNA, 19 nt, Homo sapiens
  misc_RNA (1)...(19): siRNA sense strand
ggcccaacuuucagcuuug

SEQ ID NO: 2033107 - RNA, 19 nt, Homo sapiens
  misc_RNA (1)...(19): siRNA sense strand
cuuaucgguucaauccuaa

SEQ ID NO: 2033108 - RNA, 19 nt, Homo sapiens
  misc_RNA (1)...(19): siRNA sense strand
ccacaugggauuccacucu

SEQ ID NO: 2033109 - RNA, 19 nt, Homo sapiens
  misc_RNA (1)...(19): siRNA sense strand
cuuacugccauauguguua

SEQ ID NO: 2033110 - RNA, 19 nt, Homo sapiens
  misc_RNA (1)...(19): siRNA sense strand
agugauccauuucuuauac

SEQ ID NO: 2033111 - RNA, 19 nt, Homo sapiens
  misc_RNA (1)...(19): siRNA sense strand
uagugugccuccuccaaug

SEQ ID NO: 2033112 - RNA, 19 nt, Homo sapiens
  misc_RNA (1)...(19): siRNA sense strand
uugccgagcugaugcuuca

SEQ ID NO: 2033113 - RNA, 19 nt, Homo sapiens
  misc_RNA (1)...(19): siRNA sense strand
cuaacaaccaccagucaga

SEQ ID NO: 2033114 - RNA, 19 nt, Homo sapiens
  misc_RNA (1)...(19): siRNA sense strand
gcuuugaauuagauguaga

SEQ ID NO: 2033115 - RNA, 19 nt, Homo sapiens
  misc_RNA (1)...(19): siRNA sense strand
guagugugccuccuccaau

SEQ ID NO: 2033116 - RNA, 19 nt, Homo sapiens
  misc_RNA (1)...(19): siRNA sense strand
ccaauuugccgagcugaug

SEQ ID NO: 2033117 - RNA, 19 nt, Homo sapiens
  misc_RNA (1)...(19): siRNA sense strand
uggcuuaaggcaaaucgua

SEQ ID NO: 2033118 - RNA, 19 nt, Homo sapiens
  misc_RNA (1)...(19): siRNA sense strand
uaacacaugauccuuugca

SEQ ID NO: 2033119 - RNA, 19 nt, Homo sapiens
  misc_RNA (1)...(19): siRNA sense strand
agaagugcaucgggauuca

SEQ ID NO: 2033120 - RNA, 19 nt, Homo sapiens
  misc_RNA (1)...(19): siRNA sense strand
aaaaugaaguggaacucuu

SEQ ID NO: 2033121 - RNA, 19 nt, Homo sapiens
  misc_RNA (1)...(19): siRNA sense strand
gacuuuguguguaguaugc

SEQ ID NO: 2033122 - RNA, 19 nt, Homo sapiens
  misc_RNA (1)...(19): siRNA sense strand
cuaaagcagauauugaaca

SEQ ID NO: 2033123 - RNA, 19 nt, Homo sapiens
  misc_RNA (1)...(19): siRNA sense strand
gaccaagccaacaucacuu

SEQ ID NO: 2033124 - RNA, 19 nt, Homo sapiens
  misc_RNA (1)...(19): siRNA sense strand
cgaccaagccaacaucacu

SEQ ID NO: 2033125 - RNA, 19 nt, Homo sapiens
  misc_RNA (1)...(19): siRNA sense strand
agaagauggagaaguagaa

SEQ ID NO: 2033126 - RNA, 19 nt, Homo sapiens
  misc_RNA (1)...(19): siRNA sense strand
aggcuuacaggacguagua

SEQ ID NO: 2033127 - RNA, 19 nt, Homo sapiens
  misc_RNA (1)...(19): siRNA sense strand
gagguguccuuuggaguac

SEQ ID NO: 2033128 - RNA, 19 nt, Homo sapiens
  misc_RNA (1)...(19): siRNA sense strand
uauacauccuccucaccuu

SEQ ID NO: 2033129 - RNA, 19 nt, Homo sapiens
  misc_RNA (1)...(19): siRNA sense strand
gugauccauuucuuauaca

SEQ ID NO: 2033130 - RNA, 19 nt, Homo sapiens
  misc_RNA (1)...(19): siRNA sense strand
agauguagaagauggagaa

SEQ ID NO: 2033131 - RNA, 19 nt, Homo sapiens
  misc_RNA (1)...(19): siRNA sense strand
ucagcuccaucaaggaaca

SEQ ID NO: 2033132 - RNA, 19 nt, Homo sapiens
  misc_RNA (1)...(19): siRNA sense strand
gaacagacuuuguguguag

SEQ ID NO: 2033133 - RNA, 19 nt, Homo sapiens
  misc_RNA (1)...(19): siRNA sense strand
acaaauggcuuaaggcaaa

SEQ ID NO: 2033134 - RNA, 19 nt, Homo sapiens
  misc_RNA (1)...(19): siRNA sense strand
gaagauaguccaaguccua

SEQ ID NO: 2033135 - RNA, 19 nt, Homo sapiens
  misc_RNA (1)...(19): siRNA sense strand
uguagaagauggagaagua

SEQ ID NO: 2033136 - RNA, 19 nt, Homo sapiens
  misc_RNA (1)...(19): siRNA sense strand
uugaacaacuuccuucuua

SEQ ID NO: 2033137 - RNA, 19 nt, Homo sapiens
  misc_RNA (1)...(19): siRNA sense strand
gcagcuacuuagagucuua

SEQ ID NO: 2033138 - RNA, 19 nt, Homo sapiens
  misc_RNA (1)...(19): siRNA sense strand
gcacaucccugcuuguagu

SEQ ID NO: 2033139 - RNA, 19 nt, Homo sapiens
  misc_RNA (1)...(19): siRNA sense strand
gcacuuaccaguaccauau

SEQ ID NO: 2033140 - RNA, 19 nt, Homo sapiens
  misc_RNA (1)...(19): siRNA sense strand
ccaaguguguugacaaaug

SEQ ID NO: 2033141 - RNA, 19 nt, Homo sapiens
  misc_RNA (1)...(19): siRNA sense strand
ggagguguccuuuggagua

SEQ ID NO: 2033142 - RNA, 19 nt, Homo sapiens
  misc_RNA (1)...(19): siRNA sense strand
aaucguacuugcccaauuu

SEQ ID NO: 2033143 - RNA, 19 nt, Homo sapiens
  misc_RNA (1)...(19): siRNA sense strand
gggcccaacuuucagcuuu

SEQ ID NO: 2033144 - RNA, 19 nt, Homo sapiens
  misc_RNA (1)...(19): siRNA sense strand
gaacaacuuccuucuuauc

SEQ ID NO: 2033145 - RNA, 19 nt, Homo sapiens
  misc_RNA (1)...(19): siRNA sense strand
gcagugggcccaacuuuca

SEQ ID NO: 2033146 - RNA, 19 nt, Homo sapiens
  misc_RNA (1)...(19): siRNA sense strand
caaggcagcuacuuagagu

SEQ ID NO: 2033147 - RNA, 19 nt, Homo sapiens
  misc_RNA (1)...(19): siRNA sense strand
agacagcgccucucucauu

SEQ ID NO: 2033148 - RNA, 19 nt, Homo sapiens
  misc_RNA (1)...(19): siRNA sense strand
gaucagcuccaucaaggaa

SEQ ID NO: 2033149 - RNA, 19 nt, Homo sapiens
  misc_RNA (1)...(19): siRNA sense strand
gacuaaagcagauauugaa

SEQ ID NO: 2033150 - RNA, 19 nt, Homo sapiens
  misc_RNA (1)...(19): siRNA sense strand
gcagaaugcagucaugguu

SEQ ID NO: 2033151 - RNA, 19 nt, Homo sapiens
  misc_RNA (1)...(19): siRNA sense strand
gauagaaaaugaaguggaa

SEQ ID NO: 2033152 - RNA, 19 nt, Homo sapiens
  misc_RNA (1)...(19): siRNA sense strand
guucagcacuuaccaguac

SEQ ID NO: 2033153 - RNA, 19 nt, Homo sapiens
  misc_RNA (1)...(19): siRNA sense strand
cucauucagucuuugauua

SEQ ID NO: 2033154 - RNA, 19 nt, Homo sapiens
  misc_RNA (1)...(19): siRNA sense strand
gaagauggagaaguagaaa

SEQ ID NO: 2033155 - RNA, 19 nt, Homo sapiens
  misc_RNA (1)...(19): siRNA sense strand
gcaccucccugucuguagu

SEQ ID NO: 2033156 - RNA, 19 nt, Homo sapiens
  misc_RNA (1)...(19): siRNA sense strand
aggagaacaucuuccagua

SEQ ID NO: 2033157 - RNA, 19 nt, Homo sapiens
  misc_RNA (1)...(19): siRNA sense strand
aaaugaaguggaacucuua

SEQ ID NO: 2033158 - RNA, 19 nt, Homo sapiens
  misc_RNA (1)...(19): siRNA sense strand
gaucgccucugcaaaggau

SEQ ID NO: 2033159 - RNA, 19 nt, Homo sapiens
  misc_RNA (1)...(19): siRNA sense strand
ggaagaagggaucgucugu

SEQ ID NO: 2033160 - RNA, 19 nt, Homo sapiens
  misc_RNA (1)...(19): siRNA sense strand
gagucaaggcagcuacuua

SEQ ID NO: 2033161 - RNA, 19 nt, Homo sapiens
  misc_RNA (1)...(19): siRNA sense strand
agaaugcagucaugguuga

SEQ ID NO: 2033162 - RNA, 19 nt, Homo sapiens
  misc_RNA (1)...(19): siRNA sense strand
ccaggaugcucugugguuu

SEQ ID NO: 2033163 - RNA, 19 nt, Homo sapiens
  misc_RNA (1)...(19): siRNA sense strand
gacagcgccucucucauuc

SEQ ID NO: 2033164 - RNA, 19 nt, Homo sapiens
  misc_RNA (1)...(19): siRNA sense strand
ugacuaaagcagauauuga

SEQ ID NO: 2033165 - RNA, 19 nt, Homo sapiens
  misc_RNA (1)...(19): siRNA sense strand
ugaacaacuuccuucuuau

SEQ ID NO: 2033166 - RNA, 19 nt, Homo sapiens
  misc_RNA (1)...(19): siRNA sense strand
cuuagagucuuacccugua

SEQ ID NO: 2033167 - RNA, 19 nt, Homo sapiens
  misc_RNA (1)...(19): siRNA sense strand
gagugaagauaguccaagu

SEQ ID NO: 2033168 - RNA, 19 nt, Homo sapiens
  misc_RNA (1)...(19): siRNA sense strand
gcacgcaacagaagaaguc

SEQ ID NO: 2033169 - RNA, 19 nt, Homo sapiens
  misc_RNA (1)...(19): siRNA sense strand
caaguguguugacaaaugg

SEQ ID NO: 2033170 - RNA, 19 nt, Homo sapiens
  misc_RNA (1)...(19): siRNA sense strand
guaguaugcaugugugauu

SEQ ID NO: 2033171 - RNA, 19 nt, Homo sapiens
  misc_RNA (1)...(19): siRNA sense strand
cagaacagacuuugugugu

SEQ ID NO: 2033172 - RNA, 19 nt, Homo sapiens
  misc_RNA (1)...(19): siRNA sense strand
ugccauauguguuaucaau

SEQ ID NO: 2033173 - RNA, 19 nt, Homo sapiens
  misc_RNA (1)...(19): siRNA sense strand
caucagcucccuugcaguu

SEQ ID NO: 2033174 - RNA, 19 nt, Homo sapiens
  misc_RNA (1)...(19): siRNA sense strand
gauaguccaaguccuaaga

SEQ ID NO: 2033175 - RNA, 19 nt, Homo sapiens
  misc_RNA (1)...(19): siRNA sense strand
uaccuuauccuccauuuau

SEQ ID NO: 2033176 - RNA, 19 nt, Homo sapiens
  misc_RNA (1)...(19): siRNA sense strand
cgaguuccaugccaagugu

SEQ ID NO: 2033177 - RNA, 19 nt, Homo sapiens
  misc_RNA (1)...(19): siRNA sense strand
aaauuacgaggcccuguua

SEQ ID NO: 2033178 - RNA, 19 nt, Homo sapiens
  misc_RNA (1)...(19): siRNA sense strand
ccauauguguuaucaaugc

SEQ ID NO: 2033179 - RNA, 19 nt, Homo sapiens
  misc_RNA (1)...(19): siRNA sense strand
cuuaacacaugauccuuug

SEQ ID NO: 2033180 - RNA, 19 nt, Homo sapiens
  misc_RNA (1)...(19): siRNA sense strand
gcagauauugaacaacuuc

SEQ ID NO: 2033181 - RNA, 19 nt, Homo sapiens
  misc_RNA (1)...(19): siRNA sense strand
aagcagauauugaacaacu

SEQ ID NO: 2033182 - RNA, 19 nt, Homo sapiens
  misc_RNA (1)...(19): siRNA sense strand
ggagaacaucuuccaguag

SEQ ID NO: 2033183 - RNA, 19 nt, Homo sapiens
  misc_RNA (1)...(19): siRNA sense strand
agaacagacuuugugugua

SEQ ID NO: 2033184 - RNA, 19 nt, Homo sapiens
  misc_RNA (1)...(19): siRNA sense strand
ucuuaucgguucaauccua

SEQ ID NO: 2033185 - RNA, 19 nt, Homo sapiens
  misc_RNA (1)...(19): siRNA sense strand
ggacugacuaaagcagaua

SEQ ID NO: 2033186 - RNA, 19 nt, Homo sapiens
  misc_RNA (1)...(19): siRNA sense strand
ccagcuuacugccauaugu

SEQ ID NO: 2033187 - RNA, 19 nt, Homo sapiens
  misc_RNA (1)...(19): siRNA sense strand
guaccuuauccuccauuua

SEQ ID NO: 2033188 - RNA, 19 nt, Homo sapiens
  misc_RNA (1)...(19): siRNA sense strand
ugccaaguguguugacaaa

SEQ ID NO: 2033189 - RNA, 19 nt, Homo sapiens
  misc_RNA (1)...(19): siRNA sense strand
gcaaagccucguggacuga

SEQ ID NO: 2033190 - RNA, 19 nt, Homo sapiens
  misc_RNA (1)...(19): siRNA sense strand
uuacaggacguaguagaua

SEQ ID NO: 2033191 - RNA, 19 nt, Homo sapiens
  misc_RNA (1)...(19): siRNA sense strand
aagaagggaucgucugucu

SEQ ID NO: 2033192 - RNA, 19 nt, Homo sapiens
  misc_RNA (1)...(19): siRNA sense strand
uaguaugcaugugugauuu

SEQ ID NO: 2033193 - RNA, 19 nt, Homo sapiens
  misc_RNA (1)...(19): siRNA sense strand
ucuagugauccauuucuua

SEQ ID NO: 2033194 - RNA, 19 nt, Homo sapiens
  misc_RNA (1)...(19): siRNA sense strand
uaacaaccaccagucagaa

SEQ ID NO: 2033195 - RNA, 19 nt, Homo sapiens
  misc_RNA (1)...(19): siRNA sense strand
ccagcagaaugcagucaug

SEQ ID NO: 2033196 - RNA, 19 nt, Homo sapiens
  misc_RNA (1)...(19): siRNA sense strand
guugacaaauggcuuaagg

SEQ ID NO: 2033197 - RNA, 19 nt, Homo sapiens
  misc_RNA (1)...(19): siRNA sense strand
gcccaacuuucagcuuuga

SEQ ID NO: 2033198 - RNA, 19 nt, Homo sapiens
  misc_RNA (1)...(19): siRNA sense strand
aagccaacaucacuucuca

SEQ ID NO: 2033199 - RNA, 19 nt, Homo sapiens
  misc_RNA (1)...(19): siRNA sense strand
cuucaggcauguucaguuc

SEQ ID NO: 2033200 - RNA, 19 nt, Homo sapiens
  misc_RNA (1)...(19): siRNA sense strand
cauguucaguucagcacuu

SEQ ID NO: 2033201 - RNA, 19 nt, Homo sapiens
  misc_RNA (1)...(19): siRNA sense strand
aaaucguacuugcccaauu

SEQ ID NO: 2033202 - RNA, 19 nt, Homo sapiens
  misc_RNA (1)...(19): siRNA sense strand
gauauugaacaacuuccuu

SEQ ID NO: 2033203 - RNA, 19 nt, Homo sapiens
  misc_RNA (1)...(19): siRNA sense strand
cagcuuugaauuagaugua

SEQ ID NO: 2033204 - RNA, 19 nt, Homo sapiens
  misc_RNA (1)...(19): siRNA sense strand
ugaaguggaacucuuagga

SEQ ID NO: 2033205 - RNA, 19 nt, Homo sapiens
  misc_RNA (1)...(19): siRNA sense strand
ccagcucccucaccaccaa

SEQ ID NO: 2033206 - RNA, 19 nt, Homo sapiens
  misc_RNA (1)...(19): siRNA sense strand
cuagugauccauuucuuau

SEQ ID NO: 2033207 - RNA, 19 nt, Homo sapiens
  misc_RNA (1)...(19): siRNA sense strand
cccaucauccuccucauuu

SEQ ID NO: 2033208 - RNA, 19 nt, Homo sapiens
  misc_RNA (1)...(19): siRNA sense strand
caaauggcuuaaggcaaau

SEQ ID NO: 2033209 - RNA, 19 nt, Homo sapiens
  misc_RNA (1)...(19): siRNA sense strand
agaagaaguccuccuguca

SEQ ID NO: 2033210 - RNA, 19 nt, Homo sapiens
  misc_RNA (1)...(19): siRNA sense strand
uugcaguucuuaacacaug

SEQ ID NO: 2033211 - RNA, 19 nt, Homo sapiens
  misc_RNA (1)...(19): siRNA sense strand
ccaucauccuccucauuug

SEQ ID NO: 2033212 - RNA, 19 nt, Homo sapiens
  misc_RNA (1)...(19): siRNA sense strand
caggccaguuugucccuuu

SEQ ID NO: 2033213 - RNA, 19 nt, Homo sapiens
  misc_RNA (1)...(19): siRNA sense strand
ccucucucauucagucuuu

SEQ ID NO: 2033214 - RNA, 19 nt, Homo sapiens
  misc_RNA (1)...(19): siRNA sense strand
ggcccaacuuucagcuuug

SEQ ID NO: 2033215 - RNA, 19 nt, Homo sapiens
  misc_RNA (1)...(19): siRNA sense strand
cuuaucgguucaauccuaa

SEQ ID NO: 2033216 - RNA, 19 nt, Homo sapiens
  misc_RNA (1)...(19): siRNA sense strand
ccacaugggauuccacucu

SEQ ID NO: 2033217 - RNA, 19 nt, Homo sapiens
  misc_RNA (1)...(19): siRNA sense strand
cuuacugccauauguguua

SEQ ID NO: 2033218 - RNA, 19 nt, Homo sapiens
  misc_RNA (1)...(19): siRNA sense strand
agugauccauuucuuauac

SEQ ID NO: 2033219 - RNA, 19 nt, Homo sapiens
  misc_RNA (1)...(19): siRNA sense strand
uagugugccuccuccaaug

SEQ ID NO: 2033220 - RNA, 19 nt, Homo sapiens
  misc_RNA (1)...(19): siRNA sense strand
uugccgagcugaugcuuca

SEQ ID NO: 2033221 - RNA, 19 nt, Homo sapiens
  misc_RNA (1)...(19): siRNA sense strand
cuaacaaccaccagucaga

SEQ ID NO: 2033222 - RNA, 19 nt, Homo sapiens
  misc_RNA (1)...(19): siRNA sense strand
gcuuugaauuagauguaga

SEQ ID NO: 2033223 - RNA, 19 nt, Homo sapiens
  misc_RNA (1)...(19): siRNA sense strand
guagugugccuccuccaau

SEQ ID NO: 2033224 - RNA, 19 nt, Homo sapiens
  misc_RNA (1)...(19): siRNA sense strand
ccaauuugccgagcugaug

SEQ ID NO: 2033225 - RNA, 19 nt, Homo sapiens
  misc_RNA (1)...(19): siRNA sense strand
uggcuuaaggcaaaucgua

SEQ ID NO: 2033226 - RNA, 19 nt, Homo sapiens
  misc_RNA (1)...(19): siRNA sense strand
uaacacaugauccuuugca

SEQ ID NO: 2033227 - RNA, 19 nt, Homo sapiens
  misc_RNA (1)...(19): siRNA sense strand
agaagugcaucgggauuca

SEQ ID NO: 2033228 - RNA, 19 nt, Homo sapiens
  misc_RNA (1)...(19): siRNA sense strand
aaaaugaaguggaacucuu

SEQ ID NO: 2033229 - RNA, 19 nt, Homo sapiens
  misc_RNA (1)...(19): siRNA sense strand
gacuuuguguguaguaugc

SEQ ID NO: 2033230 - RNA, 19 nt, Homo sapiens
  misc_RNA (1)...(19): siRNA sense strand
cuaaagcagauauugaaca

SEQ ID NO: 2033231 - RNA, 19 nt, Homo sapiens
  misc_RNA (1)...(19): siRNA sense strand
gaccaagccaacaucacuu

SEQ ID NO: 2033232 - RNA, 19 nt, Homo sapiens
  misc_RNA (1)...(19): siRNA sense strand
gaacagacuuuguguguag

SEQ ID NO: 2033233 - RNA, 19 nt, Homo sapiens
  misc_RNA (1)...(19): siRNA sense strand
acaaauggcuuaaggcaaa

SEQ ID NO: 2033234 - RNA, 19 nt, Homo sapiens
  misc_RNA (1)...(19): siRNA sense strand
uguagaagauggagaagua

SEQ ID NO: 2033235 - RNA, 19 nt, Homo sapiens
  misc_RNA (1)...(19): siRNA sense strand
uugaacaacuuccuucuua

SEQ ID NO: 2033236 - RNA, 19 nt, Homo sapiens
  misc_RNA (1)...(19): siRNA sense strand
gcagcuacuuagagucuua

SEQ ID NO: 2033237 - RNA, 19 nt, Homo sapiens
  misc_RNA (1)...(19): siRNA sense strand
gcacaucccugcuuguagu

SEQ ID NO: 2033238 - RNA, 19 nt, Homo sapiens
  misc_RNA (1)...(19): siRNA sense strand
gcacuuaccaguaccauau

SEQ ID NO: 2033239 - RNA, 19 nt, Homo sapiens
  misc_RNA (1)...(19): siRNA sense strand
ccaaguguguugacaaaug

SEQ ID NO: 2033240 - RNA, 19 nt, Homo sapiens
  misc_RNA (1)...(19): siRNA sense strand
ggagguguccuuuggagua

SEQ ID NO: 2033241 - RNA, 19 nt, Homo sapiens
  misc_RNA (1)...(19): siRNA sense strand
aaucguacuugcccaauuu

SEQ ID NO: 2033242 - RNA, 19 nt, Homo sapiens
  misc_RNA (1)...(19): siRNA sense strand
gggcccaacuuucagcuuu

SEQ ID NO: 2033243 - RNA, 19 nt, Homo sapiens
  misc_RNA (1)...(19): siRNA sense strand
gaacaacuuccuucuuauc

SEQ ID NO: 2033244 - RNA, 19 nt, Homo sapiens
  misc_RNA (1)...(19): siRNA sense strand
gcagugggcccaacuuuca

SEQ ID NO: 2033245 - RNA, 19 nt, Homo sapiens
  misc_RNA (1)...(19): siRNA sense strand
caaggcagcuacuuagagu

SEQ ID NO: 2033246 - RNA, 19 nt, Homo sapiens
  misc_RNA (1)...(19): siRNA sense strand
gaucagcuccaucaaggaa

SEQ ID NO: 2033247 - RNA, 19 nt, Homo sapiens
  misc_RNA (1)...(19): siRNA sense strand
gacuaaagcagauauugaa

SEQ ID NO: 2033248 - RNA, 19 nt, Homo sapiens
  misc_RNA (1)...(19): siRNA sense strand
gcagaaugcagucaugguu

SEQ ID NO: 2033249 - RNA, 19 nt, Homo sapiens
  misc_RNA (1)...(19): siRNA sense strand
gauagaaaaugaaguggaa

SEQ ID NO: 2033250 - RNA, 19 nt, Homo sapiens
  misc_RNA (1)...(19): siRNA sense strand
guucagcacuuaccaguac

SEQ ID NO: 2033251 - RNA, 19 nt, Homo sapiens
  misc_RNA (1)...(19): siRNA sense strand
gaagauggagaaguagaaa

SEQ ID NO: 2033252 - RNA, 19 nt, Homo sapiens
  misc_RNA (1)...(19): siRNA sense strand
gcaccucccugucuguagu

SEQ ID NO: 2033253 - RNA, 19 nt, Homo sapiens
  misc_RNA (1)...(19): siRNA sense strand
aggagaacaucuuccagua

SEQ ID NO: 2033254 - RNA, 19 nt, Homo sapiens
  misc_RNA (1)...(19): siRNA sense strand
aaaugaaguggaacucuua

SEQ ID NO: 2033255 - RNA, 19 nt, Homo sapiens
  misc_RNA (1)...(19): siRNA sense strand
gaucgccucugcaaaggau

SEQ ID NO: 2033256 - RNA, 19 nt, Homo sapiens
  misc_RNA (1)...(19): siRNA sense strand
ggaagaagggaucgucugu

SEQ ID NO: 2033257 - RNA, 19 nt, Homo sapiens
  misc_RNA (1)...(19): siRNA sense strand
gagucaaggcagcuacuua

SEQ ID NO: 2033258 - RNA, 19 nt, Homo sapiens
  misc_RNA (1)...(19): siRNA sense strand
agaaugcagucaugguuga

SEQ ID NO: 2033259 - RNA, 19 nt, Homo sapiens
  misc_RNA (1)...(19): siRNA sense strand
ccaggaugcucugugguuu

SEQ ID NO: 2033260 - RNA, 19 nt, Homo sapiens
  misc_RNA (1)...(19): siRNA sense strand
ugacuaaagcagauauuga

SEQ ID NO: 2033261 - RNA, 19 nt, Homo sapiens
  misc_RNA (1)...(19): siRNA sense strand
ugaacaacuuccuucuuau

SEQ ID NO: 2033262 - RNA, 19 nt, Homo sapiens
  misc_RNA (1)...(19): siRNA sense strand
cuuagagucuuacccugua

SEQ ID NO: 2033263 - RNA, 19 nt, Homo sapiens
  misc_RNA (1)...(19): siRNA sense strand
ugccauauguguuaucaau

SEQ ID NO: 2033264 - RNA, 19 nt, Homo sapiens
  misc_RNA (1)...(19): siRNA sense strand
caaguguguugacaaaugg

SEQ ID NO: 2033265 - RNA, 19 nt, Homo sapiens
  misc_RNA (1)...(19): siRNA sense strand
gcacgcaacagaagaaguc

SEQ ID NO: 2033266 - RNA, 19 nt, Homo sapiens
  misc_RNA (1)...(19): siRNA sense strand
guaguaugcaugugugauu

SEQ ID NO: 2033267 - RNA, 19 nt, Homo sapiens
  misc_RNA (1)...(19): siRNA sense strand
cagaacagacuuugugugu

SEQ ID NO: 2033268 - RNA, 19 nt, Homo sapiens
  misc_RNA (1)...(19): siRNA sense strand
caucagcucccuugcaguu

SEQ ID NO: 2033269 - RNA, 19 nt, Homo sapiens
  misc_RNA (1)...(19): siRNA sense strand
uaccuuauccuccauuuau

SEQ ID NO: 2033270 - RNA, 19 nt, Homo sapiens
  misc_RNA (1)...(19): siRNA sense strand
cgaguuccaugccaagugu

SEQ ID NO: 2033271 - RNA, 19 nt, Homo sapiens
  misc_RNA (1)...(19): siRNA sense strand
aaauuacgaggcccuguua

SEQ ID NO: 2033272 - RNA, 19 nt, Homo sapiens
  misc_RNA (1)...(19): siRNA sense strand
ccauauguguuaucaaugc

SEQ ID NO: 2033273 - RNA, 19 nt, Homo sapiens
  misc_RNA (1)...(19): siRNA sense strand
cuuaacacaugauccuuug

SEQ ID NO: 2033274 - RNA, 19 nt, Homo sapiens
  misc_RNA (1)...(19): siRNA sense strand
gcagauauugaacaacuuc

SEQ ID NO: 2033275 - RNA, 19 nt, Homo sapiens
  misc_RNA (1)...(19): siRNA sense strand
aagcagauauugaacaacu

SEQ ID NO: 2033276 - RNA, 19 nt, Homo sapiens
  misc_RNA (1)...(19): siRNA sense strand
ggagaacaucuuccaguag

SEQ ID NO: 2033277 - RNA, 19 nt, Homo sapiens
  misc_RNA (1)...(19): siRNA sense strand
agaacagacuuugugugua

SEQ ID NO: 2033278 - RNA, 19 nt, Homo sapiens
  misc_RNA (1)...(19): siRNA sense strand
ucuuaucgguucaauccua

SEQ ID NO: 2033279 - RNA, 19 nt, Homo sapiens
  misc_RNA (1)...(19): siRNA sense strand
ggacugacuaaagcagaua

SEQ ID NO: 2033280 - RNA, 19 nt, Homo sapiens
  misc_RNA (1)...(19): siRNA sense strand
ccagcuuacugccauaugu

SEQ ID NO: 2033281 - RNA, 19 nt, Homo sapiens
  misc_RNA (1)...(19): siRNA sense strand
guaccuuauccuccauuua

SEQ ID NO: 2033282 - RNA, 19 nt, Homo sapiens
  misc_RNA (1)...(19): siRNA sense strand
ugccaaguguguugacaaa

SEQ ID NO: 2033283 - RNA, 19 nt, Homo sapiens
  misc_RNA (1)...(19): siRNA sense strand
gcaaagccucguggacuga

SEQ ID NO: 2033284 - RNA, 19 nt, Homo sapiens
  misc_RNA (1)...(19): siRNA sense strand
uuacaggacguaguagaua

SEQ ID NO: 2033285 - RNA, 19 nt, Homo sapiens
  misc_RNA (1)...(19): siRNA sense strand
aagaagggaucgucugucu

SEQ ID NO: 2033286 - RNA, 19 nt, Homo sapiens
  misc_RNA (1)...(19): siRNA sense strand
uaguaugcaugugugauuu

SEQ ID NO: 2033287 - RNA, 19 nt, Homo sapiens
  misc_RNA (1)...(19): siRNA sense strand
ucuagugauccauuucuua

SEQ ID NO: 2033288 - RNA, 19 nt, Homo sapiens
  misc_RNA (1)...(19): siRNA sense strand
uaacaaccaccagucagaa

SEQ ID NO: 2033289 - RNA, 19 nt, Homo sapiens
  misc_RNA (1)...(19): siRNA sense strand
ccagcagaaugcagucaug

SEQ ID NO: 2033290 - RNA, 19 nt, Homo sapiens
  misc_RNA (1)...(19): siRNA sense strand
guugacaaauggcuuaagg

SEQ ID NO: 2033291 - RNA, 19 nt, Homo sapiens
  misc_RNA (1)...(19): siRNA sense strand
aagccaacaucacuucuca

SEQ ID NO: 2033292 - RNA, 19 nt, Homo sapiens
  misc_RNA (1)...(19): siRNA sense strand
gcccaacuuucagcuuuga

SEQ ID NO: 2033293 - RNA, 19 nt, Homo sapiens
  misc_RNA (1)...(19): siRNA sense strand
cuucaggcauguucaguuc

SEQ ID NO: 2033294 - RNA, 19 nt, Homo sapiens
  misc_RNA (1)...(19): siRNA sense strand
cauguucaguucagcacuu

SEQ ID NO: 2033295 - RNA, 19 nt, Homo sapiens
  misc_RNA (1)...(19): siRNA sense strand
aaaucguacuugcccaauu

SEQ ID NO: 2033296 - RNA, 19 nt, Homo sapiens
  misc_RNA (1)...(19): siRNA sense strand
gauauugaacaacuuccuu

SEQ ID NO: 2033297 - RNA, 19 nt, Homo sapiens
  misc_RNA (1)...(19): siRNA sense strand
cagcuuugaauuagaugua

SEQ ID NO: 2033298 - RNA, 19 nt, Homo sapiens
  misc_RNA (1)...(19): siRNA sense strand
ugaaguggaacucuuagga

SEQ ID NO: 2033299 - RNA, 19 nt, Homo sapiens
  misc_RNA (1)...(19): siRNA sense strand
cuagugauccauuucuuau

SEQ ID NO: 2033300 - RNA, 19 nt, Homo sapiens
  misc_RNA (1)...(19): siRNA sense strand
cccaucauccuccucauuu

SEQ ID NO: 2033301 - RNA, 19 nt, Homo sapiens
  misc_RNA (1)...(19): siRNA sense strand
caaauggcuuaaggcaaau

SEQ ID NO: 2033302 - RNA, 19 nt, Homo sapiens
  misc_RNA (1)...(19): siRNA sense strand
agaagaaguccuccuguca

SEQ ID NO: 2033303 - RNA, 19 nt, Homo sapiens
  misc_RNA (1)...(19): siRNA sense strand
uugcaguucuuaacacaug

SEQ ID NO: 2033304 - RNA, 19 nt, Homo sapiens
  misc_RNA (1)...(19): siRNA sense strand
ccaucauccuccucauuug

SEQ ID NO: 2033305 - RNA, 19 nt, Homo sapiens
  misc_RNA (1)...(19): siRNA sense strand
caggccaguuugucccuuu

SEQ ID NO: 2033306 - RNA, 19 nt, Homo sapiens
  misc_RNA (1)...(19): siRNA sense strand
ggcccaacuuucagcuuug

SEQ ID NO: 2033307 - RNA, 19 nt, Homo sapiens
  misc_RNA (1)...(19): siRNA sense strand
cuuaucgguucaauccuaa

SEQ ID NO: 2033308 - RNA, 19 nt, Homo sapiens
  misc_RNA (1)...(19): siRNA sense strand
ccacaugggauuccacucu

SEQ ID NO: 2033309 - RNA, 19 nt, Homo sapiens
  misc_RNA (1)...(19): siRNA sense strand
cuuacugccauauguguua

SEQ ID NO: 2033310 - RNA, 19 nt, Homo sapiens
  misc_RNA (1)...(19): siRNA sense strand
agugauccauuucuuauac

SEQ ID NO: 2033311 - RNA, 19 nt, Homo sapiens
  misc_RNA (1)...(19): siRNA sense strand
uagugugccuccuccaaug

SEQ ID NO: 2033312 - RNA, 19 nt, Homo sapiens
  misc_RNA (1)...(19): siRNA sense strand
uugccgagcugaugcuuca

SEQ ID NO: 2033313 - RNA, 19 nt, Homo sapiens
  misc_RNA (1)...(19): siRNA sense strand
cuaacaaccaccagucaga

SEQ ID NO: 2033314 - RNA, 19 nt, Homo sapiens
  misc_RNA (1)...(19): siRNA sense strand
gcuuugaauuagauguaga

SEQ ID NO: 2033315 - RNA, 19 nt, Homo sapiens
  misc_RNA (1)...(19): siRNA sense strand
guagugugccuccuccaau

SEQ ID NO: 2033316 - RNA, 19 nt, Homo sapiens
  misc_RNA (1)...(19): siRNA sense strand
ccaauuugccgagcugaug

SEQ ID NO: 2033317 - RNA, 19 nt, Homo sapiens
  misc_RNA (1)...(19): siRNA sense strand
uggcuuaaggcaaaucgua

SEQ ID NO: 2033318 - RNA, 19 nt, Homo sapiens
  misc_RNA (1)...(19): siRNA sense strand
uaacacaugauccuuugca

SEQ ID NO: 2033319 - RNA, 19 nt, Homo sapiens
  misc_RNA (1)...(19): siRNA sense strand
agaagugcaucgggauuca

SEQ ID NO: 2033320 - RNA, 19 nt, Homo sapiens
  misc_RNA (1)...(19): siRNA sense strand
aaaaugaaguggaacucuu

SEQ ID NO: 2033321 - RNA, 19 nt, Homo sapiens
  misc_RNA (1)...(19): siRNA sense strand
gacuuuguguguaguaugc

SEQ ID NO: 2033322 - RNA, 19 nt, Homo sapiens
  misc_RNA (1)...(19): siRNA sense strand
cuaaagcagauauugaaca

SEQ ID NO: 2033323 - RNA, 19 nt, Homo sapiens
  misc_RNA (1)...(19): siRNA sense strand
gaccaagccaacaucacuu

SEQ ID NO: 2033324 - RNA, 19 nt, Homo sapiens
  misc_RNA (1)...(19): siRNA sense strand
cgaccaagccaacaucacu

SEQ ID NO: 2033325 - RNA, 19 nt, Homo sapiens
  misc_RNA (1)...(19): siRNA sense strand
agaagauggagaaguagaa

SEQ ID NO: 2033326 - RNA, 19 nt, Homo sapiens
  misc_RNA (1)...(19): siRNA sense strand
aggcuuacaggacguagua

SEQ ID NO: 2033327 - RNA, 19 nt, Homo sapiens
  misc_RNA (1)...(19): siRNA sense strand
gagguguccuuuggaguac

SEQ ID NO: 2033328 - RNA, 19 nt, Homo sapiens
  misc_RNA (1)...(19): siRNA sense strand
uauacauccuccucaccuu

SEQ ID NO: 2033329 - RNA, 19 nt, Homo sapiens
  misc_RNA (1)...(19): siRNA sense strand
gugauccauuucuuauaca

SEQ ID NO: 2033330 - RNA, 19 nt, Homo sapiens
  misc_RNA (1)...(19): siRNA sense strand
agauguagaagauggagaa

SEQ ID NO: 2033331 - RNA, 19 nt, Homo sapiens
  misc_RNA (1)...(19): siRNA sense strand
ucagcuccaucaaggaaca

SEQ ID NO: 2033332 - RNA, 19 nt, Homo sapiens
  misc_RNA (1)...(19): siRNA sense strand
gaacagacuuuguguguag

SEQ ID NO: 2033333 - RNA, 19 nt, Homo sapiens
  misc_RNA (1)...(19): siRNA sense strand
acaaauggcuuaaggcaaa

SEQ ID NO: 2033334 - RNA, 19 nt, Homo sapiens
  misc_RNA (1)...(19): siRNA sense strand
uguagaagauggagaagua

SEQ ID NO: 2033335 - RNA, 19 nt, Homo sapiens
  misc_RNA (1)...(19): siRNA sense strand
uugaacaacuuccuucuua

SEQ ID NO: 2033336 - RNA, 19 nt, Homo sapiens
  misc_RNA (1)...(19): siRNA sense strand
gcagcuacuuagagucuua

SEQ ID NO: 2033337 - RNA, 19 nt, Homo sapiens
  misc_RNA (1)...(19): siRNA sense strand
gcacaucccugcuuguagu

SEQ ID NO: 2033338 - RNA, 19 nt, Homo sapiens
  misc_RNA (1)...(19): siRNA sense strand
gcacuuaccaguaccauau

SEQ ID NO: 2033339 - RNA, 19 nt, Homo sapiens
  misc_RNA (1)...(19): siRNA sense strand
ccaaguguguugacaaaug

SEQ ID NO: 2033340 - RNA, 19 nt, Homo sapiens
  misc_RNA (1)...(19): siRNA sense strand
ggagguguccuuuggagua

SEQ ID NO: 2033341 - RNA, 19 nt, Homo sapiens
  misc_RNA (1)...(19): siRNA sense strand
aaucguacuugcccaauuu

SEQ ID NO: 2033342 - RNA, 19 nt, Homo sapiens
  misc_RNA (1)...(19): siRNA sense strand
gggcccaacuuucagcuuu

SEQ ID NO: 2033343 - RNA, 19 nt, Homo sapiens
  misc_RNA (1)...(19): siRNA sense strand
gaacaacuuccuucuuauc

SEQ ID NO: 2033344 - RNA, 19 nt, Homo sapiens
  misc_RNA (1)...(19): siRNA sense strand
gcagugggcccaacuuuca

SEQ ID NO: 2033345 - RNA, 19 nt, Homo sapiens
  misc_RNA (1)...(19): siRNA sense strand
caaggcagcuacuuagagu

SEQ ID NO: 2033346 - RNA, 19 nt, Homo sapiens
  misc_RNA (1)...(19): siRNA sense strand
gaucagcuccaucaaggaa

SEQ ID NO: 2033347 - RNA, 19 nt, Homo sapiens
  misc_RNA (1)...(19): siRNA sense strand
gacuaaagcagauauugaa

SEQ ID NO: 2033348 - RNA, 19 nt, Homo sapiens
  misc_RNA (1)...(19): siRNA sense strand
gcagaaugcagucaugguu

SEQ ID NO: 2033349 - RNA, 19 nt, Homo sapiens
  misc_RNA (1)...(19): siRNA sense strand
gauagaaaaugaaguggaa

SEQ ID NO: 2033350 - RNA, 19 nt, Homo sapiens
  misc_RNA (1)...(19): siRNA sense strand
guucagcacuuaccaguac

SEQ ID NO: 2033351 - RNA, 19 nt, Homo sapiens
  misc_RNA (1)...(19): siRNA sense strand
gaagauggagaaguagaaa

SEQ ID NO: 2033352 - RNA, 19 nt, Homo sapiens
  misc_RNA (1)...(19): siRNA sense strand
gcaccucccugucuguagu

SEQ ID NO: 2033353 - RNA, 19 nt, Homo sapiens
  misc_RNA (1)...(19): siRNA sense strand
aggagaacaucuuccagua

SEQ ID NO: 2033354 - RNA, 19 nt, Homo sapiens
  misc_RNA (1)...(19): siRNA sense strand
aaaugaaguggaacucuua

SEQ ID NO: 2033355 - RNA, 19 nt, Homo sapiens
  misc_RNA (1)...(19): siRNA sense strand
gaucgccucugcaaaggau

SEQ ID NO: 2033356 - RNA, 19 nt, Homo sapiens
  misc_RNA (1)...(19): siRNA sense strand
ggaagaagggaucgucugu

SEQ ID NO: 2033357 - RNA, 19 nt, Homo sapiens
  misc_RNA (1)...(19): siRNA sense strand
gagucaaggcagcuacuua

SEQ ID NO: 2033358 - RNA, 19 nt, Homo sapiens
  misc_RNA (1)...(19): siRNA sense strand
agaaugcagucaugguuga

SEQ ID NO: 2033359 - RNA, 19 nt, Homo sapiens
  misc_RNA (1)...(19): siRNA sense strand
ccaggaugcucugugguuu

SEQ ID NO: 2033360 - RNA, 19 nt, Homo sapiens
  misc_RNA (1)...(19): siRNA sense strand
ugacuaaagcagauauuga

SEQ ID NO: 2033361 - RNA, 19 nt, Homo sapiens
  misc_RNA (1)...(19): siRNA sense strand
ugaacaacuuccuucuuau

SEQ ID NO: 2033362 - RNA, 19 nt, Homo sapiens
  misc_RNA (1)...(19): siRNA sense strand
cuuagagucuuacccugua

SEQ ID NO: 2033363 - RNA, 19 nt, Homo sapiens
  misc_RNA (1)...(19): siRNA sense strand
ugccauauguguuaucaau

SEQ ID NO: 2033364 - RNA, 19 nt, Homo sapiens
  misc_RNA (1)...(19): siRNA sense strand
caaguguguugacaaaugg

SEQ ID NO: 2033365 - RNA, 19 nt, Homo sapiens
  misc_RNA (1)...(19): siRNA sense strand
gcacgcaacagaagaaguc

SEQ ID NO: 2033366 - RNA, 19 nt, Homo sapiens
  misc_RNA (1)...(19): siRNA sense strand
guaguaugcaugugugauu

SEQ ID NO: 2033367 - RNA, 19 nt, Homo sapiens
  misc_RNA (1)...(19): siRNA sense strand
cagaacagacuuugugugu

SEQ ID NO: 2033368 - RNA, 19 nt, Homo sapiens
  misc_RNA (1)...(19): siRNA sense strand
caucagcucccuugcaguu

SEQ ID NO: 2033369 - RNA, 19 nt, Homo sapiens
  misc_RNA (1)...(19): siRNA sense strand
uaccuuauccuccauuuau

SEQ ID NO: 2033370 - RNA, 19 nt, Homo sapiens
  misc_RNA (1)...(19): siRNA sense strand
cgaguuccaugccaagugu

SEQ ID NO: 2033371 - RNA, 19 nt, Homo sapiens
  misc_RNA (1)...(19): siRNA sense strand
aaauuacgaggcccuguua

SEQ ID NO: 2033372 - RNA, 19 nt, Homo sapiens
  misc_RNA (1)...(19): siRNA sense strand
ccauauguguuaucaaugc

SEQ ID NO: 2033373 - RNA, 19 nt, Homo sapiens
  misc_RNA (1)...(19): siRNA sense strand
cuuaacacaugauccuuug

SEQ ID NO: 2033374 - RNA, 19 nt, Homo sapiens
  misc_RNA (1)...(19): siRNA sense strand
gcagauauugaacaacuuc

SEQ ID NO: 2033375 - RNA, 19 nt, Homo sapiens
  misc_RNA (1)...(19): siRNA sense strand
aagcagauauugaacaacu

SEQ ID NO: 2033376 - RNA, 19 nt, Homo sapiens
  misc_RNA (1)...(19): siRNA sense strand
ggagaacaucuuccaguag

SEQ ID NO: 2033377 - RNA, 19 nt, Homo sapiens
  misc_RNA (1)...(19): siRNA sense strand
agaacagacuuugugugua

SEQ ID NO: 2033378 - RNA, 19 nt, Homo sapiens
  misc_RNA (1)...(19): siRNA sense strand
ucuuaucgguucaauccua

SEQ ID NO: 2033379 - RNA, 19 nt, Homo sapiens
  misc_RNA (1)...(19): siRNA sense strand
ggacugacuaaagcagaua

SEQ ID NO: 2033380 - RNA, 19 nt, Homo sapiens
  misc_RNA (1)...(19): siRNA sense strand
ccagcuuacugccauaugu

SEQ ID NO: 2033381 - RNA, 19 nt, Homo sapiens
  misc_RNA (1)...(19): siRNA sense strand
guaccuuauccuccauuua

SEQ ID NO: 2033382 - RNA, 19 nt, Homo sapiens
  misc_RNA (1)...(19): siRNA sense strand
ugccaaguguguugacaaa

SEQ ID NO: 2033383 - RNA, 19 nt, Homo sapiens
  misc_RNA (1)...(19): siRNA sense strand
gcaaagccucguggacuga

SEQ ID NO: 2033384 - RNA, 19 nt, Homo sapiens
  misc_RNA (1)...(19): siRNA sense strand
uuacaggacguaguagaua

SEQ ID NO: 2033385 - RNA, 19 nt, Homo sapiens
  misc_RNA (1)...(19): siRNA sense strand
aagaagggaucgucugucu

SEQ ID NO: 2033386 - RNA, 19 nt, Homo sapiens
  misc_RNA (1)...(19): siRNA sense strand
uaguaugcaugugugauuu

SEQ ID NO: 2033387 - RNA, 19 nt, Homo sapiens
  misc_RNA (1)...(19): siRNA sense strand
ucuagugauccauuucuua

SEQ ID NO: 2033388 - RNA, 19 nt, Homo sapiens
  misc_RNA (1)...(19): siRNA sense strand
uaacaaccaccagucagaa

SEQ ID NO: 2033389 - RNA, 19 nt, Homo sapiens
  misc_RNA (1)...(19): siRNA sense strand
ccagcagaaugcagucaug

SEQ ID NO: 2033390 - RNA, 19 nt, Homo sapiens
  misc_RNA (1)...(19): siRNA sense strand
guugacaaauggcuuaagg

SEQ ID NO: 2033391 - RNA, 19 nt, Homo sapiens
  misc_RNA (1)...(19): siRNA sense strand
aagccaacaucacuucuca

SEQ ID NO: 2033392 - RNA, 19 nt, Homo sapiens
  misc_RNA (1)...(19): siRNA sense strand
gcccaacuuucagcuuuga

SEQ ID NO: 2033393 - RNA, 19 nt, Homo sapiens
  misc_RNA (1)...(19): siRNA sense strand
cuucaggcauguucaguuc

SEQ ID NO: 2033394 - RNA, 19 nt, Homo sapiens
  misc_RNA (1)...(19): siRNA sense strand
cauguucaguucagcacuu

SEQ ID NO: 2033395 - RNA, 19 nt, Homo sapiens
  misc_RNA (1)...(19): siRNA sense strand
aaaucguacuugcccaauu

SEQ ID NO: 2033396 - RNA, 19 nt, Homo sapiens
  misc_RNA (1)...(19): siRNA sense strand
gauauugaacaacuuccuu

SEQ ID NO: 2033397 - RNA, 19 nt, Homo sapiens
  misc_RNA (1)...(19): siRNA sense strand
cagcuuugaauuagaugua

SEQ ID NO: 2033398 - RNA, 19 nt, Homo sapiens
  misc_RNA (1)...(19): siRNA sense strand
ugaaguggaacucuuagga

SEQ ID NO: 2033399 - RNA, 19 nt, Homo sapiens
  misc_RNA (1)...(19): siRNA sense strand
cuagugauccauuucuuau

SEQ ID NO: 2033400 - RNA, 19 nt, Homo sapiens
  misc_RNA (1)...(19): siRNA sense strand
cccaucauccuccucauuu

SEQ ID NO: 2033401 - RNA, 19 nt, Homo sapiens
  misc_RNA (1)...(19): siRNA sense strand
caaauggcuuaaggcaaau

SEQ ID NO: 2033402 - RNA, 19 nt, Homo sapiens
  misc_RNA (1)...(19): siRNA sense strand
agaagaaguccuccuguca

SEQ ID NO: 2033403 - RNA, 19 nt, Homo sapiens
  misc_RNA (1)...(19): siRNA sense strand
uugcaguucuuaacacaug

SEQ ID NO: 2033404 - RNA, 19 nt, Homo sapiens
  misc_RNA (1)...(19): siRNA sense strand
ccaucauccuccucauuug

SEQ ID NO: 2033405 - RNA, 19 nt, Homo sapiens
  misc_RNA (1)...(19): siRNA sense strand
caggccaguuugucccuuu

SEQ ID NO: 2033406 - RNA, 19 nt, Homo sapiens
  misc_RNA (1)...(19): siRNA sense strand
ggcccaacuuucagcuuug

SEQ ID NO: 2033407 - RNA, 19 nt, Homo sapiens
  misc_RNA (1)...(19): siRNA sense strand
cuuaucgguucaauccuaa

SEQ ID NO: 2033408 - RNA, 19 nt, Homo sapiens
  misc_RNA (1)...(19): siRNA sense strand
ccacaugggauuccacucu

SEQ ID NO: 2033409 - RNA, 19 nt, Homo sapiens
  misc_RNA (1)...(19): siRNA sense strand
cuuacugccauauguguua

SEQ ID NO: 2033410 - RNA, 19 nt, Homo sapiens
  misc_RNA (1)...(19): siRNA sense strand
agugauccauuucuuauac

SEQ ID NO: 2033411 - RNA, 19 nt, Homo sapiens
  misc_RNA (1)...(19): siRNA sense strand
uagugugccuccuccaaug

SEQ ID NO: 2033412 - RNA, 19 nt, Homo sapiens
  misc_RNA (1)...(19): siRNA sense strand
uugccgagcugaugcuuca

SEQ ID NO: 2033413 - RNA, 19 nt, Homo sapiens
  misc_RNA (1)...(19): siRNA sense strand
cuaacaaccaccagucaga

SEQ ID NO: 2033414 - RNA, 19 nt, Homo sapiens
  misc_RNA (1)...(19): siRNA sense strand
gcuuugaauuagauguaga

SEQ ID NO: 2033415 - RNA, 19 nt, Homo sapiens
  misc_RNA (1)...(19): siRNA sense strand
guagugugccuccuccaau

SEQ ID NO: 2033416 - RNA, 19 nt, Homo sapiens
  misc_RNA (1)...(19): siRNA sense strand
ccaauuugccgagcugaug

SEQ ID NO: 2033417 - RNA, 19 nt, Homo sapiens
  misc_RNA (1)...(19): siRNA sense strand
uggcuuaaggcaaaucgua

SEQ ID NO: 2033418 - RNA, 19 nt, Homo sapiens
  misc_RNA (1)...(19): siRNA sense strand
uaacacaugauccuuugca

SEQ ID NO: 2033419 - RNA, 19 nt, Homo sapiens
  misc_RNA (1)...(19): siRNA sense strand
agaagugcaucgggauuca

SEQ ID NO: 2033420 - RNA, 19 nt, Homo sapiens
  misc_RNA (1)...(19): siRNA sense strand
aaaaugaaguggaacucuu

SEQ ID NO: 2033421 - RNA, 19 nt, Homo sapiens
  misc_RNA (1)...(19): siRNA sense strand
gacuuuguguguaguaugc

SEQ ID NO: 2033422 - RNA, 19 nt, Homo sapiens
  misc_RNA (1)...(19): siRNA sense strand
cuaaagcagauauugaaca

SEQ ID NO: 2033423 - RNA, 19 nt, Homo sapiens
  misc_RNA (1)...(19): siRNA sense strand
gaccaagccaacaucacuu

SEQ ID NO: 2033424 - RNA, 19 nt, Homo sapiens
  misc_RNA (1)...(19): siRNA sense strand
cgaccaagccaacaucacu

SEQ ID NO: 2033425 - RNA, 19 nt, Homo sapiens
  misc_RNA (1)...(19): siRNA sense strand
agaagauggagaaguagaa

SEQ ID NO: 2033426 - RNA, 19 nt, Homo sapiens
  misc_RNA (1)...(19): siRNA sense strand
aggcuuacaggacguagua

SEQ ID NO: 2033427 - RNA, 19 nt, Homo sapiens
  misc_RNA (1)...(19): siRNA sense strand
gagguguccuuuggaguac

SEQ ID NO: 2033428 - RNA, 19 nt, Homo sapiens
  misc_RNA (1)...(19): siRNA sense strand
uauacauccuccucaccuu

SEQ ID NO: 2033429 - RNA, 19 nt, Homo sapiens
  misc_RNA (1)...(19): siRNA sense strand
gugauccauuucuuauaca

SEQ ID NO: 2033430 - RNA, 19 nt, Homo sapiens
  misc_RNA (1)...(19): siRNA sense strand
agauguagaagauggagaa

SEQ ID NO: 2033431 - RNA, 19 nt, Homo sapiens
  misc_RNA (1)...(19): siRNA sense strand
ucagcuccaucaaggaaca

SEQ ID NO: 2033432 - RNA, 19 nt, Homo sapiens
  misc_RNA (1)...(19): siRNA sense strand
gaacagacuuuguguguag

SEQ ID NO: 2033433 - RNA, 19 nt, Homo sapiens
  misc_RNA (1)...(19): siRNA sense strand
acaaauggcuuaaggcaaa

SEQ ID NO: 2033434 - RNA, 19 nt, Homo sapiens
  misc_RNA (1)...(19): siRNA sense strand
uguagaagauggagaagua

SEQ ID NO: 2033435 - RNA, 19 nt, Homo sapiens
  misc_RNA (1)...(19): siRNA sense strand
uugaacaacuuccuucuua

SEQ ID NO: 2033436 - RNA, 19 nt, Homo sapiens
  misc_RNA (1)...(19): siRNA sense strand
gcagcuacuuagagucuua

SEQ ID NO: 2033437 - RNA, 19 nt, Homo sapiens
  misc_RNA (1)...(19): siRNA sense strand
gcacaucccugcuuguagu

SEQ ID NO: 2033438 - RNA, 19 nt, Homo sapiens
  misc_RNA (1)...(19): siRNA sense strand
gcacuuaccaguaccauau

SEQ ID NO: 2033439 - RNA, 19 nt, Homo sapiens
  misc_RNA (1)...(19): siRNA sense strand
ccaaguguguugacaaaug

SEQ ID NO: 2033440 - RNA, 19 nt, Homo sapiens
  misc_RNA (1)...(19): siRNA sense strand
ggagguguccuuuggagua

SEQ ID NO: 2033441 - RNA, 19 nt, Homo sapiens
  misc_RNA (1)...(19): siRNA sense strand
aaucguacuugcccaauuu

SEQ ID NO: 2033442 - RNA, 19 nt, Homo sapiens
  misc_RNA (1)...(19): siRNA sense strand
gggcccaacuuucagcuuu

SEQ ID NO: 2033443 - RNA, 19 nt, Homo sapiens
  misc_RNA (1)...(19): siRNA sense strand
gaacaacuuccuucuuauc

SEQ ID NO: 2033444 - RNA, 19 nt, Homo sapiens
  misc_RNA (1)...(19): siRNA sense strand
gcagugggcccaacuuuca

SEQ ID NO: 2033445 - RNA, 19 nt, Homo sapiens
  misc_RNA (1)...(19): siRNA sense strand
caaggcagcuacuuagagu

SEQ ID NO: 2033446 - RNA, 19 nt, Homo sapiens
  misc_RNA (1)...(19): siRNA sense strand
gaucagcuccaucaaggaa

SEQ ID NO: 2033447 - RNA, 19 nt, Homo sapiens
  misc_RNA (1)...(19): siRNA sense strand
gacuaaagcagauauugaa

SEQ ID NO: 2033448 - RNA, 19 nt, Homo sapiens
  misc_RNA (1)...(19): siRNA sense strand
gcagaaugcagucaugguu

SEQ ID NO: 2033449 - RNA, 19 nt, Homo sapiens
  misc_RNA (1)...(19): siRNA sense strand
gauagaaaaugaaguggaa

SEQ ID NO: 2033450 - RNA, 19 nt, Homo sapiens
  misc_RNA (1)...(19): siRNA sense strand
guucagcacuuaccaguac

SEQ ID NO: 2033451 - RNA, 19 nt, Homo sapiens
  misc_RNA (1)...(19): siRNA sense strand
gaagauggagaaguagaaa

SEQ ID NO: 2033452 - RNA, 19 nt, Homo sapiens
  misc_RNA (1)...(19): siRNA sense strand
gcaccucccugucuguagu

SEQ ID NO: 2033453 - RNA, 19 nt, Homo sapiens
  misc_RNA (1)...(19): siRNA sense strand
aggagaacaucuuccagua

SEQ ID NO: 2033454 - RNA, 19 nt, Homo sapiens
  misc_RNA (1)...(19): siRNA sense strand
aaaugaaguggaacucuua

SEQ ID NO: 2033455 - RNA, 19 nt, Homo sapiens
  misc_RNA (1)...(19): siRNA sense strand
gaucgccucugcaaaggau

SEQ ID NO: 2033456 - RNA, 19 nt, Homo sapiens
  misc_RNA (1)...(19): siRNA sense strand
ggaagaagggaucgucugu

SEQ ID NO: 2033457 - RNA, 19 nt, Homo sapiens
  misc_RNA (1)...(19): siRNA sense strand
gagucaaggcagcuacuua

SEQ ID NO: 2033458 - RNA, 19 nt, Homo sapiens
  misc_RNA (1)...(19): siRNA sense strand
agaaugcagucaugguuga

SEQ ID NO: 2033459 - RNA, 19 nt, Homo sapiens
  misc_RNA (1)...(19): siRNA sense strand
ccaggaugcucugugguuu

SEQ ID NO: 2033460 - RNA, 19 nt, Homo sapiens
  misc_RNA (1)...(19): siRNA sense strand
ugacuaaagcagauauuga

SEQ ID NO: 2033461 - RNA, 19 nt, Homo sapiens
  misc_RNA (1)...(19): siRNA sense strand
ugaacaacuuccuucuuau

SEQ ID NO: 2033462 - RNA, 19 nt, Homo sapiens
  misc_RNA (1)...(19): siRNA sense strand
cuuagagucuuacccugua

SEQ ID NO: 2033463 - RNA, 19 nt, Homo sapiens
  misc_RNA (1)...(19): siRNA sense strand
ugccauauguguuaucaau

SEQ ID NO: 2033464 - RNA, 19 nt, Homo sapiens
  misc_RNA (1)...(19): siRNA sense strand
caaguguguugacaaaugg

SEQ ID NO: 2033465 - RNA, 19 nt, Homo sapiens
  misc_RNA (1)...(19): siRNA sense strand
gcacgcaacagaagaaguc

SEQ ID NO: 2033466 - RNA, 19 nt, Homo sapiens
  misc_RNA (1)...(19): siRNA sense strand
guaguaugcaugugugauu

SEQ ID NO: 2033467 - RNA, 19 nt, Homo sapiens
  misc_RNA (1)...(19): siRNA sense strand
cagaacagacuuugugugu

SEQ ID NO: 2033468 - RNA, 19 nt, Homo sapiens
  misc_RNA (1)...(19): siRNA sense strand
caucagcucccuugcaguu

SEQ ID NO: 2033469 - RNA, 19 nt, Homo sapiens
  misc_RNA (1)...(19): siRNA sense strand
uaccuuauccuccauuuau

SEQ ID NO: 2033470 - RNA, 19 nt, Homo sapiens
  misc_RNA (1)...(19): siRNA sense strand
cgaguuccaugccaagugu

SEQ ID NO: 2033471 - RNA, 19 nt, Homo sapiens
  misc_RNA (1)...(19): siRNA sense strand
aaauuacgaggcccuguua

SEQ ID NO: 2033472 - RNA, 19 nt, Homo sapiens
  misc_RNA (1)...(19): siRNA sense strand
ccauauguguuaucaaugc

SEQ ID NO: 2033473 - RNA, 19 nt, Homo sapiens
  misc_RNA (1)...(19): siRNA sense strand
cuuaacacaugauccuuug

SEQ ID NO: 2033474 - RNA, 19 nt, Homo sapiens
  misc_RNA (1)...(19): siRNA sense strand
gcagauauugaacaacuuc

SEQ ID NO: 2033475 - RNA, 19 nt, Homo sapiens
  misc_RNA (1)...(19): siRNA sense strand
aagcagauauugaacaacu

SEQ ID NO: 2033476 - RNA, 19 nt, Homo sapiens
  misc_RNA (1)...(19): siRNA sense strand
ggagaacaucuuccaguag

SEQ ID NO: 2033477 - RNA, 19 nt, Homo sapiens
  misc_RNA (1)...(19): siRNA sense strand
agaacagacuuugugugua

SEQ ID NO: 2033478 - RNA, 19 nt, Homo sapiens
  misc_RNA (1)...(19): siRNA sense strand
ucuuaucgguucaauccua

SEQ ID NO: 2033479 - RNA, 19 nt, Homo sapiens
  misc_RNA (1)...(19): siRNA sense strand
ggacugacuaaagcagaua

SEQ ID NO: 2033480 - RNA, 19 nt, Homo sapiens
  misc_RNA (1)...(19): siRNA sense strand
ccagcuuacugccauaugu

SEQ ID NO: 2033481 - RNA, 19 nt, Homo sapiens
  misc_RNA (1)...(19): siRNA sense strand
guaccuuauccuccauuua

SEQ ID NO: 2033482 - RNA, 19 nt, Homo sapiens
  misc_RNA (1)...(19): siRNA sense strand
ugccaaguguguugacaaa

SEQ ID NO: 2033483 - RNA, 19 nt, Homo sapiens
  misc_RNA (1)...(19): siRNA sense strand
gcaaagccucguggacuga

SEQ ID NO: 2033484 - RNA, 19 nt, Homo sapiens
  misc_RNA (1)...(19): siRNA sense strand
uuacaggacguaguagaua

SEQ ID NO: 2033485 - RNA, 19 nt, Homo sapiens
  misc_RNA (1)...(19): siRNA sense strand
aagaagggaucgucugucu

SEQ ID NO: 2033486 - RNA, 19 nt, Homo sapiens
  misc_RNA (1)...(19): siRNA sense strand
uaguaugcaugugugauuu

SEQ ID NO: 2033487 - RNA, 19 nt, Homo sapiens
  misc_RNA (1)...(19): siRNA sense strand
ucuagugauccauuucuua

SEQ ID NO: 2033488 - RNA, 19 nt, Homo sapiens
  misc_RNA (1)...(19): siRNA sense strand
uaacaaccaccagucagaa

SEQ ID NO: 2033489 - RNA, 19 nt, Homo sapiens
  misc_RNA (1)...(19): siRNA sense strand
ccagcagaaugcagucaug

SEQ ID NO: 2033490 - RNA, 19 nt, Homo sapiens
  misc_RNA (1)...(19): siRNA sense strand
guugacaaauggcuuaagg

SEQ ID NO: 2033491 - RNA, 19 nt, Homo sapiens
  misc_RNA (1)...(19): siRNA sense strand
aagccaacaucacuucuca

SEQ ID NO: 2033492 - RNA, 19 nt, Homo sapiens
  misc_RNA (1)...(19): siRNA sense strand
gcccaacuuucagcuuuga

SEQ ID NO: 2033493 - RNA, 19 nt, Homo sapiens
  misc_RNA (1)...(19): siRNA sense strand
cuucaggcauguucaguuc

SEQ ID NO: 2033494 - RNA, 19 nt, Homo sapiens
  misc_RNA (1)...(19): siRNA sense strand
cauguucaguucagcacuu

SEQ ID NO: 2033495 - RNA, 19 nt, Homo sapiens
  misc_RNA (1)...(19): siRNA sense strand
aaaucguacuugcccaauu

SEQ ID NO: 2033496 - RNA, 19 nt, Homo sapiens
  misc_RNA (1)...(19): siRNA sense strand
gauauugaacaacuuccuu

SEQ ID NO: 2033497 - RNA, 19 nt, Homo sapiens
  misc_RNA (1)...(19): siRNA sense strand
cagcuuugaauuagaugua

SEQ ID NO: 2033498 - RNA, 19 nt, Homo sapiens
  misc_RNA (1)...(19): siRNA sense strand
ugaaguggaacucuuagga

SEQ ID NO: 2033499 - RNA, 19 nt, Homo sapiens
  misc_RNA (1)...(19): siRNA sense strand
cuagugauccauuucuuau

SEQ ID NO: 2033500 - RNA, 19 nt, Homo sapiens
  misc_RNA (1)...(19): siRNA sense strand
cccaucauccuccucauuu

SEQ ID NO: 2033501 - RNA, 19 nt, Homo sapiens
  misc_RNA (1)...(19): siRNA sense strand
caaauggcuuaaggcaaau

SEQ ID NO: 2033502 - RNA, 19 nt, Homo sapiens
  misc_RNA (1)...(19): siRNA sense strand
agaagaaguccuccuguca

SEQ ID NO: 2033503 - RNA, 19 nt, Homo sapiens
  misc_RNA (1)...(19): siRNA sense strand
uugcaguucuuaacacaug

SEQ ID NO: 2033504 - RNA, 19 nt, Homo sapiens
  misc_RNA (1)...(19): siRNA sense strand
ccaucauccuccucauuug

SEQ ID NO: 2033505 - RNA, 19 nt, Homo sapiens
  misc_RNA (1)...(19): siRNA sense strand
caggccaguuugucccuuu

SEQ ID NO: 2033506 - RNA, 19 nt, Homo sapiens
  misc_RNA (1)...(19): siRNA sense strand
ggcccaacuuucagcuuug

SEQ ID NO: 2033507 - RNA, 19 nt, Homo sapiens
  misc_RNA (1)...(19): siRNA sense strand
cuuaucgguucaauccuaa

SEQ ID NO: 2033508 - RNA, 19 nt, Homo sapiens
  misc_RNA (1)...(19): siRNA sense strand
ccacaugggauuccacucu

SEQ ID NO: 2033509 - RNA, 19 nt, Homo sapiens
  misc_RNA (1)...(19): siRNA sense strand
cuuacugccauauguguua

SEQ ID NO: 2033510 - RNA, 19 nt, Homo sapiens
  misc_RNA (1)...(19): siRNA sense strand
agugauccauuucuuauac

SEQ ID NO: 2033511 - RNA, 19 nt, Homo sapiens
  misc_RNA (1)...(19): siRNA sense strand
uagugugccuccuccaaug

SEQ ID NO: 2033512 - RNA, 19 nt, Homo sapiens
  misc_RNA (1)...(19): siRNA sense strand
uugccgagcugaugcuuca

SEQ ID NO: 2033513 - RNA, 19 nt, Homo sapiens
  misc_RNA (1)...(19): siRNA sense strand
cuaacaaccaccagucaga

SEQ ID NO: 2033514 - RNA, 19 nt, Homo sapiens
  misc_RNA (1)...(19): siRNA sense strand
gcuuugaauuagauguaga

SEQ ID NO: 2033515 - RNA, 19 nt, Homo sapiens
  misc_RNA (1)...(19): siRNA sense strand
guagugugccuccuccaau

SEQ ID NO: 2033516 - RNA, 19 nt, Homo sapiens
  misc_RNA (1)...(19): siRNA sense strand
ccaauuugccgagcugaug

SEQ ID NO: 2033517 - RNA, 19 nt, Homo sapiens
  misc_RNA (1)...(19): siRNA sense strand
uggcuuaaggcaaaucgua

SEQ ID NO: 2033518 - RNA, 19 nt, Homo sapiens
  misc_RNA (1)...(19): siRNA sense strand
uaacacaugauccuuugca

SEQ ID NO: 2033519 - RNA, 19 nt, Homo sapiens
  misc_RNA (1)...(19): siRNA sense strand
agaagugcaucgggauuca

SEQ ID NO: 2033520 - RNA, 19 nt, Homo sapiens
  misc_RNA (1)...(19): siRNA sense strand
aaaaugaaguggaacucuu

SEQ ID NO: 2033521 - RNA, 19 nt, Homo sapiens
  misc_RNA (1)...(19): siRNA sense strand
gacuuuguguguaguaugc

SEQ ID NO: 2033522 - RNA, 19 nt, Homo sapiens
  misc_RNA (1)...(19): siRNA sense strand
cuaaagcagauauugaaca

SEQ ID NO: 2033523 - RNA, 19 nt, Homo sapiens
  misc_RNA (1)...(19): siRNA sense strand
gaccaagccaacaucacuu

SEQ ID NO: 2033524 - RNA, 19 nt, Homo sapiens
  misc_RNA (1)...(19): siRNA sense strand
cgaccaagccaacaucacu

SEQ ID NO: 2033525 - RNA, 19 nt, Homo sapiens
  misc_RNA (1)...(19): siRNA sense strand
agaagauggagaaguagaa

SEQ ID NO: 2033526 - RNA, 19 nt, Homo sapiens
  misc_RNA (1)...(19): siRNA sense strand
aggcuuacaggacguagua

SEQ ID NO: 2033527 - RNA, 19 nt, Homo sapiens
  misc_RNA (1)...(19): siRNA sense strand
gagguguccuuuggaguac

SEQ ID NO: 2033528 - RNA, 19 nt, Homo sapiens
  misc_RNA (1)...(19): siRNA sense strand
uauacauccuccucaccuu

SEQ ID NO: 2033529 - RNA, 19 nt, Homo sapiens
  misc_RNA (1)...(19): siRNA sense strand
gugauccauuucuuauaca

SEQ ID NO: 2033530 - RNA, 19 nt, Homo sapiens
  misc_RNA (1)...(19): siRNA sense strand
agauguagaagauggagaa

SEQ ID NO: 2033531 - RNA, 19 nt, Homo sapiens
  misc_RNA (1)...(19): siRNA sense strand
ucagcuccaucaaggaaca

SEQ ID NO: 2033532 - RNA, 19 nt, Homo sapiens
  misc_RNA (1)...(19): siRNA sense strand
gaacagacuuuguguguag

SEQ ID NO: 2033533 - RNA, 19 nt, Homo sapiens
  misc_RNA (1)...(19): siRNA sense strand
acaaauggcuuaaggcaaa

SEQ ID NO: 2033534 - RNA, 19 nt, Homo sapiens
  misc_RNA (1)...(19): siRNA sense strand
gaagauaguccaaguccua

SEQ ID NO: 2033535 - RNA, 19 nt, Homo sapiens
  misc_RNA (1)...(19): siRNA sense strand
uguagaagauggagaagua

SEQ ID NO: 2033536 - RNA, 19 nt, Homo sapiens
  misc_RNA (1)...(19): siRNA sense strand
uugaacaacuuccuucuua

SEQ ID NO: 2033537 - RNA, 19 nt, Homo sapiens
  misc_RNA (1)...(19): siRNA sense strand
gcagcuacuuagagucuua

SEQ ID NO: 2033538 - RNA, 19 nt, Homo sapiens
  misc_RNA (1)...(19): siRNA sense strand
gcacaucccugcuuguagu

SEQ ID NO: 2033539 - RNA, 19 nt, Homo sapiens
  misc_RNA (1)...(19): siRNA sense strand
gcacuuaccaguaccauau

SEQ ID NO: 2033540 - RNA, 19 nt, Homo sapiens
  misc_RNA (1)...(19): siRNA sense strand
ccaaguguguugacaaaug

SEQ ID NO: 2033541 - RNA, 19 nt, Homo sapiens
  misc_RNA (1)...(19): siRNA sense strand
ggagguguccuuuggagua

SEQ ID NO: 2033542 - RNA, 19 nt, Homo sapiens
  misc_RNA (1)...(19): siRNA sense strand
aaucguacuugcccaauuu

SEQ ID NO: 2033543 - RNA, 19 nt, Homo sapiens
  misc_RNA (1)...(19): siRNA sense strand
gggcccaacuuucagcuuu

SEQ ID NO: 2033544 - RNA, 19 nt, Homo sapiens
  misc_RNA (1)...(19): siRNA sense strand
gaacaacuuccuucuuauc

SEQ ID NO: 2033545 - RNA, 19 nt, Homo sapiens
  misc_RNA (1)...(19): siRNA sense strand
gcagugggcccaacuuuca

SEQ ID NO: 2033546 - RNA, 19 nt, Homo sapiens
  misc_RNA (1)...(19): siRNA sense strand
caaggcagcuacuuagagu

SEQ ID NO: 2033547 - RNA, 19 nt, Homo sapiens
  misc_RNA (1)...(19): siRNA sense strand
agacagcgccucucucauu

SEQ ID NO: 2033548 - RNA, 19 nt, Homo sapiens
  misc_RNA (1)...(19): siRNA sense strand
gaucagcuccaucaaggaa

SEQ ID NO: 2033549 - RNA, 19 nt, Homo sapiens
  misc_RNA (1)...(19): siRNA sense strand
gacuaaagcagauauugaa

SEQ ID NO: 2033550 - RNA, 19 nt, Homo sapiens
  misc_RNA (1)...(19): siRNA sense strand
gcagaaugcagucaugguu

SEQ ID NO: 2033551 - RNA, 19 nt, Homo sapiens
  misc_RNA (1)...(19): siRNA sense strand
gauagaaaaugaaguggaa

SEQ ID NO: 2033552 - RNA, 19 nt, Homo sapiens
  misc_RNA (1)...(19): siRNA sense strand
guucagcacuuaccaguac

SEQ ID NO: 2033553 - RNA, 19 nt, Homo sapiens
  misc_RNA (1)...(19): siRNA sense strand
cucauucagucuuugauua

SEQ ID NO: 2033554 - RNA, 19 nt, Homo sapiens
  misc_RNA (1)...(19): siRNA sense strand
gaagauggagaaguagaaa

SEQ ID NO: 2033555 - RNA, 19 nt, Homo sapiens
  misc_RNA (1)...(19): siRNA sense strand
gcaccucccugucuguagu

SEQ ID NO: 2033556 - RNA, 19 nt, Homo sapiens
  misc_RNA (1)...(19): siRNA sense strand
aggagaacaucuuccagua

SEQ ID NO: 2033557 - RNA, 19 nt, Homo sapiens
  misc_RNA (1)...(19): siRNA sense strand
aaaugaaguggaacucuua

SEQ ID NO: 2033558 - RNA, 19 nt, Homo sapiens
  misc_RNA (1)...(19): siRNA sense strand
gaucgccucugcaaaggau

SEQ ID NO: 2033559 - RNA, 19 nt, Homo sapiens
  misc_RNA (1)...(19): siRNA sense strand
ggaagaagggaucgucugu

SEQ ID NO: 2033560 - RNA, 19 nt, Homo sapiens
  misc_RNA (1)...(19): siRNA sense strand
gagucaaggcagcuacuua

SEQ ID NO: 2033561 - RNA, 19 nt, Homo sapiens
  misc_RNA (1)...(19): siRNA sense strand
agaaugcagucaugguuga

SEQ ID NO: 2033562 - RNA, 19 nt, Homo sapiens
  misc_RNA (1)...(19): siRNA sense strand
ccaggaugcucugugguuu

SEQ ID NO: 2033563 - RNA, 19 nt, Homo sapiens
  misc_RNA (1)...(19): siRNA sense strand
gacagcgccucucucauuc

SEQ ID NO: 2033564 - RNA, 19 nt, Homo sapiens
  misc_RNA (1)...(19): siRNA sense strand
ugacuaaagcagauauuga

SEQ ID NO: 2033565 - RNA, 19 nt, Homo sapiens
  misc_RNA (1)...(19): siRNA sense strand
ugaacaacuuccuucuuau

SEQ ID NO: 2033566 - RNA, 19 nt, Homo sapiens
  misc_RNA (1)...(19): siRNA sense strand
cuuagagucuuacccugua

SEQ ID NO: 2033567 - RNA, 19 nt, Homo sapiens
  misc_RNA (1)...(19): siRNA sense strand
gagugaagauaguccaagu

SEQ ID NO: 2033568 - RNA, 19 nt, Homo sapiens
  misc_RNA (1)...(19): siRNA sense strand
gcacgcaacagaagaaguc

SEQ ID NO: 2033569 - RNA, 19 nt, Homo sapiens
  misc_RNA (1)...(19): siRNA sense strand
caaguguguugacaaaugg

SEQ ID NO: 2033570 - RNA, 19 nt, Homo sapiens
  misc_RNA (1)...(19): siRNA sense strand
guaguaugcaugugugauu

SEQ ID NO: 2033571 - RNA, 19 nt, Homo sapiens
  misc_RNA (1)...(19): siRNA sense strand
cagaacagacuuugugugu

SEQ ID NO: 2033572 - RNA, 19 nt, Homo sapiens
  misc_RNA (1)...(19): siRNA sense strand
ugccauauguguuaucaau

SEQ ID NO: 2033573 - RNA, 19 nt, Homo sapiens
  misc_RNA (1)...(19): siRNA sense strand
caucagcucccuugcaguu

SEQ ID NO: 2033574 - RNA, 19 nt, Homo sapiens
  misc_RNA (1)...(19): siRNA sense strand
gauaguccaaguccuaaga

SEQ ID NO: 2033575 - RNA, 19 nt, Homo sapiens
  misc_RNA (1)...(19): siRNA sense strand
uaccuuauccuccauuuau

SEQ ID NO: 2033576 - RNA, 19 nt, Homo sapiens
  misc_RNA (1)...(19): siRNA sense strand
cgaguuccaugccaagugu

SEQ ID NO: 2033577 - RNA, 19 nt, Homo sapiens
  misc_RNA (1)...(19): siRNA sense strand
aaauuacgaggcccuguua

SEQ ID NO: 2033578 - RNA, 19 nt, Homo sapiens
  misc_RNA (1)...(19): siRNA sense strand
ccauauguguuaucaaugc

SEQ ID NO: 2033579 - RNA, 19 nt, Homo sapiens
  misc_RNA (1)...(19): siRNA sense strand
cuuaacacaugauccuuug

SEQ ID NO: 2033580 - RNA, 19 nt, Homo sapiens
  misc_RNA (1)...(19): siRNA sense strand
gcagauauugaacaacuuc

SEQ ID NO: 2033581 - RNA, 19 nt, Homo sapiens
  misc_RNA (1)...(19): siRNA sense strand
aagcagauauugaacaacu

SEQ ID NO: 2033582 - RNA, 19 nt, Homo sapiens
  misc_RNA (1)...(19): siRNA sense strand
ggagaacaucuuccaguag

SEQ ID NO: 2033583 - RNA, 19 nt, Homo sapiens
  misc_RNA (1)...(19): siRNA sense strand
agaacagacuuugugugua

SEQ ID NO: 2033584 - RNA, 19 nt, Homo sapiens
  misc_RNA (1)...(19): siRNA sense strand
ucuuaucgguucaauccua

SEQ ID NO: 2033585 - RNA, 19 nt, Homo sapiens
  misc_RNA (1)...(19): siRNA sense strand
ggacugacuaaagcagaua

SEQ ID NO: 2033586 - RNA, 19 nt, Homo sapiens
  misc_RNA (1)...(19): siRNA sense strand
ccagcuuacugccauaugu

SEQ ID NO: 2033587 - RNA, 19 nt, Homo sapiens
  misc_RNA (1)...(19): siRNA sense strand
guaccuuauccuccauuua

SEQ ID NO: 2033588 - RNA, 19 nt, Homo sapiens
  misc_RNA (1)...(19): siRNA sense strand
ugccaaguguguugacaaa

SEQ ID NO: 2033589 - RNA, 19 nt, Homo sapiens
  misc_RNA (1)...(19): siRNA sense strand
gcaaagccucguggacuga

SEQ ID NO: 2033590 - RNA, 19 nt, Homo sapiens
  misc_RNA (1)...(19): siRNA sense strand
uuacaggacguaguagaua

SEQ ID NO: 2033591 - RNA, 19 nt, Homo sapiens
  misc_RNA (1)...(19): siRNA sense strand
aagaagggaucgucugucu

SEQ ID NO: 2033592 - RNA, 19 nt, Homo sapiens
  misc_RNA (1)...(19): siRNA sense strand
uaguaugcaugugugauuu

SEQ ID NO: 2033593 - RNA, 19 nt, Homo sapiens
  misc_RNA (1)...(19): siRNA sense strand
ucuagugauccauuucuua

SEQ ID NO: 2033594 - RNA, 19 nt, Homo sapiens
  misc_RNA (1)...(19): siRNA sense strand
uaacaaccaccagucagaa

SEQ ID NO: 2033595 - RNA, 19 nt, Homo sapiens
  misc_RNA (1)...(19): siRNA sense strand
ccagcagaaugcagucaug

SEQ ID NO: 2033596 - RNA, 19 nt, Homo sapiens
  misc_RNA (1)...(19): siRNA sense strand
guugacaaauggcuuaagg

SEQ ID NO: 2033597 - RNA, 19 nt, Homo sapiens
  misc_RNA (1)...(19): siRNA sense strand
gcccaacuuucagcuuuga

SEQ ID NO: 2033598 - RNA, 19 nt, Homo sapiens
  misc_RNA (1)...(19): siRNA sense strand
aagccaacaucacuucuca

SEQ ID NO: 2033599 - RNA, 19 nt, Homo sapiens
  misc_RNA (1)...(19): siRNA sense strand
cuucaggcauguucaguuc

SEQ ID NO: 2033600 - RNA, 19 nt, Homo sapiens
  misc_RNA (1)...(19): siRNA sense strand
cauguucaguucagcacuu

SEQ ID NO: 2033601 - RNA, 19 nt, Homo sapiens
  misc_RNA (1)...(19): siRNA sense strand
aaaucguacuugcccaauu

SEQ ID NO: 2033602 - RNA, 19 nt, Homo sapiens
  misc_RNA (1)...(19): siRNA sense strand
gauauugaacaacuuccuu

SEQ ID NO: 2033603 - RNA, 19 nt, Homo sapiens
  misc_RNA (1)...(19): siRNA sense strand
cagcuuugaauuagaugua

SEQ ID NO: 2033604 - RNA, 19 nt, Homo sapiens
  misc_RNA (1)...(19): siRNA sense strand
ugaaguggaacucuuagga

SEQ ID NO: 2033605 - RNA, 19 nt, Homo sapiens
  misc_RNA (1)...(19): siRNA sense strand
ccagcucccucaccaccaa

SEQ ID NO: 2033606 - RNA, 19 nt, Homo sapiens
  misc_RNA (1)...(19): siRNA sense strand
cuagugauccauuucuuau

SEQ ID NO: 2033607 - RNA, 19 nt, Homo sapiens
  misc_RNA (1)...(19): siRNA sense strand
cccaucauccuccucauuu

SEQ ID NO: 2033608 - RNA, 19 nt, Homo sapiens
  misc_RNA (1)...(19): siRNA sense strand
caaauggcuuaaggcaaau

SEQ ID NO: 2033609 - RNA, 19 nt, Homo sapiens
  misc_RNA (1)...(19): siRNA sense strand
agaagaaguccuccuguca

SEQ ID NO: 2033610 - RNA, 19 nt, Homo sapiens
  misc_RNA (1)...(19): siRNA sense strand
uugcaguucuuaacacaug

SEQ ID NO: 2033611 - RNA, 19 nt, Homo sapiens
  misc_RNA (1)...(19): siRNA sense strand
ccaucauccuccucauuug

SEQ ID NO: 2033612 - RNA, 19 nt, Homo sapiens
  misc_RNA (1)...(19): siRNA sense strand
caggccaguuugucccuuu

SEQ ID NO: 2033613 - RNA, 19 nt, Homo sapiens
  misc_RNA (1)...(19): siRNA sense strand
ccucucucauucagucuuu

SEQ ID NO: 2033614 - RNA, 19 nt, Homo sapiens
  misc_RNA (1)...(19): siRNA sense strand
ggcccaacuuucagcuuug

SEQ ID NO: 2033615 - RNA, 19 nt, Homo sapiens
  misc_RNA (1)...(19): siRNA sense strand
cuuaucgguucaauccuaa

SEQ ID NO: 2033616 - RNA, 19 nt, Homo sapiens
  misc_RNA (1)...(19): siRNA sense strand
ccacaugggauuccacucu

SEQ ID NO: 2033617 - RNA, 19 nt, Homo sapiens
  misc_RNA (1)...(19): siRNA sense strand
cuuacugccauauguguua

SEQ ID NO: 2033618 - RNA, 19 nt, Homo sapiens
  misc_RNA (1)...(19): siRNA sense strand
agugauccauuucuuauac

SEQ ID NO: 2033619 - RNA, 19 nt, Homo sapiens
  misc_RNA (1)...(19): siRNA sense strand
uagugugccuccuccaaug

SEQ ID NO: 2033620 - RNA, 19 nt, Homo sapiens
  misc_RNA (1)...(19): siRNA sense strand
uugccgagcugaugcuuca

SEQ ID NO: 2033621 - RNA, 19 nt, Homo sapiens
  misc_RNA (1)...(19): siRNA sense strand
cuaacaaccaccagucaga

SEQ ID NO: 2033622 - RNA, 19 nt, Homo sapiens
  misc_RNA (1)...(19): siRNA sense strand
gcuuugaauuagauguaga

SEQ ID NO: 2033623 - RNA, 19 nt, Homo sapiens
  misc_RNA (1)...(19): siRNA sense strand
guagugugccuccuccaau

SEQ ID NO: 2033624 - RNA, 19 nt, Homo sapiens
  misc_RNA (1)...(19): siRNA sense strand
ccaauuugccgagcugaug

SEQ ID NO: 2033625 - RNA, 19 nt, Homo sapiens
  misc_RNA (1)...(19): siRNA sense strand
uggcuuaaggcaaaucgua

SEQ ID NO: 2033626 - RNA, 19 nt, Homo sapiens
  misc_RNA (1)...(19): siRNA sense strand
uaacacaugauccuuugca

SEQ ID NO: 2033627 - RNA, 19 nt, Homo sapiens
  misc_RNA (1)...(19): siRNA sense strand
agaagugcaucgggauuca

SEQ ID NO: 2033628 - RNA, 19 nt, Homo sapiens
  misc_RNA (1)...(19): siRNA sense strand
aaaaugaaguggaacucuu

SEQ ID NO: 2033629 - RNA, 19 nt, Homo sapiens
  misc_RNA (1)...(19): siRNA sense strand
gacuuuguguguaguaugc

SEQ ID NO: 2033630 - RNA, 19 nt, Homo sapiens
  misc_RNA (1)...(19): siRNA sense strand
cuaaagcagauauugaaca

SEQ ID NO: 2033631 - RNA, 19 nt, Homo sapiens
  misc_RNA (1)...(19): siRNA sense strand
gaccaagccaacaucacuu

SEQ ID NO: 2033632 - RNA, 19 nt, Homo sapiens
  misc_RNA (1)...(19): siRNA sense strand
gaacagacuuuguguguag

SEQ ID NO: 2033633 - RNA, 19 nt, Homo sapiens
  misc_RNA (1)...(19): siRNA sense strand
acaaauggcuuaaggcaaa

SEQ ID NO: 2033634 - RNA, 19 nt, Homo sapiens
  misc_RNA (1)...(19): siRNA sense strand
uguagaagauggagaagua

SEQ ID NO: 2033635 - RNA, 19 nt, Homo sapiens
  misc_RNA (1)...(19): siRNA sense strand
uugaacaacuuccuucuua

SEQ ID NO: 2033636 - RNA, 19 nt, Homo sapiens
  misc_RNA (1)...(19): siRNA sense strand
gcagcuacuuagagucuua

SEQ ID NO: 2033637 - RNA, 19 nt, Homo sapiens
  misc_RNA (1)...(19): siRNA sense strand
gcacaucccugcuuguagu

SEQ ID NO: 2033638 - RNA, 19 nt, Homo sapiens
  misc_RNA (1)...(19): siRNA sense strand
gcacuuaccaguaccauau

SEQ ID NO: 2033639 - RNA, 19 nt, Homo sapiens
  misc_RNA (1)...(19): siRNA sense strand
ccaaguguguugacaaaug

SEQ ID NO: 2033640 - RNA, 19 nt, Homo sapiens
  misc_RNA (1)...(19): siRNA sense strand
ggagguguccuuuggagua

SEQ ID NO: 2033641 - RNA, 19 nt, Homo sapiens
  misc_RNA (1)...(19): siRNA sense strand
aaucguacuugcccaauuu

SEQ ID NO: 2033642 - RNA, 19 nt, Homo sapiens
  misc_RNA (1)...(19): siRNA sense strand
gggcccaacuuucagcuuu

SEQ ID NO: 2033643 - RNA, 19 nt, Homo sapiens
  misc_RNA (1)...(19): siRNA sense strand
gaacaacuuccuucuuauc

SEQ ID NO: 2033644 - RNA, 19 nt, Homo sapiens
  misc_RNA (1)...(19): siRNA sense strand
gcagugggcccaacuuuca

SEQ ID NO: 2033645 - RNA, 19 nt, Homo sapiens
  misc_RNA (1)...(19): siRNA sense strand
caaggcagcuacuuagagu

SEQ ID NO: 2033646 - RNA, 19 nt, Homo sapiens
  misc_RNA (1)...(19): siRNA sense strand
gaucagcuccaucaaggaa

SEQ ID NO: 2033647 - RNA, 19 nt, Homo sapiens
  misc_RNA (1)...(19): siRNA sense strand
gacuaaagcagauauugaa

SEQ ID NO: 2033648 - RNA, 19 nt, Homo sapiens
  misc_RNA (1)...(19): siRNA sense strand
gcagaaugcagucaugguu

SEQ ID NO: 2033649 - RNA, 19 nt, Homo sapiens
  misc_RNA (1)...(19): siRNA sense strand
gauagaaaaugaaguggaa

SEQ ID NO: 2033650 - RNA, 19 nt, Homo sapiens
  misc_RNA (1)...(19): siRNA sense strand
guucagcacuuaccaguac

SEQ ID NO: 2033651 - RNA, 19 nt, Homo sapiens
  misc_RNA (1)...(19): siRNA sense strand
gaagauggagaaguagaaa

SEQ ID NO: 2033652 - RNA, 19 nt, Homo sapiens
  misc_RNA (1)...(19): siRNA sense strand
gcaccucccugucuguagu

SEQ ID NO: 2033653 - RNA, 19 nt, Homo sapiens
  misc_RNA (1)...(19): siRNA sense strand
aggagaacaucuuccagua

SEQ ID NO: 2033654 - RNA, 19 nt, Homo sapiens
  misc_RNA (1)...(19): siRNA sense strand
aaaugaaguggaacucuua

SEQ ID NO: 2033655 - RNA, 19 nt, Homo sapiens
  misc_RNA (1)...(19): siRNA sense strand
gaucgccucugcaaaggau

SEQ ID NO: 2033656 - RNA, 19 nt, Homo sapiens
  misc_RNA (1)...(19): siRNA sense strand
ggaagaagggaucgucugu

SEQ ID NO: 2033657 - RNA, 19 nt, Homo sapiens
  misc_RNA (1)...(19): siRNA sense strand
gagucaaggcagcuacuua

SEQ ID NO: 2033658 - RNA, 19 nt, Homo sapiens
  misc_RNA (1)...(19): siRNA sense strand
agaaugcagucaugguuga

SEQ ID NO: 2033659 - RNA, 19 nt, Homo sapiens
  misc_RNA (1)...(19): siRNA sense strand
ccaggaugcucugugguuu

SEQ ID NO: 2033660 - RNA, 19 nt, Homo sapiens
  misc_RNA (1)...(19): siRNA sense strand
ugacuaaagcagauauuga

SEQ ID NO: 2033661 - RNA, 19 nt, Homo sapiens
  misc_RNA (1)...(19): siRNA sense strand
ugaacaacuuccuucuuau

SEQ ID NO: 2033662 - RNA, 19 nt, Homo sapiens
  misc_RNA (1)...(19): siRNA sense strand
cuuagagucuuacccugua

SEQ ID NO: 2033663 - RNA, 19 nt, Homo sapiens
  misc_RNA (1)...(19): siRNA sense strand
ugccauauguguuaucaau

SEQ ID NO: 2033664 - RNA, 19 nt, Homo sapiens
  misc_RNA (1)...(19): siRNA sense strand
caaguguguugacaaaugg

SEQ ID NO: 2033665 - RNA, 19 nt, Homo sapiens
  misc_RNA (1)...(19): siRNA sense strand
gcacgcaacagaagaaguc

SEQ ID NO: 2033666 - RNA, 19 nt, Homo sapiens
  misc_RNA (1)...(19): siRNA sense strand
guaguaugcaugugugauu

SEQ ID NO: 2033667 - RNA, 19 nt, Homo sapiens
  misc_RNA (1)...(19): siRNA sense strand
cagaacagacuuugugugu

SEQ ID NO: 2033668 - RNA, 19 nt, Homo sapiens
  misc_RNA (1)...(19): siRNA sense strand
caucagcucccuugcaguu

SEQ ID NO: 2033669 - RNA, 19 nt, Homo sapiens
  misc_RNA (1)...(19): siRNA sense strand
uaccuuauccuccauuuau

SEQ ID NO: 2033670 - RNA, 19 nt, Homo sapiens
  misc_RNA (1)...(19): siRNA sense strand
cgaguuccaugccaagugu

SEQ ID NO: 2033671 - RNA, 19 nt, Homo sapiens
  misc_RNA (1)...(19): siRNA sense strand
aaauuacgaggcccuguua

SEQ ID NO: 2033672 - RNA, 19 nt, Homo sapiens
  misc_RNA (1)...(19): siRNA sense strand
ccauauguguuaucaaugc

SEQ ID NO: 2033673 - RNA, 19 nt, Homo sapiens
  misc_RNA (1)...(19): siRNA sense strand
cuuaacacaugauccuuug

SEQ ID NO: 2033674 - RNA, 19 nt, Homo sapiens
  misc_RNA (1)...(19): siRNA sense strand
gcagauauugaacaacuuc

SEQ ID NO: 2033675 - RNA, 19 nt, Homo sapiens
  misc_RNA (1)...(19): siRNA sense strand
aagcagauauugaacaacu

SEQ ID NO: 2033676 - RNA, 19 nt, Homo sapiens
  misc_RNA (1)...(19): siRNA sense strand
ggagaacaucuuccaguag

SEQ ID NO: 2033677 - RNA, 19 nt, Homo sapiens
  misc_RNA (1)...(19): siRNA sense strand
agaacagacuuugugugua

SEQ ID NO: 2033678 - RNA, 19 nt, Homo sapiens
  misc_RNA (1)...(19): siRNA sense strand
ucuuaucgguucaauccua

SEQ ID NO: 2033679 - RNA, 19 nt, Homo sapiens
  misc_RNA (1)...(19): siRNA sense strand
ggacugacuaaagcagaua

SEQ ID NO: 2033680 - RNA, 19 nt, Homo sapiens
  misc_RNA (1)...(19): siRNA sense strand
ccagcuuacugccauaugu

SEQ ID NO: 2033681 - RNA, 19 nt, Homo sapiens
  misc_RNA (1)...(19): siRNA sense strand
guaccuuauccuccauuua

SEQ ID NO: 2033682 - RNA, 19 nt, Homo sapiens
  misc_RNA (1)...(19): siRNA sense strand
ugccaaguguguugacaaa

SEQ ID NO: 2033683 - RNA, 19 nt, Homo sapiens
  misc_RNA (1)...(19): siRNA sense strand
gcaaagccucguggacuga

SEQ ID NO: 2033684 - RNA, 19 nt, Homo sapiens
  misc_RNA (1)...(19): siRNA sense strand
uuacaggacguaguagaua

SEQ ID NO: 2033685 - RNA, 19 nt, Homo sapiens
  misc_RNA (1)...(19): siRNA sense strand
aagaagggaucgucugucu

SEQ ID NO: 2033686 - RNA, 19 nt, Homo sapiens
  misc_RNA (1)...(19): siRNA sense strand
uaguaugcaugugugauuu

SEQ ID NO: 2033687 - RNA, 19 nt, Homo sapiens
  misc_RNA (1)...(19): siRNA sense strand
ucuagugauccauuucuua

SEQ ID NO: 2033688 - RNA, 19 nt, Homo sapiens
  misc_RNA (1)...(19): siRNA sense strand
uaacaaccaccagucagaa

SEQ ID NO: 2033689 - RNA, 19 nt, Homo sapiens
  misc_RNA (1)...(19): siRNA sense strand
ccagcagaaugcagucaug

SEQ ID NO: 2033690 - RNA, 19 nt, Homo sapiens
  misc_RNA (1)...(19): siRNA sense strand
guugacaaauggcuuaagg

SEQ ID NO: 2033691 - RNA, 19 nt, Homo sapiens
  misc_RNA (1)...(19): siRNA sense strand
aagccaacaucacuucuca

SEQ ID NO: 2033692 - RNA, 19 nt, Homo sapiens
  misc_RNA (1)...(19): siRNA sense strand
gcccaacuuucagcuuuga

SEQ ID NO: 2033693 - RNA, 19 nt, Homo sapiens
  misc_RNA (1)...(19): siRNA sense strand
cuucaggcauguucaguuc

SEQ ID NO: 2033694 - RNA, 19 nt, Homo sapiens
  misc_RNA (1)...(19): siRNA sense strand
cauguucaguucagcacuu

SEQ ID NO: 2033695 - RNA, 19 nt, Homo sapiens
  misc_RNA (1)...(19): siRNA sense strand
aaaucguacuugcccaauu

SEQ ID NO: 2033696 - RNA, 19 nt, Homo sapiens
  misc_RNA (1)...(19): siRNA sense strand
gauauugaacaacuuccuu

SEQ ID NO: 2033697 - RNA, 19 nt, Homo sapiens
  misc_RNA (1)...(19): siRNA sense strand
cagcuuugaauuagaugua

SEQ ID NO: 2033698 - RNA, 19 nt, Homo sapiens
  misc_RNA (1)...(19): siRNA sense strand
ugaaguggaacucuuagga

SEQ ID NO: 2033699 - RNA, 19 nt, Homo sapiens
  misc_RNA (1)...(19): siRNA sense strand
cuagugauccauuucuuau

SEQ ID NO: 2033700 - RNA, 19 nt, Homo sapiens
  misc_RNA (1)...(19): siRNA sense strand
cccaucauccuccucauuu

SEQ ID NO: 2033701 - RNA, 19 nt, Homo sapiens
  misc_RNA (1)...(19): siRNA sense strand
caaauggcuuaaggcaaau

SEQ ID NO: 2033702 - RNA, 19 nt, Homo sapiens
  misc_RNA (1)...(19): siRNA sense strand
agaagaaguccuccuguca

SEQ ID NO: 2033703 - RNA, 19 nt, Homo sapiens
  misc_RNA (1)...(19): siRNA sense strand
uugcaguucuuaacacaug

SEQ ID NO: 2033704 - RNA, 19 nt, Homo sapiens
  misc_RNA (1)...(19): siRNA sense strand
ccaucauccuccucauuug

SEQ ID NO: 2033705 - RNA, 19 nt, Homo sapiens
  misc_RNA (1)...(19): siRNA sense strand
caggccaguuugucccuuu

SEQ ID NO: 2033706 - RNA, 19 nt, Homo sapiens
  misc_RNA (1)...(19): siRNA sense strand
ggcccaacuuucagcuuug

SEQ ID NO: 2033707 - RNA, 19 nt, Homo sapiens
  misc_RNA (1)...(19): siRNA sense strand
cuuaucgguucaauccuaa

SEQ ID NO: 2033708 - RNA, 19 nt, Homo sapiens
  misc_RNA (1)...(19): siRNA sense strand
ccacaugggauuccacucu

SEQ ID NO: 2033709 - RNA, 19 nt, Homo sapiens
  misc_RNA (1)...(19): siRNA sense strand
cuuacugccauauguguua

SEQ ID NO: 2033710 - RNA, 19 nt, Homo sapiens
  misc_RNA (1)...(19): siRNA sense strand
agugauccauuucuuauac

SEQ ID NO: 2033711 - RNA, 19 nt, Homo sapiens
  misc_RNA (1)...(19): siRNA sense strand
uagugugccuccuccaaug

SEQ ID NO: 2033712 - RNA, 19 nt, Homo sapiens
  misc_RNA (1)...(19): siRNA sense strand
uugccgagcugaugcuuca

SEQ ID NO: 2033713 - RNA, 19 nt, Homo sapiens
  misc_RNA (1)...(19): siRNA sense strand
cuaacaaccaccagucaga

SEQ ID NO: 2033714 - RNA, 19 nt, Homo sapiens
  misc_RNA (1)...(19): siRNA sense strand
gcuuugaauuagauguaga

SEQ ID NO: 2033715 - RNA, 19 nt, Homo sapiens
  misc_RNA (1)...(19): siRNA sense strand
guagugugccuccuccaau

SEQ ID NO: 2033716 - RNA, 19 nt, Homo sapiens
  misc_RNA (1)...(19): siRNA sense strand
ccaauuugccgagcugaug

SEQ ID NO: 2033717 - RNA, 19 nt, Homo sapiens
  misc_RNA (1)...(19): siRNA sense strand
uggcuuaaggcaaaucgua

SEQ ID NO: 2033718 - RNA, 19 nt, Homo sapiens
  misc_RNA (1)...(19): siRNA sense strand
uaacacaugauccuuugca

SEQ ID NO: 2033719 - RNA, 19 nt, Homo sapiens
  misc_RNA (1)...(19): siRNA sense strand
agaagugcaucgggauuca

SEQ ID NO: 2033720 - RNA, 19 nt, Homo sapiens
  misc_RNA (1)...(19): siRNA sense strand
aaaaugaaguggaacucuu

SEQ ID NO: 2033721 - RNA, 19 nt, Homo sapiens
  misc_RNA (1)...(19): siRNA sense strand
gacuuuguguguaguaugc

SEQ ID NO: 2033722 - RNA, 19 nt, Homo sapiens
  misc_RNA (1)...(19): siRNA sense strand
cuaaagcagauauugaaca

SEQ ID NO: 2033723 - RNA, 19 nt, Homo sapiens
  misc_RNA (1)...(19): siRNA sense strand
gaccaagccaacaucacuu

SEQ ID NO: 2033724 - RNA, 19 nt, Homo sapiens
  misc_RNA (1)...(19): siRNA sense strand
cgaccaagccaacaucacu

SEQ ID NO: 2033725 - RNA, 19 nt, Homo sapiens
  misc_RNA (1)...(19): siRNA sense strand
agaagauggagaaguagaa

SEQ ID NO: 2033726 - RNA, 19 nt, Homo sapiens
  misc_RNA (1)...(19): siRNA sense strand
aggcuuacaggacguagua

SEQ ID NO: 2033727 - RNA, 19 nt, Homo sapiens
  misc_RNA (1)...(19): siRNA sense strand
gagguguccuuuggaguac

SEQ ID NO: 2033728 - RNA, 19 nt, Homo sapiens
  misc_RNA (1)...(19): siRNA sense strand
uauacauccuccucaccuu

SEQ ID NO: 2033729 - RNA, 19 nt, Homo sapiens
  misc_RNA (1)...(19): siRNA sense strand
gugauccauuucuuauaca

SEQ ID NO: 2033730 - RNA, 19 nt, Homo sapiens
  misc_RNA (1)...(19): siRNA sense strand
agauguagaagauggagaa

SEQ ID NO: 2033731 - RNA, 19 nt, Homo sapiens
  misc_RNA (1)...(19): siRNA sense strand
ucagcuccaucaaggaaca

SEQ ID NO: 2033732 - RNA, 19 nt, Homo sapiens
  misc_RNA (1)...(19): siRNA sense strand
gaacagacuuuguguguag

SEQ ID NO: 2033733 - RNA, 19 nt, Homo sapiens
  misc_RNA (1)...(19): siRNA sense strand
acaaauggcuuaaggcaaa

SEQ ID NO: 2033734 - RNA, 19 nt, Homo sapiens
  misc_RNA (1)...(19): siRNA sense strand
gaagauaguccaaguccua

SEQ ID NO: 2033735 - RNA, 19 nt, Homo sapiens
  misc_RNA (1)...(19): siRNA sense strand
uguagaagauggagaagua

SEQ ID NO: 2033736 - RNA, 19 nt, Homo sapiens
  misc_RNA (1)...(19): siRNA sense strand
uugaacaacuuccuucuua

SEQ ID NO: 2033737 - RNA, 19 nt, Homo sapiens
  misc_RNA (1)...(19): siRNA sense strand
gcagcuacuuagagucuua

SEQ ID NO: 2033738 - RNA, 19 nt, Homo sapiens
  misc_RNA (1)...(19): siRNA sense strand
gcacaucccugcuuguagu

SEQ ID NO: 2033739 - RNA, 19 nt, Homo sapiens
  misc_RNA (1)...(19): siRNA sense strand
gcacuuaccaguaccauau

SEQ ID NO: 2033740 - RNA, 19 nt, Homo sapiens
  misc_RNA (1)...(19): siRNA sense strand
ccaaguguguugacaaaug

SEQ ID NO: 2033741 - RNA, 19 nt, Homo sapiens
  misc_RNA (1)...(19): siRNA sense strand
ggagguguccuuuggagua

SEQ ID NO: 2033742 - RNA, 19 nt, Homo sapiens
  misc_RNA (1)...(19): siRNA sense strand
aaucguacuugcccaauuu

SEQ ID NO: 2033743 - RNA, 19 nt, Homo sapiens
  misc_RNA (1)...(19): siRNA sense strand
gggcccaacuuucagcuuu

SEQ ID NO: 2033744 - RNA, 19 nt, Homo sapiens
  misc_RNA (1)...(19): siRNA sense strand
gaacaacuuccuucuuauc

SEQ ID NO: 2033745 - RNA, 19 nt, Homo sapiens
  misc_RNA (1)...(19): siRNA sense strand
gcagugggcccaacuuuca

SEQ ID NO: 2033746 - RNA, 19 nt, Homo sapiens
  misc_RNA (1)...(19): siRNA sense strand
caaggcagcuacuuagagu

SEQ ID NO: 2033747 - RNA, 19 nt, Homo sapiens
  misc_RNA (1)...(19): siRNA sense strand
agacagcgccucucucauu

SEQ ID NO: 2033748 - RNA, 19 nt, Homo sapiens
  misc_RNA (1)...(19): siRNA sense strand
gaucagcuccaucaaggaa

SEQ ID NO: 2033749 - RNA, 19 nt, Homo sapiens
  misc_RNA (1)...(19): siRNA sense strand
gacuaaagcagauauugaa

SEQ ID NO: 2033750 - RNA, 19 nt, Homo sapiens
  misc_RNA (1)...(19): siRNA sense strand
gcagaaugcagucaugguu

SEQ ID NO: 2033751 - RNA, 19 nt, Homo sapiens
  misc_RNA (1)...(19): siRNA sense strand
gauagaaaaugaaguggaa

SEQ ID NO: 2033752 - RNA, 19 nt, Homo sapiens
  misc_RNA (1)...(19): siRNA sense strand
guucagcacuuaccaguac

SEQ ID NO: 2033753 - RNA, 19 nt, Homo sapiens
  misc_RNA (1)...(19): siRNA sense strand
cucauucagucuuugauua

SEQ ID NO: 2033754 - RNA, 19 nt, Homo sapiens
  misc_RNA (1)...(19): siRNA sense strand
gaagauggagaaguagaaa

SEQ ID NO: 2033755 - RNA, 19 nt, Homo sapiens
  misc_RNA (1)...(19): siRNA sense strand
gcaccucccugucuguagu

SEQ ID NO: 2033756 - RNA, 19 nt, Homo sapiens
  misc_RNA (1)...(19): siRNA sense strand
aggagaacaucuuccagua

SEQ ID NO: 2033757 - RNA, 19 nt, Homo sapiens
  misc_RNA (1)...(19): siRNA sense strand
aaaugaaguggaacucuua

SEQ ID NO: 2033758 - RNA, 19 nt, Homo sapiens
  misc_RNA (1)...(19): siRNA sense strand
gaucgccucugcaaaggau

SEQ ID NO: 2033759 - RNA, 19 nt, Homo sapiens
  misc_RNA (1)...(19): siRNA sense strand
ggaagaagggaucgucugu

SEQ ID NO: 2033760 - RNA, 19 nt, Homo sapiens
  misc_RNA (1)...(19): siRNA sense strand
gagucaaggcagcuacuua

SEQ ID NO: 2033761 - RNA, 19 nt, Homo sapiens
  misc_RNA (1)...(19): siRNA sense strand
agaaugcagucaugguuga

SEQ ID NO: 2033762 - RNA, 19 nt, Homo sapiens
  misc_RNA (1)...(19): siRNA sense strand
ccaggaugcucugugguuu

SEQ ID NO: 2033763 - RNA, 19 nt, Homo sapiens
  misc_RNA (1)...(19): siRNA sense strand
gacagcgccucucucauuc

SEQ ID NO: 2033764 - RNA, 19 nt, Homo sapiens
  misc_RNA (1)...(19): siRNA sense strand
ugacuaaagcagauauuga

SEQ ID NO: 2033765 - RNA, 19 nt, Homo sapiens
  misc_RNA (1)...(19): siRNA sense strand
ugaacaacuuccuucuuau

SEQ ID NO: 2033766 - RNA, 19 nt, Homo sapiens
  misc_RNA (1)...(19): siRNA sense strand
cuuagagucuuacccugua

SEQ ID NO: 2033767 - RNA, 19 nt, Homo sapiens
  misc_RNA (1)...(19): siRNA sense strand
gagugaagauaguccaagu

SEQ ID NO: 2033768 - RNA, 19 nt, Homo sapiens
  misc_RNA (1)...(19): siRNA sense strand
gcacgcaacagaagaaguc

SEQ ID NO: 2033769 - RNA, 19 nt, Homo sapiens
  misc_RNA (1)...(19): siRNA sense strand
caaguguguugacaaaugg

SEQ ID NO: 2033770 - RNA, 19 nt, Homo sapiens
  misc_RNA (1)...(19): siRNA sense strand
guaguaugcaugugugauu

SEQ ID NO: 2033771 - RNA, 19 nt, Homo sapiens
  misc_RNA (1)...(19): siRNA sense strand
cagaacagacuuugugugu

SEQ ID NO: 2033772 - RNA, 19 nt, Homo sapiens
  misc_RNA (1)...(19): siRNA sense strand
ugccauauguguuaucaau

SEQ ID NO: 2033773 - RNA, 19 nt, Homo sapiens
  misc_RNA (1)...(19): siRNA sense strand
caucagcucccuugcaguu

SEQ ID NO: 2033774 - RNA, 19 nt, Homo sapiens
  misc_RNA (1)...(19): siRNA sense strand
gauaguccaaguccuaaga

SEQ ID NO: 2033775 - RNA, 19 nt, Homo sapiens
  misc_RNA (1)...(19): siRNA sense strand
uaccuuauccuccauuuau

SEQ ID NO: 2033776 - RNA, 19 nt, Homo sapiens
  misc_RNA (1)...(19): siRNA sense strand
cgaguuccaugccaagugu

SEQ ID NO: 2033777 - RNA, 19 nt, Homo sapiens
  misc_RNA (1)...(19): siRNA sense strand
aaauuacgaggcccuguua

SEQ ID NO: 2033778 - RNA, 19 nt, Homo sapiens
  misc_RNA (1)...(19): siRNA sense strand
ccauauguguuaucaaugc

SEQ ID NO: 2033779 - RNA, 19 nt, Homo sapiens
  misc_RNA (1)...(19): siRNA sense strand
cuuaacacaugauccuuug

SEQ ID NO: 2033780 - RNA, 19 nt, Homo sapiens
  misc_RNA (1)...(19): siRNA sense strand
gcagauauugaacaacuuc

SEQ ID NO: 2033781 - RNA, 19 nt, Homo sapiens
  misc_RNA (1)...(19): siRNA sense strand
aagcagauauugaacaacu

SEQ ID NO: 2033782 - RNA, 19 nt, Homo sapiens
  misc_RNA (1)...(19): siRNA sense strand
ggagaacaucuuccaguag

SEQ ID NO: 2033783 - RNA, 19 nt, Homo sapiens
  misc_RNA (1)...(19): siRNA sense strand
agaacagacuuugugugua

SEQ ID NO: 2033784 - RNA, 19 nt, Homo sapiens
  misc_RNA (1)...(19): siRNA sense strand
ucuuaucgguucaauccua

SEQ ID NO: 2033785 - RNA, 19 nt, Homo sapiens
  misc_RNA (1)...(19): siRNA sense strand
ggacugacuaaagcagaua

SEQ ID NO: 2033786 - RNA, 19 nt, Homo sapiens
  misc_RNA (1)...(19): siRNA sense strand
ccagcuuacugccauaugu

SEQ ID NO: 2033787 - RNA, 19 nt, Homo sapiens
  misc_RNA (1)...(19): siRNA sense strand
guaccuuauccuccauuua

SEQ ID NO: 2033788 - RNA, 19 nt, Homo sapiens
  misc_RNA (1)...(19): siRNA sense strand
ugccaaguguguugacaaa

SEQ ID NO: 2033789 - RNA, 19 nt, Homo sapiens
  misc_RNA (1)...(19): siRNA sense strand
gcaaagccucguggacuga

SEQ ID NO: 2033790 - RNA, 19 nt, Homo sapiens
  misc_RNA (1)...(19): siRNA sense strand
uuacaggacguaguagaua

SEQ ID NO: 2033791 - RNA, 19 nt, Homo sapiens
  misc_RNA (1)...(19): siRNA sense strand
aagaagggaucgucugucu

SEQ ID NO: 2033792 - RNA, 19 nt, Homo sapiens
  misc_RNA (1)...(19): siRNA sense strand
uaguaugcaugugugauuu

SEQ ID NO: 2033793 - RNA, 19 nt, Homo sapiens
  misc_RNA (1)...(19): siRNA sense strand
ucuagugauccauuucuua

SEQ ID NO: 2033794 - RNA, 19 nt, Homo sapiens
  misc_RNA (1)...(19): siRNA sense strand
uaacaaccaccagucagaa

SEQ ID NO: 2033795 - RNA, 19 nt, Homo sapiens
  misc_RNA (1)...(19): siRNA sense strand
ccagcagaaugcagucaug

SEQ ID NO: 2033796 - RNA, 19 nt, Homo sapiens
  misc_RNA (1)...(19): siRNA sense strand
guugacaaauggcuuaagg

SEQ ID NO: 2033797 - RNA, 19 nt, Homo sapiens
  misc_RNA (1)...(19): siRNA sense strand
gcccaacuuucagcuuuga

SEQ ID NO: 2033798 - RNA, 19 nt, Homo sapiens
  misc_RNA (1)...(19): siRNA sense strand
aagccaacaucacuucuca

SEQ ID NO: 2033799 - RNA, 19 nt, Homo sapiens
  misc_RNA (1)...(19): siRNA sense strand
cuucaggcauguucaguuc

SEQ ID NO: 2033800 - RNA, 19 nt, Homo sapiens
  misc_RNA (1)...(19): siRNA sense strand
cauguucaguucagcacuu

SEQ ID NO: 2033801 - RNA, 19 nt, Homo sapiens
  misc_RNA (1)...(19): siRNA sense strand
aaaucguacuugcccaauu

SEQ ID NO: 2033802 - RNA, 19 nt, Homo sapiens
  misc_RNA (1)...(19): siRNA sense strand
gauauugaacaacuuccuu

SEQ ID NO: 2033803 - RNA, 19 nt, Homo sapiens
  misc_RNA (1)...(19): siRNA sense strand
cagcuuugaauuagaugua

SEQ ID NO: 2033804 - RNA, 19 nt, Homo sapiens
  misc_RNA (1)...(19): siRNA sense strand
ugaaguggaacucuuagga

SEQ ID NO: 2033805 - RNA, 19 nt, Homo sapiens
  misc_RNA (1)...(19): siRNA sense strand
ccagcucccucaccaccaa

SEQ ID NO: 2033806 - RNA, 19 nt, Homo sapiens
  misc_RNA (1)...(19): siRNA sense strand
cuagugauccauuucuuau

SEQ ID NO: 2033807 - RNA, 19 nt, Homo sapiens
  misc_RNA (1)...(19): siRNA sense strand
cccaucauccuccucauuu

SEQ ID NO: 2033808 - RNA, 19 nt, Homo sapiens
  misc_RNA (1)...(19): siRNA sense strand
caaauggcuuaaggcaaau

SEQ ID NO: 2033809 - RNA, 19 nt, Homo sapiens
  misc_RNA (1)...(19): siRNA sense strand
agaagaaguccuccuguca

SEQ ID NO: 2033810 - RNA, 19 nt, Homo sapiens
  misc_RNA (1)...(19): siRNA sense strand
uugcaguucuuaacacaug

SEQ ID NO: 2033811 - RNA, 19 nt, Homo sapiens
  misc_RNA (1)...(19): siRNA sense strand
ccaucauccuccucauuug

SEQ ID NO: 2033812 - RNA, 19 nt, Homo sapiens
  misc_RNA (1)...(19): siRNA sense strand
caggccaguuugucccuuu

SEQ ID NO: 2033813 - RNA, 19 nt, Homo sapiens
  misc_RNA (1)...(19): siRNA sense strand
ccucucucauucagucuuu

SEQ ID NO: 2033814 - RNA, 19 nt, Homo sapiens
  misc_RNA (1)...(19): siRNA sense strand
ggcccaacuuucagcuuug

SEQ ID NO: 2033815 - RNA, 19 nt, Homo sapiens
  misc_RNA (1)...(19): siRNA sense strand
cuuaucgguucaauccuaa

SEQ ID NO: 2033816 - RNA, 19 nt, Homo sapiens
  misc_RNA (1)...(19): siRNA sense strand
ccacaugggauuccacucu

SEQ ID NO: 2033817 - RNA, 19 nt, Homo sapiens
  misc_RNA (1)...(19): siRNA sense strand
cuuacugccauauguguua

SEQ ID NO: 2033818 - RNA, 19 nt, Homo sapiens
  misc_RNA (1)...(19): siRNA sense strand
agugauccauuucuuauac

SEQ ID NO: 2033819 - RNA, 19 nt, Homo sapiens
  misc_RNA (1)...(19): siRNA sense strand
uagugugccuccuccaaug

SEQ ID NO: 2033820 - RNA, 19 nt, Homo sapiens
  misc_RNA (1)...(19): siRNA sense strand
uugccgagcugaugcuuca

SEQ ID NO: 2033821 - RNA, 19 nt, Homo sapiens
  misc_RNA (1)...(19): siRNA sense strand
cuaacaaccaccagucaga

SEQ ID NO: 2033822 - RNA, 19 nt, Homo sapiens
  misc_RNA (1)...(19): siRNA sense strand
gcuuugaauuagauguaga

SEQ ID NO: 2033823 - RNA, 19 nt, Homo sapiens
  misc_RNA (1)...(19): siRNA sense strand
guagugugccuccuccaau

SEQ ID NO: 2033824 - RNA, 19 nt, Homo sapiens
  misc_RNA (1)...(19): siRNA sense strand
ccaauuugccgagcugaug

SEQ ID NO: 2033825 - RNA, 19 nt, Homo sapiens
  misc_RNA (1)...(19): siRNA sense strand
uggcuuaaggcaaaucgua

SEQ ID NO: 2033826 - RNA, 19 nt, Homo sapiens
  misc_RNA (1)...(19): siRNA sense strand
uaacacaugauccuuugca

SEQ ID NO: 2033827 - RNA, 19 nt, Homo sapiens
  misc_RNA (1)...(19): siRNA sense strand
agaagugcaucgggauuca

SEQ ID NO: 2033828 - RNA, 19 nt, Homo sapiens
  misc_RNA (1)...(19): siRNA sense strand
aaaaugaaguggaacucuu

SEQ ID NO: 2033829 - RNA, 19 nt, Homo sapiens
  misc_RNA (1)...(19): siRNA sense strand
gacuuuguguguaguaugc

SEQ ID NO: 2033830 - RNA, 19 nt, Homo sapiens
  misc_RNA (1)...(19): siRNA sense strand
cuaaagcagauauugaaca

SEQ ID NO: 2033831 - RNA, 19 nt, Homo sapiens
  misc_RNA (1)...(19): siRNA sense strand
gaccaagccaacaucacuu

SEQ ID NO: 2033832 - RNA, 19 nt, Homo sapiens
  misc_RNA (1)...(19): siRNA sense strand
gaacagacuuuguguguag

SEQ ID NO: 2033833 - RNA, 19 nt, Homo sapiens
  misc_RNA (1)...(19): siRNA sense strand
acaaauggcuuaaggcaaa

SEQ ID NO: 2033834 - RNA, 19 nt, Homo sapiens
  misc_RNA (1)...(19): siRNA sense strand
uguagaagauggagaagua

SEQ ID NO: 2033835 - RNA, 19 nt, Homo sapiens
  misc_RNA (1)...(19): siRNA sense strand
uugaacaacuuccuucuua

SEQ ID NO: 2033836 - RNA, 19 nt, Homo sapiens
  misc_RNA (1)...(19): siRNA sense strand
gcagcuacuuagagucuua

SEQ ID NO: 2033837 - RNA, 19 nt, Homo sapiens
  misc_RNA (1)...(19): siRNA sense strand
gcacaucccugcuuguagu

SEQ ID NO: 2033838 - RNA, 19 nt, Homo sapiens
  misc_RNA (1)...(19): siRNA sense strand
gcacuuaccaguaccauau

SEQ ID NO: 2033839 - RNA, 19 nt, Homo sapiens
  misc_RNA (1)...(19): siRNA sense strand
ccaaguguguugacaaaug

SEQ ID NO: 2033840 - RNA, 19 nt, Homo sapiens
  misc_RNA (1)...(19): siRNA sense strand
ggagguguccuuuggagua

SEQ ID NO: 2033841 - RNA, 19 nt, Homo sapiens
  misc_RNA (1)...(19): siRNA sense strand
aaucguacuugcccaauuu

SEQ ID NO: 2033842 - RNA, 19 nt, Homo sapiens
  misc_RNA (1)...(19): siRNA sense strand
gggcccaacuuucagcuuu

SEQ ID NO: 2033843 - RNA, 19 nt, Homo sapiens
  misc_RNA (1)...(19): siRNA sense strand
gaacaacuuccuucuuauc

SEQ ID NO: 2033844 - RNA, 19 nt, Homo sapiens
  misc_RNA (1)...(19): siRNA sense strand
gcagugggcccaacuuuca

SEQ ID NO: 2033845 - RNA, 19 nt, Homo sapiens
  misc_RNA (1)...(19): siRNA sense strand
caaggcagcuacuuagagu

SEQ ID NO: 2033846 - RNA, 19 nt, Homo sapiens
  misc_RNA (1)...(19): siRNA sense strand
gaucagcuccaucaaggaa

SEQ ID NO: 2033847 - RNA, 19 nt, Homo sapiens
  misc_RNA (1)...(19): siRNA sense strand
gacuaaagcagauauugaa

SEQ ID NO: 2033848 - RNA, 19 nt, Homo sapiens
  misc_RNA (1)...(19): siRNA sense strand
gcagaaugcagucaugguu

SEQ ID NO: 2033849 - RNA, 19 nt, Homo sapiens
  misc_RNA (1)...(19): siRNA sense strand
gauagaaaaugaaguggaa

SEQ ID NO: 2033850 - RNA, 19 nt, Homo sapiens
  misc_RNA (1)...(19): siRNA sense strand
guucagcacuuaccaguac

SEQ ID NO: 2033851 - RNA, 19 nt, Homo sapiens
  misc_RNA (1)...(19): siRNA sense strand
gaagauggagaaguagaaa

SEQ ID NO: 2033852 - RNA, 19 nt, Homo sapiens
  misc_RNA (1)...(19): siRNA sense strand
gcaccucccugucuguagu

SEQ ID NO: 2033853 - RNA, 19 nt, Homo sapiens
  misc_RNA (1)...(19): siRNA sense strand
aggagaacaucuuccagua

SEQ ID NO: 2033854 - RNA, 19 nt, Homo sapiens
  misc_RNA (1)...(19): siRNA sense strand
aaaugaaguggaacucuua

SEQ ID NO: 2033855 - RNA, 19 nt, Homo sapiens
  misc_RNA (1)...(19): siRNA sense strand
gaucgccucugcaaaggau

SEQ ID NO: 2033856 - RNA, 19 nt, Homo sapiens
  misc_RNA (1)...(19): siRNA sense strand
ggaagaagggaucgucugu

SEQ ID NO: 2033857 - RNA, 19 nt, Homo sapiens
  misc_RNA (1)...(19): siRNA sense strand
gagucaaggcagcuacuua

SEQ ID NO: 2033858 - RNA, 19 nt, Homo sapiens
  misc_RNA (1)...(19): siRNA sense strand
agaaugcagucaugguuga

SEQ ID NO: 2033859 - RNA, 19 nt, Homo sapiens
  misc_RNA (1)...(19): siRNA sense strand
ccaggaugcucugugguuu

SEQ ID NO: 2033860 - RNA, 19 nt, Homo sapiens
  misc_RNA (1)...(19): siRNA sense strand
ugacuaaagcagauauuga

SEQ ID NO: 2033861 - RNA, 19 nt, Homo sapiens
  misc_RNA (1)...(19): siRNA sense strand
ugaacaacuuccuucuuau

SEQ ID NO: 2033862 - RNA, 19 nt, Homo sapiens
  misc_RNA (1)...(19): siRNA sense strand
cuuagagucuuacccugua

SEQ ID NO: 2033863 - RNA, 19 nt, Homo sapiens
  misc_RNA (1)...(19): siRNA sense strand
ugccauauguguuaucaau

SEQ ID NO: 2033864 - RNA, 19 nt, Homo sapiens
  misc_RNA (1)...(19): siRNA sense strand
caaguguguugacaaaugg

SEQ ID NO: 2033865 - RNA, 19 nt, Homo sapiens
  misc_RNA (1)...(19): siRNA sense strand
gcacgcaacagaagaaguc

SEQ ID NO: 2033866 - RNA, 19 nt, Homo sapiens
  misc_RNA (1)...(19): siRNA sense strand
guaguaugcaugugugauu

SEQ ID NO: 2033867 - RNA, 19 nt, Homo sapiens
  misc_RNA (1)...(19): siRNA sense strand
cagaacagacuuugugugu

SEQ ID NO: 2033868 - RNA, 19 nt, Homo sapiens
  misc_RNA (1)...(19): siRNA sense strand
caucagcucccuugcaguu

SEQ ID NO: 2033869 - RNA, 19 nt, Homo sapiens
  misc_RNA (1)...(19): siRNA sense strand
uaccuuauccuccauuuau

SEQ ID NO: 2033870 - RNA, 19 nt, Homo sapiens
  misc_RNA (1)...(19): siRNA sense strand
cgaguuccaugccaagugu

SEQ ID NO: 2033871 - RNA, 19 nt, Homo sapiens
  misc_RNA (1)...(19): siRNA sense strand
aaauuacgaggcccuguua

SEQ ID NO: 2033872 - RNA, 19 nt, Homo sapiens
  misc_RNA (1)...(19): siRNA sense strand
ccauauguguuaucaaugc

SEQ ID NO: 2033873 - RNA, 19 nt, Homo sapiens
  misc_RNA (1)...(19): siRNA sense strand
cuuaacacaugauccuuug

SEQ ID NO: 2033874 - RNA, 19 nt, Homo sapiens
  misc_RNA (1)...(19): siRNA sense strand
gcagauauugaacaacuuc

SEQ ID NO: 2033875 - RNA, 19 nt, Homo sapiens
  misc_RNA (1)...(19): siRNA sense strand
aagcagauauugaacaacu

SEQ ID NO: 2033876 - RNA, 19 nt, Homo sapiens
  misc_RNA (1)...(19): siRNA sense strand
ggagaacaucuuccaguag

SEQ ID NO: 2033877 - RNA, 19 nt, Homo sapiens
  misc_RNA (1)...(19): siRNA sense strand
agaacagacuuugugugua

SEQ ID NO: 2033878 - RNA, 19 nt, Homo sapiens
  misc_RNA (1)...(19): siRNA sense strand
ucuuaucgguucaauccua

SEQ ID NO: 2033879 - RNA, 19 nt, Homo sapiens
  misc_RNA (1)...(19): siRNA sense strand
ggacugacuaaagcagaua

SEQ ID NO: 2033880 - RNA, 19 nt, Homo sapiens
  misc_RNA (1)...(19): siRNA sense strand
ccagcuuacugccauaugu

SEQ ID NO: 2033881 - RNA, 19 nt, Homo sapiens
  misc_RNA (1)...(19): siRNA sense strand
guaccuuauccuccauuua

SEQ ID NO: 2033882 - RNA, 19 nt, Homo sapiens
  misc_RNA (1)...(19): siRNA sense strand
ugccaaguguguugacaaa

SEQ ID NO: 2033883 - RNA, 19 nt, Homo sapiens
  misc_RNA (1)...(19): siRNA sense strand
gcaaagccucguggacuga

SEQ ID NO: 2033884 - RNA, 19 nt, Homo sapiens
  misc_RNA (1)...(19): siRNA sense strand
uuacaggacguaguagaua

SEQ ID NO: 2033885 - RNA, 19 nt, Homo sapiens
  misc_RNA (1)...(19): siRNA sense strand
aagaagggaucgucugucu

SEQ ID NO: 2033886 - RNA, 19 nt, Homo sapiens
  misc_RNA (1)...(19): siRNA sense strand
uaguaugcaugugugauuu

SEQ ID NO: 2033887 - RNA, 19 nt, Homo sapiens
  misc_RNA (1)...(19): siRNA sense strand
ucuagugauccauuucuua

SEQ ID NO: 2033888 - RNA, 19 nt, Homo sapiens
  misc_RNA (1)...(19): siRNA sense strand
uaacaaccaccagucagaa

SEQ ID NO: 2033889 - RNA, 19 nt, Homo sapiens
  misc_RNA (1)...(19): siRNA sense strand
ccagcagaaugcagucaug

SEQ ID NO: 2033890 - RNA, 19 nt, Homo sapiens
  misc_RNA (1)...(19): siRNA sense strand
guugacaaauggcuuaagg

SEQ ID NO: 2033891 - RNA, 19 nt, Homo sapiens
  misc_RNA (1)...(19): siRNA sense strand
aagccaacaucacuucuca

SEQ ID NO: 2033892 - RNA, 19 nt, Homo sapiens
  misc_RNA (1)...(19): siRNA sense strand
gcccaacuuucagcuuuga

SEQ ID NO: 2033893 - RNA, 19 nt, Homo sapiens
  misc_RNA (1)...(19): siRNA sense strand
cuucaggcauguucaguuc

SEQ ID NO: 2033894 - RNA, 19 nt, Homo sapiens
  misc_RNA (1)...(19): siRNA sense strand
cauguucaguucagcacuu

SEQ ID NO: 2033895 - RNA, 19 nt, Homo sapiens
  misc_RNA (1)...(19): siRNA sense strand
aaaucguacuugcccaauu

SEQ ID NO: 2033896 - RNA, 19 nt, Homo sapiens
  misc_RNA (1)...(19): siRNA sense strand
gauauugaacaacuuccuu

SEQ ID NO: 2033897 - RNA, 19 nt, Homo sapiens
  misc_RNA (1)...(19): siRNA sense strand
cagcuuugaauuagaugua

SEQ ID NO: 2033898 - RNA, 19 nt, Homo sapiens
  misc_RNA (1)...(19): siRNA sense strand
ugaaguggaacucuuagga

SEQ ID NO: 2033899 - RNA, 19 nt, Homo sapiens
  misc_RNA (1)...(19): siRNA sense strand
cuagugauccauuucuuau

SEQ ID NO: 2033900 - RNA, 19 nt, Homo sapiens
  misc_RNA (1)...(19): siRNA sense strand
cccaucauccuccucauuu

SEQ ID NO: 2033901 - RNA, 19 nt, Homo sapiens
  misc_RNA (1)...(19): siRNA sense strand
caaauggcuuaaggcaaau

SEQ ID NO: 2033902 - RNA, 19 nt, Homo sapiens
  misc_RNA (1)...(19): siRNA sense strand
agaagaaguccuccuguca

SEQ ID NO: 2033903 - RNA, 19 nt, Homo sapiens
  misc_RNA (1)...(19): siRNA sense strand
uugcaguucuuaacacaug

SEQ ID NO: 2033904 - RNA, 19 nt, Homo sapiens
  misc_RNA (1)...(19): siRNA sense strand
ccaucauccuccucauuug

SEQ ID NO: 2033905 - RNA, 19 nt, Homo sapiens
  misc_RNA (1)...(19): siRNA sense strand
caggccaguuugucccuuu

SEQ ID NO: 2033906 - RNA, 19 nt, Homo sapiens
  misc_RNA (1)...(19): siRNA sense strand
ggcccaacuuucagcuuug

SEQ ID NO: 2033907 - RNA, 19 nt, Homo sapiens
  misc_RNA (1)...(19): siRNA sense strand
cuuaucgguucaauccuaa

SEQ ID NO: 2033908 - RNA, 19 nt, Homo sapiens
  misc_RNA (1)...(19): siRNA sense strand
ccacaugggauuccacucu

SEQ ID NO: 2033909 - RNA, 19 nt, Homo sapiens
  misc_RNA (1)...(19): siRNA sense strand
cuuacugccauauguguua

SEQ ID NO: 2033910 - RNA, 19 nt, Homo sapiens
  misc_RNA (1)...(19): siRNA sense strand
agugauccauuucuuauac

SEQ ID NO: 2033911 - RNA, 19 nt, Homo sapiens
  misc_RNA (1)...(19): siRNA sense strand
uagugugccuccuccaaug

SEQ ID NO: 2033912 - RNA, 19 nt, Homo sapiens
  misc_RNA (1)...(19): siRNA sense strand
uugccgagcugaugcuuca

SEQ ID NO: 2033913 - RNA, 19 nt, Homo sapiens
  misc_RNA (1)...(19): siRNA sense strand
cuaacaaccaccagucaga

SEQ ID NO: 2033914 - RNA, 19 nt, Homo sapiens
  misc_RNA (1)...(19): siRNA sense strand
gcuuugaauuagauguaga

SEQ ID NO: 2033915 - RNA, 19 nt, Homo sapiens
  misc_RNA (1)...(19): siRNA sense strand
guagugugccuccuccaau

SEQ ID NO: 2033916 - RNA, 19 nt, Homo sapiens
  misc_RNA (1)...(19): siRNA sense strand
ccaauuugccgagcugaug

SEQ ID NO: 2033917 - RNA, 19 nt, Homo sapiens
  misc_RNA (1)...(19): siRNA sense strand
uggcuuaaggcaaaucgua

SEQ ID NO: 2033918 - RNA, 19 nt, Homo sapiens
  misc_RNA (1)...(19): siRNA sense strand
uaacacaugauccuuugca

SEQ ID NO: 2033919 - RNA, 19 nt, Homo sapiens
  misc_RNA (1)...(19): siRNA sense strand
agaagugcaucgggauuca

SEQ ID NO: 2033920 - RNA, 19 nt, Homo sapiens
  misc_RNA (1)...(19): siRNA sense strand
aaaaugaaguggaacucuu

SEQ ID NO: 2033921 - RNA, 19 nt, Homo sapiens
  misc_RNA (1)...(19): siRNA sense strand
gacuuuguguguaguaugc

SEQ ID NO: 2033922 - RNA, 19 nt, Homo sapiens
  misc_RNA (1)...(19): siRNA sense strand
cuaaagcagauauugaaca

SEQ ID NO: 2033923 - RNA, 19 nt, Homo sapiens
  misc_RNA (1)...(19): siRNA sense strand
gaccaagccaacaucacuu

SEQ ID NO: 2033924 - RNA, 19 nt, Homo sapiens
  misc_RNA (1)...(19): siRNA sense strand
cgaccaagccaacaucacu

SEQ ID NO: 2033925 - RNA, 19 nt, Homo sapiens
  misc_RNA (1)...(19): siRNA sense strand
agaagauggagaaguagaa

SEQ ID NO: 2033926 - RNA, 19 nt, Homo sapiens
  misc_RNA (1)...(19): siRNA sense strand
aggcuuacaggacguagua

SEQ ID NO: 2033927 - RNA, 19 nt, Homo sapiens
  misc_RNA (1)...(19): siRNA sense strand
gagguguccuuuggaguac

SEQ ID NO: 2033928 - RNA, 19 nt, Homo sapiens
  misc_RNA (1)...(19): siRNA sense strand
uauacauccuccucaccuu

SEQ ID NO: 2033929 - RNA, 19 nt, Homo sapiens
  misc_RNA (1)...(19): siRNA sense strand
gugauccauuucuuauaca

SEQ ID NO: 2033930 - RNA, 19 nt, Homo sapiens
  misc_RNA (1)...(19): siRNA sense strand
agauguagaagauggagaa

SEQ ID NO: 2033931 - RNA, 19 nt, Homo sapiens
  misc_RNA (1)...(19): siRNA sense strand
ucagcuccaucaaggaaca

SEQ ID NO: 2033932 - RNA, 19 nt, Homo sapiens
  misc_RNA (1)...(19): siRNA sense strand
gaacagacuuuguguguag

SEQ ID NO: 2033933 - RNA, 19 nt, Homo sapiens
  misc_RNA (1)...(19): siRNA sense strand
acaaauggcuuaaggcaaa

SEQ ID NO: 2033934 - RNA, 19 nt, Homo sapiens
  misc_RNA (1)...(19): siRNA sense strand
uguagaagauggagaagua

SEQ ID NO: 2033935 - RNA, 19 nt, Homo sapiens
  misc_RNA (1)...(19): siRNA sense strand
uugaacaacuuccuucuua

SEQ ID NO: 2033936 - RNA, 19 nt, Homo sapiens
  misc_RNA (1)...(19): siRNA sense strand
gcagcuacuuagagucuua

SEQ ID NO: 2033937 - RNA, 19 nt, Homo sapiens
  misc_RNA (1)...(19): siRNA sense strand
gcacaucccugcuuguagu

SEQ ID NO: 2033938 - RNA, 19 nt, Homo sapiens
  misc_RNA (1)...(19): siRNA sense strand
gcacuuaccaguaccauau

SEQ ID NO: 2033939 - RNA, 19 nt, Homo sapiens
  misc_RNA (1)...(19): siRNA sense strand
ccaaguguguugacaaaug

SEQ ID NO: 2033940 - RNA, 19 nt, Homo sapiens
  misc_RNA (1)...(19): siRNA sense strand
ggagguguccuuuggagua

SEQ ID NO: 2033941 - RNA, 19 nt, Homo sapiens
  misc_RNA (1)...(19): siRNA sense strand
aaucguacuugcccaauuu

SEQ ID NO: 2033942 - RNA, 19 nt, Homo sapiens
  misc_RNA (1)...(19): siRNA sense strand
gggcccaacuuucagcuuu

SEQ ID NO: 2033943 - RNA, 19 nt, Homo sapiens
  misc_RNA (1)...(19): siRNA sense strand
gaacaacuuccuucuuauc

SEQ ID NO: 2033944 - RNA, 19 nt, Homo sapiens
  misc_RNA (1)...(19): siRNA sense strand
gcagugggcccaacuuuca

SEQ ID NO: 2033945 - RNA, 19 nt, Homo sapiens
  misc_RNA (1)...(19): siRNA sense strand
caaggcagcuacuuagagu

SEQ ID NO: 2033946 - RNA, 19 nt, Homo sapiens
  misc_RNA (1)...(19): siRNA sense strand
gaucagcuccaucaaggaa

SEQ ID NO: 2033947 - RNA, 19 nt, Homo sapiens
  misc_RNA (1)...(19): siRNA sense strand
gacuaaagcagauauugaa

SEQ ID NO: 2033948 - RNA, 19 nt, Homo sapiens
  misc_RNA (1)...(19): siRNA sense strand
gcagaaugcagucaugguu

SEQ ID NO: 2033949 - RNA, 19 nt, Homo sapiens
  misc_RNA (1)...(19): siRNA sense strand
gauagaaaaugaaguggaa

SEQ ID NO: 2033950 - RNA, 19 nt, Homo sapiens
  misc_RNA (1)...(19): siRNA sense strand
guucagcacuuaccaguac

SEQ ID NO: 2033951 - RNA, 19 nt, Homo sapiens
  misc_RNA (1)...(19): siRNA sense strand
gaagauggagaaguagaaa

SEQ ID NO: 2033952 - RNA, 19 nt, Homo sapiens
  misc_RNA (1)...(19): siRNA sense strand
gcaccucccugucuguagu

SEQ ID NO: 2033953 - RNA, 19 nt, Homo sapiens
  misc_RNA (1)...(19): siRNA sense strand
aggagaacaucuuccagua

SEQ ID NO: 2033954 - RNA, 19 nt, Homo sapiens
  misc_RNA (1)...(19): siRNA sense strand
aaaugaaguggaacucuua

SEQ ID NO: 2033955 - RNA, 19 nt, Homo sapiens
  misc_RNA (1)...(19): siRNA sense strand
gaucgccucugcaaaggau

SEQ ID NO: 2033956 - RNA, 19 nt, Homo sapiens
  misc_RNA (1)...(19): siRNA sense strand
ggaagaagggaucgucugu

SEQ ID NO: 2033957 - RNA, 19 nt, Homo sapiens
  misc_RNA (1)...(19): siRNA sense strand
gagucaaggcagcuacuua

SEQ ID NO: 2033958 - RNA, 19 nt, Homo sapiens
  misc_RNA (1)...(19): siRNA sense strand
agaaugcagucaugguuga

SEQ ID NO: 2033959 - RNA, 19 nt, Homo sapiens
  misc_RNA (1)...(19): siRNA sense strand
ccaggaugcucugugguuu

SEQ ID NO: 2033960 - RNA, 19 nt, Homo sapiens
  misc_RNA (1)...(19): siRNA sense strand
ugacuaaagcagauauuga

SEQ ID NO: 2033961 - RNA, 19 nt, Homo sapiens
  misc_RNA (1)...(19): siRNA sense strand
ugaacaacuuccuucuuau

SEQ ID NO: 2033962 - RNA, 19 nt, Homo sapiens
  misc_RNA (1)...(19): siRNA sense strand
cuuagagucuuacccugua

SEQ ID NO: 2033963 - RNA, 19 nt, Homo sapiens
  misc_RNA (1)...(19): siRNA sense strand
ugccauauguguuaucaau

SEQ ID NO: 2033964 - RNA, 19 nt, Homo sapiens
  misc_RNA (1)...(19): siRNA sense strand
caaguguguugacaaaugg

SEQ ID NO: 2033965 - RNA, 19 nt, Homo sapiens
  misc_RNA (1)...(19): siRNA sense strand
gcacgcaacagaagaaguc

SEQ ID NO: 2033966 - RNA, 19 nt, Homo sapiens
  misc_RNA (1)...(19): siRNA sense strand
guaguaugcaugugugauu

SEQ ID NO: 2033967 - RNA, 19 nt, Homo sapiens
  misc_RNA (1)...(19): siRNA sense strand
cagaacagacuuugugugu

SEQ ID NO: 2033968 - RNA, 19 nt, Homo sapiens
  misc_RNA (1)...(19): siRNA sense strand
caucagcucccuugcaguu

SEQ ID NO: 2033969 - RNA, 19 nt, Homo sapiens
  misc_RNA (1)...(19): siRNA sense strand
uaccuuauccuccauuuau

SEQ ID NO: 2033970 - RNA, 19 nt, Homo sapiens
  misc_RNA (1)...(19): siRNA sense strand
cgaguuccaugccaagugu

SEQ ID NO: 2033971 - RNA, 19 nt, Homo sapiens
  misc_RNA (1)...(19): siRNA sense strand
aaauuacgaggcccuguua

SEQ ID NO: 2033972 - RNA, 19 nt, Homo sapiens
  misc_RNA (1)...(19): siRNA sense strand
ccauauguguuaucaaugc

SEQ ID NO: 2033973 - RNA, 19 nt, Homo sapiens
  misc_RNA (1)...(19): siRNA sense strand
cuuaacacaugauccuuug

SEQ ID NO: 2033974 - RNA, 19 nt, Homo sapiens
  misc_RNA (1)...(19): siRNA sense strand
gcagauauugaacaacuuc

SEQ ID NO: 2033975 - RNA, 19 nt, Homo sapiens
  misc_RNA (1)...(19): siRNA sense strand
aagcagauauugaacaacu

SEQ ID NO: 2033976 - RNA, 19 nt, Homo sapiens
  misc_RNA (1)...(19): siRNA sense strand
ggagaacaucuuccaguag

SEQ ID NO: 2033977 - RNA, 19 nt, Homo sapiens
  misc_RNA (1)...(19): siRNA sense strand
agaacagacuuugugugua

SEQ ID NO: 2033978 - RNA, 19 nt, Homo sapiens
  misc_RNA (1)...(19): siRNA sense strand
ucuuaucgguucaauccua

SEQ ID NO: 2033979 - RNA, 19 nt, Homo sapiens
  misc_RNA (1)...(19): siRNA sense strand
ggacugacuaaagcagaua

SEQ ID NO: 2033980 - RNA, 19 nt, Homo sapiens
  misc_RNA (1)...(19): siRNA sense strand
ccagcuuacugccauaugu

SEQ ID NO: 2033981 - RNA, 19 nt, Homo sapiens
  misc_RNA (1)...(19): siRNA sense strand
guaccuuauccuccauuua

SEQ ID NO: 2033982 - RNA, 19 nt, Homo sapiens
  misc_RNA (1)...(19): siRNA sense strand
ugccaaguguguugacaaa

SEQ ID NO: 2033983 - RNA, 19 nt, Homo sapiens
  misc_RNA (1)...(19): siRNA sense strand
gcaaagccucguggacuga

SEQ ID NO: 2033984 - RNA, 19 nt, Homo sapiens
  misc_RNA (1)...(19): siRNA sense strand
uuacaggacguaguagaua

SEQ ID NO: 2033985 - RNA, 19 nt, Homo sapiens
  misc_RNA (1)...(19): siRNA sense strand
aagaagggaucgucugucu

SEQ ID NO: 2033986 - RNA, 19 nt, Homo sapiens
  misc_RNA (1)...(19): siRNA sense strand
uaguaugcaugugugauuu

SEQ ID NO: 2033987 - RNA, 19 nt, Homo sapiens
  misc_RNA (1)...(19): siRNA sense strand
ucuagugauccauuucuua

SEQ ID NO: 2033988 - RNA, 19 nt, Homo sapiens
  misc_RNA (1)...(19): siRNA sense strand
uaacaaccaccagucagaa

SEQ ID NO: 2033989 - RNA, 19 nt, Homo sapiens
  misc_RNA (1)...(19): siRNA sense strand
ccagcagaaugcagucaug

SEQ ID NO: 2033990 - RNA, 19 nt, Homo sapiens
  misc_RNA (1)...(19): siRNA sense strand
guugacaaauggcuuaagg

SEQ ID NO: 2033991 - RNA, 19 nt, Homo sapiens
  misc_RNA (1)...(19): siRNA sense strand
aagccaacaucacuucuca

SEQ ID NO: 2033992 - RNA, 19 nt, Homo sapiens
  misc_RNA (1)...(19): siRNA sense strand
gcccaacuuucagcuuuga

SEQ ID NO: 2033993 - RNA, 19 nt, Homo sapiens
  misc_RNA (1)...(19): siRNA sense strand
cuucaggcauguucaguuc

SEQ ID NO: 2033994 - RNA, 19 nt, Homo sapiens
  misc_RNA (1)...(19): siRNA sense strand
cauguucaguucagcacuu

SEQ ID NO: 2033995 - RNA, 19 nt, Homo sapiens
  misc_RNA (1)...(19): siRNA sense strand
aaaucguacuugcccaauu

SEQ ID NO: 2033996 - RNA, 19 nt, Homo sapiens
  misc_RNA (1)...(19): siRNA sense strand
gauauugaacaacuuccuu

SEQ ID NO: 2033997 - RNA, 19 nt, Homo sapiens
  misc_RNA (1)...(19): siRNA sense strand
cagcuuugaauuagaugua

SEQ ID NO: 2033998 - RNA, 19 nt, Homo sapiens
  misc_RNA (1)...(19): siRNA sense strand
ugaaguggaacucuuagga

SEQ ID NO: 2033999 - RNA, 19 nt, Homo sapiens
  misc_RNA (1)...(19): siRNA sense strand
cuagugauccauuucuuau

SEQ ID NO: 2034000 - RNA, 19 nt, Homo sapiens
  misc_RNA (1)...(19): siRNA sense strand
cccaucauccuccucauuu

SEQ ID NO: 2034001 - RNA, 19 nt, Homo sapiens
  misc_RNA (1)...(19): siRNA sense strand
caaauggcuuaaggcaaau

SEQ ID NO: 2034002 - RNA, 19 nt, Homo sapiens
  misc_RNA (1)...(19): siRNA sense strand
agaagaaguccuccuguca

SEQ ID NO: 2034003 - RNA, 19 nt, Homo sapiens
  misc_RNA (1)...(19): siRNA sense strand
uugcaguucuuaacacaug

SEQ ID NO: 2034004 - RNA, 19 nt, Homo sapiens
  misc_RNA (1)...(19): siRNA sense strand
ccaucauccuccucauuug

SEQ ID NO: 2034005 - RNA, 19 nt, Homo sapiens
  misc_RNA (1)...(19): siRNA sense strand
caggccaguuugucccuuu

SEQ ID NO: 2034006 - RNA, 19 nt, Homo sapiens
  misc_RNA (1)...(19): siRNA sense strand
ggcccaacuuucagcuuug

SEQ ID NO: 2034007 - RNA, 19 nt, Homo sapiens
  misc_RNA (1)...(19): siRNA sense strand
cuuaucgguucaauccuaa

SEQ ID NO: 2034008 - RNA, 19 nt, Homo sapiens
  misc_RNA (1)...(19): siRNA sense strand
ccacaugggauuccacucu

SEQ ID NO: 2034009 - RNA, 19 nt, Homo sapiens
  misc_RNA (1)...(19): siRNA sense strand
cuuacugccauauguguua

SEQ ID NO: 2034010 - RNA, 19 nt, Homo sapiens
  misc_RNA (1)...(19): siRNA sense strand
agugauccauuucuuauac

SEQ ID NO: 2034011 - RNA, 19 nt, Homo sapiens
  misc_RNA (1)...(19): siRNA sense strand
uagugugccuccuccaaug

SEQ ID NO: 2034012 - RNA, 19 nt, Homo sapiens
  misc_RNA (1)...(19): siRNA sense strand
uugccgagcugaugcuuca

SEQ ID NO: 2034013 - RNA, 19 nt, Homo sapiens
  misc_RNA (1)...(19): siRNA sense strand
cuaacaaccaccagucaga

SEQ ID NO: 2034014 - RNA, 19 nt, Homo sapiens
  misc_RNA (1)...(19): siRNA sense strand
gcuuugaauuagauguaga

SEQ ID NO: 2034015 - RNA, 19 nt, Homo sapiens
  misc_RNA (1)...(19): siRNA sense strand
guagugugccuccuccaau

SEQ ID NO: 2034016 - RNA, 19 nt, Homo sapiens
  misc_RNA (1)...(19): siRNA sense strand
ccaauuugccgagcugaug

SEQ ID NO: 2034017 - RNA, 19 nt, Homo sapiens
  misc_RNA (1)...(19): siRNA sense strand
uggcuuaaggcaaaucgua

SEQ ID NO: 2034018 - RNA, 19 nt, Homo sapiens
  misc_RNA (1)...(19): siRNA sense strand
uaacacaugauccuuugca

SEQ ID NO: 2034019 - RNA, 19 nt, Homo sapiens
  misc_RNA (1)...(19): siRNA sense strand
agaagugcaucgggauuca

SEQ ID NO: 2034020 - RNA, 19 nt, Homo sapiens
  misc_RNA (1)...(19): siRNA sense strand
aaaaugaaguggaacucuu

SEQ ID NO: 2034021 - RNA, 19 nt, Homo sapiens
  misc_RNA (1)...(19): siRNA sense strand
gacuuuguguguaguaugc

SEQ ID NO: 2034022 - RNA, 19 nt, Homo sapiens
  misc_RNA (1)...(19): siRNA sense strand
cuaaagcagauauugaaca

SEQ ID NO: 2034023 - RNA, 19 nt, Homo sapiens
  misc_RNA (1)...(19): siRNA sense strand
gaccaagccaacaucacuu

SEQ ID NO: 2034024 - RNA, 19 nt, Homo sapiens
  misc_RNA (1)...(19): siRNA sense strand
cgaccaagccaacaucacu

SEQ ID NO: 2034025 - RNA, 19 nt, Homo sapiens
  misc_RNA (1)...(19): siRNA sense strand
agaagauggagaaguagaa

SEQ ID NO: 2034026 - RNA, 19 nt, Homo sapiens
  misc_RNA (1)...(19): siRNA sense strand
aggcuuacaggacguagua

SEQ ID NO: 2034027 - RNA, 19 nt, Homo sapiens
  misc_RNA (1)...(19): siRNA sense strand
gagguguccuuuggaguac

SEQ ID NO: 2034028 - RNA, 19 nt, Homo sapiens
  misc_RNA (1)...(19): siRNA sense strand
uauacauccuccucaccuu

SEQ ID NO: 2034029 - RNA, 19 nt, Homo sapiens
  misc_RNA (1)...(19): siRNA sense strand
gugauccauuucuuauaca

SEQ ID NO: 2034030 - RNA, 19 nt, Homo sapiens
  misc_RNA (1)...(19): siRNA sense strand
agauguagaagauggagaa

SEQ ID NO: 2034031 - RNA, 19 nt, Homo sapiens
  misc_RNA (1)...(19): siRNA sense strand
ucagcuccaucaaggaaca

SEQ ID NO: 2034032 - RNA, 19 nt, Homo sapiens
  misc_RNA (1)...(19): siRNA sense strand
gaacagacuuuguguguag

SEQ ID NO: 2034033 - RNA, 19 nt, Homo sapiens
  misc_RNA (1)...(19): siRNA sense strand
acaaauggcuuaaggcaaa

SEQ ID NO: 2034034 - RNA, 19 nt, Homo sapiens
  misc_RNA (1)...(19): siRNA sense strand
uguagaagauggagaagua

SEQ ID NO: 2034035 - RNA, 19 nt, Homo sapiens
  misc_RNA (1)...(19): siRNA sense strand
uugaacaacuuccuucuua

SEQ ID NO: 2034036 - RNA, 19 nt, Homo sapiens
  misc_RNA (1)...(19): siRNA sense strand
gcagcuacuuagagucuua

SEQ ID NO: 2034037 - RNA, 19 nt, Homo sapiens
  misc_RNA (1)...(19): siRNA sense strand
gcacaucccugcuuguagu

SEQ ID NO: 2034038 - RNA, 19 nt, Homo sapiens
  misc_RNA (1)...(19): siRNA sense strand
gcacuuaccaguaccauau

SEQ ID NO: 2034039 - RNA, 19 nt, Homo sapiens
  misc_RNA (1)...(19): siRNA sense strand
ccaaguguguugacaaaug

SEQ ID NO: 2034040 - RNA, 19 nt, Homo sapiens
  misc_RNA (1)...(19): siRNA sense strand
ggagguguccuuuggagua

SEQ ID NO: 2034041 - RNA, 19 nt, Homo sapiens
  misc_RNA (1)...(19): siRNA sense strand
aaucguacuugcccaauuu

SEQ ID NO: 2034042 - RNA, 19 nt, Homo sapiens
  misc_RNA (1)...(19): siRNA sense strand
gggcccaacuuucagcuuu

SEQ ID NO: 2034043 - RNA, 19 nt, Homo sapiens
  misc_RNA (1)...(19): siRNA sense strand
gaacaacuuccuucuuauc

SEQ ID NO: 2034044 - RNA, 19 nt, Homo sapiens
  misc_RNA (1)...(19): siRNA sense strand
gcagugggcccaacuuuca

SEQ ID NO: 2034045 - RNA, 19 nt, Homo sapiens
  misc_RNA (1)...(19): siRNA sense strand
caaggcagcuacuuagagu

SEQ ID NO: 2034046 - RNA, 19 nt, Homo sapiens
  misc_RNA (1)...(19): siRNA sense strand
gaucagcuccaucaaggaa

SEQ ID NO: 2034047 - RNA, 19 nt, Homo sapiens
  misc_RNA (1)...(19): siRNA sense strand
gacuaaagcagauauugaa

SEQ ID NO: 2034048 - RNA, 19 nt, Homo sapiens
  misc_RNA (1)...(19): siRNA sense strand
gcagaaugcagucaugguu

SEQ ID NO: 2034049 - RNA, 19 nt, Homo sapiens
  misc_RNA (1)...(19): siRNA sense strand
gauagaaaaugaaguggaa

SEQ ID NO: 2034050 - RNA, 19 nt, Homo sapiens
  misc_RNA (1)...(19): siRNA sense strand
guucagcacuuaccaguac

SEQ ID NO: 2034051 - RNA, 19 nt, Homo sapiens
  misc_RNA (1)...(19): siRNA sense strand
gaagauggagaaguagaaa

SEQ ID NO: 2034052 - RNA, 19 nt, Homo sapiens
  misc_RNA (1)...(19): siRNA sense strand
gcaccucccugucuguagu

SEQ ID NO: 2034053 - RNA, 19 nt, Homo sapiens
  misc_RNA (1)...(19): siRNA sense strand
aggagaacaucuuccagua

SEQ ID NO: 2034054 - RNA, 19 nt, Homo sapiens
  misc_RNA (1)...(19): siRNA sense strand
aaaugaaguggaacucuua

SEQ ID NO: 2034055 - RNA, 19 nt, Homo sapiens
  misc_RNA (1)...(19): siRNA sense strand
gaucgccucugcaaaggau

SEQ ID NO: 2034056 - RNA, 19 nt, Homo sapiens
  misc_RNA (1)...(19): siRNA sense strand
ggaagaagggaucgucugu

SEQ ID NO: 2034057 - RNA, 19 nt, Homo sapiens
  misc_RNA (1)...(19): siRNA sense strand
gagucaaggcagcuacuua

SEQ ID NO: 2034058 - RNA, 19 nt, Homo sapiens
  misc_RNA (1)...(19): siRNA sense strand
agaaugcagucaugguuga

SEQ ID NO: 2034059 - RNA, 19 nt, Homo sapiens
  misc_RNA (1)...(19): siRNA sense strand
ccaggaugcucugugguuu

SEQ ID NO: 2034060 - RNA, 19 nt, Homo sapiens
  misc_RNA (1)...(19): siRNA sense strand
ugacuaaagcagauauuga

SEQ ID NO: 2034061 - RNA, 19 nt, Homo sapiens
  misc_RNA (1)...(19): siRNA sense strand
ugaacaacuuccuucuuau

SEQ ID NO: 2034062 - RNA, 19 nt, Homo sapiens
  misc_RNA (1)...(19): siRNA sense strand
cuuagagucuuacccugua

SEQ ID NO: 2034063 - RNA, 19 nt, Homo sapiens
  misc_RNA (1)...(19): siRNA sense strand
ugccauauguguuaucaau

SEQ ID NO: 2034064 - RNA, 19 nt, Homo sapiens
  misc_RNA (1)...(19): siRNA sense strand
caaguguguugacaaaugg

SEQ ID NO: 2034065 - RNA, 19 nt, Homo sapiens
  misc_RNA (1)...(19): siRNA sense strand
gcacgcaacagaagaaguc

SEQ ID NO: 2034066 - RNA, 19 nt, Homo sapiens
  misc_RNA (1)...(19): siRNA sense strand
guaguaugcaugugugauu

SEQ ID NO: 2034067 - RNA, 19 nt, Homo sapiens
  misc_RNA (1)...(19): siRNA sense strand
cagaacagacuuugugugu

SEQ ID NO: 2034068 - RNA, 19 nt, Homo sapiens
  misc_RNA (1)...(19): siRNA sense strand
caucagcucccuugcaguu

SEQ ID NO: 2034069 - RNA, 19 nt, Homo sapiens
  misc_RNA (1)...(19): siRNA sense strand
uaccuuauccuccauuuau

SEQ ID NO: 2034070 - RNA, 19 nt, Homo sapiens
  misc_RNA (1)...(19): siRNA sense strand
cgaguuccaugccaagugu

SEQ ID NO: 2034071 - RNA, 19 nt, Homo sapiens
  misc_RNA (1)...(19): siRNA sense strand
aaauuacgaggcccuguua

SEQ ID NO: 2034072 - RNA, 19 nt, Homo sapiens
  misc_RNA (1)...(19): siRNA sense strand
ccauauguguuaucaaugc

SEQ ID NO: 2034073 - RNA, 19 nt, Homo sapiens
  misc_RNA (1)...(19): siRNA sense strand
cuuaacacaugauccuuug

SEQ ID NO: 2034074 - RNA, 19 nt, Homo sapiens
  misc_RNA (1)...(19): siRNA sense strand
gcagauauugaacaacuuc

SEQ ID NO: 2034075 - RNA, 19 nt, Homo sapiens
  misc_RNA (1)...(19): siRNA sense strand
aagcagauauugaacaacu

SEQ ID NO: 2034076 - RNA, 19 nt, Homo sapiens
  misc_RNA (1)...(19): siRNA sense strand
ggagaacaucuuccaguag

SEQ ID NO: 2034077 - RNA, 19 nt, Homo sapiens
  misc_RNA (1)...(19): siRNA sense strand
agaacagacuuugugugua

SEQ ID NO: 2034078 - RNA, 19 nt, Homo sapiens
  misc_RNA (1)...(19): siRNA sense strand
ucuuaucgguucaauccua

SEQ ID NO: 2034079 - RNA, 19 nt, Homo sapiens
  misc_RNA (1)...(19): siRNA sense strand
ggacugacuaaagcagaua

SEQ ID NO: 2034080 - RNA, 19 nt, Homo sapiens
  misc_RNA (1)...(19): siRNA sense strand
ccagcuuacugccauaugu

SEQ ID NO: 2034081 - RNA, 19 nt, Homo sapiens
  misc_RNA (1)...(19): siRNA sense strand
guaccuuauccuccauuua

SEQ ID NO: 2034082 - RNA, 19 nt, Homo sapiens
  misc_RNA (1)...(19): siRNA sense strand
ugccaaguguguugacaaa

SEQ ID NO: 2034083 - RNA, 19 nt, Homo sapiens
  misc_RNA (1)...(19): siRNA sense strand
gcaaagccucguggacuga

SEQ ID NO: 2034084 - RNA, 19 nt, Homo sapiens
  misc_RNA (1)...(19): siRNA sense strand
uuacaggacguaguagaua

SEQ ID NO: 2034085 - RNA, 19 nt, Homo sapiens
  misc_RNA (1)...(19): siRNA sense strand
aagaagggaucgucugucu

SEQ ID NO: 2034086 - RNA, 19 nt, Homo sapiens
  misc_RNA (1)...(19): siRNA sense strand
uaguaugcaugugugauuu

SEQ ID NO: 2034087 - RNA, 19 nt, Homo sapiens
  misc_RNA (1)...(19): siRNA sense strand
ucuagugauccauuucuua

SEQ ID NO: 2034088 - RNA, 19 nt, Homo sapiens
  misc_RNA (1)...(19): siRNA sense strand
uaacaaccaccagucagaa

SEQ ID NO: 2034089 - RNA, 19 nt, Homo sapiens
  misc_RNA (1)...(19): siRNA sense strand
ccagcagaaugcagucaug

SEQ ID NO: 2034090 - RNA, 19 nt, Homo sapiens
  misc_RNA (1)...(19): siRNA sense strand
guugacaaauggcuuaagg

SEQ ID NO: 2034091 - RNA, 19 nt, Homo sapiens
  misc_RNA (1)...(19): siRNA sense strand
aagccaacaucacuucuca

SEQ ID NO: 2034092 - RNA, 19 nt, Homo sapiens
  misc_RNA (1)...(19): siRNA sense strand
gcccaacuuucagcuuuga

SEQ ID NO: 2034093 - RNA, 19 nt, Homo sapiens
  misc_RNA (1)...(19): siRNA sense strand
cuucaggcauguucaguuc

SEQ ID NO: 2034094 - RNA, 19 nt, Homo sapiens
  misc_RNA (1)...(19): siRNA sense strand
cauguucaguucagcacuu

SEQ ID NO: 2034095 - RNA, 19 nt, Homo sapiens
  misc_RNA (1)...(19): siRNA sense strand
aaaucguacuugcccaauu

SEQ ID NO: 2034096 - RNA, 19 nt, Homo sapiens
  misc_RNA (1)...(19): siRNA sense strand
gauauugaacaacuuccuu

SEQ ID NO: 2034097 - RNA, 19 nt, Homo sapiens
  misc_RNA (1)...(19): siRNA sense strand
cagcuuugaauuagaugua

SEQ ID NO: 2034098 - RNA, 19 nt, Homo sapiens
  misc_RNA (1)...(19): siRNA sense strand
ugaaguggaacucuuagga

SEQ ID NO: 2034099 - RNA, 19 nt, Homo sapiens
  misc_RNA (1)...(19): siRNA sense strand
cuagugauccauuucuuau

SEQ ID NO: 2034100 - RNA, 19 nt, Homo sapiens
  misc_RNA (1)...(19): siRNA sense strand
cccaucauccuccucauuu

SEQ ID NO: 2034101 - RNA, 19 nt, Homo sapiens
  misc_RNA (1)...(19): siRNA sense strand
caaauggcuuaaggcaaau

SEQ ID NO: 2034102 - RNA, 19 nt, Homo sapiens
  misc_RNA (1)...(19): siRNA sense strand
agaagaaguccuccuguca

SEQ ID NO: 2034103 - RNA, 19 nt, Homo sapiens
  misc_RNA (1)...(19): siRNA sense strand
uugcaguucuuaacacaug

SEQ ID NO: 2034104 - RNA, 19 nt, Homo sapiens
  misc_RNA (1)...(19): siRNA sense strand
ccaucauccuccucauuug

SEQ ID NO: 2034105 - RNA, 19 nt, Homo sapiens
  misc_RNA (1)...(19): siRNA sense strand
caggccaguuugucccuuu

SEQ ID NO: 2034106 - RNA, 19 nt, Homo sapiens
  misc_RNA (1)...(19): siRNA sense strand
ggcccaacuuucagcuuug

SEQ ID NO: 2034107 - RNA, 19 nt, Homo sapiens
  misc_RNA (1)...(19): siRNA sense strand
cuuaucgguucaauccuaa

SEQ ID NO: 2034108 - RNA, 19 nt, Homo sapiens
  misc_RNA (1)...(19): siRNA sense strand
ccacaugggauuccacucu

SEQ ID NO: 2034109 - RNA, 19 nt, Homo sapiens
  misc_RNA (1)...(19): siRNA sense strand
cuuacugccauauguguua

SEQ ID NO: 2034110 - RNA, 19 nt, Homo sapiens
  misc_RNA (1)...(19): siRNA sense strand
agugauccauuucuuauac

SEQ ID NO: 2034111 - RNA, 19 nt, Homo sapiens
  misc_RNA (1)...(19): siRNA sense strand
uagugugccuccuccaaug

SEQ ID NO: 2034112 - RNA, 19 nt, Homo sapiens
  misc_RNA (1)...(19): siRNA sense strand
uugccgagcugaugcuuca

SEQ ID NO: 2034113 - RNA, 19 nt, Homo sapiens
  misc_RNA (1)...(19): siRNA sense strand
cuaacaaccaccagucaga

SEQ ID NO: 2034114 - RNA, 19 nt, Homo sapiens
  misc_RNA (1)...(19): siRNA sense strand
gcuuugaauuagauguaga

SEQ ID NO: 2034115 - RNA, 19 nt, Homo sapiens
  misc_RNA (1)...(19): siRNA sense strand
guagugugccuccuccaau

SEQ ID NO: 2034116 - RNA, 19 nt, Homo sapiens
  misc_RNA (1)...(19): siRNA sense strand
ccaauuugccgagcugaug

SEQ ID NO: 2034117 - RNA, 19 nt, Homo sapiens
  misc_RNA (1)...(19): siRNA sense strand
uggcuuaaggcaaaucgua

SEQ ID NO: 2034118 - RNA, 19 nt, Homo sapiens
  misc_RNA (1)...(19): siRNA sense strand
uaacacaugauccuuugca

SEQ ID NO: 2034119 - RNA, 19 nt, Homo sapiens
  misc_RNA (1)...(19): siRNA sense strand
agaagugcaucgggauuca

SEQ ID NO: 2034120 - RNA, 19 nt, Homo sapiens
  misc_RNA (1)...(19): siRNA sense strand
aaaaugaaguggaacucuu

SEQ ID NO: 2034121 - RNA, 19 nt, Homo sapiens
  misc_RNA (1)...(19): siRNA sense strand
gacuuuguguguaguaugc

SEQ ID NO: 2034122 - RNA, 19 nt, Homo sapiens
  misc_RNA (1)...(19): siRNA sense strand
cuaaagcagauauugaaca

SEQ ID NO: 2034123 - RNA, 19 nt, Homo sapiens
  misc_RNA (1)...(19): siRNA sense strand
gaccaagccaacaucacuu

SEQ ID NO: 2034124 - RNA, 19 nt, Homo sapiens
  misc_RNA (1)...(19): siRNA sense strand
cgaccaagccaacaucacu

SEQ ID NO: 2034125 - RNA, 19 nt, Homo sapiens
  misc_RNA (1)...(19): siRNA sense strand
agaagauggagaaguagaa

SEQ ID NO: 2034126 - RNA, 19 nt, Homo sapiens
  misc_RNA (1)...(19): siRNA sense strand
aggcuuacaggacguagua

SEQ ID NO: 2034127 - RNA, 19 nt, Homo sapiens
  misc_RNA (1)...(19): siRNA sense strand
gagguguccuuuggaguac

SEQ ID NO: 2034128 - RNA, 19 nt, Homo sapiens
  misc_RNA (1)...(19): siRNA sense strand
uauacauccuccucaccuu

SEQ ID NO: 2034129 - RNA, 19 nt, Homo sapiens
  misc_RNA (1)...(19): siRNA sense strand
gugauccauuucuuauaca

SEQ ID NO: 2034130 - RNA, 19 nt, Homo sapiens
  misc_RNA (1)...(19): siRNA sense strand
agauguagaagauggagaa

SEQ ID NO: 2034131 - RNA, 19 nt, Homo sapiens
  misc_RNA (1)...(19): siRNA sense strand
ucagcuccaucaaggaaca

SEQ ID NO: 2034132 - RNA, 19 nt, Homo sapiens
  misc_RNA (1)...(19): siRNA sense strand
gaacagacuuuguguguag

SEQ ID NO: 2034133 - RNA, 19 nt, Homo sapiens
  misc_RNA (1)...(19): siRNA sense strand
acaaauggcuuaaggcaaa

SEQ ID NO: 2034134 - RNA, 19 nt, Homo sapiens
  misc_RNA (1)...(19): siRNA sense strand
gaagauaguccaaguccua

SEQ ID NO: 2034135 - RNA, 19 nt, Homo sapiens
  misc_RNA (1)...(19): siRNA sense strand
uguagaagauggagaagua

SEQ ID NO: 2034136 - RNA, 19 nt, Homo sapiens
  misc_RNA (1)...(19): siRNA sense strand
uugaacaacuuccuucuua

SEQ ID NO: 2034137 - RNA, 19 nt, Homo sapiens
  misc_RNA (1)...(19): siRNA sense strand
gcagcuacuuagagucuua

SEQ ID NO: 2034138 - RNA, 19 nt, Homo sapiens
  misc_RNA (1)...(19): siRNA sense strand
gcacaucccugcuuguagu

SEQ ID NO: 2034139 - RNA, 19 nt, Homo sapiens
  misc_RNA (1)...(19): siRNA sense strand
gcacuuaccaguaccauau

SEQ ID NO: 2034140 - RNA, 19 nt, Homo sapiens
  misc_RNA (1)...(19): siRNA sense strand
ccaaguguguugacaaaug

SEQ ID NO: 2034141 - RNA, 19 nt, Homo sapiens
  misc_RNA (1)...(19): siRNA sense strand
ggagguguccuuuggagua

SEQ ID NO: 2034142 - RNA, 19 nt, Homo sapiens
  misc_RNA (1)...(19): siRNA sense strand
aaucguacuugcccaauuu

SEQ ID NO: 2034143 - RNA, 19 nt, Homo sapiens
  misc_RNA (1)...(19): siRNA sense strand
gggcccaacuuucagcuuu

SEQ ID NO: 2034144 - RNA, 19 nt, Homo sapiens
  misc_RNA (1)...(19): siRNA sense strand
gaacaacuuccuucuuauc

SEQ ID NO: 2034145 - RNA, 19 nt, Homo sapiens
  misc_RNA (1)...(19): siRNA sense strand
gcagugggcccaacuuuca

SEQ ID NO: 2034146 - RNA, 19 nt, Homo sapiens
  misc_RNA (1)...(19): siRNA sense strand
caaggcagcuacuuagagu

SEQ ID NO: 2034147 - RNA, 19 nt, Homo sapiens
  misc_RNA (1)...(19): siRNA sense strand
agacagcgccucucucauu

SEQ ID NO: 2034148 - RNA, 19 nt, Homo sapiens
  misc_RNA (1)...(19): siRNA sense strand
gaucagcuccaucaaggaa

SEQ ID NO: 2034149 - RNA, 19 nt, Homo sapiens
  misc_RNA (1)...(19): siRNA sense strand
gacuaaagcagauauugaa

SEQ ID NO: 2034150 - RNA, 19 nt, Homo sapiens
  misc_RNA (1)...(19): siRNA sense strand
gcagaaugcagucaugguu

SEQ ID NO: 2034151 - RNA, 19 nt, Homo sapiens
  misc_RNA (1)...(19): siRNA sense strand
gauagaaaaugaaguggaa

SEQ ID NO: 2034152 - RNA, 19 nt, Homo sapiens
  misc_RNA (1)...(19): siRNA sense strand
guucagcacuuaccaguac

SEQ ID NO: 2034153 - RNA, 19 nt, Homo sapiens
  misc_RNA (1)...(19): siRNA sense strand
cucauucagucuuugauua

SEQ ID NO: 2034154 - RNA, 19 nt, Homo sapiens
  misc_RNA (1)...(19): siRNA sense strand
gaagauggagaaguagaaa

SEQ ID NO: 2034155 - RNA, 19 nt, Homo sapiens
  misc_RNA (1)...(19): siRNA sense strand
gcaccucccugucuguagu

SEQ ID NO: 2034156 - RNA, 19 nt, Homo sapiens
  misc_RNA (1)...(19): siRNA sense strand
aggagaacaucuuccagua

SEQ ID NO: 2034157 - RNA, 19 nt, Homo sapiens
  misc_RNA (1)...(19): siRNA sense strand
aaaugaaguggaacucuua

SEQ ID NO: 2034158 - RNA, 19 nt, Homo sapiens
  misc_RNA (1)...(19): siRNA sense strand
gaucgccucugcaaaggau

SEQ ID NO: 2034159 - RNA, 19 nt, Homo sapiens
  misc_RNA (1)...(19): siRNA sense strand
ggaagaagggaucgucugu

SEQ ID NO: 2034160 - RNA, 19 nt, Homo sapiens
  misc_RNA (1)...(19): siRNA sense strand
gagucaaggcagcuacuua

SEQ ID NO: 2034161 - RNA, 19 nt, Homo sapiens
  misc_RNA (1)...(19): siRNA sense strand
agaaugcagucaugguuga

SEQ ID NO: 2034162 - RNA, 19 nt, Homo sapiens
  misc_RNA (1)...(19): siRNA sense strand
ccaggaugcucugugguuu

SEQ ID NO: 2034163 - RNA, 19 nt, Homo sapiens
  misc_RNA (1)...(19): siRNA sense strand
gacagcgccucucucauuc

SEQ ID NO: 2034164 - RNA, 19 nt, Homo sapiens
  misc_RNA (1)...(19): siRNA sense strand
ugacuaaagcagauauuga

SEQ ID NO: 2034165 - RNA, 19 nt, Homo sapiens
  misc_RNA (1)...(19): siRNA sense strand
ugaacaacuuccuucuuau

SEQ ID NO: 2034166 - RNA, 19 nt, Homo sapiens
  misc_RNA (1)...(19): siRNA sense strand
cuuagagucuuacccugua

SEQ ID NO: 2034167 - RNA, 19 nt, Homo sapiens
  misc_RNA (1)...(19): siRNA sense strand
gagugaagauaguccaagu

SEQ ID NO: 2034168 - RNA, 19 nt, Homo sapiens
  misc_RNA (1)...(19): siRNA sense strand
gcacgcaacagaagaaguc

SEQ ID NO: 2034169 - RNA, 19 nt, Homo sapiens
  misc_RNA (1)...(19): siRNA sense strand
caaguguguugacaaaugg

SEQ ID NO: 2034170 - RNA, 19 nt, Homo sapiens
  misc_RNA (1)...(19): siRNA sense strand
guaguaugcaugugugauu

SEQ ID NO: 2034171 - RNA, 19 nt, Homo sapiens
  misc_RNA (1)...(19): siRNA sense strand
cagaacagacuuugugugu

SEQ ID NO: 2034172 - RNA, 19 nt, Homo sapiens
  misc_RNA (1)...(19): siRNA sense strand
ugccauauguguuaucaau

SEQ ID NO: 2034173 - RNA, 19 nt, Homo sapiens
  misc_RNA (1)...(19): siRNA sense strand
caucagcucccuugcaguu

SEQ ID NO: 2034174 - RNA, 19 nt, Homo sapiens
  misc_RNA (1)...(19): siRNA sense strand
gauaguccaaguccuaaga

SEQ ID NO: 2034175 - RNA, 19 nt, Homo sapiens
  misc_RNA (1)...(19): siRNA sense strand
uaccuuauccuccauuuau

SEQ ID NO: 2034176 - RNA, 19 nt, Homo sapiens
  misc_RNA (1)...(19): siRNA sense strand
cgaguuccaugccaagugu

SEQ ID NO: 2034177 - RNA, 19 nt, Homo sapiens
  misc_RNA (1)...(19): siRNA sense strand
aaauuacgaggcccuguua

SEQ ID NO: 2034178 - RNA, 19 nt, Homo sapiens
  misc_RNA (1)...(19): siRNA sense strand
ccauauguguuaucaaugc

SEQ ID NO: 2034179 - RNA, 19 nt, Homo sapiens
  misc_RNA (1)...(19): siRNA sense strand
cuuaacacaugauccuuug

SEQ ID NO: 2034180 - RNA, 19 nt, Homo sapiens
  misc_RNA (1)...(19): siRNA sense strand
gcagauauugaacaacuuc

SEQ ID NO: 2034181 - RNA, 19 nt, Homo sapiens
  misc_RNA (1)...(19): siRNA sense strand
aagcagauauugaacaacu

SEQ ID NO: 2034182 - RNA, 19 nt, Homo sapiens
  misc_RNA (1)...(19): siRNA sense strand
ggagaacaucuuccaguag

SEQ ID NO: 2034183 - RNA, 19 nt, Homo sapiens
  misc_RNA (1)...(19): siRNA sense strand
agaacagacuuugugugua

SEQ ID NO: 2034184 - RNA, 19 nt, Homo sapiens
  misc_RNA (1)...(19): siRNA sense strand
ucuuaucgguucaauccua

SEQ ID NO: 2034185 - RNA, 19 nt, Homo sapiens
  misc_RNA (1)...(19): siRNA sense strand
ggacugacuaaagcagaua

SEQ ID NO: 2034186 - RNA, 19 nt, Homo sapiens
  misc_RNA (1)...(19): siRNA sense strand
ccagcuuacugccauaugu

SEQ ID NO: 2034187 - RNA, 19 nt, Homo sapiens
  misc_RNA (1)...(19): siRNA sense strand
guaccuuauccuccauuua

SEQ ID NO: 2034188 - RNA, 19 nt, Homo sapiens
  misc_RNA (1)...(19): siRNA sense strand
ugccaaguguguugacaaa

SEQ ID NO: 2034189 - RNA, 19 nt, Homo sapiens
  misc_RNA (1)...(19): siRNA sense strand
gcaaagccucguggacuga

SEQ ID NO: 2034190 - RNA, 19 nt, Homo sapiens
  misc_RNA (1)...(19): siRNA sense strand
uuacaggacguaguagaua

SEQ ID NO: 2034191 - RNA, 19 nt, Homo sapiens
  misc_RNA (1)...(19): siRNA sense strand
aagaagggaucgucugucu

SEQ ID NO: 2034192 - RNA, 19 nt, Homo sapiens
  misc_RNA (1)...(19): siRNA sense strand
uaguaugcaugugugauuu

SEQ ID NO: 2034193 - RNA, 19 nt, Homo sapiens
  misc_RNA (1)...(19): siRNA sense strand
ucuagugauccauuucuua

SEQ ID NO: 2034194 - RNA, 19 nt, Homo sapiens
  misc_RNA (1)...(19): siRNA sense strand
uaacaaccaccagucagaa

SEQ ID NO: 2034195 - RNA, 19 nt, Homo sapiens
  misc_RNA (1)...(19): siRNA sense strand
ccagcagaaugcagucaug

SEQ ID NO: 2034196 - RNA, 19 nt, Homo sapiens
  misc_RNA (1)...(19): siRNA sense strand
guugacaaauggcuuaagg

SEQ ID NO: 2034197 - RNA, 19 nt, Homo sapiens
  misc_RNA (1)...(19): siRNA sense strand
gcccaacuuucagcuuuga

SEQ ID NO: 2034198 - RNA, 19 nt, Homo sapiens
  misc_RNA (1)...(19): siRNA sense strand
aagccaacaucacuucuca

SEQ ID NO: 2034199 - RNA, 19 nt, Homo sapiens
  misc_RNA (1)...(19): siRNA sense strand
cuucaggcauguucaguuc

SEQ ID NO: 2034200 - RNA, 19 nt, Homo sapiens
  misc_RNA (1)...(19): siRNA sense strand
cauguucaguucagcacuu

SEQ ID NO: 2034201 - RNA, 19 nt, Homo sapiens
  misc_RNA (1)...(19): siRNA sense strand
aaaucguacuugcccaauu

SEQ ID NO: 2034202 - RNA, 19 nt, Homo sapiens
  misc_RNA (1)...(19): siRNA sense strand
gauauugaacaacuuccuu

SEQ ID NO: 2034203 - RNA, 19 nt, Homo sapiens
  misc_RNA (1)...(19): siRNA sense strand
cagcuuugaauuagaugua

SEQ ID NO: 2034204 - RNA, 19 nt, Homo sapiens
  misc_RNA (1)...(19): siRNA sense strand
ugaaguggaacucuuagga

SEQ ID NO: 2034205 - RNA, 19 nt, Homo sapiens
  misc_RNA (1)...(19): siRNA sense strand
ccagcucccucaccaccaa

SEQ ID NO: 2034206 - RNA, 19 nt, Homo sapiens
  misc_RNA (1)...(19): siRNA sense strand
cuagugauccauuucuuau

SEQ ID NO: 2034207 - RNA, 19 nt, Homo sapiens
  misc_RNA (1)...(19): siRNA sense strand
cccaucauccuccucauuu

SEQ ID NO: 2034208 - RNA, 19 nt, Homo sapiens
  misc_RNA (1)...(19): siRNA sense strand
caaauggcuuaaggcaaau

SEQ ID NO: 2034209 - RNA, 19 nt, Homo sapiens
  misc_RNA (1)...(19): siRNA sense strand
agaagaaguccuccuguca

SEQ ID NO: 2034210 - RNA, 19 nt, Homo sapiens
  misc_RNA (1)...(19): siRNA sense strand
uugcaguucuuaacacaug

SEQ ID NO: 2034211 - RNA, 19 nt, Homo sapiens
  misc_RNA (1)...(19): siRNA sense strand
ccaucauccuccucauuug

SEQ ID NO: 2034212 - RNA, 19 nt, Homo sapiens
  misc_RNA (1)...(19): siRNA sense strand
caggccaguuugucccuuu

SEQ ID NO: 2034213 - RNA, 19 nt, Homo sapiens
  misc_RNA (1)...(19): siRNA sense strand
ccucucucauucagucuuu

SEQ ID NO: 2034214 - RNA, 19 nt, Homo sapiens
  misc_RNA (1)...(19): siRNA sense strand
ggcccaacuuucagcuuug

SEQ ID NO: 2034215 - RNA, 19 nt, Homo sapiens
  misc_RNA (1)...(19): siRNA sense strand
cuuaucgguucaauccuaa

SEQ ID NO: 2034216 - RNA, 19 nt, Homo sapiens
  misc_RNA (1)...(19): siRNA sense strand
ccacaugggauuccacucu

SEQ ID NO: 2034217 - RNA, 19 nt, Homo sapiens
  misc_RNA (1)...(19): siRNA sense strand
cuuacugccauauguguua

SEQ ID NO: 2034218 - RNA, 19 nt, Homo sapiens
  misc_RNA (1)...(19): siRNA sense strand
agugauccauuucuuauac

SEQ ID NO: 2034219 - RNA, 19 nt, Homo sapiens
  misc_RNA (1)...(19): siRNA sense strand
uagugugccuccuccaaug

SEQ ID NO: 2034220 - RNA, 19 nt, Homo sapiens
  misc_RNA (1)...(19): siRNA sense strand
uugccgagcugaugcuuca

SEQ ID NO: 2034221 - RNA, 19 nt, Homo sapiens
  misc_RNA (1)...(19): siRNA sense strand
cuaacaaccaccagucaga

SEQ ID NO: 2034222 - RNA, 19 nt, Homo sapiens
  misc_RNA (1)...(19): siRNA sense strand
gcuuugaauuagauguaga

SEQ ID NO: 2034223 - RNA, 19 nt, Homo sapiens
  misc_RNA (1)...(19): siRNA sense strand
guagugugccuccuccaau

SEQ ID NO: 2034224 - RNA, 19 nt, Homo sapiens
  misc_RNA (1)...(19): siRNA sense strand
ccaauuugccgagcugaug

SEQ ID NO: 2034225 - RNA, 19 nt, Homo sapiens
  misc_RNA (1)...(19): siRNA sense strand
uggcuuaaggcaaaucgua

SEQ ID NO: 2034226 - RNA, 19 nt, Homo sapiens
  misc_RNA (1)...(19): siRNA sense strand
uaacacaugauccuuugca

SEQ ID NO: 2034227 - RNA, 19 nt, Homo sapiens
  misc_RNA (1)...(19): siRNA sense strand
agaagugcaucgggauuca

SEQ ID NO: 2034228 - RNA, 19 nt, Homo sapiens
  misc_RNA (1)...(19): siRNA sense strand
aaaaugaaguggaacucuu

SEQ ID NO: 2034229 - RNA, 19 nt, Homo sapiens
  misc_RNA (1)...(19): siRNA sense strand
gacuuuguguguaguaugc

SEQ ID NO: 2034230 - RNA, 19 nt, Homo sapiens
  misc_RNA (1)...(19): siRNA sense strand
cuaaagcagauauugaaca

SEQ ID NO: 2034231 - RNA, 19 nt, Homo sapiens
  misc_RNA (1)...(19): siRNA sense strand
gaccaagccaacaucacuu

SEQ ID NO: 2034232 - RNA, 19 nt, Homo sapiens
  misc_RNA (1)...(19): siRNA sense strand
gaacagacuuuguguguag

SEQ ID NO: 2034233 - RNA, 19 nt, Homo sapiens
  misc_RNA (1)...(19): siRNA sense strand
acaaauggcuuaaggcaaa

SEQ ID NO: 2034234 - RNA, 19 nt, Homo sapiens
  misc_RNA (1)...(19): siRNA sense strand
uguagaagauggagaagua

SEQ ID NO: 2034235 - RNA, 19 nt, Homo sapiens
  misc_RNA (1)...(19): siRNA sense strand
uugaacaacuuccuucuua

SEQ ID NO: 2034236 - RNA, 19 nt, Homo sapiens
  misc_RNA (1)...(19): siRNA sense strand
gcagcuacuuagagucuua

SEQ ID NO: 2034237 - RNA, 19 nt, Homo sapiens
  misc_RNA (1)...(19): siRNA sense strand
gcacaucccugcuuguagu

SEQ ID NO: 2034238 - RNA, 19 nt, Homo sapiens
  misc_RNA (1)...(19): siRNA sense strand
gcacuuaccaguaccauau

SEQ ID NO: 2034239 - RNA, 19 nt, Homo sapiens
  misc_RNA (1)...(19): siRNA sense strand
ccaaguguguugacaaaug

SEQ ID NO: 2034240 - RNA, 19 nt, Homo sapiens
  misc_RNA (1)...(19): siRNA sense strand
ggagguguccuuuggagua

SEQ ID NO: 2034241 - RNA, 19 nt, Homo sapiens
  misc_RNA (1)...(19): siRNA sense strand
aaucguacuugcccaauuu

SEQ ID NO: 2034242 - RNA, 19 nt, Homo sapiens
  misc_RNA (1)...(19): siRNA sense strand
gggcccaacuuucagcuuu

SEQ ID NO: 2034243 - RNA, 19 nt, Homo sapiens
  misc_RNA (1)...(19): siRNA sense strand
gaacaacuuccuucuuauc

SEQ ID NO: 2034244 - RNA, 19 nt, Homo sapiens
  misc_RNA (1)...(19): siRNA sense strand
gcagugggcccaacuuuca

SEQ ID NO: 2034245 - RNA, 19 nt, Homo sapiens
  misc_RNA (1)...(19): siRNA sense strand
caaggcagcuacuuagagu

SEQ ID NO: 2034246 - RNA, 19 nt, Homo sapiens
  misc_RNA (1)...(19): siRNA sense strand
gaucagcuccaucaaggaa

SEQ ID NO: 2034247 - RNA, 19 nt, Homo sapiens
  misc_RNA (1)...(19): siRNA sense strand
gacuaaagcagauauugaa

SEQ ID NO: 2034248 - RNA, 19 nt, Homo sapiens
  misc_RNA (1)...(19): siRNA sense strand
gcagaaugcagucaugguu

SEQ ID NO: 2034249 - RNA, 19 nt, Homo sapiens
  misc_RNA (1)...(19): siRNA sense strand
gauagaaaaugaaguggaa

SEQ ID NO: 2034250 - RNA, 19 nt, Homo sapiens
  misc_RNA (1)...(19): siRNA sense strand
guucagcacuuaccaguac

SEQ ID NO: 2034251 - RNA, 19 nt, Homo sapiens
  misc_RNA (1)...(19): siRNA sense strand
gaagauggagaaguagaaa

SEQ ID NO: 2034252 - RNA, 19 nt, Homo sapiens
  misc_RNA (1)...(19): siRNA sense strand
gcaccucccugucuguagu

SEQ ID NO: 2034253 - RNA, 19 nt, Homo sapiens
  misc_RNA (1)...(19): siRNA sense strand
aggagaacaucuuccagua

SEQ ID NO: 2034254 - RNA, 19 nt, Homo sapiens
  misc_RNA (1)...(19): siRNA sense strand
aaaugaaguggaacucuua

SEQ ID NO: 2034255 - RNA, 19 nt, Homo sapiens
  misc_RNA (1)...(19): siRNA sense strand
gaucgccucugcaaaggau

SEQ ID NO: 2034256 - RNA, 19 nt, Homo sapiens
  misc_RNA (1)...(19): siRNA sense strand
ggaagaagggaucgucugu

SEQ ID NO: 2034257 - RNA, 19 nt, Homo sapiens
  misc_RNA (1)...(19): siRNA sense strand
gagucaaggcagcuacuua

SEQ ID NO: 2034258 - RNA, 19 nt, Homo sapiens
  misc_RNA (1)...(19): siRNA sense strand
agaaugcagucaugguuga

SEQ ID NO: 2034259 - RNA, 19 nt, Homo sapiens
  misc_RNA (1)...(19): siRNA sense strand
ccaggaugcucugugguuu

SEQ ID NO: 2034260 - RNA, 19 nt, Homo sapiens
  misc_RNA (1)...(19): siRNA sense strand
ugacuaaagcagauauuga

SEQ ID NO: 2034261 - RNA, 19 nt, Homo sapiens
  misc_RNA (1)...(19): siRNA sense strand
ugaacaacuuccuucuuau

SEQ ID NO: 2034262 - RNA, 19 nt, Homo sapiens
  misc_RNA (1)...(19): siRNA sense strand
cuuagagucuuacccugua

SEQ ID NO: 2034263 - RNA, 19 nt, Homo sapiens
  misc_RNA (1)...(19): siRNA sense strand
ugccauauguguuaucaau

SEQ ID NO: 2034264 - RNA, 19 nt, Homo sapiens
  misc_RNA (1)...(19): siRNA sense strand
caaguguguugacaaaugg

SEQ ID NO: 2034265 - RNA, 19 nt, Homo sapiens
  misc_RNA (1)...(19): siRNA sense strand
gcacgcaacagaagaaguc

SEQ ID NO: 2034266 - RNA, 19 nt, Homo sapiens
  misc_RNA (1)...(19): siRNA sense strand
guaguaugcaugugugauu

SEQ ID NO: 2034267 - RNA, 19 nt, Homo sapiens
  misc_RNA (1)...(19): siRNA sense strand
cagaacagacuuugugugu

SEQ ID NO: 2034268 - RNA, 19 nt, Homo sapiens
  misc_RNA (1)...(19): siRNA sense strand
caucagcucccuugcaguu

SEQ ID NO: 2034269 - RNA, 19 nt, Homo sapiens
  misc_RNA (1)...(19): siRNA sense strand
uaccuuauccuccauuuau

SEQ ID NO: 2034270 - RNA, 19 nt, Homo sapiens
  misc_RNA (1)...(19): siRNA sense strand
cgaguuccaugccaagugu

SEQ ID NO: 2034271 - RNA, 19 nt, Homo sapiens
  misc_RNA (1)...(19): siRNA sense strand
aaauuacgaggcccuguua

SEQ ID NO: 2034272 - RNA, 19 nt, Homo sapiens
  misc_RNA (1)...(19): siRNA sense strand
ccauauguguuaucaaugc

SEQ ID NO: 2034273 - RNA, 19 nt, Homo sapiens
  misc_RNA (1)...(19): siRNA sense strand
cuuaacacaugauccuuug

SEQ ID NO: 2034274 - RNA, 19 nt, Homo sapiens
  misc_RNA (1)...(19): siRNA sense strand
gcagauauugaacaacuuc

SEQ ID NO: 2034275 - RNA, 19 nt, Homo sapiens
  misc_RNA (1)...(19): siRNA sense strand
aagcagauauugaacaacu

SEQ ID NO: 2034276 - RNA, 19 nt, Homo sapiens
  misc_RNA (1)...(19): siRNA sense strand
ggagaacaucuuccaguag

SEQ ID NO: 2034277 - RNA, 19 nt, Homo sapiens
  misc_RNA (1)...(19): siRNA sense strand
agaacagacuuugugugua

SEQ ID NO: 2034278 - RNA, 19 nt, Homo sapiens
  misc_RNA (1)...(19): siRNA sense strand
ucuuaucgguucaauccua

SEQ ID NO: 2034279 - RNA, 19 nt, Homo sapiens
  misc_RNA (1)...(19): siRNA sense strand
ggacugacuaaagcagaua

SEQ ID NO: 2034280 - RNA, 19 nt, Homo sapiens
  misc_RNA (1)...(19): siRNA sense strand
ccagcuuacugccauaugu

SEQ ID NO: 2034281 - RNA, 19 nt, Homo sapiens
  misc_RNA (1)...(19): siRNA sense strand
guaccuuauccuccauuua

SEQ ID NO: 2034282 - RNA, 19 nt, Homo sapiens
  misc_RNA (1)...(19): siRNA sense strand
ugccaaguguguugacaaa

SEQ ID NO: 2034283 - RNA, 19 nt, Homo sapiens
  misc_RNA (1)...(19): siRNA sense strand
gcaaagccucguggacuga

SEQ ID NO: 2034284 - RNA, 19 nt, Homo sapiens
  misc_RNA (1)...(19): siRNA sense strand
uuacaggacguaguagaua

SEQ ID NO: 2034285 - RNA, 19 nt, Homo sapiens
  misc_RNA (1)...(19): siRNA sense strand
aagaagggaucgucugucu

SEQ ID NO: 2034286 - RNA, 19 nt, Homo sapiens
  misc_RNA (1)...(19): siRNA sense strand
uaguaugcaugugugauuu

SEQ ID NO: 2034287 - RNA, 19 nt, Homo sapiens
  misc_RNA (1)...(19): siRNA sense strand
ucuagugauccauuucuua

SEQ ID NO: 2034288 - RNA, 19 nt, Homo sapiens
  misc_RNA (1)...(19): siRNA sense strand
uaacaaccaccagucagaa

SEQ ID NO: 2034289 - RNA, 19 nt, Homo sapiens
  misc_RNA (1)...(19): siRNA sense strand
ccagcagaaugcagucaug

SEQ ID NO: 2034290 - RNA, 19 nt, Homo sapiens
  misc_RNA (1)...(19): siRNA sense strand
guugacaaauggcuuaagg

SEQ ID NO: 2034291 - RNA, 19 nt, Homo sapiens
  misc_RNA (1)...(19): siRNA sense strand
aagccaacaucacuucuca

SEQ ID NO: 2034292 - RNA, 19 nt, Homo sapiens
  misc_RNA (1)...(19): siRNA sense strand
gcccaacuuucagcuuuga

SEQ ID NO: 2034293 - RNA, 19 nt, Homo sapiens
  misc_RNA (1)...(19): siRNA sense strand
cuucaggcauguucaguuc

SEQ ID NO: 2034294 - RNA, 19 nt, Homo sapiens
  misc_RNA (1)...(19): siRNA sense strand
cauguucaguucagcacuu

SEQ ID NO: 2034295 - RNA, 19 nt, Homo sapiens
  misc_RNA (1)...(19): siRNA sense strand
aaaucguacuugcccaauu

SEQ ID NO: 2034296 - RNA, 19 nt, Homo sapiens
  misc_RNA (1)...(19): siRNA sense strand
gauauugaacaacuuccuu

SEQ ID NO: 2034297 - RNA, 19 nt, Homo sapiens
  misc_RNA (1)...(19): siRNA sense strand
cagcuuugaauuagaugua

SEQ ID NO: 2034298 - RNA, 19 nt, Homo sapiens
  misc_RNA (1)...(19): siRNA sense strand
ugaaguggaacucuuagga

SEQ ID NO: 2034299 - RNA, 19 nt, Homo sapiens
  misc_RNA (1)...(19): siRNA sense strand
cuagugauccauuucuuau

SEQ ID NO: 2034300 - RNA, 19 nt, Homo sapiens
  misc_RNA (1)...(19): siRNA sense strand
cccaucauccuccucauuu

SEQ ID NO: 2034301 - RNA, 19 nt, Homo sapiens
  misc_RNA (1)...(19): siRNA sense strand
caaauggcuuaaggcaaau

SEQ ID NO: 2034302 - RNA, 19 nt, Homo sapiens
  misc_RNA (1)...(19): siRNA sense strand
agaagaaguccuccuguca

SEQ ID NO: 2034303 - RNA, 19 nt, Homo sapiens
  misc_RNA (1)...(19): siRNA sense strand
uugcaguucuuaacacaug

SEQ ID NO: 2034304 - RNA, 19 nt, Homo sapiens
  misc_RNA (1)...(19): siRNA sense strand
ccaucauccuccucauuug

SEQ ID NO: 2034305 - RNA, 19 nt, Homo sapiens
  misc_RNA (1)...(19): siRNA sense strand
caggccaguuugucccuuu

SEQ ID NO: 2034306 - RNA, 19 nt, Homo sapiens
  misc_RNA (1)...(19): siRNA sense strand
ggcccaacuuucagcuuug

SEQ ID NO: 2034307 - RNA, 19 nt, Homo sapiens
  misc_RNA (1)...(19): siRNA sense strand
cuuaucgguucaauccuaa

SEQ ID NO: 2034308 - RNA, 19 nt, Homo sapiens
  misc_RNA (1)...(19): siRNA sense strand
ccacaugggauuccacucu

SEQ ID NO: 2034309 - RNA, 19 nt, Homo sapiens
  misc_RNA (1)...(19): siRNA sense strand
cuuacugccauauguguua

SEQ ID NO: 2034310 - RNA, 19 nt, Homo sapiens
  misc_RNA (1)...(19): siRNA sense strand
agugauccauuucuuauac

SEQ ID NO: 2034311 - RNA, 19 nt, Homo sapiens
  misc_RNA (1)...(19): siRNA sense strand
uagugugccuccuccaaug

SEQ ID NO: 2034312 - RNA, 19 nt, Homo sapiens
  misc_RNA (1)...(19): siRNA sense strand
uugccgagcugaugcuuca

SEQ ID NO: 2034313 - RNA, 19 nt, Homo sapiens
  misc_RNA (1)...(19): siRNA sense strand
cuaacaaccaccagucaga

SEQ ID NO: 2034314 - RNA, 19 nt, Homo sapiens
  misc_RNA (1)...(19): siRNA sense strand
gcuuugaauuagauguaga

SEQ ID NO: 2034315 - RNA, 19 nt, Homo sapiens
  misc_RNA (1)...(19): siRNA sense strand
guagugugccuccuccaau

SEQ ID NO: 2034316 - RNA, 19 nt, Homo sapiens
  misc_RNA (1)...(19): siRNA sense strand
ccaauuugccgagcugaug

SEQ ID NO: 2034317 - RNA, 19 nt, Homo sapiens
  misc_RNA (1)...(19): siRNA sense strand
uggcuuaaggcaaaucgua

SEQ ID NO: 2034318 - RNA, 19 nt, Homo sapiens
  misc_RNA (1)...(19): siRNA sense strand
uaacacaugauccuuugca

SEQ ID NO: 2034319 - RNA, 19 nt, Homo sapiens
  misc_RNA (1)...(19): siRNA sense strand
agaagugcaucgggauuca

SEQ ID NO: 2034320 - RNA, 19 nt, Homo sapiens
  misc_RNA (1)...(19): siRNA sense strand
aaaaugaaguggaacucuu

SEQ ID NO: 2034321 - RNA, 19 nt, Homo sapiens
  misc_RNA (1)...(19): siRNA sense strand
gacuuuguguguaguaugc

SEQ ID NO: 2034322 - RNA, 19 nt, Homo sapiens
  misc_RNA (1)...(19): siRNA sense strand
cuaaagcagauauugaaca

SEQ ID NO: 2034323 - RNA, 19 nt, Homo sapiens
  misc_RNA (1)...(19): siRNA sense strand
gaccaagccaacaucacuu

SEQ ID NO: 2034324 - RNA, 19 nt, Homo sapiens
  misc_RNA (1)...(19): siRNA sense strand
cgaccaagccaacaucacu

SEQ ID NO: 2034325 - RNA, 19 nt, Homo sapiens
  misc_RNA (1)...(19): siRNA sense strand
agaagauggagaaguagaa

SEQ ID NO: 2034326 - RNA, 19 nt, Homo sapiens
  misc_RNA (1)...(19): siRNA sense strand
aggcuuacaggacguagua

SEQ ID NO: 2034327 - RNA, 19 nt, Homo sapiens
  misc_RNA (1)...(19): siRNA sense strand
gagguguccuuuggaguac

SEQ ID NO: 2034328 - RNA, 19 nt, Homo sapiens
  misc_RNA (1)...(19): siRNA sense strand
uauacauccuccucaccuu

SEQ ID NO: 2034329 - RNA, 19 nt, Homo sapiens
  misc_RNA (1)...(19): siRNA sense strand
gugauccauuucuuauaca

SEQ ID NO: 2034330 - RNA, 19 nt, Homo sapiens
  misc_RNA (1)...(19): siRNA sense strand
agauguagaagauggagaa

SEQ ID NO: 2034331 - RNA, 19 nt, Homo sapiens
  misc_RNA (1)...(19): siRNA sense strand
ucagcuccaucaaggaaca

SEQ ID NO: 2034332 - RNA, 19 nt, Homo sapiens
  misc_RNA (1)...(19): siRNA sense strand
gaacagacuuuguguguag

SEQ ID NO: 2034333 - RNA, 19 nt, Homo sapiens
  misc_RNA (1)...(19): siRNA sense strand
acaaauggcuuaaggcaaa

SEQ ID NO: 2034334 - RNA, 19 nt, Homo sapiens
  misc_RNA (1)...(19): siRNA sense strand
gaagauaguccaaguccua

SEQ ID NO: 2034335 - RNA, 19 nt, Homo sapiens
  misc_RNA (1)...(19): siRNA sense strand
uguagaagauggagaagua

SEQ ID NO: 2034336 - RNA, 19 nt, Homo sapiens
  misc_RNA (1)...(19): siRNA sense strand
uugaacaacuuccuucuua

SEQ ID NO: 2034337 - RNA, 19 nt, Homo sapiens
  misc_RNA (1)...(19): siRNA sense strand
gcagcuacuuagagucuua

SEQ ID NO: 2034338 - RNA, 19 nt, Homo sapiens
  misc_RNA (1)...(19): siRNA sense strand
gcacaucccugcuuguagu

SEQ ID NO: 2034339 - RNA, 19 nt, Homo sapiens
  misc_RNA (1)...(19): siRNA sense strand
gcacuuaccaguaccauau

SEQ ID NO: 2034340 - RNA, 19 nt, Homo sapiens
  misc_RNA (1)...(19): siRNA sense strand
ccaaguguguugacaaaug

SEQ ID NO: 2034341 - RNA, 19 nt, Homo sapiens
  misc_RNA (1)...(19): siRNA sense strand
ggagguguccuuuggagua

SEQ ID NO: 2034342 - RNA, 19 nt, Homo sapiens
  misc_RNA (1)...(19): siRNA sense strand
aaucguacuugcccaauuu

SEQ ID NO: 2034343 - RNA, 19 nt, Homo sapiens
  misc_RNA (1)...(19): siRNA sense strand
gggcccaacuuucagcuuu

SEQ ID NO: 2034344 - RNA, 19 nt, Homo sapiens
  misc_RNA (1)...(19): siRNA sense strand
gaacaacuuccuucuuauc

SEQ ID NO: 2034345 - RNA, 19 nt, Homo sapiens
  misc_RNA (1)...(19): siRNA sense strand
gcagugggcccaacuuuca

SEQ ID NO: 2034346 - RNA, 19 nt, Homo sapiens
  misc_RNA (1)...(19): siRNA sense strand
caaggcagcuacuuagagu

SEQ ID NO: 2034347 - RNA, 19 nt, Homo sapiens
  misc_RNA (1)...(19): siRNA sense strand
agacagcgccucucucauu

SEQ ID NO: 2034348 - RNA, 19 nt, Homo sapiens
  misc_RNA (1)...(19): siRNA sense strand
gaucagcuccaucaaggaa

SEQ ID NO: 2034349 - RNA, 19 nt, Homo sapiens
  misc_RNA (1)...(19): siRNA sense strand
gacuaaagcagauauugaa

SEQ ID NO: 2034350 - RNA, 19 nt, Homo sapiens
  misc_RNA (1)...(19): siRNA sense strand
gcagaaugcagucaugguu

SEQ ID NO: 2034351 - RNA, 19 nt, Homo sapiens
  misc_RNA (1)...(19): siRNA sense strand
gauagaaaaugaaguggaa

SEQ ID NO: 2034352 - RNA, 19 nt, Homo sapiens
  misc_RNA (1)...(19): siRNA sense strand
guucagcacuuaccaguac

SEQ ID NO: 2034353 - RNA, 19 nt, Homo sapiens
  misc_RNA (1)...(19): siRNA sense strand
cucauucagucuuugauua

SEQ ID NO: 2034354 - RNA, 19 nt, Homo sapiens
  misc_RNA (1)...(19): siRNA sense strand
gaagauggagaaguagaaa

SEQ ID NO: 2034355 - RNA, 19 nt, Homo sapiens
  misc_RNA (1)...(19): siRNA sense strand
gcaccucccugucuguagu

SEQ ID NO: 2034356 - RNA, 19 nt, Homo sapiens
  misc_RNA (1)...(19): siRNA sense strand
aggagaacaucuuccagua

SEQ ID NO: 2034357 - RNA, 19 nt, Homo sapiens
  misc_RNA (1)...(19): siRNA sense strand
aaaugaaguggaacucuua

SEQ ID NO: 2034358 - RNA, 19 nt, Homo sapiens
  misc_RNA (1)...(19): siRNA sense strand
gaucgccucugcaaaggau

SEQ ID NO: 2034359 - RNA, 19 nt, Homo sapiens
  misc_RNA (1)...(19): siRNA sense strand
ggaagaagggaucgucugu

SEQ ID NO: 2034360 - RNA, 19 nt, Homo sapiens
  misc_RNA (1)...(19): siRNA sense strand
gagucaaggcagcuacuua

SEQ ID NO: 2034361 - RNA, 19 nt, Homo sapiens
  misc_RNA (1)...(19): siRNA sense strand
agaaugcagucaugguuga

SEQ ID NO: 2034362 - RNA, 19 nt, Homo sapiens
  misc_RNA (1)...(19): siRNA sense strand
ccaggaugcucugugguuu

SEQ ID NO: 2034363 - RNA, 19 nt, Homo sapiens
  misc_RNA (1)...(19): siRNA sense strand
gacagcgccucucucauuc

SEQ ID NO: 2034364 - RNA, 19 nt, Homo sapiens
  misc_RNA (1)...(19): siRNA sense strand
ugacuaaagcagauauuga

SEQ ID NO: 2034365 - RNA, 19 nt, Homo sapiens
  misc_RNA (1)...(19): siRNA sense strand
ugaacaacuuccuucuuau

SEQ ID NO: 2034366 - RNA, 19 nt, Homo sapiens
  misc_RNA (1)...(19): siRNA sense strand
cuuagagucuuacccugua

SEQ ID NO: 2034367 - RNA, 19 nt, Homo sapiens
  misc_RNA (1)...(19): siRNA sense strand
gagugaagauaguccaagu

SEQ ID NO: 2034368 - RNA, 19 nt, Homo sapiens
  misc_RNA (1)...(19): siRNA sense strand
gcacgcaacagaagaaguc

SEQ ID NO: 2034369 - RNA, 19 nt, Homo sapiens
  misc_RNA (1)...(19): siRNA sense strand
caaguguguugacaaaugg

SEQ ID NO: 2034370 - RNA, 19 nt, Homo sapiens
  misc_RNA (1)...(19): siRNA sense strand
guaguaugcaugugugauu

SEQ ID NO: 2034371 - RNA, 19 nt, Homo sapiens
  misc_RNA (1)...(19): siRNA sense strand
cagaacagacuuugugugu

SEQ ID NO: 2034372 - RNA, 19 nt, Homo sapiens
  misc_RNA (1)...(19): siRNA sense strand
ugccauauguguuaucaau

SEQ ID NO: 2034373 - RNA, 19 nt, Homo sapiens
  misc_RNA (1)...(19): siRNA sense strand
caucagcucccuugcaguu

SEQ ID NO: 2034374 - RNA, 19 nt, Homo sapiens
  misc_RNA (1)...(19): siRNA sense strand
gauaguccaaguccuaaga

SEQ ID NO: 2034375 - RNA, 19 nt, Homo sapiens
  misc_RNA (1)...(19): siRNA sense strand
uaccuuauccuccauuuau

SEQ ID NO: 2034376 - RNA, 19 nt, Homo sapiens
  misc_RNA (1)...(19): siRNA sense strand
cgaguuccaugccaagugu

SEQ ID NO: 2034377 - RNA, 19 nt, Homo sapiens
  misc_RNA (1)...(19): siRNA sense strand
aaauuacgaggcccuguua

SEQ ID NO: 2034378 - RNA, 19 nt, Homo sapiens
  misc_RNA (1)...(19): siRNA sense strand
ccauauguguuaucaaugc

SEQ ID NO: 2034379 - RNA, 19 nt, Homo sapiens
  misc_RNA (1)...(19): siRNA sense strand
cuuaacacaugauccuuug

SEQ ID NO: 2034380 - RNA, 19 nt, Homo sapiens
  misc_RNA (1)...(19): siRNA sense strand
gcagauauugaacaacuuc

SEQ ID NO: 2034381 - RNA, 19 nt, Homo sapiens
  misc_RNA (1)...(19): siRNA sense strand
aagcagauauugaacaacu

SEQ ID NO: 2034382 - RNA, 19 nt, Homo sapiens
  misc_RNA (1)...(19): siRNA sense strand
ggagaacaucuuccaguag

SEQ ID NO: 2034383 - RNA, 19 nt, Homo sapiens
  misc_RNA (1)...(19): siRNA sense strand
agaacagacuuugugugua

SEQ ID NO: 2034384 - RNA, 19 nt, Homo sapiens
  misc_RNA (1)...(19): siRNA sense strand
ucuuaucgguucaauccua

SEQ ID NO: 2034385 - RNA, 19 nt, Homo sapiens
  misc_RNA (1)...(19): siRNA sense strand
ggacugacuaaagcagaua

SEQ ID NO: 2034386 - RNA, 19 nt, Homo sapiens
  misc_RNA (1)...(19): siRNA sense strand
ccagcuuacugccauaugu

SEQ ID NO: 2034387 - RNA, 19 nt, Homo sapiens
  misc_RNA (1)...(19): siRNA sense strand
guaccuuauccuccauuua

SEQ ID NO: 2034388 - RNA, 19 nt, Homo sapiens
  misc_RNA (1)...(19): siRNA sense strand
ugccaaguguguugacaaa

SEQ ID NO: 2034389 - RNA, 19 nt, Homo sapiens
  misc_RNA (1)...(19): siRNA sense strand
gcaaagccucguggacuga

SEQ ID NO: 2034390 - RNA, 19 nt, Homo sapiens
  misc_RNA (1)...(19): siRNA sense strand
uuacaggacguaguagaua

SEQ ID NO: 2034391 - RNA, 19 nt, Homo sapiens
  misc_RNA (1)...(19): siRNA sense strand
aagaagggaucgucugucu

SEQ ID NO: 2034392 - RNA, 19 nt, Homo sapiens
  misc_RNA (1)...(19): siRNA sense strand
uaguaugcaugugugauuu

SEQ ID NO: 2034393 - RNA, 19 nt, Homo sapiens
  misc_RNA (1)...(19): siRNA sense strand
ucuagugauccauuucuua

SEQ ID NO: 2034394 - RNA, 19 nt, Homo sapiens
  misc_RNA (1)...(19): siRNA sense strand
uaacaaccaccagucagaa

SEQ ID NO: 2034395 - RNA, 19 nt, Homo sapiens
  misc_RNA (1)...(19): siRNA sense strand
ccagcagaaugcagucaug

SEQ ID NO: 2034396 - RNA, 19 nt, Homo sapiens
  misc_RNA (1)...(19): siRNA sense strand
guugacaaauggcuuaagg

SEQ ID NO: 2034397 - RNA, 19 nt, Homo sapiens
  misc_RNA (1)...(19): siRNA sense strand
gcccaacuuucagcuuuga

SEQ ID NO: 2034398 - RNA, 19 nt, Homo sapiens
  misc_RNA (1)...(19): siRNA sense strand
aagccaacaucacuucuca

SEQ ID NO: 2034399 - RNA, 19 nt, Homo sapiens
  misc_RNA (1)...(19): siRNA sense strand
cuucaggcauguucaguuc

SEQ ID NO: 2034400 - RNA, 19 nt, Homo sapiens
  misc_RNA (1)...(19): siRNA sense strand
cauguucaguucagcacuu

SEQ ID NO: 2034401 - RNA, 19 nt, Homo sapiens
  misc_RNA (1)...(19): siRNA sense strand
aaaucguacuugcccaauu

SEQ ID NO: 2034402 - RNA, 19 nt, Homo sapiens
  misc_RNA (1)...(19): siRNA sense strand
gauauugaacaacuuccuu

SEQ ID NO: 2034403 - RNA, 19 nt, Homo sapiens
  misc_RNA (1)...(19): siRNA sense strand
cagcuuugaauuagaugua

SEQ ID NO: 2034404 - RNA, 19 nt, Homo sapiens
  misc_RNA (1)...(19): siRNA sense strand
ugaaguggaacucuuagga

SEQ ID NO: 2034405 - RNA, 19 nt, Homo sapiens
  misc_RNA (1)...(19): siRNA sense strand
ccagcucccucaccaccaa

SEQ ID NO: 2034406 - RNA, 19 nt, Homo sapiens
  misc_RNA (1)...(19): siRNA sense strand
cuagugauccauuucuuau

SEQ ID NO: 2034407 - RNA, 19 nt, Homo sapiens
  misc_RNA (1)...(19): siRNA sense strand
cccaucauccuccucauuu

SEQ ID NO: 2034408 - RNA, 19 nt, Homo sapiens
  misc_RNA (1)...(19): siRNA sense strand
caaauggcuuaaggcaaau

SEQ ID NO: 2034409 - RNA, 19 nt, Homo sapiens
  misc_RNA (1)...(19): siRNA sense strand
agaagaaguccuccuguca

SEQ ID NO: 2034410 - RNA, 19 nt, Homo sapiens
  misc_RNA (1)...(19): siRNA sense strand
uugcaguucuuaacacaug

SEQ ID NO: 2034411 - RNA, 19 nt, Homo sapiens
  misc_RNA (1)...(19): siRNA sense strand
ccaucauccuccucauuug

SEQ ID NO: 2034412 - RNA, 19 nt, Homo sapiens
  misc_RNA (1)...(19): siRNA sense strand
caggccaguuugucccuuu

SEQ ID NO: 2034413 - RNA, 19 nt, Homo sapiens
  misc_RNA (1)...(19): siRNA sense strand
ccucucucauucagucuuu

SEQ ID NO: 2034414 - RNA, 19 nt, Homo sapiens
  misc_RNA (1)...(19): siRNA sense strand
ggcccaacuuucagcuuug

SEQ ID NO: 2034415 - RNA, 19 nt, Homo sapiens
  misc_RNA (1)...(19): siRNA sense strand
cuuaucgguucaauccuaa

SEQ ID NO: 2034416 - RNA, 19 nt, Homo sapiens
  misc_RNA (1)...(19): siRNA sense strand
ccacaugggauuccacucu

SEQ ID NO: 2034417 - RNA, 19 nt, Homo sapiens
  misc_RNA (1)...(19): siRNA sense strand
cuuacugccauauguguua

SEQ ID NO: 2034418 - RNA, 19 nt, Homo sapiens
  misc_RNA (1)...(19): siRNA sense strand
agugauccauuucuuauac

SEQ ID NO: 2034419 - RNA, 19 nt, Homo sapiens
  misc_RNA (1)...(19): siRNA sense strand
uagugugccuccuccaaug

SEQ ID NO: 2034420 - RNA, 19 nt, Homo sapiens
  misc_RNA (1)...(19): siRNA sense strand
uugccgagcugaugcuuca

SEQ ID NO: 2034421 - RNA, 19 nt, Homo sapiens
  misc_RNA (1)...(19): siRNA sense strand
cuaacaaccaccagucaga

SEQ ID NO: 2034422 - RNA, 19 nt, Homo sapiens
  misc_RNA (1)...(19): siRNA sense strand
gcuuugaauuagauguaga

SEQ ID NO: 2034423 - RNA, 19 nt, Homo sapiens
  misc_RNA (1)...(19): siRNA sense strand
guagugugccuccuccaau

SEQ ID NO: 2034424 - RNA, 19 nt, Homo sapiens
  misc_RNA (1)...(19): siRNA sense strand
ccaauuugccgagcugaug

SEQ ID NO: 2034425 - RNA, 19 nt, Homo sapiens
  misc_RNA (1)...(19): siRNA sense strand
uggcuuaaggcaaaucgua

SEQ ID NO: 2034426 - RNA, 19 nt, Homo sapiens
  misc_RNA (1)...(19): siRNA sense strand
uaacacaugauccuuugca

SEQ ID NO: 2034427 - RNA, 19 nt, Homo sapiens
  misc_RNA (1)...(19): siRNA sense strand
agaagugcaucgggauuca

SEQ ID NO: 2034428 - RNA, 19 nt, Homo sapiens
  misc_RNA (1)...(19): siRNA sense strand
aaaaugaaguggaacucuu

SEQ ID NO: 2034429 - RNA, 19 nt, Homo sapiens
  misc_RNA (1)...(19): siRNA sense strand
gacuuuguguguaguaugc

SEQ ID NO: 2034430 - RNA, 19 nt, Homo sapiens
  misc_RNA (1)...(19): siRNA sense strand
cuaaagcagauauugaaca

SEQ ID NO: 2034431 - RNA, 19 nt, Homo sapiens
  misc_RNA (1)...(19): siRNA sense strand
gaccaagccaacaucacuu

SEQ ID NO: 2034432 - RNA, 19 nt, Homo sapiens
  misc_RNA (1)...(19): siRNA sense strand
gaacagacuuuguguguag

SEQ ID NO: 2034433 - RNA, 19 nt, Homo sapiens
  misc_RNA (1)...(19): siRNA sense strand
acaaauggcuuaaggcaaa

SEQ ID NO: 2034434 - RNA, 19 nt, Homo sapiens
  misc_RNA (1)...(19): siRNA sense strand
uguagaagauggagaagua

SEQ ID NO: 2034435 - RNA, 19 nt, Homo sapiens
  misc_RNA (1)...(19): siRNA sense strand
uugaacaacuuccuucuua

SEQ ID NO: 2034436 - RNA, 19 nt, Homo sapiens
  misc_RNA (1)...(19): siRNA sense strand
gcagcuacuuagagucuua

SEQ ID NO: 2034437 - RNA, 19 nt, Homo sapiens
  misc_RNA (1)...(19): siRNA sense strand
gcacaucccugcuuguagu

SEQ ID NO: 2034438 - RNA, 19 nt, Homo sapiens
  misc_RNA (1)...(19): siRNA sense strand
gcacuuaccaguaccauau

SEQ ID NO: 2034439 - RNA, 19 nt, Homo sapiens
  misc_RNA (1)...(19): siRNA sense strand
ccaaguguguugacaaaug

SEQ ID NO: 2034440 - RNA, 19 nt, Homo sapiens
  misc_RNA (1)...(19): siRNA sense strand
ggagguguccuuuggagua

SEQ ID NO: 2034441 - RNA, 19 nt, Homo sapiens
  misc_RNA (1)...(19): siRNA sense strand
aaucguacuugcccaauuu

SEQ ID NO: 2034442 - RNA, 19 nt, Homo sapiens
  misc_RNA (1)...(19): siRNA sense strand
gggcccaacuuucagcuuu

SEQ ID NO: 2034443 - RNA, 19 nt, Homo sapiens
  misc_RNA (1)...(19): siRNA sense strand
gaacaacuuccuucuuauc

SEQ ID NO: 2034444 - RNA, 19 nt, Homo sapiens
  misc_RNA (1)...(19): siRNA sense strand
gcagugggcccaacuuuca

SEQ ID NO: 2034445 - RNA, 19 nt, Homo sapiens
  misc_RNA (1)...(19): siRNA sense strand
caaggcagcuacuuagagu

SEQ ID NO: 2034446 - RNA, 19 nt, Homo sapiens
  misc_RNA (1)...(19): siRNA sense strand
gaucagcuccaucaaggaa

SEQ ID NO: 2034447 - RNA, 19 nt, Homo sapiens
  misc_RNA (1)...(19): siRNA sense strand
gacuaaagcagauauugaa

SEQ ID NO: 2034448 - RNA, 19 nt, Homo sapiens
  misc_RNA (1)...(19): siRNA sense strand
gcagaaugcagucaugguu

SEQ ID NO: 2034449 - RNA, 19 nt, Homo sapiens
  misc_RNA (1)...(19): siRNA sense strand
gauagaaaaugaaguggaa

SEQ ID NO: 2034450 - RNA, 19 nt, Homo sapiens
  misc_RNA (1)...(19): siRNA sense strand
guucagcacuuaccaguac

SEQ ID NO: 2034451 - RNA, 19 nt, Homo sapiens
  misc_RNA (1)...(19): siRNA sense strand
gaagauggagaaguagaaa

SEQ ID NO: 2034452 - RNA, 19 nt, Homo sapiens
  misc_RNA (1)...(19): siRNA sense strand
gcaccucccugucuguagu

SEQ ID NO: 2034453 - RNA, 19 nt, Homo sapiens
  misc_RNA (1)...(19): siRNA sense strand
aggagaacaucuuccagua

SEQ ID NO: 2034454 - RNA, 19 nt, Homo sapiens
  misc_RNA (1)...(19): siRNA sense strand
aaaugaaguggaacucuua

SEQ ID NO: 2034455 - RNA, 19 nt, Homo sapiens
  misc_RNA (1)...(19): siRNA sense strand
gaucgccucugcaaaggau

SEQ ID NO: 2034456 - RNA, 19 nt, Homo sapiens
  misc_RNA (1)...(19): siRNA sense strand
ggaagaagggaucgucugu

SEQ ID NO: 2034457 - RNA, 19 nt, Homo sapiens
  misc_RNA (1)...(19): siRNA sense strand
gagucaaggcagcuacuua

SEQ ID NO: 2034458 - RNA, 19 nt, Homo sapiens
  misc_RNA (1)...(19): siRNA sense strand
agaaugcagucaugguuga

SEQ ID NO: 2034459 - RNA, 19 nt, Homo sapiens
  misc_RNA (1)...(19): siRNA sense strand
ccaggaugcucugugguuu

SEQ ID NO: 2034460 - RNA, 19 nt, Homo sapiens
  misc_RNA (1)...(19): siRNA sense strand
ugacuaaagcagauauuga

SEQ ID NO: 2034461 - RNA, 19 nt, Homo sapiens
  misc_RNA (1)...(19): siRNA sense strand
ugaacaacuuccuucuuau

SEQ ID NO: 2034462 - RNA, 19 nt, Homo sapiens
  misc_RNA (1)...(19): siRNA sense strand
cuuagagucuuacccugua

SEQ ID NO: 2034463 - RNA, 19 nt, Homo sapiens
  misc_RNA (1)...(19): siRNA sense strand
ugccauauguguuaucaau

SEQ ID NO: 2034464 - RNA, 19 nt, Homo sapiens
  misc_RNA (1)...(19): siRNA sense strand
caaguguguugacaaaugg

SEQ ID NO: 2034465 - RNA, 19 nt, Homo sapiens
  misc_RNA (1)...(19): siRNA sense strand
gcacgcaacagaagaaguc

SEQ ID NO: 2034466 - RNA, 19 nt, Homo sapiens
  misc_RNA (1)...(19): siRNA sense strand
guaguaugcaugugugauu

SEQ ID NO: 2034467 - RNA, 19 nt, Homo sapiens
  misc_RNA (1)...(19): siRNA sense strand
cagaacagacuuugugugu

SEQ ID NO: 2034468 - RNA, 19 nt, Homo sapiens
  misc_RNA (1)...(19): siRNA sense strand
caucagcucccuugcaguu

SEQ ID NO: 2034469 - RNA, 19 nt, Homo sapiens
  misc_RNA (1)...(19): siRNA sense strand
uaccuuauccuccauuuau

SEQ ID NO: 2034470 - RNA, 19 nt, Homo sapiens
  misc_RNA (1)...(19): siRNA sense strand
cgaguuccaugccaagugu

SEQ ID NO: 2034471 - RNA, 19 nt, Homo sapiens
  misc_RNA (1)...(19): siRNA sense strand
aaauuacgaggcccuguua

SEQ ID NO: 2034472 - RNA, 19 nt, Homo sapiens
  misc_RNA (1)...(19): siRNA sense strand
ccauauguguuaucaaugc

SEQ ID NO: 2034473 - RNA, 19 nt, Homo sapiens
  misc_RNA (1)...(19): siRNA sense strand
cuuaacacaugauccuuug

SEQ ID NO: 2034474 - RNA, 19 nt, Homo sapiens
  misc_RNA (1)...(19): siRNA sense strand
gcagauauugaacaacuuc

SEQ ID NO: 2034475 - RNA, 19 nt, Homo sapiens
  misc_RNA (1)...(19): siRNA sense strand
aagcagauauugaacaacu

SEQ ID NO: 2034476 - RNA, 19 nt, Homo sapiens
  misc_RNA (1)...(19): siRNA sense strand
ggagaacaucuuccaguag

SEQ ID NO: 2034477 - RNA, 19 nt, Homo sapiens
  misc_RNA (1)...(19): siRNA sense strand
agaacagacuuugugugua

SEQ ID NO: 2034478 - RNA, 19 nt, Homo sapiens
  misc_RNA (1)...(19): siRNA sense strand
ucuuaucgguucaauccua

SEQ ID NO: 2034479 - RNA, 19 nt, Homo sapiens
  misc_RNA (1)...(19): siRNA sense strand
ggacugacuaaagcagaua

SEQ ID NO: 2034480 - RNA, 19 nt, Homo sapiens
  misc_RNA (1)...(19): siRNA sense strand
ccagcuuacugccauaugu

SEQ ID NO: 2034481 - RNA, 19 nt, Homo sapiens
  misc_RNA (1)...(19): siRNA sense strand
guaccuuauccuccauuua

SEQ ID NO: 2034482 - RNA, 19 nt, Homo sapiens
  misc_RNA (1)...(19): siRNA sense strand
ugccaaguguguugacaaa

SEQ ID NO: 2034483 - RNA, 19 nt, Homo sapiens
  misc_RNA (1)...(19): siRNA sense strand
gcaaagccucguggacuga

SEQ ID NO: 2034484 - RNA, 19 nt, Homo sapiens
  misc_RNA (1)...(19): siRNA sense strand
uuacaggacguaguagaua

SEQ ID NO: 2034485 - RNA, 19 nt, Homo sapiens
  misc_RNA (1)...(19): siRNA sense strand
aagaagggaucgucugucu

SEQ ID NO: 2034486 - RNA, 19 nt, Homo sapiens
  misc_RNA (1)...(19): siRNA sense strand
uaguaugcaugugugauuu

SEQ ID NO: 2034487 - RNA, 19 nt, Homo sapiens
  misc_RNA (1)...(19): siRNA sense strand
ucuagugauccauuucuua

SEQ ID NO: 2034488 - RNA, 19 nt, Homo sapiens
  misc_RNA (1)...(19): siRNA sense strand
uaacaaccaccagucagaa

SEQ ID NO: 2034489 - RNA, 19 nt, Homo sapiens
  misc_RNA (1)...(19): siRNA sense strand
ccagcagaaugcagucaug

SEQ ID NO: 2034490 - RNA, 19 nt, Homo sapiens
  misc_RNA (1)...(19): siRNA sense strand
guugacaaauggcuuaagg

SEQ ID NO: 2034491 - RNA, 19 nt, Homo sapiens
  misc_RNA (1)...(19): siRNA sense strand
aagccaacaucacuucuca

SEQ ID NO: 2034492 - RNA, 19 nt, Homo sapiens
  misc_RNA (1)...(19): siRNA sense strand
gcccaacuuucagcuuuga

SEQ ID NO: 2034493 - RNA, 19 nt, Homo sapiens
  misc_RNA (1)...(19): siRNA sense strand
cuucaggcauguucaguuc

SEQ ID NO: 2034494 - RNA, 19 nt, Homo sapiens
  misc_RNA (1)...(19): siRNA sense strand
cauguucaguucagcacuu

SEQ ID NO: 2034495 - RNA, 19 nt, Homo sapiens
  misc_RNA (1)...(19): siRNA sense strand
aaaucguacuugcccaauu

SEQ ID NO: 2034496 - RNA, 19 nt, Homo sapiens
  misc_RNA (1)...(19): siRNA sense strand
gauauugaacaacuuccuu

SEQ ID NO: 2034497 - RNA, 19 nt, Homo sapiens
  misc_RNA (1)...(19): siRNA sense strand
cagcuuugaauuagaugua

SEQ ID NO: 2034498 - RNA, 19 nt, Homo sapiens
  misc_RNA (1)...(19): siRNA sense strand
ugaaguggaacucuuagga

SEQ ID NO: 2034499 - RNA, 19 nt, Homo sapiens
  misc_RNA (1)...(19): siRNA sense strand
cuagugauccauuucuuau

SEQ ID NO: 2034500 - RNA, 19 nt, Homo sapiens
  misc_RNA (1)...(19): siRNA sense strand
cccaucauccuccucauuu

SEQ ID NO: 2034501 - RNA, 19 nt, Homo sapiens
  misc_RNA (1)...(19): siRNA sense strand
caaauggcuuaaggcaaau

SEQ ID NO: 2034502 - RNA, 19 nt, Homo sapiens
  misc_RNA (1)...(19): siRNA sense strand
agaagaaguccuccuguca

SEQ ID NO: 2034503 - RNA, 19 nt, Homo sapiens
  misc_RNA (1)...(19): siRNA sense strand
uugcaguucuuaacacaug

SEQ ID NO: 2034504 - RNA, 19 nt, Homo sapiens
  misc_RNA (1)...(19): siRNA sense strand
ccaucauccuccucauuug

SEQ ID NO: 2034505 - RNA, 19 nt, Homo sapiens
  misc_RNA (1)...(19): siRNA sense strand
caggccaguuugucccuuu

SEQ ID NO: 2034506 - RNA, 19 nt, Homo sapiens
  misc_RNA (1)...(19): siRNA sense strand
ggcccaacuuucagcuuug

SEQ ID NO: 2034507 - RNA, 19 nt, Homo sapiens
  misc_RNA (1)...(19): siRNA sense strand
cuuaucgguucaauccuaa

SEQ ID NO: 2034508 - RNA, 19 nt, Homo sapiens
  misc_RNA (1)...(19): siRNA sense strand
ccacaugggauuccacucu

SEQ ID NO: 2034509 - RNA, 19 nt, Homo sapiens
  misc_RNA (1)...(19): siRNA sense strand
cuuacugccauauguguua

SEQ ID NO: 2034510 - RNA, 19 nt, Homo sapiens
  misc_RNA (1)...(19): siRNA sense strand
agugauccauuucuuauac

SEQ ID NO: 2034511 - RNA, 19 nt, Homo sapiens
  misc_RNA (1)...(19): siRNA sense strand
uagugugccuccuccaaug

SEQ ID NO: 2034512 - RNA, 19 nt, Homo sapiens
  misc_RNA (1)...(19): siRNA sense strand
uugccgagcugaugcuuca

SEQ ID NO: 2034513 - RNA, 19 nt, Homo sapiens
  misc_RNA (1)...(19): siRNA sense strand
cuaacaaccaccagucaga

SEQ ID NO: 2034514 - RNA, 19 nt, Homo sapiens
  misc_RNA (1)...(19): siRNA sense strand
gcuuugaauuagauguaga

SEQ ID NO: 2034515 - RNA, 19 nt, Homo sapiens
  misc_RNA (1)...(19): siRNA sense strand
guagugugccuccuccaau

SEQ ID NO: 2034516 - RNA, 19 nt, Homo sapiens
  misc_RNA (1)...(19): siRNA sense strand
ccaauuugccgagcugaug

SEQ ID NO: 2034517 - RNA, 19 nt, Homo sapiens
  misc_RNA (1)...(19): siRNA sense strand
uggcuuaaggcaaaucgua

SEQ ID NO: 2034518 - RNA, 19 nt, Homo sapiens
  misc_RNA (1)...(19): siRNA sense strand
uaacacaugauccuuugca

SEQ ID NO: 2034519 - RNA, 19 nt, Homo sapiens
  misc_RNA (1)...(19): siRNA sense strand
agaagugcaucgggauuca

SEQ ID NO: 2034520 - RNA, 19 nt, Homo sapiens
  misc_RNA (1)...(19): siRNA sense strand
aaaaugaaguggaacucuu

SEQ ID NO: 2034521 - RNA, 19 nt, Homo sapiens
  misc_RNA (1)...(19): siRNA sense strand
gacuuuguguguaguaugc

SEQ ID NO: 2034522 - RNA, 19 nt, Homo sapiens
  misc_RNA (1)...(19): siRNA sense strand
cuaaagcagauauugaaca

SEQ ID NO: 2034523 - RNA, 19 nt, Homo sapiens
  misc_RNA (1)...(19): siRNA sense strand
gaccaagccaacaucacuu

SEQ ID NO: 2034524 - RNA, 19 nt, Homo sapiens
  misc_RNA (1)...(19): siRNA sense strand
cgaccaagccaacaucacu

SEQ ID NO: 2034525 - RNA, 19 nt, Homo sapiens
  misc_RNA (1)...(19): siRNA sense strand
agaagauggagaaguagaa

SEQ ID NO: 2034526 - RNA, 19 nt, Homo sapiens
  misc_RNA (1)...(19): siRNA sense strand
aggcuuacaggacguagua

SEQ ID NO: 2034527 - RNA, 19 nt, Homo sapiens
  misc_RNA (1)...(19): siRNA sense strand
gagguguccuuuggaguac

SEQ ID NO: 2034528 - RNA, 19 nt, Homo sapiens
  misc_RNA (1)...(19): siRNA sense strand
uauacauccuccucaccuu

SEQ ID NO: 2034529 - RNA, 19 nt, Homo sapiens
  misc_RNA (1)...(19): siRNA sense strand
gugauccauuucuuauaca

SEQ ID NO: 2034530 - RNA, 19 nt, Homo sapiens
  misc_RNA (1)...(19): siRNA sense strand
agauguagaagauggagaa

SEQ ID NO: 2034531 - RNA, 19 nt, Homo sapiens
  misc_RNA (1)...(19): siRNA sense strand
ucagcuccaucaaggaaca

SEQ ID NO: 2034532 - RNA, 19 nt, Homo sapiens
  misc_RNA (1)...(19): siRNA sense strand
gaacagacuuuguguguag

SEQ ID NO: 2034533 - RNA, 19 nt, Homo sapiens
  misc_RNA (1)...(19): siRNA sense strand
acaaauggcuuaaggcaaa

SEQ ID NO: 2034534 - RNA, 19 nt, Homo sapiens
  misc_RNA (1)...(19): siRNA sense strand
uguagaagauggagaagua

SEQ ID NO: 2034535 - RNA, 19 nt, Homo sapiens
  misc_RNA (1)...(19): siRNA sense strand
uugaacaacuuccuucuua

SEQ ID NO: 2034536 - RNA, 19 nt, Homo sapiens
  misc_RNA (1)...(19): siRNA sense strand
gcagcuacuuagagucuua

SEQ ID NO: 2034537 - RNA, 19 nt, Homo sapiens
  misc_RNA (1)...(19): siRNA sense strand
gcacaucccugcuuguagu

SEQ ID NO: 2034538 - RNA, 19 nt, Homo sapiens
  misc_RNA (1)...(19): siRNA sense strand
gcacuuaccaguaccauau

SEQ ID NO: 2034539 - RNA, 19 nt, Homo sapiens
  misc_RNA (1)...(19): siRNA sense strand
ccaaguguguugacaaaug

SEQ ID NO: 2034540 - RNA, 19 nt, Homo sapiens
  misc_RNA (1)...(19): siRNA sense strand
ggagguguccuuuggagua

SEQ ID NO: 2034541 - RNA, 19 nt, Homo sapiens
  misc_RNA (1)...(19): siRNA sense strand
aaucguacuugcccaauuu

SEQ ID NO: 2034542 - RNA, 19 nt, Homo sapiens
  misc_RNA (1)...(19): siRNA sense strand
gggcccaacuuucagcuuu

SEQ ID NO: 2034543 - RNA, 19 nt, Homo sapiens
  misc_RNA (1)...(19): siRNA sense strand
gaacaacuuccuucuuauc

SEQ ID NO: 2034544 - RNA, 19 nt, Homo sapiens
  misc_RNA (1)...(19): siRNA sense strand
gcagugggcccaacuuuca

SEQ ID NO: 2034545 - RNA, 19 nt, Homo sapiens
  misc_RNA (1)...(19): siRNA sense strand
caaggcagcuacuuagagu

SEQ ID NO: 2034546 - RNA, 19 nt, Homo sapiens
  misc_RNA (1)...(19): siRNA sense strand
gaucagcuccaucaaggaa

SEQ ID NO: 2034547 - RNA, 19 nt, Homo sapiens
  misc_RNA (1)...(19): siRNA sense strand
gacuaaagcagauauugaa

SEQ ID NO: 2034548 - RNA, 19 nt, Homo sapiens
  misc_RNA (1)...(19): siRNA sense strand
gcagaaugcagucaugguu

SEQ ID NO: 2034549 - RNA, 19 nt, Homo sapiens
  misc_RNA (1)...(19): siRNA sense strand
gauagaaaaugaaguggaa

SEQ ID NO: 2034550 - RNA, 19 nt, Homo sapiens
  misc_RNA (1)...(19): siRNA sense strand
guucagcacuuaccaguac

SEQ ID NO: 2034551 - RNA, 19 nt, Homo sapiens
  misc_RNA (1)...(19): siRNA sense strand
gaagauggagaaguagaaa

SEQ ID NO: 2034552 - RNA, 19 nt, Homo sapiens
  misc_RNA (1)...(19): siRNA sense strand
gcaccucccugucuguagu

SEQ ID NO: 2034553 - RNA, 19 nt, Homo sapiens
  misc_RNA (1)...(19): siRNA sense strand
aggagaacaucuuccagua

SEQ ID NO: 2034554 - RNA, 19 nt, Homo sapiens
  misc_RNA (1)...(19): siRNA sense strand
aaaugaaguggaacucuua

SEQ ID NO: 2034555 - RNA, 19 nt, Homo sapiens
  misc_RNA (1)...(19): siRNA sense strand
gaucgccucugcaaaggau

SEQ ID NO: 2034556 - RNA, 19 nt, Homo sapiens
  misc_RNA (1)...(19): siRNA sense strand
ggaagaagggaucgucugu

SEQ ID NO: 2034557 - RNA, 19 nt, Homo sapiens
  misc_RNA (1)...(19): siRNA sense strand
gagucaaggcagcuacuua

SEQ ID NO: 2034558 - RNA, 19 nt, Homo sapiens
  misc_RNA (1)...(19): siRNA sense strand
agaaugcagucaugguuga

SEQ ID NO: 2034559 - RNA, 19 nt, Homo sapiens
  misc_RNA (1)...(19): siRNA sense strand
ccaggaugcucugugguuu

SEQ ID NO: 2034560 - RNA, 19 nt, Homo sapiens
  misc_RNA (1)...(19): siRNA sense strand
ugacuaaagcagauauuga

SEQ ID NO: 2034561 - RNA, 19 nt, Homo sapiens
  misc_RNA (1)...(19): siRNA sense strand
ugaacaacuuccuucuuau

SEQ ID NO: 2034562 - RNA, 19 nt, Homo sapiens
  misc_RNA (1)...(19): siRNA sense strand
cuuagagucuuacccugua

SEQ ID NO: 2034563 - RNA, 19 nt, Homo sapiens
  misc_RNA (1)...(19): siRNA sense strand
ugccauauguguuaucaau

SEQ ID NO: 2034564 - RNA, 19 nt, Homo sapiens
  misc_RNA (1)...(19): siRNA sense strand
caaguguguugacaaaugg

SEQ ID NO: 2034565 - RNA, 19 nt, Homo sapiens
  misc_RNA (1)...(19): siRNA sense strand
gcacgcaacagaagaaguc

SEQ ID NO: 2034566 - RNA, 19 nt, Homo sapiens
  misc_RNA (1)...(19): siRNA sense strand
guaguaugcaugugugauu

SEQ ID NO: 2034567 - RNA, 19 nt, Homo sapiens
  misc_RNA (1)...(19): siRNA sense strand
cagaacagacuuugugugu

SEQ ID NO: 2034568 - RNA, 19 nt, Homo sapiens
  misc_RNA (1)...(19): siRNA sense strand
caucagcucccuugcaguu

SEQ ID NO: 2034569 - RNA, 19 nt, Homo sapiens
  misc_RNA (1)...(19): siRNA sense strand
uaccuuauccuccauuuau

SEQ ID NO: 2034570 - RNA, 19 nt, Homo sapiens
  misc_RNA (1)...(19): siRNA sense strand
cgaguuccaugccaagugu

SEQ ID NO: 2034571 - RNA, 19 nt, Homo sapiens
  misc_RNA (1)...(19): siRNA sense strand
aaauuacgaggcccuguua

SEQ ID NO: 2034572 - RNA, 19 nt, Homo sapiens
  misc_RNA (1)...(19): siRNA sense strand
ccauauguguuaucaaugc

SEQ ID NO: 2034573 - RNA, 19 nt, Homo sapiens
  misc_RNA (1)...(19): siRNA sense strand
cuuaacacaugauccuuug

SEQ ID NO: 2034574 - RNA, 19 nt, Homo sapiens
  misc_RNA (1)...(19): siRNA sense strand
gcagauauugaacaacuuc

SEQ ID NO: 2034575 - RNA, 19 nt, Homo sapiens
  misc_RNA (1)...(19): siRNA sense strand
aagcagauauugaacaacu

SEQ ID NO: 2034576 - RNA, 19 nt, Homo sapiens
  misc_RNA (1)...(19): siRNA sense strand
ggagaacaucuuccaguag

SEQ ID NO: 2034577 - RNA, 19 nt, Homo sapiens
  misc_RNA (1)...(19): siRNA sense strand
agaacagacuuugugugua

SEQ ID NO: 2034578 - RNA, 19 nt, Homo sapiens
  misc_RNA (1)...(19): siRNA sense strand
ucuuaucgguucaauccua

SEQ ID NO: 2034579 - RNA, 19 nt, Homo sapiens
  misc_RNA (1)...(19): siRNA sense strand
ggacugacuaaagcagaua

SEQ ID NO: 2034580 - RNA, 19 nt, Homo sapiens
  misc_RNA (1)...(19): siRNA sense strand
ccagcuuacugccauaugu

SEQ ID NO: 2034581 - RNA, 19 nt, Homo sapiens
  misc_RNA (1)...(19): siRNA sense strand
guaccuuauccuccauuua

SEQ ID NO: 2034582 - RNA, 19 nt, Homo sapiens
  misc_RNA (1)...(19): siRNA sense strand
ugccaaguguguugacaaa

SEQ ID NO: 2034583 - RNA, 19 nt, Homo sapiens
  misc_RNA (1)...(19): siRNA sense strand
gcaaagccucguggacuga

SEQ ID NO: 2034584 - RNA, 19 nt, Homo sapiens
  misc_RNA (1)...(19): siRNA sense strand
uuacaggacguaguagaua

SEQ ID NO: 2034585 - RNA, 19 nt, Homo sapiens
  misc_RNA (1)...(19): siRNA sense strand
aagaagggaucgucugucu

SEQ ID NO: 2034586 - RNA, 19 nt, Homo sapiens
  misc_RNA (1)...(19): siRNA sense strand
uaguaugcaugugugauuu

SEQ ID NO: 2034587 - RNA, 19 nt, Homo sapiens
  misc_RNA (1)...(19): siRNA sense strand
ucuagugauccauuucuua

SEQ ID NO: 2034588 - RNA, 19 nt, Homo sapiens
  misc_RNA (1)...(19): siRNA sense strand
uaacaaccaccagucagaa

SEQ ID NO: 2034589 - RNA, 19 nt, Homo sapiens
  misc_RNA (1)...(19): siRNA sense strand
ccagcagaaugcagucaug

SEQ ID NO: 2034590 - RNA, 19 nt, Homo sapiens
  misc_RNA (1)...(19): siRNA sense strand
guugacaaauggcuuaagg

SEQ ID NO: 2034591 - RNA, 19 nt, Homo sapiens
  misc_RNA (1)...(19): siRNA sense strand
aagccaacaucacuucuca

SEQ ID NO: 2034592 - RNA, 19 nt, Homo sapiens
  misc_RNA (1)...(19): siRNA sense strand
gcccaacuuucagcuuuga

SEQ ID NO: 2034593 - RNA, 19 nt, Homo sapiens
  misc_RNA (1)...(19): siRNA sense strand
cuucaggcauguucaguuc

SEQ ID NO: 2034594 - RNA, 19 nt, Homo sapiens
  misc_RNA (1)...(19): siRNA sense strand
cauguucaguucagcacuu

SEQ ID NO: 2034595 - RNA, 19 nt, Homo sapiens
  misc_RNA (1)...(19): siRNA sense strand
aaaucguacuugcccaauu

SEQ ID NO: 2034596 - RNA, 19 nt, Homo sapiens
  misc_RNA (1)...(19): siRNA sense strand
gauauugaacaacuuccuu

SEQ ID NO: 2034597 - RNA, 19 nt, Homo sapiens
  misc_RNA (1)...(19): siRNA sense strand
cagcuuugaauuagaugua

SEQ ID NO: 2034598 - RNA, 19 nt, Homo sapiens
  misc_RNA (1)...(19): siRNA sense strand
ugaaguggaacucuuagga

SEQ ID NO: 2034599 - RNA, 19 nt, Homo sapiens
  misc_RNA (1)...(19): siRNA sense strand
cuagugauccauuucuuau

SEQ ID NO: 2034600 - RNA, 19 nt, Homo sapiens
  misc_RNA (1)...(19): siRNA sense strand
cccaucauccuccucauuu

SEQ ID NO: 2034601 - RNA, 19 nt, Homo sapiens
  misc_RNA (1)...(19): siRNA sense strand
caaauggcuuaaggcaaau

SEQ ID NO: 2034602 - RNA, 19 nt, Homo sapiens
  misc_RNA (1)...(19): siRNA sense strand
agaagaaguccuccuguca

SEQ ID NO: 2034603 - RNA, 19 nt, Homo sapiens
  misc_RNA (1)...(19): siRNA sense strand
uugcaguucuuaacacaug

SEQ ID NO: 2034604 - RNA, 19 nt, Homo sapiens
  misc_RNA (1)...(19): siRNA sense strand
ccaucauccuccucauuug

SEQ ID NO: 2034605 - RNA, 19 nt, Homo sapiens
  misc_RNA (1)...(19): siRNA sense strand
caggccaguuugucccuuu

SEQ ID NO: 2034606 - RNA, 19 nt, Homo sapiens
  misc_RNA (1)...(19): siRNA sense strand
ggcccaacuuucagcuuug

SEQ ID NO: 2034607 - RNA, 19 nt, Homo sapiens
  misc_RNA (1)...(19): siRNA sense strand
cuuaucgguucaauccuaa

SEQ ID NO: 2034608 - RNA, 19 nt, Homo sapiens
  misc_RNA (1)...(19): siRNA sense strand
ccacaugggauuccacucu

SEQ ID NO: 2034609 - RNA, 19 nt, Homo sapiens
  misc_RNA (1)...(19): siRNA sense strand
cuuacugccauauguguua

SEQ ID NO: 2034610 - RNA, 19 nt, Homo sapiens
  misc_RNA (1)...(19): siRNA sense strand
agugauccauuucuuauac

SEQ ID NO: 2034611 - RNA, 19 nt, Homo sapiens
  misc_RNA (1)...(19): siRNA sense strand
uagugugccuccuccaaug

SEQ ID NO: 2034612 - RNA, 19 nt, Homo sapiens
  misc_RNA (1)...(19): siRNA sense strand
uugccgagcugaugcuuca

SEQ ID NO: 2034613 - RNA, 19 nt, Homo sapiens
  misc_RNA (1)...(19): siRNA sense strand
cuaacaaccaccagucaga

SEQ ID NO: 2034614 - RNA, 19 nt, Homo sapiens
  misc_RNA (1)...(19): siRNA sense strand
gcuuugaauuagauguaga

SEQ ID NO: 2034615 - RNA, 19 nt, Homo sapiens
  misc_RNA (1)...(19): siRNA sense strand
guagugugccuccuccaau

SEQ ID NO: 2034616 - RNA, 19 nt, Homo sapiens
  misc_RNA (1)...(19): siRNA sense strand
ccaauuugccgagcugaug

SEQ ID NO: 2034617 - RNA, 19 nt, Homo sapiens
  misc_RNA (1)...(19): siRNA sense strand
uggcuuaaggcaaaucgua

SEQ ID NO: 2034618 - RNA, 19 nt, Homo sapiens
  misc_RNA (1)...(19): siRNA sense strand
uaacacaugauccuuugca

SEQ ID NO: 2034619 - RNA, 19 nt, Homo sapiens
  misc_RNA (1)...(19): siRNA sense strand
agaagugcaucgggauuca

SEQ ID NO: 2034620 - RNA, 19 nt, Homo sapiens
  misc_RNA (1)...(19): siRNA sense strand
aaaaugaaguggaacucuu

SEQ ID NO: 2034621 - RNA, 19 nt, Homo sapiens
  misc_RNA (1)...(19): siRNA sense strand
gacuuuguguguaguaugc

SEQ ID NO: 2034622 - RNA, 19 nt, Homo sapiens
  misc_RNA (1)...(19): siRNA sense strand
cuaaagcagauauugaaca

SEQ ID NO: 2034623 - RNA, 19 nt, Homo sapiens
  misc_RNA (1)...(19): siRNA sense strand
gaccaagccaacaucacuu

SEQ ID NO: 2034624 - RNA, 19 nt, Homo sapiens
  misc_RNA (1)...(19): siRNA sense strand
cgaccaagccaacaucacu

SEQ ID NO: 2034625 - RNA, 19 nt, Homo sapiens
  misc_RNA (1)...(19): siRNA sense strand
agaagauggagaaguagaa

SEQ ID NO: 2034626 - RNA, 19 nt, Homo sapiens
  misc_RNA (1)...(19): siRNA sense strand
aggcuuacaggacguagua

SEQ ID NO: 2034627 - RNA, 19 nt, Homo sapiens
  misc_RNA (1)...(19): siRNA sense strand
gagguguccuuuggaguac

SEQ ID NO: 2034628 - RNA, 19 nt, Homo sapiens
  misc_RNA (1)...(19): siRNA sense strand
uauacauccuccucaccuu

SEQ ID NO: 2034629 - RNA, 19 nt, Homo sapiens
  misc_RNA (1)...(19): siRNA sense strand
gugauccauuucuuauaca

SEQ ID NO: 2034630 - RNA, 19 nt, Homo sapiens
  misc_RNA (1)...(19): siRNA sense strand
agauguagaagauggagaa

SEQ ID NO: 2034631 - RNA, 19 nt, Homo sapiens
  misc_RNA (1)...(19): siRNA sense strand
ucagcuccaucaaggaaca

SEQ ID NO: 2034632 - RNA, 19 nt, Homo sapiens
  misc_RNA (1)...(19): siRNA sense strand
gaacagacuuuguguguag

SEQ ID NO: 2034633 - RNA, 19 nt, Homo sapiens
  misc_RNA (1)...(19): siRNA sense strand
acaaauggcuuaaggcaaa

SEQ ID NO: 2034634 - RNA, 19 nt, Homo sapiens
  misc_RNA (1)...(19): siRNA sense strand
uguagaagauggagaagua

SEQ ID NO: 2034635 - RNA, 19 nt, Homo sapiens
  misc_RNA (1)...(19): siRNA sense strand
uugaacaacuuccuucuua

SEQ ID NO: 2034636 - RNA, 19 nt, Homo sapiens
  misc_RNA (1)...(19): siRNA sense strand
gcagcuacuuagagucuua

SEQ ID NO: 2034637 - RNA, 19 nt, Homo sapiens
  misc_RNA (1)...(19): siRNA sense strand
gcacaucccugcuuguagu

SEQ ID NO: 2034638 - RNA, 19 nt, Homo sapiens
  misc_RNA (1)...(19): siRNA sense strand
gcacuuaccaguaccauau

SEQ ID NO: 2034639 - RNA, 19 nt, Homo sapiens
  misc_RNA (1)...(19): siRNA sense strand
ccaaguguguugacaaaug

SEQ ID NO: 2034640 - RNA, 19 nt, Homo sapiens
  misc_RNA (1)...(19): siRNA sense strand
ggagguguccuuuggagua

SEQ ID NO: 2034641 - RNA, 19 nt, Homo sapiens
  misc_RNA (1)...(19): siRNA sense strand
aaucguacuugcccaauuu

SEQ ID NO: 2034642 - RNA, 19 nt, Homo sapiens
  misc_RNA (1)...(19): siRNA sense strand
gggcccaacuuucagcuuu

SEQ ID NO: 2034643 - RNA, 19 nt, Homo sapiens
  misc_RNA (1)...(19): siRNA sense strand
gaacaacuuccuucuuauc

SEQ ID NO: 2034644 - RNA, 19 nt, Homo sapiens
  misc_RNA (1)...(19): siRNA sense strand
gcagugggcccaacuuuca

SEQ ID NO: 2034645 - RNA, 19 nt, Homo sapiens
  misc_RNA (1)...(19): siRNA sense strand
caaggcagcuacuuagagu

SEQ ID NO: 2034646 - RNA, 19 nt, Homo sapiens
  misc_RNA (1)...(19): siRNA sense strand
gaucagcuccaucaaggaa

SEQ ID NO: 2034647 - RNA, 19 nt, Homo sapiens
  misc_RNA (1)...(19): siRNA sense strand
gacuaaagcagauauugaa

SEQ ID NO: 2034648 - RNA, 19 nt, Homo sapiens
  misc_RNA (1)...(19): siRNA sense strand
gcagaaugcagucaugguu

SEQ ID NO: 2034649 - RNA, 19 nt, Homo sapiens
  misc_RNA (1)...(19): siRNA sense strand
gauagaaaaugaaguggaa

SEQ ID NO: 2034650 - RNA, 19 nt, Homo sapiens
  misc_RNA (1)...(19): siRNA sense strand
guucagcacuuaccaguac

SEQ ID NO: 2034651 - RNA, 19 nt, Homo sapiens
  misc_RNA (1)...(19): siRNA sense strand
gaagauggagaaguagaaa

SEQ ID NO: 2034652 - RNA, 19 nt, Homo sapiens
  misc_RNA (1)...(19): siRNA sense strand
gcaccucccugucuguagu

SEQ ID NO: 2034653 - RNA, 19 nt, Homo sapiens
  misc_RNA (1)...(19): siRNA sense strand
aggagaacaucuuccagua

SEQ ID NO: 2034654 - RNA, 19 nt, Homo sapiens
  misc_RNA (1)...(19): siRNA sense strand
aaaugaaguggaacucuua

SEQ ID NO: 2034655 - RNA, 19 nt, Homo sapiens
  misc_RNA (1)...(19): siRNA sense strand
gaucgccucugcaaaggau

SEQ ID NO: 2034656 - RNA, 19 nt, Homo sapiens
  misc_RNA (1)...(19): siRNA sense strand
ggaagaagggaucgucugu

SEQ ID NO: 2034657 - RNA, 19 nt, Homo sapiens
  misc_RNA (1)...(19): siRNA sense strand
gagucaaggcagcuacuua

SEQ ID NO: 2034658 - RNA, 19 nt, Homo sapiens
  misc_RNA (1)...(19): siRNA sense strand
agaaugcagucaugguuga

SEQ ID NO: 2034659 - RNA, 19 nt, Homo sapiens
  misc_RNA (1)...(19): siRNA sense strand
ccaggaugcucugugguuu

SEQ ID NO: 2034660 - RNA, 19 nt, Homo sapiens
  misc_RNA (1)...(19): siRNA sense strand
ugacuaaagcagauauuga

SEQ ID NO: 2034661 - RNA, 19 nt, Homo sapiens
  misc_RNA (1)...(19): siRNA sense strand
ugaacaacuuccuucuuau

SEQ ID NO: 2034662 - RNA, 19 nt, Homo sapiens
  misc_RNA (1)...(19): siRNA sense strand
cuuagagucuuacccugua

SEQ ID NO: 2034663 - RNA, 19 nt, Homo sapiens
  misc_RNA (1)...(19): siRNA sense strand
ugccauauguguuaucaau

SEQ ID NO: 2034664 - RNA, 19 nt, Homo sapiens
  misc_RNA (1)...(19): siRNA sense strand
caaguguguugacaaaugg

SEQ ID NO: 2034665 - RNA, 19 nt, Homo sapiens
  misc_RNA (1)...(19): siRNA sense strand
gcacgcaacagaagaaguc

SEQ ID NO: 2034666 - RNA, 19 nt, Homo sapiens
  misc_RNA (1)...(19): siRNA sense strand
guaguaugcaugugugauu

SEQ ID NO: 2034667 - RNA, 19 nt, Homo sapiens
  misc_RNA (1)...(19): siRNA sense strand
cagaacagacuuugugugu

SEQ ID NO: 2034668 - RNA, 19 nt, Homo sapiens
  misc_RNA (1)...(19): siRNA sense strand
caucagcucccuugcaguu

SEQ ID NO: 2034669 - RNA, 19 nt, Homo sapiens
  misc_RNA (1)...(19): siRNA sense strand
uaccuuauccuccauuuau

SEQ ID NO: 2034670 - RNA, 19 nt, Homo sapiens
  misc_RNA (1)...(19): siRNA sense strand
cgaguuccaugccaagugu

SEQ ID NO: 2034671 - RNA, 19 nt, Homo sapiens
  misc_RNA (1)...(19): siRNA sense strand
aaauuacgaggcccuguua

SEQ ID NO: 2034672 - RNA, 19 nt, Homo sapiens
  misc_RNA (1)...(19): siRNA sense strand
ccauauguguuaucaaugc

SEQ ID NO: 2034673 - RNA, 19 nt, Homo sapiens
  misc_RNA (1)...(19): siRNA sense strand
cuuaacacaugauccuuug

SEQ ID NO: 2034674 - RNA, 19 nt, Homo sapiens
  misc_RNA (1)...(19): siRNA sense strand
gcagauauugaacaacuuc

SEQ ID NO: 2034675 - RNA, 19 nt, Homo sapiens
  misc_RNA (1)...(19): siRNA sense strand
aagcagauauugaacaacu

SEQ ID NO: 2034676 - RNA, 19 nt, Homo sapiens
  misc_RNA (1)...(19): siRNA sense strand
ggagaacaucuuccaguag

SEQ ID NO: 2034677 - RNA, 19 nt, Homo sapiens
  misc_RNA (1)...(19): siRNA sense strand
agaacagacuuugugugua

SEQ ID NO: 2034678 - RNA, 19 nt, Homo sapiens
  misc_RNA (1)...(19): siRNA sense strand
ucuuaucgguucaauccua

SEQ ID NO: 2034679 - RNA, 19 nt, Homo sapiens
  misc_RNA (1)...(19): siRNA sense strand
ggacugacuaaagcagaua

SEQ ID NO: 2034680 - RNA, 19 nt, Homo sapiens
  misc_RNA (1)...(19): siRNA sense strand
ccagcuuacugccauaugu

SEQ ID NO: 2034681 - RNA, 19 nt, Homo sapiens
  misc_RNA (1)...(19): siRNA sense strand
guaccuuauccuccauuua

SEQ ID NO: 2034682 - RNA, 19 nt, Homo sapiens
  misc_RNA (1)...(19): siRNA sense strand
ugccaaguguguugacaaa

SEQ ID NO: 2034683 - RNA, 19 nt, Homo sapiens
  misc_RNA (1)...(19): siRNA sense strand
gcaaagccucguggacuga

SEQ ID NO: 2034684 - RNA, 19 nt, Homo sapiens
  misc_RNA (1)...(19): siRNA sense strand
uuacaggacguaguagaua

SEQ ID NO: 2034685 - RNA, 19 nt, Homo sapiens
  misc_RNA (1)...(19): siRNA sense strand
aagaagggaucgucugucu

SEQ ID NO: 2034686 - RNA, 19 nt, Homo sapiens
  misc_RNA (1)...(19): siRNA sense strand
uaguaugcaugugugauuu

SEQ ID NO: 2034687 - RNA, 19 nt, Homo sapiens
  misc_RNA (1)...(19): siRNA sense strand
ucuagugauccauuucuua

SEQ ID NO: 2034688 - RNA, 19 nt, Homo sapiens
  misc_RNA (1)...(19): siRNA sense strand
uaacaaccaccagucagaa

SEQ ID NO: 2034689 - RNA, 19 nt, Homo sapiens
  misc_RNA (1)...(19): siRNA sense strand
ccagcagaaugcagucaug

SEQ ID NO: 2034690 - RNA, 19 nt, Homo sapiens
  misc_RNA (1)...(19): siRNA sense strand
guugacaaauggcuuaagg

SEQ ID NO: 2034691 - RNA, 19 nt, Homo sapiens
  misc_RNA (1)...(19): siRNA sense strand
aagccaacaucacuucuca

SEQ ID NO: 2034692 - RNA, 19 nt, Homo sapiens
  misc_RNA (1)...(19): siRNA sense strand
gcccaacuuucagcuuuga

SEQ ID NO: 2034693 - RNA, 19 nt, Homo sapiens
  misc_RNA (1)...(19): siRNA sense strand
cuucaggcauguucaguuc

SEQ ID NO: 2034694 - RNA, 19 nt, Homo sapiens
  misc_RNA (1)...(19): siRNA sense strand
cauguucaguucagcacuu

SEQ ID NO: 2034695 - RNA, 19 nt, Homo sapiens
  misc_RNA (1)...(19): siRNA sense strand
aaaucguacuugcccaauu

SEQ ID NO: 2034696 - RNA, 19 nt, Homo sapiens
  misc_RNA (1)...(19): siRNA sense strand
gauauugaacaacuuccuu

SEQ ID NO: 2034697 - RNA, 19 nt, Homo sapiens
  misc_RNA (1)...(19): siRNA sense strand
cagcuuugaauuagaugua

SEQ ID NO: 2034698 - RNA, 19 nt, Homo sapiens
  misc_RNA (1)...(19): siRNA sense strand
ugaaguggaacucuuagga

SEQ ID NO: 2034699 - RNA, 19 nt, Homo sapiens
  misc_RNA (1)...(19): siRNA sense strand
cuagugauccauuucuuau

SEQ ID NO: 2034700 - RNA, 19 nt, Homo sapiens
  misc_RNA (1)...(19): siRNA sense strand
cccaucauccuccucauuu

SEQ ID NO: 2034701 - RNA, 19 nt, Homo sapiens
  misc_RNA (1)...(19): siRNA sense strand
caaauggcuuaaggcaaau

SEQ ID NO: 2034702 - RNA, 19 nt, Homo sapiens
  misc_RNA (1)...(19): siRNA sense strand
agaagaaguccuccuguca

SEQ ID NO: 2034703 - RNA, 19 nt, Homo sapiens
  misc_RNA (1)...(19): siRNA sense strand
uugcaguucuuaacacaug

SEQ ID NO: 2034704 - RNA, 19 nt, Homo sapiens
  misc_RNA (1)...(19): siRNA sense strand
ccaucauccuccucauuug

SEQ ID NO: 2034705 - RNA, 19 nt, Homo sapiens
  misc_RNA (1)...(19): siRNA sense strand
caggccaguuugucccuuu

SEQ ID NO: 2034706 - RNA, 19 nt, Homo sapiens
  misc_RNA (1)...(19): siRNA sense strand
ggcccaacuuucagcuuug

SEQ ID NO: 2034707 - RNA, 19 nt, Homo sapiens
  misc_RNA (1)...(19): siRNA sense strand
cuuaucgguucaauccuaa

SEQ ID NO: 2034708 - RNA, 19 nt, Homo sapiens
  misc_RNA (1)...(19): siRNA sense strand
ccacaugggauuccacucu

SEQ ID NO: 2034709 - RNA, 19 nt, Homo sapiens
  misc_RNA (1)...(19): siRNA sense strand
cuuacugccauauguguua

SEQ ID NO: 2034710 - RNA, 19 nt, Homo sapiens
  misc_RNA (1)...(19): siRNA sense strand
agugauccauuucuuauac

SEQ ID NO: 2034711 - RNA, 19 nt, Homo sapiens
  misc_RNA (1)...(19): siRNA sense strand
uagugugccuccuccaaug

SEQ ID NO: 2034712 - RNA, 19 nt, Homo sapiens
  misc_RNA (1)...(19): siRNA sense strand
uugccgagcugaugcuuca

SEQ ID NO: 2034713 - RNA, 19 nt, Homo sapiens
  misc_RNA (1)...(19): siRNA sense strand
cuaacaaccaccagucaga

SEQ ID NO: 2034714 - RNA, 19 nt, Homo sapiens
  misc_RNA (1)...(19): siRNA sense strand
gcuuugaauuagauguaga

SEQ ID NO: 2034715 - RNA, 19 nt, Homo sapiens
  misc_RNA (1)...(19): siRNA sense strand
guagugugccuccuccaau

SEQ ID NO: 2034716 - RNA, 19 nt, Homo sapiens
  misc_RNA (1)...(19): siRNA sense strand
ccaauuugccgagcugaug

SEQ ID NO: 2034717 - RNA, 19 nt, Homo sapiens
  misc_RNA (1)...(19): siRNA sense strand
uggcuuaaggcaaaucgua

SEQ ID NO: 2034718 - RNA, 19 nt, Homo sapiens
  misc_RNA (1)...(19): siRNA sense strand
uaacacaugauccuuugca

SEQ ID NO: 2034719 - RNA, 19 nt, Homo sapiens
  misc_RNA (1)...(19): siRNA sense strand
agaagugcaucgggauuca

SEQ ID NO: 2034720 - RNA, 19 nt, Homo sapiens
  misc_RNA (1)...(19): siRNA sense strand
aaaaugaaguggaacucuu

SEQ ID NO: 2034721 - RNA, 19 nt, Homo sapiens
  misc_RNA (1)...(19): siRNA sense strand
gacuuuguguguaguaugc

SEQ ID NO: 2034722 - RNA, 19 nt, Homo sapiens
  misc_RNA (1)...(19): siRNA sense strand
cuaaagcagauauugaaca

SEQ ID NO: 2034723 - RNA, 19 nt, Homo sapiens
  misc_RNA (1)...(19): siRNA sense strand
gaccaagccaacaucacuu

SEQ ID NO: 2034724 - RNA, 19 nt, Homo sapiens
  misc_RNA (1)...(19): siRNA sense strand
cgaccaagccaacaucacu

SEQ ID NO: 2034725 - RNA, 19 nt, Homo sapiens
  misc_RNA (1)...(19): siRNA sense strand
agaagauggagaaguagaa

SEQ ID NO: 2034726 - RNA, 19 nt, Homo sapiens
  misc_RNA (1)...(19): siRNA sense strand
aggcuuacaggacguagua

SEQ ID NO: 2034727 - RNA, 19 nt, Homo sapiens
  misc_RNA (1)...(19): siRNA sense strand
gagguguccuuuggaguac

SEQ ID NO: 2034728 - RNA, 19 nt, Homo sapiens
  misc_RNA (1)...(19): siRNA sense strand
uauacauccuccucaccuu

SEQ ID NO: 2034729 - RNA, 19 nt, Homo sapiens
  misc_RNA (1)...(19): siRNA sense strand
gugauccauuucuuauaca

SEQ ID NO: 2034730 - RNA, 19 nt, Homo sapiens
  misc_RNA (1)...(19): siRNA sense strand
agauguagaagauggagaa

SEQ ID NO: 2034731 - RNA, 19 nt, Homo sapiens
  misc_RNA (1)...(19): siRNA sense strand
ucagcuccaucaaggaaca

SEQ ID NO: 2034732 - RNA, 19 nt, Homo sapiens
  misc_RNA (1)...(19): siRNA sense strand
gacaagcucucaaugaaau

SEQ ID NO: 2034733 - RNA, 19 nt, Homo sapiens
  misc_RNA (1)...(19): siRNA sense strand
guuaaaggcuauugaacaa

SEQ ID NO: 2034734 - RNA, 19 nt, Homo sapiens
  misc_RNA (1)...(19): siRNA sense strand
gaaaugaucaacaacauag

SEQ ID NO: 2034735 - RNA, 19 nt, Homo sapiens
  misc_RNA (1)...(19): siRNA sense strand
gaaccggacuucaguggau

SEQ ID NO: 2034736 - RNA, 19 nt, Homo sapiens
  misc_RNA (1)...(19): siRNA sense strand
caucuucacuuccgacauu

SEQ ID NO: 2034737 - RNA, 19 nt, Homo sapiens
  misc_RNA (1)...(19): siRNA sense strand
aagaagagcuugaagaucu

SEQ ID NO: 2034738 - RNA, 19 nt, Homo sapiens
  misc_RNA (1)...(19): siRNA sense strand
ggaauuauccuagcaacaa

SEQ ID NO: 2034739 - RNA, 19 nt, Homo sapiens
  misc_RNA (1)...(19): siRNA sense strand
uagacaagcucucaaugaa

SEQ ID NO: 2034740 - RNA, 19 nt, Homo sapiens
  misc_RNA (1)...(19): siRNA sense strand
uugaagaucugaacaaaga

SEQ ID NO: 2034741 - RNA, 19 nt, Homo sapiens
  misc_RNA (1)...(19): siRNA sense strand
gagauuagaaacaguauug

SEQ ID NO: 2034742 - RNA, 19 nt, Homo sapiens
  misc_RNA (1)...(19): siRNA sense strand
gaaaucgagucacgucaca

SEQ ID NO: 2034743 - RNA, 19 nt, Homo sapiens
  misc_RNA (1)...(19): siRNA sense strand
gaagaucugaacaaagaaa

SEQ ID NO: 2034744 - RNA, 19 nt, Homo sapiens
  misc_RNA (1)...(19): siRNA sense strand
caagaaaacugcgaauaaa

SEQ ID NO: 2034745 - RNA, 19 nt, Homo sapiens
  misc_RNA (1)...(19): siRNA sense strand
agaacacgcuaaagaagaa

SEQ ID NO: 2034746 - RNA, 19 nt, Homo sapiens
  misc_RNA (1)...(19): siRNA sense strand
gaucaacaacauagaaaga

SEQ ID NO: 2034747 - RNA, 19 nt, Homo sapiens
  misc_RNA (1)...(19): siRNA sense strand
uaaaggcuauugaacaaag

SEQ ID NO: 2034748 - RNA, 19 nt, Homo sapiens
  misc_RNA (1)...(19): siRNA sense strand
gaaugaugauggagacaca

SEQ ID NO: 2034749 - RNA, 19 nt, Homo sapiens
  misc_RNA (1)...(19): siRNA sense strand
gcuugaagaucugaacaaa

SEQ ID NO: 2034750 - RNA, 19 nt, Homo sapiens
  misc_RNA (1)...(19): siRNA sense strand
gagcaaggcaagaaggaaa

SEQ ID NO: 2034751 - RNA, 19 nt, Homo sapiens
  misc_RNA (1)...(19): siRNA sense strand
gaggagauuagaaacagua

SEQ ID NO: 2034752 - RNA, 19 nt, Homo sapiens
  misc_RNA (1)...(19): siRNA sense strand
caaguuaaaggcuauugaa

SEQ ID NO: 2034753 - RNA, 19 nt, Homo sapiens
  misc_RNA (1)...(19): siRNA sense strand
gaaugccacagacuaugua

SEQ ID NO: 2034754 - RNA, 19 nt, Homo sapiens
  misc_RNA (1)...(19): siRNA sense strand
gugaaaugaucaacaacau

SEQ ID NO: 2034755 - RNA, 19 nt, Homo sapiens
  misc_RNA (1)...(19): siRNA sense strand
gcaccaaacccggaaggaa

SEQ ID NO: 2034756 - RNA, 19 nt, Homo sapiens
  misc_RNA (1)...(19): siRNA sense strand
uggaagccauggcggagua

SEQ ID NO: 2034757 - RNA, 19 nt, Homo sapiens
  misc_RNA (1)...(19): siRNA sense strand
gaucugaacaaagaaauca

SEQ ID NO: 2034758 - RNA, 19 nt, Homo sapiens
  misc_RNA (1)...(19): siRNA sense strand
caccaaacccggaaggaaa

SEQ ID NO: 2034759 - RNA, 19 nt, Homo sapiens
  misc_RNA (1)...(19): siRNA sense strand
cuagacaagcucucaauga

SEQ ID NO: 2034760 - RNA, 19 nt, Homo sapiens
  misc_RNA (1)...(19): siRNA sense strand
cuugugauccuuggaauua

SEQ ID NO: 2034761 - RNA, 19 nt, Homo sapiens
  misc_RNA (1)...(19): siRNA sense strand
gagaguugcaugagauguu

SEQ ID NO: 2034762 - RNA, 19 nt, Homo sapiens
  misc_RNA (1)...(19): siRNA sense strand
aaccacagcaucauucuuu

SEQ ID NO: 2034763 - RNA, 19 nt, Homo sapiens
  misc_RNA (1)...(19): siRNA sense strand
ggugcugucucggaaguuu

SEQ ID NO: 2034764 - RNA, 19 nt, Homo sapiens
  misc_RNA (1)...(19): siRNA sense strand
gaugauggagacacaguug

SEQ ID NO: 2034765 - RNA, 19 nt, Homo sapiens
  misc_RNA (1)...(19): siRNA sense strand
ucaagaaaacugcgaauaa

SEQ ID NO: 2034766 - RNA, 19 nt, Homo sapiens
  misc_RNA (1)...(19): siRNA sense strand
gaauuauccuagcaacaac

SEQ ID NO: 2034767 - RNA, 19 nt, Homo sapiens
  misc_RNA (1)...(19): siRNA sense strand
uaggaagaaugaugaugga

SEQ ID NO: 2034768 - RNA, 19 nt, Homo sapiens
  misc_RNA (1)...(19): siRNA sense strand
guaauuguuuugcuuguga

SEQ ID NO: 2034769 - RNA, 19 nt, Homo sapiens
  misc_RNA (1)...(19): siRNA sense strand
ggaggagauuagaaacagu

SEQ ID NO: 2034770 - RNA, 19 nt, Homo sapiens
  misc_RNA (1)...(19): siRNA sense strand
guagaacacgcuaaagaag

SEQ ID NO: 2034771 - RNA, 19 nt, Homo sapiens
  misc_RNA (1)...(19): siRNA sense strand
acaaggacaucaugaagcu

SEQ ID NO: 2034772 - RNA, 19 nt, Homo sapiens
  misc_RNA (1)...(19): siRNA sense strand
agacaagcucucaaugaaa

SEQ ID NO: 2034773 - RNA, 19 nt, Homo sapiens
  misc_RNA (1)...(19): siRNA sense strand
uguagaacacgcuaaagaa

SEQ ID NO: 2034774 - RNA, 19 nt, Homo sapiens
  misc_RNA (1)...(19): siRNA sense strand
uaucagagcaaggcaagaa

SEQ ID NO: 2034775 - RNA, 19 nt, Homo sapiens
  misc_RNA (1)...(19): siRNA sense strand
uagaacacgcuaaagaaga

SEQ ID NO: 2034776 - RNA, 19 nt, Homo sapiens
  misc_RNA (1)...(19): siRNA sense strand
ccacagacgacgagcuaga

SEQ ID NO: 2034777 - RNA, 19 nt, Homo sapiens
  misc_RNA (1)...(19): siRNA sense strand
uauccuagcaacaacauug

SEQ ID NO: 2034778 - RNA, 19 nt, Homo sapiens
  misc_RNA (1)...(19): siRNA sense strand
cuuccgacauuauaucaga

SEQ ID NO: 2034779 - RNA, 19 nt, Homo sapiens
  misc_RNA (1)...(19): siRNA sense strand
uucaguggaucuucggaua

SEQ ID NO: 2034780 - RNA, 19 nt, Homo sapiens
  misc_RNA (1)...(19): siRNA sense strand
ggugaaaugaucaacaaca

SEQ ID NO: 2034781 - RNA, 19 nt, Homo sapiens
  misc_RNA (1)...(19): siRNA sense strand
agggugaaaugaucaacaa

SEQ ID NO: 2034782 - RNA, 19 nt, Homo sapiens
  misc_RNA (1)...(19): siRNA sense strand
caccacagacgacgagcua

SEQ ID NO: 2034783 - RNA, 19 nt, Homo sapiens
  misc_RNA (1)...(19): siRNA sense strand
ccacagacuauguagaaca

SEQ ID NO: 2034784 - RNA, 19 nt, Homo sapiens
  misc_RNA (1)...(19): siRNA sense strand
gaccagcauccgagaguug

SEQ ID NO: 2034785 - RNA, 19 nt, Homo sapiens
  misc_RNA (1)...(19): siRNA sense strand
gcgggaagccauccaucuu

SEQ ID NO: 2034786 - RNA, 19 nt, Homo sapiens
  misc_RNA (1)...(19): siRNA sense strand
gaagagcuugaagaucuga

SEQ ID NO: 2034787 - RNA, 19 nt, Homo sapiens
  misc_RNA (1)...(19): siRNA sense strand
ucacaaggacaucaugaag

SEQ ID NO: 2034788 - RNA, 19 nt, Homo sapiens
  misc_RNA (1)...(19): siRNA sense strand
acaaauuacuagacaagcu

SEQ ID NO: 2034789 - RNA, 19 nt, Homo sapiens
  misc_RNA (1)...(19): siRNA sense strand
ccauggcggaguacaauga

SEQ ID NO: 2034790 - RNA, 19 nt, Homo sapiens
  misc_RNA (1)...(19): siRNA sense strand
ccaaguuaaaggcuauuga

SEQ ID NO: 2034791 - RNA, 19 nt, Homo sapiens
  misc_RNA (1)...(19): siRNA sense strand
gaacacgcuaaagaagaaa

SEQ ID NO: 2034792 - RNA, 19 nt, Homo sapiens
  misc_RNA (1)...(19): siRNA sense strand
ugccacagacuauguagaa

SEQ ID NO: 2034793 - RNA, 19 nt, Homo sapiens
  misc_RNA (1)...(19): siRNA sense strand
gauggagacacaguuguug

SEQ ID NO: 2034794 - RNA, 19 nt, Homo sapiens
  misc_RNA (1)...(19): siRNA sense strand
ggagauuagaaacaguauu

SEQ ID NO: 2034795 - RNA, 19 nt, Homo sapiens
  misc_RNA (1)...(19): siRNA sense strand
ucacaaauuacuagacaag

SEQ ID NO: 2034796 - RNA, 19 nt, Homo sapiens
  misc_RNA (1)...(19): siRNA sense strand
uaaaauucgagccaaguua

SEQ ID NO: 2034797 - RNA, 19 nt, Homo sapiens
  misc_RNA (1)...(19): siRNA sense strand
uaaaagaagagcuugaaga

SEQ ID NO: 2034798 - RNA, 19 nt, Homo sapiens
  misc_RNA (1)...(19): siRNA sense strand
caucagguggaggagauua

SEQ ID NO: 2034799 - RNA, 19 nt, Homo sapiens
  misc_RNA (1)...(19): siRNA sense strand
uaugaaugccacagacuau

SEQ ID NO: 2034800 - RNA, 19 nt, Homo sapiens
  misc_RNA (1)...(19): siRNA sense strand
gagaccagcauccgagagu

SEQ ID NO: 2034801 - RNA, 19 nt, Homo sapiens
  misc_RNA (1)...(19): siRNA sense strand
cuucacuuccgacauuaua

SEQ ID NO: 2034802 - RNA, 19 nt, Homo sapiens
  misc_RNA (1)...(19): siRNA sense strand
auacgaagaacccagcauu

SEQ ID NO: 2034803 - RNA, 19 nt, Homo sapiens
  misc_RNA (1)...(19): siRNA sense strand
ugaaugccacagacuaugu

SEQ ID NO: 2034804 - RNA, 19 nt, Homo sapiens
  misc_RNA (1)...(19): siRNA sense strand
gaccugacggcguguagga

SEQ ID NO: 2034805 - RNA, 19 nt, Homo sapiens
  misc_RNA (1)...(19): siRNA sense strand
acgacgagcuagaagagau

SEQ ID NO: 2034806 - RNA, 19 nt, Homo sapiens
  misc_RNA (1)...(19): siRNA sense strand
gacucagggugaaaugauc

SEQ ID NO: 2034807 - RNA, 19 nt, Homo sapiens
  misc_RNA (1)...(19): siRNA sense strand
ggagacucagggugaaaug

SEQ ID NO: 2034808 - RNA, 19 nt, Homo sapiens
  misc_RNA (1)...(19): siRNA sense strand
cagauucacaaauuacuag

SEQ ID NO: 2034809 - RNA, 19 nt, Homo sapiens
  misc_RNA (1)...(19): siRNA sense strand
gacauuauaucagauucac

SEQ ID NO: 2034810 - RNA, 19 nt, Homo sapiens
  misc_RNA (1)...(19): siRNA sense strand
agaguugcaugagauguuc

SEQ ID NO: 2034811 - RNA, 19 nt, Homo sapiens
  misc_RNA (1)...(19): siRNA sense strand
cuauguagaacacgcuaaa

SEQ ID NO: 2034812 - RNA, 19 nt, Homo sapiens
  misc_RNA (1)...(19): siRNA sense strand
gagacucagggugaaauga

SEQ ID NO: 2034813 - RNA, 19 nt, Homo sapiens
  misc_RNA (1)...(19): siRNA sense strand
agccauccaucuucacuuc

SEQ ID NO: 2034814 - RNA, 19 nt, Homo sapiens
  misc_RNA (1)...(19): siRNA sense strand
ugauggagacacaguuguu

SEQ ID NO: 2034815 - RNA, 19 nt, Homo sapiens
  misc_RNA (1)...(19): siRNA sense strand
agaagagcuugaagaucug

SEQ ID NO: 2034816 - RNA, 19 nt, Homo sapiens
  misc_RNA (1)...(19): siRNA sense strand
cgacauuauaucagauuca

SEQ ID NO: 2034817 - RNA, 19 nt, Homo sapiens
  misc_RNA (1)...(19): siRNA sense strand
uggaggagauuagaaacag

SEQ ID NO: 2034818 - RNA, 19 nt, Homo sapiens
  misc_RNA (1)...(19): siRNA sense strand
cguguaggaagaaugauga

SEQ ID NO: 2034819 - RNA, 19 nt, Homo sapiens
  misc_RNA (1)...(19): siRNA sense strand
cggcguguaggaagaauga

SEQ ID NO: 2034820 - RNA, 19 nt, Homo sapiens
  misc_RNA (1)...(19): siRNA sense strand
acaaugaggcacagacucu

SEQ ID NO: 2034821 - RNA, 19 nt, Homo sapiens
  misc_RNA (1)...(19): siRNA sense strand
uuaugaaugccacagacua

SEQ ID NO: 2034822 - RNA, 19 nt, Homo sapiens
  misc_RNA (1)...(19): siRNA sense strand
uccgagaguugcaugagau

SEQ ID NO: 2034823 - RNA, 19 nt, Homo sapiens
  misc_RNA (1)...(19): siRNA sense strand
gagauaacugggagaacca

SEQ ID NO: 2034824 - RNA, 19 nt, Homo sapiens
  misc_RNA (1)...(19): siRNA sense strand
gauccuuggaauuauccua

SEQ ID NO: 2034825 - RNA, 19 nt, Homo sapiens
  misc_RNA (1)...(19): siRNA sense strand
ugugauccuuggaauuauc

SEQ ID NO: 2034826 - RNA, 19 nt, Homo sapiens
  misc_RNA (1)...(19): siRNA sense strand
caguuguugugguugagaa

SEQ ID NO: 2034827 - RNA, 19 nt, Homo sapiens
  misc_RNA (1)...(19): siRNA sense strand
gacaagcucucaaugaaau

SEQ ID NO: 2034828 - RNA, 19 nt, Homo sapiens
  misc_RNA (1)...(19): siRNA sense strand
guuaaaggcuauugaacaa

SEQ ID NO: 2034829 - RNA, 19 nt, Homo sapiens
  misc_RNA (1)...(19): siRNA sense strand
gaaaugaucaacaacauag

SEQ ID NO: 2034830 - RNA, 19 nt, Homo sapiens
  misc_RNA (1)...(19): siRNA sense strand
gaaccggacuucaguggau

SEQ ID NO: 2034831 - RNA, 19 nt, Homo sapiens
  misc_RNA (1)...(19): siRNA sense strand
caucuucacuuccgacauu

SEQ ID NO: 2034832 - RNA, 19 nt, Homo sapiens
  misc_RNA (1)...(19): siRNA sense strand
aagaagagcuugaagaucu

SEQ ID NO: 2034833 - RNA, 19 nt, Homo sapiens
  misc_RNA (1)...(19): siRNA sense strand
uagacaagcucucaaugaa

SEQ ID NO: 2034834 - RNA, 19 nt, Homo sapiens
  misc_RNA (1)...(19): siRNA sense strand
uugaagaucugaacaaaga

SEQ ID NO: 2034835 - RNA, 19 nt, Homo sapiens
  misc_RNA (1)...(19): siRNA sense strand
gagauuagaaacaguauug

SEQ ID NO: 2034836 - RNA, 19 nt, Homo sapiens
  misc_RNA (1)...(19): siRNA sense strand
gaaaucgagucacgucaca

SEQ ID NO: 2034837 - RNA, 19 nt, Homo sapiens
  misc_RNA (1)...(19): siRNA sense strand
gaagaucugaacaaagaaa

SEQ ID NO: 2034838 - RNA, 19 nt, Homo sapiens
  misc_RNA (1)...(19): siRNA sense strand
caagaaaacugcgaauaaa

SEQ ID NO: 2034839 - RNA, 19 nt, Homo sapiens
  misc_RNA (1)...(19): siRNA sense strand
agaacacgcuaaagaagaa

SEQ ID NO: 2034840 - RNA, 19 nt, Homo sapiens
  misc_RNA (1)...(19): siRNA sense strand
gaucaacaacauagaaaga

SEQ ID NO: 2034841 - RNA, 19 nt, Homo sapiens
  misc_RNA (1)...(19): siRNA sense strand
uaaaggcuauugaacaaag

SEQ ID NO: 2034842 - RNA, 19 nt, Homo sapiens
  misc_RNA (1)...(19): siRNA sense strand
gaaugaugauggagacaca

SEQ ID NO: 2034843 - RNA, 19 nt, Homo sapiens
  misc_RNA (1)...(19): siRNA sense strand
gcuugaagaucugaacaaa

SEQ ID NO: 2034844 - RNA, 19 nt, Homo sapiens
  misc_RNA (1)...(19): siRNA sense strand
gagcaaggcaagaaggaaa

SEQ ID NO: 2034845 - RNA, 19 nt, Homo sapiens
  misc_RNA (1)...(19): siRNA sense strand
gaggagauuagaaacagua

SEQ ID NO: 2034846 - RNA, 19 nt, Homo sapiens
  misc_RNA (1)...(19): siRNA sense strand
caaguuaaaggcuauugaa

SEQ ID NO: 2034847 - RNA, 19 nt, Homo sapiens
  misc_RNA (1)...(19): siRNA sense strand
gaaugccacagacuaugua

SEQ ID NO: 2034848 - RNA, 19 nt, Homo sapiens
  misc_RNA (1)...(19): siRNA sense strand
gugaaaugaucaacaacau

SEQ ID NO: 2034849 - RNA, 19 nt, Homo sapiens
  misc_RNA (1)...(19): siRNA sense strand
gcaccaaacccggaaggaa

SEQ ID NO: 2034850 - RNA, 19 nt, Homo sapiens
  misc_RNA (1)...(19): siRNA sense strand
uggaagccauggcggagua

SEQ ID NO: 2034851 - RNA, 19 nt, Homo sapiens
  misc_RNA (1)...(19): siRNA sense strand
gaucugaacaaagaaauca

SEQ ID NO: 2034852 - RNA, 19 nt, Homo sapiens
  misc_RNA (1)...(19): siRNA sense strand
caccaaacccggaaggaaa

SEQ ID NO: 2034853 - RNA, 19 nt, Homo sapiens
  misc_RNA (1)...(19): siRNA sense strand
cuagacaagcucucaauga

SEQ ID NO: 2034854 - RNA, 19 nt, Homo sapiens
  misc_RNA (1)...(19): siRNA sense strand
gagaguugcaugagauguu

SEQ ID NO: 2034855 - RNA, 19 nt, Homo sapiens
  misc_RNA (1)...(19): siRNA sense strand
aaccacagcaucauucuuu

SEQ ID NO: 2034856 - RNA, 19 nt, Homo sapiens
  misc_RNA (1)...(19): siRNA sense strand
ggugcugucucggaaguuu

SEQ ID NO: 2034857 - RNA, 19 nt, Homo sapiens
  misc_RNA (1)...(19): siRNA sense strand
gaugauggagacacaguug

SEQ ID NO: 2034858 - RNA, 19 nt, Homo sapiens
  misc_RNA (1)...(19): siRNA sense strand
ucaagaaaacugcgaauaa

SEQ ID NO: 2034859 - RNA, 19 nt, Homo sapiens
  misc_RNA (1)...(19): siRNA sense strand
uaggaagaaugaugaugga

SEQ ID NO: 2034860 - RNA, 19 nt, Homo sapiens
  misc_RNA (1)...(19): siRNA sense strand
ggaggagauuagaaacagu

SEQ ID NO: 2034861 - RNA, 19 nt, Homo sapiens
  misc_RNA (1)...(19): siRNA sense strand
guagaacacgcuaaagaag

SEQ ID NO: 2034862 - RNA, 19 nt, Homo sapiens
  misc_RNA (1)...(19): siRNA sense strand
acaaggacaucaugaagcu

SEQ ID NO: 2034863 - RNA, 19 nt, Homo sapiens
  misc_RNA (1)...(19): siRNA sense strand
agacaagcucucaaugaaa

SEQ ID NO: 2034864 - RNA, 19 nt, Homo sapiens
  misc_RNA (1)...(19): siRNA sense strand
uguagaacacgcuaaagaa

SEQ ID NO: 2034865 - RNA, 19 nt, Homo sapiens
  misc_RNA (1)...(19): siRNA sense strand
uaucagagcaaggcaagaa

SEQ ID NO: 2034866 - RNA, 19 nt, Homo sapiens
  misc_RNA (1)...(19): siRNA sense strand
uagaacacgcuaaagaaga

SEQ ID NO: 2034867 - RNA, 19 nt, Homo sapiens
  misc_RNA (1)...(19): siRNA sense strand
ccacagacgacgagcuaga

SEQ ID NO: 2034868 - RNA, 19 nt, Homo sapiens
  misc_RNA (1)...(19): siRNA sense strand
cuuccgacauuauaucaga

SEQ ID NO: 2034869 - RNA, 19 nt, Homo sapiens
  misc_RNA (1)...(19): siRNA sense strand
uucaguggaucuucggaua

SEQ ID NO: 2034870 - RNA, 19 nt, Homo sapiens
  misc_RNA (1)...(19): siRNA sense strand
ggugaaaugaucaacaaca

SEQ ID NO: 2034871 - RNA, 19 nt, Homo sapiens
  misc_RNA (1)...(19): siRNA sense strand
agggugaaaugaucaacaa

SEQ ID NO: 2034872 - RNA, 19 nt, Homo sapiens
  misc_RNA (1)...(19): siRNA sense strand
caccacagacgacgagcua

SEQ ID NO: 2034873 - RNA, 19 nt, Homo sapiens
  misc_RNA (1)...(19): siRNA sense strand
ccacagacuauguagaaca

SEQ ID NO: 2034874 - RNA, 19 nt, Homo sapiens
  misc_RNA (1)...(19): siRNA sense strand
gaccagcauccgagaguug

SEQ ID NO: 2034875 - RNA, 19 nt, Homo sapiens
  misc_RNA (1)...(19): siRNA sense strand
gcgggaagccauccaucuu

SEQ ID NO: 2034876 - RNA, 19 nt, Homo sapiens
  misc_RNA (1)...(19): siRNA sense strand
gaagagcuugaagaucuga

SEQ ID NO: 2034877 - RNA, 19 nt, Homo sapiens
  misc_RNA (1)...(19): siRNA sense strand
ucacaaggacaucaugaag

SEQ ID NO: 2034878 - RNA, 19 nt, Homo sapiens
  misc_RNA (1)...(19): siRNA sense strand
acaaauuacuagacaagcu

SEQ ID NO: 2034879 - RNA, 19 nt, Homo sapiens
  misc_RNA (1)...(19): siRNA sense strand
ccauggcggaguacaauga

SEQ ID NO: 2034880 - RNA, 19 nt, Homo sapiens
  misc_RNA (1)...(19): siRNA sense strand
ccaaguuaaaggcuauuga

SEQ ID NO: 2034881 - RNA, 19 nt, Homo sapiens
  misc_RNA (1)...(19): siRNA sense strand
gaacacgcuaaagaagaaa

SEQ ID NO: 2034882 - RNA, 19 nt, Homo sapiens
  misc_RNA (1)...(19): siRNA sense strand
ugccacagacuauguagaa

SEQ ID NO: 2034883 - RNA, 19 nt, Homo sapiens
  misc_RNA (1)...(19): siRNA sense strand
ucacaaauuacuagacaag

SEQ ID NO: 2034884 - RNA, 19 nt, Homo sapiens
  misc_RNA (1)...(19): siRNA sense strand
ggagauuagaaacaguauu

SEQ ID NO: 2034885 - RNA, 19 nt, Homo sapiens
  misc_RNA (1)...(19): siRNA sense strand
gauggagacacaguuguug

SEQ ID NO: 2034886 - RNA, 19 nt, Homo sapiens
  misc_RNA (1)...(19): siRNA sense strand
uaaaauucgagccaaguua

SEQ ID NO: 2034887 - RNA, 19 nt, Homo sapiens
  misc_RNA (1)...(19): siRNA sense strand
uaaaagaagagcuugaaga

SEQ ID NO: 2034888 - RNA, 19 nt, Homo sapiens
  misc_RNA (1)...(19): siRNA sense strand
uaugaaugccacagacuau

SEQ ID NO: 2034889 - RNA, 19 nt, Homo sapiens
  misc_RNA (1)...(19): siRNA sense strand
gagaccagcauccgagagu

SEQ ID NO: 2034890 - RNA, 19 nt, Homo sapiens
  misc_RNA (1)...(19): siRNA sense strand
caucagguggaggagauua

SEQ ID NO: 2034891 - RNA, 19 nt, Homo sapiens
  misc_RNA (1)...(19): siRNA sense strand
cuucacuuccgacauuaua

SEQ ID NO: 2034892 - RNA, 19 nt, Homo sapiens
  misc_RNA (1)...(19): siRNA sense strand
auacgaagaacccagcauu

SEQ ID NO: 2034893 - RNA, 19 nt, Homo sapiens
  misc_RNA (1)...(19): siRNA sense strand
ugaaugccacagacuaugu

SEQ ID NO: 2034894 - RNA, 19 nt, Homo sapiens
  misc_RNA (1)...(19): siRNA sense strand
gaccugacggcguguagga

SEQ ID NO: 2034895 - RNA, 19 nt, Homo sapiens
  misc_RNA (1)...(19): siRNA sense strand
acgacgagcuagaagagau

SEQ ID NO: 2034896 - RNA, 19 nt, Homo sapiens
  misc_RNA (1)...(19): siRNA sense strand
gacucagggugaaaugauc

SEQ ID NO: 2034897 - RNA, 19 nt, Homo sapiens
  misc_RNA (1)...(19): siRNA sense strand
ggagacucagggugaaaug

SEQ ID NO: 2034898 - RNA, 19 nt, Homo sapiens
  misc_RNA (1)...(19): siRNA sense strand
cagauucacaaauuacuag

SEQ ID NO: 2034899 - RNA, 19 nt, Homo sapiens
  misc_RNA (1)...(19): siRNA sense strand
gacauuauaucagauucac

SEQ ID NO: 2034900 - RNA, 19 nt, Homo sapiens
  misc_RNA (1)...(19): siRNA sense strand
agaguugcaugagauguuc

SEQ ID NO: 2034901 - RNA, 19 nt, Homo sapiens
  misc_RNA (1)...(19): siRNA sense strand
cuauguagaacacgcuaaa

SEQ ID NO: 2034902 - RNA, 19 nt, Homo sapiens
  misc_RNA (1)...(19): siRNA sense strand
gagacucagggugaaauga

SEQ ID NO: 2034903 - RNA, 19 nt, Homo sapiens
  misc_RNA (1)...(19): siRNA sense strand
agccauccaucuucacuuc

SEQ ID NO: 2034904 - RNA, 19 nt, Homo sapiens
  misc_RNA (1)...(19): siRNA sense strand
ugauggagacacaguuguu

SEQ ID NO: 2034905 - RNA, 19 nt, Homo sapiens
  misc_RNA (1)...(19): siRNA sense strand
agaagagcuugaagaucug

SEQ ID NO: 2034906 - RNA, 19 nt, Homo sapiens
  misc_RNA (1)...(19): siRNA sense strand
cggcguguaggaagaauga

SEQ ID NO: 2034907 - RNA, 19 nt, Homo sapiens
  misc_RNA (1)...(19): siRNA sense strand
cguguaggaagaaugauga

SEQ ID NO: 2034908 - RNA, 19 nt, Homo sapiens
  misc_RNA (1)...(19): siRNA sense strand
uggaggagauuagaaacag

SEQ ID NO: 2034909 - RNA, 19 nt, Homo sapiens
  misc_RNA (1)...(19): siRNA sense strand
cgacauuauaucagauuca

SEQ ID NO: 2034910 - RNA, 19 nt, Homo sapiens
  misc_RNA (1)...(19): siRNA sense strand
acaaugaggcacagacucu

SEQ ID NO: 2034911 - RNA, 19 nt, Homo sapiens
  misc_RNA (1)...(19): siRNA sense strand
uuaugaaugccacagacua

SEQ ID NO: 2034912 - RNA, 19 nt, Homo sapiens
  misc_RNA (1)...(19): siRNA sense strand
uccgagaguugcaugagau

SEQ ID NO: 2034913 - RNA, 19 nt, Homo sapiens
  misc_RNA (1)...(19): siRNA sense strand
gagauaacugggagaacca

SEQ ID NO: 2034914 - RNA, 19 nt, Homo sapiens
  misc_RNA (1)...(19): siRNA sense strand
caguuguugugguugagaa

SEQ ID NO: 2034915 - RNA, 19 nt, Homo sapiens
  misc_RNA (1)...(19): siRNA sense strand
ccacagaccucaaauucaa

SEQ ID NO: 2034916 - RNA, 19 nt, Homo sapiens
  misc_RNA (1)...(19): siRNA sense strand
ggcaaaaccugaugaauua

SEQ ID NO: 2034917 - RNA, 19 nt, Homo sapiens
  misc_RNA (1)...(19): siRNA sense strand
ccugagagaugaagguuua

SEQ ID NO: 2034918 - RNA, 19 nt, Homo sapiens
  misc_RNA (1)...(19): siRNA sense strand
caaggaaacuaauggaaga

SEQ ID NO: 2034919 - RNA, 19 nt, Homo sapiens
  misc_RNA (1)...(19): siRNA sense strand
gcaaagcuguuccacugaa

SEQ ID NO: 2034920 - RNA, 19 nt, Homo sapiens
  misc_RNA (1)...(19): siRNA sense strand
ucagaaagguagcacauuc

SEQ ID NO: 2034921 - RNA, 19 nt, Homo sapiens
  misc_RNA (1)...(19): siRNA sense strand
gcccaacaguggaauuauu

SEQ ID NO: 2034922 - RNA, 19 nt, Homo sapiens
  misc_RNA (1)...(19): siRNA sense strand
ccaccaaacacuucagaua

SEQ ID NO: 2034923 - RNA, 19 nt, Homo sapiens
  misc_RNA (1)...(19): siRNA sense strand
gagaaaugaugaagcuauc

SEQ ID NO: 2034924 - RNA, 19 nt, Homo sapiens
  misc_RNA (1)...(19): siRNA sense strand
ggagaaaugaugaagcuau

SEQ ID NO: 2034925 - RNA, 19 nt, Homo sapiens
  misc_RNA (1)...(19): siRNA sense strand
uaagcaagauggaccuaug

SEQ ID NO: 2034926 - RNA, 19 nt, Homo sapiens
  misc_RNA (1)...(19): siRNA sense strand
gaaacaaggaaacuaaugg

SEQ ID NO: 2034927 - RNA, 19 nt, Homo sapiens
  misc_RNA (1)...(19): siRNA sense strand
uauggaagcuguguggaaa

SEQ ID NO: 2034928 - RNA, 19 nt, Homo sapiens
  misc_RNA (1)...(19): siRNA sense strand
uagggaaauucaucuugua

SEQ ID NO: 2034929 - RNA, 19 nt, Homo sapiens
  misc_RNA (1)...(19): siRNA sense strand
aaaguguguuucaaaguga

SEQ ID NO: 2034930 - RNA, 19 nt, Homo sapiens
  misc_RNA (1)...(19): siRNA sense strand
gguagcacauucggauaaa

SEQ ID NO: 2034931 - RNA, 19 nt, Homo sapiens
  misc_RNA (1)...(19): siRNA sense strand
ccugaugaauuaauggauu

SEQ ID NO: 2034932 - RNA, 19 nt, Homo sapiens
  misc_RNA (1)...(19): siRNA sense strand
ggaucaaccucaacugcau

SEQ ID NO: 2034933 - RNA, 19 nt, Homo sapiens
  misc_RNA (1)...(19): siRNA sense strand
gaaacuaauggaagagugu

SEQ ID NO: 2034934 - RNA, 19 nt, Homo sapiens
  misc_RNA (1)...(19): siRNA sense strand
caccaaacacuucagauau

SEQ ID NO: 2034935 - RNA, 19 nt, Homo sapiens
  misc_RNA (1)...(19): siRNA sense strand
gcccacagaccucaaauuc

SEQ ID NO: 2034936 - RNA, 19 nt, Homo sapiens
  misc_RNA (1)...(19): siRNA sense strand
cuacagcccuuugacuaug

SEQ ID NO: 2034937 - RNA, 19 nt, Homo sapiens
  misc_RNA (1)...(19): siRNA sense strand
cuagggaaauucaucuugu

SEQ ID NO: 2034938 - RNA, 19 nt, Homo sapiens
  misc_RNA (1)...(19): siRNA sense strand
ccaaacacuucagauaugg

SEQ ID NO: 2034939 - RNA, 19 nt, Homo sapiens
  misc_RNA (1)...(19): siRNA sense strand
caaagcuguuccacugaau

SEQ ID NO: 2034940 - RNA, 19 nt, Homo sapiens
  misc_RNA (1)...(19): siRNA sense strand
aaaccuggaucaaccucaa

SEQ ID NO: 2034941 - RNA, 19 nt, Homo sapiens
  misc_RNA (1)...(19): siRNA sense strand
accaaacacuucagauaug

SEQ ID NO: 2034942 - RNA, 19 nt, Homo sapiens
  misc_RNA (1)...(19): siRNA sense strand
cgaaacaaggaaacuaaug

SEQ ID NO: 2034943 - RNA, 19 nt, Homo sapiens
  misc_RNA (1)...(19): siRNA sense strand
gcuacagcccuuugacuau

SEQ ID NO: 2034944 - RNA, 19 nt, Homo sapiens
  misc_RNA (1)...(19): siRNA sense strand
ugacuaugauccgaaugaa

SEQ ID NO: 2034945 - RNA, 19 nt, Homo sapiens
  misc_RNA (1)...(19): siRNA sense strand
gaugaagcuaucagaagaa

SEQ ID NO: 2034946 - RNA, 19 nt, Homo sapiens
  misc_RNA (1)...(19): siRNA sense strand
caacugcauccuucagaga

SEQ ID NO: 2034947 - RNA, 19 nt, Homo sapiens
  misc_RNA (1)...(19): siRNA sense strand
ccucuuccuucacuucuug

SEQ ID NO: 2034948 - RNA, 19 nt, Homo sapiens
  misc_RNA (1)...(19): siRNA sense strand
gauauggaaccuagcaaag

SEQ ID NO: 2034949 - RNA, 19 nt, Homo sapiens
  misc_RNA (1)...(19): siRNA sense strand
gaagguuuaaggcucagaa

SEQ ID NO: 2034950 - RNA, 19 nt, Homo sapiens
  misc_RNA (1)...(19): siRNA sense strand
gaagcuaucagaagaaaau

SEQ ID NO: 2034951 - RNA, 19 nt, Homo sapiens
  misc_RNA (1)...(19): siRNA sense strand
guguuucacuuaaugauac

SEQ ID NO: 2034952 - RNA, 19 nt, Homo sapiens
  misc_RNA (1)...(19): siRNA sense strand
aaacaaggaaacuaaugga

SEQ ID NO: 2034953 - RNA, 19 nt, Homo sapiens
  misc_RNA (1)...(19): siRNA sense strand
uggaagcuguguggaaaga

SEQ ID NO: 2034954 - RNA, 19 nt, Homo sapiens
  misc_RNA (1)...(19): siRNA sense strand
caccaguccucuuccuuca

SEQ ID NO: 2034955 - RNA, 19 nt, Homo sapiens
  misc_RNA (1)...(19): siRNA sense strand
guaaugcuacagcccuuug

SEQ ID NO: 2034956 - RNA, 19 nt, Homo sapiens
  misc_RNA (1)...(19): siRNA sense strand
guuuaaggcucagaaaggu

SEQ ID NO: 2034957 - RNA, 19 nt, Homo sapiens
  misc_RNA (1)...(19): siRNA sense strand
aaaaguguguuucaaagug

SEQ ID NO: 2034958 - RNA, 19 nt, Homo sapiens
  misc_RNA (1)...(19): siRNA sense strand
ggaagaguguaaaagacuu

SEQ ID NO: 2034959 - RNA, 19 nt, Homo sapiens
  misc_RNA (1)...(19): siRNA sense strand
aaacacuucagauauggaa

SEQ ID NO: 2034960 - RNA, 19 nt, Homo sapiens
  misc_RNA (1)...(19): siRNA sense strand
aagauggaccuaugccaaa

SEQ ID NO: 2034961 - RNA, 19 nt, Homo sapiens
  misc_RNA (1)...(19): siRNA sense strand
cugcauccuucagagauaa

SEQ ID NO: 2034962 - RNA, 19 nt, Homo sapiens
  misc_RNA (1)...(19): siRNA sense strand
uaaaagacuucagggagaa

SEQ ID NO: 2034963 - RNA, 19 nt, Homo sapiens
  misc_RNA (1)...(19): siRNA sense strand
gaaaagaguaaacacaagu

SEQ ID NO: 2034964 - RNA, 19 nt, Homo sapiens
  misc_RNA (1)...(19): siRNA sense strand
caaccucaacugcauccuu

SEQ ID NO: 2034965 - RNA, 19 nt, Homo sapiens
  misc_RNA (1)...(19): siRNA sense strand
cuucacagauguagucacu

SEQ ID NO: 2034966 - RNA, 19 nt, Homo sapiens
  misc_RNA (1)...(19): siRNA sense strand
uuaaugauaccgaaacaag

SEQ ID NO: 2034967 - RNA, 19 nt, Homo sapiens
  misc_RNA (1)...(19): siRNA sense strand
ugaaugcaucuaagcaaga

SEQ ID NO: 2034968 - RNA, 19 nt, Homo sapiens
  misc_RNA (1)...(19): siRNA sense strand
uuugaaaugcccaaugaaa

SEQ ID NO: 2034969 - RNA, 19 nt, Homo sapiens
  misc_RNA (1)...(19): siRNA sense strand
ccaguccucuuccuucacu

SEQ ID NO: 2034970 - RNA, 19 nt, Homo sapiens
  misc_RNA (1)...(19): siRNA sense strand
gcucagaaagguagcacau

SEQ ID NO: 2034971 - RNA, 19 nt, Homo sapiens
  misc_RNA (1)...(19): siRNA sense strand
ugauauggaaccuagcaaa

SEQ ID NO: 2034972 - RNA, 19 nt, Homo sapiens
  misc_RNA (1)...(19): siRNA sense strand
uacagcccuuugacuauga

SEQ ID NO: 2034973 - RNA, 19 nt, Homo sapiens
  misc_RNA (1)...(19): siRNA sense strand
gacuaugauccgaaugaaa

SEQ ID NO: 2034974 - RNA, 19 nt, Homo sapiens
  misc_RNA (1)...(19): siRNA sense strand
acugcauccuucagagaua

SEQ ID NO: 2034975 - RNA, 19 nt, Homo sapiens
  misc_RNA (1)...(19): siRNA sense strand
ccucgccgguacuguguga

SEQ ID NO: 2034976 - RNA, 19 nt, Homo sapiens
  misc_RNA (1)...(19): siRNA sense strand
uauggaaccuagcaaagcu

SEQ ID NO: 2034977 - RNA, 19 nt, Homo sapiens
  misc_RNA (1)...(19): siRNA sense strand
gguuuaaggcucagaaagg

SEQ ID NO: 2034978 - RNA, 19 nt, Homo sapiens
  misc_RNA (1)...(19): siRNA sense strand
uucauuggauucuuucuag

SEQ ID NO: 2034979 - RNA, 19 nt, Homo sapiens
  misc_RNA (1)...(19): siRNA sense strand
cccaacaguggaauuauug

SEQ ID NO: 2034980 - RNA, 19 nt, Homo sapiens
  misc_RNA (1)...(19): siRNA sense strand
aaugauaccgaaacaagga

SEQ ID NO: 2034981 - RNA, 19 nt, Homo sapiens
  misc_RNA (1)...(19): siRNA sense strand
augaagcuaucagaagaaa

SEQ ID NO: 2034982 - RNA, 19 nt, Homo sapiens
  misc_RNA (1)...(19): siRNA sense strand
ucacuuaaugauaccgaaa

SEQ ID NO: 2034983 - RNA, 19 nt, Homo sapiens
  misc_RNA (1)...(19): siRNA sense strand
gagagaugaagguuuaagg

SEQ ID NO: 2034984 - RNA, 19 nt, Homo sapiens
  misc_RNA (1)...(19): siRNA sense strand
aaacuaauggaagagugua

SEQ ID NO: 2034985 - RNA, 19 nt, Homo sapiens
  misc_RNA (1)...(19): siRNA sense strand
ccaacaguggaauuauuga

SEQ ID NO: 2034986 - RNA, 19 nt, Homo sapiens
  misc_RNA (1)...(19): siRNA sense strand
cuucacuucuuguuguaau

SEQ ID NO: 2034987 - RNA, 19 nt, Homo sapiens
  misc_RNA (1)...(19): siRNA sense strand
aaucggcaccugagagaug

SEQ ID NO: 2034988 - RNA, 19 nt, Homo sapiens
  misc_RNA (1)...(19): siRNA sense strand
ucacuucuuguuguaauug

SEQ ID NO: 2034989 - RNA, 19 nt, Homo sapiens
  misc_RNA (1)...(19): siRNA sense strand
ugaaaugcccaaugaaaau

SEQ ID NO: 2034990 - RNA, 19 nt, Homo sapiens
  misc_RNA (1)...(19): siRNA sense strand
uguuguaauugcagccauu

SEQ ID NO: 2034991 - RNA, 19 nt, Homo sapiens
  misc_RNA (1)...(19): siRNA sense strand
gaaaugcccaaugaaaaug

SEQ ID NO: 2034992 - RNA, 19 nt, Homo sapiens
  misc_RNA (1)...(19): siRNA sense strand
ccacagaccucaaauucaa

SEQ ID NO: 2034993 - RNA, 19 nt, Homo sapiens
  misc_RNA (1)...(19): siRNA sense strand
ggcaaaaccugaugaauua

SEQ ID NO: 2034994 - RNA, 19 nt, Homo sapiens
  misc_RNA (1)...(19): siRNA sense strand
ccugagagaugaagguuua

SEQ ID NO: 2034995 - RNA, 19 nt, Homo sapiens
  misc_RNA (1)...(19): siRNA sense strand
caaggaaacuaauggaaga

SEQ ID NO: 2034996 - RNA, 19 nt, Homo sapiens
  misc_RNA (1)...(19): siRNA sense strand
gcaaagcuguuccacugaa

SEQ ID NO: 2034997 - RNA, 19 nt, Homo sapiens
  misc_RNA (1)...(19): siRNA sense strand
ucagaaagguagcacauuc

SEQ ID NO: 2034998 - RNA, 19 nt, Homo sapiens
  misc_RNA (1)...(19): siRNA sense strand
gcccaacaguggaauuauu

SEQ ID NO: 2034999 - RNA, 19 nt, Homo sapiens
  misc_RNA (1)...(19): siRNA sense strand
ccaccaaacacuucagaua

SEQ ID NO: 2035000 - RNA, 19 nt, Homo sapiens
  misc_RNA (1)...(19): siRNA sense strand
gagaaaugaugaagcuauc

SEQ ID NO: 2035001 - RNA, 19 nt, Homo sapiens
  misc_RNA (1)...(19): siRNA sense strand
ggagaaaugaugaagcuau

SEQ ID NO: 2035002 - RNA, 19 nt, Homo sapiens
  misc_RNA (1)...(19): siRNA sense strand
uaagcaagauggaccuaug

SEQ ID NO: 2035003 - RNA, 19 nt, Homo sapiens
  misc_RNA (1)...(19): siRNA sense strand
gaaacaaggaaacuaaugg

SEQ ID NO: 2035004 - RNA, 19 nt, Homo sapiens
  misc_RNA (1)...(19): siRNA sense strand
uauggaagcuguguggaaa

SEQ ID NO: 2035005 - RNA, 19 nt, Homo sapiens
  misc_RNA (1)...(19): siRNA sense strand
uagggaaauucaucuugua

SEQ ID NO: 2035006 - RNA, 19 nt, Homo sapiens
  misc_RNA (1)...(19): siRNA sense strand
aaaguguguuucaaaguga

SEQ ID NO: 2035007 - RNA, 19 nt, Homo sapiens
  misc_RNA (1)...(19): siRNA sense strand
gguagcacauucggauaaa

SEQ ID NO: 2035008 - RNA, 19 nt, Homo sapiens
  misc_RNA (1)...(19): siRNA sense strand
ccugaugaauuaauggauu

SEQ ID NO: 2035009 - RNA, 19 nt, Homo sapiens
  misc_RNA (1)...(19): siRNA sense strand
ggaucaaccucaacugcau

SEQ ID NO: 2035010 - RNA, 19 nt, Homo sapiens
  misc_RNA (1)...(19): siRNA sense strand
gaaacuaauggaagagugu

SEQ ID NO: 2035011 - RNA, 19 nt, Homo sapiens
  misc_RNA (1)...(19): siRNA sense strand
caccaaacacuucagauau

SEQ ID NO: 2035012 - RNA, 19 nt, Homo sapiens
  misc_RNA (1)...(19): siRNA sense strand
gcccacagaccucaaauuc

SEQ ID NO: 2035013 - RNA, 19 nt, Homo sapiens
  misc_RNA (1)...(19): siRNA sense strand
cuacagcccuuugacuaug

SEQ ID NO: 2035014 - RNA, 19 nt, Homo sapiens
  misc_RNA (1)...(19): siRNA sense strand
cuagggaaauucaucuugu

SEQ ID NO: 2035015 - RNA, 19 nt, Homo sapiens
  misc_RNA (1)...(19): siRNA sense strand
ccaaacacuucagauaugg

SEQ ID NO: 2035016 - RNA, 19 nt, Homo sapiens
  misc_RNA (1)...(19): siRNA sense strand
caaagcuguuccacugaau

SEQ ID NO: 2035017 - RNA, 19 nt, Homo sapiens
  misc_RNA (1)...(19): siRNA sense strand
aaaccuggaucaaccucaa

SEQ ID NO: 2035018 - RNA, 19 nt, Homo sapiens
  misc_RNA (1)...(19): siRNA sense strand
accaaacacuucagauaug

SEQ ID NO: 2035019 - RNA, 19 nt, Homo sapiens
  misc_RNA (1)...(19): siRNA sense strand
cgaaacaaggaaacuaaug

SEQ ID NO: 2035020 - RNA, 19 nt, Homo sapiens
  misc_RNA (1)...(19): siRNA sense strand
gcuacagcccuuugacuau

SEQ ID NO: 2035021 - RNA, 19 nt, Homo sapiens
  misc_RNA (1)...(19): siRNA sense strand
ugacuaugauccgaaugaa

SEQ ID NO: 2035022 - RNA, 19 nt, Homo sapiens
  misc_RNA (1)...(19): siRNA sense strand
gaugaagcuaucagaagaa

SEQ ID NO: 2035023 - RNA, 19 nt, Homo sapiens
  misc_RNA (1)...(19): siRNA sense strand
caacugcauccuucagaga

SEQ ID NO: 2035024 - RNA, 19 nt, Homo sapiens
  misc_RNA (1)...(19): siRNA sense strand
ccucuuccuucacuucuug

SEQ ID NO: 2035025 - RNA, 19 nt, Homo sapiens
  misc_RNA (1)...(19): siRNA sense strand
gauauggaaccuagcaaag

SEQ ID NO: 2035026 - RNA, 19 nt, Homo sapiens
  misc_RNA (1)...(19): siRNA sense strand
gaagguuuaaggcucagaa

SEQ ID NO: 2035027 - RNA, 19 nt, Homo sapiens
  misc_RNA (1)...(19): siRNA sense strand
gaagcuaucagaagaaaau

SEQ ID NO: 2035028 - RNA, 19 nt, Homo sapiens
  misc_RNA (1)...(19): siRNA sense strand
guguuucacuuaaugauac

SEQ ID NO: 2035029 - RNA, 19 nt, Homo sapiens
  misc_RNA (1)...(19): siRNA sense strand
aaacaaggaaacuaaugga

SEQ ID NO: 2035030 - RNA, 19 nt, Homo sapiens
  misc_RNA (1)...(19): siRNA sense strand
uggaagcuguguggaaaga

SEQ ID NO: 2035031 - RNA, 19 nt, Homo sapiens
  misc_RNA (1)...(19): siRNA sense strand
caccaguccucuuccuuca

SEQ ID NO: 2035032 - RNA, 19 nt, Homo sapiens
  misc_RNA (1)...(19): siRNA sense strand
guaaugcuacagcccuuug

SEQ ID NO: 2035033 - RNA, 19 nt, Homo sapiens
  misc_RNA (1)...(19): siRNA sense strand
guuuaaggcucagaaaggu

SEQ ID NO: 2035034 - RNA, 19 nt, Homo sapiens
  misc_RNA (1)...(19): siRNA sense strand
aaaaguguguuucaaagug

SEQ ID NO: 2035035 - RNA, 19 nt, Homo sapiens
  misc_RNA (1)...(19): siRNA sense strand
ggaagaguguaaaagacuu

SEQ ID NO: 2035036 - RNA, 19 nt, Homo sapiens
  misc_RNA (1)...(19): siRNA sense strand
aaacacuucagauauggaa

SEQ ID NO: 2035037 - RNA, 19 nt, Homo sapiens
  misc_RNA (1)...(19): siRNA sense strand
aagauggaccuaugccaaa

SEQ ID NO: 2035038 - RNA, 19 nt, Homo sapiens
  misc_RNA (1)...(19): siRNA sense strand
cugcauccuucagagauaa

SEQ ID NO: 2035039 - RNA, 19 nt, Homo sapiens
  misc_RNA (1)...(19): siRNA sense strand
uaaaagacuucagggagaa

SEQ ID NO: 2035040 - RNA, 19 nt, Homo sapiens
  misc_RNA (1)...(19): siRNA sense strand
gaaaagaguaaacacaagu

SEQ ID NO: 2035041 - RNA, 19 nt, Homo sapiens
  misc_RNA (1)...(19): siRNA sense strand
caaccucaacugcauccuu

SEQ ID NO: 2035042 - RNA, 19 nt, Homo sapiens
  misc_RNA (1)...(19): siRNA sense strand
cuucacagauguagucacu

SEQ ID NO: 2035043 - RNA, 19 nt, Homo sapiens
  misc_RNA (1)...(19): siRNA sense strand
uuaaugauaccgaaacaag

SEQ ID NO: 2035044 - RNA, 19 nt, Homo sapiens
  misc_RNA (1)...(19): siRNA sense strand
ugaaugcaucuaagcaaga

SEQ ID NO: 2035045 - RNA, 19 nt, Homo sapiens
  misc_RNA (1)...(19): siRNA sense strand
uuugaaaugcccaaugaaa

SEQ ID NO: 2035046 - RNA, 19 nt, Homo sapiens
  misc_RNA (1)...(19): siRNA sense strand
ccaguccucuuccuucacu

SEQ ID NO: 2035047 - RNA, 19 nt, Homo sapiens
  misc_RNA (1)...(19): siRNA sense strand
gcucagaaagguagcacau

SEQ ID NO: 2035048 - RNA, 19 nt, Homo sapiens
  misc_RNA (1)...(19): siRNA sense strand
ugauauggaaccuagcaaa

SEQ ID NO: 2035049 - RNA, 19 nt, Homo sapiens
  misc_RNA (1)...(19): siRNA sense strand
uacagcccuuugacuauga

SEQ ID NO: 2035050 - RNA, 19 nt, Homo sapiens
  misc_RNA (1)...(19): siRNA sense strand
gacuaugauccgaaugaaa

SEQ ID NO: 2035051 - RNA, 19 nt, Homo sapiens
  misc_RNA (1)...(19): siRNA sense strand
acugcauccuucagagaua

SEQ ID NO: 2035052 - RNA, 19 nt, Homo sapiens
  misc_RNA (1)...(19): siRNA sense strand
ccucgccgguacuguguga

SEQ ID NO: 2035053 - RNA, 19 nt, Homo sapiens
  misc_RNA (1)...(19): siRNA sense strand
uauggaaccuagcaaagcu

SEQ ID NO: 2035054 - RNA, 19 nt, Homo sapiens
  misc_RNA (1)...(19): siRNA sense strand
gguuuaaggcucagaaagg

SEQ ID NO: 2035055 - RNA, 19 nt, Homo sapiens
  misc_RNA (1)...(19): siRNA sense strand
uucauuggauucuuucuag

SEQ ID NO: 2035056 - RNA, 19 nt, Homo sapiens
  misc_RNA (1)...(19): siRNA sense strand
cccaacaguggaauuauug

SEQ ID NO: 2035057 - RNA, 19 nt, Homo sapiens
  misc_RNA (1)...(19): siRNA sense strand
aaugauaccgaaacaagga

SEQ ID NO: 2035058 - RNA, 19 nt, Homo sapiens
  misc_RNA (1)...(19): siRNA sense strand
augaagcuaucagaagaaa

SEQ ID NO: 2035059 - RNA, 19 nt, Homo sapiens
  misc_RNA (1)...(19): siRNA sense strand
ucacuuaaugauaccgaaa

SEQ ID NO: 2035060 - RNA, 19 nt, Homo sapiens
  misc_RNA (1)...(19): siRNA sense strand
gagagaugaagguuuaagg

SEQ ID NO: 2035061 - RNA, 19 nt, Homo sapiens
  misc_RNA (1)...(19): siRNA sense strand
aaacuaauggaagagugua

SEQ ID NO: 2035062 - RNA, 19 nt, Homo sapiens
  misc_RNA (1)...(19): siRNA sense strand
ccaacaguggaauuauuga

SEQ ID NO: 2035063 - RNA, 19 nt, Homo sapiens
  misc_RNA (1)...(19): siRNA sense strand
cuucacuucuuguuguaau

SEQ ID NO: 2035064 - RNA, 19 nt, Homo sapiens
  misc_RNA (1)...(19): siRNA sense strand
aaucggcaccugagagaug

SEQ ID NO: 2035065 - RNA, 19 nt, Homo sapiens
  misc_RNA (1)...(19): siRNA sense strand
ucacuucuuguuguaauug

SEQ ID NO: 2035066 - RNA, 19 nt, Homo sapiens
  misc_RNA (1)...(19): siRNA sense strand
ugaaaugcccaaugaaaau

SEQ ID NO: 2035067 - RNA, 19 nt, Homo sapiens
  misc_RNA (1)...(19): siRNA sense strand
uguuguaauugcagccauu

SEQ ID NO: 2035068 - RNA, 19 nt, Homo sapiens
  misc_RNA (1)...(19): siRNA sense strand
gaaaugcccaaugaaaaug

SEQ ID NO: 2035069 - RNA, 19 nt, Homo sapiens
  misc_RNA (1)...(19): siRNA sense strand
ccacagaccucaaauucaa

SEQ ID NO: 2035070 - RNA, 19 nt, Homo sapiens
  misc_RNA (1)...(19): siRNA sense strand
ggcaaaaccugaugaauua

SEQ ID NO: 2035071 - RNA, 19 nt, Homo sapiens
  misc_RNA (1)...(19): siRNA sense strand
ccugagagaugaagguuua

SEQ ID NO: 2035072 - RNA, 19 nt, Homo sapiens
  misc_RNA (1)...(19): siRNA sense strand
caaggaaacuaauggaaga

SEQ ID NO: 2035073 - RNA, 19 nt, Homo sapiens
  misc_RNA (1)...(19): siRNA sense strand
gcaaagcuguuccacugaa

SEQ ID NO: 2035074 - RNA, 19 nt, Homo sapiens
  misc_RNA (1)...(19): siRNA sense strand
ucagaaagguagcacauuc

SEQ ID NO: 2035075 - RNA, 19 nt, Homo sapiens
  misc_RNA (1)...(19): siRNA sense strand
gcccaacaguggaauuauu

SEQ ID NO: 2035076 - RNA, 19 nt, Homo sapiens
  misc_RNA (1)...(19): siRNA sense strand
ccaccaaacacuucagaua

SEQ ID NO: 2035077 - RNA, 19 nt, Homo sapiens
  misc_RNA (1)...(19): siRNA sense strand
gagaaaugaugaagcuauc

SEQ ID NO: 2035078 - RNA, 19 nt, Homo sapiens
  misc_RNA (1)...(19): siRNA sense strand
ggagaaaugaugaagcuau

SEQ ID NO: 2035079 - RNA, 19 nt, Homo sapiens
  misc_RNA (1)...(19): siRNA sense strand
uaagcaagauggaccuaug

SEQ ID NO: 2035080 - RNA, 19 nt, Homo sapiens
  misc_RNA (1)...(19): siRNA sense strand
gaaacaaggaaacuaaugg

SEQ ID NO: 2035081 - RNA, 19 nt, Homo sapiens
  misc_RNA (1)...(19): siRNA sense strand
uauggaagcuguguggaaa

SEQ ID NO: 2035082 - RNA, 19 nt, Homo sapiens
  misc_RNA (1)...(19): siRNA sense strand
uagggaaauucaucuugua

SEQ ID NO: 2035083 - RNA, 19 nt, Homo sapiens
  misc_RNA (1)...(19): siRNA sense strand
aaaguguguuucaaaguga

SEQ ID NO: 2035084 - RNA, 19 nt, Homo sapiens
  misc_RNA (1)...(19): siRNA sense strand
gguagcacauucggauaaa

SEQ ID NO: 2035085 - RNA, 19 nt, Homo sapiens
  misc_RNA (1)...(19): siRNA sense strand
ccugaugaauuaauggauu

SEQ ID NO: 2035086 - RNA, 19 nt, Homo sapiens
  misc_RNA (1)...(19): siRNA sense strand
ggaucaaccucaacugcau

SEQ ID NO: 2035087 - RNA, 19 nt, Homo sapiens
  misc_RNA (1)...(19): siRNA sense strand
gaaacuaauggaagagugu

SEQ ID NO: 2035088 - RNA, 19 nt, Homo sapiens
  misc_RNA (1)...(19): siRNA sense strand
caccaaacacuucagauau

SEQ ID NO: 2035089 - RNA, 19 nt, Homo sapiens
  misc_RNA (1)...(19): siRNA sense strand
gcccacagaccucaaauuc

SEQ ID NO: 2035090 - RNA, 19 nt, Homo sapiens
  misc_RNA (1)...(19): siRNA sense strand
cuacagcccuuugacuaug

SEQ ID NO: 2035091 - RNA, 19 nt, Homo sapiens
  misc_RNA (1)...(19): siRNA sense strand
cuagggaaauucaucuugu

SEQ ID NO: 2035092 - RNA, 19 nt, Homo sapiens
  misc_RNA (1)...(19): siRNA sense strand
ccaaacacuucagauaugg

SEQ ID NO: 2035093 - RNA, 19 nt, Homo sapiens
  misc_RNA (1)...(19): siRNA sense strand
caaagcuguuccacugaau

SEQ ID NO: 2035094 - RNA, 19 nt, Homo sapiens
  misc_RNA (1)...(19): siRNA sense strand
aaaccuggaucaaccucaa

SEQ ID NO: 2035095 - RNA, 19 nt, Homo sapiens
  misc_RNA (1)...(19): siRNA sense strand
accaaacacuucagauaug

SEQ ID NO: 2035096 - RNA, 19 nt, Homo sapiens
  misc_RNA (1)...(19): siRNA sense strand
cgaaacaaggaaacuaaug

SEQ ID NO: 2035097 - RNA, 19 nt, Homo sapiens
  misc_RNA (1)...(19): siRNA sense strand
gcuacagcccuuugacuau

SEQ ID NO: 2035098 - RNA, 19 nt, Homo sapiens
  misc_RNA (1)...(19): siRNA sense strand
ugacuaugauccgaaugaa

SEQ ID NO: 2035099 - RNA, 19 nt, Homo sapiens
  misc_RNA (1)...(19): siRNA sense strand
gaugaagcuaucagaagaa

SEQ ID NO: 2035100 - RNA, 19 nt, Homo sapiens
  misc_RNA (1)...(19): siRNA sense strand
caacugcauccuucagaga

SEQ ID NO: 2035101 - RNA, 19 nt, Homo sapiens
  misc_RNA (1)...(19): siRNA sense strand
ccucuuccuucacuucuug

SEQ ID NO: 2035102 - RNA, 19 nt, Homo sapiens
  misc_RNA (1)...(19): siRNA sense strand
gauauggaaccuagcaaag

SEQ ID NO: 2035103 - RNA, 19 nt, Homo sapiens
  misc_RNA (1)...(19): siRNA sense strand
gaagguuuaaggcucagaa

SEQ ID NO: 2035104 - RNA, 19 nt, Homo sapiens
  misc_RNA (1)...(19): siRNA sense strand
gaagcuaucagaagaaaau

SEQ ID NO: 2035105 - RNA, 19 nt, Homo sapiens
  misc_RNA (1)...(19): siRNA sense strand
guguuucacuuaaugauac

SEQ ID NO: 2035106 - RNA, 19 nt, Homo sapiens
  misc_RNA (1)...(19): siRNA sense strand
aaacaaggaaacuaaugga

SEQ ID NO: 2035107 - RNA, 19 nt, Homo sapiens
  misc_RNA (1)...(19): siRNA sense strand
uggaagcuguguggaaaga

SEQ ID NO: 2035108 - RNA, 19 nt, Homo sapiens
  misc_RNA (1)...(19): siRNA sense strand
caccaguccucuuccuuca

SEQ ID NO: 2035109 - RNA, 19 nt, Homo sapiens
  misc_RNA (1)...(19): siRNA sense strand
guaaugcuacagcccuuug

SEQ ID NO: 2035110 - RNA, 19 nt, Homo sapiens
  misc_RNA (1)...(19): siRNA sense strand
guuuaaggcucagaaaggu

SEQ ID NO: 2035111 - RNA, 19 nt, Homo sapiens
  misc_RNA (1)...(19): siRNA sense strand
aaaaguguguuucaaagug

SEQ ID NO: 2035112 - RNA, 19 nt, Homo sapiens
  misc_RNA (1)...(19): siRNA sense strand
ggaagaguguaaaagacuu

SEQ ID NO: 2035113 - RNA, 19 nt, Homo sapiens
  misc_RNA (1)...(19): siRNA sense strand
aaacacuucagauauggaa

SEQ ID NO: 2035114 - RNA, 19 nt, Homo sapiens
  misc_RNA (1)...(19): siRNA sense strand
aagauggaccuaugccaaa

SEQ ID NO: 2035115 - RNA, 19 nt, Homo sapiens
  misc_RNA (1)...(19): siRNA sense strand
cugcauccuucagagauaa

SEQ ID NO: 2035116 - RNA, 19 nt, Homo sapiens
  misc_RNA (1)...(19): siRNA sense strand
uaaaagacuucagggagaa

SEQ ID NO: 2035117 - RNA, 19 nt, Homo sapiens
  misc_RNA (1)...(19): siRNA sense strand
gaaaagaguaaacacaagu

SEQ ID NO: 2035118 - RNA, 19 nt, Homo sapiens
  misc_RNA (1)...(19): siRNA sense strand
caaccucaacugcauccuu

SEQ ID NO: 2035119 - RNA, 19 nt, Homo sapiens
  misc_RNA (1)...(19): siRNA sense strand
cuucacagauguagucacu

SEQ ID NO: 2035120 - RNA, 19 nt, Homo sapiens
  misc_RNA (1)...(19): siRNA sense strand
uuaaugauaccgaaacaag

SEQ ID NO: 2035121 - RNA, 19 nt, Homo sapiens
  misc_RNA (1)...(19): siRNA sense strand
ugaaugcaucuaagcaaga

SEQ ID NO: 2035122 - RNA, 19 nt, Homo sapiens
  misc_RNA (1)...(19): siRNA sense strand
uuugaaaugcccaaugaaa

SEQ ID NO: 2035123 - RNA, 19 nt, Homo sapiens
  misc_RNA (1)...(19): siRNA sense strand
ccaguccucuuccuucacu

SEQ ID NO: 2035124 - RNA, 19 nt, Homo sapiens
  misc_RNA (1)...(19): siRNA sense strand
gcucagaaagguagcacau

SEQ ID NO: 2035125 - RNA, 19 nt, Homo sapiens
  misc_RNA (1)...(19): siRNA sense strand
ugauauggaaccuagcaaa

SEQ ID NO: 2035126 - RNA, 19 nt, Homo sapiens
  misc_RNA (1)...(19): siRNA sense strand
uacagcccuuugacuauga

SEQ ID NO: 2035127 - RNA, 19 nt, Homo sapiens
  misc_RNA (1)...(19): siRNA sense strand
gacuaugauccgaaugaaa

SEQ ID NO: 2035128 - RNA, 19 nt, Homo sapiens
  misc_RNA (1)...(19): siRNA sense strand
acugcauccuucagagaua

SEQ ID NO: 2035129 - RNA, 19 nt, Homo sapiens
  misc_RNA (1)...(19): siRNA sense strand
ccucgccgguacuguguga

SEQ ID NO: 2035130 - RNA, 19 nt, Homo sapiens
  misc_RNA (1)...(19): siRNA sense strand
uauggaaccuagcaaagcu

SEQ ID NO: 2035131 - RNA, 19 nt, Homo sapiens
  misc_RNA (1)...(19): siRNA sense strand
gguuuaaggcucagaaagg

SEQ ID NO: 2035132 - RNA, 19 nt, Homo sapiens
  misc_RNA (1)...(19): siRNA sense strand
uucauuggauucuuucuag

SEQ ID NO: 2035133 - RNA, 19 nt, Homo sapiens
  misc_RNA (1)...(19): siRNA sense strand
cccaacaguggaauuauug

SEQ ID NO: 2035134 - RNA, 19 nt, Homo sapiens
  misc_RNA (1)...(19): siRNA sense strand
aaugauaccgaaacaagga

SEQ ID NO: 2035135 - RNA, 19 nt, Homo sapiens
  misc_RNA (1)...(19): siRNA sense strand
augaagcuaucagaagaaa

SEQ ID NO: 2035136 - RNA, 19 nt, Homo sapiens
  misc_RNA (1)...(19): siRNA sense strand
ucacuuaaugauaccgaaa

SEQ ID NO: 2035137 - RNA, 19 nt, Homo sapiens
  misc_RNA (1)...(19): siRNA sense strand
gagagaugaagguuuaagg

SEQ ID NO: 2035138 - RNA, 19 nt, Homo sapiens
  misc_RNA (1)...(19): siRNA sense strand
aaacuaauggaagagugua

SEQ ID NO: 2035139 - RNA, 19 nt, Homo sapiens
  misc_RNA (1)...(19): siRNA sense strand
ccaacaguggaauuauuga

SEQ ID NO: 2035140 - RNA, 19 nt, Homo sapiens
  misc_RNA (1)...(19): siRNA sense strand
cuucacuucuuguuguaau

SEQ ID NO: 2035141 - RNA, 19 nt, Homo sapiens
  misc_RNA (1)...(19): siRNA sense strand
aaucggcaccugagagaug

SEQ ID NO: 2035142 - RNA, 19 nt, Homo sapiens
  misc_RNA (1)...(19): siRNA sense strand
ucacuucuuguuguaauug

SEQ ID NO: 2035143 - RNA, 19 nt, Homo sapiens
  misc_RNA (1)...(19): siRNA sense strand
ugaaaugcccaaugaaaau

SEQ ID NO: 2035144 - RNA, 19 nt, Homo sapiens
  misc_RNA (1)...(19): siRNA sense strand
uguuguaauugcagccauu

SEQ ID NO: 2035145 - RNA, 19 nt, Homo sapiens
  misc_RNA (1)...(19): siRNA sense strand
gaaaugcccaaugaaaaug

SEQ ID NO: 2035146 - RNA, 19 nt, Homo sapiens
  misc_RNA (1)...(19): siRNA sense strand
ccacagaccucaaauucaa

SEQ ID NO: 2035147 - RNA, 19 nt, Homo sapiens
  misc_RNA (1)...(19): siRNA sense strand
ggcaaaaccugaugaauua

SEQ ID NO: 2035148 - RNA, 19 nt, Homo sapiens
  misc_RNA (1)...(19): siRNA sense strand
ccugagagaugaagguuua

SEQ ID NO: 2035149 - RNA, 19 nt, Homo sapiens
  misc_RNA (1)...(19): siRNA sense strand
caaggaaacuaauggaaga

SEQ ID NO: 2035150 - RNA, 19 nt, Homo sapiens
  misc_RNA (1)...(19): siRNA sense strand
gcaaagcuguuccacugaa

SEQ ID NO: 2035151 - RNA, 19 nt, Homo sapiens
  misc_RNA (1)...(19): siRNA sense strand
ucagaaagguagcacauuc

SEQ ID NO: 2035152 - RNA, 19 nt, Homo sapiens
  misc_RNA (1)...(19): siRNA sense strand
gcccaacaguggaauuauu

SEQ ID NO: 2035153 - RNA, 19 nt, Homo sapiens
  misc_RNA (1)...(19): siRNA sense strand
ccaccaaacacuucagaua

SEQ ID NO: 2035154 - RNA, 19 nt, Homo sapiens
  misc_RNA (1)...(19): siRNA sense strand
gagaaaugaugaagcuauc

SEQ ID NO: 2035155 - RNA, 19 nt, Homo sapiens
  misc_RNA (1)...(19): siRNA sense strand
ggagaaaugaugaagcuau

SEQ ID NO: 2035156 - RNA, 19 nt, Homo sapiens
  misc_RNA (1)...(19): siRNA sense strand
uaagcaagauggaccuaug

SEQ ID NO: 2035157 - RNA, 19 nt, Homo sapiens
  misc_RNA (1)...(19): siRNA sense strand
gaaacaaggaaacuaaugg

SEQ ID NO: 2035158 - RNA, 19 nt, Homo sapiens
  misc_RNA (1)...(19): siRNA sense strand
uauggaagcuguguggaaa

SEQ ID NO: 2035159 - RNA, 19 nt, Homo sapiens
  misc_RNA (1)...(19): siRNA sense strand
uagggaaauucaucuugua

SEQ ID NO: 2035160 - RNA, 19 nt, Homo sapiens
  misc_RNA (1)...(19): siRNA sense strand
aaaguguguuucaaaguga

SEQ ID NO: 2035161 - RNA, 19 nt, Homo sapiens
  misc_RNA (1)...(19): siRNA sense strand
gguagcacauucggauaaa

SEQ ID NO: 2035162 - RNA, 19 nt, Homo sapiens
  misc_RNA (1)...(19): siRNA sense strand
ccugaugaauuaauggauu

SEQ ID NO: 2035163 - RNA, 19 nt, Homo sapiens
  misc_RNA (1)...(19): siRNA sense strand
ggaucaaccucaacugcau

SEQ ID NO: 2035164 - RNA, 19 nt, Homo sapiens
  misc_RNA (1)...(19): siRNA sense strand
gaaacuaauggaagagugu

SEQ ID NO: 2035165 - RNA, 19 nt, Homo sapiens
  misc_RNA (1)...(19): siRNA sense strand
caccaaacacuucagauau

SEQ ID NO: 2035166 - RNA, 19 nt, Homo sapiens
  misc_RNA (1)...(19): siRNA sense strand
gcccacagaccucaaauuc

SEQ ID NO: 2035167 - RNA, 19 nt, Homo sapiens
  misc_RNA (1)...(19): siRNA sense strand
cuacagcccuuugacuaug

SEQ ID NO: 2035168 - RNA, 19 nt, Homo sapiens
  misc_RNA (1)...(19): siRNA sense strand
cuagggaaauucaucuugu

SEQ ID NO: 2035169 - RNA, 19 nt, Homo sapiens
  misc_RNA (1)...(19): siRNA sense strand
ccaaacacuucagauaugg

SEQ ID NO: 2035170 - RNA, 19 nt, Homo sapiens
  misc_RNA (1)...(19): siRNA sense strand
caaagcuguuccacugaau

SEQ ID NO: 2035171 - RNA, 19 nt, Homo sapiens
  misc_RNA (1)...(19): siRNA sense strand
aaaccuggaucaaccucaa

SEQ ID NO: 2035172 - RNA, 19 nt, Homo sapiens
  misc_RNA (1)...(19): siRNA sense strand
accaaacacuucagauaug

SEQ ID NO: 2035173 - RNA, 19 nt, Homo sapiens
  misc_RNA (1)...(19): siRNA sense strand
cgaaacaaggaaacuaaug

SEQ ID NO: 2035174 - RNA, 19 nt, Homo sapiens
  misc_RNA (1)...(19): siRNA sense strand
gcuacagcccuuugacuau

SEQ ID NO: 2035175 - RNA, 19 nt, Homo sapiens
  misc_RNA (1)...(19): siRNA sense strand
ugacuaugauccgaaugaa

SEQ ID NO: 2035176 - RNA, 19 nt, Homo sapiens
  misc_RNA (1)...(19): siRNA sense strand
gaugaagcuaucagaagaa

SEQ ID NO: 2035177 - RNA, 19 nt, Homo sapiens
  misc_RNA (1)...(19): siRNA sense strand
caacugcauccuucagaga

SEQ ID NO: 2035178 - RNA, 19 nt, Homo sapiens
  misc_RNA (1)...(19): siRNA sense strand
ccucuuccuucacuucuug

SEQ ID NO: 2035179 - RNA, 19 nt, Homo sapiens
  misc_RNA (1)...(19): siRNA sense strand
gauauggaaccuagcaaag

SEQ ID NO: 2035180 - RNA, 19 nt, Homo sapiens
  misc_RNA (1)...(19): siRNA sense strand
gaagguuuaaggcucagaa

SEQ ID NO: 2035181 - RNA, 19 nt, Homo sapiens
  misc_RNA (1)...(19): siRNA sense strand
gaagcuaucagaagaaaau

SEQ ID NO: 2035182 - RNA, 19 nt, Homo sapiens
  misc_RNA (1)...(19): siRNA sense strand
guguuucacuuaaugauac

SEQ ID NO: 2035183 - RNA, 19 nt, Homo sapiens
  misc_RNA (1)...(19): siRNA sense strand
aaacaaggaaacuaaugga

SEQ ID NO: 2035184 - RNA, 19 nt, Homo sapiens
  misc_RNA (1)...(19): siRNA sense strand
uggaagcuguguggaaaga

SEQ ID NO: 2035185 - RNA, 19 nt, Homo sapiens
  misc_RNA (1)...(19): siRNA sense strand
caccaguccucuuccuuca

SEQ ID NO: 2035186 - RNA, 19 nt, Homo sapiens
  misc_RNA (1)...(19): siRNA sense strand
guaaugcuacagcccuuug

SEQ ID NO: 2035187 - RNA, 19 nt, Homo sapiens
  misc_RNA (1)...(19): siRNA sense strand
guuuaaggcucagaaaggu

SEQ ID NO: 2035188 - RNA, 19 nt, Homo sapiens
  misc_RNA (1)...(19): siRNA sense strand
aaaaguguguuucaaagug

SEQ ID NO: 2035189 - RNA, 19 nt, Homo sapiens
  misc_RNA (1)...(19): siRNA sense strand
ggaagaguguaaaagacuu

SEQ ID NO: 2035190 - RNA, 19 nt, Homo sapiens
  misc_RNA (1)...(19): siRNA sense strand
aaacacuucagauauggaa

SEQ ID NO: 2035191 - RNA, 19 nt, Homo sapiens
  misc_RNA (1)...(19): siRNA sense strand
aagauggaccuaugccaaa

SEQ ID NO: 2035192 - RNA, 19 nt, Homo sapiens
  misc_RNA (1)...(19): siRNA sense strand
cugcauccuucagagauaa

SEQ ID NO: 2035193 - RNA, 19 nt, Homo sapiens
  misc_RNA (1)...(19): siRNA sense strand
uaaaagacuucagggagaa

SEQ ID NO: 2035194 - RNA, 19 nt, Homo sapiens
  misc_RNA (1)...(19): siRNA sense strand
gaaaagaguaaacacaagu

SEQ ID NO: 2035195 - RNA, 19 nt, Homo sapiens
  misc_RNA (1)...(19): siRNA sense strand
caaccucaacugcauccuu

SEQ ID NO: 2035196 - RNA, 19 nt, Homo sapiens
  misc_RNA (1)...(19): siRNA sense strand
cuucacagauguagucacu

SEQ ID NO: 2035197 - RNA, 19 nt, Homo sapiens
  misc_RNA (1)...(19): siRNA sense strand
uuaaugauaccgaaacaag

SEQ ID NO: 2035198 - RNA, 19 nt, Homo sapiens
  misc_RNA (1)...(19): siRNA sense strand
ugaaugcaucuaagcaaga

SEQ ID NO: 2035199 - RNA, 19 nt, Homo sapiens
  misc_RNA (1)...(19): siRNA sense strand
uuugaaaugcccaaugaaa

SEQ ID NO: 2035200 - RNA, 19 nt, Homo sapiens
  misc_RNA (1)...(19): siRNA sense strand
ccaguccucuuccuucacu

SEQ ID NO: 2035201 - RNA, 19 nt, Homo sapiens
  misc_RNA (1)...(19): siRNA sense strand
gcucagaaagguagcacau

SEQ ID NO: 2035202 - RNA, 19 nt, Homo sapiens
  misc_RNA (1)...(19): siRNA sense strand
ugauauggaaccuagcaaa

SEQ ID NO: 2035203 - RNA, 19 nt, Homo sapiens
  misc_RNA (1)...(19): siRNA sense strand
uacagcccuuugacuauga

SEQ ID NO: 2035204 - RNA, 19 nt, Homo sapiens
  misc_RNA (1)...(19): siRNA sense strand
gacuaugauccgaaugaaa

SEQ ID NO: 2035205 - RNA, 19 nt, Homo sapiens
  misc_RNA (1)...(19): siRNA sense strand
acugcauccuucagagaua

SEQ ID NO: 2035206 - RNA, 19 nt, Homo sapiens
  misc_RNA (1)...(19): siRNA sense strand
ccucgccgguacuguguga

SEQ ID NO: 2035207 - RNA, 19 nt, Homo sapiens
  misc_RNA (1)...(19): siRNA sense strand
uauggaaccuagcaaagcu

SEQ ID NO: 2035208 - RNA, 19 nt, Homo sapiens
  misc_RNA (1)...(19): siRNA sense strand
gguuuaaggcucagaaagg

SEQ ID NO: 2035209 - RNA, 19 nt, Homo sapiens
  misc_RNA (1)...(19): siRNA sense strand
uucauuggauucuuucuag

SEQ ID NO: 2035210 - RNA, 19 nt, Homo sapiens
  misc_RNA (1)...(19): siRNA sense strand
cccaacaguggaauuauug

SEQ ID NO: 2035211 - RNA, 19 nt, Homo sapiens
  misc_RNA (1)...(19): siRNA sense strand
aaugauaccgaaacaagga

SEQ ID NO: 2035212 - RNA, 19 nt, Homo sapiens
  misc_RNA (1)...(19): siRNA sense strand
augaagcuaucagaagaaa

SEQ ID NO: 2035213 - RNA, 19 nt, Homo sapiens
  misc_RNA (1)...(19): siRNA sense strand
ucacuuaaugauaccgaaa

SEQ ID NO: 2035214 - RNA, 19 nt, Homo sapiens
  misc_RNA (1)...(19): siRNA sense strand
gagagaugaagguuuaagg

SEQ ID NO: 2035215 - RNA, 19 nt, Homo sapiens
  misc_RNA (1)...(19): siRNA sense strand
aaacuaauggaagagugua

SEQ ID NO: 2035216 - RNA, 19 nt, Homo sapiens
  misc_RNA (1)...(19): siRNA sense strand
ccaacaguggaauuauuga

SEQ ID NO: 2035217 - RNA, 19 nt, Homo sapiens
  misc_RNA (1)...(19): siRNA sense strand
cuucacuucuuguuguaau

SEQ ID NO: 2035218 - RNA, 19 nt, Homo sapiens
  misc_RNA (1)...(19): siRNA sense strand
aaucggcaccugagagaug

SEQ ID NO: 2035219 - RNA, 19 nt, Homo sapiens
  misc_RNA (1)...(19): siRNA sense strand
ucacuucuuguuguaauug

SEQ ID NO: 2035220 - RNA, 19 nt, Homo sapiens
  misc_RNA (1)...(19): siRNA sense strand
ugaaaugcccaaugaaaau

SEQ ID NO: 2035221 - RNA, 19 nt, Homo sapiens
  misc_RNA (1)...(19): siRNA sense strand
uguuguaauugcagccauu

SEQ ID NO: 2035222 - RNA, 19 nt, Homo sapiens
  misc_RNA (1)...(19): siRNA sense strand
gaaaugcccaaugaaaaug

SEQ ID NO: 2035223 - RNA, 19 nt, Homo sapiens
  misc_RNA (1)...(19): siRNA sense strand
acaaauggcuguaaagaaa

SEQ ID NO: 2035224 - RNA, 19 nt, Homo sapiens
  misc_RNA (1)...(19): siRNA sense strand
aaaugaaccugaucaaguu

SEQ ID NO: 2035225 - RNA, 19 nt, Homo sapiens
  misc_RNA (1)...(19): siRNA sense strand
gaaaacaaauggcuguaaa

SEQ ID NO: 2035226 - RNA, 19 nt, Homo sapiens
  misc_RNA (1)...(19): siRNA sense strand
cagguugggugacagaaua

SEQ ID NO: 2035227 - RNA, 19 nt, Homo sapiens
  misc_RNA (1)...(19): siRNA sense strand
caaaugaaccugaucaagu

SEQ ID NO: 2035228 - RNA, 19 nt, Homo sapiens
  misc_RNA (1)...(19): siRNA sense strand
ucacucagaugcagucuuc

SEQ ID NO: 2035229 - RNA, 19 nt, Homo sapiens
  misc_RNA (1)...(19): siRNA sense strand
uaugauguauccagaaaug

SEQ ID NO: 2035230 - RNA, 19 nt, Homo sapiens
  misc_RNA (1)...(19): siRNA sense strand
cgacuuuccagaagaguua

SEQ ID NO: 2035231 - RNA, 19 nt, Homo sapiens
  misc_RNA (1)...(19): siRNA sense strand
ugacuucaguaaacucuug

SEQ ID NO: 2035232 - RNA, 19 nt, Homo sapiens
  misc_RNA (1)...(19): siRNA sense strand
gaaaaugacacacccuauu

SEQ ID NO: 2035233 - RNA, 19 nt, Homo sapiens
  misc_RNA (1)...(19): siRNA sense strand
agucuucacugacaacuau

SEQ ID NO: 2035234 - RNA, 19 nt, Homo sapiens
  misc_RNA (1)...(19): siRNA sense strand
gacacacccuauuaugaug

SEQ ID NO: 2035235 - RNA, 19 nt, Homo sapiens
  misc_RNA (1)...(19): siRNA sense strand
caaaaugcauuagcugaaa

SEQ ID NO: 2035236 - RNA, 19 nt, Homo sapiens
  misc_RNA (1)...(19): siRNA sense strand
aaacaaauggcuguaaaga

SEQ ID NO: 2035237 - RNA, 19 nt, Homo sapiens
  misc_RNA (1)...(19): siRNA sense strand
caacuauacccgccuuaga

SEQ ID NO: 2035238 - RNA, 19 nt, Homo sapiens
  misc_RNA (1)...(19): siRNA sense strand
ugacacacccuauuaugau

SEQ ID NO: 2035239 - RNA, 19 nt, Homo sapiens
  misc_RNA (1)...(19): siRNA sense strand
gagcaaaugaaccugauca

SEQ ID NO: 2035240 - RNA, 19 nt, Homo sapiens
  misc_RNA (1)...(19): siRNA sense strand
gaggagcagugagggagaa

SEQ ID NO: 2035241 - RNA, 19 nt, Homo sapiens
  misc_RNA (1)...(19): siRNA sense strand
aaaaugacacacccuauua

SEQ ID NO: 2035242 - RNA, 19 nt, Homo sapiens
  misc_RNA (1)...(19): siRNA sense strand
gcaaaugaaccugaucaag

SEQ ID NO: 2035243 - RNA, 19 nt, Homo sapiens
  misc_RNA (1)...(19): siRNA sense strand
uugagucucuuaugggaaa

SEQ ID NO: 2035244 - RNA, 19 nt, Homo sapiens
  misc_RNA (1)...(19): siRNA sense strand
gggagcaaaugaaccugau

SEQ ID NO: 2035245 - RNA, 19 nt, Homo sapiens
  misc_RNA (1)...(19): siRNA sense strand
agucaaacgucacucagau

SEQ ID NO: 2035246 - RNA, 19 nt, Homo sapiens
  misc_RNA (1)...(19): siRNA sense strand
aaaaguaccuugagucucu

SEQ ID NO: 2035247 - RNA, 19 nt, Homo sapiens
  misc_RNA (1)...(19): siRNA sense strand
gcucucagguugggugaca

SEQ ID NO: 2035248 - RNA, 19 nt, Homo sapiens
  misc_RNA (1)...(19): siRNA sense strand
ggugacagaauacccuuug

SEQ ID NO: 2035249 - RNA, 19 nt, Homo sapiens
  misc_RNA (1)...(19): siRNA sense strand
ccugaucaaguuucauuaa

SEQ ID NO: 2035250 - RNA, 19 nt, Homo sapiens
  misc_RNA (1)...(19): siRNA sense strand
caaauggcuguaaagaaau

SEQ ID NO: 2035251 - RNA, 19 nt, Homo sapiens
  misc_RNA (1)...(19): siRNA sense strand
caggcaugcugauggaguu

SEQ ID NO: 2035252 - RNA, 19 nt, Homo sapiens
  misc_RNA (1)...(19): siRNA sense strand
gugacagaauacccuuuga

SEQ ID NO: 2035253 - RNA, 19 nt, Homo sapiens
  misc_RNA (1)...(19): siRNA sense strand
cacacccuauuaugaugua

SEQ ID NO: 2035254 - RNA, 19 nt, Homo sapiens
  misc_RNA (1)...(19): siRNA sense strand
caucucagaagacccugua

SEQ ID NO: 2035255 - RNA, 19 nt, Homo sapiens
  misc_RNA (1)...(19): siRNA sense strand
gagcagugagggagaaucu

SEQ ID NO: 2035256 - RNA, 19 nt, Homo sapiens
  misc_RNA (1)...(19): siRNA sense strand
gcaaaaugcauuagcugaa

SEQ ID NO: 2035257 - RNA, 19 nt, Homo sapiens
  misc_RNA (1)...(19): siRNA sense strand
gaagacccuguaccaguca

SEQ ID NO: 2035258 - RNA, 19 nt, Homo sapiens
  misc_RNA (1)...(19): siRNA sense strand
uaccuugagucucuuaugg

SEQ ID NO: 2035259 - RNA, 19 nt, Homo sapiens
  misc_RNA (1)...(19): siRNA sense strand
aaaugacacacccuauuau

SEQ ID NO: 2035260 - RNA, 19 nt, Homo sapiens
  misc_RNA (1)...(19): siRNA sense strand
gggucaacuuucugccaaa

SEQ ID NO: 2035261 - RNA, 19 nt, Homo sapiens
  misc_RNA (1)...(19): siRNA sense strand
caccagugacuucaguaaa

SEQ ID NO: 2035262 - RNA, 19 nt, Homo sapiens
  misc_RNA (1)...(19): siRNA sense strand
aacaaauggcuguaaagaa

SEQ ID NO: 2035263 - RNA, 19 nt, Homo sapiens
  misc_RNA (1)...(19): siRNA sense strand
aacuauacccgccuuagaa

SEQ ID NO: 2035264 - RNA, 19 nt, Homo sapiens
  misc_RNA (1)...(19): siRNA sense strand
ccagugacuucaguaaacu

SEQ ID NO: 2035265 - RNA, 19 nt, Homo sapiens
  misc_RNA (1)...(19): siRNA sense strand
acucuugggucaacuuucu

SEQ ID NO: 2035266 - RNA, 19 nt, Homo sapiens
  misc_RNA (1)...(19): siRNA sense strand
gugcucuucucacagacuu

SEQ ID NO: 2035267 - RNA, 19 nt, Homo sapiens
  misc_RNA (1)...(19): siRNA sense strand
cggcauggccucuuuacag

SEQ ID NO: 2035268 - RNA, 19 nt, Homo sapiens
  misc_RNA (1)...(19): siRNA sense strand
guaccuugagucucuuaug

SEQ ID NO: 2035269 - RNA, 19 nt, Homo sapiens
  misc_RNA (1)...(19): siRNA sense strand
aaacucuugggucaacuuu

SEQ ID NO: 2035270 - RNA, 19 nt, Homo sapiens
  misc_RNA (1)...(19): siRNA sense strand
aaccugaucaaguuucauu

SEQ ID NO: 2035271 - RNA, 19 nt, Homo sapiens
  misc_RNA (1)...(19): siRNA sense strand
aaaagaagacauugacaug

SEQ ID NO: 2035272 - RNA, 19 nt, Homo sapiens
  misc_RNA (1)...(19): siRNA sense strand
acaaauggcuguaaagaaa

SEQ ID NO: 2035273 - RNA, 19 nt, Homo sapiens
  misc_RNA (1)...(19): siRNA sense strand
aaaugaaccugaucaaguu

SEQ ID NO: 2035274 - RNA, 19 nt, Homo sapiens
  misc_RNA (1)...(19): siRNA sense strand
gaaaacaaauggcuguaaa

SEQ ID NO: 2035275 - RNA, 19 nt, Homo sapiens
  misc_RNA (1)...(19): siRNA sense strand
cagguugggugacagaaua

SEQ ID NO: 2035276 - RNA, 19 nt, Homo sapiens
  misc_RNA (1)...(19): siRNA sense strand
caaaugaaccugaucaagu

SEQ ID NO: 2035277 - RNA, 19 nt, Homo sapiens
  misc_RNA (1)...(19): siRNA sense strand
ucacucagaugcagucuuc

SEQ ID NO: 2035278 - RNA, 19 nt, Homo sapiens
  misc_RNA (1)...(19): siRNA sense strand
uaugauguauccagaaaug

SEQ ID NO: 2035279 - RNA, 19 nt, Homo sapiens
  misc_RNA (1)...(19): siRNA sense strand
cgacuuuccagaagaguua

SEQ ID NO: 2035280 - RNA, 19 nt, Homo sapiens
  misc_RNA (1)...(19): siRNA sense strand
ugacuucaguaaacucuug

SEQ ID NO: 2035281 - RNA, 19 nt, Homo sapiens
  misc_RNA (1)...(19): siRNA sense strand
gaaaaugacacacccuauu

SEQ ID NO: 2035282 - RNA, 19 nt, Homo sapiens
  misc_RNA (1)...(19): siRNA sense strand
agucuucacugacaacuau

SEQ ID NO: 2035283 - RNA, 19 nt, Homo sapiens
  misc_RNA (1)...(19): siRNA sense strand
gacacacccuauuaugaug

SEQ ID NO: 2035284 - RNA, 19 nt, Homo sapiens
  misc_RNA (1)...(19): siRNA sense strand
caaaaugcauuagcugaaa

SEQ ID NO: 2035285 - RNA, 19 nt, Homo sapiens
  misc_RNA (1)...(19): siRNA sense strand
aaacaaauggcuguaaaga

SEQ ID NO: 2035286 - RNA, 19 nt, Homo sapiens
  misc_RNA (1)...(19): siRNA sense strand
caacuauacccgccuuaga

SEQ ID NO: 2035287 - RNA, 19 nt, Homo sapiens
  misc_RNA (1)...(19): siRNA sense strand
ugacacacccuauuaugau

SEQ ID NO: 2035288 - RNA, 19 nt, Homo sapiens
  misc_RNA (1)...(19): siRNA sense strand
gagcaaaugaaccugauca

SEQ ID NO: 2035289 - RNA, 19 nt, Homo sapiens
  misc_RNA (1)...(19): siRNA sense strand
gaggagcagugagggagaa

SEQ ID NO: 2035290 - RNA, 19 nt, Homo sapiens
  misc_RNA (1)...(19): siRNA sense strand
aaaaugacacacccuauua

SEQ ID NO: 2035291 - RNA, 19 nt, Homo sapiens
  misc_RNA (1)...(19): siRNA sense strand
gcaaaugaaccugaucaag

SEQ ID NO: 2035292 - RNA, 19 nt, Homo sapiens
  misc_RNA (1)...(19): siRNA sense strand
uugagucucuuaugggaaa

SEQ ID NO: 2035293 - RNA, 19 nt, Homo sapiens
  misc_RNA (1)...(19): siRNA sense strand
gggagcaaaugaaccugau

SEQ ID NO: 2035294 - RNA, 19 nt, Homo sapiens
  misc_RNA (1)...(19): siRNA sense strand
agucaaacgucacucagau

SEQ ID NO: 2035295 - RNA, 19 nt, Homo sapiens
  misc_RNA (1)...(19): siRNA sense strand
aaaaguaccuugagucucu

SEQ ID NO: 2035296 - RNA, 19 nt, Homo sapiens
  misc_RNA (1)...(19): siRNA sense strand
gcucucagguugggugaca

SEQ ID NO: 2035297 - RNA, 19 nt, Homo sapiens
  misc_RNA (1)...(19): siRNA sense strand
ggugacagaauacccuuug

SEQ ID NO: 2035298 - RNA, 19 nt, Homo sapiens
  misc_RNA (1)...(19): siRNA sense strand
ccugaucaaguuucauuaa

SEQ ID NO: 2035299 - RNA, 19 nt, Homo sapiens
  misc_RNA (1)...(19): siRNA sense strand
caaauggcuguaaagaaau

SEQ ID NO: 2035300 - RNA, 19 nt, Homo sapiens
  misc_RNA (1)...(19): siRNA sense strand
caggcaugcugauggaguu

SEQ ID NO: 2035301 - RNA, 19 nt, Homo sapiens
  misc_RNA (1)...(19): siRNA sense strand
gugacagaauacccuuuga

SEQ ID NO: 2035302 - RNA, 19 nt, Homo sapiens
  misc_RNA (1)...(19): siRNA sense strand
cacacccuauuaugaugua

SEQ ID NO: 2035303 - RNA, 19 nt, Homo sapiens
  misc_RNA (1)...(19): siRNA sense strand
caucucagaagacccugua

SEQ ID NO: 2035304 - RNA, 19 nt, Homo sapiens
  misc_RNA (1)...(19): siRNA sense strand
gagcagugagggagaaucu

SEQ ID NO: 2035305 - RNA, 19 nt, Homo sapiens
  misc_RNA (1)...(19): siRNA sense strand
gcaaaaugcauuagcugaa

SEQ ID NO: 2035306 - RNA, 19 nt, Homo sapiens
  misc_RNA (1)...(19): siRNA sense strand
gaagacccuguaccaguca

SEQ ID NO: 2035307 - RNA, 19 nt, Homo sapiens
  misc_RNA (1)...(19): siRNA sense strand
uaccuugagucucuuaugg

SEQ ID NO: 2035308 - RNA, 19 nt, Homo sapiens
  misc_RNA (1)...(19): siRNA sense strand
aaaugacacacccuauuau

SEQ ID NO: 2035309 - RNA, 19 nt, Homo sapiens
  misc_RNA (1)...(19): siRNA sense strand
gggucaacuuucugccaaa

SEQ ID NO: 2035310 - RNA, 19 nt, Homo sapiens
  misc_RNA (1)...(19): siRNA sense strand
caccagugacuucaguaaa

SEQ ID NO: 2035311 - RNA, 19 nt, Homo sapiens
  misc_RNA (1)...(19): siRNA sense strand
aacaaauggcuguaaagaa

SEQ ID NO: 2035312 - RNA, 19 nt, Homo sapiens
  misc_RNA (1)...(19): siRNA sense strand
aacuauacccgccuuagaa

SEQ ID NO: 2035313 - RNA, 19 nt, Homo sapiens
  misc_RNA (1)...(19): siRNA sense strand
ccagugacuucaguaaacu

SEQ ID NO: 2035314 - RNA, 19 nt, Homo sapiens
  misc_RNA (1)...(19): siRNA sense strand
acucuugggucaacuuucu

SEQ ID NO: 2035315 - RNA, 19 nt, Homo sapiens
  misc_RNA (1)...(19): siRNA sense strand
gugcucuucucacagacuu

SEQ ID NO: 2035316 - RNA, 19 nt, Homo sapiens
  misc_RNA (1)...(19): siRNA sense strand
cggcauggccucuuuacag

SEQ ID NO: 2035317 - RNA, 19 nt, Homo sapiens
  misc_RNA (1)...(19): siRNA sense strand
guaccuugagucucuuaug

SEQ ID NO: 2035318 - RNA, 19 nt, Homo sapiens
  misc_RNA (1)...(19): siRNA sense strand
aaacucuugggucaacuuu

SEQ ID NO: 2035319 - RNA, 19 nt, Homo sapiens
  misc_RNA (1)...(19): siRNA sense strand
aaccugaucaaguuucauu

SEQ ID NO: 2035320 - RNA, 19 nt, Homo sapiens
  misc_RNA (1)...(19): siRNA sense strand
aaaagaagacauugacaug

SEQ ID NO: 2035321 - RNA, 19 nt, Homo sapiens
  misc_RNA (1)...(19): siRNA sense strand
acaaauggcuguaaagaaa

SEQ ID NO: 2035322 - RNA, 19 nt, Homo sapiens
  misc_RNA (1)...(19): siRNA sense strand
aaaugaaccugaucaaguu

SEQ ID NO: 2035323 - RNA, 19 nt, Homo sapiens
  misc_RNA (1)...(19): siRNA sense strand
gaaaacaaauggcuguaaa

SEQ ID NO: 2035324 - RNA, 19 nt, Homo sapiens
  misc_RNA (1)...(19): siRNA sense strand
cagguugggugacagaaua

SEQ ID NO: 2035325 - RNA, 19 nt, Homo sapiens
  misc_RNA (1)...(19): siRNA sense strand
caaaugaaccugaucaagu

SEQ ID NO: 2035326 - RNA, 19 nt, Homo sapiens
  misc_RNA (1)...(19): siRNA sense strand
ucacucagaugcagucuuc

SEQ ID NO: 2035327 - RNA, 19 nt, Homo sapiens
  misc_RNA (1)...(19): siRNA sense strand
uaugauguauccagaaaug

SEQ ID NO: 2035328 - RNA, 19 nt, Homo sapiens
  misc_RNA (1)...(19): siRNA sense strand
cgacuuuccagaagaguua

SEQ ID NO: 2035329 - RNA, 19 nt, Homo sapiens
  misc_RNA (1)...(19): siRNA sense strand
ugacuucaguaaacucuug

SEQ ID NO: 2035330 - RNA, 19 nt, Homo sapiens
  misc_RNA (1)...(19): siRNA sense strand
gaaaaugacacacccuauu

SEQ ID NO: 2035331 - RNA, 19 nt, Homo sapiens
  misc_RNA (1)...(19): siRNA sense strand
agucuucacugacaacuau

SEQ ID NO: 2035332 - RNA, 19 nt, Homo sapiens
  misc_RNA (1)...(19): siRNA sense strand
gacacacccuauuaugaug

SEQ ID NO: 2035333 - RNA, 19 nt, Homo sapiens
  misc_RNA (1)...(19): siRNA sense strand
caaaaugcauuagcugaaa

SEQ ID NO: 2035334 - RNA, 19 nt, Homo sapiens
  misc_RNA (1)...(19): siRNA sense strand
aaacaaauggcuguaaaga

SEQ ID NO: 2035335 - RNA, 19 nt, Homo sapiens
  misc_RNA (1)...(19): siRNA sense strand
caacuauacccgccuuaga

SEQ ID NO: 2035336 - RNA, 19 nt, Homo sapiens
  misc_RNA (1)...(19): siRNA sense strand
ugacacacccuauuaugau

SEQ ID NO: 2035337 - RNA, 19 nt, Homo sapiens
  misc_RNA (1)...(19): siRNA sense strand
gagcaaaugaaccugauca

SEQ ID NO: 2035338 - RNA, 19 nt, Homo sapiens
  misc_RNA (1)...(19): siRNA sense strand
gaggagcagugagggagaa

SEQ ID NO: 2035339 - RNA, 19 nt, Homo sapiens
  misc_RNA (1)...(19): siRNA sense strand
aaaaugacacacccuauua

SEQ ID NO: 2035340 - RNA, 19 nt, Homo sapiens
  misc_RNA (1)...(19): siRNA sense strand
gcaaaugaaccugaucaag

SEQ ID NO: 2035341 - RNA, 19 nt, Homo sapiens
  misc_RNA (1)...(19): siRNA sense strand
uugagucucuuaugggaaa

SEQ ID NO: 2035342 - RNA, 19 nt, Homo sapiens
  misc_RNA (1)...(19): siRNA sense strand
gggagcaaaugaaccugau

SEQ ID NO: 2035343 - RNA, 19 nt, Homo sapiens
  misc_RNA (1)...(19): siRNA sense strand
agucaaacgucacucagau

SEQ ID NO: 2035344 - RNA, 19 nt, Homo sapiens
  misc_RNA (1)...(19): siRNA sense strand
aaaaguaccuugagucucu

SEQ ID NO: 2035345 - RNA, 19 nt, Homo sapiens
  misc_RNA (1)...(19): siRNA sense strand
gcucucagguugggugaca

SEQ ID NO: 2035346 - RNA, 19 nt, Homo sapiens
  misc_RNA (1)...(19): siRNA sense strand
ggugacagaauacccuuug

SEQ ID NO: 2035347 - RNA, 19 nt, Homo sapiens
  misc_RNA (1)...(19): siRNA sense strand
ccugaucaaguuucauuaa

SEQ ID NO: 2035348 - RNA, 19 nt, Homo sapiens
  misc_RNA (1)...(19): siRNA sense strand
caaauggcuguaaagaaau

SEQ ID NO: 2035349 - RNA, 19 nt, Homo sapiens
  misc_RNA (1)...(19): siRNA sense strand
caggcaugcugauggaguu

SEQ ID NO: 2035350 - RNA, 19 nt, Homo sapiens
  misc_RNA (1)...(19): siRNA sense strand
gugacagaauacccuuuga

SEQ ID NO: 2035351 - RNA, 19 nt, Homo sapiens
  misc_RNA (1)...(19): siRNA sense strand
cacacccuauuaugaugua

SEQ ID NO: 2035352 - RNA, 19 nt, Homo sapiens
  misc_RNA (1)...(19): siRNA sense strand
caucucagaagacccugua

SEQ ID NO: 2035353 - RNA, 19 nt, Homo sapiens
  misc_RNA (1)...(19): siRNA sense strand
gagcagugagggagaaucu

SEQ ID NO: 2035354 - RNA, 19 nt, Homo sapiens
  misc_RNA (1)...(19): siRNA sense strand
gcaaaaugcauuagcugaa

SEQ ID NO: 2035355 - RNA, 19 nt, Homo sapiens
  misc_RNA (1)...(19): siRNA sense strand
gaagacccuguaccaguca

SEQ ID NO: 2035356 - RNA, 19 nt, Homo sapiens
  misc_RNA (1)...(19): siRNA sense strand
uaccuugagucucuuaugg

SEQ ID NO: 2035357 - RNA, 19 nt, Homo sapiens
  misc_RNA (1)...(19): siRNA sense strand
aaaugacacacccuauuau

SEQ ID NO: 2035358 - RNA, 19 nt, Homo sapiens
  misc_RNA (1)...(19): siRNA sense strand
gggucaacuuucugccaaa

SEQ ID NO: 2035359 - RNA, 19 nt, Homo sapiens
  misc_RNA (1)...(19): siRNA sense strand
caccagugacuucaguaaa

SEQ ID NO: 2035360 - RNA, 19 nt, Homo sapiens
  misc_RNA (1)...(19): siRNA sense strand
aacaaauggcuguaaagaa

SEQ ID NO: 2035361 - RNA, 19 nt, Homo sapiens
  misc_RNA (1)...(19): siRNA sense strand
aacuauacccgccuuagaa

SEQ ID NO: 2035362 - RNA, 19 nt, Homo sapiens
  misc_RNA (1)...(19): siRNA sense strand
ccagugacuucaguaaacu

SEQ ID NO: 2035363 - RNA, 19 nt, Homo sapiens
  misc_RNA (1)...(19): siRNA sense strand
acucuugggucaacuuucu

SEQ ID NO: 2035364 - RNA, 19 nt, Homo sapiens
  misc_RNA (1)...(19): siRNA sense strand
gugcucuucucacagacuu

SEQ ID NO: 2035365 - RNA, 19 nt, Homo sapiens
  misc_RNA (1)...(19): siRNA sense strand
cggcauggccucuuuacag

SEQ ID NO: 2035366 - RNA, 19 nt, Homo sapiens
  misc_RNA (1)...(19): siRNA sense strand
guaccuugagucucuuaug

SEQ ID NO: 2035367 - RNA, 19 nt, Homo sapiens
  misc_RNA (1)...(19): siRNA sense strand
aaacucuugggucaacuuu

SEQ ID NO: 2035368 - RNA, 19 nt, Homo sapiens
  misc_RNA (1)...(19): siRNA sense strand
aaccugaucaaguuucauu

SEQ ID NO: 2035369 - RNA, 19 nt, Homo sapiens
  misc_RNA (1)...(19): siRNA sense strand
aaaagaagacauugacaug

SEQ ID NO: 2035370 - RNA, 19 nt, Homo sapiens
  misc_RNA (1)...(19): siRNA sense strand
acaaauggcuguaaagaaa

SEQ ID NO: 2035371 - RNA, 19 nt, Homo sapiens
  misc_RNA (1)...(19): siRNA sense strand
aaaugaaccugaucaaguu

SEQ ID NO: 2035372 - RNA, 19 nt, Homo sapiens
  misc_RNA (1)...(19): siRNA sense strand
gaaaacaaauggcuguaaa

SEQ ID NO: 2035373 - RNA, 19 nt, Homo sapiens
  misc_RNA (1)...(19): siRNA sense strand
cagguugggugacagaaua

SEQ ID NO: 2035374 - RNA, 19 nt, Homo sapiens
  misc_RNA (1)...(19): siRNA sense strand
caaaugaaccugaucaagu

SEQ ID NO: 2035375 - RNA, 19 nt, Homo sapiens
  misc_RNA (1)...(19): siRNA sense strand
ucacucagaugcagucuuc

SEQ ID NO: 2035376 - RNA, 19 nt, Homo sapiens
  misc_RNA (1)...(19): siRNA sense strand
uaugauguauccagaaaug

SEQ ID NO: 2035377 - RNA, 19 nt, Homo sapiens
  misc_RNA (1)...(19): siRNA sense strand
cgacuuuccagaagaguua

SEQ ID NO: 2035378 - RNA, 19 nt, Homo sapiens
  misc_RNA (1)...(19): siRNA sense strand
ugacuucaguaaacucuug

SEQ ID NO: 2035379 - RNA, 19 nt, Homo sapiens
  misc_RNA (1)...(19): siRNA sense strand
gaaaaugacacacccuauu

SEQ ID NO: 2035380 - RNA, 19 nt, Homo sapiens
  misc_RNA (1)...(19): siRNA sense strand
agucuucacugacaacuau

SEQ ID NO: 2035381 - RNA, 19 nt, Homo sapiens
  misc_RNA (1)...(19): siRNA sense strand
gacacacccuauuaugaug

SEQ ID NO: 2035382 - RNA, 19 nt, Homo sapiens
  misc_RNA (1)...(19): siRNA sense strand
caaaaugcauuagcugaaa

SEQ ID NO: 2035383 - RNA, 19 nt, Homo sapiens
  misc_RNA (1)...(19): siRNA sense strand
aaacaaauggcuguaaaga

SEQ ID NO: 2035384 - RNA, 19 nt, Homo sapiens
  misc_RNA (1)...(19): siRNA sense strand
caacuauacccgccuuaga

SEQ ID NO: 2035385 - RNA, 19 nt, Homo sapiens
  misc_RNA (1)...(19): siRNA sense strand
ugacacacccuauuaugau

SEQ ID NO: 2035386 - RNA, 19 nt, Homo sapiens
  misc_RNA (1)...(19): siRNA sense strand
gagcaaaugaaccugauca

SEQ ID NO: 2035387 - RNA, 19 nt, Homo sapiens
  misc_RNA (1)...(19): siRNA sense strand
gaggagcagugagggagaa

SEQ ID NO: 2035388 - RNA, 19 nt, Homo sapiens
  misc_RNA (1)...(19): siRNA sense strand
aaaaugacacacccuauua

SEQ ID NO: 2035389 - RNA, 19 nt, Homo sapiens
  misc_RNA (1)...(19): siRNA sense strand
gcaaaugaaccugaucaag

SEQ ID NO: 2035390 - RNA, 19 nt, Homo sapiens
  misc_RNA (1)...(19): siRNA sense strand
uugagucucuuaugggaaa

SEQ ID NO: 2035391 - RNA, 19 nt, Homo sapiens
  misc_RNA (1)...(19): siRNA sense strand
gggagcaaaugaaccugau

SEQ ID NO: 2035392 - RNA, 19 nt, Homo sapiens
  misc_RNA (1)...(19): siRNA sense strand
agucaaacgucacucagau

SEQ ID NO: 2035393 - RNA, 19 nt, Homo sapiens
  misc_RNA (1)...(19): siRNA sense strand
aaaaguaccuugagucucu

SEQ ID NO: 2035394 - RNA, 19 nt, Homo sapiens
  misc_RNA (1)...(19): siRNA sense strand
gcucucagguugggugaca

SEQ ID NO: 2035395 - RNA, 19 nt, Homo sapiens
  misc_RNA (1)...(19): siRNA sense strand
ggugacagaauacccuuug

SEQ ID NO: 2035396 - RNA, 19 nt, Homo sapiens
  misc_RNA (1)...(19): siRNA sense strand
ccugaucaaguuucauuaa

SEQ ID NO: 2035397 - RNA, 19 nt, Homo sapiens
  misc_RNA (1)...(19): siRNA sense strand
caaauggcuguaaagaaau

SEQ ID NO: 2035398 - RNA, 19 nt, Homo sapiens
  misc_RNA (1)...(19): siRNA sense strand
caggcaugcugauggaguu

SEQ ID NO: 2035399 - RNA, 19 nt, Homo sapiens
  misc_RNA (1)...(19): siRNA sense strand
gugacagaauacccuuuga

SEQ ID NO: 2035400 - RNA, 19 nt, Homo sapiens
  misc_RNA (1)...(19): siRNA sense strand
cacacccuauuaugaugua

SEQ ID NO: 2035401 - RNA, 19 nt, Homo sapiens
  misc_RNA (1)...(19): siRNA sense strand
caucucagaagacccugua

SEQ ID NO: 2035402 - RNA, 19 nt, Homo sapiens
  misc_RNA (1)...(19): siRNA sense strand
gagcagugagggagaaucu

SEQ ID NO: 2035403 - RNA, 19 nt, Homo sapiens
  misc_RNA (1)...(19): siRNA sense strand
gcaaaaugcauuagcugaa

SEQ ID NO: 2035404 - RNA, 19 nt, Homo sapiens
  misc_RNA (1)...(19): siRNA sense strand
gaagacccuguaccaguca

SEQ ID NO: 2035405 - RNA, 19 nt, Homo sapiens
  misc_RNA (1)...(19): siRNA sense strand
uaccuugagucucuuaugg

SEQ ID NO: 2035406 - RNA, 19 nt, Homo sapiens
  misc_RNA (1)...(19): siRNA sense strand
aaaugacacacccuauuau

SEQ ID NO: 2035407 - RNA, 19 nt, Homo sapiens
  misc_RNA (1)...(19): siRNA sense strand
gggucaacuuucugccaaa

SEQ ID NO: 2035408 - RNA, 19 nt, Homo sapiens
  misc_RNA (1)...(19): siRNA sense strand
caccagugacuucaguaaa

SEQ ID NO: 2035409 - RNA, 19 nt, Homo sapiens
  misc_RNA (1)...(19): siRNA sense strand
aacaaauggcuguaaagaa

SEQ ID NO: 2035410 - RNA, 19 nt, Homo sapiens
  misc_RNA (1)...(19): siRNA sense strand
aacuauacccgccuuagaa

SEQ ID NO: 2035411 - RNA, 19 nt, Homo sapiens
  misc_RNA (1)...(19): siRNA sense strand
ccagugacuucaguaaacu

SEQ ID NO: 2035412 - RNA, 19 nt, Homo sapiens
  misc_RNA (1)...(19): siRNA sense strand
acucuugggucaacuuucu

SEQ ID NO: 2035413 - RNA, 19 nt, Homo sapiens
  misc_RNA (1)...(19): siRNA sense strand
gugcucuucucacagacuu

SEQ ID NO: 2035414 - RNA, 19 nt, Homo sapiens
  misc_RNA (1)...(19): siRNA sense strand
cggcauggccucuuuacag

SEQ ID NO: 2035415 - RNA, 19 nt, Homo sapiens
  misc_RNA (1)...(19): siRNA sense strand
guaccuugagucucuuaug

SEQ ID NO: 2035416 - RNA, 19 nt, Homo sapiens
  misc_RNA (1)...(19): siRNA sense strand
aaacucuugggucaacuuu

SEQ ID NO: 2035417 - RNA, 19 nt, Homo sapiens
  misc_RNA (1)...(19): siRNA sense strand
aaccugaucaaguuucauu

SEQ ID NO: 2035418 - RNA, 19 nt, Homo sapiens
  misc_RNA (1)...(19): siRNA sense strand
aaaagaagacauugacaug

SEQ ID NO: 2035419 - RNA, 19 nt, Homo sapiens
  misc_RNA (1)...(19): siRNA sense strand
gcaagaagaucgcggauga

SEQ ID NO: 2035420 - RNA, 19 nt, Homo sapiens
  misc_RNA (1)...(19): siRNA sense strand
gagaugcgccaccugauua

SEQ ID NO: 2035421 - RNA, 19 nt, Homo sapiens
  misc_RNA (1)...(19): siRNA sense strand
gagaacgaauugagaaguu

SEQ ID NO: 2035422 - RNA, 19 nt, Homo sapiens
  misc_RNA (1)...(19): siRNA sense strand
ccacucagcugcaggagaa

SEQ ID NO: 2035423 - RNA, 19 nt, Homo sapiens
  misc_RNA (1)...(19): siRNA sense strand
gaugcugaaugcagaguua

SEQ ID NO: 2035424 - RNA, 19 nt, Homo sapiens
  misc_RNA (1)...(19): siRNA sense strand
gaugccaacuuuaagcuaa

SEQ ID NO: 2035425 - RNA, 19 nt, Homo sapiens
  misc_RNA (1)...(19): siRNA sense strand
gaucaaggccaaccagauu

SEQ ID NO: 2035426 - RNA, 19 nt, Homo sapiens
  misc_RNA (1)...(19): siRNA sense strand
ugaaacugcugcuggauau

SEQ ID NO: 2035427 - RNA, 19 nt, Homo sapiens
  misc_RNA (1)...(19): siRNA sense strand
gcuuaacucuggcuacuau

SEQ ID NO: 2035428 - RNA, 19 nt, Homo sapiens
  misc_RNA (1)...(19): siRNA sense strand
gaauugagaaguuggagaa

SEQ ID NO: 2035429 - RNA, 19 nt, Homo sapiens
  misc_RNA (1)...(19): siRNA sense strand
ggaggaggcucugcucuca

SEQ ID NO: 2035430 - RNA, 19 nt, Homo sapiens
  misc_RNA (1)...(19): siRNA sense strand
gaagaucgcggaugaggau

SEQ ID NO: 2035431 - RNA, 19 nt, Homo sapiens
  misc_RNA (1)...(19): siRNA sense strand
gaagggagagcaagaagau

SEQ ID NO: 2035432 - RNA, 19 nt, Homo sapiens
  misc_RNA (1)...(19): siRNA sense strand
caacgagucucugcaagug

SEQ ID NO: 2035433 - RNA, 19 nt, Homo sapiens
  misc_RNA (1)...(19): siRNA sense strand
ccuaggaccuccaccugua

SEQ ID NO: 2035434 - RNA, 19 nt, Homo sapiens
  misc_RNA (1)...(19): siRNA sense strand
acuccgagcuccaggauaa

SEQ ID NO: 2035435 - RNA, 19 nt, Homo sapiens
  misc_RNA (1)...(19): siRNA sense strand
aggaggagaucaaggagua

SEQ ID NO: 2035436 - RNA, 19 nt, Homo sapiens
  misc_RNA (1)...(19): siRNA sense strand
gaacuccgagaacgaauug

SEQ ID NO: 2035437 - RNA, 19 nt, Homo sapiens
  misc_RNA (1)...(19): siRNA sense strand
gcaucgaguuugagcagaa

SEQ ID NO: 2035438 - RNA, 19 nt, Homo sapiens
  misc_RNA (1)...(19): siRNA sense strand
uggcagagcuggagaaacu

SEQ ID NO: 2035439 - RNA, 19 nt, Homo sapiens
  misc_RNA (1)...(19): siRNA sense strand
ccaaggugcuggagaugga

SEQ ID NO: 2035440 - RNA, 19 nt, Homo sapiens
  misc_RNA (1)...(19): siRNA sense strand
ccaaggagcagcgggauaa

SEQ ID NO: 2035441 - RNA, 19 nt, Homo sapiens
  misc_RNA (1)...(19): siRNA sense strand
cuacagcaguugcgggaaa

SEQ ID NO: 2035442 - RNA, 19 nt, Homo sapiens
  misc_RNA (1)...(19): siRNA sense strand
agaagaagcuacgcacaga

SEQ ID NO: 2035443 - RNA, 19 nt, Homo sapiens
  misc_RNA (1)...(19): siRNA sense strand
ugcagaagcuggaggagaa

SEQ ID NO: 2035444 - RNA, 19 nt, Homo sapiens
  misc_RNA (1)...(19): siRNA sense strand
cuacgcagaugccgacgaa

SEQ ID NO: 2035445 - RNA, 19 nt, Homo sapiens
  misc_RNA (1)...(19): siRNA sense strand
gcaccuggcagaggccuua

SEQ ID NO: 2035446 - RNA, 19 nt, Homo sapiens
  misc_RNA (1)...(19): siRNA sense strand
agaggaagguggaggucua

SEQ ID NO: 2035447 - RNA, 19 nt, Homo sapiens
  misc_RNA (1)...(19): siRNA sense strand
gaaugcagaguuagaggaa

SEQ ID NO: 2035448 - RNA, 19 nt, Homo sapiens
  misc_RNA (1)...(19): siRNA sense strand
gaaacaccaccgcaucuca

SEQ ID NO: 2035449 - RNA, 19 nt, Homo sapiens
  misc_RNA (1)...(19): siRNA sense strand
cgacuuccaucguaucuac

SEQ ID NO: 2035450 - RNA, 19 nt, Homo sapiens
  misc_RNA (1)...(19): siRNA sense strand
cggaggagauggaccugaa

SEQ ID NO: 2035451 - RNA, 19 nt, Homo sapiens
  misc_RNA (1)...(19): siRNA sense strand
gggauaaggugcagcucau

SEQ ID NO: 2035452 - RNA, 19 nt, Homo sapiens
  misc_RNA (1)...(19): siRNA sense strand
agacaacaguggaggacuu

SEQ ID NO: 2035453 - RNA, 19 nt, Homo sapiens
  misc_RNA (1)...(19): siRNA sense strand
gaagaugaacuccgagaac

SEQ ID NO: 2035454 - RNA, 19 nt, Homo sapiens
  misc_RNA (1)...(19): siRNA sense strand
ggagaaggccaagguggaa

SEQ ID NO: 2035455 - RNA, 19 nt, Homo sapiens
  misc_RNA (1)...(19): siRNA sense strand
ggaaucagaacuccucaag

SEQ ID NO: 2035456 - RNA, 19 nt, Homo sapiens
  misc_RNA (1)...(19): siRNA sense strand
gcaggcagaggagcagaua

SEQ ID NO: 2035457 - RNA, 19 nt, Homo sapiens
  misc_RNA (1)...(19): siRNA sense strand
cagcggaacgcaaggcuaa

SEQ ID NO: 2035458 - RNA, 19 nt, Homo sapiens
  misc_RNA (1)...(19): siRNA sense strand
uaacucuggcuacuaugua

SEQ ID NO: 2035459 - RNA, 19 nt, Homo sapiens
  misc_RNA (1)...(19): siRNA sense strand
gggaggagaaggaugaguu

SEQ ID NO: 2035460 - RNA, 19 nt, Homo sapiens
  misc_RNA (1)...(19): siRNA sense strand
gaucgaagggagagcaaga

SEQ ID NO: 2035461 - RNA, 19 nt, Homo sapiens
  misc_RNA (1)...(19): siRNA sense strand
gcaggcuugugaagaugaa

SEQ ID NO: 2035462 - RNA, 19 nt, Homo sapiens
  misc_RNA (1)...(19): siRNA sense strand
aaagugacaucggcagaga

SEQ ID NO: 2035463 - RNA, 19 nt, Homo sapiens
  misc_RNA (1)...(19): siRNA sense strand
gccaagcccuggagcucaa

SEQ ID NO: 2035464 - RNA, 19 nt, Homo sapiens
  misc_RNA (1)...(19): siRNA sense strand
ggaggagaaggaugaguug

SEQ ID NO: 2035465 - RNA, 19 nt, Homo sapiens
  misc_RNA (1)...(19): siRNA sense strand
cagaggagcagauagaaca

SEQ ID NO: 2035466 - RNA, 19 nt, Homo sapiens
  misc_RNA (1)...(19): siRNA sense strand
gaugaacuccgagaacgaa

SEQ ID NO: 2035467 - RNA, 19 nt, Homo sapiens
  misc_RNA (1)...(19): siRNA sense strand
gaaaccaagcggaaggaau

SEQ ID NO: 2035468 - RNA, 19 nt, Homo sapiens
  misc_RNA (1)...(19): siRNA sense strand
gaaguacaagcugagauug

SEQ ID NO: 2035469 - RNA, 19 nt, Homo sapiens
  misc_RNA (1)...(19): siRNA sense strand
agaccaaggugcuggagau

SEQ ID NO: 2035470 - RNA, 19 nt, Homo sapiens
  misc_RNA (1)...(19): siRNA sense strand
gggcugugcggaccaauga

SEQ ID NO: 2035471 - RNA, 19 nt, Homo sapiens
  misc_RNA (1)...(19): siRNA sense strand
gaaacugcaggccgaacuu

SEQ ID NO: 2035472 - RNA, 19 nt, Homo sapiens
  misc_RNA (1)...(19): siRNA sense strand
accaagugcuuccacguuu

SEQ ID NO: 2035473 - RNA, 19 nt, Homo sapiens
  misc_RNA (1)...(19): siRNA sense strand
gggcugcucgugagaaaga

SEQ ID NO: 2035474 - RNA, 19 nt, Homo sapiens
  misc_RNA (1)...(19): siRNA sense strand
ccacacuccucaucgucaa

SEQ ID NO: 2035475 - RNA, 19 nt, Homo sapiens
  misc_RNA (1)...(19): siRNA sense strand
acuuuaagcuaaugucaga

SEQ ID NO: 2035476 - RNA, 19 nt, Homo sapiens
  misc_RNA (1)...(19): siRNA sense strand
aaaccaagcggaaggaauc

SEQ ID NO: 2035477 - RNA, 19 nt, Homo sapiens
  misc_RNA (1)...(19): siRNA sense strand
agaaguacaagcugagauu

SEQ ID NO: 2035478 - RNA, 19 nt, Homo sapiens
  misc_RNA (1)...(19): siRNA sense strand
gggcccagcuggaugaaac

SEQ ID NO: 2035479 - RNA, 19 nt, Homo sapiens
  misc_RNA (1)...(19): siRNA sense strand
gagaaacaccaccgcaucu

SEQ ID NO: 2035480 - RNA, 19 nt, Homo sapiens
  misc_RNA (1)...(19): siRNA sense strand
ccaaccagauucacaagcu

SEQ ID NO: 2035481 - RNA, 19 nt, Homo sapiens
  misc_RNA (1)...(19): siRNA sense strand
gcaagugaagacccagcua

SEQ ID NO: 2035482 - RNA, 19 nt, Homo sapiens
  misc_RNA (1)...(19): siRNA sense strand
aggaugaugccaacuuuaa

SEQ ID NO: 2035483 - RNA, 19 nt, Homo sapiens
  misc_RNA (1)...(19): siRNA sense strand
gcuccaggauaaagugaca

SEQ ID NO: 2035484 - RNA, 19 nt, Homo sapiens
  misc_RNA (1)...(19): siRNA sense strand
ugagaugcgccaccugauu

SEQ ID NO: 2035485 - RNA, 19 nt, Homo sapiens
  misc_RNA (1)...(19): siRNA sense strand
caacuuuaagcuaauguca

SEQ ID NO: 2035486 - RNA, 19 nt, Homo sapiens
  misc_RNA (1)...(19): siRNA sense strand
agaacgaauugagaaguug

SEQ ID NO: 2035487 - RNA, 19 nt, Homo sapiens
  misc_RNA (1)...(19): siRNA sense strand
ggaaggucccagccuagga

SEQ ID NO: 2035488 - RNA, 19 nt, Homo sapiens
  misc_RNA (1)...(19): siRNA sense strand
ggacaugcaggaacagaac

SEQ ID NO: 2035489 - RNA, 19 nt, Homo sapiens
  misc_RNA (1)...(19): siRNA sense strand
guaacacccgcaagaagga

SEQ ID NO: 2035490 - RNA, 19 nt, Homo sapiens
  misc_RNA (1)...(19): siRNA sense strand
ucucacugcucuacaacga

SEQ ID NO: 2035491 - RNA, 19 nt, Homo sapiens
  misc_RNA (1)...(19): siRNA sense strand
aagaggacuuccaggguau

SEQ ID NO: 2035492 - RNA, 19 nt, Homo sapiens
  misc_RNA (1)...(19): siRNA sense strand
acgagucucugcaagugaa

SEQ ID NO: 2035493 - RNA, 19 nt, Homo sapiens
  misc_RNA (1)...(19): siRNA sense strand
ggaucaaggccaaccagau

SEQ ID NO: 2035494 - RNA, 19 nt, Homo sapiens
  misc_RNA (1)...(19): siRNA sense strand
gcugcaggcccaauucuca

SEQ ID NO: 2035495 - RNA, 19 nt, Homo sapiens
  misc_RNA (1)...(19): siRNA sense strand
cuacaacgagucucugcaa

SEQ ID NO: 2035496 - RNA, 19 nt, Homo sapiens
  misc_RNA (1)...(19): siRNA sense strand
ugacaucggcagagaccaa

SEQ ID NO: 2035497 - RNA, 19 nt, Homo sapiens
  misc_RNA (1)...(19): siRNA sense strand
gcagugggacaucgagaag

SEQ ID NO: 2035498 - RNA, 19 nt, Homo sapiens
  misc_RNA (1)...(19): siRNA sense strand
gaggacuuccaggguauaa

SEQ ID NO: 2035499 - RNA, 19 nt, Homo sapiens
  misc_RNA (1)...(19): siRNA sense strand
ccacuacuaccacuucagu

SEQ ID NO: 2035500 - RNA, 19 nt, Homo sapiens
  misc_RNA (1)...(19): siRNA sense strand
gcaaggaguaugagaugcu

SEQ ID NO: 2035501 - RNA, 19 nt, Homo sapiens
  misc_RNA (1)...(19): siRNA sense strand
gcaugcagaaguuugagau

SEQ ID NO: 2035502 - RNA, 19 nt, Homo sapiens
  misc_RNA (1)...(19): siRNA sense strand
cagcuuaacucuggcuacu

SEQ ID NO: 2035503 - RNA, 19 nt, Homo sapiens
  misc_RNA (1)...(19): siRNA sense strand
aaaccacaaccaccagcua

SEQ ID NO: 2035504 - RNA, 19 nt, Homo sapiens
  misc_RNA (1)...(19): siRNA sense strand
gcuguaacacccgcaagaa

SEQ ID NO: 2035505 - RNA, 19 nt, Homo sapiens
  misc_RNA (1)...(19): siRNA sense strand
ccgggcugcucgugagaaa

SEQ ID NO: 2035506 - RNA, 19 nt, Homo sapiens
  misc_RNA (1)...(19): siRNA sense strand
cgaagggagagcaagaaga

SEQ ID NO: 2035507 - RNA, 19 nt, Homo sapiens
  misc_RNA (1)...(19): siRNA sense strand
ggagccgcauccgggaauu

SEQ ID NO: 2035508 - RNA, 19 nt, Homo sapiens
  misc_RNA (1)...(19): siRNA sense strand
uggcagagcggcuggaaca

SEQ ID NO: 2035509 - RNA, 19 nt, Homo sapiens
  misc_RNA (1)...(19): siRNA sense strand
gaugcaguccuuaccaagu

SEQ ID NO: 2035510 - RNA, 19 nt, Homo sapiens
  misc_RNA (1)...(19): siRNA sense strand
ccaagcggaaggaaucaga

SEQ ID NO: 2035511 - RNA, 19 nt, Homo sapiens
  misc_RNA (1)...(19): siRNA sense strand
cugauuaguagucuucaaa

SEQ ID NO: 2035512 - RNA, 19 nt, Homo sapiens
  misc_RNA (1)...(19): siRNA sense strand
acacucagcaugcagaagu

SEQ ID NO: 2035513 - RNA, 19 nt, Homo sapiens
  misc_RNA (1)...(19): siRNA sense strand
guacgcaaggaguaugaga

SEQ ID NO: 2035514 - RNA, 19 nt, Homo sapiens
  misc_RNA (1)...(19): siRNA sense strand
ggaugaugccaacuuuaag

SEQ ID NO: 2035515 - RNA, 19 nt, Homo sapiens
  misc_RNA (1)...(19): siRNA sense strand
aaacugcugcuggauaugu

SEQ ID NO: 2035516 - RNA, 19 nt, Homo sapiens
  misc_RNA (1)...(19): siRNA sense strand
ccacagaugaugccacacu

SEQ ID NO: 2035517 - RNA, 19 nt, Homo sapiens
  misc_RNA (1)...(19): siRNA sense strand
gaaggccaagguggaagaa

SEQ ID NO: 2035518 - RNA, 19 nt, Homo sapiens
  misc_RNA (1)...(19): siRNA sense strand
ccaccacuacuaccacuuc

SEQ ID NO: 2035519 - RNA, 19 nt, Homo sapiens
  misc_RNA (1)...(19): siRNA sense strand
gcaagaagaucgcggauga

SEQ ID NO: 2035520 - RNA, 19 nt, Homo sapiens
  misc_RNA (1)...(19): siRNA sense strand
gagaugcgccaccugauua

SEQ ID NO: 2035521 - RNA, 19 nt, Homo sapiens
  misc_RNA (1)...(19): siRNA sense strand
gagaacgaauugagaaguu

SEQ ID NO: 2035522 - RNA, 19 nt, Homo sapiens
  misc_RNA (1)...(19): siRNA sense strand
ccacucagcugcaggagaa

SEQ ID NO: 2035523 - RNA, 19 nt, Homo sapiens
  misc_RNA (1)...(19): siRNA sense strand
gaugcugaaugcagaguua

SEQ ID NO: 2035524 - RNA, 19 nt, Homo sapiens
  misc_RNA (1)...(19): siRNA sense strand
gaugccaacuuuaagcuaa

SEQ ID NO: 2035525 - RNA, 19 nt, Homo sapiens
  misc_RNA (1)...(19): siRNA sense strand
gaucaaggccaaccagauu

SEQ ID NO: 2035526 - RNA, 19 nt, Homo sapiens
  misc_RNA (1)...(19): siRNA sense strand
ugaaacugcugcuggauau

SEQ ID NO: 2035527 - RNA, 19 nt, Homo sapiens
  misc_RNA (1)...(19): siRNA sense strand
gcuuaacucuggcuacuau

SEQ ID NO: 2035528 - RNA, 19 nt, Homo sapiens
  misc_RNA (1)...(19): siRNA sense strand
gaauugagaaguuggagaa

SEQ ID NO: 2035529 - RNA, 19 nt, Homo sapiens
  misc_RNA (1)...(19): siRNA sense strand
ggaggaggcucugcucuca

SEQ ID NO: 2035530 - RNA, 19 nt, Homo sapiens
  misc_RNA (1)...(19): siRNA sense strand
gaagaucgcggaugaggau

SEQ ID NO: 2035531 - RNA, 19 nt, Homo sapiens
  misc_RNA (1)...(19): siRNA sense strand
gaagggagagcaagaagau

SEQ ID NO: 2035532 - RNA, 19 nt, Homo sapiens
  misc_RNA (1)...(19): siRNA sense strand
caacgagucucugcaagug

SEQ ID NO: 2035533 - RNA, 19 nt, Homo sapiens
  misc_RNA (1)...(19): siRNA sense strand
ccuaggaccuccaccugua

SEQ ID NO: 2035534 - RNA, 19 nt, Homo sapiens
  misc_RNA (1)...(19): siRNA sense strand
acuccgagcuccaggauaa

SEQ ID NO: 2035535 - RNA, 19 nt, Homo sapiens
  misc_RNA (1)...(19): siRNA sense strand
gaacuccgagaacgaauug

SEQ ID NO: 2035536 - RNA, 19 nt, Homo sapiens
  misc_RNA (1)...(19): siRNA sense strand
gcaucgaguuugagcagaa

SEQ ID NO: 2035537 - RNA, 19 nt, Homo sapiens
  misc_RNA (1)...(19): siRNA sense strand
uggcagagcuggagaaacu

SEQ ID NO: 2035538 - RNA, 19 nt, Homo sapiens
  misc_RNA (1)...(19): siRNA sense strand
ccaaggugcuggagaugga

SEQ ID NO: 2035539 - RNA, 19 nt, Homo sapiens
  misc_RNA (1)...(19): siRNA sense strand
ccaaggagcagcgggauaa

SEQ ID NO: 2035540 - RNA, 19 nt, Homo sapiens
  misc_RNA (1)...(19): siRNA sense strand
cuacagcaguugcgggaaa

SEQ ID NO: 2035541 - RNA, 19 nt, Homo sapiens
  misc_RNA (1)...(19): siRNA sense strand
agaagaagcuacgcacaga

SEQ ID NO: 2035542 - RNA, 19 nt, Homo sapiens
  misc_RNA (1)...(19): siRNA sense strand
gcaccuggcagaggccuua

SEQ ID NO: 2035543 - RNA, 19 nt, Homo sapiens
  misc_RNA (1)...(19): siRNA sense strand
gaaugcagaguuagaggaa

SEQ ID NO: 2035544 - RNA, 19 nt, Homo sapiens
  misc_RNA (1)...(19): siRNA sense strand
gaaacaccaccgcaucuca

SEQ ID NO: 2035545 - RNA, 19 nt, Homo sapiens
  misc_RNA (1)...(19): siRNA sense strand
cggaggagauggaccugaa

SEQ ID NO: 2035546 - RNA, 19 nt, Homo sapiens
  misc_RNA (1)...(19): siRNA sense strand
gggauaaggugcagcucau

SEQ ID NO: 2035547 - RNA, 19 nt, Homo sapiens
  misc_RNA (1)...(19): siRNA sense strand
agacaacaguggaggacuu

SEQ ID NO: 2035548 - RNA, 19 nt, Homo sapiens
  misc_RNA (1)...(19): siRNA sense strand
gaagaugaacuccgagaac

SEQ ID NO: 2035549 - RNA, 19 nt, Homo sapiens
  misc_RNA (1)...(19): siRNA sense strand
ggagaaggccaagguggaa

SEQ ID NO: 2035550 - RNA, 19 nt, Homo sapiens
  misc_RNA (1)...(19): siRNA sense strand
ggaaucagaacuccucaag

SEQ ID NO: 2035551 - RNA, 19 nt, Homo sapiens
  misc_RNA (1)...(19): siRNA sense strand
gcaggcagaggagcagaua

SEQ ID NO: 2035552 - RNA, 19 nt, Homo sapiens
  misc_RNA (1)...(19): siRNA sense strand
cagcggaacgcaaggcuaa

SEQ ID NO: 2035553 - RNA, 19 nt, Homo sapiens
  misc_RNA (1)...(19): siRNA sense strand
gcaggcuugugaagaugaa

SEQ ID NO: 2035554 - RNA, 19 nt, Homo sapiens
  misc_RNA (1)...(19): siRNA sense strand
gggaggagaaggaugaguu

SEQ ID NO: 2035555 - RNA, 19 nt, Homo sapiens
  misc_RNA (1)...(19): siRNA sense strand
gaucgaagggagagcaaga

SEQ ID NO: 2035556 - RNA, 19 nt, Homo sapiens
  misc_RNA (1)...(19): siRNA sense strand
uaacucuggcuacuaugua

SEQ ID NO: 2035557 - RNA, 19 nt, Homo sapiens
  misc_RNA (1)...(19): siRNA sense strand
gaugaacuccgagaacgaa

SEQ ID NO: 2035558 - RNA, 19 nt, Homo sapiens
  misc_RNA (1)...(19): siRNA sense strand
ggaggagaaggaugaguug

SEQ ID NO: 2035559 - RNA, 19 nt, Homo sapiens
  misc_RNA (1)...(19): siRNA sense strand
cagaggagcagauagaaca

SEQ ID NO: 2035560 - RNA, 19 nt, Homo sapiens
  misc_RNA (1)...(19): siRNA sense strand
gaaaccaagcggaaggaau

SEQ ID NO: 2035561 - RNA, 19 nt, Homo sapiens
  misc_RNA (1)...(19): siRNA sense strand
gaaguacaagcugagauug

SEQ ID NO: 2035562 - RNA, 19 nt, Homo sapiens
  misc_RNA (1)...(19): siRNA sense strand
aaagugacaucggcagaga

SEQ ID NO: 2035563 - RNA, 19 nt, Homo sapiens
  misc_RNA (1)...(19): siRNA sense strand
agaccaaggugcuggagau

SEQ ID NO: 2035564 - RNA, 19 nt, Homo sapiens
  misc_RNA (1)...(19): siRNA sense strand
gggcugugcggaccaauga

SEQ ID NO: 2035565 - RNA, 19 nt, Homo sapiens
  misc_RNA (1)...(19): siRNA sense strand
gaaacugcaggccgaacuu

SEQ ID NO: 2035566 - RNA, 19 nt, Homo sapiens
  misc_RNA (1)...(19): siRNA sense strand
ccacacuccucaucgucaa

SEQ ID NO: 2035567 - RNA, 19 nt, Homo sapiens
  misc_RNA (1)...(19): siRNA sense strand
acuuuaagcuaaugucaga

SEQ ID NO: 2035568 - RNA, 19 nt, Homo sapiens
  misc_RNA (1)...(19): siRNA sense strand
aaaccaagcggaaggaauc

SEQ ID NO: 2035569 - RNA, 19 nt, Homo sapiens
  misc_RNA (1)...(19): siRNA sense strand
agaaguacaagcugagauu

SEQ ID NO: 2035570 - RNA, 19 nt, Homo sapiens
  misc_RNA (1)...(19): siRNA sense strand
gggcccagcuggaugaaac

SEQ ID NO: 2035571 - RNA, 19 nt, Homo sapiens
  misc_RNA (1)...(19): siRNA sense strand
gagaaacaccaccgcaucu

SEQ ID NO: 2035572 - RNA, 19 nt, Homo sapiens
  misc_RNA (1)...(19): siRNA sense strand
ccaaccagauucacaagcu

SEQ ID NO: 2035573 - RNA, 19 nt, Homo sapiens
  misc_RNA (1)...(19): siRNA sense strand
gcaagugaagacccagcua

SEQ ID NO: 2035574 - RNA, 19 nt, Homo sapiens
  misc_RNA (1)...(19): siRNA sense strand
aggaugaugccaacuuuaa

SEQ ID NO: 2035575 - RNA, 19 nt, Homo sapiens
  misc_RNA (1)...(19): siRNA sense strand
gcuccaggauaaagugaca

SEQ ID NO: 2035576 - RNA, 19 nt, Homo sapiens
  misc_RNA (1)...(19): siRNA sense strand
agaacgaauugagaaguug

SEQ ID NO: 2035577 - RNA, 19 nt, Homo sapiens
  misc_RNA (1)...(19): siRNA sense strand
caacuuuaagcuaauguca

SEQ ID NO: 2035578 - RNA, 19 nt, Homo sapiens
  misc_RNA (1)...(19): siRNA sense strand
ggaaggucccagccuagga

SEQ ID NO: 2035579 - RNA, 19 nt, Homo sapiens
  misc_RNA (1)...(19): siRNA sense strand
ugagaugcgccaccugauu

SEQ ID NO: 2035580 - RNA, 19 nt, Homo sapiens
  misc_RNA (1)...(19): siRNA sense strand
ggacaugcaggaacagaac

SEQ ID NO: 2035581 - RNA, 19 nt, Homo sapiens
  misc_RNA (1)...(19): siRNA sense strand
ucucacugcucuacaacga

SEQ ID NO: 2035582 - RNA, 19 nt, Homo sapiens
  misc_RNA (1)...(19): siRNA sense strand
aagaggacuuccaggguau

SEQ ID NO: 2035583 - RNA, 19 nt, Homo sapiens
  misc_RNA (1)...(19): siRNA sense strand
acgagucucugcaagugaa

SEQ ID NO: 2035584 - RNA, 19 nt, Homo sapiens
  misc_RNA (1)...(19): siRNA sense strand
ggaucaaggccaaccagau

SEQ ID NO: 2035585 - RNA, 19 nt, Homo sapiens
  misc_RNA (1)...(19): siRNA sense strand
gcugcaggcccaauucuca

SEQ ID NO: 2035586 - RNA, 19 nt, Homo sapiens
  misc_RNA (1)...(19): siRNA sense strand
cuacaacgagucucugcaa

SEQ ID NO: 2035587 - RNA, 19 nt, Homo sapiens
  misc_RNA (1)...(19): siRNA sense strand
ugacaucggcagagaccaa

SEQ ID NO: 2035588 - RNA, 19 nt, Homo sapiens
  misc_RNA (1)...(19): siRNA sense strand
gcagugggacaucgagaag

SEQ ID NO: 2035589 - RNA, 19 nt, Homo sapiens
  misc_RNA (1)...(19): siRNA sense strand
gaggacuuccaggguauaa

SEQ ID NO: 2035590 - RNA, 19 nt, Homo sapiens
  misc_RNA (1)...(19): siRNA sense strand
ccacuacuaccacuucagu

SEQ ID NO: 2035591 - RNA, 19 nt, Homo sapiens
  misc_RNA (1)...(19): siRNA sense strand
gcaaggaguaugagaugcu

SEQ ID NO: 2035592 - RNA, 19 nt, Homo sapiens
  misc_RNA (1)...(19): siRNA sense strand
gcaugcagaaguuugagau

SEQ ID NO: 2035593 - RNA, 19 nt, Homo sapiens
  misc_RNA (1)...(19): siRNA sense strand
cagcuuaacucuggcuacu

SEQ ID NO: 2035594 - RNA, 19 nt, Homo sapiens
  misc_RNA (1)...(19): siRNA sense strand
aaaccacaaccaccagcua

SEQ ID NO: 2035595 - RNA, 19 nt, Homo sapiens
  misc_RNA (1)...(19): siRNA sense strand
cgaagggagagcaagaaga

SEQ ID NO: 2035596 - RNA, 19 nt, Homo sapiens
  misc_RNA (1)...(19): siRNA sense strand
ggagccgcauccgggaauu

SEQ ID NO: 2035597 - RNA, 19 nt, Homo sapiens
  misc_RNA (1)...(19): siRNA sense strand
uggcagagcggcuggaaca

SEQ ID NO: 2035598 - RNA, 19 nt, Homo sapiens
  misc_RNA (1)...(19): siRNA sense strand
ccaagcggaaggaaucaga

SEQ ID NO: 2035599 - RNA, 19 nt, Homo sapiens
  misc_RNA (1)...(19): siRNA sense strand
cugauuaguagucuucaaa

SEQ ID NO: 2035600 - RNA, 19 nt, Homo sapiens
  misc_RNA (1)...(19): siRNA sense strand
acacucagcaugcagaagu

SEQ ID NO: 2035601 - RNA, 19 nt, Homo sapiens
  misc_RNA (1)...(19): siRNA sense strand
ccacagaugaugccacacu

SEQ ID NO: 2035602 - RNA, 19 nt, Homo sapiens
  misc_RNA (1)...(19): siRNA sense strand
ggaugaugccaacuuuaag

SEQ ID NO: 2035603 - RNA, 19 nt, Homo sapiens
  misc_RNA (1)...(19): siRNA sense strand
aaacugcugcuggauaugu

SEQ ID NO: 2035604 - RNA, 19 nt, Homo sapiens
  misc_RNA (1)...(19): siRNA sense strand
gaaggccaagguggaagaa

SEQ ID NO: 2035605 - RNA, 19 nt, Homo sapiens
  misc_RNA (1)...(19): siRNA sense strand
ccaccacuacuaccacuuc

SEQ ID NO: 2035606 - RNA, 19 nt, Homo sapiens
  misc_RNA (1)...(19): siRNA sense strand
guacgcaaggaguaugaga

SEQ ID NO: 2035607 - RNA, 19 nt, Homo sapiens
  misc_RNA (1)...(19): siRNA sense strand
caacaguggaggacuugca

SEQ ID NO: 2035608 - RNA, 19 nt, Homo sapiens
  misc_RNA (1)...(19): siRNA sense strand
gaagguacuacaguucaag

SEQ ID NO: 2035609 - RNA, 19 nt, Homo sapiens
  misc_RNA (1)...(19): siRNA sense strand
gagaaguacaagcugagau

SEQ ID NO: 2035610 - RNA, 19 nt, Homo sapiens
  misc_RNA (1)...(19): siRNA sense strand
gcaugcugcaggcccaauu

SEQ ID NO: 2035611 - RNA, 19 nt, Homo sapiens
  misc_RNA (1)...(19): siRNA sense strand
ugaagaugaacuccgagaa

SEQ ID NO: 2035612 - RNA, 19 nt, Homo sapiens
  misc_RNA (1)...(19): siRNA sense strand
uugaggacaugcaggaaca

SEQ ID NO: 2035613 - RNA, 19 nt, Homo sapiens
  misc_RNA (1)...(19): siRNA sense strand
gcagaggagcagauagaac

SEQ ID NO: 2035614 - RNA, 19 nt, Homo sapiens
  misc_RNA (1)...(19): siRNA sense strand
cuaaggccgagguugauga

SEQ ID NO: 2035615 - RNA, 19 nt, Homo sapiens
  misc_RNA (1)...(19): siRNA sense strand
caucgaguuugagcagaau

SEQ ID NO: 2035616 - RNA, 19 nt, Homo sapiens
  misc_RNA (1)...(19): siRNA sense strand
gagcugcaaggccgaaugg

SEQ ID NO: 2035617 - RNA, 19 nt, Homo sapiens
  misc_RNA (1)...(19): siRNA sense strand
aauucucacugcucuacaa

SEQ ID NO: 2035618 - RNA, 19 nt, Homo sapiens
  misc_RNA (1)...(19): siRNA sense strand
gacaacaguggaggacuug

SEQ ID NO: 2035619 - RNA, 19 nt, Homo sapiens
  misc_RNA (1)...(19): siRNA sense strand
gcaagaagaucgcggauga

SEQ ID NO: 2035620 - RNA, 19 nt, Homo sapiens
  misc_RNA (1)...(19): siRNA sense strand
gagaugcgccaccugauua

SEQ ID NO: 2035621 - RNA, 19 nt, Homo sapiens
  misc_RNA (1)...(19): siRNA sense strand
gagaacgaauugagaaguu

SEQ ID NO: 2035622 - RNA, 19 nt, Homo sapiens
  misc_RNA (1)...(19): siRNA sense strand
ccacucagcugcaggagaa

SEQ ID NO: 2035623 - RNA, 19 nt, Homo sapiens
  misc_RNA (1)...(19): siRNA sense strand
gaugcugaaugcagaguua

SEQ ID NO: 2035624 - RNA, 19 nt, Homo sapiens
  misc_RNA (1)...(19): siRNA sense strand
gaugccaacuuuaagcuaa

SEQ ID NO: 2035625 - RNA, 19 nt, Homo sapiens
  misc_RNA (1)...(19): siRNA sense strand
gaucaaggccaaccagauu

SEQ ID NO: 2035626 - RNA, 19 nt, Homo sapiens
  misc_RNA (1)...(19): siRNA sense strand
ugaaacugcugcuggauau

SEQ ID NO: 2035627 - RNA, 19 nt, Homo sapiens
  misc_RNA (1)...(19): siRNA sense strand
gcuuaacucuggcuacuau

SEQ ID NO: 2035628 - RNA, 19 nt, Homo sapiens
  misc_RNA (1)...(19): siRNA sense strand
gaauugagaaguuggagaa

SEQ ID NO: 2035629 - RNA, 19 nt, Homo sapiens
  misc_RNA (1)...(19): siRNA sense strand
ggaggaggcucugcucuca

SEQ ID NO: 2035630 - RNA, 19 nt, Homo sapiens
  misc_RNA (1)...(19): siRNA sense strand
gaagaucgcggaugaggau

SEQ ID NO: 2035631 - RNA, 19 nt, Homo sapiens
  misc_RNA (1)...(19): siRNA sense strand
gaagggagagcaagaagau

SEQ ID NO: 2035632 - RNA, 19 nt, Homo sapiens
  misc_RNA (1)...(19): siRNA sense strand
caacgagucucugcaagug

SEQ ID NO: 2035633 - RNA, 19 nt, Homo sapiens
  misc_RNA (1)...(19): siRNA sense strand
ccuaggaccuccaccugua

SEQ ID NO: 2035634 - RNA, 19 nt, Homo sapiens
  misc_RNA (1)...(19): siRNA sense strand
acuccgagcuccaggauaa

SEQ ID NO: 2035635 - RNA, 19 nt, Homo sapiens
  misc_RNA (1)...(19): siRNA sense strand
aggaggagaucaaggagua

SEQ ID NO: 2035636 - RNA, 19 nt, Homo sapiens
  misc_RNA (1)...(19): siRNA sense strand
gaacuccgagaacgaauug

SEQ ID NO: 2035637 - RNA, 19 nt, Homo sapiens
  misc_RNA (1)...(19): siRNA sense strand
gcaucgaguuugagcagaa

SEQ ID NO: 2035638 - RNA, 19 nt, Homo sapiens
  misc_RNA (1)...(19): siRNA sense strand
uggcagagcuggagaaacu

SEQ ID NO: 2035639 - RNA, 19 nt, Homo sapiens
  misc_RNA (1)...(19): siRNA sense strand
ccaaggugcuggagaugga

SEQ ID NO: 2035640 - RNA, 19 nt, Homo sapiens
  misc_RNA (1)...(19): siRNA sense strand
ccaaggagcagcgggauaa

SEQ ID NO: 2035641 - RNA, 19 nt, Homo sapiens
  misc_RNA (1)...(19): siRNA sense strand
cuacagcaguugcgggaaa

SEQ ID NO: 2035642 - RNA, 19 nt, Homo sapiens
  misc_RNA (1)...(19): siRNA sense strand
agaagaagcuacgcacaga

SEQ ID NO: 2035643 - RNA, 19 nt, Homo sapiens
  misc_RNA (1)...(19): siRNA sense strand
ugcagaagcuggaggagaa

SEQ ID NO: 2035644 - RNA, 19 nt, Homo sapiens
  misc_RNA (1)...(19): siRNA sense strand
cuacgcagaugccgacgaa

SEQ ID NO: 2035645 - RNA, 19 nt, Homo sapiens
  misc_RNA (1)...(19): siRNA sense strand
gcaccuggcagaggccuua

SEQ ID NO: 2035646 - RNA, 19 nt, Homo sapiens
  misc_RNA (1)...(19): siRNA sense strand
agaggaagguggaggucua

SEQ ID NO: 2035647 - RNA, 19 nt, Homo sapiens
  misc_RNA (1)...(19): siRNA sense strand
gaaugcagaguuagaggaa

SEQ ID NO: 2035648 - RNA, 19 nt, Homo sapiens
  misc_RNA (1)...(19): siRNA sense strand
gaaacaccaccgcaucuca

SEQ ID NO: 2035649 - RNA, 19 nt, Homo sapiens
  misc_RNA (1)...(19): siRNA sense strand
cgacuuccaucguaucuac

SEQ ID NO: 2035650 - RNA, 19 nt, Homo sapiens
  misc_RNA (1)...(19): siRNA sense strand
cggaggagauggaccugaa

SEQ ID NO: 2035651 - RNA, 19 nt, Homo sapiens
  misc_RNA (1)...(19): siRNA sense strand
gggauaaggugcagcucau

SEQ ID NO: 2035652 - RNA, 19 nt, Homo sapiens
  misc_RNA (1)...(19): siRNA sense strand
agacaacaguggaggacuu

SEQ ID NO: 2035653 - RNA, 19 nt, Homo sapiens
  misc_RNA (1)...(19): siRNA sense strand
gaagaugaacuccgagaac

SEQ ID NO: 2035654 - RNA, 19 nt, Homo sapiens
  misc_RNA (1)...(19): siRNA sense strand
ggagaaggccaagguggaa

SEQ ID NO: 2035655 - RNA, 19 nt, Homo sapiens
  misc_RNA (1)...(19): siRNA sense strand
ggaaucagaacuccucaag

SEQ ID NO: 2035656 - RNA, 19 nt, Homo sapiens
  misc_RNA (1)...(19): siRNA sense strand
gcaggcagaggagcagaua

SEQ ID NO: 2035657 - RNA, 19 nt, Homo sapiens
  misc_RNA (1)...(19): siRNA sense strand
cagcggaacgcaaggcuaa

SEQ ID NO: 2035658 - RNA, 19 nt, Homo sapiens
  misc_RNA (1)...(19): siRNA sense strand
uaacucuggcuacuaugua

SEQ ID NO: 2035659 - RNA, 19 nt, Homo sapiens
  misc_RNA (1)...(19): siRNA sense strand
gggaggagaaggaugaguu

SEQ ID NO: 2035660 - RNA, 19 nt, Homo sapiens
  misc_RNA (1)...(19): siRNA sense strand
gaucgaagggagagcaaga

SEQ ID NO: 2035661 - RNA, 19 nt, Homo sapiens
  misc_RNA (1)...(19): siRNA sense strand
gcaggcuugugaagaugaa

SEQ ID NO: 2035662 - RNA, 19 nt, Homo sapiens
  misc_RNA (1)...(19): siRNA sense strand
aaagugacaucggcagaga

SEQ ID NO: 2035663 - RNA, 19 nt, Homo sapiens
  misc_RNA (1)...(19): siRNA sense strand
gccaagcccuggagcucaa

SEQ ID NO: 2035664 - RNA, 19 nt, Homo sapiens
  misc_RNA (1)...(19): siRNA sense strand
ggaggagaaggaugaguug

SEQ ID NO: 2035665 - RNA, 19 nt, Homo sapiens
  misc_RNA (1)...(19): siRNA sense strand
cagaggagcagauagaaca

SEQ ID NO: 2035666 - RNA, 19 nt, Homo sapiens
  misc_RNA (1)...(19): siRNA sense strand
gaugaacuccgagaacgaa

SEQ ID NO: 2035667 - RNA, 19 nt, Homo sapiens
  misc_RNA (1)...(19): siRNA sense strand
gaaaccaagcggaaggaau

SEQ ID NO: 2035668 - RNA, 19 nt, Homo sapiens
  misc_RNA (1)...(19): siRNA sense strand
gaaguacaagcugagauug

SEQ ID NO: 2035669 - RNA, 19 nt, Homo sapiens
  misc_RNA (1)...(19): siRNA sense strand
agaccaaggugcuggagau

SEQ ID NO: 2035670 - RNA, 19 nt, Homo sapiens
  misc_RNA (1)...(19): siRNA sense strand
gggcugugcggaccaauga

SEQ ID NO: 2035671 - RNA, 19 nt, Homo sapiens
  misc_RNA (1)...(19): siRNA sense strand
gaaacugcaggccgaacuu

SEQ ID NO: 2035672 - RNA, 19 nt, Homo sapiens
  misc_RNA (1)...(19): siRNA sense strand
accaagugcuuccacguuu

SEQ ID NO: 2035673 - RNA, 19 nt, Homo sapiens
  misc_RNA (1)...(19): siRNA sense strand
gggcugcucgugagaaaga

SEQ ID NO: 2035674 - RNA, 19 nt, Homo sapiens
  misc_RNA (1)...(19): siRNA sense strand
ccacacuccucaucgucaa

SEQ ID NO: 2035675 - RNA, 19 nt, Homo sapiens
  misc_RNA (1)...(19): siRNA sense strand
acuuuaagcuaaugucaga

SEQ ID NO: 2035676 - RNA, 19 nt, Homo sapiens
  misc_RNA (1)...(19): siRNA sense strand
aaaccaagcggaaggaauc

SEQ ID NO: 2035677 - RNA, 19 nt, Homo sapiens
  misc_RNA (1)...(19): siRNA sense strand
agaaguacaagcugagauu

SEQ ID NO: 2035678 - RNA, 19 nt, Homo sapiens
  misc_RNA (1)...(19): siRNA sense strand
gggcccagcuggaugaaac

SEQ ID NO: 2035679 - RNA, 19 nt, Homo sapiens
  misc_RNA (1)...(19): siRNA sense strand
gagaaacaccaccgcaucu

SEQ ID NO: 2035680 - RNA, 19 nt, Homo sapiens
  misc_RNA (1)...(19): siRNA sense strand
ccaaccagauucacaagcu

SEQ ID NO: 2035681 - RNA, 19 nt, Homo sapiens
  misc_RNA (1)...(19): siRNA sense strand
gcaagugaagacccagcua

SEQ ID NO: 2035682 - RNA, 19 nt, Homo sapiens
  misc_RNA (1)...(19): siRNA sense strand
aggaugaugccaacuuuaa

SEQ ID NO: 2035683 - RNA, 19 nt, Homo sapiens
  misc_RNA (1)...(19): siRNA sense strand
gcuccaggauaaagugaca

SEQ ID NO: 2035684 - RNA, 19 nt, Homo sapiens
  misc_RNA (1)...(19): siRNA sense strand
ugagaugcgccaccugauu

SEQ ID NO: 2035685 - RNA, 19 nt, Homo sapiens
  misc_RNA (1)...(19): siRNA sense strand
caacuuuaagcuaauguca

SEQ ID NO: 2035686 - RNA, 19 nt, Homo sapiens
  misc_RNA (1)...(19): siRNA sense strand
agaacgaauugagaaguug

SEQ ID NO: 2035687 - RNA, 19 nt, Homo sapiens
  misc_RNA (1)...(19): siRNA sense strand
ggaaggucccagccuagga

SEQ ID NO: 2035688 - RNA, 19 nt, Homo sapiens
  misc_RNA (1)...(19): siRNA sense strand
ggacaugcaggaacagaac

SEQ ID NO: 2035689 - RNA, 19 nt, Homo sapiens
  misc_RNA (1)...(19): siRNA sense strand
guaacacccgcaagaagga

SEQ ID NO: 2035690 - RNA, 19 nt, Homo sapiens
  misc_RNA (1)...(19): siRNA sense strand
ucucacugcucuacaacga

SEQ ID NO: 2035691 - RNA, 19 nt, Homo sapiens
  misc_RNA (1)...(19): siRNA sense strand
aagaggacuuccaggguau

SEQ ID NO: 2035692 - RNA, 19 nt, Homo sapiens
  misc_RNA (1)...(19): siRNA sense strand
acgagucucugcaagugaa

SEQ ID NO: 2035693 - RNA, 19 nt, Homo sapiens
  misc_RNA (1)...(19): siRNA sense strand
ggaucaaggccaaccagau

SEQ ID NO: 2035694 - RNA, 19 nt, Homo sapiens
  misc_RNA (1)...(19): siRNA sense strand
gcugcaggcccaauucuca

SEQ ID NO: 2035695 - RNA, 19 nt, Homo sapiens
  misc_RNA (1)...(19): siRNA sense strand
cuacaacgagucucugcaa

SEQ ID NO: 2035696 - RNA, 19 nt, Homo sapiens
  misc_RNA (1)...(19): siRNA sense strand
ugacaucggcagagaccaa

SEQ ID NO: 2035697 - RNA, 19 nt, Homo sapiens
  misc_RNA (1)...(19): siRNA sense strand
gcagugggacaucgagaag

SEQ ID NO: 2035698 - RNA, 19 nt, Homo sapiens
  misc_RNA (1)...(19): siRNA sense strand
gaggacuuccaggguauaa

SEQ ID NO: 2035699 - RNA, 19 nt, Homo sapiens
  misc_RNA (1)...(19): siRNA sense strand
ccacuacuaccacuucagu

SEQ ID NO: 2035700 - RNA, 19 nt, Homo sapiens
  misc_RNA (1)...(19): siRNA sense strand
gcaaggaguaugagaugcu

SEQ ID NO: 2035701 - RNA, 19 nt, Homo sapiens
  misc_RNA (1)...(19): siRNA sense strand
gcaugcagaaguuugagau

SEQ ID NO: 2035702 - RNA, 19 nt, Homo sapiens
  misc_RNA (1)...(19): siRNA sense strand
cagcuuaacucuggcuacu

SEQ ID NO: 2035703 - RNA, 19 nt, Homo sapiens
  misc_RNA (1)...(19): siRNA sense strand
aaaccacaaccaccagcua

SEQ ID NO: 2035704 - RNA, 19 nt, Homo sapiens
  misc_RNA (1)...(19): siRNA sense strand
gcuguaacacccgcaagaa

SEQ ID NO: 2035705 - RNA, 19 nt, Homo sapiens
  misc_RNA (1)...(19): siRNA sense strand
ccgggcugcucgugagaaa

SEQ ID NO: 2035706 - RNA, 19 nt, Homo sapiens
  misc_RNA (1)...(19): siRNA sense strand
cgaagggagagcaagaaga

SEQ ID NO: 2035707 - RNA, 19 nt, Homo sapiens
  misc_RNA (1)...(19): siRNA sense strand
ggagccgcauccgggaauu

SEQ ID NO: 2035708 - RNA, 19 nt, Homo sapiens
  misc_RNA (1)...(19): siRNA sense strand
uggcagagcggcuggaaca

SEQ ID NO: 2035709 - RNA, 19 nt, Homo sapiens
  misc_RNA (1)...(19): siRNA sense strand
gaugcaguccuuaccaagu

SEQ ID NO: 2035710 - RNA, 19 nt, Homo sapiens
  misc_RNA (1)...(19): siRNA sense strand
ccaagcggaaggaaucaga

SEQ ID NO: 2035711 - RNA, 19 nt, Homo sapiens
  misc_RNA (1)...(19): siRNA sense strand
cugauuaguagucuucaaa

SEQ ID NO: 2035712 - RNA, 19 nt, Homo sapiens
  misc_RNA (1)...(19): siRNA sense strand
acacucagcaugcagaagu

SEQ ID NO: 2035713 - RNA, 19 nt, Homo sapiens
  misc_RNA (1)...(19): siRNA sense strand
guacgcaaggaguaugaga

SEQ ID NO: 2035714 - RNA, 19 nt, Homo sapiens
  misc_RNA (1)...(19): siRNA sense strand
ggaugaugccaacuuuaag

SEQ ID NO: 2035715 - RNA, 19 nt, Homo sapiens
  misc_RNA (1)...(19): siRNA sense strand
aaacugcugcuggauaugu

SEQ ID NO: 2035716 - RNA, 19 nt, Homo sapiens
  misc_RNA (1)...(19): siRNA sense strand
ccacagaugaugccacacu

SEQ ID NO: 2035717 - RNA, 19 nt, Homo sapiens
  misc_RNA (1)...(19): siRNA sense strand
gaaggccaagguggaagaa

SEQ ID NO: 2035718 - RNA, 19 nt, Homo sapiens
  misc_RNA (1)...(19): siRNA sense strand
ccaccacuacuaccacuuc

SEQ ID NO: 2035719 - RNA, 19 nt, Homo sapiens
  misc_RNA (1)...(19): siRNA sense strand
gcaagaagaucgcggauga

SEQ ID NO: 2035720 - RNA, 19 nt, Homo sapiens
  misc_RNA (1)...(19): siRNA sense strand
gagaugcgccaccugauua

SEQ ID NO: 2035721 - RNA, 19 nt, Homo sapiens
  misc_RNA (1)...(19): siRNA sense strand
gagaacgaauugagaaguu

SEQ ID NO: 2035722 - RNA, 19 nt, Homo sapiens
  misc_RNA (1)...(19): siRNA sense strand
ccacucagcugcaggagaa

SEQ ID NO: 2035723 - RNA, 19 nt, Homo sapiens
  misc_RNA (1)...(19): siRNA sense strand
gaugcugaaugcagaguua

SEQ ID NO: 2035724 - RNA, 19 nt, Homo sapiens
  misc_RNA (1)...(19): siRNA sense strand
gaugccaacuuuaagcuaa

SEQ ID NO: 2035725 - RNA, 19 nt, Homo sapiens
  misc_RNA (1)...(19): siRNA sense strand
gaucaaggccaaccagauu

SEQ ID NO: 2035726 - RNA, 19 nt, Homo sapiens
  misc_RNA (1)...(19): siRNA sense strand
ugaaacugcugcuggauau

SEQ ID NO: 2035727 - RNA, 19 nt, Homo sapiens
  misc_RNA (1)...(19): siRNA sense strand
gcuuaacucuggcuacuau

SEQ ID NO: 2035728 - RNA, 19 nt, Homo sapiens
  misc_RNA (1)...(19): siRNA sense strand
gaauugagaaguuggagaa

SEQ ID NO: 2035729 - RNA, 19 nt, Homo sapiens
  misc_RNA (1)...(19): siRNA sense strand
ggaggaggcucugcucuca

SEQ ID NO: 2035730 - RNA, 19 nt, Homo sapiens
  misc_RNA (1)...(19): siRNA sense strand
gaagaucgcggaugaggau

SEQ ID NO: 2035731 - RNA, 19 nt, Homo sapiens
  misc_RNA (1)...(19): siRNA sense strand
gaagggagagcaagaagau

SEQ ID NO: 2035732 - RNA, 19 nt, Homo sapiens
  misc_RNA (1)...(19): siRNA sense strand
caacgagucucugcaagug

SEQ ID NO: 2035733 - RNA, 19 nt, Homo sapiens
  misc_RNA (1)...(19): siRNA sense strand
ccuaggaccuccaccugua

SEQ ID NO: 2035734 - RNA, 19 nt, Homo sapiens
  misc_RNA (1)...(19): siRNA sense strand
acuccgagcuccaggauaa

SEQ ID NO: 2035735 - RNA, 19 nt, Homo sapiens
  misc_RNA (1)...(19): siRNA sense strand
gaacuccgagaacgaauug

SEQ ID NO: 2035736 - RNA, 19 nt, Homo sapiens
  misc_RNA (1)...(19): siRNA sense strand
gcaucgaguuugagcagaa

SEQ ID NO: 2035737 - RNA, 19 nt, Homo sapiens
  misc_RNA (1)...(19): siRNA sense strand
uggcagagcuggagaaacu

SEQ ID NO: 2035738 - RNA, 19 nt, Homo sapiens
  misc_RNA (1)...(19): siRNA sense strand
ccaaggugcuggagaugga

SEQ ID NO: 2035739 - RNA, 19 nt, Homo sapiens
  misc_RNA (1)...(19): siRNA sense strand
ccaaggagcagcgggauaa

SEQ ID NO: 2035740 - RNA, 19 nt, Homo sapiens
  misc_RNA (1)...(19): siRNA sense strand
cuacagcaguugcgggaaa

SEQ ID NO: 2035741 - RNA, 19 nt, Homo sapiens
  misc_RNA (1)...(19): siRNA sense strand
agaagaagcuacgcacaga

SEQ ID NO: 2035742 - RNA, 19 nt, Homo sapiens
  misc_RNA (1)...(19): siRNA sense strand
gcaccuggcagaggccuua

SEQ ID NO: 2035743 - RNA, 19 nt, Homo sapiens
  misc_RNA (1)...(19): siRNA sense strand
gaaugcagaguuagaggaa

SEQ ID NO: 2035744 - RNA, 19 nt, Homo sapiens
  misc_RNA (1)...(19): siRNA sense strand
gaaacaccaccgcaucuca

SEQ ID NO: 2035745 - RNA, 19 nt, Homo sapiens
  misc_RNA (1)...(19): siRNA sense strand
cggaggagauggaccugaa

SEQ ID NO: 2035746 - RNA, 19 nt, Homo sapiens
  misc_RNA (1)...(19): siRNA sense strand
gggauaaggugcagcucau

SEQ ID NO: 2035747 - RNA, 19 nt, Homo sapiens
  misc_RNA (1)...(19): siRNA sense strand
agacaacaguggaggacuu

SEQ ID NO: 2035748 - RNA, 19 nt, Homo sapiens
  misc_RNA (1)...(19): siRNA sense strand
gaagaugaacuccgagaac

SEQ ID NO: 2035749 - RNA, 19 nt, Homo sapiens
  misc_RNA (1)...(19): siRNA sense strand
ggagaaggccaagguggaa

SEQ ID NO: 2035750 - RNA, 19 nt, Homo sapiens
  misc_RNA (1)...(19): siRNA sense strand
ggaaucagaacuccucaag

SEQ ID NO: 2035751 - RNA, 19 nt, Homo sapiens
  misc_RNA (1)...(19): siRNA sense strand
gcaggcagaggagcagaua

SEQ ID NO: 2035752 - RNA, 19 nt, Homo sapiens
  misc_RNA (1)...(19): siRNA sense strand
cagcggaacgcaaggcuaa

SEQ ID NO: 2035753 - RNA, 19 nt, Homo sapiens
  misc_RNA (1)...(19): siRNA sense strand
gcaggcuugugaagaugaa

SEQ ID NO: 2035754 - RNA, 19 nt, Homo sapiens
  misc_RNA (1)...(19): siRNA sense strand
gggaggagaaggaugaguu

SEQ ID NO: 2035755 - RNA, 19 nt, Homo sapiens
  misc_RNA (1)...(19): siRNA sense strand
gaucgaagggagagcaaga

SEQ ID NO: 2035756 - RNA, 19 nt, Homo sapiens
  misc_RNA (1)...(19): siRNA sense strand
uaacucuggcuacuaugua

SEQ ID NO: 2035757 - RNA, 19 nt, Homo sapiens
  misc_RNA (1)...(19): siRNA sense strand
gaugaacuccgagaacgaa

SEQ ID NO: 2035758 - RNA, 19 nt, Homo sapiens
  misc_RNA (1)...(19): siRNA sense strand
ggaggagaaggaugaguug

SEQ ID NO: 2035759 - RNA, 19 nt, Homo sapiens
  misc_RNA (1)...(19): siRNA sense strand
cagaggagcagauagaaca

SEQ ID NO: 2035760 - RNA, 19 nt, Homo sapiens
  misc_RNA (1)...(19): siRNA sense strand
gaaaccaagcggaaggaau

SEQ ID NO: 2035761 - RNA, 19 nt, Homo sapiens
  misc_RNA (1)...(19): siRNA sense strand
gaaguacaagcugagauug

SEQ ID NO: 2035762 - RNA, 19 nt, Homo sapiens
  misc_RNA (1)...(19): siRNA sense strand
aaagugacaucggcagaga

SEQ ID NO: 2035763 - RNA, 19 nt, Homo sapiens
  misc_RNA (1)...(19): siRNA sense strand
agaccaaggugcuggagau

SEQ ID NO: 2035764 - RNA, 19 nt, Homo sapiens
  misc_RNA (1)...(19): siRNA sense strand
gggcugugcggaccaauga

SEQ ID NO: 2035765 - RNA, 19 nt, Homo sapiens
  misc_RNA (1)...(19): siRNA sense strand
gaaacugcaggccgaacuu

SEQ ID NO: 2035766 - RNA, 19 nt, Homo sapiens
  misc_RNA (1)...(19): siRNA sense strand
ccacacuccucaucgucaa

SEQ ID NO: 2035767 - RNA, 19 nt, Homo sapiens
  misc_RNA (1)...(19): siRNA sense strand
acuuuaagcuaaugucaga

SEQ ID NO: 2035768 - RNA, 19 nt, Homo sapiens
  misc_RNA (1)...(19): siRNA sense strand
aaaccaagcggaaggaauc

SEQ ID NO: 2035769 - RNA, 19 nt, Homo sapiens
  misc_RNA (1)...(19): siRNA sense strand
agaaguacaagcugagauu

SEQ ID NO: 2035770 - RNA, 19 nt, Homo sapiens
  misc_RNA (1)...(19): siRNA sense strand
gggcccagcuggaugaaac

SEQ ID NO: 2035771 - RNA, 19 nt, Homo sapiens
  misc_RNA (1)...(19): siRNA sense strand
gagaaacaccaccgcaucu

SEQ ID NO: 2035772 - RNA, 19 nt, Homo sapiens
  misc_RNA (1)...(19): siRNA sense strand
ccaaccagauucacaagcu

SEQ ID NO: 2035773 - RNA, 19 nt, Homo sapiens
  misc_RNA (1)...(19): siRNA sense strand
gcaagugaagacccagcua

SEQ ID NO: 2035774 - RNA, 19 nt, Homo sapiens
  misc_RNA (1)...(19): siRNA sense strand
aggaugaugccaacuuuaa

SEQ ID NO: 2035775 - RNA, 19 nt, Homo sapiens
  misc_RNA (1)...(19): siRNA sense strand
gcuccaggauaaagugaca

SEQ ID NO: 2035776 - RNA, 19 nt, Homo sapiens
  misc_RNA (1)...(19): siRNA sense strand
agaacgaauugagaaguug

SEQ ID NO: 2035777 - RNA, 19 nt, Homo sapiens
  misc_RNA (1)...(19): siRNA sense strand
caacuuuaagcuaauguca

SEQ ID NO: 2035778 - RNA, 19 nt, Homo sapiens
  misc_RNA (1)...(19): siRNA sense strand
ggaaggucccagccuagga

SEQ ID NO: 2035779 - RNA, 19 nt, Homo sapiens
  misc_RNA (1)...(19): siRNA sense strand
ugagaugcgccaccugauu

SEQ ID NO: 2035780 - RNA, 19 nt, Homo sapiens
  misc_RNA (1)...(19): siRNA sense strand
ggacaugcaggaacagaac

SEQ ID NO: 2035781 - RNA, 19 nt, Homo sapiens
  misc_RNA (1)...(19): siRNA sense strand
ucucacugcucuacaacga

SEQ ID NO: 2035782 - RNA, 19 nt, Homo sapiens
  misc_RNA (1)...(19): siRNA sense strand
aagaggacuuccaggguau

SEQ ID NO: 2035783 - RNA, 19 nt, Homo sapiens
  misc_RNA (1)...(19): siRNA sense strand
acgagucucugcaagugaa

SEQ ID NO: 2035784 - RNA, 19 nt, Homo sapiens
  misc_RNA (1)...(19): siRNA sense strand
ggaucaaggccaaccagau

SEQ ID NO: 2035785 - RNA, 19 nt, Homo sapiens
  misc_RNA (1)...(19): siRNA sense strand
gcugcaggcccaauucuca

SEQ ID NO: 2035786 - RNA, 19 nt, Homo sapiens
  misc_RNA (1)...(19): siRNA sense strand
cuacaacgagucucugcaa

SEQ ID NO: 2035787 - RNA, 19 nt, Homo sapiens
  misc_RNA (1)...(19): siRNA sense strand
ugacaucggcagagaccaa

SEQ ID NO: 2035788 - RNA, 19 nt, Homo sapiens
  misc_RNA (1)...(19): siRNA sense strand
gcagugggacaucgagaag

SEQ ID NO: 2035789 - RNA, 19 nt, Homo sapiens
  misc_RNA (1)...(19): siRNA sense strand
gaggacuuccaggguauaa

SEQ ID NO: 2035790 - RNA, 19 nt, Homo sapiens
  misc_RNA (1)...(19): siRNA sense strand
ccacuacuaccacuucagu

SEQ ID NO: 2035791 - RNA, 19 nt, Homo sapiens
  misc_RNA (1)...(19): siRNA sense strand
gcaaggaguaugagaugcu

SEQ ID NO: 2035792 - RNA, 19 nt, Homo sapiens
  misc_RNA (1)...(19): siRNA sense strand
gcaugcagaaguuugagau

SEQ ID NO: 2035793 - RNA, 19 nt, Homo sapiens
  misc_RNA (1)...(19): siRNA sense strand
cagcuuaacucuggcuacu

SEQ ID NO: 2035794 - RNA, 19 nt, Homo sapiens
  misc_RNA (1)...(19): siRNA sense strand
aaaccacaaccaccagcua

SEQ ID NO: 2035795 - RNA, 19 nt, Homo sapiens
  misc_RNA (1)...(19): siRNA sense strand
cgaagggagagcaagaaga

SEQ ID NO: 2035796 - RNA, 19 nt, Homo sapiens
  misc_RNA (1)...(19): siRNA sense strand
ggagccgcauccgggaauu

SEQ ID NO: 2035797 - RNA, 19 nt, Homo sapiens
  misc_RNA (1)...(19): siRNA sense strand
uggcagagcggcuggaaca

SEQ ID NO: 2035798 - RNA, 19 nt, Homo sapiens
  misc_RNA (1)...(19): siRNA sense strand
ccaagcggaaggaaucaga

SEQ ID NO: 2035799 - RNA, 19 nt, Homo sapiens
  misc_RNA (1)...(19): siRNA sense strand
cugauuaguagucuucaaa

SEQ ID NO: 2035800 - RNA, 19 nt, Homo sapiens
  misc_RNA (1)...(19): siRNA sense strand
acacucagcaugcagaagu

SEQ ID NO: 2035801 - RNA, 19 nt, Homo sapiens
  misc_RNA (1)...(19): siRNA sense strand
ccacagaugaugccacacu

SEQ ID NO: 2035802 - RNA, 19 nt, Homo sapiens
  misc_RNA (1)...(19): siRNA sense strand
ggaugaugccaacuuuaag

SEQ ID NO: 2035803 - RNA, 19 nt, Homo sapiens
  misc_RNA (1)...(19): siRNA sense strand
aaacugcugcuggauaugu

SEQ ID NO: 2035804 - RNA, 19 nt, Homo sapiens
  misc_RNA (1)...(19): siRNA sense strand
gaaggccaagguggaagaa

SEQ ID NO: 2035805 - RNA, 19 nt, Homo sapiens
  misc_RNA (1)...(19): siRNA sense strand
ccaccacuacuaccacuuc

SEQ ID NO: 2035806 - RNA, 19 nt, Homo sapiens
  misc_RNA (1)...(19): siRNA sense strand
guacgcaaggaguaugaga

SEQ ID NO: 2035807 - RNA, 19 nt, Homo sapiens
  misc_RNA (1)...(19): siRNA sense strand
caacaguggaggacuugca

SEQ ID NO: 2035808 - RNA, 19 nt, Homo sapiens
  misc_RNA (1)...(19): siRNA sense strand
gaagguacuacaguucaag

SEQ ID NO: 2035809 - RNA, 19 nt, Homo sapiens
  misc_RNA (1)...(19): siRNA sense strand
gagaaguacaagcugagau

SEQ ID NO: 2035810 - RNA, 19 nt, Homo sapiens
  misc_RNA (1)...(19): siRNA sense strand
gcaugcugcaggcccaauu

SEQ ID NO: 2035811 - RNA, 19 nt, Homo sapiens
  misc_RNA (1)...(19): siRNA sense strand
ugaagaugaacuccgagaa

SEQ ID NO: 2035812 - RNA, 19 nt, Homo sapiens
  misc_RNA (1)...(19): siRNA sense strand
uugaggacaugcaggaaca

SEQ ID NO: 2035813 - RNA, 19 nt, Homo sapiens
  misc_RNA (1)...(19): siRNA sense strand
gcagaggagcagauagaac

SEQ ID NO: 2035814 - RNA, 19 nt, Homo sapiens
  misc_RNA (1)...(19): siRNA sense strand
cuaaggccgagguugauga

SEQ ID NO: 2035815 - RNA, 19 nt, Homo sapiens
  misc_RNA (1)...(19): siRNA sense strand
caucgaguuugagcagaau

SEQ ID NO: 2035816 - RNA, 19 nt, Homo sapiens
  misc_RNA (1)...(19): siRNA sense strand
gagcugcaaggccgaaugg

SEQ ID NO: 2035817 - RNA, 19 nt, Homo sapiens
  misc_RNA (1)...(19): siRNA sense strand
aauucucacugcucuacaa

SEQ ID NO: 2035818 - RNA, 19 nt, Homo sapiens
  misc_RNA (1)...(19): siRNA sense strand
gacaacaguggaggacuug

SEQ ID NO: 2035819 - RNA, 19 nt, Homo sapiens
  misc_RNA (1)...(19): siRNA sense strand
gaucuuaucugcccuauuu

SEQ ID NO: 2035820 - RNA, 19 nt, Homo sapiens
  misc_RNA (1)...(19): siRNA sense strand
gacgucagcugaacacaaa

SEQ ID NO: 2035821 - RNA, 19 nt, Homo sapiens
  misc_RNA (1)...(19): siRNA sense strand
gagaguggcuguccugcuu

SEQ ID NO: 2035822 - RNA, 19 nt, Homo sapiens
  misc_RNA (1)...(19): siRNA sense strand
gguaugauguaacccguuu

SEQ ID NO: 2035823 - RNA, 19 nt, Homo sapiens
  misc_RNA (1)...(19): siRNA sense strand
gggaugacauggugcaaga

SEQ ID NO: 2035824 - RNA, 19 nt, Homo sapiens
  misc_RNA (1)...(19): siRNA sense strand
ugucaaagcugcagauugc

SEQ ID NO: 2035825 - RNA, 19 nt, Homo sapiens
  misc_RNA (1)...(19): siRNA sense strand
ggagacaauugaauacaac

SEQ ID NO: 2035826 - RNA, 19 nt, Homo sapiens
  misc_RNA (1)...(19): siRNA sense strand
gaugagcugcccaaccaua

SEQ ID NO: 2035827 - RNA, 19 nt, Homo sapiens
  misc_RNA (1)...(19): siRNA sense strand
gcuccaggcuguaaucaag

SEQ ID NO: 2035828 - RNA, 19 nt, Homo sapiens
  misc_RNA (1)...(19): siRNA sense strand
gccaggccuugucaugaua

SEQ ID NO: 2035829 - RNA, 19 nt, Homo sapiens
  misc_RNA (1)...(19): siRNA sense strand
ucgcagagcuggagaagac

SEQ ID NO: 2035830 - RNA, 19 nt, Homo sapiens
  misc_RNA (1)...(19): siRNA sense strand
ggagaagacgucagcugaa

SEQ ID NO: 2035831 - RNA, 19 nt, Homo sapiens
  misc_RNA (1)...(19): siRNA sense strand
gccuggagaugcccaaaga

SEQ ID NO: 2035832 - RNA, 19 nt, Homo sapiens
  misc_RNA (1)...(19): siRNA sense strand
gagaagacgucagcugaac

SEQ ID NO: 2035833 - RNA, 19 nt, Homo sapiens
  misc_RNA (1)...(19): siRNA sense strand
aagaugagcugcccaacca

SEQ ID NO: 2035834 - RNA, 19 nt, Homo sapiens
  misc_RNA (1)...(19): siRNA sense strand
gcaccugcgcucaguggua

SEQ ID NO: 2035835 - RNA, 19 nt, Homo sapiens
  misc_RNA (1)...(19): siRNA sense strand
uggaggagacaauugaaua

SEQ ID NO: 2035836 - RNA, 19 nt, Homo sapiens
  misc_RNA (1)...(19): siRNA sense strand
cgagacauccagcugcuaa

SEQ ID NO: 2035837 - RNA, 19 nt, Homo sapiens
  misc_RNA (1)...(19): siRNA sense strand
gauguugacgaagaucuua

SEQ ID NO: 2035838 - RNA, 19 nt, Homo sapiens
  misc_RNA (1)...(19): siRNA sense strand
gaaccuggaggagacaauu

SEQ ID NO: 2035839 - RNA, 19 nt, Homo sapiens
  misc_RNA (1)...(19): siRNA sense strand
ccaguggaccguaguguug

SEQ ID NO: 2035840 - RNA, 19 nt, Homo sapiens
  misc_RNA (1)...(19): siRNA sense strand
aaccauaacugcauuaagc

SEQ ID NO: 2035841 - RNA, 19 nt, Homo sapiens
  misc_RNA (1)...(19): siRNA sense strand
gcccaaccauaacugcauu

SEQ ID NO: 2035842 - RNA, 19 nt, Homo sapiens
  misc_RNA (1)...(19): siRNA sense strand
gcagauugccugugacaac

SEQ ID NO: 2035843 - RNA, 19 nt, Homo sapiens
  misc_RNA (1)...(19): siRNA sense strand
gcauggcguggaagagaua

SEQ ID NO: 2035844 - RNA, 19 nt, Homo sapiens
  misc_RNA (1)...(19): siRNA sense strand
gagccaggccuugucauga

SEQ ID NO: 2035845 - RNA, 19 nt, Homo sapiens
  misc_RNA (1)...(19): siRNA sense strand
gaaccgacgcuacuaugag

SEQ ID NO: 2035846 - RNA, 19 nt, Homo sapiens
  misc_RNA (1)...(19): siRNA sense strand
gcaccucauugugaacaug

SEQ ID NO: 2035847 - RNA, 19 nt, Homo sapiens
  misc_RNA (1)...(19): siRNA sense strand
gaugaaccgacgcuacuau

SEQ ID NO: 2035848 - RNA, 19 nt, Homo sapiens
  misc_RNA (1)...(19): siRNA sense strand
ggaggagacaauugaauac

SEQ ID NO: 2035849 - RNA, 19 nt, Homo sapiens
  misc_RNA (1)...(19): siRNA sense strand
ggccuugucaugauauuug

SEQ ID NO: 2035850 - RNA, 19 nt, Homo sapiens
  misc_RNA (1)...(19): siRNA sense strand
gcaggcuguugucgugaug

SEQ ID NO: 2035851 - RNA, 19 nt, Homo sapiens
  misc_RNA (1)...(19): siRNA sense strand
aggagacaauugaauacaa

SEQ ID NO: 2035852 - RNA, 19 nt, Homo sapiens
  misc_RNA (1)...(19): siRNA sense strand
aaccgacgcuacuaugaga

SEQ ID NO: 2035853 - RNA, 19 nt, Homo sapiens
  misc_RNA (1)...(19): siRNA sense strand
ugcggaacauguugucaaa

SEQ ID NO: 2035854 - RNA, 19 nt, Homo sapiens
  misc_RNA (1)...(19): siRNA sense strand
gaucucgacuccugaugcu

SEQ ID NO: 2035855 - RNA, 19 nt, Homo sapiens
  misc_RNA (1)...(19): siRNA sense strand
ggagaugcccaaagaugag

SEQ ID NO: 2035856 - RNA, 19 nt, Homo sapiens
  misc_RNA (1)...(19): siRNA sense strand
ggaacauguugucaaagcu

SEQ ID NO: 2035857 - RNA, 19 nt, Homo sapiens
  misc_RNA (1)...(19): siRNA sense strand
gcgcauggcguggaagaga

SEQ ID NO: 2035858 - RNA, 19 nt, Homo sapiens
  misc_RNA (1)...(19): siRNA sense strand
uauuugcaguggagucuug

SEQ ID NO: 2035859 - RNA, 19 nt, Homo sapiens
  misc_RNA (1)...(19): siRNA sense strand
ggucuggccacacuagaga

SEQ ID NO: 2035860 - RNA, 19 nt, Homo sapiens
  misc_RNA (1)...(19): siRNA sense strand
cccaguaccucggaucaug

SEQ ID NO: 2035861 - RNA, 19 nt, Homo sapiens
  misc_RNA (1)...(19): siRNA sense strand
uggcuguccugcuucuauu

SEQ ID NO: 2035862 - RNA, 19 nt, Homo sapiens
  misc_RNA (1)...(19): siRNA sense strand
cggaacauguugucaaagc

SEQ ID NO: 2035863 - RNA, 19 nt, Homo sapiens
  misc_RNA (1)...(19): siRNA sense strand
uggagaugcccaaagauga

SEQ ID NO: 2035864 - RNA, 19 nt, Homo sapiens
  misc_RNA (1)...(19): siRNA sense strand
gugaacaugcuuucugcaa

SEQ ID NO: 2035865 - RNA, 19 nt, Homo sapiens
  misc_RNA (1)...(19): siRNA sense strand
ugaaccgacgcuacuauga

SEQ ID NO: 2035866 - RNA, 19 nt, Homo sapiens
  misc_RNA (1)...(19): siRNA sense strand
gaggagacaauugaauaca

SEQ ID NO: 2035867 - RNA, 19 nt, Homo sapiens
  misc_RNA (1)...(19): siRNA sense strand
ugaauacaacgagauccua

SEQ ID NO: 2035868 - RNA, 19 nt, Homo sapiens
  misc_RNA (1)...(19): siRNA sense strand
ggauguugacgaagaucuu

SEQ ID NO: 2035869 - RNA, 19 nt, Homo sapiens
  misc_RNA (1)...(19): siRNA sense strand
gaagacgucagcugaacac

SEQ ID NO: 2035870 - RNA, 19 nt, Homo sapiens
  misc_RNA (1)...(19): siRNA sense strand
cugcuucuauugucaacga

SEQ ID NO: 2035871 - RNA, 19 nt, Homo sapiens
  misc_RNA (1)...(19): siRNA sense strand
ccaaccauaacugcauuaa

SEQ ID NO: 2035872 - RNA, 19 nt, Homo sapiens
  misc_RNA (1)...(19): siRNA sense strand
uuaagcaccugcgcucagu

SEQ ID NO: 2035873 - RNA, 19 nt, Homo sapiens
  misc_RNA (1)...(19): siRNA sense strand
gagacauccagcugcuaaa

SEQ ID NO: 2035874 - RNA, 19 nt, Homo sapiens
  misc_RNA (1)...(19): siRNA sense strand
gcugugcuccaggcuguaa

SEQ ID NO: 2035875 - RNA, 19 nt, Homo sapiens
  misc_RNA (1)...(19): siRNA sense strand
uggcguggaagagauauaa

SEQ ID NO: 2035876 - RNA, 19 nt, Homo sapiens
  misc_RNA (1)...(19): siRNA sense strand
uccagcugcuaaaggcaua

SEQ ID NO: 2035877 - RNA, 19 nt, Homo sapiens
  misc_RNA (1)...(19): siRNA sense strand
agccaggccuugucaugau

SEQ ID NO: 2035878 - RNA, 19 nt, Homo sapiens
  misc_RNA (1)...(19): siRNA sense strand
gacgucagcugaacacaaa

SEQ ID NO: 2035879 - RNA, 19 nt, Homo sapiens
  misc_RNA (1)...(19): siRNA sense strand
gagaguggcuguccugcuu

SEQ ID NO: 2035880 - RNA, 19 nt, Homo sapiens
  misc_RNA (1)...(19): siRNA sense strand
gggaugacauggugcaaga

SEQ ID NO: 2035881 - RNA, 19 nt, Homo sapiens
  misc_RNA (1)...(19): siRNA sense strand
ugucaaagcugcagauugc

SEQ ID NO: 2035882 - RNA, 19 nt, Homo sapiens
  misc_RNA (1)...(19): siRNA sense strand
ggagacaauugaauacaac

SEQ ID NO: 2035883 - RNA, 19 nt, Homo sapiens
  misc_RNA (1)...(19): siRNA sense strand
gaugagcugcccaaccaua

SEQ ID NO: 2035884 - RNA, 19 nt, Homo sapiens
  misc_RNA (1)...(19): siRNA sense strand
gcuccaggcuguaaucaag

SEQ ID NO: 2035885 - RNA, 19 nt, Homo sapiens
  misc_RNA (1)...(19): siRNA sense strand
gccaggccuugucaugaua

SEQ ID NO: 2035886 - RNA, 19 nt, Homo sapiens
  misc_RNA (1)...(19): siRNA sense strand
ucgcagagcuggagaagac

SEQ ID NO: 2035887 - RNA, 19 nt, Homo sapiens
  misc_RNA (1)...(19): siRNA sense strand
ggagaagacgucagcugaa

SEQ ID NO: 2035888 - RNA, 19 nt, Homo sapiens
  misc_RNA (1)...(19): siRNA sense strand
gccuggagaugcccaaaga

SEQ ID NO: 2035889 - RNA, 19 nt, Homo sapiens
  misc_RNA (1)...(19): siRNA sense strand
gagaagacgucagcugaac

SEQ ID NO: 2035890 - RNA, 19 nt, Homo sapiens
  misc_RNA (1)...(19): siRNA sense strand
aagaugagcugcccaacca

SEQ ID NO: 2035891 - RNA, 19 nt, Homo sapiens
  misc_RNA (1)...(19): siRNA sense strand
gcaccugcgcucaguggua

SEQ ID NO: 2035892 - RNA, 19 nt, Homo sapiens
  misc_RNA (1)...(19): siRNA sense strand
uggaggagacaauugaaua

SEQ ID NO: 2035893 - RNA, 19 nt, Homo sapiens
  misc_RNA (1)...(19): siRNA sense strand
cgagacauccagcugcuaa

SEQ ID NO: 2035894 - RNA, 19 nt, Homo sapiens
  misc_RNA (1)...(19): siRNA sense strand
gaaccuggaggagacaauu

SEQ ID NO: 2035895 - RNA, 19 nt, Homo sapiens
  misc_RNA (1)...(19): siRNA sense strand
gcccaaccauaacugcauu

SEQ ID NO: 2035896 - RNA, 19 nt, Homo sapiens
  misc_RNA (1)...(19): siRNA sense strand
aaccauaacugcauuaagc

SEQ ID NO: 2035897 - RNA, 19 nt, Homo sapiens
  misc_RNA (1)...(19): siRNA sense strand
gcagauugccugugacaac

SEQ ID NO: 2035898 - RNA, 19 nt, Homo sapiens
  misc_RNA (1)...(19): siRNA sense strand
gcauggcguggaagagaua

SEQ ID NO: 2035899 - RNA, 19 nt, Homo sapiens
  misc_RNA (1)...(19): siRNA sense strand
gagccaggccuugucauga

SEQ ID NO: 2035900 - RNA, 19 nt, Homo sapiens
  misc_RNA (1)...(19): siRNA sense strand
gaaccgacgcuacuaugag

SEQ ID NO: 2035901 - RNA, 19 nt, Homo sapiens
  misc_RNA (1)...(19): siRNA sense strand
gaugaaccgacgcuacuau

SEQ ID NO: 2035902 - RNA, 19 nt, Homo sapiens
  misc_RNA (1)...(19): siRNA sense strand
ggaggagacaauugaauac

SEQ ID NO: 2035903 - RNA, 19 nt, Homo sapiens
  misc_RNA (1)...(19): siRNA sense strand
ggccuugucaugauauuug

SEQ ID NO: 2035904 - RNA, 19 nt, Homo sapiens
  misc_RNA (1)...(19): siRNA sense strand
gcaggcuguugucgugaug

SEQ ID NO: 2035905 - RNA, 19 nt, Homo sapiens
  misc_RNA (1)...(19): siRNA sense strand
aggagacaauugaauacaa

SEQ ID NO: 2035906 - RNA, 19 nt, Homo sapiens
  misc_RNA (1)...(19): siRNA sense strand
aaccgacgcuacuaugaga

SEQ ID NO: 2035907 - RNA, 19 nt, Homo sapiens
  misc_RNA (1)...(19): siRNA sense strand
ggagaugcccaaagaugag

SEQ ID NO: 2035908 - RNA, 19 nt, Homo sapiens
  misc_RNA (1)...(19): siRNA sense strand
ggaacauguugucaaagcu

SEQ ID NO: 2035909 - RNA, 19 nt, Homo sapiens
  misc_RNA (1)...(19): siRNA sense strand
gaucucgacuccugaugcu

SEQ ID NO: 2035910 - RNA, 19 nt, Homo sapiens
  misc_RNA (1)...(19): siRNA sense strand
gcgcauggcguggaagaga

SEQ ID NO: 2035911 - RNA, 19 nt, Homo sapiens
  misc_RNA (1)...(19): siRNA sense strand
ggucuggccacacuagaga

SEQ ID NO: 2035912 - RNA, 19 nt, Homo sapiens
  misc_RNA (1)...(19): siRNA sense strand
cggaacauguugucaaagc

SEQ ID NO: 2035913 - RNA, 19 nt, Homo sapiens
  misc_RNA (1)...(19): siRNA sense strand
uggcuguccugcuucuauu

SEQ ID NO: 2035914 - RNA, 19 nt, Homo sapiens
  misc_RNA (1)...(19): siRNA sense strand
uggagaugcccaaagauga

SEQ ID NO: 2035915 - RNA, 19 nt, Homo sapiens
  misc_RNA (1)...(19): siRNA sense strand
ugaaccgacgcuacuauga

SEQ ID NO: 2035916 - RNA, 19 nt, Homo sapiens
  misc_RNA (1)...(19): siRNA sense strand
gaggagacaauugaauaca

SEQ ID NO: 2035917 - RNA, 19 nt, Homo sapiens
  misc_RNA (1)...(19): siRNA sense strand
ugaauacaacgagauccua

SEQ ID NO: 2035918 - RNA, 19 nt, Homo sapiens
  misc_RNA (1)...(19): siRNA sense strand
gaagacgucagcugaacac

SEQ ID NO: 2035919 - RNA, 19 nt, Homo sapiens
  misc_RNA (1)...(19): siRNA sense strand
cugcuucuauugucaacga

SEQ ID NO: 2035920 - RNA, 19 nt, Homo sapiens
  misc_RNA (1)...(19): siRNA sense strand
ccaaccauaacugcauuaa

SEQ ID NO: 2035921 - RNA, 19 nt, Homo sapiens
  misc_RNA (1)...(19): siRNA sense strand
uuaagcaccugcgcucagu

SEQ ID NO: 2035922 - RNA, 19 nt, Homo sapiens
  misc_RNA (1)...(19): siRNA sense strand
gagacauccagcugcuaaa

SEQ ID NO: 2035923 - RNA, 19 nt, Homo sapiens
  misc_RNA (1)...(19): siRNA sense strand
gcugugcuccaggcuguaa

SEQ ID NO: 2035924 - RNA, 19 nt, Homo sapiens
  misc_RNA (1)...(19): siRNA sense strand
uggcguggaagagauauaa

SEQ ID NO: 2035925 - RNA, 19 nt, Homo sapiens
  misc_RNA (1)...(19): siRNA sense strand
uccagcugcuaaaggcaua

SEQ ID NO: 2035926 - RNA, 19 nt, Homo sapiens
  misc_RNA (1)...(19): siRNA sense strand
agccaggccuugucaugau

SEQ ID NO: 2035927 - RNA, 19 nt, Homo sapiens
  misc_RNA (1)...(19): siRNA sense strand
gaucuuaucugcccuauuu

SEQ ID NO: 2035928 - RNA, 19 nt, Homo sapiens
  misc_RNA (1)...(19): siRNA sense strand
gacgucagcugaacacaaa

SEQ ID NO: 2035929 - RNA, 19 nt, Homo sapiens
  misc_RNA (1)...(19): siRNA sense strand
gagaguggcuguccugcuu

SEQ ID NO: 2035930 - RNA, 19 nt, Homo sapiens
  misc_RNA (1)...(19): siRNA sense strand
gguaugauguaacccguuu

SEQ ID NO: 2035931 - RNA, 19 nt, Homo sapiens
  misc_RNA (1)...(19): siRNA sense strand
gggaugacauggugcaaga

SEQ ID NO: 2035932 - RNA, 19 nt, Homo sapiens
  misc_RNA (1)...(19): siRNA sense strand
ugucaaagcugcagauugc

SEQ ID NO: 2035933 - RNA, 19 nt, Homo sapiens
  misc_RNA (1)...(19): siRNA sense strand
ggagacaauugaauacaac

SEQ ID NO: 2035934 - RNA, 19 nt, Homo sapiens
  misc_RNA (1)...(19): siRNA sense strand
gaugagcugcccaaccaua

SEQ ID NO: 2035935 - RNA, 19 nt, Homo sapiens
  misc_RNA (1)...(19): siRNA sense strand
gcuccaggcuguaaucaag

SEQ ID NO: 2035936 - RNA, 19 nt, Homo sapiens
  misc_RNA (1)...(19): siRNA sense strand
gccaggccuugucaugaua

SEQ ID NO: 2035937 - RNA, 19 nt, Homo sapiens
  misc_RNA (1)...(19): siRNA sense strand
ucgcagagcuggagaagac

SEQ ID NO: 2035938 - RNA, 19 nt, Homo sapiens
  misc_RNA (1)...(19): siRNA sense strand
ggagaagacgucagcugaa

SEQ ID NO: 2035939 - RNA, 19 nt, Homo sapiens
  misc_RNA (1)...(19): siRNA sense strand
gccuggagaugcccaaaga

SEQ ID NO: 2035940 - RNA, 19 nt, Homo sapiens
  misc_RNA (1)...(19): siRNA sense strand
gagaagacgucagcugaac

SEQ ID NO: 2035941 - RNA, 19 nt, Homo sapiens
  misc_RNA (1)...(19): siRNA sense strand
aagaugagcugcccaacca

SEQ ID NO: 2035942 - RNA, 19 nt, Homo sapiens
  misc_RNA (1)...(19): siRNA sense strand
gcaccugcgcucaguggua

SEQ ID NO: 2035943 - RNA, 19 nt, Homo sapiens
  misc_RNA (1)...(19): siRNA sense strand
uggaggagacaauugaaua

SEQ ID NO: 2035944 - RNA, 19 nt, Homo sapiens
  misc_RNA (1)...(19): siRNA sense strand
cgagacauccagcugcuaa

SEQ ID NO: 2035945 - RNA, 19 nt, Homo sapiens
  misc_RNA (1)...(19): siRNA sense strand
gauguugacgaagaucuua

SEQ ID NO: 2035946 - RNA, 19 nt, Homo sapiens
  misc_RNA (1)...(19): siRNA sense strand
gaaccuggaggagacaauu

SEQ ID NO: 2035947 - RNA, 19 nt, Homo sapiens
  misc_RNA (1)...(19): siRNA sense strand
ccaguggaccguaguguug

SEQ ID NO: 2035948 - RNA, 19 nt, Homo sapiens
  misc_RNA (1)...(19): siRNA sense strand
aaccauaacugcauuaagc

SEQ ID NO: 2035949 - RNA, 19 nt, Homo sapiens
  misc_RNA (1)...(19): siRNA sense strand
gcccaaccauaacugcauu

SEQ ID NO: 2035950 - RNA, 19 nt, Homo sapiens
  misc_RNA (1)...(19): siRNA sense strand
gcagauugccugugacaac

SEQ ID NO: 2035951 - RNA, 19 nt, Homo sapiens
  misc_RNA (1)...(19): siRNA sense strand
gcauggcguggaagagaua

SEQ ID NO: 2035952 - RNA, 19 nt, Homo sapiens
  misc_RNA (1)...(19): siRNA sense strand
gagccaggccuugucauga

SEQ ID NO: 2035953 - RNA, 19 nt, Homo sapiens
  misc_RNA (1)...(19): siRNA sense strand
gaaccgacgcuacuaugag

SEQ ID NO: 2035954 - RNA, 19 nt, Homo sapiens
  misc_RNA (1)...(19): siRNA sense strand
gcaccucauugugaacaug

SEQ ID NO: 2035955 - RNA, 19 nt, Homo sapiens
  misc_RNA (1)...(19): siRNA sense strand
gaugaaccgacgcuacuau

SEQ ID NO: 2035956 - RNA, 19 nt, Homo sapiens
  misc_RNA (1)...(19): siRNA sense strand
ggaggagacaauugaauac

SEQ ID NO: 2035957 - RNA, 19 nt, Homo sapiens
  misc_RNA (1)...(19): siRNA sense strand
ggccuugucaugauauuug

SEQ ID NO: 2035958 - RNA, 19 nt, Homo sapiens
  misc_RNA (1)...(19): siRNA sense strand
gcaggcuguugucgugaug

SEQ ID NO: 2035959 - RNA, 19 nt, Homo sapiens
  misc_RNA (1)...(19): siRNA sense strand
aggagacaauugaauacaa

SEQ ID NO: 2035960 - RNA, 19 nt, Homo sapiens
  misc_RNA (1)...(19): siRNA sense strand
aaccgacgcuacuaugaga

SEQ ID NO: 2035961 - RNA, 19 nt, Homo sapiens
  misc_RNA (1)...(19): siRNA sense strand
ugcggaacauguugucaaa

SEQ ID NO: 2035962 - RNA, 19 nt, Homo sapiens
  misc_RNA (1)...(19): siRNA sense strand
gaucucgacuccugaugcu

SEQ ID NO: 2035963 - RNA, 19 nt, Homo sapiens
  misc_RNA (1)...(19): siRNA sense strand
ggagaugcccaaagaugag

SEQ ID NO: 2035964 - RNA, 19 nt, Homo sapiens
  misc_RNA (1)...(19): siRNA sense strand
ggaacauguugucaaagcu

SEQ ID NO: 2035965 - RNA, 19 nt, Homo sapiens
  misc_RNA (1)...(19): siRNA sense strand
gcgcauggcguggaagaga

SEQ ID NO: 2035966 - RNA, 19 nt, Homo sapiens
  misc_RNA (1)...(19): siRNA sense strand
uauuugcaguggagucuug

SEQ ID NO: 2035967 - RNA, 19 nt, Homo sapiens
  misc_RNA (1)...(19): siRNA sense strand
ggucuggccacacuagaga

SEQ ID NO: 2035968 - RNA, 19 nt, Homo sapiens
  misc_RNA (1)...(19): siRNA sense strand
cccaguaccucggaucaug

SEQ ID NO: 2035969 - RNA, 19 nt, Homo sapiens
  misc_RNA (1)...(19): siRNA sense strand
uggcuguccugcuucuauu

SEQ ID NO: 2035970 - RNA, 19 nt, Homo sapiens
  misc_RNA (1)...(19): siRNA sense strand
cggaacauguugucaaagc

SEQ ID NO: 2035971 - RNA, 19 nt, Homo sapiens
  misc_RNA (1)...(19): siRNA sense strand
uggagaugcccaaagauga

SEQ ID NO: 2035972 - RNA, 19 nt, Homo sapiens
  misc_RNA (1)...(19): siRNA sense strand
gugaacaugcuuucugcaa

SEQ ID NO: 2035973 - RNA, 19 nt, Homo sapiens
  misc_RNA (1)...(19): siRNA sense strand
ugaaccgacgcuacuauga

SEQ ID NO: 2035974 - RNA, 19 nt, Homo sapiens
  misc_RNA (1)...(19): siRNA sense strand
gaggagacaauugaauaca

SEQ ID NO: 2035975 - RNA, 19 nt, Homo sapiens
  misc_RNA (1)...(19): siRNA sense strand
ugaauacaacgagauccua

SEQ ID NO: 2035976 - RNA, 19 nt, Homo sapiens
  misc_RNA (1)...(19): siRNA sense strand
ggauguugacgaagaucuu

SEQ ID NO: 2035977 - RNA, 19 nt, Homo sapiens
  misc_RNA (1)...(19): siRNA sense strand
gaagacgucagcugaacac

SEQ ID NO: 2035978 - RNA, 19 nt, Homo sapiens
  misc_RNA (1)...(19): siRNA sense strand
cugcuucuauugucaacga

SEQ ID NO: 2035979 - RNA, 19 nt, Homo sapiens
  misc_RNA (1)...(19): siRNA sense strand
ccaaccauaacugcauuaa

SEQ ID NO: 2035980 - RNA, 19 nt, Homo sapiens
  misc_RNA (1)...(19): siRNA sense strand
uuaagcaccugcgcucagu

SEQ ID NO: 2035981 - RNA, 19 nt, Homo sapiens
  misc_RNA (1)...(19): siRNA sense strand
gagacauccagcugcuaaa

SEQ ID NO: 2035982 - RNA, 19 nt, Homo sapiens
  misc_RNA (1)...(19): siRNA sense strand
gcugugcuccaggcuguaa

SEQ ID NO: 2035983 - RNA, 19 nt, Homo sapiens
  misc_RNA (1)...(19): siRNA sense strand
uggcguggaagagauauaa

SEQ ID NO: 2035984 - RNA, 19 nt, Homo sapiens
  misc_RNA (1)...(19): siRNA sense strand
uccagcugcuaaaggcaua

SEQ ID NO: 2035985 - RNA, 19 nt, Homo sapiens
  misc_RNA (1)...(19): siRNA sense strand
agccaggccuugucaugau

SEQ ID NO: 2035986 - RNA, 19 nt, Homo sapiens
  misc_RNA (1)...(19): siRNA sense strand
gaucuuaucugcccuauuu

SEQ ID NO: 2035987 - RNA, 19 nt, Homo sapiens
  misc_RNA (1)...(19): siRNA sense strand
gacgucagcugaacacaaa

SEQ ID NO: 2035988 - RNA, 19 nt, Homo sapiens
  misc_RNA (1)...(19): siRNA sense strand
gagaguggcuguccugcuu

SEQ ID NO: 2035989 - RNA, 19 nt, Homo sapiens
  misc_RNA (1)...(19): siRNA sense strand
gguaugauguaacccguuu

SEQ ID NO: 2035990 - RNA, 19 nt, Homo sapiens
  misc_RNA (1)...(19): siRNA sense strand
gggaugacauggugcaaga

SEQ ID NO: 2035991 - RNA, 19 nt, Homo sapiens
  misc_RNA (1)...(19): siRNA sense strand
ugucaaagcugcagauugc

SEQ ID NO: 2035992 - RNA, 19 nt, Homo sapiens
  misc_RNA (1)...(19): siRNA sense strand
ggagacaauugaauacaac

SEQ ID NO: 2035993 - RNA, 19 nt, Homo sapiens
  misc_RNA (1)...(19): siRNA sense strand
gaugagcugcccaaccaua

SEQ ID NO: 2035994 - RNA, 19 nt, Homo sapiens
  misc_RNA (1)...(19): siRNA sense strand
gcuccaggcuguaaucaag

SEQ ID NO: 2035995 - RNA, 19 nt, Homo sapiens
  misc_RNA (1)...(19): siRNA sense strand
gccaggccuugucaugaua

SEQ ID NO: 2035996 - RNA, 19 nt, Homo sapiens
  misc_RNA (1)...(19): siRNA sense strand
ucgcagagcuggagaagac

SEQ ID NO: 2035997 - RNA, 19 nt, Homo sapiens
  misc_RNA (1)...(19): siRNA sense strand
ggagaagacgucagcugaa

SEQ ID NO: 2035998 - RNA, 19 nt, Homo sapiens
  misc_RNA (1)...(19): siRNA sense strand
gccuggagaugcccaaaga

SEQ ID NO: 2035999 - RNA, 19 nt, Homo sapiens
  misc_RNA (1)...(19): siRNA sense strand
gagaagacgucagcugaac

SEQ ID NO: 2036000 - RNA, 19 nt, Homo sapiens
  misc_RNA (1)...(19): siRNA sense strand
aagaugagcugcccaacca

SEQ ID NO: 2036001 - RNA, 19 nt, Homo sapiens
  misc_RNA (1)...(19): siRNA sense strand
gcaccugcgcucaguggua

SEQ ID NO: 2036002 - RNA, 19 nt, Homo sapiens
  misc_RNA (1)...(19): siRNA sense strand
uggaggagacaauugaaua

SEQ ID NO: 2036003 - RNA, 19 nt, Homo sapiens
  misc_RNA (1)...(19): siRNA sense strand
cgagacauccagcugcuaa

SEQ ID NO: 2036004 - RNA, 19 nt, Homo sapiens
  misc_RNA (1)...(19): siRNA sense strand
gauguugacgaagaucuua

SEQ ID NO: 2036005 - RNA, 19 nt, Homo sapiens
  misc_RNA (1)...(19): siRNA sense strand
gaaccuggaggagacaauu

SEQ ID NO: 2036006 - RNA, 19 nt, Homo sapiens
  misc_RNA (1)...(19): siRNA sense strand
ccaguggaccguaguguug

SEQ ID NO: 2036007 - RNA, 19 nt, Homo sapiens
  misc_RNA (1)...(19): siRNA sense strand
aaccauaacugcauuaagc

SEQ ID NO: 2036008 - RNA, 19 nt, Homo sapiens
  misc_RNA (1)...(19): siRNA sense strand
gcccaaccauaacugcauu

SEQ ID NO: 2036009 - RNA, 19 nt, Homo sapiens
  misc_RNA (1)...(19): siRNA sense strand
gcagauugccugugacaac

SEQ ID NO: 2036010 - RNA, 19 nt, Homo sapiens
  misc_RNA (1)...(19): siRNA sense strand
gcauggcguggaagagaua

SEQ ID NO: 2036011 - RNA, 19 nt, Homo sapiens
  misc_RNA (1)...(19): siRNA sense strand
gagccaggccuugucauga

SEQ ID NO: 2036012 - RNA, 19 nt, Homo sapiens
  misc_RNA (1)...(19): siRNA sense strand
gaaccgacgcuacuaugag

SEQ ID NO: 2036013 - RNA, 19 nt, Homo sapiens
  misc_RNA (1)...(19): siRNA sense strand
gcaccucauugugaacaug

SEQ ID NO: 2036014 - RNA, 19 nt, Homo sapiens
  misc_RNA (1)...(19): siRNA sense strand
gaugaaccgacgcuacuau

SEQ ID NO: 2036015 - RNA, 19 nt, Homo sapiens
  misc_RNA (1)...(19): siRNA sense strand
ggaggagacaauugaauac

SEQ ID NO: 2036016 - RNA, 19 nt, Homo sapiens
  misc_RNA (1)...(19): siRNA sense strand
ggccuugucaugauauuug

SEQ ID NO: 2036017 - RNA, 19 nt, Homo sapiens
  misc_RNA (1)...(19): siRNA sense strand
gcaggcuguugucgugaug

SEQ ID NO: 2036018 - RNA, 19 nt, Homo sapiens
  misc_RNA (1)...(19): siRNA sense strand
aggagacaauugaauacaa

SEQ ID NO: 2036019 - RNA, 19 nt, Homo sapiens
  misc_RNA (1)...(19): siRNA sense strand
aaccgacgcuacuaugaga

SEQ ID NO: 2036020 - RNA, 19 nt, Homo sapiens
  misc_RNA (1)...(19): siRNA sense strand
ugcggaacauguugucaaa

SEQ ID NO: 2036021 - RNA, 19 nt, Homo sapiens
  misc_RNA (1)...(19): siRNA sense strand
gaucucgacuccugaugcu

SEQ ID NO: 2036022 - RNA, 19 nt, Homo sapiens
  misc_RNA (1)...(19): siRNA sense strand
ggagaugcccaaagaugag

SEQ ID NO: 2036023 - RNA, 19 nt, Homo sapiens
  misc_RNA (1)...(19): siRNA sense strand
ggaacauguugucaaagcu

SEQ ID NO: 2036024 - RNA, 19 nt, Homo sapiens
  misc_RNA (1)...(19): siRNA sense strand
gcgcauggcguggaagaga

SEQ ID NO: 2036025 - RNA, 19 nt, Homo sapiens
  misc_RNA (1)...(19): siRNA sense strand
uauuugcaguggagucuug

SEQ ID NO: 2036026 - RNA, 19 nt, Homo sapiens
  misc_RNA (1)...(19): siRNA sense strand
ggucuggccacacuagaga

SEQ ID NO: 2036027 - RNA, 19 nt, Homo sapiens
  misc_RNA (1)...(19): siRNA sense strand
cccaguaccucggaucaug

SEQ ID NO: 2036028 - RNA, 19 nt, Homo sapiens
  misc_RNA (1)...(19): siRNA sense strand
uggcuguccugcuucuauu

SEQ ID NO: 2036029 - RNA, 19 nt, Homo sapiens
  misc_RNA (1)...(19): siRNA sense strand
cggaacauguugucaaagc

SEQ ID NO: 2036030 - RNA, 19 nt, Homo sapiens
  misc_RNA (1)...(19): siRNA sense strand
uggagaugcccaaagauga

SEQ ID NO: 2036031 - RNA, 19 nt, Homo sapiens
  misc_RNA (1)...(19): siRNA sense strand
gugaacaugcuuucugcaa

SEQ ID NO: 2036032 - RNA, 19 nt, Homo sapiens
  misc_RNA (1)...(19): siRNA sense strand
ugaaccgacgcuacuauga

SEQ ID NO: 2036033 - RNA, 19 nt, Homo sapiens
  misc_RNA (1)...(19): siRNA sense strand
gaggagacaauugaauaca

SEQ ID NO: 2036034 - RNA, 19 nt, Homo sapiens
  misc_RNA (1)...(19): siRNA sense strand
ugaauacaacgagauccua

SEQ ID NO: 2036035 - RNA, 19 nt, Homo sapiens
  misc_RNA (1)...(19): siRNA sense strand
ggauguugacgaagaucuu

SEQ ID NO: 2036036 - RNA, 19 nt, Homo sapiens
  misc_RNA (1)...(19): siRNA sense strand
gaagacgucagcugaacac

SEQ ID NO: 2036037 - RNA, 19 nt, Homo sapiens
  misc_RNA (1)...(19): siRNA sense strand
cugcuucuauugucaacga

SEQ ID NO: 2036038 - RNA, 19 nt, Homo sapiens
  misc_RNA (1)...(19): siRNA sense strand
ccaaccauaacugcauuaa

SEQ ID NO: 2036039 - RNA, 19 nt, Homo sapiens
  misc_RNA (1)...(19): siRNA sense strand
uuaagcaccugcgcucagu

SEQ ID NO: 2036040 - RNA, 19 nt, Homo sapiens
  misc_RNA (1)...(19): siRNA sense strand
gagacauccagcugcuaaa

SEQ ID NO: 2036041 - RNA, 19 nt, Homo sapiens
  misc_RNA (1)...(19): siRNA sense strand
gcugugcuccaggcuguaa

SEQ ID NO: 2036042 - RNA, 19 nt, Homo sapiens
  misc_RNA (1)...(19): siRNA sense strand
uggcguggaagagauauaa

SEQ ID NO: 2036043 - RNA, 19 nt, Homo sapiens
  misc_RNA (1)...(19): siRNA sense strand
uccagcugcuaaaggcaua

SEQ ID NO: 2036044 - RNA, 19 nt, Homo sapiens
  misc_RNA (1)...(19): siRNA sense strand
agccaggccuugucaugau

SEQ ID NO: 2036045 - RNA, 19 nt, Homo sapiens
  misc_RNA (1)...(19): siRNA sense strand
gacgucagcugaacacaaa

SEQ ID NO: 2036046 - RNA, 19 nt, Homo sapiens
  misc_RNA (1)...(19): siRNA sense strand
gagaguggcuguccugcuu

SEQ ID NO: 2036047 - RNA, 19 nt, Homo sapiens
  misc_RNA (1)...(19): siRNA sense strand
gggaugacauggugcaaga

SEQ ID NO: 2036048 - RNA, 19 nt, Homo sapiens
  misc_RNA (1)...(19): siRNA sense strand
ugucaaagcugcagauugc

SEQ ID NO: 2036049 - RNA, 19 nt, Homo sapiens
  misc_RNA (1)...(19): siRNA sense strand
ggagacaauugaauacaac

SEQ ID NO: 2036050 - RNA, 19 nt, Homo sapiens
  misc_RNA (1)...(19): siRNA sense strand
gaugagcugcccaaccaua

SEQ ID NO: 2036051 - RNA, 19 nt, Homo sapiens
  misc_RNA (1)...(19): siRNA sense strand
gcuccaggcuguaaucaag

SEQ ID NO: 2036052 - RNA, 19 nt, Homo sapiens
  misc_RNA (1)...(19): siRNA sense strand
gccaggccuugucaugaua

SEQ ID NO: 2036053 - RNA, 19 nt, Homo sapiens
  misc_RNA (1)...(19): siRNA sense strand
ucgcagagcuggagaagac

SEQ ID NO: 2036054 - RNA, 19 nt, Homo sapiens
  misc_RNA (1)...(19): siRNA sense strand
ggagaagacgucagcugaa

SEQ ID NO: 2036055 - RNA, 19 nt, Homo sapiens
  misc_RNA (1)...(19): siRNA sense strand
gccuggagaugcccaaaga

SEQ ID NO: 2036056 - RNA, 19 nt, Homo sapiens
  misc_RNA (1)...(19): siRNA sense strand
gagaagacgucagcugaac

SEQ ID NO: 2036057 - RNA, 19 nt, Homo sapiens
  misc_RNA (1)...(19): siRNA sense strand
aagaugagcugcccaacca

SEQ ID NO: 2036058 - RNA, 19 nt, Homo sapiens
  misc_RNA (1)...(19): siRNA sense strand
gcaccugcgcucaguggua

SEQ ID NO: 2036059 - RNA, 19 nt, Homo sapiens
  misc_RNA (1)...(19): siRNA sense strand
uggaggagacaauugaaua

SEQ ID NO: 2036060 - RNA, 19 nt, Homo sapiens
  misc_RNA (1)...(19): siRNA sense strand
cgagacauccagcugcuaa

SEQ ID NO: 2036061 - RNA, 19 nt, Homo sapiens
  misc_RNA (1)...(19): siRNA sense strand
gaaccuggaggagacaauu

SEQ ID NO: 2036062 - RNA, 19 nt, Homo sapiens
  misc_RNA (1)...(19): siRNA sense strand
gcccaaccauaacugcauu

SEQ ID NO: 2036063 - RNA, 19 nt, Homo sapiens
  misc_RNA (1)...(19): siRNA sense strand
aaccauaacugcauuaagc

SEQ ID NO: 2036064 - RNA, 19 nt, Homo sapiens
  misc_RNA (1)...(19): siRNA sense strand
gcagauugccugugacaac

SEQ ID NO: 2036065 - RNA, 19 nt, Homo sapiens
  misc_RNA (1)...(19): siRNA sense strand
gcauggcguggaagagaua

SEQ ID NO: 2036066 - RNA, 19 nt, Homo sapiens
  misc_RNA (1)...(19): siRNA sense strand
gagccaggccuugucauga

SEQ ID NO: 2036067 - RNA, 19 nt, Homo sapiens
  misc_RNA (1)...(19): siRNA sense strand
gaaccgacgcuacuaugag

SEQ ID NO: 2036068 - RNA, 19 nt, Homo sapiens
  misc_RNA (1)...(19): siRNA sense strand
gaugaaccgacgcuacuau

SEQ ID NO: 2036069 - RNA, 19 nt, Homo sapiens
  misc_RNA (1)...(19): siRNA sense strand
ggaggagacaauugaauac

SEQ ID NO: 2036070 - RNA, 19 nt, Homo sapiens
  misc_RNA (1)...(19): siRNA sense strand
ggccuugucaugauauuug

SEQ ID NO: 2036071 - RNA, 19 nt, Homo sapiens
  misc_RNA (1)...(19): siRNA sense strand
gcaggcuguugucgugaug

SEQ ID NO: 2036072 - RNA, 19 nt, Homo sapiens
  misc_RNA (1)...(19): siRNA sense strand
aggagacaauugaauacaa

SEQ ID NO: 2036073 - RNA, 19 nt, Homo sapiens
  misc_RNA (1)...(19): siRNA sense strand
aaccgacgcuacuaugaga

SEQ ID NO: 2036074 - RNA, 19 nt, Homo sapiens
  misc_RNA (1)...(19): siRNA sense strand
ggagaugcccaaagaugag

SEQ ID NO: 2036075 - RNA, 19 nt, Homo sapiens
  misc_RNA (1)...(19): siRNA sense strand
ggaacauguugucaaagcu

SEQ ID NO: 2036076 - RNA, 19 nt, Homo sapiens
  misc_RNA (1)...(19): siRNA sense strand
gaucucgacuccugaugcu

SEQ ID NO: 2036077 - RNA, 19 nt, Homo sapiens
  misc_RNA (1)...(19): siRNA sense strand
gcgcauggcguggaagaga

SEQ ID NO: 2036078 - RNA, 19 nt, Homo sapiens
  misc_RNA (1)...(19): siRNA sense strand
ggucuggccacacuagaga

SEQ ID NO: 2036079 - RNA, 19 nt, Homo sapiens
  misc_RNA (1)...(19): siRNA sense strand
cggaacauguugucaaagc

SEQ ID NO: 2036080 - RNA, 19 nt, Homo sapiens
  misc_RNA (1)...(19): siRNA sense strand
uggcuguccugcuucuauu

SEQ ID NO: 2036081 - RNA, 19 nt, Homo sapiens
  misc_RNA (1)...(19): siRNA sense strand
uggagaugcccaaagauga

SEQ ID NO: 2036082 - RNA, 19 nt, Homo sapiens
  misc_RNA (1)...(19): siRNA sense strand
ugaaccgacgcuacuauga

SEQ ID NO: 2036083 - RNA, 19 nt, Homo sapiens
  misc_RNA (1)...(19): siRNA sense strand
gaggagacaauugaauaca

SEQ ID NO: 2036084 - RNA, 19 nt, Homo sapiens
  misc_RNA (1)...(19): siRNA sense strand
ugaauacaacgagauccua

SEQ ID NO: 2036085 - RNA, 19 nt, Homo sapiens
  misc_RNA (1)...(19): siRNA sense strand
gaagacgucagcugaacac

SEQ ID NO: 2036086 - RNA, 19 nt, Homo sapiens
  misc_RNA (1)...(19): siRNA sense strand
cugcuucuauugucaacga

SEQ ID NO: 2036087 - RNA, 19 nt, Homo sapiens
  misc_RNA (1)...(19): siRNA sense strand
ccaaccauaacugcauuaa

SEQ ID NO: 2036088 - RNA, 19 nt, Homo sapiens
  misc_RNA (1)...(19): siRNA sense strand
uuaagcaccugcgcucagu

SEQ ID NO: 2036089 - RNA, 19 nt, Homo sapiens
  misc_RNA (1)...(19): siRNA sense strand
gagacauccagcugcuaaa

SEQ ID NO: 2036090 - RNA, 19 nt, Homo sapiens
  misc_RNA (1)...(19): siRNA sense strand
gcugugcuccaggcuguaa

SEQ ID NO: 2036091 - RNA, 19 nt, Homo sapiens
  misc_RNA (1)...(19): siRNA sense strand
uggcguggaagagauauaa

SEQ ID NO: 2036092 - RNA, 19 nt, Homo sapiens
  misc_RNA (1)...(19): siRNA sense strand
uccagcugcuaaaggcaua

SEQ ID NO: 2036093 - RNA, 19 nt, Homo sapiens
  misc_RNA (1)...(19): siRNA sense strand
agccaggccuugucaugau

SEQ ID NO: 2036094 - RNA, 19 nt, Homo sapiens
  misc_RNA (1)...(19): siRNA sense strand
gaucuuaucugcccuauuu

SEQ ID NO: 2036095 - RNA, 19 nt, Homo sapiens
  misc_RNA (1)...(19): siRNA sense strand
gacgucagcugaacacaaa

SEQ ID NO: 2036096 - RNA, 19 nt, Homo sapiens
  misc_RNA (1)...(19): siRNA sense strand
gagaguggcuguccugcuu

SEQ ID NO: 2036097 - RNA, 19 nt, Homo sapiens
  misc_RNA (1)...(19): siRNA sense strand
gguaugauguaacccguuu

SEQ ID NO: 2036098 - RNA, 19 nt, Homo sapiens
  misc_RNA (1)...(19): siRNA sense strand
gggaugacauggugcaaga

SEQ ID NO: 2036099 - RNA, 19 nt, Homo sapiens
  misc_RNA (1)...(19): siRNA sense strand
ugucaaagcugcagauugc

SEQ ID NO: 2036100 - RNA, 19 nt, Homo sapiens
  misc_RNA (1)...(19): siRNA sense strand
ggagacaauugaauacaac

SEQ ID NO: 2036101 - RNA, 19 nt, Homo sapiens
  misc_RNA (1)...(19): siRNA sense strand
gaugagcugcccaaccaua

SEQ ID NO: 2036102 - RNA, 19 nt, Homo sapiens
  misc_RNA (1)...(19): siRNA sense strand
gcuccaggcuguaaucaag

SEQ ID NO: 2036103 - RNA, 19 nt, Homo sapiens
  misc_RNA (1)...(19): siRNA sense strand
gccaggccuugucaugaua

SEQ ID NO: 2036104 - RNA, 19 nt, Homo sapiens
  misc_RNA (1)...(19): siRNA sense strand
ucgcagagcuggagaagac

SEQ ID NO: 2036105 - RNA, 19 nt, Homo sapiens
  misc_RNA (1)...(19): siRNA sense strand
ggagaagacgucagcugaa

SEQ ID NO: 2036106 - RNA, 19 nt, Homo sapiens
  misc_RNA (1)...(19): siRNA sense strand
gccuggagaugcccaaaga

SEQ ID NO: 2036107 - RNA, 19 nt, Homo sapiens
  misc_RNA (1)...(19): siRNA sense strand
gagaagacgucagcugaac

SEQ ID NO: 2036108 - RNA, 19 nt, Homo sapiens
  misc_RNA (1)...(19): siRNA sense strand
aagaugagcugcccaacca

SEQ ID NO: 2036109 - RNA, 19 nt, Homo sapiens
  misc_RNA (1)...(19): siRNA sense strand
gcaccugcgcucaguggua

SEQ ID NO: 2036110 - RNA, 19 nt, Homo sapiens
  misc_RNA (1)...(19): siRNA sense strand
uggaggagacaauugaaua

SEQ ID NO: 2036111 - RNA, 19 nt, Homo sapiens
  misc_RNA (1)...(19): siRNA sense strand
cgagacauccagcugcuaa

SEQ ID NO: 2036112 - RNA, 19 nt, Homo sapiens
  misc_RNA (1)...(19): siRNA sense strand
gauguugacgaagaucuua

SEQ ID NO: 2036113 - RNA, 19 nt, Homo sapiens
  misc_RNA (1)...(19): siRNA sense strand
gaaccuggaggagacaauu

SEQ ID NO: 2036114 - RNA, 19 nt, Homo sapiens
  misc_RNA (1)...(19): siRNA sense strand
ccaguggaccguaguguug

SEQ ID NO: 2036115 - RNA, 19 nt, Homo sapiens
  misc_RNA (1)...(19): siRNA sense strand
aaccauaacugcauuaagc

SEQ ID NO: 2036116 - RNA, 19 nt, Homo sapiens
  misc_RNA (1)...(19): siRNA sense strand
gcccaaccauaacugcauu

SEQ ID NO: 2036117 - RNA, 19 nt, Homo sapiens
  misc_RNA (1)...(19): siRNA sense strand
gcagauugccugugacaac

SEQ ID NO: 2036118 - RNA, 19 nt, Homo sapiens
  misc_RNA (1)...(19): siRNA sense strand
gcauggcguggaagagaua

SEQ ID NO: 2036119 - RNA, 19 nt, Homo sapiens
  misc_RNA (1)...(19): siRNA sense strand
gagccaggccuugucauga

SEQ ID NO: 2036120 - RNA, 19 nt, Homo sapiens
  misc_RNA (1)...(19): siRNA sense strand
gaaccgacgcuacuaugag

SEQ ID NO: 2036121 - RNA, 19 nt, Homo sapiens
  misc_RNA (1)...(19): siRNA sense strand
gcaccucauugugaacaug

SEQ ID NO: 2036122 - RNA, 19 nt, Homo sapiens
  misc_RNA (1)...(19): siRNA sense strand
gaugaaccgacgcuacuau

SEQ ID NO: 2036123 - RNA, 19 nt, Homo sapiens
  misc_RNA (1)...(19): siRNA sense strand
ggaggagacaauugaauac

SEQ ID NO: 2036124 - RNA, 19 nt, Homo sapiens
  misc_RNA (1)...(19): siRNA sense strand
ggccuugucaugauauuug

SEQ ID NO: 2036125 - RNA, 19 nt, Homo sapiens
  misc_RNA (1)...(19): siRNA sense strand
gcaggcuguugucgugaug

SEQ ID NO: 2036126 - RNA, 19 nt, Homo sapiens
  misc_RNA (1)...(19): siRNA sense strand
aggagacaauugaauacaa

SEQ ID NO: 2036127 - RNA, 19 nt, Homo sapiens
  misc_RNA (1)...(19): siRNA sense strand
aaccgacgcuacuaugaga

SEQ ID NO: 2036128 - RNA, 19 nt, Homo sapiens
  misc_RNA (1)...(19): siRNA sense strand
ugcggaacauguugucaaa

SEQ ID NO: 2036129 - RNA, 19 nt, Homo sapiens
  misc_RNA (1)...(19): siRNA sense strand
gaucucgacuccugaugcu

SEQ ID NO: 2036130 - RNA, 19 nt, Homo sapiens
  misc_RNA (1)...(19): siRNA sense strand
ggagaugcccaaagaugag

SEQ ID NO: 2036131 - RNA, 19 nt, Homo sapiens
  misc_RNA (1)...(19): siRNA sense strand
ggaacauguugucaaagcu

SEQ ID NO: 2036132 - RNA, 19 nt, Homo sapiens
  misc_RNA (1)...(19): siRNA sense strand
gcgcauggcguggaagaga

SEQ ID NO: 2036133 - RNA, 19 nt, Homo sapiens
  misc_RNA (1)...(19): siRNA sense strand
uauuugcaguggagucuug

SEQ ID NO: 2036134 - RNA, 19 nt, Homo sapiens
  misc_RNA (1)...(19): siRNA sense strand
ggucuggccacacuagaga

SEQ ID NO: 2036135 - RNA, 19 nt, Homo sapiens
  misc_RNA (1)...(19): siRNA sense strand
cccaguaccucggaucaug

SEQ ID NO: 2036136 - RNA, 19 nt, Homo sapiens
  misc_RNA (1)...(19): siRNA sense strand
uggcuguccugcuucuauu

SEQ ID NO: 2036137 - RNA, 19 nt, Homo sapiens
  misc_RNA (1)...(19): siRNA sense strand
cggaacauguugucaaagc

SEQ ID NO: 2036138 - RNA, 19 nt, Homo sapiens
  misc_RNA (1)...(19): siRNA sense strand
uggagaugcccaaagauga

SEQ ID NO: 2036139 - RNA, 19 nt, Homo sapiens
  misc_RNA (1)...(19): siRNA sense strand
gugaacaugcuuucugcaa

SEQ ID NO: 2036140 - RNA, 19 nt, Homo sapiens
  misc_RNA (1)...(19): siRNA sense strand
ugaaccgacgcuacuauga

SEQ ID NO: 2036141 - RNA, 19 nt, Homo sapiens
  misc_RNA (1)...(19): siRNA sense strand
gaggagacaauugaauaca

SEQ ID NO: 2036142 - RNA, 19 nt, Homo sapiens
  misc_RNA (1)...(19): siRNA sense strand
ugaauacaacgagauccua

SEQ ID NO: 2036143 - RNA, 19 nt, Homo sapiens
  misc_RNA (1)...(19): siRNA sense strand
ggauguugacgaagaucuu

SEQ ID NO: 2036144 - RNA, 19 nt, Homo sapiens
  misc_RNA (1)...(19): siRNA sense strand
gaagacgucagcugaacac

SEQ ID NO: 2036145 - RNA, 19 nt, Homo sapiens
  misc_RNA (1)...(19): siRNA sense strand
cugcuucuauugucaacga

SEQ ID NO: 2036146 - RNA, 19 nt, Homo sapiens
  misc_RNA (1)...(19): siRNA sense strand
ccaaccauaacugcauuaa

SEQ ID NO: 2036147 - RNA, 19 nt, Homo sapiens
  misc_RNA (1)...(19): siRNA sense strand
uuaagcaccugcgcucagu

SEQ ID NO: 2036148 - RNA, 19 nt, Homo sapiens
  misc_RNA (1)...(19): siRNA sense strand
gagacauccagcugcuaaa

SEQ ID NO: 2036149 - RNA, 19 nt, Homo sapiens
  misc_RNA (1)...(19): siRNA sense strand
gcugugcuccaggcuguaa

SEQ ID NO: 2036150 - RNA, 19 nt, Homo sapiens
  misc_RNA (1)...(19): siRNA sense strand
uggcguggaagagauauaa

SEQ ID NO: 2036151 - RNA, 19 nt, Homo sapiens
  misc_RNA (1)...(19): siRNA sense strand
uccagcugcuaaaggcaua

SEQ ID NO: 2036152 - RNA, 19 nt, Homo sapiens
  misc_RNA (1)...(19): siRNA sense strand
agccaggccuugucaugau

SEQ ID NO: 2036153 - RNA, 19 nt, Homo sapiens
  misc_RNA (1)...(19): siRNA sense strand
gaucuuaucugcccuauuu

SEQ ID NO: 2036154 - RNA, 19 nt, Homo sapiens
  misc_RNA (1)...(19): siRNA sense strand
gacgucagcugaacacaaa

SEQ ID NO: 2036155 - RNA, 19 nt, Homo sapiens
  misc_RNA (1)...(19): siRNA sense strand
gagaguggcuguccugcuu

SEQ ID NO: 2036156 - RNA, 19 nt, Homo sapiens
  misc_RNA (1)...(19): siRNA sense strand
gguaugauguaacccguuu

SEQ ID NO: 2036157 - RNA, 19 nt, Homo sapiens
  misc_RNA (1)...(19): siRNA sense strand
gggaugacauggugcaaga

SEQ ID NO: 2036158 - RNA, 19 nt, Homo sapiens
  misc_RNA (1)...(19): siRNA sense strand
ugucaaagcugcagauugc

SEQ ID NO: 2036159 - RNA, 19 nt, Homo sapiens
  misc_RNA (1)...(19): siRNA sense strand
ggagacaauugaauacaac

SEQ ID NO: 2036160 - RNA, 19 nt, Homo sapiens
  misc_RNA (1)...(19): siRNA sense strand
gaugagcugcccaaccaua

SEQ ID NO: 2036161 - RNA, 19 nt, Homo sapiens
  misc_RNA (1)...(19): siRNA sense strand
gcuccaggcuguaaucaag

SEQ ID NO: 2036162 - RNA, 19 nt, Homo sapiens
  misc_RNA (1)...(19): siRNA sense strand
gccaggccuugucaugaua

SEQ ID NO: 2036163 - RNA, 19 nt, Homo sapiens
  misc_RNA (1)...(19): siRNA sense strand
ucgcagagcuggagaagac

SEQ ID NO: 2036164 - RNA, 19 nt, Homo sapiens
  misc_RNA (1)...(19): siRNA sense strand
ggagaagacgucagcugaa

SEQ ID NO: 2036165 - RNA, 19 nt, Homo sapiens
  misc_RNA (1)...(19): siRNA sense strand
gccuggagaugcccaaaga

SEQ ID NO: 2036166 - RNA, 19 nt, Homo sapiens
  misc_RNA (1)...(19): siRNA sense strand
gagaagacgucagcugaac

SEQ ID NO: 2036167 - RNA, 19 nt, Homo sapiens
  misc_RNA (1)...(19): siRNA sense strand
aagaugagcugcccaacca

SEQ ID NO: 2036168 - RNA, 19 nt, Homo sapiens
  misc_RNA (1)...(19): siRNA sense strand
gcaccugcgcucaguggua

SEQ ID NO: 2036169 - RNA, 19 nt, Homo sapiens
  misc_RNA (1)...(19): siRNA sense strand
uggaggagacaauugaaua

SEQ ID NO: 2036170 - RNA, 19 nt, Homo sapiens
  misc_RNA (1)...(19): siRNA sense strand
cgagacauccagcugcuaa

SEQ ID NO: 2036171 - RNA, 19 nt, Homo sapiens
  misc_RNA (1)...(19): siRNA sense strand
gauguugacgaagaucuua

SEQ ID NO: 2036172 - RNA, 19 nt, Homo sapiens
  misc_RNA (1)...(19): siRNA sense strand
gaaccuggaggagacaauu

SEQ ID NO: 2036173 - RNA, 19 nt, Homo sapiens
  misc_RNA (1)...(19): siRNA sense strand
ccaguggaccguaguguug

SEQ ID NO: 2036174 - RNA, 19 nt, Homo sapiens
  misc_RNA (1)...(19): siRNA sense strand
aaccauaacugcauuaagc

SEQ ID NO: 2036175 - RNA, 19 nt, Homo sapiens
  misc_RNA (1)...(19): siRNA sense strand
gcccaaccauaacugcauu

SEQ ID NO: 2036176 - RNA, 19 nt, Homo sapiens
  misc_RNA (1)...(19): siRNA sense strand
gcagauugccugugacaac

SEQ ID NO: 2036177 - RNA, 19 nt, Homo sapiens
  misc_RNA (1)...(19): siRNA sense strand
gcauggcguggaagagaua

SEQ ID NO: 2036178 - RNA, 19 nt, Homo sapiens
  misc_RNA (1)...(19): siRNA sense strand
gagccaggccuugucauga

SEQ ID NO: 2036179 - RNA, 19 nt, Homo sapiens
  misc_RNA (1)...(19): siRNA sense strand
gaaccgacgcuacuaugag

SEQ ID NO: 2036180 - RNA, 19 nt, Homo sapiens
  misc_RNA (1)...(19): siRNA sense strand
gcaccucauugugaacaug

SEQ ID NO: 2036181 - RNA, 19 nt, Homo sapiens
  misc_RNA (1)...(19): siRNA sense strand
gaugaaccgacgcuacuau

SEQ ID NO: 2036182 - RNA, 19 nt, Homo sapiens
  misc_RNA (1)...(19): siRNA sense strand
ggaggagacaauugaauac

SEQ ID NO: 2036183 - RNA, 19 nt, Homo sapiens
  misc_RNA (1)...(19): siRNA sense strand
ggccuugucaugauauuug

SEQ ID NO: 2036184 - RNA, 19 nt, Homo sapiens
  misc_RNA (1)...(19): siRNA sense strand
gcaggcuguugucgugaug

SEQ ID NO: 2036185 - RNA, 19 nt, Homo sapiens
  misc_RNA (1)...(19): siRNA sense strand
aggagacaauugaauacaa

SEQ ID NO: 2036186 - RNA, 19 nt, Homo sapiens
  misc_RNA (1)...(19): siRNA sense strand
aaccgacgcuacuaugaga

SEQ ID NO: 2036187 - RNA, 19 nt, Homo sapiens
  misc_RNA (1)...(19): siRNA sense strand
ugcggaacauguugucaaa

SEQ ID NO: 2036188 - RNA, 19 nt, Homo sapiens
  misc_RNA (1)...(19): siRNA sense strand
gaucucgacuccugaugcu

SEQ ID NO: 2036189 - RNA, 19 nt, Homo sapiens
  misc_RNA (1)...(19): siRNA sense strand
ggagaugcccaaagaugag

SEQ ID NO: 2036190 - RNA, 19 nt, Homo sapiens
  misc_RNA (1)...(19): siRNA sense strand
ggaacauguugucaaagcu

SEQ ID NO: 2036191 - RNA, 19 nt, Homo sapiens
  misc_RNA (1)...(19): siRNA sense strand
gcgcauggcguggaagaga

SEQ ID NO: 2036192 - RNA, 19 nt, Homo sapiens
  misc_RNA (1)...(19): siRNA sense strand
uauuugcaguggagucuug

SEQ ID NO: 2036193 - RNA, 19 nt, Homo sapiens
  misc_RNA (1)...(19): siRNA sense strand
ggucuggccacacuagaga

SEQ ID NO: 2036194 - RNA, 19 nt, Homo sapiens
  misc_RNA (1)...(19): siRNA sense strand
cccaguaccucggaucaug

SEQ ID NO: 2036195 - RNA, 19 nt, Homo sapiens
  misc_RNA (1)...(19): siRNA sense strand
uggcuguccugcuucuauu

SEQ ID NO: 2036196 - RNA, 19 nt, Homo sapiens
  misc_RNA (1)...(19): siRNA sense strand
cggaacauguugucaaagc

SEQ ID NO: 2036197 - RNA, 19 nt, Homo sapiens
  misc_RNA (1)...(19): siRNA sense strand
uggagaugcccaaagauga

SEQ ID NO: 2036198 - RNA, 19 nt, Homo sapiens
  misc_RNA (1)...(19): siRNA sense strand
gugaacaugcuuucugcaa

SEQ ID NO: 2036199 - RNA, 19 nt, Homo sapiens
  misc_RNA (1)...(19): siRNA sense strand
ugaaccgacgcuacuauga

SEQ ID NO: 2036200 - RNA, 19 nt, Homo sapiens
  misc_RNA (1)...(19): siRNA sense strand
gaggagacaauugaauaca

SEQ ID NO: 2036201 - RNA, 19 nt, Homo sapiens
  misc_RNA (1)...(19): siRNA sense strand
ugaauacaacgagauccua

SEQ ID NO: 2036202 - RNA, 19 nt, Homo sapiens
  misc_RNA (1)...(19): siRNA sense strand
ggauguugacgaagaucuu

SEQ ID NO: 2036203 - RNA, 19 nt, Homo sapiens
  misc_RNA (1)...(19): siRNA sense strand
gaagacgucagcugaacac

SEQ ID NO: 2036204 - RNA, 19 nt, Homo sapiens
  misc_RNA (1)...(19): siRNA sense strand
cugcuucuauugucaacga

SEQ ID NO: 2036205 - RNA, 19 nt, Homo sapiens
  misc_RNA (1)...(19): siRNA sense strand
ccaaccauaacugcauuaa

SEQ ID NO: 2036206 - RNA, 19 nt, Homo sapiens
  misc_RNA (1)...(19): siRNA sense strand
uuaagcaccugcgcucagu

SEQ ID NO: 2036207 - RNA, 19 nt, Homo sapiens
  misc_RNA (1)...(19): siRNA sense strand
gagacauccagcugcuaaa

SEQ ID NO: 2036208 - RNA, 19 nt, Homo sapiens
  misc_RNA (1)...(19): siRNA sense strand
gcugugcuccaggcuguaa

SEQ ID NO: 2036209 - RNA, 19 nt, Homo sapiens
  misc_RNA (1)...(19): siRNA sense strand
uggcguggaagagauauaa

SEQ ID NO: 2036210 - RNA, 19 nt, Homo sapiens
  misc_RNA (1)...(19): siRNA sense strand
uccagcugcuaaaggcaua

SEQ ID NO: 2036211 - RNA, 19 nt, Homo sapiens
  misc_RNA (1)...(19): siRNA sense strand
agccaggccuugucaugau

SEQ ID NO: 2036212 - RNA, 19 nt, Homo sapiens
  misc_RNA (1)...(19): siRNA sense strand
gacgucagcugaacacaaa

SEQ ID NO: 2036213 - RNA, 19 nt, Homo sapiens
  misc_RNA (1)...(19): siRNA sense strand
gagaguggcuguccugcuu

SEQ ID NO: 2036214 - RNA, 19 nt, Homo sapiens
  misc_RNA (1)...(19): siRNA sense strand
gggaugacauggugcaaga

SEQ ID NO: 2036215 - RNA, 19 nt, Homo sapiens
  misc_RNA (1)...(19): siRNA sense strand
ugucaaagcugcagauugc

SEQ ID NO: 2036216 - RNA, 19 nt, Homo sapiens
  misc_RNA (1)...(19): siRNA sense strand
ggagacaauugaauacaac

SEQ ID NO: 2036217 - RNA, 19 nt, Homo sapiens
  misc_RNA (1)...(19): siRNA sense strand
gaugagcugcccaaccaua

SEQ ID NO: 2036218 - RNA, 19 nt, Homo sapiens
  misc_RNA (1)...(19): siRNA sense strand
gcuccaggcuguaaucaag

SEQ ID NO: 2036219 - RNA, 19 nt, Homo sapiens
  misc_RNA (1)...(19): siRNA sense strand
gccaggccuugucaugaua

SEQ ID NO: 2036220 - RNA, 19 nt, Homo sapiens
  misc_RNA (1)...(19): siRNA sense strand
ucgcagagcuggagaagac

SEQ ID NO: 2036221 - RNA, 19 nt, Homo sapiens
  misc_RNA (1)...(19): siRNA sense strand
ggagaagacgucagcugaa

SEQ ID NO: 2036222 - RNA, 19 nt, Homo sapiens
  misc_RNA (1)...(19): siRNA sense strand
gccuggagaugcccaaaga

SEQ ID NO: 2036223 - RNA, 19 nt, Homo sapiens
  misc_RNA (1)...(19): siRNA sense strand
gagaagacgucagcugaac

SEQ ID NO: 2036224 - RNA, 19 nt, Homo sapiens
  misc_RNA (1)...(19): siRNA sense strand
aagaugagcugcccaacca

SEQ ID NO: 2036225 - RNA, 19 nt, Homo sapiens
  misc_RNA (1)...(19): siRNA sense strand
gcaccugcgcucaguggua

SEQ ID NO: 2036226 - RNA, 19 nt, Homo sapiens
  misc_RNA (1)...(19): siRNA sense strand
uggaggagacaauugaaua

SEQ ID NO: 2036227 - RNA, 19 nt, Homo sapiens
  misc_RNA (1)...(19): siRNA sense strand
cgagacauccagcugcuaa

SEQ ID NO: 2036228 - RNA, 19 nt, Homo sapiens
  misc_RNA (1)...(19): siRNA sense strand
gaaccuggaggagacaauu

SEQ ID NO: 2036229 - RNA, 19 nt, Homo sapiens
  misc_RNA (1)...(19): siRNA sense strand
gcccaaccauaacugcauu

SEQ ID NO: 2036230 - RNA, 19 nt, Homo sapiens
  misc_RNA (1)...(19): siRNA sense strand
aaccauaacugcauuaagc

SEQ ID NO: 2036231 - RNA, 19 nt, Homo sapiens
  misc_RNA (1)...(19): siRNA sense strand
gcagauugccugugacaac

SEQ ID NO: 2036232 - RNA, 19 nt, Homo sapiens
  misc_RNA (1)...(19): siRNA sense strand
gcauggcguggaagagaua

SEQ ID NO: 2036233 - RNA, 19 nt, Homo sapiens
  misc_RNA (1)...(19): siRNA sense strand
gagccaggccuugucauga

SEQ ID NO: 2036234 - RNA, 19 nt, Homo sapiens
  misc_RNA (1)...(19): siRNA sense strand
gaaccgacgcuacuaugag

SEQ ID NO: 2036235 - RNA, 19 nt, Homo sapiens
  misc_RNA (1)...(19): siRNA sense strand
gaugaaccgacgcuacuau

SEQ ID NO: 2036236 - RNA, 19 nt, Homo sapiens
  misc_RNA (1)...(19): siRNA sense strand
ggaggagacaauugaauac

SEQ ID NO: 2036237 - RNA, 19 nt, Homo sapiens
  misc_RNA (1)...(19): siRNA sense strand
ggccuugucaugauauuug

SEQ ID NO: 2036238 - RNA, 19 nt, Homo sapiens
  misc_RNA (1)...(19): siRNA sense strand
gcaggcuguugucgugaug

SEQ ID NO: 2036239 - RNA, 19 nt, Homo sapiens
  misc_RNA (1)...(19): siRNA sense strand
aggagacaauugaauacaa

SEQ ID NO: 2036240 - RNA, 19 nt, Homo sapiens
  misc_RNA (1)...(19): siRNA sense strand
aaccgacgcuacuaugaga

SEQ ID NO: 2036241 - RNA, 19 nt, Homo sapiens
  misc_RNA (1)...(19): siRNA sense strand
ggagaugcccaaagaugag

SEQ ID NO: 2036242 - RNA, 19 nt, Homo sapiens
  misc_RNA (1)...(19): siRNA sense strand
ggaacauguugucaaagcu

SEQ ID NO: 2036243 - RNA, 19 nt, Homo sapiens
  misc_RNA (1)...(19): siRNA sense strand
gaucucgacuccugaugcu

SEQ ID NO: 2036244 - RNA, 19 nt, Homo sapiens
  misc_RNA (1)...(19): siRNA sense strand
gcgcauggcguggaagaga

SEQ ID NO: 2036245 - RNA, 19 nt, Homo sapiens
  misc_RNA (1)...(19): siRNA sense strand
ggucuggccacacuagaga

SEQ ID NO: 2036246 - RNA, 19 nt, Homo sapiens
  misc_RNA (1)...(19): siRNA sense strand
cggaacauguugucaaagc

SEQ ID NO: 2036247 - RNA, 19 nt, Homo sapiens
  misc_RNA (1)...(19): siRNA sense strand
uggcuguccugcuucuauu

SEQ ID NO: 2036248 - RNA, 19 nt, Homo sapiens
  misc_RNA (1)...(19): siRNA sense strand
uggagaugcccaaagauga

SEQ ID NO: 2036249 - RNA, 19 nt, Homo sapiens
  misc_RNA (1)...(19): siRNA sense strand
ugaaccgacgcuacuauga

SEQ ID NO: 2036250 - RNA, 19 nt, Homo sapiens
  misc_RNA (1)...(19): siRNA sense strand
gaggagacaauugaauaca

SEQ ID NO: 2036251 - RNA, 19 nt, Homo sapiens
  misc_RNA (1)...(19): siRNA sense strand
ugaauacaacgagauccua

SEQ ID NO: 2036252 - RNA, 19 nt, Homo sapiens
  misc_RNA (1)...(19): siRNA sense strand
gaagacgucagcugaacac

SEQ ID NO: 2036253 - RNA, 19 nt, Homo sapiens
  misc_RNA (1)...(19): siRNA sense strand
cugcuucuauugucaacga

SEQ ID NO: 2036254 - RNA, 19 nt, Homo sapiens
  misc_RNA (1)...(19): siRNA sense strand
ccaaccauaacugcauuaa

SEQ ID NO: 2036255 - RNA, 19 nt, Homo sapiens
  misc_RNA (1)...(19): siRNA sense strand
uuaagcaccugcgcucagu

SEQ ID NO: 2036256 - RNA, 19 nt, Homo sapiens
  misc_RNA (1)...(19): siRNA sense strand
gagacauccagcugcuaaa

SEQ ID NO: 2036257 - RNA, 19 nt, Homo sapiens
  misc_RNA (1)...(19): siRNA sense strand
gcugugcuccaggcuguaa

SEQ ID NO: 2036258 - RNA, 19 nt, Homo sapiens
  misc_RNA (1)...(19): siRNA sense strand
uggcguggaagagauauaa

SEQ ID NO: 2036259 - RNA, 19 nt, Homo sapiens
  misc_RNA (1)...(19): siRNA sense strand
uccagcugcuaaaggcaua

SEQ ID NO: 2036260 - RNA, 19 nt, Homo sapiens
  misc_RNA (1)...(19): siRNA sense strand
agccaggccuugucaugau

SEQ ID NO: 2036261 - RNA, 19 nt, Homo sapiens
  misc_RNA (1)...(19): siRNA sense strand
gaucuuaucugcccuauuu

SEQ ID NO: 2036262 - RNA, 19 nt, Homo sapiens
  misc_RNA (1)...(19): siRNA sense strand
gacgucagcugaacacaaa

SEQ ID NO: 2036263 - RNA, 19 nt, Homo sapiens
  misc_RNA (1)...(19): siRNA sense strand
gagaguggcuguccugcuu

SEQ ID NO: 2036264 - RNA, 19 nt, Homo sapiens
  misc_RNA (1)...(19): siRNA sense strand
gguaugauguaacccguuu

SEQ ID NO: 2036265 - RNA, 19 nt, Homo sapiens
  misc_RNA (1)...(19): siRNA sense strand
gggaugacauggugcaaga

SEQ ID NO: 2036266 - RNA, 19 nt, Homo sapiens
  misc_RNA (1)...(19): siRNA sense strand
ugucaaagcugcagauugc

SEQ ID NO: 2036267 - RNA, 19 nt, Homo sapiens
  misc_RNA (1)...(19): siRNA sense strand
ggagacaauugaauacaac

SEQ ID NO: 2036268 - RNA, 19 nt, Homo sapiens
  misc_RNA (1)...(19): siRNA sense strand
gaugagcugcccaaccaua

SEQ ID NO: 2036269 - RNA, 19 nt, Homo sapiens
  misc_RNA (1)...(19): siRNA sense strand
gcuccaggcuguaaucaag

SEQ ID NO: 2036270 - RNA, 19 nt, Homo sapiens
  misc_RNA (1)...(19): siRNA sense strand
gccaggccuugucaugaua

SEQ ID NO: 2036271 - RNA, 19 nt, Homo sapiens
  misc_RNA (1)...(19): siRNA sense strand
ucgcagagcuggagaagac

SEQ ID NO: 2036272 - RNA, 19 nt, Homo sapiens
  misc_RNA (1)...(19): siRNA sense strand
ggagaagacgucagcugaa

SEQ ID NO: 2036273 - RNA, 19 nt, Homo sapiens
  misc_RNA (1)...(19): siRNA sense strand
gccuggagaugcccaaaga

SEQ ID NO: 2036274 - RNA, 19 nt, Homo sapiens
  misc_RNA (1)...(19): siRNA sense strand
gagaagacgucagcugaac

SEQ ID NO: 2036275 - RNA, 19 nt, Homo sapiens
  misc_RNA (1)...(19): siRNA sense strand
aagaugagcugcccaacca

SEQ ID NO: 2036276 - RNA, 19 nt, Homo sapiens
  misc_RNA (1)...(19): siRNA sense strand
gcaccugcgcucaguggua

SEQ ID NO: 2036277 - RNA, 19 nt, Homo sapiens
  misc_RNA (1)...(19): siRNA sense strand
uggaggagacaauugaaua

SEQ ID NO: 2036278 - RNA, 19 nt, Homo sapiens
  misc_RNA (1)...(19): siRNA sense strand
cgagacauccagcugcuaa

SEQ ID NO: 2036279 - RNA, 19 nt, Homo sapiens
  misc_RNA (1)...(19): siRNA sense strand
gauguugacgaagaucuua

SEQ ID NO: 2036280 - RNA, 19 nt, Homo sapiens
  misc_RNA (1)...(19): siRNA sense strand
gaaccuggaggagacaauu

SEQ ID NO: 2036281 - RNA, 19 nt, Homo sapiens
  misc_RNA (1)...(19): siRNA sense strand
ccaguggaccguaguguug

SEQ ID NO: 2036282 - RNA, 19 nt, Homo sapiens
  misc_RNA (1)...(19): siRNA sense strand
aaccauaacugcauuaagc

SEQ ID NO: 2036283 - RNA, 19 nt, Homo sapiens
  misc_RNA (1)...(19): siRNA sense strand
gcccaaccauaacugcauu

SEQ ID NO: 2036284 - RNA, 19 nt, Homo sapiens
  misc_RNA (1)...(19): siRNA sense strand
gcagauugccugugacaac

SEQ ID NO: 2036285 - RNA, 19 nt, Homo sapiens
  misc_RNA (1)...(19): siRNA sense strand
gcauggcguggaagagaua

SEQ ID NO: 2036286 - RNA, 19 nt, Homo sapiens
  misc_RNA (1)...(19): siRNA sense strand
gagccaggccuugucauga

SEQ ID NO: 2036287 - RNA, 19 nt, Homo sapiens
  misc_RNA (1)...(19): siRNA sense strand
gaaccgacgcuacuaugag

SEQ ID NO: 2036288 - RNA, 19 nt, Homo sapiens
  misc_RNA (1)...(19): siRNA sense strand
gcaccucauugugaacaug

SEQ ID NO: 2036289 - RNA, 19 nt, Homo sapiens
  misc_RNA (1)...(19): siRNA sense strand
gaugaaccgacgcuacuau

SEQ ID NO: 2036290 - RNA, 19 nt, Homo sapiens
  misc_RNA (1)...(19): siRNA sense strand
ggaggagacaauugaauac

SEQ ID NO: 2036291 - RNA, 19 nt, Homo sapiens
  misc_RNA (1)...(19): siRNA sense strand
ggccuugucaugauauuug

SEQ ID NO: 2036292 - RNA, 19 nt, Homo sapiens
  misc_RNA (1)...(19): siRNA sense strand
gcaggcuguugucgugaug

SEQ ID NO: 2036293 - RNA, 19 nt, Homo sapiens
  misc_RNA (1)...(19): siRNA sense strand
aggagacaauugaauacaa

SEQ ID NO: 2036294 - RNA, 19 nt, Homo sapiens
  misc_RNA (1)...(19): siRNA sense strand
aaccgacgcuacuaugaga

SEQ ID NO: 2036295 - RNA, 19 nt, Homo sapiens
  misc_RNA (1)...(19): siRNA sense strand
ugcggaacauguugucaaa

SEQ ID NO: 2036296 - RNA, 19 nt, Homo sapiens
  misc_RNA (1)...(19): siRNA sense strand
gaucucgacuccugaugcu

SEQ ID NO: 2036297 - RNA, 19 nt, Homo sapiens
  misc_RNA (1)...(19): siRNA sense strand
ggagaugcccaaagaugag

SEQ ID NO: 2036298 - RNA, 19 nt, Homo sapiens
  misc_RNA (1)...(19): siRNA sense strand
ggaacauguugucaaagcu

SEQ ID NO: 2036299 - RNA, 19 nt, Homo sapiens
  misc_RNA (1)...(19): siRNA sense strand
gcgcauggcguggaagaga

SEQ ID NO: 2036300 - RNA, 19 nt, Homo sapiens
  misc_RNA (1)...(19): siRNA sense strand
uauuugcaguggagucuug

SEQ ID NO: 2036301 - RNA, 19 nt, Homo sapiens
  misc_RNA (1)...(19): siRNA sense strand
ggucuggccacacuagaga

SEQ ID NO: 2036302 - RNA, 19 nt, Homo sapiens
  misc_RNA (1)...(19): siRNA sense strand
cccaguaccucggaucaug

SEQ ID NO: 2036303 - RNA, 19 nt, Homo sapiens
  misc_RNA (1)...(19): siRNA sense strand
uggcuguccugcuucuauu

SEQ ID NO: 2036304 - RNA, 19 nt, Homo sapiens
  misc_RNA (1)...(19): siRNA sense strand
cggaacauguugucaaagc

SEQ ID NO: 2036305 - RNA, 19 nt, Homo sapiens
  misc_RNA (1)...(19): siRNA sense strand
uggagaugcccaaagauga

SEQ ID NO: 2036306 - RNA, 19 nt, Homo sapiens
  misc_RNA (1)...(19): siRNA sense strand
gugaacaugcuuucugcaa

SEQ ID NO: 2036307 - RNA, 19 nt, Homo sapiens
  misc_RNA (1)...(19): siRNA sense strand
ugaaccgacgcuacuauga

SEQ ID NO: 2036308 - RNA, 19 nt, Homo sapiens
  misc_RNA (1)...(19): siRNA sense strand
gaggagacaauugaauaca

SEQ ID NO: 2036309 - RNA, 19 nt, Homo sapiens
  misc_RNA (1)...(19): siRNA sense strand
ugaauacaacgagauccua

SEQ ID NO: 2036310 - RNA, 19 nt, Homo sapiens
  misc_RNA (1)...(19): siRNA sense strand
ggauguugacgaagaucuu

SEQ ID NO: 2036311 - RNA, 19 nt, Homo sapiens
  misc_RNA (1)...(19): siRNA sense strand
gaagacgucagcugaacac

SEQ ID NO: 2036312 - RNA, 19 nt, Homo sapiens
  misc_RNA (1)...(19): siRNA sense strand
cugcuucuauugucaacga

SEQ ID NO: 2036313 - RNA, 19 nt, Homo sapiens
  misc_RNA (1)...(19): siRNA sense strand
ccaaccauaacugcauuaa

SEQ ID NO: 2036314 - RNA, 19 nt, Homo sapiens
  misc_RNA (1)...(19): siRNA sense strand
uuaagcaccugcgcucagu

SEQ ID NO: 2036315 - RNA, 19 nt, Homo sapiens
  misc_RNA (1)...(19): siRNA sense strand
gagacauccagcugcuaaa

SEQ ID NO: 2036316 - RNA, 19 nt, Homo sapiens
  misc_RNA (1)...(19): siRNA sense strand
gcugugcuccaggcuguaa

SEQ ID NO: 2036317 - RNA, 19 nt, Homo sapiens
  misc_RNA (1)...(19): siRNA sense strand
uggcguggaagagauauaa

SEQ ID NO: 2036318 - RNA, 19 nt, Homo sapiens
  misc_RNA (1)...(19): siRNA sense strand
uccagcugcuaaaggcaua

SEQ ID NO: 2036319 - RNA, 19 nt, Homo sapiens
  misc_RNA (1)...(19): siRNA sense strand
agccaggccuugucaugau

SEQ ID NO: 2036320 - RNA, 19 nt, Homo sapiens
  misc_RNA (1)...(19): siRNA sense strand
ccaaguguguugacaagug

SEQ ID NO: 2036321 - RNA, 19 nt, Homo sapiens
  misc_RNA (1)...(19): siRNA sense strand
gcagagcccguucaugguu

SEQ ID NO: 2036322 - RNA, 19 nt, Homo sapiens
  misc_RNA (1)...(19): siRNA sense strand
gccauauucucacaugaug

SEQ ID NO: 2036323 - RNA, 19 nt, Homo sapiens
  misc_RNA (1)...(19): siRNA sense strand
gcagcugccugugcccuau

SEQ ID NO: 2036324 - RNA, 19 nt, Homo sapiens
  misc_RNA (1)...(19): siRNA sense strand
caccaaagcagacauagag

SEQ ID NO: 2036325 - RNA, 19 nt, Homo sapiens
  misc_RNA (1)...(19): siRNA sense strand
uggaugauguggagaugga

SEQ ID NO: 2036326 - RNA, 19 nt, Homo sapiens
  misc_RNA (1)...(19): siRNA sense strand
caccaaguguguugacaag

SEQ ID NO: 2036327 - RNA, 19 nt, Homo sapiens
  misc_RNA (1)...(19): siRNA sense strand
agacugagcacccagagau

SEQ ID NO: 2036328 - RNA, 19 nt, Homo sapiens
  misc_RNA (1)...(19): siRNA sense strand
ccagcuuccugcccuacuu

SEQ ID NO: 2036329 - RNA, 19 nt, Homo sapiens
  misc_RNA (1)...(19): siRNA sense strand
gaccugucccucuguccua

SEQ ID NO: 2036330 - RNA, 19 nt, Homo sapiens
  misc_RNA (1)...(19): siRNA sense strand
gacugagcacccagagaua

SEQ ID NO: 2036331 - RNA, 19 nt, Homo sapiens
  misc_RNA (1)...(19): siRNA sense strand
auguggagauggagaacua

SEQ ID NO: 2036332 - RNA, 19 nt, Homo sapiens
  misc_RNA (1)...(19): siRNA sense strand
ccuuuggugugccauauuc

SEQ ID NO: 2036333 - RNA, 19 nt, Homo sapiens
  misc_RNA (1)...(19): siRNA sense strand
ggagauggagaacuaugag

SEQ ID NO: 2036334 - RNA, 19 nt, Homo sapiens
  misc_RNA (1)...(19): siRNA sense strand
ccagcaugcuccgugaugu

SEQ ID NO: 2036335 - RNA, 19 nt, Homo sapiens
  misc_RNA (1)...(19): siRNA sense strand
ucaccaaagcagacauaga

SEQ ID NO: 2036336 - RNA, 19 nt, Homo sapiens
  misc_RNA (1)...(19): siRNA sense strand
cagcaugcuccgugauguu

SEQ ID NO: 2036337 - RNA, 19 nt, Homo sapiens
  misc_RNA (1)...(19): siRNA sense strand
ucucgaugcugccaauguc

SEQ ID NO: 2036338 - RNA, 19 nt, Homo sapiens
  misc_RNA (1)...(19): siRNA sense strand
gugccauauucucacauga

SEQ ID NO: 2036339 - RNA, 19 nt, Homo sapiens
  misc_RNA (1)...(19): siRNA sense strand
ccuacacggucaccacagu

SEQ ID NO: 2036340 - RNA, 19 nt, Homo sapiens
  misc_RNA (1)...(19): siRNA sense strand
ucucaccaaagcagacaua

SEQ ID NO: 2036341 - RNA, 19 nt, Homo sapiens
  misc_RNA (1)...(19): siRNA sense strand
caaugucaccaacagcaau

SEQ ID NO: 2036342 - RNA, 19 nt, Homo sapiens
  misc_RNA (1)...(19): siRNA sense strand
ggaccuggacguggaugau

SEQ ID NO: 2036343 - RNA, 19 nt, Homo sapiens
  misc_RNA (1)...(19): siRNA sense strand
gaacgggacuuugcagaaa

SEQ ID NO: 2036344 - RNA, 19 nt, Homo sapiens
  misc_RNA (1)...(19): siRNA sense strand
ggagaggccucacgucaug

SEQ ID NO: 2036345 - RNA, 19 nt, Homo sapiens
  misc_RNA (1)...(19): siRNA sense strand
ggacuggcuucgauacuug

SEQ ID NO: 2036346 - RNA, 19 nt, Homo sapiens
  misc_RNA (1)...(19): siRNA sense strand
gcaucucccuucucuucua

SEQ ID NO: 2036347 - RNA, 19 nt, Homo sapiens
  misc_RNA (1)...(19): siRNA sense strand
ucaagaggauguucagcaa

SEQ ID NO: 2036348 - RNA, 19 nt, Homo sapiens
  misc_RNA (1)...(19): siRNA sense strand
ggacuuugcagaaaugugu

SEQ ID NO: 2036349 - RNA, 19 nt, Homo sapiens
  misc_RNA (1)...(19): siRNA sense strand
ggaacgggacuuugcagaa

SEQ ID NO: 2036350 - RNA, 19 nt, Homo sapiens
  misc_RNA (1)...(19): siRNA sense strand
cguauaggcuguccugcaa

SEQ ID NO: 2036351 - RNA, 19 nt, Homo sapiens
  misc_RNA (1)...(19): siRNA sense strand
gaagaugccauggacuuug

SEQ ID NO: 2036352 - RNA, 19 nt, Homo sapiens
  misc_RNA (1)...(19): siRNA sense strand
gggcaugccuaccaaacau

SEQ ID NO: 2036353 - RNA, 19 nt, Homo sapiens
  misc_RNA (1)...(19): siRNA sense strand
gcagaaaugugugcagacu

SEQ ID NO: 2036354 - RNA, 19 nt, Homo sapiens
  misc_RNA (1)...(19): siRNA sense strand
agaaaugugugcagacuac

SEQ ID NO: 2036355 - RNA, 19 nt, Homo sapiens
  misc_RNA (1)...(19): siRNA sense strand
caagcaccguggccaugaa

SEQ ID NO: 2036356 - RNA, 19 nt, Homo sapiens
  misc_RNA (1)...(19): siRNA sense strand
gcuggugcaucgugggaaa

SEQ ID NO: 2036357 - RNA, 19 nt, Homo sapiens
  misc_RNA (1)...(19): siRNA sense strand
ucuauggccucuacuaugg

SEQ ID NO: 2036358 - RNA, 19 nt, Homo sapiens
  misc_RNA (1)...(19): siRNA sense strand
aagaggauguucagcaauc

SEQ ID NO: 2036359 - RNA, 19 nt, Homo sapiens
  misc_RNA (1)...(19): siRNA sense strand
gaagcuaugcaugcugaaa

SEQ ID NO: 2036360 - RNA, 19 nt, Homo sapiens
  misc_RNA (1)...(19): siRNA sense strand
cagaagaugccauggacuu

SEQ ID NO: 2036361 - RNA, 19 nt, Homo sapiens
  misc_RNA (1)...(19): siRNA sense strand
aaacgugucccuacugcaa

SEQ ID NO: 2036362 - RNA, 19 nt, Homo sapiens
  misc_RNA (1)...(19): siRNA sense strand
cagacuacauggcaucuac

SEQ ID NO: 2036363 - RNA, 19 nt, Homo sapiens
  misc_RNA (1)...(19): siRNA sense strand
cuaccaaacaucuuucaga

SEQ ID NO: 2036364 - RNA, 19 nt, Homo sapiens
  misc_RNA (1)...(19): siRNA sense strand
ggccucacgucauguaugg

SEQ ID NO: 2036365 - RNA, 19 nt, Homo sapiens
  misc_RNA (1)...(19): siRNA sense strand
caucucccuucucuucuau

SEQ ID NO: 2036366 - RNA, 19 nt, Homo sapiens
  misc_RNA (1)...(19): siRNA sense strand
gcacccacgcuccuacaau

SEQ ID NO: 2036367 - RNA, 19 nt, Homo sapiens
  misc_RNA (1)...(19): siRNA sense strand
guccugcaaucaugucuuc

SEQ ID NO: 2036368 - RNA, 19 nt, Homo sapiens
  misc_RNA (1)...(19): siRNA sense strand
uauaggcuguccugcaauc

SEQ ID NO: 2036369 - RNA, 19 nt, Homo sapiens
  misc_RNA (1)...(19): siRNA sense strand
gaucauugagaacacguau

SEQ ID NO: 2036370 - RNA, 19 nt, Homo sapiens
  misc_RNA (1)...(19): siRNA sense strand
gggaacgggagcuggauga

SEQ ID NO: 2036371 - RNA, 19 nt, Homo sapiens
  misc_RNA (1)...(19): siRNA sense strand
ucauugagaacacguauag

SEQ ID NO: 2036372 - RNA, 19 nt, Homo sapiens
  misc_RNA (1)...(19): siRNA sense strand
gaagaggggaucauugaga

SEQ ID NO: 2036373 - RNA, 19 nt, Homo sapiens
  misc_RNA (1)...(19): siRNA sense strand
caaacaucuuucagacagu

SEQ ID NO: 2036374 - RNA, 19 nt, Homo sapiens
  misc_RNA (1)...(19): siRNA sense strand
uggcaucucccuucucuuc

SEQ ID NO: 2036375 - RNA, 19 nt, Homo sapiens
  misc_RNA (1)...(19): siRNA sense strand
caucuaccauaggguucua

SEQ ID NO: 2036376 - RNA, 19 nt, Homo sapiens
  misc_RNA (1)...(19): siRNA sense strand
uggacuggcuucgauacuu

SEQ ID NO: 2036377 - RNA, 19 nt, Homo sapiens
  misc_RNA (1)...(19): siRNA sense strand
ugucaucauugguguaguc

SEQ ID NO: 2036378 - RNA, 19 nt, Homo sapiens
  misc_RNA (1)...(19): siRNA sense strand
ccaagcaccguggccauga

SEQ ID NO: 2036379 - RNA, 19 nt, Homo sapiens
  misc_RNA (1)...(19): siRNA sense strand
aagcaaacgugucccuacu

SEQ ID NO: 2036380 - RNA, 19 nt, Homo sapiens
  misc_RNA (1)...(19): siRNA sense strand
agaagaugccauggacuuu

SEQ ID NO: 2036381 - RNA, 19 nt, Homo sapiens
  misc_RNA (1)...(19): siRNA sense strand
ccucuacuauggaguucug

SEQ ID NO: 2036382 - RNA, 19 nt, Homo sapiens
  misc_RNA (1)...(19): siRNA sense strand
aagaugccauggacuuugg

SEQ ID NO: 2036383 - RNA, 19 nt, Homo sapiens
  misc_RNA (1)...(19): siRNA sense strand
cuggcagccugucaucauu

SEQ ID NO: 2036384 - RNA, 19 nt, Homo sapiens
  misc_RNA (1)...(19): siRNA sense strand
cagaaaugugugcagacua

SEQ ID NO: 2036385 - RNA, 19 nt, Homo sapiens
  misc_RNA (1)...(19): siRNA sense strand
cugcuggacuggcuucgau

SEQ ID NO: 2036386 - RNA, 19 nt, Homo sapiens
  misc_RNA (1)...(19): siRNA sense strand
cgucauguaugggcaacug

SEQ ID NO: 2036387 - RNA, 19 nt, Homo sapiens
  misc_RNA (1)...(19): siRNA sense strand
cagugugugugcugugugu

SEQ ID NO: 2036388 - RNA, 19 nt, Homo sapiens
  misc_RNA (1)...(19): siRNA sense strand
ucucuucuauggccucuac

SEQ ID NO: 2036389 - RNA, 19 nt, Homo sapiens
  misc_RNA (1)...(19): siRNA sense strand
uccaaggcaucaacuacau

SEQ ID NO: 2036390 - RNA, 19 nt, Homo sapiens
  misc_RNA (1)...(19): siRNA sense strand
gggagaggccucacgucau

SEQ ID NO: 2036391 - RNA, 19 nt, Homo sapiens
  misc_RNA (1)...(19): siRNA sense strand
caagaggauguucagcaau

SEQ ID NO: 2036392 - RNA, 19 nt, Homo sapiens
  misc_RNA (1)...(19): siRNA sense strand
aggcuguccugcaaucaug

SEQ ID NO: 2036393 - RNA, 19 nt, Homo sapiens
  misc_RNA (1)...(19): siRNA sense strand
gcagacuacauggcaucua

SEQ ID NO: 2036394 - RNA, 19 nt, Homo sapiens
  misc_RNA (1)...(19): siRNA sense strand
gaacgggacuuugcagaaa

SEQ ID NO: 2036395 - RNA, 19 nt, Homo sapiens
  misc_RNA (1)...(19): siRNA sense strand
ggagaggccucacgucaug

SEQ ID NO: 2036396 - RNA, 19 nt, Homo sapiens
  misc_RNA (1)...(19): siRNA sense strand
ggacuggcuucgauacuug

SEQ ID NO: 2036397 - RNA, 19 nt, Homo sapiens
  misc_RNA (1)...(19): siRNA sense strand
gcaucucccuucucuucua

SEQ ID NO: 2036398 - RNA, 19 nt, Homo sapiens
  misc_RNA (1)...(19): siRNA sense strand
ucaagaggauguucagcaa

SEQ ID NO: 2036399 - RNA, 19 nt, Homo sapiens
  misc_RNA (1)...(19): siRNA sense strand
ggacuuugcagaaaugugu

SEQ ID NO: 2036400 - RNA, 19 nt, Homo sapiens
  misc_RNA (1)...(19): siRNA sense strand
ggaacgggacuuugcagaa

SEQ ID NO: 2036401 - RNA, 19 nt, Homo sapiens
  misc_RNA (1)...(19): siRNA sense strand
cguauaggcuguccugcaa

SEQ ID NO: 2036402 - RNA, 19 nt, Homo sapiens
  misc_RNA (1)...(19): siRNA sense strand
gaagaugccauggacuuug

SEQ ID NO: 2036403 - RNA, 19 nt, Homo sapiens
  misc_RNA (1)...(19): siRNA sense strand
gggcaugccuaccaaacau

SEQ ID NO: 2036404 - RNA, 19 nt, Homo sapiens
  misc_RNA (1)...(19): siRNA sense strand
gcagaaaugugugcagacu

SEQ ID NO: 2036405 - RNA, 19 nt, Homo sapiens
  misc_RNA (1)...(19): siRNA sense strand
agaaaugugugcagacuac

SEQ ID NO: 2036406 - RNA, 19 nt, Homo sapiens
  misc_RNA (1)...(19): siRNA sense strand
caagcaccguggccaugaa

SEQ ID NO: 2036407 - RNA, 19 nt, Homo sapiens
  misc_RNA (1)...(19): siRNA sense strand
gcuggugcaucgugggaaa

SEQ ID NO: 2036408 - RNA, 19 nt, Homo sapiens
  misc_RNA (1)...(19): siRNA sense strand
ucuauggccucuacuaugg

SEQ ID NO: 2036409 - RNA, 19 nt, Homo sapiens
  misc_RNA (1)...(19): siRNA sense strand
aagaggauguucagcaauc

SEQ ID NO: 2036410 - RNA, 19 nt, Homo sapiens
  misc_RNA (1)...(19): siRNA sense strand
cagaagaugccauggacuu

SEQ ID NO: 2036411 - RNA, 19 nt, Homo sapiens
  misc_RNA (1)...(19): siRNA sense strand
gaagcuaugcaugcugaaa

SEQ ID NO: 2036412 - RNA, 19 nt, Homo sapiens
  misc_RNA (1)...(19): siRNA sense strand
aaacgugucccuacugcaa

SEQ ID NO: 2036413 - RNA, 19 nt, Homo sapiens
  misc_RNA (1)...(19): siRNA sense strand
cagacuacauggcaucuac

SEQ ID NO: 2036414 - RNA, 19 nt, Homo sapiens
  misc_RNA (1)...(19): siRNA sense strand
cuaccaaacaucuuucaga

SEQ ID NO: 2036415 - RNA, 19 nt, Homo sapiens
  misc_RNA (1)...(19): siRNA sense strand
ggccucacgucauguaugg

SEQ ID NO: 2036416 - RNA, 19 nt, Homo sapiens
  misc_RNA (1)...(19): siRNA sense strand
caucucccuucucuucuau

SEQ ID NO: 2036417 - RNA, 19 nt, Homo sapiens
  misc_RNA (1)...(19): siRNA sense strand
gcacccacgcuccuacaau

SEQ ID NO: 2036418 - RNA, 19 nt, Homo sapiens
  misc_RNA (1)...(19): siRNA sense strand
guccugcaaucaugucuuc

SEQ ID NO: 2036419 - RNA, 19 nt, Homo sapiens
  misc_RNA (1)...(19): siRNA sense strand
uauaggcuguccugcaauc

SEQ ID NO: 2036420 - RNA, 19 nt, Homo sapiens
  misc_RNA (1)...(19): siRNA sense strand
gaucauugagaacacguau

SEQ ID NO: 2036421 - RNA, 19 nt, Homo sapiens
  misc_RNA (1)...(19): siRNA sense strand
gaagaggggaucauugaga

SEQ ID NO: 2036422 - RNA, 19 nt, Homo sapiens
  misc_RNA (1)...(19): siRNA sense strand
ucauugagaacacguauag

SEQ ID NO: 2036423 - RNA, 19 nt, Homo sapiens
  misc_RNA (1)...(19): siRNA sense strand
caaacaucuuucagacagu

SEQ ID NO: 2036424 - RNA, 19 nt, Homo sapiens
  misc_RNA (1)...(19): siRNA sense strand
uggcaucucccuucucuuc

SEQ ID NO: 2036425 - RNA, 19 nt, Homo sapiens
  misc_RNA (1)...(19): siRNA sense strand
caucuaccauaggguucua

SEQ ID NO: 2036426 - RNA, 19 nt, Homo sapiens
  misc_RNA (1)...(19): siRNA sense strand
uggacuggcuucgauacuu

SEQ ID NO: 2036427 - RNA, 19 nt, Homo sapiens
  misc_RNA (1)...(19): siRNA sense strand
ugucaucauugguguaguc

SEQ ID NO: 2036428 - RNA, 19 nt, Homo sapiens
  misc_RNA (1)...(19): siRNA sense strand
aagcaaacgugucccuacu

SEQ ID NO: 2036429 - RNA, 19 nt, Homo sapiens
  misc_RNA (1)...(19): siRNA sense strand
ccaagcaccguggccauga

SEQ ID NO: 2036430 - RNA, 19 nt, Homo sapiens
  misc_RNA (1)...(19): siRNA sense strand
ccucuacuauggaguucug

SEQ ID NO: 2036431 - RNA, 19 nt, Homo sapiens
  misc_RNA (1)...(19): siRNA sense strand
agaagaugccauggacuuu

SEQ ID NO: 2036432 - RNA, 19 nt, Homo sapiens
  misc_RNA (1)...(19): siRNA sense strand
aagaugccauggacuuugg

SEQ ID NO: 2036433 - RNA, 19 nt, Homo sapiens
  misc_RNA (1)...(19): siRNA sense strand
cuggcagccugucaucauu

SEQ ID NO: 2036434 - RNA, 19 nt, Homo sapiens
  misc_RNA (1)...(19): siRNA sense strand
cagaaaugugugcagacua

SEQ ID NO: 2036435 - RNA, 19 nt, Homo sapiens
  misc_RNA (1)...(19): siRNA sense strand
cugcuggacuggcuucgau

SEQ ID NO: 2036436 - RNA, 19 nt, Homo sapiens
  misc_RNA (1)...(19): siRNA sense strand
cgucauguaugggcaacug

SEQ ID NO: 2036437 - RNA, 19 nt, Homo sapiens
  misc_RNA (1)...(19): siRNA sense strand
cagugugugugcugugugu

SEQ ID NO: 2036438 - RNA, 19 nt, Homo sapiens
  misc_RNA (1)...(19): siRNA sense strand
ucucuucuauggccucuac

SEQ ID NO: 2036439 - RNA, 19 nt, Homo sapiens
  misc_RNA (1)...(19): siRNA sense strand
uccaaggcaucaacuacau

SEQ ID NO: 2036440 - RNA, 19 nt, Homo sapiens
  misc_RNA (1)...(19): siRNA sense strand
gggagaggccucacgucau

SEQ ID NO: 2036441 - RNA, 19 nt, Homo sapiens
  misc_RNA (1)...(19): siRNA sense strand
caagaggauguucagcaau

SEQ ID NO: 2036442 - RNA, 19 nt, Homo sapiens
  misc_RNA (1)...(19): siRNA sense strand
aggcuguccugcaaucaug

SEQ ID NO: 2036443 - RNA, 19 nt, Homo sapiens
  misc_RNA (1)...(19): siRNA sense strand
gcagacuacauggcaucua

SEQ ID NO: 2036444 - RNA, 19 nt, Homo sapiens
  misc_RNA (1)...(19): siRNA sense strand
gaacgggacuuugcagaaa

SEQ ID NO: 2036445 - RNA, 19 nt, Homo sapiens
  misc_RNA (1)...(19): siRNA sense strand
ggagaggccucacgucaug

SEQ ID NO: 2036446 - RNA, 19 nt, Homo sapiens
  misc_RNA (1)...(19): siRNA sense strand
ggacuggcuucgauacuug

SEQ ID NO: 2036447 - RNA, 19 nt, Homo sapiens
  misc_RNA (1)...(19): siRNA sense strand
gcaucucccuucucuucua

SEQ ID NO: 2036448 - RNA, 19 nt, Homo sapiens
  misc_RNA (1)...(19): siRNA sense strand
ucaagaggauguucagcaa

SEQ ID NO: 2036449 - RNA, 19 nt, Homo sapiens
  misc_RNA (1)...(19): siRNA sense strand
ggacuuugcagaaaugugu

SEQ ID NO: 2036450 - RNA, 19 nt, Homo sapiens
  misc_RNA (1)...(19): siRNA sense strand
ggaacgggacuuugcagaa

SEQ ID NO: 2036451 - RNA, 19 nt, Homo sapiens
  misc_RNA (1)...(19): siRNA sense strand
cguauaggcuguccugcaa

SEQ ID NO: 2036452 - RNA, 19 nt, Homo sapiens
  misc_RNA (1)...(19): siRNA sense strand
gaagaugccauggacuuug

SEQ ID NO: 2036453 - RNA, 19 nt, Homo sapiens
  misc_RNA (1)...(19): siRNA sense strand
gggcaugccuaccaaacau

SEQ ID NO: 2036454 - RNA, 19 nt, Homo sapiens
  misc_RNA (1)...(19): siRNA sense strand
gcagaaaugugugcagacu

SEQ ID NO: 2036455 - RNA, 19 nt, Homo sapiens
  misc_RNA (1)...(19): siRNA sense strand
agaaaugugugcagacuac

SEQ ID NO: 2036456 - RNA, 19 nt, Homo sapiens
  misc_RNA (1)...(19): siRNA sense strand
caagcaccguggccaugaa

SEQ ID NO: 2036457 - RNA, 19 nt, Homo sapiens
  misc_RNA (1)...(19): siRNA sense strand
gcuggugcaucgugggaaa

SEQ ID NO: 2036458 - RNA, 19 nt, Homo sapiens
  misc_RNA (1)...(19): siRNA sense strand
ucuauggccucuacuaugg

SEQ ID NO: 2036459 - RNA, 19 nt, Homo sapiens
  misc_RNA (1)...(19): siRNA sense strand
aagaggauguucagcaauc

SEQ ID NO: 2036460 - RNA, 19 nt, Homo sapiens
  misc_RNA (1)...(19): siRNA sense strand
cagaagaugccauggacuu

SEQ ID NO: 2036461 - RNA, 19 nt, Homo sapiens
  misc_RNA (1)...(19): siRNA sense strand
gaagcuaugcaugcugaaa

SEQ ID NO: 2036462 - RNA, 19 nt, Homo sapiens
  misc_RNA (1)...(19): siRNA sense strand
aaacgugucccuacugcaa

SEQ ID NO: 2036463 - RNA, 19 nt, Homo sapiens
  misc_RNA (1)...(19): siRNA sense strand
cagacuacauggcaucuac

SEQ ID NO: 2036464 - RNA, 19 nt, Homo sapiens
  misc_RNA (1)...(19): siRNA sense strand
cuaccaaacaucuuucaga

SEQ ID NO: 2036465 - RNA, 19 nt, Homo sapiens
  misc_RNA (1)...(19): siRNA sense strand
ggccucacgucauguaugg

SEQ ID NO: 2036466 - RNA, 19 nt, Homo sapiens
  misc_RNA (1)...(19): siRNA sense strand
caucucccuucucuucuau

SEQ ID NO: 2036467 - RNA, 19 nt, Homo sapiens
  misc_RNA (1)...(19): siRNA sense strand
gcacccacgcuccuacaau

SEQ ID NO: 2036468 - RNA, 19 nt, Homo sapiens
  misc_RNA (1)...(19): siRNA sense strand
guccugcaaucaugucuuc

SEQ ID NO: 2036469 - RNA, 19 nt, Homo sapiens
  misc_RNA (1)...(19): siRNA sense strand
uauaggcuguccugcaauc

SEQ ID NO: 2036470 - RNA, 19 nt, Homo sapiens
  misc_RNA (1)...(19): siRNA sense strand
gaucauugagaacacguau

SEQ ID NO: 2036471 - RNA, 19 nt, Homo sapiens
  misc_RNA (1)...(19): siRNA sense strand
gaagaggggaucauugaga

SEQ ID NO: 2036472 - RNA, 19 nt, Homo sapiens
  misc_RNA (1)...(19): siRNA sense strand
ucauugagaacacguauag

SEQ ID NO: 2036473 - RNA, 19 nt, Homo sapiens
  misc_RNA (1)...(19): siRNA sense strand
caaacaucuuucagacagu

SEQ ID NO: 2036474 - RNA, 19 nt, Homo sapiens
  misc_RNA (1)...(19): siRNA sense strand
uggcaucucccuucucuuc

SEQ ID NO: 2036475 - RNA, 19 nt, Homo sapiens
  misc_RNA (1)...(19): siRNA sense strand
caucuaccauaggguucua

SEQ ID NO: 2036476 - RNA, 19 nt, Homo sapiens
  misc_RNA (1)...(19): siRNA sense strand
uggacuggcuucgauacuu

SEQ ID NO: 2036477 - RNA, 19 nt, Homo sapiens
  misc_RNA (1)...(19): siRNA sense strand
ugucaucauugguguaguc

SEQ ID NO: 2036478 - RNA, 19 nt, Homo sapiens
  misc_RNA (1)...(19): siRNA sense strand
aagcaaacgugucccuacu

SEQ ID NO: 2036479 - RNA, 19 nt, Homo sapiens
  misc_RNA (1)...(19): siRNA sense strand
ccaagcaccguggccauga

SEQ ID NO: 2036480 - RNA, 19 nt, Homo sapiens
  misc_RNA (1)...(19): siRNA sense strand
ccucuacuauggaguucug

SEQ ID NO: 2036481 - RNA, 19 nt, Homo sapiens
  misc_RNA (1)...(19): siRNA sense strand
agaagaugccauggacuuu

SEQ ID NO: 2036482 - RNA, 19 nt, Homo sapiens
  misc_RNA (1)...(19): siRNA sense strand
aagaugccauggacuuugg

SEQ ID NO: 2036483 - RNA, 19 nt, Homo sapiens
  misc_RNA (1)...(19): siRNA sense strand
cuggcagccugucaucauu

SEQ ID NO: 2036484 - RNA, 19 nt, Homo sapiens
  misc_RNA (1)...(19): siRNA sense strand
cagaaaugugugcagacua

SEQ ID NO: 2036485 - RNA, 19 nt, Homo sapiens
  misc_RNA (1)...(19): siRNA sense strand
cugcuggacuggcuucgau

SEQ ID NO: 2036486 - RNA, 19 nt, Homo sapiens
  misc_RNA (1)...(19): siRNA sense strand
cgucauguaugggcaacug

SEQ ID NO: 2036487 - RNA, 19 nt, Homo sapiens
  misc_RNA (1)...(19): siRNA sense strand
cagugugugugcugugugu

SEQ ID NO: 2036488 - RNA, 19 nt, Homo sapiens
  misc_RNA (1)...(19): siRNA sense strand
ucucuucuauggccucuac

SEQ ID NO: 2036489 - RNA, 19 nt, Homo sapiens
  misc_RNA (1)...(19): siRNA sense strand
uccaaggcaucaacuacau

SEQ ID NO: 2036490 - RNA, 19 nt, Homo sapiens
  misc_RNA (1)...(19): siRNA sense strand
gggagaggccucacgucau

SEQ ID NO: 2036491 - RNA, 19 nt, Homo sapiens
  misc_RNA (1)...(19): siRNA sense strand
caagaggauguucagcaau

SEQ ID NO: 2036492 - RNA, 19 nt, Homo sapiens
  misc_RNA (1)...(19): siRNA sense strand
aggcuguccugcaaucaug

SEQ ID NO: 2036493 - RNA, 19 nt, Homo sapiens
  misc_RNA (1)...(19): siRNA sense strand
gcagacuacauggcaucua

SEQ ID NO: 2036494 - RNA, 19 nt, Homo sapiens
  misc_RNA (1)...(19): siRNA sense strand
gaacgggacuuugcagaaa

SEQ ID NO: 2036495 - RNA, 19 nt, Homo sapiens
  misc_RNA (1)...(19): siRNA sense strand
ggagaggccucacgucaug

SEQ ID NO: 2036496 - RNA, 19 nt, Homo sapiens
  misc_RNA (1)...(19): siRNA sense strand
ggacuggcuucgauacuug

SEQ ID NO: 2036497 - RNA, 19 nt, Homo sapiens
  misc_RNA (1)...(19): siRNA sense strand
gcaucucccuucucuucua

SEQ ID NO: 2036498 - RNA, 19 nt, Homo sapiens
  misc_RNA (1)...(19): siRNA sense strand
ucaagaggauguucagcaa

SEQ ID NO: 2036499 - RNA, 19 nt, Homo sapiens
  misc_RNA (1)...(19): siRNA sense strand
ggacuuugcagaaaugugu

SEQ ID NO: 2036500 - RNA, 19 nt, Homo sapiens
  misc_RNA (1)...(19): siRNA sense strand
ggaacgggacuuugcagaa

SEQ ID NO: 2036501 - RNA, 19 nt, Homo sapiens
  misc_RNA (1)...(19): siRNA sense strand
cguauaggcuguccugcaa

SEQ ID NO: 2036502 - RNA, 19 nt, Homo sapiens
  misc_RNA (1)...(19): siRNA sense strand
gaagaugccauggacuuug

SEQ ID NO: 2036503 - RNA, 19 nt, Homo sapiens
  misc_RNA (1)...(19): siRNA sense strand
gggcaugccuaccaaacau

SEQ ID NO: 2036504 - RNA, 19 nt, Homo sapiens
  misc_RNA (1)...(19): siRNA sense strand
gcagaaaugugugcagacu

SEQ ID NO: 2036505 - RNA, 19 nt, Homo sapiens
  misc_RNA (1)...(19): siRNA sense strand
agaaaugugugcagacuac

SEQ ID NO: 2036506 - RNA, 19 nt, Homo sapiens
  misc_RNA (1)...(19): siRNA sense strand
caagcaccguggccaugaa

SEQ ID NO: 2036507 - RNA, 19 nt, Homo sapiens
  misc_RNA (1)...(19): siRNA sense strand
gcuggugcaucgugggaaa

SEQ ID NO: 2036508 - RNA, 19 nt, Homo sapiens
  misc_RNA (1)...(19): siRNA sense strand
ucuauggccucuacuaugg

SEQ ID NO: 2036509 - RNA, 19 nt, Homo sapiens
  misc_RNA (1)...(19): siRNA sense strand
aagaggauguucagcaauc

SEQ ID NO: 2036510 - RNA, 19 nt, Homo sapiens
  misc_RNA (1)...(19): siRNA sense strand
gaagcuaugcaugcugaaa

SEQ ID NO: 2036511 - RNA, 19 nt, Homo sapiens
  misc_RNA (1)...(19): siRNA sense strand
cagaagaugccauggacuu

SEQ ID NO: 2036512 - RNA, 19 nt, Homo sapiens
  misc_RNA (1)...(19): siRNA sense strand
aaacgugucccuacugcaa

SEQ ID NO: 2036513 - RNA, 19 nt, Homo sapiens
  misc_RNA (1)...(19): siRNA sense strand
cagacuacauggcaucuac

SEQ ID NO: 2036514 - RNA, 19 nt, Homo sapiens
  misc_RNA (1)...(19): siRNA sense strand
cuaccaaacaucuuucaga

SEQ ID NO: 2036515 - RNA, 19 nt, Homo sapiens
  misc_RNA (1)...(19): siRNA sense strand
ggccucacgucauguaugg

SEQ ID NO: 2036516 - RNA, 19 nt, Homo sapiens
  misc_RNA (1)...(19): siRNA sense strand
caucucccuucucuucuau

SEQ ID NO: 2036517 - RNA, 19 nt, Homo sapiens
  misc_RNA (1)...(19): siRNA sense strand
gcacccacgcuccuacaau

SEQ ID NO: 2036518 - RNA, 19 nt, Homo sapiens
  misc_RNA (1)...(19): siRNA sense strand
guccugcaaucaugucuuc

SEQ ID NO: 2036519 - RNA, 19 nt, Homo sapiens
  misc_RNA (1)...(19): siRNA sense strand
uauaggcuguccugcaauc

SEQ ID NO: 2036520 - RNA, 19 nt, Homo sapiens
  misc_RNA (1)...(19): siRNA sense strand
gaucauugagaacacguau

SEQ ID NO: 2036521 - RNA, 19 nt, Homo sapiens
  misc_RNA (1)...(19): siRNA sense strand
gggaacgggagcuggauga

SEQ ID NO: 2036522 - RNA, 19 nt, Homo sapiens
  misc_RNA (1)...(19): siRNA sense strand
ucauugagaacacguauag

SEQ ID NO: 2036523 - RNA, 19 nt, Homo sapiens
  misc_RNA (1)...(19): siRNA sense strand
gaagaggggaucauugaga

SEQ ID NO: 2036524 - RNA, 19 nt, Homo sapiens
  misc_RNA (1)...(19): siRNA sense strand
caaacaucuuucagacagu

SEQ ID NO: 2036525 - RNA, 19 nt, Homo sapiens
  misc_RNA (1)...(19): siRNA sense strand
uggcaucucccuucucuuc

SEQ ID NO: 2036526 - RNA, 19 nt, Homo sapiens
  misc_RNA (1)...(19): siRNA sense strand
caucuaccauaggguucua

SEQ ID NO: 2036527 - RNA, 19 nt, Homo sapiens
  misc_RNA (1)...(19): siRNA sense strand
uggacuggcuucgauacuu

SEQ ID NO: 2036528 - RNA, 19 nt, Homo sapiens
  misc_RNA (1)...(19): siRNA sense strand
ugucaucauugguguaguc

SEQ ID NO: 2036529 - RNA, 19 nt, Homo sapiens
  misc_RNA (1)...(19): siRNA sense strand
ccaagcaccguggccauga

SEQ ID NO: 2036530 - RNA, 19 nt, Homo sapiens
  misc_RNA (1)...(19): siRNA sense strand
aagcaaacgugucccuacu

SEQ ID NO: 2036531 - RNA, 19 nt, Homo sapiens
  misc_RNA (1)...(19): siRNA sense strand
agaagaugccauggacuuu

SEQ ID NO: 2036532 - RNA, 19 nt, Homo sapiens
  misc_RNA (1)...(19): siRNA sense strand
ccucuacuauggaguucug

SEQ ID NO: 2036533 - RNA, 19 nt, Homo sapiens
  misc_RNA (1)...(19): siRNA sense strand
aagaugccauggacuuugg

SEQ ID NO: 2036534 - RNA, 19 nt, Homo sapiens
  misc_RNA (1)...(19): siRNA sense strand
cuggcagccugucaucauu

SEQ ID NO: 2036535 - RNA, 19 nt, Homo sapiens
  misc_RNA (1)...(19): siRNA sense strand
cagaaaugugugcagacua

SEQ ID NO: 2036536 - RNA, 19 nt, Homo sapiens
  misc_RNA (1)...(19): siRNA sense strand
cugcuggacuggcuucgau

SEQ ID NO: 2036537 - RNA, 19 nt, Homo sapiens
  misc_RNA (1)...(19): siRNA sense strand
cgucauguaugggcaacug

SEQ ID NO: 2036538 - RNA, 19 nt, Homo sapiens
  misc_RNA (1)...(19): siRNA sense strand
cagugugugugcugugugu

SEQ ID NO: 2036539 - RNA, 19 nt, Homo sapiens
  misc_RNA (1)...(19): siRNA sense strand
ucucuucuauggccucuac

SEQ ID NO: 2036540 - RNA, 19 nt, Homo sapiens
  misc_RNA (1)...(19): siRNA sense strand
uccaaggcaucaacuacau

SEQ ID NO: 2036541 - RNA, 19 nt, Homo sapiens
  misc_RNA (1)...(19): siRNA sense strand
gggagaggccucacgucau

SEQ ID NO: 2036542 - RNA, 19 nt, Homo sapiens
  misc_RNA (1)...(19): siRNA sense strand
caagaggauguucagcaau

SEQ ID NO: 2036543 - RNA, 19 nt, Homo sapiens
  misc_RNA (1)...(19): siRNA sense strand
aggcuguccugcaaucaug

SEQ ID NO: 2036544 - RNA, 19 nt, Homo sapiens
  misc_RNA (1)...(19): siRNA sense strand
gcagacuacauggcaucua

SEQ ID NO: 2036545 - RNA, 19 nt, Homo sapiens
  misc_RNA (1)...(19): siRNA sense strand
gaacgggacuuugcagaaa

SEQ ID NO: 2036546 - RNA, 19 nt, Homo sapiens
  misc_RNA (1)...(19): siRNA sense strand
ggagaggccucacgucaug

SEQ ID NO: 2036547 - RNA, 19 nt, Homo sapiens
  misc_RNA (1)...(19): siRNA sense strand
ggacuggcuucgauacuug

SEQ ID NO: 2036548 - RNA, 19 nt, Homo sapiens
  misc_RNA (1)...(19): siRNA sense strand
gcaucucccuucucuucua

SEQ ID NO: 2036549 - RNA, 19 nt, Homo sapiens
  misc_RNA (1)...(19): siRNA sense strand
ucaagaggauguucagcaa

SEQ ID NO: 2036550 - RNA, 19 nt, Homo sapiens
  misc_RNA (1)...(19): siRNA sense strand
ggacuuugcagaaaugugu

SEQ ID NO: 2036551 - RNA, 19 nt, Homo sapiens
  misc_RNA (1)...(19): siRNA sense strand
ggaacgggacuuugcagaa

SEQ ID NO: 2036552 - RNA, 19 nt, Homo sapiens
  misc_RNA (1)...(19): siRNA sense strand
cguauaggcuguccugcaa

SEQ ID NO: 2036553 - RNA, 19 nt, Homo sapiens
  misc_RNA (1)...(19): siRNA sense strand
gaagaugccauggacuuug

SEQ ID NO: 2036554 - RNA, 19 nt, Homo sapiens
  misc_RNA (1)...(19): siRNA sense strand
gggcaugccuaccaaacau

SEQ ID NO: 2036555 - RNA, 19 nt, Homo sapiens
  misc_RNA (1)...(19): siRNA sense strand
gcagaaaugugugcagacu

SEQ ID NO: 2036556 - RNA, 19 nt, Homo sapiens
  misc_RNA (1)...(19): siRNA sense strand
agaaaugugugcagacuac

SEQ ID NO: 2036557 - RNA, 19 nt, Homo sapiens
  misc_RNA (1)...(19): siRNA sense strand
caagcaccguggccaugaa

SEQ ID NO: 2036558 - RNA, 19 nt, Homo sapiens
  misc_RNA (1)...(19): siRNA sense strand
gcuggugcaucgugggaaa

SEQ ID NO: 2036559 - RNA, 19 nt, Homo sapiens
  misc_RNA (1)...(19): siRNA sense strand
ucuauggccucuacuaugg

SEQ ID NO: 2036560 - RNA, 19 nt, Homo sapiens
  misc_RNA (1)...(19): siRNA sense strand
aagaggauguucagcaauc

SEQ ID NO: 2036561 - RNA, 19 nt, Homo sapiens
  misc_RNA (1)...(19): siRNA sense strand
cagaagaugccauggacuu

SEQ ID NO: 2036562 - RNA, 19 nt, Homo sapiens
  misc_RNA (1)...(19): siRNA sense strand
gaagcuaugcaugcugaaa

SEQ ID NO: 2036563 - RNA, 19 nt, Homo sapiens
  misc_RNA (1)...(19): siRNA sense strand
aaacgugucccuacugcaa

SEQ ID NO: 2036564 - RNA, 19 nt, Homo sapiens
  misc_RNA (1)...(19): siRNA sense strand
cagacuacauggcaucuac

SEQ ID NO: 2036565 - RNA, 19 nt, Homo sapiens
  misc_RNA (1)...(19): siRNA sense strand
cuaccaaacaucuuucaga

SEQ ID NO: 2036566 - RNA, 19 nt, Homo sapiens
  misc_RNA (1)...(19): siRNA sense strand
ggccucacgucauguaugg

SEQ ID NO: 2036567 - RNA, 19 nt, Homo sapiens
  misc_RNA (1)...(19): siRNA sense strand
caucucccuucucuucuau

SEQ ID NO: 2036568 - RNA, 19 nt, Homo sapiens
  misc_RNA (1)...(19): siRNA sense strand
gcacccacgcuccuacaau

SEQ ID NO: 2036569 - RNA, 19 nt, Homo sapiens
  misc_RNA (1)...(19): siRNA sense strand
guccugcaaucaugucuuc

SEQ ID NO: 2036570 - RNA, 19 nt, Homo sapiens
  misc_RNA (1)...(19): siRNA sense strand
uauaggcuguccugcaauc

SEQ ID NO: 2036571 - RNA, 19 nt, Homo sapiens
  misc_RNA (1)...(19): siRNA sense strand
gaucauugagaacacguau

SEQ ID NO: 2036572 - RNA, 19 nt, Homo sapiens
  misc_RNA (1)...(19): siRNA sense strand
gaagaggggaucauugaga

SEQ ID NO: 2036573 - RNA, 19 nt, Homo sapiens
  misc_RNA (1)...(19): siRNA sense strand
ucauugagaacacguauag

SEQ ID NO: 2036574 - RNA, 19 nt, Homo sapiens
  misc_RNA (1)...(19): siRNA sense strand
caaacaucuuucagacagu

SEQ ID NO: 2036575 - RNA, 19 nt, Homo sapiens
  misc_RNA (1)...(19): siRNA sense strand
uggcaucucccuucucuuc

SEQ ID NO: 2036576 - RNA, 19 nt, Homo sapiens
  misc_RNA (1)...(19): siRNA sense strand
caucuaccauaggguucua

SEQ ID NO: 2036577 - RNA, 19 nt, Homo sapiens
  misc_RNA (1)...(19): siRNA sense strand
uggacuggcuucgauacuu

SEQ ID NO: 2036578 - RNA, 19 nt, Homo sapiens
  misc_RNA (1)...(19): siRNA sense strand
ugucaucauugguguaguc

SEQ ID NO: 2036579 - RNA, 19 nt, Homo sapiens
  misc_RNA (1)...(19): siRNA sense strand
aagcaaacgugucccuacu

SEQ ID NO: 2036580 - RNA, 19 nt, Homo sapiens
  misc_RNA (1)...(19): siRNA sense strand
ccaagcaccguggccauga

SEQ ID NO: 2036581 - RNA, 19 nt, Homo sapiens
  misc_RNA (1)...(19): siRNA sense strand
ccucuacuauggaguucug

SEQ ID NO: 2036582 - RNA, 19 nt, Homo sapiens
  misc_RNA (1)...(19): siRNA sense strand
agaagaugccauggacuuu

SEQ ID NO: 2036583 - RNA, 19 nt, Homo sapiens
  misc_RNA (1)...(19): siRNA sense strand
aagaugccauggacuuugg

SEQ ID NO: 2036584 - RNA, 19 nt, Homo sapiens
  misc_RNA (1)...(19): siRNA sense strand
cuggcagccugucaucauu

SEQ ID NO: 2036585 - RNA, 19 nt, Homo sapiens
  misc_RNA (1)...(19): siRNA sense strand
cagaaaugugugcagacua

SEQ ID NO: 2036586 - RNA, 19 nt, Homo sapiens
  misc_RNA (1)...(19): siRNA sense strand
cugcuggacuggcuucgau

SEQ ID NO: 2036587 - RNA, 19 nt, Homo sapiens
  misc_RNA (1)...(19): siRNA sense strand
cgucauguaugggcaacug

SEQ ID NO: 2036588 - RNA, 19 nt, Homo sapiens
  misc_RNA (1)...(19): siRNA sense strand
cagugugugugcugugugu

SEQ ID NO: 2036589 - RNA, 19 nt, Homo sapiens
  misc_RNA (1)...(19): siRNA sense strand
ucucuucuauggccucuac

SEQ ID NO: 2036590 - RNA, 19 nt, Homo sapiens
  misc_RNA (1)...(19): siRNA sense strand
uccaaggcaucaacuacau

SEQ ID NO: 2036591 - RNA, 19 nt, Homo sapiens
  misc_RNA (1)...(19): siRNA sense strand
gggagaggccucacgucau

SEQ ID NO: 2036592 - RNA, 19 nt, Homo sapiens
  misc_RNA (1)...(19): siRNA sense strand
caagaggauguucagcaau

SEQ ID NO: 2036593 - RNA, 19 nt, Homo sapiens
  misc_RNA (1)...(19): siRNA sense strand
aggcuguccugcaaucaug

SEQ ID NO: 2036594 - RNA, 19 nt, Homo sapiens
  misc_RNA (1)...(19): siRNA sense strand
gcagacuacauggcaucua

SEQ ID NO: 2036595 - RNA, 19 nt, Homo sapiens
  misc_RNA (1)...(19): siRNA sense strand
gaacgggacuuugcagaaa

SEQ ID NO: 2036596 - RNA, 19 nt, Homo sapiens
  misc_RNA (1)...(19): siRNA sense strand
ggagaggccucacgucaug

SEQ ID NO: 2036597 - RNA, 19 nt, Homo sapiens
  misc_RNA (1)...(19): siRNA sense strand
ggacuggcuucgauacuug

SEQ ID NO: 2036598 - RNA, 19 nt, Homo sapiens
  misc_RNA (1)...(19): siRNA sense strand
gcaucucccuucucuucua

SEQ ID NO: 2036599 - RNA, 19 nt, Homo sapiens
  misc_RNA (1)...(19): siRNA sense strand
ucaagaggauguucagcaa

SEQ ID NO: 2036600 - RNA, 19 nt, Homo sapiens
  misc_RNA (1)...(19): siRNA sense strand
ggacuuugcagaaaugugu

SEQ ID NO: 2036601 - RNA, 19 nt, Homo sapiens
  misc_RNA (1)...(19): siRNA sense strand
ggaacgggacuuugcagaa

SEQ ID NO: 2036602 - RNA, 19 nt, Homo sapiens
  misc_RNA (1)...(19): siRNA sense strand
cguauaggcuguccugcaa

SEQ ID NO: 2036603 - RNA, 19 nt, Homo sapiens
  misc_RNA (1)...(19): siRNA sense strand
gaagaugccauggacuuug

SEQ ID NO: 2036604 - RNA, 19 nt, Homo sapiens
  misc_RNA (1)...(19): siRNA sense strand
gggcaugccuaccaaacau

SEQ ID NO: 2036605 - RNA, 19 nt, Homo sapiens
  misc_RNA (1)...(19): siRNA sense strand
gcagaaaugugugcagacu

SEQ ID NO: 2036606 - RNA, 19 nt, Homo sapiens
  misc_RNA (1)...(19): siRNA sense strand
agaaaugugugcagacuac

SEQ ID NO: 2036607 - RNA, 19 nt, Homo sapiens
  misc_RNA (1)...(19): siRNA sense strand
caagcaccguggccaugaa

SEQ ID NO: 2036608 - RNA, 19 nt, Homo sapiens
  misc_RNA (1)...(19): siRNA sense strand
gcuggugcaucgugggaaa

SEQ ID NO: 2036609 - RNA, 19 nt, Homo sapiens
  misc_RNA (1)...(19): siRNA sense strand
ucuauggccucuacuaugg

SEQ ID NO: 2036610 - RNA, 19 nt, Homo sapiens
  misc_RNA (1)...(19): siRNA sense strand
aagaggauguucagcaauc

SEQ ID NO: 2036611 - RNA, 19 nt, Homo sapiens
  misc_RNA (1)...(19): siRNA sense strand
cagaagaugccauggacuu

SEQ ID NO: 2036612 - RNA, 19 nt, Homo sapiens
  misc_RNA (1)...(19): siRNA sense strand
gaagcuaugcaugcugaaa

SEQ ID NO: 2036613 - RNA, 19 nt, Homo sapiens
  misc_RNA (1)...(19): siRNA sense strand
aaacgugucccuacugcaa

SEQ ID NO: 2036614 - RNA, 19 nt, Homo sapiens
  misc_RNA (1)...(19): siRNA sense strand
cagacuacauggcaucuac

SEQ ID NO: 2036615 - RNA, 19 nt, Homo sapiens
  misc_RNA (1)...(19): siRNA sense strand
cuaccaaacaucuuucaga

SEQ ID NO: 2036616 - RNA, 19 nt, Homo sapiens
  misc_RNA (1)...(19): siRNA sense strand
ggccucacgucauguaugg

SEQ ID NO: 2036617 - RNA, 19 nt, Homo sapiens
  misc_RNA (1)...(19): siRNA sense strand
caucucccuucucuucuau

SEQ ID NO: 2036618 - RNA, 19 nt, Homo sapiens
  misc_RNA (1)...(19): siRNA sense strand
gcacccacgcuccuacaau

SEQ ID NO: 2036619 - RNA, 19 nt, Homo sapiens
  misc_RNA (1)...(19): siRNA sense strand
guccugcaaucaugucuuc

SEQ ID NO: 2036620 - RNA, 19 nt, Homo sapiens
  misc_RNA (1)...(19): siRNA sense strand
uauaggcuguccugcaauc

SEQ ID NO: 2036621 - RNA, 19 nt, Homo sapiens
  misc_RNA (1)...(19): siRNA sense strand
gaucauugagaacacguau

SEQ ID NO: 2036622 - RNA, 19 nt, Homo sapiens
  misc_RNA (1)...(19): siRNA sense strand
gaagaggggaucauugaga

SEQ ID NO: 2036623 - RNA, 19 nt, Homo sapiens
  misc_RNA (1)...(19): siRNA sense strand
ucauugagaacacguauag

SEQ ID NO: 2036624 - RNA, 19 nt, Homo sapiens
  misc_RNA (1)...(19): siRNA sense strand
caaacaucuuucagacagu

SEQ ID NO: 2036625 - RNA, 19 nt, Homo sapiens
  misc_RNA (1)...(19): siRNA sense strand
uggcaucucccuucucuuc

SEQ ID NO: 2036626 - RNA, 19 nt, Homo sapiens
  misc_RNA (1)...(19): siRNA sense strand
caucuaccauaggguucua

SEQ ID NO: 2036627 - RNA, 19 nt, Homo sapiens
  misc_RNA (1)...(19): siRNA sense strand
uggacuggcuucgauacuu

SEQ ID NO: 2036628 - RNA, 19 nt, Homo sapiens
  misc_RNA (1)...(19): siRNA sense strand
ugucaucauugguguaguc

SEQ ID NO: 2036629 - RNA, 19 nt, Homo sapiens
  misc_RNA (1)...(19): siRNA sense strand
aagcaaacgugucccuacu

SEQ ID NO: 2036630 - RNA, 19 nt, Homo sapiens
  misc_RNA (1)...(19): siRNA sense strand
ccaagcaccguggccauga

SEQ ID NO: 2036631 - RNA, 19 nt, Homo sapiens
  misc_RNA (1)...(19): siRNA sense strand
ccucuacuauggaguucug

SEQ ID NO: 2036632 - RNA, 19 nt, Homo sapiens
  misc_RNA (1)...(19): siRNA sense strand
agaagaugccauggacuuu

SEQ ID NO: 2036633 - RNA, 19 nt, Homo sapiens
  misc_RNA (1)...(19): siRNA sense strand
aagaugccauggacuuugg

SEQ ID NO: 2036634 - RNA, 19 nt, Homo sapiens
  misc_RNA (1)...(19): siRNA sense strand
cuggcagccugucaucauu

SEQ ID NO: 2036635 - RNA, 19 nt, Homo sapiens
  misc_RNA (1)...(19): siRNA sense strand
cagaaaugugugcagacua

SEQ ID NO: 2036636 - RNA, 19 nt, Homo sapiens
  misc_RNA (1)...(19): siRNA sense strand
cugcuggacuggcuucgau

SEQ ID NO: 2036637 - RNA, 19 nt, Homo sapiens
  misc_RNA (1)...(19): siRNA sense strand
cgucauguaugggcaacug

SEQ ID NO: 2036638 - RNA, 19 nt, Homo sapiens
  misc_RNA (1)...(19): siRNA sense strand
cagugugugugcugugugu

SEQ ID NO: 2036639 - RNA, 19 nt, Homo sapiens
  misc_RNA (1)...(19): siRNA sense strand
ucucuucuauggccucuac

SEQ ID NO: 2036640 - RNA, 19 nt, Homo sapiens
  misc_RNA (1)...(19): siRNA sense strand
uccaaggcaucaacuacau

SEQ ID NO: 2036641 - RNA, 19 nt, Homo sapiens
  misc_RNA (1)...(19): siRNA sense strand
gggagaggccucacgucau

SEQ ID NO: 2036642 - RNA, 19 nt, Homo sapiens
  misc_RNA (1)...(19): siRNA sense strand
caagaggauguucagcaau

SEQ ID NO: 2036643 - RNA, 19 nt, Homo sapiens
  misc_RNA (1)...(19): siRNA sense strand
aggcuguccugcaaucaug

SEQ ID NO: 2036644 - RNA, 19 nt, Homo sapiens
  misc_RNA (1)...(19): siRNA sense strand
gcagacuacauggcaucua

SEQ ID NO: 2036645 - RNA, 19 nt, Homo sapiens
  misc_RNA (1)...(19): siRNA sense strand
gaacgggacuuugcagaaa

SEQ ID NO: 2036646 - RNA, 19 nt, Homo sapiens
  misc_RNA (1)...(19): siRNA sense strand
ggagaggccucacgucaug

SEQ ID NO: 2036647 - RNA, 19 nt, Homo sapiens
  misc_RNA (1)...(19): siRNA sense strand
ggacuggcuucgauacuug

SEQ ID NO: 2036648 - RNA, 19 nt, Homo sapiens
  misc_RNA (1)...(19): siRNA sense strand
gcaucucccuucucuucua

SEQ ID NO: 2036649 - RNA, 19 nt, Homo sapiens
  misc_RNA (1)...(19): siRNA sense strand
ucaagaggauguucagcaa

SEQ ID NO: 2036650 - RNA, 19 nt, Homo sapiens
  misc_RNA (1)...(19): siRNA sense strand
ggacuuugcagaaaugugu

SEQ ID NO: 2036651 - RNA, 19 nt, Homo sapiens
  misc_RNA (1)...(19): siRNA sense strand
ggaacgggacuuugcagaa

SEQ ID NO: 2036652 - RNA, 19 nt, Homo sapiens
  misc_RNA (1)...(19): siRNA sense strand
cguauaggcuguccugcaa

SEQ ID NO: 2036653 - RNA, 19 nt, Homo sapiens
  misc_RNA (1)...(19): siRNA sense strand
gaagaugccauggacuuug

SEQ ID NO: 2036654 - RNA, 19 nt, Homo sapiens
  misc_RNA (1)...(19): siRNA sense strand
gggcaugccuaccaaacau

SEQ ID NO: 2036655 - RNA, 19 nt, Homo sapiens
  misc_RNA (1)...(19): siRNA sense strand
gcagaaaugugugcagacu

SEQ ID NO: 2036656 - RNA, 19 nt, Homo sapiens
  misc_RNA (1)...(19): siRNA sense strand
agaaaugugugcagacuac

SEQ ID NO: 2036657 - RNA, 19 nt, Homo sapiens
  misc_RNA (1)...(19): siRNA sense strand
caagcaccguggccaugaa

SEQ ID NO: 2036658 - RNA, 19 nt, Homo sapiens
  misc_RNA (1)...(19): siRNA sense strand
gcuggugcaucgugggaaa

SEQ ID NO: 2036659 - RNA, 19 nt, Homo sapiens
  misc_RNA (1)...(19): siRNA sense strand
ucuauggccucuacuaugg

SEQ ID NO: 2036660 - RNA, 19 nt, Homo sapiens
  misc_RNA (1)...(19): siRNA sense strand
aagaggauguucagcaauc

SEQ ID NO: 2036661 - RNA, 19 nt, Homo sapiens
  misc_RNA (1)...(19): siRNA sense strand
gaagcuaugcaugcugaaa

SEQ ID NO: 2036662 - RNA, 19 nt, Homo sapiens
  misc_RNA (1)...(19): siRNA sense strand
cagaagaugccauggacuu

SEQ ID NO: 2036663 - RNA, 19 nt, Homo sapiens
  misc_RNA (1)...(19): siRNA sense strand
aaacgugucccuacugcaa

SEQ ID NO: 2036664 - RNA, 19 nt, Homo sapiens
  misc_RNA (1)...(19): siRNA sense strand
cagacuacauggcaucuac

SEQ ID NO: 2036665 - RNA, 19 nt, Homo sapiens
  misc_RNA (1)...(19): siRNA sense strand
cuaccaaacaucuuucaga

SEQ ID NO: 2036666 - RNA, 19 nt, Homo sapiens
  misc_RNA (1)...(19): siRNA sense strand
ggccucacgucauguaugg

SEQ ID NO: 2036667 - RNA, 19 nt, Homo sapiens
  misc_RNA (1)...(19): siRNA sense strand
caucucccuucucuucuau

SEQ ID NO: 2036668 - RNA, 19 nt, Homo sapiens
  misc_RNA (1)...(19): siRNA sense strand
gcacccacgcuccuacaau

SEQ ID NO: 2036669 - RNA, 19 nt, Homo sapiens
  misc_RNA (1)...(19): siRNA sense strand
guccugcaaucaugucuuc

SEQ ID NO: 2036670 - RNA, 19 nt, Homo sapiens
  misc_RNA (1)...(19): siRNA sense strand
uauaggcuguccugcaauc

SEQ ID NO: 2036671 - RNA, 19 nt, Homo sapiens
  misc_RNA (1)...(19): siRNA sense strand
gaucauugagaacacguau

SEQ ID NO: 2036672 - RNA, 19 nt, Homo sapiens
  misc_RNA (1)...(19): siRNA sense strand
gggaacgggagcuggauga

SEQ ID NO: 2036673 - RNA, 19 nt, Homo sapiens
  misc_RNA (1)...(19): siRNA sense strand
ucauugagaacacguauag

SEQ ID NO: 2036674 - RNA, 19 nt, Homo sapiens
  misc_RNA (1)...(19): siRNA sense strand
gaagaggggaucauugaga

SEQ ID NO: 2036675 - RNA, 19 nt, Homo sapiens
  misc_RNA (1)...(19): siRNA sense strand
caaacaucuuucagacagu

SEQ ID NO: 2036676 - RNA, 19 nt, Homo sapiens
  misc_RNA (1)...(19): siRNA sense strand
uggcaucucccuucucuuc

SEQ ID NO: 2036677 - RNA, 19 nt, Homo sapiens
  misc_RNA (1)...(19): siRNA sense strand
caucuaccauaggguucua

SEQ ID NO: 2036678 - RNA, 19 nt, Homo sapiens
  misc_RNA (1)...(19): siRNA sense strand
uggacuggcuucgauacuu

SEQ ID NO: 2036679 - RNA, 19 nt, Homo sapiens
  misc_RNA (1)...(19): siRNA sense strand
ugucaucauugguguaguc

SEQ ID NO: 2036680 - RNA, 19 nt, Homo sapiens
  misc_RNA (1)...(19): siRNA sense strand
ccaagcaccguggccauga

SEQ ID NO: 2036681 - RNA, 19 nt, Homo sapiens
  misc_RNA (1)...(19): siRNA sense strand
aagcaaacgugucccuacu

SEQ ID NO: 2036682 - RNA, 19 nt, Homo sapiens
  misc_RNA (1)...(19): siRNA sense strand
agaagaugccauggacuuu

SEQ ID NO: 2036683 - RNA, 19 nt, Homo sapiens
  misc_RNA (1)...(19): siRNA sense strand
ccucuacuauggaguucug

SEQ ID NO: 2036684 - RNA, 19 nt, Homo sapiens
  misc_RNA (1)...(19): siRNA sense strand
aagaugccauggacuuugg

SEQ ID NO: 2036685 - RNA, 19 nt, Homo sapiens
  misc_RNA (1)...(19): siRNA sense strand
cuggcagccugucaucauu

SEQ ID NO: 2036686 - RNA, 19 nt, Homo sapiens
  misc_RNA (1)...(19): siRNA sense strand
cagaaaugugugcagacua

SEQ ID NO: 2036687 - RNA, 19 nt, Homo sapiens
  misc_RNA (1)...(19): siRNA sense strand
cugcuggacuggcuucgau

SEQ ID NO: 2036688 - RNA, 19 nt, Homo sapiens
  misc_RNA (1)...(19): siRNA sense strand
cgucauguaugggcaacug

SEQ ID NO: 2036689 - RNA, 19 nt, Homo sapiens
  misc_RNA (1)...(19): siRNA sense strand
cagugugugugcugugugu

SEQ ID NO: 2036690 - RNA, 19 nt, Homo sapiens
  misc_RNA (1)...(19): siRNA sense strand
ucucuucuauggccucuac

SEQ ID NO: 2036691 - RNA, 19 nt, Homo sapiens
  misc_RNA (1)...(19): siRNA sense strand
uccaaggcaucaacuacau

SEQ ID NO: 2036692 - RNA, 19 nt, Homo sapiens
  misc_RNA (1)...(19): siRNA sense strand
gggagaggccucacgucau

SEQ ID NO: 2036693 - RNA, 19 nt, Homo sapiens
  misc_RNA (1)...(19): siRNA sense strand
caagaggauguucagcaau

SEQ ID NO: 2036694 - RNA, 19 nt, Homo sapiens
  misc_RNA (1)...(19): siRNA sense strand
aggcuguccugcaaucaug

SEQ ID NO: 2036695 - RNA, 19 nt, Homo sapiens
  misc_RNA (1)...(19): siRNA sense strand
gcagacuacauggcaucua

SEQ ID NO: 2036696 - RNA, 19 nt, Homo sapiens
  misc_RNA (1)...(19): siRNA sense strand
gaacgggacuuugcagaaa

SEQ ID NO: 2036697 - RNA, 19 nt, Homo sapiens
  misc_RNA (1)...(19): siRNA sense strand
ggagaggccucacgucaug

SEQ ID NO: 2036698 - RNA, 19 nt, Homo sapiens
  misc_RNA (1)...(19): siRNA sense strand
ggacuggcuucgauacuug

SEQ ID NO: 2036699 - RNA, 19 nt, Homo sapiens
  misc_RNA (1)...(19): siRNA sense strand
gcaucucccuucucuucua

SEQ ID NO: 2036700 - RNA, 19 nt, Homo sapiens
  misc_RNA (1)...(19): siRNA sense strand
ucaagaggauguucagcaa

SEQ ID NO: 2036701 - RNA, 19 nt, Homo sapiens
  misc_RNA (1)...(19): siRNA sense strand
ggacuuugcagaaaugugu

SEQ ID NO: 2036702 - RNA, 19 nt, Homo sapiens
  misc_RNA (1)...(19): siRNA sense strand
ggaacgggacuuugcagaa

SEQ ID NO: 2036703 - RNA, 19 nt, Homo sapiens
  misc_RNA (1)...(19): siRNA sense strand
cguauaggcuguccugcaa

SEQ ID NO: 2036704 - RNA, 19 nt, Homo sapiens
  misc_RNA (1)...(19): siRNA sense strand
gaagaugccauggacuuug

SEQ ID NO: 2036705 - RNA, 19 nt, Homo sapiens
  misc_RNA (1)...(19): siRNA sense strand
gggcaugccuaccaaacau

SEQ ID NO: 2036706 - RNA, 19 nt, Homo sapiens
  misc_RNA (1)...(19): siRNA sense strand
gcagaaaugugugcagacu

SEQ ID NO: 2036707 - RNA, 19 nt, Homo sapiens
  misc_RNA (1)...(19): siRNA sense strand
agaaaugugugcagacuac

SEQ ID NO: 2036708 - RNA, 19 nt, Homo sapiens
  misc_RNA (1)...(19): siRNA sense strand
caagcaccguggccaugaa

SEQ ID NO: 2036709 - RNA, 19 nt, Homo sapiens
  misc_RNA (1)...(19): siRNA sense strand
gcuggugcaucgugggaaa

SEQ ID NO: 2036710 - RNA, 19 nt, Homo sapiens
  misc_RNA (1)...(19): siRNA sense strand
ucuauggccucuacuaugg

SEQ ID NO: 2036711 - RNA, 19 nt, Homo sapiens
  misc_RNA (1)...(19): siRNA sense strand
aagaggauguucagcaauc

SEQ ID NO: 2036712 - RNA, 19 nt, Homo sapiens
  misc_RNA (1)...(19): siRNA sense strand
cagaagaugccauggacuu

SEQ ID NO: 2036713 - RNA, 19 nt, Homo sapiens
  misc_RNA (1)...(19): siRNA sense strand
gaagcuaugcaugcugaaa

SEQ ID NO: 2036714 - RNA, 19 nt, Homo sapiens
  misc_RNA (1)...(19): siRNA sense strand
aaacgugucccuacugcaa

SEQ ID NO: 2036715 - RNA, 19 nt, Homo sapiens
  misc_RNA (1)...(19): siRNA sense strand
cagacuacauggcaucuac

SEQ ID NO: 2036716 - RNA, 19 nt, Homo sapiens
  misc_RNA (1)...(19): siRNA sense strand
cuaccaaacaucuuucaga

SEQ ID NO: 2036717 - RNA, 19 nt, Homo sapiens
  misc_RNA (1)...(19): siRNA sense strand
ggccucacgucauguaugg

SEQ ID NO: 2036718 - RNA, 19 nt, Homo sapiens
  misc_RNA (1)...(19): siRNA sense strand
caucucccuucucuucuau

SEQ ID NO: 2036719 - RNA, 19 nt, Homo sapiens
  misc_RNA (1)...(19): siRNA sense strand
gcacccacgcuccuacaau

SEQ ID NO: 2036720 - RNA, 19 nt, Homo sapiens
  misc_RNA (1)...(19): siRNA sense strand
guccugcaaucaugucuuc

SEQ ID NO: 2036721 - RNA, 19 nt, Homo sapiens
  misc_RNA (1)...(19): siRNA sense strand
uauaggcuguccugcaauc

SEQ ID NO: 2036722 - RNA, 19 nt, Homo sapiens
  misc_RNA (1)...(19): siRNA sense strand
gaucauugagaacacguau

SEQ ID NO: 2036723 - RNA, 19 nt, Homo sapiens
  misc_RNA (1)...(19): siRNA sense strand
gaagaggggaucauugaga

SEQ ID NO: 2036724 - RNA, 19 nt, Homo sapiens
  misc_RNA (1)...(19): siRNA sense strand
ucauugagaacacguauag

SEQ ID NO: 2036725 - RNA, 19 nt, Homo sapiens
  misc_RNA (1)...(19): siRNA sense strand
caaacaucuuucagacagu

SEQ ID NO: 2036726 - RNA, 19 nt, Homo sapiens
  misc_RNA (1)...(19): siRNA sense strand
uggcaucucccuucucuuc

SEQ ID NO: 2036727 - RNA, 19 nt, Homo sapiens
  misc_RNA (1)...(19): siRNA sense strand
caucuaccauaggguucua

SEQ ID NO: 2036728 - RNA, 19 nt, Homo sapiens
  misc_RNA (1)...(19): siRNA sense strand
uggacuggcuucgauacuu

SEQ ID NO: 2036729 - RNA, 19 nt, Homo sapiens
  misc_RNA (1)...(19): siRNA sense strand
ugucaucauugguguaguc

SEQ ID NO: 2036730 - RNA, 19 nt, Homo sapiens
  misc_RNA (1)...(19): siRNA sense strand
aagcaaacgugucccuacu

SEQ ID NO: 2036731 - RNA, 19 nt, Homo sapiens
  misc_RNA (1)...(19): siRNA sense strand
ccaagcaccguggccauga

SEQ ID NO: 2036732 - RNA, 19 nt, Homo sapiens
  misc_RNA (1)...(19): siRNA sense strand
ccucuacuauggaguucug

SEQ ID NO: 2036733 - RNA, 19 nt, Homo sapiens
  misc_RNA (1)...(19): siRNA sense strand
agaagaugccauggacuuu

SEQ ID NO: 2036734 - RNA, 19 nt, Homo sapiens
  misc_RNA (1)...(19): siRNA sense strand
aagaugccauggacuuugg

SEQ ID NO: 2036735 - RNA, 19 nt, Homo sapiens
  misc_RNA (1)...(19): siRNA sense strand
cuggcagccugucaucauu

SEQ ID NO: 2036736 - RNA, 19 nt, Homo sapiens
  misc_RNA (1)...(19): siRNA sense strand
cagaaaugugugcagacua

SEQ ID NO: 2036737 - RNA, 19 nt, Homo sapiens
  misc_RNA (1)...(19): siRNA sense strand
cugcuggacuggcuucgau

SEQ ID NO: 2036738 - RNA, 19 nt, Homo sapiens
  misc_RNA (1)...(19): siRNA sense strand
cgucauguaugggcaacug

SEQ ID NO: 2036739 - RNA, 19 nt, Homo sapiens
  misc_RNA (1)...(19): siRNA sense strand
cagugugugugcugugugu

SEQ ID NO: 2036740 - RNA, 19 nt, Homo sapiens
  misc_RNA (1)...(19): siRNA sense strand
ucucuucuauggccucuac

SEQ ID NO: 2036741 - RNA, 19 nt, Homo sapiens
  misc_RNA (1)...(19): siRNA sense strand
uccaaggcaucaacuacau

SEQ ID NO: 2036742 - RNA, 19 nt, Homo sapiens
  misc_RNA (1)...(19): siRNA sense strand
gggagaggccucacgucau

SEQ ID NO: 2036743 - RNA, 19 nt, Homo sapiens
  misc_RNA (1)...(19): siRNA sense strand
caagaggauguucagcaau

SEQ ID NO: 2036744 - RNA, 19 nt, Homo sapiens
  misc_RNA (1)...(19): siRNA sense strand
aggcuguccugcaaucaug

SEQ ID NO: 2036745 - RNA, 19 nt, Homo sapiens
  misc_RNA (1)...(19): siRNA sense strand
gcagacuacauggcaucua

SEQ ID NO: 2036746 - RNA, 19 nt, Homo sapiens
  misc_RNA (1)...(19): siRNA sense strand
gaacgggacuuugcagaaa

SEQ ID NO: 2036747 - RNA, 19 nt, Homo sapiens
  misc_RNA (1)...(19): siRNA sense strand
ggagaggccucacgucaug

SEQ ID NO: 2036748 - RNA, 19 nt, Homo sapiens
  misc_RNA (1)...(19): siRNA sense strand
ggacuggcuucgauacuug

SEQ ID NO: 2036749 - RNA, 19 nt, Homo sapiens
  misc_RNA (1)...(19): siRNA sense strand
gcaucucccuucucuucua

SEQ ID NO: 2036750 - RNA, 19 nt, Homo sapiens
  misc_RNA (1)...(19): siRNA sense strand
ucaagaggauguucagcaa

SEQ ID NO: 2036751 - RNA, 19 nt, Homo sapiens
  misc_RNA (1)...(19): siRNA sense strand
ggacuuugcagaaaugugu

SEQ ID NO: 2036752 - RNA, 19 nt, Homo sapiens
  misc_RNA (1)...(19): siRNA sense strand
ggaacgggacuuugcagaa

SEQ ID NO: 2036753 - RNA, 19 nt, Homo sapiens
  misc_RNA (1)...(19): siRNA sense strand
cguauaggcuguccugcaa

SEQ ID NO: 2036754 - RNA, 19 nt, Homo sapiens
  misc_RNA (1)...(19): siRNA sense strand
gaagaugccauggacuuug

SEQ ID NO: 2036755 - RNA, 19 nt, Homo sapiens
  misc_RNA (1)...(19): siRNA sense strand
gggcaugccuaccaaacau

SEQ ID NO: 2036756 - RNA, 19 nt, Homo sapiens
  misc_RNA (1)...(19): siRNA sense strand
gcagaaaugugugcagacu

SEQ ID NO: 2036757 - RNA, 19 nt, Homo sapiens
  misc_RNA (1)...(19): siRNA sense strand
agaaaugugugcagacuac

SEQ ID NO: 2036758 - RNA, 19 nt, Homo sapiens
  misc_RNA (1)...(19): siRNA sense strand
caagcaccguggccaugaa

SEQ ID NO: 2036759 - RNA, 19 nt, Homo sapiens
  misc_RNA (1)...(19): siRNA sense strand
gcuggugcaucgugggaaa

SEQ ID NO: 2036760 - RNA, 19 nt, Homo sapiens
  misc_RNA (1)...(19): siRNA sense strand
ucuauggccucuacuaugg

SEQ ID NO: 2036761 - RNA, 19 nt, Homo sapiens
  misc_RNA (1)...(19): siRNA sense strand
aagaggauguucagcaauc

SEQ ID NO: 2036762 - RNA, 19 nt, Homo sapiens
  misc_RNA (1)...(19): siRNA sense strand
cagaagaugccauggacuu

SEQ ID NO: 2036763 - RNA, 19 nt, Homo sapiens
  misc_RNA (1)...(19): siRNA sense strand
gaagcuaugcaugcugaaa

SEQ ID NO: 2036764 - RNA, 19 nt, Homo sapiens
  misc_RNA (1)...(19): siRNA sense strand
aaacgugucccuacugcaa

SEQ ID NO: 2036765 - RNA, 19 nt, Homo sapiens
  misc_RNA (1)...(19): siRNA sense strand
cagacuacauggcaucuac

SEQ ID NO: 2036766 - RNA, 19 nt, Homo sapiens
  misc_RNA (1)...(19): siRNA sense strand
cuaccaaacaucuuucaga

SEQ ID NO: 2036767 - RNA, 19 nt, Homo sapiens
  misc_RNA (1)...(19): siRNA sense strand
ggccucacgucauguaugg

SEQ ID NO: 2036768 - RNA, 19 nt, Homo sapiens
  misc_RNA (1)...(19): siRNA sense strand
caucucccuucucuucuau

SEQ ID NO: 2036769 - RNA, 19 nt, Homo sapiens
  misc_RNA (1)...(19): siRNA sense strand
gcacccacgcuccuacaau

SEQ ID NO: 2036770 - RNA, 19 nt, Homo sapiens
  misc_RNA (1)...(19): siRNA sense strand
guccugcaaucaugucuuc

SEQ ID NO: 2036771 - RNA, 19 nt, Homo sapiens
  misc_RNA (1)...(19): siRNA sense strand
uauaggcuguccugcaauc

SEQ ID NO: 2036772 - RNA, 19 nt, Homo sapiens
  misc_RNA (1)...(19): siRNA sense strand
gaucauugagaacacguau

SEQ ID NO: 2036773 - RNA, 19 nt, Homo sapiens
  misc_RNA (1)...(19): siRNA sense strand
gaagaggggaucauugaga

SEQ ID NO: 2036774 - RNA, 19 nt, Homo sapiens
  misc_RNA (1)...(19): siRNA sense strand
ucauugagaacacguauag

SEQ ID NO: 2036775 - RNA, 19 nt, Homo sapiens
  misc_RNA (1)...(19): siRNA sense strand
caaacaucuuucagacagu

SEQ ID NO: 2036776 - RNA, 19 nt, Homo sapiens
  misc_RNA (1)...(19): siRNA sense strand
uggcaucucccuucucuuc

SEQ ID NO: 2036777 - RNA, 19 nt, Homo sapiens
  misc_RNA (1)...(19): siRNA sense strand
caucuaccauaggguucua

SEQ ID NO: 2036778 - RNA, 19 nt, Homo sapiens
  misc_RNA (1)...(19): siRNA sense strand
uggacuggcuucgauacuu

SEQ ID NO: 2036779 - RNA, 19 nt, Homo sapiens
  misc_RNA (1)...(19): siRNA sense strand
ugucaucauugguguaguc

SEQ ID NO: 2036780 - RNA, 19 nt, Homo sapiens
  misc_RNA (1)...(19): siRNA sense strand
aagcaaacgugucccuacu

SEQ ID NO: 2036781 - RNA, 19 nt, Homo sapiens
  misc_RNA (1)...(19): siRNA sense strand
ccaagcaccguggccauga

SEQ ID NO: 2036782 - RNA, 19 nt, Homo sapiens
  misc_RNA (1)...(19): siRNA sense strand
ccucuacuauggaguucug

SEQ ID NO: 2036783 - RNA, 19 nt, Homo sapiens
  misc_RNA (1)...(19): siRNA sense strand
agaagaugccauggacuuu

SEQ ID NO: 2036784 - RNA, 19 nt, Homo sapiens
  misc_RNA (1)...(19): siRNA sense strand
aagaugccauggacuuugg

SEQ ID NO: 2036785 - RNA, 19 nt, Homo sapiens
  misc_RNA (1)...(19): siRNA sense strand
cuggcagccugucaucauu

SEQ ID NO: 2036786 - RNA, 19 nt, Homo sapiens
  misc_RNA (1)...(19): siRNA sense strand
cagaaaugugugcagacua

SEQ ID NO: 2036787 - RNA, 19 nt, Homo sapiens
  misc_RNA (1)...(19): siRNA sense strand
cugcuggacuggcuucgau

SEQ ID NO: 2036788 - RNA, 19 nt, Homo sapiens
  misc_RNA (1)...(19): siRNA sense strand
cgucauguaugggcaacug

SEQ ID NO: 2036789 - RNA, 19 nt, Homo sapiens
  misc_RNA (1)...(19): siRNA sense strand
cagugugugugcugugugu

SEQ ID NO: 2036790 - RNA, 19 nt, Homo sapiens
  misc_RNA (1)...(19): siRNA sense strand
ucucuucuauggccucuac

SEQ ID NO: 2036791 - RNA, 19 nt, Homo sapiens
  misc_RNA (1)...(19): siRNA sense strand
uccaaggcaucaacuacau

SEQ ID NO: 2036792 - RNA, 19 nt, Homo sapiens
  misc_RNA (1)...(19): siRNA sense strand
gggagaggccucacgucau

SEQ ID NO: 2036793 - RNA, 19 nt, Homo sapiens
  misc_RNA (1)...(19): siRNA sense strand
caagaggauguucagcaau

SEQ ID NO: 2036794 - RNA, 19 nt, Homo sapiens
  misc_RNA (1)...(19): siRNA sense strand
aggcuguccugcaaucaug

SEQ ID NO: 2036795 - RNA, 19 nt, Homo sapiens
  misc_RNA (1)...(19): siRNA sense strand
gcagacuacauggcaucua

SEQ ID NO: 2036796 - RNA, 19 nt, Homo sapiens
  misc_RNA (1)...(19): siRNA sense strand
ggaagacccucaaagauga

SEQ ID NO: 2036797 - RNA, 19 nt, Homo sapiens
  misc_RNA (1)...(19): siRNA sense strand
acagugcucucaagaauua

SEQ ID NO: 2036798 - RNA, 19 nt, Homo sapiens
  misc_RNA (1)...(19): siRNA sense strand
guacauggucugcuucuua

SEQ ID NO: 2036799 - RNA, 19 nt, Homo sapiens
  misc_RNA (1)...(19): siRNA sense strand
ggacauccuugcagaguug

SEQ ID NO: 2036800 - RNA, 19 nt, Homo sapiens
  misc_RNA (1)...(19): siRNA sense strand
ccgaugaugucaaugaaua

SEQ ID NO: 2036801 - RNA, 19 nt, Homo sapiens
  misc_RNA (1)...(19): siRNA sense strand
aggagaagcugcugaauga

SEQ ID NO: 2036802 - RNA, 19 nt, Homo sapiens
  misc_RNA (1)...(19): siRNA sense strand
gcacauggcggaccuccua

SEQ ID NO: 2036803 - RNA, 19 nt, Homo sapiens
  misc_RNA (1)...(19): siRNA sense strand
gcacccagcuuccucaaca

SEQ ID NO: 2036804 - RNA, 19 nt, Homo sapiens
  misc_RNA (1)...(19): siRNA sense strand
gaccaaguuucgcaaguuu

SEQ ID NO: 2036805 - RNA, 19 nt, Homo sapiens
  misc_RNA (1)...(19): siRNA sense strand
ggccuucucugaauucauu

SEQ ID NO: 2036806 - RNA, 19 nt, Homo sapiens
  misc_RNA (1)...(19): siRNA sense strand
gggugaagcuucuagguau

SEQ ID NO: 2036807 - RNA, 19 nt, Homo sapiens
  misc_RNA (1)...(19): siRNA sense strand
caacaaggacugcuucuuc

SEQ ID NO: 2036808 - RNA, 19 nt, Homo sapiens
  misc_RNA (1)...(19): siRNA sense strand
cuacagugcucucaagaau

SEQ ID NO: 2036809 - RNA, 19 nt, Homo sapiens
  misc_RNA (1)...(19): siRNA sense strand
gcagagcuaugcggauuau

SEQ ID NO: 2036810 - RNA, 19 nt, Homo sapiens
  misc_RNA (1)...(19): siRNA sense strand
gaaccugccagaacauuug

SEQ ID NO: 2036811 - RNA, 19 nt, Homo sapiens
  misc_RNA (1)...(19): siRNA sense strand
gcaaagagagcacggagau

SEQ ID NO: 2036812 - RNA, 19 nt, Homo sapiens
  misc_RNA (1)...(19): siRNA sense strand
ggugaagcuucuagguaua

SEQ ID NO: 2036813 - RNA, 19 nt, Homo sapiens
  misc_RNA (1)...(19): siRNA sense strand
gaaggcagccacuggaaug

SEQ ID NO: 2036814 - RNA, 19 nt, Homo sapiens
  misc_RNA (1)...(19): siRNA sense strand
gagaggaaccuguuugauc

SEQ ID NO: 2036815 - RNA, 19 nt, Homo sapiens
  misc_RNA (1)...(19): siRNA sense strand
caacugggccuucucugaa

SEQ ID NO: 2036816 - RNA, 19 nt, Homo sapiens
  misc_RNA (1)...(19): siRNA sense strand
ugagaagucccgcaaguuu

SEQ ID NO: 2036817 - RNA, 19 nt, Homo sapiens
  misc_RNA (1)...(19): siRNA sense strand
ccacaucuuccaucacuuu

SEQ ID NO: 2036818 - RNA, 19 nt, Homo sapiens
  misc_RNA (1)...(19): siRNA sense strand
gguacaagauugccucaag

SEQ ID NO: 2036819 - RNA, 19 nt, Homo sapiens
  misc_RNA (1)...(19): siRNA sense strand
ccacaugcguguacaaagg

SEQ ID NO: 2036820 - RNA, 19 nt, Homo sapiens
  misc_RNA (1)...(19): siRNA sense strand
aagaugaccuugcuuccaa

SEQ ID NO: 2036821 - RNA, 19 nt, Homo sapiens
  misc_RNA (1)...(19): siRNA sense strand
gcaucgaagugguggaaga

SEQ ID NO: 2036822 - RNA, 19 nt, Homo sapiens
  misc_RNA (1)...(19): siRNA sense strand
gagauacacacaacuccua

SEQ ID NO: 2036823 - RNA, 19 nt, Homo sapiens
  misc_RNA (1)...(19): siRNA sense strand
ggacuacgagguacaagau

SEQ ID NO: 2036824 - RNA, 19 nt, Homo sapiens
  misc_RNA (1)...(19): siRNA sense strand
ccgaugagcuggcccaagu

SEQ ID NO: 2036825 - RNA, 19 nt, Homo sapiens
  misc_RNA (1)...(19): siRNA sense strand
cagaacauuuggaccaguu

SEQ ID NO: 2036826 - RNA, 19 nt, Homo sapiens
  misc_RNA (1)...(19): siRNA sense strand
agaagcugcugaaugacua

SEQ ID NO: 2036827 - RNA, 19 nt, Homo sapiens
  misc_RNA (1)...(19): siRNA sense strand
gugcgcaaguggaauguga

SEQ ID NO: 2036828 - RNA, 19 nt, Homo sapiens
  misc_RNA (1)...(19): siRNA sense strand
gcaagguggacuacuuuga

SEQ ID NO: 2036829 - RNA, 19 nt, Homo sapiens
  misc_RNA (1)...(19): siRNA sense strand
aaagagagcacggagauga

SEQ ID NO: 2036830 - RNA, 19 nt, Homo sapiens
  misc_RNA (1)...(19): siRNA sense strand
aagauugccucaagcaguu

SEQ ID NO: 2036831 - RNA, 19 nt, Homo sapiens
  misc_RNA (1)...(19): siRNA sense strand
ggaaagccagggacagguu

SEQ ID NO: 2036832 - RNA, 19 nt, Homo sapiens
  misc_RNA (1)...(19): siRNA sense strand
caacuccuaugccuaugau

SEQ ID NO: 2036833 - RNA, 19 nt, Homo sapiens
  misc_RNA (1)...(19): siRNA sense strand
cggaagacccucaaagaug

SEQ ID NO: 2036834 - RNA, 19 nt, Homo sapiens
  misc_RNA (1)...(19): siRNA sense strand
ggacaauaaagaugacaau

SEQ ID NO: 2036835 - RNA, 19 nt, Homo sapiens
  misc_RNA (1)...(19): siRNA sense strand
ggacugcuucuucugcaaa

SEQ ID NO: 2036836 - RNA, 19 nt, Homo sapiens
  misc_RNA (1)...(19): siRNA sense strand
ggaccacuaucccauucug

SEQ ID NO: 2036837 - RNA, 19 nt, Homo sapiens
  misc_RNA (1)...(19): siRNA sense strand
ucaacagcguccucaauca

SEQ ID NO: 2036838 - RNA, 19 nt, Homo sapiens
  misc_RNA (1)...(19): siRNA sense strand
ugaccaaguuucgcaaguu

SEQ ID NO: 2036839 - RNA, 19 nt, Homo sapiens
  misc_RNA (1)...(19): siRNA sense strand
acacaacuccuaugccuau

SEQ ID NO: 2036840 - RNA, 19 nt, Homo sapiens
  misc_RNA (1)...(19): siRNA sense strand
gcuuagcaauguccucuuc

SEQ ID NO: 2036841 - RNA, 19 nt, Homo sapiens
  misc_RNA (1)...(19): siRNA sense strand
caugagaagucccgcaagu

SEQ ID NO: 2036842 - RNA, 19 nt, Homo sapiens
  misc_RNA (1)...(19): siRNA sense strand
guccguggccuucaacuuu

SEQ ID NO: 2036843 - RNA, 19 nt, Homo sapiens
  misc_RNA (1)...(19): siRNA sense strand
ggaccacacaggcggcuuu

SEQ ID NO: 2036844 - RNA, 19 nt, Homo sapiens
  misc_RNA (1)...(19): siRNA sense strand
gagaagggagccaauacga

SEQ ID NO: 2036845 - RNA, 19 nt, Homo sapiens
  misc_RNA (1)...(19): siRNA sense strand
gguggaggcugugcucaug

SEQ ID NO: 2036846 - RNA, 19 nt, Homo sapiens
  misc_RNA (1)...(19): siRNA sense strand
gauuggacacagcaacuuu

SEQ ID NO: 2036847 - RNA, 19 nt, Homo sapiens
  misc_RNA (1)...(19): siRNA sense strand
cagcuacgcucaauaugcu

SEQ ID NO: 2036848 - RNA, 19 nt, Homo sapiens
  misc_RNA (1)...(19): siRNA sense strand
agaacucgcugcuggaagu

SEQ ID NO: 2036849 - RNA, 19 nt, Homo sapiens
  misc_RNA (1)...(19): siRNA sense strand
gcccacaucuuccaucacu

SEQ ID NO: 2036850 - RNA, 19 nt, Homo sapiens
  misc_RNA (1)...(19): siRNA sense strand
gccaucagccucucuuuca

SEQ ID NO: 2036851 - RNA, 19 nt, Homo sapiens
  misc_RNA (1)...(19): siRNA sense strand
gccggcagcucaagguaug

SEQ ID NO: 2036852 - RNA, 19 nt, Homo sapiens
  misc_RNA (1)...(19): siRNA sense strand
ccucaaagaugaccuugcu

SEQ ID NO: 2036853 - RNA, 19 nt, Homo sapiens
  misc_RNA (1)...(19): siRNA sense strand
gcgcuacuauugggaugaa

SEQ ID NO: 2036854 - RNA, 19 nt, Homo sapiens
  misc_RNA (1)...(19): siRNA sense strand
cgaagugguggaagaacua

SEQ ID NO: 2036855 - RNA, 19 nt, Homo sapiens
  misc_RNA (1)...(19): siRNA sense strand
ucccgcaaguuucugcuua

SEQ ID NO: 2036856 - RNA, 19 nt, Homo sapiens
  misc_RNA (1)...(19): siRNA sense strand
gagaagucccgcaaguuuc

SEQ ID NO: 2036857 - RNA, 19 nt, Homo sapiens
  misc_RNA (1)...(19): siRNA sense strand
ugaagcugcugcuggacaa

SEQ ID NO: 2036858 - RNA, 19 nt, Homo sapiens
  misc_RNA (1)...(19): siRNA sense strand
aaaccaccaucgugucugu

SEQ ID NO: 2036859 - RNA, 19 nt, Homo sapiens
  misc_RNA (1)...(19): siRNA sense strand
cugcagagcuaugcggauu

SEQ ID NO: 2036860 - RNA, 19 nt, Homo sapiens
  misc_RNA (1)...(19): siRNA sense strand
gggcggucaugauguacaa

SEQ ID NO: 2036861 - RNA, 19 nt, Homo sapiens
  misc_RNA (1)...(19): siRNA sense strand
cgccauggaugaccuagau

SEQ ID NO: 2036862 - RNA, 19 nt, Homo sapiens
  misc_RNA (1)...(19): siRNA sense strand
gcggaagacccucaaagau

SEQ ID NO: 2036863 - RNA, 19 nt, Homo sapiens
  misc_RNA (1)...(19): siRNA sense strand
gaauacaaggcuuccaauc

SEQ ID NO: 2036864 - RNA, 19 nt, Homo sapiens
  misc_RNA (1)...(19): siRNA sense strand
gaggacccgugaggacauu

SEQ ID NO: 2036865 - RNA, 19 nt, Homo sapiens
  misc_RNA (1)...(19): siRNA sense strand
gagcuaugcggauuauauc

SEQ ID NO: 2036866 - RNA, 19 nt, Homo sapiens
  misc_RNA (1)...(19): siRNA sense strand
gcacagggucucucuuugc

SEQ ID NO: 2036867 - RNA, 19 nt, Homo sapiens
  misc_RNA (1)...(19): siRNA sense strand
cauggaggacuacgaggua

SEQ ID NO: 2036868 - RNA, 19 nt, Homo sapiens
  misc_RNA (1)...(19): siRNA sense strand
gguaugugccaccugcuuu

SEQ ID NO: 2036869 - RNA, 19 nt, Homo sapiens
  misc_RNA (1)...(19): siRNA sense strand
uaccgauucucacccauug

SEQ ID NO: 2036870 - RNA, 19 nt, Homo sapiens
  misc_RNA (1)...(19): siRNA sense strand
ggccacaaguccugcaaag

SEQ ID NO: 2036871 - RNA, 19 nt, Homo sapiens
  misc_RNA (1)...(19): siRNA sense strand
gcaccugaccucugcaucu

SEQ ID NO: 2036872 - RNA, 19 nt, Homo sapiens
  misc_RNA (1)...(19): siRNA sense strand
auacacggcugccacaucu

SEQ ID NO: 2036873 - RNA, 19 nt, Homo sapiens
  misc_RNA (1)...(19): siRNA sense strand
caucuuccaucacuuugca

SEQ ID NO: 2036874 - RNA, 19 nt, Homo sapiens
  misc_RNA (1)...(19): siRNA sense strand
gcuucucccugcagagcua

SEQ ID NO: 2036875 - RNA, 19 nt, Homo sapiens
  misc_RNA (1)...(19): siRNA sense strand
ugccugagauauuccuuga

SEQ ID NO: 2036876 - RNA, 19 nt, Homo sapiens
  misc_RNA (1)...(19): siRNA sense strand
ucaacugggccuucucuga

SEQ ID NO: 2036877 - RNA, 19 nt, Homo sapiens
  misc_RNA (1)...(19): siRNA sense strand
caggagaagcugcugaaug

SEQ ID NO: 2036878 - RNA, 19 nt, Homo sapiens
  misc_RNA (1)...(19): siRNA sense strand
ugcuacagguggacaauga

SEQ ID NO: 2036879 - RNA, 19 nt, Homo sapiens
  misc_RNA (1)...(19): siRNA sense strand
acuacgagguacaagauug

SEQ ID NO: 2036880 - RNA, 19 nt, Homo sapiens
  misc_RNA (1)...(19): siRNA sense strand
gcacugccuuugagaaccu

SEQ ID NO: 2036881 - RNA, 19 nt, Homo sapiens
  misc_RNA (1)...(19): siRNA sense strand
uugcacagcugcuaaacca

SEQ ID NO: 2036882 - RNA, 19 nt, Homo sapiens
  misc_RNA (1)...(19): siRNA sense strand
cagcuacagugcucucaag

SEQ ID NO: 2036883 - RNA, 19 nt, Homo sapiens
  misc_RNA (1)...(19): siRNA sense strand
gcguggccaucaacagcua

SEQ ID NO: 2036884 - RNA, 19 nt, Homo sapiens
  misc_RNA (1)...(19): siRNA sense strand
gcaccucggagaaagugaa

SEQ ID NO: 2036885 - RNA, 19 nt, Homo sapiens
  misc_RNA (1)...(19): siRNA sense strand
ggacaaugaggaggaggaa

SEQ ID NO: 2036886 - RNA, 19 nt, Homo sapiens
  misc_RNA (1)...(19): siRNA sense strand
ccaucagccucucuuucaa

SEQ ID NO: 2036887 - RNA, 19 nt, Homo sapiens
  misc_RNA (1)...(19): siRNA sense strand
ccugagauauuccuugacu

SEQ ID NO: 2036888 - RNA, 19 nt, Homo sapiens
  misc_RNA (1)...(19): siRNA sense strand
ucucugcccugcgcuacua

SEQ ID NO: 2036889 - RNA, 19 nt, Homo sapiens
  misc_RNA (1)...(19): siRNA sense strand
guaccgauucucacccauu

SEQ ID NO: 2036890 - RNA, 19 nt, Homo sapiens
  misc_RNA (1)...(19): siRNA sense strand
gcuacagugcucucaagaa

SEQ ID NO: 2036891 - RNA, 19 nt, Homo sapiens
  misc_RNA (1)...(19): siRNA sense strand
ucaaccagcaccugaugaa

SEQ ID NO: 2036892 - RNA, 19 nt, Homo sapiens
  misc_RNA (1)...(19): siRNA sense strand
agagcuaugcggauuauau

SEQ ID NO: 2036893 - RNA, 19 nt, Homo sapiens
  misc_RNA (1)...(19): siRNA sense strand
gcugagaggaaccuguuug

SEQ ID NO: 2036894 - RNA, 19 nt, Homo sapiens
  misc_RNA (1)...(19): siRNA sense strand
ucacacuggugccugagau

SEQ ID NO: 2036895 - RNA, 19 nt, Homo sapiens
  misc_RNA (1)...(19): siRNA sense strand
ucucaagaauuacuuuggu

SEQ ID NO: 2036896 - RNA, 19 nt, Homo sapiens
  misc_RNA (1)...(19): siRNA sense strand
gaauugagguggauguuga

SEQ ID NO: 2036897 - RNA, 19 nt, Homo sapiens
  misc_RNA (1)...(19): siRNA sense strand
caaagaggcauacaaguga

SEQ ID NO: 2036898 - RNA, 19 nt, Homo sapiens
  misc_RNA (1)...(19): siRNA sense strand
gaaacaaggagacaaggaa

SEQ ID NO: 2036899 - RNA, 19 nt, Homo sapiens
  misc_RNA (1)...(19): siRNA sense strand
ggagauaguugugcugugu

SEQ ID NO: 2036900 - RNA, 19 nt, Homo sapiens
  misc_RNA (1)...(19): siRNA sense strand
gguaaaccaugaagcaaau

SEQ ID NO: 2036901 - RNA, 19 nt, Homo sapiens
  misc_RNA (1)...(19): siRNA sense strand
agacgaaacuccuaaucaa

SEQ ID NO: 2036902 - RNA, 19 nt, Homo sapiens
  misc_RNA (1)...(19): siRNA sense strand
ggaagcagaggcaauuaaa

SEQ ID NO: 2036903 - RNA, 19 nt, Homo sapiens
  misc_RNA (1)...(19): siRNA sense strand
gaaagucuacagcugguaa

SEQ ID NO: 2036904 - RNA, 19 nt, Homo sapiens
  misc_RNA (1)...(19): siRNA sense strand
gaagaagacgaaacuccua

SEQ ID NO: 2036905 - RNA, 19 nt, Homo sapiens
  misc_RNA (1)...(19): siRNA sense strand
ggucauagaaguagggaaa

SEQ ID NO: 2036906 - RNA, 19 nt, Homo sapiens
  misc_RNA (1)...(19): siRNA sense strand
caacccaaccuuugaagaa

SEQ ID NO: 2036907 - RNA, 19 nt, Homo sapiens
  misc_RNA (1)...(19): siRNA sense strand
gcaggaagcagaggcaauu

SEQ ID NO: 2036908 - RNA, 19 nt, Homo sapiens
  misc_RNA (1)...(19): siRNA sense strand
gcaaccauauuuuccauaa

SEQ ID NO: 2036909 - RNA, 19 nt, Homo sapiens
  misc_RNA (1)...(19): siRNA sense strand
gacaauggucauagaagua

SEQ ID NO: 2036910 - RNA, 19 nt, Homo sapiens
  misc_RNA (1)...(19): siRNA sense strand
ucaaagaggcauacaagug

SEQ ID NO: 2036911 - RNA, 19 nt, Homo sapiens
  misc_RNA (1)...(19): siRNA sense strand
ugagguggauguugaagau

SEQ ID NO: 2036912 - RNA, 19 nt, Homo sapiens
  misc_RNA (1)...(19): siRNA sense strand
cggcaacugugggcuauuu

SEQ ID NO: 2036913 - RNA, 19 nt, Homo sapiens
  misc_RNA (1)...(19): siRNA sense strand
gauguuauuccucauguug

SEQ ID NO: 2036914 - RNA, 19 nt, Homo sapiens
  misc_RNA (1)...(19): siRNA sense strand
gaacacgugcagucaacaa

SEQ ID NO: 2036915 - RNA, 19 nt, Homo sapiens
  misc_RNA (1)...(19): siRNA sense strand
ggaaauuggcccugaugga

SEQ ID NO: 2036916 - RNA, 19 nt, Homo sapiens
  misc_RNA (1)...(19): siRNA sense strand
gcauacaagugacaauggu

SEQ ID NO: 2036917 - RNA, 19 nt, Homo sapiens
  misc_RNA (1)...(19): siRNA sense strand
ucaagagacugcuguucga

SEQ ID NO: 2036918 - RNA, 19 nt, Homo sapiens
  misc_RNA (1)...(19): siRNA sense strand
acaagucccuguauccaau

SEQ ID NO: 2036919 - RNA, 19 nt, Homo sapiens
  misc_RNA (1)...(19): siRNA sense strand
gcucgaaggcuacggaaug

SEQ ID NO: 2036920 - RNA, 19 nt, Homo sapiens
  misc_RNA (1)...(19): siRNA sense strand
gucaacaaaugaaagucua

SEQ ID NO: 2036921 - RNA, 19 nt, Homo sapiens
  misc_RNA (1)...(19): siRNA sense strand
gugacauacucaaagcuuu

SEQ ID NO: 2036922 - RNA, 19 nt, Homo sapiens
  misc_RNA (1)...(19): siRNA sense strand
gaagacgaaacuccuaauc

SEQ ID NO: 2036923 - RNA, 19 nt, Homo sapiens
  misc_RNA (1)...(19): siRNA sense strand
agagacugcuguucgagaa

SEQ ID NO: 2036924 - RNA, 19 nt, Homo sapiens
  misc_RNA (1)...(19): siRNA sense strand
caaggaaauuggcccugau

SEQ ID NO: 2036925 - RNA, 19 nt, Homo sapiens
  misc_RNA (1)...(19): siRNA sense strand
ucugcaaucuauucaaaga

SEQ ID NO: 2036926 - RNA, 19 nt, Homo sapiens
  misc_RNA (1)...(19): siRNA sense strand
caacuacgcacacugaaac

SEQ ID NO: 2036927 - RNA, 19 nt, Homo sapiens
  misc_RNA (1)...(19): siRNA sense strand
aaacaaggagacaaggaaa

SEQ ID NO: 2036928 - RNA, 19 nt, Homo sapiens
  misc_RNA (1)...(19): siRNA sense strand
gcagucaacaaaugaaagu

SEQ ID NO: 2036929 - RNA, 19 nt, Homo sapiens
  misc_RNA (1)...(19): siRNA sense strand
acaaggagacaaggaaauu

SEQ ID NO: 2036930 - RNA, 19 nt, Homo sapiens
  misc_RNA (1)...(19): siRNA sense strand
ggauguuauuccucauguu

SEQ ID NO: 2036931 - RNA, 19 nt, Homo sapiens
  misc_RNA (1)...(19): siRNA sense strand
gaccgcaucaucuggauau

SEQ ID NO: 2036932 - RNA, 19 nt, Homo sapiens
  misc_RNA (1)...(19): siRNA sense strand
gcagcgagaccgcaucauc

SEQ ID NO: 2036933 - RNA, 19 nt, Homo sapiens
  misc_RNA (1)...(19): siRNA sense strand
ggaauugagguggauguug

SEQ ID NO: 2036934 - RNA, 19 nt, Homo sapiens
  misc_RNA (1)...(19): siRNA sense strand
gauuugguacgcaucuuaa

SEQ ID NO: 2036935 - RNA, 19 nt, Homo sapiens
  misc_RNA (1)...(19): siRNA sense strand
gcauugaauuguauaaacc

SEQ ID NO: 2036936 - RNA, 19 nt, Homo sapiens
  misc_RNA (1)...(19): siRNA sense strand
ggaucagugucuuuacaag

SEQ ID NO: 2036937 - RNA, 19 nt, Homo sapiens
  misc_RNA (1)...(19): siRNA sense strand
cgaaacuccuaaucaagag

SEQ ID NO: 2036938 - RNA, 19 nt, Homo sapiens
  misc_RNA (1)...(19): siRNA sense strand
caugaucggcaaucugaaa

SEQ ID NO: 2036939 - RNA, 19 nt, Homo sapiens
  misc_RNA (1)...(19): siRNA sense strand
gaucagugucuuuacaagu

SEQ ID NO: 2036940 - RNA, 19 nt, Homo sapiens
  misc_RNA (1)...(19): siRNA sense strand
cacgugcagucaacaaaug

SEQ ID NO: 2036941 - RNA, 19 nt, Homo sapiens
  misc_RNA (1)...(19): siRNA sense strand
gaagcagaggcaauuaaag

SEQ ID NO: 2036942 - RNA, 19 nt, Homo sapiens
  misc_RNA (1)...(19): siRNA sense strand
ugacaacccaaccuuugaa

SEQ ID NO: 2036943 - RNA, 19 nt, Homo sapiens
  misc_RNA (1)...(19): siRNA sense strand
ggaggaacacgugcaguca

SEQ ID NO: 2036944 - RNA, 19 nt, Homo sapiens
  misc_RNA (1)...(19): siRNA sense strand
ugauuugguacgcaucuua

SEQ ID NO: 2036945 - RNA, 19 nt, Homo sapiens
  misc_RNA (1)...(19): siRNA sense strand
gucccuguauccaaugaaa

SEQ ID NO: 2036946 - RNA, 19 nt, Homo sapiens
  misc_RNA (1)...(19): siRNA sense strand
acgaaacuccuaaucaaga

SEQ ID NO: 2036947 - RNA, 19 nt, Homo sapiens
  misc_RNA (1)...(19): siRNA sense strand
gcaauuaaaggcagaugcu

SEQ ID NO: 2036948 - RNA, 19 nt, Homo sapiens
  misc_RNA (1)...(19): siRNA sense strand
cccuguauccaaugaaaua

SEQ ID NO: 2036949 - RNA, 19 nt, Homo sapiens
  misc_RNA (1)...(19): siRNA sense strand
caaggagacaaggaaauug

SEQ ID NO: 2036950 - RNA, 19 nt, Homo sapiens
  misc_RNA (1)...(19): siRNA sense strand
aauuaaaggcagaugcuaa

SEQ ID NO: 2036951 - RNA, 19 nt, Homo sapiens
  misc_RNA (1)...(19): siRNA sense strand
gcaacugugggcuauuuua

SEQ ID NO: 2036952 - RNA, 19 nt, Homo sapiens
  misc_RNA (1)...(19): siRNA sense strand
ucaacuacgcacacugaaa

SEQ ID NO: 2036953 - RNA, 19 nt, Homo sapiens
  misc_RNA (1)...(19): siRNA sense strand
gaggaacacgugcagucaa

SEQ ID NO: 2036954 - RNA, 19 nt, Homo sapiens
  misc_RNA (1)...(19): siRNA sense strand
gaaacuccuaaucaagaga

SEQ ID NO: 2036955 - RNA, 19 nt, Homo sapiens
  misc_RNA (1)...(19): siRNA sense strand
gcaguagacauuguugcaa

SEQ ID NO: 2036956 - RNA, 19 nt, Homo sapiens
  misc_RNA (1)...(19): siRNA sense strand
gagaccgcaucaucuggau

SEQ ID NO: 2036957 - RNA, 19 nt, Homo sapiens
  misc_RNA (1)...(19): siRNA sense strand
gcuguucgagaaauuaaau

SEQ ID NO: 2036958 - RNA, 19 nt, Homo sapiens
  misc_RNA (1)...(19): siRNA sense strand
agacugcuguucgagaaau

SEQ ID NO: 2036959 - RNA, 19 nt, Homo sapiens
  misc_RNA (1)...(19): siRNA sense strand
cgaaggcuacggaaugcaa

SEQ ID NO: 2036960 - RNA, 19 nt, Homo sapiens
  misc_RNA (1)...(19): siRNA sense strand
guugugcugugugcauuga

SEQ ID NO: 2036961 - RNA, 19 nt, Homo sapiens
  misc_RNA (1)...(19): siRNA sense strand
aagaagacgaaacuccuaa

SEQ ID NO: 2036962 - RNA, 19 nt, Homo sapiens
  misc_RNA (1)...(19): siRNA sense strand
agauggaucagugucuuua

SEQ ID NO: 2036963 - RNA, 19 nt, Homo sapiens
  misc_RNA (1)...(19): siRNA sense strand
gguggauguugaagaugga

SEQ ID NO: 2036964 - RNA, 19 nt, Homo sapiens
  misc_RNA (1)...(19): siRNA sense strand
ugugugcauugaauuguau

SEQ ID NO: 2036965 - RNA, 19 nt, Homo sapiens
  misc_RNA (1)...(19): siRNA sense strand
gacugcuguucgagaaauu

SEQ ID NO: 2036966 - RNA, 19 nt, Homo sapiens
  misc_RNA (1)...(19): siRNA sense strand
gacgaaacuccuaaucaag

SEQ ID NO: 2036967 - RNA, 19 nt, Homo sapiens
  misc_RNA (1)...(19): siRNA sense strand
uuaacgugcaaccauauuu

SEQ ID NO: 2036968 - RNA, 19 nt, Homo sapiens
  misc_RNA (1)...(19): siRNA sense strand
caucuuaacgugcaaccau

SEQ ID NO: 2036969 - RNA, 19 nt, Homo sapiens
  misc_RNA (1)...(19): siRNA sense strand
caauuaaaggcagaugcua

SEQ ID NO: 2036970 - RNA, 19 nt, Homo sapiens
  misc_RNA (1)...(19): siRNA sense strand
aagacgaaacuccuaauca

SEQ ID NO: 2036971 - RNA, 19 nt, Homo sapiens
  misc_RNA (1)...(19): siRNA sense strand
uggauaugcuucaguacag

SEQ ID NO: 2036972 - RNA, 19 nt, Homo sapiens
  misc_RNA (1)...(19): siRNA sense strand
caggaagcagaggcaauua

SEQ ID NO: 2036973 - RNA, 19 nt, Homo sapiens
  misc_RNA (1)...(19): siRNA sense strand
cugugugcauugaauugua

SEQ ID NO: 2036974 - RNA, 19 nt, Homo sapiens
  misc_RNA (1)...(19): siRNA sense strand
ugaaacaaggagacaagga

SEQ ID NO: 2036975 - RNA, 19 nt, Homo sapiens
  misc_RNA (1)...(19): siRNA sense strand
uaaaccaugaagcaaauuc

SEQ ID NO: 2036976 - RNA, 19 nt, Homo sapiens
  misc_RNA (1)...(19): siRNA sense strand
caacaaaugaaagucuaca

SEQ ID NO: 2036977 - RNA, 19 nt, Homo sapiens
  misc_RNA (1)...(19): siRNA sense strand
aagcagaggcaauuaaagg

SEQ ID NO: 2036978 - RNA, 19 nt, Homo sapiens
  misc_RNA (1)...(19): siRNA sense strand
ggaaugcaagagcucaaag

SEQ ID NO: 2036979 - RNA, 19 nt, Homo sapiens
  misc_RNA (1)...(19): siRNA sense strand
ggauguugaagauggauca

SEQ ID NO: 2036980 - RNA, 19 nt, Homo sapiens
  misc_RNA (1)...(19): siRNA sense strand
caagagcucaaagcaggaa

SEQ ID NO: 2036981 - RNA, 19 nt, Homo sapiens
  misc_RNA (1)...(19): siRNA sense strand
cuucaacuacgcacacuga

SEQ ID NO: 2036982 - RNA, 19 nt, Homo sapiens
  misc_RNA (1)...(19): siRNA sense strand
auuaaaggcagaugcuaaa

SEQ ID NO: 2036983 - RNA, 19 nt, Homo sapiens
  misc_RNA (1)...(19): siRNA sense strand
gugcagucaacaaaugaaa

SEQ ID NO: 2036984 - RNA, 19 nt, Homo sapiens
  misc_RNA (1)...(19): siRNA sense strand
gcaaucaugaucggcaauc

SEQ ID NO: 2036985 - RNA, 19 nt, Homo sapiens
  misc_RNA (1)...(19): siRNA sense strand
gagacugcuguucgagaaa

SEQ ID NO: 2036986 - RNA, 19 nt, Homo sapiens
  misc_RNA (1)...(19): siRNA sense strand
uggauguuauuccucaugu

SEQ ID NO: 2036987 - RNA, 19 nt, Homo sapiens
  misc_RNA (1)...(19): siRNA sense strand
aggaagcagaggcaauuaa

SEQ ID NO: 2036988 - RNA, 19 nt, Homo sapiens
  misc_RNA (1)...(19): siRNA sense strand
gcccugauggagauaguug

SEQ ID NO: 2036989 - RNA, 19 nt, Homo sapiens
  misc_RNA (1)...(19): siRNA sense strand
cagcgagaccgcaucaucu

SEQ ID NO: 2036990 - RNA, 19 nt, Homo sapiens
  misc_RNA (1)...(19): siRNA sense strand
ggcggcaacugugggcuau

SEQ ID NO: 2036991 - RNA, 19 nt, Homo sapiens
  misc_RNA (1)...(19): siRNA sense strand
uaacgugcaaccauauuuu

SEQ ID NO: 2036992 - RNA, 19 nt, Homo sapiens
  misc_RNA (1)...(19): siRNA sense strand
gaauugagguggauguuga

SEQ ID NO: 2036993 - RNA, 19 nt, Homo sapiens
  misc_RNA (1)...(19): siRNA sense strand
caaagaggcauacaaguga

SEQ ID NO: 2036994 - RNA, 19 nt, Homo sapiens
  misc_RNA (1)...(19): siRNA sense strand
gaaacaaggagacaaggaa

SEQ ID NO: 2036995 - RNA, 19 nt, Homo sapiens
  misc_RNA (1)...(19): siRNA sense strand
ggagauaguugugcugugu

SEQ ID NO: 2036996 - RNA, 19 nt, Homo sapiens
  misc_RNA (1)...(19): siRNA sense strand
gguaaaccaugaagcaaau

SEQ ID NO: 2036997 - RNA, 19 nt, Homo sapiens
  misc_RNA (1)...(19): siRNA sense strand
agacgaaacuccuaaucaa

SEQ ID NO: 2036998 - RNA, 19 nt, Homo sapiens
  misc_RNA (1)...(19): siRNA sense strand
ggaagcagaggcaauuaaa

SEQ ID NO: 2036999 - RNA, 19 nt, Homo sapiens
  misc_RNA (1)...(19): siRNA sense strand
gaaagucuacagcugguaa

SEQ ID NO: 2037000 - RNA, 19 nt, Homo sapiens
  misc_RNA (1)...(19): siRNA sense strand
gaagaagacgaaacuccua

SEQ ID NO: 2037001 - RNA, 19 nt, Homo sapiens
  misc_RNA (1)...(19): siRNA sense strand
ggucauagaaguagggaaa

SEQ ID NO: 2037002 - RNA, 19 nt, Homo sapiens
  misc_RNA (1)...(19): siRNA sense strand
caacccaaccuuugaagaa

SEQ ID NO: 2037003 - RNA, 19 nt, Homo sapiens
  misc_RNA (1)...(19): siRNA sense strand
gcaggaagcagaggcaauu

SEQ ID NO: 2037004 - RNA, 19 nt, Homo sapiens
  misc_RNA (1)...(19): siRNA sense strand
gcaaccauauuuuccauaa

SEQ ID NO: 2037005 - RNA, 19 nt, Homo sapiens
  misc_RNA (1)...(19): siRNA sense strand
gacaauggucauagaagua

SEQ ID NO: 2037006 - RNA, 19 nt, Homo sapiens
  misc_RNA (1)...(19): siRNA sense strand
ucaaagaggcauacaagug

SEQ ID NO: 2037007 - RNA, 19 nt, Homo sapiens
  misc_RNA (1)...(19): siRNA sense strand
ugagguggauguugaagau

SEQ ID NO: 2037008 - RNA, 19 nt, Homo sapiens
  misc_RNA (1)...(19): siRNA sense strand
cggcaacugugggcuauuu

SEQ ID NO: 2037009 - RNA, 19 nt, Homo sapiens
  misc_RNA (1)...(19): siRNA sense strand
gauguuauuccucauguug

SEQ ID NO: 2037010 - RNA, 19 nt, Homo sapiens
  misc_RNA (1)...(19): siRNA sense strand
gaacacgugcagucaacaa

SEQ ID NO: 2037011 - RNA, 19 nt, Homo sapiens
  misc_RNA (1)...(19): siRNA sense strand
ggaaauuggcccugaugga

SEQ ID NO: 2037012 - RNA, 19 nt, Homo sapiens
  misc_RNA (1)...(19): siRNA sense strand
gcauacaagugacaauggu

SEQ ID NO: 2037013 - RNA, 19 nt, Homo sapiens
  misc_RNA (1)...(19): siRNA sense strand
ucaagagacugcuguucga

SEQ ID NO: 2037014 - RNA, 19 nt, Homo sapiens
  misc_RNA (1)...(19): siRNA sense strand
acaagucccuguauccaau

SEQ ID NO: 2037015 - RNA, 19 nt, Homo sapiens
  misc_RNA (1)...(19): siRNA sense strand
gcucgaaggcuacggaaug

SEQ ID NO: 2037016 - RNA, 19 nt, Homo sapiens
  misc_RNA (1)...(19): siRNA sense strand
gucaacaaaugaaagucua

SEQ ID NO: 2037017 - RNA, 19 nt, Homo sapiens
  misc_RNA (1)...(19): siRNA sense strand
gugacauacucaaagcuuu

SEQ ID NO: 2037018 - RNA, 19 nt, Homo sapiens
  misc_RNA (1)...(19): siRNA sense strand
gaagacgaaacuccuaauc

SEQ ID NO: 2037019 - RNA, 19 nt, Homo sapiens
  misc_RNA (1)...(19): siRNA sense strand
agagacugcuguucgagaa

SEQ ID NO: 2037020 - RNA, 19 nt, Homo sapiens
  misc_RNA (1)...(19): siRNA sense strand
caaggaaauuggcccugau

SEQ ID NO: 2037021 - RNA, 19 nt, Homo sapiens
  misc_RNA (1)...(19): siRNA sense strand
ucugcaaucuauucaaaga

SEQ ID NO: 2037022 - RNA, 19 nt, Homo sapiens
  misc_RNA (1)...(19): siRNA sense strand
caacuacgcacacugaaac

SEQ ID NO: 2037023 - RNA, 19 nt, Homo sapiens
  misc_RNA (1)...(19): siRNA sense strand
aaacaaggagacaaggaaa

SEQ ID NO: 2037024 - RNA, 19 nt, Homo sapiens
  misc_RNA (1)...(19): siRNA sense strand
gcagucaacaaaugaaagu

SEQ ID NO: 2037025 - RNA, 19 nt, Homo sapiens
  misc_RNA (1)...(19): siRNA sense strand
acaaggagacaaggaaauu

SEQ ID NO: 2037026 - RNA, 19 nt, Homo sapiens
  misc_RNA (1)...(19): siRNA sense strand
ggauguuauuccucauguu

SEQ ID NO: 2037027 - RNA, 19 nt, Homo sapiens
  misc_RNA (1)...(19): siRNA sense strand
gaccgcaucaucuggauau

SEQ ID NO: 2037028 - RNA, 19 nt, Homo sapiens
  misc_RNA (1)...(19): siRNA sense strand
gcagcgagaccgcaucauc

SEQ ID NO: 2037029 - RNA, 19 nt, Homo sapiens
  misc_RNA (1)...(19): siRNA sense strand
ggaauugagguggauguug

SEQ ID NO: 2037030 - RNA, 19 nt, Homo sapiens
  misc_RNA (1)...(19): siRNA sense strand
gauuugguacgcaucuuaa

SEQ ID NO: 2037031 - RNA, 19 nt, Homo sapiens
  misc_RNA (1)...(19): siRNA sense strand
gcauugaauuguauaaacc

SEQ ID NO: 2037032 - RNA, 19 nt, Homo sapiens
  misc_RNA (1)...(19): siRNA sense strand
ggaucagugucuuuacaag

SEQ ID NO: 2037033 - RNA, 19 nt, Homo sapiens
  misc_RNA (1)...(19): siRNA sense strand
cgaaacuccuaaucaagag

SEQ ID NO: 2037034 - RNA, 19 nt, Homo sapiens
  misc_RNA (1)...(19): siRNA sense strand
caugaucggcaaucugaaa

SEQ ID NO: 2037035 - RNA, 19 nt, Homo sapiens
  misc_RNA (1)...(19): siRNA sense strand
gaucagugucuuuacaagu

SEQ ID NO: 2037036 - RNA, 19 nt, Homo sapiens
  misc_RNA (1)...(19): siRNA sense strand
cacgugcagucaacaaaug

SEQ ID NO: 2037037 - RNA, 19 nt, Homo sapiens
  misc_RNA (1)...(19): siRNA sense strand
gaagcagaggcaauuaaag

SEQ ID NO: 2037038 - RNA, 19 nt, Homo sapiens
  misc_RNA (1)...(19): siRNA sense strand
ugacaacccaaccuuugaa

SEQ ID NO: 2037039 - RNA, 19 nt, Homo sapiens
  misc_RNA (1)...(19): siRNA sense strand
ggaggaacacgugcaguca

SEQ ID NO: 2037040 - RNA, 19 nt, Homo sapiens
  misc_RNA (1)...(19): siRNA sense strand
ugauuugguacgcaucuua

SEQ ID NO: 2037041 - RNA, 19 nt, Homo sapiens
  misc_RNA (1)...(19): siRNA sense strand
gucccuguauccaaugaaa

SEQ ID NO: 2037042 - RNA, 19 nt, Homo sapiens
  misc_RNA (1)...(19): siRNA sense strand
acgaaacuccuaaucaaga

SEQ ID NO: 2037043 - RNA, 19 nt, Homo sapiens
  misc_RNA (1)...(19): siRNA sense strand
gcaauuaaaggcagaugcu

SEQ ID NO: 2037044 - RNA, 19 nt, Homo sapiens
  misc_RNA (1)...(19): siRNA sense strand
cccuguauccaaugaaaua

SEQ ID NO: 2037045 - RNA, 19 nt, Homo sapiens
  misc_RNA (1)...(19): siRNA sense strand
caaggagacaaggaaauug

SEQ ID NO: 2037046 - RNA, 19 nt, Homo sapiens
  misc_RNA (1)...(19): siRNA sense strand
aauuaaaggcagaugcuaa

SEQ ID NO: 2037047 - RNA, 19 nt, Homo sapiens
  misc_RNA (1)...(19): siRNA sense strand
gcaacugugggcuauuuua

SEQ ID NO: 2037048 - RNA, 19 nt, Homo sapiens
  misc_RNA (1)...(19): siRNA sense strand
ucaacuacgcacacugaaa

SEQ ID NO: 2037049 - RNA, 19 nt, Homo sapiens
  misc_RNA (1)...(19): siRNA sense strand
gaggaacacgugcagucaa

SEQ ID NO: 2037050 - RNA, 19 nt, Homo sapiens
  misc_RNA (1)...(19): siRNA sense strand
gaaacuccuaaucaagaga

SEQ ID NO: 2037051 - RNA, 19 nt, Homo sapiens
  misc_RNA (1)...(19): siRNA sense strand
gcaguagacauuguugcaa

SEQ ID NO: 2037052 - RNA, 19 nt, Homo sapiens
  misc_RNA (1)...(19): siRNA sense strand
gagaccgcaucaucuggau

SEQ ID NO: 2037053 - RNA, 19 nt, Homo sapiens
  misc_RNA (1)...(19): siRNA sense strand
gcuguucgagaaauuaaau

SEQ ID NO: 2037054 - RNA, 19 nt, Homo sapiens
  misc_RNA (1)...(19): siRNA sense strand
agacugcuguucgagaaau

SEQ ID NO: 2037055 - RNA, 19 nt, Homo sapiens
  misc_RNA (1)...(19): siRNA sense strand
cgaaggcuacggaaugcaa

SEQ ID NO: 2037056 - RNA, 19 nt, Homo sapiens
  misc_RNA (1)...(19): siRNA sense strand
guugugcugugugcauuga

SEQ ID NO: 2037057 - RNA, 19 nt, Homo sapiens
  misc_RNA (1)...(19): siRNA sense strand
aagaagacgaaacuccuaa

SEQ ID NO: 2037058 - RNA, 19 nt, Homo sapiens
  misc_RNA (1)...(19): siRNA sense strand
agauggaucagugucuuua

SEQ ID NO: 2037059 - RNA, 19 nt, Homo sapiens
  misc_RNA (1)...(19): siRNA sense strand
gguggauguugaagaugga

SEQ ID NO: 2037060 - RNA, 19 nt, Homo sapiens
  misc_RNA (1)...(19): siRNA sense strand
ugugugcauugaauuguau

SEQ ID NO: 2037061 - RNA, 19 nt, Homo sapiens
  misc_RNA (1)...(19): siRNA sense strand
gacugcuguucgagaaauu

SEQ ID NO: 2037062 - RNA, 19 nt, Homo sapiens
  misc_RNA (1)...(19): siRNA sense strand
gacgaaacuccuaaucaag

SEQ ID NO: 2037063 - RNA, 19 nt, Homo sapiens
  misc_RNA (1)...(19): siRNA sense strand
uuaacgugcaaccauauuu

SEQ ID NO: 2037064 - RNA, 19 nt, Homo sapiens
  misc_RNA (1)...(19): siRNA sense strand
caucuuaacgugcaaccau

SEQ ID NO: 2037065 - RNA, 19 nt, Homo sapiens
  misc_RNA (1)...(19): siRNA sense strand
caauuaaaggcagaugcua

SEQ ID NO: 2037066 - RNA, 19 nt, Homo sapiens
  misc_RNA (1)...(19): siRNA sense strand
aagacgaaacuccuaauca

SEQ ID NO: 2037067 - RNA, 19 nt, Homo sapiens
  misc_RNA (1)...(19): siRNA sense strand
uggauaugcuucaguacag

SEQ ID NO: 2037068 - RNA, 19 nt, Homo sapiens
  misc_RNA (1)...(19): siRNA sense strand
caggaagcagaggcaauua

SEQ ID NO: 2037069 - RNA, 19 nt, Homo sapiens
  misc_RNA (1)...(19): siRNA sense strand
cugugugcauugaauugua

SEQ ID NO: 2037070 - RNA, 19 nt, Homo sapiens
  misc_RNA (1)...(19): siRNA sense strand
ugaaacaaggagacaagga

SEQ ID NO: 2037071 - RNA, 19 nt, Homo sapiens
  misc_RNA (1)...(19): siRNA sense strand
uaaaccaugaagcaaauuc

SEQ ID NO: 2037072 - RNA, 19 nt, Homo sapiens
  misc_RNA (1)...(19): siRNA sense strand
caacaaaugaaagucuaca

SEQ ID NO: 2037073 - RNA, 19 nt, Homo sapiens
  misc_RNA (1)...(19): siRNA sense strand
aagcagaggcaauuaaagg

SEQ ID NO: 2037074 - RNA, 19 nt, Homo sapiens
  misc_RNA (1)...(19): siRNA sense strand
ggaaugcaagagcucaaag

SEQ ID NO: 2037075 - RNA, 19 nt, Homo sapiens
  misc_RNA (1)...(19): siRNA sense strand
ggauguugaagauggauca

SEQ ID NO: 2037076 - RNA, 19 nt, Homo sapiens
  misc_RNA (1)...(19): siRNA sense strand
caagagcucaaagcaggaa

SEQ ID NO: 2037077 - RNA, 19 nt, Homo sapiens
  misc_RNA (1)...(19): siRNA sense strand
cuucaacuacgcacacuga

SEQ ID NO: 2037078 - RNA, 19 nt, Homo sapiens
  misc_RNA (1)...(19): siRNA sense strand
auuaaaggcagaugcuaaa

SEQ ID NO: 2037079 - RNA, 19 nt, Homo sapiens
  misc_RNA (1)...(19): siRNA sense strand
gugcagucaacaaaugaaa

SEQ ID NO: 2037080 - RNA, 19 nt, Homo sapiens
  misc_RNA (1)...(19): siRNA sense strand
gcaaucaugaucggcaauc

SEQ ID NO: 2037081 - RNA, 19 nt, Homo sapiens
  misc_RNA (1)...(19): siRNA sense strand
gagacugcuguucgagaaa

SEQ ID NO: 2037082 - RNA, 19 nt, Homo sapiens
  misc_RNA (1)...(19): siRNA sense strand
uggauguuauuccucaugu

SEQ ID NO: 2037083 - RNA, 19 nt, Homo sapiens
  misc_RNA (1)...(19): siRNA sense strand
aggaagcagaggcaauuaa

SEQ ID NO: 2037084 - RNA, 19 nt, Homo sapiens
  misc_RNA (1)...(19): siRNA sense strand
gcccugauggagauaguug

SEQ ID NO: 2037085 - RNA, 19 nt, Homo sapiens
  misc_RNA (1)...(19): siRNA sense strand
cagcgagaccgcaucaucu

SEQ ID NO: 2037086 - RNA, 19 nt, Homo sapiens
  misc_RNA (1)...(19): siRNA sense strand
ggcggcaacugugggcuau

SEQ ID NO: 2037087 - RNA, 19 nt, Homo sapiens
  misc_RNA (1)...(19): siRNA sense strand
uaacgugcaaccauauuuu

SEQ ID NO: 2037088 - RNA, 19 nt, Homo sapiens
  misc_RNA (1)...(19): siRNA sense strand
gaauugagguggauguuga

SEQ ID NO: 2037089 - RNA, 19 nt, Homo sapiens
  misc_RNA (1)...(19): siRNA sense strand
caaagaggcauacaaguga

SEQ ID NO: 2037090 - RNA, 19 nt, Homo sapiens
  misc_RNA (1)...(19): siRNA sense strand
gaaacaaggagacaaggaa

SEQ ID NO: 2037091 - RNA, 19 nt, Homo sapiens
  misc_RNA (1)...(19): siRNA sense strand
ggagauaguugugcugugu

SEQ ID NO: 2037092 - RNA, 19 nt, Homo sapiens
  misc_RNA (1)...(19): siRNA sense strand
gguaaaccaugaagcaaau

SEQ ID NO: 2037093 - RNA, 19 nt, Homo sapiens
  misc_RNA (1)...(19): siRNA sense strand
agacgaaacuccuaaucaa

SEQ ID NO: 2037094 - RNA, 19 nt, Homo sapiens
  misc_RNA (1)...(19): siRNA sense strand
ggaagcagaggcaauuaaa

SEQ ID NO: 2037095 - RNA, 19 nt, Homo sapiens
  misc_RNA (1)...(19): siRNA sense strand
gaaagucuacagcugguaa

SEQ ID NO: 2037096 - RNA, 19 nt, Homo sapiens
  misc_RNA (1)...(19): siRNA sense strand
gaagaagacgaaacuccua

SEQ ID NO: 2037097 - RNA, 19 nt, Homo sapiens
  misc_RNA (1)...(19): siRNA sense strand
ggucauagaaguagggaaa

SEQ ID NO: 2037098 - RNA, 19 nt, Homo sapiens
  misc_RNA (1)...(19): siRNA sense strand
caacccaaccuuugaagaa

SEQ ID NO: 2037099 - RNA, 19 nt, Homo sapiens
  misc_RNA (1)...(19): siRNA sense strand
gcaggaagcagaggcaauu

SEQ ID NO: 2037100 - RNA, 19 nt, Homo sapiens
  misc_RNA (1)...(19): siRNA sense strand
gcaaccauauuuuccauaa

SEQ ID NO: 2037101 - RNA, 19 nt, Homo sapiens
  misc_RNA (1)...(19): siRNA sense strand
gacaauggucauagaagua

SEQ ID NO: 2037102 - RNA, 19 nt, Homo sapiens
  misc_RNA (1)...(19): siRNA sense strand
ucaaagaggcauacaagug

SEQ ID NO: 2037103 - RNA, 19 nt, Homo sapiens
  misc_RNA (1)...(19): siRNA sense strand
ugagguggauguugaagau

SEQ ID NO: 2037104 - RNA, 19 nt, Homo sapiens
  misc_RNA (1)...(19): siRNA sense strand
cggcaacugugggcuauuu

SEQ ID NO: 2037105 - RNA, 19 nt, Homo sapiens
  misc_RNA (1)...(19): siRNA sense strand
gauguuauuccucauguug

SEQ ID NO: 2037106 - RNA, 19 nt, Homo sapiens
  misc_RNA (1)...(19): siRNA sense strand
gaacacgugcagucaacaa

SEQ ID NO: 2037107 - RNA, 19 nt, Homo sapiens
  misc_RNA (1)...(19): siRNA sense strand
ggaaauuggcccugaugga

SEQ ID NO: 2037108 - RNA, 19 nt, Homo sapiens
  misc_RNA (1)...(19): siRNA sense strand
gcauacaagugacaauggu

SEQ ID NO: 2037109 - RNA, 19 nt, Homo sapiens
  misc_RNA (1)...(19): siRNA sense strand
ucaagagacugcuguucga

SEQ ID NO: 2037110 - RNA, 19 nt, Homo sapiens
  misc_RNA (1)...(19): siRNA sense strand
acaagucccuguauccaau

SEQ ID NO: 2037111 - RNA, 19 nt, Homo sapiens
  misc_RNA (1)...(19): siRNA sense strand
gcucgaaggcuacggaaug

SEQ ID NO: 2037112 - RNA, 19 nt, Homo sapiens
  misc_RNA (1)...(19): siRNA sense strand
gucaacaaaugaaagucua

SEQ ID NO: 2037113 - RNA, 19 nt, Homo sapiens
  misc_RNA (1)...(19): siRNA sense strand
gugacauacucaaagcuuu

SEQ ID NO: 2037114 - RNA, 19 nt, Homo sapiens
  misc_RNA (1)...(19): siRNA sense strand
gaagacgaaacuccuaauc

SEQ ID NO: 2037115 - RNA, 19 nt, Homo sapiens
  misc_RNA (1)...(19): siRNA sense strand
agagacugcuguucgagaa

SEQ ID NO: 2037116 - RNA, 19 nt, Homo sapiens
  misc_RNA (1)...(19): siRNA sense strand
caaggaaauuggcccugau

SEQ ID NO: 2037117 - RNA, 19 nt, Homo sapiens
  misc_RNA (1)...(19): siRNA sense strand
ucugcaaucuauucaaaga

SEQ ID NO: 2037118 - RNA, 19 nt, Homo sapiens
  misc_RNA (1)...(19): siRNA sense strand
caacuacgcacacugaaac

SEQ ID NO: 2037119 - RNA, 19 nt, Homo sapiens
  misc_RNA (1)...(19): siRNA sense strand
aaacaaggagacaaggaaa

SEQ ID NO: 2037120 - RNA, 19 nt, Homo sapiens
  misc_RNA (1)...(19): siRNA sense strand
gcagucaacaaaugaaagu

SEQ ID NO: 2037121 - RNA, 19 nt, Homo sapiens
  misc_RNA (1)...(19): siRNA sense strand
acaaggagacaaggaaauu

SEQ ID NO: 2037122 - RNA, 19 nt, Homo sapiens
  misc_RNA (1)...(19): siRNA sense strand
ggauguuauuccucauguu

SEQ ID NO: 2037123 - RNA, 19 nt, Homo sapiens
  misc_RNA (1)...(19): siRNA sense strand
gaccgcaucaucuggauau

SEQ ID NO: 2037124 - RNA, 19 nt, Homo sapiens
  misc_RNA (1)...(19): siRNA sense strand
gcagcgagaccgcaucauc

SEQ ID NO: 2037125 - RNA, 19 nt, Homo sapiens
  misc_RNA (1)...(19): siRNA sense strand
ggaauugagguggauguug

SEQ ID NO: 2037126 - RNA, 19 nt, Homo sapiens
  misc_RNA (1)...(19): siRNA sense strand
gauuugguacgcaucuuaa

SEQ ID NO: 2037127 - RNA, 19 nt, Homo sapiens
  misc_RNA (1)...(19): siRNA sense strand
gcauugaauuguauaaacc

SEQ ID NO: 2037128 - RNA, 19 nt, Homo sapiens
  misc_RNA (1)...(19): siRNA sense strand
ggaucagugucuuuacaag

SEQ ID NO: 2037129 - RNA, 19 nt, Homo sapiens
  misc_RNA (1)...(19): siRNA sense strand
cgaaacuccuaaucaagag

SEQ ID NO: 2037130 - RNA, 19 nt, Homo sapiens
  misc_RNA (1)...(19): siRNA sense strand
caugaucggcaaucugaaa

SEQ ID NO: 2037131 - RNA, 19 nt, Homo sapiens
  misc_RNA (1)...(19): siRNA sense strand
gaucagugucuuuacaagu

SEQ ID NO: 2037132 - RNA, 19 nt, Homo sapiens
  misc_RNA (1)...(19): siRNA sense strand
cacgugcagucaacaaaug

SEQ ID NO: 2037133 - RNA, 19 nt, Homo sapiens
  misc_RNA (1)...(19): siRNA sense strand
gaagcagaggcaauuaaag

SEQ ID NO: 2037134 - RNA, 19 nt, Homo sapiens
  misc_RNA (1)...(19): siRNA sense strand
ugacaacccaaccuuugaa

SEQ ID NO: 2037135 - RNA, 19 nt, Homo sapiens
  misc_RNA (1)...(19): siRNA sense strand
ggaggaacacgugcaguca

SEQ ID NO: 2037136 - RNA, 19 nt, Homo sapiens
  misc_RNA (1)...(19): siRNA sense strand
ugauuugguacgcaucuua

SEQ ID NO: 2037137 - RNA, 19 nt, Homo sapiens
  misc_RNA (1)...(19): siRNA sense strand
gucccuguauccaaugaaa

SEQ ID NO: 2037138 - RNA, 19 nt, Homo sapiens
  misc_RNA (1)...(19): siRNA sense strand
acgaaacuccuaaucaaga

SEQ ID NO: 2037139 - RNA, 19 nt, Homo sapiens
  misc_RNA (1)...(19): siRNA sense strand
gcaauuaaaggcagaugcu

SEQ ID NO: 2037140 - RNA, 19 nt, Homo sapiens
  misc_RNA (1)...(19): siRNA sense strand
cccuguauccaaugaaaua

SEQ ID NO: 2037141 - RNA, 19 nt, Homo sapiens
  misc_RNA (1)...(19): siRNA sense strand
caaggagacaaggaaauug

SEQ ID NO: 2037142 - RNA, 19 nt, Homo sapiens
  misc_RNA (1)...(19): siRNA sense strand
aauuaaaggcagaugcuaa

SEQ ID NO: 2037143 - RNA, 19 nt, Homo sapiens
  misc_RNA (1)...(19): siRNA sense strand
gcaacugugggcuauuuua

SEQ ID NO: 2037144 - RNA, 19 nt, Homo sapiens
  misc_RNA (1)...(19): siRNA sense strand
ucaacuacgcacacugaaa

SEQ ID NO: 2037145 - RNA, 19 nt, Homo sapiens
  misc_RNA (1)...(19): siRNA sense strand
gaggaacacgugcagucaa

SEQ ID NO: 2037146 - RNA, 19 nt, Homo sapiens
  misc_RNA (1)...(19): siRNA sense strand
gaaacuccuaaucaagaga

SEQ ID NO: 2037147 - RNA, 19 nt, Homo sapiens
  misc_RNA (1)...(19): siRNA sense strand
gcaguagacauuguugcaa

SEQ ID NO: 2037148 - RNA, 19 nt, Homo sapiens
  misc_RNA (1)...(19): siRNA sense strand
gagaccgcaucaucuggau

SEQ ID NO: 2037149 - RNA, 19 nt, Homo sapiens
  misc_RNA (1)...(19): siRNA sense strand
gcuguucgagaaauuaaau

SEQ ID NO: 2037150 - RNA, 19 nt, Homo sapiens
  misc_RNA (1)...(19): siRNA sense strand
agacugcuguucgagaaau

SEQ ID NO: 2037151 - RNA, 19 nt, Homo sapiens
  misc_RNA (1)...(19): siRNA sense strand
cgaaggcuacggaaugcaa

SEQ ID NO: 2037152 - RNA, 19 nt, Homo sapiens
  misc_RNA (1)...(19): siRNA sense strand
guugugcugugugcauuga

SEQ ID NO: 2037153 - RNA, 19 nt, Homo sapiens
  misc_RNA (1)...(19): siRNA sense strand
aagaagacgaaacuccuaa

SEQ ID NO: 2037154 - RNA, 19 nt, Homo sapiens
  misc_RNA (1)...(19): siRNA sense strand
agauggaucagugucuuua

SEQ ID NO: 2037155 - RNA, 19 nt, Homo sapiens
  misc_RNA (1)...(19): siRNA sense strand
gguggauguugaagaugga

SEQ ID NO: 2037156 - RNA, 19 nt, Homo sapiens
  misc_RNA (1)...(19): siRNA sense strand
ugugugcauugaauuguau

SEQ ID NO: 2037157 - RNA, 19 nt, Homo sapiens
  misc_RNA (1)...(19): siRNA sense strand
gacugcuguucgagaaauu

SEQ ID NO: 2037158 - RNA, 19 nt, Homo sapiens
  misc_RNA (1)...(19): siRNA sense strand
gacgaaacuccuaaucaag

SEQ ID NO: 2037159 - RNA, 19 nt, Homo sapiens
  misc_RNA (1)...(19): siRNA sense strand
uuaacgugcaaccauauuu

SEQ ID NO: 2037160 - RNA, 19 nt, Homo sapiens
  misc_RNA (1)...(19): siRNA sense strand
caucuuaacgugcaaccau

SEQ ID NO: 2037161 - RNA, 19 nt, Homo sapiens
  misc_RNA (1)...(19): siRNA sense strand
caauuaaaggcagaugcua

SEQ ID NO: 2037162 - RNA, 19 nt, Homo sapiens
  misc_RNA (1)...(19): siRNA sense strand
aagacgaaacuccuaauca

SEQ ID NO: 2037163 - RNA, 19 nt, Homo sapiens
  misc_RNA (1)...(19): siRNA sense strand
uggauaugcuucaguacag

SEQ ID NO: 2037164 - RNA, 19 nt, Homo sapiens
  misc_RNA (1)...(19): siRNA sense strand
caggaagcagaggcaauua

SEQ ID NO: 2037165 - RNA, 19 nt, Homo sapiens
  misc_RNA (1)...(19): siRNA sense strand
cugugugcauugaauugua

SEQ ID NO: 2037166 - RNA, 19 nt, Homo sapiens
  misc_RNA (1)...(19): siRNA sense strand
ugaaacaaggagacaagga

SEQ ID NO: 2037167 - RNA, 19 nt, Homo sapiens
  misc_RNA (1)...(19): siRNA sense strand
uaaaccaugaagcaaauuc

SEQ ID NO: 2037168 - RNA, 19 nt, Homo sapiens
  misc_RNA (1)...(19): siRNA sense strand
caacaaaugaaagucuaca

SEQ ID NO: 2037169 - RNA, 19 nt, Homo sapiens
  misc_RNA (1)...(19): siRNA sense strand
aagcagaggcaauuaaagg

SEQ ID NO: 2037170 - RNA, 19 nt, Homo sapiens
  misc_RNA (1)...(19): siRNA sense strand
ggaaugcaagagcucaaag

SEQ ID NO: 2037171 - RNA, 19 nt, Homo sapiens
  misc_RNA (1)...(19): siRNA sense strand
ggauguugaagauggauca

SEQ ID NO: 2037172 - RNA, 19 nt, Homo sapiens
  misc_RNA (1)...(19): siRNA sense strand
caagagcucaaagcaggaa

SEQ ID NO: 2037173 - RNA, 19 nt, Homo sapiens
  misc_RNA (1)...(19): siRNA sense strand
cuucaacuacgcacacuga

SEQ ID NO: 2037174 - RNA, 19 nt, Homo sapiens
  misc_RNA (1)...(19): siRNA sense strand
auuaaaggcagaugcuaaa

SEQ ID NO: 2037175 - RNA, 19 nt, Homo sapiens
  misc_RNA (1)...(19): siRNA sense strand
gugcagucaacaaaugaaa

SEQ ID NO: 2037176 - RNA, 19 nt, Homo sapiens
  misc_RNA (1)...(19): siRNA sense strand
gcaaucaugaucggcaauc

SEQ ID NO: 2037177 - RNA, 19 nt, Homo sapiens
  misc_RNA (1)...(19): siRNA sense strand
gagacugcuguucgagaaa

SEQ ID NO: 2037178 - RNA, 19 nt, Homo sapiens
  misc_RNA (1)...(19): siRNA sense strand
uggauguuauuccucaugu

SEQ ID NO: 2037179 - RNA, 19 nt, Homo sapiens
  misc_RNA (1)...(19): siRNA sense strand
aggaagcagaggcaauuaa

SEQ ID NO: 2037180 - RNA, 19 nt, Homo sapiens
  misc_RNA (1)...(19): siRNA sense strand
gcccugauggagauaguug

SEQ ID NO: 2037181 - RNA, 19 nt, Homo sapiens
  misc_RNA (1)...(19): siRNA sense strand
cagcgagaccgcaucaucu

SEQ ID NO: 2037182 - RNA, 19 nt, Homo sapiens
  misc_RNA (1)...(19): siRNA sense strand
ggcggcaacugugggcuau

SEQ ID NO: 2037183 - RNA, 19 nt, Homo sapiens
  misc_RNA (1)...(19): siRNA sense strand
uaacgugcaaccauauuuu

SEQ ID NO: 2037184 - RNA, 19 nt, Homo sapiens
  misc_RNA (1)...(19): siRNA sense strand
gaauugagguggauguuga

SEQ ID NO: 2037185 - RNA, 19 nt, Homo sapiens
  misc_RNA (1)...(19): siRNA sense strand
caaagaggcauacaaguga

SEQ ID NO: 2037186 - RNA, 19 nt, Homo sapiens
  misc_RNA (1)...(19): siRNA sense strand
gaaacaaggagacaaggaa

SEQ ID NO: 2037187 - RNA, 19 nt, Homo sapiens
  misc_RNA (1)...(19): siRNA sense strand
ggagauaguugugcugugu

SEQ ID NO: 2037188 - RNA, 19 nt, Homo sapiens
  misc_RNA (1)...(19): siRNA sense strand
gguaaaccaugaagcaaau

SEQ ID NO: 2037189 - RNA, 19 nt, Homo sapiens
  misc_RNA (1)...(19): siRNA sense strand
agacgaaacuccuaaucaa

SEQ ID NO: 2037190 - RNA, 19 nt, Homo sapiens
  misc_RNA (1)...(19): siRNA sense strand
ggaagcagaggcaauuaaa

SEQ ID NO: 2037191 - RNA, 19 nt, Homo sapiens
  misc_RNA (1)...(19): siRNA sense strand
gaaagucuacagcugguaa

SEQ ID NO: 2037192 - RNA, 19 nt, Homo sapiens
  misc_RNA (1)...(19): siRNA sense strand
gaagaagacgaaacuccua

SEQ ID NO: 2037193 - RNA, 19 nt, Homo sapiens
  misc_RNA (1)...(19): siRNA sense strand
ggucauagaaguagggaaa

SEQ ID NO: 2037194 - RNA, 19 nt, Homo sapiens
  misc_RNA (1)...(19): siRNA sense strand
caacccaaccuuugaagaa

SEQ ID NO: 2037195 - RNA, 19 nt, Homo sapiens
  misc_RNA (1)...(19): siRNA sense strand
gcaggaagcagaggcaauu

SEQ ID NO: 2037196 - RNA, 19 nt, Homo sapiens
  misc_RNA (1)...(19): siRNA sense strand
gcaaccauauuuuccauaa

SEQ ID NO: 2037197 - RNA, 19 nt, Homo sapiens
  misc_RNA (1)...(19): siRNA sense strand
gacaauggucauagaagua

SEQ ID NO: 2037198 - RNA, 19 nt, Homo sapiens
  misc_RNA (1)...(19): siRNA sense strand
ucaaagaggcauacaagug

SEQ ID NO: 2037199 - RNA, 19 nt, Homo sapiens
  misc_RNA (1)...(19): siRNA sense strand
ugagguggauguugaagau

SEQ ID NO: 2037200 - RNA, 19 nt, Homo sapiens
  misc_RNA (1)...(19): siRNA sense strand
cggcaacugugggcuauuu

SEQ ID NO: 2037201 - RNA, 19 nt, Homo sapiens
  misc_RNA (1)...(19): siRNA sense strand
gauguuauuccucauguug

SEQ ID NO: 2037202 - RNA, 19 nt, Homo sapiens
  misc_RNA (1)...(19): siRNA sense strand
gaacacgugcagucaacaa

SEQ ID NO: 2037203 - RNA, 19 nt, Homo sapiens
  misc_RNA (1)...(19): siRNA sense strand
ggaaauuggcccugaugga

SEQ ID NO: 2037204 - RNA, 19 nt, Homo sapiens
  misc_RNA (1)...(19): siRNA sense strand
gcauacaagugacaauggu

SEQ ID NO: 2037205 - RNA, 19 nt, Homo sapiens
  misc_RNA (1)...(19): siRNA sense strand
ucaagagacugcuguucga

SEQ ID NO: 2037206 - RNA, 19 nt, Homo sapiens
  misc_RNA (1)...(19): siRNA sense strand
acaagucccuguauccaau

SEQ ID NO: 2037207 - RNA, 19 nt, Homo sapiens
  misc_RNA (1)...(19): siRNA sense strand
gcucgaaggcuacggaaug

SEQ ID NO: 2037208 - RNA, 19 nt, Homo sapiens
  misc_RNA (1)...(19): siRNA sense strand
gucaacaaaugaaagucua

SEQ ID NO: 2037209 - RNA, 19 nt, Homo sapiens
  misc_RNA (1)...(19): siRNA sense strand
gugacauacucaaagcuuu

SEQ ID NO: 2037210 - RNA, 19 nt, Homo sapiens
  misc_RNA (1)...(19): siRNA sense strand
gaagacgaaacuccuaauc

SEQ ID NO: 2037211 - RNA, 19 nt, Homo sapiens
  misc_RNA (1)...(19): siRNA sense strand
agagacugcuguucgagaa

SEQ ID NO: 2037212 - RNA, 19 nt, Homo sapiens
  misc_RNA (1)...(19): siRNA sense strand
caaggaaauuggcccugau

SEQ ID NO: 2037213 - RNA, 19 nt, Homo sapiens
  misc_RNA (1)...(19): siRNA sense strand
ucugcaaucuauucaaaga

SEQ ID NO: 2037214 - RNA, 19 nt, Homo sapiens
  misc_RNA (1)...(19): siRNA sense strand
caacuacgcacacugaaac

SEQ ID NO: 2037215 - RNA, 19 nt, Homo sapiens
  misc_RNA (1)...(19): siRNA sense strand
aaacaaggagacaaggaaa

SEQ ID NO: 2037216 - RNA, 19 nt, Homo sapiens
  misc_RNA (1)...(19): siRNA sense strand
gcagucaacaaaugaaagu

SEQ ID NO: 2037217 - RNA, 19 nt, Homo sapiens
  misc_RNA (1)...(19): siRNA sense strand
acaaggagacaaggaaauu

SEQ ID NO: 2037218 - RNA, 19 nt, Homo sapiens
  misc_RNA (1)...(19): siRNA sense strand
ggauguuauuccucauguu

SEQ ID NO: 2037219 - RNA, 19 nt, Homo sapiens
  misc_RNA (1)...(19): siRNA sense strand
gaccgcaucaucuggauau

SEQ ID NO: 2037220 - RNA, 19 nt, Homo sapiens
  misc_RNA (1)...(19): siRNA sense strand
gcagcgagaccgcaucauc

SEQ ID NO: 2037221 - RNA, 19 nt, Homo sapiens
  misc_RNA (1)...(19): siRNA sense strand
ggaauugagguggauguug

SEQ ID NO: 2037222 - RNA, 19 nt, Homo sapiens
  misc_RNA (1)...(19): siRNA sense strand
gauuugguacgcaucuuaa

SEQ ID NO: 2037223 - RNA, 19 nt, Homo sapiens
  misc_RNA (1)...(19): siRNA sense strand
gcauugaauuguauaaacc

SEQ ID NO: 2037224 - RNA, 19 nt, Homo sapiens
  misc_RNA (1)...(19): siRNA sense strand
ggaucagugucuuuacaag

SEQ ID NO: 2037225 - RNA, 19 nt, Homo sapiens
  misc_RNA (1)...(19): siRNA sense strand
cgaaacuccuaaucaagag

SEQ ID NO: 2037226 - RNA, 19 nt, Homo sapiens
  misc_RNA (1)...(19): siRNA sense strand
caugaucggcaaucugaaa

SEQ ID NO: 2037227 - RNA, 19 nt, Homo sapiens
  misc_RNA (1)...(19): siRNA sense strand
gaucagugucuuuacaagu

SEQ ID NO: 2037228 - RNA, 19 nt, Homo sapiens
  misc_RNA (1)...(19): siRNA sense strand
cacgugcagucaacaaaug

SEQ ID NO: 2037229 - RNA, 19 nt, Homo sapiens
  misc_RNA (1)...(19): siRNA sense strand
gaagcagaggcaauuaaag

SEQ ID NO: 2037230 - RNA, 19 nt, Homo sapiens
  misc_RNA (1)...(19): siRNA sense strand
ugacaacccaaccuuugaa

SEQ ID NO: 2037231 - RNA, 19 nt, Homo sapiens
  misc_RNA (1)...(19): siRNA sense strand
ggaggaacacgugcaguca

SEQ ID NO: 2037232 - RNA, 19 nt, Homo sapiens
  misc_RNA (1)...(19): siRNA sense strand
ugauuugguacgcaucuua

SEQ ID NO: 2037233 - RNA, 19 nt, Homo sapiens
  misc_RNA (1)...(19): siRNA sense strand
gucccuguauccaaugaaa

SEQ ID NO: 2037234 - RNA, 19 nt, Homo sapiens
  misc_RNA (1)...(19): siRNA sense strand
acgaaacuccuaaucaaga

SEQ ID NO: 2037235 - RNA, 19 nt, Homo sapiens
  misc_RNA (1)...(19): siRNA sense strand
gcaauuaaaggcagaugcu

SEQ ID NO: 2037236 - RNA, 19 nt, Homo sapiens
  misc_RNA (1)...(19): siRNA sense strand
cccuguauccaaugaaaua

SEQ ID NO: 2037237 - RNA, 19 nt, Homo sapiens
  misc_RNA (1)...(19): siRNA sense strand
caaggagacaaggaaauug

SEQ ID NO: 2037238 - RNA, 19 nt, Homo sapiens
  misc_RNA (1)...(19): siRNA sense strand
aauuaaaggcagaugcuaa

SEQ ID NO: 2037239 - RNA, 19 nt, Homo sapiens
  misc_RNA (1)...(19): siRNA sense strand
gcaacugugggcuauuuua

SEQ ID NO: 2037240 - RNA, 19 nt, Homo sapiens
  misc_RNA (1)...(19): siRNA sense strand
ucaacuacgcacacugaaa

SEQ ID NO: 2037241 - RNA, 19 nt, Homo sapiens
  misc_RNA (1)...(19): siRNA sense strand
gaggaacacgugcagucaa

SEQ ID NO: 2037242 - RNA, 19 nt, Homo sapiens
  misc_RNA (1)...(19): siRNA sense strand
gaaacuccuaaucaagaga

SEQ ID NO: 2037243 - RNA, 19 nt, Homo sapiens
  misc_RNA (1)...(19): siRNA sense strand
gcaguagacauuguugcaa

SEQ ID NO: 2037244 - RNA, 19 nt, Homo sapiens
  misc_RNA (1)...(19): siRNA sense strand
gagaccgcaucaucuggau

SEQ ID NO: 2037245 - RNA, 19 nt, Homo sapiens
  misc_RNA (1)...(19): siRNA sense strand
gcuguucgagaaauuaaau

SEQ ID NO: 2037246 - RNA, 19 nt, Homo sapiens
  misc_RNA (1)...(19): siRNA sense strand
agacugcuguucgagaaau

SEQ ID NO: 2037247 - RNA, 19 nt, Homo sapiens
  misc_RNA (1)...(19): siRNA sense strand
cgaaggcuacggaaugcaa

SEQ ID NO: 2037248 - RNA, 19 nt, Homo sapiens
  misc_RNA (1)...(19): siRNA sense strand
guugugcugugugcauuga

SEQ ID NO: 2037249 - RNA, 19 nt, Homo sapiens
  misc_RNA (1)...(19): siRNA sense strand
aagaagacgaaacuccuaa

SEQ ID NO: 2037250 - RNA, 19 nt, Homo sapiens
  misc_RNA (1)...(19): siRNA sense strand
agauggaucagugucuuua

SEQ ID NO: 2037251 - RNA, 19 nt, Homo sapiens
  misc_RNA (1)...(19): siRNA sense strand
gguggauguugaagaugga

SEQ ID NO: 2037252 - RNA, 19 nt, Homo sapiens
  misc_RNA (1)...(19): siRNA sense strand
ugugugcauugaauuguau

SEQ ID NO: 2037253 - RNA, 19 nt, Homo sapiens
  misc_RNA (1)...(19): siRNA sense strand
gacugcuguucgagaaauu

SEQ ID NO: 2037254 - RNA, 19 nt, Homo sapiens
  misc_RNA (1)...(19): siRNA sense strand
gacgaaacuccuaaucaag

SEQ ID NO: 2037255 - RNA, 19 nt, Homo sapiens
  misc_RNA (1)...(19): siRNA sense strand
uuaacgugcaaccauauuu

SEQ ID NO: 2037256 - RNA, 19 nt, Homo sapiens
  misc_RNA (1)...(19): siRNA sense strand
caucuuaacgugcaaccau

SEQ ID NO: 2037257 - RNA, 19 nt, Homo sapiens
  misc_RNA (1)...(19): siRNA sense strand
caauuaaaggcagaugcua

SEQ ID NO: 2037258 - RNA, 19 nt, Homo sapiens
  misc_RNA (1)...(19): siRNA sense strand
aagacgaaacuccuaauca

SEQ ID NO: 2037259 - RNA, 19 nt, Homo sapiens
  misc_RNA (1)...(19): siRNA sense strand
uggauaugcuucaguacag

SEQ ID NO: 2037260 - RNA, 19 nt, Homo sapiens
  misc_RNA (1)...(19): siRNA sense strand
caggaagcagaggcaauua

SEQ ID NO: 2037261 - RNA, 19 nt, Homo sapiens
  misc_RNA (1)...(19): siRNA sense strand
cugugugcauugaauugua

SEQ ID NO: 2037262 - RNA, 19 nt, Homo sapiens
  misc_RNA (1)...(19): siRNA sense strand
ugaaacaaggagacaagga

SEQ ID NO: 2037263 - RNA, 19 nt, Homo sapiens
  misc_RNA (1)...(19): siRNA sense strand
uaaaccaugaagcaaauuc

SEQ ID NO: 2037264 - RNA, 19 nt, Homo sapiens
  misc_RNA (1)...(19): siRNA sense strand
caacaaaugaaagucuaca

SEQ ID NO: 2037265 - RNA, 19 nt, Homo sapiens
  misc_RNA (1)...(19): siRNA sense strand
aagcagaggcaauuaaagg

SEQ ID NO: 2037266 - RNA, 19 nt, Homo sapiens
  misc_RNA (1)...(19): siRNA sense strand
ggaaugcaagagcucaaag

SEQ ID NO: 2037267 - RNA, 19 nt, Homo sapiens
  misc_RNA (1)...(19): siRNA sense strand
ggauguugaagauggauca

SEQ ID NO: 2037268 - RNA, 19 nt, Homo sapiens
  misc_RNA (1)...(19): siRNA sense strand
caagagcucaaagcaggaa

SEQ ID NO: 2037269 - RNA, 19 nt, Homo sapiens
  misc_RNA (1)...(19): siRNA sense strand
cuucaacuacgcacacuga

SEQ ID NO: 2037270 - RNA, 19 nt, Homo sapiens
  misc_RNA (1)...(19): siRNA sense strand
auuaaaggcagaugcuaaa

SEQ ID NO: 2037271 - RNA, 19 nt, Homo sapiens
  misc_RNA (1)...(19): siRNA sense strand
gugcagucaacaaaugaaa

SEQ ID NO: 2037272 - RNA, 19 nt, Homo sapiens
  misc_RNA (1)...(19): siRNA sense strand
gcaaucaugaucggcaauc

SEQ ID NO: 2037273 - RNA, 19 nt, Homo sapiens
  misc_RNA (1)...(19): siRNA sense strand
gagacugcuguucgagaaa

SEQ ID NO: 2037274 - RNA, 19 nt, Homo sapiens
  misc_RNA (1)...(19): siRNA sense strand
uggauguuauuccucaugu

SEQ ID NO: 2037275 - RNA, 19 nt, Homo sapiens
  misc_RNA (1)...(19): siRNA sense strand
aggaagcagaggcaauuaa

SEQ ID NO: 2037276 - RNA, 19 nt, Homo sapiens
  misc_RNA (1)...(19): siRNA sense strand
gcccugauggagauaguug

SEQ ID NO: 2037277 - RNA, 19 nt, Homo sapiens
  misc_RNA (1)...(19): siRNA sense strand
cagcgagaccgcaucaucu

SEQ ID NO: 2037278 - RNA, 19 nt, Homo sapiens
  misc_RNA (1)...(19): siRNA sense strand
ggcggcaacugugggcuau

SEQ ID NO: 2037279 - RNA, 19 nt, Homo sapiens
  misc_RNA (1)...(19): siRNA sense strand
uaacgugcaaccauauuuu

SEQ ID NO: 2037280 - RNA, 19 nt, Homo sapiens
  misc_RNA (1)...(19): siRNA sense strand
gagaacagcuccugcauca

SEQ ID NO: 2037281 - RNA, 19 nt, Homo sapiens
  misc_RNA (1)...(19): siRNA sense strand
gaaaugauccgacuagaug

SEQ ID NO: 2037282 - RNA, 19 nt, Homo sapiens
  misc_RNA (1)...(19): siRNA sense strand
gaaaccacuuauccaaaua

SEQ ID NO: 2037283 - RNA, 19 nt, Homo sapiens
  misc_RNA (1)...(19): siRNA sense strand
gggaugugcuccagaguua

SEQ ID NO: 2037284 - RNA, 19 nt, Homo sapiens
  misc_RNA (1)...(19): siRNA sense strand
caaugaagauuaugcauga

SEQ ID NO: 2037285 - RNA, 19 nt, Homo sapiens
  misc_RNA (1)...(19): siRNA sense strand
ccacuuauccaaauacuua

SEQ ID NO: 2037286 - RNA, 19 nt, Homo sapiens
  misc_RNA (1)...(19): siRNA sense strand
ggacaucaccuugaagaua

SEQ ID NO: 2037287 - RNA, 19 nt, Homo sapiens
  misc_RNA (1)...(19): siRNA sense strand
gcacauccuuuacugcauu

SEQ ID NO: 2037288 - RNA, 19 nt, Homo sapiens
  misc_RNA (1)...(19): siRNA sense strand
caacaccgaugcaaaguuc

SEQ ID NO: 2037289 - RNA, 19 nt, Homo sapiens
  misc_RNA (1)...(19): siRNA sense strand
ggacagaaacugaaaauaa

SEQ ID NO: 2037290 - RNA, 19 nt, Homo sapiens
  misc_RNA (1)...(19): siRNA sense strand
gaagauauuuuggguguua

SEQ ID NO: 2037291 - RNA, 19 nt, Homo sapiens
  misc_RNA (1)...(19): siRNA sense strand
uauaauaccugugucugua

SEQ ID NO: 2037292 - RNA, 19 nt, Homo sapiens
  misc_RNA (1)...(19): siRNA sense strand
caacaucccugagguggaa

SEQ ID NO: 2037293 - RNA, 19 nt, Homo sapiens
  misc_RNA (1)...(19): siRNA sense strand
cagcaacccucauugaaga

SEQ ID NO: 2037294 - RNA, 19 nt, Homo sapiens
  misc_RNA (1)...(19): siRNA sense strand
aagaagagcuugaguuugg

SEQ ID NO: 2037295 - RNA, 19 nt, Homo sapiens
  misc_RNA (1)...(19): siRNA sense strand
uaugaaaguugccgaggua

SEQ ID NO: 2037296 - RNA, 19 nt, Homo sapiens
  misc_RNA (1)...(19): siRNA sense strand
gaggaaacuuacccaagaa

SEQ ID NO: 2037297 - RNA, 19 nt, Homo sapiens
  misc_RNA (1)...(19): siRNA sense strand
gcuugaguauccuguauaa

SEQ ID NO: 2037298 - RNA, 19 nt, Homo sapiens
  misc_RNA (1)...(19): siRNA sense strand
ggaaauuucuccucuucuc

SEQ ID NO: 2037299 - RNA, 19 nt, Homo sapiens
  misc_RNA (1)...(19): siRNA sense strand
gcagauguccuuccucuuc

SEQ ID NO: 2037300 - RNA, 19 nt, Homo sapiens
  misc_RNA (1)...(19): siRNA sense strand
ucccuggacuuaauaauuu

SEQ ID NO: 2037301 - RNA, 19 nt, Homo sapiens
  misc_RNA (1)...(19): siRNA sense strand
gcuaauuucugccggauuc

SEQ ID NO: 2037302 - RNA, 19 nt, Homo sapiens
  misc_RNA (1)...(19): siRNA sense strand
guacagagggaguuacaaa

SEQ ID NO: 2037303 - RNA, 19 nt, Homo sapiens
  misc_RNA (1)...(19): siRNA sense strand
agaggaaacuuacccaaga

SEQ ID NO: 2037304 - RNA, 19 nt, Homo sapiens
  misc_RNA (1)...(19): siRNA sense strand
uuugugaucuuccuguuua

SEQ ID NO: 2037305 - RNA, 19 nt, Homo sapiens
  misc_RNA (1)...(19): siRNA sense strand
gcugaucccuggacuuaau

SEQ ID NO: 2037306 - RNA, 19 nt, Homo sapiens
  misc_RNA (1)...(19): siRNA sense strand
caaucugaguuccuuagua

SEQ ID NO: 2037307 - RNA, 19 nt, Homo sapiens
  misc_RNA (1)...(19): siRNA sense strand
gcacacgcuucuugccaaa

SEQ ID NO: 2037308 - RNA, 19 nt, Homo sapiens
  misc_RNA (1)...(19): siRNA sense strand
caagaaaccacuuauccaa

SEQ ID NO: 2037309 - RNA, 19 nt, Homo sapiens
  misc_RNA (1)...(19): siRNA sense strand
gacagcaccugccuagaga

SEQ ID NO: 2037310 - RNA, 19 nt, Homo sapiens
  misc_RNA (1)...(19): siRNA sense strand
ggacagcgaguguaaguca

SEQ ID NO: 2037311 - RNA, 19 nt, Homo sapiens
  misc_RNA (1)...(19): siRNA sense strand
agaaaccacuuauccaaau

SEQ ID NO: 2037312 - RNA, 19 nt, Homo sapiens
  misc_RNA (1)...(19): siRNA sense strand
gugaugaaauguccaagga

SEQ ID NO: 2037313 - RNA, 19 nt, Homo sapiens
  misc_RNA (1)...(19): siRNA sense strand
gagaauggccugccucaca

SEQ ID NO: 2037314 - RNA, 19 nt, Homo sapiens
  misc_RNA (1)...(19): siRNA sense strand
aaucugaguuccuuaguau

SEQ ID NO: 2037315 - RNA, 19 nt, Homo sapiens
  misc_RNA (1)...(19): siRNA sense strand
gacaucaccuugaagauac

SEQ ID NO: 2037316 - RNA, 19 nt, Homo sapiens
  misc_RNA (1)...(19): siRNA sense strand
agcagcagcucgcuaauuu

SEQ ID NO: 2037317 - RNA, 19 nt, Homo sapiens
  misc_RNA (1)...(19): siRNA sense strand
agaagaagagcuugaguuu

SEQ ID NO: 2037318 - RNA, 19 nt, Homo sapiens
  misc_RNA (1)...(19): siRNA sense strand
gaggcuauggcauuuguua

SEQ ID NO: 2037319 - RNA, 19 nt, Homo sapiens
  misc_RNA (1)...(19): siRNA sense strand
gaugcaaaguuccagguau

SEQ ID NO: 2037320 - RNA, 19 nt, Homo sapiens
  misc_RNA (1)...(19): siRNA sense strand
gauucuggcugucaccauu

SEQ ID NO: 2037321 - RNA, 19 nt, Homo sapiens
  misc_RNA (1)...(19): siRNA sense strand
cagcauuccuggcuuuguu

SEQ ID NO: 2037322 - RNA, 19 nt, Homo sapiens
  misc_RNA (1)...(19): siRNA sense strand
ggacauagacagggacuuc

SEQ ID NO: 2037323 - RNA, 19 nt, Homo sapiens
  misc_RNA (1)...(19): siRNA sense strand
ggacagcaccugccuagag

SEQ ID NO: 2037324 - RNA, 19 nt, Homo sapiens
  misc_RNA (1)...(19): siRNA sense strand
gguggaagcuguccucaac

SEQ ID NO: 2037325 - RNA, 19 nt, Homo sapiens
  misc_RNA (1)...(19): siRNA sense strand
aaucaagccuccauugugu

SEQ ID NO: 2037326 - RNA, 19 nt, Homo sapiens
  misc_RNA (1)...(19): siRNA sense strand
agacaaugcuuuggugcua

SEQ ID NO: 2037327 - RNA, 19 nt, Homo sapiens
  misc_RNA (1)...(19): siRNA sense strand
acacauggcuagacaaugc

SEQ ID NO: 2037328 - RNA, 19 nt, Homo sapiens
  misc_RNA (1)...(19): siRNA sense strand
gcauucaagagauucaaua

SEQ ID NO: 2037329 - RNA, 19 nt, Homo sapiens
  misc_RNA (1)...(19): siRNA sense strand
aaacagcaacccucauuga

SEQ ID NO: 2037330 - RNA, 19 nt, Homo sapiens
  misc_RNA (1)...(19): siRNA sense strand
ccucugcucucguuagcua

SEQ ID NO: 2037331 - RNA, 19 nt, Homo sapiens
  misc_RNA (1)...(19): siRNA sense strand
ggaaaugauccgacuagau

SEQ ID NO: 2037332 - RNA, 19 nt, Homo sapiens
  misc_RNA (1)...(19): siRNA sense strand
gaagaagagcuugaguuug

SEQ ID NO: 2037333 - RNA, 19 nt, Homo sapiens
  misc_RNA (1)...(19): siRNA sense strand
gaggaagcauucagcaucu

SEQ ID NO: 2037334 - RNA, 19 nt, Homo sapiens
  misc_RNA (1)...(19): siRNA sense strand
ccagccaccuccacaguga

SEQ ID NO: 2037335 - RNA, 19 nt, Homo sapiens
  misc_RNA (1)...(19): siRNA sense strand
cagaaugauugcagaguuc

SEQ ID NO: 2037336 - RNA, 19 nt, Homo sapiens
  misc_RNA (1)...(19): siRNA sense strand
ggugcuagaugcccugaug

SEQ ID NO: 2037337 - RNA, 19 nt, Homo sapiens
  misc_RNA (1)...(19): siRNA sense strand
caacagaagaagagcuuga

SEQ ID NO: 2037338 - RNA, 19 nt, Homo sapiens
  misc_RNA (1)...(19): siRNA sense strand
cauggaggcuauggcauuu

SEQ ID NO: 2037339 - RNA, 19 nt, Homo sapiens
  misc_RNA (1)...(19): siRNA sense strand
gcccggacaucaccuugaa

SEQ ID NO: 2037340 - RNA, 19 nt, Homo sapiens
  misc_RNA (1)...(19): siRNA sense strand
gaucauguacaaacuggaa

SEQ ID NO: 2037341 - RNA, 19 nt, Homo sapiens
  misc_RNA (1)...(19): siRNA sense strand
acagaaugauugcagaguu

SEQ ID NO: 2037342 - RNA, 19 nt, Homo sapiens
  misc_RNA (1)...(19): siRNA sense strand
agagucgucuuucagguuu

SEQ ID NO: 2037343 - RNA, 19 nt, Homo sapiens
  misc_RNA (1)...(19): siRNA sense strand
guguugaucuucuuguaga

SEQ ID NO: 2037344 - RNA, 19 nt, Homo sapiens
  misc_RNA (1)...(19): siRNA sense strand
ggauggagcacagcaagaa

SEQ ID NO: 2037345 - RNA, 19 nt, Homo sapiens
  misc_RNA (1)...(19): siRNA sense strand
aaccagaacugugacugua

SEQ ID NO: 2037346 - RNA, 19 nt, Homo sapiens
  misc_RNA (1)...(19): siRNA sense strand
aagcugaucccuggacuua

SEQ ID NO: 2037347 - RNA, 19 nt, Homo sapiens
  misc_RNA (1)...(19): siRNA sense strand
gcaaacuggcgacucgaaa

SEQ ID NO: 2037348 - RNA, 19 nt, Homo sapiens
  misc_RNA (1)...(19): siRNA sense strand
agaaugacuuugugaucuu

SEQ ID NO: 2037349 - RNA, 19 nt, Homo sapiens
  misc_RNA (1)...(19): siRNA sense strand
gaaugacuuugugaucuuc

SEQ ID NO: 2037350 - RNA, 19 nt, Homo sapiens
  misc_RNA (1)...(19): siRNA sense strand
gaaaguugccgagguacug

SEQ ID NO: 2037351 - RNA, 19 nt, Homo sapiens
  misc_RNA (1)...(19): siRNA sense strand
cgacaggaguuuggugugu

SEQ ID NO: 2037352 - RNA, 19 nt, Homo sapiens
  misc_RNA (1)...(19): siRNA sense strand
ugacaaguaagaagacauu

SEQ ID NO: 2037353 - RNA, 19 nt, Homo sapiens
  misc_RNA (1)...(19): siRNA sense strand
acaaacagcaacccucauu

SEQ ID NO: 2037354 - RNA, 19 nt, Homo sapiens
  misc_RNA (1)...(19): siRNA sense strand
ccagguggauaugaaaguu

SEQ ID NO: 2037355 - RNA, 19 nt, Homo sapiens
  misc_RNA (1)...(19): siRNA sense strand
caacccucauugaagauau

SEQ ID NO: 2037356 - RNA, 19 nt, Homo sapiens
  misc_RNA (1)...(19): siRNA sense strand
gacagaaacugaaaauaag

SEQ ID NO: 2037357 - RNA, 19 nt, Homo sapiens
  misc_RNA (1)...(19): siRNA sense strand
guacacauggcuagacaau

SEQ ID NO: 2037358 - RNA, 19 nt, Homo sapiens
  misc_RNA (1)...(19): siRNA sense strand
gcaacccucauugaagaua

SEQ ID NO: 2037359 - RNA, 19 nt, Homo sapiens
  misc_RNA (1)...(19): siRNA sense strand
cagaagaagagcuugaguu

SEQ ID NO: 2037360 - RNA, 19 nt, Homo sapiens
  misc_RNA (1)...(19): siRNA sense strand
gcaccugccuagagaacag

SEQ ID NO: 2037361 - RNA, 19 nt, Homo sapiens
  misc_RNA (1)...(19): siRNA sense strand
gcacaaucaagccuccauu

SEQ ID NO: 2037362 - RNA, 19 nt, Homo sapiens
  misc_RNA (1)...(19): siRNA sense strand
gaucuuccuguuuacauug

SEQ ID NO: 2037363 - RNA, 19 nt, Homo sapiens
  misc_RNA (1)...(19): siRNA sense strand
ggagucagagcacaaucaa

SEQ ID NO: 2037364 - RNA, 19 nt, Homo sapiens
  misc_RNA (1)...(19): siRNA sense strand
gcacagccagcuuccuuca

SEQ ID NO: 2037365 - RNA, 19 nt, Homo sapiens
  misc_RNA (1)...(19): siRNA sense strand
guuuggagguguugaucuu

SEQ ID NO: 2037366 - RNA, 19 nt, Homo sapiens
  misc_RNA (1)...(19): siRNA sense strand
guuccuuaguauccaauuu

SEQ ID NO: 2037367 - RNA, 19 nt, Homo sapiens
  misc_RNA (1)...(19): siRNA sense strand
ucucagcauuccuggcuuu

SEQ ID NO: 2037368 - RNA, 19 nt, Homo sapiens
  misc_RNA (1)...(19): siRNA sense strand
gaacgucagcugccucaac

SEQ ID NO: 2037369 - RNA, 19 nt, Homo sapiens
  misc_RNA (1)...(19): siRNA sense strand
augcaaaguuccagguauu

SEQ ID NO: 2037370 - RNA, 19 nt, Homo sapiens
  misc_RNA (1)...(19): siRNA sense strand
cgaaaggugucagagucaa

SEQ ID NO: 2037371 - RNA, 19 nt, Homo sapiens
  misc_RNA (1)...(19): siRNA sense strand
ugacuuguuuggagguguu

SEQ ID NO: 2037372 - RNA, 19 nt, Homo sapiens
  misc_RNA (1)...(19): siRNA sense strand
gaugcuggcccgacggaaa

SEQ ID NO: 2037373 - RNA, 19 nt, Homo sapiens
  misc_RNA (1)...(19): siRNA sense strand
gggaagaggggcuuauuaa

SEQ ID NO: 2037374 - RNA, 19 nt, Homo sapiens
  misc_RNA (1)...(19): siRNA sense strand
ugaagauuaugcaugagau

SEQ ID NO: 2037375 - RNA, 19 nt, Homo sapiens
  misc_RNA (1)...(19): siRNA sense strand
ugacggagagggacaaaca

SEQ ID NO: 2037376 - RNA, 19 nt, Homo sapiens
  misc_RNA (1)...(19): siRNA sense strand
cccagucaaugaagauuau

SEQ ID NO: 2037377 - RNA, 19 nt, Homo sapiens
  misc_RNA (1)...(19): siRNA sense strand
gggcacagccagcuuccuu

SEQ ID NO: 2037378 - RNA, 19 nt, Homo sapiens
  misc_RNA (1)...(19): siRNA sense strand
ucuuggagcacauccuuua

SEQ ID NO: 2037379 - RNA, 19 nt, Homo sapiens
  misc_RNA (1)...(19): siRNA sense strand
gcuauggcauuuguuacug

SEQ ID NO: 2037380 - RNA, 19 nt, Homo sapiens
  misc_RNA (1)...(19): siRNA sense strand
agaaagagcucgauugaaa

SEQ ID NO: 2037381 - RNA, 19 nt, Homo sapiens
  misc_RNA (1)...(19): siRNA sense strand
gaagauacaugacuuacga

SEQ ID NO: 2037382 - RNA, 19 nt, Homo sapiens
  misc_RNA (1)...(19): siRNA sense strand
guacagaccugaagaauac

SEQ ID NO: 2037383 - RNA, 19 nt, Homo sapiens
  misc_RNA (1)...(19): siRNA sense strand
gaacaaauggagaaagaua

SEQ ID NO: 2037384 - RNA, 19 nt, Homo sapiens
  misc_RNA (1)...(19): siRNA sense strand
caucugauaugguguauuu

SEQ ID NO: 2037385 - RNA, 19 nt, Homo sapiens
  misc_RNA (1)...(19): siRNA sense strand
gagaacaaauggagaaaga

SEQ ID NO: 2037386 - RNA, 19 nt, Homo sapiens
  misc_RNA (1)...(19): siRNA sense strand
ggacaagacuaccacuuug

SEQ ID NO: 2037387 - RNA, 19 nt, Homo sapiens
  misc_RNA (1)...(19): siRNA sense strand
gaaaagagguccuuguaug

SEQ ID NO: 2037388 - RNA, 19 nt, Homo sapiens
  misc_RNA (1)...(19): siRNA sense strand
gugauggcauguucaaaua

SEQ ID NO: 2037389 - RNA, 19 nt, Homo sapiens
  misc_RNA (1)...(19): siRNA sense strand
gaaagaaagagcucgauug

SEQ ID NO: 2037390 - RNA, 19 nt, Homo sapiens
  misc_RNA (1)...(19): siRNA sense strand
gggcucagcuucucuuaug

SEQ ID NO: 2037391 - RNA, 19 nt, Homo sapiens
  misc_RNA (1)...(19): siRNA sense strand
gaagaacacaucugauaug

SEQ ID NO: 2037392 - RNA, 19 nt, Homo sapiens
  misc_RNA (1)...(19): siRNA sense strand
gcagacauaugaacaagca

SEQ ID NO: 2037393 - RNA, 19 nt, Homo sapiens
  misc_RNA (1)...(19): siRNA sense strand
agaaagauauucaggacaa

SEQ ID NO: 2037394 - RNA, 19 nt, Homo sapiens
  misc_RNA (1)...(19): siRNA sense strand
gcaagaaauucacuaugca

SEQ ID NO: 2037395 - RNA, 19 nt, Homo sapiens
  misc_RNA (1)...(19): siRNA sense strand
gggcaagcacugcaucuua

SEQ ID NO: 2037396 - RNA, 19 nt, Homo sapiens
  misc_RNA (1)...(19): siRNA sense strand
gcaaauaagaucuaugaca

SEQ ID NO: 2037397 - RNA, 19 nt, Homo sapiens
  misc_RNA (1)...(19): siRNA sense strand
gaggaaaucguacuugaga

SEQ ID NO: 2037398 - RNA, 19 nt, Homo sapiens
  misc_RNA (1)...(19): siRNA sense strand
gaauuuggagaguacuuua

SEQ ID NO: 2037399 - RNA, 19 nt, Homo sapiens
  misc_RNA (1)...(19): siRNA sense strand
gaaacuggagcaggaauuu

SEQ ID NO: 2037400 - RNA, 19 nt, Homo sapiens
  misc_RNA (1)...(19): siRNA sense strand
gauggcauguucaaauaug

SEQ ID NO: 2037401 - RNA, 19 nt, Homo sapiens
  misc_RNA (1)...(19): siRNA sense strand
gagaacaaaugaugaacag

SEQ ID NO: 2037402 - RNA, 19 nt, Homo sapiens
  misc_RNA (1)...(19): siRNA sense strand
gauggacgccuacagauug

SEQ ID NO: 2037403 - RNA, 19 nt, Homo sapiens
  misc_RNA (1)...(19): siRNA sense strand
gaccugaucuccgaauuuc

SEQ ID NO: 2037404 - RNA, 19 nt, Homo sapiens
  misc_RNA (1)...(19): siRNA sense strand
aaagaaagagcucgauuga

SEQ ID NO: 2037405 - RNA, 19 nt, Homo sapiens
  misc_RNA (1)...(19): siRNA sense strand
gcaaugcuaucaagagacu

SEQ ID NO: 2037406 - RNA, 19 nt, Homo sapiens
  misc_RNA (1)...(19): siRNA sense strand
guucaaauaugaggaaauc

SEQ ID NO: 2037407 - RNA, 19 nt, Homo sapiens
  misc_RNA (1)...(19): siRNA sense strand
gcaggaauuuggagaguac

SEQ ID NO: 2037408 - RNA, 19 nt, Homo sapiens
  misc_RNA (1)...(19): siRNA sense strand
ggcaagaaauucacuaugc

SEQ ID NO: 2037409 - RNA, 19 nt, Homo sapiens
  misc_RNA (1)...(19): siRNA sense strand
gguuaagugacgauuauua

SEQ ID NO: 2037410 - RNA, 19 nt, Homo sapiens
  misc_RNA (1)...(19): siRNA sense strand
caaauaugaggaaaucgua

SEQ ID NO: 2037411 - RNA, 19 nt, Homo sapiens
  misc_RNA (1)...(19): siRNA sense strand
gacaacagcaucuacauca

SEQ ID NO: 2037412 - RNA, 19 nt, Homo sapiens
  misc_RNA (1)...(19): siRNA sense strand
guaagugcccugagugcua

SEQ ID NO: 2037413 - RNA, 19 nt, Homo sapiens
  misc_RNA (1)...(19): siRNA sense strand
gaagaauacagucgcuuug

SEQ ID NO: 2037414 - RNA, 19 nt, Homo sapiens
  misc_RNA (1)...(19): siRNA sense strand
gcaagaucauccugcacaa

SEQ ID NO: 2037415 - RNA, 19 nt, Homo sapiens
  misc_RNA (1)...(19): siRNA sense strand
gaauacagucgcuuugaau

SEQ ID NO: 2037416 - RNA, 19 nt, Homo sapiens
  misc_RNA (1)...(19): siRNA sense strand
acaccaaucugcaggaugu

SEQ ID NO: 2037417 - RNA, 19 nt, Homo sapiens
  misc_RNA (1)...(19): siRNA sense strand
cugaagaacacaucugaua

SEQ ID NO: 2037418 - RNA, 19 nt, Homo sapiens
  misc_RNA (1)...(19): siRNA sense strand
gcuguggccucacugaaga

SEQ ID NO: 2037419 - RNA, 19 nt, Homo sapiens
  misc_RNA (1)...(19): siRNA sense strand
gagcaaagaaccugaaagg

SEQ ID NO: 2037420 - RNA, 19 nt, Homo sapiens
  misc_RNA (1)...(19): siRNA sense strand
ggacaagaggaugcuauuu

SEQ ID NO: 2037421 - RNA, 19 nt, Homo sapiens
  misc_RNA (1)...(19): siRNA sense strand
agaauacagucgcuuugaa

SEQ ID NO: 2037422 - RNA, 19 nt, Homo sapiens
  misc_RNA (1)...(19): siRNA sense strand
ggcaagcacugcaucuuag

SEQ ID NO: 2037423 - RNA, 19 nt, Homo sapiens
  misc_RNA (1)...(19): siRNA sense strand
gguaugagcaggugaaugg

SEQ ID NO: 2037424 - RNA, 19 nt, Homo sapiens
  misc_RNA (1)...(19): siRNA sense strand
ggauggacgccuacagauu

SEQ ID NO: 2037425 - RNA, 19 nt, Homo sapiens
  misc_RNA (1)...(19): siRNA sense strand
ugaaggaccgagucaauga

SEQ ID NO: 2037426 - RNA, 19 nt, Homo sapiens
  misc_RNA (1)...(19): siRNA sense strand
ggaagugucggagguggua

SEQ ID NO: 2037427 - RNA, 19 nt, Homo sapiens
  misc_RNA (1)...(19): siRNA sense strand
gaacaagcaaauaagaucu

SEQ ID NO: 2037428 - RNA, 19 nt, Homo sapiens
  misc_RNA (1)...(19): siRNA sense strand
gaaggcagacauaugaaca

SEQ ID NO: 2037429 - RNA, 19 nt, Homo sapiens
  misc_RNA (1)...(19): siRNA sense strand
ggcugcagcugcucugaaa

SEQ ID NO: 2037430 - RNA, 19 nt, Homo sapiens
  misc_RNA (1)...(19): siRNA sense strand
gacaaccacauaagccaua

SEQ ID NO: 2037431 - RNA, 19 nt, Homo sapiens
  misc_RNA (1)...(19): siRNA sense strand
ccacaggccugggcuucaa

SEQ ID NO: 2037432 - RNA, 19 nt, Homo sapiens
  misc_RNA (1)...(19): siRNA sense strand
ggaauuuggagaguacuuu

SEQ ID NO: 2037433 - RNA, 19 nt, Homo sapiens
  misc_RNA (1)...(19): siRNA sense strand
gagcaggaauuuggagagu

SEQ ID NO: 2037434 - RNA, 19 nt, Homo sapiens
  misc_RNA (1)...(19): siRNA sense strand
cggcaaugcuaucaagaga

SEQ ID NO: 2037435 - RNA, 19 nt, Homo sapiens
  misc_RNA (1)...(19): siRNA sense strand
ggaccagcauccagucagu

SEQ ID NO: 2037436 - RNA, 19 nt, Homo sapiens
  misc_RNA (1)...(19): siRNA sense strand
ggagugaaucugaggaaug

SEQ ID NO: 2037437 - RNA, 19 nt, Homo sapiens
  misc_RNA (1)...(19): siRNA sense strand
ggccuggguuucagcauug

SEQ ID NO: 2037438 - RNA, 19 nt, Homo sapiens
  misc_RNA (1)...(19): siRNA sense strand
gcagcaagcacaacuuuac

SEQ ID NO: 2037439 - RNA, 19 nt, Homo sapiens
  misc_RNA (1)...(19): siRNA sense strand
aaucgaagauacaugacuu

SEQ ID NO: 2037440 - RNA, 19 nt, Homo sapiens
  misc_RNA (1)...(19): siRNA sense strand
cagagagccucgcaagauc

SEQ ID NO: 2037441 - RNA, 19 nt, Homo sapiens
  misc_RNA (1)...(19): siRNA sense strand
ccagagagccucgcaagau

SEQ ID NO: 2037442 - RNA, 19 nt, Homo sapiens
  misc_RNA (1)...(19): siRNA sense strand
cauugaagcccuuauggaa

SEQ ID NO: 2037443 - RNA, 19 nt, Homo sapiens
  misc_RNA (1)...(19): siRNA sense strand
gcaggugaauggcagugau

SEQ ID NO: 2037444 - RNA, 19 nt, Homo sapiens
  misc_RNA (1)...(19): siRNA sense strand
ccagugacacggcaagaaa

SEQ ID NO: 2037445 - RNA, 19 nt, Homo sapiens
  misc_RNA (1)...(19): siRNA sense strand
ugacuuacgagaacaaaug

SEQ ID NO: 2037446 - RNA, 19 nt, Homo sapiens
  misc_RNA (1)...(19): siRNA sense strand
ugaagaauacagucgcuuu

SEQ ID NO: 2037447 - RNA, 19 nt, Homo sapiens
  misc_RNA (1)...(19): siRNA sense strand
uaagugcccugagugcuau

SEQ ID NO: 2037448 - RNA, 19 nt, Homo sapiens
  misc_RNA (1)...(19): siRNA sense strand
gugaauggagugaaucuga

SEQ ID NO: 2037449 - RNA, 19 nt, Homo sapiens
  misc_RNA (1)...(19): siRNA sense strand
ugaagaacacaucugauau

SEQ ID NO: 2037450 - RNA, 19 nt, Homo sapiens
  misc_RNA (1)...(19): siRNA sense strand
ucuccgaauuuccacauaa

SEQ ID NO: 2037451 - RNA, 19 nt, Homo sapiens
  misc_RNA (1)...(19): siRNA sense strand
ggccugggcuucaguaucg

SEQ ID NO: 2037452 - RNA, 19 nt, Homo sapiens
  misc_RNA (1)...(19): siRNA sense strand
uugaagcccuuauggaaau

SEQ ID NO: 2037453 - RNA, 19 nt, Homo sapiens
  misc_RNA (1)...(19): siRNA sense strand
gaaccgaaggcagacauau

SEQ ID NO: 2037454 - RNA, 19 nt, Homo sapiens
  misc_RNA (1)...(19): siRNA sense strand
gagugaaucugaggaaugc

SEQ ID NO: 2037455 - RNA, 19 nt, Homo sapiens
  misc_RNA (1)...(19): siRNA sense strand
ugacaaagccaugaaacug

SEQ ID NO: 2037456 - RNA, 19 nt, Homo sapiens
  misc_RNA (1)...(19): siRNA sense strand
auacaugacuuacgagaac

SEQ ID NO: 2037457 - RNA, 19 nt, Homo sapiens
  misc_RNA (1)...(19): siRNA sense strand
gcacaucccaggagacaac

SEQ ID NO: 2037458 - RNA, 19 nt, Homo sapiens
  misc_RNA (1)...(19): siRNA sense strand
caagaaauucacuaugcaa

SEQ ID NO: 2037459 - RNA, 19 nt, Homo sapiens
  misc_RNA (1)...(19): siRNA sense strand
gcagugauggcauguucaa

SEQ ID NO: 2037460 - RNA, 19 nt, Homo sapiens
  misc_RNA (1)...(19): siRNA sense strand
ggagacaacagcaucuaca

SEQ ID NO: 2037461 - RNA, 19 nt, Homo sapiens
  misc_RNA (1)...(19): siRNA sense strand
caacaccaaucugcaggau

SEQ ID NO: 2037462 - RNA, 19 nt, Homo sapiens
  misc_RNA (1)...(19): siRNA sense strand
gacaagaggaugcuauuuu

SEQ ID NO: 2037463 - RNA, 19 nt, Homo sapiens
  misc_RNA (1)...(19): siRNA sense strand
gaucuuaucggugaaugga

SEQ ID NO: 2037464 - RNA, 19 nt, Homo sapiens
  misc_RNA (1)...(19): siRNA sense strand
uaagugacgauuauuaugg

SEQ ID NO: 2037465 - RNA, 19 nt, Homo sapiens
  misc_RNA (1)...(19): siRNA sense strand
ucacuggaagagauuuaua

SEQ ID NO: 2037466 - RNA, 19 nt, Homo sapiens
  misc_RNA (1)...(19): siRNA sense strand
gcacaacuuuaccccauug

SEQ ID NO: 2037467 - RNA, 19 nt, Homo sapiens
  misc_RNA (1)...(19): siRNA sense strand
uggacaagacuaccacuuu

SEQ ID NO: 2037468 - RNA, 19 nt, Homo sapiens
  misc_RNA (1)...(19): siRNA sense strand
gaagcuguggccucacuga

SEQ ID NO: 2037469 - RNA, 19 nt, Homo sapiens
  misc_RNA (1)...(19): siRNA sense strand
gauacaugacuuacgagaa

SEQ ID NO: 2037470 - RNA, 19 nt, Homo sapiens
  misc_RNA (1)...(19): siRNA sense strand
gccagucagucaccauugu

SEQ ID NO: 2037471 - RNA, 19 nt, Homo sapiens
  misc_RNA (1)...(19): siRNA sense strand
ucaccauuguggcccagua

SEQ ID NO: 2037472 - RNA, 19 nt, Homo sapiens
  misc_RNA (1)...(19): siRNA sense strand
uggagcagcugccauggau

SEQ ID NO: 2037473 - RNA, 19 nt, Homo sapiens
  misc_RNA (1)...(19): siRNA sense strand
gcaagcacugcaucuuaga

SEQ ID NO: 2037474 - RNA, 19 nt, Homo sapiens
  misc_RNA (1)...(19): siRNA sense strand
gggcccuguuugauuauga

SEQ ID NO: 2037475 - RNA, 19 nt, Homo sapiens
  misc_RNA (1)...(19): siRNA sense strand
aagagguccuuguauguca

SEQ ID NO: 2037476 - RNA, 19 nt, Homo sapiens
  misc_RNA (1)...(19): siRNA sense strand
acaagaggaugcuauuuug

SEQ ID NO: 2037477 - RNA, 19 nt, Homo sapiens
  misc_RNA (1)...(19): siRNA sense strand
gaaagagcucgauugaaaa

SEQ ID NO: 2037478 - RNA, 19 nt, Homo sapiens
  misc_RNA (1)...(19): siRNA sense strand
agacauaugaacaagcaaa

SEQ ID NO: 2037479 - RNA, 19 nt, Homo sapiens
  misc_RNA (1)...(19): siRNA sense strand
ugaacaagcaaauaagauc

SEQ ID NO: 2037480 - RNA, 19 nt, Homo sapiens
  misc_RNA (1)...(19): siRNA sense strand
ggaaaccugucgaggacuu

SEQ ID NO: 2037481 - RNA, 19 nt, Homo sapiens
  misc_RNA (1)...(19): siRNA sense strand
gcgcgucaccgucaaguau

SEQ ID NO: 2037482 - RNA, 19 nt, Homo sapiens
  misc_RNA (1)...(19): siRNA sense strand
gcgucaccgucaaguauga

SEQ ID NO: 2037483 - RNA, 19 nt, Homo sapiens
  misc_RNA (1)...(19): siRNA sense strand
ggaguuagagagugaagag

SEQ ID NO: 2037484 - RNA, 19 nt, Homo sapiens
  misc_RNA (1)...(19): siRNA sense strand
gcagacaugcccgaugaga

SEQ ID NO: 2037485 - RNA, 19 nt, Homo sapiens
  misc_RNA (1)...(19): siRNA sense strand
agacaugcccgaugagauc

SEQ ID NO: 2037486 - RNA, 19 nt, Homo sapiens
  misc_RNA (1)...(19): siRNA sense strand
gaugaauuguuggaguuag

SEQ ID NO: 2037487 - RNA, 19 nt, Homo sapiens
  misc_RNA (1)...(19): siRNA sense strand
gaagucaugugggaaaccu

SEQ ID NO: 2037488 - RNA, 19 nt, Homo sapiens
  misc_RNA (1)...(19): siRNA sense strand
uugaugaauuguuggaguu

SEQ ID NO: 2037489 - RNA, 19 nt, Homo sapiens
  misc_RNA (1)...(19): siRNA sense strand
ggcuggacguggagaagug

SEQ ID NO: 2037490 - RNA, 19 nt, Homo sapiens
  misc_RNA (1)...(19): siRNA sense strand
gaggagagaagccggaaaa

SEQ ID NO: 2037491 - RNA, 19 nt, Homo sapiens
  misc_RNA (1)...(19): siRNA sense strand
ugaugaauuguuggaguua

SEQ ID NO: 2037492 - RNA, 19 nt, Homo sapiens
  misc_RNA (1)...(19): siRNA sense strand
uguuggaguuagagaguga

SEQ ID NO: 2037493 - RNA, 19 nt, Homo sapiens
  misc_RNA (1)...(19): siRNA sense strand
ccugaagucaugugggaaa

SEQ ID NO: 2037494 - RNA, 19 nt, Homo sapiens
  misc_RNA (1)...(19): siRNA sense strand
gagagaagccggaaaaucc

SEQ ID NO: 2037495 - RNA, 19 nt, Homo sapiens
  misc_RNA (1)...(19): siRNA sense strand
gagcaagaguugagcuuua

SEQ ID NO: 2037496 - RNA, 19 nt, Homo sapiens
  misc_RNA (1)...(19): siRNA sense strand
gaagcucucuguuuauaaa

SEQ ID NO: 2037497 - RNA, 19 nt, Homo sapiens
  misc_RNA (1)...(19): siRNA sense strand
caaaggagucggagaaaua

SEQ ID NO: 2037498 - RNA, 19 nt, Homo sapiens
  misc_RNA (1)...(19): siRNA sense strand
caaagacucugauaagaug

SEQ ID NO: 2037499 - RNA, 19 nt, Homo sapiens
  misc_RNA (1)...(19): siRNA sense strand
ugucaaagauugccuguuu

SEQ ID NO: 2037500 - RNA, 19 nt, Homo sapiens
  misc_RNA (1)...(19): siRNA sense strand
caacaagucucugaaugaa

SEQ ID NO: 2037501 - RNA, 19 nt, Homo sapiens
  misc_RNA (1)...(19): siRNA sense strand
cagcaugucugaagucaaa

SEQ ID NO: 2037502 - RNA, 19 nt, Homo sapiens
  misc_RNA (1)...(19): siRNA sense strand
ggugacagcuucuacauca

SEQ ID NO: 2037503 - RNA, 19 nt, Homo sapiens
  misc_RNA (1)...(19): siRNA sense strand
cuacguggaugacaccuua

SEQ ID NO: 2037504 - RNA, 19 nt, Homo sapiens
  misc_RNA (1)...(19): siRNA sense strand
ugaaggagcucaaggaaca

SEQ ID NO: 2037505 - RNA, 19 nt, Homo sapiens
  misc_RNA (1)...(19): siRNA sense strand
cgagagagguucaguguca

SEQ ID NO: 2037506 - RNA, 19 nt, Homo sapiens
  misc_RNA (1)...(19): siRNA sense strand
gguccaggcucauaacaaa

SEQ ID NO: 2037507 - RNA, 19 nt, Homo sapiens
  misc_RNA (1)...(19): siRNA sense strand
gcacucagaucuuggcaau

SEQ ID NO: 2037508 - RNA, 19 nt, Homo sapiens
  misc_RNA (1)...(19): siRNA sense strand
gaaagacaguggcaucagu

SEQ ID NO: 2037509 - RNA, 19 nt, Homo sapiens
  misc_RNA (1)...(19): siRNA sense strand
gacaauagcgccacaaaga

SEQ ID NO: 2037510 - RNA, 19 nt, Homo sapiens
  misc_RNA (1)...(19): siRNA sense strand
aaacggaaguuguagaguu

SEQ ID NO: 2037511 - RNA, 19 nt, Homo sapiens
  misc_RNA (1)...(19): siRNA sense strand
gaaagucgccauccacaau

SEQ ID NO: 2037512 - RNA, 19 nt, Homo sapiens
  misc_RNA (1)...(19): siRNA sense strand
gaagcuugcuccaguagug

SEQ ID NO: 2037513 - RNA, 19 nt, Homo sapiens
  misc_RNA (1)...(19): siRNA sense strand
cugauaagaugcugaguuu

SEQ ID NO: 2037514 - RNA, 19 nt, Homo sapiens
  misc_RNA (1)...(19): siRNA sense strand
gcauugcacuggacaacaa

SEQ ID NO: 2037515 - RNA, 19 nt, Homo sapiens
  misc_RNA (1)...(19): siRNA sense strand
uaacaaacggaacuugaua

SEQ ID NO: 2037516 - RNA, 19 nt, Homo sapiens
  misc_RNA (1)...(19): siRNA sense strand
gacaacaagucucugaaug

SEQ ID NO: 2037517 - RNA, 19 nt, Homo sapiens
  misc_RNA (1)...(19): siRNA sense strand
uaaaggagaucacagaaaa

SEQ ID NO: 2037518 - RNA, 19 nt, Homo sapiens
  misc_RNA (1)...(19): siRNA sense strand
ugaaggagaugcuggugaa

SEQ ID NO: 2037519 - RNA, 19 nt, Homo sapiens
  misc_RNA (1)...(19): siRNA sense strand
gcaaaggagucggagaaau

SEQ ID NO: 2037520 - RNA, 19 nt, Homo sapiens
  misc_RNA (1)...(19): siRNA sense strand
gccaagaaauccugugaug

SEQ ID NO: 2037521 - RNA, 19 nt, Homo sapiens
  misc_RNA (1)...(19): siRNA sense strand
caaccucaguggacagaaa

SEQ ID NO: 2037522 - RNA, 19 nt, Homo sapiens
  misc_RNA (1)...(19): siRNA sense strand
gaagagguacagugagaaa

SEQ ID NO: 2037523 - RNA, 19 nt, Homo sapiens
  misc_RNA (1)...(19): siRNA sense strand
acaagucucugaaugaaug

SEQ ID NO: 2037524 - RNA, 19 nt, Homo sapiens
  misc_RNA (1)...(19): siRNA sense strand
ucaaggcgcuccucaaugg

SEQ ID NO: 2037525 - RNA, 19 nt, Homo sapiens
  misc_RNA (1)...(19): siRNA sense strand
ccaaggagacugacuucua

SEQ ID NO: 2037526 - RNA, 19 nt, Homo sapiens
  misc_RNA (1)...(19): siRNA sense strand
agacucggcugaaggauga

SEQ ID NO: 2037527 - RNA, 19 nt, Homo sapiens
  misc_RNA (1)...(19): siRNA sense strand
caaggagacugacuucuac

SEQ ID NO: 2037528 - RNA, 19 nt, Homo sapiens
  misc_RNA (1)...(19): siRNA sense strand
ggaagucuauguggagaug

SEQ ID NO: 2037529 - RNA, 19 nt, Homo sapiens
  misc_RNA (1)...(19): siRNA sense strand
gaacaagacaguggaggaa

SEQ ID NO: 2037530 - RNA, 19 nt, Homo sapiens
  misc_RNA (1)...(19): siRNA sense strand
ggacgagaaugcccagaag

SEQ ID NO: 2037531 - RNA, 19 nt, Homo sapiens
  misc_RNA (1)...(19): siRNA sense strand
ugucugaagucaaagauga

SEQ ID NO: 2037532 - RNA, 19 nt, Homo sapiens
  misc_RNA (1)...(19): siRNA sense strand
gcauauuugucacuaaagu

SEQ ID NO: 2037533 - RNA, 19 nt, Homo sapiens
  misc_RNA (1)...(19): siRNA sense strand
gugaggagguggccaagga

SEQ ID NO: 2037534 - RNA, 19 nt, Homo sapiens
  misc_RNA (1)...(19): siRNA sense strand
ggagcccugucaagcauuu

SEQ ID NO: 2037535 - RNA, 19 nt, Homo sapiens
  misc_RNA (1)...(19): siRNA sense strand
gcagauucccagcaaauau

SEQ ID NO: 2037536 - RNA, 19 nt, Homo sapiens
  misc_RNA (1)...(19): siRNA sense strand
gaccucagccuccacauug

SEQ ID NO: 2037537 - RNA, 19 nt, Homo sapiens
  misc_RNA (1)...(19): siRNA sense strand
gagguucagugucacauuc

SEQ ID NO: 2037538 - RNA, 19 nt, Homo sapiens
  misc_RNA (1)...(19): siRNA sense strand
cggaagagguacagugaga

SEQ ID NO: 2037539 - RNA, 19 nt, Homo sapiens
  misc_RNA (1)...(19): siRNA sense strand
gcaagcagaagaaugaugu

SEQ ID NO: 2037540 - RNA, 19 nt, Homo sapiens
  misc_RNA (1)...(19): siRNA sense strand
caauaaaggagaucacaga

SEQ ID NO: 2037541 - RNA, 19 nt, Homo sapiens
  misc_RNA (1)...(19): siRNA sense strand
caagaaauccugugaugag

SEQ ID NO: 2037542 - RNA, 19 nt, Homo sapiens
  misc_RNA (1)...(19): siRNA sense strand
ggacaacaagucucugaau

SEQ ID NO: 2037543 - RNA, 19 nt, Homo sapiens
  misc_RNA (1)...(19): siRNA sense strand
caacgggucauccgagauu

SEQ ID NO: 2037544 - RNA, 19 nt, Homo sapiens
  misc_RNA (1)...(19): siRNA sense strand
ggaggaaacacaagcacaa

SEQ ID NO: 2037545 - RNA, 19 nt, Homo sapiens
  misc_RNA (1)...(19): siRNA sense strand
uggcauauuugucacuaaa

SEQ ID NO: 2037546 - RNA, 19 nt, Homo sapiens
  misc_RNA (1)...(19): siRNA sense strand
gaggagcccugucaagcau

SEQ ID NO: 2037547 - RNA, 19 nt, Homo sapiens
  misc_RNA (1)...(19): siRNA sense strand
gcaucagucuggagaaugg

SEQ ID NO: 2037548 - RNA, 19 nt, Homo sapiens
  misc_RNA (1)...(19): siRNA sense strand
ucaaagacacggugacaau

SEQ ID NO: 2037549 - RNA, 19 nt, Homo sapiens
  misc_RNA (1)...(19): siRNA sense strand
aggagaugcuggugaauga

SEQ ID NO: 2037550 - RNA, 19 nt, Homo sapiens
  misc_RNA (1)...(19): siRNA sense strand
uggcagauguggagcaaga

SEQ ID NO: 2037551 - RNA, 19 nt, Homo sapiens
  misc_RNA (1)...(19): siRNA sense strand
ggccacugcugcccuuuga

SEQ ID NO: 2037552 - RNA, 19 nt, Homo sapiens
  misc_RNA (1)...(19): siRNA sense strand
gcacggccuuugacaagag

SEQ ID NO: 2037553 - RNA, 19 nt, Homo sapiens
  misc_RNA (1)...(19): siRNA sense strand
gagaagcggccauuucgau

SEQ ID NO: 2037554 - RNA, 19 nt, Homo sapiens
  misc_RNA (1)...(19): siRNA sense strand
ugacuccauuccacucuuu

SEQ ID NO: 2037555 - RNA, 19 nt, Homo sapiens
  misc_RNA (1)...(19): siRNA sense strand
caagauauccgcggagugu

SEQ ID NO: 2037556 - RNA, 19 nt, Homo sapiens
  misc_RNA (1)...(19): siRNA sense strand
cuacuacccugaaggagau

SEQ ID NO: 2037557 - RNA, 19 nt, Homo sapiens
  misc_RNA (1)...(19): siRNA sense strand
ucacgccgcugcacaucaa

SEQ ID NO: 2037558 - RNA, 19 nt, Homo sapiens
  misc_RNA (1)...(19): siRNA sense strand
acacggccauggacaaguu

SEQ ID NO: 2037559 - RNA, 19 nt, Homo sapiens
  misc_RNA (1)...(19): siRNA sense strand
ggaacuugauacagcacaa

SEQ ID NO: 2037560 - RNA, 19 nt, Homo sapiens
  misc_RNA (1)...(19): siRNA sense strand
ucugaggccuguccugauu

SEQ ID NO: 2037561 - RNA, 19 nt, Homo sapiens
  misc_RNA (1)...(19): siRNA sense strand
ggagaugccaacaagaaga

SEQ ID NO: 2037562 - RNA, 19 nt, Homo sapiens
  misc_RNA (1)...(19): siRNA sense strand
uggaagcccugccgcuaaa

SEQ ID NO: 2037563 - RNA, 19 nt, Homo sapiens
  misc_RNA (1)...(19): siRNA sense strand
ucaagcauuugcacucaga

SEQ ID NO: 2037564 - RNA, 19 nt, Homo sapiens
  misc_RNA (1)...(19): siRNA sense strand
ugaaugagaagguggagaa

SEQ ID NO: 2037565 - RNA, 19 nt, Homo sapiens
  misc_RNA (1)...(19): siRNA sense strand
ucaaagacucugauaagau

SEQ ID NO: 2037566 - RNA, 19 nt, Homo sapiens
  misc_RNA (1)...(19): siRNA sense strand
acaacaagucucugaauga

SEQ ID NO: 2037567 - RNA, 19 nt, Homo sapiens
  misc_RNA (1)...(19): siRNA sense strand
cagcaaaggagucggagaa

SEQ ID NO: 2037568 - RNA, 19 nt, Homo sapiens
  misc_RNA (1)...(19): siRNA sense strand
gagcgacuccauuaaguuc

SEQ ID NO: 2037569 - RNA, 19 nt, Homo sapiens
  misc_RNA (1)...(19): siRNA sense strand
gauggaaucccaguuggaa

SEQ ID NO: 2037570 - RNA, 19 nt, Homo sapiens
  misc_RNA (1)...(19): siRNA sense strand
cauaacaaacggaacuuga

SEQ ID NO: 2037571 - RNA, 19 nt, Homo sapiens
  misc_RNA (1)...(19): siRNA sense strand
cagcacaucugagaagaag

SEQ ID NO: 2037572 - RNA, 19 nt, Homo sapiens
  misc_RNA (1)...(19): siRNA sense strand
ggcugaauccugacuauga

SEQ ID NO: 2037573 - RNA, 19 nt, Homo sapiens
  misc_RNA (1)...(19): siRNA sense strand
caaaauagacuaccugcuu

SEQ ID NO: 2037574 - RNA, 19 nt, Homo sapiens
  misc_RNA (1)...(19): siRNA sense strand
gcagacagacaucuucuac

SEQ ID NO: 2037575 - RNA, 19 nt, Homo sapiens
  misc_RNA (1)...(19): siRNA sense strand
ccacggcgcagaacaagga

SEQ ID NO: 2037576 - RNA, 19 nt, Homo sapiens
  misc_RNA (1)...(19): siRNA sense strand
uggcaauggucaaucaaga

SEQ ID NO: 2037577 - RNA, 19 nt, Homo sapiens
  misc_RNA (1)...(19): siRNA sense strand
gcgccaagcacaucaagga

SEQ ID NO: 2037578 - RNA, 19 nt, Homo sapiens
  misc_RNA (1)...(19): siRNA sense strand
gcaucuacgucuccaaggu

SEQ ID NO: 2037579 - RNA, 19 nt, Homo sapiens
  misc_RNA (1)...(19): siRNA sense strand
agacagacaucuucuacac

SEQ ID NO: 2037580 - RNA, 19 nt, Homo sapiens
  misc_RNA (1)...(19): siRNA sense strand
caucaaggcgcuccucaau

SEQ ID NO: 2037581 - RNA, 19 nt, Homo sapiens
  misc_RNA (1)...(19): siRNA sense strand
ggaaacggaaguuguagag

SEQ ID NO: 2037582 - RNA, 19 nt, Homo sapiens
  misc_RNA (1)...(19): siRNA sense strand
gagcagcacaucugagaag

SEQ ID NO: 2037583 - RNA, 19 nt, Homo sapiens
  misc_RNA (1)...(19): siRNA sense strand
aauaaaguccuguggauuc

SEQ ID NO: 2037584 - RNA, 19 nt, Homo sapiens
  misc_RNA (1)...(19): siRNA sense strand
ucagaggcauuccaaagag

SEQ ID NO: 2037585 - RNA, 19 nt, Homo sapiens
  misc_RNA (1)...(19): siRNA sense strand
gcgggcagauucccagcaa

SEQ ID NO: 2037586 - RNA, 19 nt, Homo sapiens
  misc_RNA (1)...(19): siRNA sense strand
uggccgagguggaggauga

SEQ ID NO: 2037587 - RNA, 19 nt, Homo sapiens
  misc_RNA (1)...(19): siRNA sense strand
gccgaagcuugcuccagua

SEQ ID NO: 2037588 - RNA, 19 nt, Homo sapiens
  misc_RNA (1)...(19): siRNA sense strand
caaaaucugcucccaguuu

SEQ ID NO: 2037589 - RNA, 19 nt, Homo sapiens
  misc_RNA (1)...(19): siRNA sense strand
guaccgcccugaggaguuc

SEQ ID NO: 2037590 - RNA, 19 nt, Homo sapiens
  misc_RNA (1)...(19): siRNA sense strand
ggaggagcccugucaagca

SEQ ID NO: 2037591 - RNA, 19 nt, Homo sapiens
  misc_RNA (1)...(19): siRNA sense strand
gaagcggccauuucgaugu

SEQ ID NO: 2037592 - RNA, 19 nt, Homo sapiens
  misc_RNA (1)...(19): siRNA sense strand
gaggaaacacaagcacaaa

SEQ ID NO: 2037593 - RNA, 19 nt, Homo sapiens
  misc_RNA (1)...(19): siRNA sense strand
agcaagaguugagcuuuaa

SEQ ID NO: 2037594 - RNA, 19 nt, Homo sapiens
  misc_RNA (1)...(19): siRNA sense strand
ggagcaagaguugagcuuu

SEQ ID NO: 2037595 - RNA, 19 nt, Homo sapiens
  misc_RNA (1)...(19): siRNA sense strand
gcaaucagcuuacucaaca

SEQ ID NO: 2037596 - RNA, 19 nt, Homo sapiens
  misc_RNA (1)...(19): siRNA sense strand
ggagaagccuuacgagugu

SEQ ID NO: 2037597 - RNA, 19 nt, Homo sapiens
  misc_RNA (1)...(19): siRNA sense strand
guaaaucccuuggccguaa

SEQ ID NO: 2037598 - RNA, 19 nt, Homo sapiens
  misc_RNA (1)...(19): siRNA sense strand
cgacguagccauagacuuu

SEQ ID NO: 2037599 - RNA, 19 nt, Homo sapiens
  misc_RNA (1)...(19): siRNA sense strand
gcucaagccucguuauuca

SEQ ID NO: 2037600 - RNA, 19 nt, Homo sapiens
  misc_RNA (1)...(19): siRNA sense strand
gaaagacuacgaaugcaaa

SEQ ID NO: 2037601 - RNA, 19 nt, Homo sapiens
  misc_RNA (1)...(19): siRNA sense strand
ggagguaugucaaucagau

SEQ ID NO: 2037602 - RNA, 19 nt, Homo sapiens
  misc_RNA (1)...(19): siRNA sense strand
gagaagcccuacgaaugua

SEQ ID NO: 2037603 - RNA, 19 nt, Homo sapiens
  misc_RNA (1)...(19): siRNA sense strand
gaaggcauguaaccaccua

SEQ ID NO: 2037604 - RNA, 19 nt, Homo sapiens
  misc_RNA (1)...(19): siRNA sense strand
ggagaagcccuacgaaugu

SEQ ID NO: 2037605 - RNA, 19 nt, Homo sapiens
  misc_RNA (1)...(19): siRNA sense strand
agucguggcuaucaacuua

SEQ ID NO: 2037606 - RNA, 19 nt, Homo sapiens
  misc_RNA (1)...(19): siRNA sense strand
ggaaggcuuucauuuaugg

SEQ ID NO: 2037607 - RNA, 19 nt, Homo sapiens
  misc_RNA (1)...(19): siRNA sense strand
ggagaaagacuacgaaugc

SEQ ID NO: 2037608 - RNA, 19 nt, Homo sapiens
  misc_RNA (1)...(19): siRNA sense strand
ugagaaacccuaugaaugu

SEQ ID NO: 2037609 - RNA, 19 nt, Homo sapiens
  misc_RNA (1)...(19): siRNA sense strand
gugggaaggcuuucauuua

SEQ ID NO: 2037610 - RNA, 19 nt, Homo sapiens
  misc_RNA (1)...(19): siRNA sense strand
gaauucagauagaagaagu

SEQ ID NO: 2037611 - RNA, 19 nt, Homo sapiens
  misc_RNA (1)...(19): siRNA sense strand
ugggaaggcuuucauuuau

SEQ ID NO: 2037612 - RNA, 19 nt, Homo sapiens
  misc_RNA (1)...(19): siRNA sense strand
gaacacaucagagacauca

SEQ ID NO: 2037613 - RNA, 19 nt, Homo sapiens
  misc_RNA (1)...(19): siRNA sense strand
gcgagaagccguacaagug

SEQ ID NO: 2037614 - RNA, 19 nt, Homo sapiens
  misc_RNA (1)...(19): siRNA sense strand
gggagaagcccuacgaaug

SEQ ID NO: 2037615 - RNA, 19 nt, Homo sapiens
  misc_RNA (1)...(19): siRNA sense strand
gagaaaccuuaugaaugua

SEQ ID NO: 2037616 - RNA, 19 nt, Homo sapiens
  misc_RNA (1)...(19): siRNA sense strand
gccaucagcuuacacaaca

SEQ ID NO: 2037617 - RNA, 19 nt, Homo sapiens
  misc_RNA (1)...(19): siRNA sense strand
gaaauaagggcuuccaaaa

SEQ ID NO: 2037618 - RNA, 19 nt, Homo sapiens
  misc_RNA (1)...(19): siRNA sense strand
gggaaggcuuucauuuaug

SEQ ID NO: 2037619 - RNA, 19 nt, Homo sapiens
  misc_RNA (1)...(19): siRNA sense strand
ggccguaacuggauaugug

SEQ ID NO: 2037620 - RNA, 19 nt, Homo sapiens
  misc_RNA (1)...(19): siRNA sense strand
ggagaacuacaguaacuug

SEQ ID NO: 2037621 - RNA, 19 nt, Homo sapiens
  misc_RNA (1)...(19): siRNA sense strand
gaaugugggaagagcuuua

SEQ ID NO: 2037622 - RNA, 19 nt, Homo sapiens
  misc_RNA (1)...(19): siRNA sense strand
gaaacccuaugaaugucaa

SEQ ID NO: 2037623 - RNA, 19 nt, Homo sapiens
  misc_RNA (1)...(19): siRNA sense strand
caacuuagucaacaucaga

SEQ ID NO: 2037624 - RNA, 19 nt, Homo sapiens
  misc_RNA (1)...(19): siRNA sense strand
caaaaggaauucagauaga

SEQ ID NO: 2037625 - RNA, 19 nt, Homo sapiens
  misc_RNA (1)...(19): siRNA sense strand
cagcacaagagaauucaua

SEQ ID NO: 2037626 - RNA, 19 nt, Homo sapiens
  misc_RNA (1)...(19): siRNA sense strand
gcgaaauccuacgaaugua

SEQ ID NO: 2037627 - RNA, 19 nt, Homo sapiens
  misc_RNA (1)...(19): siRNA sense strand
cuaugaaugucaagaaugu

SEQ ID NO: 2037628 - RNA, 19 nt, Homo sapiens
  misc_RNA (1)...(19): siRNA sense strand
gcuaucaacuuagucaaca

SEQ ID NO: 2037629 - RNA, 19 nt, Homo sapiens
  misc_RNA (1)...(19): siRNA sense strand
ggcgaaauccuacgaaugu

SEQ ID NO: 2037630 - RNA, 19 nt, Homo sapiens
  misc_RNA (1)...(19): siRNA sense strand
cuacgaauguaaagacugu

SEQ ID NO: 2037631 - RNA, 19 nt, Homo sapiens
  misc_RNA (1)...(19): siRNA sense strand
ugaaauaagggcuuccaaa

SEQ ID NO: 2037632 - RNA, 19 nt, Homo sapiens
  misc_RNA (1)...(19): siRNA sense strand
cgaaauccuacgaauguaa

SEQ ID NO: 2037633 - RNA, 19 nt, Homo sapiens
  misc_RNA (1)...(19): siRNA sense strand
gugagaaacccuaugaaug

SEQ ID NO: 2037634 - RNA, 19 nt, Homo sapiens
  misc_RNA (1)...(19): siRNA sense strand
ucacucagcaccagagauu

SEQ ID NO: 2037635 - RNA, 19 nt, Homo sapiens
  misc_RNA (1)...(19): siRNA sense strand
acacaucagagacaucaua

SEQ ID NO: 2037636 - RNA, 19 nt, Homo sapiens
  misc_RNA (1)...(19): siRNA sense strand
cgugaaacaugagagaauu

SEQ ID NO: 2037637 - RNA, 19 nt, Homo sapiens
  misc_RNA (1)...(19): siRNA sense strand
ucaagccucguuauucaua

SEQ ID NO: 2037638 - RNA, 19 nt, Homo sapiens
  misc_RNA (1)...(19): siRNA sense strand
gagaaacccuaugaauguc

SEQ ID NO: 2037639 - RNA, 19 nt, Homo sapiens
  misc_RNA (1)...(19): siRNA sense strand
guacaagugcacagaaugu

SEQ ID NO: 2037640 - RNA, 19 nt, Homo sapiens
  misc_RNA (1)...(19): siRNA sense strand
cauaagaggauucauacug

SEQ ID NO: 2037641 - RNA, 19 nt, Homo sapiens
  misc_RNA (1)...(19): siRNA sense strand
gagaaagacuacgaaugca

SEQ ID NO: 2037642 - RNA, 19 nt, Homo sapiens
  misc_RNA (1)...(19): siRNA sense strand
ggugagaaacccuaugaau

SEQ ID NO: 2037643 - RNA, 19 nt, Homo sapiens
  misc_RNA (1)...(19): siRNA sense strand
guauaaauguaaggagugu

SEQ ID NO: 2037644 - RNA, 19 nt, Homo sapiens
  misc_RNA (1)...(19): siRNA sense strand
guaaccaccuaaaccaucu

SEQ ID NO: 2037645 - RNA, 19 nt, Homo sapiens
  misc_RNA (1)...(19): siRNA sense strand
ggauuuggagucagcauau

SEQ ID NO: 2037646 - RNA, 19 nt, Homo sapiens
  misc_RNA (1)...(19): siRNA sense strand
caagccucauucagcauaa

SEQ ID NO: 2037647 - RNA, 19 nt, Homo sapiens
  misc_RNA (1)...(19): siRNA sense strand
cacaagagaauucauagug

SEQ ID NO: 2037648 - RNA, 19 nt, Homo sapiens
  misc_RNA (1)...(19): siRNA sense strand
gaauguaaagacuguggaa

SEQ ID NO: 2037649 - RNA, 19 nt, Homo sapiens
  misc_RNA (1)...(19): siRNA sense strand
gagaagccuuacgagugua

SEQ ID NO: 2037650 - RNA, 19 nt, Homo sapiens
  misc_RNA (1)...(19): siRNA sense strand
ggccuucaauuguggcuau

SEQ ID NO: 2037651 - RNA, 19 nt, Homo sapiens
  misc_RNA (1)...(19): siRNA sense strand
gaaauccuacgaauguaag

SEQ ID NO: 2037652 - RNA, 19 nt, Homo sapiens
  misc_RNA (1)...(19): siRNA sense strand
ggagugggccugucugaac

SEQ ID NO: 2037653 - RNA, 19 nt, Homo sapiens
  misc_RNA (1)...(19): siRNA sense strand
cagaggauccacaacaguu

SEQ ID NO: 2037654 - RNA, 19 nt, Homo sapiens
  misc_RNA (1)...(19): siRNA sense strand
ggccuuuacucgagucaau

SEQ ID NO: 2037655 - RNA, 19 nt, Homo sapiens
  misc_RNA (1)...(19): siRNA sense strand
caucagagacaucauaagg

SEQ ID NO: 2037656 - RNA, 19 nt, Homo sapiens
  misc_RNA (1)...(19): siRNA sense strand
caucagaggauccacaaca

SEQ ID NO: 2037657 - RNA, 19 nt, Homo sapiens
  misc_RNA (1)...(19): siRNA sense strand
ucacucagcacgagagaau

SEQ ID NO: 2037658 - RNA, 19 nt, Homo sapiens
  misc_RNA (1)...(19): siRNA sense strand
gcacaagagaauucauagu

SEQ ID NO: 2037659 - RNA, 19 nt, Homo sapiens
  misc_RNA (1)...(19): siRNA sense strand
ucaagccucauucagcaua

SEQ ID NO: 2037660 - RNA, 19 nt, Homo sapiens
  misc_RNA (1)...(19): siRNA sense strand
gacaucauaaggagaauuc

SEQ ID NO: 2037661 - RNA, 19 nt, Homo sapiens
  misc_RNA (1)...(19): siRNA sense strand
gaaaccccguauaaaugua

SEQ ID NO: 2037662 - RNA, 19 nt, Homo sapiens
  misc_RNA (1)...(19): siRNA sense strand
ucacgaauguaaggagugu

SEQ ID NO: 2037663 - RNA, 19 nt, Homo sapiens
  misc_RNA (1)...(19): siRNA sense strand
gaaugugggaaggccuuua

SEQ ID NO: 2037664 - RNA, 19 nt, Homo sapiens
  misc_RNA (1)...(19): siRNA sense strand
agccguguguauaaacuua

SEQ ID NO: 2037665 - RNA, 19 nt, Homo sapiens
  misc_RNA (1)...(19): siRNA sense strand
gggagaaagacuacgaaug

SEQ ID NO: 2037666 - RNA, 19 nt, Homo sapiens
  misc_RNA (1)...(19): siRNA sense strand
gaagcccuacgaauguaaa

SEQ ID NO: 2037667 - RNA, 19 nt, Homo sapiens
  misc_RNA (1)...(19): siRNA sense strand
gggacgugaugcuggagaa

SEQ ID NO: 2037668 - RNA, 19 nt, Homo sapiens
  misc_RNA (1)...(19): siRNA sense strand
gaaggcaccccuccuagaa

SEQ ID NO: 2037669 - RNA, 19 nt, Homo sapiens
  misc_RNA (1)...(19): siRNA sense strand
agagacaucauaaggagaa

SEQ ID NO: 2037670 - RNA, 19 nt, Homo sapiens
  misc_RNA (1)...(19): siRNA sense strand
agaagccucacgaauguaa

SEQ ID NO: 2037671 - RNA, 19 nt, Homo sapiens
  misc_RNA (1)...(19): siRNA sense strand
caggugagaaacccuauga

SEQ ID NO: 2037672 - RNA, 19 nt, Homo sapiens
  misc_RNA (1)...(19): siRNA sense strand
aaacuuauucagcacaaga

SEQ ID NO: 2037673 - RNA, 19 nt, Homo sapiens
  misc_RNA (1)...(19): siRNA sense strand
cuaugaauguaaagacugu

SEQ ID NO: 2037674 - RNA, 19 nt, Homo sapiens
  misc_RNA (1)...(19): siRNA sense strand
ggagucagcauaugaaaau

SEQ ID NO: 2037675 - RNA, 19 nt, Homo sapiens
  misc_RNA (1)...(19): siRNA sense strand
uuacucagcaucagaagau

SEQ ID NO: 2037676 - RNA, 19 nt, Homo sapiens
  misc_RNA (1)...(19): siRNA sense strand
gggcgaaauccuacgaaug

SEQ ID NO: 2037677 - RNA, 19 nt, Homo sapiens
  misc_RNA (1)...(19): siRNA sense strand
ugaagguacgcuugaaaga

SEQ ID NO: 2037678 - RNA, 19 nt, Homo sapiens
  misc_RNA (1)...(19): siRNA sense strand
cagcuuacacaacaucaga

SEQ ID NO: 2037679 - RNA, 19 nt, Homo sapiens
  misc_RNA (1)...(19): siRNA sense strand
gauuuggagucagcauaug

SEQ ID NO: 2037680 - RNA, 19 nt, Homo sapiens
  misc_RNA (1)...(19): siRNA sense strand
uaacuuggucucacuggau

SEQ ID NO: 2037681 - RNA, 19 nt, Homo sapiens
  misc_RNA (1)...(19): siRNA sense strand
cagcuuacucaacaucaaa

SEQ ID NO: 2037682 - RNA, 19 nt, Homo sapiens
  misc_RNA (1)...(19): siRNA sense strand
gaagguacgcuugaaagac

SEQ ID NO: 2037683 - RNA, 19 nt, Homo sapiens
  misc_RNA (1)...(19): siRNA sense strand
gagggagguaugucaauca

SEQ ID NO: 2037684 - RNA, 19 nt, Homo sapiens
  misc_RNA (1)...(19): siRNA sense strand
ccuuuacucgagucaauua

SEQ ID NO: 2037685 - RNA, 19 nt, Homo sapiens
  misc_RNA (1)...(19): siRNA sense strand
gaggagugggccugucuga

SEQ ID NO: 2037686 - RNA, 19 nt, Homo sapiens
  misc_RNA (1)...(19): siRNA sense strand
ucagcuuacucaacaucaa

SEQ ID NO: 2037687 - RNA, 19 nt, Homo sapiens
  misc_RNA (1)...(19): siRNA sense strand
agucacggccaucagcuua

SEQ ID NO: 2037688 - RNA, 19 nt, Homo sapiens
  misc_RNA (1)...(19): siRNA sense strand
gcgaaaccccguauaaaug

SEQ ID NO: 2037689 - RNA, 19 nt, Homo sapiens
  misc_RNA (1)...(19): siRNA sense strand
gagugggccugucugaacu

SEQ ID NO: 2037690 - RNA, 19 nt, Homo sapiens
  misc_RNA (1)...(19): siRNA sense strand
uguaaagacuguggaaagg

SEQ ID NO: 2037691 - RNA, 19 nt, Homo sapiens
  misc_RNA (1)...(19): siRNA sense strand
cacaucagagacaucauaa

SEQ ID NO: 2037692 - RNA, 19 nt, Homo sapiens
  misc_RNA (1)...(19): siRNA sense strand
gcuuacacaacaucagaaa

SEQ ID NO: 2037693 - RNA, 19 nt, Homo sapiens
  misc_RNA (1)...(19): siRNA sense strand
cuggagaacuacaguaacu

SEQ ID NO: 2037694 - RNA, 19 nt, Homo sapiens
  misc_RNA (1)...(19): siRNA sense strand
gagaagccucacgaaugua

SEQ ID NO: 2037695 - RNA, 19 nt, Homo sapiens
  misc_RNA (1)...(19): siRNA sense strand
gcagaggauucauuucuuc

SEQ ID NO: 2037696 - RNA, 19 nt, Homo sapiens
  misc_RNA (1)...(19): siRNA sense strand
gaggauucauuucuucuau

SEQ ID NO: 2037697 - RNA, 19 nt, Homo sapiens
  misc_RNA (1)...(19): siRNA sense strand
uacaacacguucuccaaua

SEQ ID NO: 2037698 - RNA, 19 nt, Homo sapiens
  misc_RNA (1)...(19): siRNA sense strand
gagguggacuggugugaga

SEQ ID NO: 2037699 - RNA, 19 nt, Homo sapiens
  misc_RNA (1)...(19): siRNA sense strand
ggcaguggcuauagcauau

SEQ ID NO: 2037700 - RNA, 19 nt, Homo sapiens
  misc_RNA (1)...(19): siRNA sense strand
acaacacguucuccaauau

SEQ ID NO: 2037701 - RNA, 19 nt, Homo sapiens
  misc_RNA (1)...(19): siRNA sense strand
gcauugcccugcacauucu

SEQ ID NO: 2037702 - RNA, 19 nt, Homo sapiens
  misc_RNA (1)...(19): siRNA sense strand
gggcaguggcuauagcaua

SEQ ID NO: 2037703 - RNA, 19 nt, Homo sapiens
  misc_RNA (1)...(19): siRNA sense strand
ggauucauuucuucuaucu

SEQ ID NO: 2037704 - RNA, 19 nt, Homo sapiens
  misc_RNA (1)...(19): siRNA sense strand
ggcagaggauucauuucuu

SEQ ID NO: 2037705 - RNA, 19 nt, Homo sapiens
  misc_RNA (1)...(19): siRNA sense strand
gagagcaacuuccaguacu

SEQ ID NO: 2037706 - RNA, 19 nt, Homo sapiens
  misc_RNA (1)...(19): siRNA sense strand
ggaagaccagcaauaagga

SEQ ID NO: 2037707 - RNA, 19 nt, Homo sapiens
  misc_RNA (1)...(19): siRNA sense strand
acaggaagaccagcaauaa

SEQ ID NO: 2037708 - RNA, 19 nt, Homo sapiens
  misc_RNA (1)...(19): siRNA sense strand
gagcuucggcaccugauug

SEQ ID NO: 2037709 - RNA, 19 nt, Homo sapiens
  misc_RNA (1)...(19): siRNA sense strand
cagcaucaccuucccuuau

SEQ ID NO: 2037710 - RNA, 19 nt, Homo sapiens
  misc_RNA (1)...(19): siRNA sense strand
ggccuguucuccauguauu

SEQ ID NO: 2037711 - RNA, 19 nt, Homo sapiens
  misc_RNA (1)...(19): siRNA sense strand
gcucugaccagcuggauca

SEQ ID NO: 2037712 - RNA, 19 nt, Homo sapiens
  misc_RNA (1)...(19): siRNA sense strand
gaucagugaccgucugcuu

SEQ ID NO: 2037713 - RNA, 19 nt, Homo sapiens
  misc_RNA (1)...(19): siRNA sense strand
ucauaggccuguucuccau

SEQ ID NO: 2037714 - RNA, 19 nt, Homo sapiens
  misc_RNA (1)...(19): siRNA sense strand
gcacccguaugcccagaag

SEQ ID NO: 2037715 - RNA, 19 nt, Homo sapiens
  misc_RNA (1)...(19): siRNA sense strand
ucagugaccgucugcuuug

SEQ ID NO: 2037716 - RNA, 19 nt, Homo sapiens
  misc_RNA (1)...(19): siRNA sense strand
cagcauugcccugcacauu

SEQ ID NO: 2037717 - RNA, 19 nt, Homo sapiens
  misc_RNA (1)...(19): siRNA sense strand
ucagcacccuucuguccuu

SEQ ID NO: 2037718 - RNA, 19 nt, Homo sapiens
  misc_RNA (1)...(19): siRNA sense strand
uacaggaagaccagcaaua

SEQ ID NO: 2037719 - RNA, 19 nt, Homo sapiens
  misc_RNA (1)...(19): siRNA sense strand
cuacaacacguucuccaau

SEQ ID NO: 2037720 - RNA, 19 nt, Homo sapiens
  misc_RNA (1)...(19): siRNA sense strand
caacacguucuccaauauc

SEQ ID NO: 2037721 - RNA, 19 nt, Homo sapiens
  misc_RNA (1)...(19): siRNA sense strand
gaccagcaauaaggagcuu

SEQ ID NO: 2037722 - RNA, 19 nt, Homo sapiens
  misc_RNA (1)...(19): siRNA sense strand
gcaucaccuucccuuaugg

SEQ ID NO: 2037723 - RNA, 19 nt, Homo sapiens
  misc_RNA (1)...(19): siRNA sense strand
uaugagaugccaggugaaa

SEQ ID NO: 2037724 - RNA, 19 nt, Homo sapiens
  misc_RNA (1)...(19): siRNA sense strand
gugagagcaacuuccagua

SEQ ID NO: 2037725 - RNA, 19 nt, Homo sapiens
  misc_RNA (1)...(19): siRNA sense strand
caggugaaacccucaaagu

SEQ ID NO: 2037726 - RNA, 19 nt, Homo sapiens
  misc_RNA (1)...(19): siRNA sense strand
agcaucaccuucccuuaug

SEQ ID NO: 2037727 - RNA, 19 nt, Homo sapiens
  misc_RNA (1)...(19): siRNA sense strand
ugaugaugcuccugaugca

SEQ ID NO: 2037728 - RNA, 19 nt, Homo sapiens
  misc_RNA (1)...(19): siRNA sense strand
ggaugccaacuaugagaug

SEQ ID NO: 2037729 - RNA, 19 nt, Homo sapiens
  misc_RNA (1)...(19): siRNA sense strand
uggguccucuucaugauca

SEQ ID NO: 2037730 - RNA, 19 nt, Homo sapiens
  misc_RNA (1)...(19): siRNA sense strand
caucuggcaugugcucauc

SEQ ID NO: 2037731 - RNA, 19 nt, Homo sapiens
  misc_RNA (1)...(19): siRNA sense strand
guacaggaagaccagcaau

SEQ ID NO: 2037732 - RNA, 19 nt, Homo sapiens
  misc_RNA (1)...(19): siRNA sense strand
gauugaggucuccgugguu

SEQ ID NO: 2037733 - RNA, 19 nt, Homo sapiens
  misc_RNA (1)...(19): siRNA sense strand
uggcagaggauucauuucu

SEQ ID NO: 2037734 - RNA, 19 nt, Homo sapiens
  misc_RNA (1)...(19): siRNA sense strand
ugagagcaacuuccaguac

SEQ ID NO: 2037735 - RNA, 19 nt, Homo sapiens
  misc_RNA (1)...(19): siRNA sense strand
gaaaggagauuaacaagug

SEQ ID NO: 2037736 - RNA, 19 nt, Homo sapiens
  misc_RNA (1)...(19): siRNA sense strand
ggacaaugaucagauauuu

SEQ ID NO: 2037737 - RNA, 19 nt, Homo sapiens
  misc_RNA (1)...(19): siRNA sense strand
caagagaagugcuuugauu

SEQ ID NO: 2037738 - RNA, 19 nt, Homo sapiens
  misc_RNA (1)...(19): siRNA sense strand
gagcuucucuuccagcaua

SEQ ID NO: 2037739 - RNA, 19 nt, Homo sapiens
  misc_RNA (1)...(19): siRNA sense strand
gaagggaggcuugccauua

SEQ ID NO: 2037740 - RNA, 19 nt, Homo sapiens
  misc_RNA (1)...(19): siRNA sense strand
gaacugauuuggaagaaca

SEQ ID NO: 2037741 - RNA, 19 nt, Homo sapiens
  misc_RNA (1)...(19): siRNA sense strand
ggacaaguggugaagcaua

SEQ ID NO: 2037742 - RNA, 19 nt, Homo sapiens
  misc_RNA (1)...(19): siRNA sense strand
gaaaaucuggcaugaaaua

SEQ ID NO: 2037743 - RNA, 19 nt, Homo sapiens
  misc_RNA (1)...(19): siRNA sense strand
ggacgcagguuuaacuucu

SEQ ID NO: 2037744 - RNA, 19 nt, Homo sapiens
  misc_RNA (1)...(19): siRNA sense strand
ucagauauuucacaucgaa

SEQ ID NO: 2037745 - RNA, 19 nt, Homo sapiens
  misc_RNA (1)...(19): siRNA sense strand
gucaugaacugauuuggaa

SEQ ID NO: 2037746 - RNA, 19 nt, Homo sapiens
  misc_RNA (1)...(19): siRNA sense strand
gcaauaugaaucacugaaa

SEQ ID NO: 2037747 - RNA, 19 nt, Homo sapiens
  misc_RNA (1)...(19): siRNA sense strand
aauccaggguccagaguua

SEQ ID NO: 2037748 - RNA, 19 nt, Homo sapiens
  misc_RNA (1)...(19): siRNA sense strand
caaauguccuuguauucug

SEQ ID NO: 2037749 - RNA, 19 nt, Homo sapiens
  misc_RNA (1)...(19): siRNA sense strand
uauuauagcugcaaauguc

SEQ ID NO: 2037750 - RNA, 19 nt, Homo sapiens
  misc_RNA (1)...(19): siRNA sense strand
gugaaaaucuggcaugaaa

SEQ ID NO: 2037751 - RNA, 19 nt, Homo sapiens
  misc_RNA (1)...(19): siRNA sense strand
cagguguuauuuccaauuu

SEQ ID NO: 2037752 - RNA, 19 nt, Homo sapiens
  misc_RNA (1)...(19): siRNA sense strand
gaaacagucuuuuauccuu

SEQ ID NO: 2037753 - RNA, 19 nt, Homo sapiens
  misc_RNA (1)...(19): siRNA sense strand
ggaauaugguauguuacuu

SEQ ID NO: 2037754 - RNA, 19 nt, Homo sapiens
  misc_RNA (1)...(19): siRNA sense strand
gcauuuggaucagcugcua

SEQ ID NO: 2037755 - RNA, 19 nt, Homo sapiens
  misc_RNA (1)...(19): siRNA sense strand
ucacauggcagcaaauaug

SEQ ID NO: 2037756 - RNA, 19 nt, Homo sapiens
  misc_RNA (1)...(19): siRNA sense strand
cugcaaauguccuuguauu

SEQ ID NO: 2037757 - RNA, 19 nt, Homo sapiens
  misc_RNA (1)...(19): siRNA sense strand
gcaaauguccuuguauucu

SEQ ID NO: 2037758 - RNA, 19 nt, Homo sapiens
  misc_RNA (1)...(19): siRNA sense strand
ccuauaaggagucucauaa

SEQ ID NO: 2037759 - RNA, 19 nt, Homo sapiens
  misc_RNA (1)...(19): siRNA sense strand
ggcaugaaauaaggacuaa

SEQ ID NO: 2037760 - RNA, 19 nt, Homo sapiens
  misc_RNA (1)...(19): siRNA sense strand
ucagaaaggagauuaacaa

SEQ ID NO: 2037761 - RNA, 19 nt, Homo sapiens
  misc_RNA (1)...(19): siRNA sense strand
auuaacaagugguggaaua

SEQ ID NO: 2037762 - RNA, 19 nt, Homo sapiens
  misc_RNA (1)...(19): siRNA sense strand
gcagcaaauauguauguuu

SEQ ID NO: 2037763 - RNA, 19 nt, Homo sapiens
  misc_RNA (1)...(19): siRNA sense strand
ggugaagcauacaagagaa

SEQ ID NO: 2037764 - RNA, 19 nt, Homo sapiens
  misc_RNA (1)...(19): siRNA sense strand
aagggaggcuugccauuau

SEQ ID NO: 2037765 - RNA, 19 nt, Homo sapiens
  misc_RNA (1)...(19): siRNA sense strand
uggaauaaccuaagugaug

SEQ ID NO: 2037766 - RNA, 19 nt, Homo sapiens
  misc_RNA (1)...(19): siRNA sense strand
gacaaguggugaagcauac

SEQ ID NO: 2037767 - RNA, 19 nt, Homo sapiens
  misc_RNA (1)...(19): siRNA sense strand
gaacagggagccgcuagug

SEQ ID NO: 2037768 - RNA, 19 nt, Homo sapiens
  misc_RNA (1)...(19): siRNA sense strand
gaucaugcggcacaucuug

SEQ ID NO: 2037769 - RNA, 19 nt, Homo sapiens
  misc_RNA (1)...(19): siRNA sense strand
ggauacagcaggaaugauc

SEQ ID NO: 2037770 - RNA, 19 nt, Homo sapiens
  misc_RNA (1)...(19): siRNA sense strand
ucagucauuucuccuuauu

SEQ ID NO: 2037771 - RNA, 19 nt, Homo sapiens
  misc_RNA (1)...(19): siRNA sense strand
gauagcauaagaccacaaa

SEQ ID NO: 2037772 - RNA, 19 nt, Homo sapiens
  misc_RNA (1)...(19): siRNA sense strand
ggagcucacugcgguccua

SEQ ID NO: 2037773 - RNA, 19 nt, Homo sapiens
  misc_RNA (1)...(19): siRNA sense strand
caucgaauccagccucaaa

SEQ ID NO: 2037774 - RNA, 19 nt, Homo sapiens
  misc_RNA (1)...(19): siRNA sense strand
guccuuguauucuguuuau

SEQ ID NO: 2037775 - RNA, 19 nt, Homo sapiens
  misc_RNA (1)...(19): siRNA sense strand
caugaaauaaggacuaaug

SEQ ID NO: 2037776 - RNA, 19 nt, Homo sapiens
  misc_RNA (1)...(19): siRNA sense strand
uggaucagcugcuauuugg

SEQ ID NO: 2037777 - RNA, 19 nt, Homo sapiens
  misc_RNA (1)...(19): siRNA sense strand
aaagcugauugguuggaua

SEQ ID NO: 2037778 - RNA, 19 nt, Homo sapiens
  misc_RNA (1)...(19): siRNA sense strand
agucauuucuccuuauuuc

SEQ ID NO: 2037779 - RNA, 19 nt, Homo sapiens
  misc_RNA (1)...(19): siRNA sense strand
uaaaguugccacaggaaga

SEQ ID NO: 2037780 - RNA, 19 nt, Homo sapiens
  misc_RNA (1)...(19): siRNA sense strand
ggucaugaacugauuugga

SEQ ID NO: 2037781 - RNA, 19 nt, Homo sapiens
  misc_RNA (1)...(19): siRNA sense strand
gguggaauaaccuaaguga

SEQ ID NO: 2037782 - RNA, 19 nt, Homo sapiens
  misc_RNA (1)...(19): siRNA sense strand
uuacggucaugaacugauu

SEQ ID NO: 2037783 - RNA, 19 nt, Homo sapiens
  misc_RNA (1)...(19): siRNA sense strand
gcagguguuauuuccaauu

SEQ ID NO: 2037784 - RNA, 19 nt, Homo sapiens
  misc_RNA (1)...(19): siRNA sense strand
ugucaacauucagucauuu

SEQ ID NO: 2037785 - RNA, 19 nt, Homo sapiens
  misc_RNA (1)...(19): siRNA sense strand
auucagucauuucuccuua

SEQ ID NO: 2037786 - RNA, 19 nt, Homo sapiens
  misc_RNA (1)...(19): siRNA sense strand
gggaggcuugccauuauuu

SEQ ID NO: 2037787 - RNA, 19 nt, Homo sapiens
  misc_RNA (1)...(19): siRNA sense strand
ccuucucccuauccuauaa

SEQ ID NO: 2037788 - RNA, 19 nt, Homo sapiens
  misc_RNA (1)...(19): siRNA sense strand
acagggagccgcuagugaa

SEQ ID NO: 2037789 - RNA, 19 nt, Homo sapiens
  misc_RNA (1)...(19): siRNA sense strand
gcagguuuaacuucuuuau

SEQ ID NO: 2037790 - RNA, 19 nt, Homo sapiens
  misc_RNA (1)...(19): siRNA sense strand
gguauuauagcugcaaaug

SEQ ID NO: 2037791 - RNA, 19 nt, Homo sapiens
  misc_RNA (1)...(19): siRNA sense strand
gagaagugcuuugauuccu

SEQ ID NO: 2037792 - RNA, 19 nt, Homo sapiens
  misc_RNA (1)...(19): siRNA sense strand
acgcagguuuaacuucuuu

SEQ ID NO: 2037793 - RNA, 19 nt, Homo sapiens
  misc_RNA (1)...(19): siRNA sense strand
cuauaaggagucucauaaa

SEQ ID NO: 2037794 - RNA, 19 nt, Homo sapiens
  misc_RNA (1)...(19): siRNA sense strand
cugcagguguuauuuccaa

SEQ ID NO: 2037795 - RNA, 19 nt, Homo sapiens
  misc_RNA (1)...(19): siRNA sense strand
guucauggcaguguaccua

SEQ ID NO: 2037796 - RNA, 19 nt, Homo sapiens
  misc_RNA (1)...(19): siRNA sense strand
gguccuuuguucuccaaug

SEQ ID NO: 2037797 - RNA, 19 nt, Homo sapiens
  misc_RNA (1)...(19): siRNA sense strand
gaucagacccagggacaag

SEQ ID NO: 2037798 - RNA, 19 nt, Homo sapiens
  misc_RNA (1)...(19): siRNA sense strand
gguguuauuuccaauuuug

SEQ ID NO: 2037799 - RNA, 19 nt, Homo sapiens
  misc_RNA (1)...(19): siRNA sense strand
aaauguccuuguauucugu

SEQ ID NO: 2037800 - RNA, 19 nt, Homo sapiens
  misc_RNA (1)...(19): siRNA sense strand
gaaauccaggguccagagu

SEQ ID NO: 2037801 - RNA, 19 nt, Homo sapiens
  misc_RNA (1)...(19): siRNA sense strand
aaucuggcaugaaauaagg

SEQ ID NO: 2037802 - RNA, 19 nt, Homo sapiens
  misc_RNA (1)...(19): siRNA sense strand
gaacauucugggucaagag

SEQ ID NO: 2037803 - RNA, 19 nt, Homo sapiens
  misc_RNA (1)...(19): siRNA sense strand
cauggcagcaaauauguau

SEQ ID NO: 2037804 - RNA, 19 nt, Homo sapiens
  misc_RNA (1)...(19): siRNA sense strand
ccuuuguucuccaauguug

SEQ ID NO: 2037805 - RNA, 19 nt, Homo sapiens
  misc_RNA (1)...(19): siRNA sense strand
gacaaugaucagauauuuc

SEQ ID NO: 2037806 - RNA, 19 nt, Homo sapiens
  misc_RNA (1)...(19): siRNA sense strand
gcauacaagagaagugcuu

SEQ ID NO: 2037807 - RNA, 19 nt, Homo sapiens
  misc_RNA (1)...(19): siRNA sense strand
gcugauugguuggauagca

SEQ ID NO: 2037808 - RNA, 19 nt, Homo sapiens
  misc_RNA (1)...(19): siRNA sense strand
ugaacauucugggucaaga

SEQ ID NO: 2037809 - RNA, 19 nt, Homo sapiens
  misc_RNA (1)...(19): siRNA sense strand
uauuucacauggcagcaaa

SEQ ID NO: 2037810 - RNA, 19 nt, Homo sapiens
  misc_RNA (1)...(19): siRNA sense strand
gacgcagguuuaacuucuu

SEQ ID NO: 2037811 - RNA, 19 nt, Homo sapiens
  misc_RNA (1)...(19): siRNA sense strand
agcggacaaugaucagaua

SEQ ID NO: 2037812 - RNA, 19 nt, Homo sapiens
  misc_RNA (1)...(19): siRNA sense strand
uacaagagaagugcuuuga

SEQ ID NO: 2037813 - RNA, 19 nt, Homo sapiens
  misc_RNA (1)...(19): siRNA sense strand
uuaacaagugguggaauaa

SEQ ID NO: 2037814 - RNA, 19 nt, Homo sapiens
  misc_RNA (1)...(19): siRNA sense strand
gguaaaguugccacaggaa

SEQ ID NO: 2037815 - RNA, 19 nt, Homo sapiens
  misc_RNA (1)...(19): siRNA sense strand
guccuuuguucuccaaugu

SEQ ID NO: 2037816 - RNA, 19 nt, Homo sapiens
  misc_RNA (1)...(19): siRNA sense strand
caagugguggaauaaccua

SEQ ID NO: 2037817 - RNA, 19 nt, Homo sapiens
  misc_RNA (1)...(19): siRNA sense strand
gaagcauacaagagaagug

SEQ ID NO: 2037818 - RNA, 19 nt, Homo sapiens
  misc_RNA (1)...(19): siRNA sense strand
caugaacugauuuggaaga

SEQ ID NO: 2037819 - RNA, 19 nt, Homo sapiens
  misc_RNA (1)...(19): siRNA sense strand
ccaggguccagaguuauuu

SEQ ID NO: 2037820 - RNA, 19 nt, Homo sapiens
  misc_RNA (1)...(19): siRNA sense strand
ggcagcaaauauguauguu

SEQ ID NO: 2037821 - RNA, 19 nt, Homo sapiens
  misc_RNA (1)...(19): siRNA sense strand
aaggagacuucagaaagga

SEQ ID NO: 2037822 - RNA, 19 nt, Homo sapiens
  misc_RNA (1)...(19): siRNA sense strand
uugguuggauagcauaaga

SEQ ID NO: 2037823 - RNA, 19 nt, Homo sapiens
  misc_RNA (1)...(19): siRNA sense strand
gugguggaauaaccuaagu

SEQ ID NO: 2037824 - RNA, 19 nt, Homo sapiens
  misc_RNA (1)...(19): siRNA sense strand
aaggagguggcucuaagua

SEQ ID NO: 2037825 - RNA, 19 nt, Homo sapiens
  misc_RNA (1)...(19): siRNA sense strand
aaaaggagguggcucuaag

SEQ ID NO: 2037826 - RNA, 19 nt, Homo sapiens
  misc_RNA (1)...(19): siRNA sense strand
cagggagccgcuagugaaa

SEQ ID NO: 2037827 - RNA, 19 nt, Homo sapiens
  misc_RNA (1)...(19): siRNA sense strand
guauguuacuuacggucau

SEQ ID NO: 2037828 - RNA, 19 nt, Homo sapiens
  misc_RNA (1)...(19): siRNA sense strand
ucucugcagcggacaauga

SEQ ID NO: 2037829 - RNA, 19 nt, Homo sapiens
  misc_RNA (1)...(19): siRNA sense strand
guauuauagcugcaaaugu

SEQ ID NO: 2037830 - RNA, 19 nt, Homo sapiens
  misc_RNA (1)...(19): siRNA sense strand
ggcaauaugaaucacugaa

SEQ ID NO: 2037831 - RNA, 19 nt, Homo sapiens
  misc_RNA (1)...(19): siRNA sense strand
cagguauuauagcugcaaa

SEQ ID NO: 2037832 - RNA, 19 nt, Homo sapiens
  misc_RNA (1)...(19): siRNA sense strand
gauggccagcggacuguga

SEQ ID NO: 2037833 - RNA, 19 nt, Homo sapiens
  misc_RNA (1)...(19): siRNA sense strand
gcuccucggacgcagguuu

SEQ ID NO: 2037834 - RNA, 19 nt, Homo sapiens
  misc_RNA (1)...(19): siRNA sense strand
gggagccgcuagugaaaau

SEQ ID NO: 2037835 - RNA, 19 nt, Homo sapiens
  misc_RNA (1)...(19): siRNA sense strand
gagaaucgcuagagccaaa

SEQ ID NO: 2037836 - RNA, 19 nt, Homo sapiens
  misc_RNA (1)...(19): siRNA sense strand
gaacaaugacuucagcaaa

SEQ ID NO: 2037837 - RNA, 19 nt, Homo sapiens
  misc_RNA (1)...(19): siRNA sense strand
gggaguaccucaaguucuu

SEQ ID NO: 2037838 - RNA, 19 nt, Homo sapiens
  misc_RNA (1)...(19): siRNA sense strand
agacggagcucaagaaugc

SEQ ID NO: 2037839 - RNA, 19 nt, Homo sapiens
  misc_RNA (1)...(19): siRNA sense strand
caaaugggaauucuucuau

SEQ ID NO: 2037840 - RNA, 19 nt, Homo sapiens
  misc_RNA (1)...(19): siRNA sense strand
caagucaccugugcccuuu

SEQ ID NO: 2037841 - RNA, 19 nt, Homo sapiens
  misc_RNA (1)...(19): siRNA sense strand
ugaaggccauggcaaguga

SEQ ID NO: 2037842 - RNA, 19 nt, Homo sapiens
  misc_RNA (1)...(19): siRNA sense strand
gcuguuagcucccaaaaga

SEQ ID NO: 2037843 - RNA, 19 nt, Homo sapiens
  misc_RNA (1)...(19): siRNA sense strand
gccaaaggcaccuccuaua

SEQ ID NO: 2037844 - RNA, 19 nt, Homo sapiens
  misc_RNA (1)...(19): siRNA sense strand
guacagcuccaucaagaau

SEQ ID NO: 2037845 - RNA, 19 nt, Homo sapiens
  misc_RNA (1)...(19): siRNA sense strand
gggcaugacucuggaccaa

SEQ ID NO: 2037846 - RNA, 19 nt, Homo sapiens
  misc_RNA (1)...(19): siRNA sense strand
ucaagggcaugauccucua

SEQ ID NO: 2037847 - RNA, 19 nt, Homo sapiens
  misc_RNA (1)...(19): siRNA sense strand
ccaaaugggaauucuucua

SEQ ID NO: 2037848 - RNA, 19 nt, Homo sapiens
  misc_RNA (1)...(19): siRNA sense strand
gaaccuggagugccucaau

SEQ ID NO: 2037849 - RNA, 19 nt, Homo sapiens
  misc_RNA (1)...(19): siRNA sense strand
cgggaagucuccucucaug

SEQ ID NO: 2037850 - RNA, 19 nt, Homo sapiens
  misc_RNA (1)...(19): siRNA sense strand
ccggaugccucucaaguca

SEQ ID NO: 2037851 - RNA, 19 nt, Homo sapiens
  misc_RNA (1)...(19): siRNA sense strand
cagaugcaguccuggauca

SEQ ID NO: 2037852 - RNA, 19 nt, Homo sapiens
  misc_RNA (1)...(19): siRNA sense strand
gccagugacuacagcaaga

SEQ ID NO: 2037853 - RNA, 19 nt, Homo sapiens
  misc_RNA (1)...(19): siRNA sense strand
acagcuccaucaagaauga

SEQ ID NO: 2037854 - RNA, 19 nt, Homo sapiens
  misc_RNA (1)...(19): siRNA sense strand
gacgcucucugucugaguu

SEQ ID NO: 2037855 - RNA, 19 nt, Homo sapiens
  misc_RNA (1)...(19): siRNA sense strand
gcaguggcaaugaggauga

SEQ ID NO: 2037856 - RNA, 19 nt, Homo sapiens
  misc_RNA (1)...(19): siRNA sense strand
aggccuaccuggaguuuga

SEQ ID NO: 2037857 - RNA, 19 nt, Homo sapiens
  misc_RNA (1)...(19): siRNA sense strand
aaaggcaccuccuauacca

SEQ ID NO: 2037858 - RNA, 19 nt, Homo sapiens
  misc_RNA (1)...(19): siRNA sense strand
cugaugggccugacucuuu

SEQ ID NO: 2037859 - RNA, 19 nt, Homo sapiens
  misc_RNA (1)...(19): siRNA sense strand
ccaaaggcaccuccuauac

SEQ ID NO: 2037860 - RNA, 19 nt, Homo sapiens
  misc_RNA (1)...(19): siRNA sense strand
gggcugccgucuacaagca

SEQ ID NO: 2037861 - RNA, 19 nt, Homo sapiens
  misc_RNA (1)...(19): siRNA sense strand
aaaugggaauucuucuaug

SEQ ID NO: 2037862 - RNA, 19 nt, Homo sapiens
  misc_RNA (1)...(19): siRNA sense strand
uuguacagcuccaucaaga

SEQ ID NO: 2037863 - RNA, 19 nt, Homo sapiens
  misc_RNA (1)...(19): siRNA sense strand
cuggaucacucgcaucaau

SEQ ID NO: 2037864 - RNA, 19 nt, Homo sapiens
  misc_RNA (1)...(19): siRNA sense strand
ccgcgagacugacaucgau

SEQ ID NO: 2037865 - RNA, 19 nt, Homo sapiens
  misc_RNA (1)...(19): siRNA sense strand
ugaugggccugacucuuuc

SEQ ID NO: 2037866 - RNA, 19 nt, Homo sapiens
  misc_RNA (1)...(19): siRNA sense strand
gccaucagcauccacaaug

SEQ ID NO: 2037867 - RNA, 19 nt, Homo sapiens
  misc_RNA (1)...(19): siRNA sense strand
gcaagaacaaugacuucag

SEQ ID NO: 2037868 - RNA, 19 nt, Homo sapiens
  misc_RNA (1)...(19): siRNA sense strand
gggcaagaacaaugacuuc

SEQ ID NO: 2037869 - RNA, 19 nt, Homo sapiens
  misc_RNA (1)...(19): siRNA sense strand
ggccaaaggcaccuccuau

SEQ ID NO: 2037870 - RNA, 19 nt, Homo sapiens
  misc_RNA (1)...(19): siRNA sense strand
aacaaugacuucagcaaac

SEQ ID NO: 2037871 - RNA, 19 nt, Homo sapiens
  misc_RNA (1)...(19): siRNA sense strand
gaucacucgcaucaaugua

SEQ ID NO: 2037872 - RNA, 19 nt, Homo sapiens
  misc_RNA (1)...(19): siRNA sense strand
cagagacggagcucaagaa

SEQ ID NO: 2037873 - RNA, 19 nt, Homo sapiens
  misc_RNA (1)...(19): siRNA sense strand
ggagccggaugccucucaa

SEQ ID NO: 2037874 - RNA, 19 nt, Homo sapiens
  misc_RNA (1)...(19): siRNA sense strand
ggaucacucgcaucaaugu

SEQ ID NO: 2037875 - RNA, 19 nt, Homo sapiens
  misc_RNA (1)...(19): siRNA sense strand
gaucuccacggccauaaca

SEQ ID NO: 2037876 - RNA, 19 nt, Homo sapiens
  misc_RNA (1)...(19): siRNA sense strand
gcgagacugacaucgauga

SEQ ID NO: 2037877 - RNA, 19 nt, Homo sapiens
  misc_RNA (1)...(19): siRNA sense strand
caagaggcuguaccgacua

SEQ ID NO: 2037878 - RNA, 19 nt, Homo sapiens
  misc_RNA (1)...(19): siRNA sense strand
gagacggagcucaagaaug

SEQ ID NO: 2037879 - RNA, 19 nt, Homo sapiens
  misc_RNA (1)...(19): siRNA sense strand
aaugggaauucuucuaugg

SEQ ID NO: 2037880 - RNA, 19 nt, Homo sapiens
  misc_RNA (1)...(19): siRNA sense strand
ggugcuaccgcgagacuga

SEQ ID NO: 2037881 - RNA, 19 nt, Homo sapiens
  misc_RNA (1)...(19): siRNA sense strand
gaaccggauucugguacca

SEQ ID NO: 2037882 - RNA, 19 nt, Homo sapiens
  misc_RNA (1)...(19): siRNA sense strand
cgacucggccaucgaaagu

SEQ ID NO: 2037883 - RNA, 19 nt, Homo sapiens
  misc_RNA (1)...(19): siRNA sense strand
cuaccuggaguuugagaaa

SEQ ID NO: 2037884 - RNA, 19 nt, Homo sapiens
  misc_RNA (1)...(19): siRNA sense strand
ggaggccuaccuggaguuu

SEQ ID NO: 2037885 - RNA, 19 nt, Homo sapiens
  misc_RNA (1)...(19): siRNA sense strand
ggaguaccucaaguucuuu

SEQ ID NO: 2037886 - RNA, 19 nt, Homo sapiens
  misc_RNA (1)...(19): siRNA sense strand
gcagaaggaggaguacaag

SEQ ID NO: 2037887 - RNA, 19 nt, Homo sapiens
  misc_RNA (1)...(19): siRNA sense strand
gacuagauggcuucaggaa

SEQ ID NO: 2037888 - RNA, 19 nt, Homo sapiens
  misc_RNA (1)...(19): siRNA sense strand
ucacucgcaucaauguagu

SEQ ID NO: 2037889 - RNA, 19 nt, Homo sapiens
  misc_RNA (1)...(19): siRNA sense strand
gaagcugcagugggccaua

SEQ ID NO: 2037890 - RNA, 19 nt, Homo sapiens
  misc_RNA (1)...(19): siRNA sense strand
gggcaaggaggcugaagag

SEQ ID NO: 2037891 - RNA, 19 nt, Homo sapiens
  misc_RNA (1)...(19): siRNA sense strand
acaaugacuucagcaaacu

SEQ ID NO: 2037892 - RNA, 19 nt, Homo sapiens
  misc_RNA (1)...(19): siRNA sense strand
uaccucaaguucuuugucu

SEQ ID NO: 2037893 - RNA, 19 nt, Homo sapiens
  misc_RNA (1)...(19): siRNA sense strand
gggccaaaggcaccuccua

SEQ ID NO: 2037894 - RNA, 19 nt, Homo sapiens
  misc_RNA (1)...(19): siRNA sense strand
aagagcagcggcagaagga

SEQ ID NO: 2037895 - RNA, 19 nt, Homo sapiens
  misc_RNA (1)...(19): siRNA sense strand
acucggccaucgaaaguca

SEQ ID NO: 2037896 - RNA, 19 nt, Homo sapiens
  misc_RNA (1)...(19): siRNA sense strand
ccucaaguucuuugucuuc

SEQ ID NO: 2037897 - RNA, 19 nt, Homo sapiens
  misc_RNA (1)...(19): siRNA sense strand
aggaugaggacgacgauga

SEQ ID NO: 2037898 - RNA, 19 nt, Homo sapiens
  misc_RNA (1)...(19): siRNA sense strand
ggaagcacagacaccuugu

SEQ ID NO: 2037899 - RNA, 19 nt, Homo sapiens
  misc_RNA (1)...(19): siRNA sense strand
caaaggcaccuccuauacc

SEQ ID NO: 2037900 - RNA, 19 nt, Homo sapiens
  misc_RNA (1)...(19): siRNA sense strand
gaaucgcuagagccaaaug

SEQ ID NO: 2037901 - RNA, 19 nt, Homo sapiens
  misc_RNA (1)...(19): siRNA sense strand
gagccaaaugggaauucuu

SEQ ID NO: 2037902 - RNA, 19 nt, Homo sapiens
  misc_RNA (1)...(19): siRNA sense strand
ucagagacggagcucaaga

SEQ ID NO: 2037903 - RNA, 19 nt, Homo sapiens
  misc_RNA (1)...(19): siRNA sense strand
cccgggaagucuccucuca

SEQ ID NO: 2037904 - RNA, 19 nt, Homo sapiens
  misc_RNA (1)...(19): siRNA sense strand
aaccuggagugccucaaug

SEQ ID NO: 2037905 - RNA, 19 nt, Homo sapiens
  misc_RNA (1)...(19): siRNA sense strand
gcgcucaugcugcucaaca

SEQ ID NO: 2037906 - RNA, 19 nt, Homo sapiens
  misc_RNA (1)...(19): siRNA sense strand
gcugaccugugcgcucaug

SEQ ID NO: 2037907 - RNA, 19 nt, Homo sapiens
  misc_RNA (1)...(19): siRNA sense strand
gcaccugggcaagaacaau

SEQ ID NO: 2037908 - RNA, 19 nt, Homo sapiens
  misc_RNA (1)...(19): siRNA sense strand
ggaugaggacgacgaugag

SEQ ID NO: 2037909 - RNA, 19 nt, Homo sapiens
  misc_RNA (1)...(19): siRNA sense strand
gaacaucacucgaaaacua

SEQ ID NO: 2037910 - RNA, 19 nt, Homo sapiens
  misc_RNA (1)...(19): siRNA sense strand
gcagauagaaugcaaauag

SEQ ID NO: 2037911 - RNA, 19 nt, Homo sapiens
  misc_RNA (1)...(19): siRNA sense strand
gaacacauuuaugcauuga

SEQ ID NO: 2037912 - RNA, 19 nt, Homo sapiens
  misc_RNA (1)...(19): siRNA sense strand
gcaaugaacaucacucgaa

SEQ ID NO: 2037913 - RNA, 19 nt, Homo sapiens
  misc_RNA (1)...(19): siRNA sense strand
ggaacacauuuaugcauug

SEQ ID NO: 2037914 - RNA, 19 nt, Homo sapiens
  misc_RNA (1)...(19): siRNA sense strand
ugaguagucuguacaguga

SEQ ID NO: 2037915 - RNA, 19 nt, Homo sapiens
  misc_RNA (1)...(19): siRNA sense strand
caaugaacaucacucgaaa

SEQ ID NO: 2037916 - RNA, 19 nt, Homo sapiens
  misc_RNA (1)...(19): siRNA sense strand
ggaggcaaauugugcaaau

SEQ ID NO: 2037917 - RNA, 19 nt, Homo sapiens
  misc_RNA (1)...(19): siRNA sense strand
ccuguugucuucuaccuua

SEQ ID NO: 2037918 - RNA, 19 nt, Homo sapiens
  misc_RNA (1)...(19): siRNA sense strand
gcaaauaguugugauucuc

SEQ ID NO: 2037919 - RNA, 19 nt, Homo sapiens
  misc_RNA (1)...(19): siRNA sense strand
gauagaaugcaaauaguug

SEQ ID NO: 2037920 - RNA, 19 nt, Homo sapiens
  misc_RNA (1)...(19): siRNA sense strand
gaaccuggaacacauuuau

SEQ ID NO: 2037921 - RNA, 19 nt, Homo sapiens
  misc_RNA (1)...(19): siRNA sense strand
caacagugaagaauuauca

SEQ ID NO: 2037922 - RNA, 19 nt, Homo sapiens
  misc_RNA (1)...(19): siRNA sense strand
caacaggucgucagcaaga

SEQ ID NO: 2037923 - RNA, 19 nt, Homo sapiens
  misc_RNA (1)...(19): siRNA sense strand
gagucgaacuuucaacugu

SEQ ID NO: 2037924 - RNA, 19 nt, Homo sapiens
  misc_RNA (1)...(19): siRNA sense strand
caaacagcacaguauauuu

SEQ ID NO: 2037925 - RNA, 19 nt, Homo sapiens
  misc_RNA (1)...(19): siRNA sense strand
gaaugcacauagucuuuua

SEQ ID NO: 2037926 - RNA, 19 nt, Homo sapiens
  misc_RNA (1)...(19): siRNA sense strand
caaacaacagugaagaauu

SEQ ID NO: 2037927 - RNA, 19 nt, Homo sapiens
  misc_RNA (1)...(19): siRNA sense strand
ccacauggcaggaggcaaa

SEQ ID NO: 2037928 - RNA, 19 nt, Homo sapiens
  misc_RNA (1)...(19): siRNA sense strand
aaacagcacaguauauuuc

SEQ ID NO: 2037929 - RNA, 19 nt, Homo sapiens
  misc_RNA (1)...(19): siRNA sense strand
ugaccugcuuugaacauaa

SEQ ID NO: 2037930 - RNA, 19 nt, Homo sapiens
  misc_RNA (1)...(19): siRNA sense strand
uaucaaacagcacaguaua

SEQ ID NO: 2037931 - RNA, 19 nt, Homo sapiens
  misc_RNA (1)...(19): siRNA sense strand
ucaaacagcacaguauauu

SEQ ID NO: 2037932 - RNA, 19 nt, Homo sapiens
  misc_RNA (1)...(19): siRNA sense strand
ugccagaagucucuuaaug

SEQ ID NO: 2037933 - RNA, 19 nt, Homo sapiens
  misc_RNA (1)...(19): siRNA sense strand
acacauuuaugcauugaug

SEQ ID NO: 2037934 - RNA, 19 nt, Homo sapiens
  misc_RNA (1)...(19): siRNA sense strand
uggaacacauuuaugcauu

SEQ ID NO: 2037935 - RNA, 19 nt, Homo sapiens
  misc_RNA (1)...(19): siRNA sense strand
gggaaugcacauagucuuu

SEQ ID NO: 2037936 - RNA, 19 nt, Homo sapiens
  misc_RNA (1)...(19): siRNA sense strand
gcacauagucuuuuacaga

SEQ ID NO: 2037937 - RNA, 19 nt, Homo sapiens
  misc_RNA (1)...(19): siRNA sense strand
aaagaaacgcaaacucauu

SEQ ID NO: 2037938 - RNA, 19 nt, Homo sapiens
  misc_RNA (1)...(19): siRNA sense strand
gcacaguauauuuccuuaa

SEQ ID NO: 2037939 - RNA, 19 nt, Homo sapiens
  misc_RNA (1)...(19): siRNA sense strand
gaaugaacuugagaauaag

SEQ ID NO: 2037940 - RNA, 19 nt, Homo sapiens
  misc_RNA (1)...(19): siRNA sense strand
guagcuuucuucacucaga

SEQ ID NO: 2037941 - RNA, 19 nt, Homo sapiens
  misc_RNA (1)...(19): siRNA sense strand
cagauagaaugcaaauagu

SEQ ID NO: 2037942 - RNA, 19 nt, Homo sapiens
  misc_RNA (1)...(19): siRNA sense strand
cuuaguagcuuucuucacu

SEQ ID NO: 2037943 - RNA, 19 nt, Homo sapiens
  misc_RNA (1)...(19): siRNA sense strand
gaaugcaaauaguugugau

SEQ ID NO: 2037944 - RNA, 19 nt, Homo sapiens
  misc_RNA (1)...(19): siRNA sense strand
uaacaaacaacagugaaga

SEQ ID NO: 2037945 - RNA, 19 nt, Homo sapiens
  misc_RNA (1)...(19): siRNA sense strand
ucagcaagauggacaacau

SEQ ID NO: 2037946 - RNA, 19 nt, Homo sapiens
  misc_RNA (1)...(19): siRNA sense strand
aaacugccgugaagcauac

SEQ ID NO: 2037947 - RNA, 19 nt, Homo sapiens
  misc_RNA (1)...(19): siRNA sense strand
uaauugcuguuucuguguu

SEQ ID NO: 2037948 - RNA, 19 nt, Homo sapiens
  misc_RNA (1)...(19): siRNA sense strand
cgaaaacuauggagucgaa

SEQ ID NO: 2037949 - RNA, 19 nt, Homo sapiens
  misc_RNA (1)...(19): siRNA sense strand
ucaaguccaguaccaguuu

SEQ ID NO: 2037950 - RNA, 19 nt, Homo sapiens
  misc_RNA (1)...(19): siRNA sense strand
aaacgucucaaguccagua

SEQ ID NO: 2037951 - RNA, 19 nt, Homo sapiens
  misc_RNA (1)...(19): siRNA sense strand
caaaagaaacgcaaacuca

SEQ ID NO: 2037952 - RNA, 19 nt, Homo sapiens
  misc_RNA (1)...(19): siRNA sense strand
guugucuucuaccuuagua

SEQ ID NO: 2037953 - RNA, 19 nt, Homo sapiens
  misc_RNA (1)...(19): siRNA sense strand
ggaauacuucagagaguca

SEQ ID NO: 2037954 - RNA, 19 nt, Homo sapiens
  misc_RNA (1)...(19): siRNA sense strand
caaacucauucugcccaaa

SEQ ID NO: 2037955 - RNA, 19 nt, Homo sapiens
  misc_RNA (1)...(19): siRNA sense strand
cuucagagagucagaguug

SEQ ID NO: 2037956 - RNA, 19 nt, Homo sapiens
  misc_RNA (1)...(19): siRNA sense strand
cuuaauggcagauagaaug

SEQ ID NO: 2037957 - RNA, 19 nt, Homo sapiens
  misc_RNA (1)...(19): siRNA sense strand
gugaagaauuaucaaacag

SEQ ID NO: 2037958 - RNA, 19 nt, Homo sapiens
  misc_RNA (1)...(19): siRNA sense strand
gccagaagucucuuaaugg

SEQ ID NO: 2037959 - RNA, 19 nt, Homo sapiens
  misc_RNA (1)...(19): siRNA sense strand
agucagaguugugccagaa

SEQ ID NO: 2037960 - RNA, 19 nt, Homo sapiens
  misc_RNA (1)...(19): siRNA sense strand
gaaacgcaaacucauucug

SEQ ID NO: 2037961 - RNA, 19 nt, Homo sapiens
  misc_RNA (1)...(19): siRNA sense strand
cauggcaggaggcaaauug

SEQ ID NO: 2037962 - RNA, 19 nt, Homo sapiens
  misc_RNA (1)...(19): siRNA sense strand
guaccaguuuugcaaauau

SEQ ID NO: 2037963 - RNA, 19 nt, Homo sapiens
  misc_RNA (1)...(19): siRNA sense strand
aagaaacgcaaacucauuc

SEQ ID NO: 2037964 - RNA, 19 nt, Homo sapiens
  misc_RNA (1)...(19): siRNA sense strand
uccaacaggucgucagcaa

SEQ ID NO: 2037965 - RNA, 19 nt, Homo sapiens
  misc_RNA (1)...(19): siRNA sense strand
aguagucuguacagugaaa

SEQ ID NO: 2037966 - RNA, 19 nt, Homo sapiens
  misc_RNA (1)...(19): siRNA sense strand
uguggaagaugcaaugaac

SEQ ID NO: 2037967 - RNA, 19 nt, Homo sapiens
  misc_RNA (1)...(19): siRNA sense strand
ucagaguugugccagaagu

SEQ ID NO: 2037968 - RNA, 19 nt, Homo sapiens
  misc_RNA (1)...(19): siRNA sense strand
guaauugcuguuucugugu

SEQ ID NO: 2037969 - RNA, 19 nt, Homo sapiens
  misc_RNA (1)...(19): siRNA sense strand
ggagucgaacuuucaacug

SEQ ID NO: 2037970 - RNA, 19 nt, Homo sapiens
  misc_RNA (1)...(19): siRNA sense strand
gaccugcuuugaacauaac

SEQ ID NO: 2037971 - RNA, 19 nt, Homo sapiens
  misc_RNA (1)...(19): siRNA sense strand
gggagcuccugcuggacuu

SEQ ID NO: 2037972 - RNA, 19 nt, Homo sapiens
  misc_RNA (1)...(19): siRNA sense strand
uguguucauucucuuucua

SEQ ID NO: 2037973 - RNA, 19 nt, Homo sapiens
  misc_RNA (1)...(19): siRNA sense strand
ggaccugccggaucuggau

SEQ ID NO: 2037974 - RNA, 19 nt, Homo sapiens
  misc_RNA (1)...(19): siRNA sense strand
ggcugaaccuggaacacau

SEQ ID NO: 2037975 - RNA, 19 nt, Homo sapiens
  misc_RNA (1)...(19): siRNA sense strand
acaaacaacagugaagaau

SEQ ID NO: 2037976 - RNA, 19 nt, Homo sapiens
  misc_RNA (1)...(19): siRNA sense strand
uaguagcuuucuucacuca

SEQ ID NO: 2037977 - RNA, 19 nt, Homo sapiens
  misc_RNA (1)...(19): siRNA sense strand
agucgaacuuucaacuguu

SEQ ID NO: 2037978 - RNA, 19 nt, Homo sapiens
  misc_RNA (1)...(19): siRNA sense strand
caaauaguugugauucucu

SEQ ID NO: 2037979 - RNA, 19 nt, Homo sapiens
  misc_RNA (1)...(19): siRNA sense strand
aaacuauggagucgaacuu

SEQ ID NO: 2037980 - RNA, 19 nt, Homo sapiens
  misc_RNA (1)...(19): siRNA sense strand
uaguugugauucucucaga

SEQ ID NO: 2037981 - RNA, 19 nt, Homo sapiens
  misc_RNA (1)...(19): siRNA sense strand
cagcacaguauauuuccuu

SEQ ID NO: 2037982 - RNA, 19 nt, Homo sapiens
  misc_RNA (1)...(19): siRNA sense strand
aauggcagauagaaugcaa

SEQ ID NO: 2037983 - RNA, 19 nt, Homo sapiens
  misc_RNA (1)...(19): siRNA sense strand
uuucuucacucagagcaaa

SEQ ID NO: 2037984 - RNA, 19 nt, Homo sapiens
  misc_RNA (1)...(19): siRNA sense strand
ucuguacagugaaaugcaa

SEQ ID NO: 2037985 - RNA, 19 nt, Homo sapiens
  misc_RNA (1)...(19): siRNA sense strand
ucagagagucagaguugug

SEQ ID NO: 2037986 - RNA, 19 nt, Homo sapiens
  misc_RNA (1)...(19): siRNA sense strand
cuuucuaccuguugucuuc

SEQ ID NO: 2037987 - RNA, 19 nt, Homo sapiens
  misc_RNA (1)...(19): siRNA sense strand
gcugaaccuggaacacauu

SEQ ID NO: 2037988 - RNA, 19 nt, Homo sapiens
  misc_RNA (1)...(19): siRNA sense strand
agcacaguauauuuccuua

SEQ ID NO: 2037989 - RNA, 19 nt, Homo sapiens
  misc_RNA (1)...(19): siRNA sense strand
ggaaugcacauagucuuuu

SEQ ID NO: 2037990 - RNA, 19 nt, Homo sapiens
  misc_RNA (1)...(19): siRNA sense strand
cugaccugcuuugaacaua

SEQ ID NO: 2037991 - RNA, 19 nt, Homo sapiens
  misc_RNA (1)...(19): siRNA sense strand
guucagucccuugcaguga

SEQ ID NO: 2037992 - RNA, 19 nt, Homo sapiens
  misc_RNA (1)...(19): siRNA sense strand
acuauggagucgaacuuuc

SEQ ID NO: 2037993 - RNA, 19 nt, Homo sapiens
  misc_RNA (1)...(19): siRNA sense strand
uuuaugcauugauguggaa

SEQ ID NO: 2037994 - RNA, 19 nt, Homo sapiens
  misc_RNA (1)...(19): siRNA sense strand
cgucucaaguccaguacca

SEQ ID NO: 2037995 - RNA, 19 nt, Homo sapiens
  misc_RNA (1)...(19): siRNA sense strand
gcaaauccauguuuacuuu

SEQ ID NO: 2037996 - RNA, 19 nt, Homo sapiens
  misc_RNA (1)...(19): siRNA sense strand
ccacagagccugccacuuu

SEQ ID NO: 2037997 - RNA, 19 nt, Homo sapiens
  misc_RNA (1)...(19): siRNA sense strand
gcagcacacuccuaauuga

SEQ ID NO: 2037998 - RNA, 19 nt, Homo sapiens
  misc_RNA (1)...(19): siRNA sense strand
ccaccaaggucuacaguga

SEQ ID NO: 2037999 - RNA, 19 nt, Homo sapiens
  misc_RNA (1)...(19): siRNA sense strand
agucacggauggagaaaua

SEQ ID NO: 2038000 - RNA, 19 nt, Homo sapiens
  misc_RNA (1)...(19): siRNA sense strand
ccaccgaugucaaucagaa

SEQ ID NO: 2038001 - RNA, 19 nt, Homo sapiens
  misc_RNA (1)...(19): siRNA sense strand
gcacacuccuaauugacaa

SEQ ID NO: 2038002 - RNA, 19 nt, Homo sapiens
  misc_RNA (1)...(19): siRNA sense strand
uggagaagguggccaguga

SEQ ID NO: 2038003 - RNA, 19 nt, Homo sapiens
  misc_RNA (1)...(19): siRNA sense strand
ccagcucccugcucauuga

SEQ ID NO: 2038004 - RNA, 19 nt, Homo sapiens
  misc_RNA (1)...(19): siRNA sense strand
ccaccaagcagccgccaua

SEQ ID NO: 2038005 - RNA, 19 nt, Homo sapiens
  misc_RNA (1)...(19): siRNA sense strand
gcccaacucccaucuaaug

SEQ ID NO: 2038006 - RNA, 19 nt, Homo sapiens
  misc_RNA (1)...(19): siRNA sense strand
gcgcgaaacaucaucaaug

SEQ ID NO: 2038007 - RNA, 19 nt, Homo sapiens
  misc_RNA (1)...(19): siRNA sense strand
gccaaggucucaccaagag

SEQ ID NO: 2038008 - RNA, 19 nt, Homo sapiens
  misc_RNA (1)...(19): siRNA sense strand
ucaaggagccugccaaggu

SEQ ID NO: 2038009 - RNA, 19 nt, Homo sapiens
  misc_RNA (1)...(19): siRNA sense strand
cagagaagcuacgcucauc

SEQ ID NO: 2038010 - RNA, 19 nt, Homo sapiens
  misc_RNA (1)...(19): siRNA sense strand
gucagcagaucaagagaug

SEQ ID NO: 2038011 - RNA, 19 nt, Homo sapiens
  misc_RNA (1)...(19): siRNA sense strand
gaacccaccggcaacuguu

SEQ ID NO: 2038012 - RNA, 19 nt, Homo sapiens
  misc_RNA (1)...(19): siRNA sense strand
ucaccacaccaacuucuaa

SEQ ID NO: 2038013 - RNA, 19 nt, Homo sapiens
  misc_RNA (1)...(19): siRNA sense strand
ggucuccucccucauauuc

SEQ ID NO: 2038014 - RNA, 19 nt, Homo sapiens
  misc_RNA (1)...(19): siRNA sense strand
aggcccaacucccaucuaa

SEQ ID NO: 2038015 - RNA, 19 nt, Homo sapiens
  misc_RNA (1)...(19): siRNA sense strand
gggcugcaccugucccaaa

SEQ ID NO: 2038016 - RNA, 19 nt, Homo sapiens
  misc_RNA (1)...(19): siRNA sense strand
ccucauauucuguccugua

SEQ ID NO: 2038017 - RNA, 19 nt, Homo sapiens
  misc_RNA (1)...(19): siRNA sense strand
guacagacagcggaugaga

SEQ ID NO: 2038018 - RNA, 19 nt, Homo sapiens
  misc_RNA (1)...(19): siRNA sense strand
agccgcaaauccauguuua

SEQ ID NO: 2038019 - RNA, 19 nt, Homo sapiens
  misc_RNA (1)...(19): siRNA sense strand
cacagagccugccacuuuc

SEQ ID NO: 2038020 - RNA, 19 nt, Homo sapiens
  misc_RNA (1)...(19): siRNA sense strand
gagaugcagcacacuccua

SEQ ID NO: 2038021 - RNA, 19 nt, Homo sapiens
  misc_RNA (1)...(19): siRNA sense strand
ccaagcagccgccauacca

SEQ ID NO: 2038022 - RNA, 19 nt, Homo sapiens
  misc_RNA (1)...(19): siRNA sense strand
acuccuaauugacaaggua

SEQ ID NO: 2038023 - RNA, 19 nt, Homo sapiens
  misc_RNA (1)...(19): siRNA sense strand
gaaauaugucaucgagucu

SEQ ID NO: 2038024 - RNA, 19 nt, Homo sapiens
  misc_RNA (1)...(19): siRNA sense strand
cauauucuguccuguaucc

SEQ ID NO: 2038025 - RNA, 19 nt, Homo sapiens
  misc_RNA (1)...(19): siRNA sense strand
cgcgaaacaucaucaaugc

SEQ ID NO: 2038026 - RNA, 19 nt, Homo sapiens
  misc_RNA (1)...(19): siRNA sense strand
ccaccuacacugagaccuu

SEQ ID NO: 2038027 - RNA, 19 nt, Homo sapiens
  misc_RNA (1)...(19): siRNA sense strand
cccaggcccuccuucucua

SEQ ID NO: 2038028 - RNA, 19 nt, Homo sapiens
  misc_RNA (1)...(19): siRNA sense strand
aauaugucaucgagucuuc

SEQ ID NO: 2038029 - RNA, 19 nt, Homo sapiens
  misc_RNA (1)...(19): siRNA sense strand
ucuagcauccaacagaauu

SEQ ID NO: 2038030 - RNA, 19 nt, Homo sapiens
  misc_RNA (1)...(19): siRNA sense strand
cugcagaugucaaccaaaa

SEQ ID NO: 2038031 - RNA, 19 nt, Homo sapiens
  misc_RNA (1)...(19): siRNA sense strand
ccaagucuucucaucugaa

SEQ ID NO: 2038032 - RNA, 19 nt, Homo sapiens
  misc_RNA (1)...(19): siRNA sense strand
cucauauucuguccuguau

SEQ ID NO: 2038033 - RNA, 19 nt, Homo sapiens
  misc_RNA (1)...(19): siRNA sense strand
agaugcagcacacuccuaa

SEQ ID NO: 2038034 - RNA, 19 nt, Homo sapiens
  misc_RNA (1)...(19): siRNA sense strand
ucuaacagcagccacaauc

SEQ ID NO: 2038035 - RNA, 19 nt, Homo sapiens
  misc_RNA (1)...(19): siRNA sense strand
ucacggauggagaaauaug

SEQ ID NO: 2038036 - RNA, 19 nt, Homo sapiens
  misc_RNA (1)...(19): siRNA sense strand
cuagagagacgacauuuug

SEQ ID NO: 2038037 - RNA, 19 nt, Homo sapiens
  misc_RNA (1)...(19): siRNA sense strand
ggugucagcagaucaagag

SEQ ID NO: 2038038 - RNA, 19 nt, Homo sapiens
  misc_RNA (1)...(19): siRNA sense strand
cagcagaucaagagauguc

SEQ ID NO: 2038039 - RNA, 19 nt, Homo sapiens
  misc_RNA (1)...(19): siRNA sense strand
gcccaucaccuaccauguc

SEQ ID NO: 2038040 - RNA, 19 nt, Homo sapiens
  misc_RNA (1)...(19): siRNA sense strand
acagacagcggaugagaag

SEQ ID NO: 2038041 - RNA, 19 nt, Homo sapiens
  misc_RNA (1)...(19): siRNA sense strand
cccaagucuucucaucuga

SEQ ID NO: 2038042 - RNA, 19 nt, Homo sapiens
  misc_RNA (1)...(19): siRNA sense strand
gccagucacggauggagaa

SEQ ID NO: 2038043 - RNA, 19 nt, Homo sapiens
  misc_RNA (1)...(19): siRNA sense strand
gcucccugcucauugacau

SEQ ID NO: 2038044 - RNA, 19 nt, Homo sapiens
  misc_RNA (1)...(19): siRNA sense strand
uuuguccucucaccuauca

SEQ ID NO: 2038045 - RNA, 19 nt, Homo sapiens
  misc_RNA (1)...(19): siRNA sense strand
cagccgcaaauccauguuu

SEQ ID NO: 2038046 - RNA, 19 nt, Homo sapiens
  misc_RNA (1)...(19): siRNA sense strand
cggcugaggaggugagaug

SEQ ID NO: 2038047 - RNA, 19 nt, Homo sapiens
  misc_RNA (1)...(19): siRNA sense strand
ggcauccugggcuacaaua

SEQ ID NO: 2038048 - RNA, 19 nt, Homo sapiens
  misc_RNA (1)...(19): siRNA sense strand
gcccaaacccaaccagaac

SEQ ID NO: 2038049 - RNA, 19 nt, Homo sapiens
  misc_RNA (1)...(19): siRNA sense strand
caaauccauguuuacuuuc

SEQ ID NO: 2038050 - RNA, 19 nt, Homo sapiens
  misc_RNA (1)...(19): siRNA sense strand
ccagagaagcuacgcucau

SEQ ID NO: 2038051 - RNA, 19 nt, Homo sapiens
  misc_RNA (1)...(19): siRNA sense strand
augcagcacacuccuaauu

SEQ ID NO: 2038052 - RNA, 19 nt, Homo sapiens
  misc_RNA (1)...(19): siRNA sense strand
ggagagaacuggugcauaa

SEQ ID NO: 2038053 - RNA, 19 nt, Homo sapiens
  misc_RNA (1)...(19): siRNA sense strand
gcacuucccuugccucauu

SEQ ID NO: 2038054 - RNA, 19 nt, Homo sapiens
  misc_RNA (1)...(19): siRNA sense strand
ugacaacacuuacuacaaa

SEQ ID NO: 2038055 - RNA, 19 nt, Homo sapiens
  misc_RNA (1)...(19): siRNA sense strand
ggcaagaacuguggaaaua

SEQ ID NO: 2038056 - RNA, 19 nt, Homo sapiens
  misc_RNA (1)...(19): siRNA sense strand
gcaagaaggaugauauuaa

SEQ ID NO: 2038057 - RNA, 19 nt, Homo sapiens
  misc_RNA (1)...(19): siRNA sense strand
gagaauggcugagguagaa

SEQ ID NO: 2038058 - RNA, 19 nt, Homo sapiens
  misc_RNA (1)...(19): siRNA sense strand
ggacgaaccgguagugaua

SEQ ID NO: 2038059 - RNA, 19 nt, Homo sapiens
  misc_RNA (1)...(19): siRNA sense strand
gaaauucuacccucuaaga

SEQ ID NO: 2038060 - RNA, 19 nt, Homo sapiens
  misc_RNA (1)...(19): siRNA sense strand
ggaugaacacuuugaauuu

SEQ ID NO: 2038061 - RNA, 19 nt, Homo sapiens
  misc_RNA (1)...(19): siRNA sense strand
agacaaagaacgucaguua

SEQ ID NO: 2038062 - RNA, 19 nt, Homo sapiens
  misc_RNA (1)...(19): siRNA sense strand
gaacuuuacaucugaacua

SEQ ID NO: 2038063 - RNA, 19 nt, Homo sapiens
  misc_RNA (1)...(19): siRNA sense strand
caagaacuguggaaauaug

SEQ ID NO: 2038064 - RNA, 19 nt, Homo sapiens
  misc_RNA (1)...(19): siRNA sense strand
cugaggagcucgagaaauu

SEQ ID NO: 2038065 - RNA, 19 nt, Homo sapiens
  misc_RNA (1)...(19): siRNA sense strand
caagaaaccaccugugaaa

SEQ ID NO: 2038066 - RNA, 19 nt, Homo sapiens
  misc_RNA (1)...(19): siRNA sense strand
gaugaacacuuugaauuuc

SEQ ID NO: 2038067 - RNA, 19 nt, Homo sapiens
  misc_RNA (1)...(19): siRNA sense strand
gcauaaggcaaauccaaua

SEQ ID NO: 2038068 - RNA, 19 nt, Homo sapiens
  misc_RNA (1)...(19): siRNA sense strand
gagcgagaaucaaagaaga

SEQ ID NO: 2038069 - RNA, 19 nt, Homo sapiens
  misc_RNA (1)...(19): siRNA sense strand
caagaaggaugauauuaac

SEQ ID NO: 2038070 - RNA, 19 nt, Homo sapiens
  misc_RNA (1)...(19): siRNA sense strand
gaagagaauggcugaggua

SEQ ID NO: 2038071 - RNA, 19 nt, Homo sapiens
  misc_RNA (1)...(19): siRNA sense strand
agaagaagguaaagaaugu

SEQ ID NO: 2038072 - RNA, 19 nt, Homo sapiens
  misc_RNA (1)...(19): siRNA sense strand
ccucggauuucaucaauuu

SEQ ID NO: 2038073 - RNA, 19 nt, Homo sapiens
  misc_RNA (1)...(19): siRNA sense strand
uaaagaaugugacccagau

SEQ ID NO: 2038074 - RNA, 19 nt, Homo sapiens
  misc_RNA (1)...(19): siRNA sense strand
caaagaagaugaggaagag

SEQ ID NO: 2038075 - RNA, 19 nt, Homo sapiens
  misc_RNA (1)...(19): siRNA sense strand
ccuaacagauaucauuuga

SEQ ID NO: 2038076 - RNA, 19 nt, Homo sapiens
  misc_RNA (1)...(19): siRNA sense strand
ccauuaaccugccagagaa

SEQ ID NO: 2038077 - RNA, 19 nt, Homo sapiens
  misc_RNA (1)...(19): siRNA sense strand
ugaacuugaucccagaaua

SEQ ID NO: 2038078 - RNA, 19 nt, Homo sapiens
  misc_RNA (1)...(19): siRNA sense strand
gaacugagacagcagaaag

SEQ ID NO: 2038079 - RNA, 19 nt, Homo sapiens
  misc_RNA (1)...(19): siRNA sense strand
gagaaaggcuaaucuucag

SEQ ID NO: 2038080 - RNA, 19 nt, Homo sapiens
  misc_RNA (1)...(19): siRNA sense strand
ugacccagauugaaccuuu

SEQ ID NO: 2038081 - RNA, 19 nt, Homo sapiens
  misc_RNA (1)...(19): siRNA sense strand
gagaagaagguaaagaaug

SEQ ID NO: 2038082 - RNA, 19 nt, Homo sapiens
  misc_RNA (1)...(19): siRNA sense strand
cuaagaaccaggaggaaua

SEQ ID NO: 2038083 - RNA, 19 nt, Homo sapiens
  misc_RNA (1)...(19): siRNA sense strand
aauaugcccuuucucguuu

SEQ ID NO: 2038084 - RNA, 19 nt, Homo sapiens
  misc_RNA (1)...(19): siRNA sense strand
ggaauagggcaaccuguga

SEQ ID NO: 2038085 - RNA, 19 nt, Homo sapiens
  misc_RNA (1)...(19): siRNA sense strand
caaagcacgugaacuugau

SEQ ID NO: 2038086 - RNA, 19 nt, Homo sapiens
  misc_RNA (1)...(19): siRNA sense strand
ucaaacaacauccuaagaa

SEQ ID NO: 2038087 - RNA, 19 nt, Homo sapiens
  misc_RNA (1)...(19): siRNA sense strand
uaagggauguaccauuguu

SEQ ID NO: 2038088 - RNA, 19 nt, Homo sapiens
  misc_RNA (1)...(19): siRNA sense strand
ccagaaagcccagcaguug

SEQ ID NO: 2038089 - RNA, 19 nt, Homo sapiens
  misc_RNA (1)...(19): siRNA sense strand
ggcaggagcuggagaagag

SEQ ID NO: 2038090 - RNA, 19 nt, Homo sapiens
  misc_RNA (1)...(19): siRNA sense strand
caaacaacauccuaagaac

SEQ ID NO: 2038091 - RNA, 19 nt, Homo sapiens
  misc_RNA (1)...(19): siRNA sense strand
caaauccaauacgcaagua

SEQ ID NO: 2038092 - RNA, 19 nt, Homo sapiens
  misc_RNA (1)...(19): siRNA sense strand
caaacaccgucaucucuca

SEQ ID NO: 2038093 - RNA, 19 nt, Homo sapiens
  misc_RNA (1)...(19): siRNA sense strand
gcugugaccugcaaaagua

SEQ ID NO: 2038094 - RNA, 19 nt, Homo sapiens
  misc_RNA (1)...(19): siRNA sense strand
gagcaagaaggaugauauu

SEQ ID NO: 2038095 - RNA, 19 nt, Homo sapiens
  misc_RNA (1)...(19): siRNA sense strand
ggaggaauauaaggaagug

SEQ ID NO: 2038096 - RNA, 19 nt, Homo sapiens
  misc_RNA (1)...(19): siRNA sense strand
gccuguaucucccaaauuc

SEQ ID NO: 2038097 - RNA, 19 nt, Homo sapiens
  misc_RNA (1)...(19): siRNA sense strand
uaaaagaacugcagaaagg

SEQ ID NO: 2038098 - RNA, 19 nt, Homo sapiens
  misc_RNA (1)...(19): siRNA sense strand
acuaagggauguaccauug

SEQ ID NO: 2038099 - RNA, 19 nt, Homo sapiens
  misc_RNA (1)...(19): siRNA sense strand
agaaggauuuggaacagaa

SEQ ID NO: 2038100 - RNA, 19 nt, Homo sapiens
  misc_RNA (1)...(19): siRNA sense strand
gaaagagaagaaaucaguu

SEQ ID NO: 2038101 - RNA, 19 nt, Homo sapiens
  misc_RNA (1)...(19): siRNA sense strand
aacagaggaugaacacuuu

SEQ ID NO: 2038102 - RNA, 19 nt, Homo sapiens
  misc_RNA (1)...(19): siRNA sense strand
gaaaccaccugugaaacca

SEQ ID NO: 2038103 - RNA, 19 nt, Homo sapiens
  misc_RNA (1)...(19): siRNA sense strand
guaccauuguuaagccuuu

SEQ ID NO: 2038104 - RNA, 19 nt, Homo sapiens
  misc_RNA (1)...(19): siRNA sense strand
gaaucaaacaacauccuaa

SEQ ID NO: 2038105 - RNA, 19 nt, Homo sapiens
  misc_RNA (1)...(19): siRNA sense strand
gaaagaaaagcaucaugua

SEQ ID NO: 2038106 - RNA, 19 nt, Homo sapiens
  misc_RNA (1)...(19): siRNA sense strand
ggagcaagaaggaugauau

SEQ ID NO: 2038107 - RNA, 19 nt, Homo sapiens
  misc_RNA (1)...(19): siRNA sense strand
cagagaagaagguaaagaa

SEQ ID NO: 2038108 - RNA, 19 nt, Homo sapiens
  misc_RNA (1)...(19): siRNA sense strand
ccaaagaagaugaggaaga

SEQ ID NO: 2038109 - RNA, 19 nt, Homo sapiens
  misc_RNA (1)...(19): siRNA sense strand
gaacuugaucccagaauac

SEQ ID NO: 2038110 - RNA, 19 nt, Homo sapiens
  misc_RNA (1)...(19): siRNA sense strand
ggaaguugaggcagccaua

SEQ ID NO: 2038111 - RNA, 19 nt, Homo sapiens
  misc_RNA (1)...(19): siRNA sense strand
caaauucuccacucgauuc

SEQ ID NO: 2038112 - RNA, 19 nt, Homo sapiens
  misc_RNA (1)...(19): siRNA sense strand
ggaagcaccagcuggaaga

SEQ ID NO: 2038113 - RNA, 19 nt, Homo sapiens
  misc_RNA (1)...(19): siRNA sense strand
aaacagaggaugaacacuu

SEQ ID NO: 2038114 - RNA, 19 nt, Homo sapiens
  misc_RNA (1)...(19): siRNA sense strand
gaacaauccauuccgucaa

SEQ ID NO: 2038115 - RNA, 19 nt, Homo sapiens
  misc_RNA (1)...(19): siRNA sense strand
gcugagggccuuucugguu

SEQ ID NO: 2038116 - RNA, 19 nt, Homo sapiens
  misc_RNA (1)...(19): siRNA sense strand
ugaccaagauuugcagaga

SEQ ID NO: 2038117 - RNA, 19 nt, Homo sapiens
  misc_RNA (1)...(19): siRNA sense strand
gaagaaggcagugcucauc

SEQ ID NO: 2038118 - RNA, 19 nt, Homo sapiens
  misc_RNA (1)...(19): siRNA sense strand
ugagaaaggcuaaucuuca

SEQ ID NO: 2038119 - RNA, 19 nt, Homo sapiens
  misc_RNA (1)...(19): siRNA sense strand
gaagaacagaauucgaaug

SEQ ID NO: 2038120 - RNA, 19 nt, Homo sapiens
  misc_RNA (1)...(19): siRNA sense strand
gaugaaauucuacccucua

SEQ ID NO: 2038121 - RNA, 19 nt, Homo sapiens
  misc_RNA (1)...(19): siRNA sense strand
caagaaagagaagaaauca

SEQ ID NO: 2038122 - RNA, 19 nt, Homo sapiens
  misc_RNA (1)...(19): siRNA sense strand
ucagcaagcuauugucaca

SEQ ID NO: 2038123 - RNA, 19 nt, Homo sapiens
  misc_RNA (1)...(19): siRNA sense strand
gcuauugucacaccuuuga

SEQ ID NO: 2038124 - RNA, 19 nt, Homo sapiens
  misc_RNA (1)...(19): siRNA sense strand
caaagaacgucaguuacag

SEQ ID NO: 2038125 - RNA, 19 nt, Homo sapiens
  misc_RNA (1)...(19): siRNA sense strand
gaugaaggagauacucaaa

SEQ ID NO: 2038126 - RNA, 19 nt, Homo sapiens
  misc_RNA (1)...(19): siRNA sense strand
gcaagaacuguggaaauau

SEQ ID NO: 2038127 - RNA, 19 nt, Homo sapiens
  misc_RNA (1)...(19): siRNA sense strand
gaacauuugaugaaacagu

SEQ ID NO: 2038128 - RNA, 19 nt, Homo sapiens
  misc_RNA (1)...(19): siRNA sense strand
ggaaagaaaagaacauuug

SEQ ID NO: 2038129 - RNA, 19 nt, Homo sapiens
  misc_RNA (1)...(19): siRNA sense strand
gaacuacgaaagcauccuu

SEQ ID NO: 2038130 - RNA, 19 nt, Homo sapiens
  misc_RNA (1)...(19): siRNA sense strand
gaauagggcaaccugugaa

SEQ ID NO: 2038131 - RNA, 19 nt, Homo sapiens
  misc_RNA (1)...(19): siRNA sense strand
gaauucgaaugcccaccaa

SEQ ID NO: 2038132 - RNA, 19 nt, Homo sapiens
  misc_RNA (1)...(19): siRNA sense strand
ccaaaucaguugacuucca

SEQ ID NO: 2038133 - RNA, 19 nt, Homo sapiens
  misc_RNA (1)...(19): siRNA sense strand
aacaauccauuccgucaaa

SEQ ID NO: 2038134 - RNA, 19 nt, Homo sapiens
  misc_RNA (1)...(19): siRNA sense strand
gcaaauccaauacgcaagu

SEQ ID NO: 2038135 - RNA, 19 nt, Homo sapiens
  misc_RNA (1)...(19): siRNA sense strand
cuacuaagauuuuggaaga

SEQ ID NO: 2038136 - RNA, 19 nt, Homo sapiens
  misc_RNA (1)...(19): siRNA sense strand
gaaccaggaggaauauaag

SEQ ID NO: 2038137 - RNA, 19 nt, Homo sapiens
  misc_RNA (1)...(19): siRNA sense strand
ccaagaaagagaagaaauc

SEQ ID NO: 2038138 - RNA, 19 nt, Homo sapiens
  misc_RNA (1)...(19): siRNA sense strand
ucaccagccuuugcauuga

SEQ ID NO: 2038139 - RNA, 19 nt, Homo sapiens
  misc_RNA (1)...(19): siRNA sense strand
ccaagaaaccaccugugaa

SEQ ID NO: 2038140 - RNA, 19 nt, Homo sapiens
  misc_RNA (1)...(19): siRNA sense strand
gaaugugacccagauugaa

SEQ ID NO: 2038141 - RNA, 19 nt, Homo sapiens
  misc_RNA (1)...(19): siRNA sense strand
acaaagaacgucaguuaca

SEQ ID NO: 2038142 - RNA, 19 nt, Homo sapiens
  misc_RNA (1)...(19): siRNA sense strand
gagaugugccacuccugua

SEQ ID NO: 2038143 - RNA, 19 nt, Homo sapiens
  misc_RNA (1)...(19): siRNA sense strand
agaaagagaagaaaucagu

SEQ ID NO: 2038144 - RNA, 19 nt, Homo sapiens
  misc_RNA (1)...(19): siRNA sense strand
agcaagagcuggagaagag

SEQ ID NO: 2038145 - RNA, 19 nt, Homo sapiens
  misc_RNA (1)...(19): siRNA sense strand
agaaccaggaggaauauaa

SEQ ID NO: 2038146 - RNA, 19 nt, Homo sapiens
  misc_RNA (1)...(19): siRNA sense strand
gagcgaaucaaacaacauc

SEQ ID NO: 2038147 - RNA, 19 nt, Homo sapiens
  misc_RNA (1)...(19): siRNA sense strand
cagaugagcgaaucaaaca

SEQ ID NO: 2038148 - RNA, 19 nt, Homo sapiens
  misc_RNA (1)...(19): siRNA sense strand
gcacagaugagcgaaucaa

SEQ ID NO: 2038149 - RNA, 19 nt, Homo sapiens
  misc_RNA (1)...(19): siRNA sense strand
caccaaaucaguugacuuc

SEQ ID NO: 2038150 - RNA, 19 nt, Homo sapiens
  misc_RNA (1)...(19): siRNA sense strand
ggcaaccugugaagaaauc

SEQ ID NO: 2038151 - RNA, 19 nt, Homo sapiens
  misc_RNA (1)...(19): siRNA sense strand
ugagguagaagcccagaaa

SEQ ID NO: 2038152 - RNA, 19 nt, Homo sapiens
  misc_RNA (1)...(19): siRNA sense strand
gcaagcugcuggccaaaua

SEQ ID NO: 2038153 - RNA, 19 nt, Homo sapiens
  misc_RNA (1)...(19): siRNA sense strand
ccacagagcucaccugcaa

SEQ ID NO: 2038154 - RNA, 19 nt, Homo sapiens
  misc_RNA (1)...(19): siRNA sense strand
gcacauacccuagcgauuu

SEQ ID NO: 2038155 - RNA, 19 nt, Homo sapiens
  misc_RNA (1)...(19): siRNA sense strand
ggacgcugcucgacucuaa

SEQ ID NO: 2038156 - RNA, 19 nt, Homo sapiens
  misc_RNA (1)...(19): siRNA sense strand
uggaauggcucaagaauga

SEQ ID NO: 2038157 - RNA, 19 nt, Homo sapiens
  misc_RNA (1)...(19): siRNA sense strand
ccacacagaucuacuucaa

SEQ ID NO: 2038158 - RNA, 19 nt, Homo sapiens
  misc_RNA (1)...(19): siRNA sense strand
gcacagaagcucucuaugg

SEQ ID NO: 2038159 - RNA, 19 nt, Homo sapiens
  misc_RNA (1)...(19): siRNA sense strand
ucuaagaacugcacagaug

SEQ ID NO: 2038160 - RNA, 19 nt, Homo sapiens
  misc_RNA (1)...(19): siRNA sense strand
gaagggacccagacaguau

SEQ ID NO: 2038161 - RNA, 19 nt, Homo sapiens
  misc_RNA (1)...(19): siRNA sense strand
cgaaaccgcuaauguucaa

SEQ ID NO: 2038162 - RNA, 19 nt, Homo sapiens
  misc_RNA (1)...(19): siRNA sense strand
cacagaagcucucuaugga

SEQ ID NO: 2038163 - RNA, 19 nt, Homo sapiens
  misc_RNA (1)...(19): siRNA sense strand
ucuuugggcuggaggauua

SEQ ID NO: 2038164 - RNA, 19 nt, Homo sapiens
  misc_RNA (1)...(19): siRNA sense strand
gagcucaccugcaagaucu

SEQ ID NO: 2038165 - RNA, 19 nt, Homo sapiens
  misc_RNA (1)...(19): siRNA sense strand
agacaucacugacucaucu

SEQ ID NO: 2038166 - RNA, 19 nt, Homo sapiens
  misc_RNA (1)...(19): siRNA sense strand
ggcaaugacuggcggaugu

SEQ ID NO: 2038167 - RNA, 19 nt, Homo sapiens
  misc_RNA (1)...(19): siRNA sense strand
gagguggaauggcucaaga

SEQ ID NO: 2038168 - RNA, 19 nt, Homo sapiens
  misc_RNA (1)...(19): siRNA sense strand
gaugggcugugcaugcaaa

SEQ ID NO: 2038169 - RNA, 19 nt, Homo sapiens
  misc_RNA (1)...(19): siRNA sense strand
ugaauuacuuugccaccaa

SEQ ID NO: 2038170 - RNA, 19 nt, Homo sapiens
  misc_RNA (1)...(19): siRNA sense strand
ccacaggacgccuacauug

SEQ ID NO: 2038171 - RNA, 19 nt, Homo sapiens
  misc_RNA (1)...(19): siRNA sense strand
ggccaggcauuccagaaga

SEQ ID NO: 2038172 - RNA, 19 nt, Homo sapiens
  misc_RNA (1)...(19): siRNA sense strand
gcaggacuccaccgacaaa

SEQ ID NO: 2038173 - RNA, 19 nt, Homo sapiens
  misc_RNA (1)...(19): siRNA sense strand
cagagccgcugcccuacuu

SEQ ID NO: 2038174 - RNA, 19 nt, Homo sapiens
  misc_RNA (1)...(19): siRNA sense strand
gagccgaaaccgcuaaugu

SEQ ID NO: 2038175 - RNA, 19 nt, Homo sapiens
  misc_RNA (1)...(19): siRNA sense strand
caggacgccuacauuguga

SEQ ID NO: 2038176 - RNA, 19 nt, Homo sapiens
  misc_RNA (1)...(19): siRNA sense strand
gcccgugacuggaucuuuc

SEQ ID NO: 2038177 - RNA, 19 nt, Homo sapiens
  misc_RNA (1)...(19): siRNA sense strand
gagaugggcaagagugaga

SEQ ID NO: 2038178 - RNA, 19 nt, Homo sapiens
  misc_RNA (1)...(19): siRNA sense strand
gaccuuaugccuucaagau

SEQ ID NO: 2038179 - RNA, 19 nt, Homo sapiens
  misc_RNA (1)...(19): siRNA sense strand
gcgagugggucagccagaa

SEQ ID NO: 2038180 - RNA, 19 nt, Homo sapiens
  misc_RNA (1)...(19): siRNA sense strand
caaggacaguuaccacaac

SEQ ID NO: 2038181 - RNA, 19 nt, Homo sapiens
  misc_RNA (1)...(19): siRNA sense strand
gcagguggaggagcucuuu

SEQ ID NO: 2038182 - RNA, 19 nt, Homo sapiens
  misc_RNA (1)...(19): siRNA sense strand
cacauacccuagcgauuuc

SEQ ID NO: 2038183 - RNA, 19 nt, Homo sapiens
  misc_RNA (1)...(19): siRNA sense strand
gcccuccacugcacuuuca

SEQ ID NO: 2038184 - RNA, 19 nt, Homo sapiens
  misc_RNA (1)...(19): siRNA sense strand
gucggacacugccaacuau

SEQ ID NO: 2038185 - RNA, 19 nt, Homo sapiens
  misc_RNA (1)...(19): siRNA sense strand
gcaaguucuacgagaugua

SEQ ID NO: 2038186 - RNA, 19 nt, Homo sapiens
  misc_RNA (1)...(19): siRNA sense strand
acgccuacauugugaagaa

SEQ ID NO: 2038187 - RNA, 19 nt, Homo sapiens
  misc_RNA (1)...(19): siRNA sense strand
gccgaaaccgcuaauguuc

SEQ ID NO: 2038188 - RNA, 19 nt, Homo sapiens
  misc_RNA (1)...(19): siRNA sense strand
uagcacagaagcucucuau

SEQ ID NO: 2038189 - RNA, 19 nt, Homo sapiens
  misc_RNA (1)...(19): siRNA sense strand
ccagaacgaccacgucaca

SEQ ID NO: 2038190 - RNA, 19 nt, Homo sapiens
  misc_RNA (1)...(19): siRNA sense strand
uaauguucaaggacaguua

SEQ ID NO: 2038191 - RNA, 19 nt, Homo sapiens
  misc_RNA (1)...(19): siRNA sense strand
caaguucuacgagauguau

SEQ ID NO: 2038192 - RNA, 19 nt, Homo sapiens
  misc_RNA (1)...(19): siRNA sense strand
ggacggaguggagcaagug

SEQ ID NO: 2038193 - RNA, 19 nt, Homo sapiens
  misc_RNA (1)...(19): siRNA sense strand
gauaugcaacagccuagau

SEQ ID NO: 2038194 - RNA, 19 nt, Homo sapiens
  misc_RNA (1)...(19): siRNA sense strand
ggaaggggagggccagaua

SEQ ID NO: 2038195 - RNA, 19 nt, Homo sapiens
  misc_RNA (1)...(19): siRNA sense strand
gccgugacuucgacacaga

SEQ ID NO: 2038196 - RNA, 19 nt, Homo sapiens
  misc_RNA (1)...(19): siRNA sense strand
cagaugggcugugcaugca

SEQ ID NO: 2038197 - RNA, 19 nt, Homo sapiens
  misc_RNA (1)...(19): siRNA sense strand
gggcaaguucuacgagaug

SEQ ID NO: 2038198 - RNA, 19 nt, Homo sapiens
  misc_RNA (1)...(19): siRNA sense strand
accgguaccugaauuacuu

SEQ ID NO: 2038199 - RNA, 19 nt, Homo sapiens
  misc_RNA (1)...(19): siRNA sense strand
cagauauuccagcugcaua

SEQ ID NO: 2038200 - RNA, 19 nt, Homo sapiens
  misc_RNA (1)...(19): siRNA sense strand
gagccaagcaggcacugau

SEQ ID NO: 2038201 - RNA, 19 nt, Homo sapiens
  misc_RNA (1)...(19): siRNA sense strand
ggaggacacgccuguagca

SEQ ID NO: 2038202 - RNA, 19 nt, Homo sapiens
  misc_RNA (1)...(19): siRNA sense strand
ggucguggcaauccucaug

SEQ ID NO: 2038203 - RNA, 19 nt, Homo sapiens
  misc_RNA (1)...(19): siRNA sense strand
caaugacuggcggauguua

SEQ ID NO: 2038204 - RNA, 19 nt, Homo sapiens
  misc_RNA (1)...(19): siRNA sense strand
ucgccuaccugcgcaagaa

SEQ ID NO: 2038205 - RNA, 19 nt, Homo sapiens
  misc_RNA (1)...(19): siRNA sense strand
ucaaggacaguuaccacaa

SEQ ID NO: 2038206 - RNA, 19 nt, Homo sapiens
  misc_RNA (1)...(19): siRNA sense strand
agaagggacccagacagua

SEQ ID NO: 2038207 - RNA, 19 nt, Homo sapiens
  misc_RNA (1)...(19): siRNA sense strand
uguaucuacucaucaacaa

SEQ ID NO: 2038208 - RNA, 19 nt, Homo sapiens
  misc_RNA (1)...(19): siRNA sense strand
cagaagggacccagacagu

SEQ ID NO: 2038209 - RNA, 19 nt, Homo sapiens
  misc_RNA (1)...(19): siRNA sense strand
gcugggcaccuacguguuc

SEQ ID NO: 2038210 - RNA, 19 nt, Homo sapiens
  misc_RNA (1)...(19): siRNA sense strand
gcaaugacuggcggauguu

SEQ ID NO: 2038211 - RNA, 19 nt, Homo sapiens
  misc_RNA (1)...(19): siRNA sense strand
acaggacgccuacauugug

SEQ ID NO: 2038212 - RNA, 19 nt, Homo sapiens
  misc_RNA (1)...(19): siRNA sense strand
caucaacaaggcagaaagu

SEQ ID NO: 2038213 - RNA, 19 nt, Homo sapiens
  misc_RNA (1)...(19): siRNA sense strand
gcaacugccgugacuucga

SEQ ID NO: 2038214 - RNA, 19 nt, Homo sapiens
  misc_RNA (1)...(19): siRNA sense strand
gggcugugcaugcaaaaua

SEQ ID NO: 2038215 - RNA, 19 nt, Homo sapiens
  misc_RNA (1)...(19): siRNA sense strand
auaccugcguggccaagaa

SEQ ID NO: 2038216 - RNA, 19 nt, Homo sapiens
  misc_RNA (1)...(19): siRNA sense strand
ccaacuuccugcucaccau

SEQ ID NO: 2038217 - RNA, 19 nt, Homo sapiens
  misc_RNA (1)...(19): siRNA sense strand
uggcggauguuagcacaga

SEQ ID NO: 2038218 - RNA, 19 nt, Homo sapiens
  misc_RNA (1)...(19): siRNA sense strand
gaggagccgaaaccgcuaa

SEQ ID NO: 2038219 - RNA, 19 nt, Homo sapiens
  misc_RNA (1)...(19): siRNA sense strand
cagcgucagcggcaccuuu

SEQ ID NO: 2038220 - RNA, 19 nt, Homo sapiens
  misc_RNA (1)...(19): siRNA sense strand
gguggaauggcucaagaau

SEQ ID NO: 2038221 - RNA, 19 nt, Homo sapiens
  misc_RNA (1)...(19): siRNA sense strand
acagagcucaccugcaaga

SEQ ID NO: 2038222 - RNA, 19 nt, Homo sapiens
  misc_RNA (1)...(19): siRNA sense strand
gagauccccuucuaucaca

SEQ ID NO: 2038223 - RNA, 19 nt, Homo sapiens
  misc_RNA (1)...(19): siRNA sense strand
caagaacaucguggccaaa

SEQ ID NO: 2038224 - RNA, 19 nt, Homo sapiens
  misc_RNA (1)...(19): siRNA sense strand
cgagugccuuggaggagau

SEQ ID NO: 2038225 - RNA, 19 nt, Homo sapiens
  misc_RNA (1)...(19): siRNA sense strand
gccacaggacgccuacauu

SEQ ID NO: 2038226 - RNA, 19 nt, Homo sapiens
  misc_RNA (1)...(19): siRNA sense strand
ggcaaguucuacgagaugu

SEQ ID NO: 2038227 - RNA, 19 nt, Homo sapiens
  misc_RNA (1)...(19): siRNA sense strand
cgucaucgucuacgugaau

SEQ ID NO: 2038228 - RNA, 19 nt, Homo sapiens
  misc_RNA (1)...(19): siRNA sense strand
ugacuucgacacagacauc

SEQ ID NO: 2038229 - RNA, 19 nt, Homo sapiens
  misc_RNA (1)...(19): siRNA sense strand
uggaccagcugggcaccua

SEQ ID NO: 2038230 - RNA, 19 nt, Homo sapiens
  misc_RNA (1)...(19): siRNA sense strand
gaugaggagacccugaaca

SEQ ID NO: 2038231 - RNA, 19 nt, Homo sapiens
  misc_RNA (1)...(19): siRNA sense strand
ucaacaaggcagaaaguac

SEQ ID NO: 2038232 - RNA, 19 nt, Homo sapiens
  misc_RNA (1)...(19): siRNA sense strand
ggacccagacaguauugag

SEQ ID NO: 2038233 - RNA, 19 nt, Homo sapiens
  misc_RNA (1)...(19): siRNA sense strand
gccagaagauaugcaacag

SEQ ID NO: 2038234 - RNA, 19 nt, Homo sapiens
  misc_RNA (1)...(19): siRNA sense strand
guccauccgccagaagaua

SEQ ID NO: 2038235 - RNA, 19 nt, Homo sapiens
  misc_RNA (1)...(19): siRNA sense strand
ucacgggcgaguccuauuc

SEQ ID NO: 2038236 - RNA, 19 nt, Homo sapiens
  misc_RNA (1)...(19): siRNA sense strand
cacaggacgccuacauugu

SEQ ID NO: 2038237 - RNA, 19 nt, Homo sapiens
  misc_RNA (1)...(19): siRNA sense strand
uggaggagaugggcaagag

SEQ ID NO: 2038238 - RNA, 19 nt, Homo sapiens
  misc_RNA (1)...(19): siRNA sense strand
guggaauggcucaagaaug

SEQ ID NO: 2038239 - RNA, 19 nt, Homo sapiens
  misc_RNA (1)...(19): siRNA sense strand
ccacccaggacaccaacuu

SEQ ID NO: 2038240 - RNA, 19 nt, Homo sapiens
  misc_RNA (1)...(19): siRNA sense strand
ccaagcaggcacugauucu

SEQ ID NO: 2038241 - RNA, 19 nt, Homo sapiens
  misc_RNA (1)...(19): siRNA sense strand
gcucuaaacugaaggauua

SEQ ID NO: 2038242 - RNA, 19 nt, Homo sapiens
  misc_RNA (1)...(19): siRNA sense strand
ggaggcacaucaacaauuu

SEQ ID NO: 2038243 - RNA, 19 nt, Homo sapiens
  misc_RNA (1)...(19): siRNA sense strand
ucaggaagcugcccaguuu

SEQ ID NO: 2038244 - RNA, 19 nt, Homo sapiens
  misc_RNA (1)...(19): siRNA sense strand
gcaagaagcucauuuuguu

SEQ ID NO: 2038245 - RNA, 19 nt, Homo sapiens
  misc_RNA (1)...(19): siRNA sense strand
ucaagaggcuucaguucua

SEQ ID NO: 2038246 - RNA, 19 nt, Homo sapiens
  misc_RNA (1)...(19): siRNA sense strand
gaacagcacauauggaaau

SEQ ID NO: 2038247 - RNA, 19 nt, Homo sapiens
  misc_RNA (1)...(19): siRNA sense strand
gaacgggguugcagaaaua

SEQ ID NO: 2038248 - RNA, 19 nt, Homo sapiens
  misc_RNA (1)...(19): siRNA sense strand
uaacugugauguauacuga

SEQ ID NO: 2038249 - RNA, 19 nt, Homo sapiens
  misc_RNA (1)...(19): siRNA sense strand
gaacucaggagcauugaaa

SEQ ID NO: 2038250 - RNA, 19 nt, Homo sapiens
  misc_RNA (1)...(19): siRNA sense strand
gaccuuugcucuaaacuga

SEQ ID NO: 2038251 - RNA, 19 nt, Homo sapiens
  misc_RNA (1)...(19): siRNA sense strand
caauggaccuuugcucuaa

SEQ ID NO: 2038252 - RNA, 19 nt, Homo sapiens
  misc_RNA (1)...(19): siRNA sense strand
ggugauaacugugauguau

SEQ ID NO: 2038253 - RNA, 19 nt, Homo sapiens
  misc_RNA (1)...(19): siRNA sense strand
gauccucuuuggcaaguua

SEQ ID NO: 2038254 - RNA, 19 nt, Homo sapiens
  misc_RNA (1)...(19): siRNA sense strand
gcaacuauuucguacuuug

SEQ ID NO: 2038255 - RNA, 19 nt, Homo sapiens
  misc_RNA (1)...(19): siRNA sense strand
guagauggauuacuagcuu

SEQ ID NO: 2038256 - RNA, 19 nt, Homo sapiens
  misc_RNA (1)...(19): siRNA sense strand
gcgagaccuucauccauua

SEQ ID NO: 2038257 - RNA, 19 nt, Homo sapiens
  misc_RNA (1)...(19): siRNA sense strand
gaauugugguguuaguaaa

SEQ ID NO: 2038258 - RNA, 19 nt, Homo sapiens
  misc_RNA (1)...(19): siRNA sense strand
gcauucaggugauuuagug

SEQ ID NO: 2038259 - RNA, 19 nt, Homo sapiens
  misc_RNA (1)...(19): siRNA sense strand
gaaauacccgucuacauca

SEQ ID NO: 2038260 - RNA, 19 nt, Homo sapiens
  misc_RNA (1)...(19): siRNA sense strand
gccgaaggcuaccuaaauu

SEQ ID NO: 2038261 - RNA, 19 nt, Homo sapiens
  misc_RNA (1)...(19): siRNA sense strand
ggaauugugguguuaguaa

SEQ ID NO: 2038262 - RNA, 19 nt, Homo sapiens
  misc_RNA (1)...(19): siRNA sense strand
ggccauggcuguccagaug

SEQ ID NO: 2038263 - RNA, 19 nt, Homo sapiens
  misc_RNA (1)...(19): siRNA sense strand
gaaggauuaugguuuaugg

SEQ ID NO: 2038264 - RNA, 19 nt, Homo sapiens
  misc_RNA (1)...(19): siRNA sense strand
guacagagacuauggaagu

SEQ ID NO: 2038265 - RNA, 19 nt, Homo sapiens
  misc_RNA (1)...(19): siRNA sense strand
acugaaggauuaugguuua

SEQ ID NO: 2038266 - RNA, 19 nt, Homo sapiens
  misc_RNA (1)...(19): siRNA sense strand
gaaagaguacagagacuau

SEQ ID NO: 2038267 - RNA, 19 nt, Homo sapiens
  misc_RNA (1)...(19): siRNA sense strand
gcgcauucuuacacauuua

SEQ ID NO: 2038268 - RNA, 19 nt, Homo sapiens
  misc_RNA (1)...(19): siRNA sense strand
ggaagaagauacugaugac

SEQ ID NO: 2038269 - RNA, 19 nt, Homo sapiens
  misc_RNA (1)...(19): siRNA sense strand
gaucaagucaaccuuugua

SEQ ID NO: 2038270 - RNA, 19 nt, Homo sapiens
  misc_RNA (1)...(19): siRNA sense strand
gggcucgucucaaggaauu

SEQ ID NO: 2038271 - RNA, 19 nt, Homo sapiens
  misc_RNA (1)...(19): siRNA sense strand
uagaggaauugugguguua

SEQ ID NO: 2038272 - RNA, 19 nt, Homo sapiens
  misc_RNA (1)...(19): siRNA sense strand
gcauguugcugauuuuaua

SEQ ID NO: 2038273 - RNA, 19 nt, Homo sapiens
  misc_RNA (1)...(19): siRNA sense strand
caaguccaguguuaaguau

SEQ ID NO: 2038274 - RNA, 19 nt, Homo sapiens
  misc_RNA (1)...(19): siRNA sense strand
aaagccagcugauugaaau

SEQ ID NO: 2038275 - RNA, 19 nt, Homo sapiens
  misc_RNA (1)...(19): siRNA sense strand
ggaaagaguacagagacua

SEQ ID NO: 2038276 - RNA, 19 nt, Homo sapiens
  misc_RNA (1)...(19): siRNA sense strand
augaugagcugcuguuuga

SEQ ID NO: 2038277 - RNA, 19 nt, Homo sapiens
  misc_RNA (1)...(19): siRNA sense strand
ucaaggaauuggagcaaga

SEQ ID NO: 2038278 - RNA, 19 nt, Homo sapiens
  misc_RNA (1)...(19): siRNA sense strand
aagacacucuacagacuua

SEQ ID NO: 2038279 - RNA, 19 nt, Homo sapiens
  misc_RNA (1)...(19): siRNA sense strand
gagaauagugcugcaguuu

SEQ ID NO: 2038280 - RNA, 19 nt, Homo sapiens
  misc_RNA (1)...(19): siRNA sense strand
ccaugcaucuacauucaaa

SEQ ID NO: 2038281 - RNA, 19 nt, Homo sapiens
  misc_RNA (1)...(19): siRNA sense strand
ggaaagccaugccauucag

SEQ ID NO: 2038282 - RNA, 19 nt, Homo sapiens
  misc_RNA (1)...(19): siRNA sense strand
gcuuauagauccuagugau

SEQ ID NO: 2038283 - RNA, 19 nt, Homo sapiens
  misc_RNA (1)...(19): siRNA sense strand
gauuaugucugcuaugcau

SEQ ID NO: 2038284 - RNA, 19 nt, Homo sapiens
  misc_RNA (1)...(19): siRNA sense strand
caagaucaagucaaccuuu

SEQ ID NO: 2038285 - RNA, 19 nt, Homo sapiens
  misc_RNA (1)...(19): siRNA sense strand
gcacugagucucccagcaa

SEQ ID NO: 2038286 - RNA, 19 nt, Homo sapiens
  misc_RNA (1)...(19): siRNA sense strand
cagccaagcauccuaauau

SEQ ID NO: 2038287 - RNA, 19 nt, Homo sapiens
  misc_RNA (1)...(19): siRNA sense strand
auuacuagcuugcaugaaa

SEQ ID NO: 2038288 - RNA, 19 nt, Homo sapiens
  misc_RNA (1)...(19): siRNA sense strand
caagucaaccuuuguagau

SEQ ID NO: 2038289 - RNA, 19 nt, Homo sapiens
  misc_RNA (1)...(19): siRNA sense strand
gaagacaggaagacucaau

SEQ ID NO: 2038290 - RNA, 19 nt, Homo sapiens
  misc_RNA (1)...(19): siRNA sense strand
agaaauacccgucuacauc

SEQ ID NO: 2038291 - RNA, 19 nt, Homo sapiens
  misc_RNA (1)...(19): siRNA sense strand
gaagacacucuacagacuu

SEQ ID NO: 2038292 - RNA, 19 nt, Homo sapiens
  misc_RNA (1)...(19): siRNA sense strand
cuuuguagauggauuacua

SEQ ID NO: 2038293 - RNA, 19 nt, Homo sapiens
  misc_RNA (1)...(19): siRNA sense strand
cagaagcaguguuaaaugc

SEQ ID NO: 2038294 - RNA, 19 nt, Homo sapiens
  misc_RNA (1)...(19): siRNA sense strand
caucagaagcaguguuaaa

SEQ ID NO: 2038295 - RNA, 19 nt, Homo sapiens
  misc_RNA (1)...(19): siRNA sense strand
cuauggaagugauaaacaa

SEQ ID NO: 2038296 - RNA, 19 nt, Homo sapiens
  misc_RNA (1)...(19): siRNA sense strand
acaaagaggagauggagaa

SEQ ID NO: 2038297 - RNA, 19 nt, Homo sapiens
  misc_RNA (1)...(19): siRNA sense strand
gugaacagcacauauggaa

SEQ ID NO: 2038298 - RNA, 19 nt, Homo sapiens
  misc_RNA (1)...(19): siRNA sense strand
gaacgugcuauuucaaaca

SEQ ID NO: 2038299 - RNA, 19 nt, Homo sapiens
  misc_RNA (1)...(19): siRNA sense strand
agucagacaucaagagguu

SEQ ID NO: 2038300 - RNA, 19 nt, Homo sapiens
  misc_RNA (1)...(19): siRNA sense strand
ggaacgugcuauuucaaac

SEQ ID NO: 2038301 - RNA, 19 nt, Homo sapiens
  misc_RNA (1)...(19): siRNA sense strand
uggaacaggugcaggcauu

SEQ ID NO: 2038302 - RNA, 19 nt, Homo sapiens
  misc_RNA (1)...(19): siRNA sense strand
acagagagcaaaccaagaa

SEQ ID NO: 2038303 - RNA, 19 nt, Homo sapiens
  misc_RNA (1)...(19): siRNA sense strand
ggagaagacgucagcacuu

SEQ ID NO: 2038304 - RNA, 19 nt, Homo sapiens
  misc_RNA (1)...(19): siRNA sense strand
ugauaacugugauguauac

SEQ ID NO: 2038305 - RNA, 19 nt, Homo sapiens
  misc_RNA (1)...(19): siRNA sense strand
ggaaucagacuggaacugu

SEQ ID NO: 2038306 - RNA, 19 nt, Homo sapiens
  misc_RNA (1)...(19): siRNA sense strand
gcuuugaucucuguaauac

SEQ ID NO: 2038307 - RNA, 19 nt, Homo sapiens
  misc_RNA (1)...(19): siRNA sense strand
uggcaacuauuucguacuu

SEQ ID NO: 2038308 - RNA, 19 nt, Homo sapiens
  misc_RNA (1)...(19): siRNA sense strand
ugaagacacucuacagacu

SEQ ID NO: 2038309 - RNA, 19 nt, Homo sapiens
  misc_RNA (1)...(19): siRNA sense strand
gugagaaccugaagacacu

SEQ ID NO: 2038310 - RNA, 19 nt, Homo sapiens
  misc_RNA (1)...(19): siRNA sense strand
ugcgagaccuucauccauu

SEQ ID NO: 2038311 - RNA, 19 nt, Homo sapiens
  misc_RNA (1)...(19): siRNA sense strand
ccucaguccuucaguguca

SEQ ID NO: 2038312 - RNA, 19 nt, Homo sapiens
  misc_RNA (1)...(19): siRNA sense strand
aaagugaacagcacauaug

SEQ ID NO: 2038313 - RNA, 19 nt, Homo sapiens
  misc_RNA (1)...(19): siRNA sense strand
ccauuacaguuaaagugaa

SEQ ID NO: 2038314 - RNA, 19 nt, Homo sapiens
  misc_RNA (1)...(19): siRNA sense strand
gcaaugauggcaguuggaa

SEQ ID NO: 2038315 - RNA, 19 nt, Homo sapiens
  misc_RNA (1)...(19): siRNA sense strand
gaaauguaaauguccuguu

SEQ ID NO: 2038316 - RNA, 19 nt, Homo sapiens
  misc_RNA (1)...(19): siRNA sense strand
gaggaauugugguguuagu

SEQ ID NO: 2038317 - RNA, 19 nt, Homo sapiens
  misc_RNA (1)...(19): siRNA sense strand
gguaggcuuugaucucugu

SEQ ID NO: 2038318 - RNA, 19 nt, Homo sapiens
  misc_RNA (1)...(19): siRNA sense strand
cagcagcccuggugauaac

SEQ ID NO: 2038319 - RNA, 19 nt, Homo sapiens
  misc_RNA (1)...(19): siRNA sense strand
gaacaggaggcacaucaac

SEQ ID NO: 2038320 - RNA, 19 nt, Homo sapiens
  misc_RNA (1)...(19): siRNA sense strand
acaggcagguucacaagau

SEQ ID NO: 2038321 - RNA, 19 nt, Homo sapiens
  misc_RNA (1)...(19): siRNA sense strand
uacaucagaagcaguguua

SEQ ID NO: 2038322 - RNA, 19 nt, Homo sapiens
  misc_RNA (1)...(19): siRNA sense strand
uaaagugaacagcacauau

SEQ ID NO: 2038323 - RNA, 19 nt, Homo sapiens
  misc_RNA (1)...(19): siRNA sense strand
ugagaauagugcugcaguu

SEQ ID NO: 2038324 - RNA, 19 nt, Homo sapiens
  misc_RNA (1)...(19): siRNA sense strand
gcagcagcccuggugauaa

SEQ ID NO: 2038325 - RNA, 19 nt, Homo sapiens
  misc_RNA (1)...(19): siRNA sense strand
gaccauggaguccuuggaa

SEQ ID NO: 2038326 - RNA, 19 nt, Homo sapiens
  misc_RNA (1)...(19): siRNA sense strand
ggagauccggaacuucuga

SEQ ID NO: 2038327 - RNA, 19 nt, Homo sapiens
  misc_RNA (1)...(19): siRNA sense strand
aagaucaagucaaccuuug

SEQ ID NO: 2038328 - RNA, 19 nt, Homo sapiens
  misc_RNA (1)...(19): siRNA sense strand
acaaguccaguguuaagua

SEQ ID NO: 2038329 - RNA, 19 nt, Homo sapiens
  misc_RNA (1)...(19): siRNA sense strand
cuucauccauuacccaaga

SEQ ID NO: 2038330 - RNA, 19 nt, Homo sapiens
  misc_RNA (1)...(19): siRNA sense strand
gaacgguuucuuauaacga

SEQ ID NO: 2038331 - RNA, 19 nt, Homo sapiens
  misc_RNA (1)...(19): siRNA sense strand
gcuaugcauucaggugauu

SEQ ID NO: 2038332 - RNA, 19 nt, Homo sapiens
  misc_RNA (1)...(19): siRNA sense strand
ggcagcagcccuggugaua

SEQ ID NO: 2038333 - RNA, 19 nt, Homo sapiens
  misc_RNA (1)...(19): siRNA sense strand
cgagggccauguuuguuuc

SEQ ID NO: 2038334 - RNA, 19 nt, Homo sapiens
  misc_RNA (1)...(19): siRNA sense strand
aagacaagauucucacgau

SEQ ID NO: 2038335 - RNA, 19 nt, Homo sapiens
  misc_RNA (1)...(19): siRNA sense strand
caaccuuuguagauggauu

SEQ ID NO: 2038336 - RNA, 19 nt, Homo sapiens
  misc_RNA (1)...(19): siRNA sense strand
gagauccucuuuggcaagu

SEQ ID NO: 2038337 - RNA, 19 nt, Homo sapiens
  misc_RNA (1)...(19): siRNA sense strand
uuagaggaauugugguguu

SEQ ID NO: 2038338 - RNA, 19 nt, Homo sapiens
  misc_RNA (1)...(19): siRNA sense strand
ggauuacuagcuugcauga

SEQ ID NO: 2038339 - RNA, 19 nt, Homo sapiens
  misc_RNA (1)...(19): siRNA sense strand
agaagauuaugucugcuau

SEQ ID NO: 2038340 - RNA, 19 nt, Homo sapiens
  misc_RNA (1)...(19): siRNA sense strand
gcagagcgacaggcaguga

SEQ ID NO: 2038341 - RNA, 19 nt, Homo sapiens
  misc_RNA (1)...(19): siRNA sense strand
ggagaugacucaaguauuu

SEQ ID NO: 2038342 - RNA, 19 nt, Homo sapiens
  misc_RNA (1)...(19): siRNA sense strand
gaagugaccuuacuggaua

SEQ ID NO: 2038343 - RNA, 19 nt, Homo sapiens
  misc_RNA (1)...(19): siRNA sense strand
gaagaaaucacacuugaaa

SEQ ID NO: 2038344 - RNA, 19 nt, Homo sapiens
  misc_RNA (1)...(19): siRNA sense strand
gaaagaacgagcccgauua

SEQ ID NO: 2038345 - RNA, 19 nt, Homo sapiens
  misc_RNA (1)...(19): siRNA sense strand
gaaaugccauaaagagauu

SEQ ID NO: 2038346 - RNA, 19 nt, Homo sapiens
  misc_RNA (1)...(19): siRNA sense strand
gcucagaaguuccauagaa

SEQ ID NO: 2038347 - RNA, 19 nt, Homo sapiens
  misc_RNA (1)...(19): siRNA sense strand
uaucagagauugagaaugu

SEQ ID NO: 2038348 - RNA, 19 nt, Homo sapiens
  misc_RNA (1)...(19): siRNA sense strand
gaauacgucuuaucuuaug

SEQ ID NO: 2038349 - RNA, 19 nt, Homo sapiens
  misc_RNA (1)...(19): siRNA sense strand
gcacagaugcagauuauga

SEQ ID NO: 2038350 - RNA, 19 nt, Homo sapiens
  misc_RNA (1)...(19): siRNA sense strand
gaauaagcgucuaacagaa

SEQ ID NO: 2038351 - RNA, 19 nt, Homo sapiens
  misc_RNA (1)...(19): siRNA sense strand
ugaaacagaucauagaaga

SEQ ID NO: 2038352 - RNA, 19 nt, Homo sapiens
  misc_RNA (1)...(19): siRNA sense strand
caacacagauagcuuggaa

SEQ ID NO: 2038353 - RNA, 19 nt, Homo sapiens
  misc_RNA (1)...(19): siRNA sense strand
uagaagaaguuacucauga

SEQ ID NO: 2038354 - RNA, 19 nt, Homo sapiens
  misc_RNA (1)...(19): siRNA sense strand
gagcagaugaugaauagua

SEQ ID NO: 2038355 - RNA, 19 nt, Homo sapiens
  misc_RNA (1)...(19): siRNA sense strand
ccacaaguauguauaugaa

SEQ ID NO: 2038356 - RNA, 19 nt, Homo sapiens
  misc_RNA (1)...(19): siRNA sense strand
gaacaggaguuuacugaac

SEQ ID NO: 2038357 - RNA, 19 nt, Homo sapiens
  misc_RNA (1)...(19): siRNA sense strand
gaagcaagauacccagaga

SEQ ID NO: 2038358 - RNA, 19 nt, Homo sapiens
  misc_RNA (1)...(19): siRNA sense strand
gaaagaagcagggucuauu

SEQ ID NO: 2038359 - RNA, 19 nt, Homo sapiens
  misc_RNA (1)...(19): siRNA sense strand
caggauaaaugaugacuug

SEQ ID NO: 2038360 - RNA, 19 nt, Homo sapiens
  misc_RNA (1)...(19): siRNA sense strand
ggucuuggguuuagcauug

SEQ ID NO: 2038361 - RNA, 19 nt, Homo sapiens
  misc_RNA (1)...(19): siRNA sense strand
gauaaaugaugacuugauc

SEQ ID NO: 2038362 - RNA, 19 nt, Homo sapiens
  misc_RNA (1)...(19): siRNA sense strand
ggaguuuacugaacauuuc

SEQ ID NO: 2038363 - RNA, 19 nt, Homo sapiens
  misc_RNA (1)...(19): siRNA sense strand
gaauguccauggauuuguu

SEQ ID NO: 2038364 - RNA, 19 nt, Homo sapiens
  misc_RNA (1)...(19): siRNA sense strand
gaaacaccaacuuacguua

SEQ ID NO: 2038365 - RNA, 19 nt, Homo sapiens
  misc_RNA (1)...(19): siRNA sense strand
gaaaugaauaagcgucuaa

SEQ ID NO: 2038366 - RNA, 19 nt, Homo sapiens
  misc_RNA (1)...(19): siRNA sense strand
gggagcagaugaugaauag

SEQ ID NO: 2038367 - RNA, 19 nt, Homo sapiens
  misc_RNA (1)...(19): siRNA sense strand
gaaggaaaccagugucaga

SEQ ID NO: 2038368 - RNA, 19 nt, Homo sapiens
  misc_RNA (1)...(19): siRNA sense strand
ugaaagacaggauaaauga

SEQ ID NO: 2038369 - RNA, 19 nt, Homo sapiens
  misc_RNA (1)...(19): siRNA sense strand
gaucauagaagaacaaucu

SEQ ID NO: 2038370 - RNA, 19 nt, Homo sapiens
  misc_RNA (1)...(19): siRNA sense strand
gaacauuucacagcuauug

SEQ ID NO: 2038371 - RNA, 19 nt, Homo sapiens
  misc_RNA (1)...(19): siRNA sense strand
ccaggaacauaaauucauu

SEQ ID NO: 2038372 - RNA, 19 nt, Homo sapiens
  misc_RNA (1)...(19): siRNA sense strand
gaaauucagggcuugguuu

SEQ ID NO: 2038373 - RNA, 19 nt, Homo sapiens
  misc_RNA (1)...(19): siRNA sense strand
ggaagacauuuacaaccaa

SEQ ID NO: 2038374 - RNA, 19 nt, Homo sapiens
  misc_RNA (1)...(19): siRNA sense strand
gagauauccuccauguuau

SEQ ID NO: 2038375 - RNA, 19 nt, Homo sapiens
  misc_RNA (1)...(19): siRNA sense strand
cauugaagcuggccaguau

SEQ ID NO: 2038376 - RNA, 19 nt, Homo sapiens
  misc_RNA (1)...(19): siRNA sense strand
gaagacagacagcucagaa

SEQ ID NO: 2038377 - RNA, 19 nt, Homo sapiens
  misc_RNA (1)...(19): siRNA sense strand
gaagcagggucuauuguac

SEQ ID NO: 2038378 - RNA, 19 nt, Homo sapiens
  misc_RNA (1)...(19): siRNA sense strand
agugauagguccagaauug

SEQ ID NO: 2038379 - RNA, 19 nt, Homo sapiens
  misc_RNA (1)...(19): siRNA sense strand
gaagauacaccuccucaag

SEQ ID NO: 2038380 - RNA, 19 nt, Homo sapiens
  misc_RNA (1)...(19): siRNA sense strand
ccauagaacggguuauuaa

SEQ ID NO: 2038381 - RNA, 19 nt, Homo sapiens
  misc_RNA (1)...(19): siRNA sense strand
ugaauaagcgucuaacaga

SEQ ID NO: 2038382 - RNA, 19 nt, Homo sapiens
  misc_RNA (1)...(19): siRNA sense strand
guaacugccuuaaagaaca

SEQ ID NO: 2038383 - RNA, 19 nt, Homo sapiens
  misc_RNA (1)...(19): siRNA sense strand
gcccuaguguagagaaaua

SEQ ID NO: 2038384 - RNA, 19 nt, Homo sapiens
  misc_RNA (1)...(19): siRNA sense strand
ugagaauacugucauccua

SEQ ID NO: 2038385 - RNA, 19 nt, Homo sapiens
  misc_RNA (1)...(19): siRNA sense strand
ggaaaugaauaagcgucua

SEQ ID NO: 2038386 - RNA, 19 nt, Homo sapiens
  misc_RNA (1)...(19): siRNA sense strand
ggaaaugccauaaagagau

SEQ ID NO: 2038387 - RNA, 19 nt, Homo sapiens
  misc_RNA (1)...(19): siRNA sense strand
gauauccuccauguuauua

SEQ ID NO: 2038388 - RNA, 19 nt, Homo sapiens
  misc_RNA (1)...(19): siRNA sense strand
gauggagaaggaauauuua

SEQ ID NO: 2038389 - RNA, 19 nt, Homo sapiens
  misc_RNA (1)...(19): siRNA sense strand
agaaguuacucaugaagaa

SEQ ID NO: 2038390 - RNA, 19 nt, Homo sapiens
  misc_RNA (1)...(19): siRNA sense strand
gggcuugguuucagcauug

SEQ ID NO: 2038391 - RNA, 19 nt, Homo sapiens
  misc_RNA (1)...(19): siRNA sense strand
gaaauuacaagggaaccua

SEQ ID NO: 2038392 - RNA, 19 nt, Homo sapiens
  misc_RNA (1)...(19): siRNA sense strand
uagcaucuauguaaccaaa

SEQ ID NO: 2038393 - RNA, 19 nt, Homo sapiens
  misc_RNA (1)...(19): siRNA sense strand
ugaaguagauguucgugau

SEQ ID NO: 2038394 - RNA, 19 nt, Homo sapiens
  misc_RNA (1)...(19): siRNA sense strand
gugaauacuugggagauuu

SEQ ID NO: 2038395 - RNA, 19 nt, Homo sapiens
  misc_RNA (1)...(19): siRNA sense strand
cggaggaccugcugaucua

SEQ ID NO: 2038396 - RNA, 19 nt, Homo sapiens
  misc_RNA (1)...(19): siRNA sense strand
guauaugaaugauggcuau

SEQ ID NO: 2038397 - RNA, 19 nt, Homo sapiens
  misc_RNA (1)...(19): siRNA sense strand
ggaggaauaucguucaaaa

SEQ ID NO: 2038398 - RNA, 19 nt, Homo sapiens
  misc_RNA (1)...(19): siRNA sense strand
cuuccaagcucuacuguga

SEQ ID NO: 2038399 - RNA, 19 nt, Homo sapiens
  misc_RNA (1)...(19): siRNA sense strand
aaagauauccaggaacaua

SEQ ID NO: 2038400 - RNA, 19 nt, Homo sapiens
  misc_RNA (1)...(19): siRNA sense strand
ggaaacaccaacuuacguu

SEQ ID NO: 2038401 - RNA, 19 nt, Homo sapiens
  misc_RNA (1)...(19): siRNA sense strand
gcucuacugugacuucaga

SEQ ID NO: 2038402 - RNA, 19 nt, Homo sapiens
  misc_RNA (1)...(19): siRNA sense strand
gcacagcuuuacccuaucu

SEQ ID NO: 2038403 - RNA, 19 nt, Homo sapiens
  misc_RNA (1)...(19): siRNA sense strand
ugacaagacuaaagacagu

SEQ ID NO: 2038404 - RNA, 19 nt, Homo sapiens
  misc_RNA (1)...(19): siRNA sense strand
ccacaaaucacaaaugaag

SEQ ID NO: 2038405 - RNA, 19 nt, Homo sapiens
  misc_RNA (1)...(19): siRNA sense strand
cagagagcauugcaccuuu

SEQ ID NO: 2038406 - RNA, 19 nt, Homo sapiens
  misc_RNA (1)...(19): siRNA sense strand
gggauacgcuggaagacau

SEQ ID NO: 2038407 - RNA, 19 nt, Homo sapiens
  misc_RNA (1)...(19): siRNA sense strand
ugagguagauggaagagau

SEQ ID NO: 2038408 - RNA, 19 nt, Homo sapiens
  misc_RNA (1)...(19): siRNA sense strand
gagauaaagggcagucauu

SEQ ID NO: 2038409 - RNA, 19 nt, Homo sapiens
  misc_RNA (1)...(19): siRNA sense strand
cagaagcgaucccucuaug

SEQ ID NO: 2038410 - RNA, 19 nt, Homo sapiens
  misc_RNA (1)...(19): siRNA sense strand
ggacaacccacacauugga

SEQ ID NO: 2038411 - RNA, 19 nt, Homo sapiens
  misc_RNA (1)...(19): siRNA sense strand
uggcacagaugcagauuau

SEQ ID NO: 2038412 - RNA, 19 nt, Homo sapiens
  misc_RNA (1)...(19): siRNA sense strand
guacuggucaacacagaua

SEQ ID NO: 2038413 - RNA, 19 nt, Homo sapiens
  misc_RNA (1)...(19): siRNA sense strand
gaagugauagguccagaau

SEQ ID NO: 2038414 - RNA, 19 nt, Homo sapiens
  misc_RNA (1)...(19): siRNA sense strand
gaaccaauucaaccuguga

SEQ ID NO: 2038415 - RNA, 19 nt, Homo sapiens
  misc_RNA (1)...(19): siRNA sense strand
ccaaauccauggaaaauau

SEQ ID NO: 2038416 - RNA, 19 nt, Homo sapiens
  misc_RNA (1)...(19): siRNA sense strand
gaagauggagaaggaauau

SEQ ID NO: 2038417 - RNA, 19 nt, Homo sapiens
  misc_RNA (1)...(19): siRNA sense strand
agaagaaguuacucaugaa

SEQ ID NO: 2038418 - RNA, 19 nt, Homo sapiens
  misc_RNA (1)...(19): siRNA sense strand
caaccucuuucaggcuuua

SEQ ID NO: 2038419 - RNA, 19 nt, Homo sapiens
  misc_RNA (1)...(19): siRNA sense strand
gaucguauuauaucgguaa

SEQ ID NO: 2038420 - RNA, 19 nt, Homo sapiens
  misc_RNA (1)...(19): siRNA sense strand
caacgggccuugguuucaa

SEQ ID NO: 2038421 - RNA, 19 nt, Homo sapiens
  misc_RNA (1)...(19): siRNA sense strand
cauuaaagguccuaaaggu

SEQ ID NO: 2038422 - RNA, 19 nt, Homo sapiens
  misc_RNA (1)...(19): siRNA sense strand
gagcauauuuccccacaaa

SEQ ID NO: 2038423 - RNA, 19 nt, Homo sapiens
  misc_RNA (1)...(19): siRNA sense strand
gaagcuggccaguauaaca

SEQ ID NO: 2038424 - RNA, 19 nt, Homo sapiens
  misc_RNA (1)...(19): siRNA sense strand
gauggaagagauuaucauu

SEQ ID NO: 2038425 - RNA, 19 nt, Homo sapiens
  misc_RNA (1)...(19): siRNA sense strand
aaaacgagauuaugaggua

SEQ ID NO: 2038426 - RNA, 19 nt, Homo sapiens
  misc_RNA (1)...(19): siRNA sense strand
cgucuuaucuuaugaacca

SEQ ID NO: 2038427 - RNA, 19 nt, Homo sapiens
  misc_RNA (1)...(19): siRNA sense strand
gauaaagggcagucauuca

SEQ ID NO: 2038428 - RNA, 19 nt, Homo sapiens
  misc_RNA (1)...(19): siRNA sense strand
gaacuucaaauuuggagau

SEQ ID NO: 2038429 - RNA, 19 nt, Homo sapiens
  misc_RNA (1)...(19): siRNA sense strand
ggccuugguuucaacauug

SEQ ID NO: 2038430 - RNA, 19 nt, Homo sapiens
  misc_RNA (1)...(19): siRNA sense strand
auuguacgcuuguauguaa

SEQ ID NO: 2038431 - RNA, 19 nt, Homo sapiens
  misc_RNA (1)...(19): siRNA sense strand
ugacuugaucucagaauuu

SEQ ID NO: 2038432 - RNA, 19 nt, Homo sapiens
  misc_RNA (1)...(19): siRNA sense strand
aaagaacgagcccgauuaa

SEQ ID NO: 2038433 - RNA, 19 nt, Homo sapiens
  misc_RNA (1)...(19): siRNA sense strand
ccucagagcugcuagucau

SEQ ID NO: 2038434 - RNA, 19 nt, Homo sapiens
  misc_RNA (1)...(19): siRNA sense strand
acagacagcucagaaguuc

SEQ ID NO: 2038435 - RNA, 19 nt, Homo sapiens
  misc_RNA (1)...(19): siRNA sense strand
gugaauaacguauguuuag

SEQ ID NO: 2038436 - RNA, 19 nt, Homo sapiens
  misc_RNA (1)...(19): siRNA sense strand
ggaaaccagugucagaaaa

SEQ ID NO: 2038437 - RNA, 19 nt, Homo sapiens
  misc_RNA (1)...(19): siRNA sense strand
aaauuuggauccuguguuc

SEQ ID NO: 2038438 - RNA, 19 nt, Homo sapiens
  misc_RNA (1)...(19): siRNA sense strand
ggaauaucguucaaaacua

SEQ ID NO: 2038439 - RNA, 19 nt, Homo sapiens
  misc_RNA (1)...(19): siRNA sense strand
aaacccaaauccauggaaa

SEQ ID NO: 2038440 - RNA, 19 nt, Homo sapiens
  misc_RNA (1)...(19): siRNA sense strand
uugcacagcuuuacccuau

SEQ ID NO: 2038441 - RNA, 19 nt, Homo sapiens
  misc_RNA (1)...(19): siRNA sense strand
ccagacagauuccuuagua

SEQ ID NO: 2038442 - RNA, 19 nt, Homo sapiens
  misc_RNA (1)...(19): siRNA sense strand
gaaagcgaacuguagauuu

SEQ ID NO: 2038443 - RNA, 19 nt, Homo sapiens
  misc_RNA (1)...(19): siRNA sense strand
ggacagaggaggaggaaga

SEQ ID NO: 2038444 - RNA, 19 nt, Homo sapiens
  misc_RNA (1)...(19): siRNA sense strand
gcaccagacagauuccuua

SEQ ID NO: 2038445 - RNA, 19 nt, Homo sapiens
  misc_RNA (1)...(19): siRNA sense strand
ggagcacccugaugcacua

SEQ ID NO: 2038446 - RNA, 19 nt, Homo sapiens
  misc_RNA (1)...(19): siRNA sense strand
aaagcgaacuguagauuuc

SEQ ID NO: 2038447 - RNA, 19 nt, Homo sapiens
  misc_RNA (1)...(19): siRNA sense strand
agauuucucugaguucuua

SEQ ID NO: 2038448 - RNA, 19 nt, Homo sapiens
  misc_RNA (1)...(19): siRNA sense strand
gaacuguagauuucucuga

SEQ ID NO: 2038449 - RNA, 19 nt, Homo sapiens
  misc_RNA (1)...(19): siRNA sense strand
gacuguauauggccagauu

SEQ ID NO: 2038450 - RNA, 19 nt, Homo sapiens
  misc_RNA (1)...(19): siRNA sense strand
cacauugucuuugauggua

SEQ ID NO: 2038451 - RNA, 19 nt, Homo sapiens
  misc_RNA (1)...(19): siRNA sense strand
ggaagaggaggaagcaaug

SEQ ID NO: 2038452 - RNA, 19 nt, Homo sapiens
  misc_RNA (1)...(19): siRNA sense strand
gaaggaauuagaccaggaa

SEQ ID NO: 2038453 - RNA, 19 nt, Homo sapiens
  misc_RNA (1)...(19): siRNA sense strand
agagauggaugaggaagaa

SEQ ID NO: 2038454 - RNA, 19 nt, Homo sapiens
  misc_RNA (1)...(19): siRNA sense strand
auaccaaccuuccugauuc

SEQ ID NO: 2038455 - RNA, 19 nt, Homo sapiens
  misc_RNA (1)...(19): siRNA sense strand
gggagaggcccaagucaga

SEQ ID NO: 2038456 - RNA, 19 nt, Homo sapiens
  misc_RNA (1)...(19): siRNA sense strand
gcuacaagcaguucacuuc

SEQ ID NO: 2038457 - RNA, 19 nt, Homo sapiens
  misc_RNA (1)...(19): siRNA sense strand
ugaagcugcugccgcuaaa

SEQ ID NO: 2038458 - RNA, 19 nt, Homo sapiens
  misc_RNA (1)...(19): siRNA sense strand
gucccaaucuuccaugaug

SEQ ID NO: 2038459 - RNA, 19 nt, Homo sapiens
  misc_RNA (1)...(19): siRNA sense strand
ucucuacucugucguaaca

SEQ ID NO: 2038460 - RNA, 19 nt, Homo sapiens
  misc_RNA (1)...(19): siRNA sense strand
uaguaguggugacuguaua

SEQ ID NO: 2038461 - RNA, 19 nt, Homo sapiens
  misc_RNA (1)...(19): siRNA sense strand
cgaaagcgaacuguagauu

SEQ ID NO: 2038462 - RNA, 19 nt, Homo sapiens
  misc_RNA (1)...(19): siRNA sense strand
ggcagcacuuugacccuaa

SEQ ID NO: 2038463 - RNA, 19 nt, Homo sapiens
  misc_RNA (1)...(19): siRNA sense strand
ucucugaguucuuaaacau

SEQ ID NO: 2038464 - RNA, 19 nt, Homo sapiens
  misc_RNA (1)...(19): siRNA sense strand
ucugaguucuuaaacauca

SEQ ID NO: 2038465 - RNA, 19 nt, Homo sapiens
  misc_RNA (1)...(19): siRNA sense strand
cugaugcacuagcuaagaa

SEQ ID NO: 2038466 - RNA, 19 nt, Homo sapiens
  misc_RNA (1)...(19): siRNA sense strand
caggaugugaugcuguuua

SEQ ID NO: 2038467 - RNA, 19 nt, Homo sapiens
  misc_RNA (1)...(19): siRNA sense strand
caucaagggcuguacuaug

SEQ ID NO: 2038468 - RNA, 19 nt, Homo sapiens
  misc_RNA (1)...(19): siRNA sense strand
aagcugcugccgcuaaaua

SEQ ID NO: 2038469 - RNA, 19 nt, Homo sapiens
  misc_RNA (1)...(19): siRNA sense strand
gcugcugccgcuaaauaua

SEQ ID NO: 2038470 - RNA, 19 nt, Homo sapiens
  misc_RNA (1)...(19): siRNA sense strand
gcaucuugccgccaugauu

SEQ ID NO: 2038471 - RNA, 19 nt, Homo sapiens
  misc_RNA (1)...(19): siRNA sense strand
caucuugccgccaugauug

SEQ ID NO: 2038472 - RNA, 19 nt, Homo sapiens
  misc_RNA (1)...(19): siRNA sense strand
gggcagggguuguguuaga

SEQ ID NO: 2038473 - RNA, 19 nt, Homo sapiens
  misc_RNA (1)...(19): siRNA sense strand
ucuacucugucguaacaaa

SEQ ID NO: 2038474 - RNA, 19 nt, Homo sapiens
  misc_RNA (1)...(19): siRNA sense strand
gacagauuccuuaguagug

SEQ ID NO: 2038475 - RNA, 19 nt, Homo sapiens
  misc_RNA (1)...(19): siRNA sense strand
cauuggaacagaaggaauu

SEQ ID NO: 2038476 - RNA, 19 nt, Homo sapiens
  misc_RNA (1)...(19): siRNA sense strand
gcagcacuuugacccuaau

SEQ ID NO: 2038477 - RNA, 19 nt, Homo sapiens
  misc_RNA (1)...(19): siRNA sense strand
guagauuucucugaguucu

SEQ ID NO: 2038478 - RNA, 19 nt, Homo sapiens
  misc_RNA (1)...(19): siRNA sense strand
aaucuuccaugaugcacuu

SEQ ID NO: 2038479 - RNA, 19 nt, Homo sapiens
  misc_RNA (1)...(19): siRNA sense strand
gaugugaugcuguuuacca

SEQ ID NO: 2038480 - RNA, 19 nt, Homo sapiens
  misc_RNA (1)...(19): siRNA sense strand
ggaauuagaccaggaaccu

SEQ ID NO: 2038481 - RNA, 19 nt, Homo sapiens
  misc_RNA (1)...(19): siRNA sense strand
gauuccacuuccugcguuu

SEQ ID NO: 2038482 - RNA, 19 nt, Homo sapiens
  misc_RNA (1)...(19): siRNA sense strand
gauuggcaccagacagauu

SEQ ID NO: 2038483 - RNA, 19 nt, Homo sapiens
  misc_RNA (1)...(19): siRNA sense strand
acacugugcugagaagcuu

SEQ ID NO: 2038484 - RNA, 19 nt, Homo sapiens
  misc_RNA (1)...(19): siRNA sense strand
ccaaggcccugagagugau

SEQ ID NO: 2038485 - RNA, 19 nt, Homo sapiens
  misc_RNA (1)...(19): siRNA sense strand
aucaagggcuguacuaugg

SEQ ID NO: 2038486 - RNA, 19 nt, Homo sapiens
  misc_RNA (1)...(19): siRNA sense strand
caaagucagcagagaccuu

SEQ ID NO: 2038487 - RNA, 19 nt, Homo sapiens
  misc_RNA (1)...(19): siRNA sense strand
ggugaaggccagucaaacu

SEQ ID NO: 2038488 - RNA, 19 nt, Homo sapiens
  misc_RNA (1)...(19): siRNA sense strand
cccaggaugugaugcuguu

SEQ ID NO: 2038489 - RNA, 19 nt, Homo sapiens
  misc_RNA (1)...(19): siRNA sense strand
aauaccaaccuuccugauu

SEQ ID NO: 2038490 - RNA, 19 nt, Homo sapiens
  misc_RNA (1)...(19): siRNA sense strand
ggaggaagaggaggaagca

SEQ ID NO: 2038491 - RNA, 19 nt, Homo sapiens
  misc_RNA (1)...(19): siRNA sense strand
cagacagauuccuuaguag

SEQ ID NO: 2038492 - RNA, 19 nt, Homo sapiens
  misc_RNA (1)...(19): siRNA sense strand
gccgaaagcgaacuguaga

SEQ ID NO: 2038493 - RNA, 19 nt, Homo sapiens
  misc_RNA (1)...(19): siRNA sense strand
uggaacagaaggaauuaga

SEQ ID NO: 2038494 - RNA, 19 nt, Homo sapiens
  misc_RNA (1)...(19): siRNA sense strand
caaccugaaggcccugcua

SEQ ID NO: 2038495 - RNA, 19 nt, Homo sapiens
  misc_RNA (1)...(19): siRNA sense strand
ggaggaggaagaggaggaa

SEQ ID NO: 2038496 - RNA, 19 nt, Homo sapiens
  misc_RNA (1)...(19): siRNA sense strand
ugaggaagaaucugacgau

SEQ ID NO: 2038497 - RNA, 19 nt, Homo sapiens
  misc_RNA (1)...(19): siRNA sense strand
ugaaaucucccuggucaag

SEQ ID NO: 2038498 - RNA, 19 nt, Homo sapiens
  misc_RNA (1)...(19): siRNA sense strand
cuguagauuucucugaguu

SEQ ID NO: 2038499 - RNA, 19 nt, Homo sapiens
  misc_RNA (1)...(19): siRNA sense strand
caucucggguugaaaucuc

SEQ ID NO: 2038500 - RNA, 19 nt, Homo sapiens
  misc_RNA (1)...(19): siRNA sense strand
gccagaacccaggauguga

SEQ ID NO: 2038501 - RNA, 19 nt, Homo sapiens
  misc_RNA (1)...(19): siRNA sense strand
uggaugaggaagaaucuga

SEQ ID NO: 2038502 - RNA, 19 nt, Homo sapiens
  misc_RNA (1)...(19): siRNA sense strand
gcacccugaugcacuagcu

SEQ ID NO: 2038503 - RNA, 19 nt, Homo sapiens
  misc_RNA (1)...(19): siRNA sense strand
gcagagucgguagacauga

SEQ ID NO: 2038504 - RNA, 19 nt, Homo sapiens
  misc_RNA (1)...(19): siRNA sense strand
agacagauuccuuaguagu

SEQ ID NO: 2038505 - RNA, 19 nt, Homo sapiens
  misc_RNA (1)...(19): siRNA sense strand
gaagaggaggaagcaaugg

SEQ ID NO: 2038506 - RNA, 19 nt, Homo sapiens
  misc_RNA (1)...(19): siRNA sense strand
cuacaagcaguucacuuca

SEQ ID NO: 2038507 - RNA, 19 nt, Homo sapiens
  misc_RNA (1)...(19): siRNA sense strand
acauugucuuugaugguaa

SEQ ID NO: 2038508 - RNA, 19 nt, Homo sapiens
  misc_RNA (1)...(19): siRNA sense strand
gugcagagucgguagacau

SEQ ID NO: 2038509 - RNA, 19 nt, Homo sapiens
  misc_RNA (1)...(19): siRNA sense strand
gaacccaggaugugaugcu

SEQ ID NO: 2038510 - RNA, 19 nt, Homo sapiens
  misc_RNA (1)...(19): siRNA sense strand
cugcugccgcuaaauauau

SEQ ID NO: 2038511 - RNA, 19 nt, Homo sapiens
  misc_RNA (1)...(19): siRNA sense strand
gauggaugaggaagaaucu

SEQ ID NO: 2038512 - RNA, 19 nt, Homo sapiens
  misc_RNA (1)...(19): siRNA sense strand
gagcucugucuucuugaug

SEQ ID NO: 2038513 - RNA, 19 nt, Homo sapiens
  misc_RNA (1)...(19): siRNA sense strand
gggucccaaucuuccauga

SEQ ID NO: 2038514 - RNA, 19 nt, Homo sapiens
  misc_RNA (1)...(19): siRNA sense strand
ggaacagaaggaauuagac

SEQ ID NO: 2038515 - RNA, 19 nt, Homo sapiens
  misc_RNA (1)...(19): siRNA sense strand
gccgaaaccucaugaguua

SEQ ID NO: 2038516 - RNA, 19 nt, Homo sapiens
  misc_RNA (1)...(19): siRNA sense strand
gagcaaugauacaggauua

SEQ ID NO: 2038517 - RNA, 19 nt, Homo sapiens
  misc_RNA (1)...(19): siRNA sense strand
gaucaacacaguuucauuu

SEQ ID NO: 2038518 - RNA, 19 nt, Homo sapiens
  misc_RNA (1)...(19): siRNA sense strand
ggacuaugauaaugaguug

SEQ ID NO: 2038519 - RNA, 19 nt, Homo sapiens
  misc_RNA (1)...(19): siRNA sense strand
gaauaccucuugaaaucuu

SEQ ID NO: 2038520 - RNA, 19 nt, Homo sapiens
  misc_RNA (1)...(19): siRNA sense strand
ccacauaucuccucuacca

SEQ ID NO: 2038521 - RNA, 19 nt, Homo sapiens
  misc_RNA (1)...(19): siRNA sense strand
gauaggagauguggaagau

SEQ ID NO: 2038522 - RNA, 19 nt, Homo sapiens
  misc_RNA (1)...(19): siRNA sense strand
ccagaugguugguuugauu

SEQ ID NO: 2038523 - RNA, 19 nt, Homo sapiens
  misc_RNA (1)...(19): siRNA sense strand
ggauacacuugcaauaaug

SEQ ID NO: 2038524 - RNA, 19 nt, Homo sapiens
  misc_RNA (1)...(19): siRNA sense strand
aagaagaccuagaaauguu

SEQ ID NO: 2038525 - RNA, 19 nt, Homo sapiens
  misc_RNA (1)...(19): siRNA sense strand
agugagaccuguaaauauu

SEQ ID NO: 2038526 - RNA, 19 nt, Homo sapiens
  misc_RNA (1)...(19): siRNA sense strand
gcaaucguguaccugauga

SEQ ID NO: 2038527 - RNA, 19 nt, Homo sapiens
  misc_RNA (1)...(19): siRNA sense strand
cuagggaacuacucauuga

SEQ ID NO: 2038528 - RNA, 19 nt, Homo sapiens
  misc_RNA (1)...(19): siRNA sense strand
gaagaccuagaaauguuua

SEQ ID NO: 2038529 - RNA, 19 nt, Homo sapiens
  misc_RNA (1)...(19): siRNA sense strand
gguacucccugcccuuaaa

SEQ ID NO: 2038530 - RNA, 19 nt, Homo sapiens
  misc_RNA (1)...(19): siRNA sense strand
ucagugagaccuguaaaua

SEQ ID NO: 2038531 - RNA, 19 nt, Homo sapiens
  misc_RNA (1)...(19): siRNA sense strand
caacacaguuucauuugac

SEQ ID NO: 2038532 - RNA, 19 nt, Homo sapiens
  misc_RNA (1)...(19): siRNA sense strand
gaauugccauggaaggaau

SEQ ID NO: 2038533 - RNA, 19 nt, Homo sapiens
  misc_RNA (1)...(19): siRNA sense strand
gaccagaguuaguggaauc

SEQ ID NO: 2038534 - RNA, 19 nt, Homo sapiens
  misc_RNA (1)...(19): siRNA sense strand
ccagauacauguucacaac

SEQ ID NO: 2038535 - RNA, 19 nt, Homo sapiens
  misc_RNA (1)...(19): siRNA sense strand
gggcuggacuccuucuaug

SEQ ID NO: 2038536 - RNA, 19 nt, Homo sapiens
  misc_RNA (1)...(19): siRNA sense strand
augaauaccucuugaaauc

SEQ ID NO: 2038537 - RNA, 19 nt, Homo sapiens
  misc_RNA (1)...(19): siRNA sense strand
gcgggaagccugcaaugaa

SEQ ID NO: 2038538 - RNA, 19 nt, Homo sapiens
  misc_RNA (1)...(19): siRNA sense strand
caacagagggacacauugu

SEQ ID NO: 2038539 - RNA, 19 nt, Homo sapiens
  misc_RNA (1)...(19): siRNA sense strand
cgaaaccucaugaguuaaa

SEQ ID NO: 2038540 - RNA, 19 nt, Homo sapiens
  misc_RNA (1)...(19): siRNA sense strand
gaugguugguuugauuuga

SEQ ID NO: 2038541 - RNA, 19 nt, Homo sapiens
  misc_RNA (1)...(19): siRNA sense strand
caaaucugaacaucaauga

SEQ ID NO: 2038542 - RNA, 19 nt, Homo sapiens
  misc_RNA (1)...(19): siRNA sense strand
uggauacacuugcaauaau

SEQ ID NO: 2038543 - RNA, 19 nt, Homo sapiens
  misc_RNA (1)...(19): siRNA sense strand
gcaauaaugggaaauucau

SEQ ID NO: 2038544 - RNA, 19 nt, Homo sapiens
  misc_RNA (1)...(19): siRNA sense strand
gcugauaggagauguggaa

SEQ ID NO: 2038545 - RNA, 19 nt, Homo sapiens
  misc_RNA (1)...(19): siRNA sense strand
uuggugacaugacaauuaa

SEQ ID NO: 2038546 - RNA, 19 nt, Homo sapiens
  misc_RNA (1)...(19): siRNA sense strand
gcuguuugaugaagacaau

SEQ ID NO: 2038547 - RNA, 19 nt, Homo sapiens
  misc_RNA (1)...(19): siRNA sense strand
ugagaccuguaaauauuug

SEQ ID NO: 2038548 - RNA, 19 nt, Homo sapiens
  misc_RNA (1)...(19): siRNA sense strand
uguaucugcuguuugauga

SEQ ID NO: 2038549 - RNA, 19 nt, Homo sapiens
  misc_RNA (1)...(19): siRNA sense strand
gagguacucccugcccuua

SEQ ID NO: 2038550 - RNA, 19 nt, Homo sapiens
  misc_RNA (1)...(19): siRNA sense strand
caagacagggauuccauau

SEQ ID NO: 2038551 - RNA, 19 nt, Homo sapiens
  misc_RNA (1)...(19): siRNA sense strand
ggccgaaaccucaugaguu

SEQ ID NO: 2038552 - RNA, 19 nt, Homo sapiens
  misc_RNA (1)...(19): siRNA sense strand
cuucaugccuucuacuaug

SEQ ID NO: 2038553 - RNA, 19 nt, Homo sapiens
  misc_RNA (1)...(19): siRNA sense strand
aaucuuacauucucuuugg

SEQ ID NO: 2038554 - RNA, 19 nt, Homo sapiens
  misc_RNA (1)...(19): siRNA sense strand
gcucacagaauaauaacug

SEQ ID NO: 2038555 - RNA, 19 nt, Homo sapiens
  misc_RNA (1)...(19): siRNA sense strand
ggaauugccauggaaggaa

SEQ ID NO: 2038556 - RNA, 19 nt, Homo sapiens
  misc_RNA (1)...(19): siRNA sense strand
aaagaagaccuagaaaugu

SEQ ID NO: 2038557 - RNA, 19 nt, Homo sapiens
  misc_RNA (1)...(19): siRNA sense strand
uaaggacuaugauaaugag

SEQ ID NO: 2038558 - RNA, 19 nt, Homo sapiens
  misc_RNA (1)...(19): siRNA sense strand
gaauaauaacugacuccaa

SEQ ID NO: 2038559 - RNA, 19 nt, Homo sapiens
  misc_RNA (1)...(19): siRNA sense strand
ugacaauuaaggacuauga

SEQ ID NO: 2038560 - RNA, 19 nt, Homo sapiens
  misc_RNA (1)...(19): siRNA sense strand
ucagaacuacuuaagaaga

SEQ ID NO: 2038561 - RNA, 19 nt, Homo sapiens
  misc_RNA (1)...(19): siRNA sense strand
gaacuacucauugacucuu

SEQ ID NO: 2038562 - RNA, 19 nt, Homo sapiens
  misc_RNA (1)...(19): siRNA sense strand
gcauaucagaguauucaga

SEQ ID NO: 2038563 - RNA, 19 nt, Homo sapiens
  misc_RNA (1)...(19): siRNA sense strand
ccaagacagggauuccaua

SEQ ID NO: 2038564 - RNA, 19 nt, Homo sapiens
  misc_RNA (1)...(19): siRNA sense strand
cagaacuacuuaagaagag

SEQ ID NO: 2038565 - RNA, 19 nt, Homo sapiens
  misc_RNA (1)...(19): siRNA sense strand
guacacaagucuggaacca

SEQ ID NO: 2038566 - RNA, 19 nt, Homo sapiens
  misc_RNA (1)...(19): siRNA sense strand
acaugacaauuaaggacua

SEQ ID NO: 2038567 - RNA, 19 nt, Homo sapiens
  misc_RNA (1)...(19): siRNA sense strand
caacugcaaucguguaccu

SEQ ID NO: 2038568 - RNA, 19 nt, Homo sapiens
  misc_RNA (1)...(19): siRNA sense strand
ugaugaagacaauccagua

SEQ ID NO: 2038569 - RNA, 19 nt, Homo sapiens
  misc_RNA (1)...(19): siRNA sense strand
cauaucagaguauucagaa

SEQ ID NO: 2038570 - RNA, 19 nt, Homo sapiens
  misc_RNA (1)...(19): siRNA sense strand
gaccuagaaauguuuaaug

SEQ ID NO: 2038571 - RNA, 19 nt, Homo sapiens
  misc_RNA (1)...(19): siRNA sense strand
ggagcaaugauacaggauu

SEQ ID NO: 2038572 - RNA, 19 nt, Homo sapiens
  misc_RNA (1)...(19): siRNA sense strand
gcuggacuccuucuaugaa

SEQ ID NO: 2038573 - RNA, 19 nt, Homo sapiens
  misc_RNA (1)...(19): siRNA sense strand
caaugauacaggauuacua

SEQ ID NO: 2038574 - RNA, 19 nt, Homo sapiens
  misc_RNA (1)...(19): siRNA sense strand
gaaaaguacacaaaaguca

SEQ ID NO: 2038575 - RNA, 19 nt, Homo sapiens
  misc_RNA (1)...(19): siRNA sense strand
aaaagaagaccuagaaaug

SEQ ID NO: 2038576 - RNA, 19 nt, Homo sapiens
  misc_RNA (1)...(19): siRNA sense strand
cuugaaaucuuacauucuc

SEQ ID NO: 2038577 - RNA, 19 nt, Homo sapiens
  misc_RNA (1)...(19): siRNA sense strand
uuagugaucaacacaguuu

SEQ ID NO: 2038578 - RNA, 19 nt, Homo sapiens
  misc_RNA (1)...(19): siRNA sense strand
cagugagaccuguaaauau

SEQ ID NO: 2038579 - RNA, 19 nt, Homo sapiens
  misc_RNA (1)...(19): siRNA sense strand
ggacugcaggugcugauag

SEQ ID NO: 2038580 - RNA, 19 nt, Homo sapiens
  misc_RNA (1)...(19): siRNA sense strand
uggacuccuucuaugaaua

SEQ ID NO: 2038581 - RNA, 19 nt, Homo sapiens
  misc_RNA (1)...(19): siRNA sense strand
ugacaccaauaaugagaca

SEQ ID NO: 2038582 - RNA, 19 nt, Homo sapiens
  misc_RNA (1)...(19): siRNA sense strand
uuuggugacaugacaauua

SEQ ID NO: 2038583 - RNA, 19 nt, Homo sapiens
  misc_RNA (1)...(19): siRNA sense strand
gugagaccuguaaauauuu

SEQ ID NO: 2038584 - RNA, 19 nt, Homo sapiens
  misc_RNA (1)...(19): siRNA sense strand
gagaccagaguuaguggaa

SEQ ID NO: 2038585 - RNA, 19 nt, Homo sapiens
  misc_RNA (1)...(19): siRNA sense strand
cuaugaauaccucuugaaa

SEQ ID NO: 2038586 - RNA, 19 nt, Homo sapiens
  misc_RNA (1)...(19): siRNA sense strand
ggccagacgagcagugaaa

SEQ ID NO: 2038587 - RNA, 19 nt, Homo sapiens
  misc_RNA (1)...(19): siRNA sense strand
ugacucuuguugaugcauu

SEQ ID NO: 2038588 - RNA, 19 nt, Homo sapiens
  misc_RNA (1)...(19): siRNA sense strand
auuuguaucugcuguuuga

SEQ ID NO: 2038589 - RNA, 19 nt, Homo sapiens
  misc_RNA (1)...(19): siRNA sense strand
cgggaagccugcaaugaag

SEQ ID NO: 2038590 - RNA, 19 nt, Homo sapiens
  misc_RNA (1)...(19): siRNA sense strand
gggaaauucauccgaguuc

SEQ ID NO: 2038591 - RNA, 19 nt, Homo sapiens
  misc_RNA (1)...(19): siRNA sense strand
cacaacagagggacacauu

SEQ ID NO: 2038592 - RNA, 19 nt, Homo sapiens
  misc_RNA (1)...(19): siRNA sense strand
gaagacaauccaguacaca

SEQ ID NO: 2038593 - RNA, 19 nt, Homo sapiens
  misc_RNA (1)...(19): siRNA sense strand
ggauggagagcuucuuucu

SEQ ID NO: 2038594 - RNA, 19 nt, Homo sapiens
  misc_RNA (1)...(19): siRNA sense strand
ggacuccuucuaugaauac

SEQ ID NO: 2038595 - RNA, 19 nt, Homo sapiens
  misc_RNA (1)...(19): siRNA sense strand
gaaauucauccgaguucca

SEQ ID NO: 2038596 - RNA, 19 nt, Homo sapiens
  misc_RNA (1)...(19): siRNA sense strand
gcgacagauugaccagaug

SEQ ID NO: 2038597 - RNA, 19 nt, Homo sapiens
  misc_RNA (1)...(19): siRNA sense strand
gaaucuaaagacaggaguu

SEQ ID NO: 2038598 - RNA, 19 nt, Homo sapiens
  misc_RNA (1)...(19): siRNA sense strand
acaccuggauugacucucu

SEQ ID NO: 2038599 - RNA, 19 nt, Homo sapiens
  misc_RNA (1)...(19): siRNA sense strand
ggaagccugcaaugaagga

SEQ ID NO: 2038600 - RNA, 19 nt, Homo sapiens
  misc_RNA (1)...(19): siRNA sense strand
gcccuuuggugacaugaca

SEQ ID NO: 2038601 - RNA, 19 nt, Homo sapiens
  misc_RNA (1)...(19): siRNA sense strand
cagaugguugguuugauuu

SEQ ID NO: 2038602 - RNA, 19 nt, Homo sapiens
  misc_RNA (1)...(19): siRNA sense strand
acagagggacacauuguau

SEQ ID NO: 2038603 - RNA, 19 nt, Homo sapiens
  misc_RNA (1)...(19): siRNA sense strand
ccacugagaccagaguuag

SEQ ID NO: 2038604 - RNA, 19 nt, Homo sapiens
  misc_RNA (1)...(19): siRNA sense strand
guucucuucuacccacuga

SEQ ID NO: 2038605 - RNA, 19 nt, Homo sapiens
  misc_RNA (1)...(19): siRNA sense strand
caaagauuccaccguccaa

SEQ ID NO: 2038606 - RNA, 19 nt, Homo sapiens
  misc_RNA (1)...(19): siRNA sense strand
ucaaaucugaacaucaaug

SEQ ID NO: 2038607 - RNA, 19 nt, Homo sapiens
  misc_RNA (1)...(19): siRNA sense strand
ugaagacaauccaguacac

SEQ ID NO: 2038608 - RNA, 19 nt, Homo sapiens
  misc_RNA (1)...(19): siRNA sense strand
gaacaccuggauugacucu

SEQ ID NO: 2038609 - RNA, 19 nt, Homo sapiens
  misc_RNA (1)...(19): siRNA sense strand
agaagaccuagaaauguuu

SEQ ID NO: 2038610 - RNA, 19 nt, Homo sapiens
  misc_RNA (1)...(19): siRNA sense strand
uauccucgggugaaucuaa

SEQ ID NO: 2038611 - RNA, 19 nt, Homo sapiens
  misc_RNA (1)...(19): siRNA sense strand
gcagcccuuuggugacaug

SEQ ID NO: 2038612 - RNA, 19 nt, Homo sapiens
  misc_RNA (1)...(19): siRNA sense strand
cugaugaacaccuggauug

SEQ ID NO: 2038613 - RNA, 19 nt, Homo sapiens
  misc_RNA (1)...(19): siRNA sense strand
gaugaagacaauccaguac

SEQ ID NO: 2038614 - RNA, 19 nt, Homo sapiens
  misc_RNA (1)...(19): siRNA sense strand
caaguuagugaucaacaca

SEQ ID NO: 2038615 - RNA, 19 nt, Homo sapiens
  misc_RNA (1)...(19): siRNA sense strand
gcacaaagaaagugauuua

SEQ ID NO: 2038616 - RNA, 19 nt, Homo sapiens
  misc_RNA (1)...(19): siRNA sense strand
aaacuucagucuccgauua

SEQ ID NO: 2038617 - RNA, 19 nt, Homo sapiens
  misc_RNA (1)...(19): siRNA sense strand
gaaauugacagacgaauau

SEQ ID NO: 2038618 - RNA, 19 nt, Homo sapiens
  misc_RNA (1)...(19): siRNA sense strand
gaaagugauuuaagagaug

SEQ ID NO: 2038619 - RNA, 19 nt, Homo sapiens
  misc_RNA (1)...(19): siRNA sense strand
gaaggcaucucuccugaau

SEQ ID NO: 2038620 - RNA, 19 nt, Homo sapiens
  misc_RNA (1)...(19): siRNA sense strand
agacgaauaucugcauuua

SEQ ID NO: 2038621 - RNA, 19 nt, Homo sapiens
  misc_RNA (1)...(19): siRNA sense strand
gaagaacgacuacaaaaua

SEQ ID NO: 2038622 - RNA, 19 nt, Homo sapiens
  misc_RNA (1)...(19): siRNA sense strand
gacuagaccugaaggaauu

SEQ ID NO: 2038623 - RNA, 19 nt, Homo sapiens
  misc_RNA (1)...(19): siRNA sense strand
gaaaauaguugugcaagaa

SEQ ID NO: 2038624 - RNA, 19 nt, Homo sapiens
  misc_RNA (1)...(19): siRNA sense strand
aaagcaagcugaaaucaau

SEQ ID NO: 2038625 - RNA, 19 nt, Homo sapiens
  misc_RNA (1)...(19): siRNA sense strand
caaacaagcccuccucaga

SEQ ID NO: 2038626 - RNA, 19 nt, Homo sapiens
  misc_RNA (1)...(19): siRNA sense strand
uaaucaggcuguagaagaa

SEQ ID NO: 2038627 - RNA, 19 nt, Homo sapiens
  misc_RNA (1)...(19): siRNA sense strand
gcacuugaacaacacauuu

SEQ ID NO: 2038628 - RNA, 19 nt, Homo sapiens
  misc_RNA (1)...(19): siRNA sense strand
gcaucucuccugaauauuu

SEQ ID NO: 2038629 - RNA, 19 nt, Homo sapiens
  misc_RNA (1)...(19): siRNA sense strand
gaaagaaagcaagcugaaa

SEQ ID NO: 2038630 - RNA, 19 nt, Homo sapiens
  misc_RNA (1)...(19): siRNA sense strand
cuagaguugugaauacaua

SEQ ID NO: 2038631 - RNA, 19 nt, Homo sapiens
  misc_RNA (1)...(19): siRNA sense strand
gaaagcaagcugaaaucaa

SEQ ID NO: 2038632 - RNA, 19 nt, Homo sapiens
  misc_RNA (1)...(19): siRNA sense strand
gaaaauuagugcccucaaa

SEQ ID NO: 2038633 - RNA, 19 nt, Homo sapiens
  misc_RNA (1)...(19): siRNA sense strand
cagaaguaguucagauaaa

SEQ ID NO: 2038634 - RNA, 19 nt, Homo sapiens
  misc_RNA (1)...(19): siRNA sense strand
gaacagaaauggggaacaa

SEQ ID NO: 2038635 - RNA, 19 nt, Homo sapiens
  misc_RNA (1)...(19): siRNA sense strand
uggcugaacuugaugagaa

SEQ ID NO: 2038636 - RNA, 19 nt, Homo sapiens
  misc_RNA (1)...(19): siRNA sense strand
aggcaucucuccugaauau

SEQ ID NO: 2038637 - RNA, 19 nt, Homo sapiens
  misc_RNA (1)...(19): siRNA sense strand
gagauaggaagaacagaaa

SEQ ID NO: 2038638 - RNA, 19 nt, Homo sapiens
  misc_RNA (1)...(19): siRNA sense strand
gauaaaggcuggaaaagca

SEQ ID NO: 2038639 - RNA, 19 nt, Homo sapiens
  misc_RNA (1)...(19): siRNA sense strand
guaaucaggcuguagaaga

SEQ ID NO: 2038640 - RNA, 19 nt, Homo sapiens
  misc_RNA (1)...(19): siRNA sense strand
cagccugcauugcucuuua

SEQ ID NO: 2038641 - RNA, 19 nt, Homo sapiens
  misc_RNA (1)...(19): siRNA sense strand
ugcaagaacugaugcgauu

SEQ ID NO: 2038642 - RNA, 19 nt, Homo sapiens
  misc_RNA (1)...(19): siRNA sense strand
aaacaagcccuccucagaa

SEQ ID NO: 2038643 - RNA, 19 nt, Homo sapiens
  misc_RNA (1)...(19): siRNA sense strand
gagaugauguggugaaaau

SEQ ID NO: 2038644 - RNA, 19 nt, Homo sapiens
  misc_RNA (1)...(19): siRNA sense strand
aacaagcccuccucagaaa

SEQ ID NO: 2038645 - RNA, 19 nt, Homo sapiens
  misc_RNA (1)...(19): siRNA sense strand
ccagaaguaguucagauaa

SEQ ID NO: 2038646 - RNA, 19 nt, Homo sapiens
  misc_RNA (1)...(19): siRNA sense strand
gaagagauaggaagaacag

SEQ ID NO: 2038647 - RNA, 19 nt, Homo sapiens
  misc_RNA (1)...(19): siRNA sense strand
aaagaaagcaagcugaaau

SEQ ID NO: 2038648 - RNA, 19 nt, Homo sapiens
  misc_RNA (1)...(19): siRNA sense strand
gaagaaaagcacaaagaaa

SEQ ID NO: 2038649 - RNA, 19 nt, Homo sapiens
  misc_RNA (1)...(19): siRNA sense strand
ccaagagacauuuaucaga

SEQ ID NO: 2038650 - RNA, 19 nt, Homo sapiens
  misc_RNA (1)...(19): siRNA sense strand
gauaggaagaacagaaaug

SEQ ID NO: 2038651 - RNA, 19 nt, Homo sapiens
  misc_RNA (1)...(19): siRNA sense strand
guaaaaguuucuagaguug

SEQ ID NO: 2038652 - RNA, 19 nt, Homo sapiens
  misc_RNA (1)...(19): siRNA sense strand
agaaauugacagacgaaua

SEQ ID NO: 2038653 - RNA, 19 nt, Homo sapiens
  misc_RNA (1)...(19): siRNA sense strand
gcucuuuagugcacuugaa

SEQ ID NO: 2038654 - RNA, 19 nt, Homo sapiens
  misc_RNA (1)...(19): siRNA sense strand
agaaguaguucagauaaag

SEQ ID NO: 2038655 - RNA, 19 nt, Homo sapiens
  misc_RNA (1)...(19): siRNA sense strand
gaugauguggugaaaauua

SEQ ID NO: 2038656 - RNA, 19 nt, Homo sapiens
  misc_RNA (1)...(19): siRNA sense strand
agacacagauccauuuuga

SEQ ID NO: 2038657 - RNA, 19 nt, Homo sapiens
  misc_RNA (1)...(19): siRNA sense strand
gaacgacuacaaaauauug

SEQ ID NO: 2038658 - RNA, 19 nt, Homo sapiens
  misc_RNA (1)...(19): siRNA sense strand
aaacaacgucagggaauuu

SEQ ID NO: 2038659 - RNA, 19 nt, Homo sapiens
  misc_RNA (1)...(19): siRNA sense strand
ugaaagaaagcaagcugaa

SEQ ID NO: 2038660 - RNA, 19 nt, Homo sapiens
  misc_RNA (1)...(19): siRNA sense strand
uuagugcacuugaacaaca

SEQ ID NO: 2038661 - RNA, 19 nt, Homo sapiens
  misc_RNA (1)...(19): siRNA sense strand
cagagaugauguggugaaa

SEQ ID NO: 2038662 - RNA, 19 nt, Homo sapiens
  misc_RNA (1)...(19): siRNA sense strand
cagcaugcuucgagacugu

SEQ ID NO: 2038663 - RNA, 19 nt, Homo sapiens
  misc_RNA (1)...(19): siRNA sense strand
gcagaaauugacagacgaa

SEQ ID NO: 2038664 - RNA, 19 nt, Homo sapiens
  misc_RNA (1)...(19): siRNA sense strand
ggaagaaaagcacaaagaa

SEQ ID NO: 2038665 - RNA, 19 nt, Homo sapiens
  misc_RNA (1)...(19): siRNA sense strand
gcaagaacugaugcgauuu

SEQ ID NO: 2038666 - RNA, 19 nt, Homo sapiens
  misc_RNA (1)...(19): siRNA sense strand
ggcugaacuugaugagaaa

SEQ ID NO: 2038667 - RNA, 19 nt, Homo sapiens
  misc_RNA (1)...(19): siRNA sense strand
cagcuugaccucagagaug

SEQ ID NO: 2038668 - RNA, 19 nt, Homo sapiens
  misc_RNA (1)...(19): siRNA sense strand
cguaaaaguuucuagaguu

SEQ ID NO: 2038669 - RNA, 19 nt, Homo sapiens
  misc_RNA (1)...(19): siRNA sense strand
gaggugcucuacgaaaucu

SEQ ID NO: 2038670 - RNA, 19 nt, Homo sapiens
  misc_RNA (1)...(19): siRNA sense strand
ggaaggcaucucuccugaa

SEQ ID NO: 2038671 - RNA, 19 nt, Homo sapiens
  misc_RNA (1)...(19): siRNA sense strand
agagacauuuaucagagaa

SEQ ID NO: 2038672 - RNA, 19 nt, Homo sapiens
  misc_RNA (1)...(19): siRNA sense strand
aagagacauuuaucagaga

SEQ ID NO: 2038673 - RNA, 19 nt, Homo sapiens
  misc_RNA (1)...(19): siRNA sense strand
gaaaacaacgucagggaau

SEQ ID NO: 2038674 - RNA, 19 nt, Homo sapiens
  misc_RNA (1)...(19): siRNA sense strand
caagcugaaaucaaugaaa

SEQ ID NO: 2038675 - RNA, 19 nt, Homo sapiens
  misc_RNA (1)...(19): siRNA sense strand
ucaaccaccucaacagaac

SEQ ID NO: 2038676 - RNA, 19 nt, Homo sapiens
  misc_RNA (1)...(19): siRNA sense strand
ggugcucuacgaaaucuuu

SEQ ID NO: 2038677 - RNA, 19 nt, Homo sapiens
  misc_RNA (1)...(19): siRNA sense strand
guucaaccaccucaacaga

SEQ ID NO: 2038678 - RNA, 19 nt, Homo sapiens
  misc_RNA (1)...(19): siRNA sense strand
agagauaggaagaacagaa

SEQ ID NO: 2038679 - RNA, 19 nt, Homo sapiens
  misc_RNA (1)...(19): siRNA sense strand
caagagaagcagaauccau

SEQ ID NO: 2038680 - RNA, 19 nt, Homo sapiens
  misc_RNA (1)...(19): siRNA sense strand
ucuguaagcuuuucuggaa

SEQ ID NO: 2038681 - RNA, 19 nt, Homo sapiens
  misc_RNA (1)...(19): siRNA sense strand
gauuaaagaggagaauaca

SEQ ID NO: 2038682 - RNA, 19 nt, Homo sapiens
  misc_RNA (1)...(19): siRNA sense strand
gaaguaguucagauaaagg

SEQ ID NO: 2038683 - RNA, 19 nt, Homo sapiens
  misc_RNA (1)...(19): siRNA sense strand
uuaaagaggagaauacaac

SEQ ID NO: 2038684 - RNA, 19 nt, Homo sapiens
  misc_RNA (1)...(19): siRNA sense strand
ggagaauacaacugcuguu

SEQ ID NO: 2038685 - RNA, 19 nt, Homo sapiens
  misc_RNA (1)...(19): siRNA sense strand
ucagagaugauguggugaa

SEQ ID NO: 2038686 - RNA, 19 nt, Homo sapiens
  misc_RNA (1)...(19): siRNA sense strand
caccucaacagaacuauuc

SEQ ID NO: 2038687 - RNA, 19 nt, Homo sapiens
  misc_RNA (1)...(19): siRNA sense strand
agacuagaccugaaggaau

SEQ ID NO: 2038688 - RNA, 19 nt, Homo sapiens
  misc_RNA (1)...(19): siRNA sense strand
ccauuuugauccagaagua

SEQ ID NO: 2038689 - RNA, 19 nt, Homo sapiens
  misc_RNA (1)...(19): siRNA sense strand
aaaagacacagauccauuu

SEQ ID NO: 2038690 - RNA, 19 nt, Homo sapiens
  misc_RNA (1)...(19): siRNA sense strand
caucucuccugaauauuuu

SEQ ID NO: 2038691 - RNA, 19 nt, Homo sapiens
  misc_RNA (1)...(19): siRNA sense strand
gauaaaauccuugaauugg

SEQ ID NO: 2038692 - RNA, 19 nt, Homo sapiens
  misc_RNA (1)...(19): siRNA sense strand
gcaagcugaaaucaaugaa

SEQ ID NO: 2038693 - RNA, 19 nt, Homo sapiens
  misc_RNA (1)...(19): siRNA sense strand
uccagaaguaguucagaua

SEQ ID NO: 2038694 - RNA, 19 nt, Homo sapiens
  misc_RNA (1)...(19): siRNA sense strand
uuucuagaguugugaauac

SEQ ID NO: 2038695 - RNA, 19 nt, Homo sapiens
  misc_RNA (1)...(19): siRNA sense strand
caagaacugaugcgauuuu

SEQ ID NO: 2038696 - RNA, 19 nt, Homo sapiens
  misc_RNA (1)...(19): siRNA sense strand
ccacagacuagaccugaag

SEQ ID NO: 2038697 - RNA, 19 nt, Homo sapiens
  misc_RNA (1)...(19): siRNA sense strand
cagacuagaccugaaggaa

SEQ ID NO: 2038698 - RNA, 19 nt, Homo sapiens
  misc_RNA (1)...(19): siRNA sense strand
cuucgagacugugguaauc

SEQ ID NO: 2038699 - RNA, 19 nt, Homo sapiens
  misc_RNA (1)...(19): siRNA sense strand
gucauaaaccuaacagcau

SEQ ID NO: 2038700 - RNA, 19 nt, Homo sapiens
  misc_RNA (1)...(19): siRNA sense strand
gaaaagcacaaagaaagug

SEQ ID NO: 2038701 - RNA, 19 nt, Homo sapiens
  misc_RNA (1)...(19): siRNA sense strand
ggauuuaaaagucacguaa

SEQ ID NO: 2038702 - RNA, 19 nt, Homo sapiens
  misc_RNA (1)...(19): siRNA sense strand
cgauuaaagaggagaauac

SEQ ID NO: 2038703 - RNA, 19 nt, Homo sapiens
  misc_RNA (1)...(19): siRNA sense strand
gacgaauaucugcauuuau

SEQ ID NO: 2038704 - RNA, 19 nt, Homo sapiens
  misc_RNA (1)...(19): siRNA sense strand
cgaccuacaagaggaagaa

SEQ ID NO: 2038705 - RNA, 19 nt, Homo sapiens
  misc_RNA (1)...(19): siRNA sense strand
ugaauuggaaggcaucucu

SEQ ID NO: 2038706 - RNA, 19 nt, Homo sapiens
  misc_RNA (1)...(19): siRNA sense strand
aaauauugaggcccacuug

SEQ ID NO: 2038707 - RNA, 19 nt, Homo sapiens
  misc_RNA (1)...(19): siRNA sense strand
gugguaaucaggcuguaga

SEQ ID NO: 2038708 - RNA, 19 nt, Homo sapiens
  misc_RNA (1)...(19): siRNA sense strand
agaaagcaagcugaaauca

SEQ ID NO: 2038709 - RNA, 19 nt, Homo sapiens
  misc_RNA (1)...(19): siRNA sense strand
ggcuguagaagaacgacua

SEQ ID NO: 2038710 - RNA, 19 nt, Homo sapiens
  misc_RNA (1)...(19): siRNA sense strand
ccgauuaaagaggagaaua

SEQ ID NO: 2038711 - RNA, 19 nt, Homo sapiens
  misc_RNA (1)...(19): siRNA sense strand
gccaagagacauuuaucag

SEQ ID NO: 2038712 - RNA, 19 nt, Homo sapiens
  misc_RNA (1)...(19): siRNA sense strand
gaugauggcucagaucuua

SEQ ID NO: 2038713 - RNA, 19 nt, Homo sapiens
  misc_RNA (1)...(19): siRNA sense strand
gauaaaggcuacagugauu

SEQ ID NO: 2038714 - RNA, 19 nt, Homo sapiens
  misc_RNA (1)...(19): siRNA sense strand
gaguaaaggugaagaagaa

SEQ ID NO: 2038715 - RNA, 19 nt, Homo sapiens
  misc_RNA (1)...(19): siRNA sense strand
gaaaggugcucucccaugu

SEQ ID NO: 2038716 - RNA, 19 nt, Homo sapiens
  misc_RNA (1)...(19): siRNA sense strand
cuuaagaucucaccugaua

SEQ ID NO: 2038717 - RNA, 19 nt, Homo sapiens
  misc_RNA (1)...(19): siRNA sense strand
ggaugaaucuguggaaauu

SEQ ID NO: 2038718 - RNA, 19 nt, Homo sapiens
  misc_RNA (1)...(19): siRNA sense strand
caaccagaauggauccuua

SEQ ID NO: 2038719 - RNA, 19 nt, Homo sapiens
  misc_RNA (1)...(19): siRNA sense strand
gaaauagaaugaugucaac

SEQ ID NO: 2038720 - RNA, 19 nt, Homo sapiens
  misc_RNA (1)...(19): siRNA sense strand
agaaugaugucaacccaua

SEQ ID NO: 2038721 - RNA, 19 nt, Homo sapiens
  misc_RNA (1)...(19): siRNA sense strand
gaauggauccuuaagcaaa

SEQ ID NO: 2038722 - RNA, 19 nt, Homo sapiens
  misc_RNA (1)...(19): siRNA sense strand
caacaccgacauuauuuaa

SEQ ID NO: 2038723 - RNA, 19 nt, Homo sapiens
  misc_RNA (1)...(19): siRNA sense strand
gaaaacaccugaaaucaag

SEQ ID NO: 2038724 - RNA, 19 nt, Homo sapiens
  misc_RNA (1)...(19): siRNA sense strand
aaagauaacgcaagcuaua

SEQ ID NO: 2038725 - RNA, 19 nt, Homo sapiens
  misc_RNA (1)...(19): siRNA sense strand
gaaggaugcucugcagaug

SEQ ID NO: 2038726 - RNA, 19 nt, Homo sapiens
  misc_RNA (1)...(19): siRNA sense strand
ugaagaagaagaagaugua

SEQ ID NO: 2038727 - RNA, 19 nt, Homo sapiens
  misc_RNA (1)...(19): siRNA sense strand
gaauacugaucgauaaugg

SEQ ID NO: 2038728 - RNA, 19 nt, Homo sapiens
  misc_RNA (1)...(19): siRNA sense strand
cugaacaagugauggaaua

SEQ ID NO: 2038729 - RNA, 19 nt, Homo sapiens
  misc_RNA (1)...(19): siRNA sense strand
cagaauggauccuuaagca

SEQ ID NO: 2038730 - RNA, 19 nt, Homo sapiens
  misc_RNA (1)...(19): siRNA sense strand
ccaaugacaccaacugaaa

SEQ ID NO: 2038731 - RNA, 19 nt, Homo sapiens
  misc_RNA (1)...(19): siRNA sense strand
acagauagaaacccaaaua

SEQ ID NO: 2038732 - RNA, 19 nt, Homo sapiens
  misc_RNA (1)...(19): siRNA sense strand
uaagaucucaccugauaaa

SEQ ID NO: 2038733 - RNA, 19 nt, Homo sapiens
  misc_RNA (1)...(19): siRNA sense strand
caaaagaagucacagauag

SEQ ID NO: 2038734 - RNA, 19 nt, Homo sapiens
  misc_RNA (1)...(19): siRNA sense strand
caaaugccagucagaguaa

SEQ ID NO: 2038735 - RNA, 19 nt, Homo sapiens
  misc_RNA (1)...(19): siRNA sense strand
ccugauaguguaauuguua

SEQ ID NO: 2038736 - RNA, 19 nt, Homo sapiens
  misc_RNA (1)...(19): siRNA sense strand
gaagcauuauaggcaauuu

SEQ ID NO: 2038737 - RNA, 19 nt, Homo sapiens
  misc_RNA (1)...(19): siRNA sense strand
gcaauaucauccugacagu

SEQ ID NO: 2038738 - RNA, 19 nt, Homo sapiens
  misc_RNA (1)...(19): siRNA sense strand
agaagaagaagauguagaa

SEQ ID NO: 2038739 - RNA, 19 nt, Homo sapiens
  misc_RNA (1)...(19): siRNA sense strand
ucaaggagaaggagagaaa

SEQ ID NO: 2038740 - RNA, 19 nt, Homo sapiens
  misc_RNA (1)...(19): siRNA sense strand
gaaacuacaaagccaguau

SEQ ID NO: 2038741 - RNA, 19 nt, Homo sapiens
  misc_RNA (1)...(19): siRNA sense strand
ggaaggaugcucugcagau

SEQ ID NO: 2038742 - RNA, 19 nt, Homo sapiens
  misc_RNA (1)...(19): siRNA sense strand
gaucgauaauggauaccaa

SEQ ID NO: 2038743 - RNA, 19 nt, Homo sapiens
  misc_RNA (1)...(19): siRNA sense strand
acaaaugccagucagagua

SEQ ID NO: 2038744 - RNA, 19 nt, Homo sapiens
  misc_RNA (1)...(19): siRNA sense strand
caacgagagaagcauuaua

SEQ ID NO: 2038745 - RNA, 19 nt, Homo sapiens
  misc_RNA (1)...(19): siRNA sense strand
acaccgacauuauuuaagu

SEQ ID NO: 2038746 - RNA, 19 nt, Homo sapiens
  misc_RNA (1)...(19): siRNA sense strand
gcucuaauacugcugauuc

SEQ ID NO: 2038747 - RNA, 19 nt, Homo sapiens
  misc_RNA (1)...(19): siRNA sense strand
cagauagaaacccaaauaa

SEQ ID NO: 2038748 - RNA, 19 nt, Homo sapiens
  misc_RNA (1)...(19): siRNA sense strand
agacagagcaaacagcaaa

SEQ ID NO: 2038749 - RNA, 19 nt, Homo sapiens
  misc_RNA (1)...(19): siRNA sense strand
ccaacaccgacauuauuua

SEQ ID NO: 2038750 - RNA, 19 nt, Homo sapiens
  misc_RNA (1)...(19): siRNA sense strand
gagaagcauuauaggcaau

SEQ ID NO: 2038751 - RNA, 19 nt, Homo sapiens
  misc_RNA (1)...(19): siRNA sense strand
ugacuguucuuacauugau

SEQ ID NO: 2038752 - RNA, 19 nt, Homo sapiens
  misc_RNA (1)...(19): siRNA sense strand
gagcaaacagcaaaagaua

SEQ ID NO: 2038753 - RNA, 19 nt, Homo sapiens
  misc_RNA (1)...(19): siRNA sense strand
gaagaagaagauguagaaa

SEQ ID NO: 2038754 - RNA, 19 nt, Homo sapiens
  misc_RNA (1)...(19): siRNA sense strand
caacucagagaggcaauuu

SEQ ID NO: 2038755 - RNA, 19 nt, Homo sapiens
  misc_RNA (1)...(19): siRNA sense strand
gaaaggaaaaccucugaaa

SEQ ID NO: 2038756 - RNA, 19 nt, Homo sapiens
  misc_RNA (1)...(19): siRNA sense strand
gauaacgcaagcuauagaa

SEQ ID NO: 2038757 - RNA, 19 nt, Homo sapiens
  misc_RNA (1)...(19): siRNA sense strand
gaacaagugauggaauauc

SEQ ID NO: 2038758 - RNA, 19 nt, Homo sapiens
  misc_RNA (1)...(19): siRNA sense strand
gauagaaacccaaauaacc

SEQ ID NO: 2038759 - RNA, 19 nt, Homo sapiens
  misc_RNA (1)...(19): siRNA sense strand
uaaaggugaagaagaagaa

SEQ ID NO: 2038760 - RNA, 19 nt, Homo sapiens
  misc_RNA (1)...(19): siRNA sense strand
aaggugcucucccauguga

SEQ ID NO: 2038761 - RNA, 19 nt, Homo sapiens
  misc_RNA (1)...(19): siRNA sense strand
ggugcucucccaugugaua

SEQ ID NO: 2038762 - RNA, 19 nt, Homo sapiens
  misc_RNA (1)...(19): siRNA sense strand
gagugaaaaugcuuccaua

SEQ ID NO: 2038763 - RNA, 19 nt, Homo sapiens
  misc_RNA (1)...(19): siRNA sense strand
gaaugaugucaacccauaa

SEQ ID NO: 2038764 - RNA, 19 nt, Homo sapiens
  misc_RNA (1)...(19): siRNA sense strand
ucagaaagaaauugucaga

SEQ ID NO: 2038765 - RNA, 19 nt, Homo sapiens
  misc_RNA (1)...(19): siRNA sense strand
gcucagaaagaaauuguca

SEQ ID NO: 2038766 - RNA, 19 nt, Homo sapiens
  misc_RNA (1)...(19): siRNA sense strand
caccugaaaucaagaaagg

SEQ ID NO: 2038767 - RNA, 19 nt, Homo sapiens
  misc_RNA (1)...(19): siRNA sense strand
agaccgugcugcugaacaa

SEQ ID NO: 2038768 - RNA, 19 nt, Homo sapiens
  misc_RNA (1)...(19): siRNA sense strand
gaaacccaaauaaccuuga

SEQ ID NO: 2038769 - RNA, 19 nt, Homo sapiens
  misc_RNA (1)...(19): siRNA sense strand
guaaaggugaagaagaaga

SEQ ID NO: 2038770 - RNA, 19 nt, Homo sapiens
  misc_RNA (1)...(19): siRNA sense strand
ucacagauagaaacccaaa

SEQ ID NO: 2038771 - RNA, 19 nt, Homo sapiens
  misc_RNA (1)...(19): siRNA sense strand
gcgauacuauugagcaacu

SEQ ID NO: 2038772 - RNA, 19 nt, Homo sapiens
  misc_RNA (1)...(19): siRNA sense strand
uaauggauaccaaccagaa

SEQ ID NO: 2038773 - RNA, 19 nt, Homo sapiens
  misc_RNA (1)...(19): siRNA sense strand
aggcuacagugauuccuaa

SEQ ID NO: 2038774 - RNA, 19 nt, Homo sapiens
  misc_RNA (1)...(19): siRNA sense strand
aaagaagucacagauagaa

SEQ ID NO: 2038775 - RNA, 19 nt, Homo sapiens
  misc_RNA (1)...(19): siRNA sense strand
aaccugaaccgaauacuga

SEQ ID NO: 2038776 - RNA, 19 nt, Homo sapiens
  misc_RNA (1)...(19): siRNA sense strand
cgcaagcuauagaacguuu

SEQ ID NO: 2038777 - RNA, 19 nt, Homo sapiens
  misc_RNA (1)...(19): siRNA sense strand
aggaugcucugcagaugaa

SEQ ID NO: 2038778 - RNA, 19 nt, Homo sapiens
  misc_RNA (1)...(19): siRNA sense strand
gcucucccaugugauagaa

SEQ ID NO: 2038779 - RNA, 19 nt, Homo sapiens
  misc_RNA (1)...(19): siRNA sense strand
cagaugaagucagggaauc

SEQ ID NO: 2038780 - RNA, 19 nt, Homo sapiens
  misc_RNA (1)...(19): siRNA sense strand
gacaccaacugaaaagaaa

SEQ ID NO: 2038781 - RNA, 19 nt, Homo sapiens
  misc_RNA (1)...(19): siRNA sense strand
gcaagcuauagaacguuua

SEQ ID NO: 2038782 - RNA, 19 nt, Homo sapiens
  misc_RNA (1)...(19): siRNA sense strand
ccugacaguggcucuaaua

SEQ ID NO: 2038783 - RNA, 19 nt, Homo sapiens
  misc_RNA (1)...(19): siRNA sense strand
caaaaggaaauaagcgaua

SEQ ID NO: 2038784 - RNA, 19 nt, Homo sapiens
  misc_RNA (1)...(19): siRNA sense strand
accgaauacugaucgauaa

SEQ ID NO: 2038785 - RNA, 19 nt, Homo sapiens
  misc_RNA (1)...(19): siRNA sense strand
aaggagacuuugacaaucu

SEQ ID NO: 2038786 - RNA, 19 nt, Homo sapiens
  misc_RNA (1)...(19): siRNA sense strand
gcagaugaagucagggaau

SEQ ID NO: 2038787 - RNA, 19 nt, Homo sapiens
  misc_RNA (1)...(19): siRNA sense strand
caaaagauaacgcaagcua

SEQ ID NO: 2038788 - RNA, 19 nt, Homo sapiens
  misc_RNA (1)...(19): siRNA sense strand
gcugauucugcaacauuua

SEQ ID NO: 2038789 - RNA, 19 nt, Homo sapiens
  misc_RNA (1)...(19): siRNA sense strand
ucugcaacauuuauaagga

SEQ ID NO: 2038790 - RNA, 19 nt, Homo sapiens
  misc_RNA (1)...(19): siRNA sense strand
ggagagaaaacaccugaaa

SEQ ID NO: 2038791 - RNA, 19 nt, Homo sapiens
  misc_RNA (1)...(19): siRNA sense strand
caaacaaaugccagucaga

SEQ ID NO: 2038792 - RNA, 19 nt, Homo sapiens
  misc_RNA (1)...(19): siRNA sense strand
ugucagagcccagaaaaua

SEQ ID NO: 2038793 - RNA, 19 nt, Homo sapiens
  misc_RNA (1)...(19): siRNA sense strand
caccgacauuauuuaaguu

SEQ ID NO: 2038794 - RNA, 19 nt, Homo sapiens
  misc_RNA (1)...(19): siRNA sense strand
cccaacaccgacauuauuu

SEQ ID NO: 2038795 - RNA, 19 nt, Homo sapiens
  misc_RNA (1)...(19): siRNA sense strand
gaagaagaagaagauguag

SEQ ID NO: 2038796 - RNA, 19 nt, Homo sapiens
  misc_RNA (1)...(19): siRNA sense strand
aaccgaauacugaucgaua

SEQ ID NO: 2038797 - RNA, 19 nt, Homo sapiens
  misc_RNA (1)...(19): siRNA sense strand
ucacaaccugaaccgaaua

SEQ ID NO: 2038798 - RNA, 19 nt, Homo sapiens
  misc_RNA (1)...(19): siRNA sense strand
aaacuacaaagccaguauu

SEQ ID NO: 2038799 - RNA, 19 nt, Homo sapiens
  misc_RNA (1)...(19): siRNA sense strand
caacucaacgagagaagca

SEQ ID NO: 2038800 - RNA, 19 nt, Homo sapiens
  misc_RNA (1)...(19): siRNA sense strand
uuacauugaucccaugacu

SEQ ID NO: 2038801 - RNA, 19 nt, Homo sapiens
  misc_RNA (1)...(19): siRNA sense strand
gaugucaacccauaaaucc

SEQ ID NO: 2038802 - RNA, 19 nt, Homo sapiens
  misc_RNA (1)...(19): siRNA sense strand
aaacccaaauaaccuugau

SEQ ID NO: 2038803 - RNA, 19 nt, Homo sapiens
  misc_RNA (1)...(19): siRNA sense strand
acauugaucccaugacuca

SEQ ID NO: 2038804 - RNA, 19 nt, Homo sapiens
  misc_RNA (1)...(19): siRNA sense strand
cuacaaagccaguauuuuc

SEQ ID NO: 2038805 - RNA, 19 nt, Homo sapiens
  misc_RNA (1)...(19): siRNA sense strand
gcaacauuuauaaggauug

SEQ ID NO: 2038806 - RNA, 19 nt, Homo sapiens
  misc_RNA (1)...(19): siRNA sense strand
gaucaaggagaaggagaga

SEQ ID NO: 2038807 - RNA, 19 nt, Homo sapiens
  misc_RNA (1)...(19): siRNA sense strand
ugauaaaggcuacagugau

SEQ ID NO: 2038808 - RNA, 19 nt, Homo sapiens
  misc_RNA (1)...(19): siRNA sense strand
aaauauacgagacccuuau

SEQ ID NO: 2038809 - RNA, 19 nt, Homo sapiens
  misc_RNA (1)...(19): siRNA sense strand
ccauguuugugagcaguuu

SEQ ID NO: 2038810 - RNA, 19 nt, Homo sapiens
  misc_RNA (1)...(19): siRNA sense strand
caaccugaaccgaauacug

SEQ ID NO: 2038811 - RNA, 19 nt, Homo sapiens
  misc_RNA (1)...(19): siRNA sense strand
gugauagaacaaacaaaug

SEQ ID NO: 2038812 - RNA, 19 nt, Homo sapiens
  misc_RNA (1)...(19): siRNA sense strand
gaauuuaggagacauaaga

SEQ ID NO: 2038813 - RNA, 19 nt, Homo sapiens
  misc_RNA (1)...(19): siRNA sense strand
guacgugaaagacgaauuu

SEQ ID NO: 2038814 - RNA, 19 nt, Homo sapiens
  misc_RNA (1)...(19): siRNA sense strand
caacagcguuauugcaaca

SEQ ID NO: 2038815 - RNA, 19 nt, Homo sapiens
  misc_RNA (1)...(19): siRNA sense strand
ugaacaaauuggacaguug

SEQ ID NO: 2038816 - RNA, 19 nt, Homo sapiens
  misc_RNA (1)...(19): siRNA sense strand
cuuaaugacuuucgugaug

SEQ ID NO: 2038817 - RNA, 19 nt, Homo sapiens
  misc_RNA (1)...(19): siRNA sense strand
ccaauaggcaauuuaguau

SEQ ID NO: 2038818 - RNA, 19 nt, Homo sapiens
  misc_RNA (1)...(19): siRNA sense strand
cccaauaggcaauuuagua

SEQ ID NO: 2038819 - RNA, 19 nt, Homo sapiens
  misc_RNA (1)...(19): siRNA sense strand
gcaagaaugggagguguau

SEQ ID NO: 2038820 - RNA, 19 nt, Homo sapiens
  misc_RNA (1)...(19): siRNA sense strand
ugacuuucgugaugaacaa

SEQ ID NO: 2038821 - RNA, 19 nt, Homo sapiens
  misc_RNA (1)...(19): siRNA sense strand
uuaaugacuuucgugauga

SEQ ID NO: 2038822 - RNA, 19 nt, Homo sapiens
  misc_RNA (1)...(19): siRNA sense strand
uaaugacuuucgugaugaa

SEQ ID NO: 2038823 - RNA, 19 nt, Homo sapiens
  misc_RNA (1)...(19): siRNA sense strand
aaacccaauaggcaauuua

SEQ ID NO: 2038824 - RNA, 19 nt, Homo sapiens
  misc_RNA (1)...(19): siRNA sense strand
cugagucuaugaaaccaaa

SEQ ID NO: 2038825 - RNA, 19 nt, Homo sapiens
  misc_RNA (1)...(19): siRNA sense strand
gguguaugcaacagcguua

SEQ ID NO: 2038826 - RNA, 19 nt, Homo sapiens
  misc_RNA (1)...(19): siRNA sense strand
agacaaaauucaacuggaa

SEQ ID NO: 2038827 - RNA, 19 nt, Homo sapiens
  misc_RNA (1)...(19): siRNA sense strand
gugaaagacgaauuuagga

SEQ ID NO: 2038828 - RNA, 19 nt, Homo sapiens
  misc_RNA (1)...(19): siRNA sense strand
gcaacaggcuaacgaaaac

SEQ ID NO: 2038829 - RNA, 19 nt, Homo sapiens
  misc_RNA (1)...(19): siRNA sense strand
auaagaccguugguucuga

SEQ ID NO: 2038830 - RNA, 19 nt, Homo sapiens
  misc_RNA (1)...(19): siRNA sense strand
ggcaauuuaguauuucuga

SEQ ID NO: 2038831 - RNA, 19 nt, Homo sapiens
  misc_RNA (1)...(19): siRNA sense strand
gaaugggagguguaugcaa

SEQ ID NO: 2038832 - RNA, 19 nt, Homo sapiens
  misc_RNA (1)...(19): siRNA sense strand
guaugcaacagcguuauug

SEQ ID NO: 2038833 - RNA, 19 nt, Homo sapiens
  misc_RNA (1)...(19): siRNA sense strand
gggcgaccaguacgugaaa

SEQ ID NO: 2038834 - RNA, 19 nt, Homo sapiens
  misc_RNA (1)...(19): siRNA sense strand
gacgaauuuaggagacaua

SEQ ID NO: 2038835 - RNA, 19 nt, Homo sapiens
  misc_RNA (1)...(19): siRNA sense strand
ggcacagcguuucuugcaa

SEQ ID NO: 2038836 - RNA, 19 nt, Homo sapiens
  misc_RNA (1)...(19): siRNA sense strand
cgugaaagacgaauuuagg

SEQ ID NO: 2038837 - RNA, 19 nt, Homo sapiens
  misc_RNA (1)...(19): siRNA sense strand
guauuucugagucuaugaa

SEQ ID NO: 2038838 - RNA, 19 nt, Homo sapiens
  misc_RNA (1)...(19): siRNA sense strand
agacauaagaccguugguu

SEQ ID NO: 2038839 - RNA, 19 nt, Homo sapiens
  misc_RNA (1)...(19): siRNA sense strand
cgaggcacagcguuucuug

SEQ ID NO: 2038840 - RNA, 19 nt, Homo sapiens
  misc_RNA (1)...(19): siRNA sense strand
cauaagaccguugguucug

SEQ ID NO: 2038841 - RNA, 19 nt, Homo sapiens
  misc_RNA (1)...(19): siRNA sense strand
gaaagaagcccuauaaaug

SEQ ID NO: 2038842 - RNA, 19 nt, Homo sapiens
  misc_RNA (1)...(19): siRNA sense strand
ggaaagccuucacuucuaa

SEQ ID NO: 2038843 - RNA, 19 nt, Homo sapiens
  misc_RNA (1)...(19): siRNA sense strand
gaaacaaccucagaaaugu

SEQ ID NO: 2038844 - RNA, 19 nt, Homo sapiens
  misc_RNA (1)...(19): siRNA sense strand
ggagaaaccuuaugaaugc

SEQ ID NO: 2038845 - RNA, 19 nt, Homo sapiens
  misc_RNA (1)...(19): siRNA sense strand
caucagaggugucaagaaa

SEQ ID NO: 2038846 - RNA, 19 nt, Homo sapiens
  misc_RNA (1)...(19): siRNA sense strand
ggaaaggccuucaacaaca

SEQ ID NO: 2038847 - RNA, 19 nt, Homo sapiens
  misc_RNA (1)...(19): siRNA sense strand
gauguuaucucucuucaga

SEQ ID NO: 2038848 - RNA, 19 nt, Homo sapiens
  misc_RNA (1)...(19): siRNA sense strand
ucaaauaacucacacuaga

SEQ ID NO: 2038849 - RNA, 19 nt, Homo sapiens
  misc_RNA (1)...(19): siRNA sense strand
gagagaagccuuacaaaug

SEQ ID NO: 2038850 - RNA, 19 nt, Homo sapiens
  misc_RNA (1)...(19): siRNA sense strand
ggaaaucguucaguaagaa

SEQ ID NO: 2038851 - RNA, 19 nt, Homo sapiens
  misc_RNA (1)...(19): siRNA sense strand
ggaggaggcugaagucuca

SEQ ID NO: 2038852 - RNA, 19 nt, Homo sapiens
  misc_RNA (1)...(19): siRNA sense strand
gggaaggucuuuauucaga

SEQ ID NO: 2038853 - RNA, 19 nt, Homo sapiens
  misc_RNA (1)...(19): siRNA sense strand
gggaaagccuucacuucua

SEQ ID NO: 2038854 - RNA, 19 nt, Homo sapiens
  misc_RNA (1)...(19): siRNA sense strand
agaaagaccuuaugugugu

SEQ ID NO: 2038855 - RNA, 19 nt, Homo sapiens
  misc_RNA (1)...(19): siRNA sense strand
ggucagcuauucagccaua

SEQ ID NO: 2038856 - RNA, 19 nt, Homo sapiens
  misc_RNA (1)...(19): siRNA sense strand
gaagaaaccagauggaugu

SEQ ID NO: 2038857 - RNA, 19 nt, Homo sapiens
  misc_RNA (1)...(19): siRNA sense strand
ggaaagccuucaaccagaa

SEQ ID NO: 2038858 - RNA, 19 nt, Homo sapiens
  misc_RNA (1)...(19): siRNA sense strand
agacaaaucuuacaaaugc

SEQ ID NO: 2038859 - RNA, 19 nt, Homo sapiens
  misc_RNA (1)...(19): siRNA sense strand
ggagaaagaccuuaugugu

SEQ ID NO: 2038860 - RNA, 19 nt, Homo sapiens
  misc_RNA (1)...(19): siRNA sense strand
caacagagaauucauagug

SEQ ID NO: 2038861 - RNA, 19 nt, Homo sapiens
  misc_RNA (1)...(19): siRNA sense strand
ggucaaacuucaauaaaca

SEQ ID NO: 2038862 - RNA, 19 nt, Homo sapiens
  misc_RNA (1)...(19): siRNA sense strand
ggucaaauuuccauaaaca

SEQ ID NO: 2038863 - RNA, 19 nt, Homo sapiens
  misc_RNA (1)...(19): siRNA sense strand
ggcaaaggcuucucccaaa

SEQ ID NO: 2038864 - RNA, 19 nt, Homo sapiens
  misc_RNA (1)...(19): siRNA sense strand
aaacucaacccucauuaua

SEQ ID NO: 2038865 - RNA, 19 nt, Homo sapiens
  misc_RNA (1)...(19): siRNA sense strand
ucagagaacucacaguaga

SEQ ID NO: 2038866 - RNA, 19 nt, Homo sapiens
  misc_RNA (1)...(19): siRNA sense strand
ggagaaagacaccauguau

SEQ ID NO: 2038867 - RNA, 19 nt, Homo sapiens
  misc_RNA (1)...(19): siRNA sense strand
gaacucacaugggagagaa

SEQ ID NO: 2038868 - RNA, 19 nt, Homo sapiens
  misc_RNA (1)...(19): siRNA sense strand
gagagaaacccuaugaaug

SEQ ID NO: 2038869 - RNA, 19 nt, Homo sapiens
  misc_RNA (1)...(19): siRNA sense strand
gaagugaacggucagaaug

SEQ ID NO: 2038870 - RNA, 19 nt, Homo sapiens
  misc_RNA (1)...(19): siRNA sense strand
gggcagaaguccuaugugu

SEQ ID NO: 2038871 - RNA, 19 nt, Homo sapiens
  misc_RNA (1)...(19): siRNA sense strand
ugaaagcaaugacacagaa

SEQ ID NO: 2038872 - RNA, 19 nt, Homo sapiens
  misc_RNA (1)...(19): siRNA sense strand
uaggaaaccuccaugaaug

SEQ ID NO: 2038873 - RNA, 19 nt, Homo sapiens
  misc_RNA (1)...(19): siRNA sense strand
gaaaccagauggauguucu

SEQ ID NO: 2038874 - RNA, 19 nt, Homo sapiens
  misc_RNA (1)...(19): siRNA sense strand
cuagaaagaagcccuauaa

SEQ ID NO: 2038875 - RNA, 19 nt, Homo sapiens
  misc_RNA (1)...(19): siRNA sense strand
ggagagaagccuuacaaau

SEQ ID NO: 2038876 - RNA, 19 nt, Homo sapiens
  misc_RNA (1)...(19): siRNA sense strand
ggagagaaacccuaugaau

SEQ ID NO: 2038877 - RNA, 19 nt, Homo sapiens
  misc_RNA (1)...(19): siRNA sense strand
gaacacagaaagcaauugu

SEQ ID NO: 2038878 - RNA, 19 nt, Homo sapiens
  misc_RNA (1)...(19): siRNA sense strand
gcagaaguccuaugugugu

SEQ ID NO: 2038879 - RNA, 19 nt, Homo sapiens
  misc_RNA (1)...(19): siRNA sense strand
gaaggucuuuauucagaga

SEQ ID NO: 2038880 - RNA, 19 nt, Homo sapiens
  misc_RNA (1)...(19): siRNA sense strand
gggaaaucguucaguaaga

SEQ ID NO: 2038881 - RNA, 19 nt, Homo sapiens
  misc_RNA (1)...(19): siRNA sense strand
caaagagcaucagcgaauu

SEQ ID NO: 2038882 - RNA, 19 nt, Homo sapiens
  misc_RNA (1)...(19): siRNA sense strand
caucagagaacucacagua

SEQ ID NO: 2038883 - RNA, 19 nt, Homo sapiens
  misc_RNA (1)...(19): siRNA sense strand
ccucagaaauguugcuuau

SEQ ID NO: 2038884 - RNA, 19 nt, Homo sapiens
  misc_RNA (1)...(19): siRNA sense strand
gaccuuauguguguucuga

SEQ ID NO: 2038885 - RNA, 19 nt, Homo sapiens
  misc_RNA (1)...(19): siRNA sense strand
gggagaaaccuuaugaaug

SEQ ID NO: 2038886 - RNA, 19 nt, Homo sapiens
  misc_RNA (1)...(19): siRNA sense strand
acagagaauucauagugua

SEQ ID NO: 2038887 - RNA, 19 nt, Homo sapiens
  misc_RNA (1)...(19): siRNA sense strand
agaaacaaccucagaaaug

SEQ ID NO: 2038888 - RNA, 19 nt, Homo sapiens
  misc_RNA (1)...(19): siRNA sense strand
gcaggucaaauuuccauaa

SEQ ID NO: 2038889 - RNA, 19 nt, Homo sapiens
  misc_RNA (1)...(19): siRNA sense strand
acacagaacagcuugauga

SEQ ID NO: 2038890 - RNA, 19 nt, Homo sapiens
  misc_RNA (1)...(19): siRNA sense strand
gaggucaucuucagaaugc

SEQ ID NO: 2038891 - RNA, 19 nt, Homo sapiens
  misc_RNA (1)...(19): siRNA sense strand
gugggaaggucuuuauuca

SEQ ID NO: 2038892 - RNA, 19 nt, Homo sapiens
  misc_RNA (1)...(19): siRNA sense strand
ccaugaauguggcaaaugu

SEQ ID NO: 2038893 - RNA, 19 nt, Homo sapiens
  misc_RNA (1)...(19): siRNA sense strand
gagaauucauaguguagga

SEQ ID NO: 2038894 - RNA, 19 nt, Homo sapiens
  misc_RNA (1)...(19): siRNA sense strand
agccauagcucuucugaug

SEQ ID NO: 2038895 - RNA, 19 nt, Homo sapiens
  misc_RNA (1)...(19): siRNA sense strand
gaaaggccuucaacaacag

SEQ ID NO: 2038896 - RNA, 19 nt, Homo sapiens
  misc_RNA (1)...(19): siRNA sense strand
caggucaaauuuccauaaa

SEQ ID NO: 2038897 - RNA, 19 nt, Homo sapiens
  misc_RNA (1)...(19): siRNA sense strand
agaaagaagcccuauaaau

SEQ ID NO: 2038898 - RNA, 19 nt, Homo sapiens
  misc_RNA (1)...(19): siRNA sense strand
guaggaaaccuccaugaau

SEQ ID NO: 2038899 - RNA, 19 nt, Homo sapiens
  misc_RNA (1)...(19): siRNA sense strand
ccagaagucacaccucuuu

SEQ ID NO: 2038900 - RNA, 19 nt, Homo sapiens
  misc_RNA (1)...(19): siRNA sense strand
ucaaagagcaucagcgaau

SEQ ID NO: 2038901 - RNA, 19 nt, Homo sapiens
  misc_RNA (1)...(19): siRNA sense strand
ucacagugcuuucuucaac

SEQ ID NO: 2038902 - RNA, 19 nt, Homo sapiens
  misc_RNA (1)...(19): siRNA sense strand
ccagaaggcacaccugauu

SEQ ID NO: 2038903 - RNA, 19 nt, Homo sapiens
  misc_RNA (1)...(19): siRNA sense strand
guuugaagcugaaccuaga

SEQ ID NO: 2038904 - RNA, 19 nt, Homo sapiens
  misc_RNA (1)...(19): siRNA sense strand
agucacagcuugauauaca

SEQ ID NO: 2038905 - RNA, 19 nt, Homo sapiens
  misc_RNA (1)...(19): siRNA sense strand
cagcaugcaucagagaauu

SEQ ID NO: 2038906 - RNA, 19 nt, Homo sapiens
  misc_RNA (1)...(19): siRNA sense strand
aaacaacucauaccagaga

SEQ ID NO: 2038907 - RNA, 19 nt, Homo sapiens
  misc_RNA (1)...(19): siRNA sense strand
caucaaauaacucacacua

SEQ ID NO: 2038908 - RNA, 19 nt, Homo sapiens
  misc_RNA (1)...(19): siRNA sense strand
gcaaagguaaccaguguag

SEQ ID NO: 2038909 - RNA, 19 nt, Homo sapiens
  misc_RNA (1)...(19): siRNA sense strand
gagacaaaucuuacaaaug

SEQ ID NO: 2038910 - RNA, 19 nt, Homo sapiens
  misc_RNA (1)...(19): siRNA sense strand
caacaacaggucaaacuuc

SEQ ID NO: 2038911 - RNA, 19 nt, Homo sapiens
  misc_RNA (1)...(19): siRNA sense strand
caaggugcaucagcgaauu

SEQ ID NO: 2038912 - RNA, 19 nt, Homo sapiens
  misc_RNA (1)...(19): siRNA sense strand
gagaaagacaccauguaug

SEQ ID NO: 2038913 - RNA, 19 nt, Homo sapiens
  misc_RNA (1)...(19): siRNA sense strand
aaagguaaccaguguagaa

SEQ ID NO: 2038914 - RNA, 19 nt, Homo sapiens
  misc_RNA (1)...(19): siRNA sense strand
caagcaacaucaaauucau

SEQ ID NO: 2038915 - RNA, 19 nt, Homo sapiens
  misc_RNA (1)...(19): siRNA sense strand
aaacaccaaacaacucaua

SEQ ID NO: 2038916 - RNA, 19 nt, Homo sapiens
  misc_RNA (1)...(19): siRNA sense strand
caacaggucaaacuucaau

SEQ ID NO: 2038917 - RNA, 19 nt, Homo sapiens
  misc_RNA (1)...(19): siRNA sense strand
gaaaucguucaguaagaaa

SEQ ID NO: 2038918 - RNA, 19 nt, Homo sapiens
  misc_RNA (1)...(19): siRNA sense strand
ugugggaaaucguucagua

SEQ ID NO: 2038919 - RNA, 19 nt, Homo sapiens
  misc_RNA (1)...(19): siRNA sense strand
agagaagccuuacaaaugc

SEQ ID NO: 2038920 - RNA, 19 nt, Homo sapiens
  misc_RNA (1)...(19): siRNA sense strand
gcaaaggcuucucccaaaa

SEQ ID NO: 2038921 - RNA, 19 nt, Homo sapiens
  misc_RNA (1)...(19): siRNA sense strand
gaauguggcaaauguggaa

SEQ ID NO: 2038922 - RNA, 19 nt, Homo sapiens
  misc_RNA (1)...(19): siRNA sense strand
aaccagaagucaauacuca

SEQ ID NO: 2038923 - RNA, 19 nt, Homo sapiens
  misc_RNA (1)...(19): siRNA sense strand
uaagaaaccacaacucaag

SEQ ID NO: 2038924 - RNA, 19 nt, Homo sapiens
  misc_RNA (1)...(19): siRNA sense strand
cagaaaguuugaagcugaa

SEQ ID NO: 2038925 - RNA, 19 nt, Homo sapiens
  misc_RNA (1)...(19): siRNA sense strand
gaaagaccuuauguguguu

SEQ ID NO: 2038926 - RNA, 19 nt, Homo sapiens
  misc_RNA (1)...(19): siRNA sense strand
guaagaaaccacaacucaa

SEQ ID NO: 2038927 - RNA, 19 nt, Homo sapiens
  misc_RNA (1)...(19): siRNA sense strand
gaaaauucauacuggagaa

SEQ ID NO: 2038928 - RNA, 19 nt, Homo sapiens
  misc_RNA (1)...(19): siRNA sense strand
cagcaagaauauucauaca

SEQ ID NO: 2038929 - RNA, 19 nt, Homo sapiens
  misc_RNA (1)...(19): siRNA sense strand
gaauucauaguguaggaaa

SEQ ID NO: 2038930 - RNA, 19 nt, Homo sapiens
  misc_RNA (1)...(19): siRNA sense strand
agauggauguucugaaugu

SEQ ID NO: 2038931 - RNA, 19 nt, Homo sapiens
  misc_RNA (1)...(19): siRNA sense strand
ggagagacauuuugcaaag

SEQ ID NO: 2038932 - RNA, 19 nt, Homo sapiens
  misc_RNA (1)...(19): siRNA sense strand
gcaauugugaauauaagga

SEQ ID NO: 2038933 - RNA, 19 nt, Homo sapiens
  misc_RNA (1)...(19): siRNA sense strand
aggcaucagugucauuuga

SEQ ID NO: 2038934 - RNA, 19 nt, Homo sapiens
  misc_RNA (1)...(19): siRNA sense strand
caccauguaugcagugaau

SEQ ID NO: 2038935 - RNA, 19 nt, Homo sapiens
  misc_RNA (1)...(19): siRNA sense strand
gcccaacagagaauucaua

SEQ ID NO: 2038936 - RNA, 19 nt, Homo sapiens
  misc_RNA (1)...(19): siRNA sense strand
ucacagaaacaaccucaga

SEQ ID NO: 2038937 - RNA, 19 nt, Homo sapiens
  misc_RNA (1)...(19): siRNA sense strand
guggaaaggccuucaacaa

SEQ ID NO: 2038938 - RNA, 19 nt, Homo sapiens
  misc_RNA (1)...(19): siRNA sense strand
gagcaucagcgaauucaca

SEQ ID NO: 2038939 - RNA, 19 nt, Homo sapiens
  misc_RNA (1)...(19): siRNA sense strand
aaacacacacuagaaagaa

SEQ ID NO: 2038940 - RNA, 19 nt, Homo sapiens
  misc_RNA (1)...(19): siRNA sense strand
gaagcugaaccuagaagug

SEQ ID NO: 2038941 - RNA, 19 nt, Homo sapiens
  misc_RNA (1)...(19): siRNA sense strand
uggaggcccuggagaauga

SEQ ID NO: 2038942 - RNA, 19 nt, Homo sapiens
  misc_RNA (1)...(19): siRNA sense strand
ugucugaaguggacugugu

SEQ ID NO: 2038943 - RNA, 19 nt, Homo sapiens
  misc_RNA (1)...(19): siRNA sense strand
gaaugacaacuuccaggau

SEQ ID NO: 2038944 - RNA, 19 nt, Homo sapiens
  misc_RNA (1)...(19): siRNA sense strand
gaagaaaacccgaggugau

SEQ ID NO: 2038945 - RNA, 19 nt, Homo sapiens
  misc_RNA (1)...(19): siRNA sense strand
ugcggacacuggaaagaaa

SEQ ID NO: 2038946 - RNA, 19 nt, Homo sapiens
  misc_RNA (1)...(19): siRNA sense strand
ccuggagaaugacaacuuc

SEQ ID NO: 2038947 - RNA, 19 nt, Homo sapiens
  misc_RNA (1)...(19): siRNA sense strand
ggugaucauuuuaaacuuc

SEQ ID NO: 2038948 - RNA, 19 nt, Homo sapiens
  misc_RNA (1)...(19): siRNA sense strand
aaacccgaggugaucauuu

SEQ ID NO: 2038949 - RNA, 19 nt, Homo sapiens
  misc_RNA (1)...(19): siRNA sense strand
gaaagacucuaucaaacua

SEQ ID NO: 2038950 - RNA, 19 nt, Homo sapiens
  misc_RNA (1)...(19): siRNA sense strand
gaagauggaccaccuuaua

SEQ ID NO: 2038951 - RNA, 19 nt, Homo sapiens
  misc_RNA (1)...(19): siRNA sense strand
gagaaacccuuugaaugua

SEQ ID NO: 2038952 - RNA, 19 nt, Homo sapiens
  misc_RNA (1)...(19): siRNA sense strand
ggaaggaccagaacauuaa

SEQ ID NO: 2038953 - RNA, 19 nt, Homo sapiens
  misc_RNA (1)...(19): siRNA sense strand
gagaaacccuucguaugua

SEQ ID NO: 2038954 - RNA, 19 nt, Homo sapiens
  misc_RNA (1)...(19): siRNA sense strand
ggacagaaacccuaucauu

SEQ ID NO: 2038955 - RNA, 19 nt, Homo sapiens
  misc_RNA (1)...(19): siRNA sense strand
gaaaaucccuggagugaaa

SEQ ID NO: 2038956 - RNA, 19 nt, Homo sapiens
  misc_RNA (1)...(19): siRNA sense strand
gaagacacaugauaaagca

SEQ ID NO: 2038957 - RNA, 19 nt, Homo sapiens
  misc_RNA (1)...(19): siRNA sense strand
agagaaaccuuauguaugu

SEQ ID NO: 2038958 - RNA, 19 nt, Homo sapiens
  misc_RNA (1)...(19): siRNA sense strand
gaaacucugugaaagcauu

SEQ ID NO: 2038959 - RNA, 19 nt, Homo sapiens
  misc_RNA (1)...(19): siRNA sense strand
gagaaacucuaugauugua

SEQ ID NO: 2038960 - RNA, 19 nt, Homo sapiens
  misc_RNA (1)...(19): siRNA sense strand
ggucagucaucccuuaaua

SEQ ID NO: 2038961 - RNA, 19 nt, Homo sapiens
  misc_RNA (1)...(19): siRNA sense strand
gaagacacaucaucacaca

SEQ ID NO: 2038962 - RNA, 19 nt, Homo sapiens
  misc_RNA (1)...(19): siRNA sense strand
gguaaagccuucaguuguu

SEQ ID NO: 2038963 - RNA, 19 nt, Homo sapiens
  misc_RNA (1)...(19): siRNA sense strand
ggagaaaucuaagaaguca

SEQ ID NO: 2038964 - RNA, 19 nt, Homo sapiens
  misc_RNA (1)...(19): siRNA sense strand
ggaaaagccuucacuugua

SEQ ID NO: 2038965 - RNA, 19 nt, Homo sapiens
  misc_RNA (1)...(19): siRNA sense strand
ggagagaaaccuuauguau

SEQ ID NO: 2038966 - RNA, 19 nt, Homo sapiens
  misc_RNA (1)...(19): siRNA sense strand
gaagucauauguuagaaag

SEQ ID NO: 2038967 - RNA, 19 nt, Homo sapiens
  misc_RNA (1)...(19): siRNA sense strand
ggagauggaccuuauaaau

SEQ ID NO: 2038968 - RNA, 19 nt, Homo sapiens
  misc_RNA (1)...(19): siRNA sense strand
gagagaaaccuuaugaaug

SEQ ID NO: 2038969 - RNA, 19 nt, Homo sapiens
  misc_RNA (1)...(19): siRNA sense strand
gacaugaaccaaaggaaua

SEQ ID NO: 2038970 - RNA, 19 nt, Homo sapiens
  misc_RNA (1)...(19): siRNA sense strand
gaauguaagcgauguggua

SEQ ID NO: 2038971 - RNA, 19 nt, Homo sapiens
  misc_RNA (1)...(19): siRNA sense strand
gagagaaacccuaugaaug

SEQ ID NO: 2038972 - RNA, 19 nt, Homo sapiens
  misc_RNA (1)...(19): siRNA sense strand
gaacacaugagauaauuca

SEQ ID NO: 2038973 - RNA, 19 nt, Homo sapiens
  misc_RNA (1)...(19): siRNA sense strand
gagauggaccuuauaaaug

SEQ ID NO: 2038974 - RNA, 19 nt, Homo sapiens
  misc_RNA (1)...(19): siRNA sense strand
guaaagcuuucguuucuuc

SEQ ID NO: 2038975 - RNA, 19 nt, Homo sapiens
  misc_RNA (1)...(19): siRNA sense strand
ucaagugcaugaaagaauu

SEQ ID NO: 2038976 - RNA, 19 nt, Homo sapiens
  misc_RNA (1)...(19): siRNA sense strand
gggaaagccuucaguuauc

SEQ ID NO: 2038977 - RNA, 19 nt, Homo sapiens
  misc_RNA (1)...(19): siRNA sense strand
ggagagaaaccuuaugaau

SEQ ID NO: 2038978 - RNA, 19 nt, Homo sapiens
  misc_RNA (1)...(19): siRNA sense strand
caaaggaauaucaggaaua

SEQ ID NO: 2038979 - RNA, 19 nt, Homo sapiens
  misc_RNA (1)...(19): siRNA sense strand
gacagaaacccuaucauug

SEQ ID NO: 2038980 - RNA, 19 nt, Homo sapiens
  misc_RNA (1)...(19): siRNA sense strand
gagaaacccuaugagugua

SEQ ID NO: 2038981 - RNA, 19 nt, Homo sapiens
  misc_RNA (1)...(19): siRNA sense strand
gccaguaccuuucaaauac

SEQ ID NO: 2038982 - RNA, 19 nt, Homo sapiens
  misc_RNA (1)...(19): siRNA sense strand
ggagugggcuuugcuagau

SEQ ID NO: 2038983 - RNA, 19 nt, Homo sapiens
  misc_RNA (1)...(19): siRNA sense strand
gagagaaaccuuauguaug

SEQ ID NO: 2038984 - RNA, 19 nt, Homo sapiens
  misc_RNA (1)...(19): siRNA sense strand
ggauguagaugugaacuuc

SEQ ID NO: 2038985 - RNA, 19 nt, Homo sapiens
  misc_RNA (1)...(19): siRNA sense strand
ggagagaaacccuaugaau

SEQ ID NO: 2038986 - RNA, 19 nt, Homo sapiens
  misc_RNA (1)...(19): siRNA sense strand
gaaacucuaugauuguaag

SEQ ID NO: 2038987 - RNA, 19 nt, Homo sapiens
  misc_RNA (1)...(19): siRNA sense strand
agagaaaccuuaugaaugc

SEQ ID NO: 2038988 - RNA, 19 nt, Homo sapiens
  misc_RNA (1)...(19): siRNA sense strand
ccagaagaaucucuacaga

SEQ ID NO: 2038989 - RNA, 19 nt, Homo sapiens
  misc_RNA (1)...(19): siRNA sense strand
ugagaaacccuuugaaugu

SEQ ID NO: 2038990 - RNA, 19 nt, Homo sapiens
  misc_RNA (1)...(19): siRNA sense strand
agauggaccuuauaaaugu

SEQ ID NO: 2038991 - RNA, 19 nt, Homo sapiens
  misc_RNA (1)...(19): siRNA sense strand
caacaucaauucgaauaca

SEQ ID NO: 2038992 - RNA, 19 nt, Homo sapiens
  misc_RNA (1)...(19): siRNA sense strand
gaaaagccuucacuuguau

SEQ ID NO: 2038993 - RNA, 19 nt, Homo sapiens
  misc_RNA (1)...(19): siRNA sense strand
uaucucaacuccuuucgaa

SEQ ID NO: 2038994 - RNA, 19 nt, Homo sapiens
  misc_RNA (1)...(19): siRNA sense strand
ugagaaacccuucguaugu

SEQ ID NO: 2038995 - RNA, 19 nt, Homo sapiens
  misc_RNA (1)...(19): siRNA sense strand
gaagacacaugauaaaaca

SEQ ID NO: 2038996 - RNA, 19 nt, Homo sapiens
  misc_RNA (1)...(19): siRNA sense strand
gagaaaccuuauguaugua

SEQ ID NO: 2038997 - RNA, 19 nt, Homo sapiens
  misc_RNA (1)...(19): siRNA sense strand
agaaacccuuugaauguaa

SEQ ID NO: 2038998 - RNA, 19 nt, Homo sapiens
  misc_RNA (1)...(19): siRNA sense strand
agagaaacccuaugaaugu

SEQ ID NO: 2038999 - RNA, 19 nt, Homo sapiens
  misc_RNA (1)...(19): siRNA sense strand
ucgaacacaugaaaugauu

SEQ ID NO: 2039000 - RNA, 19 nt, Homo sapiens
  misc_RNA (1)...(19): siRNA sense strand
uaucacaaguguucgaaga

SEQ ID NO: 2039001 - RNA, 19 nt, Homo sapiens
  misc_RNA (1)...(19): siRNA sense strand
gugaaagcauuguauaugg

SEQ ID NO: 2039002 - RNA, 19 nt, Homo sapiens
  misc_RNA (1)...(19): siRNA sense strand
ggaaagccuucaguuaucu

SEQ ID NO: 2039003 - RNA, 19 nt, Homo sapiens
  misc_RNA (1)...(19): siRNA sense strand
gauggaccuuauaaaugua

SEQ ID NO: 2039004 - RNA, 19 nt, Homo sapiens
  misc_RNA (1)...(19): siRNA sense strand
ggacaugaaccaaaggaau

SEQ ID NO: 2039005 - RNA, 19 nt, Homo sapiens
  misc_RNA (1)...(19): siRNA sense strand
guucgaagacacaugauaa

SEQ ID NO: 2039006 - RNA, 19 nt, Homo sapiens
  misc_RNA (1)...(19): siRNA sense strand
guuaacacaugcugaagau

SEQ ID NO: 2039007 - RNA, 19 nt, Homo sapiens
  misc_RNA (1)...(19): siRNA sense strand
ggagagaaacccuaugagu

SEQ ID NO: 2039008 - RNA, 19 nt, Homo sapiens
  misc_RNA (1)...(19): siRNA sense strand
agaaacccuucguauguaa

SEQ ID NO: 2039009 - RNA, 19 nt, Homo sapiens
  misc_RNA (1)...(19): siRNA sense strand
ugaaagcauuguauaugga

SEQ ID NO: 2039010 - RNA, 19 nt, Homo sapiens
  misc_RNA (1)...(19): siRNA sense strand
gaccagaacauuaaagauc

SEQ ID NO: 2039011 - RNA, 19 nt, Homo sapiens
  misc_RNA (1)...(19): siRNA sense strand
ccaaaggaauaucaggaau

SEQ ID NO: 2039012 - RNA, 19 nt, Homo sapiens
  misc_RNA (1)...(19): siRNA sense strand
gaacucauacuggagagaa

SEQ ID NO: 2039013 - RNA, 19 nt, Homo sapiens
  misc_RNA (1)...(19): siRNA sense strand
ucaguuguaucccaaguau

SEQ ID NO: 2039014 - RNA, 19 nt, Homo sapiens
  misc_RNA (1)...(19): siRNA sense strand
gauaaaacauacuggagaa

SEQ ID NO: 2039015 - RNA, 19 nt, Homo sapiens
  misc_RNA (1)...(19): siRNA sense strand
gugggaaagccuucaguua

SEQ ID NO: 2039016 - RNA, 19 nt, Homo sapiens
  misc_RNA (1)...(19): siRNA sense strand
uggaaggaccagaacauua

SEQ ID NO: 2039017 - RNA, 19 nt, Homo sapiens
  misc_RNA (1)...(19): siRNA sense strand
guaaagccuucaguuguuc

SEQ ID NO: 2039018 - RNA, 19 nt, Homo sapiens
  misc_RNA (1)...(19): siRNA sense strand
gaacucacacuggagagaa

SEQ ID NO: 2039019 - RNA, 19 nt, Homo sapiens
  misc_RNA (1)...(19): siRNA sense strand
gugagaaacccuuugaaug

SEQ ID NO: 2039020 - RNA, 19 nt, Homo sapiens
  misc_RNA (1)...(19): siRNA sense strand
gaacauuaaagaucacuac

SEQ ID NO: 2039021 - RNA, 19 nt, Homo sapiens
  misc_RNA (1)...(19): siRNA sense strand
ucgacuacaugaaagaauu

SEQ ID NO: 2039022 - RNA, 19 nt, Homo sapiens
  misc_RNA (1)...(19): siRNA sense strand
gaaggaccagaacauuaaa

SEQ ID NO: 2039023 - RNA, 19 nt, Homo sapiens
  misc_RNA (1)...(19): siRNA sense strand
ucgaacacaugagauaauu

SEQ ID NO: 2039024 - RNA, 19 nt, Homo sapiens
  misc_RNA (1)...(19): siRNA sense strand
ggaaacccuucaguucuca

SEQ ID NO: 2039025 - RNA, 19 nt, Homo sapiens
  misc_RNA (1)...(19): siRNA sense strand
agagaaacccuaugagugu

SEQ ID NO: 2039026 - RNA, 19 nt, Homo sapiens
  misc_RNA (1)...(19): siRNA sense strand
gagaaacccuaugaauguc

SEQ ID NO: 2039027 - RNA, 19 nt, Homo sapiens
  misc_RNA (1)...(19): siRNA sense strand
ucaggaauauggagagaag

SEQ ID NO: 2039028 - RNA, 19 nt, Homo sapiens
  misc_RNA (1)...(19): siRNA sense strand
ugguaaagcuuucguuucu

SEQ ID NO: 2039029 - RNA, 19 nt, Homo sapiens
  misc_RNA (1)...(19): siRNA sense strand
gggaagcauucaguuguau

SEQ ID NO: 2039030 - RNA, 19 nt, Homo sapiens
  misc_RNA (1)...(19): siRNA sense strand
gagaagccagauacacgua

SEQ ID NO: 2039031 - RNA, 19 nt, Homo sapiens
  misc_RNA (1)...(19): siRNA sense strand
cagaaacccuaucauugca

SEQ ID NO: 2039032 - RNA, 19 nt, Homo sapiens
  misc_RNA (1)...(19): siRNA sense strand
ggugagaaacccuuugaau

SEQ ID NO: 2039033 - RNA, 19 nt, Homo sapiens
  misc_RNA (1)...(19): siRNA sense strand
guauguaaacaauguggua

SEQ ID NO: 2039034 - RNA, 19 nt, Homo sapiens
  misc_RNA (1)...(19): siRNA sense strand
gugaaacucugugaaagca

SEQ ID NO: 2039035 - RNA, 19 nt, Homo sapiens
  misc_RNA (1)...(19): siRNA sense strand
gauggaccaccuuauaaau

SEQ ID NO: 2039036 - RNA, 19 nt, Homo sapiens
  misc_RNA (1)...(19): siRNA sense strand
ugggaaagcuuuugauuau

SEQ ID NO: 2039037 - RNA, 19 nt, Homo sapiens
  misc_RNA (1)...(19): siRNA sense strand
agaauuagaagacacauca

SEQ ID NO: 2039038 - RNA, 19 nt, Homo sapiens
  misc_RNA (1)...(19): siRNA sense strand
agucaucccuuaauagaca

SEQ ID NO: 2039039 - RNA, 19 nt, Homo sapiens
  misc_RNA (1)...(19): siRNA sense strand
ucucaccacuccuuucgaa

SEQ ID NO: 2039040 - RNA, 19 nt, Homo sapiens
  misc_RNA (1)...(19): siRNA sense strand
aagauggaccaccuuauaa

SEQ ID NO: 2039041 - RNA, 19 nt, Homo sapiens
  misc_RNA (1)...(19): siRNA sense strand
agagacacauguuaacaca

SEQ ID NO: 2039042 - RNA, 19 nt, Homo sapiens
  misc_RNA (1)...(19): siRNA sense strand
gacucacacuggacagaaa

SEQ ID NO: 2039043 - RNA, 19 nt, Homo sapiens
  misc_RNA (1)...(19): siRNA sense strand
ugggaaagccuucaguuau

SEQ ID NO: 2039044 - RNA, 19 nt, Homo sapiens
  misc_RNA (1)...(19): siRNA sense strand
gggaaaccaugaggaaucu

SEQ ID NO: 2039045 - RNA, 19 nt, Homo sapiens
  misc_RNA (1)...(19): siRNA sense strand
gccuuuagaucugccagua

SEQ ID NO: 2039046 - RNA, 19 nt, Homo sapiens
  misc_RNA (1)...(19): siRNA sense strand
ggugagaaacccuucguau

SEQ ID NO: 2039047 - RNA, 19 nt, Homo sapiens
  misc_RNA (1)...(19): siRNA sense strand
auagacacaucaaagauca

SEQ ID NO: 2039048 - RNA, 19 nt, Homo sapiens
  misc_RNA (1)...(19): siRNA sense strand
gaacacaugaaagaaguca

SEQ ID NO: 2039049 - RNA, 19 nt, Homo sapiens
  misc_RNA (1)...(19): siRNA sense strand
ggagaaaccuuaugaaugu

SEQ ID NO: 2039050 - RNA, 19 nt, Homo sapiens
  misc_RNA (1)...(19): siRNA sense strand
gcucaaaccuugcuaaaca

SEQ ID NO: 2039051 - RNA, 19 nt, Homo sapiens
  misc_RNA (1)...(19): siRNA sense strand
ggaaagaauucuaagucaa

SEQ ID NO: 2039052 - RNA, 19 nt, Homo sapiens
  misc_RNA (1)...(19): siRNA sense strand
gagaaaagcucuaugaaug

SEQ ID NO: 2039053 - RNA, 19 nt, Homo sapiens
  misc_RNA (1)...(19): siRNA sense strand
gagaaacccuauguaugua

SEQ ID NO: 2039054 - RNA, 19 nt, Homo sapiens
  misc_RNA (1)...(19): siRNA sense strand
gaaaaucagggauguauua

SEQ ID NO: 2039055 - RNA, 19 nt, Homo sapiens
  misc_RNA (1)...(19): siRNA sense strand
gagagaaaccuuaugaaug

SEQ ID NO: 2039056 - RNA, 19 nt, Homo sapiens
  misc_RNA (1)...(19): siRNA sense strand
ucaaagaauucacauagga

SEQ ID NO: 2039057 - RNA, 19 nt, Homo sapiens
  misc_RNA (1)...(19): siRNA sense strand
ggagagaaacccuauguau

SEQ ID NO: 2039058 - RNA, 19 nt, Homo sapiens
  misc_RNA (1)...(19): siRNA sense strand
gauacauacuggaaagaaa

SEQ ID NO: 2039059 - RNA, 19 nt, Homo sapiens
  misc_RNA (1)...(19): siRNA sense strand
ggagagaaaccuuaugaau

SEQ ID NO: 2039060 - RNA, 19 nt, Homo sapiens
  misc_RNA (1)...(19): siRNA sense strand
gagcauccauacaaccaaa

SEQ ID NO: 2039061 - RNA, 19 nt, Homo sapiens
  misc_RNA (1)...(19): siRNA sense strand
aaagagauuuguacagaug

SEQ ID NO: 2039062 - RNA, 19 nt, Homo sapiens
  misc_RNA (1)...(19): siRNA sense strand
gagaauucaugcuggagaa

SEQ ID NO: 2039063 - RNA, 19 nt, Homo sapiens
  misc_RNA (1)...(19): siRNA sense strand
gagaaaccauaugcaugua

SEQ ID NO: 2039064 - RNA, 19 nt, Homo sapiens
  misc_RNA (1)...(19): siRNA sense strand
gaaagaauucuaagucaag

SEQ ID NO: 2039065 - RNA, 19 nt, Homo sapiens
  misc_RNA (1)...(19): siRNA sense strand
agagaaaccuuaugaaugc

SEQ ID NO: 2039066 - RNA, 19 nt, Homo sapiens
  misc_RNA (1)...(19): siRNA sense strand
caucagagcauccauacaa

SEQ ID NO: 2039067 - RNA, 19 nt, Homo sapiens
  misc_RNA (1)...(19): siRNA sense strand
gagagaaacccuauguaug

SEQ ID NO: 2039068 - RNA, 19 nt, Homo sapiens
  misc_RNA (1)...(19): siRNA sense strand
ucagagauguggccauaga

SEQ ID NO: 2039069 - RNA, 19 nt, Homo sapiens
  misc_RNA (1)...(19): siRNA sense strand
gaaaccauaugcauguaag

SEQ ID NO: 2039070 - RNA, 19 nt, Homo sapiens
  misc_RNA (1)...(19): siRNA sense strand
caaccucacucgacaucaa

SEQ ID NO: 2039071 - RNA, 19 nt, Homo sapiens
  misc_RNA (1)...(19): siRNA sense strand
gggagaaaccuuaugaaug

SEQ ID NO: 2039072 - RNA, 19 nt, Homo sapiens
  misc_RNA (1)...(19): siRNA sense strand
ucaguuaccuuucauuucu

SEQ ID NO: 2039073 - RNA, 19 nt, Homo sapiens
  misc_RNA (1)...(19): siRNA sense strand
gcaaggaucauacugagau

SEQ ID NO: 2039074 - RNA, 19 nt, Homo sapiens
  misc_RNA (1)...(19): siRNA sense strand
aaucagggauguauuagga

SEQ ID NO: 2039075 - RNA, 19 nt, Homo sapiens
  misc_RNA (1)...(19): siRNA sense strand
gaaaccuuaugaaugcauu

SEQ ID NO: 2039076 - RNA, 19 nt, Homo sapiens
  misc_RNA (1)...(19): siRNA sense strand
ugaugaaugugguaaaguu

SEQ ID NO: 2039077 - RNA, 19 nt, Homo sapiens
  misc_RNA (1)...(19): siRNA sense strand
ugucacucauuccuuauua

SEQ ID NO: 2039078 - RNA, 19 nt, Homo sapiens
  misc_RNA (1)...(19): siRNA sense strand
auacugagaugcugcaaga

SEQ ID NO: 2039079 - RNA, 19 nt, Homo sapiens
  misc_RNA (1)...(19): siRNA sense strand
gagaaaccuuaugaaugua

SEQ ID NO: 2039080 - RNA, 19 nt, Homo sapiens
  misc_RNA (1)...(19): siRNA sense strand
caaaugauacauacuggaa

SEQ ID NO: 2039081 - RNA, 19 nt, Homo sapiens
  misc_RNA (1)...(19): siRNA sense strand
cagaugugguuuccuuauu

SEQ ID NO: 2039082 - RNA, 19 nt, Homo sapiens
  misc_RNA (1)...(19): siRNA sense strand
ggacacacacucuugacaa

SEQ ID NO: 2039083 - RNA, 19 nt, Homo sapiens
  misc_RNA (1)...(19): siRNA sense strand
agagaaacccuauguaugu

SEQ ID NO: 2039084 - RNA, 19 nt, Homo sapiens
  misc_RNA (1)...(19): siRNA sense strand
ucagugacauucagagaug

SEQ ID NO: 2039085 - RNA, 19 nt, Homo sapiens
  misc_RNA (1)...(19): siRNA sense strand
ggagaacuauggccaucug

SEQ ID NO: 2039086 - RNA, 19 nt, Homo sapiens
  misc_RNA (1)...(19): siRNA sense strand
guaacagucucucaucaag

SEQ ID NO: 2039087 - RNA, 19 nt, Homo sapiens
  misc_RNA (1)...(19): siRNA sense strand
gaaaguaacagucucucau

SEQ ID NO: 2039088 - RNA, 19 nt, Homo sapiens
  misc_RNA (1)...(19): siRNA sense strand
gaauucacauaggaaagaa

SEQ ID NO: 2039089 - RNA, 19 nt, Homo sapiens
  misc_RNA (1)...(19): siRNA sense strand
gaucauggaaagaauucua

SEQ ID NO: 2039090 - RNA, 19 nt, Homo sapiens
  misc_RNA (1)...(19): siRNA sense strand
cguugucacucauuccuua

SEQ ID NO: 2039091 - RNA, 19 nt, Homo sapiens
  misc_RNA (1)...(19): siRNA sense strand
gaaggcauuucgccguuuc

SEQ ID NO: 2039092 - RNA, 19 nt, Homo sapiens
  misc_RNA (1)...(19): siRNA sense strand
ggaaggcauuucgccguuu

SEQ ID NO: 2039093 - RNA, 19 nt, Homo sapiens
  misc_RNA (1)...(19): siRNA sense strand
caucaaagaauucacauag

SEQ ID NO: 2039094 - RNA, 19 nt, Homo sapiens
  misc_RNA (1)...(19): siRNA sense strand
aauuaccacucauuccuua

SEQ ID NO: 2039095 - RNA, 19 nt, Homo sapiens
  misc_RNA (1)...(19): siRNA sense strand
gagucacacuggagagaaa

SEQ ID NO: 2039096 - RNA, 19 nt, Homo sapiens
  misc_RNA (1)...(19): siRNA sense strand
gaacucauacuggagagaa

SEQ ID NO: 2039097 - RNA, 19 nt, Homo sapiens
  misc_RNA (1)...(19): siRNA sense strand
guggugagaucaaagacuu

SEQ ID NO: 2039098 - RNA, 19 nt, Homo sapiens
  misc_RNA (1)...(19): siRNA sense strand
cuaugaaugugaugaaugu

SEQ ID NO: 2039099 - RNA, 19 nt, Homo sapiens
  misc_RNA (1)...(19): siRNA sense strand
ggauguauuaggaaaguaa

SEQ ID NO: 2039100 - RNA, 19 nt, Homo sapiens
  misc_RNA (1)...(19): siRNA sense strand
aaaggaggcuggaaaugca

SEQ ID NO: 2039101 - RNA, 19 nt, Homo sapiens
  misc_RNA (1)...(19): siRNA sense strand
gaaacccuauguauguaag

SEQ ID NO: 2039102 - RNA, 19 nt, Homo sapiens
  misc_RNA (1)...(19): siRNA sense strand
cuacaucagagaacucaua

SEQ ID NO: 2039103 - RNA, 19 nt, Homo sapiens
  misc_RNA (1)...(19): siRNA sense strand
gauguguaauguuggagaa

SEQ ID NO: 2039104 - RNA, 19 nt, Homo sapiens
  misc_RNA (1)...(19): siRNA sense strand
ugugaaacaccaaaugaua

SEQ ID NO: 2039105 - RNA, 19 nt, Homo sapiens
  misc_RNA (1)...(19): siRNA sense strand
ggagagaaaccauaugcau

SEQ ID NO: 2039106 - RNA, 19 nt, Homo sapiens
  misc_RNA (1)...(19): siRNA sense strand
ucagggauguauuaggaaa

SEQ ID NO: 2039107 - RNA, 19 nt, Homo sapiens
  misc_RNA (1)...(19): siRNA sense strand
uggaaagaauucuaaguca

SEQ ID NO: 2039108 - RNA, 19 nt, Homo sapiens
  misc_RNA (1)...(19): siRNA sense strand
cgacaucagagcauccaua

SEQ ID NO: 2039109 - RNA, 19 nt, Homo sapiens
  misc_RNA (1)...(19): siRNA sense strand
uaggaaaugugguaaagca

SEQ ID NO: 2039110 - RNA, 19 nt, Homo sapiens
  misc_RNA (1)...(19): siRNA sense strand
aacagucucucaucaagaa

SEQ ID NO: 2039111 - RNA, 19 nt, Homo sapiens
  misc_RNA (1)...(19): siRNA sense strand
caaagaauucacauaggaa

SEQ ID NO: 2039112 - RNA, 19 nt, Homo sapiens
  misc_RNA (1)...(19): siRNA sense strand
ucacugggucuuuccauuu

SEQ ID NO: 2039113 - RNA, 19 nt, Homo sapiens
  misc_RNA (1)...(19): siRNA sense strand
gaguguaaggacuguaaua

SEQ ID NO: 2039114 - RNA, 19 nt, Homo sapiens
  misc_RNA (1)...(19): siRNA sense strand
gagcucaaaccuugcuaaa

SEQ ID NO: 2039115 - RNA, 19 nt, Homo sapiens
  misc_RNA (1)...(19): siRNA sense strand
uggcaugcaucccuuauuc

SEQ ID NO: 2039116 - RNA, 19 nt, Homo sapiens
  misc_RNA (1)...(19): siRNA sense strand
ggaaaugcaaggaucauac

SEQ ID NO: 2039117 - RNA, 19 nt, Homo sapiens
  misc_RNA (1)...(19): siRNA sense strand
agaugugguuuccuuauug

SEQ ID NO: 2039118 - RNA, 19 nt, Homo sapiens
  misc_RNA (1)...(19): siRNA sense strand
uguaagguaugcaacaaau

SEQ ID NO: 2039119 - RNA, 19 nt, Homo sapiens
  misc_RNA (1)...(19): siRNA sense strand
gaugaaugugguaaaguuu

SEQ ID NO: 2039120 - RNA, 19 nt, Homo sapiens
  misc_RNA (1)...(19): siRNA sense strand
gaaaagcucuaugaaugug

SEQ ID NO: 2039121 - RNA, 19 nt, Homo sapiens
  misc_RNA (1)...(19): siRNA sense strand
ccauaugcauguaaggaau

SEQ ID NO: 2039122 - RNA, 19 nt, Homo sapiens
  misc_RNA (1)...(19): siRNA sense strand
cgccguuucucacaccuua

SEQ ID NO: 2039123 - RNA, 19 nt, Homo sapiens
  misc_RNA (1)...(19): siRNA sense strand
aaagagaucuguuuucagu

SEQ ID NO: 2039124 - RNA, 19 nt, Homo sapiens
  misc_RNA (1)...(19): siRNA sense strand
auucagagauguggccaua

SEQ ID NO: 2039125 - RNA, 19 nt, Homo sapiens
  misc_RNA (1)...(19): siRNA sense strand
caucagagaacucauacug

SEQ ID NO: 2039126 - RNA, 19 nt, Homo sapiens
  misc_RNA (1)...(19): siRNA sense strand
gcaugcaucccuuauucaa

SEQ ID NO: 2039127 - RNA, 19 nt, Homo sapiens
  misc_RNA (1)...(19): siRNA sense strand
ggaaaguaacagucucuca

SEQ ID NO: 2039128 - RNA, 19 nt, Homo sapiens
  misc_RNA (1)...(19): siRNA sense strand
aaacaucagagaauucaug

SEQ ID NO: 2039129 - RNA, 19 nt, Homo sapiens
  misc_RNA (1)...(19): siRNA sense strand
gcuucagccugcucaaaga

SEQ ID NO: 2039130 - RNA, 19 nt, Homo sapiens
  misc_RNA (1)...(19): siRNA sense strand
ggacucauacuggagagaa

SEQ ID NO: 2039131 - RNA, 19 nt, Homo sapiens
  misc_RNA (1)...(19): siRNA sense strand
caacauacgaagagucaca

SEQ ID NO: 2039132 - RNA, 19 nt, Homo sapiens
  misc_RNA (1)...(19): siRNA sense strand
agagaaaccauaugcaugu

SEQ ID NO: 2039133 - RNA, 19 nt, Homo sapiens
  misc_RNA (1)...(19): siRNA sense strand
caaguggugagaucaaaga

SEQ ID NO: 2039134 - RNA, 19 nt, Homo sapiens
  misc_RNA (1)...(19): siRNA sense strand
uguaaugaauguaggaaag

SEQ ID NO: 2039135 - RNA, 19 nt, Homo sapiens
  misc_RNA (1)...(19): siRNA sense strand
gaaaugcaaggaucauacu

SEQ ID NO: 2039136 - RNA, 19 nt, Homo sapiens
  misc_RNA (1)...(19): siRNA sense strand
caaggaucauacugagaug

SEQ ID NO: 2039137 - RNA, 19 nt, Homo sapiens
  misc_RNA (1)...(19): siRNA sense strand
gaugugguuuccuuauugg

SEQ ID NO: 2039138 - RNA, 19 nt, Homo sapiens
  misc_RNA (1)...(19): siRNA sense strand
gaaaagggaagugaaaaga

SEQ ID NO: 2039139 - RNA, 19 nt, Homo sapiens
  misc_RNA (1)...(19): siRNA sense strand
guguaaggacuguaauaaa

SEQ ID NO: 2039140 - RNA, 19 nt, Homo sapiens
  misc_RNA (1)...(19): siRNA sense strand
gcaagaaaaucagggaugu

SEQ ID NO: 2039141 - RNA, 19 nt, Homo sapiens
  misc_RNA (1)...(19): siRNA sense strand
ugacucaucccaguauuug

SEQ ID NO: 2039142 - RNA, 19 nt, Homo sapiens
  misc_RNA (1)...(19): siRNA sense strand
guguaauguuggagaacua

SEQ ID NO: 2039143 - RNA, 19 nt, Homo sapiens
  misc_RNA (1)...(19): siRNA sense strand
gaauguggcaaaaccuuua

SEQ ID NO: 2039144 - RNA, 19 nt, Homo sapiens
  misc_RNA (1)...(19): siRNA sense strand
gaauguaaugaauguagga

SEQ ID NO: 2039145 - RNA, 19 nt, Homo sapiens
  misc_RNA (1)...(19): siRNA sense strand
gacacacacucuugacaac

SEQ ID NO: 2039146 - RNA, 19 nt, Homo sapiens
  misc_RNA (1)...(19): siRNA sense strand
uauguaagguaugcaacaa

SEQ ID NO: 2039147 - RNA, 19 nt, Homo sapiens
  misc_RNA (1)...(19): siRNA sense strand
agagaucuguuuucaguuu

SEQ ID NO: 2039148 - RNA, 19 nt, Homo sapiens
  misc_RNA (1)...(19): siRNA sense strand
gucacucauuccuuauuaa

SEQ ID NO: 2039149 - RNA, 19 nt, Homo sapiens
  misc_RNA (1)...(19): siRNA sense strand
aggcagagcugauggaauu

SEQ ID NO: 2039150 - RNA, 19 nt, Homo sapiens
  misc_RNA (1)...(19): siRNA sense strand
gcuacugccucacaaguuu

SEQ ID NO: 2039151 - RNA, 19 nt, Homo sapiens
  misc_RNA (1)...(19): siRNA sense strand
caucugacccuaacugaaa

SEQ ID NO: 2039152 - RNA, 19 nt, Homo sapiens
  misc_RNA (1)...(19): siRNA sense strand
gagggcagccguuggcaua

SEQ ID NO: 2039153 - RNA, 19 nt, Homo sapiens
  misc_RNA (1)...(19): siRNA sense strand
agaaggaccugguguugga

SEQ ID NO: 2039154 - RNA, 19 nt, Homo sapiens
  misc_RNA (1)...(19): siRNA sense strand
ggaaccagcagcaugagaa

SEQ ID NO: 2039155 - RNA, 19 nt, Homo sapiens
  misc_RNA (1)...(19): siRNA sense strand
aaacccagccuccuaagaa

SEQ ID NO: 2039156 - RNA, 19 nt, Homo sapiens
  misc_RNA (1)...(19): siRNA sense strand
cagaagguguucccugugu

SEQ ID NO: 2039157 - RNA, 19 nt, Homo sapiens
  misc_RNA (1)...(19): siRNA sense strand
uggaacagaucccagaaau

SEQ ID NO: 2039158 - RNA, 19 nt, Homo sapiens
  misc_RNA (1)...(19): siRNA sense strand
uggagaagcugaacaugca

SEQ ID NO: 2039159 - RNA, 19 nt, Homo sapiens
  misc_RNA (1)...(19): siRNA sense strand
ucuaagcgcugcucacgau

SEQ ID NO: 2039160 - RNA, 19 nt, Homo sapiens
  misc_RNA (1)...(19): siRNA sense strand
gcagugcagaggcuucuaa

SEQ ID NO: 2039161 - RNA, 19 nt, Homo sapiens
  misc_RNA (1)...(19): siRNA sense strand
gcugauggaauuugagauu

SEQ ID NO: 2039162 - RNA, 19 nt, Homo sapiens
  misc_RNA (1)...(19): siRNA sense strand
gaaacccagccuccuaaga

SEQ ID NO: 2039163 - RNA, 19 nt, Homo sapiens
  misc_RNA (1)...(19): siRNA sense strand
cagagcugauggaauuuga

SEQ ID NO: 2039164 - RNA, 19 nt, Homo sapiens
  misc_RNA (1)...(19): siRNA sense strand
ccacgaggccuccaucauc

SEQ ID NO: 2039165 - RNA, 19 nt, Homo sapiens
  misc_RNA (1)...(19): siRNA sense strand
gaagguguucccuguguuc

SEQ ID NO: 2039166 - RNA, 19 nt, Homo sapiens
  misc_RNA (1)...(19): siRNA sense strand
gguggaaccagcagcauga

SEQ ID NO: 2039167 - RNA, 19 nt, Homo sapiens
  misc_RNA (1)...(19): siRNA sense strand
uaagaaggaccugguguug

SEQ ID NO: 2039168 - RNA, 19 nt, Homo sapiens
  misc_RNA (1)...(19): siRNA sense strand
gaaggcccucucaguacua

SEQ ID NO: 2039169 - RNA, 19 nt, Homo sapiens
  misc_RNA (1)...(19): siRNA sense strand
cacgaggccuccaucauca

SEQ ID NO: 2039170 - RNA, 19 nt, Homo sapiens
  misc_RNA (1)...(19): siRNA sense strand
gagcugauggaauuugaga

SEQ ID NO: 2039171 - RNA, 19 nt, Homo sapiens
  misc_RNA (1)...(19): siRNA sense strand
aauuugagauugcacugaa

SEQ ID NO: 2039172 - RNA, 19 nt, Homo sapiens
  misc_RNA (1)...(19): siRNA sense strand
agacaguguucuuccacaa

SEQ ID NO: 2039173 - RNA, 19 nt, Homo sapiens
  misc_RNA (1)...(19): siRNA sense strand
guggacagccucucucuca

SEQ ID NO: 2039174 - RNA, 19 nt, Homo sapiens
  misc_RNA (1)...(19): siRNA sense strand
gcagagcugauggaauuug

SEQ ID NO: 2039175 - RNA, 19 nt, Homo sapiens
  misc_RNA (1)...(19): siRNA sense strand
gaugccagaaugaguggua

SEQ ID NO: 2039176 - RNA, 19 nt, Homo sapiens
  misc_RNA (1)...(19): siRNA sense strand
gaagcaggcagagcugaug

SEQ ID NO: 2039177 - RNA, 19 nt, Homo sapiens
  misc_RNA (1)...(19): siRNA sense strand
ggaaaagcauggaaagacu

SEQ ID NO: 2039178 - RNA, 19 nt, Homo sapiens
  misc_RNA (1)...(19): siRNA sense strand
gaauuugagauugcacuga

SEQ ID NO: 2039179 - RNA, 19 nt, Homo sapiens
  misc_RNA (1)...(19): siRNA sense strand
ggaacagaucccagaaauc

SEQ ID NO: 2039180 - RNA, 19 nt, Homo sapiens
  misc_RNA (1)...(19): siRNA sense strand
gauggaauuugagauugca

SEQ ID NO: 2039181 - RNA, 19 nt, Homo sapiens
  misc_RNA (1)...(19): siRNA sense strand
cagaaugagugguauugcu

SEQ ID NO: 2039182 - RNA, 19 nt, Homo sapiens
  misc_RNA (1)...(19): siRNA sense strand
gccaagggacggcuacuca

SEQ ID NO: 2039183 - RNA, 19 nt, Homo sapiens
  misc_RNA (1)...(19): siRNA sense strand
ugaaggcccucucaguacu

SEQ ID NO: 2039184 - RNA, 19 nt, Homo sapiens
  misc_RNA (1)...(19): siRNA sense strand
cuaagaaggaccugguguu

SEQ ID NO: 2039185 - RNA, 19 nt, Homo sapiens
  misc_RNA (1)...(19): siRNA sense strand
caagucaagcacugggaaa

SEQ ID NO: 2039186 - RNA, 19 nt, Homo sapiens
  misc_RNA (1)...(19): siRNA sense strand
gcgcgcuacugccucacaa

SEQ ID NO: 2039187 - RNA, 19 nt, Homo sapiens
  misc_RNA (1)...(19): siRNA sense strand
gcagggagugccaagucaa

SEQ ID NO: 2039188 - RNA, 19 nt, Homo sapiens
  misc_RNA (1)...(19): siRNA sense strand
ggacuugguagacuauugc

SEQ ID NO: 2039189 - RNA, 19 nt, Homo sapiens
  misc_RNA (1)...(19): siRNA sense strand
gcucacgaugccagaauga

SEQ ID NO: 2039190 - RNA, 19 nt, Homo sapiens
  misc_RNA (1)...(19): siRNA sense strand
caaguuggacgggcaagug

SEQ ID NO: 2039191 - RNA, 19 nt, Homo sapiens
  misc_RNA (1)...(19): siRNA sense strand
accuugagccguaugcuua

SEQ ID NO: 2039192 - RNA, 19 nt, Homo sapiens
  misc_RNA (1)...(19): siRNA sense strand
cugauggaauuugagauug

SEQ ID NO: 2039193 - RNA, 19 nt, Homo sapiens
  misc_RNA (1)...(19): siRNA sense strand
gcaggcagagcugauggaa

SEQ ID NO: 2039194 - RNA, 19 nt, Homo sapiens
  misc_RNA (1)...(19): siRNA sense strand
caaggaggugugugaguca

SEQ ID NO: 2039195 - RNA, 19 nt, Homo sapiens
  misc_RNA (1)...(19): siRNA sense strand
uguacaaccugcugcuaag

SEQ ID NO: 2039196 - RNA, 19 nt, Homo sapiens
  misc_RNA (1)...(19): siRNA sense strand
aaguguggaucgcccugua

SEQ ID NO: 2039197 - RNA, 19 nt, Homo sapiens
  misc_RNA (1)...(19): siRNA sense strand
gcugaucgcaguggagaug

SEQ ID NO: 2039198 - RNA, 19 nt, Homo sapiens
  misc_RNA (1)...(19): siRNA sense strand
uggacuugguagacuauug

SEQ ID NO: 2039199 - RNA, 19 nt, Homo sapiens
  misc_RNA (1)...(19): siRNA sense strand
gccagaaugagugguauug

SEQ ID NO: 2039200 - RNA, 19 nt, Homo sapiens
  misc_RNA (1)...(19): siRNA sense strand
agaagguguucccuguguu

SEQ ID NO: 2039201 - RNA, 19 nt, Homo sapiens
  misc_RNA (1)...(19): siRNA sense strand
ucaguacuacgcuacauca

SEQ ID NO: 2039202 - RNA, 19 nt, Homo sapiens
  misc_RNA (1)...(19): siRNA sense strand
caagggacggcuacucaag

SEQ ID NO: 2039203 - RNA, 19 nt, Homo sapiens
  misc_RNA (1)...(19): siRNA sense strand
cugaaacccagccuccuaa

SEQ ID NO: 2039204 - RNA, 19 nt, Homo sapiens
  misc_RNA (1)...(19): siRNA sense strand
ggaucgcccuguacaaccu

SEQ ID NO: 2039205 - RNA, 19 nt, Homo sapiens
  misc_RNA (1)...(19): siRNA sense strand
gaaccagcagcaugagaac

SEQ ID NO: 2039206 - RNA, 19 nt, Homo sapiens
  misc_RNA (1)...(19): siRNA sense strand
gagcggcuggagcgagaaa

SEQ ID NO: 2039207 - RNA, 19 nt, Homo sapiens
  misc_RNA (1)...(19): siRNA sense strand
uggcccacuugcagaguuu

SEQ ID NO: 2039208 - RNA, 19 nt, Homo sapiens
  misc_RNA (1)...(19): siRNA sense strand
caguggagauguggaagca

SEQ ID NO: 2039209 - RNA, 19 nt, Homo sapiens
  misc_RNA (1)...(19): siRNA sense strand
ucuuggacuugguagacua

SEQ ID NO: 2039210 - RNA, 19 nt, Homo sapiens
  misc_RNA (1)...(19): siRNA sense strand
ccaagggacggcuacucaa

SEQ ID NO: 2039211 - RNA, 19 nt, Homo sapiens
  misc_RNA (1)...(19): siRNA sense strand
ugauggaauuugagauugc

SEQ ID NO: 2039212 - RNA, 19 nt, Homo sapiens
  misc_RNA (1)...(19): siRNA sense strand
cagaacaccuuccccaucu

SEQ ID NO: 2039213 - RNA, 19 nt, Homo sapiens
  misc_RNA (1)...(19): siRNA sense strand
gaaaagcauggaaagacuu

SEQ ID NO: 2039214 - RNA, 19 nt, Homo sapiens
  misc_RNA (1)...(19): siRNA sense strand
gaaauggugcuaagauauu

SEQ ID NO: 2039215 - RNA, 19 nt, Homo sapiens
  misc_RNA (1)...(19): siRNA sense strand
ggaaguggaugcagaugga

SEQ ID NO: 2039216 - RNA, 19 nt, Homo sapiens
  misc_RNA (1)...(19): siRNA sense strand
gcacagugauugagaagca

SEQ ID NO: 2039217 - RNA, 19 nt, Homo sapiens
  misc_RNA (1)...(19): siRNA sense strand
gauauuugccuaugccuuu

SEQ ID NO: 2039218 - RNA, 19 nt, Homo sapiens
  misc_RNA (1)...(19): siRNA sense strand
ggaaauggugcuaagauau

SEQ ID NO: 2039219 - RNA, 19 nt, Homo sapiens
  misc_RNA (1)...(19): siRNA sense strand
uggaaauggugcuaagaua

SEQ ID NO: 2039220 - RNA, 19 nt, Homo sapiens
  misc_RNA (1)...(19): siRNA sense strand
cuacagacccuauagaaga

SEQ ID NO: 2039221 - RNA, 19 nt, Homo sapiens
  misc_RNA (1)...(19): siRNA sense strand
uaaaugugacccgguauua

SEQ ID NO: 2039222 - RNA, 19 nt, Homo sapiens
  misc_RNA (1)...(19): siRNA sense strand
gcuaagauauuugccuaug

SEQ ID NO: 2039223 - RNA, 19 nt, Homo sapiens
  misc_RNA (1)...(19): siRNA sense strand
aauacacgcugaucgauga

SEQ ID NO: 2039224 - RNA, 19 nt, Homo sapiens
  misc_RNA (1)...(19): siRNA sense strand
aaugugacccgguauuaua

SEQ ID NO: 2039225 - RNA, 19 nt, Homo sapiens
  misc_RNA (1)...(19): siRNA sense strand
ggaugcagauggaaauggu

SEQ ID NO: 2039226 - RNA, 19 nt, Homo sapiens
  misc_RNA (1)...(19): siRNA sense strand
uacagacccuauagaagaa

SEQ ID NO: 2039227 - RNA, 19 nt, Homo sapiens
  misc_RNA (1)...(19): siRNA sense strand
ccaaauacacgcugaucga

SEQ ID NO: 2039228 - RNA, 19 nt, Homo sapiens
  misc_RNA (1)...(19): siRNA sense strand
caacggggauguaguggaa

SEQ ID NO: 2039229 - RNA, 19 nt, Homo sapiens
  misc_RNA (1)...(19): siRNA sense strand
ccuaugccuuugacaagaa

SEQ ID NO: 2039230 - RNA, 19 nt, Homo sapiens
  misc_RNA (1)...(19): siRNA sense strand
gggagcaaagcuuguauug

SEQ ID NO: 2039231 - RNA, 19 nt, Homo sapiens
  misc_RNA (1)...(19): siRNA sense strand
gcaagcagagggagcaaag

SEQ ID NO: 2039232 - RNA, 19 nt, Homo sapiens
  misc_RNA (1)...(19): siRNA sense strand
gaacucuugcaccuacuau

SEQ ID NO: 2039233 - RNA, 19 nt, Homo sapiens
  misc_RNA (1)...(19): siRNA sense strand
gcagauggaaauggugcua

SEQ ID NO: 2039234 - RNA, 19 nt, Homo sapiens
  misc_RNA (1)...(19): siRNA sense strand
uacccucccugcacaguga

SEQ ID NO: 2039235 - RNA, 19 nt, Homo sapiens
  misc_RNA (1)...(19): siRNA sense strand
gccuaugccuuugacaaga

SEQ ID NO: 2039236 - RNA, 19 nt, Homo sapiens
  misc_RNA (1)...(19): siRNA sense strand
gccuacagacccuauagaa

SEQ ID NO: 2039237 - RNA, 19 nt, Homo sapiens
  misc_RNA (1)...(19): siRNA sense strand
gugacccgguauuauaaug

SEQ ID NO: 2039238 - RNA, 19 nt, Homo sapiens
  misc_RNA (1)...(19): siRNA sense strand
cccuauagaagaacaguuu

SEQ ID NO: 2039239 - RNA, 19 nt, Homo sapiens
  misc_RNA (1)...(19): siRNA sense strand
cuaaaugugacccgguauu

SEQ ID NO: 2039240 - RNA, 19 nt, Homo sapiens
  misc_RNA (1)...(19): siRNA sense strand
caaauacacgcugaucgau

SEQ ID NO: 2039241 - RNA, 19 nt, Homo sapiens
  misc_RNA (1)...(19): siRNA sense strand
cugaagagaccuccagcaa

SEQ ID NO: 2039242 - RNA, 19 nt, Homo sapiens
  misc_RNA (1)...(19): siRNA sense strand
gauggaaauggugcuaaga

SEQ ID NO: 2039243 - RNA, 19 nt, Homo sapiens
  misc_RNA (1)...(19): siRNA sense strand
acucuugcaccuacuauga

SEQ ID NO: 2039244 - RNA, 19 nt, Homo sapiens
  misc_RNA (1)...(19): siRNA sense strand
agagggagcaaagcuugua

SEQ ID NO: 2039245 - RNA, 19 nt, Homo sapiens
  misc_RNA (1)...(19): siRNA sense strand
gaaguggaugcagauggaa

SEQ ID NO: 2039246 - RNA, 19 nt, Homo sapiens
  misc_RNA (1)...(19): siRNA sense strand
agauggaaauggugcuaag

SEQ ID NO: 2039247 - RNA, 19 nt, Homo sapiens
  misc_RNA (1)...(19): siRNA sense strand
ccugcacagugauugagaa

SEQ ID NO: 2039248 - RNA, 19 nt, Homo sapiens
  misc_RNA (1)...(19): siRNA sense strand
cuaagauauuugccuaugc

SEQ ID NO: 2039249 - RNA, 19 nt, Homo sapiens
  misc_RNA (1)...(19): siRNA sense strand
ggagcaaagcuuguauugg

SEQ ID NO: 2039250 - RNA, 19 nt, Homo sapiens
  misc_RNA (1)...(19): siRNA sense strand
gagaaaggaugacucacaa

SEQ ID NO: 2039251 - RNA, 19 nt, Homo sapiens
  misc_RNA (1)...(19): siRNA sense strand
gaaaggcacaucaacaaga

SEQ ID NO: 2039252 - RNA, 19 nt, Homo sapiens
  misc_RNA (1)...(19): siRNA sense strand
gaaaggaugacucacaaga

SEQ ID NO: 2039253 - RNA, 19 nt, Homo sapiens
  misc_RNA (1)...(19): siRNA sense strand
ggaaggcacuggcuuacuc

SEQ ID NO: 2039254 - RNA, 19 nt, Homo sapiens
  misc_RNA (1)...(19): siRNA sense strand
aaaggcacaucaacaagaa

SEQ ID NO: 2039255 - RNA, 19 nt, Homo sapiens
  misc_RNA (1)...(19): siRNA sense strand
gccaagggcagaguauuua

SEQ ID NO: 2039256 - RNA, 19 nt, Homo sapiens
  misc_RNA (1)...(19): siRNA sense strand
gcagugacaccgcuguuga

SEQ ID NO: 2039257 - RNA, 19 nt, Homo sapiens
  misc_RNA (1)...(19): siRNA sense strand
ggccaagggcagaguauuu

SEQ ID NO: 2039258 - RNA, 19 nt, Homo sapiens
  misc_RNA (1)...(19): siRNA sense strand
ccacccaccuucuccuuuc

SEQ ID NO: 2039259 - RNA, 19 nt, Homo sapiens
  misc_RNA (1)...(19): siRNA sense strand
ggagagacgucggcuacag

SEQ ID NO: 2039260 - RNA, 19 nt, Homo sapiens
  misc_RNA (1)...(19): siRNA sense strand
cgggugcucuuaccuucua

SEQ ID NO: 2039261 - RNA, 19 nt, Homo sapiens
  misc_RNA (1)...(19): siRNA sense strand
caacgugauccgcugguuu

SEQ ID NO: 2039262 - RNA, 19 nt, Homo sapiens
  misc_RNA (1)...(19): siRNA sense strand
acaggaaggcacuggcuua

SEQ ID NO: 2039263 - RNA, 19 nt, Homo sapiens
  misc_RNA (1)...(19): siRNA sense strand
cgagaaaggaugacucaca

SEQ ID NO: 2039264 - RNA, 19 nt, Homo sapiens
  misc_RNA (1)...(19): siRNA sense strand
ggcagaguauuuaggaauc

SEQ ID NO: 2039265 - RNA, 19 nt, Homo sapiens
  misc_RNA (1)...(19): siRNA sense strand
ugacaccgcuguugaugcu

SEQ ID NO: 2039266 - RNA, 19 nt, Homo sapiens
  misc_RNA (1)...(19): siRNA sense strand
ggaggcuuaugcugccauu

SEQ ID NO: 2039267 - RNA, 19 nt, Homo sapiens
  misc_RNA (1)...(19): siRNA sense strand
acacaccacugcagcaucu

SEQ ID NO: 2039268 - RNA, 19 nt, Homo sapiens
  misc_RNA (1)...(19): siRNA sense strand
uauggaaguugggaccuuu

SEQ ID NO: 2039269 - RNA, 19 nt, Homo sapiens
  misc_RNA (1)...(19): siRNA sense strand
gaacacaccacugcagcau

SEQ ID NO: 2039270 - RNA, 19 nt, Homo sapiens
  misc_RNA (1)...(19): siRNA sense strand
gggcagaguauuuaggaau

SEQ ID NO: 2039271 - RNA, 19 nt, Homo sapiens
  misc_RNA (1)...(19): siRNA sense strand
ucgaaaggcacaucaacaa

SEQ ID NO: 2039272 - RNA, 19 nt, Homo sapiens
  misc_RNA (1)...(19): siRNA sense strand
ggacaacuggaagguauuc

SEQ ID NO: 2039273 - RNA, 19 nt, Homo sapiens
  misc_RNA (1)...(19): siRNA sense strand
gccaccgucuccaucugua

SEQ ID NO: 2039274 - RNA, 19 nt, Homo sapiens
  misc_RNA (1)...(19): siRNA sense strand
ucuguaagaagugcauuua

SEQ ID NO: 2039275 - RNA, 19 nt, Homo sapiens
  misc_RNA (1)...(19): siRNA sense strand
uuggacaacuggaagguau

SEQ ID NO: 2039276 - RNA, 19 nt, Homo sapiens
  misc_RNA (1)...(19): siRNA sense strand
ggugagacuagcaucgaaa

SEQ ID NO: 2039277 - RNA, 19 nt, Homo sapiens
  misc_RNA (1)...(19): siRNA sense strand
gcugguagacaacgugauc

SEQ ID NO: 2039278 - RNA, 19 nt, Homo sapiens
  misc_RNA (1)...(19): siRNA sense strand
cgaaaggcacaucaacaag

SEQ ID NO: 2039279 - RNA, 19 nt, Homo sapiens
  misc_RNA (1)...(19): siRNA sense strand
aggcuuaugcugccauuga

SEQ ID NO: 2039280 - RNA, 19 nt, Homo sapiens
  misc_RNA (1)...(19): siRNA sense strand
gaggugagacuagcaucga

SEQ ID NO: 2039281 - RNA, 19 nt, Homo sapiens
  misc_RNA (1)...(19): siRNA sense strand
ccuuugagccugucuacug

SEQ ID NO: 2039282 - RNA, 19 nt, Homo sapiens
  misc_RNA (1)...(19): siRNA sense strand
gcaugcuguucucaucagu

SEQ ID NO: 2039283 - RNA, 19 nt, Homo sapiens
  misc_RNA (1)...(19): siRNA sense strand
gcucccugcucuacaacuc

SEQ ID NO: 2039284 - RNA, 19 nt, Homo sapiens
  misc_RNA (1)...(19): siRNA sense strand
gcagaguauuuaggaaucc

SEQ ID NO: 2039285 - RNA, 19 nt, Homo sapiens
  misc_RNA (1)...(19): siRNA sense strand
gagaaaggaugacucacaa

SEQ ID NO: 2039286 - RNA, 19 nt, Homo sapiens
  misc_RNA (1)...(19): siRNA sense strand
gaaaggcacaucaacaaga

SEQ ID NO: 2039287 - RNA, 19 nt, Homo sapiens
  misc_RNA (1)...(19): siRNA sense strand
gaaaggaugacucacaaga

SEQ ID NO: 2039288 - RNA, 19 nt, Homo sapiens
  misc_RNA (1)...(19): siRNA sense strand
ggaaggcacuggcuuacuc

SEQ ID NO: 2039289 - RNA, 19 nt, Homo sapiens
  misc_RNA (1)...(19): siRNA sense strand
aaaggcacaucaacaagaa

SEQ ID NO: 2039290 - RNA, 19 nt, Homo sapiens
  misc_RNA (1)...(19): siRNA sense strand
gccaagggcagaguauuua

SEQ ID NO: 2039291 - RNA, 19 nt, Homo sapiens
  misc_RNA (1)...(19): siRNA sense strand
gcagugacaccgcuguuga

SEQ ID NO: 2039292 - RNA, 19 nt, Homo sapiens
  misc_RNA (1)...(19): siRNA sense strand
ggccaagggcagaguauuu

SEQ ID NO: 2039293 - RNA, 19 nt, Homo sapiens
  misc_RNA (1)...(19): siRNA sense strand
ccacccaccuucuccuuuc

SEQ ID NO: 2039294 - RNA, 19 nt, Homo sapiens
  misc_RNA (1)...(19): siRNA sense strand
ggagagacgucggcuacag

SEQ ID NO: 2039295 - RNA, 19 nt, Homo sapiens
  misc_RNA (1)...(19): siRNA sense strand
cgggugcucuuaccuucua

SEQ ID NO: 2039296 - RNA, 19 nt, Homo sapiens
  misc_RNA (1)...(19): siRNA sense strand
caacgugauccgcugguuu

SEQ ID NO: 2039297 - RNA, 19 nt, Homo sapiens
  misc_RNA (1)...(19): siRNA sense strand
acaggaaggcacuggcuua

SEQ ID NO: 2039298 - RNA, 19 nt, Homo sapiens
  misc_RNA (1)...(19): siRNA sense strand
cgagaaaggaugacucaca

SEQ ID NO: 2039299 - RNA, 19 nt, Homo sapiens
  misc_RNA (1)...(19): siRNA sense strand
ggcagaguauuuaggaauc

SEQ ID NO: 2039300 - RNA, 19 nt, Homo sapiens
  misc_RNA (1)...(19): siRNA sense strand
ugacaccgcuguugaugcu

SEQ ID NO: 2039301 - RNA, 19 nt, Homo sapiens
  misc_RNA (1)...(19): siRNA sense strand
ggaggcuuaugcugccauu

SEQ ID NO: 2039302 - RNA, 19 nt, Homo sapiens
  misc_RNA (1)...(19): siRNA sense strand
acacaccacugcagcaucu

SEQ ID NO: 2039303 - RNA, 19 nt, Homo sapiens
  misc_RNA (1)...(19): siRNA sense strand
uauggaaguugggaccuuu

SEQ ID NO: 2039304 - RNA, 19 nt, Homo sapiens
  misc_RNA (1)...(19): siRNA sense strand
gaacacaccacugcagcau

SEQ ID NO: 2039305 - RNA, 19 nt, Homo sapiens
  misc_RNA (1)...(19): siRNA sense strand
gggcagaguauuuaggaau

SEQ ID NO: 2039306 - RNA, 19 nt, Homo sapiens
  misc_RNA (1)...(19): siRNA sense strand
ucgaaaggcacaucaacaa

SEQ ID NO: 2039307 - RNA, 19 nt, Homo sapiens
  misc_RNA (1)...(19): siRNA sense strand
ggacaacuggaagguauuc

SEQ ID NO: 2039308 - RNA, 19 nt, Homo sapiens
  misc_RNA (1)...(19): siRNA sense strand
gccaccgucuccaucugua

SEQ ID NO: 2039309 - RNA, 19 nt, Homo sapiens
  misc_RNA (1)...(19): siRNA sense strand
ucuguaagaagugcauuua

SEQ ID NO: 2039310 - RNA, 19 nt, Homo sapiens
  misc_RNA (1)...(19): siRNA sense strand
uuggacaacuggaagguau

SEQ ID NO: 2039311 - RNA, 19 nt, Homo sapiens
  misc_RNA (1)...(19): siRNA sense strand
ggugagacuagcaucgaaa

SEQ ID NO: 2039312 - RNA, 19 nt, Homo sapiens
  misc_RNA (1)...(19): siRNA sense strand
gcugguagacaacgugauc

SEQ ID NO: 2039313 - RNA, 19 nt, Homo sapiens
  misc_RNA (1)...(19): siRNA sense strand
cgaaaggcacaucaacaag

SEQ ID NO: 2039314 - RNA, 19 nt, Homo sapiens
  misc_RNA (1)...(19): siRNA sense strand
aggcuuaugcugccauuga

SEQ ID NO: 2039315 - RNA, 19 nt, Homo sapiens
  misc_RNA (1)...(19): siRNA sense strand
gaggugagacuagcaucga

SEQ ID NO: 2039316 - RNA, 19 nt, Homo sapiens
  misc_RNA (1)...(19): siRNA sense strand
ccuuugagccugucuacug

SEQ ID NO: 2039317 - RNA, 19 nt, Homo sapiens
  misc_RNA (1)...(19): siRNA sense strand
gcaugcuguucucaucagu

SEQ ID NO: 2039318 - RNA, 19 nt, Homo sapiens
  misc_RNA (1)...(19): siRNA sense strand
gcucccugcucuacaacuc

SEQ ID NO: 2039319 - RNA, 19 nt, Homo sapiens
  misc_RNA (1)...(19): siRNA sense strand
gcagaguauuuaggaaucc

SEQ ID NO: 2039320 - RNA, 19 nt, Homo sapiens
  misc_RNA (1)...(19): siRNA sense strand
gagaaaggaugacucacaa

SEQ ID NO: 2039321 - RNA, 19 nt, Homo sapiens
  misc_RNA (1)...(19): siRNA sense strand
gaaaggcacaucaacaaga

SEQ ID NO: 2039322 - RNA, 19 nt, Homo sapiens
  misc_RNA (1)...(19): siRNA sense strand
gaaaggaugacucacaaga

SEQ ID NO: 2039323 - RNA, 19 nt, Homo sapiens
  misc_RNA (1)...(19): siRNA sense strand
ggaaggcacuggcuuacuc

SEQ ID NO: 2039324 - RNA, 19 nt, Homo sapiens
  misc_RNA (1)...(19): siRNA sense strand
aaaggcacaucaacaagaa

SEQ ID NO: 2039325 - RNA, 19 nt, Homo sapiens
  misc_RNA (1)...(19): siRNA sense strand
gccaagggcagaguauuua

SEQ ID NO: 2039326 - RNA, 19 nt, Homo sapiens
  misc_RNA (1)...(19): siRNA sense strand
gcagugacaccgcuguuga

SEQ ID NO: 2039327 - RNA, 19 nt, Homo sapiens
  misc_RNA (1)...(19): siRNA sense strand
ggccaagggcagaguauuu

SEQ ID NO: 2039328 - RNA, 19 nt, Homo sapiens
  misc_RNA (1)...(19): siRNA sense strand
ccacccaccuucuccuuuc

SEQ ID NO: 2039329 - RNA, 19 nt, Homo sapiens
  misc_RNA (1)...(19): siRNA sense strand
ggagagacgucggcuacag

SEQ ID NO: 2039330 - RNA, 19 nt, Homo sapiens
  misc_RNA (1)...(19): siRNA sense strand
cgggugcucuuaccuucua

SEQ ID NO: 2039331 - RNA, 19 nt, Homo sapiens
  misc_RNA (1)...(19): siRNA sense strand
caacgugauccgcugguuu

SEQ ID NO: 2039332 - RNA, 19 nt, Homo sapiens
  misc_RNA (1)...(19): siRNA sense strand
acaggaaggcacuggcuua

SEQ ID NO: 2039333 - RNA, 19 nt, Homo sapiens
  misc_RNA (1)...(19): siRNA sense strand
cgagaaaggaugacucaca

SEQ ID NO: 2039334 - RNA, 19 nt, Homo sapiens
  misc_RNA (1)...(19): siRNA sense strand
ggcagaguauuuaggaauc

SEQ ID NO: 2039335 - RNA, 19 nt, Homo sapiens
  misc_RNA (1)...(19): siRNA sense strand
ugacaccgcuguugaugcu

SEQ ID NO: 2039336 - RNA, 19 nt, Homo sapiens
  misc_RNA (1)...(19): siRNA sense strand
ggaggcuuaugcugccauu

SEQ ID NO: 2039337 - RNA, 19 nt, Homo sapiens
  misc_RNA (1)...(19): siRNA sense strand
acacaccacugcagcaucu

SEQ ID NO: 2039338 - RNA, 19 nt, Homo sapiens
  misc_RNA (1)...(19): siRNA sense strand
uauggaaguugggaccuuu

SEQ ID NO: 2039339 - RNA, 19 nt, Homo sapiens
  misc_RNA (1)...(19): siRNA sense strand
gaacacaccacugcagcau

SEQ ID NO: 2039340 - RNA, 19 nt, Homo sapiens
  misc_RNA (1)...(19): siRNA sense strand
gggcagaguauuuaggaau

SEQ ID NO: 2039341 - RNA, 19 nt, Homo sapiens
  misc_RNA (1)...(19): siRNA sense strand
ucgaaaggcacaucaacaa

SEQ ID NO: 2039342 - RNA, 19 nt, Homo sapiens
  misc_RNA (1)...(19): siRNA sense strand
ggacaacuggaagguauuc

SEQ ID NO: 2039343 - RNA, 19 nt, Homo sapiens
  misc_RNA (1)...(19): siRNA sense strand
gccaccgucuccaucugua

SEQ ID NO: 2039344 - RNA, 19 nt, Homo sapiens
  misc_RNA (1)...(19): siRNA sense strand
ucuguaagaagugcauuua

SEQ ID NO: 2039345 - RNA, 19 nt, Homo sapiens
  misc_RNA (1)...(19): siRNA sense strand
uuggacaacuggaagguau

SEQ ID NO: 2039346 - RNA, 19 nt, Homo sapiens
  misc_RNA (1)...(19): siRNA sense strand
ggugagacuagcaucgaaa

SEQ ID NO: 2039347 - RNA, 19 nt, Homo sapiens
  misc_RNA (1)...(19): siRNA sense strand
gcugguagacaacgugauc

SEQ ID NO: 2039348 - RNA, 19 nt, Homo sapiens
  misc_RNA (1)...(19): siRNA sense strand
cgaaaggcacaucaacaag

SEQ ID NO: 2039349 - RNA, 19 nt, Homo sapiens
  misc_RNA (1)...(19): siRNA sense strand
aggcuuaugcugccauuga

SEQ ID NO: 2039350 - RNA, 19 nt, Homo sapiens
  misc_RNA (1)...(19): siRNA sense strand
gaggugagacuagcaucga

SEQ ID NO: 2039351 - RNA, 19 nt, Homo sapiens
  misc_RNA (1)...(19): siRNA sense strand
ccuuugagccugucuacug

SEQ ID NO: 2039352 - RNA, 19 nt, Homo sapiens
  misc_RNA (1)...(19): siRNA sense strand
gcaugcuguucucaucagu

SEQ ID NO: 2039353 - RNA, 19 nt, Homo sapiens
  misc_RNA (1)...(19): siRNA sense strand
gcucccugcucuacaacuc

SEQ ID NO: 2039354 - RNA, 19 nt, Homo sapiens
  misc_RNA (1)...(19): siRNA sense strand
gcagaguauuuaggaaucc

SEQ ID NO: 2039355 - RNA, 19 nt, Homo sapiens
  misc_RNA (1)...(19): siRNA sense strand
gagaaaggaugacucacaa

SEQ ID NO: 2039356 - RNA, 19 nt, Homo sapiens
  misc_RNA (1)...(19): siRNA sense strand
gaaaggcacaucaacaaga

SEQ ID NO: 2039357 - RNA, 19 nt, Homo sapiens
  misc_RNA (1)...(19): siRNA sense strand
gaaaggaugacucacaaga

SEQ ID NO: 2039358 - RNA, 19 nt, Homo sapiens
  misc_RNA (1)...(19): siRNA sense strand
ggaaggcacuggcuuacuc

SEQ ID NO: 2039359 - RNA, 19 nt, Homo sapiens
  misc_RNA (1)...(19): siRNA sense strand
aaaggcacaucaacaagaa

SEQ ID NO: 2039360 - RNA, 19 nt, Homo sapiens
  misc_RNA (1)...(19): siRNA sense strand
gccaagggcagaguauuua

SEQ ID NO: 2039361 - RNA, 19 nt, Homo sapiens
  misc_RNA (1)...(19): siRNA sense strand
gcagugacaccgcuguuga

SEQ ID NO: 2039362 - RNA, 19 nt, Homo sapiens
  misc_RNA (1)...(19): siRNA sense strand
ggccaagggcagaguauuu

SEQ ID NO: 2039363 - RNA, 19 nt, Homo sapiens
  misc_RNA (1)...(19): siRNA sense strand
ccacccaccuucuccuuuc

SEQ ID NO: 2039364 - RNA, 19 nt, Homo sapiens
  misc_RNA (1)...(19): siRNA sense strand
ggagagacgucggcuacag

SEQ ID NO: 2039365 - RNA, 19 nt, Homo sapiens
  misc_RNA (1)...(19): siRNA sense strand
cgggugcucuuaccuucua

SEQ ID NO: 2039366 - RNA, 19 nt, Homo sapiens
  misc_RNA (1)...(19): siRNA sense strand
caacgugauccgcugguuu

SEQ ID NO: 2039367 - RNA, 19 nt, Homo sapiens
  misc_RNA (1)...(19): siRNA sense strand
acaggaaggcacuggcuua

SEQ ID NO: 2039368 - RNA, 19 nt, Homo sapiens
  misc_RNA (1)...(19): siRNA sense strand
cgagaaaggaugacucaca

SEQ ID NO: 2039369 - RNA, 19 nt, Homo sapiens
  misc_RNA (1)...(19): siRNA sense strand
ggcagaguauuuaggaauc

SEQ ID NO: 2039370 - RNA, 19 nt, Homo sapiens
  misc_RNA (1)...(19): siRNA sense strand
ugacaccgcuguugaugcu

SEQ ID NO: 2039371 - RNA, 19 nt, Homo sapiens
  misc_RNA (1)...(19): siRNA sense strand
ggaggcuuaugcugccauu

SEQ ID NO: 2039372 - RNA, 19 nt, Homo sapiens
  misc_RNA (1)...(19): siRNA sense strand
acacaccacugcagcaucu

SEQ ID NO: 2039373 - RNA, 19 nt, Homo sapiens
  misc_RNA (1)...(19): siRNA sense strand
uauggaaguugggaccuuu

SEQ ID NO: 2039374 - RNA, 19 nt, Homo sapiens
  misc_RNA (1)...(19): siRNA sense strand
gaacacaccacugcagcau

SEQ ID NO: 2039375 - RNA, 19 nt, Homo sapiens
  misc_RNA (1)...(19): siRNA sense strand
gggcagaguauuuaggaau

SEQ ID NO: 2039376 - RNA, 19 nt, Homo sapiens
  misc_RNA (1)...(19): siRNA sense strand
ucgaaaggcacaucaacaa

SEQ ID NO: 2039377 - RNA, 19 nt, Homo sapiens
  misc_RNA (1)...(19): siRNA sense strand
ggacaacuggaagguauuc

SEQ ID NO: 2039378 - RNA, 19 nt, Homo sapiens
  misc_RNA (1)...(19): siRNA sense strand
gccaccgucuccaucugua

SEQ ID NO: 2039379 - RNA, 19 nt, Homo sapiens
  misc_RNA (1)...(19): siRNA sense strand
ucuguaagaagugcauuua

SEQ ID NO: 2039380 - RNA, 19 nt, Homo sapiens
  misc_RNA (1)...(19): siRNA sense strand
uuggacaacuggaagguau

SEQ ID NO: 2039381 - RNA, 19 nt, Homo sapiens
  misc_RNA (1)...(19): siRNA sense strand
ggugagacuagcaucgaaa

SEQ ID NO: 2039382 - RNA, 19 nt, Homo sapiens
  misc_RNA (1)...(19): siRNA sense strand
gcugguagacaacgugauc

SEQ ID NO: 2039383 - RNA, 19 nt, Homo sapiens
  misc_RNA (1)...(19): siRNA sense strand
cgaaaggcacaucaacaag

SEQ ID NO: 2039384 - RNA, 19 nt, Homo sapiens
  misc_RNA (1)...(19): siRNA sense strand
aggcuuaugcugccauuga

SEQ ID NO: 2039385 - RNA, 19 nt, Homo sapiens
  misc_RNA (1)...(19): siRNA sense strand
gaggugagacuagcaucga

SEQ ID NO: 2039386 - RNA, 19 nt, Homo sapiens
  misc_RNA (1)...(19): siRNA sense strand
ccuuugagccugucuacug

SEQ ID NO: 2039387 - RNA, 19 nt, Homo sapiens
  misc_RNA (1)...(19): siRNA sense strand
gcaugcuguucucaucagu

SEQ ID NO: 2039388 - RNA, 19 nt, Homo sapiens
  misc_RNA (1)...(19): siRNA sense strand
gcucccugcucuacaacuc

SEQ ID NO: 2039389 - RNA, 19 nt, Homo sapiens
  misc_RNA (1)...(19): siRNA sense strand
gcagaguauuuaggaaucc

SEQ ID NO: 2039390 - RNA, 19 nt, Homo sapiens
  misc_RNA (1)...(19): siRNA sense strand
gagaaaggaugacucacaa

SEQ ID NO: 2039391 - RNA, 19 nt, Homo sapiens
  misc_RNA (1)...(19): siRNA sense strand
gaaaggcacaucaacaaga

SEQ ID NO: 2039392 - RNA, 19 nt, Homo sapiens
  misc_RNA (1)...(19): siRNA sense strand
gaaaggaugacucacaaga

SEQ ID NO: 2039393 - RNA, 19 nt, Homo sapiens
  misc_RNA (1)...(19): siRNA sense strand
ggaaggcacuggcuuacuc

SEQ ID NO: 2039394 - RNA, 19 nt, Homo sapiens
  misc_RNA (1)...(19): siRNA sense strand
aaaggcacaucaacaagaa

SEQ ID NO: 2039395 - RNA, 19 nt, Homo sapiens
  misc_RNA (1)...(19): siRNA sense strand
gccaagggcagaguauuua

SEQ ID NO: 2039396 - RNA, 19 nt, Homo sapiens
  misc_RNA (1)...(19): siRNA sense strand
gcagugacaccgcuguuga

SEQ ID NO: 2039397 - RNA, 19 nt, Homo sapiens
  misc_RNA (1)...(19): siRNA sense strand
ggccaagggcagaguauuu

SEQ ID NO: 2039398 - RNA, 19 nt, Homo sapiens
  misc_RNA (1)...(19): siRNA sense strand
ccacccaccuucuccuuuc

SEQ ID NO: 2039399 - RNA, 19 nt, Homo sapiens
  misc_RNA (1)...(19): siRNA sense strand
ggagagacgucggcuacag

SEQ ID NO: 2039400 - RNA, 19 nt, Homo sapiens
  misc_RNA (1)...(19): siRNA sense strand
cgggugcucuuaccuucua

SEQ ID NO: 2039401 - RNA, 19 nt, Homo sapiens
  misc_RNA (1)...(19): siRNA sense strand
caacgugauccgcugguuu

SEQ ID NO: 2039402 - RNA, 19 nt, Homo sapiens
  misc_RNA (1)...(19): siRNA sense strand
acaggaaggcacuggcuua

SEQ ID NO: 2039403 - RNA, 19 nt, Homo sapiens
  misc_RNA (1)...(19): siRNA sense strand
cgagaaaggaugacucaca

SEQ ID NO: 2039404 - RNA, 19 nt, Homo sapiens
  misc_RNA (1)...(19): siRNA sense strand
ggcagaguauuuaggaauc

SEQ ID NO: 2039405 - RNA, 19 nt, Homo sapiens
  misc_RNA (1)...(19): siRNA sense strand
ugacaccgcuguugaugcu

SEQ ID NO: 2039406 - RNA, 19 nt, Homo sapiens
  misc_RNA (1)...(19): siRNA sense strand
ggaggcuuaugcugccauu

SEQ ID NO: 2039407 - RNA, 19 nt, Homo sapiens
  misc_RNA (1)...(19): siRNA sense strand
acacaccacugcagcaucu

SEQ ID NO: 2039408 - RNA, 19 nt, Homo sapiens
  misc_RNA (1)...(19): siRNA sense strand
uauggaaguugggaccuuu

SEQ ID NO: 2039409 - RNA, 19 nt, Homo sapiens
  misc_RNA (1)...(19): siRNA sense strand
gaacacaccacugcagcau

SEQ ID NO: 2039410 - RNA, 19 nt, Homo sapiens
  misc_RNA (1)...(19): siRNA sense strand
gggcagaguauuuaggaau

SEQ ID NO: 2039411 - RNA, 19 nt, Homo sapiens
  misc_RNA (1)...(19): siRNA sense strand
ucgaaaggcacaucaacaa

SEQ ID NO: 2039412 - RNA, 19 nt, Homo sapiens
  misc_RNA (1)...(19): siRNA sense strand
ggacaacuggaagguauuc

SEQ ID NO: 2039413 - RNA, 19 nt, Homo sapiens
  misc_RNA (1)...(19): siRNA sense strand
gccaccgucuccaucugua

SEQ ID NO: 2039414 - RNA, 19 nt, Homo sapiens
  misc_RNA (1)...(19): siRNA sense strand
ucuguaagaagugcauuua

SEQ ID NO: 2039415 - RNA, 19 nt, Homo sapiens
  misc_RNA (1)...(19): siRNA sense strand
uuggacaacuggaagguau

SEQ ID NO: 2039416 - RNA, 19 nt, Homo sapiens
  misc_RNA (1)...(19): siRNA sense strand
ggugagacuagcaucgaaa

SEQ ID NO: 2039417 - RNA, 19 nt, Homo sapiens
  misc_RNA (1)...(19): siRNA sense strand
gcugguagacaacgugauc

SEQ ID NO: 2039418 - RNA, 19 nt, Homo sapiens
  misc_RNA (1)...(19): siRNA sense strand
cgaaaggcacaucaacaag

SEQ ID NO: 2039419 - RNA, 19 nt, Homo sapiens
  misc_RNA (1)...(19): siRNA sense strand
aggcuuaugcugccauuga

SEQ ID NO: 2039420 - RNA, 19 nt, Homo sapiens
  misc_RNA (1)...(19): siRNA sense strand
gaggugagacuagcaucga

SEQ ID NO: 2039421 - RNA, 19 nt, Homo sapiens
  misc_RNA (1)...(19): siRNA sense strand
ccuuugagccugucuacug

SEQ ID NO: 2039422 - RNA, 19 nt, Homo sapiens
  misc_RNA (1)...(19): siRNA sense strand
gcaugcuguucucaucagu

SEQ ID NO: 2039423 - RNA, 19 nt, Homo sapiens
  misc_RNA (1)...(19): siRNA sense strand
gcucccugcucuacaacuc

SEQ ID NO: 2039424 - RNA, 19 nt, Homo sapiens
  misc_RNA (1)...(19): siRNA sense strand
gcagaguauuuaggaaucc

SEQ ID NO: 2039425 - RNA, 19 nt, Homo sapiens
  misc_RNA (1)...(19): siRNA sense strand
gagaaaggaugacucacaa

SEQ ID NO: 2039426 - RNA, 19 nt, Homo sapiens
  misc_RNA (1)...(19): siRNA sense strand
gaaaggcacaucaacaaga

SEQ ID NO: 2039427 - RNA, 19 nt, Homo sapiens
  misc_RNA (1)...(19): siRNA sense strand
gaaaggaugacucacaaga

SEQ ID NO: 2039428 - RNA, 19 nt, Homo sapiens
  misc_RNA (1)...(19): siRNA sense strand
ggaaggcacuggcuuacuc

SEQ ID NO: 2039429 - RNA, 19 nt, Homo sapiens
  misc_RNA (1)...(19): siRNA sense strand
aaaggcacaucaacaagaa

SEQ ID NO: 2039430 - RNA, 19 nt, Homo sapiens
  misc_RNA (1)...(19): siRNA sense strand
gccaagggcagaguauuua

SEQ ID NO: 2039431 - RNA, 19 nt, Homo sapiens
  misc_RNA (1)...(19): siRNA sense strand
gcagugacaccgcuguuga

SEQ ID NO: 2039432 - RNA, 19 nt, Homo sapiens
  misc_RNA (1)...(19): siRNA sense strand
ggccaagggcagaguauuu

SEQ ID NO: 2039433 - RNA, 19 nt, Homo sapiens
  misc_RNA (1)...(19): siRNA sense strand
ccacccaccuucuccuuuc

SEQ ID NO: 2039434 - RNA, 19 nt, Homo sapiens
  misc_RNA (1)...(19): siRNA sense strand
ggagagacgucggcuacag

SEQ ID NO: 2039435 - RNA, 19 nt, Homo sapiens
  misc_RNA (1)...(19): siRNA sense strand
cgggugcucuuaccuucua

SEQ ID NO: 2039436 - RNA, 19 nt, Homo sapiens
  misc_RNA (1)...(19): siRNA sense strand
caacgugauccgcugguuu

SEQ ID NO: 2039437 - RNA, 19 nt, Homo sapiens
  misc_RNA (1)...(19): siRNA sense strand
acaggaaggcacuggcuua

SEQ ID NO: 2039438 - RNA, 19 nt, Homo sapiens
  misc_RNA (1)...(19): siRNA sense strand
cgagaaaggaugacucaca

SEQ ID NO: 2039439 - RNA, 19 nt, Homo sapiens
  misc_RNA (1)...(19): siRNA sense strand
ggcagaguauuuaggaauc

SEQ ID NO: 2039440 - RNA, 19 nt, Homo sapiens
  misc_RNA (1)...(19): siRNA sense strand
ugacaccgcuguugaugcu

SEQ ID NO: 2039441 - RNA, 19 nt, Homo sapiens
  misc_RNA (1)...(19): siRNA sense strand
ggaggcuuaugcugccauu

SEQ ID NO: 2039442 - RNA, 19 nt, Homo sapiens
  misc_RNA (1)...(19): siRNA sense strand
acacaccacugcagcaucu

SEQ ID NO: 2039443 - RNA, 19 nt, Homo sapiens
  misc_RNA (1)...(19): siRNA sense strand
uauggaaguugggaccuuu

SEQ ID NO: 2039444 - RNA, 19 nt, Homo sapiens
  misc_RNA (1)...(19): siRNA sense strand
gaacacaccacugcagcau

SEQ ID NO: 2039445 - RNA, 19 nt, Homo sapiens
  misc_RNA (1)...(19): siRNA sense strand
gggcagaguauuuaggaau

SEQ ID NO: 2039446 - RNA, 19 nt, Homo sapiens
  misc_RNA (1)...(19): siRNA sense strand
ucgaaaggcacaucaacaa

SEQ ID NO: 2039447 - RNA, 19 nt, Homo sapiens
  misc_RNA (1)...(19): siRNA sense strand
ggacaacuggaagguauuc

SEQ ID NO: 2039448 - RNA, 19 nt, Homo sapiens
  misc_RNA (1)...(19): siRNA sense strand
gccaccgucuccaucugua

SEQ ID NO: 2039449 - RNA, 19 nt, Homo sapiens
  misc_RNA (1)...(19): siRNA sense strand
ucuguaagaagugcauuua

SEQ ID NO: 2039450 - RNA, 19 nt, Homo sapiens
  misc_RNA (1)...(19): siRNA sense strand
uuggacaacuggaagguau

SEQ ID NO: 2039451 - RNA, 19 nt, Homo sapiens
  misc_RNA (1)...(19): siRNA sense strand
ggugagacuagcaucgaaa

SEQ ID NO: 2039452 - RNA, 19 nt, Homo sapiens
  misc_RNA (1)...(19): siRNA sense strand
gcugguagacaacgugauc

SEQ ID NO: 2039453 - RNA, 19 nt, Homo sapiens
  misc_RNA (1)...(19): siRNA sense strand
cgaaaggcacaucaacaag

SEQ ID NO: 2039454 - RNA, 19 nt, Homo sapiens
  misc_RNA (1)...(19): siRNA sense strand
aggcuuaugcugccauuga

SEQ ID NO: 2039455 - RNA, 19 nt, Homo sapiens
  misc_RNA (1)...(19): siRNA sense strand
gaggugagacuagcaucga

SEQ ID NO: 2039456 - RNA, 19 nt, Homo sapiens
  misc_RNA (1)...(19): siRNA sense strand
ccuuugagccugucuacug

SEQ ID NO: 2039457 - RNA, 19 nt, Homo sapiens
  misc_RNA (1)...(19): siRNA sense strand
gcaugcuguucucaucagu

SEQ ID NO: 2039458 - RNA, 19 nt, Homo sapiens
  misc_RNA (1)...(19): siRNA sense strand
gcucccugcucuacaacuc

SEQ ID NO: 2039459 - RNA, 19 nt, Homo sapiens
  misc_RNA (1)...(19): siRNA sense strand
gcagaguauuuaggaaucc

SEQ ID NO: 2039460 - RNA, 19 nt, Homo sapiens
  misc_RNA (1)...(19): siRNA sense strand
gagaaaggaugacucacaa

SEQ ID NO: 2039461 - RNA, 19 nt, Homo sapiens
  misc_RNA (1)...(19): siRNA sense strand
gaaaggcacaucaacaaga

SEQ ID NO: 2039462 - RNA, 19 nt, Homo sapiens
  misc_RNA (1)...(19): siRNA sense strand
gaaaggaugacucacaaga

SEQ ID NO: 2039463 - RNA, 19 nt, Homo sapiens
  misc_RNA (1)...(19): siRNA sense strand
ggaaggcacuggcuuacuc

SEQ ID NO: 2039464 - RNA, 19 nt, Homo sapiens
  misc_RNA (1)...(19): siRNA sense strand
aaaggcacaucaacaagaa

SEQ ID NO: 2039465 - RNA, 19 nt, Homo sapiens
  misc_RNA (1)...(19): siRNA sense strand
gccaagggcagaguauuua

SEQ ID NO: 2039466 - RNA, 19 nt, Homo sapiens
  misc_RNA (1)...(19): siRNA sense strand
gcagugacaccgcuguuga

SEQ ID NO: 2039467 - RNA, 19 nt, Homo sapiens
  misc_RNA (1)...(19): siRNA sense strand
ggccaagggcagaguauuu

SEQ ID NO: 2039468 - RNA, 19 nt, Homo sapiens
  misc_RNA (1)...(19): siRNA sense strand
ccacccaccuucuccuuuc

SEQ ID NO: 2039469 - RNA, 19 nt, Homo sapiens
  misc_RNA (1)...(19): siRNA sense strand
ggagagacgucggcuacag

SEQ ID NO: 2039470 - RNA, 19 nt, Homo sapiens
  misc_RNA (1)...(19): siRNA sense strand
cgggugcucuuaccuucua

SEQ ID NO: 2039471 - RNA, 19 nt, Homo sapiens
  misc_RNA (1)...(19): siRNA sense strand
caacgugauccgcugguuu

SEQ ID NO: 2039472 - RNA, 19 nt, Homo sapiens
  misc_RNA (1)...(19): siRNA sense strand
acaggaaggcacuggcuua

SEQ ID NO: 2039473 - RNA, 19 nt, Homo sapiens
  misc_RNA (1)...(19): siRNA sense strand
cgagaaaggaugacucaca

SEQ ID NO: 2039474 - RNA, 19 nt, Homo sapiens
  misc_RNA (1)...(19): siRNA sense strand
ggcagaguauuuaggaauc

SEQ ID NO: 2039475 - RNA, 19 nt, Homo sapiens
  misc_RNA (1)...(19): siRNA sense strand
ugacaccgcuguugaugcu

SEQ ID NO: 2039476 - RNA, 19 nt, Homo sapiens
  misc_RNA (1)...(19): siRNA sense strand
ggaggcuuaugcugccauu

SEQ ID NO: 2039477 - RNA, 19 nt, Homo sapiens
  misc_RNA (1)...(19): siRNA sense strand
acacaccacugcagcaucu

SEQ ID NO: 2039478 - RNA, 19 nt, Homo sapiens
  misc_RNA (1)...(19): siRNA sense strand
uauggaaguugggaccuuu

SEQ ID NO: 2039479 - RNA, 19 nt, Homo sapiens
  misc_RNA (1)...(19): siRNA sense strand
gaacacaccacugcagcau

SEQ ID NO: 2039480 - RNA, 19 nt, Homo sapiens
  misc_RNA (1)...(19): siRNA sense strand
gggcagaguauuuaggaau

SEQ ID NO: 2039481 - RNA, 19 nt, Homo sapiens
  misc_RNA (1)...(19): siRNA sense strand
ucgaaaggcacaucaacaa

SEQ ID NO: 2039482 - RNA, 19 nt, Homo sapiens
  misc_RNA (1)...(19): siRNA sense strand
ggacaacuggaagguauuc

SEQ ID NO: 2039483 - RNA, 19 nt, Homo sapiens
  misc_RNA (1)...(19): siRNA sense strand
gccaccgucuccaucugua

SEQ ID NO: 2039484 - RNA, 19 nt, Homo sapiens
  misc_RNA (1)...(19): siRNA sense strand
ucuguaagaagugcauuua

SEQ ID NO: 2039485 - RNA, 19 nt, Homo sapiens
  misc_RNA (1)...(19): siRNA sense strand
uuggacaacuggaagguau

SEQ ID NO: 2039486 - RNA, 19 nt, Homo sapiens
  misc_RNA (1)...(19): siRNA sense strand
ggugagacuagcaucgaaa

SEQ ID NO: 2039487 - RNA, 19 nt, Homo sapiens
  misc_RNA (1)...(19): siRNA sense strand
gcugguagacaacgugauc

SEQ ID NO: 2039488 - RNA, 19 nt, Homo sapiens
  misc_RNA (1)...(19): siRNA sense strand
cgaaaggcacaucaacaag

SEQ ID NO: 2039489 - RNA, 19 nt, Homo sapiens
  misc_RNA (1)...(19): siRNA sense strand
aggcuuaugcugccauuga

SEQ ID NO: 2039490 - RNA, 19 nt, Homo sapiens
  misc_RNA (1)...(19): siRNA sense strand
gaggugagacuagcaucga

SEQ ID NO: 2039491 - RNA, 19 nt, Homo sapiens
  misc_RNA (1)...(19): siRNA sense strand
ccuuugagccugucuacug

SEQ ID NO: 2039492 - RNA, 19 nt, Homo sapiens
  misc_RNA (1)...(19): siRNA sense strand
gcaugcuguucucaucagu

SEQ ID NO: 2039493 - RNA, 19 nt, Homo sapiens
  misc_RNA (1)...(19): siRNA sense strand
gcucccugcucuacaacuc

SEQ ID NO: 2039494 - RNA, 19 nt, Homo sapiens
  misc_RNA (1)...(19): siRNA sense strand
gcagaguauuuaggaaucc

SEQ ID NO: 2039495 - RNA, 19 nt, Homo sapiens
  misc_RNA (1)...(19): siRNA sense strand
gagaaaggaugacucacaa

SEQ ID NO: 2039496 - RNA, 19 nt, Homo sapiens
  misc_RNA (1)...(19): siRNA sense strand
gaaaggcacaucaacaaga

SEQ ID NO: 2039497 - RNA, 19 nt, Homo sapiens
  misc_RNA (1)...(19): siRNA sense strand
gaaaggaugacucacaaga

SEQ ID NO: 2039498 - RNA, 19 nt, Homo sapiens
  misc_RNA (1)...(19): siRNA sense strand
ggaaggcacuggcuuacuc

SEQ ID NO: 2039499 - RNA, 19 nt, Homo sapiens
  misc_RNA (1)...(19): siRNA sense strand
aaaggcacaucaacaagaa

SEQ ID NO: 2039500 - RNA, 19 nt, Homo sapiens
  misc_RNA (1)...(19): siRNA sense strand
gccaagggcagaguauuua

SEQ ID NO: 2039501 - RNA, 19 nt, Homo sapiens
  misc_RNA (1)...(19): siRNA sense strand
gcagugacaccgcuguuga

SEQ ID NO: 2039502 - RNA, 19 nt, Homo sapiens
  misc_RNA (1)...(19): siRNA sense strand
ggccaagggcagaguauuu

SEQ ID NO: 2039503 - RNA, 19 nt, Homo sapiens
  misc_RNA (1)...(19): siRNA sense strand
ccacccaccuucuccuuuc

SEQ ID NO: 2039504 - RNA, 19 nt, Homo sapiens
  misc_RNA (1)...(19): siRNA sense strand
ggagagacgucggcuacag

SEQ ID NO: 2039505 - RNA, 19 nt, Homo sapiens
  misc_RNA (1)...(19): siRNA sense strand
cgggugcucuuaccuucua

SEQ ID NO: 2039506 - RNA, 19 nt, Homo sapiens
  misc_RNA (1)...(19): siRNA sense strand
caacgugauccgcugguuu

SEQ ID NO: 2039507 - RNA, 19 nt, Homo sapiens
  misc_RNA (1)...(19): siRNA sense strand
acaggaaggcacuggcuua

SEQ ID NO: 2039508 - RNA, 19 nt, Homo sapiens
  misc_RNA (1)...(19): siRNA sense strand
cgagaaaggaugacucaca

SEQ ID NO: 2039509 - RNA, 19 nt, Homo sapiens
  misc_RNA (1)...(19): siRNA sense strand
ggcagaguauuuaggaauc

SEQ ID NO: 2039510 - RNA, 19 nt, Homo sapiens
  misc_RNA (1)...(19): siRNA sense strand
ugacaccgcuguugaugcu

SEQ ID NO: 2039511 - RNA, 19 nt, Homo sapiens
  misc_RNA (1)...(19): siRNA sense strand
ggaggcuuaugcugccauu

SEQ ID NO: 2039512 - RNA, 19 nt, Homo sapiens
  misc_RNA (1)...(19): siRNA sense strand
acacaccacugcagcaucu

SEQ ID NO: 2039513 - RNA, 19 nt, Homo sapiens
  misc_RNA (1)...(19): siRNA sense strand
uauggaaguugggaccuuu

SEQ ID NO: 2039514 - RNA, 19 nt, Homo sapiens
  misc_RNA (1)...(19): siRNA sense strand
gaacacaccacugcagcau

SEQ ID NO: 2039515 - RNA, 19 nt, Homo sapiens
  misc_RNA (1)...(19): siRNA sense strand
gggcagaguauuuaggaau

SEQ ID NO: 2039516 - RNA, 19 nt, Homo sapiens
  misc_RNA (1)...(19): siRNA sense strand
ucgaaaggcacaucaacaa

SEQ ID NO: 2039517 - RNA, 19 nt, Homo sapiens
  misc_RNA (1)...(19): siRNA sense strand
ggacaacuggaagguauuc

SEQ ID NO: 2039518 - RNA, 19 nt, Homo sapiens
  misc_RNA (1)...(19): siRNA sense strand
gccaccgucuccaucugua

SEQ ID NO: 2039519 - RNA, 19 nt, Homo sapiens
  misc_RNA (1)...(19): siRNA sense strand
ucuguaagaagugcauuua

SEQ ID NO: 2039520 - RNA, 19 nt, Homo sapiens
  misc_RNA (1)...(19): siRNA sense strand
uuggacaacuggaagguau

SEQ ID NO: 2039521 - RNA, 19 nt, Homo sapiens
  misc_RNA (1)...(19): siRNA sense strand
ggugagacuagcaucgaaa

SEQ ID NO: 2039522 - RNA, 19 nt, Homo sapiens
  misc_RNA (1)...(19): siRNA sense strand
gcugguagacaacgugauc

SEQ ID NO: 2039523 - RNA, 19 nt, Homo sapiens
  misc_RNA (1)...(19): siRNA sense strand
cgaaaggcacaucaacaag

SEQ ID NO: 2039524 - RNA, 19 nt, Homo sapiens
  misc_RNA (1)...(19): siRNA sense strand
aggcuuaugcugccauuga

SEQ ID NO: 2039525 - RNA, 19 nt, Homo sapiens
  misc_RNA (1)...(19): siRNA sense strand
gaggugagacuagcaucga

SEQ ID NO: 2039526 - RNA, 19 nt, Homo sapiens
  misc_RNA (1)...(19): siRNA sense strand
ccuuugagccugucuacug

SEQ ID NO: 2039527 - RNA, 19 nt, Homo sapiens
  misc_RNA (1)...(19): siRNA sense strand
gcaugcuguucucaucagu

SEQ ID NO: 2039528 - RNA, 19 nt, Homo sapiens
  misc_RNA (1)...(19): siRNA sense strand
gcucccugcucuacaacuc

SEQ ID NO: 2039529 - RNA, 19 nt, Homo sapiens
  misc_RNA (1)...(19): siRNA sense strand
gcagaguauuuaggaaucc

SEQ ID NO: 2039530 - RNA, 19 nt, Homo sapiens
  misc_RNA (1)...(19): siRNA sense strand
gagaaaggaugacucacaa

SEQ ID NO: 2039531 - RNA, 19 nt, Homo sapiens
  misc_RNA (1)...(19): siRNA sense strand
gaaaggcacaucaacaaga

SEQ ID NO: 2039532 - RNA, 19 nt, Homo sapiens
  misc_RNA (1)...(19): siRNA sense strand
gaaaggaugacucacaaga

SEQ ID NO: 2039533 - RNA, 19 nt, Homo sapiens
  misc_RNA (1)...(19): siRNA sense strand
ggaaggcacuggcuuacuc

SEQ ID NO: 2039534 - RNA, 19 nt, Homo sapiens
  misc_RNA (1)...(19): siRNA sense strand
aaaggcacaucaacaagaa

SEQ ID NO: 2039535 - RNA, 19 nt, Homo sapiens
  misc_RNA (1)...(19): siRNA sense strand
gccaagggcagaguauuua

SEQ ID NO: 2039536 - RNA, 19 nt, Homo sapiens
  misc_RNA (1)...(19): siRNA sense strand
gcagugacaccgcuguuga

SEQ ID NO: 2039537 - RNA, 19 nt, Homo sapiens
  misc_RNA (1)...(19): siRNA sense strand
ggccaagggcagaguauuu

SEQ ID NO: 2039538 - RNA, 19 nt, Homo sapiens
  misc_RNA (1)...(19): siRNA sense strand
ccacccaccuucuccuuuc

SEQ ID NO: 2039539 - RNA, 19 nt, Homo sapiens
  misc_RNA (1)...(19): siRNA sense strand
ggagagacgucggcuacag

SEQ ID NO: 2039540 - RNA, 19 nt, Homo sapiens
  misc_RNA (1)...(19): siRNA sense strand
cgggugcucuuaccuucua

SEQ ID NO: 2039541 - RNA, 19 nt, Homo sapiens
  misc_RNA (1)...(19): siRNA sense strand
caacgugauccgcugguuu

SEQ ID NO: 2039542 - RNA, 19 nt, Homo sapiens
  misc_RNA (1)...(19): siRNA sense strand
acaggaaggcacuggcuua

SEQ ID NO: 2039543 - RNA, 19 nt, Homo sapiens
  misc_RNA (1)...(19): siRNA sense strand
cgagaaaggaugacucaca

SEQ ID NO: 2039544 - RNA, 19 nt, Homo sapiens
  misc_RNA (1)...(19): siRNA sense strand
ggcagaguauuuaggaauc

SEQ ID NO: 2039545 - RNA, 19 nt, Homo sapiens
  misc_RNA (1)...(19): siRNA sense strand
ugacaccgcuguugaugcu

SEQ ID NO: 2039546 - RNA, 19 nt, Homo sapiens
  misc_RNA (1)...(19): siRNA sense strand
ggaggcuuaugcugccauu

SEQ ID NO: 2039547 - RNA, 19 nt, Homo sapiens
  misc_RNA (1)...(19): siRNA sense strand
acacaccacugcagcaucu

SEQ ID NO: 2039548 - RNA, 19 nt, Homo sapiens
  misc_RNA (1)...(19): siRNA sense strand
uauggaaguugggaccuuu

SEQ ID NO: 2039549 - RNA, 19 nt, Homo sapiens
  misc_RNA (1)...(19): siRNA sense strand
gaacacaccacugcagcau

SEQ ID NO: 2039550 - RNA, 19 nt, Homo sapiens
  misc_RNA (1)...(19): siRNA sense strand
gggcagaguauuuaggaau

SEQ ID NO: 2039551 - RNA, 19 nt, Homo sapiens
  misc_RNA (1)...(19): siRNA sense strand
ucgaaaggcacaucaacaa

SEQ ID NO: 2039552 - RNA, 19 nt, Homo sapiens
  misc_RNA (1)...(19): siRNA sense strand
ggacaacuggaagguauuc

SEQ ID NO: 2039553 - RNA, 19 nt, Homo sapiens
  misc_RNA (1)...(19): siRNA sense strand
gccaccgucuccaucugua

SEQ ID NO: 2039554 - RNA, 19 nt, Homo sapiens
  misc_RNA (1)...(19): siRNA sense strand
ucuguaagaagugcauuua

SEQ ID NO: 2039555 - RNA, 19 nt, Homo sapiens
  misc_RNA (1)...(19): siRNA sense strand
uuggacaacuggaagguau

SEQ ID NO: 2039556 - RNA, 19 nt, Homo sapiens
  misc_RNA (1)...(19): siRNA sense strand
ggugagacuagcaucgaaa

SEQ ID NO: 2039557 - RNA, 19 nt, Homo sapiens
  misc_RNA (1)...(19): siRNA sense strand
gcugguagacaacgugauc

SEQ ID NO: 2039558 - RNA, 19 nt, Homo sapiens
  misc_RNA (1)...(19): siRNA sense strand
cgaaaggcacaucaacaag

SEQ ID NO: 2039559 - RNA, 19 nt, Homo sapiens
  misc_RNA (1)...(19): siRNA sense strand
aggcuuaugcugccauuga

SEQ ID NO: 2039560 - RNA, 19 nt, Homo sapiens
  misc_RNA (1)...(19): siRNA sense strand
gaggugagacuagcaucga

SEQ ID NO: 2039561 - RNA, 19 nt, Homo sapiens
  misc_RNA (1)...(19): siRNA sense strand
ccuuugagccugucuacug

SEQ ID NO: 2039562 - RNA, 19 nt, Homo sapiens
  misc_RNA (1)...(19): siRNA sense strand
gcaugcuguucucaucagu

SEQ ID NO: 2039563 - RNA, 19 nt, Homo sapiens
  misc_RNA (1)...(19): siRNA sense strand
gcucccugcucuacaacuc

SEQ ID NO: 2039564 - RNA, 19 nt, Homo sapiens
  misc_RNA (1)...(19): siRNA sense strand
gcagaguauuuaggaaucc

SEQ ID NO: 2039565 - RNA, 19 nt, Homo sapiens
  misc_RNA (1)...(19): siRNA sense strand
gagaaaggaugacucacaa

SEQ ID NO: 2039566 - RNA, 19 nt, Homo sapiens
  misc_RNA (1)...(19): siRNA sense strand
gaaaggcacaucaacaaga

SEQ ID NO: 2039567 - RNA, 19 nt, Homo sapiens
  misc_RNA (1)...(19): siRNA sense strand
gaaaggaugacucacaaga

SEQ ID NO: 2039568 - RNA, 19 nt, Homo sapiens
  misc_RNA (1)...(19): siRNA sense strand
ggaaggcacuggcuuacuc

SEQ ID NO: 2039569 - RNA, 19 nt, Homo sapiens
  misc_RNA (1)...(19): siRNA sense strand
aaaggcacaucaacaagaa

SEQ ID NO: 2039570 - RNA, 19 nt, Homo sapiens
  misc_RNA (1)...(19): siRNA sense strand
gccaagggcagaguauuua

SEQ ID NO: 2039571 - RNA, 19 nt, Homo sapiens
  misc_RNA (1)...(19): siRNA sense strand
gcagugacaccgcuguuga

SEQ ID NO: 2039572 - RNA, 19 nt, Homo sapiens
  misc_RNA (1)...(19): siRNA sense strand
ggccaagggcagaguauuu

SEQ ID NO: 2039573 - RNA, 19 nt, Homo sapiens
  misc_RNA (1)...(19): siRNA sense strand
ccacccaccuucuccuuuc

SEQ ID NO: 2039574 - RNA, 19 nt, Homo sapiens
  misc_RNA (1)...(19): siRNA sense strand
ggagagacgucggcuacag

SEQ ID NO: 2039575 - RNA, 19 nt, Homo sapiens
  misc_RNA (1)...(19): siRNA sense strand
cgggugcucuuaccuucua

SEQ ID NO: 2039576 - RNA, 19 nt, Homo sapiens
  misc_RNA (1)...(19): siRNA sense strand
caacgugauccgcugguuu

SEQ ID NO: 2039577 - RNA, 19 nt, Homo sapiens
  misc_RNA (1)...(19): siRNA sense strand
acaggaaggcacuggcuua

SEQ ID NO: 2039578 - RNA, 19 nt, Homo sapiens
  misc_RNA (1)...(19): siRNA sense strand
cgagaaaggaugacucaca

SEQ ID NO: 2039579 - RNA, 19 nt, Homo sapiens
  misc_RNA (1)...(19): siRNA sense strand
ggcagaguauuuaggaauc

SEQ ID NO: 2039580 - RNA, 19 nt, Homo sapiens
  misc_RNA (1)...(19): siRNA sense strand
ugacaccgcuguugaugcu

SEQ ID NO: 2039581 - RNA, 19 nt, Homo sapiens
  misc_RNA (1)...(19): siRNA sense strand
ggaggcuuaugcugccauu

SEQ ID NO: 2039582 - RNA, 19 nt, Homo sapiens
  misc_RNA (1)...(19): siRNA sense strand
acacaccacugcagcaucu

SEQ ID NO: 2039583 - RNA, 19 nt, Homo sapiens
  misc_RNA (1)...(19): siRNA sense strand
uauggaaguugggaccuuu

SEQ ID NO: 2039584 - RNA, 19 nt, Homo sapiens
  misc_RNA (1)...(19): siRNA sense strand
gaacacaccacugcagcau

SEQ ID NO: 2039585 - RNA, 19 nt, Homo sapiens
  misc_RNA (1)...(19): siRNA sense strand
gggcagaguauuuaggaau

SEQ ID NO: 2039586 - RNA, 19 nt, Homo sapiens
  misc_RNA (1)...(19): siRNA sense strand
ucgaaaggcacaucaacaa

SEQ ID NO: 2039587 - RNA, 19 nt, Homo sapiens
  misc_RNA (1)...(19): siRNA sense strand
ggacaacuggaagguauuc

SEQ ID NO: 2039588 - RNA, 19 nt, Homo sapiens
  misc_RNA (1)...(19): siRNA sense strand
gccaccgucuccaucugua

SEQ ID NO: 2039589 - RNA, 19 nt, Homo sapiens
  misc_RNA (1)...(19): siRNA sense strand
ucuguaagaagugcauuua

SEQ ID NO: 2039590 - RNA, 19 nt, Homo sapiens
  misc_RNA (1)...(19): siRNA sense strand
uuggacaacuggaagguau

SEQ ID NO: 2039591 - RNA, 19 nt, Homo sapiens
  misc_RNA (1)...(19): siRNA sense strand
ggugagacuagcaucgaaa

SEQ ID NO: 2039592 - RNA, 19 nt, Homo sapiens
  misc_RNA (1)...(19): siRNA sense strand
gcugguagacaacgugauc

SEQ ID NO: 2039593 - RNA, 19 nt, Homo sapiens
  misc_RNA (1)...(19): siRNA sense strand
cgaaaggcacaucaacaag

SEQ ID NO: 2039594 - RNA, 19 nt, Homo sapiens
  misc_RNA (1)...(19): siRNA sense strand
aggcuuaugcugccauuga

SEQ ID NO: 2039595 - RNA, 19 nt, Homo sapiens
  misc_RNA (1)...(19): siRNA sense strand
gaggugagacuagcaucga

SEQ ID NO: 2039596 - RNA, 19 nt, Homo sapiens
  misc_RNA (1)...(19): siRNA sense strand
ccuuugagccugucuacug

SEQ ID NO: 2039597 - RNA, 19 nt, Homo sapiens
  misc_RNA (1)...(19): siRNA sense strand
gcaugcuguucucaucagu

SEQ ID NO: 2039598 - RNA, 19 nt, Homo sapiens
  misc_RNA (1)...(19): siRNA sense strand
gcucccugcucuacaacuc

SEQ ID NO: 2039599 - RNA, 19 nt, Homo sapiens
  misc_RNA (1)...(19): siRNA sense strand
gcagaguauuuaggaaucc

SEQ ID NO: 2039600 - RNA, 19 nt, Homo sapiens
  misc_RNA (1)...(19): siRNA sense strand
gagaaaggaugacucacaa

SEQ ID NO: 2039601 - RNA, 19 nt, Homo sapiens
  misc_RNA (1)...(19): siRNA sense strand
gaaaggcacaucaacaaga

SEQ ID NO: 2039602 - RNA, 19 nt, Homo sapiens
  misc_RNA (1)...(19): siRNA sense strand
gaaaggaugacucacaaga

SEQ ID NO: 2039603 - RNA, 19 nt, Homo sapiens
  misc_RNA (1)...(19): siRNA sense strand
ggaaggcacuggcuuacuc

SEQ ID NO: 2039604 - RNA, 19 nt, Homo sapiens
  misc_RNA (1)...(19): siRNA sense strand
aaaggcacaucaacaagaa

SEQ ID NO: 2039605 - RNA, 19 nt, Homo sapiens
  misc_RNA (1)...(19): siRNA sense strand
gccaagggcagaguauuua

SEQ ID NO: 2039606 - RNA, 19 nt, Homo sapiens
  misc_RNA (1)...(19): siRNA sense strand
gcagugacaccgcuguuga

SEQ ID NO: 2039607 - RNA, 19 nt, Homo sapiens
  misc_RNA (1)...(19): siRNA sense strand
ggccaagggcagaguauuu

SEQ ID NO: 2039608 - RNA, 19 nt, Homo sapiens
  misc_RNA (1)...(19): siRNA sense strand
ccacccaccuucuccuuuc

SEQ ID NO: 2039609 - RNA, 19 nt, Homo sapiens
  misc_RNA (1)...(19): siRNA sense strand
ggagagacgucggcuacag

SEQ ID NO: 2039610 - RNA, 19 nt, Homo sapiens
  misc_RNA (1)...(19): siRNA sense strand
cgggugcucuuaccuucua

SEQ ID NO: 2039611 - RNA, 19 nt, Homo sapiens
  misc_RNA (1)...(19): siRNA sense strand
caacgugauccgcugguuu

SEQ ID NO: 2039612 - RNA, 19 nt, Homo sapiens
  misc_RNA (1)...(19): siRNA sense strand
acaggaaggcacuggcuua

SEQ ID NO: 2039613 - RNA, 19 nt, Homo sapiens
  misc_RNA (1)...(19): siRNA sense strand
cgagaaaggaugacucaca

SEQ ID NO: 2039614 - RNA, 19 nt, Homo sapiens
  misc_RNA (1)...(19): siRNA sense strand
ggcagaguauuuaggaauc

SEQ ID NO: 2039615 - RNA, 19 nt, Homo sapiens
  misc_RNA (1)...(19): siRNA sense strand
ugacaccgcuguugaugcu

SEQ ID NO: 2039616 - RNA, 19 nt, Homo sapiens
  misc_RNA (1)...(19): siRNA sense strand
ggaggcuuaugcugccauu

SEQ ID NO: 2039617 - RNA, 19 nt, Homo sapiens
  misc_RNA (1)...(19): siRNA sense strand
acacaccacugcagcaucu

SEQ ID NO: 2039618 - RNA, 19 nt, Homo sapiens
  misc_RNA (1)...(19): siRNA sense strand
uauggaaguugggaccuuu

SEQ ID NO: 2039619 - RNA, 19 nt, Homo sapiens
  misc_RNA (1)...(19): siRNA sense strand
gaacacaccacugcagcau

SEQ ID NO: 2039620 - RNA, 19 nt, Homo sapiens
  misc_RNA (1)...(19): siRNA sense strand
gggcagaguauuuaggaau

SEQ ID NO: 2039621 - RNA, 19 nt, Homo sapiens
  misc_RNA (1)...(19): siRNA sense strand
ucgaaaggcacaucaacaa

SEQ ID NO: 2039622 - RNA, 19 nt, Homo sapiens
  misc_RNA (1)...(19): siRNA sense strand
ggacaacuggaagguauuc

SEQ ID NO: 2039623 - RNA, 19 nt, Homo sapiens
  misc_RNA (1)...(19): siRNA sense strand
gccaccgucuccaucugua

SEQ ID NO: 2039624 - RNA, 19 nt, Homo sapiens
  misc_RNA (1)...(19): siRNA sense strand
ucuguaagaagugcauuua

SEQ ID NO: 2039625 - RNA, 19 nt, Homo sapiens
  misc_RNA (1)...(19): siRNA sense strand
uuggacaacuggaagguau

SEQ ID NO: 2039626 - RNA, 19 nt, Homo sapiens
  misc_RNA (1)...(19): siRNA sense strand
ggugagacuagcaucgaaa

SEQ ID NO: 2039627 - RNA, 19 nt, Homo sapiens
  misc_RNA (1)...(19): siRNA sense strand
gcugguagacaacgugauc

SEQ ID NO: 2039628 - RNA, 19 nt, Homo sapiens
  misc_RNA (1)...(19): siRNA sense strand
cgaaaggcacaucaacaag

SEQ ID NO: 2039629 - RNA, 19 nt, Homo sapiens
  misc_RNA (1)...(19): siRNA sense strand
aggcuuaugcugccauuga

SEQ ID NO: 2039630 - RNA, 19 nt, Homo sapiens
  misc_RNA (1)...(19): siRNA sense strand
gaggugagacuagcaucga

SEQ ID NO: 2039631 - RNA, 19 nt, Homo sapiens
  misc_RNA (1)...(19): siRNA sense strand
ccuuugagccugucuacug

SEQ ID NO: 2039632 - RNA, 19 nt, Homo sapiens
  misc_RNA (1)...(19): siRNA sense strand
gcaugcuguucucaucagu

SEQ ID NO: 2039633 - RNA, 19 nt, Homo sapiens
  misc_RNA (1)...(19): siRNA sense strand
gcucccugcucuacaacuc

SEQ ID NO: 2039634 - RNA, 19 nt, Homo sapiens
  misc_RNA (1)...(19): siRNA sense strand
gcagaguauuuaggaaucc

SEQ ID NO: 2039635 - RNA, 19 nt, Homo sapiens
  misc_RNA (1)...(19): siRNA sense strand
gagaaaggaugacucacaa

SEQ ID NO: 2039636 - RNA, 19 nt, Homo sapiens
  misc_RNA (1)...(19): siRNA sense strand
gaaaggcacaucaacaaga

SEQ ID NO: 2039637 - RNA, 19 nt, Homo sapiens
  misc_RNA (1)...(19): siRNA sense strand
gaaaggaugacucacaaga

SEQ ID NO: 2039638 - RNA, 19 nt, Homo sapiens
  misc_RNA (1)...(19): siRNA sense strand
ggaaggcacuggcuuacuc

SEQ ID NO: 2039639 - RNA, 19 nt, Homo sapiens
  misc_RNA (1)...(19): siRNA sense strand
aaaggcacaucaacaagaa

SEQ ID NO: 2039640 - RNA, 19 nt, Homo sapiens
  misc_RNA (1)...(19): siRNA sense strand
gccaagggcagaguauuua

SEQ ID NO: 2039641 - RNA, 19 nt, Homo sapiens
  misc_RNA (1)...(19): siRNA sense strand
gcagugacaccgcuguuga

SEQ ID NO: 2039642 - RNA, 19 nt, Homo sapiens
  misc_RNA (1)...(19): siRNA sense strand
ggccaagggcagaguauuu

SEQ ID NO: 2039643 - RNA, 19 nt, Homo sapiens
  misc_RNA (1)...(19): siRNA sense strand
ccacccaccuucuccuuuc

SEQ ID NO: 2039644 - RNA, 19 nt, Homo sapiens
  misc_RNA (1)...(19): siRNA sense strand
ggagagacgucggcuacag

SEQ ID NO: 2039645 - RNA, 19 nt, Homo sapiens
  misc_RNA (1)...(19): siRNA sense strand
cgggugcucuuaccuucua

SEQ ID NO: 2039646 - RNA, 19 nt, Homo sapiens
  misc_RNA (1)...(19): siRNA sense strand
caacgugauccgcugguuu

SEQ ID NO: 2039647 - RNA, 19 nt, Homo sapiens
  misc_RNA (1)...(19): siRNA sense strand
acaggaaggcacuggcuua

SEQ ID NO: 2039648 - RNA, 19 nt, Homo sapiens
  misc_RNA (1)...(19): siRNA sense strand
cgagaaaggaugacucaca

SEQ ID NO: 2039649 - RNA, 19 nt, Homo sapiens
  misc_RNA (1)...(19): siRNA sense strand
ggcagaguauuuaggaauc

SEQ ID NO: 2039650 - RNA, 19 nt, Homo sapiens
  misc_RNA (1)...(19): siRNA sense strand
ugacaccgcuguugaugcu

SEQ ID NO: 2039651 - RNA, 19 nt, Homo sapiens
  misc_RNA (1)...(19): siRNA sense strand
ggaggcuuaugcugccauu

SEQ ID NO: 2039652 - RNA, 19 nt, Homo sapiens
  misc_RNA (1)...(19): siRNA sense strand
acacaccacugcagcaucu

SEQ ID NO: 2039653 - RNA, 19 nt, Homo sapiens
  misc_RNA (1)...(19): siRNA sense strand
uauggaaguugggaccuuu

SEQ ID NO: 2039654 - RNA, 19 nt, Homo sapiens
  misc_RNA (1)...(19): siRNA sense strand
gaacacaccacugcagcau

SEQ ID NO: 2039655 - RNA, 19 nt, Homo sapiens
  misc_RNA (1)...(19): siRNA sense strand
gggcagaguauuuaggaau

SEQ ID NO: 2039656 - RNA, 19 nt, Homo sapiens
  misc_RNA (1)...(19): siRNA sense strand
ucgaaaggcacaucaacaa

SEQ ID NO: 2039657 - RNA, 19 nt, Homo sapiens
  misc_RNA (1)...(19): siRNA sense strand
ggacaacuggaagguauuc

SEQ ID NO: 2039658 - RNA, 19 nt, Homo sapiens
  misc_RNA (1)...(19): siRNA sense strand
gccaccgucuccaucugua

SEQ ID NO: 2039659 - RNA, 19 nt, Homo sapiens
  misc_RNA (1)...(19): siRNA sense strand
ucuguaagaagugcauuua

SEQ ID NO: 2039660 - RNA, 19 nt, Homo sapiens
  misc_RNA (1)...(19): siRNA sense strand
uuggacaacuggaagguau

SEQ ID NO: 2039661 - RNA, 19 nt, Homo sapiens
  misc_RNA (1)...(19): siRNA sense strand
ggugagacuagcaucgaaa

SEQ ID NO: 2039662 - RNA, 19 nt, Homo sapiens
  misc_RNA (1)...(19): siRNA sense strand
gcugguagacaacgugauc

SEQ ID NO: 2039663 - RNA, 19 nt, Homo sapiens
  misc_RNA (1)...(19): siRNA sense strand
cgaaaggcacaucaacaag

SEQ ID NO: 2039664 - RNA, 19 nt, Homo sapiens
  misc_RNA (1)...(19): siRNA sense strand
aggcuuaugcugccauuga

SEQ ID NO: 2039665 - RNA, 19 nt, Homo sapiens
  misc_RNA (1)...(19): siRNA sense strand
gaggugagacuagcaucga

SEQ ID NO: 2039666 - RNA, 19 nt, Homo sapiens
  misc_RNA (1)...(19): siRNA sense strand
ccuuugagccugucuacug

SEQ ID NO: 2039667 - RNA, 19 nt, Homo sapiens
  misc_RNA (1)...(19): siRNA sense strand
gcaugcuguucucaucagu

SEQ ID NO: 2039668 - RNA, 19 nt, Homo sapiens
  misc_RNA (1)...(19): siRNA sense strand
gcucccugcucuacaacuc

SEQ ID NO: 2039669 - RNA, 19 nt, Homo sapiens
  misc_RNA (1)...(19): siRNA sense strand
gcagaguauuuaggaaucc

SEQ ID NO: 2039670 - RNA, 19 nt, Homo sapiens
  misc_RNA (1)...(19): siRNA sense strand
gagaaaggaugacucacaa

SEQ ID NO: 2039671 - RNA, 19 nt, Homo sapiens
  misc_RNA (1)...(19): siRNA sense strand
gaaaggcacaucaacaaga

SEQ ID NO: 2039672 - RNA, 19 nt, Homo sapiens
  misc_RNA (1)...(19): siRNA sense strand
gaaaggaugacucacaaga

SEQ ID NO: 2039673 - RNA, 19 nt, Homo sapiens
  misc_RNA (1)...(19): siRNA sense strand
ggaaggcacuggcuuacuc

SEQ ID NO: 2039674 - RNA, 19 nt, Homo sapiens
  misc_RNA (1)...(19): siRNA sense strand
aaaggcacaucaacaagaa

SEQ ID NO: 2039675 - RNA, 19 nt, Homo sapiens
  misc_RNA (1)...(19): siRNA sense strand
gccaagggcagaguauuua

SEQ ID NO: 2039676 - RNA, 19 nt, Homo sapiens
  misc_RNA (1)...(19): siRNA sense strand
gcagugacaccgcuguuga

SEQ ID NO: 2039677 - RNA, 19 nt, Homo sapiens
  misc_RNA (1)...(19): siRNA sense strand
ggccaagggcagaguauuu

SEQ ID NO: 2039678 - RNA, 19 nt, Homo sapiens
  misc_RNA (1)...(19): siRNA sense strand
ccacccaccuucuccuuuc

SEQ ID NO: 2039679 - RNA, 19 nt, Homo sapiens
  misc_RNA (1)...(19): siRNA sense strand
ggagagacgucggcuacag

SEQ ID NO: 2039680 - RNA, 19 nt, Homo sapiens
  misc_RNA (1)...(19): siRNA sense strand
cgggugcucuuaccuucua

SEQ ID NO: 2039681 - RNA, 19 nt, Homo sapiens
  misc_RNA (1)...(19): siRNA sense strand
caacgugauccgcugguuu

SEQ ID NO: 2039682 - RNA, 19 nt, Homo sapiens
  misc_RNA (1)...(19): siRNA sense strand
acaggaaggcacuggcuua

SEQ ID NO: 2039683 - RNA, 19 nt, Homo sapiens
  misc_RNA (1)...(19): siRNA sense strand
cgagaaaggaugacucaca

SEQ ID NO: 2039684 - RNA, 19 nt, Homo sapiens
  misc_RNA (1)...(19): siRNA sense strand
ggcagaguauuuaggaauc

SEQ ID NO: 2039685 - RNA, 19 nt, Homo sapiens
  misc_RNA (1)...(19): siRNA sense strand
ugacaccgcuguugaugcu

SEQ ID NO: 2039686 - RNA, 19 nt, Homo sapiens
  misc_RNA (1)...(19): siRNA sense strand
ggaggcuuaugcugccauu

SEQ ID NO: 2039687 - RNA, 19 nt, Homo sapiens
  misc_RNA (1)...(19): siRNA sense strand
acacaccacugcagcaucu

SEQ ID NO: 2039688 - RNA, 19 nt, Homo sapiens
  misc_RNA (1)...(19): siRNA sense strand
uauggaaguugggaccuuu

SEQ ID NO: 2039689 - RNA, 19 nt, Homo sapiens
  misc_RNA (1)...(19): siRNA sense strand
gaacacaccacugcagcau

SEQ ID NO: 2039690 - RNA, 19 nt, Homo sapiens
  misc_RNA (1)...(19): siRNA sense strand
gggcagaguauuuaggaau

SEQ ID NO: 2039691 - RNA, 19 nt, Homo sapiens
  misc_RNA (1)...(19): siRNA sense strand
ucgaaaggcacaucaacaa

SEQ ID NO: 2039692 - RNA, 19 nt, Homo sapiens
  misc_RNA (1)...(19): siRNA sense strand
ggacaacuggaagguauuc

SEQ ID NO: 2039693 - RNA, 19 nt, Homo sapiens
  misc_RNA (1)...(19): siRNA sense strand
gccaccgucuccaucugua

SEQ ID NO: 2039694 - RNA, 19 nt, Homo sapiens
  misc_RNA (1)...(19): siRNA sense strand
ucuguaagaagugcauuua

SEQ ID NO: 2039695 - RNA, 19 nt, Homo sapiens
  misc_RNA (1)...(19): siRNA sense strand
uuggacaacuggaagguau

SEQ ID NO: 2039696 - RNA, 19 nt, Homo sapiens
  misc_RNA (1)...(19): siRNA sense strand
ggugagacuagcaucgaaa

SEQ ID NO: 2039697 - RNA, 19 nt, Homo sapiens
  misc_RNA (1)...(19): siRNA sense strand
gcugguagacaacgugauc

SEQ ID NO: 2039698 - RNA, 19 nt, Homo sapiens
  misc_RNA (1)...(19): siRNA sense strand
cgaaaggcacaucaacaag

SEQ ID NO: 2039699 - RNA, 19 nt, Homo sapiens
  misc_RNA (1)...(19): siRNA sense strand
aggcuuaugcugccauuga

SEQ ID NO: 2039700 - RNA, 19 nt, Homo sapiens
  misc_RNA (1)...(19): siRNA sense strand
gaggugagacuagcaucga

SEQ ID NO: 2039701 - RNA, 19 nt, Homo sapiens
  misc_RNA (1)...(19): siRNA sense strand
ccuuugagccugucuacug

SEQ ID NO: 2039702 - RNA, 19 nt, Homo sapiens
  misc_RNA (1)...(19): siRNA sense strand
gcaugcuguucucaucagu

SEQ ID NO: 2039703 - RNA, 19 nt, Homo sapiens
  misc_RNA (1)...(19): siRNA sense strand
gcucccugcucuacaacuc

SEQ ID NO: 2039704 - RNA, 19 nt, Homo sapiens
  misc_RNA (1)...(19): siRNA sense strand
gcagaguauuuaggaaucc

SEQ ID NO: 2039705 - RNA, 19 nt, Homo sapiens
  misc_RNA (1)...(19): siRNA sense strand
gagaaaggaugacucacaa

SEQ ID NO: 2039706 - RNA, 19 nt, Homo sapiens
  misc_RNA (1)...(19): siRNA sense strand
gaaaggcacaucaacaaga

SEQ ID NO: 2039707 - RNA, 19 nt, Homo sapiens
  misc_RNA (1)...(19): siRNA sense strand
gaaaggaugacucacaaga

SEQ ID NO: 2039708 - RNA, 19 nt, Homo sapiens
  misc_RNA (1)...(19): siRNA sense strand
ggaaggcacuggcuuacuc

SEQ ID NO: 2039709 - RNA, 19 nt, Homo sapiens
  misc_RNA (1)...(19): siRNA sense strand
aaaggcacaucaacaagaa

SEQ ID NO: 2039710 - RNA, 19 nt, Homo sapiens
  misc_RNA (1)...(19): siRNA sense strand
gccaagggcagaguauuua

SEQ ID NO: 2039711 - RNA, 19 nt, Homo sapiens
  misc_RNA (1)...(19): siRNA sense strand
gcagugacaccgcuguuga

SEQ ID NO: 2039712 - RNA, 19 nt, Homo sapiens
  misc_RNA (1)...(19): siRNA sense strand
ggccaagggcagaguauuu

SEQ ID NO: 2039713 - RNA, 19 nt, Homo sapiens
  misc_RNA (1)...(19): siRNA sense strand
ccacccaccuucuccuuuc

SEQ ID NO: 2039714 - RNA, 19 nt, Homo sapiens
  misc_RNA (1)...(19): siRNA sense strand
ggagagacgucggcuacag

SEQ ID NO: 2039715 - RNA, 19 nt, Homo sapiens
  misc_RNA (1)...(19): siRNA sense strand
cgggugcucuuaccuucua

SEQ ID NO: 2039716 - RNA, 19 nt, Homo sapiens
  misc_RNA (1)...(19): siRNA sense strand
caacgugauccgcugguuu

SEQ ID NO: 2039717 - RNA, 19 nt, Homo sapiens
  misc_RNA (1)...(19): siRNA sense strand
acaggaaggcacuggcuua

SEQ ID NO: 2039718 - RNA, 19 nt, Homo sapiens
  misc_RNA (1)...(19): siRNA sense strand
cgagaaaggaugacucaca

SEQ ID NO: 2039719 - RNA, 19 nt, Homo sapiens
  misc_RNA (1)...(19): siRNA sense strand
ggcagaguauuuaggaauc

SEQ ID NO: 2039720 - RNA, 19 nt, Homo sapiens
  misc_RNA (1)...(19): siRNA sense strand
ugacaccgcuguugaugcu

SEQ ID NO: 2039721 - RNA, 19 nt, Homo sapiens
  misc_RNA (1)...(19): siRNA sense strand
ggaggcuuaugcugccauu

SEQ ID NO: 2039722 - RNA, 19 nt, Homo sapiens
  misc_RNA (1)...(19): siRNA sense strand
acacaccacugcagcaucu

SEQ ID NO: 2039723 - RNA, 19 nt, Homo sapiens
  misc_RNA (1)...(19): siRNA sense strand
uauggaaguugggaccuuu

SEQ ID NO: 2039724 - RNA, 19 nt, Homo sapiens
  misc_RNA (1)...(19): siRNA sense strand
gaacacaccacugcagcau

SEQ ID NO: 2039725 - RNA, 19 nt, Homo sapiens
  misc_RNA (1)...(19): siRNA sense strand
gggcagaguauuuaggaau

SEQ ID NO: 2039726 - RNA, 19 nt, Homo sapiens
  misc_RNA (1)...(19): siRNA sense strand
ucgaaaggcacaucaacaa

SEQ ID NO: 2039727 - RNA, 19 nt, Homo sapiens
  misc_RNA (1)...(19): siRNA sense strand
ggacaacuggaagguauuc

SEQ ID NO: 2039728 - RNA, 19 nt, Homo sapiens
  misc_RNA (1)...(19): siRNA sense strand
gccaccgucuccaucugua

SEQ ID NO: 2039729 - RNA, 19 nt, Homo sapiens
  misc_RNA (1)...(19): siRNA sense strand
ucuguaagaagugcauuua

SEQ ID NO: 2039730 - RNA, 19 nt, Homo sapiens
  misc_RNA (1)...(19): siRNA sense strand
uuggacaacuggaagguau

SEQ ID NO: 2039731 - RNA, 19 nt, Homo sapiens
  misc_RNA (1)...(19): siRNA sense strand
ggugagacuagcaucgaaa

SEQ ID NO: 2039732 - RNA, 19 nt, Homo sapiens
  misc_RNA (1)...(19): siRNA sense strand
gcugguagacaacgugauc

SEQ ID NO: 2039733 - RNA, 19 nt, Homo sapiens
  misc_RNA (1)...(19): siRNA sense strand
cgaaaggcacaucaacaag

SEQ ID NO: 2039734 - RNA, 19 nt, Homo sapiens
  misc_RNA (1)...(19): siRNA sense strand
aggcuuaugcugccauuga

SEQ ID NO: 2039735 - RNA, 19 nt, Homo sapiens
  misc_RNA (1)...(19): siRNA sense strand
gaggugagacuagcaucga

SEQ ID NO: 2039736 - RNA, 19 nt, Homo sapiens
  misc_RNA (1)...(19): siRNA sense strand
ccuuugagccugucuacug

SEQ ID NO: 2039737 - RNA, 19 nt, Homo sapiens
  misc_RNA (1)...(19): siRNA sense strand
gcaugcuguucucaucagu

SEQ ID NO: 2039738 - RNA, 19 nt, Homo sapiens
  misc_RNA (1)...(19): siRNA sense strand
gcucccugcucuacaacuc

SEQ ID NO: 2039739 - RNA, 19 nt, Homo sapiens
  misc_RNA (1)...(19): siRNA sense strand
gcagaguauuuaggaaucc

SEQ ID NO: 2039740 - RNA, 19 nt, Homo sapiens
  misc_RNA (1)...(19): siRNA sense strand
gagaaaggaugacucacaa

SEQ ID NO: 2039741 - RNA, 19 nt, Homo sapiens
  misc_RNA (1)...(19): siRNA sense strand
gaaaggcacaucaacaaga

SEQ ID NO: 2039742 - RNA, 19 nt, Homo sapiens
  misc_RNA (1)...(19): siRNA sense strand
gaaaggaugacucacaaga

SEQ ID NO: 2039743 - RNA, 19 nt, Homo sapiens
  misc_RNA (1)...(19): siRNA sense strand
ggaaggcacuggcuuacuc

SEQ ID NO: 2039744 - RNA, 19 nt, Homo sapiens
  misc_RNA (1)...(19): siRNA sense strand
aaaggcacaucaacaagaa

SEQ ID NO: 2039745 - RNA, 19 nt, Homo sapiens
  misc_RNA (1)...(19): siRNA sense strand
gccaagggcagaguauuua

SEQ ID NO: 2039746 - RNA, 19 nt, Homo sapiens
  misc_RNA (1)...(19): siRNA sense strand
gcagugacaccgcuguuga

SEQ ID NO: 2039747 - RNA, 19 nt, Homo sapiens
  misc_RNA (1)...(19): siRNA sense strand
ggccaagggcagaguauuu

SEQ ID NO: 2039748 - RNA, 19 nt, Homo sapiens
  misc_RNA (1)...(19): siRNA sense strand
ccacccaccuucuccuuuc

SEQ ID NO: 2039749 - RNA, 19 nt, Homo sapiens
  misc_RNA (1)...(19): siRNA sense strand
ggagagacgucggcuacag

SEQ ID NO: 2039750 - RNA, 19 nt, Homo sapiens
  misc_RNA (1)...(19): siRNA sense strand
cgggugcucuuaccuucua

SEQ ID NO: 2039751 - RNA, 19 nt, Homo sapiens
  misc_RNA (1)...(19): siRNA sense strand
caacgugauccgcugguuu

SEQ ID NO: 2039752 - RNA, 19 nt, Homo sapiens
  misc_RNA (1)...(19): siRNA sense strand
acaggaaggcacuggcuua

SEQ ID NO: 2039753 - RNA, 19 nt, Homo sapiens
  misc_RNA (1)...(19): siRNA sense strand
cgagaaaggaugacucaca

SEQ ID NO: 2039754 - RNA, 19 nt, Homo sapiens
  misc_RNA (1)...(19): siRNA sense strand
ggcagaguauuuaggaauc

SEQ ID NO: 2039755 - RNA, 19 nt, Homo sapiens
  misc_RNA (1)...(19): siRNA sense strand
ugacaccgcuguugaugcu

SEQ ID NO: 2039756 - RNA, 19 nt, Homo sapiens
  misc_RNA (1)...(19): siRNA sense strand
ggaggcuuaugcugccauu

SEQ ID NO: 2039757 - RNA, 19 nt, Homo sapiens
  misc_RNA (1)...(19): siRNA sense strand
acacaccacugcagcaucu

SEQ ID NO: 2039758 - RNA, 19 nt, Homo sapiens
  misc_RNA (1)...(19): siRNA sense strand
uauggaaguugggaccuuu

SEQ ID NO: 2039759 - RNA, 19 nt, Homo sapiens
  misc_RNA (1)...(19): siRNA sense strand
gaacacaccacugcagcau

SEQ ID NO: 2039760 - RNA, 19 nt, Homo sapiens
  misc_RNA (1)...(19): siRNA sense strand
gggcagaguauuuaggaau

SEQ ID NO: 2039761 - RNA, 19 nt, Homo sapiens
  misc_RNA (1)...(19): siRNA sense strand
ucgaaaggcacaucaacaa

SEQ ID NO: 2039762 - RNA, 19 nt, Homo sapiens
  misc_RNA (1)...(19): siRNA sense strand
ggacaacuggaagguauuc

SEQ ID NO: 2039763 - RNA, 19 nt, Homo sapiens
  misc_RNA (1)...(19): siRNA sense strand
gccaccgucuccaucugua

SEQ ID NO: 2039764 - RNA, 19 nt, Homo sapiens
  misc_RNA (1)...(19): siRNA sense strand
ucuguaagaagugcauuua

SEQ ID NO: 2039765 - RNA, 19 nt, Homo sapiens
  misc_RNA (1)...(19): siRNA sense strand
uuggacaacuggaagguau

SEQ ID NO: 2039766 - RNA, 19 nt, Homo sapiens
  misc_RNA (1)...(19): siRNA sense strand
ggugagacuagcaucgaaa

SEQ ID NO: 2039767 - RNA, 19 nt, Homo sapiens
  misc_RNA (1)...(19): siRNA sense strand
gcugguagacaacgugauc

SEQ ID NO: 2039768 - RNA, 19 nt, Homo sapiens
  misc_RNA (1)...(19): siRNA sense strand
cgaaaggcacaucaacaag

SEQ ID NO: 2039769 - RNA, 19 nt, Homo sapiens
  misc_RNA (1)...(19): siRNA sense strand
aggcuuaugcugccauuga

SEQ ID NO: 2039770 - RNA, 19 nt, Homo sapiens
  misc_RNA (1)...(19): siRNA sense strand
gaggugagacuagcaucga

SEQ ID NO: 2039771 - RNA, 19 nt, Homo sapiens
  misc_RNA (1)...(19): siRNA sense strand
ccuuugagccugucuacug

SEQ ID NO: 2039772 - RNA, 19 nt, Homo sapiens
  misc_RNA (1)...(19): siRNA sense strand
gcaugcuguucucaucagu

SEQ ID NO: 2039773 - RNA, 19 nt, Homo sapiens
  misc_RNA (1)...(19): siRNA sense strand
gcucccugcucuacaacuc

SEQ ID NO: 2039774 - RNA, 19 nt, Homo sapiens
  misc_RNA (1)...(19): siRNA sense strand
gcagaguauuuaggaaucc

SEQ ID NO: 2039775 - RNA, 19 nt, Homo sapiens
  misc_RNA (1)...(19): siRNA sense strand
gagaaaggaugacucacaa

SEQ ID NO: 2039776 - RNA, 19 nt, Homo sapiens
  misc_RNA (1)...(19): siRNA sense strand
gaaaggcacaucaacaaga

SEQ ID NO: 2039777 - RNA, 19 nt, Homo sapiens
  misc_RNA (1)...(19): siRNA sense strand
gaaaggaugacucacaaga

SEQ ID NO: 2039778 - RNA, 19 nt, Homo sapiens
  misc_RNA (1)...(19): siRNA sense strand
ggaaggcacuggcuuacuc

SEQ ID NO: 2039779 - RNA, 19 nt, Homo sapiens
  misc_RNA (1)...(19): siRNA sense strand
aaaggcacaucaacaagaa

SEQ ID NO: 2039780 - RNA, 19 nt, Homo sapiens
  misc_RNA (1)...(19): siRNA sense strand
gccaagggcagaguauuua

SEQ ID NO: 2039781 - RNA, 19 nt, Homo sapiens
  misc_RNA (1)...(19): siRNA sense strand
gcagugacaccgcuguuga

SEQ ID NO: 2039782 - RNA, 19 nt, Homo sapiens
  misc_RNA (1)...(19): siRNA sense strand
ggccaagggcagaguauuu

SEQ ID NO: 2039783 - RNA, 19 nt, Homo sapiens
  misc_RNA (1)...(19): siRNA sense strand
ccacccaccuucuccuuuc

SEQ ID NO: 2039784 - RNA, 19 nt, Homo sapiens
  misc_RNA (1)...(19): siRNA sense strand
ggagagacgucggcuacag

SEQ ID NO: 2039785 - RNA, 19 nt, Homo sapiens
  misc_RNA (1)...(19): siRNA sense strand
cgggugcucuuaccuucua

SEQ ID NO: 2039786 - RNA, 19 nt, Homo sapiens
  misc_RNA (1)...(19): siRNA sense strand
caacgugauccgcugguuu

SEQ ID NO: 2039787 - RNA, 19 nt, Homo sapiens
  misc_RNA (1)...(19): siRNA sense strand
acaggaaggcacuggcuua

SEQ ID NO: 2039788 - RNA, 19 nt, Homo sapiens
  misc_RNA (1)...(19): siRNA sense strand
cgagaaaggaugacucaca

SEQ ID NO: 2039789 - RNA, 19 nt, Homo sapiens
  misc_RNA (1)...(19): siRNA sense strand
ggcagaguauuuaggaauc

SEQ ID NO: 2039790 - RNA, 19 nt, Homo sapiens
  misc_RNA (1)...(19): siRNA sense strand
ugacaccgcuguugaugcu

SEQ ID NO: 2039791 - RNA, 19 nt, Homo sapiens
  misc_RNA (1)...(19): siRNA sense strand
ggaggcuuaugcugccauu

SEQ ID NO: 2039792 - RNA, 19 nt, Homo sapiens
  misc_RNA (1)...(19): siRNA sense strand
acacaccacugcagcaucu

SEQ ID NO: 2039793 - RNA, 19 nt, Homo sapiens
  misc_RNA (1)...(19): siRNA sense strand
uauggaaguugggaccuuu

SEQ ID NO: 2039794 - RNA, 19 nt, Homo sapiens
  misc_RNA (1)...(19): siRNA sense strand
gaacacaccacugcagcau

SEQ ID NO: 2039795 - RNA, 19 nt, Homo sapiens
  misc_RNA (1)...(19): siRNA sense strand
gggcagaguauuuaggaau

SEQ ID NO: 2039796 - RNA, 19 nt, Homo sapiens
  misc_RNA (1)...(19): siRNA sense strand
ucgaaaggcacaucaacaa

SEQ ID NO: 2039797 - RNA, 19 nt, Homo sapiens
  misc_RNA (1)...(19): siRNA sense strand
ggacaacuggaagguauuc

SEQ ID NO: 2039798 - RNA, 19 nt, Homo sapiens
  misc_RNA (1)...(19): siRNA sense strand
gccaccgucuccaucugua

SEQ ID NO: 2039799 - RNA, 19 nt, Homo sapiens
  misc_RNA (1)...(19): siRNA sense strand
ucuguaagaagugcauuua

SEQ ID NO: 2039800 - RNA, 19 nt, Homo sapiens
  misc_RNA (1)...(19): siRNA sense strand
uuggacaacuggaagguau

SEQ ID NO: 2039801 - RNA, 19 nt, Homo sapiens
  misc_RNA (1)...(19): siRNA sense strand
ggugagacuagcaucgaaa

SEQ ID NO: 2039802 - RNA, 19 nt, Homo sapiens
  misc_RNA (1)...(19): siRNA sense strand
gcugguagacaacgugauc

SEQ ID NO: 2039803 - RNA, 19 nt, Homo sapiens
  misc_RNA (1)...(19): siRNA sense strand
cgaaaggcacaucaacaag

SEQ ID NO: 2039804 - RNA, 19 nt, Homo sapiens
  misc_RNA (1)...(19): siRNA sense strand
aggcuuaugcugccauuga

SEQ ID NO: 2039805 - RNA, 19 nt, Homo sapiens
  misc_RNA (1)...(19): siRNA sense strand
gaggugagacuagcaucga

SEQ ID NO: 2039806 - RNA, 19 nt, Homo sapiens
  misc_RNA (1)...(19): siRNA sense strand
ccuuugagccugucuacug

SEQ ID NO: 2039807 - RNA, 19 nt, Homo sapiens
  misc_RNA (1)...(19): siRNA sense strand
gcaugcuguucucaucagu

SEQ ID NO: 2039808 - RNA, 19 nt, Homo sapiens
  misc_RNA (1)...(19): siRNA sense strand
gcucccugcucuacaacuc

SEQ ID NO: 2039809 - RNA, 19 nt, Homo sapiens
  misc_RNA (1)...(19): siRNA sense strand
gcagaguauuuaggaaucc

SEQ ID NO: 2039810 - RNA, 19 nt, Homo sapiens
  misc_RNA (1)...(19): siRNA sense strand
gagaaaggaugacucacaa

SEQ ID NO: 2039811 - RNA, 19 nt, Homo sapiens
  misc_RNA (1)...(19): siRNA sense strand
gaaaggcacaucaacaaga

SEQ ID NO: 2039812 - RNA, 19 nt, Homo sapiens
  misc_RNA (1)...(19): siRNA sense strand
gaaaggaugacucacaaga

SEQ ID NO: 2039813 - RNA, 19 nt, Homo sapiens
  misc_RNA (1)...(19): siRNA sense strand
ggaaggcacuggcuuacuc

SEQ ID NO: 2039814 - RNA, 19 nt, Homo sapiens
  misc_RNA (1)...(19): siRNA sense strand
aaaggcacaucaacaagaa

SEQ ID NO: 2039815 - RNA, 19 nt, Homo sapiens
  misc_RNA (1)...(19): siRNA sense strand
gccaagggcagaguauuua

SEQ ID NO: 2039816 - RNA, 19 nt, Homo sapiens
  misc_RNA (1)...(19): siRNA sense strand
gcagugacaccgcuguuga

SEQ ID NO: 2039817 - RNA, 19 nt, Homo sapiens
  misc_RNA (1)...(19): siRNA sense strand
ggccaagggcagaguauuu

SEQ ID NO: 2039818 - RNA, 19 nt, Homo sapiens
  misc_RNA (1)...(19): siRNA sense strand
ccacccaccuucuccuuuc

SEQ ID NO: 2039819 - RNA, 19 nt, Homo sapiens
  misc_RNA (1)...(19): siRNA sense strand
ggagagacgucggcuacag

SEQ ID NO: 2039820 - RNA, 19 nt, Homo sapiens
  misc_RNA (1)...(19): siRNA sense strand
cgggugcucuuaccuucua

SEQ ID NO: 2039821 - RNA, 19 nt, Homo sapiens
  misc_RNA (1)...(19): siRNA sense strand
caacgugauccgcugguuu

SEQ ID NO: 2039822 - RNA, 19 nt, Homo sapiens
  misc_RNA (1)...(19): siRNA sense strand
acaggaaggcacuggcuua

SEQ ID NO: 2039823 - RNA, 19 nt, Homo sapiens
  misc_RNA (1)...(19): siRNA sense strand
cgagaaaggaugacucaca

SEQ ID NO: 2039824 - RNA, 19 nt, Homo sapiens
  misc_RNA (1)...(19): siRNA sense strand
ggcagaguauuuaggaauc

SEQ ID NO: 2039825 - RNA, 19 nt, Homo sapiens
  misc_RNA (1)...(19): siRNA sense strand
ugacaccgcuguugaugcu

SEQ ID NO: 2039826 - RNA, 19 nt, Homo sapiens
  misc_RNA (1)...(19): siRNA sense strand
ggaggcuuaugcugccauu

SEQ ID NO: 2039827 - RNA, 19 nt, Homo sapiens
  misc_RNA (1)...(19): siRNA sense strand
acacaccacugcagcaucu

SEQ ID NO: 2039828 - RNA, 19 nt, Homo sapiens
  misc_RNA (1)...(19): siRNA sense strand
uauggaaguugggaccuuu

SEQ ID NO: 2039829 - RNA, 19 nt, Homo sapiens
  misc_RNA (1)...(19): siRNA sense strand
gaacacaccacugcagcau

SEQ ID NO: 2039830 - RNA, 19 nt, Homo sapiens
  misc_RNA (1)...(19): siRNA sense strand
gggcagaguauuuaggaau

SEQ ID NO: 2039831 - RNA, 19 nt, Homo sapiens
  misc_RNA (1)...(19): siRNA sense strand
ucgaaaggcacaucaacaa

SEQ ID NO: 2039832 - RNA, 19 nt, Homo sapiens
  misc_RNA (1)...(19): siRNA sense strand
ggacaacuggaagguauuc

SEQ ID NO: 2039833 - RNA, 19 nt, Homo sapiens
  misc_RNA (1)...(19): siRNA sense strand
gccaccgucuccaucugua

SEQ ID NO: 2039834 - RNA, 19 nt, Homo sapiens
  misc_RNA (1)...(19): siRNA sense strand
ucuguaagaagugcauuua

SEQ ID NO: 2039835 - RNA, 19 nt, Homo sapiens
  misc_RNA (1)...(19): siRNA sense strand
uuggacaacuggaagguau

SEQ ID NO: 2039836 - RNA, 19 nt, Homo sapiens
  misc_RNA (1)...(19): siRNA sense strand
ggugagacuagcaucgaaa

SEQ ID NO: 2039837 - RNA, 19 nt, Homo sapiens
  misc_RNA (1)...(19): siRNA sense strand
gcugguagacaacgugauc

SEQ ID NO: 2039838 - RNA, 19 nt, Homo sapiens
  misc_RNA (1)...(19): siRNA sense strand
cgaaaggcacaucaacaag

SEQ ID NO: 2039839 - RNA, 19 nt, Homo sapiens
  misc_RNA (1)...(19): siRNA sense strand
aggcuuaugcugccauuga

SEQ ID NO: 2039840 - RNA, 19 nt, Homo sapiens
  misc_RNA (1)...(19): siRNA sense strand
gaggugagacuagcaucga

SEQ ID NO: 2039841 - RNA, 19 nt, Homo sapiens
  misc_RNA (1)...(19): siRNA sense strand
ccuuugagccugucuacug

SEQ ID NO: 2039842 - RNA, 19 nt, Homo sapiens
  misc_RNA (1)...(19): siRNA sense strand
gcaugcuguucucaucagu

SEQ ID NO: 2039843 - RNA, 19 nt, Homo sapiens
  misc_RNA (1)...(19): siRNA sense strand
gcucccugcucuacaacuc

SEQ ID NO: 2039844 - RNA, 19 nt, Homo sapiens
  misc_RNA (1)...(19): siRNA sense strand
gcagaguauuuaggaaucc

SEQ ID NO: 2039845 - RNA, 19 nt, Homo sapiens
  misc_RNA (1)...(19): siRNA sense strand
gagaaaggaugacucacaa

SEQ ID NO: 2039846 - RNA, 19 nt, Homo sapiens
  misc_RNA (1)...(19): siRNA sense strand
gaaaggcacaucaacaaga

SEQ ID NO: 2039847 - RNA, 19 nt, Homo sapiens
  misc_RNA (1)...(19): siRNA sense strand
gaaaggaugacucacaaga

SEQ ID NO: 2039848 - RNA, 19 nt, Homo sapiens
  misc_RNA (1)...(19): siRNA sense strand
ggaaggcacuggcuuacuc

SEQ ID NO: 2039849 - RNA, 19 nt, Homo sapiens
  misc_RNA (1)...(19): siRNA sense strand
aaaggcacaucaacaagaa

SEQ ID NO: 2039850 - RNA, 19 nt, Homo sapiens
  misc_RNA (1)...(19): siRNA sense strand
gccaagggcagaguauuua

SEQ ID NO: 2039851 - RNA, 19 nt, Homo sapiens
  misc_RNA (1)...(19): siRNA sense strand
gcagugacaccgcuguuga

SEQ ID NO: 2039852 - RNA, 19 nt, Homo sapiens
  misc_RNA (1)...(19): siRNA sense strand
ggccaagggcagaguauuu

SEQ ID NO: 2039853 - RNA, 19 nt, Homo sapiens
  misc_RNA (1)...(19): siRNA sense strand
ccacccaccuucuccuuuc

SEQ ID NO: 2039854 - RNA, 19 nt, Homo sapiens
  misc_RNA (1)...(19): siRNA sense strand
ggagagacgucggcuacag

SEQ ID NO: 2039855 - RNA, 19 nt, Homo sapiens
  misc_RNA (1)...(19): siRNA sense strand
cgggugcucuuaccuucua

SEQ ID NO: 2039856 - RNA, 19 nt, Homo sapiens
  misc_RNA (1)...(19): siRNA sense strand
caacgugauccgcugguuu

SEQ ID NO: 2039857 - RNA, 19 nt, Homo sapiens
  misc_RNA (1)...(19): siRNA sense strand
acaggaaggcacuggcuua

SEQ ID NO: 2039858 - RNA, 19 nt, Homo sapiens
  misc_RNA (1)...(19): siRNA sense strand
cgagaaaggaugacucaca

SEQ ID NO: 2039859 - RNA, 19 nt, Homo sapiens
  misc_RNA (1)...(19): siRNA sense strand
ggcagaguauuuaggaauc

SEQ ID NO: 2039860 - RNA, 19 nt, Homo sapiens
  misc_RNA (1)...(19): siRNA sense strand
ugacaccgcuguugaugcu

SEQ ID NO: 2039861 - RNA, 19 nt, Homo sapiens
  misc_RNA (1)...(19): siRNA sense strand
ggaggcuuaugcugccauu

SEQ ID NO: 2039862 - RNA, 19 nt, Homo sapiens
  misc_RNA (1)...(19): siRNA sense strand
acacaccacugcagcaucu

SEQ ID NO: 2039863 - RNA, 19 nt, Homo sapiens
  misc_RNA (1)...(19): siRNA sense strand
uauggaaguugggaccuuu

SEQ ID NO: 2039864 - RNA, 19 nt, Homo sapiens
  misc_RNA (1)...(19): siRNA sense strand
gaacacaccacugcagcau

SEQ ID NO: 2039865 - RNA, 19 nt, Homo sapiens
  misc_RNA (1)...(19): siRNA sense strand
gggcagaguauuuaggaau

SEQ ID NO: 2039866 - RNA, 19 nt, Homo sapiens
  misc_RNA (1)...(19): siRNA sense strand
ucgaaaggcacaucaacaa

SEQ ID NO: 2039867 - RNA, 19 nt, Homo sapiens
  misc_RNA (1)...(19): siRNA sense strand
ggacaacuggaagguauuc

SEQ ID NO: 2039868 - RNA, 19 nt, Homo sapiens
  misc_RNA (1)...(19): siRNA sense strand
gccaccgucuccaucugua

SEQ ID NO: 2039869 - RNA, 19 nt, Homo sapiens
  misc_RNA (1)...(19): siRNA sense strand
ucuguaagaagugcauuua

SEQ ID NO: 2039870 - RNA, 19 nt, Homo sapiens
  misc_RNA (1)...(19): siRNA sense strand
uuggacaacuggaagguau

SEQ ID NO: 2039871 - RNA, 19 nt, Homo sapiens
  misc_RNA (1)...(19): siRNA sense strand
ggugagacuagcaucgaaa

SEQ ID NO: 2039872 - RNA, 19 nt, Homo sapiens
  misc_RNA (1)...(19): siRNA sense strand
gcugguagacaacgugauc

SEQ ID NO: 2039873 - RNA, 19 nt, Homo sapiens
  misc_RNA (1)...(19): siRNA sense strand
cgaaaggcacaucaacaag

SEQ ID NO: 2039874 - RNA, 19 nt, Homo sapiens
  misc_RNA (1)...(19): siRNA sense strand
aggcuuaugcugccauuga

SEQ ID NO: 2039875 - RNA, 19 nt, Homo sapiens
  misc_RNA (1)...(19): siRNA sense strand
gaggugagacuagcaucga

SEQ ID NO: 2039876 - RNA, 19 nt, Homo sapiens
  misc_RNA (1)...(19): siRNA sense strand
ccuuugagccugucuacug

SEQ ID NO: 2039877 - RNA, 19 nt, Homo sapiens
  misc_RNA (1)...(19): siRNA sense strand
gcaugcuguucucaucagu

SEQ ID NO: 2039878 - RNA, 19 nt, Homo sapiens
  misc_RNA (1)...(19): siRNA sense strand
gcucccugcucuacaacuc

SEQ ID NO: 2039879 - RNA, 19 nt, Homo sapiens
  misc_RNA (1)...(19): siRNA sense strand
gcagaguauuuaggaaucc

SEQ ID NO: 2039880 - RNA, 19 nt, Homo sapiens
  misc_RNA (1)...(19): siRNA sense strand
gagaaaggaugacucacaa

SEQ ID NO: 2039881 - RNA, 19 nt, Homo sapiens
  misc_RNA (1)...(19): siRNA sense strand
gaaaggcacaucaacaaga

SEQ ID NO: 2039882 - RNA, 19 nt, Homo sapiens
  misc_RNA (1)...(19): siRNA sense strand
gaaaggaugacucacaaga

SEQ ID NO: 2039883 - RNA, 19 nt, Homo sapiens
  misc_RNA (1)...(19): siRNA sense strand
ggaaggcacuggcuuacuc

SEQ ID NO: 2039884 - RNA, 19 nt, Homo sapiens
  misc_RNA (1)...(19): siRNA sense strand
aaaggcacaucaacaagaa

SEQ ID NO: 2039885 - RNA, 19 nt, Homo sapiens
  misc_RNA (1)...(19): siRNA sense strand
gccaagggcagaguauuua

SEQ ID NO: 2039886 - RNA, 19 nt, Homo sapiens
  misc_RNA (1)...(19): siRNA sense strand
gcagugacaccgcuguuga

SEQ ID NO: 2039887 - RNA, 19 nt, Homo sapiens
  misc_RNA (1)...(19): siRNA sense strand
ggccaagggcagaguauuu

SEQ ID NO: 2039888 - RNA, 19 nt, Homo sapiens
  misc_RNA (1)...(19): siRNA sense strand
ccacccaccuucuccuuuc

SEQ ID NO: 2039889 - RNA, 19 nt, Homo sapiens
  misc_RNA (1)...(19): siRNA sense strand
ggagagacgucggcuacag

SEQ ID NO: 2039890 - RNA, 19 nt, Homo sapiens
  misc_RNA (1)...(19): siRNA sense strand
cgggugcucuuaccuucua

SEQ ID NO: 2039891 - RNA, 19 nt, Homo sapiens
  misc_RNA (1)...(19): siRNA sense strand
caacgugauccgcugguuu

SEQ ID NO: 2039892 - RNA, 19 nt, Homo sapiens
  misc_RNA (1)...(19): siRNA sense strand
acaggaaggcacuggcuua

SEQ ID NO: 2039893 - RNA, 19 nt, Homo sapiens
  misc_RNA (1)...(19): siRNA sense strand
cgagaaaggaugacucaca

SEQ ID NO: 2039894 - RNA, 19 nt, Homo sapiens
  misc_RNA (1)...(19): siRNA sense strand
ggcagaguauuuaggaauc

SEQ ID NO: 2039895 - RNA, 19 nt, Homo sapiens
  misc_RNA (1)...(19): siRNA sense strand
ugacaccgcuguugaugcu

SEQ ID NO: 2039896 - RNA, 19 nt, Homo sapiens
  misc_RNA (1)...(19): siRNA sense strand
ggaggcuuaugcugccauu

SEQ ID NO: 2039897 - RNA, 19 nt, Homo sapiens
  misc_RNA (1)...(19): siRNA sense strand
acacaccacugcagcaucu

SEQ ID NO: 2039898 - RNA, 19 nt, Homo sapiens
  misc_RNA (1)...(19): siRNA sense strand
uauggaaguugggaccuuu

SEQ ID NO: 2039899 - RNA, 19 nt, Homo sapiens
  misc_RNA (1)...(19): siRNA sense strand
gaacacaccacugcagcau

SEQ ID NO: 2039900 - RNA, 19 nt, Homo sapiens
  misc_RNA (1)...(19): siRNA sense strand
gggcagaguauuuaggaau

SEQ ID NO: 2039901 - RNA, 19 nt, Homo sapiens
  misc_RNA (1)...(19): siRNA sense strand
ucgaaaggcacaucaacaa

SEQ ID NO: 2039902 - RNA, 19 nt, Homo sapiens
  misc_RNA (1)...(19): siRNA sense strand
ggacaacuggaagguauuc

SEQ ID NO: 2039903 - RNA, 19 nt, Homo sapiens
  misc_RNA (1)...(19): siRNA sense strand
gccaccgucuccaucugua

SEQ ID NO: 2039904 - RNA, 19 nt, Homo sapiens
  misc_RNA (1)...(19): siRNA sense strand
ucuguaagaagugcauuua

SEQ ID NO: 2039905 - RNA, 19 nt, Homo sapiens
  misc_RNA (1)...(19): siRNA sense strand
uuggacaacuggaagguau

SEQ ID NO: 2039906 - RNA, 19 nt, Homo sapiens
  misc_RNA (1)...(19): siRNA sense strand
ggugagacuagcaucgaaa

SEQ ID NO: 2039907 - RNA, 19 nt, Homo sapiens
  misc_RNA (1)...(19): siRNA sense strand
gcugguagacaacgugauc

SEQ ID NO: 2039908 - RNA, 19 nt, Homo sapiens
  misc_RNA (1)...(19): siRNA sense strand
cgaaaggcacaucaacaag

SEQ ID NO: 2039909 - RNA, 19 nt, Homo sapiens
  misc_RNA (1)...(19): siRNA sense strand
aggcuuaugcugccauuga

SEQ ID NO: 2039910 - RNA, 19 nt, Homo sapiens
  misc_RNA (1)...(19): siRNA sense strand
gaggugagacuagcaucga

SEQ ID NO: 2039911 - RNA, 19 nt, Homo sapiens
  misc_RNA (1)...(19): siRNA sense strand
ccuuugagccugucuacug

SEQ ID NO: 2039912 - RNA, 19 nt, Homo sapiens
  misc_RNA (1)...(19): siRNA sense strand
gcaugcuguucucaucagu

SEQ ID NO: 2039913 - RNA, 19 nt, Homo sapiens
  misc_RNA (1)...(19): siRNA sense strand
gcucccugcucuacaacuc

SEQ ID NO: 2039914 - RNA, 19 nt, Homo sapiens
  misc_RNA (1)...(19): siRNA sense strand
gcagaguauuuaggaaucc

SEQ ID NO: 2039915 - RNA, 19 nt, Homo sapiens
  misc_RNA (1)...(19): siRNA sense strand
gagaaaggaugacucacaa

SEQ ID NO: 2039916 - RNA, 19 nt, Homo sapiens
  misc_RNA (1)...(19): siRNA sense strand
gaaaggcacaucaacaaga

SEQ ID NO: 2039917 - RNA, 19 nt, Homo sapiens
  misc_RNA (1)...(19): siRNA sense strand
gaaaggaugacucacaaga

SEQ ID NO: 2039918 - RNA, 19 nt, Homo sapiens
  misc_RNA (1)...(19): siRNA sense strand
ggaaggcacuggcuuacuc

SEQ ID NO: 2039919 - RNA, 19 nt, Homo sapiens
  misc_RNA (1)...(19): siRNA sense strand
aaaggcacaucaacaagaa

SEQ ID NO: 2039920 - RNA, 19 nt, Homo sapiens
  misc_RNA (1)...(19): siRNA sense strand
gccaagggcagaguauuua

SEQ ID NO: 2039921 - RNA, 19 nt, Homo sapiens
  misc_RNA (1)...(19): siRNA sense strand
gcagugacaccgcuguuga

SEQ ID NO: 2039922 - RNA, 19 nt, Homo sapiens
  misc_RNA (1)...(19): siRNA sense strand
ggccaagggcagaguauuu

SEQ ID NO: 2039923 - RNA, 19 nt, Homo sapiens
  misc_RNA (1)...(19): siRNA sense strand
ccacccaccuucuccuuuc

SEQ ID NO: 2039924 - RNA, 19 nt, Homo sapiens
  misc_RNA (1)...(19): siRNA sense strand
ggagagacgucggcuacag

SEQ ID NO: 2039925 - RNA, 19 nt, Homo sapiens
  misc_RNA (1)...(19): siRNA sense strand
cgggugcucuuaccuucua

SEQ ID NO: 2039926 - RNA, 19 nt, Homo sapiens
  misc_RNA (1)...(19): siRNA sense strand
caacgugauccgcugguuu

SEQ ID NO: 2039927 - RNA, 19 nt, Homo sapiens
  misc_RNA (1)...(19): siRNA sense strand
acaggaaggcacuggcuua

SEQ ID NO: 2039928 - RNA, 19 nt, Homo sapiens
  misc_RNA (1)...(19): siRNA sense strand
cgagaaaggaugacucaca

SEQ ID NO: 2039929 - RNA, 19 nt, Homo sapiens
  misc_RNA (1)...(19): siRNA sense strand
ggcagaguauuuaggaauc

SEQ ID NO: 2039930 - RNA, 19 nt, Homo sapiens
  misc_RNA (1)...(19): siRNA sense strand
ugacaccgcuguugaugcu

SEQ ID NO: 2039931 - RNA, 19 nt, Homo sapiens
  misc_RNA (1)...(19): siRNA sense strand
ggaggcuuaugcugccauu

SEQ ID NO: 2039932 - RNA, 19 nt, Homo sapiens
  misc_RNA (1)...(19): siRNA sense strand
acacaccacugcagcaucu

SEQ ID NO: 2039933 - RNA, 19 nt, Homo sapiens
  misc_RNA (1)...(19): siRNA sense strand
uauggaaguugggaccuuu

SEQ ID NO: 2039934 - RNA, 19 nt, Homo sapiens
  misc_RNA (1)...(19): siRNA sense strand
gaacacaccacugcagcau

SEQ ID NO: 2039935 - RNA, 19 nt, Homo sapiens
  misc_RNA (1)...(19): siRNA sense strand
gggcagaguauuuaggaau

SEQ ID NO: 2039936 - RNA, 19 nt, Homo sapiens
  misc_RNA (1)...(19): siRNA sense strand
ucgaaaggcacaucaacaa

SEQ ID NO: 2039937 - RNA, 19 nt, Homo sapiens
  misc_RNA (1)...(19): siRNA sense strand
ggacaacuggaagguauuc

SEQ ID NO: 2039938 - RNA, 19 nt, Homo sapiens
  misc_RNA (1)...(19): siRNA sense strand
gccaccgucuccaucugua

SEQ ID NO: 2039939 - RNA, 19 nt, Homo sapiens
  misc_RNA (1)...(19): siRNA sense strand
ucuguaagaagugcauuua

SEQ ID NO: 2039940 - RNA, 19 nt, Homo sapiens
  misc_RNA (1)...(19): siRNA sense strand
uuggacaacuggaagguau

SEQ ID NO: 2039941 - RNA, 19 nt, Homo sapiens
  misc_RNA (1)...(19): siRNA sense strand
ggugagacuagcaucgaaa

SEQ ID NO: 2039942 - RNA, 19 nt, Homo sapiens
  misc_RNA (1)...(19): siRNA sense strand
gcugguagacaacgugauc

SEQ ID NO: 2039943 - RNA, 19 nt, Homo sapiens
  misc_RNA (1)...(19): siRNA sense strand
cgaaaggcacaucaacaag

SEQ ID NO: 2039944 - RNA, 19 nt, Homo sapiens
  misc_RNA (1)...(19): siRNA sense strand
aggcuuaugcugccauuga

SEQ ID NO: 2039945 - RNA, 19 nt, Homo sapiens
  misc_RNA (1)...(19): siRNA sense strand
gaggugagacuagcaucga

SEQ ID NO: 2039946 - RNA, 19 nt, Homo sapiens
  misc_RNA (1)...(19): siRNA sense strand
ccuuugagccugucuacug

SEQ ID NO: 2039947 - RNA, 19 nt, Homo sapiens
  misc_RNA (1)...(19): siRNA sense strand
gcaugcuguucucaucagu

SEQ ID NO: 2039948 - RNA, 19 nt, Homo sapiens
  misc_RNA (1)...(19): siRNA sense strand
gcucccugcucuacaacuc

SEQ ID NO: 2039949 - RNA, 19 nt, Homo sapiens
  misc_RNA (1)...(19): siRNA sense strand
gcagaguauuuaggaaucc

SEQ ID NO: 2039950 - RNA, 19 nt, Homo sapiens
  misc_RNA (1)...(19): siRNA sense strand
ggagcaagcuuguaaauau

SEQ ID NO: 2039951 - RNA, 19 nt, Homo sapiens
  misc_RNA (1)...(19): siRNA sense strand
gaagauaucauucgaugua

SEQ ID NO: 2039952 - RNA, 19 nt, Homo sapiens
  misc_RNA (1)...(19): siRNA sense strand
guaaauaucuugaggacuu

SEQ ID NO: 2039953 - RNA, 19 nt, Homo sapiens
  misc_RNA (1)...(19): siRNA sense strand
ggaaaggaaugaaacugua

SEQ ID NO: 2039954 - RNA, 19 nt, Homo sapiens
  misc_RNA (1)...(19): siRNA sense strand
gaagaaugaucgagacaaa

SEQ ID NO: 2039955 - RNA, 19 nt, Homo sapiens
  misc_RNA (1)...(19): siRNA sense strand
ugacagagcugguacaaau

SEQ ID NO: 2039956 - RNA, 19 nt, Homo sapiens
  misc_RNA (1)...(19): siRNA sense strand
cuacuuaccuagcugauua

SEQ ID NO: 2039957 - RNA, 19 nt, Homo sapiens
  misc_RNA (1)...(19): siRNA sense strand
caacagaaauagacgauau

SEQ ID NO: 2039958 - RNA, 19 nt, Homo sapiens
  misc_RNA (1)...(19): siRNA sense strand
gauaauugcuguccuuaga

SEQ ID NO: 2039959 - RNA, 19 nt, Homo sapiens
  misc_RNA (1)...(19): siRNA sense strand
gaaauagacgauaugcuua

SEQ ID NO: 2039960 - RNA, 19 nt, Homo sapiens
  misc_RNA (1)...(19): siRNA sense strand
aaacagaaguugauagaga

SEQ ID NO: 2039961 - RNA, 19 nt, Homo sapiens
  misc_RNA (1)...(19): siRNA sense strand
gaucuuaacuguucaggau

SEQ ID NO: 2039962 - RNA, 19 nt, Homo sapiens
  misc_RNA (1)...(19): siRNA sense strand
gaauaugcaugaaacaguu

SEQ ID NO: 2039963 - RNA, 19 nt, Homo sapiens
  misc_RNA (1)...(19): siRNA sense strand
gaaacaagcaagacuggua

SEQ ID NO: 2039964 - RNA, 19 nt, Homo sapiens
  misc_RNA (1)...(19): siRNA sense strand
gaacauggcccucucaaag

SEQ ID NO: 2039965 - RNA, 19 nt, Homo sapiens
  misc_RNA (1)...(19): siRNA sense strand
gguagaagaucacauuuua

SEQ ID NO: 2039966 - RNA, 19 nt, Homo sapiens
  misc_RNA (1)...(19): siRNA sense strand
uuacagaacuccuuaaagu

SEQ ID NO: 2039967 - RNA, 19 nt, Homo sapiens
  misc_RNA (1)...(19): siRNA sense strand
aaacacugcuuaagaaaug

SEQ ID NO: 2039968 - RNA, 19 nt, Homo sapiens
  misc_RNA (1)...(19): siRNA sense strand
ggaaugaaacuguauugaa

SEQ ID NO: 2039969 - RNA, 19 nt, Homo sapiens
  misc_RNA (1)...(19): siRNA sense strand
gaaguuuggugaaugguau

SEQ ID NO: 2039970 - RNA, 19 nt, Homo sapiens
  misc_RNA (1)...(19): siRNA sense strand
gauuaugacuggacaaugu

SEQ ID NO: 2039971 - RNA, 19 nt, Homo sapiens
  misc_RNA (1)...(19): siRNA sense strand
caccggagcucaacagaaa

SEQ ID NO: 2039972 - RNA, 19 nt, Homo sapiens
  misc_RNA (1)...(19): siRNA sense strand
gcagaaggagaaauauaua

SEQ ID NO: 2039973 - RNA, 19 nt, Homo sapiens
  misc_RNA (1)...(19): siRNA sense strand
uaacuuagaugucauacag

SEQ ID NO: 2039974 - RNA, 19 nt, Homo sapiens
  misc_RNA (1)...(19): siRNA sense strand
gaugaaggauacuagcaaa

SEQ ID NO: 2039975 - RNA, 19 nt, Homo sapiens
  misc_RNA (1)...(19): siRNA sense strand
gcaaauuucccuuucaaga

SEQ ID NO: 2039976 - RNA, 19 nt, Homo sapiens
  misc_RNA (1)...(19): siRNA sense strand
caauauauuugcucaguuc

SEQ ID NO: 2039977 - RNA, 19 nt, Homo sapiens
  misc_RNA (1)...(19): siRNA sense strand
acaguaagcugaaagaaca

SEQ ID NO: 2039978 - RNA, 19 nt, Homo sapiens
  misc_RNA (1)...(19): siRNA sense strand
gaagagcuagugguuauuu

SEQ ID NO: 2039979 - RNA, 19 nt, Homo sapiens
  misc_RNA (1)...(19): siRNA sense strand
ggagaaauauauaccaaac

SEQ ID NO: 2039980 - RNA, 19 nt, Homo sapiens
  misc_RNA (1)...(19): siRNA sense strand
ccaagaaacuguucauacu

SEQ ID NO: 2039981 - RNA, 19 nt, Homo sapiens
  misc_RNA (1)...(19): siRNA sense strand
uaagagaccaauacaauga

SEQ ID NO: 2039982 - RNA, 19 nt, Homo sapiens
  misc_RNA (1)...(19): siRNA sense strand
gcagagaaauauuacaacu

SEQ ID NO: 2039983 - RNA, 19 nt, Homo sapiens
  misc_RNA (1)...(19): siRNA sense strand
ggauuggucuacuuaccua

SEQ ID NO: 2039984 - RNA, 19 nt, Homo sapiens
  misc_RNA (1)...(19): siRNA sense strand
gaaauaagagaccaauaca

SEQ ID NO: 2039985 - RNA, 19 nt, Homo sapiens
  misc_RNA (1)...(19): siRNA sense strand
ugaaacaguugauggcuau

SEQ ID NO: 2039986 - RNA, 19 nt, Homo sapiens
  misc_RNA (1)...(19): siRNA sense strand
gcagccagcuucuaaguac

SEQ ID NO: 2039987 - RNA, 19 nt, Homo sapiens
  misc_RNA (1)...(19): siRNA sense strand
acagaacuccuuaaaguaa

SEQ ID NO: 2039988 - RNA, 19 nt, Homo sapiens
  misc_RNA (1)...(19): siRNA sense strand
cauacagugugaauuguuu

SEQ ID NO: 2039989 - RNA, 19 nt, Homo sapiens
  misc_RNA (1)...(19): siRNA sense strand
uggaagagcuagugguuau

SEQ ID NO: 2039990 - RNA, 19 nt, Homo sapiens
  misc_RNA (1)...(19): siRNA sense strand
gagcaagcuuguaaauauc

SEQ ID NO: 2039991 - RNA, 19 nt, Homo sapiens
  misc_RNA (1)...(19): siRNA sense strand
ccacacagaagauaucauu

SEQ ID NO: 2039992 - RNA, 19 nt, Homo sapiens
  misc_RNA (1)...(19): siRNA sense strand
agaagcaucuuucaagugu

SEQ ID NO: 2039993 - RNA, 19 nt, Homo sapiens
  misc_RNA (1)...(19): siRNA sense strand
caagaaacuguucauacua

SEQ ID NO: 2039994 - RNA, 19 nt, Homo sapiens
  misc_RNA (1)...(19): siRNA sense strand
cuugaggacuuuauaacua

SEQ ID NO: 2039995 - RNA, 19 nt, Homo sapiens
  misc_RNA (1)...(19): siRNA sense strand
gaauucagcagagaaauau

SEQ ID NO: 2039996 - RNA, 19 nt, Homo sapiens
  misc_RNA (1)...(19): siRNA sense strand
aaaguuagaugcuuguauc

SEQ ID NO: 2039997 - RNA, 19 nt, Homo sapiens
  misc_RNA (1)...(19): siRNA sense strand
ggcauacacugaugaacuu

SEQ ID NO: 2039998 - RNA, 19 nt, Homo sapiens
  misc_RNA (1)...(19): siRNA sense strand
gaaaggaaugaaacuguau

SEQ ID NO: 2039999 - RNA, 19 nt, Homo sapiens
  misc_RNA (1)...(19): siRNA sense strand
uagacgauaugcuuagaaa

SEQ ID NO: 2040000 - RNA, 19 nt, Homo sapiens
  misc_RNA (1)...(19): siRNA sense strand
gaaacacugcuuaagaaau

SEQ ID NO: 2040001 - RNA, 19 nt, Homo sapiens
  misc_RNA (1)...(19): siRNA sense strand
guugauggcuauagaagau

SEQ ID NO: 2040002 - RNA, 19 nt, Homo sapiens
  misc_RNA (1)...(19): siRNA sense strand
gauagagacagucgugaaa

SEQ ID NO: 2040003 - RNA, 19 nt, Homo sapiens
  misc_RNA (1)...(19): siRNA sense strand
aagcaucuuucaaguguuu

SEQ ID NO: 2040004 - RNA, 19 nt, Homo sapiens
  misc_RNA (1)...(19): siRNA sense strand
gaacuuugaguagcuguuu

SEQ ID NO: 2040005 - RNA, 19 nt, Homo sapiens
  misc_RNA (1)...(19): siRNA sense strand
cagcaaauuucccuuucaa

SEQ ID NO: 2040006 - RNA, 19 nt, Homo sapiens
  misc_RNA (1)...(19): siRNA sense strand
aaagauaauugcuguccuu

SEQ ID NO: 2040007 - RNA, 19 nt, Homo sapiens
  misc_RNA (1)...(19): siRNA sense strand
uucaggaucuuguugauuu

SEQ ID NO: 2040008 - RNA, 19 nt, Homo sapiens
  misc_RNA (1)...(19): siRNA sense strand
agaaauagacgauaugcuu

SEQ ID NO: 2040009 - RNA, 19 nt, Homo sapiens
  misc_RNA (1)...(19): siRNA sense strand
aagaagaggaugagaauga

SEQ ID NO: 2040010 - RNA, 19 nt, Homo sapiens
  misc_RNA (1)...(19): siRNA sense strand
gcacauuuauucuguuuug

SEQ ID NO: 2040011 - RNA, 19 nt, Homo sapiens
  misc_RNA (1)...(19): siRNA sense strand
gauagaaaaucuucccaaa

SEQ ID NO: 2040012 - RNA, 19 nt, Homo sapiens
  misc_RNA (1)...(19): siRNA sense strand
agucagugccucauauuua

SEQ ID NO: 2040013 - RNA, 19 nt, Homo sapiens
  misc_RNA (1)...(19): siRNA sense strand
cagauacuuuacaggguua

SEQ ID NO: 2040014 - RNA, 19 nt, Homo sapiens
  misc_RNA (1)...(19): siRNA sense strand
uuaaagaaaucuccauguc

SEQ ID NO: 2040015 - RNA, 19 nt, Homo sapiens
  misc_RNA (1)...(19): siRNA sense strand
gcuauuacagaacuccuua

SEQ ID NO: 2040016 - RNA, 19 nt, Homo sapiens
  misc_RNA (1)...(19): siRNA sense strand
gauaucauucgauguagaa

SEQ ID NO: 2040017 - RNA, 19 nt, Homo sapiens
  misc_RNA (1)...(19): siRNA sense strand
aaacacagcccuuacucuu

SEQ ID NO: 2040018 - RNA, 19 nt, Homo sapiens
  misc_RNA (1)...(19): siRNA sense strand
caacauccuuaaugcagau

SEQ ID NO: 2040019 - RNA, 19 nt, Homo sapiens
  misc_RNA (1)...(19): siRNA sense strand
cagcagaaggagaaauaua

SEQ ID NO: 2040020 - RNA, 19 nt, Homo sapiens
  misc_RNA (1)...(19): siRNA sense strand
caaauuucccuuucaagau

SEQ ID NO: 2040021 - RNA, 19 nt, Homo sapiens
  misc_RNA (1)...(19): siRNA sense strand
augaaacacugcuuaagaa

SEQ ID NO: 2040022 - RNA, 19 nt, Homo sapiens
  misc_RNA (1)...(19): siRNA sense strand
gaaagaaacaagcaagacu

SEQ ID NO: 2040023 - RNA, 19 nt, Homo sapiens
  misc_RNA (1)...(19): siRNA sense strand
guacuauucugcccuaaaa

SEQ ID NO: 2040024 - RNA, 19 nt, Homo sapiens
  misc_RNA (1)...(19): siRNA sense strand
gcugagaaguuuggugaau

SEQ ID NO: 2040025 - RNA, 19 nt, Homo sapiens
  misc_RNA (1)...(19): siRNA sense strand
aguaaggacugaugcagaa

SEQ ID NO: 2040026 - RNA, 19 nt, Homo sapiens
  misc_RNA (1)...(19): siRNA sense strand
caaacuccgugaggauauu

SEQ ID NO: 2040027 - RNA, 19 nt, Homo sapiens
  misc_RNA (1)...(19): siRNA sense strand
agaauucagcagagaaaua

SEQ ID NO: 2040028 - RNA, 19 nt, Homo sapiens
  misc_RNA (1)...(19): siRNA sense strand
cuaaguaccuucgggugaa

SEQ ID NO: 2040029 - RNA, 19 nt, Homo sapiens
  misc_RNA (1)...(19): siRNA sense strand
gcuagugguuauuuaaugg

SEQ ID NO: 2040030 - RNA, 19 nt, Homo sapiens
  misc_RNA (1)...(19): siRNA sense strand
caaggaugcucgacaugca

SEQ ID NO: 2040031 - RNA, 19 nt, Homo sapiens
  misc_RNA (1)...(19): siRNA sense strand
gcuguuuacugaaccuuau

SEQ ID NO: 2040032 - RNA, 19 nt, Homo sapiens
  misc_RNA (1)...(19): siRNA sense strand
aaauuucccuuucaagauc

SEQ ID NO: 2040033 - RNA, 19 nt, Homo sapiens
  misc_RNA (1)...(19): siRNA sense strand
ggaugagaaugaagaagag

SEQ ID NO: 2040034 - RNA, 19 nt, Homo sapiens
  misc_RNA (1)...(19): siRNA sense strand
cuccaugucugaucucaaa

SEQ ID NO: 2040035 - RNA, 19 nt, Homo sapiens
  misc_RNA (1)...(19): siRNA sense strand
guucauacuacaagacuuu

SEQ ID NO: 2040036 - RNA, 19 nt, Homo sapiens
  misc_RNA (1)...(19): siRNA sense strand
ucaaguguuuacucauuug

SEQ ID NO: 2040037 - RNA, 19 nt, Homo sapiens
  misc_RNA (1)...(19): siRNA sense strand
ugagaagcaucuuucaagu

SEQ ID NO: 2040038 - RNA, 19 nt, Homo sapiens
  misc_RNA (1)...(19): siRNA sense strand
ggugauaguccacacagaa

SEQ ID NO: 2040039 - RNA, 19 nt, Homo sapiens
  misc_RNA (1)...(19): siRNA sense strand
gauggaagagcuagugguu

SEQ ID NO: 2040040 - RNA, 19 nt, Homo sapiens
  misc_RNA (1)...(19): siRNA sense strand
guagaauucagcagagaaa

SEQ ID NO: 2040041 - RNA, 19 nt, Homo sapiens
  misc_RNA (1)...(19): siRNA sense strand
gccagcaucugucaacauc

SEQ ID NO: 2040042 - RNA, 19 nt, Homo sapiens
  misc_RNA (1)...(19): siRNA sense strand
gagaagcaucuuucaagug

SEQ ID NO: 2040043 - RNA, 19 nt, Homo sapiens
  misc_RNA (1)...(19): siRNA sense strand
ccaaagaaauuccccaugu

SEQ ID NO: 2040044 - RNA, 19 nt, Homo sapiens
  misc_RNA (1)...(19): siRNA sense strand
ugaaauaagagaccaauac

SEQ ID NO: 2040045 - RNA, 19 nt, Homo sapiens
  misc_RNA (1)...(19): siRNA sense strand
acaugugacccaaggauua

SEQ ID NO: 2040046 - RNA, 19 nt, Homo sapiens
  misc_RNA (1)...(19): siRNA sense strand
agaagaggaugagaaugaa

SEQ ID NO: 2040047 - RNA, 19 nt, Homo sapiens
  misc_RNA (1)...(19): siRNA sense strand
gaacaauuagagaaugugu

SEQ ID NO: 2040048 - RNA, 19 nt, Homo sapiens
  misc_RNA (1)...(19): siRNA sense strand
ugcuagaaauguacaguaa

SEQ ID NO: 2040049 - RNA, 19 nt, Homo sapiens
  misc_RNA (1)...(19): siRNA sense strand
cagcagagaaauauuacaa

SEQ ID NO: 2040050 - RNA, 19 nt, Homo sapiens
  misc_RNA (1)...(19): siRNA sense strand
gagaaaggaugacucacaa

SEQ ID NO: 2040051 - RNA, 19 nt, Homo sapiens
  misc_RNA (1)...(19): siRNA sense strand
gaaaggcacaucaacaaga

SEQ ID NO: 2040052 - RNA, 19 nt, Homo sapiens
  misc_RNA (1)...(19): siRNA sense strand
gaaaggaugacucacaaga

SEQ ID NO: 2040053 - RNA, 19 nt, Homo sapiens
  misc_RNA (1)...(19): siRNA sense strand
ggaaggcacuggcuuacuc

SEQ ID NO: 2040054 - RNA, 19 nt, Homo sapiens
  misc_RNA (1)...(19): siRNA sense strand
aaaggcacaucaacaagaa

SEQ ID NO: 2040055 - RNA, 19 nt, Homo sapiens
  misc_RNA (1)...(19): siRNA sense strand
gccaagggcagaguauuua

SEQ ID NO: 2040056 - RNA, 19 nt, Homo sapiens
  misc_RNA (1)...(19): siRNA sense strand
gcagugacaccgcuguuga

SEQ ID NO: 2040057 - RNA, 19 nt, Homo sapiens
  misc_RNA (1)...(19): siRNA sense strand
ggccaagggcagaguauuu

SEQ ID NO: 2040058 - RNA, 19 nt, Homo sapiens
  misc_RNA (1)...(19): siRNA sense strand
ccacccaccuucuccuuuc

SEQ ID NO: 2040059 - RNA, 19 nt, Homo sapiens
  misc_RNA (1)...(19): siRNA sense strand
ggagagacgucggcuacag

SEQ ID NO: 2040060 - RNA, 19 nt, Homo sapiens
  misc_RNA (1)...(19): siRNA sense strand
cgggugcucuuaccuucua

SEQ ID NO: 2040061 - RNA, 19 nt, Homo sapiens
  misc_RNA (1)...(19): siRNA sense strand
caacgugauccgcugguuu

SEQ ID NO: 2040062 - RNA, 19 nt, Homo sapiens
  misc_RNA (1)...(19): siRNA sense strand
acaggaaggcacuggcuua

SEQ ID NO: 2040063 - RNA, 19 nt, Homo sapiens
  misc_RNA (1)...(19): siRNA sense strand
cgagaaaggaugacucaca

SEQ ID NO: 2040064 - RNA, 19 nt, Homo sapiens
  misc_RNA (1)...(19): siRNA sense strand
ggcagaguauuuaggaauc

SEQ ID NO: 2040065 - RNA, 19 nt, Homo sapiens
  misc_RNA (1)...(19): siRNA sense strand
ugacaccgcuguugaugcu

SEQ ID NO: 2040066 - RNA, 19 nt, Homo sapiens
  misc_RNA (1)...(19): siRNA sense strand
ggaggcuuaugcugccauu

SEQ ID NO: 2040067 - RNA, 19 nt, Homo sapiens
  misc_RNA (1)...(19): siRNA sense strand
acacaccacugcagcaucu

SEQ ID NO: 2040068 - RNA, 19 nt, Homo sapiens
  misc_RNA (1)...(19): siRNA sense strand
uauggaaguugggaccuuu

SEQ ID NO: 2040069 - RNA, 19 nt, Homo sapiens
  misc_RNA (1)...(19): siRNA sense strand
gaacacaccacugcagcau

SEQ ID NO: 2040070 - RNA, 19 nt, Homo sapiens
  misc_RNA (1)...(19): siRNA sense strand
gggcagaguauuuaggaau

SEQ ID NO: 2040071 - RNA, 19 nt, Homo sapiens
  misc_RNA (1)...(19): siRNA sense strand
ucgaaaggcacaucaacaa

SEQ ID NO: 2040072 - RNA, 19 nt, Homo sapiens
  misc_RNA (1)...(19): siRNA sense strand
ggacaacuggaagguauuc

SEQ ID NO: 2040073 - RNA, 19 nt, Homo sapiens
  misc_RNA (1)...(19): siRNA sense strand
gccaccgucuccaucugua

SEQ ID NO: 2040074 - RNA, 19 nt, Homo sapiens
  misc_RNA (1)...(19): siRNA sense strand
ucuguaagaagugcauuua

SEQ ID NO: 2040075 - RNA, 19 nt, Homo sapiens
  misc_RNA (1)...(19): siRNA sense strand
uuggacaacuggaagguau

SEQ ID NO: 2040076 - RNA, 19 nt, Homo sapiens
  misc_RNA (1)...(19): siRNA sense strand
ggugagacuagcaucgaaa

SEQ ID NO: 2040077 - RNA, 19 nt, Homo sapiens
  misc_RNA (1)...(19): siRNA sense strand
gcugguagacaacgugauc

SEQ ID NO: 2040078 - RNA, 19 nt, Homo sapiens
  misc_RNA (1)...(19): siRNA sense strand
cgaaaggcacaucaacaag

SEQ ID NO: 2040079 - RNA, 19 nt, Homo sapiens
  misc_RNA (1)...(19): siRNA sense strand
aggcuuaugcugccauuga

SEQ ID NO: 2040080 - RNA, 19 nt, Homo sapiens
  misc_RNA (1)...(19): siRNA sense strand
gaggugagacuagcaucga

SEQ ID NO: 2040081 - RNA, 19 nt, Homo sapiens
  misc_RNA (1)...(19): siRNA sense strand
ccuuugagccugucuacug

SEQ ID NO: 2040082 - RNA, 19 nt, Homo sapiens
  misc_RNA (1)...(19): siRNA sense strand
gcaugcuguucucaucagu

SEQ ID NO: 2040083 - RNA, 19 nt, Homo sapiens
  misc_RNA (1)...(19): siRNA sense strand
gcucccugcucuacaacuc

SEQ ID NO: 2040084 - RNA, 19 nt, Homo sapiens
  misc_RNA (1)...(19): siRNA sense strand
gcagaguauuuaggaaucc

SEQ ID NO: 2040085 - RNA, 19 nt, Homo sapiens
  misc_RNA (1)...(19): siRNA sense strand
gagaaaggaugacucacaa

SEQ ID NO: 2040086 - RNA, 19 nt, Homo sapiens
  misc_RNA (1)...(19): siRNA sense strand
gaaaggcacaucaacaaga

SEQ ID NO: 2040087 - RNA, 19 nt, Homo sapiens
  misc_RNA (1)...(19): siRNA sense strand
gaaaggaugacucacaaga

SEQ ID NO: 2040088 - RNA, 19 nt, Homo sapiens
  misc_RNA (1)...(19): siRNA sense strand
ggaaggcacuggcuuacuc

SEQ ID NO: 2040089 - RNA, 19 nt, Homo sapiens
  misc_RNA (1)...(19): siRNA sense strand
aaaggcacaucaacaagaa

SEQ ID NO: 2040090 - RNA, 19 nt, Homo sapiens
  misc_RNA (1)...(19): siRNA sense strand
gccaagggcagaguauuua

SEQ ID NO: 2040091 - RNA, 19 nt, Homo sapiens
  misc_RNA (1)...(19): siRNA sense strand
gcagugacaccgcuguuga

SEQ ID NO: 2040092 - RNA, 19 nt, Homo sapiens
  misc_RNA (1)...(19): siRNA sense strand
ggccaagggcagaguauuu

SEQ ID NO: 2040093 - RNA, 19 nt, Homo sapiens
  misc_RNA (1)...(19): siRNA sense strand
ccacccaccuucuccuuuc

SEQ ID NO: 2040094 - RNA, 19 nt, Homo sapiens
  misc_RNA (1)...(19): siRNA sense strand
ggagagacgucggcuacag

SEQ ID NO: 2040095 - RNA, 19 nt, Homo sapiens
  misc_RNA (1)...(19): siRNA sense strand
cgggugcucuuaccuucua

SEQ ID NO: 2040096 - RNA, 19 nt, Homo sapiens
  misc_RNA (1)...(19): siRNA sense strand
caacgugauccgcugguuu

SEQ ID NO: 2040097 - RNA, 19 nt, Homo sapiens
  misc_RNA (1)...(19): siRNA sense strand
acaggaaggcacuggcuua

SEQ ID NO: 2040098 - RNA, 19 nt, Homo sapiens
  misc_RNA (1)...(19): siRNA sense strand
cgagaaaggaugacucaca

SEQ ID NO: 2040099 - RNA, 19 nt, Homo sapiens
  misc_RNA (1)...(19): siRNA sense strand
ggcagaguauuuaggaauc

SEQ ID NO: 2040100 - RNA, 19 nt, Homo sapiens
  misc_RNA (1)...(19): siRNA sense strand
ugacaccgcuguugaugcu

SEQ ID NO: 2040101 - RNA, 19 nt, Homo sapiens
  misc_RNA (1)...(19): siRNA sense strand
ggaggcuuaugcugccauu

SEQ ID NO: 2040102 - RNA, 19 nt, Homo sapiens
  misc_RNA (1)...(19): siRNA sense strand
acacaccacugcagcaucu

SEQ ID NO: 2040103 - RNA, 19 nt, Homo sapiens
  misc_RNA (1)...(19): siRNA sense strand
uauggaaguugggaccuuu

SEQ ID NO: 2040104 - RNA, 19 nt, Homo sapiens
  misc_RNA (1)...(19): siRNA sense strand
gaacacaccacugcagcau

SEQ ID NO: 2040105 - RNA, 19 nt, Homo sapiens
  misc_RNA (1)...(19): siRNA sense strand
gggcagaguauuuaggaau

SEQ ID NO: 2040106 - RNA, 19 nt, Homo sapiens
  misc_RNA (1)...(19): siRNA sense strand
ucgaaaggcacaucaacaa

SEQ ID NO: 2040107 - RNA, 19 nt, Homo sapiens
  misc_RNA (1)...(19): siRNA sense strand
ggacaacuggaagguauuc

SEQ ID NO: 2040108 - RNA, 19 nt, Homo sapiens
  misc_RNA (1)...(19): siRNA sense strand
gccaccgucuccaucugua

SEQ ID NO: 2040109 - RNA, 19 nt, Homo sapiens
  misc_RNA (1)...(19): siRNA sense strand
ucuguaagaagugcauuua

SEQ ID NO: 2040110 - RNA, 19 nt, Homo sapiens
  misc_RNA (1)...(19): siRNA sense strand
uuggacaacuggaagguau

SEQ ID NO: 2040111 - RNA, 19 nt, Homo sapiens
  misc_RNA (1)...(19): siRNA sense strand
ggugagacuagcaucgaaa

SEQ ID NO: 2040112 - RNA, 19 nt, Homo sapiens
  misc_RNA (1)...(19): siRNA sense strand
gcugguagacaacgugauc

SEQ ID NO: 2040113 - RNA, 19 nt, Homo sapiens
  misc_RNA (1)...(19): siRNA sense strand
cgaaaggcacaucaacaag

SEQ ID NO: 2040114 - RNA, 19 nt, Homo sapiens
  misc_RNA (1)...(19): siRNA sense strand
aggcuuaugcugccauuga

SEQ ID NO: 2040115 - RNA, 19 nt, Homo sapiens
  misc_RNA (1)...(19): siRNA sense strand
gaggugagacuagcaucga

SEQ ID NO: 2040116 - RNA, 19 nt, Homo sapiens
  misc_RNA (1)...(19): siRNA sense strand
ccuuugagccugucuacug

SEQ ID NO: 2040117 - RNA, 19 nt, Homo sapiens
  misc_RNA (1)...(19): siRNA sense strand
gcaugcuguucucaucagu

SEQ ID NO: 2040118 - RNA, 19 nt, Homo sapiens
  misc_RNA (1)...(19): siRNA sense strand
gcucccugcucuacaacuc

SEQ ID NO: 2040119 - RNA, 19 nt, Homo sapiens
  misc_RNA (1)...(19): siRNA sense strand
gcagaguauuuaggaaucc

SEQ ID NO: 2040120 - RNA, 19 nt, Homo sapiens
  misc_RNA (1)...(19): siRNA sense strand
gagaaaggaugacucacaa

SEQ ID NO: 2040121 - RNA, 19 nt, Homo sapiens
  misc_RNA (1)...(19): siRNA sense strand
gaaaggcacaucaacaaga

SEQ ID NO: 2040122 - RNA, 19 nt, Homo sapiens
  misc_RNA (1)...(19): siRNA sense strand
gaaaggaugacucacaaga

SEQ ID NO: 2040123 - RNA, 19 nt, Homo sapiens
  misc_RNA (1)...(19): siRNA sense strand
ggaaggcacuggcuuacuc

SEQ ID NO: 2040124 - RNA, 19 nt, Homo sapiens
  misc_RNA (1)...(19): siRNA sense strand
aaaggcacaucaacaagaa

SEQ ID NO: 2040125 - RNA, 19 nt, Homo sapiens
  misc_RNA (1)...(19): siRNA sense strand
gccaagggcagaguauuua

SEQ ID NO: 2040126 - RNA, 19 nt, Homo sapiens
  misc_RNA (1)...(19): siRNA sense strand
gcagugacaccgcuguuga

SEQ ID NO: 2040127 - RNA, 19 nt, Homo sapiens
  misc_RNA (1)...(19): siRNA sense strand
ggccaagggcagaguauuu

SEQ ID NO: 2040128 - RNA, 19 nt, Homo sapiens
  misc_RNA (1)...(19): siRNA sense strand
ccacccaccuucuccuuuc

SEQ ID NO: 2040129 - RNA, 19 nt, Homo sapiens
  misc_RNA (1)...(19): siRNA sense strand
ggagagacgucggcuacag

SEQ ID NO: 2040130 - RNA, 19 nt, Homo sapiens
  misc_RNA (1)...(19): siRNA sense strand
cgggugcucuuaccuucua

SEQ ID NO: 2040131 - RNA, 19 nt, Homo sapiens
  misc_RNA (1)...(19): siRNA sense strand
caacgugauccgcugguuu

SEQ ID NO: 2040132 - RNA, 19 nt, Homo sapiens
  misc_RNA (1)...(19): siRNA sense strand
acaggaaggcacuggcuua

SEQ ID NO: 2040133 - RNA, 19 nt, Homo sapiens
  misc_RNA (1)...(19): siRNA sense strand
cgagaaaggaugacucaca

SEQ ID NO: 2040134 - RNA, 19 nt, Homo sapiens
  misc_RNA (1)...(19): siRNA sense strand
ggcagaguauuuaggaauc

SEQ ID NO: 2040135 - RNA, 19 nt, Homo sapiens
  misc_RNA (1)...(19): siRNA sense strand
ugacaccgcuguugaugcu

SEQ ID NO: 2040136 - RNA, 19 nt, Homo sapiens
  misc_RNA (1)...(19): siRNA sense strand
ggaggcuuaugcugccauu

SEQ ID NO: 2040137 - RNA, 19 nt, Homo sapiens
  misc_RNA (1)...(19): siRNA sense strand
acacaccacugcagcaucu

SEQ ID NO: 2040138 - RNA, 19 nt, Homo sapiens
  misc_RNA (1)...(19): siRNA sense strand
uauggaaguugggaccuuu

SEQ ID NO: 2040139 - RNA, 19 nt, Homo sapiens
  misc_RNA (1)...(19): siRNA sense strand
gaacacaccacugcagcau

SEQ ID NO: 2040140 - RNA, 19 nt, Homo sapiens
  misc_RNA (1)...(19): siRNA sense strand
gggcagaguauuuaggaau

SEQ ID NO: 2040141 - RNA, 19 nt, Homo sapiens
  misc_RNA (1)...(19): siRNA sense strand
ucgaaaggcacaucaacaa

SEQ ID NO: 2040142 - RNA, 19 nt, Homo sapiens
  misc_RNA (1)...(19): siRNA sense strand
ggacaacuggaagguauuc

SEQ ID NO: 2040143 - RNA, 19 nt, Homo sapiens
  misc_RNA (1)...(19): siRNA sense strand
gccaccgucuccaucugua

SEQ ID NO: 2040144 - RNA, 19 nt, Homo sapiens
  misc_RNA (1)...(19): siRNA sense strand
ucuguaagaagugcauuua

SEQ ID NO: 2040145 - RNA, 19 nt, Homo sapiens
  misc_RNA (1)...(19): siRNA sense strand
uuggacaacuggaagguau

SEQ ID NO: 2040146 - RNA, 19 nt, Homo sapiens
  misc_RNA (1)...(19): siRNA sense strand
ggugagacuagcaucgaaa

SEQ ID NO: 2040147 - RNA, 19 nt, Homo sapiens
  misc_RNA (1)...(19): siRNA sense strand
gcugguagacaacgugauc

SEQ ID NO: 2040148 - RNA, 19 nt, Homo sapiens
  misc_RNA (1)...(19): siRNA sense strand
cgaaaggcacaucaacaag

SEQ ID NO: 2040149 - RNA, 19 nt, Homo sapiens
  misc_RNA (1)...(19): siRNA sense strand
aggcuuaugcugccauuga

SEQ ID NO: 2040150 - RNA, 19 nt, Homo sapiens
  misc_RNA (1)...(19): siRNA sense strand
gaggugagacuagcaucga

SEQ ID NO: 2040151 - RNA, 19 nt, Homo sapiens
  misc_RNA (1)...(19): siRNA sense strand
ccuuugagccugucuacug

SEQ ID NO: 2040152 - RNA, 19 nt, Homo sapiens
  misc_RNA (1)...(19): siRNA sense strand
gcaugcuguucucaucagu

SEQ ID NO: 2040153 - RNA, 19 nt, Homo sapiens
  misc_RNA (1)...(19): siRNA sense strand
gcucccugcucuacaacuc

SEQ ID NO: 2040154 - RNA, 19 nt, Homo sapiens
  misc_RNA (1)...(19): siRNA sense strand
gcagaguauuuaggaaucc

SEQ ID NO: 2040155 - RNA, 19 nt, Homo sapiens
  misc_RNA (1)...(19): siRNA sense strand
gagaaaggaugacucacaa

SEQ ID NO: 2040156 - RNA, 19 nt, Homo sapiens
  misc_RNA (1)...(19): siRNA sense strand
gaaaggcacaucaacaaga

SEQ ID NO: 2040157 - RNA, 19 nt, Homo sapiens
  misc_RNA (1)...(19): siRNA sense strand
gaaaggaugacucacaaga

SEQ ID NO: 2040158 - RNA, 19 nt, Homo sapiens
  misc_RNA (1)...(19): siRNA sense strand
ggaaggcacuggcuuacuc

SEQ ID NO: 2040159 - RNA, 19 nt, Homo sapiens
  misc_RNA (1)...(19): siRNA sense strand
aaaggcacaucaacaagaa

SEQ ID NO: 2040160 - RNA, 19 nt, Homo sapiens
  misc_RNA (1)...(19): siRNA sense strand
gccaagggcagaguauuua

SEQ ID NO: 2040161 - RNA, 19 nt, Homo sapiens
  misc_RNA (1)...(19): siRNA sense strand
gcagugacaccgcuguuga

SEQ ID NO: 2040162 - RNA, 19 nt, Homo sapiens
  misc_RNA (1)...(19): siRNA sense strand
ggccaagggcagaguauuu

SEQ ID NO: 2040163 - RNA, 19 nt, Homo sapiens
  misc_RNA (1)...(19): siRNA sense strand
ccacccaccuucuccuuuc

SEQ ID NO: 2040164 - RNA, 19 nt, Homo sapiens
  misc_RNA (1)...(19): siRNA sense strand
ggagagacgucggcuacag

SEQ ID NO: 2040165 - RNA, 19 nt, Homo sapiens
  misc_RNA (1)...(19): siRNA sense strand
cgggugcucuuaccuucua

SEQ ID NO: 2040166 - RNA, 19 nt, Homo sapiens
  misc_RNA (1)...(19): siRNA sense strand
caacgugauccgcugguuu

SEQ ID NO: 2040167 - RNA, 19 nt, Homo sapiens
  misc_RNA (1)...(19): siRNA sense strand
acaggaaggcacuggcuua

SEQ ID NO: 2040168 - RNA, 19 nt, Homo sapiens
  misc_RNA (1)...(19): siRNA sense strand
cgagaaaggaugacucaca

SEQ ID NO: 2040169 - RNA, 19 nt, Homo sapiens
  misc_RNA (1)...(19): siRNA sense strand
ggcagaguauuuaggaauc

SEQ ID NO: 2040170 - RNA, 19 nt, Homo sapiens
  misc_RNA (1)...(19): siRNA sense strand
ugacaccgcuguugaugcu

SEQ ID NO: 2040171 - RNA, 19 nt, Homo sapiens
  misc_RNA (1)...(19): siRNA sense strand
ggaggcuuaugcugccauu

SEQ ID NO: 2040172 - RNA, 19 nt, Homo sapiens
  misc_RNA (1)...(19): siRNA sense strand
acacaccacugcagcaucu

SEQ ID NO: 2040173 - RNA, 19 nt, Homo sapiens
  misc_RNA (1)...(19): siRNA sense strand
uauggaaguugggaccuuu

SEQ ID NO: 2040174 - RNA, 19 nt, Homo sapiens
  misc_RNA (1)...(19): siRNA sense strand
gaacacaccacugcagcau

SEQ ID NO: 2040175 - RNA, 19 nt, Homo sapiens
  misc_RNA (1)...(19): siRNA sense strand
gggcagaguauuuaggaau

SEQ ID NO: 2040176 - RNA, 19 nt, Homo sapiens
  misc_RNA (1)...(19): siRNA sense strand
ucgaaaggcacaucaacaa

SEQ ID NO: 2040177 - RNA, 19 nt, Homo sapiens
  misc_RNA (1)...(19): siRNA sense strand
ggacaacuggaagguauuc

SEQ ID NO: 2040178 - RNA, 19 nt, Homo sapiens
  misc_RNA (1)...(19): siRNA sense strand
gccaccgucuccaucugua

SEQ ID NO: 2040179 - RNA, 19 nt, Homo sapiens
  misc_RNA (1)...(19): siRNA sense strand
ucuguaagaagugcauuua

SEQ ID NO: 2040180 - RNA, 19 nt, Homo sapiens
  misc_RNA (1)...(19): siRNA sense strand
uuggacaacuggaagguau

SEQ ID NO: 2040181 - RNA, 19 nt, Homo sapiens
  misc_RNA (1)...(19): siRNA sense strand
ggugagacuagcaucgaaa

SEQ ID NO: 2040182 - RNA, 19 nt, Homo sapiens
  misc_RNA (1)...(19): siRNA sense strand
gcugguagacaacgugauc

SEQ ID NO: 2040183 - RNA, 19 nt, Homo sapiens
  misc_RNA (1)...(19): siRNA sense strand
cgaaaggcacaucaacaag

SEQ ID NO: 2040184 - RNA, 19 nt, Homo sapiens
  misc_RNA (1)...(19): siRNA sense strand
aggcuuaugcugccauuga

SEQ ID NO: 2040185 - RNA, 19 nt, Homo sapiens
  misc_RNA (1)...(19): siRNA sense strand
gaggugagacuagcaucga

SEQ ID NO: 2040186 - RNA, 19 nt, Homo sapiens
  misc_RNA (1)...(19): siRNA sense strand
ccuuugagccugucuacug

SEQ ID NO: 2040187 - RNA, 19 nt, Homo sapiens
  misc_RNA (1)...(19): siRNA sense strand
gcaugcuguucucaucagu

SEQ ID NO: 2040188 - RNA, 19 nt, Homo sapiens
  misc_RNA (1)...(19): siRNA sense strand
gcucccugcucuacaacuc

SEQ ID NO: 2040189 - RNA, 19 nt, Homo sapiens
  misc_RNA (1)...(19): siRNA sense strand
gcagaguauuuaggaaucc

SEQ ID NO: 2040190 - RNA, 19 nt, Homo sapiens
  misc_RNA (1)...(19): siRNA sense strand
gagaaaggaugacucacaa

SEQ ID NO: 2040191 - RNA, 19 nt, Homo sapiens
  misc_RNA (1)...(19): siRNA sense strand
gaaaggcacaucaacaaga

SEQ ID NO: 2040192 - RNA, 19 nt, Homo sapiens
  misc_RNA (1)...(19): siRNA sense strand
gaaaggaugacucacaaga

SEQ ID NO: 2040193 - RNA, 19 nt, Homo sapiens
  misc_RNA (1)...(19): siRNA sense strand
ggaaggcacuggcuuacuc

SEQ ID NO: 2040194 - RNA, 19 nt, Homo sapiens
  misc_RNA (1)...(19): siRNA sense strand
aaaggcacaucaacaagaa

SEQ ID NO: 2040195 - RNA, 19 nt, Homo sapiens
  misc_RNA (1)...(19): siRNA sense strand
gccaagggcagaguauuua

SEQ ID NO: 2040196 - RNA, 19 nt, Homo sapiens
  misc_RNA (1)...(19): siRNA sense strand
gcagugacaccgcuguuga

SEQ ID NO: 2040197 - RNA, 19 nt, Homo sapiens
  misc_RNA (1)...(19): siRNA sense strand
ggccaagggcagaguauuu

SEQ ID NO: 2040198 - RNA, 19 nt, Homo sapiens
  misc_RNA (1)...(19): siRNA sense strand
ccacccaccuucuccuuuc

SEQ ID NO: 2040199 - RNA, 19 nt, Homo sapiens
  misc_RNA (1)...(19): siRNA sense strand
ggagagacgucggcuacag

SEQ ID NO: 2040200 - RNA, 19 nt, Homo sapiens
  misc_RNA (1)...(19): siRNA sense strand
cgggugcucuuaccuucua

SEQ ID NO: 2040201 - RNA, 19 nt, Homo sapiens
  misc_RNA (1)...(19): siRNA sense strand
caacgugauccgcugguuu

SEQ ID NO: 2040202 - RNA, 19 nt, Homo sapiens
  misc_RNA (1)...(19): siRNA sense strand
acaggaaggcacuggcuua

SEQ ID NO: 2040203 - RNA, 19 nt, Homo sapiens
  misc_RNA (1)...(19): siRNA sense strand
cgagaaaggaugacucaca

SEQ ID NO: 2040204 - RNA, 19 nt, Homo sapiens
  misc_RNA (1)...(19): siRNA sense strand
ggcagaguauuuaggaauc

SEQ ID NO: 2040205 - RNA, 19 nt, Homo sapiens
  misc_RNA (1)...(19): siRNA sense strand
ugacaccgcuguugaugcu

SEQ ID NO: 2040206 - RNA, 19 nt, Homo sapiens
  misc_RNA (1)...(19): siRNA sense strand
ggaggcuuaugcugccauu

SEQ ID NO: 2040207 - RNA, 19 nt, Homo sapiens
  misc_RNA (1)...(19): siRNA sense strand
acacaccacugcagcaucu

SEQ ID NO: 2040208 - RNA, 19 nt, Homo sapiens
  misc_RNA (1)...(19): siRNA sense strand
uauggaaguugggaccuuu

SEQ ID NO: 2040209 - RNA, 19 nt, Homo sapiens
  misc_RNA (1)...(19): siRNA sense strand
gaacacaccacugcagcau

SEQ ID NO: 2040210 - RNA, 19 nt, Homo sapiens
  misc_RNA (1)...(19): siRNA sense strand
gggcagaguauuuaggaau

SEQ ID NO: 2040211 - RNA, 19 nt, Homo sapiens
  misc_RNA (1)...(19): siRNA sense strand
ucgaaaggcacaucaacaa

SEQ ID NO: 2040212 - RNA, 19 nt, Homo sapiens
  misc_RNA (1)...(19): siRNA sense strand
ggacaacuggaagguauuc

SEQ ID NO: 2040213 - RNA, 19 nt, Homo sapiens
  misc_RNA (1)...(19): siRNA sense strand
gccaccgucuccaucugua

SEQ ID NO: 2040214 - RNA, 19 nt, Homo sapiens
  misc_RNA (1)...(19): siRNA sense strand
ucuguaagaagugcauuua

SEQ ID NO: 2040215 - RNA, 19 nt, Homo sapiens
  misc_RNA (1)...(19): siRNA sense strand
uuggacaacuggaagguau

SEQ ID NO: 2040216 - RNA, 19 nt, Homo sapiens
  misc_RNA (1)...(19): siRNA sense strand
ggugagacuagcaucgaaa

SEQ ID NO: 2040217 - RNA, 19 nt, Homo sapiens
  misc_RNA (1)...(19): siRNA sense strand
gcugguagacaacgugauc

SEQ ID NO: 2040218 - RNA, 19 nt, Homo sapiens
  misc_RNA (1)...(19): siRNA sense strand
cgaaaggcacaucaacaag

SEQ ID NO: 2040219 - RNA, 19 nt, Homo sapiens
  misc_RNA (1)...(19): siRNA sense strand
aggcuuaugcugccauuga

SEQ ID NO: 2040220 - RNA, 19 nt, Homo sapiens
  misc_RNA (1)...(19): siRNA sense strand
gaggugagacuagcaucga

SEQ ID NO: 2040221 - RNA, 19 nt, Homo sapiens
  misc_RNA (1)...(19): siRNA sense strand
ccuuugagccugucuacug

SEQ ID NO: 2040222 - RNA, 19 nt, Homo sapiens
  misc_RNA (1)...(19): siRNA sense strand
gcaugcuguucucaucagu

SEQ ID NO: 2040223 - RNA, 19 nt, Homo sapiens
  misc_RNA (1)...(19): siRNA sense strand
gcucccugcucuacaacuc

SEQ ID NO: 2040224 - RNA, 19 nt, Homo sapiens
  misc_RNA (1)...(19): siRNA sense strand
gcagaguauuuaggaaucc

SEQ ID NO: 2040225 - RNA, 19 nt, Homo sapiens
  misc_RNA (1)...(19): siRNA sense strand
gcgccgagcucuuccguaa

SEQ ID NO: 2040226 - RNA, 19 nt, Homo sapiens
  misc_RNA (1)...(19): siRNA sense strand
ccaccgaccuucuuuguug

SEQ ID NO: 2040227 - RNA, 19 nt, Homo sapiens
  misc_RNA (1)...(19): siRNA sense strand
cuacggaccuguucgauga

SEQ ID NO: 2040228 - RNA, 19 nt, Homo sapiens
  misc_RNA (1)...(19): siRNA sense strand
gcacugcuguuuccucuca

SEQ ID NO: 2040229 - RNA, 19 nt, Homo sapiens
  misc_RNA (1)...(19): siRNA sense strand
gaacagccuuggccucauc

SEQ ID NO: 2040230 - RNA, 19 nt, Homo sapiens
  misc_RNA (1)...(19): siRNA sense strand
ucaccaacgugcugucuuu

SEQ ID NO: 2040231 - RNA, 19 nt, Homo sapiens
  misc_RNA (1)...(19): siRNA sense strand
ucaagaagcugcugaaagc

SEQ ID NO: 2040232 - RNA, 19 nt, Homo sapiens
  misc_RNA (1)...(19): siRNA sense strand
gcaagggugucaucgacuu

SEQ ID NO: 2040233 - RNA, 19 nt, Homo sapiens
  misc_RNA (1)...(19): siRNA sense strand
ggacaaagcccagcucaag

SEQ ID NO: 2040234 - RNA, 19 nt, Homo sapiens
  misc_RNA (1)...(19): siRNA sense strand
gcaggucugugugggagua

SEQ ID NO: 2040235 - RNA, 19 nt, Homo sapiens
  misc_RNA (1)...(19): siRNA sense strand
ccaacgugcugucuuuguu

SEQ ID NO: 2040236 - RNA, 19 nt, Homo sapiens
  misc_RNA (1)...(19): siRNA sense strand
cagaguggcugauccagau

SEQ ID NO: 2040237 - RNA, 19 nt, Homo sapiens
  misc_RNA (1)...(19): siRNA sense strand
ggacaucagggccaccuuu

SEQ ID NO: 2040238 - RNA, 19 nt, Homo sapiens
  misc_RNA (1)...(19): siRNA sense strand
ucugagcccuuccgcauuu

SEQ ID NO: 2040239 - RNA, 19 nt, Homo sapiens
  misc_RNA (1)...(19): siRNA sense strand
ccacagagagggaggaaga

SEQ ID NO: 2040240 - RNA, 19 nt, Homo sapiens
  misc_RNA (1)...(19): siRNA sense strand
gcaugucacucgcaagaag

SEQ ID NO: 2040241 - RNA, 19 nt, Homo sapiens
  misc_RNA (1)...(19): siRNA sense strand
agauacagcuucaccuaug

SEQ ID NO: 2040242 - RNA, 19 nt, Homo sapiens
  misc_RNA (1)...(19): siRNA sense strand
gcagcgagcagcccucuau

SEQ ID NO: 2040243 - RNA, 19 nt, Homo sapiens
  misc_RNA (1)...(19): siRNA sense strand
gauacagcuucaccuaugu

SEQ ID NO: 2040244 - RNA, 19 nt, Homo sapiens
  misc_RNA (1)...(19): siRNA sense strand
gcaagaggacgccuguguu

SEQ ID NO: 2040245 - RNA, 19 nt, Homo sapiens
  misc_RNA (1)...(19): siRNA sense strand
cugcagcgcuucccagaga

SEQ ID NO: 2040246 - RNA, 19 nt, Homo sapiens
  misc_RNA (1)...(19): siRNA sense strand
cuaagacuguggacgagaa

SEQ ID NO: 2040247 - RNA, 19 nt, Homo sapiens
  misc_RNA (1)...(19): siRNA sense strand
ggaagaacggucugaugga

SEQ ID NO: 2040248 - RNA, 19 nt, Homo sapiens
  misc_RNA (1)...(19): siRNA sense strand
gauuguugcugaucuggau

SEQ ID NO: 2040249 - RNA, 19 nt, Homo sapiens
  misc_RNA (1)...(19): siRNA sense strand
guuccacaauuacauguau

SEQ ID NO: 2040250 - RNA, 19 nt, Homo sapiens
  misc_RNA (1)...(19): siRNA sense strand
gcucgacucugacuaugag

SEQ ID NO: 2040251 - RNA, 19 nt, Homo sapiens
  misc_RNA (1)...(19): siRNA sense strand
gagcagcccucuauauccu

SEQ ID NO: 2040252 - RNA, 19 nt, Homo sapiens
  misc_RNA (1)...(19): siRNA sense strand
uggcugcgcugaccaagga

SEQ ID NO: 2040253 - RNA, 19 nt, Homo sapiens
  misc_RNA (1)...(19): siRNA sense strand
ggagagcggcuucgaggau

SEQ ID NO: 2040254 - RNA, 19 nt, Homo sapiens
  misc_RNA (1)...(19): siRNA sense strand
caagaggacgccuguguuc

SEQ ID NO: 2040255 - RNA, 19 nt, Homo sapiens
  misc_RNA (1)...(19): siRNA sense strand
ggaauccaccgaccuucuu

SEQ ID NO: 2040256 - RNA, 19 nt, Homo sapiens
  misc_RNA (1)...(19): siRNA sense strand
cccggaaccuggucaagaa

SEQ ID NO: 2040257 - RNA, 19 nt, Homo sapiens
  misc_RNA (1)...(19): siRNA sense strand
gcaacugcaucuccuacgu

SEQ ID NO: 2040258 - RNA, 19 nt, Homo sapiens
  misc_RNA (1)...(19): siRNA sense strand
cagagccacugcagaguca

SEQ ID NO: 2040259 - RNA, 19 nt, Homo sapiens
  misc_RNA (1)...(19): siRNA sense strand
gcgagcagcccucuauauc

SEQ ID NO: 2040260 - RNA, 19 nt, Homo sapiens
  misc_RNA (1)...(19): siRNA sense strand
cagcugcgcuccugcacau

SEQ ID NO: 2040261 - RNA, 19 nt, Homo sapiens
  misc_RNA (1)...(19): siRNA sense strand
agcaggagcuggugcagaa

SEQ ID NO: 2040262 - RNA, 19 nt, Homo sapiens
  misc_RNA (1)...(19): siRNA sense strand
cugcaucuccuacguguuu

SEQ ID NO: 2040263 - RNA, 19 nt, Homo sapiens
  misc_RNA (1)...(19): siRNA sense strand
ucagauacagcuucaccua

SEQ ID NO: 2040264 - RNA, 19 nt, Homo sapiens
  misc_RNA (1)...(19): siRNA sense strand
gaggaagaacggucugaug

SEQ ID NO: 2040265 - RNA, 19 nt, Homo sapiens
  misc_RNA (1)...(19): siRNA sense strand
gcggagccuucacaggaaa

SEQ ID NO: 2040266 - RNA, 19 nt, Homo sapiens
  misc_RNA (1)...(19): siRNA sense strand
gaauccaccgaccuucuuu

SEQ ID NO: 2040267 - RNA, 19 nt, Homo sapiens
  misc_RNA (1)...(19): siRNA sense strand
gggagcuggugcccauuga

SEQ ID NO: 2040268 - RNA, 19 nt, Homo sapiens
  misc_RNA (1)...(19): siRNA sense strand
ggccuuugcuggcuuugug

SEQ ID NO: 2040269 - RNA, 19 nt, Homo sapiens
  misc_RNA (1)...(19): siRNA sense strand
ggagggacggucaccauuc

SEQ ID NO: 2040270 - RNA, 19 nt, Homo sapiens
  misc_RNA (1)...(19): siRNA sense strand
ugguggagcuccuggauuc

SEQ ID NO: 2040271 - RNA, 19 nt, Homo sapiens
  misc_RNA (1)...(19): siRNA sense strand
ggucaccauuccugagugu

SEQ ID NO: 2040272 - RNA, 19 nt, Homo sapiens
  misc_RNA (1)...(19): siRNA sense strand
ugcagaggcuggagacaga

SEQ ID NO: 2040273 - RNA, 19 nt, Homo sapiens
  misc_RNA (1)...(19): siRNA sense strand
ccacguaccgggucaucuu

SEQ ID NO: 2040274 - RNA, 19 nt, Homo sapiens
  misc_RNA (1)...(19): siRNA sense strand
gcaguguggccgagagcua

SEQ ID NO: 2040275 - RNA, 19 nt, Homo sapiens
  misc_RNA (1)...(19): siRNA sense strand
gggugacgcaguuugcaua

SEQ ID NO: 2040276 - RNA, 19 nt, Homo sapiens
  misc_RNA (1)...(19): siRNA sense strand
gcagagcagcggcuucaca

SEQ ID NO: 2040277 - RNA, 19 nt, Homo sapiens
  misc_RNA (1)...(19): siRNA sense strand
cagcaugucacucgcaaga

SEQ ID NO: 2040278 - RNA, 19 nt, Homo sapiens
  misc_RNA (1)...(19): siRNA sense strand
gucaagaacgccaagaaga

SEQ ID NO: 2040279 - RNA, 19 nt, Homo sapiens
  misc_RNA (1)...(19): siRNA sense strand
ugacagcgccgagcucuuc

SEQ ID NO: 2040280 - RNA, 19 nt, Homo sapiens
  misc_RNA (1)...(19): siRNA sense strand
gaggagagcacgguguuca

SEQ ID NO: 2040281 - RNA, 19 nt, Homo sapiens
  misc_RNA (1)...(19): siRNA sense strand
guggagggccugaaugugu

SEQ ID NO: 2040282 - RNA, 19 nt, Homo sapiens
  misc_RNA (1)...(19): siRNA sense strand
gcuguuuccucucagauac

SEQ ID NO: 2040283 - RNA, 19 nt, Homo sapiens
  misc_RNA (1)...(19): siRNA sense strand
gcugguagaggacgauuuc

SEQ ID NO: 2040284 - RNA, 19 nt, Homo sapiens
  misc_RNA (1)...(19): siRNA sense strand
caacguguccaaccugaag

SEQ ID NO: 2040285 - RNA, 19 nt, Homo sapiens
  misc_RNA (1)...(19): siRNA sense strand
ccaccagcaguuugacuuu

SEQ ID NO: 2040286 - RNA, 19 nt, Homo sapiens
  misc_RNA (1)...(19): siRNA sense strand
ggacagcgaccagaguagu

SEQ ID NO: 2040287 - RNA, 19 nt, Homo sapiens
  misc_RNA (1)...(19): siRNA sense strand
ugugggacuucuacacuga

SEQ ID NO: 2040288 - RNA, 19 nt, Homo sapiens
  misc_RNA (1)...(19): siRNA sense strand
gcuggugcccauugaggua

SEQ ID NO: 2040289 - RNA, 19 nt, Homo sapiens
  misc_RNA (1)...(19): siRNA sense strand
ugacgcaguuugcauacag

SEQ ID NO: 2040290 - RNA, 19 nt, Homo sapiens
  misc_RNA (1)...(19): siRNA sense strand
gacuuugucguccguauga

SEQ ID NO: 2040291 - RNA, 19 nt, Homo sapiens
  misc_RNA (1)...(19): siRNA sense strand
cccacgcccuucaucauug

SEQ ID NO: 2040292 - RNA, 19 nt, Homo sapiens
  misc_RNA (1)...(19): siRNA sense strand
guacagccaguuccagaca

SEQ ID NO: 2040293 - RNA, 19 nt, Homo sapiens
  misc_RNA (1)...(19): siRNA sense strand
ucaagggugugcggucaga

SEQ ID NO: 2040294 - RNA, 19 nt, Homo sapiens
  misc_RNA (1)...(19): siRNA sense strand
gcugugguccgcuucauca

SEQ ID NO: 2040295 - RNA, 19 nt, Homo sapiens
  misc_RNA (1)...(19): siRNA sense strand
cccuagacguggcuucuga

SEQ ID NO: 2040296 - RNA, 19 nt, Homo sapiens
  misc_RNA (1)...(19): siRNA sense strand
caccagcaguuugacuuug

SEQ ID NO: 2040297 - RNA, 19 nt, Homo sapiens
  misc_RNA (1)...(19): siRNA sense strand
ccugucauccgcuuccaua

SEQ ID NO: 2040298 - RNA, 19 nt, Homo sapiens
  misc_RNA (1)...(19): siRNA sense strand
ugaagaugcaggacaagga

SEQ ID NO: 2040299 - RNA, 19 nt, Homo sapiens
  misc_RNA (1)...(19): siRNA sense strand
ucacggagcacaagguucu

SEQ ID NO: 2040300 - RNA, 19 nt, Homo sapiens
  misc_RNA (1)...(19): siRNA sense strand
cgagggcacucuguacaag

SEQ ID NO: 2040301 - RNA, 19 nt, Homo sapiens
  misc_RNA (1)...(19): siRNA sense strand
ccaguucuaccucaaguuc

SEQ ID NO: 2040302 - RNA, 19 nt, Homo sapiens
  misc_RNA (1)...(19): siRNA sense strand
ggucaagaacgccaagaag

SEQ ID NO: 2040303 - RNA, 19 nt, Homo sapiens
  misc_RNA (1)...(19): siRNA sense strand
uccguaagcagcugcauaa

SEQ ID NO: 2040304 - RNA, 19 nt, Homo sapiens
  misc_RNA (1)...(19): siRNA sense strand
gucauccgcuuccauaagg

SEQ ID NO: 2040305 - RNA, 19 nt, Homo sapiens
  misc_RNA (1)...(19): siRNA sense strand
gcugcucgaugugauuguu

SEQ ID NO: 2040306 - RNA, 19 nt, Homo sapiens
  misc_RNA (1)...(19): siRNA sense strand
ccucucagauacagcuuca

SEQ ID NO: 2040307 - RNA, 19 nt, Homo sapiens
  misc_RNA (1)...(19): siRNA sense strand
caacgugcugucuuuguuc

SEQ ID NO: 2040308 - RNA, 19 nt, Homo sapiens
  misc_RNA (1)...(19): siRNA sense strand
uggugcagcugcucucaga

SEQ ID NO: 2040309 - RNA, 19 nt, Homo sapiens
  misc_RNA (1)...(19): siRNA sense strand
gccgagcucuuccguaagc

SEQ ID NO: 2040310 - RNA, 19 nt, Homo sapiens
  misc_RNA (1)...(19): siRNA sense strand
agcaagagccgccuacuuc

SEQ ID NO: 2040311 - RNA, 19 nt, Homo sapiens
  misc_RNA (1)...(19): siRNA sense strand
cagcaagagccgccuacuu

SEQ ID NO: 2040312 - RNA, 19 nt, Homo sapiens
  misc_RNA (1)...(19): siRNA sense strand
ggaacagccuuggccucau

SEQ ID NO: 2040313 - RNA, 19 nt, Homo sapiens
  misc_RNA (1)...(19): siRNA sense strand
cagauacagcuucaccuau

SEQ ID NO: 2040314 - RNA, 19 nt, Homo sapiens
  misc_RNA (1)...(19): siRNA sense strand
ggaccaggaggacgagauc

SEQ ID NO: 2040315 - RNA, 19 nt, Homo sapiens
  misc_RNA (1)...(19): siRNA sense strand
gacaucagggccaccuuug

SEQ ID NO: 2040316 - RNA, 19 nt, Homo sapiens
  misc_RNA (1)...(19): siRNA sense strand
gagggacggucaccauucc

SEQ ID NO: 2040317 - RNA, 19 nt, Homo sapiens
  misc_RNA (1)...(19): siRNA sense strand
ugagcagccugguggaaag

SEQ ID NO: 2040318 - RNA, 19 nt, Homo sapiens
  misc_RNA (1)...(19): siRNA sense strand
cagcagagagugagaacag

SEQ ID NO: 2040319 - RNA, 19 nt, Homo sapiens
  misc_RNA (1)...(19): siRNA sense strand
ccacguggagggccugaau

SEQ ID NO: 2040320 - RNA, 19 nt, Homo sapiens
  misc_RNA (1)...(19): siRNA sense strand
agggcacucuguacaagaa

SEQ ID NO: 2040321 - RNA, 19 nt, Homo sapiens
  misc_RNA (1)...(19): siRNA sense strand
cagccaggccauccacuau

SEQ ID NO: 2040322 - RNA, 19 nt, Homo sapiens
  misc_RNA (1)...(19): siRNA sense strand
ccauggaguuugaguucag

SEQ ID NO: 2040323 - RNA, 19 nt, Homo sapiens
  misc_RNA (1)...(19): siRNA sense strand
gccaggccauccacuaugc

SEQ ID NO: 2040324 - RNA, 19 nt, Homo sapiens
  misc_RNA (1)...(19): siRNA sense strand
gagggcacucuguacaaga

SEQ ID NO: 2040325 - RNA, 19 nt, Homo sapiens
  misc_RNA (1)...(19): siRNA sense strand
gcgccgagcucuuccguaa

SEQ ID NO: 2040326 - RNA, 19 nt, Homo sapiens
  misc_RNA (1)...(19): siRNA sense strand
ccaccgaccuucuuuguug

SEQ ID NO: 2040327 - RNA, 19 nt, Homo sapiens
  misc_RNA (1)...(19): siRNA sense strand
cuacggaccuguucgauga

SEQ ID NO: 2040328 - RNA, 19 nt, Homo sapiens
  misc_RNA (1)...(19): siRNA sense strand
gcacugcuguuuccucuca

SEQ ID NO: 2040329 - RNA, 19 nt, Homo sapiens
  misc_RNA (1)...(19): siRNA sense strand
gaacagccuuggccucauc

SEQ ID NO: 2040330 - RNA, 19 nt, Homo sapiens
  misc_RNA (1)...(19): siRNA sense strand
ucaccaacgugcugucuuu

SEQ ID NO: 2040331 - RNA, 19 nt, Homo sapiens
  misc_RNA (1)...(19): siRNA sense strand
ucaagaagcugcugaaagc

SEQ ID NO: 2040332 - RNA, 19 nt, Homo sapiens
  misc_RNA (1)...(19): siRNA sense strand
gcaagggugucaucgacuu

SEQ ID NO: 2040333 - RNA, 19 nt, Homo sapiens
  misc_RNA (1)...(19): siRNA sense strand
ggacaaagcccagcucaag

SEQ ID NO: 2040334 - RNA, 19 nt, Homo sapiens
  misc_RNA (1)...(19): siRNA sense strand
gcaggucugugugggagua

SEQ ID NO: 2040335 - RNA, 19 nt, Homo sapiens
  misc_RNA (1)...(19): siRNA sense strand
ccaacgugcugucuuuguu

SEQ ID NO: 2040336 - RNA, 19 nt, Homo sapiens
  misc_RNA (1)...(19): siRNA sense strand
cagaguggcugauccagau

SEQ ID NO: 2040337 - RNA, 19 nt, Homo sapiens
  misc_RNA (1)...(19): siRNA sense strand
ggacaucagggccaccuuu

SEQ ID NO: 2040338 - RNA, 19 nt, Homo sapiens
  misc_RNA (1)...(19): siRNA sense strand
ucugagcccuuccgcauuu

SEQ ID NO: 2040339 - RNA, 19 nt, Homo sapiens
  misc_RNA (1)...(19): siRNA sense strand
ccacagagagggaggaaga

SEQ ID NO: 2040340 - RNA, 19 nt, Homo sapiens
  misc_RNA (1)...(19): siRNA sense strand
gcaugucacucgcaagaag

SEQ ID NO: 2040341 - RNA, 19 nt, Homo sapiens
  misc_RNA (1)...(19): siRNA sense strand
agauacagcuucaccuaug

SEQ ID NO: 2040342 - RNA, 19 nt, Homo sapiens
  misc_RNA (1)...(19): siRNA sense strand
gcagcgagcagcccucuau

SEQ ID NO: 2040343 - RNA, 19 nt, Homo sapiens
  misc_RNA (1)...(19): siRNA sense strand
gauacagcuucaccuaugu

SEQ ID NO: 2040344 - RNA, 19 nt, Homo sapiens
  misc_RNA (1)...(19): siRNA sense strand
gcaagaggacgccuguguu

SEQ ID NO: 2040345 - RNA, 19 nt, Homo sapiens
  misc_RNA (1)...(19): siRNA sense strand
cugcagcgcuucccagaga

SEQ ID NO: 2040346 - RNA, 19 nt, Homo sapiens
  misc_RNA (1)...(19): siRNA sense strand
cuaagacuguggacgagaa

SEQ ID NO: 2040347 - RNA, 19 nt, Homo sapiens
  misc_RNA (1)...(19): siRNA sense strand
ggaagaacggucugaugga

SEQ ID NO: 2040348 - RNA, 19 nt, Homo sapiens
  misc_RNA (1)...(19): siRNA sense strand
gauuguugcugaucuggau

SEQ ID NO: 2040349 - RNA, 19 nt, Homo sapiens
  misc_RNA (1)...(19): siRNA sense strand
guuccacaauuacauguau

SEQ ID NO: 2040350 - RNA, 19 nt, Homo sapiens
  misc_RNA (1)...(19): siRNA sense strand
gcucgacucugacuaugag

SEQ ID NO: 2040351 - RNA, 19 nt, Homo sapiens
  misc_RNA (1)...(19): siRNA sense strand
gagcagcccucuauauccu

SEQ ID NO: 2040352 - RNA, 19 nt, Homo sapiens
  misc_RNA (1)...(19): siRNA sense strand
uggcugcgcugaccaagga

SEQ ID NO: 2040353 - RNA, 19 nt, Homo sapiens
  misc_RNA (1)...(19): siRNA sense strand
ggagagcggcuucgaggau

SEQ ID NO: 2040354 - RNA, 19 nt, Homo sapiens
  misc_RNA (1)...(19): siRNA sense strand
caagaggacgccuguguuc

SEQ ID NO: 2040355 - RNA, 19 nt, Homo sapiens
  misc_RNA (1)...(19): siRNA sense strand
ggaauccaccgaccuucuu

SEQ ID NO: 2040356 - RNA, 19 nt, Homo sapiens
  misc_RNA (1)...(19): siRNA sense strand
cccggaaccuggucaagaa

SEQ ID NO: 2040357 - RNA, 19 nt, Homo sapiens
  misc_RNA (1)...(19): siRNA sense strand
gcaacugcaucuccuacgu

SEQ ID NO: 2040358 - RNA, 19 nt, Homo sapiens
  misc_RNA (1)...(19): siRNA sense strand
cagagccacugcagaguca

SEQ ID NO: 2040359 - RNA, 19 nt, Homo sapiens
  misc_RNA (1)...(19): siRNA sense strand
gcgagcagcccucuauauc

SEQ ID NO: 2040360 - RNA, 19 nt, Homo sapiens
  misc_RNA (1)...(19): siRNA sense strand
cagcugcgcuccugcacau

SEQ ID NO: 2040361 - RNA, 19 nt, Homo sapiens
  misc_RNA (1)...(19): siRNA sense strand
agcaggagcuggugcagaa

SEQ ID NO: 2040362 - RNA, 19 nt, Homo sapiens
  misc_RNA (1)...(19): siRNA sense strand
cugcaucuccuacguguuu

SEQ ID NO: 2040363 - RNA, 19 nt, Homo sapiens
  misc_RNA (1)...(19): siRNA sense strand
ucagauacagcuucaccua

SEQ ID NO: 2040364 - RNA, 19 nt, Homo sapiens
  misc_RNA (1)...(19): siRNA sense strand
gaggaagaacggucugaug

SEQ ID NO: 2040365 - RNA, 19 nt, Homo sapiens
  misc_RNA (1)...(19): siRNA sense strand
gcggagccuucacaggaaa

SEQ ID NO: 2040366 - RNA, 19 nt, Homo sapiens
  misc_RNA (1)...(19): siRNA sense strand
gaauccaccgaccuucuuu

SEQ ID NO: 2040367 - RNA, 19 nt, Homo sapiens
  misc_RNA (1)...(19): siRNA sense strand
gggagcuggugcccauuga

SEQ ID NO: 2040368 - RNA, 19 nt, Homo sapiens
  misc_RNA (1)...(19): siRNA sense strand
ggccuuugcuggcuuugug

SEQ ID NO: 2040369 - RNA, 19 nt, Homo sapiens
  misc_RNA (1)...(19): siRNA sense strand
ggagggacggucaccauuc

SEQ ID NO: 2040370 - RNA, 19 nt, Homo sapiens
  misc_RNA (1)...(19): siRNA sense strand
ugguggagcuccuggauuc

SEQ ID NO: 2040371 - RNA, 19 nt, Homo sapiens
  misc_RNA (1)...(19): siRNA sense strand
ggucaccauuccugagugu

SEQ ID NO: 2040372 - RNA, 19 nt, Homo sapiens
  misc_RNA (1)...(19): siRNA sense strand
ugcagaggcuggagacaga

SEQ ID NO: 2040373 - RNA, 19 nt, Homo sapiens
  misc_RNA (1)...(19): siRNA sense strand
ccacguaccgggucaucuu

SEQ ID NO: 2040374 - RNA, 19 nt, Homo sapiens
  misc_RNA (1)...(19): siRNA sense strand
gcaguguggccgagagcua

SEQ ID NO: 2040375 - RNA, 19 nt, Homo sapiens
  misc_RNA (1)...(19): siRNA sense strand
gggugacgcaguuugcaua

SEQ ID NO: 2040376 - RNA, 19 nt, Homo sapiens
  misc_RNA (1)...(19): siRNA sense strand
gcagagcagcggcuucaca

SEQ ID NO: 2040377 - RNA, 19 nt, Homo sapiens
  misc_RNA (1)...(19): siRNA sense strand
cagcaugucacucgcaaga

SEQ ID NO: 2040378 - RNA, 19 nt, Homo sapiens
  misc_RNA (1)...(19): siRNA sense strand
gucaagaacgccaagaaga

SEQ ID NO: 2040379 - RNA, 19 nt, Homo sapiens
  misc_RNA (1)...(19): siRNA sense strand
ugacagcgccgagcucuuc

SEQ ID NO: 2040380 - RNA, 19 nt, Homo sapiens
  misc_RNA (1)...(19): siRNA sense strand
gaggagagcacgguguuca

SEQ ID NO: 2040381 - RNA, 19 nt, Homo sapiens
  misc_RNA (1)...(19): siRNA sense strand
guggagggccugaaugugu

SEQ ID NO: 2040382 - RNA, 19 nt, Homo sapiens
  misc_RNA (1)...(19): siRNA sense strand
gcuguuuccucucagauac

SEQ ID NO: 2040383 - RNA, 19 nt, Homo sapiens
  misc_RNA (1)...(19): siRNA sense strand
gcugguagaggacgauuuc

SEQ ID NO: 2040384 - RNA, 19 nt, Homo sapiens
  misc_RNA (1)...(19): siRNA sense strand
caacguguccaaccugaag

SEQ ID NO: 2040385 - RNA, 19 nt, Homo sapiens
  misc_RNA (1)...(19): siRNA sense strand
ccaccagcaguuugacuuu

SEQ ID NO: 2040386 - RNA, 19 nt, Homo sapiens
  misc_RNA (1)...(19): siRNA sense strand
ggacagcgaccagaguagu

SEQ ID NO: 2040387 - RNA, 19 nt, Homo sapiens
  misc_RNA (1)...(19): siRNA sense strand
ugugggacuucuacacuga

SEQ ID NO: 2040388 - RNA, 19 nt, Homo sapiens
  misc_RNA (1)...(19): siRNA sense strand
gcuggugcccauugaggua

SEQ ID NO: 2040389 - RNA, 19 nt, Homo sapiens
  misc_RNA (1)...(19): siRNA sense strand
ugacgcaguuugcauacag

SEQ ID NO: 2040390 - RNA, 19 nt, Homo sapiens
  misc_RNA (1)...(19): siRNA sense strand
gacuuugucguccguauga

SEQ ID NO: 2040391 - RNA, 19 nt, Homo sapiens
  misc_RNA (1)...(19): siRNA sense strand
cccacgcccuucaucauug

SEQ ID NO: 2040392 - RNA, 19 nt, Homo sapiens
  misc_RNA (1)...(19): siRNA sense strand
guacagccaguuccagaca

SEQ ID NO: 2040393 - RNA, 19 nt, Homo sapiens
  misc_RNA (1)...(19): siRNA sense strand
ucaagggugugcggucaga

SEQ ID NO: 2040394 - RNA, 19 nt, Homo sapiens
  misc_RNA (1)...(19): siRNA sense strand
gcugugguccgcuucauca

SEQ ID NO: 2040395 - RNA, 19 nt, Homo sapiens
  misc_RNA (1)...(19): siRNA sense strand
cccuagacguggcuucuga

SEQ ID NO: 2040396 - RNA, 19 nt, Homo sapiens
  misc_RNA (1)...(19): siRNA sense strand
caccagcaguuugacuuug

SEQ ID NO: 2040397 - RNA, 19 nt, Homo sapiens
  misc_RNA (1)...(19): siRNA sense strand
ccugucauccgcuuccaua

SEQ ID NO: 2040398 - RNA, 19 nt, Homo sapiens
  misc_RNA (1)...(19): siRNA sense strand
ugaagaugcaggacaagga

SEQ ID NO: 2040399 - RNA, 19 nt, Homo sapiens
  misc_RNA (1)...(19): siRNA sense strand
ucacggagcacaagguucu

SEQ ID NO: 2040400 - RNA, 19 nt, Homo sapiens
  misc_RNA (1)...(19): siRNA sense strand
cgagggcacucuguacaag

SEQ ID NO: 2040401 - RNA, 19 nt, Homo sapiens
  misc_RNA (1)...(19): siRNA sense strand
ccaguucuaccucaaguuc

SEQ ID NO: 2040402 - RNA, 19 nt, Homo sapiens
  misc_RNA (1)...(19): siRNA sense strand
ggucaagaacgccaagaag

SEQ ID NO: 2040403 - RNA, 19 nt, Homo sapiens
  misc_RNA (1)...(19): siRNA sense strand
uccguaagcagcugcauaa

SEQ ID NO: 2040404 - RNA, 19 nt, Homo sapiens
  misc_RNA (1)...(19): siRNA sense strand
gucauccgcuuccauaagg

SEQ ID NO: 2040405 - RNA, 19 nt, Homo sapiens
  misc_RNA (1)...(19): siRNA sense strand
gcugcucgaugugauuguu

SEQ ID NO: 2040406 - RNA, 19 nt, Homo sapiens
  misc_RNA (1)...(19): siRNA sense strand
ccucucagauacagcuuca

SEQ ID NO: 2040407 - RNA, 19 nt, Homo sapiens
  misc_RNA (1)...(19): siRNA sense strand
caacgugcugucuuuguuc

SEQ ID NO: 2040408 - RNA, 19 nt, Homo sapiens
  misc_RNA (1)...(19): siRNA sense strand
uggugcagcugcucucaga

SEQ ID NO: 2040409 - RNA, 19 nt, Homo sapiens
  misc_RNA (1)...(19): siRNA sense strand
gccgagcucuuccguaagc

SEQ ID NO: 2040410 - RNA, 19 nt, Homo sapiens
  misc_RNA (1)...(19): siRNA sense strand
agcaagagccgccuacuuc

SEQ ID NO: 2040411 - RNA, 19 nt, Homo sapiens
  misc_RNA (1)...(19): siRNA sense strand
cagcaagagccgccuacuu

SEQ ID NO: 2040412 - RNA, 19 nt, Homo sapiens
  misc_RNA (1)...(19): siRNA sense strand
ggaacagccuuggccucau

SEQ ID NO: 2040413 - RNA, 19 nt, Homo sapiens
  misc_RNA (1)...(19): siRNA sense strand
cagauacagcuucaccuau

SEQ ID NO: 2040414 - RNA, 19 nt, Homo sapiens
  misc_RNA (1)...(19): siRNA sense strand
ggaccaggaggacgagauc

SEQ ID NO: 2040415 - RNA, 19 nt, Homo sapiens
  misc_RNA (1)...(19): siRNA sense strand
gacaucagggccaccuuug

SEQ ID NO: 2040416 - RNA, 19 nt, Homo sapiens
  misc_RNA (1)...(19): siRNA sense strand
gagggacggucaccauucc

SEQ ID NO: 2040417 - RNA, 19 nt, Homo sapiens
  misc_RNA (1)...(19): siRNA sense strand
ugagcagccugguggaaag

SEQ ID NO: 2040418 - RNA, 19 nt, Homo sapiens
  misc_RNA (1)...(19): siRNA sense strand
ccacguggagggccugaau

SEQ ID NO: 2040419 - RNA, 19 nt, Homo sapiens
  misc_RNA (1)...(19): siRNA sense strand
agggcacucuguacaagaa

SEQ ID NO: 2040420 - RNA, 19 nt, Homo sapiens
  misc_RNA (1)...(19): siRNA sense strand
cagccaggccauccacuau

SEQ ID NO: 2040421 - RNA, 19 nt, Homo sapiens
  misc_RNA (1)...(19): siRNA sense strand
ccauggaguuugaguucag

SEQ ID NO: 2040422 - RNA, 19 nt, Homo sapiens
  misc_RNA (1)...(19): siRNA sense strand
gccaggccauccacuaugc

SEQ ID NO: 2040423 - RNA, 19 nt, Homo sapiens
  misc_RNA (1)...(19): siRNA sense strand
cagcgagcagcccucuaua

SEQ ID NO: 2040424 - RNA, 19 nt, Homo sapiens
  misc_RNA (1)...(19): siRNA sense strand
gagggcacucuguacaaga

SEQ ID NO: 2040425 - RNA, 19 nt, Homo sapiens
  misc_RNA (1)...(19): siRNA sense strand
ggaagcauaucuuacaauu

SEQ ID NO: 2040426 - RNA, 19 nt, Homo sapiens
  misc_RNA (1)...(19): siRNA sense strand
gaagccagguuccuaauga

SEQ ID NO: 2040427 - RNA, 19 nt, Homo sapiens
  misc_RNA (1)...(19): siRNA sense strand
gaacuaccaugacgaaaca

SEQ ID NO: 2040428 - RNA, 19 nt, Homo sapiens
  misc_RNA (1)...(19): siRNA sense strand
gaaagacuguggagaaugg

SEQ ID NO: 2040429 - RNA, 19 nt, Homo sapiens
  misc_RNA (1)...(19): siRNA sense strand
ggauagcaguggaaauaaa

SEQ ID NO: 2040430 - RNA, 19 nt, Homo sapiens
  misc_RNA (1)...(19): siRNA sense strand
gagcaagaauggccuguau

SEQ ID NO: 2040431 - RNA, 19 nt, Homo sapiens
  misc_RNA (1)...(19): siRNA sense strand
gcuagaagcuggagaugau

SEQ ID NO: 2040432 - RNA, 19 nt, Homo sapiens
  misc_RNA (1)...(19): siRNA sense strand
ggaauacacugcagucucu

SEQ ID NO: 2040433 - RNA, 19 nt, Homo sapiens
  misc_RNA (1)...(19): siRNA sense strand
gcaagaauggccuguauga

SEQ ID NO: 2040434 - RNA, 19 nt, Homo sapiens
  misc_RNA (1)...(19): siRNA sense strand
cgaaacaggugagauaaug

SEQ ID NO: 2040435 - RNA, 19 nt, Homo sapiens
  misc_RNA (1)...(19): siRNA sense strand
aaagugggcuggcuuguug

SEQ ID NO: 2040436 - RNA, 19 nt, Homo sapiens
  misc_RNA (1)...(19): siRNA sense strand
caggugagauaauggauaa

SEQ ID NO: 2040437 - RNA, 19 nt, Homo sapiens
  misc_RNA (1)...(19): siRNA sense strand
gaagagagaaauagaggaa

SEQ ID NO: 2040438 - RNA, 19 nt, Homo sapiens
  misc_RNA (1)...(19): siRNA sense strand
gcucucaacuccuuacaga

SEQ ID NO: 2040439 - RNA, 19 nt, Homo sapiens
  misc_RNA (1)...(19): siRNA sense strand
ugacgaaacaggugagaua

SEQ ID NO: 2040440 - RNA, 19 nt, Homo sapiens
  misc_RNA (1)...(19): siRNA sense strand
ugaaauggguggacaucaa

SEQ ID NO: 2040441 - RNA, 19 nt, Homo sapiens
  misc_RNA (1)...(19): siRNA sense strand
acuauaagccuguggaaua

SEQ ID NO: 2040442 - RNA, 19 nt, Homo sapiens
  misc_RNA (1)...(19): siRNA sense strand
uaagggauauguugaugau

SEQ ID NO: 2040443 - RNA, 19 nt, Homo sapiens
  misc_RNA (1)...(19): siRNA sense strand
ucuaaugguuccaaagaaa

SEQ ID NO: 2040444 - RNA, 19 nt, Homo sapiens
  misc_RNA (1)...(19): siRNA sense strand
ccaagaccaccuagugaua

SEQ ID NO: 2040445 - RNA, 19 nt, Homo sapiens
  misc_RNA (1)...(19): siRNA sense strand
gccagucacucucaauuca

SEQ ID NO: 2040446 - RNA, 19 nt, Homo sapiens
  misc_RNA (1)...(19): siRNA sense strand
gaaagugggcuggcuuguu

SEQ ID NO: 2040447 - RNA, 19 nt, Homo sapiens
  misc_RNA (1)...(19): siRNA sense strand
gaaauggguggacaucaau

SEQ ID NO: 2040448 - RNA, 19 nt, Homo sapiens
  misc_RNA (1)...(19): siRNA sense strand
ggaugggcauguugagaga

SEQ ID NO: 2040449 - RNA, 19 nt, Homo sapiens
  misc_RNA (1)...(19): siRNA sense strand
gauccaggagagaagauua

SEQ ID NO: 2040450 - RNA, 19 nt, Homo sapiens
  misc_RNA (1)...(19): siRNA sense strand
cgucaugucugguucuaau

SEQ ID NO: 2040451 - RNA, 19 nt, Homo sapiens
  misc_RNA (1)...(19): siRNA sense strand
gguuucaucuuaauaccaa

SEQ ID NO: 2040452 - RNA, 19 nt, Homo sapiens
  misc_RNA (1)...(19): siRNA sense strand
ccagguuccuaaugagaaa

SEQ ID NO: 2040453 - RNA, 19 nt, Homo sapiens
  misc_RNA (1)...(19): siRNA sense strand
agaauggccuguaugagau

SEQ ID NO: 2040454 - RNA, 19 nt, Homo sapiens
  misc_RNA (1)...(19): siRNA sense strand
ucagaucagugaaaguaau

SEQ ID NO: 2040455 - RNA, 19 nt, Homo sapiens
  misc_RNA (1)...(19): siRNA sense strand
gagagaaagagcaagaaug

SEQ ID NO: 2040456 - RNA, 19 nt, Homo sapiens
  misc_RNA (1)...(19): siRNA sense strand
aagaccaccuagugauaua

SEQ ID NO: 2040457 - RNA, 19 nt, Homo sapiens
  misc_RNA (1)...(19): siRNA sense strand
aagaauggccuguaugaga

SEQ ID NO: 2040458 - RNA, 19 nt, Homo sapiens
  misc_RNA (1)...(19): siRNA sense strand
ccucagaucagugaaagua

SEQ ID NO: 2040459 - RNA, 19 nt, Homo sapiens
  misc_RNA (1)...(19): siRNA sense strand
ucucaacuccuuacagaaa

SEQ ID NO: 2040460 - RNA, 19 nt, Homo sapiens
  misc_RNA (1)...(19): siRNA sense strand
gaccaccuagugauauaua

SEQ ID NO: 2040461 - RNA, 19 nt, Homo sapiens
  misc_RNA (1)...(19): siRNA sense strand
cuucuugguuucaucuuaa

SEQ ID NO: 2040462 - RNA, 19 nt, Homo sapiens
  misc_RNA (1)...(19): siRNA sense strand
gaaaauggaagaccgagaa

SEQ ID NO: 2040463 - RNA, 19 nt, Homo sapiens
  misc_RNA (1)...(19): siRNA sense strand
gauccucgaaacacugaua

SEQ ID NO: 2040464 - RNA, 19 nt, Homo sapiens
  misc_RNA (1)...(19): siRNA sense strand
gcagaucccauuauaacca

SEQ ID NO: 2040465 - RNA, 19 nt, Homo sapiens
  misc_RNA (1)...(19): siRNA sense strand
aagagaauuuggugaggaa

SEQ ID NO: 2040466 - RNA, 19 nt, Homo sapiens
  misc_RNA (1)...(19): siRNA sense strand
ucgaaacacugauaaugca

SEQ ID NO: 2040467 - RNA, 19 nt, Homo sapiens
  misc_RNA (1)...(19): siRNA sense strand
uauaagggauauguugaug

SEQ ID NO: 2040468 - RNA, 19 nt, Homo sapiens
  misc_RNA (1)...(19): siRNA sense strand
agggauagcaguggaaaua

SEQ ID NO: 2040469 - RNA, 19 nt, Homo sapiens
  misc_RNA (1)...(19): siRNA sense strand
ucaaacuuguggcugagaa

SEQ ID NO: 2040470 - RNA, 19 nt, Homo sapiens
  misc_RNA (1)...(19): siRNA sense strand
cagaagcugugaacuacca

SEQ ID NO: 2040471 - RNA, 19 nt, Homo sapiens
  misc_RNA (1)...(19): siRNA sense strand
ggaaagacuguggagaaug

SEQ ID NO: 2040472 - RNA, 19 nt, Homo sapiens
  misc_RNA (1)...(19): siRNA sense strand
cauuauaaccagauggaaa

SEQ ID NO: 2040473 - RNA, 19 nt, Homo sapiens
  misc_RNA (1)...(19): siRNA sense strand
guucuaaugguuccaaaga

SEQ ID NO: 2040474 - RNA, 19 nt, Homo sapiens
  misc_RNA (1)...(19): siRNA sense strand
caagaccaccuagugauau

SEQ ID NO: 2040475 - RNA, 19 nt, Homo sapiens
  misc_RNA (1)...(19): siRNA sense strand
aaggaaagacuguggagaa

SEQ ID NO: 2040476 - RNA, 19 nt, Homo sapiens
  misc_RNA (1)...(19): siRNA sense strand
gacgaaacaggugagauaa

SEQ ID NO: 2040477 - RNA, 19 nt, Homo sapiens
  misc_RNA (1)...(19): siRNA sense strand
gaaaaccagugcugagaag

SEQ ID NO: 2040478 - RNA, 19 nt, Homo sapiens
  misc_RNA (1)...(19): siRNA sense strand
agagaaagagcaagaaugg

SEQ ID NO: 2040479 - RNA, 19 nt, Homo sapiens
  misc_RNA (1)...(19): siRNA sense strand
gggauagcaguggaaauaa

SEQ ID NO: 2040480 - RNA, 19 nt, Homo sapiens
  misc_RNA (1)...(19): siRNA sense strand
cgcugcagaucccauuaua

SEQ ID NO: 2040481 - RNA, 19 nt, Homo sapiens
  misc_RNA (1)...(19): siRNA sense strand
gaauggccuguaugagauu

SEQ ID NO: 2040482 - RNA, 19 nt, Homo sapiens
  misc_RNA (1)...(19): siRNA sense strand
aaucaugcauccuguuucu

SEQ ID NO: 2040483 - RNA, 19 nt, Homo sapiens
  misc_RNA (1)...(19): siRNA sense strand
ucuucuugguuucaucuua

SEQ ID NO: 2040484 - RNA, 19 nt, Homo sapiens
  misc_RNA (1)...(19): siRNA sense strand
augcauggauggagacaga

SEQ ID NO: 2040485 - RNA, 19 nt, Homo sapiens
  misc_RNA (1)...(19): siRNA sense strand
gaaacaggugagauaaugg

SEQ ID NO: 2040486 - RNA, 19 nt, Homo sapiens
  misc_RNA (1)...(19): siRNA sense strand
cuauaagccuguggaauac

SEQ ID NO: 2040487 - RNA, 19 nt, Homo sapiens
  misc_RNA (1)...(19): siRNA sense strand
aaacaggugagauaaugga

SEQ ID NO: 2040488 - RNA, 19 nt, Homo sapiens
  misc_RNA (1)...(19): siRNA sense strand
cagaucagugaaaguaauu

SEQ ID NO: 2040489 - RNA, 19 nt, Homo sapiens
  misc_RNA (1)...(19): siRNA sense strand
cagccaagaccaccuagug

SEQ ID NO: 2040490 - RNA, 19 nt, Homo sapiens
  misc_RNA (1)...(19): siRNA sense strand
gcugcagaucccauuauaa

SEQ ID NO: 2040491 - RNA, 19 nt, Homo sapiens
  misc_RNA (1)...(19): siRNA sense strand
acacugcagucucugucuu

SEQ ID NO: 2040492 - RNA, 19 nt, Homo sapiens
  misc_RNA (1)...(19): siRNA sense strand
ugacugccaugcguuguag

SEQ ID NO: 2040493 - RNA, 19 nt, Homo sapiens
  misc_RNA (1)...(19): siRNA sense strand
agaaauagaggaaaaguug

SEQ ID NO: 2040494 - RNA, 19 nt, Homo sapiens
  misc_RNA (1)...(19): siRNA sense strand
agagagaaauagaggaaaa

SEQ ID NO: 2040495 - RNA, 19 nt, Homo sapiens
  misc_RNA (1)...(19): siRNA sense strand
ggaagcucucaacuccuua

SEQ ID NO: 2040496 - RNA, 19 nt, Homo sapiens
  misc_RNA (1)...(19): siRNA sense strand
aggaaagacuguggagaau

SEQ ID NO: 2040497 - RNA, 19 nt, Homo sapiens
  misc_RNA (1)...(19): siRNA sense strand
ucucccaaguuuaacgaaa

SEQ ID NO: 2040498 - RNA, 19 nt, Homo sapiens
  misc_RNA (1)...(19): siRNA sense strand
gaaaaggaugggcauguug

SEQ ID NO: 2040499 - RNA, 19 nt, Homo sapiens
  misc_RNA (1)...(19): siRNA sense strand
uugaguggcaagacuauaa

SEQ ID NO: 2040500 - RNA, 19 nt, Homo sapiens
  misc_RNA (1)...(19): siRNA sense strand
cgaaaaggaugggcauguu

SEQ ID NO: 2040501 - RNA, 19 nt, Homo sapiens
  misc_RNA (1)...(19): siRNA sense strand
guugagagaaagagcaaga

SEQ ID NO: 2040502 - RNA, 19 nt, Homo sapiens
  misc_RNA (1)...(19): siRNA sense strand
gaggaaaaguugcacaaac

SEQ ID NO: 2040503 - RNA, 19 nt, Homo sapiens
  misc_RNA (1)...(19): siRNA sense strand
gcugagaagagagaaauag

SEQ ID NO: 2040504 - RNA, 19 nt, Homo sapiens
  misc_RNA (1)...(19): siRNA sense strand
ugggaagcauaucuuacaa

SEQ ID NO: 2040505 - RNA, 19 nt, Homo sapiens
  misc_RNA (1)...(19): siRNA sense strand
aauggaagaccgagaaauc

SEQ ID NO: 2040506 - RNA, 19 nt, Homo sapiens
  misc_RNA (1)...(19): siRNA sense strand
uguaugagauugaaaaugg

SEQ ID NO: 2040507 - RNA, 19 nt, Homo sapiens
  misc_RNA (1)...(19): siRNA sense strand
gagcgaggacucugaagcu

SEQ ID NO: 2040508 - RNA, 19 nt, Homo sapiens
  misc_RNA (1)...(19): siRNA sense strand
ucucaauucaucaaacuug

SEQ ID NO: 2040509 - RNA, 19 nt, Homo sapiens
  misc_RNA (1)...(19): siRNA sense strand
ggugagauaauggauaauc

SEQ ID NO: 2040510 - RNA, 19 nt, Homo sapiens
  misc_RNA (1)...(19): siRNA sense strand
ccucgaaacacugauaaug

SEQ ID NO: 2040511 - RNA, 19 nt, Homo sapiens
  misc_RNA (1)...(19): siRNA sense strand
aaccagugcugagaagaga

SEQ ID NO: 2040512 - RNA, 19 nt, Homo sapiens
  misc_RNA (1)...(19): siRNA sense strand
gggaagcauaucuuacaau

SEQ ID NO: 2040513 - RNA, 19 nt, Homo sapiens
  misc_RNA (1)...(19): siRNA sense strand
gauagcaguggaaauaaaa

SEQ ID NO: 2040514 - RNA, 19 nt, Homo sapiens
  misc_RNA (1)...(19): siRNA sense strand
cagucacucucaauucauc

SEQ ID NO: 2040515 - RNA, 19 nt, Homo sapiens
  misc_RNA (1)...(19): siRNA sense strand
caaacuuguggcugagaaa

SEQ ID NO: 2040516 - RNA, 19 nt, Homo sapiens
  misc_RNA (1)...(19): siRNA sense strand
ugagagaaagagcaagaau

SEQ ID NO: 2040517 - RNA, 19 nt, Homo sapiens
  misc_RNA (1)...(19): siRNA sense strand
acaggugagauaauggaua

SEQ ID NO: 2040518 - RNA, 19 nt, Homo sapiens
  misc_RNA (1)...(19): siRNA sense strand
gccaagaccaccuagugau

SEQ ID NO: 2040519 - RNA, 19 nt, Homo sapiens
  misc_RNA (1)...(19): siRNA sense strand
gccagguuccuaaugagaa

SEQ ID NO: 2040520 - RNA, 19 nt, Homo sapiens
  misc_RNA (1)...(19): siRNA sense strand
ccaaaucacgcugcagauc

SEQ ID NO: 2040521 - RNA, 19 nt, Homo sapiens
  misc_RNA (1)...(19): siRNA sense strand
gggcauguugagagaaaga

SEQ ID NO: 2040522 - RNA, 19 nt, Homo sapiens
  misc_RNA (1)...(19): siRNA sense strand
cugcagaucccauuauaac

SEQ ID NO: 2040523 - RNA, 19 nt, Homo sapiens
  misc_RNA (1)...(19): siRNA sense strand
cgaagccagguuccuaaug

SEQ ID NO: 2040524 - RNA, 19 nt, Homo sapiens
  misc_RNA (1)...(19): siRNA sense strand
acacugauaaugcauggau

SEQ ID NO: 2040525 - RNA, 19 nt, Homo sapiens
  misc_RNA (1)...(19): siRNA sense strand
ggaagcauaucuuacaauu

SEQ ID NO: 2040526 - RNA, 19 nt, Homo sapiens
  misc_RNA (1)...(19): siRNA sense strand
gaagccagguuccuaauga

SEQ ID NO: 2040527 - RNA, 19 nt, Homo sapiens
  misc_RNA (1)...(19): siRNA sense strand
gaacuaccaugacgaaaca

SEQ ID NO: 2040528 - RNA, 19 nt, Homo sapiens
  misc_RNA (1)...(19): siRNA sense strand
gaaagacuguggagaaugg

SEQ ID NO: 2040529 - RNA, 19 nt, Homo sapiens
  misc_RNA (1)...(19): siRNA sense strand
ggauagcaguggaaauaaa

SEQ ID NO: 2040530 - RNA, 19 nt, Homo sapiens
  misc_RNA (1)...(19): siRNA sense strand
gagcaagaauggccuguau

SEQ ID NO: 2040531 - RNA, 19 nt, Homo sapiens
  misc_RNA (1)...(19): siRNA sense strand
gcuagaagcuggagaugau

SEQ ID NO: 2040532 - RNA, 19 nt, Homo sapiens
  misc_RNA (1)...(19): siRNA sense strand
ggaauacacugcagucucu

SEQ ID NO: 2040533 - RNA, 19 nt, Homo sapiens
  misc_RNA (1)...(19): siRNA sense strand
gcaagaauggccuguauga

SEQ ID NO: 2040534 - RNA, 19 nt, Homo sapiens
  misc_RNA (1)...(19): siRNA sense strand
cgaaacaggugagauaaug

SEQ ID NO: 2040535 - RNA, 19 nt, Homo sapiens
  misc_RNA (1)...(19): siRNA sense strand
aaagugggcuggcuuguug

SEQ ID NO: 2040536 - RNA, 19 nt, Homo sapiens
  misc_RNA (1)...(19): siRNA sense strand
caggugagauaauggauaa

SEQ ID NO: 2040537 - RNA, 19 nt, Homo sapiens
  misc_RNA (1)...(19): siRNA sense strand
gaagagagaaauagaggaa

SEQ ID NO: 2040538 - RNA, 19 nt, Homo sapiens
  misc_RNA (1)...(19): siRNA sense strand
gcucucaacuccuuacaga

SEQ ID NO: 2040539 - RNA, 19 nt, Homo sapiens
  misc_RNA (1)...(19): siRNA sense strand
ugacgaaacaggugagaua

SEQ ID NO: 2040540 - RNA, 19 nt, Homo sapiens
  misc_RNA (1)...(19): siRNA sense strand
ugaaauggguggacaucaa

SEQ ID NO: 2040541 - RNA, 19 nt, Homo sapiens
  misc_RNA (1)...(19): siRNA sense strand
acuauaagccuguggaaua

SEQ ID NO: 2040542 - RNA, 19 nt, Homo sapiens
  misc_RNA (1)...(19): siRNA sense strand
uaagggauauguugaugau

SEQ ID NO: 2040543 - RNA, 19 nt, Homo sapiens
  misc_RNA (1)...(19): siRNA sense strand
ucuaaugguuccaaagaaa

SEQ ID NO: 2040544 - RNA, 19 nt, Homo sapiens
  misc_RNA (1)...(19): siRNA sense strand
ccaagaccaccuagugaua

SEQ ID NO: 2040545 - RNA, 19 nt, Homo sapiens
  misc_RNA (1)...(19): siRNA sense strand
gccagucacucucaauuca

SEQ ID NO: 2040546 - RNA, 19 nt, Homo sapiens
  misc_RNA (1)...(19): siRNA sense strand
gaaagugggcuggcuuguu

SEQ ID NO: 2040547 - RNA, 19 nt, Homo sapiens
  misc_RNA (1)...(19): siRNA sense strand
gaaauggguggacaucaau

SEQ ID NO: 2040548 - RNA, 19 nt, Homo sapiens
  misc_RNA (1)...(19): siRNA sense strand
ggaugggcauguugagaga

SEQ ID NO: 2040549 - RNA, 19 nt, Homo sapiens
  misc_RNA (1)...(19): siRNA sense strand
gauccaggagagaagauua

SEQ ID NO: 2040550 - RNA, 19 nt, Homo sapiens
  misc_RNA (1)...(19): siRNA sense strand
ccagguuccuaaugagaaa

SEQ ID NO: 2040551 - RNA, 19 nt, Homo sapiens
  misc_RNA (1)...(19): siRNA sense strand
agaauggccuguaugagau

SEQ ID NO: 2040552 - RNA, 19 nt, Homo sapiens
  misc_RNA (1)...(19): siRNA sense strand
ucagaucagugaaaguaau

SEQ ID NO: 2040553 - RNA, 19 nt, Homo sapiens
  misc_RNA (1)...(19): siRNA sense strand
gagagaaagagcaagaaug

SEQ ID NO: 2040554 - RNA, 19 nt, Homo sapiens
  misc_RNA (1)...(19): siRNA sense strand
aagaccaccuagugauaua

SEQ ID NO: 2040555 - RNA, 19 nt, Homo sapiens
  misc_RNA (1)...(19): siRNA sense strand
aagaauggccuguaugaga

SEQ ID NO: 2040556 - RNA, 19 nt, Homo sapiens
  misc_RNA (1)...(19): siRNA sense strand
ccucagaucagugaaagua

SEQ ID NO: 2040557 - RNA, 19 nt, Homo sapiens
  misc_RNA (1)...(19): siRNA sense strand
ucucaacuccuuacagaaa

SEQ ID NO: 2040558 - RNA, 19 nt, Homo sapiens
  misc_RNA (1)...(19): siRNA sense strand
gaccaccuagugauauaua

SEQ ID NO: 2040559 - RNA, 19 nt, Homo sapiens
  misc_RNA (1)...(19): siRNA sense strand
gaaaauggaagaccgagaa

SEQ ID NO: 2040560 - RNA, 19 nt, Homo sapiens
  misc_RNA (1)...(19): siRNA sense strand
gauccucgaaacacugaua

SEQ ID NO: 2040561 - RNA, 19 nt, Homo sapiens
  misc_RNA (1)...(19): siRNA sense strand
gcagaucccauuauaacca

SEQ ID NO: 2040562 - RNA, 19 nt, Homo sapiens
  misc_RNA (1)...(19): siRNA sense strand
aagagaauuuggugaggaa

SEQ ID NO: 2040563 - RNA, 19 nt, Homo sapiens
  misc_RNA (1)...(19): siRNA sense strand
ucgaaacacugauaaugca

SEQ ID NO: 2040564 - RNA, 19 nt, Homo sapiens
  misc_RNA (1)...(19): siRNA sense strand
uauaagggauauguugaug

SEQ ID NO: 2040565 - RNA, 19 nt, Homo sapiens
  misc_RNA (1)...(19): siRNA sense strand
agggauagcaguggaaaua

SEQ ID NO: 2040566 - RNA, 19 nt, Homo sapiens
  misc_RNA (1)...(19): siRNA sense strand
ucaaacuuguggcugagaa

SEQ ID NO: 2040567 - RNA, 19 nt, Homo sapiens
  misc_RNA (1)...(19): siRNA sense strand
cagaagcugugaacuacca

SEQ ID NO: 2040568 - RNA, 19 nt, Homo sapiens
  misc_RNA (1)...(19): siRNA sense strand
ggaaagacuguggagaaug

SEQ ID NO: 2040569 - RNA, 19 nt, Homo sapiens
  misc_RNA (1)...(19): siRNA sense strand
cauuauaaccagauggaaa

SEQ ID NO: 2040570 - RNA, 19 nt, Homo sapiens
  misc_RNA (1)...(19): siRNA sense strand
caagaccaccuagugauau

SEQ ID NO: 2040571 - RNA, 19 nt, Homo sapiens
  misc_RNA (1)...(19): siRNA sense strand
guucuaaugguuccaaaga

SEQ ID NO: 2040572 - RNA, 19 nt, Homo sapiens
  misc_RNA (1)...(19): siRNA sense strand
aaggaaagacuguggagaa

SEQ ID NO: 2040573 - RNA, 19 nt, Homo sapiens
  misc_RNA (1)...(19): siRNA sense strand
gacgaaacaggugagauaa

SEQ ID NO: 2040574 - RNA, 19 nt, Homo sapiens
  misc_RNA (1)...(19): siRNA sense strand
gaaaaccagugcugagaag

SEQ ID NO: 2040575 - RNA, 19 nt, Homo sapiens
  misc_RNA (1)...(19): siRNA sense strand
agagaaagagcaagaaugg

SEQ ID NO: 2040576 - RNA, 19 nt, Homo sapiens
  misc_RNA (1)...(19): siRNA sense strand
gggauagcaguggaaauaa

SEQ ID NO: 2040577 - RNA, 19 nt, Homo sapiens
  misc_RNA (1)...(19): siRNA sense strand
cgcugcagaucccauuaua

SEQ ID NO: 2040578 - RNA, 19 nt, Homo sapiens
  misc_RNA (1)...(19): siRNA sense strand
gaauggccuguaugagauu

SEQ ID NO: 2040579 - RNA, 19 nt, Homo sapiens
  misc_RNA (1)...(19): siRNA sense strand
aaucaugcauccuguuucu

SEQ ID NO: 2040580 - RNA, 19 nt, Homo sapiens
  misc_RNA (1)...(19): siRNA sense strand
augcauggauggagacaga

SEQ ID NO: 2040581 - RNA, 19 nt, Homo sapiens
  misc_RNA (1)...(19): siRNA sense strand
gaaacaggugagauaaugg

SEQ ID NO: 2040582 - RNA, 19 nt, Homo sapiens
  misc_RNA (1)...(19): siRNA sense strand
cuauaagccuguggaauac

SEQ ID NO: 2040583 - RNA, 19 nt, Homo sapiens
  misc_RNA (1)...(19): siRNA sense strand
aaacaggugagauaaugga

SEQ ID NO: 2040584 - RNA, 19 nt, Homo sapiens
  misc_RNA (1)...(19): siRNA sense strand
cagaucagugaaaguaauu

SEQ ID NO: 2040585 - RNA, 19 nt, Homo sapiens
  misc_RNA (1)...(19): siRNA sense strand
cagccaagaccaccuagug

SEQ ID NO: 2040586 - RNA, 19 nt, Homo sapiens
  misc_RNA (1)...(19): siRNA sense strand
gcugcagaucccauuauaa

SEQ ID NO: 2040587 - RNA, 19 nt, Homo sapiens
  misc_RNA (1)...(19): siRNA sense strand
aggaaagacuguggagaau

SEQ ID NO: 2040588 - RNA, 19 nt, Homo sapiens
  misc_RNA (1)...(19): siRNA sense strand
ugacugccaugcguuguag

SEQ ID NO: 2040589 - RNA, 19 nt, Homo sapiens
  misc_RNA (1)...(19): siRNA sense strand
acacugcagucucugucuu

SEQ ID NO: 2040590 - RNA, 19 nt, Homo sapiens
  misc_RNA (1)...(19): siRNA sense strand
agaaauagaggaaaaguug

SEQ ID NO: 2040591 - RNA, 19 nt, Homo sapiens
  misc_RNA (1)...(19): siRNA sense strand
agagagaaauagaggaaaa

SEQ ID NO: 2040592 - RNA, 19 nt, Homo sapiens
  misc_RNA (1)...(19): siRNA sense strand
ggaagcucucaacuccuua

SEQ ID NO: 2040593 - RNA, 19 nt, Homo sapiens
  misc_RNA (1)...(19): siRNA sense strand
cgaaaaggaugggcauguu

SEQ ID NO: 2040594 - RNA, 19 nt, Homo sapiens
  misc_RNA (1)...(19): siRNA sense strand
uugaguggcaagacuauaa

SEQ ID NO: 2040595 - RNA, 19 nt, Homo sapiens
  misc_RNA (1)...(19): siRNA sense strand
gaaaaggaugggcauguug

SEQ ID NO: 2040596 - RNA, 19 nt, Homo sapiens
  misc_RNA (1)...(19): siRNA sense strand
ucucccaaguuuaacgaaa

SEQ ID NO: 2040597 - RNA, 19 nt, Homo sapiens
  misc_RNA (1)...(19): siRNA sense strand
guugagagaaagagcaaga

SEQ ID NO: 2040598 - RNA, 19 nt, Homo sapiens
  misc_RNA (1)...(19): siRNA sense strand
gaggaaaaguugcacaaac

SEQ ID NO: 2040599 - RNA, 19 nt, Homo sapiens
  misc_RNA (1)...(19): siRNA sense strand
gcugagaagagagaaauag

SEQ ID NO: 2040600 - RNA, 19 nt, Homo sapiens
  misc_RNA (1)...(19): siRNA sense strand
ugggaagcauaucuuacaa

SEQ ID NO: 2040601 - RNA, 19 nt, Homo sapiens
  misc_RNA (1)...(19): siRNA sense strand
aauggaagaccgagaaauc

SEQ ID NO: 2040602 - RNA, 19 nt, Homo sapiens
  misc_RNA (1)...(19): siRNA sense strand
uguaugagauugaaaaugg

SEQ ID NO: 2040603 - RNA, 19 nt, Homo sapiens
  misc_RNA (1)...(19): siRNA sense strand
gagcgaggacucugaagcu

SEQ ID NO: 2040604 - RNA, 19 nt, Homo sapiens
  misc_RNA (1)...(19): siRNA sense strand
ucucaauucaucaaacuug

SEQ ID NO: 2040605 - RNA, 19 nt, Homo sapiens
  misc_RNA (1)...(19): siRNA sense strand
ggugagauaauggauaauc

SEQ ID NO: 2040606 - RNA, 19 nt, Homo sapiens
  misc_RNA (1)...(19): siRNA sense strand
ccucgaaacacugauaaug

SEQ ID NO: 2040607 - RNA, 19 nt, Homo sapiens
  misc_RNA (1)...(19): siRNA sense strand
aaccagugcugagaagaga

SEQ ID NO: 2040608 - RNA, 19 nt, Homo sapiens
  misc_RNA (1)...(19): siRNA sense strand
gggaagcauaucuuacaau

SEQ ID NO: 2040609 - RNA, 19 nt, Homo sapiens
  misc_RNA (1)...(19): siRNA sense strand
gauagcaguggaaauaaaa

SEQ ID NO: 2040610 - RNA, 19 nt, Homo sapiens
  misc_RNA (1)...(19): siRNA sense strand
cagucacucucaauucauc

SEQ ID NO: 2040611 - RNA, 19 nt, Homo sapiens
  misc_RNA (1)...(19): siRNA sense strand
caaacuuguggcugagaaa

SEQ ID NO: 2040612 - RNA, 19 nt, Homo sapiens
  misc_RNA (1)...(19): siRNA sense strand
ugagagaaagagcaagaau

SEQ ID NO: 2040613 - RNA, 19 nt, Homo sapiens
  misc_RNA (1)...(19): siRNA sense strand
acaggugagauaauggaua

SEQ ID NO: 2040614 - RNA, 19 nt, Homo sapiens
  misc_RNA (1)...(19): siRNA sense strand
gccagguuccuaaugagaa

SEQ ID NO: 2040615 - RNA, 19 nt, Homo sapiens
  misc_RNA (1)...(19): siRNA sense strand
gccaagaccaccuagugau

SEQ ID NO: 2040616 - RNA, 19 nt, Homo sapiens
  misc_RNA (1)...(19): siRNA sense strand
ccaaaucacgcugcagauc

SEQ ID NO: 2040617 - RNA, 19 nt, Homo sapiens
  misc_RNA (1)...(19): siRNA sense strand
cugcagaucccauuauaac

SEQ ID NO: 2040618 - RNA, 19 nt, Homo sapiens
  misc_RNA (1)...(19): siRNA sense strand
gggcauguugagagaaaga

SEQ ID NO: 2040619 - RNA, 19 nt, Homo sapiens
  misc_RNA (1)...(19): siRNA sense strand
cgaagccagguuccuaaug

SEQ ID NO: 2040620 - RNA, 19 nt, Homo sapiens
  misc_RNA (1)...(19): siRNA sense strand
gcucggacgucuccuuacc

SEQ ID NO: 2040621 - RNA, 19 nt, Homo sapiens
  misc_RNA (1)...(19): siRNA sense strand
acacugauaaugcauggau

SEQ ID NO: 2040622 - RNA, 19 nt, Homo sapiens
  misc_RNA (1)...(19): siRNA sense strand
ggaagcauaucuuacaauu

SEQ ID NO: 2040623 - RNA, 19 nt, Homo sapiens
  misc_RNA (1)...(19): siRNA sense strand
gaagccagguuccuaauga

SEQ ID NO: 2040624 - RNA, 19 nt, Homo sapiens
  misc_RNA (1)...(19): siRNA sense strand
gaacuaccaugacgaaaca

SEQ ID NO: 2040625 - RNA, 19 nt, Homo sapiens
  misc_RNA (1)...(19): siRNA sense strand
gaaagacuguggagaaugg

SEQ ID NO: 2040626 - RNA, 19 nt, Homo sapiens
  misc_RNA (1)...(19): siRNA sense strand
ggauagcaguggaaauaaa

SEQ ID NO: 2040627 - RNA, 19 nt, Homo sapiens
  misc_RNA (1)...(19): siRNA sense strand
gagcaagaauggccuguau

SEQ ID NO: 2040628 - RNA, 19 nt, Homo sapiens
  misc_RNA (1)...(19): siRNA sense strand
gcuagaagcuggagaugau

SEQ ID NO: 2040629 - RNA, 19 nt, Homo sapiens
  misc_RNA (1)...(19): siRNA sense strand
ggaauacacugcagucucu

SEQ ID NO: 2040630 - RNA, 19 nt, Homo sapiens
  misc_RNA (1)...(19): siRNA sense strand
gcaagaauggccuguauga

SEQ ID NO: 2040631 - RNA, 19 nt, Homo sapiens
  misc_RNA (1)...(19): siRNA sense strand
cgaaacaggugagauaaug

SEQ ID NO: 2040632 - RNA, 19 nt, Homo sapiens
  misc_RNA (1)...(19): siRNA sense strand
aaagugggcuggcuuguug

SEQ ID NO: 2040633 - RNA, 19 nt, Homo sapiens
  misc_RNA (1)...(19): siRNA sense strand
caggugagauaauggauaa

SEQ ID NO: 2040634 - RNA, 19 nt, Homo sapiens
  misc_RNA (1)...(19): siRNA sense strand
gaagagagaaauagaggaa

SEQ ID NO: 2040635 - RNA, 19 nt, Homo sapiens
  misc_RNA (1)...(19): siRNA sense strand
gcucucaacuccuuacaga

SEQ ID NO: 2040636 - RNA, 19 nt, Homo sapiens
  misc_RNA (1)...(19): siRNA sense strand
ugacgaaacaggugagaua

SEQ ID NO: 2040637 - RNA, 19 nt, Homo sapiens
  misc_RNA (1)...(19): siRNA sense strand
ugaaauggguggacaucaa

SEQ ID NO: 2040638 - RNA, 19 nt, Homo sapiens
  misc_RNA (1)...(19): siRNA sense strand
acuauaagccuguggaaua

SEQ ID NO: 2040639 - RNA, 19 nt, Homo sapiens
  misc_RNA (1)...(19): siRNA sense strand
uaagggauauguugaugau

SEQ ID NO: 2040640 - RNA, 19 nt, Homo sapiens
  misc_RNA (1)...(19): siRNA sense strand
ucuaaugguuccaaagaaa

SEQ ID NO: 2040641 - RNA, 19 nt, Homo sapiens
  misc_RNA (1)...(19): siRNA sense strand
ccaagaccaccuagugaua

SEQ ID NO: 2040642 - RNA, 19 nt, Homo sapiens
  misc_RNA (1)...(19): siRNA sense strand
gccagucacucucaauuca

SEQ ID NO: 2040643 - RNA, 19 nt, Homo sapiens
  misc_RNA (1)...(19): siRNA sense strand
gaaagugggcuggcuuguu

SEQ ID NO: 2040644 - RNA, 19 nt, Homo sapiens
  misc_RNA (1)...(19): siRNA sense strand
gaaauggguggacaucaau

SEQ ID NO: 2040645 - RNA, 19 nt, Homo sapiens
  misc_RNA (1)...(19): siRNA sense strand
ggaugggcauguugagaga

SEQ ID NO: 2040646 - RNA, 19 nt, Homo sapiens
  misc_RNA (1)...(19): siRNA sense strand
gauccaggagagaagauua

SEQ ID NO: 2040647 - RNA, 19 nt, Homo sapiens
  misc_RNA (1)...(19): siRNA sense strand
cgucaugucugguucuaau

SEQ ID NO: 2040648 - RNA, 19 nt, Homo sapiens
  misc_RNA (1)...(19): siRNA sense strand
gguuucaucuuaauaccaa

SEQ ID NO: 2040649 - RNA, 19 nt, Homo sapiens
  misc_RNA (1)...(19): siRNA sense strand
ccagguuccuaaugagaaa

SEQ ID NO: 2040650 - RNA, 19 nt, Homo sapiens
  misc_RNA (1)...(19): siRNA sense strand
agaauggccuguaugagau

SEQ ID NO: 2040651 - RNA, 19 nt, Homo sapiens
  misc_RNA (1)...(19): siRNA sense strand
ucagaucagugaaaguaau

SEQ ID NO: 2040652 - RNA, 19 nt, Homo sapiens
  misc_RNA (1)...(19): siRNA sense strand
gagagaaagagcaagaaug

SEQ ID NO: 2040653 - RNA, 19 nt, Homo sapiens
  misc_RNA (1)...(19): siRNA sense strand
aagaccaccuagugauaua

SEQ ID NO: 2040654 - RNA, 19 nt, Homo sapiens
  misc_RNA (1)...(19): siRNA sense strand
aagaauggccuguaugaga

SEQ ID NO: 2040655 - RNA, 19 nt, Homo sapiens
  misc_RNA (1)...(19): siRNA sense strand
ccucagaucagugaaagua

SEQ ID NO: 2040656 - RNA, 19 nt, Homo sapiens
  misc_RNA (1)...(19): siRNA sense strand
ucucaacuccuuacagaaa

SEQ ID NO: 2040657 - RNA, 19 nt, Homo sapiens
  misc_RNA (1)...(19): siRNA sense strand
gaccaccuagugauauaua

SEQ ID NO: 2040658 - RNA, 19 nt, Homo sapiens
  misc_RNA (1)...(19): siRNA sense strand
cuucuugguuucaucuuaa

SEQ ID NO: 2040659 - RNA, 19 nt, Homo sapiens
  misc_RNA (1)...(19): siRNA sense strand
gaaaauggaagaccgagaa

SEQ ID NO: 2040660 - RNA, 19 nt, Homo sapiens
  misc_RNA (1)...(19): siRNA sense strand
gauccucgaaacacugaua

SEQ ID NO: 2040661 - RNA, 19 nt, Homo sapiens
  misc_RNA (1)...(19): siRNA sense strand
gcagaucccauuauaacca

SEQ ID NO: 2040662 - RNA, 19 nt, Homo sapiens
  misc_RNA (1)...(19): siRNA sense strand
aagagaauuuggugaggaa

SEQ ID NO: 2040663 - RNA, 19 nt, Homo sapiens
  misc_RNA (1)...(19): siRNA sense strand
ucgaaacacugauaaugca

SEQ ID NO: 2040664 - RNA, 19 nt, Homo sapiens
  misc_RNA (1)...(19): siRNA sense strand
uauaagggauauguugaug

SEQ ID NO: 2040665 - RNA, 19 nt, Homo sapiens
  misc_RNA (1)...(19): siRNA sense strand
agggauagcaguggaaaua

SEQ ID NO: 2040666 - RNA, 19 nt, Homo sapiens
  misc_RNA (1)...(19): siRNA sense strand
ucaaacuuguggcugagaa

SEQ ID NO: 2040667 - RNA, 19 nt, Homo sapiens
  misc_RNA (1)...(19): siRNA sense strand
cagaagcugugaacuacca

SEQ ID NO: 2040668 - RNA, 19 nt, Homo sapiens
  misc_RNA (1)...(19): siRNA sense strand
ggaaagacuguggagaaug

SEQ ID NO: 2040669 - RNA, 19 nt, Homo sapiens
  misc_RNA (1)...(19): siRNA sense strand
cauuauaaccagauggaaa

SEQ ID NO: 2040670 - RNA, 19 nt, Homo sapiens
  misc_RNA (1)...(19): siRNA sense strand
guucuaaugguuccaaaga

SEQ ID NO: 2040671 - RNA, 19 nt, Homo sapiens
  misc_RNA (1)...(19): siRNA sense strand
caagaccaccuagugauau

SEQ ID NO: 2040672 - RNA, 19 nt, Homo sapiens
  misc_RNA (1)...(19): siRNA sense strand
aaggaaagacuguggagaa

SEQ ID NO: 2040673 - RNA, 19 nt, Homo sapiens
  misc_RNA (1)...(19): siRNA sense strand
gacgaaacaggugagauaa

SEQ ID NO: 2040674 - RNA, 19 nt, Homo sapiens
  misc_RNA (1)...(19): siRNA sense strand
gaaaaccagugcugagaag

SEQ ID NO: 2040675 - RNA, 19 nt, Homo sapiens
  misc_RNA (1)...(19): siRNA sense strand
agagaaagagcaagaaugg

SEQ ID NO: 2040676 - RNA, 19 nt, Homo sapiens
  misc_RNA (1)...(19): siRNA sense strand
gggauagcaguggaaauaa

SEQ ID NO: 2040677 - RNA, 19 nt, Homo sapiens
  misc_RNA (1)...(19): siRNA sense strand
cgcugcagaucccauuaua

SEQ ID NO: 2040678 - RNA, 19 nt, Homo sapiens
  misc_RNA (1)...(19): siRNA sense strand
gaauggccuguaugagauu

SEQ ID NO: 2040679 - RNA, 19 nt, Homo sapiens
  misc_RNA (1)...(19): siRNA sense strand
aaucaugcauccuguuucu

SEQ ID NO: 2040680 - RNA, 19 nt, Homo sapiens
  misc_RNA (1)...(19): siRNA sense strand
ucuucuugguuucaucuua

SEQ ID NO: 2040681 - RNA, 19 nt, Homo sapiens
  misc_RNA (1)...(19): siRNA sense strand
augcauggauggagacaga

SEQ ID NO: 2040682 - RNA, 19 nt, Homo sapiens
  misc_RNA (1)...(19): siRNA sense strand
gaaacaggugagauaaugg

SEQ ID NO: 2040683 - RNA, 19 nt, Homo sapiens
  misc_RNA (1)...(19): siRNA sense strand
cuauaagccuguggaauac

SEQ ID NO: 2040684 - RNA, 19 nt, Homo sapiens
  misc_RNA (1)...(19): siRNA sense strand
aaacaggugagauaaugga

SEQ ID NO: 2040685 - RNA, 19 nt, Homo sapiens
  misc_RNA (1)...(19): siRNA sense strand
cagaucagugaaaguaauu

SEQ ID NO: 2040686 - RNA, 19 nt, Homo sapiens
  misc_RNA (1)...(19): siRNA sense strand
cagccaagaccaccuagug

SEQ ID NO: 2040687 - RNA, 19 nt, Homo sapiens
  misc_RNA (1)...(19): siRNA sense strand
gcugcagaucccauuauaa

SEQ ID NO: 2040688 - RNA, 19 nt, Homo sapiens
  misc_RNA (1)...(19): siRNA sense strand
acacugcagucucugucuu

SEQ ID NO: 2040689 - RNA, 19 nt, Homo sapiens
  misc_RNA (1)...(19): siRNA sense strand
ugacugccaugcguuguag

SEQ ID NO: 2040690 - RNA, 19 nt, Homo sapiens
  misc_RNA (1)...(19): siRNA sense strand
agaaauagaggaaaaguug

SEQ ID NO: 2040691 - RNA, 19 nt, Homo sapiens
  misc_RNA (1)...(19): siRNA sense strand
agagagaaauagaggaaaa

SEQ ID NO: 2040692 - RNA, 19 nt, Homo sapiens
  misc_RNA (1)...(19): siRNA sense strand
ggaagcucucaacuccuua

SEQ ID NO: 2040693 - RNA, 19 nt, Homo sapiens
  misc_RNA (1)...(19): siRNA sense strand
aggaaagacuguggagaau

SEQ ID NO: 2040694 - RNA, 19 nt, Homo sapiens
  misc_RNA (1)...(19): siRNA sense strand
ucucccaaguuuaacgaaa

SEQ ID NO: 2040695 - RNA, 19 nt, Homo sapiens
  misc_RNA (1)...(19): siRNA sense strand
gaaaaggaugggcauguug

SEQ ID NO: 2040696 - RNA, 19 nt, Homo sapiens
  misc_RNA (1)...(19): siRNA sense strand
uugaguggcaagacuauaa

SEQ ID NO: 2040697 - RNA, 19 nt, Homo sapiens
  misc_RNA (1)...(19): siRNA sense strand
cgaaaaggaugggcauguu

SEQ ID NO: 2040698 - RNA, 19 nt, Homo sapiens
  misc_RNA (1)...(19): siRNA sense strand
guugagagaaagagcaaga

SEQ ID NO: 2040699 - RNA, 19 nt, Homo sapiens
  misc_RNA (1)...(19): siRNA sense strand
gaggaaaaguugcacaaac

SEQ ID NO: 2040700 - RNA, 19 nt, Homo sapiens
  misc_RNA (1)...(19): siRNA sense strand
gcugagaagagagaaauag

SEQ ID NO: 2040701 - RNA, 19 nt, Homo sapiens
  misc_RNA (1)...(19): siRNA sense strand
ugggaagcauaucuuacaa

SEQ ID NO: 2040702 - RNA, 19 nt, Homo sapiens
  misc_RNA (1)...(19): siRNA sense strand
aauggaagaccgagaaauc

SEQ ID NO: 2040703 - RNA, 19 nt, Homo sapiens
  misc_RNA (1)...(19): siRNA sense strand
uguaugagauugaaaaugg

SEQ ID NO: 2040704 - RNA, 19 nt, Homo sapiens
  misc_RNA (1)...(19): siRNA sense strand
gagcgaggacucugaagcu

SEQ ID NO: 2040705 - RNA, 19 nt, Homo sapiens
  misc_RNA (1)...(19): siRNA sense strand
ucucaauucaucaaacuug

SEQ ID NO: 2040706 - RNA, 19 nt, Homo sapiens
  misc_RNA (1)...(19): siRNA sense strand
ggugagauaauggauaauc

SEQ ID NO: 2040707 - RNA, 19 nt, Homo sapiens
  misc_RNA (1)...(19): siRNA sense strand
ccucgaaacacugauaaug

SEQ ID NO: 2040708 - RNA, 19 nt, Homo sapiens
  misc_RNA (1)...(19): siRNA sense strand
aaccagugcugagaagaga

SEQ ID NO: 2040709 - RNA, 19 nt, Homo sapiens
  misc_RNA (1)...(19): siRNA sense strand
gggaagcauaucuuacaau

SEQ ID NO: 2040710 - RNA, 19 nt, Homo sapiens
  misc_RNA (1)...(19): siRNA sense strand
gauagcaguggaaauaaaa

SEQ ID NO: 2040711 - RNA, 19 nt, Homo sapiens
  misc_RNA (1)...(19): siRNA sense strand
cagucacucucaauucauc

SEQ ID NO: 2040712 - RNA, 19 nt, Homo sapiens
  misc_RNA (1)...(19): siRNA sense strand
caaacuuguggcugagaaa

SEQ ID NO: 2040713 - RNA, 19 nt, Homo sapiens
  misc_RNA (1)...(19): siRNA sense strand
ugagagaaagagcaagaau

SEQ ID NO: 2040714 - RNA, 19 nt, Homo sapiens
  misc_RNA (1)...(19): siRNA sense strand
acaggugagauaauggaua

SEQ ID NO: 2040715 - RNA, 19 nt, Homo sapiens
  misc_RNA (1)...(19): siRNA sense strand
gccaagaccaccuagugau

SEQ ID NO: 2040716 - RNA, 19 nt, Homo sapiens
  misc_RNA (1)...(19): siRNA sense strand
gccagguuccuaaugagaa

SEQ ID NO: 2040717 - RNA, 19 nt, Homo sapiens
  misc_RNA (1)...(19): siRNA sense strand
ccaaaucacgcugcagauc

SEQ ID NO: 2040718 - RNA, 19 nt, Homo sapiens
  misc_RNA (1)...(19): siRNA sense strand
gggcauguugagagaaaga

SEQ ID NO: 2040719 - RNA, 19 nt, Homo sapiens
  misc_RNA (1)...(19): siRNA sense strand
cugcagaucccauuauaac

SEQ ID NO: 2040720 - RNA, 19 nt, Homo sapiens
  misc_RNA (1)...(19): siRNA sense strand
cgaagccagguuccuaaug

SEQ ID NO: 2040721 - RNA, 19 nt, Homo sapiens
  misc_RNA (1)...(19): siRNA sense strand
acacugauaaugcauggau

SEQ ID NO: 2040722 - RNA, 19 nt, Homo sapiens
  misc_RNA (1)...(19): siRNA sense strand
ggaagcauaucuuacaauu

SEQ ID NO: 2040723 - RNA, 19 nt, Homo sapiens
  misc_RNA (1)...(19): siRNA sense strand
gaagccagguuccuaauga

SEQ ID NO: 2040724 - RNA, 19 nt, Homo sapiens
  misc_RNA (1)...(19): siRNA sense strand
gaacuaccaugacgaaaca

SEQ ID NO: 2040725 - RNA, 19 nt, Homo sapiens
  misc_RNA (1)...(19): siRNA sense strand
gaaagacuguggagaaugg

SEQ ID NO: 2040726 - RNA, 19 nt, Homo sapiens
  misc_RNA (1)...(19): siRNA sense strand
ggauagcaguggaaauaaa

SEQ ID NO: 2040727 - RNA, 19 nt, Homo sapiens
  misc_RNA (1)...(19): siRNA sense strand
gagcaagaauggccuguau

SEQ ID NO: 2040728 - RNA, 19 nt, Homo sapiens
  misc_RNA (1)...(19): siRNA sense strand
gcuagaagcuggagaugau

SEQ ID NO: 2040729 - RNA, 19 nt, Homo sapiens
  misc_RNA (1)...(19): siRNA sense strand
ggaauacacugcagucucu

SEQ ID NO: 2040730 - RNA, 19 nt, Homo sapiens
  misc_RNA (1)...(19): siRNA sense strand
gcaagaauggccuguauga

SEQ ID NO: 2040731 - RNA, 19 nt, Homo sapiens
  misc_RNA (1)...(19): siRNA sense strand
cgaaacaggugagauaaug

SEQ ID NO: 2040732 - RNA, 19 nt, Homo sapiens
  misc_RNA (1)...(19): siRNA sense strand
aaagugggcuggcuuguug

SEQ ID NO: 2040733 - RNA, 19 nt, Homo sapiens
  misc_RNA (1)...(19): siRNA sense strand
caggugagauaauggauaa

SEQ ID NO: 2040734 - RNA, 19 nt, Homo sapiens
  misc_RNA (1)...(19): siRNA sense strand
gaagagagaaauagaggaa

SEQ ID NO: 2040735 - RNA, 19 nt, Homo sapiens
  misc_RNA (1)...(19): siRNA sense strand
gcucucaacuccuuacaga

SEQ ID NO: 2040736 - RNA, 19 nt, Homo sapiens
  misc_RNA (1)...(19): siRNA sense strand
ugacgaaacaggugagaua

SEQ ID NO: 2040737 - RNA, 19 nt, Homo sapiens
  misc_RNA (1)...(19): siRNA sense strand
ugaaauggguggacaucaa

SEQ ID NO: 2040738 - RNA, 19 nt, Homo sapiens
  misc_RNA (1)...(19): siRNA sense strand
acuauaagccuguggaaua

SEQ ID NO: 2040739 - RNA, 19 nt, Homo sapiens
  misc_RNA (1)...(19): siRNA sense strand
uaagggauauguugaugau

SEQ ID NO: 2040740 - RNA, 19 nt, Homo sapiens
  misc_RNA (1)...(19): siRNA sense strand
ucuaaugguuccaaagaaa

SEQ ID NO: 2040741 - RNA, 19 nt, Homo sapiens
  misc_RNA (1)...(19): siRNA sense strand
ccaagaccaccuagugaua

SEQ ID NO: 2040742 - RNA, 19 nt, Homo sapiens
  misc_RNA (1)...(19): siRNA sense strand
gccagucacucucaauuca

SEQ ID NO: 2040743 - RNA, 19 nt, Homo sapiens
  misc_RNA (1)...(19): siRNA sense strand
gaaagugggcuggcuuguu

SEQ ID NO: 2040744 - RNA, 19 nt, Homo sapiens
  misc_RNA (1)...(19): siRNA sense strand
gaaauggguggacaucaau

SEQ ID NO: 2040745 - RNA, 19 nt, Homo sapiens
  misc_RNA (1)...(19): siRNA sense strand
ggaugggcauguugagaga

SEQ ID NO: 2040746 - RNA, 19 nt, Homo sapiens
  misc_RNA (1)...(19): siRNA sense strand
gauccaggagagaagauua

SEQ ID NO: 2040747 - RNA, 19 nt, Homo sapiens
  misc_RNA (1)...(19): siRNA sense strand
cgucaugucugguucuaau

SEQ ID NO: 2040748 - RNA, 19 nt, Homo sapiens
  misc_RNA (1)...(19): siRNA sense strand
gguuucaucuuaauaccaa

SEQ ID NO: 2040749 - RNA, 19 nt, Homo sapiens
  misc_RNA (1)...(19): siRNA sense strand
ccagguuccuaaugagaaa

SEQ ID NO: 2040750 - RNA, 19 nt, Homo sapiens
  misc_RNA (1)...(19): siRNA sense strand
agaauggccuguaugagau

SEQ ID NO: 2040751 - RNA, 19 nt, Homo sapiens
  misc_RNA (1)...(19): siRNA sense strand
ucagaucagugaaaguaau

SEQ ID NO: 2040752 - RNA, 19 nt, Homo sapiens
  misc_RNA (1)...(19): siRNA sense strand
gagagaaagagcaagaaug

SEQ ID NO: 2040753 - RNA, 19 nt, Homo sapiens
  misc_RNA (1)...(19): siRNA sense strand
aagaccaccuagugauaua

SEQ ID NO: 2040754 - RNA, 19 nt, Homo sapiens
  misc_RNA (1)...(19): siRNA sense strand
aagaauggccuguaugaga

SEQ ID NO: 2040755 - RNA, 19 nt, Homo sapiens
  misc_RNA (1)...(19): siRNA sense strand
ccucagaucagugaaagua

SEQ ID NO: 2040756 - RNA, 19 nt, Homo sapiens
  misc_RNA (1)...(19): siRNA sense strand
ucucaacuccuuacagaaa

SEQ ID NO: 2040757 - RNA, 19 nt, Homo sapiens
  misc_RNA (1)...(19): siRNA sense strand
gaccaccuagugauauaua

SEQ ID NO: 2040758 - RNA, 19 nt, Homo sapiens
  misc_RNA (1)...(19): siRNA sense strand
cuucuugguuucaucuuaa

SEQ ID NO: 2040759 - RNA, 19 nt, Homo sapiens
  misc_RNA (1)...(19): siRNA sense strand
gaaaauggaagaccgagaa

SEQ ID NO: 2040760 - RNA, 19 nt, Homo sapiens
  misc_RNA (1)...(19): siRNA sense strand
gauccucgaaacacugaua

SEQ ID NO: 2040761 - RNA, 19 nt, Homo sapiens
  misc_RNA (1)...(19): siRNA sense strand
gcagaucccauuauaacca

SEQ ID NO: 2040762 - RNA, 19 nt, Homo sapiens
  misc_RNA (1)...(19): siRNA sense strand
aagagaauuuggugaggaa

SEQ ID NO: 2040763 - RNA, 19 nt, Homo sapiens
  misc_RNA (1)...(19): siRNA sense strand
ucgaaacacugauaaugca

SEQ ID NO: 2040764 - RNA, 19 nt, Homo sapiens
  misc_RNA (1)...(19): siRNA sense strand
uauaagggauauguugaug

SEQ ID NO: 2040765 - RNA, 19 nt, Homo sapiens
  misc_RNA (1)...(19): siRNA sense strand
agggauagcaguggaaaua

SEQ ID NO: 2040766 - RNA, 19 nt, Homo sapiens
  misc_RNA (1)...(19): siRNA sense strand
ucaaacuuguggcugagaa

SEQ ID NO: 2040767 - RNA, 19 nt, Homo sapiens
  misc_RNA (1)...(19): siRNA sense strand
cagaagcugugaacuacca

SEQ ID NO: 2040768 - RNA, 19 nt, Homo sapiens
  misc_RNA (1)...(19): siRNA sense strand
ggaaagacuguggagaaug

SEQ ID NO: 2040769 - RNA, 19 nt, Homo sapiens
  misc_RNA (1)...(19): siRNA sense strand
cauuauaaccagauggaaa

SEQ ID NO: 2040770 - RNA, 19 nt, Homo sapiens
  misc_RNA (1)...(19): siRNA sense strand
guucuaaugguuccaaaga

SEQ ID NO: 2040771 - RNA, 19 nt, Homo sapiens
  misc_RNA (1)...(19): siRNA sense strand
caagaccaccuagugauau

SEQ ID NO: 2040772 - RNA, 19 nt, Homo sapiens
  misc_RNA (1)...(19): siRNA sense strand
aaggaaagacuguggagaa

SEQ ID NO: 2040773 - RNA, 19 nt, Homo sapiens
  misc_RNA (1)...(19): siRNA sense strand
gacgaaacaggugagauaa

SEQ ID NO: 2040774 - RNA, 19 nt, Homo sapiens
  misc_RNA (1)...(19): siRNA sense strand
gaaaaccagugcugagaag

SEQ ID NO: 2040775 - RNA, 19 nt, Homo sapiens
  misc_RNA (1)...(19): siRNA sense strand
agagaaagagcaagaaugg

SEQ ID NO: 2040776 - RNA, 19 nt, Homo sapiens
  misc_RNA (1)...(19): siRNA sense strand
gggauagcaguggaaauaa

SEQ ID NO: 2040777 - RNA, 19 nt, Homo sapiens
  misc_RNA (1)...(19): siRNA sense strand
cgcugcagaucccauuaua

SEQ ID NO: 2040778 - RNA, 19 nt, Homo sapiens
  misc_RNA (1)...(19): siRNA sense strand
gaauggccuguaugagauu

SEQ ID NO: 2040779 - RNA, 19 nt, Homo sapiens
  misc_RNA (1)...(19): siRNA sense strand
aaucaugcauccuguuucu

SEQ ID NO: 2040780 - RNA, 19 nt, Homo sapiens
  misc_RNA (1)...(19): siRNA sense strand
ucuucuugguuucaucuua

SEQ ID NO: 2040781 - RNA, 19 nt, Homo sapiens
  misc_RNA (1)...(19): siRNA sense strand
augcauggauggagacaga

SEQ ID NO: 2040782 - RNA, 19 nt, Homo sapiens
  misc_RNA (1)...(19): siRNA sense strand
gaaacaggugagauaaugg

SEQ ID NO: 2040783 - RNA, 19 nt, Homo sapiens
  misc_RNA (1)...(19): siRNA sense strand
cuauaagccuguggaauac

SEQ ID NO: 2040784 - RNA, 19 nt, Homo sapiens
  misc_RNA (1)...(19): siRNA sense strand
aaacaggugagauaaugga

SEQ ID NO: 2040785 - RNA, 19 nt, Homo sapiens
  misc_RNA (1)...(19): siRNA sense strand
cagaucagugaaaguaauu

SEQ ID NO: 2040786 - RNA, 19 nt, Homo sapiens
  misc_RNA (1)...(19): siRNA sense strand
cagccaagaccaccuagug

SEQ ID NO: 2040787 - RNA, 19 nt, Homo sapiens
  misc_RNA (1)...(19): siRNA sense strand
gcugcagaucccauuauaa

SEQ ID NO: 2040788 - RNA, 19 nt, Homo sapiens
  misc_RNA (1)...(19): siRNA sense strand
acacugcagucucugucuu

SEQ ID NO: 2040789 - RNA, 19 nt, Homo sapiens
  misc_RNA (1)...(19): siRNA sense strand
ugacugccaugcguuguag

SEQ ID NO: 2040790 - RNA, 19 nt, Homo sapiens
  misc_RNA (1)...(19): siRNA sense strand
agaaauagaggaaaaguug

SEQ ID NO: 2040791 - RNA, 19 nt, Homo sapiens
  misc_RNA (1)...(19): siRNA sense strand
agagagaaauagaggaaaa

SEQ ID NO: 2040792 - RNA, 19 nt, Homo sapiens
  misc_RNA (1)...(19): siRNA sense strand
ggaagcucucaacuccuua

SEQ ID NO: 2040793 - RNA, 19 nt, Homo sapiens
  misc_RNA (1)...(19): siRNA sense strand
aggaaagacuguggagaau

SEQ ID NO: 2040794 - RNA, 19 nt, Homo sapiens
  misc_RNA (1)...(19): siRNA sense strand
ucucccaaguuuaacgaaa

SEQ ID NO: 2040795 - RNA, 19 nt, Homo sapiens
  misc_RNA (1)...(19): siRNA sense strand
gaaaaggaugggcauguug

SEQ ID NO: 2040796 - RNA, 19 nt, Homo sapiens
  misc_RNA (1)...(19): siRNA sense strand
uugaguggcaagacuauaa

SEQ ID NO: 2040797 - RNA, 19 nt, Homo sapiens
  misc_RNA (1)...(19): siRNA sense strand
cgaaaaggaugggcauguu

SEQ ID NO: 2040798 - RNA, 19 nt, Homo sapiens
  misc_RNA (1)...(19): siRNA sense strand
guugagagaaagagcaaga

SEQ ID NO: 2040799 - RNA, 19 nt, Homo sapiens
  misc_RNA (1)...(19): siRNA sense strand
gaggaaaaguugcacaaac

SEQ ID NO: 2040800 - RNA, 19 nt, Homo sapiens
  misc_RNA (1)...(19): siRNA sense strand
gcugagaagagagaaauag

SEQ ID NO: 2040801 - RNA, 19 nt, Homo sapiens
  misc_RNA (1)...(19): siRNA sense strand
ugggaagcauaucuuacaa

SEQ ID NO: 2040802 - RNA, 19 nt, Homo sapiens
  misc_RNA (1)...(19): siRNA sense strand
aauggaagaccgagaaauc

SEQ ID NO: 2040803 - RNA, 19 nt, Homo sapiens
  misc_RNA (1)...(19): siRNA sense strand
uguaugagauugaaaaugg

SEQ ID NO: 2040804 - RNA, 19 nt, Homo sapiens
  misc_RNA (1)...(19): siRNA sense strand
gagcgaggacucugaagcu

SEQ ID NO: 2040805 - RNA, 19 nt, Homo sapiens
  misc_RNA (1)...(19): siRNA sense strand
ucucaauucaucaaacuug

SEQ ID NO: 2040806 - RNA, 19 nt, Homo sapiens
  misc_RNA (1)...(19): siRNA sense strand
ggugagauaauggauaauc

SEQ ID NO: 2040807 - RNA, 19 nt, Homo sapiens
  misc_RNA (1)...(19): siRNA sense strand
ccucgaaacacugauaaug

SEQ ID NO: 2040808 - RNA, 19 nt, Homo sapiens
  misc_RNA (1)...(19): siRNA sense strand
aaccagugcugagaagaga

SEQ ID NO: 2040809 - RNA, 19 nt, Homo sapiens
  misc_RNA (1)...(19): siRNA sense strand
gggaagcauaucuuacaau

SEQ ID NO: 2040810 - RNA, 19 nt, Homo sapiens
  misc_RNA (1)...(19): siRNA sense strand
gauagcaguggaaauaaaa

SEQ ID NO: 2040811 - RNA, 19 nt, Homo sapiens
  misc_RNA (1)...(19): siRNA sense strand
cagucacucucaauucauc

SEQ ID NO: 2040812 - RNA, 19 nt, Homo sapiens
  misc_RNA (1)...(19): siRNA sense strand
caaacuuguggcugagaaa

SEQ ID NO: 2040813 - RNA, 19 nt, Homo sapiens
  misc_RNA (1)...(19): siRNA sense strand
ugagagaaagagcaagaau

SEQ ID NO: 2040814 - RNA, 19 nt, Homo sapiens
  misc_RNA (1)...(19): siRNA sense strand
acaggugagauaauggaua

SEQ ID NO: 2040815 - RNA, 19 nt, Homo sapiens
  misc_RNA (1)...(19): siRNA sense strand
gccaagaccaccuagugau

SEQ ID NO: 2040816 - RNA, 19 nt, Homo sapiens
  misc_RNA (1)...(19): siRNA sense strand
gccagguuccuaaugagaa

SEQ ID NO: 2040817 - RNA, 19 nt, Homo sapiens
  misc_RNA (1)...(19): siRNA sense strand
ccaaaucacgcugcagauc

SEQ ID NO: 2040818 - RNA, 19 nt, Homo sapiens
  misc_RNA (1)...(19): siRNA sense strand
gggcauguugagagaaaga

SEQ ID NO: 2040819 - RNA, 19 nt, Homo sapiens
  misc_RNA (1)...(19): siRNA sense strand
cugcagaucccauuauaac

SEQ ID NO: 2040820 - RNA, 19 nt, Homo sapiens
  misc_RNA (1)...(19): siRNA sense strand
cgaagccagguuccuaaug

SEQ ID NO: 2040821 - RNA, 19 nt, Homo sapiens
  misc_RNA (1)...(19): siRNA sense strand
acacugauaaugcauggau

SEQ ID NO: 2040822 - RNA, 19 nt, Homo sapiens
  misc_RNA (1)...(19): siRNA sense strand
ggaagcauaucuuacaauu

SEQ ID NO: 2040823 - RNA, 19 nt, Homo sapiens
  misc_RNA (1)...(19): siRNA sense strand
gaagccagguuccuaauga

SEQ ID NO: 2040824 - RNA, 19 nt, Homo sapiens
  misc_RNA (1)...(19): siRNA sense strand
gaacuaccaugacgaaaca

SEQ ID NO: 2040825 - RNA, 19 nt, Homo sapiens
  misc_RNA (1)...(19): siRNA sense strand
gaaagacuguggagaaugg

SEQ ID NO: 2040826 - RNA, 19 nt, Homo sapiens
  misc_RNA (1)...(19): siRNA sense strand
ggauagcaguggaaauaaa

SEQ ID NO: 2040827 - RNA, 19 nt, Homo sapiens
  misc_RNA (1)...(19): siRNA sense strand
gagcaagaauggccuguau

SEQ ID NO: 2040828 - RNA, 19 nt, Homo sapiens
  misc_RNA (1)...(19): siRNA sense strand
gcuagaagcuggagaugau

SEQ ID NO: 2040829 - RNA, 19 nt, Homo sapiens
  misc_RNA (1)...(19): siRNA sense strand
ggaauacacugcagucucu

SEQ ID NO: 2040830 - RNA, 19 nt, Homo sapiens
  misc_RNA (1)...(19): siRNA sense strand
gcaagaauggccuguauga

SEQ ID NO: 2040831 - RNA, 19 nt, Homo sapiens
  misc_RNA (1)...(19): siRNA sense strand
cgaaacaggugagauaaug

SEQ ID NO: 2040832 - RNA, 19 nt, Homo sapiens
  misc_RNA (1)...(19): siRNA sense strand
aaagugggcuggcuuguug

SEQ ID NO: 2040833 - RNA, 19 nt, Homo sapiens
  misc_RNA (1)...(19): siRNA sense strand
caggugagauaauggauaa

SEQ ID NO: 2040834 - RNA, 19 nt, Homo sapiens
  misc_RNA (1)...(19): siRNA sense strand
gaagagagaaauagaggaa

SEQ ID NO: 2040835 - RNA, 19 nt, Homo sapiens
  misc_RNA (1)...(19): siRNA sense strand
gcucucaacuccuuacaga

SEQ ID NO: 2040836 - RNA, 19 nt, Homo sapiens
  misc_RNA (1)...(19): siRNA sense strand
ugacgaaacaggugagaua

SEQ ID NO: 2040837 - RNA, 19 nt, Homo sapiens
  misc_RNA (1)...(19): siRNA sense strand
ugaaauggguggacaucaa

SEQ ID NO: 2040838 - RNA, 19 nt, Homo sapiens
  misc_RNA (1)...(19): siRNA sense strand
acuauaagccuguggaaua

SEQ ID NO: 2040839 - RNA, 19 nt, Homo sapiens
  misc_RNA (1)...(19): siRNA sense strand
uaagggauauguugaugau

SEQ ID NO: 2040840 - RNA, 19 nt, Homo sapiens
  misc_RNA (1)...(19): siRNA sense strand
ucuaaugguuccaaagaaa

SEQ ID NO: 2040841 - RNA, 19 nt, Homo sapiens
  misc_RNA (1)...(19): siRNA sense strand
ccaagaccaccuagugaua

SEQ ID NO: 2040842 - RNA, 19 nt, Homo sapiens
  misc_RNA (1)...(19): siRNA sense strand
gccagucacucucaauuca

SEQ ID NO: 2040843 - RNA, 19 nt, Homo sapiens
  misc_RNA (1)...(19): siRNA sense strand
gaaagugggcuggcuuguu

SEQ ID NO: 2040844 - RNA, 19 nt, Homo sapiens
  misc_RNA (1)...(19): siRNA sense strand
gaaauggguggacaucaau

SEQ ID NO: 2040845 - RNA, 19 nt, Homo sapiens
  misc_RNA (1)...(19): siRNA sense strand
ggaugggcauguugagaga

SEQ ID NO: 2040846 - RNA, 19 nt, Homo sapiens
  misc_RNA (1)...(19): siRNA sense strand
gauccaggagagaagauua

SEQ ID NO: 2040847 - RNA, 19 nt, Homo sapiens
  misc_RNA (1)...(19): siRNA sense strand
ccagguuccuaaugagaaa

SEQ ID NO: 2040848 - RNA, 19 nt, Homo sapiens
  misc_RNA (1)...(19): siRNA sense strand
agaauggccuguaugagau

SEQ ID NO: 2040849 - RNA, 19 nt, Homo sapiens
  misc_RNA (1)...(19): siRNA sense strand
ucagaucagugaaaguaau

SEQ ID NO: 2040850 - RNA, 19 nt, Homo sapiens
  misc_RNA (1)...(19): siRNA sense strand
gagagaaagagcaagaaug

SEQ ID NO: 2040851 - RNA, 19 nt, Homo sapiens
  misc_RNA (1)...(19): siRNA sense strand
aagaccaccuagugauaua

SEQ ID NO: 2040852 - RNA, 19 nt, Homo sapiens
  misc_RNA (1)...(19): siRNA sense strand
aagaauggccuguaugaga

SEQ ID NO: 2040853 - RNA, 19 nt, Homo sapiens
  misc_RNA (1)...(19): siRNA sense strand
ccucagaucagugaaagua

SEQ ID NO: 2040854 - RNA, 19 nt, Homo sapiens
  misc_RNA (1)...(19): siRNA sense strand
ucucaacuccuuacagaaa

SEQ ID NO: 2040855 - RNA, 19 nt, Homo sapiens
  misc_RNA (1)...(19): siRNA sense strand
gaccaccuagugauauaua

SEQ ID NO: 2040856 - RNA, 19 nt, Homo sapiens
  misc_RNA (1)...(19): siRNA sense strand
gaaaauggaagaccgagaa

SEQ ID NO: 2040857 - RNA, 19 nt, Homo sapiens
  misc_RNA (1)...(19): siRNA sense strand
gauccucgaaacacugaua

SEQ ID NO: 2040858 - RNA, 19 nt, Homo sapiens
  misc_RNA (1)...(19): siRNA sense strand
gcagaucccauuauaacca

SEQ ID NO: 2040859 - RNA, 19 nt, Homo sapiens
  misc_RNA (1)...(19): siRNA sense strand
aagagaauuuggugaggaa

SEQ ID NO: 2040860 - RNA, 19 nt, Homo sapiens
  misc_RNA (1)...(19): siRNA sense strand
ucgaaacacugauaaugca

SEQ ID NO: 2040861 - RNA, 19 nt, Homo sapiens
  misc_RNA (1)...(19): siRNA sense strand
uauaagggauauguugaug

SEQ ID NO: 2040862 - RNA, 19 nt, Homo sapiens
  misc_RNA (1)...(19): siRNA sense strand
agggauagcaguggaaaua

SEQ ID NO: 2040863 - RNA, 19 nt, Homo sapiens
  misc_RNA (1)...(19): siRNA sense strand
ucaaacuuguggcugagaa

SEQ ID NO: 2040864 - RNA, 19 nt, Homo sapiens
  misc_RNA (1)...(19): siRNA sense strand
cagaagcugugaacuacca

SEQ ID NO: 2040865 - RNA, 19 nt, Homo sapiens
  misc_RNA (1)...(19): siRNA sense strand
ggaaagacuguggagaaug

SEQ ID NO: 2040866 - RNA, 19 nt, Homo sapiens
  misc_RNA (1)...(19): siRNA sense strand
cauuauaaccagauggaaa

SEQ ID NO: 2040867 - RNA, 19 nt, Homo sapiens
  misc_RNA (1)...(19): siRNA sense strand
caagaccaccuagugauau

SEQ ID NO: 2040868 - RNA, 19 nt, Homo sapiens
  misc_RNA (1)...(19): siRNA sense strand
guucuaaugguuccaaaga

SEQ ID NO: 2040869 - RNA, 19 nt, Homo sapiens
  misc_RNA (1)...(19): siRNA sense strand
aaggaaagacuguggagaa

SEQ ID NO: 2040870 - RNA, 19 nt, Homo sapiens
  misc_RNA (1)...(19): siRNA sense strand
gacgaaacaggugagauaa

SEQ ID NO: 2040871 - RNA, 19 nt, Homo sapiens
  misc_RNA (1)...(19): siRNA sense strand
gaaaaccagugcugagaag

SEQ ID NO: 2040872 - RNA, 19 nt, Homo sapiens
  misc_RNA (1)...(19): siRNA sense strand
agagaaagagcaagaaugg

SEQ ID NO: 2040873 - RNA, 19 nt, Homo sapiens
  misc_RNA (1)...(19): siRNA sense strand
gggauagcaguggaaauaa

SEQ ID NO: 2040874 - RNA, 19 nt, Homo sapiens
  misc_RNA (1)...(19): siRNA sense strand
cgcugcagaucccauuaua

SEQ ID NO: 2040875 - RNA, 19 nt, Homo sapiens
  misc_RNA (1)...(19): siRNA sense strand
gaauggccuguaugagauu

SEQ ID NO: 2040876 - RNA, 19 nt, Homo sapiens
  misc_RNA (1)...(19): siRNA sense strand
aaucaugcauccuguuucu

SEQ ID NO: 2040877 - RNA, 19 nt, Homo sapiens
  misc_RNA (1)...(19): siRNA sense strand
augcauggauggagacaga

SEQ ID NO: 2040878 - RNA, 19 nt, Homo sapiens
  misc_RNA (1)...(19): siRNA sense strand
gaaacaggugagauaaugg

SEQ ID NO: 2040879 - RNA, 19 nt, Homo sapiens
  misc_RNA (1)...(19): siRNA sense strand
cuauaagccuguggaauac

SEQ ID NO: 2040880 - RNA, 19 nt, Homo sapiens
  misc_RNA (1)...(19): siRNA sense strand
aaacaggugagauaaugga

SEQ ID NO: 2040881 - RNA, 19 nt, Homo sapiens
  misc_RNA (1)...(19): siRNA sense strand
cagaucagugaaaguaauu

SEQ ID NO: 2040882 - RNA, 19 nt, Homo sapiens
  misc_RNA (1)...(19): siRNA sense strand
cagccaagaccaccuagug

SEQ ID NO: 2040883 - RNA, 19 nt, Homo sapiens
  misc_RNA (1)...(19): siRNA sense strand
gcugcagaucccauuauaa

SEQ ID NO: 2040884 - RNA, 19 nt, Homo sapiens
  misc_RNA (1)...(19): siRNA sense strand
aggaaagacuguggagaau

SEQ ID NO: 2040885 - RNA, 19 nt, Homo sapiens
  misc_RNA (1)...(19): siRNA sense strand
ugacugccaugcguuguag

SEQ ID NO: 2040886 - RNA, 19 nt, Homo sapiens
  misc_RNA (1)...(19): siRNA sense strand
acacugcagucucugucuu

SEQ ID NO: 2040887 - RNA, 19 nt, Homo sapiens
  misc_RNA (1)...(19): siRNA sense strand
agaaauagaggaaaaguug

SEQ ID NO: 2040888 - RNA, 19 nt, Homo sapiens
  misc_RNA (1)...(19): siRNA sense strand
agagagaaauagaggaaaa

SEQ ID NO: 2040889 - RNA, 19 nt, Homo sapiens
  misc_RNA (1)...(19): siRNA sense strand
ggaagcucucaacuccuua

SEQ ID NO: 2040890 - RNA, 19 nt, Homo sapiens
  misc_RNA (1)...(19): siRNA sense strand
cgaaaaggaugggcauguu

SEQ ID NO: 2040891 - RNA, 19 nt, Homo sapiens
  misc_RNA (1)...(19): siRNA sense strand
uugaguggcaagacuauaa

SEQ ID NO: 2040892 - RNA, 19 nt, Homo sapiens
  misc_RNA (1)...(19): siRNA sense strand
gaaaaggaugggcauguug

SEQ ID NO: 2040893 - RNA, 19 nt, Homo sapiens
  misc_RNA (1)...(19): siRNA sense strand
ucucccaaguuuaacgaaa

SEQ ID NO: 2040894 - RNA, 19 nt, Homo sapiens
  misc_RNA (1)...(19): siRNA sense strand
guugagagaaagagcaaga

SEQ ID NO: 2040895 - RNA, 19 nt, Homo sapiens
  misc_RNA (1)...(19): siRNA sense strand
gaggaaaaguugcacaaac

SEQ ID NO: 2040896 - RNA, 19 nt, Homo sapiens
  misc_RNA (1)...(19): siRNA sense strand
gcugagaagagagaaauag

SEQ ID NO: 2040897 - RNA, 19 nt, Homo sapiens
  misc_RNA (1)...(19): siRNA sense strand
ugggaagcauaucuuacaa

SEQ ID NO: 2040898 - RNA, 19 nt, Homo sapiens
  misc_RNA (1)...(19): siRNA sense strand
aauggaagaccgagaaauc

SEQ ID NO: 2040899 - RNA, 19 nt, Homo sapiens
  misc_RNA (1)...(19): siRNA sense strand
uguaugagauugaaaaugg

SEQ ID NO: 2040900 - RNA, 19 nt, Homo sapiens
  misc_RNA (1)...(19): siRNA sense strand
gagcgaggacucugaagcu

SEQ ID NO: 2040901 - RNA, 19 nt, Homo sapiens
  misc_RNA (1)...(19): siRNA sense strand
ucucaauucaucaaacuug

SEQ ID NO: 2040902 - RNA, 19 nt, Homo sapiens
  misc_RNA (1)...(19): siRNA sense strand
ggugagauaauggauaauc

SEQ ID NO: 2040903 - RNA, 19 nt, Homo sapiens
  misc_RNA (1)...(19): siRNA sense strand
ccucgaaacacugauaaug

SEQ ID NO: 2040904 - RNA, 19 nt, Homo sapiens
  misc_RNA (1)...(19): siRNA sense strand
aaccagugcugagaagaga

SEQ ID NO: 2040905 - RNA, 19 nt, Homo sapiens
  misc_RNA (1)...(19): siRNA sense strand
gggaagcauaucuuacaau

SEQ ID NO: 2040906 - RNA, 19 nt, Homo sapiens
  misc_RNA (1)...(19): siRNA sense strand
gauagcaguggaaauaaaa

SEQ ID NO: 2040907 - RNA, 19 nt, Homo sapiens
  misc_RNA (1)...(19): siRNA sense strand
cagucacucucaauucauc

SEQ ID NO: 2040908 - RNA, 19 nt, Homo sapiens
  misc_RNA (1)...(19): siRNA sense strand
caaacuuguggcugagaaa

SEQ ID NO: 2040909 - RNA, 19 nt, Homo sapiens
  misc_RNA (1)...(19): siRNA sense strand
ugagagaaagagcaagaau

SEQ ID NO: 2040910 - RNA, 19 nt, Homo sapiens
  misc_RNA (1)...(19): siRNA sense strand
acaggugagauaauggaua

SEQ ID NO: 2040911 - RNA, 19 nt, Homo sapiens
  misc_RNA (1)...(19): siRNA sense strand
gccagguuccuaaugagaa

SEQ ID NO: 2040912 - RNA, 19 nt, Homo sapiens
  misc_RNA (1)...(19): siRNA sense strand
gccaagaccaccuagugau

SEQ ID NO: 2040913 - RNA, 19 nt, Homo sapiens
  misc_RNA (1)...(19): siRNA sense strand
ccaaaucacgcugcagauc

SEQ ID NO: 2040914 - RNA, 19 nt, Homo sapiens
  misc_RNA (1)...(19): siRNA sense strand
cugcagaucccauuauaac

SEQ ID NO: 2040915 - RNA, 19 nt, Homo sapiens
  misc_RNA (1)...(19): siRNA sense strand
gggcauguugagagaaaga

SEQ ID NO: 2040916 - RNA, 19 nt, Homo sapiens
  misc_RNA (1)...(19): siRNA sense strand
cgaagccagguuccuaaug

SEQ ID NO: 2040917 - RNA, 19 nt, Homo sapiens
  misc_RNA (1)...(19): siRNA sense strand
gcucggacgucuccuuacc

SEQ ID NO: 2040918 - RNA, 19 nt, Homo sapiens
  misc_RNA (1)...(19): siRNA sense strand
acacugauaaugcauggau

SEQ ID NO: 2040919 - RNA, 19 nt, Homo sapiens
  misc_RNA (1)...(19): siRNA sense strand
ggaagcauaucuuacaauu

SEQ ID NO: 2040920 - RNA, 19 nt, Homo sapiens
  misc_RNA (1)...(19): siRNA sense strand
gaagccagguuccuaauga

SEQ ID NO: 2040921 - RNA, 19 nt, Homo sapiens
  misc_RNA (1)...(19): siRNA sense strand
gaacuaccaugacgaaaca

SEQ ID NO: 2040922 - RNA, 19 nt, Homo sapiens
  misc_RNA (1)...(19): siRNA sense strand
gaaagacuguggagaaugg

SEQ ID NO: 2040923 - RNA, 19 nt, Homo sapiens
  misc_RNA (1)...(19): siRNA sense strand
ggauagcaguggaaauaaa

SEQ ID NO: 2040924 - RNA, 19 nt, Homo sapiens
  misc_RNA (1)...(19): siRNA sense strand
gagcaagaauggccuguau

SEQ ID NO: 2040925 - RNA, 19 nt, Homo sapiens
  misc_RNA (1)...(19): siRNA sense strand
gcuagaagcuggagaugau

SEQ ID NO: 2040926 - RNA, 19 nt, Homo sapiens
  misc_RNA (1)...(19): siRNA sense strand
ggaauacacugcagucucu

SEQ ID NO: 2040927 - RNA, 19 nt, Homo sapiens
  misc_RNA (1)...(19): siRNA sense strand
gcaagaauggccuguauga

SEQ ID NO: 2040928 - RNA, 19 nt, Homo sapiens
  misc_RNA (1)...(19): siRNA sense strand
cgaaacaggugagauaaug

SEQ ID NO: 2040929 - RNA, 19 nt, Homo sapiens
  misc_RNA (1)...(19): siRNA sense strand
aaagugggcuggcuuguug

SEQ ID NO: 2040930 - RNA, 19 nt, Homo sapiens
  misc_RNA (1)...(19): siRNA sense strand
caggugagauaauggauaa

SEQ ID NO: 2040931 - RNA, 19 nt, Homo sapiens
  misc_RNA (1)...(19): siRNA sense strand
gaagagagaaauagaggaa

SEQ ID NO: 2040932 - RNA, 19 nt, Homo sapiens
  misc_RNA (1)...(19): siRNA sense strand
gcucucaacuccuuacaga

SEQ ID NO: 2040933 - RNA, 19 nt, Homo sapiens
  misc_RNA (1)...(19): siRNA sense strand
ugacgaaacaggugagaua

SEQ ID NO: 2040934 - RNA, 19 nt, Homo sapiens
  misc_RNA (1)...(19): siRNA sense strand
ugaaauggguggacaucaa

SEQ ID NO: 2040935 - RNA, 19 nt, Homo sapiens
  misc_RNA (1)...(19): siRNA sense strand
acuauaagccuguggaaua

SEQ ID NO: 2040936 - RNA, 19 nt, Homo sapiens
  misc_RNA (1)...(19): siRNA sense strand
uaagggauauguugaugau

SEQ ID NO: 2040937 - RNA, 19 nt, Homo sapiens
  misc_RNA (1)...(19): siRNA sense strand
ucuaaugguuccaaagaaa

SEQ ID NO: 2040938 - RNA, 19 nt, Homo sapiens
  misc_RNA (1)...(19): siRNA sense strand
ccaagaccaccuagugaua

SEQ ID NO: 2040939 - RNA, 19 nt, Homo sapiens
  misc_RNA (1)...(19): siRNA sense strand
gccagucacucucaauuca

SEQ ID NO: 2040940 - RNA, 19 nt, Homo sapiens
  misc_RNA (1)...(19): siRNA sense strand
gaaagugggcuggcuuguu

SEQ ID NO: 2040941 - RNA, 19 nt, Homo sapiens
  misc_RNA (1)...(19): siRNA sense strand
gaaauggguggacaucaau

SEQ ID NO: 2040942 - RNA, 19 nt, Homo sapiens
  misc_RNA (1)...(19): siRNA sense strand
ggaugggcauguugagaga

SEQ ID NO: 2040943 - RNA, 19 nt, Homo sapiens
  misc_RNA (1)...(19): siRNA sense strand
gauccaggagagaagauua

SEQ ID NO: 2040944 - RNA, 19 nt, Homo sapiens
  misc_RNA (1)...(19): siRNA sense strand
cgucaugucugguucuaau

SEQ ID NO: 2040945 - RNA, 19 nt, Homo sapiens
  misc_RNA (1)...(19): siRNA sense strand
gguuucaucuuaauaccaa

SEQ ID NO: 2040946 - RNA, 19 nt, Homo sapiens
  misc_RNA (1)...(19): siRNA sense strand
ccagguuccuaaugagaaa

SEQ ID NO: 2040947 - RNA, 19 nt, Homo sapiens
  misc_RNA (1)...(19): siRNA sense strand
agaauggccuguaugagau

SEQ ID NO: 2040948 - RNA, 19 nt, Homo sapiens
  misc_RNA (1)...(19): siRNA sense strand
ucagaucagugaaaguaau

SEQ ID NO: 2040949 - RNA, 19 nt, Homo sapiens
  misc_RNA (1)...(19): siRNA sense strand
gagagaaagagcaagaaug

SEQ ID NO: 2040950 - RNA, 19 nt, Homo sapiens
  misc_RNA (1)...(19): siRNA sense strand
aagaccaccuagugauaua

SEQ ID NO: 2040951 - RNA, 19 nt, Homo sapiens
  misc_RNA (1)...(19): siRNA sense strand
aagaauggccuguaugaga

SEQ ID NO: 2040952 - RNA, 19 nt, Homo sapiens
  misc_RNA (1)...(19): siRNA sense strand
ccucagaucagugaaagua

SEQ ID NO: 2040953 - RNA, 19 nt, Homo sapiens
  misc_RNA (1)...(19): siRNA sense strand
ucucaacuccuuacagaaa

SEQ ID NO: 2040954 - RNA, 19 nt, Homo sapiens
  misc_RNA (1)...(19): siRNA sense strand
gaccaccuagugauauaua

SEQ ID NO: 2040955 - RNA, 19 nt, Homo sapiens
  misc_RNA (1)...(19): siRNA sense strand
cuucuugguuucaucuuaa

SEQ ID NO: 2040956 - RNA, 19 nt, Homo sapiens
  misc_RNA (1)...(19): siRNA sense strand
gaaaauggaagaccgagaa

SEQ ID NO: 2040957 - RNA, 19 nt, Homo sapiens
  misc_RNA (1)...(19): siRNA sense strand
gauccucgaaacacugaua

SEQ ID NO: 2040958 - RNA, 19 nt, Homo sapiens
  misc_RNA (1)...(19): siRNA sense strand
gcagaucccauuauaacca

SEQ ID NO: 2040959 - RNA, 19 nt, Homo sapiens
  misc_RNA (1)...(19): siRNA sense strand
aagagaauuuggugaggaa

SEQ ID NO: 2040960 - RNA, 19 nt, Homo sapiens
  misc_RNA (1)...(19): siRNA sense strand
ucgaaacacugauaaugca

SEQ ID NO: 2040961 - RNA, 19 nt, Homo sapiens
  misc_RNA (1)...(19): siRNA sense strand
uauaagggauauguugaug

SEQ ID NO: 2040962 - RNA, 19 nt, Homo sapiens
  misc_RNA (1)...(19): siRNA sense strand
agggauagcaguggaaaua

SEQ ID NO: 2040963 - RNA, 19 nt, Homo sapiens
  misc_RNA (1)...(19): siRNA sense strand
ucaaacuuguggcugagaa

SEQ ID NO: 2040964 - RNA, 19 nt, Homo sapiens
  misc_RNA (1)...(19): siRNA sense strand
cagaagcugugaacuacca

SEQ ID NO: 2040965 - RNA, 19 nt, Homo sapiens
  misc_RNA (1)...(19): siRNA sense strand
ggaaagacuguggagaaug

SEQ ID NO: 2040966 - RNA, 19 nt, Homo sapiens
  misc_RNA (1)...(19): siRNA sense strand
cauuauaaccagauggaaa

SEQ ID NO: 2040967 - RNA, 19 nt, Homo sapiens
  misc_RNA (1)...(19): siRNA sense strand
guucuaaugguuccaaaga

SEQ ID NO: 2040968 - RNA, 19 nt, Homo sapiens
  misc_RNA (1)...(19): siRNA sense strand
caagaccaccuagugauau

SEQ ID NO: 2040969 - RNA, 19 nt, Homo sapiens
  misc_RNA (1)...(19): siRNA sense strand
aaggaaagacuguggagaa

SEQ ID NO: 2040970 - RNA, 19 nt, Homo sapiens
  misc_RNA (1)...(19): siRNA sense strand
gacgaaacaggugagauaa

SEQ ID NO: 2040971 - RNA, 19 nt, Homo sapiens
  misc_RNA (1)...(19): siRNA sense strand
gaaaaccagugcugagaag

SEQ ID NO: 2040972 - RNA, 19 nt, Homo sapiens
  misc_RNA (1)...(19): siRNA sense strand
agagaaagagcaagaaugg

SEQ ID NO: 2040973 - RNA, 19 nt, Homo sapiens
  misc_RNA (1)...(19): siRNA sense strand
gggauagcaguggaaauaa

SEQ ID NO: 2040974 - RNA, 19 nt, Homo sapiens
  misc_RNA (1)...(19): siRNA sense strand
cgcugcagaucccauuaua

SEQ ID NO: 2040975 - RNA, 19 nt, Homo sapiens
  misc_RNA (1)...(19): siRNA sense strand
gaauggccuguaugagauu

SEQ ID NO: 2040976 - RNA, 19 nt, Homo sapiens
  misc_RNA (1)...(19): siRNA sense strand
aaucaugcauccuguuucu

SEQ ID NO: 2040977 - RNA, 19 nt, Homo sapiens
  misc_RNA (1)...(19): siRNA sense strand
ucuucuugguuucaucuua

SEQ ID NO: 2040978 - RNA, 19 nt, Homo sapiens
  misc_RNA (1)...(19): siRNA sense strand
augcauggauggagacaga

SEQ ID NO: 2040979 - RNA, 19 nt, Homo sapiens
  misc_RNA (1)...(19): siRNA sense strand
gaaacaggugagauaaugg

SEQ ID NO: 2040980 - RNA, 19 nt, Homo sapiens
  misc_RNA (1)...(19): siRNA sense strand
cuauaagccuguggaauac

SEQ ID NO: 2040981 - RNA, 19 nt, Homo sapiens
  misc_RNA (1)...(19): siRNA sense strand
aaacaggugagauaaugga

SEQ ID NO: 2040982 - RNA, 19 nt, Homo sapiens
  misc_RNA (1)...(19): siRNA sense strand
cagaucagugaaaguaauu

SEQ ID NO: 2040983 - RNA, 19 nt, Homo sapiens
  misc_RNA (1)...(19): siRNA sense strand
cagccaagaccaccuagug

SEQ ID NO: 2040984 - RNA, 19 nt, Homo sapiens
  misc_RNA (1)...(19): siRNA sense strand
gcugcagaucccauuauaa

SEQ ID NO: 2040985 - RNA, 19 nt, Homo sapiens
  misc_RNA (1)...(19): siRNA sense strand
acacugcagucucugucuu

SEQ ID NO: 2040986 - RNA, 19 nt, Homo sapiens
  misc_RNA (1)...(19): siRNA sense strand
ugacugccaugcguuguag

SEQ ID NO: 2040987 - RNA, 19 nt, Homo sapiens
  misc_RNA (1)...(19): siRNA sense strand
agaaauagaggaaaaguug

SEQ ID NO: 2040988 - RNA, 19 nt, Homo sapiens
  misc_RNA (1)...(19): siRNA sense strand
agagagaaauagaggaaaa

SEQ ID NO: 2040989 - RNA, 19 nt, Homo sapiens
  misc_RNA (1)...(19): siRNA sense strand
ggaagcucucaacuccuua

SEQ ID NO: 2040990 - RNA, 19 nt, Homo sapiens
  misc_RNA (1)...(19): siRNA sense strand
aggaaagacuguggagaau

SEQ ID NO: 2040991 - RNA, 19 nt, Homo sapiens
  misc_RNA (1)...(19): siRNA sense strand
ucucccaaguuuaacgaaa

SEQ ID NO: 2040992 - RNA, 19 nt, Homo sapiens
  misc_RNA (1)...(19): siRNA sense strand
gaaaaggaugggcauguug

SEQ ID NO: 2040993 - RNA, 19 nt, Homo sapiens
  misc_RNA (1)...(19): siRNA sense strand
uugaguggcaagacuauaa

SEQ ID NO: 2040994 - RNA, 19 nt, Homo sapiens
  misc_RNA (1)...(19): siRNA sense strand
cgaaaaggaugggcauguu

SEQ ID NO: 2040995 - RNA, 19 nt, Homo sapiens
  misc_RNA (1)...(19): siRNA sense strand
guugagagaaagagcaaga

SEQ ID NO: 2040996 - RNA, 19 nt, Homo sapiens
  misc_RNA (1)...(19): siRNA sense strand
gaggaaaaguugcacaaac

SEQ ID NO: 2040997 - RNA, 19 nt, Homo sapiens
  misc_RNA (1)...(19): siRNA sense strand
gcugagaagagagaaauag

SEQ ID NO: 2040998 - RNA, 19 nt, Homo sapiens
  misc_RNA (1)...(19): siRNA sense strand
ugggaagcauaucuuacaa

SEQ ID NO: 2040999 - RNA, 19 nt, Homo sapiens
  misc_RNA (1)...(19): siRNA sense strand
aauggaagaccgagaaauc

SEQ ID NO: 2041000 - RNA, 19 nt, Homo sapiens
  misc_RNA (1)...(19): siRNA sense strand
uguaugagauugaaaaugg

SEQ ID NO: 2041001 - RNA, 19 nt, Homo sapiens
  misc_RNA (1)...(19): siRNA sense strand
gagcgaggacucugaagcu

SEQ ID NO: 2041002 - RNA, 19 nt, Homo sapiens
  misc_RNA (1)...(19): siRNA sense strand
ucucaauucaucaaacuug

SEQ ID NO: 2041003 - RNA, 19 nt, Homo sapiens
  misc_RNA (1)...(19): siRNA sense strand
ggugagauaauggauaauc

SEQ ID NO: 2041004 - RNA, 19 nt, Homo sapiens
  misc_RNA (1)...(19): siRNA sense strand
ccucgaaacacugauaaug

SEQ ID NO: 2041005 - RNA, 19 nt, Homo sapiens
  misc_RNA (1)...(19): siRNA sense strand
aaccagugcugagaagaga

SEQ ID NO: 2041006 - RNA, 19 nt, Homo sapiens
  misc_RNA (1)...(19): siRNA sense strand
gggaagcauaucuuacaau

SEQ ID NO: 2041007 - RNA, 19 nt, Homo sapiens
  misc_RNA (1)...(19): siRNA sense strand
gauagcaguggaaauaaaa

SEQ ID NO: 2041008 - RNA, 19 nt, Homo sapiens
  misc_RNA (1)...(19): siRNA sense strand
cagucacucucaauucauc

SEQ ID NO: 2041009 - RNA, 19 nt, Homo sapiens
  misc_RNA (1)...(19): siRNA sense strand
caaacuuguggcugagaaa

SEQ ID NO: 2041010 - RNA, 19 nt, Homo sapiens
  misc_RNA (1)...(19): siRNA sense strand
ugagagaaagagcaagaau

SEQ ID NO: 2041011 - RNA, 19 nt, Homo sapiens
  misc_RNA (1)...(19): siRNA sense strand
acaggugagauaauggaua

SEQ ID NO: 2041012 - RNA, 19 nt, Homo sapiens
  misc_RNA (1)...(19): siRNA sense strand
gccaagaccaccuagugau

SEQ ID NO: 2041013 - RNA, 19 nt, Homo sapiens
  misc_RNA (1)...(19): siRNA sense strand
gccagguuccuaaugagaa

SEQ ID NO: 2041014 - RNA, 19 nt, Homo sapiens
  misc_RNA (1)...(19): siRNA sense strand
ccaaaucacgcugcagauc

SEQ ID NO: 2041015 - RNA, 19 nt, Homo sapiens
  misc_RNA (1)...(19): siRNA sense strand
gggcauguugagagaaaga

SEQ ID NO: 2041016 - RNA, 19 nt, Homo sapiens
  misc_RNA (1)...(19): siRNA sense strand
cugcagaucccauuauaac

SEQ ID NO: 2041017 - RNA, 19 nt, Homo sapiens
  misc_RNA (1)...(19): siRNA sense strand
cgaagccagguuccuaaug

SEQ ID NO: 2041018 - RNA, 19 nt, Homo sapiens
  misc_RNA (1)...(19): siRNA sense strand
acacugauaaugcauggau

SEQ ID NO: 2041019 - RNA, 19 nt, Homo sapiens
  misc_RNA (1)...(19): siRNA sense strand
gaagaaugcuuaagaugug

SEQ ID NO: 2041020 - RNA, 19 nt, Homo sapiens
  misc_RNA (1)...(19): siRNA sense strand
ggaagaaugcuuaagaugu

SEQ ID NO: 2041021 - RNA, 19 nt, Homo sapiens
  misc_RNA (1)...(19): siRNA sense strand
gaacugccagagaauuaua

SEQ ID NO: 2041022 - RNA, 19 nt, Homo sapiens
  misc_RNA (1)...(19): siRNA sense strand
uauaucaucugccgccuaa

SEQ ID NO: 2041023 - RNA, 19 nt, Homo sapiens
  misc_RNA (1)...(19): siRNA sense strand
ccauauucauucaccauaa

SEQ ID NO: 2041024 - RNA, 19 nt, Homo sapiens
  misc_RNA (1)...(19): siRNA sense strand
auaaggaacugccagagaa

SEQ ID NO: 2041025 - RNA, 19 nt, Homo sapiens
  misc_RNA (1)...(19): siRNA sense strand
gagaagggcccagcagauu

SEQ ID NO: 2041026 - RNA, 19 nt, Homo sapiens
  misc_RNA (1)...(19): siRNA sense strand
gaagguagaacagcuguau

SEQ ID NO: 2041027 - RNA, 19 nt, Homo sapiens
  misc_RNA (1)...(19): siRNA sense strand
cuccaaagccgauuuauug

SEQ ID NO: 2041028 - RNA, 19 nt, Homo sapiens
  misc_RNA (1)...(19): siRNA sense strand
ugaagagacugguauaaaa

SEQ ID NO: 2041029 - RNA, 19 nt, Homo sapiens
  misc_RNA (1)...(19): siRNA sense strand
ggagcuguauuugaugaaa

SEQ ID NO: 2041030 - RNA, 19 nt, Homo sapiens
  misc_RNA (1)...(19): siRNA sense strand
caauggcgaucagaaggua

SEQ ID NO: 2041031 - RNA, 19 nt, Homo sapiens
  misc_RNA (1)...(19): siRNA sense strand
cuaaagccauauucauuca

SEQ ID NO: 2041032 - RNA, 19 nt, Homo sapiens
  misc_RNA (1)...(19): siRNA sense strand
ucaaugaccuggcgaagac

SEQ ID NO: 2041033 - RNA, 19 nt, Homo sapiens
  misc_RNA (1)...(19): siRNA sense strand
acacaaauccuggagcuuu

SEQ ID NO: 2041034 - RNA, 19 nt, Homo sapiens
  misc_RNA (1)...(19): siRNA sense strand
ccaggaagaaugcuuaaga

SEQ ID NO: 2041035 - RNA, 19 nt, Homo sapiens
  misc_RNA (1)...(19): siRNA sense strand
caggaagaaugcuuaagau

SEQ ID NO: 2041036 - RNA, 19 nt, Homo sapiens
  misc_RNA (1)...(19): siRNA sense strand
caggagcuguauuugauga

SEQ ID NO: 2041037 - RNA, 19 nt, Homo sapiens
  misc_RNA (1)...(19): siRNA sense strand
agaagggcccagcagauua

SEQ ID NO: 2041038 - RNA, 19 nt, Homo sapiens
  misc_RNA (1)...(19): siRNA sense strand
gccuaaagccauauucauu

SEQ ID NO: 2041039 - RNA, 19 nt, Homo sapiens
  misc_RNA (1)...(19): siRNA sense strand
ggauaugcuucacaucaag

SEQ ID NO: 2041040 - RNA, 19 nt, Homo sapiens
  misc_RNA (1)...(19): siRNA sense strand
gaaaauacaacucccauca

SEQ ID NO: 2041041 - RNA, 19 nt, Homo sapiens
  misc_RNA (1)...(19): siRNA sense strand
ugcaggagcuguauuugau

SEQ ID NO: 2041042 - RNA, 19 nt, Homo sapiens
  misc_RNA (1)...(19): siRNA sense strand
ugaccugacuguggaagaa

SEQ ID NO: 2041043 - RNA, 19 nt, Homo sapiens
  misc_RNA (1)...(19): siRNA sense strand
agacacagcgguucgagaa

SEQ ID NO: 2041044 - RNA, 19 nt, Homo sapiens
  misc_RNA (1)...(19): siRNA sense strand
guacagcaauggcgaucag

SEQ ID NO: 2041045 - RNA, 19 nt, Homo sapiens
  misc_RNA (1)...(19): siRNA sense strand
uugcuaggcugcugcugua

SEQ ID NO: 2041046 - RNA, 19 nt, Homo sapiens
  misc_RNA (1)...(19): siRNA sense strand
gcacauucccauccuccaa

SEQ ID NO: 2041047 - RNA, 19 nt, Homo sapiens
  misc_RNA (1)...(19): siRNA sense strand
caggauaugcuucacauca

SEQ ID NO: 2041048 - RNA, 19 nt, Homo sapiens
  misc_RNA (1)...(19): siRNA sense strand
aaauacugguuguacaaga

SEQ ID NO: 2041049 - RNA, 19 nt, Homo sapiens
  misc_RNA (1)...(19): siRNA sense strand
gaagggcccagcagauuac

SEQ ID NO: 2041050 - RNA, 19 nt, Homo sapiens
  misc_RNA (1)...(19): siRNA sense strand
gagcuguauuugaugaaag

SEQ ID NO: 2041051 - RNA, 19 nt, Homo sapiens
  misc_RNA (1)...(19): siRNA sense strand
cauaaggaacugccagaga

SEQ ID NO: 2041052 - RNA, 19 nt, Homo sapiens
  misc_RNA (1)...(19): siRNA sense strand
ccuaaagccauauucauuc

SEQ ID NO: 2041053 - RNA, 19 nt, Homo sapiens
  misc_RNA (1)...(19): siRNA sense strand
ggaacugccagagaauuau

SEQ ID NO: 2041054 - RNA, 19 nt, Homo sapiens
  misc_RNA (1)...(19): siRNA sense strand
aggaacugccagagaauua

SEQ ID NO: 2041055 - RNA, 19 nt, Homo sapiens
  misc_RNA (1)...(19): siRNA sense strand
gaagagacugguauaaaau

SEQ ID NO: 2041056 - RNA, 19 nt, Homo sapiens
  misc_RNA (1)...(19): siRNA sense strand
cagcagauuaccaggauau

SEQ ID NO: 2041057 - RNA, 19 nt, Homo sapiens
  misc_RNA (1)...(19): siRNA sense strand
acacagcgguucgagaagu

SEQ ID NO: 2041058 - RNA, 19 nt, Homo sapiens
  misc_RNA (1)...(19): siRNA sense strand
aggauaugcuucacaucaa

SEQ ID NO: 2041059 - RNA, 19 nt, Homo sapiens
  misc_RNA (1)...(19): siRNA sense strand
gccauauucauucaccaua

SEQ ID NO: 2041060 - RNA, 19 nt, Homo sapiens
  misc_RNA (1)...(19): siRNA sense strand
ccagcagauuaccaggaua

SEQ ID NO: 2041061 - RNA, 19 nt, Homo sapiens
  misc_RNA (1)...(19): siRNA sense strand
gcaauggcgaucagaaggu

SEQ ID NO: 2041062 - RNA, 19 nt, Homo sapiens
  misc_RNA (1)...(19): siRNA sense strand
guuguacaagaucgaaaua

SEQ ID NO: 2041063 - RNA, 19 nt, Homo sapiens
  misc_RNA (1)...(19): siRNA sense strand
uugaagagacugguauaaa

SEQ ID NO: 2041064 - RNA, 19 nt, Homo sapiens
  misc_RNA (1)...(19): siRNA sense strand
cacagcgguucgagaaguu

SEQ ID NO: 2041065 - RNA, 19 nt, Homo sapiens
  misc_RNA (1)...(19): siRNA sense strand
aauacugguuguacaagau

SEQ ID NO: 2041066 - RNA, 19 nt, Homo sapiens
  misc_RNA (1)...(19): siRNA sense strand
gggaagucagauauguaua

SEQ ID NO: 2041067 - RNA, 19 nt, Homo sapiens
  misc_RNA (1)...(19): siRNA sense strand
ucccugggcuucugcuuuc

SEQ ID NO: 2041068 - RNA, 19 nt, Homo sapiens
  misc_RNA (1)...(19): siRNA sense strand
ccuccaaagccgauuuauu

SEQ ID NO: 2041069 - RNA, 19 nt, Homo sapiens
  misc_RNA (1)...(19): siRNA sense strand
guggauggaucucaaugac

SEQ ID NO: 2041070 - RNA, 19 nt, Homo sapiens
  misc_RNA (1)...(19): siRNA sense strand
gcaggagcuguauuugaug

SEQ ID NO: 2041071 - RNA, 19 nt, Homo sapiens
  misc_RNA (1)...(19): siRNA sense strand
ucacaucaaguaggaguug

SEQ ID NO: 2041072 - RNA, 19 nt, Homo sapiens
  misc_RNA (1)...(19): siRNA sense strand
cuaggcugcugcuguaugg

SEQ ID NO: 2041073 - RNA, 19 nt, Homo sapiens
  misc_RNA (1)...(19): siRNA sense strand
gcgaucagaagguagaaca

SEQ ID NO: 2041074 - RNA, 19 nt, Homo sapiens
  misc_RNA (1)...(19): siRNA sense strand
gaagaagauauuggagaca

SEQ ID NO: 2041075 - RNA, 19 nt, Homo sapiens
  misc_RNA (1)...(19): siRNA sense strand
aagaaugcuuaagauguga

SEQ ID NO: 2041076 - RNA, 19 nt, Homo sapiens
  misc_RNA (1)...(19): siRNA sense strand
uaucaucugccgccuaaag

SEQ ID NO: 2041077 - RNA, 19 nt, Homo sapiens
  misc_RNA (1)...(19): siRNA sense strand
cccagcagauuaccaggau

SEQ ID NO: 2041078 - RNA, 19 nt, Homo sapiens
  misc_RNA (1)...(19): siRNA sense strand
gaugugaguggauggaucu

SEQ ID NO: 2041079 - RNA, 19 nt, Homo sapiens
  misc_RNA (1)...(19): siRNA sense strand
ugggaagucagauauguau

SEQ ID NO: 2041080 - RNA, 19 nt, Homo sapiens
  misc_RNA (1)...(19): siRNA sense strand
acagagaaggguuugacaa

SEQ ID NO: 2041081 - RNA, 19 nt, Homo sapiens
  misc_RNA (1)...(19): siRNA sense strand
ggaguugcaggagcuguau

SEQ ID NO: 2041082 - RNA, 19 nt, Homo sapiens
  misc_RNA (1)...(19): siRNA sense strand
uaaggaacugccagagaau

SEQ ID NO: 2041083 - RNA, 19 nt, Homo sapiens
  misc_RNA (1)...(19): siRNA sense strand
cacaaauccuggagcuuuu

SEQ ID NO: 2041084 - RNA, 19 nt, Homo sapiens
  misc_RNA (1)...(19): siRNA sense strand
ggcaacagcacacaaaucc

SEQ ID NO: 2041085 - RNA, 19 nt, Homo sapiens
  misc_RNA (1)...(19): siRNA sense strand
guacagagaaggguuugac

SEQ ID NO: 2041086 - RNA, 19 nt, Homo sapiens
  misc_RNA (1)...(19): siRNA sense strand
gcuaggcugcugcuguaug

SEQ ID NO: 2041087 - RNA, 19 nt, Homo sapiens
  misc_RNA (1)...(19): siRNA sense strand
gcuguauggcugcacauuc

SEQ ID NO: 2041088 - RNA, 19 nt, Homo sapiens
  misc_RNA (1)...(19): siRNA sense strand
cacauucccauccuccaaa

SEQ ID NO: 2041089 - RNA, 19 nt, Homo sapiens
  misc_RNA (1)...(19): siRNA sense strand
agaagauauuggagacaca

SEQ ID NO: 2041090 - RNA, 19 nt, Homo sapiens
  misc_RNA (1)...(19): siRNA sense strand
gaagaaugcuuaagaugug

SEQ ID NO: 2041091 - RNA, 19 nt, Homo sapiens
  misc_RNA (1)...(19): siRNA sense strand
ggaagaaugcuuaagaugu

SEQ ID NO: 2041092 - RNA, 19 nt, Homo sapiens
  misc_RNA (1)...(19): siRNA sense strand
gaacugccagagaauuaua

SEQ ID NO: 2041093 - RNA, 19 nt, Homo sapiens
  misc_RNA (1)...(19): siRNA sense strand
uauaucaucugccgccuaa

SEQ ID NO: 2041094 - RNA, 19 nt, Homo sapiens
  misc_RNA (1)...(19): siRNA sense strand
ccauauucauucaccauaa

SEQ ID NO: 2041095 - RNA, 19 nt, Homo sapiens
  misc_RNA (1)...(19): siRNA sense strand
auaaggaacugccagagaa

SEQ ID NO: 2041096 - RNA, 19 nt, Homo sapiens
  misc_RNA (1)...(19): siRNA sense strand
ugaagagacugguauaaaa

SEQ ID NO: 2041097 - RNA, 19 nt, Homo sapiens
  misc_RNA (1)...(19): siRNA sense strand
cuaaagccauauucauuca

SEQ ID NO: 2041098 - RNA, 19 nt, Homo sapiens
  misc_RNA (1)...(19): siRNA sense strand
ucaaugaccuggcgaagac

SEQ ID NO: 2041099 - RNA, 19 nt, Homo sapiens
  misc_RNA (1)...(19): siRNA sense strand
acacaaauccuggagcuuu

SEQ ID NO: 2041100 - RNA, 19 nt, Homo sapiens
  misc_RNA (1)...(19): siRNA sense strand
ccaggaagaaugcuuaaga

SEQ ID NO: 2041101 - RNA, 19 nt, Homo sapiens
  misc_RNA (1)...(19): siRNA sense strand
caggaagaaugcuuaagau

SEQ ID NO: 2041102 - RNA, 19 nt, Homo sapiens
  misc_RNA (1)...(19): siRNA sense strand
gccuaaagccauauucauu

SEQ ID NO: 2041103 - RNA, 19 nt, Homo sapiens
  misc_RNA (1)...(19): siRNA sense strand
gaaaauacaacucccauca

SEQ ID NO: 2041104 - RNA, 19 nt, Homo sapiens
  misc_RNA (1)...(19): siRNA sense strand
ugaccugacuguggaagaa

SEQ ID NO: 2041105 - RNA, 19 nt, Homo sapiens
  misc_RNA (1)...(19): siRNA sense strand
agacacagcgguucgagaa

SEQ ID NO: 2041106 - RNA, 19 nt, Homo sapiens
  misc_RNA (1)...(19): siRNA sense strand
uugcuaggcugcugcugua

SEQ ID NO: 2041107 - RNA, 19 nt, Homo sapiens
  misc_RNA (1)...(19): siRNA sense strand
cauaaggaacugccagaga

SEQ ID NO: 2041108 - RNA, 19 nt, Homo sapiens
  misc_RNA (1)...(19): siRNA sense strand
ccuaaagccauauucauuc

SEQ ID NO: 2041109 - RNA, 19 nt, Homo sapiens
  misc_RNA (1)...(19): siRNA sense strand
ggaacugccagagaauuau

SEQ ID NO: 2041110 - RNA, 19 nt, Homo sapiens
  misc_RNA (1)...(19): siRNA sense strand
aggaacugccagagaauua

SEQ ID NO: 2041111 - RNA, 19 nt, Homo sapiens
  misc_RNA (1)...(19): siRNA sense strand
gaagagacugguauaaaau

SEQ ID NO: 2041112 - RNA, 19 nt, Homo sapiens
  misc_RNA (1)...(19): siRNA sense strand
acacagcgguucgagaagu

SEQ ID NO: 2041113 - RNA, 19 nt, Homo sapiens
  misc_RNA (1)...(19): siRNA sense strand
gccauauucauucaccaua

SEQ ID NO: 2041114 - RNA, 19 nt, Homo sapiens
  misc_RNA (1)...(19): siRNA sense strand
cacagcgguucgagaaguu

SEQ ID NO: 2041115 - RNA, 19 nt, Homo sapiens
  misc_RNA (1)...(19): siRNA sense strand
uugaagagacugguauaaa

SEQ ID NO: 2041116 - RNA, 19 nt, Homo sapiens
  misc_RNA (1)...(19): siRNA sense strand
gggaagucagauauguaua

SEQ ID NO: 2041117 - RNA, 19 nt, Homo sapiens
  misc_RNA (1)...(19): siRNA sense strand
guggauggaucucaaugac

SEQ ID NO: 2041118 - RNA, 19 nt, Homo sapiens
  misc_RNA (1)...(19): siRNA sense strand
gaagaagauauuggagaca

SEQ ID NO: 2041119 - RNA, 19 nt, Homo sapiens
  misc_RNA (1)...(19): siRNA sense strand
cuaggcugcugcuguaugg

SEQ ID NO: 2041120 - RNA, 19 nt, Homo sapiens
  misc_RNA (1)...(19): siRNA sense strand
aagaaugcuuaagauguga

SEQ ID NO: 2041121 - RNA, 19 nt, Homo sapiens
  misc_RNA (1)...(19): siRNA sense strand
uaucaucugccgccuaaag

SEQ ID NO: 2041122 - RNA, 19 nt, Homo sapiens
  misc_RNA (1)...(19): siRNA sense strand
gaugugaguggauggaucu

SEQ ID NO: 2041123 - RNA, 19 nt, Homo sapiens
  misc_RNA (1)...(19): siRNA sense strand
ugggaagucagauauguau

SEQ ID NO: 2041124 - RNA, 19 nt, Homo sapiens
  misc_RNA (1)...(19): siRNA sense strand
acagagaaggguuugacaa

SEQ ID NO: 2041125 - RNA, 19 nt, Homo sapiens
  misc_RNA (1)...(19): siRNA sense strand
cacaaauccuggagcuuuu

SEQ ID NO: 2041126 - RNA, 19 nt, Homo sapiens
  misc_RNA (1)...(19): siRNA sense strand
uaaggaacugccagagaau

SEQ ID NO: 2041127 - RNA, 19 nt, Homo sapiens
  misc_RNA (1)...(19): siRNA sense strand
gcuaggcugcugcuguaug

SEQ ID NO: 2041128 - RNA, 19 nt, Homo sapiens
  misc_RNA (1)...(19): siRNA sense strand
ggcaacagcacacaaaucc

SEQ ID NO: 2041129 - RNA, 19 nt, Homo sapiens
  misc_RNA (1)...(19): siRNA sense strand
guacagagaaggguuugac

SEQ ID NO: 2041130 - RNA, 19 nt, Homo sapiens
  misc_RNA (1)...(19): siRNA sense strand
agaagauauuggagacaca

SEQ ID NO: 2041131 - RNA, 19 nt, Homo sapiens
  misc_RNA (1)...(19): siRNA sense strand
ggaagcauaucuuacaauu

SEQ ID NO: 2041132 - RNA, 19 nt, Homo sapiens
  misc_RNA (1)...(19): siRNA sense strand
gaagccagguuccuaauga

SEQ ID NO: 2041133 - RNA, 19 nt, Homo sapiens
  misc_RNA (1)...(19): siRNA sense strand
gaacuaccaugacgaaaca

SEQ ID NO: 2041134 - RNA, 19 nt, Homo sapiens
  misc_RNA (1)...(19): siRNA sense strand
gaaagacuguggagaaugg

SEQ ID NO: 2041135 - RNA, 19 nt, Homo sapiens
  misc_RNA (1)...(19): siRNA sense strand
ggauagcaguggaaauaaa

SEQ ID NO: 2041136 - RNA, 19 nt, Homo sapiens
  misc_RNA (1)...(19): siRNA sense strand
gagcaagaauggccuguau

SEQ ID NO: 2041137 - RNA, 19 nt, Homo sapiens
  misc_RNA (1)...(19): siRNA sense strand
gcuagaagcuggagaugau

SEQ ID NO: 2041138 - RNA, 19 nt, Homo sapiens
  misc_RNA (1)...(19): siRNA sense strand
ggaauacacugcagucucu

SEQ ID NO: 2041139 - RNA, 19 nt, Homo sapiens
  misc_RNA (1)...(19): siRNA sense strand
gcaagaauggccuguauga

SEQ ID NO: 2041140 - RNA, 19 nt, Homo sapiens
  misc_RNA (1)...(19): siRNA sense strand
cgaaacaggugagauaaug

SEQ ID NO: 2041141 - RNA, 19 nt, Homo sapiens
  misc_RNA (1)...(19): siRNA sense strand
aaagugggcuggcuuguug

SEQ ID NO: 2041142 - RNA, 19 nt, Homo sapiens
  misc_RNA (1)...(19): siRNA sense strand
caggugagauaauggauaa

SEQ ID NO: 2041143 - RNA, 19 nt, Homo sapiens
  misc_RNA (1)...(19): siRNA sense strand
gaagagagaaauagaggaa

SEQ ID NO: 2041144 - RNA, 19 nt, Homo sapiens
  misc_RNA (1)...(19): siRNA sense strand
gcucucaacuccuuacaga

SEQ ID NO: 2041145 - RNA, 19 nt, Homo sapiens
  misc_RNA (1)...(19): siRNA sense strand
ugacgaaacaggugagaua

SEQ ID NO: 2041146 - RNA, 19 nt, Homo sapiens
  misc_RNA (1)...(19): siRNA sense strand
ugaaauggguggacaucaa

SEQ ID NO: 2041147 - RNA, 19 nt, Homo sapiens
  misc_RNA (1)...(19): siRNA sense strand
acuauaagccuguggaaua

SEQ ID NO: 2041148 - RNA, 19 nt, Homo sapiens
  misc_RNA (1)...(19): siRNA sense strand
uaagggauauguugaugau

SEQ ID NO: 2041149 - RNA, 19 nt, Homo sapiens
  misc_RNA (1)...(19): siRNA sense strand
ucuaaugguuccaaagaaa

SEQ ID NO: 2041150 - RNA, 19 nt, Homo sapiens
  misc_RNA (1)...(19): siRNA sense strand
ccaagaccaccuagugaua

SEQ ID NO: 2041151 - RNA, 19 nt, Homo sapiens
  misc_RNA (1)...(19): siRNA sense strand
gccagucacucucaauuca

SEQ ID NO: 2041152 - RNA, 19 nt, Homo sapiens
  misc_RNA (1)...(19): siRNA sense strand
gaaagugggcuggcuuguu

SEQ ID NO: 2041153 - RNA, 19 nt, Homo sapiens
  misc_RNA (1)...(19): siRNA sense strand
gaaauggguggacaucaau

SEQ ID NO: 2041154 - RNA, 19 nt, Homo sapiens
  misc_RNA (1)...(19): siRNA sense strand
ggaugggcauguugagaga

SEQ ID NO: 2041155 - RNA, 19 nt, Homo sapiens
  misc_RNA (1)...(19): siRNA sense strand
gauccaggagagaagauua

SEQ ID NO: 2041156 - RNA, 19 nt, Homo sapiens
  misc_RNA (1)...(19): siRNA sense strand
cgucaugucugguucuaau

SEQ ID NO: 2041157 - RNA, 19 nt, Homo sapiens
  misc_RNA (1)...(19): siRNA sense strand
gguuucaucuuaauaccaa

SEQ ID NO: 2041158 - RNA, 19 nt, Homo sapiens
  misc_RNA (1)...(19): siRNA sense strand
ccagguuccuaaugagaaa

SEQ ID NO: 2041159 - RNA, 19 nt, Homo sapiens
  misc_RNA (1)...(19): siRNA sense strand
agaauggccuguaugagau

SEQ ID NO: 2041160 - RNA, 19 nt, Homo sapiens
  misc_RNA (1)...(19): siRNA sense strand
ucagaucagugaaaguaau

SEQ ID NO: 2041161 - RNA, 19 nt, Homo sapiens
  misc_RNA (1)...(19): siRNA sense strand
gagagaaagagcaagaaug

SEQ ID NO: 2041162 - RNA, 19 nt, Homo sapiens
  misc_RNA (1)...(19): siRNA sense strand
aagaccaccuagugauaua

SEQ ID NO: 2041163 - RNA, 19 nt, Homo sapiens
  misc_RNA (1)...(19): siRNA sense strand
aagaauggccuguaugaga

SEQ ID NO: 2041164 - RNA, 19 nt, Homo sapiens
  misc_RNA (1)...(19): siRNA sense strand
ccucagaucagugaaagua

SEQ ID NO: 2041165 - RNA, 19 nt, Homo sapiens
  misc_RNA (1)...(19): siRNA sense strand
ucucaacuccuuacagaaa

SEQ ID NO: 2041166 - RNA, 19 nt, Homo sapiens
  misc_RNA (1)...(19): siRNA sense strand
gaccaccuagugauauaua

SEQ ID NO: 2041167 - RNA, 19 nt, Homo sapiens
  misc_RNA (1)...(19): siRNA sense strand
cuucuugguuucaucuuaa

SEQ ID NO: 2041168 - RNA, 19 nt, Homo sapiens
  misc_RNA (1)...(19): siRNA sense strand
gaaaauggaagaccgagaa

SEQ ID NO: 2041169 - RNA, 19 nt, Homo sapiens
  misc_RNA (1)...(19): siRNA sense strand
gauccucgaaacacugaua

SEQ ID NO: 2041170 - RNA, 19 nt, Homo sapiens
  misc_RNA (1)...(19): siRNA sense strand
gcagaucccauuauaacca

SEQ ID NO: 2041171 - RNA, 19 nt, Homo sapiens
  misc_RNA (1)...(19): siRNA sense strand
aagagaauuuggugaggaa

SEQ ID NO: 2041172 - RNA, 19 nt, Homo sapiens
  misc_RNA (1)...(19): siRNA sense strand
ucgaaacacugauaaugca

SEQ ID NO: 2041173 - RNA, 19 nt, Homo sapiens
  misc_RNA (1)...(19): siRNA sense strand
uauaagggauauguugaug

SEQ ID NO: 2041174 - RNA, 19 nt, Homo sapiens
  misc_RNA (1)...(19): siRNA sense strand
agggauagcaguggaaaua

SEQ ID NO: 2041175 - RNA, 19 nt, Homo sapiens
  misc_RNA (1)...(19): siRNA sense strand
ucaaacuuguggcugagaa

SEQ ID NO: 2041176 - RNA, 19 nt, Homo sapiens
  misc_RNA (1)...(19): siRNA sense strand
cagaagcugugaacuacca

SEQ ID NO: 2041177 - RNA, 19 nt, Homo sapiens
  misc_RNA (1)...(19): siRNA sense strand
ggaaagacuguggagaaug

SEQ ID NO: 2041178 - RNA, 19 nt, Homo sapiens
  misc_RNA (1)...(19): siRNA sense strand
cauuauaaccagauggaaa

SEQ ID NO: 2041179 - RNA, 19 nt, Homo sapiens
  misc_RNA (1)...(19): siRNA sense strand
guucuaaugguuccaaaga

SEQ ID NO: 2041180 - RNA, 19 nt, Homo sapiens
  misc_RNA (1)...(19): siRNA sense strand
caagaccaccuagugauau

SEQ ID NO: 2041181 - RNA, 19 nt, Homo sapiens
  misc_RNA (1)...(19): siRNA sense strand
aaggaaagacuguggagaa

SEQ ID NO: 2041182 - RNA, 19 nt, Homo sapiens
  misc_RNA (1)...(19): siRNA sense strand
gacgaaacaggugagauaa

SEQ ID NO: 2041183 - RNA, 19 nt, Homo sapiens
  misc_RNA (1)...(19): siRNA sense strand
gaaaaccagugcugagaag

SEQ ID NO: 2041184 - RNA, 19 nt, Homo sapiens
  misc_RNA (1)...(19): siRNA sense strand
agagaaagagcaagaaugg

SEQ ID NO: 2041185 - RNA, 19 nt, Homo sapiens
  misc_RNA (1)...(19): siRNA sense strand
gggauagcaguggaaauaa

SEQ ID NO: 2041186 - RNA, 19 nt, Homo sapiens
  misc_RNA (1)...(19): siRNA sense strand
cgcugcagaucccauuaua

SEQ ID NO: 2041187 - RNA, 19 nt, Homo sapiens
  misc_RNA (1)...(19): siRNA sense strand
gaauggccuguaugagauu

SEQ ID NO: 2041188 - RNA, 19 nt, Homo sapiens
  misc_RNA (1)...(19): siRNA sense strand
aaucaugcauccuguuucu

SEQ ID NO: 2041189 - RNA, 19 nt, Homo sapiens
  misc_RNA (1)...(19): siRNA sense strand
ucuucuugguuucaucuua

SEQ ID NO: 2041190 - RNA, 19 nt, Homo sapiens
  misc_RNA (1)...(19): siRNA sense strand
augcauggauggagacaga

SEQ ID NO: 2041191 - RNA, 19 nt, Homo sapiens
  misc_RNA (1)...(19): siRNA sense strand
gaaacaggugagauaaugg

SEQ ID NO: 2041192 - RNA, 19 nt, Homo sapiens
  misc_RNA (1)...(19): siRNA sense strand
cuauaagccuguggaauac

SEQ ID NO: 2041193 - RNA, 19 nt, Homo sapiens
  misc_RNA (1)...(19): siRNA sense strand
aaacaggugagauaaugga

SEQ ID NO: 2041194 - RNA, 19 nt, Homo sapiens
  misc_RNA (1)...(19): siRNA sense strand
cagaucagugaaaguaauu

SEQ ID NO: 2041195 - RNA, 19 nt, Homo sapiens
  misc_RNA (1)...(19): siRNA sense strand
cagccaagaccaccuagug

SEQ ID NO: 2041196 - RNA, 19 nt, Homo sapiens
  misc_RNA (1)...(19): siRNA sense strand
gcugcagaucccauuauaa

SEQ ID NO: 2041197 - RNA, 19 nt, Homo sapiens
  misc_RNA (1)...(19): siRNA sense strand
acacugcagucucugucuu

SEQ ID NO: 2041198 - RNA, 19 nt, Homo sapiens
  misc_RNA (1)...(19): siRNA sense strand
ugacugccaugcguuguag

SEQ ID NO: 2041199 - RNA, 19 nt, Homo sapiens
  misc_RNA (1)...(19): siRNA sense strand
agaaauagaggaaaaguug

SEQ ID NO: 2041200 - RNA, 19 nt, Homo sapiens
  misc_RNA (1)...(19): siRNA sense strand
agagagaaauagaggaaaa

SEQ ID NO: 2041201 - RNA, 19 nt, Homo sapiens
  misc_RNA (1)...(19): siRNA sense strand
ggaagcucucaacuccuua

SEQ ID NO: 2041202 - RNA, 19 nt, Homo sapiens
  misc_RNA (1)...(19): siRNA sense strand
aggaaagacuguggagaau

SEQ ID NO: 2041203 - RNA, 19 nt, Homo sapiens
  misc_RNA (1)...(19): siRNA sense strand
ucucccaaguuuaacgaaa

SEQ ID NO: 2041204 - RNA, 19 nt, Homo sapiens
  misc_RNA (1)...(19): siRNA sense strand
gaaaaggaugggcauguug

SEQ ID NO: 2041205 - RNA, 19 nt, Homo sapiens
  misc_RNA (1)...(19): siRNA sense strand
uugaguggcaagacuauaa

SEQ ID NO: 2041206 - RNA, 19 nt, Homo sapiens
  misc_RNA (1)...(19): siRNA sense strand
cgaaaaggaugggcauguu

SEQ ID NO: 2041207 - RNA, 19 nt, Homo sapiens
  misc_RNA (1)...(19): siRNA sense strand
guugagagaaagagcaaga

SEQ ID NO: 2041208 - RNA, 19 nt, Homo sapiens
  misc_RNA (1)...(19): siRNA sense strand
gaggaaaaguugcacaaac

SEQ ID NO: 2041209 - RNA, 19 nt, Homo sapiens
  misc_RNA (1)...(19): siRNA sense strand
gcugagaagagagaaauag

SEQ ID NO: 2041210 - RNA, 19 nt, Homo sapiens
  misc_RNA (1)...(19): siRNA sense strand
ugggaagcauaucuuacaa

SEQ ID NO: 2041211 - RNA, 19 nt, Homo sapiens
  misc_RNA (1)...(19): siRNA sense strand
aauggaagaccgagaaauc

SEQ ID NO: 2041212 - RNA, 19 nt, Homo sapiens
  misc_RNA (1)...(19): siRNA sense strand
uguaugagauugaaaaugg

SEQ ID NO: 2041213 - RNA, 19 nt, Homo sapiens
  misc_RNA (1)...(19): siRNA sense strand
gagcgaggacucugaagcu

SEQ ID NO: 2041214 - RNA, 19 nt, Homo sapiens
  misc_RNA (1)...(19): siRNA sense strand
ucucaauucaucaaacuug

SEQ ID NO: 2041215 - RNA, 19 nt, Homo sapiens
  misc_RNA (1)...(19): siRNA sense strand
ggugagauaauggauaauc

SEQ ID NO: 2041216 - RNA, 19 nt, Homo sapiens
  misc_RNA (1)...(19): siRNA sense strand
ccucgaaacacugauaaug

SEQ ID NO: 2041217 - RNA, 19 nt, Homo sapiens
  misc_RNA (1)...(19): siRNA sense strand
aaccagugcugagaagaga

SEQ ID NO: 2041218 - RNA, 19 nt, Homo sapiens
  misc_RNA (1)...(19): siRNA sense strand
gggaagcauaucuuacaau

SEQ ID NO: 2041219 - RNA, 19 nt, Homo sapiens
  misc_RNA (1)...(19): siRNA sense strand
gauagcaguggaaauaaaa

SEQ ID NO: 2041220 - RNA, 19 nt, Homo sapiens
  misc_RNA (1)...(19): siRNA sense strand
cagucacucucaauucauc

SEQ ID NO: 2041221 - RNA, 19 nt, Homo sapiens
  misc_RNA (1)...(19): siRNA sense strand
caaacuuguggcugagaaa

SEQ ID NO: 2041222 - RNA, 19 nt, Homo sapiens
  misc_RNA (1)...(19): siRNA sense strand
ugagagaaagagcaagaau

SEQ ID NO: 2041223 - RNA, 19 nt, Homo sapiens
  misc_RNA (1)...(19): siRNA sense strand
acaggugagauaauggaua

SEQ ID NO: 2041224 - RNA, 19 nt, Homo sapiens
  misc_RNA (1)...(19): siRNA sense strand
gccaagaccaccuagugau

SEQ ID NO: 2041225 - RNA, 19 nt, Homo sapiens
  misc_RNA (1)...(19): siRNA sense strand
gccagguuccuaaugagaa

SEQ ID NO: 2041226 - RNA, 19 nt, Homo sapiens
  misc_RNA (1)...(19): siRNA sense strand
ccaaaucacgcugcagauc

SEQ ID NO: 2041227 - RNA, 19 nt, Homo sapiens
  misc_RNA (1)...(19): siRNA sense strand
gggcauguugagagaaaga

SEQ ID NO: 2041228 - RNA, 19 nt, Homo sapiens
  misc_RNA (1)...(19): siRNA sense strand
cugcagaucccauuauaac

SEQ ID NO: 2041229 - RNA, 19 nt, Homo sapiens
  misc_RNA (1)...(19): siRNA sense strand
cgaagccagguuccuaaug

SEQ ID NO: 2041230 - RNA, 19 nt, Homo sapiens
  misc_RNA (1)...(19): siRNA sense strand
acacugauaaugcauggau

SEQ ID NO: 2041231 - RNA, 19 nt, Homo sapiens
  misc_RNA (1)...(19): siRNA sense strand
ggaagcauaucuuacaauu

SEQ ID NO: 2041232 - RNA, 19 nt, Homo sapiens
  misc_RNA (1)...(19): siRNA sense strand
gaagccagguuccuaauga

SEQ ID NO: 2041233 - RNA, 19 nt, Homo sapiens
  misc_RNA (1)...(19): siRNA sense strand
gaacuaccaugacgaaaca

SEQ ID NO: 2041234 - RNA, 19 nt, Homo sapiens
  misc_RNA (1)...(19): siRNA sense strand
gaaagacuguggagaaugg

SEQ ID NO: 2041235 - RNA, 19 nt, Homo sapiens
  misc_RNA (1)...(19): siRNA sense strand
ggauagcaguggaaauaaa

SEQ ID NO: 2041236 - RNA, 19 nt, Homo sapiens
  misc_RNA (1)...(19): siRNA sense strand
gagcaagaauggccuguau

SEQ ID NO: 2041237 - RNA, 19 nt, Homo sapiens
  misc_RNA (1)...(19): siRNA sense strand
gcuagaagcuggagaugau

SEQ ID NO: 2041238 - RNA, 19 nt, Homo sapiens
  misc_RNA (1)...(19): siRNA sense strand
ggaauacacugcagucucu

SEQ ID NO: 2041239 - RNA, 19 nt, Homo sapiens
  misc_RNA (1)...(19): siRNA sense strand
gcaagaauggccuguauga

SEQ ID NO: 2041240 - RNA, 19 nt, Homo sapiens
  misc_RNA (1)...(19): siRNA sense strand
cgaaacaggugagauaaug

SEQ ID NO: 2041241 - RNA, 19 nt, Homo sapiens
  misc_RNA (1)...(19): siRNA sense strand
aaagugggcuggcuuguug

SEQ ID NO: 2041242 - RNA, 19 nt, Homo sapiens
  misc_RNA (1)...(19): siRNA sense strand
caggugagauaauggauaa

SEQ ID NO: 2041243 - RNA, 19 nt, Homo sapiens
  misc_RNA (1)...(19): siRNA sense strand
gaagagagaaauagaggaa

SEQ ID NO: 2041244 - RNA, 19 nt, Homo sapiens
  misc_RNA (1)...(19): siRNA sense strand
gcucucaacuccuuacaga

SEQ ID NO: 2041245 - RNA, 19 nt, Homo sapiens
  misc_RNA (1)...(19): siRNA sense strand
ugacgaaacaggugagaua

SEQ ID NO: 2041246 - RNA, 19 nt, Homo sapiens
  misc_RNA (1)...(19): siRNA sense strand
ugaaauggguggacaucaa

SEQ ID NO: 2041247 - RNA, 19 nt, Homo sapiens
  misc_RNA (1)...(19): siRNA sense strand
acuauaagccuguggaaua

SEQ ID NO: 2041248 - RNA, 19 nt, Homo sapiens
  misc_RNA (1)...(19): siRNA sense strand
uaagggauauguugaugau

SEQ ID NO: 2041249 - RNA, 19 nt, Homo sapiens
  misc_RNA (1)...(19): siRNA sense strand
ucuaaugguuccaaagaaa

SEQ ID NO: 2041250 - RNA, 19 nt, Homo sapiens
  misc_RNA (1)...(19): siRNA sense strand
ccaagaccaccuagugaua

SEQ ID NO: 2041251 - RNA, 19 nt, Homo sapiens
  misc_RNA (1)...(19): siRNA sense strand
gccagucacucucaauuca

SEQ ID NO: 2041252 - RNA, 19 nt, Homo sapiens
  misc_RNA (1)...(19): siRNA sense strand
gaaagugggcuggcuuguu

SEQ ID NO: 2041253 - RNA, 19 nt, Homo sapiens
  misc_RNA (1)...(19): siRNA sense strand
gaaauggguggacaucaau

SEQ ID NO: 2041254 - RNA, 19 nt, Homo sapiens
  misc_RNA (1)...(19): siRNA sense strand
ggaugggcauguugagaga

SEQ ID NO: 2041255 - RNA, 19 nt, Homo sapiens
  misc_RNA (1)...(19): siRNA sense strand
gauccaggagagaagauua

SEQ ID NO: 2041256 - RNA, 19 nt, Homo sapiens
  misc_RNA (1)...(19): siRNA sense strand
ccagguuccuaaugagaaa

SEQ ID NO: 2041257 - RNA, 19 nt, Homo sapiens
  misc_RNA (1)...(19): siRNA sense strand
agaauggccuguaugagau

SEQ ID NO: 2041258 - RNA, 19 nt, Homo sapiens
  misc_RNA (1)...(19): siRNA sense strand
ucagaucagugaaaguaau

SEQ ID NO: 2041259 - RNA, 19 nt, Homo sapiens
  misc_RNA (1)...(19): siRNA sense strand
gagagaaagagcaagaaug

SEQ ID NO: 2041260 - RNA, 19 nt, Homo sapiens
  misc_RNA (1)...(19): siRNA sense strand
aagaccaccuagugauaua

SEQ ID NO: 2041261 - RNA, 19 nt, Homo sapiens
  misc_RNA (1)...(19): siRNA sense strand
aagaauggccuguaugaga

SEQ ID NO: 2041262 - RNA, 19 nt, Homo sapiens
  misc_RNA (1)...(19): siRNA sense strand
ccucagaucagugaaagua

SEQ ID NO: 2041263 - RNA, 19 nt, Homo sapiens
  misc_RNA (1)...(19): siRNA sense strand
ucucaacuccuuacagaaa

SEQ ID NO: 2041264 - RNA, 19 nt, Homo sapiens
  misc_RNA (1)...(19): siRNA sense strand
gaccaccuagugauauaua

SEQ ID NO: 2041265 - RNA, 19 nt, Homo sapiens
  misc_RNA (1)...(19): siRNA sense strand
gaaaauggaagaccgagaa

SEQ ID NO: 2041266 - RNA, 19 nt, Homo sapiens
  misc_RNA (1)...(19): siRNA sense strand
gauccucgaaacacugaua

SEQ ID NO: 2041267 - RNA, 19 nt, Homo sapiens
  misc_RNA (1)...(19): siRNA sense strand
gcagaucccauuauaacca

SEQ ID NO: 2041268 - RNA, 19 nt, Homo sapiens
  misc_RNA (1)...(19): siRNA sense strand
aagagaauuuggugaggaa

SEQ ID NO: 2041269 - RNA, 19 nt, Homo sapiens
  misc_RNA (1)...(19): siRNA sense strand
ucgaaacacugauaaugca

SEQ ID NO: 2041270 - RNA, 19 nt, Homo sapiens
  misc_RNA (1)...(19): siRNA sense strand
uauaagggauauguugaug

SEQ ID NO: 2041271 - RNA, 19 nt, Homo sapiens
  misc_RNA (1)...(19): siRNA sense strand
agggauagcaguggaaaua

SEQ ID NO: 2041272 - RNA, 19 nt, Homo sapiens
  misc_RNA (1)...(19): siRNA sense strand
ucaaacuuguggcugagaa

SEQ ID NO: 2041273 - RNA, 19 nt, Homo sapiens
  misc_RNA (1)...(19): siRNA sense strand
cagaagcugugaacuacca

SEQ ID NO: 2041274 - RNA, 19 nt, Homo sapiens
  misc_RNA (1)...(19): siRNA sense strand
ggaaagacuguggagaaug

SEQ ID NO: 2041275 - RNA, 19 nt, Homo sapiens
  misc_RNA (1)...(19): siRNA sense strand
cauuauaaccagauggaaa

SEQ ID NO: 2041276 - RNA, 19 nt, Homo sapiens
  misc_RNA (1)...(19): siRNA sense strand
caagaccaccuagugauau

SEQ ID NO: 2041277 - RNA, 19 nt, Homo sapiens
  misc_RNA (1)...(19): siRNA sense strand
guucuaaugguuccaaaga

SEQ ID NO: 2041278 - RNA, 19 nt, Homo sapiens
  misc_RNA (1)...(19): siRNA sense strand
aaggaaagacuguggagaa

SEQ ID NO: 2041279 - RNA, 19 nt, Homo sapiens
  misc_RNA (1)...(19): siRNA sense strand
gacgaaacaggugagauaa

SEQ ID NO: 2041280 - RNA, 19 nt, Homo sapiens
  misc_RNA (1)...(19): siRNA sense strand
gaaaaccagugcugagaag

SEQ ID NO: 2041281 - RNA, 19 nt, Homo sapiens
  misc_RNA (1)...(19): siRNA sense strand
agagaaagagcaagaaugg

SEQ ID NO: 2041282 - RNA, 19 nt, Homo sapiens
  misc_RNA (1)...(19): siRNA sense strand
gggauagcaguggaaauaa

SEQ ID NO: 2041283 - RNA, 19 nt, Homo sapiens
  misc_RNA (1)...(19): siRNA sense strand
cgcugcagaucccauuaua

SEQ ID NO: 2041284 - RNA, 19 nt, Homo sapiens
  misc_RNA (1)...(19): siRNA sense strand
gaauggccuguaugagauu

SEQ ID NO: 2041285 - RNA, 19 nt, Homo sapiens
  misc_RNA (1)...(19): siRNA sense strand
aaucaugcauccuguuucu

SEQ ID NO: 2041286 - RNA, 19 nt, Homo sapiens
  misc_RNA (1)...(19): siRNA sense strand
augcauggauggagacaga

SEQ ID NO: 2041287 - RNA, 19 nt, Homo sapiens
  misc_RNA (1)...(19): siRNA sense strand
gaaacaggugagauaaugg

SEQ ID NO: 2041288 - RNA, 19 nt, Homo sapiens
  misc_RNA (1)...(19): siRNA sense strand
cuauaagccuguggaauac

SEQ ID NO: 2041289 - RNA, 19 nt, Homo sapiens
  misc_RNA (1)...(19): siRNA sense strand
aaacaggugagauaaugga

SEQ ID NO: 2041290 - RNA, 19 nt, Homo sapiens
  misc_RNA (1)...(19): siRNA sense strand
cagaucagugaaaguaauu

SEQ ID NO: 2041291 - RNA, 19 nt, Homo sapiens
  misc_RNA (1)...(19): siRNA sense strand
cagccaagaccaccuagug

SEQ ID NO: 2041292 - RNA, 19 nt, Homo sapiens
  misc_RNA (1)...(19): siRNA sense strand
gcugcagaucccauuauaa

SEQ ID NO: 2041293 - RNA, 19 nt, Homo sapiens
  misc_RNA (1)...(19): siRNA sense strand
aggaaagacuguggagaau

SEQ ID NO: 2041294 - RNA, 19 nt, Homo sapiens
  misc_RNA (1)...(19): siRNA sense strand
ugacugccaugcguuguag

SEQ ID NO: 2041295 - RNA, 19 nt, Homo sapiens
  misc_RNA (1)...(19): siRNA sense strand
acacugcagucucugucuu

SEQ ID NO: 2041296 - RNA, 19 nt, Homo sapiens
  misc_RNA (1)...(19): siRNA sense strand
agaaauagaggaaaaguug

SEQ ID NO: 2041297 - RNA, 19 nt, Homo sapiens
  misc_RNA (1)...(19): siRNA sense strand
agagagaaauagaggaaaa

SEQ ID NO: 2041298 - RNA, 19 nt, Homo sapiens
  misc_RNA (1)...(19): siRNA sense strand
ggaagcucucaacuccuua

SEQ ID NO: 2041299 - RNA, 19 nt, Homo sapiens
  misc_RNA (1)...(19): siRNA sense strand
cgaaaaggaugggcauguu

SEQ ID NO: 2041300 - RNA, 19 nt, Homo sapiens
  misc_RNA (1)...(19): siRNA sense strand
uugaguggcaagacuauaa

SEQ ID NO: 2041301 - RNA, 19 nt, Homo sapiens
  misc_RNA (1)...(19): siRNA sense strand
gaaaaggaugggcauguug

SEQ ID NO: 2041302 - RNA, 19 nt, Homo sapiens
  misc_RNA (1)...(19): siRNA sense strand
ucucccaaguuuaacgaaa

SEQ ID NO: 2041303 - RNA, 19 nt, Homo sapiens
  misc_RNA (1)...(19): siRNA sense strand
guugagagaaagagcaaga

SEQ ID NO: 2041304 - RNA, 19 nt, Homo sapiens
  misc_RNA (1)...(19): siRNA sense strand
gaggaaaaguugcacaaac

SEQ ID NO: 2041305 - RNA, 19 nt, Homo sapiens
  misc_RNA (1)...(19): siRNA sense strand
gcugagaagagagaaauag

SEQ ID NO: 2041306 - RNA, 19 nt, Homo sapiens
  misc_RNA (1)...(19): siRNA sense strand
ugggaagcauaucuuacaa

SEQ ID NO: 2041307 - RNA, 19 nt, Homo sapiens
  misc_RNA (1)...(19): siRNA sense strand
aauggaagaccgagaaauc

SEQ ID NO: 2041308 - RNA, 19 nt, Homo sapiens
  misc_RNA (1)...(19): siRNA sense strand
uguaugagauugaaaaugg

SEQ ID NO: 2041309 - RNA, 19 nt, Homo sapiens
  misc_RNA (1)...(19): siRNA sense strand
gagcgaggacucugaagcu

SEQ ID NO: 2041310 - RNA, 19 nt, Homo sapiens
  misc_RNA (1)...(19): siRNA sense strand
ucucaauucaucaaacuug

SEQ ID NO: 2041311 - RNA, 19 nt, Homo sapiens
  misc_RNA (1)...(19): siRNA sense strand
ggugagauaauggauaauc

SEQ ID NO: 2041312 - RNA, 19 nt, Homo sapiens
  misc_RNA (1)...(19): siRNA sense strand
ccucgaaacacugauaaug

SEQ ID NO: 2041313 - RNA, 19 nt, Homo sapiens
  misc_RNA (1)...(19): siRNA sense strand
aaccagugcugagaagaga

SEQ ID NO: 2041314 - RNA, 19 nt, Homo sapiens
  misc_RNA (1)...(19): siRNA sense strand
gggaagcauaucuuacaau

SEQ ID NO: 2041315 - RNA, 19 nt, Homo sapiens
  misc_RNA (1)...(19): siRNA sense strand
gauagcaguggaaauaaaa

SEQ ID NO: 2041316 - RNA, 19 nt, Homo sapiens
  misc_RNA (1)...(19): siRNA sense strand
cagucacucucaauucauc

SEQ ID NO: 2041317 - RNA, 19 nt, Homo sapiens
  misc_RNA (1)...(19): siRNA sense strand
caaacuuguggcugagaaa

SEQ ID NO: 2041318 - RNA, 19 nt, Homo sapiens
  misc_RNA (1)...(19): siRNA sense strand
ugagagaaagagcaagaau

SEQ ID NO: 2041319 - RNA, 19 nt, Homo sapiens
  misc_RNA (1)...(19): siRNA sense strand
acaggugagauaauggaua

SEQ ID NO: 2041320 - RNA, 19 nt, Homo sapiens
  misc_RNA (1)...(19): siRNA sense strand
gccagguuccuaaugagaa

SEQ ID NO: 2041321 - RNA, 19 nt, Homo sapiens
  misc_RNA (1)...(19): siRNA sense strand
gccaagaccaccuagugau

SEQ ID NO: 2041322 - RNA, 19 nt, Homo sapiens
  misc_RNA (1)...(19): siRNA sense strand
ccaaaucacgcugcagauc

SEQ ID NO: 2041323 - RNA, 19 nt, Homo sapiens
  misc_RNA (1)...(19): siRNA sense strand
cugcagaucccauuauaac

SEQ ID NO: 2041324 - RNA, 19 nt, Homo sapiens
  misc_RNA (1)...(19): siRNA sense strand
gggcauguugagagaaaga

SEQ ID NO: 2041325 - RNA, 19 nt, Homo sapiens
  misc_RNA (1)...(19): siRNA sense strand
cgaagccagguuccuaaug

SEQ ID NO: 2041326 - RNA, 19 nt, Homo sapiens
  misc_RNA (1)...(19): siRNA sense strand
gcucggacgucuccuuacc

SEQ ID NO: 2041327 - RNA, 19 nt, Homo sapiens
  misc_RNA (1)...(19): siRNA sense strand
acacugauaaugcauggau

SEQ ID NO: 2041328 - RNA, 19 nt, Homo sapiens
  misc_RNA (1)...(19): siRNA sense strand
ggaagcauaucuuacaauu

SEQ ID NO: 2041329 - RNA, 19 nt, Homo sapiens
  misc_RNA (1)...(19): siRNA sense strand
gaagccagguuccuaauga

SEQ ID NO: 2041330 - RNA, 19 nt, Homo sapiens
  misc_RNA (1)...(19): siRNA sense strand
gaacuaccaugacgaaaca

SEQ ID NO: 2041331 - RNA, 19 nt, Homo sapiens
  misc_RNA (1)...(19): siRNA sense strand
gaaagacuguggagaaugg

SEQ ID NO: 2041332 - RNA, 19 nt, Homo sapiens
  misc_RNA (1)...(19): siRNA sense strand
ggauagcaguggaaauaaa

SEQ ID NO: 2041333 - RNA, 19 nt, Homo sapiens
  misc_RNA (1)...(19): siRNA sense strand
gagcaagaauggccuguau

SEQ ID NO: 2041334 - RNA, 19 nt, Homo sapiens
  misc_RNA (1)...(19): siRNA sense strand
gcuagaagcuggagaugau

SEQ ID NO: 2041335 - RNA, 19 nt, Homo sapiens
  misc_RNA (1)...(19): siRNA sense strand
ggaauacacugcagucucu

SEQ ID NO: 2041336 - RNA, 19 nt, Homo sapiens
  misc_RNA (1)...(19): siRNA sense strand
gcaagaauggccuguauga

SEQ ID NO: 2041337 - RNA, 19 nt, Homo sapiens
  misc_RNA (1)...(19): siRNA sense strand
cgaaacaggugagauaaug

SEQ ID NO: 2041338 - RNA, 19 nt, Homo sapiens
  misc_RNA (1)...(19): siRNA sense strand
aaagugggcuggcuuguug

SEQ ID NO: 2041339 - RNA, 19 nt, Homo sapiens
  misc_RNA (1)...(19): siRNA sense strand
caggugagauaauggauaa

SEQ ID NO: 2041340 - RNA, 19 nt, Homo sapiens
  misc_RNA (1)...(19): siRNA sense strand
gaagagagaaauagaggaa

SEQ ID NO: 2041341 - RNA, 19 nt, Homo sapiens
  misc_RNA (1)...(19): siRNA sense strand
gcucucaacuccuuacaga

SEQ ID NO: 2041342 - RNA, 19 nt, Homo sapiens
  misc_RNA (1)...(19): siRNA sense strand
ugacgaaacaggugagaua

SEQ ID NO: 2041343 - RNA, 19 nt, Homo sapiens
  misc_RNA (1)...(19): siRNA sense strand
ugaaauggguggacaucaa

SEQ ID NO: 2041344 - RNA, 19 nt, Homo sapiens
  misc_RNA (1)...(19): siRNA sense strand
acuauaagccuguggaaua

SEQ ID NO: 2041345 - RNA, 19 nt, Homo sapiens
  misc_RNA (1)...(19): siRNA sense strand
uaagggauauguugaugau

SEQ ID NO: 2041346 - RNA, 19 nt, Homo sapiens
  misc_RNA (1)...(19): siRNA sense strand
ucuaaugguuccaaagaaa

SEQ ID NO: 2041347 - RNA, 19 nt, Homo sapiens
  misc_RNA (1)...(19): siRNA sense strand
ccaagaccaccuagugaua

SEQ ID NO: 2041348 - RNA, 19 nt, Homo sapiens
  misc_RNA (1)...(19): siRNA sense strand
gccagucacucucaauuca

SEQ ID NO: 2041349 - RNA, 19 nt, Homo sapiens
  misc_RNA (1)...(19): siRNA sense strand
gaaagugggcuggcuuguu

SEQ ID NO: 2041350 - RNA, 19 nt, Homo sapiens
  misc_RNA (1)...(19): siRNA sense strand
gaaauggguggacaucaau

SEQ ID NO: 2041351 - RNA, 19 nt, Homo sapiens
  misc_RNA (1)...(19): siRNA sense strand
ggaugggcauguugagaga

SEQ ID NO: 2041352 - RNA, 19 nt, Homo sapiens
  misc_RNA (1)...(19): siRNA sense strand
gauccaggagagaagauua

SEQ ID NO: 2041353 - RNA, 19 nt, Homo sapiens
  misc_RNA (1)...(19): siRNA sense strand
cgucaugucugguucuaau

SEQ ID NO: 2041354 - RNA, 19 nt, Homo sapiens
  misc_RNA (1)...(19): siRNA sense strand
gguuucaucuuaauaccaa

SEQ ID NO: 2041355 - RNA, 19 nt, Homo sapiens
  misc_RNA (1)...(19): siRNA sense strand
ccagguuccuaaugagaaa

SEQ ID NO: 2041356 - RNA, 19 nt, Homo sapiens
  misc_RNA (1)...(19): siRNA sense strand
agaauggccuguaugagau

SEQ ID NO: 2041357 - RNA, 19 nt, Homo sapiens
  misc_RNA (1)...(19): siRNA sense strand
ucagaucagugaaaguaau

SEQ ID NO: 2041358 - RNA, 19 nt, Homo sapiens
  misc_RNA (1)...(19): siRNA sense strand
gagagaaagagcaagaaug

SEQ ID NO: 2041359 - RNA, 19 nt, Homo sapiens
  misc_RNA (1)...(19): siRNA sense strand
aagaccaccuagugauaua

SEQ ID NO: 2041360 - RNA, 19 nt, Homo sapiens
  misc_RNA (1)...(19): siRNA sense strand
aagaauggccuguaugaga

SEQ ID NO: 2041361 - RNA, 19 nt, Homo sapiens
  misc_RNA (1)...(19): siRNA sense strand
ccucagaucagugaaagua

SEQ ID NO: 2041362 - RNA, 19 nt, Homo sapiens
  misc_RNA (1)...(19): siRNA sense strand
ucucaacuccuuacagaaa

SEQ ID NO: 2041363 - RNA, 19 nt, Homo sapiens
  misc_RNA (1)...(19): siRNA sense strand
gaccaccuagugauauaua

SEQ ID NO: 2041364 - RNA, 19 nt, Homo sapiens
  misc_RNA (1)...(19): siRNA sense strand
cuucuugguuucaucuuaa

SEQ ID NO: 2041365 - RNA, 19 nt, Homo sapiens
  misc_RNA (1)...(19): siRNA sense strand
gaaaauggaagaccgagaa

SEQ ID NO: 2041366 - RNA, 19 nt, Homo sapiens
  misc_RNA (1)...(19): siRNA sense strand
gauccucgaaacacugaua

SEQ ID NO: 2041367 - RNA, 19 nt, Homo sapiens
  misc_RNA (1)...(19): siRNA sense strand
gcagaucccauuauaacca

SEQ ID NO: 2041368 - RNA, 19 nt, Homo sapiens
  misc_RNA (1)...(19): siRNA sense strand
aagagaauuuggugaggaa

SEQ ID NO: 2041369 - RNA, 19 nt, Homo sapiens
  misc_RNA (1)...(19): siRNA sense strand
ucgaaacacugauaaugca

SEQ ID NO: 2041370 - RNA, 19 nt, Homo sapiens
  misc_RNA (1)...(19): siRNA sense strand
uauaagggauauguugaug

SEQ ID NO: 2041371 - RNA, 19 nt, Homo sapiens
  misc_RNA (1)...(19): siRNA sense strand
agggauagcaguggaaaua

SEQ ID NO: 2041372 - RNA, 19 nt, Homo sapiens
  misc_RNA (1)...(19): siRNA sense strand
ucaaacuuguggcugagaa

SEQ ID NO: 2041373 - RNA, 19 nt, Homo sapiens
  misc_RNA (1)...(19): siRNA sense strand
cagaagcugugaacuacca

SEQ ID NO: 2041374 - RNA, 19 nt, Homo sapiens
  misc_RNA (1)...(19): siRNA sense strand
ggaaagacuguggagaaug

SEQ ID NO: 2041375 - RNA, 19 nt, Homo sapiens
  misc_RNA (1)...(19): siRNA sense strand
cauuauaaccagauggaaa

SEQ ID NO: 2041376 - RNA, 19 nt, Homo sapiens
  misc_RNA (1)...(19): siRNA sense strand
guucuaaugguuccaaaga

SEQ ID NO: 2041377 - RNA, 19 nt, Homo sapiens
  misc_RNA (1)...(19): siRNA sense strand
caagaccaccuagugauau

SEQ ID NO: 2041378 - RNA, 19 nt, Homo sapiens
  misc_RNA (1)...(19): siRNA sense strand
aaggaaagacuguggagaa

SEQ ID NO: 2041379 - RNA, 19 nt, Homo sapiens
  misc_RNA (1)...(19): siRNA sense strand
gacgaaacaggugagauaa

SEQ ID NO: 2041380 - RNA, 19 nt, Homo sapiens
  misc_RNA (1)...(19): siRNA sense strand
gaaaaccagugcugagaag

SEQ ID NO: 2041381 - RNA, 19 nt, Homo sapiens
  misc_RNA (1)...(19): siRNA sense strand
agagaaagagcaagaaugg

SEQ ID NO: 2041382 - RNA, 19 nt, Homo sapiens
  misc_RNA (1)...(19): siRNA sense strand
gggauagcaguggaaauaa

SEQ ID NO: 2041383 - RNA, 19 nt, Homo sapiens
  misc_RNA (1)...(19): siRNA sense strand
cgcugcagaucccauuaua

SEQ ID NO: 2041384 - RNA, 19 nt, Homo sapiens
  misc_RNA (1)...(19): siRNA sense strand
gaauggccuguaugagauu

SEQ ID NO: 2041385 - RNA, 19 nt, Homo sapiens
  misc_RNA (1)...(19): siRNA sense strand
aaucaugcauccuguuucu

SEQ ID NO: 2041386 - RNA, 19 nt, Homo sapiens
  misc_RNA (1)...(19): siRNA sense strand
ucuucuugguuucaucuua

SEQ ID NO: 2041387 - RNA, 19 nt, Homo sapiens
  misc_RNA (1)...(19): siRNA sense strand
augcauggauggagacaga

SEQ ID NO: 2041388 - RNA, 19 nt, Homo sapiens
  misc_RNA (1)...(19): siRNA sense strand
gaaacaggugagauaaugg

SEQ ID NO: 2041389 - RNA, 19 nt, Homo sapiens
  misc_RNA (1)...(19): siRNA sense strand
cuauaagccuguggaauac

SEQ ID NO: 2041390 - RNA, 19 nt, Homo sapiens
  misc_RNA (1)...(19): siRNA sense strand
aaacaggugagauaaugga

SEQ ID NO: 2041391 - RNA, 19 nt, Homo sapiens
  misc_RNA (1)...(19): siRNA sense strand
cagaucagugaaaguaauu

SEQ ID NO: 2041392 - RNA, 19 nt, Homo sapiens
  misc_RNA (1)...(19): siRNA sense strand
cagccaagaccaccuagug

SEQ ID NO: 2041393 - RNA, 19 nt, Homo sapiens
  misc_RNA (1)...(19): siRNA sense strand
gcugcagaucccauuauaa

SEQ ID NO: 2041394 - RNA, 19 nt, Homo sapiens
  misc_RNA (1)...(19): siRNA sense strand
acacugcagucucugucuu

SEQ ID NO: 2041395 - RNA, 19 nt, Homo sapiens
  misc_RNA (1)...(19): siRNA sense strand
ugacugccaugcguuguag

SEQ ID NO: 2041396 - RNA, 19 nt, Homo sapiens
  misc_RNA (1)...(19): siRNA sense strand
agaaauagaggaaaaguug

SEQ ID NO: 2041397 - RNA, 19 nt, Homo sapiens
  misc_RNA (1)...(19): siRNA sense strand
agagagaaauagaggaaaa

SEQ ID NO: 2041398 - RNA, 19 nt, Homo sapiens
  misc_RNA (1)...(19): siRNA sense strand
ggaagcucucaacuccuua

SEQ ID NO: 2041399 - RNA, 19 nt, Homo sapiens
  misc_RNA (1)...(19): siRNA sense strand
aggaaagacuguggagaau

SEQ ID NO: 2041400 - RNA, 19 nt, Homo sapiens
  misc_RNA (1)...(19): siRNA sense strand
ucucccaaguuuaacgaaa

SEQ ID NO: 2041401 - RNA, 19 nt, Homo sapiens
  misc_RNA (1)...(19): siRNA sense strand
gaaaaggaugggcauguug

SEQ ID NO: 2041402 - RNA, 19 nt, Homo sapiens
  misc_RNA (1)...(19): siRNA sense strand
uugaguggcaagacuauaa

SEQ ID NO: 2041403 - RNA, 19 nt, Homo sapiens
  misc_RNA (1)...(19): siRNA sense strand
cgaaaaggaugggcauguu

SEQ ID NO: 2041404 - RNA, 19 nt, Homo sapiens
  misc_RNA (1)...(19): siRNA sense strand
guugagagaaagagcaaga

SEQ ID NO: 2041405 - RNA, 19 nt, Homo sapiens
  misc_RNA (1)...(19): siRNA sense strand
gaggaaaaguugcacaaac

SEQ ID NO: 2041406 - RNA, 19 nt, Homo sapiens
  misc_RNA (1)...(19): siRNA sense strand
gcugagaagagagaaauag

SEQ ID NO: 2041407 - RNA, 19 nt, Homo sapiens
  misc_RNA (1)...(19): siRNA sense strand
ugggaagcauaucuuacaa

SEQ ID NO: 2041408 - RNA, 19 nt, Homo sapiens
  misc_RNA (1)...(19): siRNA sense strand
aauggaagaccgagaaauc

SEQ ID NO: 2041409 - RNA, 19 nt, Homo sapiens
  misc_RNA (1)...(19): siRNA sense strand
uguaugagauugaaaaugg

SEQ ID NO: 2041410 - RNA, 19 nt, Homo sapiens
  misc_RNA (1)...(19): siRNA sense strand
gagcgaggacucugaagcu

SEQ ID NO: 2041411 - RNA, 19 nt, Homo sapiens
  misc_RNA (1)...(19): siRNA sense strand
ucucaauucaucaaacuug

SEQ ID NO: 2041412 - RNA, 19 nt, Homo sapiens
  misc_RNA (1)...(19): siRNA sense strand
ggugagauaauggauaauc

SEQ ID NO: 2041413 - RNA, 19 nt, Homo sapiens
  misc_RNA (1)...(19): siRNA sense strand
ccucgaaacacugauaaug

SEQ ID NO: 2041414 - RNA, 19 nt, Homo sapiens
  misc_RNA (1)...(19): siRNA sense strand
aaccagugcugagaagaga

SEQ ID NO: 2041415 - RNA, 19 nt, Homo sapiens
  misc_RNA (1)...(19): siRNA sense strand
gggaagcauaucuuacaau

SEQ ID NO: 2041416 - RNA, 19 nt, Homo sapiens
  misc_RNA (1)...(19): siRNA sense strand
gauagcaguggaaauaaaa

SEQ ID NO: 2041417 - RNA, 19 nt, Homo sapiens
  misc_RNA (1)...(19): siRNA sense strand
cagucacucucaauucauc

SEQ ID NO: 2041418 - RNA, 19 nt, Homo sapiens
  misc_RNA (1)...(19): siRNA sense strand
caaacuuguggcugagaaa

SEQ ID NO: 2041419 - RNA, 19 nt, Homo sapiens
  misc_RNA (1)...(19): siRNA sense strand
ugagagaaagagcaagaau

SEQ ID NO: 2041420 - RNA, 19 nt, Homo sapiens
  misc_RNA (1)...(19): siRNA sense strand
acaggugagauaauggaua

SEQ ID NO: 2041421 - RNA, 19 nt, Homo sapiens
  misc_RNA (1)...(19): siRNA sense strand
gccaagaccaccuagugau

SEQ ID NO: 2041422 - RNA, 19 nt, Homo sapiens
  misc_RNA (1)...(19): siRNA sense strand
gccagguuccuaaugagaa

SEQ ID NO: 2041423 - RNA, 19 nt, Homo sapiens
  misc_RNA (1)...(19): siRNA sense strand
ccaaaucacgcugcagauc

SEQ ID NO: 2041424 - RNA, 19 nt, Homo sapiens
  misc_RNA (1)...(19): siRNA sense strand
gggcauguugagagaaaga

SEQ ID NO: 2041425 - RNA, 19 nt, Homo sapiens
  misc_RNA (1)...(19): siRNA sense strand
cugcagaucccauuauaac

SEQ ID NO: 2041426 - RNA, 19 nt, Homo sapiens
  misc_RNA (1)...(19): siRNA sense strand
cgaagccagguuccuaaug

SEQ ID NO: 2041427 - RNA, 19 nt, Homo sapiens
  misc_RNA (1)...(19): siRNA sense strand
acacugauaaugcauggau

SEQ ID NO: 2041428 - RNA, 19 nt, Homo sapiens
  misc_RNA (1)...(19): siRNA sense strand
agaagaaacuggcuacaaa

SEQ ID NO: 2041429 - RNA, 19 nt, Homo sapiens
  misc_RNA (1)...(19): siRNA sense strand
agagaacacuucacuauga

SEQ ID NO: 2041430 - RNA, 19 nt, Homo sapiens
  misc_RNA (1)...(19): siRNA sense strand
ggaguuaauuucagaagga

SEQ ID NO: 2041431 - RNA, 19 nt, Homo sapiens
  misc_RNA (1)...(19): siRNA sense strand
gcagagaacacuucacuau

SEQ ID NO: 2041432 - RNA, 19 nt, Homo sapiens
  misc_RNA (1)...(19): siRNA sense strand
ggcaaacaguauaucauuu

SEQ ID NO: 2041433 - RNA, 19 nt, Homo sapiens
  misc_RNA (1)...(19): siRNA sense strand
gcaaacaguauaucauuuc

SEQ ID NO: 2041434 - RNA, 19 nt, Homo sapiens
  misc_RNA (1)...(19): siRNA sense strand
gagacuugaugcucuggua

SEQ ID NO: 2041435 - RNA, 19 nt, Homo sapiens
  misc_RNA (1)...(19): siRNA sense strand
cagaggaguuaauuucaga

SEQ ID NO: 2041436 - RNA, 19 nt, Homo sapiens
  misc_RNA (1)...(19): siRNA sense strand
cagaauggcaaacaguaua

SEQ ID NO: 2041437 - RNA, 19 nt, Homo sapiens
  misc_RNA (1)...(19): siRNA sense strand
gaacuugggaaucagugaa

SEQ ID NO: 2041438 - RNA, 19 nt, Homo sapiens
  misc_RNA (1)...(19): siRNA sense strand
gcacugaaacaugcaaaug

SEQ ID NO: 2041439 - RNA, 19 nt, Homo sapiens
  misc_RNA (1)...(19): siRNA sense strand
ccaacggaaucuucucaga

SEQ ID NO: 2041440 - RNA, 19 nt, Homo sapiens
  misc_RNA (1)...(19): siRNA sense strand
gagaacacuucacuaugag

SEQ ID NO: 2041441 - RNA, 19 nt, Homo sapiens
  misc_RNA (1)...(19): siRNA sense strand
ggauggagaguuuguggaa

SEQ ID NO: 2041442 - RNA, 19 nt, Homo sapiens
  misc_RNA (1)...(19): siRNA sense strand
gaagaaacuggcuacaaag

SEQ ID NO: 2041443 - RNA, 19 nt, Homo sapiens
  misc_RNA (1)...(19): siRNA sense strand
gacccaggcuugucaaacu

SEQ ID NO: 2041444 - RNA, 19 nt, Homo sapiens
  misc_RNA (1)...(19): siRNA sense strand
ucugguagcugaagaacau

SEQ ID NO: 2041445 - RNA, 19 nt, Homo sapiens
  misc_RNA (1)...(19): siRNA sense strand
uccgggagcuugaagaaga

SEQ ID NO: 2041446 - RNA, 19 nt, Homo sapiens
  misc_RNA (1)...(19): siRNA sense strand
gaguuaauuucagaaggaa

SEQ ID NO: 2041447 - RNA, 19 nt, Homo sapiens
  misc_RNA (1)...(19): siRNA sense strand
acauggauccuacugguaa

SEQ ID NO: 2041448 - RNA, 19 nt, Homo sapiens
  misc_RNA (1)...(19): siRNA sense strand
uaucauuucagaggaguua

SEQ ID NO: 2041449 - RNA, 19 nt, Homo sapiens
  misc_RNA (1)...(19): siRNA sense strand
uggcaaacaguauaucauu

SEQ ID NO: 2041450 - RNA, 19 nt, Homo sapiens
  misc_RNA (1)...(19): siRNA sense strand
gaaacguacaaccaggaaa

SEQ ID NO: 2041451 - RNA, 19 nt, Homo sapiens
  misc_RNA (1)...(19): siRNA sense strand
gcucuagcacugaaacaug

SEQ ID NO: 2041452 - RNA, 19 nt, Homo sapiens
  misc_RNA (1)...(19): siRNA sense strand
uuguggaagucauuucuuu

SEQ ID NO: 2041453 - RNA, 19 nt, Homo sapiens
  misc_RNA (1)...(19): siRNA sense strand
cagagaacacuucacuaug

SEQ ID NO: 2041454 - RNA, 19 nt, Homo sapiens
  misc_RNA (1)...(19): siRNA sense strand
aaacaguuccgaccaccaa

SEQ ID NO: 2041455 - RNA, 19 nt, Homo sapiens
  misc_RNA (1)...(19): siRNA sense strand
gccaagaaccaacggaauc

SEQ ID NO: 2041456 - RNA, 19 nt, Homo sapiens
  misc_RNA (1)...(19): siRNA sense strand
guaucguucuggugaaaca

SEQ ID NO: 2041457 - RNA, 19 nt, Homo sapiens
  misc_RNA (1)...(19): siRNA sense strand
aacuagaacuugggaauca

SEQ ID NO: 2041458 - RNA, 19 nt, Homo sapiens
  misc_RNA (1)...(19): siRNA sense strand
ucagaggaguuaauuucag

SEQ ID NO: 2041459 - RNA, 19 nt, Homo sapiens
  misc_RNA (1)...(19): siRNA sense strand
cauggauccuacugguaaa

SEQ ID NO: 2041460 - RNA, 19 nt, Homo sapiens
  misc_RNA (1)...(19): siRNA sense strand
ggucuauuccuacgcucua

SEQ ID NO: 2041461 - RNA, 19 nt, Homo sapiens
  misc_RNA (1)...(19): siRNA sense strand
uguggaagucauuucuuua

SEQ ID NO: 2041462 - RNA, 19 nt, Homo sapiens
  misc_RNA (1)...(19): siRNA sense strand
ccaggcuugucaaacugua

SEQ ID NO: 2041463 - RNA, 19 nt, Homo sapiens
  misc_RNA (1)...(19): siRNA sense strand
acgcaaggccgaagccaaa

SEQ ID NO: 2041464 - RNA, 19 nt, Homo sapiens
  misc_RNA (1)...(19): siRNA sense strand
gccaggggauggagaguuu

SEQ ID NO: 2041465 - RNA, 19 nt, Homo sapiens
  misc_RNA (1)...(19): siRNA sense strand
guguaucguucuggugaaa

SEQ ID NO: 2041466 - RNA, 19 nt, Homo sapiens
  misc_RNA (1)...(19): siRNA sense strand
gagaguuuguggaagucau

SEQ ID NO: 2041467 - RNA, 19 nt, Homo sapiens
  misc_RNA (1)...(19): siRNA sense strand
cuauacacaucgugacagu

SEQ ID NO: 2041468 - RNA, 19 nt, Homo sapiens
  misc_RNA (1)...(19): siRNA sense strand
uuucagaggaguuaauuuc

SEQ ID NO: 2041469 - RNA, 19 nt, Homo sapiens
  misc_RNA (1)...(19): siRNA sense strand
aaacguacaaccaggaaag

SEQ ID NO: 2041470 - RNA, 19 nt, Homo sapiens
  misc_RNA (1)...(19): siRNA sense strand
ucagaauggcaaacaguau

SEQ ID NO: 2041471 - RNA, 19 nt, Homo sapiens
  misc_RNA (1)...(19): siRNA sense strand
ccgggagcuugaagaagaa

SEQ ID NO: 2041472 - RNA, 19 nt, Homo sapiens
  misc_RNA (1)...(19): siRNA sense strand
acgccagggucuauuccua

SEQ ID NO: 2041473 - RNA, 19 nt, Homo sapiens
  misc_RNA (1)...(19): siRNA sense strand
gaagaagaaacuggcuaca

SEQ ID NO: 2041474 - RNA, 19 nt, Homo sapiens
  misc_RNA (1)...(19): siRNA sense strand
aagaagaaacuggcuacaa

SEQ ID NO: 2041475 - RNA, 19 nt, Homo sapiens
  misc_RNA (1)...(19): siRNA sense strand
agaauggcaaacaguauau

SEQ ID NO: 2041476 - RNA, 19 nt, Homo sapiens
  misc_RNA (1)...(19): siRNA sense strand
ggaaucagugaaacguaca

SEQ ID NO: 2041477 - RNA, 19 nt, Homo sapiens
  misc_RNA (1)...(19): siRNA sense strand
ugaaacguacaaccaggaa

SEQ ID NO: 2041478 - RNA, 19 nt, Homo sapiens
  misc_RNA (1)...(19): siRNA sense strand
gaaccaacggaaucuucuc

SEQ ID NO: 2041479 - RNA, 19 nt, Homo sapiens
  misc_RNA (1)...(19): siRNA sense strand
cugaagaacaucucacagu

SEQ ID NO: 2041480 - RNA, 19 nt, Homo sapiens
  misc_RNA (1)...(19): siRNA sense strand
gggcuacugcauagaguuc

SEQ ID NO: 2041481 - RNA, 19 nt, Homo sapiens
  misc_RNA (1)...(19): siRNA sense strand
ucagugaaacguacaacca

SEQ ID NO: 2041482 - RNA, 19 nt, Homo sapiens
  misc_RNA (1)...(19): siRNA sense strand
ccuacgcucuagcacugaa

SEQ ID NO: 2041483 - RNA, 19 nt, Homo sapiens
  misc_RNA (1)...(19): siRNA sense strand
guggaagucauuucuuuac

SEQ ID NO: 2041484 - RNA, 19 nt, Homo sapiens
  misc_RNA (1)...(19): siRNA sense strand
cauagaugauggugaaacc

SEQ ID NO: 2041485 - RNA, 19 nt, Homo sapiens
  misc_RNA (1)...(19): siRNA sense strand
gaagaaugcuuaagaugug

SEQ ID NO: 2041486 - RNA, 19 nt, Homo sapiens
  misc_RNA (1)...(19): siRNA sense strand
ggaagaaugcuuaagaugu

SEQ ID NO: 2041487 - RNA, 19 nt, Homo sapiens
  misc_RNA (1)...(19): siRNA sense strand
gaacugccagagaauuaua

SEQ ID NO: 2041488 - RNA, 19 nt, Homo sapiens
  misc_RNA (1)...(19): siRNA sense strand
uauaucaucugccgccuaa

SEQ ID NO: 2041489 - RNA, 19 nt, Homo sapiens
  misc_RNA (1)...(19): siRNA sense strand
ccauauucauucaccauaa

SEQ ID NO: 2041490 - RNA, 19 nt, Homo sapiens
  misc_RNA (1)...(19): siRNA sense strand
auaaggaacugccagagaa

SEQ ID NO: 2041491 - RNA, 19 nt, Homo sapiens
  misc_RNA (1)...(19): siRNA sense strand
gagaagggcccagcagauu

SEQ ID NO: 2041492 - RNA, 19 nt, Homo sapiens
  misc_RNA (1)...(19): siRNA sense strand
gaagguagaacagcuguau

SEQ ID NO: 2041493 - RNA, 19 nt, Homo sapiens
  misc_RNA (1)...(19): siRNA sense strand
cuccaaagccgauuuauug

SEQ ID NO: 2041494 - RNA, 19 nt, Homo sapiens
  misc_RNA (1)...(19): siRNA sense strand
ugaagagacugguauaaaa

SEQ ID NO: 2041495 - RNA, 19 nt, Homo sapiens
  misc_RNA (1)...(19): siRNA sense strand
ggagcuguauuugaugaaa

SEQ ID NO: 2041496 - RNA, 19 nt, Homo sapiens
  misc_RNA (1)...(19): siRNA sense strand
caauggcgaucagaaggua

SEQ ID NO: 2041497 - RNA, 19 nt, Homo sapiens
  misc_RNA (1)...(19): siRNA sense strand
cuaaagccauauucauuca

SEQ ID NO: 2041498 - RNA, 19 nt, Homo sapiens
  misc_RNA (1)...(19): siRNA sense strand
ucaaugaccuggcgaagac

SEQ ID NO: 2041499 - RNA, 19 nt, Homo sapiens
  misc_RNA (1)...(19): siRNA sense strand
acacaaauccuggagcuuu

SEQ ID NO: 2041500 - RNA, 19 nt, Homo sapiens
  misc_RNA (1)...(19): siRNA sense strand
ccaggaagaaugcuuaaga

SEQ ID NO: 2041501 - RNA, 19 nt, Homo sapiens
  misc_RNA (1)...(19): siRNA sense strand
caggaagaaugcuuaagau

SEQ ID NO: 2041502 - RNA, 19 nt, Homo sapiens
  misc_RNA (1)...(19): siRNA sense strand
caggagcuguauuugauga

SEQ ID NO: 2041503 - RNA, 19 nt, Homo sapiens
  misc_RNA (1)...(19): siRNA sense strand
agaagggcccagcagauua

SEQ ID NO: 2041504 - RNA, 19 nt, Homo sapiens
  misc_RNA (1)...(19): siRNA sense strand
gccuaaagccauauucauu

SEQ ID NO: 2041505 - RNA, 19 nt, Homo sapiens
  misc_RNA (1)...(19): siRNA sense strand
ggauaugcuucacaucaag

SEQ ID NO: 2041506 - RNA, 19 nt, Homo sapiens
  misc_RNA (1)...(19): siRNA sense strand
gaaaauacaacucccauca

SEQ ID NO: 2041507 - RNA, 19 nt, Homo sapiens
  misc_RNA (1)...(19): siRNA sense strand
ugcaggagcuguauuugau

SEQ ID NO: 2041508 - RNA, 19 nt, Homo sapiens
  misc_RNA (1)...(19): siRNA sense strand
ugaccugacuguggaagaa

SEQ ID NO: 2041509 - RNA, 19 nt, Homo sapiens
  misc_RNA (1)...(19): siRNA sense strand
agacacagcgguucgagaa

SEQ ID NO: 2041510 - RNA, 19 nt, Homo sapiens
  misc_RNA (1)...(19): siRNA sense strand
guacagcaauggcgaucag

SEQ ID NO: 2041511 - RNA, 19 nt, Homo sapiens
  misc_RNA (1)...(19): siRNA sense strand
uugcuaggcugcugcugua

SEQ ID NO: 2041512 - RNA, 19 nt, Homo sapiens
  misc_RNA (1)...(19): siRNA sense strand
gcacauucccauccuccaa

SEQ ID NO: 2041513 - RNA, 19 nt, Homo sapiens
  misc_RNA (1)...(19): siRNA sense strand
caggauaugcuucacauca

SEQ ID NO: 2041514 - RNA, 19 nt, Homo sapiens
  misc_RNA (1)...(19): siRNA sense strand
aaauacugguuguacaaga

SEQ ID NO: 2041515 - RNA, 19 nt, Homo sapiens
  misc_RNA (1)...(19): siRNA sense strand
gaagggcccagcagauuac

SEQ ID NO: 2041516 - RNA, 19 nt, Homo sapiens
  misc_RNA (1)...(19): siRNA sense strand
gagcuguauuugaugaaag

SEQ ID NO: 2041517 - RNA, 19 nt, Homo sapiens
  misc_RNA (1)...(19): siRNA sense strand
cauaaggaacugccagaga

SEQ ID NO: 2041518 - RNA, 19 nt, Homo sapiens
  misc_RNA (1)...(19): siRNA sense strand
ccuaaagccauauucauuc

SEQ ID NO: 2041519 - RNA, 19 nt, Homo sapiens
  misc_RNA (1)...(19): siRNA sense strand
ggaacugccagagaauuau

SEQ ID NO: 2041520 - RNA, 19 nt, Homo sapiens
  misc_RNA (1)...(19): siRNA sense strand
aggaacugccagagaauua

SEQ ID NO: 2041521 - RNA, 19 nt, Homo sapiens
  misc_RNA (1)...(19): siRNA sense strand
gaagagacugguauaaaau

SEQ ID NO: 2041522 - RNA, 19 nt, Homo sapiens
  misc_RNA (1)...(19): siRNA sense strand
cagcagauuaccaggauau

SEQ ID NO: 2041523 - RNA, 19 nt, Homo sapiens
  misc_RNA (1)...(19): siRNA sense strand
acacagcgguucgagaagu

SEQ ID NO: 2041524 - RNA, 19 nt, Homo sapiens
  misc_RNA (1)...(19): siRNA sense strand
aggauaugcuucacaucaa

SEQ ID NO: 2041525 - RNA, 19 nt, Homo sapiens
  misc_RNA (1)...(19): siRNA sense strand
gccauauucauucaccaua

SEQ ID NO: 2041526 - RNA, 19 nt, Homo sapiens
  misc_RNA (1)...(19): siRNA sense strand
ccagcagauuaccaggaua

SEQ ID NO: 2041527 - RNA, 19 nt, Homo sapiens
  misc_RNA (1)...(19): siRNA sense strand
gcaauggcgaucagaaggu

SEQ ID NO: 2041528 - RNA, 19 nt, Homo sapiens
  misc_RNA (1)...(19): siRNA sense strand
guuguacaagaucgaaaua

SEQ ID NO: 2041529 - RNA, 19 nt, Homo sapiens
  misc_RNA (1)...(19): siRNA sense strand
uugaagagacugguauaaa

SEQ ID NO: 2041530 - RNA, 19 nt, Homo sapiens
  misc_RNA (1)...(19): siRNA sense strand
cacagcgguucgagaaguu

SEQ ID NO: 2041531 - RNA, 19 nt, Homo sapiens
  misc_RNA (1)...(19): siRNA sense strand
aauacugguuguacaagau

SEQ ID NO: 2041532 - RNA, 19 nt, Homo sapiens
  misc_RNA (1)...(19): siRNA sense strand
gggaagucagauauguaua

SEQ ID NO: 2041533 - RNA, 19 nt, Homo sapiens
  misc_RNA (1)...(19): siRNA sense strand
ucccugggcuucugcuuuc

SEQ ID NO: 2041534 - RNA, 19 nt, Homo sapiens
  misc_RNA (1)...(19): siRNA sense strand
ccuccaaagccgauuuauu

SEQ ID NO: 2041535 - RNA, 19 nt, Homo sapiens
  misc_RNA (1)...(19): siRNA sense strand
guggauggaucucaaugac

SEQ ID NO: 2041536 - RNA, 19 nt, Homo sapiens
  misc_RNA (1)...(19): siRNA sense strand
gcaggagcuguauuugaug

SEQ ID NO: 2041537 - RNA, 19 nt, Homo sapiens
  misc_RNA (1)...(19): siRNA sense strand
ucacaucaaguaggaguug

SEQ ID NO: 2041538 - RNA, 19 nt, Homo sapiens
  misc_RNA (1)...(19): siRNA sense strand
cuaggcugcugcuguaugg

SEQ ID NO: 2041539 - RNA, 19 nt, Homo sapiens
  misc_RNA (1)...(19): siRNA sense strand
gcgaucagaagguagaaca

SEQ ID NO: 2041540 - RNA, 19 nt, Homo sapiens
  misc_RNA (1)...(19): siRNA sense strand
gaagaagauauuggagaca

SEQ ID NO: 2041541 - RNA, 19 nt, Homo sapiens
  misc_RNA (1)...(19): siRNA sense strand
aagaaugcuuaagauguga

SEQ ID NO: 2041542 - RNA, 19 nt, Homo sapiens
  misc_RNA (1)...(19): siRNA sense strand
uaucaucugccgccuaaag

SEQ ID NO: 2041543 - RNA, 19 nt, Homo sapiens
  misc_RNA (1)...(19): siRNA sense strand
cccagcagauuaccaggau

SEQ ID NO: 2041544 - RNA, 19 nt, Homo sapiens
  misc_RNA (1)...(19): siRNA sense strand
gaugugaguggauggaucu

SEQ ID NO: 2041545 - RNA, 19 nt, Homo sapiens
  misc_RNA (1)...(19): siRNA sense strand
ugggaagucagauauguau

SEQ ID NO: 2041546 - RNA, 19 nt, Homo sapiens
  misc_RNA (1)...(19): siRNA sense strand
acagagaaggguuugacaa

SEQ ID NO: 2041547 - RNA, 19 nt, Homo sapiens
  misc_RNA (1)...(19): siRNA sense strand
ggaguugcaggagcuguau

SEQ ID NO: 2041548 - RNA, 19 nt, Homo sapiens
  misc_RNA (1)...(19): siRNA sense strand
uaaggaacugccagagaau

SEQ ID NO: 2041549 - RNA, 19 nt, Homo sapiens
  misc_RNA (1)...(19): siRNA sense strand
cacaaauccuggagcuuuu

SEQ ID NO: 2041550 - RNA, 19 nt, Homo sapiens
  misc_RNA (1)...(19): siRNA sense strand
ggcaacagcacacaaaucc

SEQ ID NO: 2041551 - RNA, 19 nt, Homo sapiens
  misc_RNA (1)...(19): siRNA sense strand
guacagagaaggguuugac

SEQ ID NO: 2041552 - RNA, 19 nt, Homo sapiens
  misc_RNA (1)...(19): siRNA sense strand
gcuaggcugcugcuguaug

SEQ ID NO: 2041553 - RNA, 19 nt, Homo sapiens
  misc_RNA (1)...(19): siRNA sense strand
gcuguauggcugcacauuc

SEQ ID NO: 2041554 - RNA, 19 nt, Homo sapiens
  misc_RNA (1)...(19): siRNA sense strand
cacauucccauccuccaaa

SEQ ID NO: 2041555 - RNA, 19 nt, Homo sapiens
  misc_RNA (1)...(19): siRNA sense strand
agaagauauuggagacaca

SEQ ID NO: 2041556 - RNA, 19 nt, Homo sapiens
  misc_RNA (1)...(19): siRNA sense strand
gaagaaugcuuaagaugug

SEQ ID NO: 2041557 - RNA, 19 nt, Homo sapiens
  misc_RNA (1)...(19): siRNA sense strand
ggaagaaugcuuaagaugu

SEQ ID NO: 2041558 - RNA, 19 nt, Homo sapiens
  misc_RNA (1)...(19): siRNA sense strand
gaacugccagagaauuaua

SEQ ID NO: 2041559 - RNA, 19 nt, Homo sapiens
  misc_RNA (1)...(19): siRNA sense strand
uauaucaucugccgccuaa

SEQ ID NO: 2041560 - RNA, 19 nt, Homo sapiens
  misc_RNA (1)...(19): siRNA sense strand
ccauauucauucaccauaa

SEQ ID NO: 2041561 - RNA, 19 nt, Homo sapiens
  misc_RNA (1)...(19): siRNA sense strand
auaaggaacugccagagaa

SEQ ID NO: 2041562 - RNA, 19 nt, Homo sapiens
  misc_RNA (1)...(19): siRNA sense strand
ugaagagacugguauaaaa

SEQ ID NO: 2041563 - RNA, 19 nt, Homo sapiens
  misc_RNA (1)...(19): siRNA sense strand
cuaaagccauauucauuca

SEQ ID NO: 2041564 - RNA, 19 nt, Homo sapiens
  misc_RNA (1)...(19): siRNA sense strand
ucaaugaccuggcgaagac

SEQ ID NO: 2041565 - RNA, 19 nt, Homo sapiens
  misc_RNA (1)...(19): siRNA sense strand
acacaaauccuggagcuuu

SEQ ID NO: 2041566 - RNA, 19 nt, Homo sapiens
  misc_RNA (1)...(19): siRNA sense strand
ccaggaagaaugcuuaaga

SEQ ID NO: 2041567 - RNA, 19 nt, Homo sapiens
  misc_RNA (1)...(19): siRNA sense strand
caggaagaaugcuuaagau

SEQ ID NO: 2041568 - RNA, 19 nt, Homo sapiens
  misc_RNA (1)...(19): siRNA sense strand
gccuaaagccauauucauu

SEQ ID NO: 2041569 - RNA, 19 nt, Homo sapiens
  misc_RNA (1)...(19): siRNA sense strand
gaaaauacaacucccauca

SEQ ID NO: 2041570 - RNA, 19 nt, Homo sapiens
  misc_RNA (1)...(19): siRNA sense strand
ugaccugacuguggaagaa

SEQ ID NO: 2041571 - RNA, 19 nt, Homo sapiens
  misc_RNA (1)...(19): siRNA sense strand
agacacagcgguucgagaa

SEQ ID NO: 2041572 - RNA, 19 nt, Homo sapiens
  misc_RNA (1)...(19): siRNA sense strand
uugcuaggcugcugcugua

SEQ ID NO: 2041573 - RNA, 19 nt, Homo sapiens
  misc_RNA (1)...(19): siRNA sense strand
cauaaggaacugccagaga

SEQ ID NO: 2041574 - RNA, 19 nt, Homo sapiens
  misc_RNA (1)...(19): siRNA sense strand
ccuaaagccauauucauuc

SEQ ID NO: 2041575 - RNA, 19 nt, Homo sapiens
  misc_RNA (1)...(19): siRNA sense strand
ggaacugccagagaauuau

SEQ ID NO: 2041576 - RNA, 19 nt, Homo sapiens
  misc_RNA (1)...(19): siRNA sense strand
aggaacugccagagaauua

SEQ ID NO: 2041577 - RNA, 19 nt, Homo sapiens
  misc_RNA (1)...(19): siRNA sense strand
gaagagacugguauaaaau

SEQ ID NO: 2041578 - RNA, 19 nt, Homo sapiens
  misc_RNA (1)...(19): siRNA sense strand
acacagcgguucgagaagu

SEQ ID NO: 2041579 - RNA, 19 nt, Homo sapiens
  misc_RNA (1)...(19): siRNA sense strand
gccauauucauucaccaua

SEQ ID NO: 2041580 - RNA, 19 nt, Homo sapiens
  misc_RNA (1)...(19): siRNA sense strand
cacagcgguucgagaaguu

SEQ ID NO: 2041581 - RNA, 19 nt, Homo sapiens
  misc_RNA (1)...(19): siRNA sense strand
uugaagagacugguauaaa

SEQ ID NO: 2041582 - RNA, 19 nt, Homo sapiens
  misc_RNA (1)...(19): siRNA sense strand
gggaagucagauauguaua

SEQ ID NO: 2041583 - RNA, 19 nt, Homo sapiens
  misc_RNA (1)...(19): siRNA sense strand
guggauggaucucaaugac

SEQ ID NO: 2041584 - RNA, 19 nt, Homo sapiens
  misc_RNA (1)...(19): siRNA sense strand
gaagaagauauuggagaca

SEQ ID NO: 2041585 - RNA, 19 nt, Homo sapiens
  misc_RNA (1)...(19): siRNA sense strand
cuaggcugcugcuguaugg

SEQ ID NO: 2041586 - RNA, 19 nt, Homo sapiens
  misc_RNA (1)...(19): siRNA sense strand
aagaaugcuuaagauguga

SEQ ID NO: 2041587 - RNA, 19 nt, Homo sapiens
  misc_RNA (1)...(19): siRNA sense strand
uaucaucugccgccuaaag

SEQ ID NO: 2041588 - RNA, 19 nt, Homo sapiens
  misc_RNA (1)...(19): siRNA sense strand
gaugugaguggauggaucu

SEQ ID NO: 2041589 - RNA, 19 nt, Homo sapiens
  misc_RNA (1)...(19): siRNA sense strand
ugggaagucagauauguau

SEQ ID NO: 2041590 - RNA, 19 nt, Homo sapiens
  misc_RNA (1)...(19): siRNA sense strand
acagagaaggguuugacaa

SEQ ID NO: 2041591 - RNA, 19 nt, Homo sapiens
  misc_RNA (1)...(19): siRNA sense strand
cacaaauccuggagcuuuu

SEQ ID NO: 2041592 - RNA, 19 nt, Homo sapiens
  misc_RNA (1)...(19): siRNA sense strand
uaaggaacugccagagaau

SEQ ID NO: 2041593 - RNA, 19 nt, Homo sapiens
  misc_RNA (1)...(19): siRNA sense strand
gcuaggcugcugcuguaug

SEQ ID NO: 2041594 - RNA, 19 nt, Homo sapiens
  misc_RNA (1)...(19): siRNA sense strand
ggcaacagcacacaaaucc

SEQ ID NO: 2041595 - RNA, 19 nt, Homo sapiens
  misc_RNA (1)...(19): siRNA sense strand
guacagagaaggguuugac

SEQ ID NO: 2041596 - RNA, 19 nt, Homo sapiens
  misc_RNA (1)...(19): siRNA sense strand
agaagauauuggagacaca

SEQ ID NO: 2041597 - RNA, 19 nt, Homo sapiens
  misc_RNA (1)...(19): siRNA sense strand
gagcugauccaguuuauua

SEQ ID NO: 2041598 - RNA, 19 nt, Homo sapiens
  misc_RNA (1)...(19): siRNA sense strand
ggcaaacacugcuaaauuu

SEQ ID NO: 2041599 - RNA, 19 nt, Homo sapiens
  misc_RNA (1)...(19): siRNA sense strand
ggauggaucuguugaaaug

SEQ ID NO: 2041600 - RNA, 19 nt, Homo sapiens
  misc_RNA (1)...(19): siRNA sense strand
gaacagauggcauaagaaa

SEQ ID NO: 2041601 - RNA, 19 nt, Homo sapiens
  misc_RNA (1)...(19): siRNA sense strand
ucaaugagcugauccaguu

SEQ ID NO: 2041602 - RNA, 19 nt, Homo sapiens
  misc_RNA (1)...(19): siRNA sense strand
gcacuuggaagauuuauuu

SEQ ID NO: 2041603 - RNA, 19 nt, Homo sapiens
  misc_RNA (1)...(19): siRNA sense strand
ggaaagaagcauuggauuu

SEQ ID NO: 2041604 - RNA, 19 nt, Homo sapiens
  misc_RNA (1)...(19): siRNA sense strand
aaacaaagcuggauuuacu

SEQ ID NO: 2041605 - RNA, 19 nt, Homo sapiens
  misc_RNA (1)...(19): siRNA sense strand
gaaagauccugauggcuau

SEQ ID NO: 2041606 - RNA, 19 nt, Homo sapiens
  misc_RNA (1)...(19): siRNA sense strand
gcaaacacugcuaaauuua

SEQ ID NO: 2041607 - RNA, 19 nt, Homo sapiens
  misc_RNA (1)...(19): siRNA sense strand
caauggagauucaacagaa

SEQ ID NO: 2041608 - RNA, 19 nt, Homo sapiens
  misc_RNA (1)...(19): siRNA sense strand
uaaaccagaugcaauauca

SEQ ID NO: 2041609 - RNA, 19 nt, Homo sapiens
  misc_RNA (1)...(19): siRNA sense strand
ccagagaaauggaguuguu

SEQ ID NO: 2041610 - RNA, 19 nt, Homo sapiens
  misc_RNA (1)...(19): siRNA sense strand
gaauaaugcuacaaagaca

SEQ ID NO: 2041611 - RNA, 19 nt, Homo sapiens
  misc_RNA (1)...(19): siRNA sense strand
gagaugaugcuauauguga

SEQ ID NO: 2041612 - RNA, 19 nt, Homo sapiens
  misc_RNA (1)...(19): siRNA sense strand
aaacuaagauccagaaugc

SEQ ID NO: 2041613 - RNA, 19 nt, Homo sapiens
  misc_RNA (1)...(19): siRNA sense strand
acaaagacauuucgagaau

SEQ ID NO: 2041614 - RNA, 19 nt, Homo sapiens
  misc_RNA (1)...(19): siRNA sense strand
gaaggacuguugggaaaga

SEQ ID NO: 2041615 - RNA, 19 nt, Homo sapiens
  misc_RNA (1)...(19): siRNA sense strand
gcaacaaagugaaugucuu

SEQ ID NO: 2041616 - RNA, 19 nt, Homo sapiens
  misc_RNA (1)...(19): siRNA sense strand
ucagagcaaucuuugguaa

SEQ ID NO: 2041617 - RNA, 19 nt, Homo sapiens
  misc_RNA (1)...(19): siRNA sense strand
ugaaaugcaugauguaaag

SEQ ID NO: 2041618 - RNA, 19 nt, Homo sapiens
  misc_RNA (1)...(19): siRNA sense strand
gugaaggacuguugggaaa

SEQ ID NO: 2041619 - RNA, 19 nt, Homo sapiens
  misc_RNA (1)...(19): siRNA sense strand
aucaaaggcuggagaaaua

SEQ ID NO: 2041620 - RNA, 19 nt, Homo sapiens
  misc_RNA (1)...(19): siRNA sense strand
ccagaaugcuguucacugu

SEQ ID NO: 2041621 - RNA, 19 nt, Homo sapiens
  misc_RNA (1)...(19): siRNA sense strand
ccaaaugcuucacuucuuc

SEQ ID NO: 2041622 - RNA, 19 nt, Homo sapiens
  misc_RNA (1)...(19): siRNA sense strand
gaggaauucuaugaaguuu

SEQ ID NO: 2041623 - RNA, 19 nt, Homo sapiens
  misc_RNA (1)...(19): siRNA sense strand
uggaacagauggcauaaga

SEQ ID NO: 2041624 - RNA, 19 nt, Homo sapiens
  misc_RNA (1)...(19): siRNA sense strand
gaaagaagcauuggauuuu

SEQ ID NO: 2041625 - RNA, 19 nt, Homo sapiens
  misc_RNA (1)...(19): siRNA sense strand
uaaagcggaccaaauauga

SEQ ID NO: 2041626 - RNA, 19 nt, Homo sapiens
  misc_RNA (1)...(19): siRNA sense strand
ggguuaauguugaggaauu

SEQ ID NO: 2041627 - RNA, 19 nt, Homo sapiens
  misc_RNA (1)...(19): siRNA sense strand
cgacaacugguauuaauug

SEQ ID NO: 2041628 - RNA, 19 nt, Homo sapiens
  misc_RNA (1)...(19): siRNA sense strand
caaagacauuucgagaauu

SEQ ID NO: 2041629 - RNA, 19 nt, Homo sapiens
  misc_RNA (1)...(19): siRNA sense strand
caacugguauuaauugacu

SEQ ID NO: 2041630 - RNA, 19 nt, Homo sapiens
  misc_RNA (1)...(19): siRNA sense strand
cuaugcagauguucaauau

SEQ ID NO: 2041631 - RNA, 19 nt, Homo sapiens
  misc_RNA (1)...(19): siRNA sense strand
gacaacugguauuaauuga

SEQ ID NO: 2041632 - RNA, 19 nt, Homo sapiens
  misc_RNA (1)...(19): siRNA sense strand
cggcaaacacugcuaaauu

SEQ ID NO: 2041633 - RNA, 19 nt, Homo sapiens
  misc_RNA (1)...(19): siRNA sense strand
ucauguagaucaccaguca

SEQ ID NO: 2041634 - RNA, 19 nt, Homo sapiens
  misc_RNA (1)...(19): siRNA sense strand
caauauggaucggguuaau

SEQ ID NO: 2041635 - RNA, 19 nt, Homo sapiens
  misc_RNA (1)...(19): siRNA sense strand
aauuguaccuguugcauug

SEQ ID NO: 2041636 - RNA, 19 nt, Homo sapiens
  misc_RNA (1)...(19): siRNA sense strand
gcuguucacuguacugauc

SEQ ID NO: 2041637 - RNA, 19 nt, Homo sapiens
  misc_RNA (1)...(19): siRNA sense strand
uauuacaacugguccuauu

SEQ ID NO: 2041638 - RNA, 19 nt, Homo sapiens
  misc_RNA (1)...(19): siRNA sense strand
gcuaugcagauguucaaua

SEQ ID NO: 2041639 - RNA, 19 nt, Homo sapiens
  misc_RNA (1)...(19): siRNA sense strand
gcugggaccugcaaacucu

SEQ ID NO: 2041640 - RNA, 19 nt, Homo sapiens
  misc_RNA (1)...(19): siRNA sense strand
uaagagaugaugcuauaug

SEQ ID NO: 2041641 - RNA, 19 nt, Homo sapiens
  misc_RNA (1)...(19): siRNA sense strand
gcaauggagauucaacaga

SEQ ID NO: 2041642 - RNA, 19 nt, Homo sapiens
  misc_RNA (1)...(19): siRNA sense strand
acagauggcauaagaaaug

SEQ ID NO: 2041643 - RNA, 19 nt, Homo sapiens
  misc_RNA (1)...(19): siRNA sense strand
ugaugaugcuuucaaggaa

SEQ ID NO: 2041644 - RNA, 19 nt, Homo sapiens
  misc_RNA (1)...(19): siRNA sense strand
cagaauaaugcuacaaaga

SEQ ID NO: 2041645 - RNA, 19 nt, Homo sapiens
  misc_RNA (1)...(19): siRNA sense strand
caaagcuggauuuacuaua

SEQ ID NO: 2041646 - RNA, 19 nt, Homo sapiens
  misc_RNA (1)...(19): siRNA sense strand
aagagaugaugcuauaugu

SEQ ID NO: 2041647 - RNA, 19 nt, Homo sapiens
  misc_RNA (1)...(19): siRNA sense strand
caacugguccuauuauugc

SEQ ID NO: 2041648 - RNA, 19 nt, Homo sapiens
  misc_RNA (1)...(19): siRNA sense strand
ucucagcuaugcagauguu

SEQ ID NO: 2041649 - RNA, 19 nt, Homo sapiens
  misc_RNA (1)...(19): siRNA sense strand
gagguucaauacuucuuca

SEQ ID NO: 2041650 - RNA, 19 nt, Homo sapiens
  misc_RNA (1)...(19): siRNA sense strand
aaggaguagugaccgaaua

SEQ ID NO: 2041651 - RNA, 19 nt, Homo sapiens
  misc_RNA (1)...(19): siRNA sense strand
gcauggcccugauucuuuu

SEQ ID NO: 2041652 - RNA, 19 nt, Homo sapiens
  misc_RNA (1)...(19): siRNA sense strand
aagcggaccaaauaugaua

SEQ ID NO: 2041653 - RNA, 19 nt, Homo sapiens
  misc_RNA (1)...(19): siRNA sense strand
guagugaccgaauaucaug

SEQ ID NO: 2041654 - RNA, 19 nt, Homo sapiens
  misc_RNA (1)...(19): siRNA sense strand
gaugcuauaugugaaugga

SEQ ID NO: 2041655 - RNA, 19 nt, Homo sapiens
  misc_RNA (1)...(19): siRNA sense strand
uacaacugguccuauuauu

SEQ ID NO: 2041656 - RNA, 19 nt, Homo sapiens
  misc_RNA (1)...(19): siRNA sense strand
ugaggaauucuaugaaguu

SEQ ID NO: 2041657 - RNA, 19 nt, Homo sapiens
  misc_RNA (1)...(19): siRNA sense strand
guugaggaauucuaugaag

SEQ ID NO: 2041658 - RNA, 19 nt, Homo sapiens
  misc_RNA (1)...(19): siRNA sense strand
gaguagugaccgaauauca

SEQ ID NO: 2041659 - RNA, 19 nt, Homo sapiens
  misc_RNA (1)...(19): siRNA sense strand
agaaugcuguucacuguac

SEQ ID NO: 2041660 - RNA, 19 nt, Homo sapiens
  misc_RNA (1)...(19): siRNA sense strand
uaucaaaggcuggagaaau

SEQ ID NO: 2041661 - RNA, 19 nt, Homo sapiens
  misc_RNA (1)...(19): siRNA sense strand
gaaaugcaugauguaaaga

SEQ ID NO: 2041662 - RNA, 19 nt, Homo sapiens
  misc_RNA (1)...(19): siRNA sense strand
uccaaaugcuucacuucuu

SEQ ID NO: 2041663 - RNA, 19 nt, Homo sapiens
  misc_RNA (1)...(19): siRNA sense strand
augcagauguucaauaugg

SEQ ID NO: 2041664 - RNA, 19 nt, Homo sapiens
  misc_RNA (1)...(19): siRNA sense strand
ccugauggcuauccgagau

SEQ ID NO: 2041665 - RNA, 19 nt, Homo sapiens
  misc_RNA (1)...(19): siRNA sense strand
ggaacagauggcauaagaa

SEQ ID NO: 2041666 - RNA, 19 nt, Homo sapiens
  misc_RNA (1)...(19): siRNA sense strand
ggaguggcacgcacagaug

SEQ ID NO: 2041667 - RNA, 19 nt, Homo sapiens
  misc_RNA (1)...(19): siRNA sense strand
uaaagaaucaucgcaccuu

SEQ ID NO: 2041668 - RNA, 19 nt, Homo sapiens
  misc_RNA (1)...(19): siRNA sense strand
ccauggagauuuuaagaga

SEQ ID NO: 2041669 - RNA, 19 nt, Homo sapiens
  misc_RNA (1)...(19): siRNA sense strand
uggaucggguuaauguuga

SEQ ID NO: 2041670 - RNA, 19 nt, Homo sapiens
  misc_RNA (1)...(19): siRNA sense strand
gcgcauggcccugauucuu

SEQ ID NO: 2041671 - RNA, 19 nt, Homo sapiens
  misc_RNA (1)...(19): siRNA sense strand
ucaaaggcuggagaaauaa

SEQ ID NO: 2041672 - RNA, 19 nt, Homo sapiens
  misc_RNA (1)...(19): siRNA sense strand
guguagcaauggagauuca

SEQ ID NO: 2041673 - RNA, 19 nt, Homo sapiens
  misc_RNA (1)...(19): siRNA sense strand
caaacacugcuaaauuuac

SEQ ID NO: 2041674 - RNA, 19 nt, Homo sapiens
  misc_RNA (1)...(19): siRNA sense strand
acaacugguccuauuauug

SEQ ID NO: 2041675 - RNA, 19 nt, Homo sapiens
  misc_RNA (1)...(19): siRNA sense strand
gcuggagaaauaauugaaa

SEQ ID NO: 2041676 - RNA, 19 nt, Homo sapiens
  misc_RNA (1)...(19): siRNA sense strand
guugaaaugcaugauguaa

SEQ ID NO: 2041677 - RNA, 19 nt, Homo sapiens
  misc_RNA (1)...(19): siRNA sense strand
augauaaccugcacuugga

SEQ ID NO: 2041678 - RNA, 19 nt, Homo sapiens
  misc_RNA (1)...(19): siRNA sense strand
uuaaagcggaccaaauaug

SEQ ID NO: 2041679 - RNA, 19 nt, Homo sapiens
  misc_RNA (1)...(19): siRNA sense strand
ugcuauaugugaauggaaa

SEQ ID NO: 2041680 - RNA, 19 nt, Homo sapiens
  misc_RNA (1)...(19): siRNA sense strand
cuucacuucuucgacguua

SEQ ID NO: 2041681 - RNA, 19 nt, Homo sapiens
  misc_RNA (1)...(19): siRNA sense strand
uuacaacugguccuauuau

SEQ ID NO: 2041682 - RNA, 19 nt, Homo sapiens
  misc_RNA (1)...(19): siRNA sense strand
uacaaagacauuucgagaa

SEQ ID NO: 2041683 - RNA, 19 nt, Homo sapiens
  misc_RNA (1)...(19): siRNA sense strand
acagaauaaugcuacaaag

SEQ ID NO: 2041684 - RNA, 19 nt, Homo sapiens
  misc_RNA (1)...(19): siRNA sense strand
caacagaauaaugcuacaa

SEQ ID NO: 2041685 - RNA, 19 nt, Homo sapiens
  misc_RNA (1)...(19): siRNA sense strand
cauggugacagaaauguau

SEQ ID NO: 2041686 - RNA, 19 nt, Homo sapiens
  misc_RNA (1)...(19): siRNA sense strand
cgcauggcccugauucuuu

SEQ ID NO: 2041687 - RNA, 19 nt, Homo sapiens
  misc_RNA (1)...(19): siRNA sense strand
aaacgcuagcccuaauuaa

SEQ ID NO: 2041688 - RNA, 19 nt, Homo sapiens
  misc_RNA (1)...(19): siRNA sense strand
cagaggauggccuauuaga

SEQ ID NO: 2041689 - RNA, 19 nt, Homo sapiens
  misc_RNA (1)...(19): siRNA sense strand
cucgacaacugguauuaau

SEQ ID NO: 2041690 - RNA, 19 nt, Homo sapiens
  misc_RNA (1)...(19): siRNA sense strand
ugacauggugacagaaaug

SEQ ID NO: 2041691 - RNA, 19 nt, Homo sapiens
  misc_RNA (1)...(19): siRNA sense strand
gguuaauguugaggaauuc

SEQ ID NO: 2041692 - RNA, 19 nt, Homo sapiens
  misc_RNA (1)...(19): siRNA sense strand
gcagauguucaauauggau

SEQ ID NO: 2041693 - RNA, 19 nt, Homo sapiens
  misc_RNA (1)...(19): siRNA sense strand
uguaccuguugcauuguua

SEQ ID NO: 2041694 - RNA, 19 nt, Homo sapiens
  misc_RNA (1)...(19): siRNA sense strand
aaccugcacuuggaagauu

SEQ ID NO: 2041695 - RNA, 19 nt, Homo sapiens
  misc_RNA (1)...(19): siRNA sense strand
gaugaugcuauaugugaau

SEQ ID NO: 2041696 - RNA, 19 nt, Homo sapiens
  misc_RNA (1)...(19): siRNA sense strand
aaaugaugaugcuuucaag

SEQ ID NO: 2041697 - RNA, 19 nt, Homo sapiens
  misc_RNA (1)...(19): siRNA sense strand
gagcugauccaguuuauua

SEQ ID NO: 2041698 - RNA, 19 nt, Homo sapiens
  misc_RNA (1)...(19): siRNA sense strand
ggcaaacacugcuaaauuu

SEQ ID NO: 2041699 - RNA, 19 nt, Homo sapiens
  misc_RNA (1)...(19): siRNA sense strand
gaacagauggcauaagaaa

SEQ ID NO: 2041700 - RNA, 19 nt, Homo sapiens
  misc_RNA (1)...(19): siRNA sense strand
ucaaugagcugauccaguu

SEQ ID NO: 2041701 - RNA, 19 nt, Homo sapiens
  misc_RNA (1)...(19): siRNA sense strand
gcacuuggaagauuuauuu

SEQ ID NO: 2041702 - RNA, 19 nt, Homo sapiens
  misc_RNA (1)...(19): siRNA sense strand
ggaaagaagcauuggauuu

SEQ ID NO: 2041703 - RNA, 19 nt, Homo sapiens
  misc_RNA (1)...(19): siRNA sense strand
aaacaaagcuggauuuacu

SEQ ID NO: 2041704 - RNA, 19 nt, Homo sapiens
  misc_RNA (1)...(19): siRNA sense strand
gaaagauccugauggcuau

SEQ ID NO: 2041705 - RNA, 19 nt, Homo sapiens
  misc_RNA (1)...(19): siRNA sense strand
gcaaacacugcuaaauuua

SEQ ID NO: 2041706 - RNA, 19 nt, Homo sapiens
  misc_RNA (1)...(19): siRNA sense strand
caauggagauucaacagaa

SEQ ID NO: 2041707 - RNA, 19 nt, Homo sapiens
  misc_RNA (1)...(19): siRNA sense strand
uaaaccagaugcaauauca

SEQ ID NO: 2041708 - RNA, 19 nt, Homo sapiens
  misc_RNA (1)...(19): siRNA sense strand
ccagagaaauggaguuguu

SEQ ID NO: 2041709 - RNA, 19 nt, Homo sapiens
  misc_RNA (1)...(19): siRNA sense strand
gaauaaugcuacaaagaca

SEQ ID NO: 2041710 - RNA, 19 nt, Homo sapiens
  misc_RNA (1)...(19): siRNA sense strand
gagaugaugcuauauguga

SEQ ID NO: 2041711 - RNA, 19 nt, Homo sapiens
  misc_RNA (1)...(19): siRNA sense strand
aaacuaagauccagaaugc

SEQ ID NO: 2041712 - RNA, 19 nt, Homo sapiens
  misc_RNA (1)...(19): siRNA sense strand
acaaagacauuucgagaau

SEQ ID NO: 2041713 - RNA, 19 nt, Homo sapiens
  misc_RNA (1)...(19): siRNA sense strand
gaaggacuguugggaaaga

SEQ ID NO: 2041714 - RNA, 19 nt, Homo sapiens
  misc_RNA (1)...(19): siRNA sense strand
gcaacaaagugaaugucuu

SEQ ID NO: 2041715 - RNA, 19 nt, Homo sapiens
  misc_RNA (1)...(19): siRNA sense strand
ucagagcaaucuuugguaa

SEQ ID NO: 2041716 - RNA, 19 nt, Homo sapiens
  misc_RNA (1)...(19): siRNA sense strand
gugaaggacuguugggaaa

SEQ ID NO: 2041717 - RNA, 19 nt, Homo sapiens
  misc_RNA (1)...(19): siRNA sense strand
aucaaaggcuggagaaaua

SEQ ID NO: 2041718 - RNA, 19 nt, Homo sapiens
  misc_RNA (1)...(19): siRNA sense strand
ccagaaugcuguucacugu

SEQ ID NO: 2041719 - RNA, 19 nt, Homo sapiens
  misc_RNA (1)...(19): siRNA sense strand
gaaagaagcauuggauuuu

SEQ ID NO: 2041720 - RNA, 19 nt, Homo sapiens
  misc_RNA (1)...(19): siRNA sense strand
gaggaauucuaugaaguuu

SEQ ID NO: 2041721 - RNA, 19 nt, Homo sapiens
  misc_RNA (1)...(19): siRNA sense strand
uggaacagauggcauaaga

SEQ ID NO: 2041722 - RNA, 19 nt, Homo sapiens
  misc_RNA (1)...(19): siRNA sense strand
uaaagcggaccaaauauga

SEQ ID NO: 2041723 - RNA, 19 nt, Homo sapiens
  misc_RNA (1)...(19): siRNA sense strand
ggguuaauguugaggaauu

SEQ ID NO: 2041724 - RNA, 19 nt, Homo sapiens
  misc_RNA (1)...(19): siRNA sense strand
cgacaacugguauuaauug

SEQ ID NO: 2041725 - RNA, 19 nt, Homo sapiens
  misc_RNA (1)...(19): siRNA sense strand
caaagacauuucgagaauu

SEQ ID NO: 2041726 - RNA, 19 nt, Homo sapiens
  misc_RNA (1)...(19): siRNA sense strand
caacugguauuaauugacu

SEQ ID NO: 2041727 - RNA, 19 nt, Homo sapiens
  misc_RNA (1)...(19): siRNA sense strand
cuaugcagauguucaauau

SEQ ID NO: 2041728 - RNA, 19 nt, Homo sapiens
  misc_RNA (1)...(19): siRNA sense strand
gacaacugguauuaauuga

SEQ ID NO: 2041729 - RNA, 19 nt, Homo sapiens
  misc_RNA (1)...(19): siRNA sense strand
cggcaaacacugcuaaauu

SEQ ID NO: 2041730 - RNA, 19 nt, Homo sapiens
  misc_RNA (1)...(19): siRNA sense strand
ucauguagaucaccaguca

SEQ ID NO: 2041731 - RNA, 19 nt, Homo sapiens
  misc_RNA (1)...(19): siRNA sense strand
caauauggaucggguuaau

SEQ ID NO: 2041732 - RNA, 19 nt, Homo sapiens
  misc_RNA (1)...(19): siRNA sense strand
aauuguaccuguugcauug

SEQ ID NO: 2041733 - RNA, 19 nt, Homo sapiens
  misc_RNA (1)...(19): siRNA sense strand
gcuguucacuguacugauc

SEQ ID NO: 2041734 - RNA, 19 nt, Homo sapiens
  misc_RNA (1)...(19): siRNA sense strand
uauuacaacugguccuauu

SEQ ID NO: 2041735 - RNA, 19 nt, Homo sapiens
  misc_RNA (1)...(19): siRNA sense strand
gcuaugcagauguucaaua

SEQ ID NO: 2041736 - RNA, 19 nt, Homo sapiens
  misc_RNA (1)...(19): siRNA sense strand
gcugggaccugcaaacucu

SEQ ID NO: 2041737 - RNA, 19 nt, Homo sapiens
  misc_RNA (1)...(19): siRNA sense strand
uaagagaugaugcuauaug

SEQ ID NO: 2041738 - RNA, 19 nt, Homo sapiens
  misc_RNA (1)...(19): siRNA sense strand
gcaauggagauucaacaga

SEQ ID NO: 2041739 - RNA, 19 nt, Homo sapiens
  misc_RNA (1)...(19): siRNA sense strand
acagauggcauaagaaaug

SEQ ID NO: 2041740 - RNA, 19 nt, Homo sapiens
  misc_RNA (1)...(19): siRNA sense strand
ugaugaugcuuucaaggaa

SEQ ID NO: 2041741 - RNA, 19 nt, Homo sapiens
  misc_RNA (1)...(19): siRNA sense strand
cagaauaaugcuacaaaga

SEQ ID NO: 2041742 - RNA, 19 nt, Homo sapiens
  misc_RNA (1)...(19): siRNA sense strand
caaagcuggauuuacuaua

SEQ ID NO: 2041743 - RNA, 19 nt, Homo sapiens
  misc_RNA (1)...(19): siRNA sense strand
aagagaugaugcuauaugu

SEQ ID NO: 2041744 - RNA, 19 nt, Homo sapiens
  misc_RNA (1)...(19): siRNA sense strand
caacugguccuauuauugc

SEQ ID NO: 2041745 - RNA, 19 nt, Homo sapiens
  misc_RNA (1)...(19): siRNA sense strand
ucucagcuaugcagauguu

SEQ ID NO: 2041746 - RNA, 19 nt, Homo sapiens
  misc_RNA (1)...(19): siRNA sense strand
gagguucaauacuucuuca

SEQ ID NO: 2041747 - RNA, 19 nt, Homo sapiens
  misc_RNA (1)...(19): siRNA sense strand
aaggaguagugaccgaaua

SEQ ID NO: 2041748 - RNA, 19 nt, Homo sapiens
  misc_RNA (1)...(19): siRNA sense strand
gcauggcccugauucuuuu

SEQ ID NO: 2041749 - RNA, 19 nt, Homo sapiens
  misc_RNA (1)...(19): siRNA sense strand
aagcggaccaaauaugaua

SEQ ID NO: 2041750 - RNA, 19 nt, Homo sapiens
  misc_RNA (1)...(19): siRNA sense strand
guagugaccgaauaucaug

SEQ ID NO: 2041751 - RNA, 19 nt, Homo sapiens
  misc_RNA (1)...(19): siRNA sense strand
gaugcuauaugugaaugga

SEQ ID NO: 2041752 - RNA, 19 nt, Homo sapiens
  misc_RNA (1)...(19): siRNA sense strand
uacaacugguccuauuauu

SEQ ID NO: 2041753 - RNA, 19 nt, Homo sapiens
  misc_RNA (1)...(19): siRNA sense strand
ugaggaauucuaugaaguu

SEQ ID NO: 2041754 - RNA, 19 nt, Homo sapiens
  misc_RNA (1)...(19): siRNA sense strand
guugaggaauucuaugaag

SEQ ID NO: 2041755 - RNA, 19 nt, Homo sapiens
  misc_RNA (1)...(19): siRNA sense strand
gaguagugaccgaauauca

SEQ ID NO: 2041756 - RNA, 19 nt, Homo sapiens
  misc_RNA (1)...(19): siRNA sense strand
agaaugcuguucacuguac

SEQ ID NO: 2041757 - RNA, 19 nt, Homo sapiens
  misc_RNA (1)...(19): siRNA sense strand
uaucaaaggcuggagaaau

SEQ ID NO: 2041758 - RNA, 19 nt, Homo sapiens
  misc_RNA (1)...(19): siRNA sense strand
augcagauguucaauaugg

SEQ ID NO: 2041759 - RNA, 19 nt, Homo sapiens
  misc_RNA (1)...(19): siRNA sense strand
ccugauggcuauccgagau

SEQ ID NO: 2041760 - RNA, 19 nt, Homo sapiens
  misc_RNA (1)...(19): siRNA sense strand
ggaacagauggcauaagaa

SEQ ID NO: 2041761 - RNA, 19 nt, Homo sapiens
  misc_RNA (1)...(19): siRNA sense strand
ggaguggcacgcacagaug

SEQ ID NO: 2041762 - RNA, 19 nt, Homo sapiens
  misc_RNA (1)...(19): siRNA sense strand
uaaagaaucaucgcaccuu

SEQ ID NO: 2041763 - RNA, 19 nt, Homo sapiens
  misc_RNA (1)...(19): siRNA sense strand
ccauggagauuuuaagaga

SEQ ID NO: 2041764 - RNA, 19 nt, Homo sapiens
  misc_RNA (1)...(19): siRNA sense strand
uggaucggguuaauguuga

SEQ ID NO: 2041765 - RNA, 19 nt, Homo sapiens
  misc_RNA (1)...(19): siRNA sense strand
gcgcauggcccugauucuu

SEQ ID NO: 2041766 - RNA, 19 nt, Homo sapiens
  misc_RNA (1)...(19): siRNA sense strand
ucaaaggcuggagaaauaa

SEQ ID NO: 2041767 - RNA, 19 nt, Homo sapiens
  misc_RNA (1)...(19): siRNA sense strand
guguagcaauggagauuca

SEQ ID NO: 2041768 - RNA, 19 nt, Homo sapiens
  misc_RNA (1)...(19): siRNA sense strand
caaacacugcuaaauuuac

SEQ ID NO: 2041769 - RNA, 19 nt, Homo sapiens
  misc_RNA (1)...(19): siRNA sense strand
acaacugguccuauuauug

SEQ ID NO: 2041770 - RNA, 19 nt, Homo sapiens
  misc_RNA (1)...(19): siRNA sense strand
gcuggagaaauaauugaaa

SEQ ID NO: 2041771 - RNA, 19 nt, Homo sapiens
  misc_RNA (1)...(19): siRNA sense strand
uuaaagcggaccaaauaug

SEQ ID NO: 2041772 - RNA, 19 nt, Homo sapiens
  misc_RNA (1)...(19): siRNA sense strand
augauaaccugcacuugga

SEQ ID NO: 2041773 - RNA, 19 nt, Homo sapiens
  misc_RNA (1)...(19): siRNA sense strand
ugcuauaugugaauggaaa

SEQ ID NO: 2041774 - RNA, 19 nt, Homo sapiens
  misc_RNA (1)...(19): siRNA sense strand
uuacaacugguccuauuau

SEQ ID NO: 2041775 - RNA, 19 nt, Homo sapiens
  misc_RNA (1)...(19): siRNA sense strand
uacaaagacauuucgagaa

SEQ ID NO: 2041776 - RNA, 19 nt, Homo sapiens
  misc_RNA (1)...(19): siRNA sense strand
acagaauaaugcuacaaag

SEQ ID NO: 2041777 - RNA, 19 nt, Homo sapiens
  misc_RNA (1)...(19): siRNA sense strand
caacagaauaaugcuacaa

SEQ ID NO: 2041778 - RNA, 19 nt, Homo sapiens
  misc_RNA (1)...(19): siRNA sense strand
cauggugacagaaauguau

SEQ ID NO: 2041779 - RNA, 19 nt, Homo sapiens
  misc_RNA (1)...(19): siRNA sense strand
cgcauggcccugauucuuu

SEQ ID NO: 2041780 - RNA, 19 nt, Homo sapiens
  misc_RNA (1)...(19): siRNA sense strand
aaaugaugaugcuuucaag

SEQ ID NO: 2041781 - RNA, 19 nt, Homo sapiens
  misc_RNA (1)...(19): siRNA sense strand
cagaggauggccuauuaga

SEQ ID NO: 2041782 - RNA, 19 nt, Homo sapiens
  misc_RNA (1)...(19): siRNA sense strand
ugacauggugacagaaaug

SEQ ID NO: 2041783 - RNA, 19 nt, Homo sapiens
  misc_RNA (1)...(19): siRNA sense strand
gguuaauguugaggaauuc

SEQ ID NO: 2041784 - RNA, 19 nt, Homo sapiens
  misc_RNA (1)...(19): siRNA sense strand
gcagauguucaauauggau

SEQ ID NO: 2041785 - RNA, 19 nt, Homo sapiens
  misc_RNA (1)...(19): siRNA sense strand
aaacgcuagcccuaauuaa

SEQ ID NO: 2041786 - RNA, 19 nt, Homo sapiens
  misc_RNA (1)...(19): siRNA sense strand
uguaccuguugcauuguua

SEQ ID NO: 2041787 - RNA, 19 nt, Homo sapiens
  misc_RNA (1)...(19): siRNA sense strand
cucgacaacugguauuaau

SEQ ID NO: 2041788 - RNA, 19 nt, Homo sapiens
  misc_RNA (1)...(19): siRNA sense strand
gaugaugcuauaugugaau

SEQ ID NO: 2041789 - RNA, 19 nt, Homo sapiens
  misc_RNA (1)...(19): siRNA sense strand
aaccugcacuuggaagauu

SEQ ID NO: 2041790 - RNA, 19 nt, Homo sapiens
  misc_RNA (1)...(19): siRNA sense strand
aaugagcugauccaguuua

SEQ ID NO: 2041791 - RNA, 19 nt, Homo sapiens
  misc_RNA (1)...(19): siRNA sense strand
caaaggcuggagaaauaau

SEQ ID NO: 2041792 - RNA, 19 nt, Homo sapiens
  misc_RNA (1)...(19): siRNA sense strand
aaccagaugcaauaucaaa

SEQ ID NO: 2041793 - RNA, 19 nt, Homo sapiens
  misc_RNA (1)...(19): siRNA sense strand
aacgcuagcccuaauuaaa

SEQ ID NO: 2041794 - RNA, 19 nt, Homo sapiens
  misc_RNA (1)...(19): siRNA sense strand
uaauuguaccuguugcauu

SEQ ID NO: 2041795 - RNA, 19 nt, Homo sapiens
  misc_RNA (1)...(19): siRNA sense strand
uuacuaauuguaccuguug

SEQ ID NO: 2041796 - RNA, 19 nt, Homo sapiens
  misc_RNA (1)...(19): siRNA sense strand
uauccgagaugcagguuuu

SEQ ID NO: 2041797 - RNA, 19 nt, Homo sapiens
  misc_RNA (1)...(19): siRNA sense strand
cagcgugaccguucucuua

SEQ ID NO: 2041798 - RNA, 19 nt, Homo sapiens
  misc_RNA (1)...(19): siRNA sense strand
ggaggagggugagcucauu

SEQ ID NO: 2041799 - RNA, 19 nt, Homo sapiens
  misc_RNA (1)...(19): siRNA sense strand
ccagacagaccauguucua

SEQ ID NO: 2041800 - RNA, 19 nt, Homo sapiens
  misc_RNA (1)...(19): siRNA sense strand
ggaggagccugguguuggu

SEQ ID NO: 2041801 - RNA, 19 nt, Homo sapiens
  misc_RNA (1)...(19): siRNA sense strand
gcgugaccguucucuuauu

SEQ ID NO: 2041802 - RNA, 19 nt, Homo sapiens
  misc_RNA (1)...(19): siRNA sense strand
gacccucggcgucaucuuu

SEQ ID NO: 2041803 - RNA, 19 nt, Homo sapiens
  misc_RNA (1)...(19): siRNA sense strand
ccagaauggugcccagaag

SEQ ID NO: 2041804 - RNA, 19 nt, Homo sapiens
  misc_RNA (1)...(19): siRNA sense strand
ugaccguucucuuauucaa

SEQ ID NO: 2041805 - RNA, 19 nt, Homo sapiens
  misc_RNA (1)...(19): siRNA sense strand
cgucaucuuuggugucuca

SEQ ID NO: 2041806 - RNA, 19 nt, Homo sapiens
  misc_RNA (1)...(19): siRNA sense strand
cgugaccguucucuuauuc

SEQ ID NO: 2041807 - RNA, 19 nt, Homo sapiens
  misc_RNA (1)...(19): siRNA sense strand
uggaggaaguggcuugcaa

SEQ ID NO: 2041808 - RNA, 19 nt, Homo sapiens
  misc_RNA (1)...(19): siRNA sense strand
agacagaccauguucuaca

SEQ ID NO: 2041809 - RNA, 19 nt, Homo sapiens
  misc_RNA (1)...(19): siRNA sense strand
ggagccugguguuggugaa

SEQ ID NO: 2041810 - RNA, 19 nt, Homo sapiens
  misc_RNA (1)...(19): siRNA sense strand
gacagaccauguucuacac

SEQ ID NO: 2041811 - RNA, 19 nt, Homo sapiens
  misc_RNA (1)...(19): siRNA sense strand
agaccauguucuacacaga

SEQ ID NO: 2041812 - RNA, 19 nt, Homo sapiens
  misc_RNA (1)...(19): siRNA sense strand
gaggagggugagcucauug

SEQ ID NO: 2041813 - RNA, 19 nt, Homo sapiens
  misc_RNA (1)...(19): siRNA sense strand
gcuccagacagaccauguu

SEQ ID NO: 2041814 - RNA, 19 nt, Homo sapiens
  misc_RNA (1)...(19): siRNA sense strand
gccagaauggugcccagaa

SEQ ID NO: 2041815 - RNA, 19 nt, Homo sapiens
  misc_RNA (1)...(19): siRNA sense strand
ccaagacccucggcgucau

SEQ ID NO: 2041816 - RNA, 19 nt, Homo sapiens
  misc_RNA (1)...(19): siRNA sense strand
gagcugauccaguuuauua

SEQ ID NO: 2041817 - RNA, 19 nt, Homo sapiens
  misc_RNA (1)...(19): siRNA sense strand
ggcaaacacugcuaaauuu

SEQ ID NO: 2041818 - RNA, 19 nt, Homo sapiens
  misc_RNA (1)...(19): siRNA sense strand
ggauggaucuguugaaaug

SEQ ID NO: 2041819 - RNA, 19 nt, Homo sapiens
  misc_RNA (1)...(19): siRNA sense strand
gaacagauggcauaagaaa

SEQ ID NO: 2041820 - RNA, 19 nt, Homo sapiens
  misc_RNA (1)...(19): siRNA sense strand
ucaaugagcugauccaguu

SEQ ID NO: 2041821 - RNA, 19 nt, Homo sapiens
  misc_RNA (1)...(19): siRNA sense strand
gcacuuggaagauuuauuu

SEQ ID NO: 2041822 - RNA, 19 nt, Homo sapiens
  misc_RNA (1)...(19): siRNA sense strand
ggaaagaagcauuggauuu

SEQ ID NO: 2041823 - RNA, 19 nt, Homo sapiens
  misc_RNA (1)...(19): siRNA sense strand
aaacaaagcuggauuuacu

SEQ ID NO: 2041824 - RNA, 19 nt, Homo sapiens
  misc_RNA (1)...(19): siRNA sense strand
gaaagauccugauggcuau

SEQ ID NO: 2041825 - RNA, 19 nt, Homo sapiens
  misc_RNA (1)...(19): siRNA sense strand
gcaaacacugcuaaauuua

SEQ ID NO: 2041826 - RNA, 19 nt, Homo sapiens
  misc_RNA (1)...(19): siRNA sense strand
caauggagauucaacagaa

SEQ ID NO: 2041827 - RNA, 19 nt, Homo sapiens
  misc_RNA (1)...(19): siRNA sense strand
uaaaccagaugcaauauca

SEQ ID NO: 2041828 - RNA, 19 nt, Homo sapiens
  misc_RNA (1)...(19): siRNA sense strand
ccagagaaauggaguuguu

SEQ ID NO: 2041829 - RNA, 19 nt, Homo sapiens
  misc_RNA (1)...(19): siRNA sense strand
gaauaaugcuacaaagaca

SEQ ID NO: 2041830 - RNA, 19 nt, Homo sapiens
  misc_RNA (1)...(19): siRNA sense strand
gagaugaugcuauauguga

SEQ ID NO: 2041831 - RNA, 19 nt, Homo sapiens
  misc_RNA (1)...(19): siRNA sense strand
aaacuaagauccagaaugc

SEQ ID NO: 2041832 - RNA, 19 nt, Homo sapiens
  misc_RNA (1)...(19): siRNA sense strand
acaaagacauuucgagaau

SEQ ID NO: 2041833 - RNA, 19 nt, Homo sapiens
  misc_RNA (1)...(19): siRNA sense strand
gaaggacuguugggaaaga

SEQ ID NO: 2041834 - RNA, 19 nt, Homo sapiens
  misc_RNA (1)...(19): siRNA sense strand
gcaacaaagugaaugucuu

SEQ ID NO: 2041835 - RNA, 19 nt, Homo sapiens
  misc_RNA (1)...(19): siRNA sense strand
ucagagcaaucuuugguaa

SEQ ID NO: 2041836 - RNA, 19 nt, Homo sapiens
  misc_RNA (1)...(19): siRNA sense strand
ugaaaugcaugauguaaag

SEQ ID NO: 2041837 - RNA, 19 nt, Homo sapiens
  misc_RNA (1)...(19): siRNA sense strand
gugaaggacuguugggaaa

SEQ ID NO: 2041838 - RNA, 19 nt, Homo sapiens
  misc_RNA (1)...(19): siRNA sense strand
aucaaaggcuggagaaaua

SEQ ID NO: 2041839 - RNA, 19 nt, Homo sapiens
  misc_RNA (1)...(19): siRNA sense strand
ccagaaugcuguucacugu

SEQ ID NO: 2041840 - RNA, 19 nt, Homo sapiens
  misc_RNA (1)...(19): siRNA sense strand
ccaaaugcuucacuucuuc

SEQ ID NO: 2041841 - RNA, 19 nt, Homo sapiens
  misc_RNA (1)...(19): siRNA sense strand
gaggaauucuaugaaguuu

SEQ ID NO: 2041842 - RNA, 19 nt, Homo sapiens
  misc_RNA (1)...(19): siRNA sense strand
uggaacagauggcauaaga

SEQ ID NO: 2041843 - RNA, 19 nt, Homo sapiens
  misc_RNA (1)...(19): siRNA sense strand
gaaagaagcauuggauuuu

SEQ ID NO: 2041844 - RNA, 19 nt, Homo sapiens
  misc_RNA (1)...(19): siRNA sense strand
uaaagcggaccaaauauga

SEQ ID NO: 2041845 - RNA, 19 nt, Homo sapiens
  misc_RNA (1)...(19): siRNA sense strand
ggguuaauguugaggaauu

SEQ ID NO: 2041846 - RNA, 19 nt, Homo sapiens
  misc_RNA (1)...(19): siRNA sense strand
cgacaacugguauuaauug

SEQ ID NO: 2041847 - RNA, 19 nt, Homo sapiens
  misc_RNA (1)...(19): siRNA sense strand
caaagacauuucgagaauu

SEQ ID NO: 2041848 - RNA, 19 nt, Homo sapiens
  misc_RNA (1)...(19): siRNA sense strand
caacugguauuaauugacu

SEQ ID NO: 2041849 - RNA, 19 nt, Homo sapiens
  misc_RNA (1)...(19): siRNA sense strand
cuaugcagauguucaauau

SEQ ID NO: 2041850 - RNA, 19 nt, Homo sapiens
  misc_RNA (1)...(19): siRNA sense strand
gacaacugguauuaauuga

SEQ ID NO: 2041851 - RNA, 19 nt, Homo sapiens
  misc_RNA (1)...(19): siRNA sense strand
cggcaaacacugcuaaauu

SEQ ID NO: 2041852 - RNA, 19 nt, Homo sapiens
  misc_RNA (1)...(19): siRNA sense strand
ucauguagaucaccaguca

SEQ ID NO: 2041853 - RNA, 19 nt, Homo sapiens
  misc_RNA (1)...(19): siRNA sense strand
caauauggaucggguuaau

SEQ ID NO: 2041854 - RNA, 19 nt, Homo sapiens
  misc_RNA (1)...(19): siRNA sense strand
aauuguaccuguugcauug

SEQ ID NO: 2041855 - RNA, 19 nt, Homo sapiens
  misc_RNA (1)...(19): siRNA sense strand
gcuguucacuguacugauc

SEQ ID NO: 2041856 - RNA, 19 nt, Homo sapiens
  misc_RNA (1)...(19): siRNA sense strand
uauuacaacugguccuauu

SEQ ID NO: 2041857 - RNA, 19 nt, Homo sapiens
  misc_RNA (1)...(19): siRNA sense strand
gcuaugcagauguucaaua

SEQ ID NO: 2041858 - RNA, 19 nt, Homo sapiens
  misc_RNA (1)...(19): siRNA sense strand
gcugggaccugcaaacucu

SEQ ID NO: 2041859 - RNA, 19 nt, Homo sapiens
  misc_RNA (1)...(19): siRNA sense strand
uaagagaugaugcuauaug

SEQ ID NO: 2041860 - RNA, 19 nt, Homo sapiens
  misc_RNA (1)...(19): siRNA sense strand
gcaauggagauucaacaga

SEQ ID NO: 2041861 - RNA, 19 nt, Homo sapiens
  misc_RNA (1)...(19): siRNA sense strand
acagauggcauaagaaaug

SEQ ID NO: 2041862 - RNA, 19 nt, Homo sapiens
  misc_RNA (1)...(19): siRNA sense strand
ugaugaugcuuucaaggaa

SEQ ID NO: 2041863 - RNA, 19 nt, Homo sapiens
  misc_RNA (1)...(19): siRNA sense strand
cagaauaaugcuacaaaga

SEQ ID NO: 2041864 - RNA, 19 nt, Homo sapiens
  misc_RNA (1)...(19): siRNA sense strand
caaagcuggauuuacuaua

SEQ ID NO: 2041865 - RNA, 19 nt, Homo sapiens
  misc_RNA (1)...(19): siRNA sense strand
aagagaugaugcuauaugu

SEQ ID NO: 2041866 - RNA, 19 nt, Homo sapiens
  misc_RNA (1)...(19): siRNA sense strand
caacugguccuauuauugc

SEQ ID NO: 2041867 - RNA, 19 nt, Homo sapiens
  misc_RNA (1)...(19): siRNA sense strand
ucucagcuaugcagauguu

SEQ ID NO: 2041868 - RNA, 19 nt, Homo sapiens
  misc_RNA (1)...(19): siRNA sense strand
gagguucaauacuucuuca

SEQ ID NO: 2041869 - RNA, 19 nt, Homo sapiens
  misc_RNA (1)...(19): siRNA sense strand
aaggaguagugaccgaaua

SEQ ID NO: 2041870 - RNA, 19 nt, Homo sapiens
  misc_RNA (1)...(19): siRNA sense strand
gcauggcccugauucuuuu

SEQ ID NO: 2041871 - RNA, 19 nt, Homo sapiens
  misc_RNA (1)...(19): siRNA sense strand
aagcggaccaaauaugaua

SEQ ID NO: 2041872 - RNA, 19 nt, Homo sapiens
  misc_RNA (1)...(19): siRNA sense strand
guagugaccgaauaucaug

SEQ ID NO: 2041873 - RNA, 19 nt, Homo sapiens
  misc_RNA (1)...(19): siRNA sense strand
gaugcuauaugugaaugga

SEQ ID NO: 2041874 - RNA, 19 nt, Homo sapiens
  misc_RNA (1)...(19): siRNA sense strand
uacaacugguccuauuauu

SEQ ID NO: 2041875 - RNA, 19 nt, Homo sapiens
  misc_RNA (1)...(19): siRNA sense strand
ugaggaauucuaugaaguu

SEQ ID NO: 2041876 - RNA, 19 nt, Homo sapiens
  misc_RNA (1)...(19): siRNA sense strand
guugaggaauucuaugaag

SEQ ID NO: 2041877 - RNA, 19 nt, Homo sapiens
  misc_RNA (1)...(19): siRNA sense strand
gaguagugaccgaauauca

SEQ ID NO: 2041878 - RNA, 19 nt, Homo sapiens
  misc_RNA (1)...(19): siRNA sense strand
agaaugcuguucacuguac

SEQ ID NO: 2041879 - RNA, 19 nt, Homo sapiens
  misc_RNA (1)...(19): siRNA sense strand
uaucaaaggcuggagaaau

SEQ ID NO: 2041880 - RNA, 19 nt, Homo sapiens
  misc_RNA (1)...(19): siRNA sense strand
gaaaugcaugauguaaaga

SEQ ID NO: 2041881 - RNA, 19 nt, Homo sapiens
  misc_RNA (1)...(19): siRNA sense strand
uccaaaugcuucacuucuu

SEQ ID NO: 2041882 - RNA, 19 nt, Homo sapiens
  misc_RNA (1)...(19): siRNA sense strand
augcagauguucaauaugg

SEQ ID NO: 2041883 - RNA, 19 nt, Homo sapiens
  misc_RNA (1)...(19): siRNA sense strand
ccugauggcuauccgagau

SEQ ID NO: 2041884 - RNA, 19 nt, Homo sapiens
  misc_RNA (1)...(19): siRNA sense strand
ggaacagauggcauaagaa

SEQ ID NO: 2041885 - RNA, 19 nt, Homo sapiens
  misc_RNA (1)...(19): siRNA sense strand
ggaguggcacgcacagaug

SEQ ID NO: 2041886 - RNA, 19 nt, Homo sapiens
  misc_RNA (1)...(19): siRNA sense strand
uaaagaaucaucgcaccuu

SEQ ID NO: 2041887 - RNA, 19 nt, Homo sapiens
  misc_RNA (1)...(19): siRNA sense strand
ccauggagauuuuaagaga

SEQ ID NO: 2041888 - RNA, 19 nt, Homo sapiens
  misc_RNA (1)...(19): siRNA sense strand
uggaucggguuaauguuga

SEQ ID NO: 2041889 - RNA, 19 nt, Homo sapiens
  misc_RNA (1)...(19): siRNA sense strand
gcgcauggcccugauucuu

SEQ ID NO: 2041890 - RNA, 19 nt, Homo sapiens
  misc_RNA (1)...(19): siRNA sense strand
ucaaaggcuggagaaauaa

SEQ ID NO: 2041891 - RNA, 19 nt, Homo sapiens
  misc_RNA (1)...(19): siRNA sense strand
guguagcaauggagauuca

SEQ ID NO: 2041892 - RNA, 19 nt, Homo sapiens
  misc_RNA (1)...(19): siRNA sense strand
caaacacugcuaaauuuac

SEQ ID NO: 2041893 - RNA, 19 nt, Homo sapiens
  misc_RNA (1)...(19): siRNA sense strand
acaacugguccuauuauug

SEQ ID NO: 2041894 - RNA, 19 nt, Homo sapiens
  misc_RNA (1)...(19): siRNA sense strand
gcuggagaaauaauugaaa

SEQ ID NO: 2041895 - RNA, 19 nt, Homo sapiens
  misc_RNA (1)...(19): siRNA sense strand
guugaaaugcaugauguaa

SEQ ID NO: 2041896 - RNA, 19 nt, Homo sapiens
  misc_RNA (1)...(19): siRNA sense strand
augauaaccugcacuugga

SEQ ID NO: 2041897 - RNA, 19 nt, Homo sapiens
  misc_RNA (1)...(19): siRNA sense strand
uuaaagcggaccaaauaug

SEQ ID NO: 2041898 - RNA, 19 nt, Homo sapiens
  misc_RNA (1)...(19): siRNA sense strand
ugcuauaugugaauggaaa

SEQ ID NO: 2041899 - RNA, 19 nt, Homo sapiens
  misc_RNA (1)...(19): siRNA sense strand
cuucacuucuucgacguua

SEQ ID NO: 2041900 - RNA, 19 nt, Homo sapiens
  misc_RNA (1)...(19): siRNA sense strand
uuacaacugguccuauuau

SEQ ID NO: 2041901 - RNA, 19 nt, Homo sapiens
  misc_RNA (1)...(19): siRNA sense strand
uacaaagacauuucgagaa

SEQ ID NO: 2041902 - RNA, 19 nt, Homo sapiens
  misc_RNA (1)...(19): siRNA sense strand
acagaauaaugcuacaaag

SEQ ID NO: 2041903 - RNA, 19 nt, Homo sapiens
  misc_RNA (1)...(19): siRNA sense strand
caacagaauaaugcuacaa

SEQ ID NO: 2041904 - RNA, 19 nt, Homo sapiens
  misc_RNA (1)...(19): siRNA sense strand
cauggugacagaaauguau

SEQ ID NO: 2041905 - RNA, 19 nt, Homo sapiens
  misc_RNA (1)...(19): siRNA sense strand
cgcauggcccugauucuuu

SEQ ID NO: 2041906 - RNA, 19 nt, Homo sapiens
  misc_RNA (1)...(19): siRNA sense strand
aaacgcuagcccuaauuaa

SEQ ID NO: 2041907 - RNA, 19 nt, Homo sapiens
  misc_RNA (1)...(19): siRNA sense strand
cagaggauggccuauuaga

SEQ ID NO: 2041908 - RNA, 19 nt, Homo sapiens
  misc_RNA (1)...(19): siRNA sense strand
cucgacaacugguauuaau

SEQ ID NO: 2041909 - RNA, 19 nt, Homo sapiens
  misc_RNA (1)...(19): siRNA sense strand
ugacauggugacagaaaug

SEQ ID NO: 2041910 - RNA, 19 nt, Homo sapiens
  misc_RNA (1)...(19): siRNA sense strand
gguuaauguugaggaauuc

SEQ ID NO: 2041911 - RNA, 19 nt, Homo sapiens
  misc_RNA (1)...(19): siRNA sense strand
gcagauguucaauauggau

SEQ ID NO: 2041912 - RNA, 19 nt, Homo sapiens
  misc_RNA (1)...(19): siRNA sense strand
uguaccuguugcauuguua

SEQ ID NO: 2041913 - RNA, 19 nt, Homo sapiens
  misc_RNA (1)...(19): siRNA sense strand
aaccugcacuuggaagauu

SEQ ID NO: 2041914 - RNA, 19 nt, Homo sapiens
  misc_RNA (1)...(19): siRNA sense strand
gaugaugcuauaugugaau

SEQ ID NO: 2041915 - RNA, 19 nt, Homo sapiens
  misc_RNA (1)...(19): siRNA sense strand
aaaugaugaugcuuucaag

SEQ ID NO: 2041916 - RNA, 19 nt, Homo sapiens
  misc_RNA (1)...(19): siRNA sense strand
gagcugauccaguuuauua

SEQ ID NO: 2041917 - RNA, 19 nt, Homo sapiens
  misc_RNA (1)...(19): siRNA sense strand
ggcaaacacugcuaaauuu

SEQ ID NO: 2041918 - RNA, 19 nt, Homo sapiens
  misc_RNA (1)...(19): siRNA sense strand
gaacagauggcauaagaaa

SEQ ID NO: 2041919 - RNA, 19 nt, Homo sapiens
  misc_RNA (1)...(19): siRNA sense strand
ucaaugagcugauccaguu

SEQ ID NO: 2041920 - RNA, 19 nt, Homo sapiens
  misc_RNA (1)...(19): siRNA sense strand
gcacuuggaagauuuauuu

SEQ ID NO: 2041921 - RNA, 19 nt, Homo sapiens
  misc_RNA (1)...(19): siRNA sense strand
ggaaagaagcauuggauuu

SEQ ID NO: 2041922 - RNA, 19 nt, Homo sapiens
  misc_RNA (1)...(19): siRNA sense strand
aaacaaagcuggauuuacu

SEQ ID NO: 2041923 - RNA, 19 nt, Homo sapiens
  misc_RNA (1)...(19): siRNA sense strand
gaaagauccugauggcuau

SEQ ID NO: 2041924 - RNA, 19 nt, Homo sapiens
  misc_RNA (1)...(19): siRNA sense strand
gcaaacacugcuaaauuua

SEQ ID NO: 2041925 - RNA, 19 nt, Homo sapiens
  misc_RNA (1)...(19): siRNA sense strand
caauggagauucaacagaa

SEQ ID NO: 2041926 - RNA, 19 nt, Homo sapiens
  misc_RNA (1)...(19): siRNA sense strand
uaaaccagaugcaauauca

SEQ ID NO: 2041927 - RNA, 19 nt, Homo sapiens
  misc_RNA (1)...(19): siRNA sense strand
ccagagaaauggaguuguu

SEQ ID NO: 2041928 - RNA, 19 nt, Homo sapiens
  misc_RNA (1)...(19): siRNA sense strand
gaauaaugcuacaaagaca

SEQ ID NO: 2041929 - RNA, 19 nt, Homo sapiens
  misc_RNA (1)...(19): siRNA sense strand
gagaugaugcuauauguga

SEQ ID NO: 2041930 - RNA, 19 nt, Homo sapiens
  misc_RNA (1)...(19): siRNA sense strand
aaacuaagauccagaaugc

SEQ ID NO: 2041931 - RNA, 19 nt, Homo sapiens
  misc_RNA (1)...(19): siRNA sense strand
acaaagacauuucgagaau

SEQ ID NO: 2041932 - RNA, 19 nt, Homo sapiens
  misc_RNA (1)...(19): siRNA sense strand
gaaggacuguugggaaaga

SEQ ID NO: 2041933 - RNA, 19 nt, Homo sapiens
  misc_RNA (1)...(19): siRNA sense strand
gcaacaaagugaaugucuu

SEQ ID NO: 2041934 - RNA, 19 nt, Homo sapiens
  misc_RNA (1)...(19): siRNA sense strand
ucagagcaaucuuugguaa

SEQ ID NO: 2041935 - RNA, 19 nt, Homo sapiens
  misc_RNA (1)...(19): siRNA sense strand
gugaaggacuguugggaaa

SEQ ID NO: 2041936 - RNA, 19 nt, Homo sapiens
  misc_RNA (1)...(19): siRNA sense strand
aucaaaggcuggagaaaua

SEQ ID NO: 2041937 - RNA, 19 nt, Homo sapiens
  misc_RNA (1)...(19): siRNA sense strand
ccagaaugcuguucacugu

SEQ ID NO: 2041938 - RNA, 19 nt, Homo sapiens
  misc_RNA (1)...(19): siRNA sense strand
gaaagaagcauuggauuuu

SEQ ID NO: 2041939 - RNA, 19 nt, Homo sapiens
  misc_RNA (1)...(19): siRNA sense strand
gaggaauucuaugaaguuu

SEQ ID NO: 2041940 - RNA, 19 nt, Homo sapiens
  misc_RNA (1)...(19): siRNA sense strand
uggaacagauggcauaaga

SEQ ID NO: 2041941 - RNA, 19 nt, Homo sapiens
  misc_RNA (1)...(19): siRNA sense strand
uaaagcggaccaaauauga

SEQ ID NO: 2041942 - RNA, 19 nt, Homo sapiens
  misc_RNA (1)...(19): siRNA sense strand
ggguuaauguugaggaauu

SEQ ID NO: 2041943 - RNA, 19 nt, Homo sapiens
  misc_RNA (1)...(19): siRNA sense strand
cgacaacugguauuaauug

SEQ ID NO: 2041944 - RNA, 19 nt, Homo sapiens
  misc_RNA (1)...(19): siRNA sense strand
caaagacauuucgagaauu

SEQ ID NO: 2041945 - RNA, 19 nt, Homo sapiens
  misc_RNA (1)...(19): siRNA sense strand
caacugguauuaauugacu

SEQ ID NO: 2041946 - RNA, 19 nt, Homo sapiens
  misc_RNA (1)...(19): siRNA sense strand
cuaugcagauguucaauau

SEQ ID NO: 2041947 - RNA, 19 nt, Homo sapiens
  misc_RNA (1)...(19): siRNA sense strand
gacaacugguauuaauuga

SEQ ID NO: 2041948 - RNA, 19 nt, Homo sapiens
  misc_RNA (1)...(19): siRNA sense strand
cggcaaacacugcuaaauu

SEQ ID NO: 2041949 - RNA, 19 nt, Homo sapiens
  misc_RNA (1)...(19): siRNA sense strand
ucauguagaucaccaguca

SEQ ID NO: 2041950 - RNA, 19 nt, Homo sapiens
  misc_RNA (1)...(19): siRNA sense strand
caauauggaucggguuaau

SEQ ID NO: 2041951 - RNA, 19 nt, Homo sapiens
  misc_RNA (1)...(19): siRNA sense strand
aauuguaccuguugcauug

SEQ ID NO: 2041952 - RNA, 19 nt, Homo sapiens
  misc_RNA (1)...(19): siRNA sense strand
gcuguucacuguacugauc

SEQ ID NO: 2041953 - RNA, 19 nt, Homo sapiens
  misc_RNA (1)...(19): siRNA sense strand
uauuacaacugguccuauu

SEQ ID NO: 2041954 - RNA, 19 nt, Homo sapiens
  misc_RNA (1)...(19): siRNA sense strand
gcuaugcagauguucaaua

SEQ ID NO: 2041955 - RNA, 19 nt, Homo sapiens
  misc_RNA (1)...(19): siRNA sense strand
gcugggaccugcaaacucu

SEQ ID NO: 2041956 - RNA, 19 nt, Homo sapiens
  misc_RNA (1)...(19): siRNA sense strand
uaagagaugaugcuauaug

SEQ ID NO: 2041957 - RNA, 19 nt, Homo sapiens
  misc_RNA (1)...(19): siRNA sense strand
gcaauggagauucaacaga

SEQ ID NO: 2041958 - RNA, 19 nt, Homo sapiens
  misc_RNA (1)...(19): siRNA sense strand
acagauggcauaagaaaug

SEQ ID NO: 2041959 - RNA, 19 nt, Homo sapiens
  misc_RNA (1)...(19): siRNA sense strand
ugaugaugcuuucaaggaa

SEQ ID NO: 2041960 - RNA, 19 nt, Homo sapiens
  misc_RNA (1)...(19): siRNA sense strand
cagaauaaugcuacaaaga

SEQ ID NO: 2041961 - RNA, 19 nt, Homo sapiens
  misc_RNA (1)...(19): siRNA sense strand
caaagcuggauuuacuaua

SEQ ID NO: 2041962 - RNA, 19 nt, Homo sapiens
  misc_RNA (1)...(19): siRNA sense strand
aagagaugaugcuauaugu

SEQ ID NO: 2041963 - RNA, 19 nt, Homo sapiens
  misc_RNA (1)...(19): siRNA sense strand
caacugguccuauuauugc

SEQ ID NO: 2041964 - RNA, 19 nt, Homo sapiens
  misc_RNA (1)...(19): siRNA sense strand
ucucagcuaugcagauguu

SEQ ID NO: 2041965 - RNA, 19 nt, Homo sapiens
  misc_RNA (1)...(19): siRNA sense strand
gagguucaauacuucuuca

SEQ ID NO: 2041966 - RNA, 19 nt, Homo sapiens
  misc_RNA (1)...(19): siRNA sense strand
aaggaguagugaccgaaua

SEQ ID NO: 2041967 - RNA, 19 nt, Homo sapiens
  misc_RNA (1)...(19): siRNA sense strand
gcauggcccugauucuuuu

SEQ ID NO: 2041968 - RNA, 19 nt, Homo sapiens
  misc_RNA (1)...(19): siRNA sense strand
aagcggaccaaauaugaua

SEQ ID NO: 2041969 - RNA, 19 nt, Homo sapiens
  misc_RNA (1)...(19): siRNA sense strand
guagugaccgaauaucaug

SEQ ID NO: 2041970 - RNA, 19 nt, Homo sapiens
  misc_RNA (1)...(19): siRNA sense strand
gaugcuauaugugaaugga

SEQ ID NO: 2041971 - RNA, 19 nt, Homo sapiens
  misc_RNA (1)...(19): siRNA sense strand
uacaacugguccuauuauu

SEQ ID NO: 2041972 - RNA, 19 nt, Homo sapiens
  misc_RNA (1)...(19): siRNA sense strand
ugaggaauucuaugaaguu

SEQ ID NO: 2041973 - RNA, 19 nt, Homo sapiens
  misc_RNA (1)...(19): siRNA sense strand
guugaggaauucuaugaag

SEQ ID NO: 2041974 - RNA, 19 nt, Homo sapiens
  misc_RNA (1)...(19): siRNA sense strand
gaguagugaccgaauauca

SEQ ID NO: 2041975 - RNA, 19 nt, Homo sapiens
  misc_RNA (1)...(19): siRNA sense strand
agaaugcuguucacuguac

SEQ ID NO: 2041976 - RNA, 19 nt, Homo sapiens
  misc_RNA (1)...(19): siRNA sense strand
uaucaaaggcuggagaaau

SEQ ID NO: 2041977 - RNA, 19 nt, Homo sapiens
  misc_RNA (1)...(19): siRNA sense strand
augcagauguucaauaugg

SEQ ID NO: 2041978 - RNA, 19 nt, Homo sapiens
  misc_RNA (1)...(19): siRNA sense strand
ccugauggcuauccgagau

SEQ ID NO: 2041979 - RNA, 19 nt, Homo sapiens
  misc_RNA (1)...(19): siRNA sense strand
ggaacagauggcauaagaa

SEQ ID NO: 2041980 - RNA, 19 nt, Homo sapiens
  misc_RNA (1)...(19): siRNA sense strand
ggaguggcacgcacagaug

SEQ ID NO: 2041981 - RNA, 19 nt, Homo sapiens
  misc_RNA (1)...(19): siRNA sense strand
uaaagaaucaucgcaccuu

SEQ ID NO: 2041982 - RNA, 19 nt, Homo sapiens
  misc_RNA (1)...(19): siRNA sense strand
ccauggagauuuuaagaga

SEQ ID NO: 2041983 - RNA, 19 nt, Homo sapiens
  misc_RNA (1)...(19): siRNA sense strand
uggaucggguuaauguuga

SEQ ID NO: 2041984 - RNA, 19 nt, Homo sapiens
  misc_RNA (1)...(19): siRNA sense strand
gcgcauggcccugauucuu

SEQ ID NO: 2041985 - RNA, 19 nt, Homo sapiens
  misc_RNA (1)...(19): siRNA sense strand
ucaaaggcuggagaaauaa

SEQ ID NO: 2041986 - RNA, 19 nt, Homo sapiens
  misc_RNA (1)...(19): siRNA sense strand
guguagcaauggagauuca

SEQ ID NO: 2041987 - RNA, 19 nt, Homo sapiens
  misc_RNA (1)...(19): siRNA sense strand
caaacacugcuaaauuuac

SEQ ID NO: 2041988 - RNA, 19 nt, Homo sapiens
  misc_RNA (1)...(19): siRNA sense strand
acaacugguccuauuauug

SEQ ID NO: 2041989 - RNA, 19 nt, Homo sapiens
  misc_RNA (1)...(19): siRNA sense strand
gcuggagaaauaauugaaa

SEQ ID NO: 2041990 - RNA, 19 nt, Homo sapiens
  misc_RNA (1)...(19): siRNA sense strand
uuaaagcggaccaaauaug

SEQ ID NO: 2041991 - RNA, 19 nt, Homo sapiens
  misc_RNA (1)...(19): siRNA sense strand
augauaaccugcacuugga

SEQ ID NO: 2041992 - RNA, 19 nt, Homo sapiens
  misc_RNA (1)...(19): siRNA sense strand
ugcuauaugugaauggaaa

SEQ ID NO: 2041993 - RNA, 19 nt, Homo sapiens
  misc_RNA (1)...(19): siRNA sense strand
uuacaacugguccuauuau

SEQ ID NO: 2041994 - RNA, 19 nt, Homo sapiens
  misc_RNA (1)...(19): siRNA sense strand
uacaaagacauuucgagaa

SEQ ID NO: 2041995 - RNA, 19 nt, Homo sapiens
  misc_RNA (1)...(19): siRNA sense strand
acagaauaaugcuacaaag

SEQ ID NO: 2041996 - RNA, 19 nt, Homo sapiens
  misc_RNA (1)...(19): siRNA sense strand
caacagaauaaugcuacaa

SEQ ID NO: 2041997 - RNA, 19 nt, Homo sapiens
  misc_RNA (1)...(19): siRNA sense strand
cauggugacagaaauguau

SEQ ID NO: 2041998 - RNA, 19 nt, Homo sapiens
  misc_RNA (1)...(19): siRNA sense strand
cgcauggcccugauucuuu

SEQ ID NO: 2041999 - RNA, 19 nt, Homo sapiens
  misc_RNA (1)...(19): siRNA sense strand
aaaugaugaugcuuucaag

SEQ ID NO: 2042000 - RNA, 19 nt, Homo sapiens
  misc_RNA (1)...(19): siRNA sense strand
cagaggauggccuauuaga

SEQ ID NO: 2042001 - RNA, 19 nt, Homo sapiens
  misc_RNA (1)...(19): siRNA sense strand
ugacauggugacagaaaug

SEQ ID NO: 2042002 - RNA, 19 nt, Homo sapiens
  misc_RNA (1)...(19): siRNA sense strand
gguuaauguugaggaauuc

SEQ ID NO: 2042003 - RNA, 19 nt, Homo sapiens
  misc_RNA (1)...(19): siRNA sense strand
gcagauguucaauauggau

SEQ ID NO: 2042004 - RNA, 19 nt, Homo sapiens
  misc_RNA (1)...(19): siRNA sense strand
aaacgcuagcccuaauuaa

SEQ ID NO: 2042005 - RNA, 19 nt, Homo sapiens
  misc_RNA (1)...(19): siRNA sense strand
uguaccuguugcauuguua

SEQ ID NO: 2042006 - RNA, 19 nt, Homo sapiens
  misc_RNA (1)...(19): siRNA sense strand
cucgacaacugguauuaau

SEQ ID NO: 2042007 - RNA, 19 nt, Homo sapiens
  misc_RNA (1)...(19): siRNA sense strand
gaugaugcuauaugugaau

SEQ ID NO: 2042008 - RNA, 19 nt, Homo sapiens
  misc_RNA (1)...(19): siRNA sense strand
aaccugcacuuggaagauu

SEQ ID NO: 2042009 - RNA, 19 nt, Homo sapiens
  misc_RNA (1)...(19): siRNA sense strand
aaugagcugauccaguuua

SEQ ID NO: 2042010 - RNA, 19 nt, Homo sapiens
  misc_RNA (1)...(19): siRNA sense strand
caaaggcuggagaaauaau

SEQ ID NO: 2042011 - RNA, 19 nt, Homo sapiens
  misc_RNA (1)...(19): siRNA sense strand
aaccagaugcaauaucaaa

SEQ ID NO: 2042012 - RNA, 19 nt, Homo sapiens
  misc_RNA (1)...(19): siRNA sense strand
aacgcuagcccuaauuaaa

SEQ ID NO: 2042013 - RNA, 19 nt, Homo sapiens
  misc_RNA (1)...(19): siRNA sense strand
uaauuguaccuguugcauu

SEQ ID NO: 2042014 - RNA, 19 nt, Homo sapiens
  misc_RNA (1)...(19): siRNA sense strand
uuacuaauuguaccuguug

SEQ ID NO: 2042015 - RNA, 19 nt, Homo sapiens
  misc_RNA (1)...(19): siRNA sense strand
uauccgagaugcagguuuu

SEQ ID NO: 2042016 - RNA, 19 nt, Homo sapiens
  misc_RNA (1)...(19): siRNA sense strand
gcacacagaugcagcagaa

SEQ ID NO: 2042017 - RNA, 19 nt, Homo sapiens
  misc_RNA (1)...(19): siRNA sense strand
gaagauagcuccaguuuuc

SEQ ID NO: 2042018 - RNA, 19 nt, Homo sapiens
  misc_RNA (1)...(19): siRNA sense strand
gaaaccagcugaucuaaaa

SEQ ID NO: 2042019 - RNA, 19 nt, Homo sapiens
  misc_RNA (1)...(19): siRNA sense strand
ucaaugcacugacucuuaa

SEQ ID NO: 2042020 - RNA, 19 nt, Homo sapiens
  misc_RNA (1)...(19): siRNA sense strand
gcacugacucuuaauauga

SEQ ID NO: 2042021 - RNA, 19 nt, Homo sapiens
  misc_RNA (1)...(19): siRNA sense strand
ucaaagaccuugcaagaag

SEQ ID NO: 2042022 - RNA, 19 nt, Homo sapiens
  misc_RNA (1)...(19): siRNA sense strand
gggaagcagugauuugaaa

SEQ ID NO: 2042023 - RNA, 19 nt, Homo sapiens
  misc_RNA (1)...(19): siRNA sense strand
ggaacaagauccugaaacu

SEQ ID NO: 2042024 - RNA, 19 nt, Homo sapiens
  misc_RNA (1)...(19): siRNA sense strand
cagaagaggugcuauugga

SEQ ID NO: 2042025 - RNA, 19 nt, Homo sapiens
  misc_RNA (1)...(19): siRNA sense strand
gcagauuuauccacagcua

SEQ ID NO: 2042026 - RNA, 19 nt, Homo sapiens
  misc_RNA (1)...(19): siRNA sense strand
ccagaaaccuuauguugca

SEQ ID NO: 2042027 - RNA, 19 nt, Homo sapiens
  misc_RNA (1)...(19): siRNA sense strand
gccagaaacugcaauagga

SEQ ID NO: 2042028 - RNA, 19 nt, Homo sapiens
  misc_RNA (1)...(19): siRNA sense strand
gaagaggugcuauuggaaa

SEQ ID NO: 2042029 - RNA, 19 nt, Homo sapiens
  misc_RNA (1)...(19): siRNA sense strand
gaauaaugcuguugguucu

SEQ ID NO: 2042030 - RNA, 19 nt, Homo sapiens
  misc_RNA (1)...(19): siRNA sense strand
caaaaggacuaauaccaua

SEQ ID NO: 2042031 - RNA, 19 nt, Homo sapiens
  misc_RNA (1)...(19): siRNA sense strand
ggguggagguuauuucuug

SEQ ID NO: 2042032 - RNA, 19 nt, Homo sapiens
  misc_RNA (1)...(19): siRNA sense strand
uuaacaggauucagacuaa

SEQ ID NO: 2042033 - RNA, 19 nt, Homo sapiens
  misc_RNA (1)...(19): siRNA sense strand
gaagauuuguuagccuuga

SEQ ID NO: 2042034 - RNA, 19 nt, Homo sapiens
  misc_RNA (1)...(19): siRNA sense strand
gaccaaaguuccucaaugc

SEQ ID NO: 2042035 - RNA, 19 nt, Homo sapiens
  misc_RNA (1)...(19): siRNA sense strand
cuagagcaauugaagguaa

SEQ ID NO: 2042036 - RNA, 19 nt, Homo sapiens
  misc_RNA (1)...(19): siRNA sense strand
ccaauacuguggaagaaau

SEQ ID NO: 2042037 - RNA, 19 nt, Homo sapiens
  misc_RNA (1)...(19): siRNA sense strand
gagguuuaaugcauucaaa

SEQ ID NO: 2042038 - RNA, 19 nt, Homo sapiens
  misc_RNA (1)...(19): siRNA sense strand
guuagaggaagauuuguua

SEQ ID NO: 2042039 - RNA, 19 nt, Homo sapiens
  misc_RNA (1)...(19): siRNA sense strand
aacaagauccugaaacuuu

SEQ ID NO: 2042040 - RNA, 19 nt, Homo sapiens
  misc_RNA (1)...(19): siRNA sense strand
gaaaucuccuucaaaagaa

SEQ ID NO: 2042041 - RNA, 19 nt, Homo sapiens
  misc_RNA (1)...(19): siRNA sense strand
cagaagauagcuccaguuu

SEQ ID NO: 2042042 - RNA, 19 nt, Homo sapiens
  misc_RNA (1)...(19): siRNA sense strand
ggaaaccagcugaucuaaa

SEQ ID NO: 2042043 - RNA, 19 nt, Homo sapiens
  misc_RNA (1)...(19): siRNA sense strand
gcaagaaguacuaacuaug

SEQ ID NO: 2042044 - RNA, 19 nt, Homo sapiens
  misc_RNA (1)...(19): siRNA sense strand
uaacaggauucagacuaaa

SEQ ID NO: 2042045 - RNA, 19 nt, Homo sapiens
  misc_RNA (1)...(19): siRNA sense strand
gaacaagauccugaaacuu

SEQ ID NO: 2042046 - RNA, 19 nt, Homo sapiens
  misc_RNA (1)...(19): siRNA sense strand
uaagauugaucgagacaag

SEQ ID NO: 2042047 - RNA, 19 nt, Homo sapiens
  misc_RNA (1)...(19): siRNA sense strand
aggaauugcuacacacuuu

SEQ ID NO: 2042048 - RNA, 19 nt, Homo sapiens
  misc_RNA (1)...(19): siRNA sense strand
gcacgggagucauaacacu

SEQ ID NO: 2042049 - RNA, 19 nt, Homo sapiens
  misc_RNA (1)...(19): siRNA sense strand
gaacacauggacaaaauaa

SEQ ID NO: 2042050 - RNA, 19 nt, Homo sapiens
  misc_RNA (1)...(19): siRNA sense strand
cauacagagucuaagauug

SEQ ID NO: 2042051 - RNA, 19 nt, Homo sapiens
  misc_RNA (1)...(19): siRNA sense strand
uauugcaucugucuuagaa

SEQ ID NO: 2042052 - RNA, 19 nt, Homo sapiens
  misc_RNA (1)...(19): siRNA sense strand
gauaaagaccagaguccaa

SEQ ID NO: 2042053 - RNA, 19 nt, Homo sapiens
  misc_RNA (1)...(19): siRNA sense strand
caagaaguacuaacuaugg

SEQ ID NO: 2042054 - RNA, 19 nt, Homo sapiens
  misc_RNA (1)...(19): siRNA sense strand
caaagaccuugcaagaagu

SEQ ID NO: 2042055 - RNA, 19 nt, Homo sapiens
  misc_RNA (1)...(19): siRNA sense strand
uaaagaagugggaacaaga

SEQ ID NO: 2042056 - RNA, 19 nt, Homo sapiens
  misc_RNA (1)...(19): siRNA sense strand
auacagagucuaagauuga

SEQ ID NO: 2042057 - RNA, 19 nt, Homo sapiens
  misc_RNA (1)...(19): siRNA sense strand
agaccaaaguuccucaaug

SEQ ID NO: 2042058 - RNA, 19 nt, Homo sapiens
  misc_RNA (1)...(19): siRNA sense strand
gaaaccuuauguugcacuu

SEQ ID NO: 2042059 - RNA, 19 nt, Homo sapiens
  misc_RNA (1)...(19): siRNA sense strand
gagaagaauauaugcugaa

SEQ ID NO: 2042060 - RNA, 19 nt, Homo sapiens
  misc_RNA (1)...(19): siRNA sense strand
ucuccaacaucucuaaaga

SEQ ID NO: 2042061 - RNA, 19 nt, Homo sapiens
  misc_RNA (1)...(19): siRNA sense strand
cuaaagaagugggaacaag

SEQ ID NO: 2042062 - RNA, 19 nt, Homo sapiens
  misc_RNA (1)...(19): siRNA sense strand
aggcucaugucgagguuua

SEQ ID NO: 2042063 - RNA, 19 nt, Homo sapiens
  misc_RNA (1)...(19): siRNA sense strand
cauguuagaggaagauuug

SEQ ID NO: 2042064 - RNA, 19 nt, Homo sapiens
  misc_RNA (1)...(19): siRNA sense strand
aggaagagauguguacaga

SEQ ID NO: 2042065 - RNA, 19 nt, Homo sapiens
  misc_RNA (1)...(19): siRNA sense strand
ugcaagaaguacuaacuau

SEQ ID NO: 2042066 - RNA, 19 nt, Homo sapiens
  misc_RNA (1)...(19): siRNA sense strand
auaccauacugcaccauuu

SEQ ID NO: 2042067 - RNA, 19 nt, Homo sapiens
  misc_RNA (1)...(19): siRNA sense strand
ccauacagagucuaagauu

SEQ ID NO: 2042068 - RNA, 19 nt, Homo sapiens
  misc_RNA (1)...(19): siRNA sense strand
ggagucauaacacuaaaca

SEQ ID NO: 2042069 - RNA, 19 nt, Homo sapiens
  misc_RNA (1)...(19): siRNA sense strand
cuucaaagaccuugcaaga

SEQ ID NO: 2042070 - RNA, 19 nt, Homo sapiens
  misc_RNA (1)...(19): siRNA sense strand
uaauaugauucggcagauu

SEQ ID NO: 2042071 - RNA, 19 nt, Homo sapiens
  misc_RNA (1)...(19): siRNA sense strand
acacuaaacagaccaaagu

SEQ ID NO: 2042072 - RNA, 19 nt, Homo sapiens
  misc_RNA (1)...(19): siRNA sense strand
cugaggaagauuugaauaa

SEQ ID NO: 2042073 - RNA, 19 nt, Homo sapiens
  misc_RNA (1)...(19): siRNA sense strand
aaccuuauguugcacuuau

SEQ ID NO: 2042074 - RNA, 19 nt, Homo sapiens
  misc_RNA (1)...(19): siRNA sense strand
ugucgagguuuaaugcauu

SEQ ID NO: 2042075 - RNA, 19 nt, Homo sapiens
  misc_RNA (1)...(19): siRNA sense strand
ggaauugcuacacacuuug

SEQ ID NO: 2042076 - RNA, 19 nt, Homo sapiens
  misc_RNA (1)...(19): siRNA sense strand
aauaugauucggcagauuu

SEQ ID NO: 2042077 - RNA, 19 nt, Homo sapiens
  misc_RNA (1)...(19): siRNA sense strand
agucauaacacuaaacaga

SEQ ID NO: 2042078 - RNA, 19 nt, Homo sapiens
  misc_RNA (1)...(19): siRNA sense strand
gaccuugcaagaaguacua

SEQ ID NO: 2042079 - RNA, 19 nt, Homo sapiens
  misc_RNA (1)...(19): siRNA sense strand
ucucuaaagaucacacuaa

SEQ ID NO: 2042080 - RNA, 19 nt, Homo sapiens
  misc_RNA (1)...(19): siRNA sense strand
uuacuuccuugcauuaaca

SEQ ID NO: 2042081 - RNA, 19 nt, Homo sapiens
  misc_RNA (1)...(19): siRNA sense strand
ugauguggguggagguuau

SEQ ID NO: 2042082 - RNA, 19 nt, Homo sapiens
  misc_RNA (1)...(19): siRNA sense strand
ggaggcucaugucgagguu

SEQ ID NO: 2042083 - RNA, 19 nt, Homo sapiens
  misc_RNA (1)...(19): siRNA sense strand
gaauguccaagcacacaga

SEQ ID NO: 2042084 - RNA, 19 nt, Homo sapiens
  misc_RNA (1)...(19): siRNA sense strand
gaauugcuacacacuuugu

SEQ ID NO: 2042085 - RNA, 19 nt, Homo sapiens
  misc_RNA (1)...(19): siRNA sense strand
cucaaugcacugacucuua

SEQ ID NO: 2042086 - RNA, 19 nt, Homo sapiens
  misc_RNA (1)...(19): siRNA sense strand
gaaguuacugaggaagauu

SEQ ID NO: 2042087 - RNA, 19 nt, Homo sapiens
  misc_RNA (1)...(19): siRNA sense strand
aagaaguacuaacuaugga

SEQ ID NO: 2042088 - RNA, 19 nt, Homo sapiens
  misc_RNA (1)...(19): siRNA sense strand
acacagaugcagcagaaga

SEQ ID NO: 2042089 - RNA, 19 nt, Homo sapiens
  misc_RNA (1)...(19): siRNA sense strand
aaagggagcaggaggaaag

SEQ ID NO: 2042090 - RNA, 19 nt, Homo sapiens
  misc_RNA (1)...(19): siRNA sense strand
auaaugcuguugguucuug

SEQ ID NO: 2042091 - RNA, 19 nt, Homo sapiens
  misc_RNA (1)...(19): siRNA sense strand
aaaagaaguuacugaggaa

SEQ ID NO: 2042092 - RNA, 19 nt, Homo sapiens
  misc_RNA (1)...(19): siRNA sense strand
gaguaucggcuaagucaag

SEQ ID NO: 2042093 - RNA, 19 nt, Homo sapiens
  misc_RNA (1)...(19): siRNA sense strand
gcaucugucuuagaaaauu

SEQ ID NO: 2042094 - RNA, 19 nt, Homo sapiens
  misc_RNA (1)...(19): siRNA sense strand
gcagaagaggugcuauugg

SEQ ID NO: 2042095 - RNA, 19 nt, Homo sapiens
  misc_RNA (1)...(19): siRNA sense strand
ugccagaaaccuuauguug

SEQ ID NO: 2042096 - RNA, 19 nt, Homo sapiens
  misc_RNA (1)...(19): siRNA sense strand
agaaguuacugaggaagau

SEQ ID NO: 2042097 - RNA, 19 nt, Homo sapiens
  misc_RNA (1)...(19): siRNA sense strand
gagaauguccaagcacaca

SEQ ID NO: 2042098 - RNA, 19 nt, Homo sapiens
  misc_RNA (1)...(19): siRNA sense strand
ugccacgacuccaaggaaa

SEQ ID NO: 2042099 - RNA, 19 nt, Homo sapiens
  misc_RNA (1)...(19): siRNA sense strand
uuacugaggaagauuugaa

SEQ ID NO: 2042100 - RNA, 19 nt, Homo sapiens
  misc_RNA (1)...(19): siRNA sense strand
aaagaccuugcaagaagua

SEQ ID NO: 2042101 - RNA, 19 nt, Homo sapiens
  misc_RNA (1)...(19): siRNA sense strand
uagagcaauugaagguaau

SEQ ID NO: 2042102 - RNA, 19 nt, Homo sapiens
  misc_RNA (1)...(19): siRNA sense strand
cagccaauacuguggaaga

SEQ ID NO: 2042103 - RNA, 19 nt, Homo sapiens
  misc_RNA (1)...(19): siRNA sense strand
gaaaauauugcaucugucu

SEQ ID NO: 2042104 - RNA, 19 nt, Homo sapiens
  misc_RNA (1)...(19): siRNA sense strand
ugcacugacucuuaauaug

SEQ ID NO: 2042105 - RNA, 19 nt, Homo sapiens
  misc_RNA (1)...(19): siRNA sense strand
gaaacugcaauaggacugu

SEQ ID NO: 2042106 - RNA, 19 nt, Homo sapiens
  misc_RNA (1)...(19): siRNA sense strand
gcugaauaaugcuguuggu

SEQ ID NO: 2042107 - RNA, 19 nt, Homo sapiens
  misc_RNA (1)...(19): siRNA sense strand
gcauucaaaaggacuaaua

SEQ ID NO: 2042108 - RNA, 19 nt, Homo sapiens
  misc_RNA (1)...(19): siRNA sense strand
cacugacucuuaauaugau

SEQ ID NO: 2042109 - RNA, 19 nt, Homo sapiens
  misc_RNA (1)...(19): siRNA sense strand
aaagaagugggaacaagau

SEQ ID NO: 2042110 - RNA, 19 nt, Homo sapiens
  misc_RNA (1)...(19): siRNA sense strand
auaaagaccagaguccaaa

SEQ ID NO: 2042111 - RNA, 19 nt, Homo sapiens
  misc_RNA (1)...(19): siRNA sense strand
acuauggaguaucggcuaa

SEQ ID NO: 2042112 - RNA, 19 nt, Homo sapiens
  misc_RNA (1)...(19): siRNA sense strand
caauacuguggaagaaauu

SEQ ID NO: 2042113 - RNA, 19 nt, Homo sapiens
  misc_RNA (1)...(19): siRNA sense strand
gaaaauuaccauacagagu

SEQ ID NO: 2042114 - RNA, 19 nt, Homo sapiens
  misc_RNA (1)...(19): siRNA sense strand
aaacugcaauaggacuguu

SEQ ID NO: 2042115 - RNA, 19 nt, Homo sapiens
  misc_RNA (1)...(19): siRNA sense strand
gaaaaggcaaaacagaaga

SEQ ID NO: 2042116 - RNA, 19 nt, Homo sapiens
  misc_RNA (1)...(19): siRNA sense strand
gcacacagaugcagcagaa

SEQ ID NO: 2042117 - RNA, 19 nt, Homo sapiens
  misc_RNA (1)...(19): siRNA sense strand
gaagauagcuccaguuuuc

SEQ ID NO: 2042118 - RNA, 19 nt, Homo sapiens
  misc_RNA (1)...(19): siRNA sense strand
ucaaugcacugacucuuaa

SEQ ID NO: 2042119 - RNA, 19 nt, Homo sapiens
  misc_RNA (1)...(19): siRNA sense strand
gcacugacucuuaauauga

SEQ ID NO: 2042120 - RNA, 19 nt, Homo sapiens
  misc_RNA (1)...(19): siRNA sense strand
ucaaagaccuugcaagaag

SEQ ID NO: 2042121 - RNA, 19 nt, Homo sapiens
  misc_RNA (1)...(19): siRNA sense strand
ggaacaagauccugaaacu

SEQ ID NO: 2042122 - RNA, 19 nt, Homo sapiens
  misc_RNA (1)...(19): siRNA sense strand
cagaagaggugcuauugga

SEQ ID NO: 2042123 - RNA, 19 nt, Homo sapiens
  misc_RNA (1)...(19): siRNA sense strand
gcagauuuauccacagcua

SEQ ID NO: 2042124 - RNA, 19 nt, Homo sapiens
  misc_RNA (1)...(19): siRNA sense strand
ccagaaaccuuauguugca

SEQ ID NO: 2042125 - RNA, 19 nt, Homo sapiens
  misc_RNA (1)...(19): siRNA sense strand
gccagaaacugcaauagga

SEQ ID NO: 2042126 - RNA, 19 nt, Homo sapiens
  misc_RNA (1)...(19): siRNA sense strand
gaagaggugcuauuggaaa

SEQ ID NO: 2042127 - RNA, 19 nt, Homo sapiens
  misc_RNA (1)...(19): siRNA sense strand
gaauaaugcuguugguucu

SEQ ID NO: 2042128 - RNA, 19 nt, Homo sapiens
  misc_RNA (1)...(19): siRNA sense strand
caaaaggacuaauaccaua

SEQ ID NO: 2042129 - RNA, 19 nt, Homo sapiens
  misc_RNA (1)...(19): siRNA sense strand
ggguggagguuauuucuug

SEQ ID NO: 2042130 - RNA, 19 nt, Homo sapiens
  misc_RNA (1)...(19): siRNA sense strand
uuaacaggauucagacuaa

SEQ ID NO: 2042131 - RNA, 19 nt, Homo sapiens
  misc_RNA (1)...(19): siRNA sense strand
gaagauuuguuagccuuga

SEQ ID NO: 2042132 - RNA, 19 nt, Homo sapiens
  misc_RNA (1)...(19): siRNA sense strand
gaccaaaguuccucaaugc

SEQ ID NO: 2042133 - RNA, 19 nt, Homo sapiens
  misc_RNA (1)...(19): siRNA sense strand
cuagagcaauugaagguaa

SEQ ID NO: 2042134 - RNA, 19 nt, Homo sapiens
  misc_RNA (1)...(19): siRNA sense strand
ccaauacuguggaagaaau

SEQ ID NO: 2042135 - RNA, 19 nt, Homo sapiens
  misc_RNA (1)...(19): siRNA sense strand
gagguuuaaugcauucaaa

SEQ ID NO: 2042136 - RNA, 19 nt, Homo sapiens
  misc_RNA (1)...(19): siRNA sense strand
guuagaggaagauuuguua

SEQ ID NO: 2042137 - RNA, 19 nt, Homo sapiens
  misc_RNA (1)...(19): siRNA sense strand
aacaagauccugaaacuuu

SEQ ID NO: 2042138 - RNA, 19 nt, Homo sapiens
  misc_RNA (1)...(19): siRNA sense strand
gaaaucuccuucaaaagaa

SEQ ID NO: 2042139 - RNA, 19 nt, Homo sapiens
  misc_RNA (1)...(19): siRNA sense strand
cagaagauagcuccaguuu

SEQ ID NO: 2042140 - RNA, 19 nt, Homo sapiens
  misc_RNA (1)...(19): siRNA sense strand
gcaagaaguacuaacuaug

SEQ ID NO: 2042141 - RNA, 19 nt, Homo sapiens
  misc_RNA (1)...(19): siRNA sense strand
uaacaggauucagacuaaa

SEQ ID NO: 2042142 - RNA, 19 nt, Homo sapiens
  misc_RNA (1)...(19): siRNA sense strand
gaacaagauccugaaacuu

SEQ ID NO: 2042143 - RNA, 19 nt, Homo sapiens
  misc_RNA (1)...(19): siRNA sense strand
uaagauugaucgagacaag

SEQ ID NO: 2042144 - RNA, 19 nt, Homo sapiens
  misc_RNA (1)...(19): siRNA sense strand
aggaauugcuacacacuuu

SEQ ID NO: 2042145 - RNA, 19 nt, Homo sapiens
  misc_RNA (1)...(19): siRNA sense strand
gcacgggagucauaacacu

SEQ ID NO: 2042146 - RNA, 19 nt, Homo sapiens
  misc_RNA (1)...(19): siRNA sense strand
gaacacauggacaaaauaa

SEQ ID NO: 2042147 - RNA, 19 nt, Homo sapiens
  misc_RNA (1)...(19): siRNA sense strand
cauacagagucuaagauug

SEQ ID NO: 2042148 - RNA, 19 nt, Homo sapiens
  misc_RNA (1)...(19): siRNA sense strand
uauugcaucugucuuagaa

SEQ ID NO: 2042149 - RNA, 19 nt, Homo sapiens
  misc_RNA (1)...(19): siRNA sense strand
caagaaguacuaacuaugg

SEQ ID NO: 2042150 - RNA, 19 nt, Homo sapiens
  misc_RNA (1)...(19): siRNA sense strand
caaagaccuugcaagaagu

SEQ ID NO: 2042151 - RNA, 19 nt, Homo sapiens
  misc_RNA (1)...(19): siRNA sense strand
uaaagaagugggaacaaga

SEQ ID NO: 2042152 - RNA, 19 nt, Homo sapiens
  misc_RNA (1)...(19): siRNA sense strand
auacagagucuaagauuga

SEQ ID NO: 2042153 - RNA, 19 nt, Homo sapiens
  misc_RNA (1)...(19): siRNA sense strand
agaccaaaguuccucaaug

SEQ ID NO: 2042154 - RNA, 19 nt, Homo sapiens
  misc_RNA (1)...(19): siRNA sense strand
gaaaccuuauguugcacuu

SEQ ID NO: 2042155 - RNA, 19 nt, Homo sapiens
  misc_RNA (1)...(19): siRNA sense strand
gagaagaauauaugcugaa

SEQ ID NO: 2042156 - RNA, 19 nt, Homo sapiens
  misc_RNA (1)...(19): siRNA sense strand
ucuccaacaucucuaaaga

SEQ ID NO: 2042157 - RNA, 19 nt, Homo sapiens
  misc_RNA (1)...(19): siRNA sense strand
aggcucaugucgagguuua

SEQ ID NO: 2042158 - RNA, 19 nt, Homo sapiens
  misc_RNA (1)...(19): siRNA sense strand
cauguuagaggaagauuug

SEQ ID NO: 2042159 - RNA, 19 nt, Homo sapiens
  misc_RNA (1)...(19): siRNA sense strand
aggaagagauguguacaga

SEQ ID NO: 2042160 - RNA, 19 nt, Homo sapiens
  misc_RNA (1)...(19): siRNA sense strand
cuaaagaagugggaacaag

SEQ ID NO: 2042161 - RNA, 19 nt, Homo sapiens
  misc_RNA (1)...(19): siRNA sense strand
ugcaagaaguacuaacuau

SEQ ID NO: 2042162 - RNA, 19 nt, Homo sapiens
  misc_RNA (1)...(19): siRNA sense strand
auaccauacugcaccauuu

SEQ ID NO: 2042163 - RNA, 19 nt, Homo sapiens
  misc_RNA (1)...(19): siRNA sense strand
ccauacagagucuaagauu

SEQ ID NO: 2042164 - RNA, 19 nt, Homo sapiens
  misc_RNA (1)...(19): siRNA sense strand
ggagucauaacacuaaaca

SEQ ID NO: 2042165 - RNA, 19 nt, Homo sapiens
  misc_RNA (1)...(19): siRNA sense strand
cuucaaagaccuugcaaga

SEQ ID NO: 2042166 - RNA, 19 nt, Homo sapiens
  misc_RNA (1)...(19): siRNA sense strand
uaauaugauucggcagauu

SEQ ID NO: 2042167 - RNA, 19 nt, Homo sapiens
  misc_RNA (1)...(19): siRNA sense strand
acacuaaacagaccaaagu

SEQ ID NO: 2042168 - RNA, 19 nt, Homo sapiens
  misc_RNA (1)...(19): siRNA sense strand
aaccuuauguugcacuuau

SEQ ID NO: 2042169 - RNA, 19 nt, Homo sapiens
  misc_RNA (1)...(19): siRNA sense strand
aauaugauucggcagauuu

SEQ ID NO: 2042170 - RNA, 19 nt, Homo sapiens
  misc_RNA (1)...(19): siRNA sense strand
ggaauugcuacacacuuug

SEQ ID NO: 2042171 - RNA, 19 nt, Homo sapiens
  misc_RNA (1)...(19): siRNA sense strand
ugucgagguuuaaugcauu

SEQ ID NO: 2042172 - RNA, 19 nt, Homo sapiens
  misc_RNA (1)...(19): siRNA sense strand
agucauaacacuaaacaga

SEQ ID NO: 2042173 - RNA, 19 nt, Homo sapiens
  misc_RNA (1)...(19): siRNA sense strand
gaccuugcaagaaguacua

SEQ ID NO: 2042174 - RNA, 19 nt, Homo sapiens
  misc_RNA (1)...(19): siRNA sense strand
ucucuaaagaucacacuaa

SEQ ID NO: 2042175 - RNA, 19 nt, Homo sapiens
  misc_RNA (1)...(19): siRNA sense strand
uuacuuccuugcauuaaca

SEQ ID NO: 2042176 - RNA, 19 nt, Homo sapiens
  misc_RNA (1)...(19): siRNA sense strand
ugauguggguggagguuau

SEQ ID NO: 2042177 - RNA, 19 nt, Homo sapiens
  misc_RNA (1)...(19): siRNA sense strand
ggaggcucaugucgagguu

SEQ ID NO: 2042178 - RNA, 19 nt, Homo sapiens
  misc_RNA (1)...(19): siRNA sense strand
gaauguccaagcacacaga

SEQ ID NO: 2042179 - RNA, 19 nt, Homo sapiens
  misc_RNA (1)...(19): siRNA sense strand
gaauugcuacacacuuugu

SEQ ID NO: 2042180 - RNA, 19 nt, Homo sapiens
  misc_RNA (1)...(19): siRNA sense strand
cucaaugcacugacucuua

SEQ ID NO: 2042181 - RNA, 19 nt, Homo sapiens
  misc_RNA (1)...(19): siRNA sense strand
aagaaguacuaacuaugga

SEQ ID NO: 2042182 - RNA, 19 nt, Homo sapiens
  misc_RNA (1)...(19): siRNA sense strand
acacagaugcagcagaaga

SEQ ID NO: 2042183 - RNA, 19 nt, Homo sapiens
  misc_RNA (1)...(19): siRNA sense strand
aaagggagcaggaggaaag

SEQ ID NO: 2042184 - RNA, 19 nt, Homo sapiens
  misc_RNA (1)...(19): siRNA sense strand
auaaugcuguugguucuug

SEQ ID NO: 2042185 - RNA, 19 nt, Homo sapiens
  misc_RNA (1)...(19): siRNA sense strand
gaguaucggcuaagucaag

SEQ ID NO: 2042186 - RNA, 19 nt, Homo sapiens
  misc_RNA (1)...(19): siRNA sense strand
gcaucugucuuagaaaauu

SEQ ID NO: 2042187 - RNA, 19 nt, Homo sapiens
  misc_RNA (1)...(19): siRNA sense strand
gcagaagaggugcuauugg

SEQ ID NO: 2042188 - RNA, 19 nt, Homo sapiens
  misc_RNA (1)...(19): siRNA sense strand
ugccagaaaccuuauguug

SEQ ID NO: 2042189 - RNA, 19 nt, Homo sapiens
  misc_RNA (1)...(19): siRNA sense strand
gagaauguccaagcacaca

SEQ ID NO: 2042190 - RNA, 19 nt, Homo sapiens
  misc_RNA (1)...(19): siRNA sense strand
ugccacgacuccaaggaaa

SEQ ID NO: 2042191 - RNA, 19 nt, Homo sapiens
  misc_RNA (1)...(19): siRNA sense strand
aaagaccuugcaagaagua

SEQ ID NO: 2042192 - RNA, 19 nt, Homo sapiens
  misc_RNA (1)...(19): siRNA sense strand
uagagcaauugaagguaau

SEQ ID NO: 2042193 - RNA, 19 nt, Homo sapiens
  misc_RNA (1)...(19): siRNA sense strand
cagccaauacuguggaaga

SEQ ID NO: 2042194 - RNA, 19 nt, Homo sapiens
  misc_RNA (1)...(19): siRNA sense strand
gaaaauauugcaucugucu

SEQ ID NO: 2042195 - RNA, 19 nt, Homo sapiens
  misc_RNA (1)...(19): siRNA sense strand
ugcacugacucuuaauaug

SEQ ID NO: 2042196 - RNA, 19 nt, Homo sapiens
  misc_RNA (1)...(19): siRNA sense strand
gaaacugcaauaggacugu

SEQ ID NO: 2042197 - RNA, 19 nt, Homo sapiens
  misc_RNA (1)...(19): siRNA sense strand
gcugaauaaugcuguuggu

SEQ ID NO: 2042198 - RNA, 19 nt, Homo sapiens
  misc_RNA (1)...(19): siRNA sense strand
gcauucaaaaggacuaaua

SEQ ID NO: 2042199 - RNA, 19 nt, Homo sapiens
  misc_RNA (1)...(19): siRNA sense strand
cacugacucuuaauaugau

SEQ ID NO: 2042200 - RNA, 19 nt, Homo sapiens
  misc_RNA (1)...(19): siRNA sense strand
aaagaagugggaacaagau

SEQ ID NO: 2042201 - RNA, 19 nt, Homo sapiens
  misc_RNA (1)...(19): siRNA sense strand
acuauggaguaucggcuaa

SEQ ID NO: 2042202 - RNA, 19 nt, Homo sapiens
  misc_RNA (1)...(19): siRNA sense strand
caauacuguggaagaaauu

SEQ ID NO: 2042203 - RNA, 19 nt, Homo sapiens
  misc_RNA (1)...(19): siRNA sense strand
gaaaauuaccauacagagu

SEQ ID NO: 2042204 - RNA, 19 nt, Homo sapiens
  misc_RNA (1)...(19): siRNA sense strand
aaacugcaauaggacuguu

SEQ ID NO: 2042205 - RNA, 19 nt, Homo sapiens
  misc_RNA (1)...(19): siRNA sense strand
gaaaaggcaaaacagaaga

SEQ ID NO: 2042206 - RNA, 19 nt, Homo sapiens
  misc_RNA (1)...(19): siRNA sense strand
auccacagcuaaagaagug

SEQ ID NO: 2042207 - RNA, 19 nt, Homo sapiens
  misc_RNA (1)...(19): siRNA sense strand
gagauguggaggcucaugu

SEQ ID NO: 2042208 - RNA, 19 nt, Homo sapiens
  misc_RNA (1)...(19): siRNA sense strand
uggaguaucggcuaaguca

SEQ ID NO: 2042209 - RNA, 19 nt, Homo sapiens
  misc_RNA (1)...(19): siRNA sense strand
ggaacacauggacaaaaua

SEQ ID NO: 2042210 - RNA, 19 nt, Homo sapiens
  misc_RNA (1)...(19): siRNA sense strand
auaggacuguucccugaug

SEQ ID NO: 2042211 - RNA, 19 nt, Homo sapiens
  misc_RNA (1)...(19): siRNA sense strand
gcuaaagaagugggaacaa

SEQ ID NO: 2042212 - RNA, 19 nt, Homo sapiens
  misc_RNA (1)...(19): siRNA sense strand
aaacuuacagcaagauggu

SEQ ID NO: 2042213 - RNA, 19 nt, Homo sapiens
  misc_RNA (1)...(19): siRNA sense strand
uaccauacagagucuaaga

SEQ ID NO: 2042214 - RNA, 19 nt, Homo sapiens
  misc_RNA (1)...(19): siRNA sense strand
cucaguccaugggcaauuu

SEQ ID NO: 2042215 - RNA, 19 nt, Homo sapiens
  misc_RNA (1)...(19): siRNA sense strand
gccaauacuguggaagaaa

SEQ ID NO: 2042216 - RNA, 19 nt, Homo sapiens
  misc_RNA (1)...(19): siRNA sense strand
gcacacagaugcagcagaa

SEQ ID NO: 2042217 - RNA, 19 nt, Homo sapiens
  misc_RNA (1)...(19): siRNA sense strand
gaagauagcuccaguuuuc

SEQ ID NO: 2042218 - RNA, 19 nt, Homo sapiens
  misc_RNA (1)...(19): siRNA sense strand
gaaaccagcugaucuaaaa

SEQ ID NO: 2042219 - RNA, 19 nt, Homo sapiens
  misc_RNA (1)...(19): siRNA sense strand
ucaaugcacugacucuuaa

SEQ ID NO: 2042220 - RNA, 19 nt, Homo sapiens
  misc_RNA (1)...(19): siRNA sense strand
gcacugacucuuaauauga

SEQ ID NO: 2042221 - RNA, 19 nt, Homo sapiens
  misc_RNA (1)...(19): siRNA sense strand
ucaaagaccuugcaagaag

SEQ ID NO: 2042222 - RNA, 19 nt, Homo sapiens
  misc_RNA (1)...(19): siRNA sense strand
gggaagcagugauuugaaa

SEQ ID NO: 2042223 - RNA, 19 nt, Homo sapiens
  misc_RNA (1)...(19): siRNA sense strand
ggaacaagauccugaaacu

SEQ ID NO: 2042224 - RNA, 19 nt, Homo sapiens
  misc_RNA (1)...(19): siRNA sense strand
cagaagaggugcuauugga

SEQ ID NO: 2042225 - RNA, 19 nt, Homo sapiens
  misc_RNA (1)...(19): siRNA sense strand
gcagauuuauccacagcua

SEQ ID NO: 2042226 - RNA, 19 nt, Homo sapiens
  misc_RNA (1)...(19): siRNA sense strand
ccagaaaccuuauguugca

SEQ ID NO: 2042227 - RNA, 19 nt, Homo sapiens
  misc_RNA (1)...(19): siRNA sense strand
gccagaaacugcaauagga

SEQ ID NO: 2042228 - RNA, 19 nt, Homo sapiens
  misc_RNA (1)...(19): siRNA sense strand
gaagaggugcuauuggaaa

SEQ ID NO: 2042229 - RNA, 19 nt, Homo sapiens
  misc_RNA (1)...(19): siRNA sense strand
gaauaaugcuguugguucu

SEQ ID NO: 2042230 - RNA, 19 nt, Homo sapiens
  misc_RNA (1)...(19): siRNA sense strand
caaaaggacuaauaccaua

SEQ ID NO: 2042231 - RNA, 19 nt, Homo sapiens
  misc_RNA (1)...(19): siRNA sense strand
ggguggagguuauuucuug

SEQ ID NO: 2042232 - RNA, 19 nt, Homo sapiens
  misc_RNA (1)...(19): siRNA sense strand
uuaacaggauucagacuaa

SEQ ID NO: 2042233 - RNA, 19 nt, Homo sapiens
  misc_RNA (1)...(19): siRNA sense strand
gaagauuuguuagccuuga

SEQ ID NO: 2042234 - RNA, 19 nt, Homo sapiens
  misc_RNA (1)...(19): siRNA sense strand
gaccaaaguuccucaaugc

SEQ ID NO: 2042235 - RNA, 19 nt, Homo sapiens
  misc_RNA (1)...(19): siRNA sense strand
cuagagcaauugaagguaa

SEQ ID NO: 2042236 - RNA, 19 nt, Homo sapiens
  misc_RNA (1)...(19): siRNA sense strand
ccaauacuguggaagaaau

SEQ ID NO: 2042237 - RNA, 19 nt, Homo sapiens
  misc_RNA (1)...(19): siRNA sense strand
gagguuuaaugcauucaaa

SEQ ID NO: 2042238 - RNA, 19 nt, Homo sapiens
  misc_RNA (1)...(19): siRNA sense strand
guuagaggaagauuuguua

SEQ ID NO: 2042239 - RNA, 19 nt, Homo sapiens
  misc_RNA (1)...(19): siRNA sense strand
aacaagauccugaaacuuu

SEQ ID NO: 2042240 - RNA, 19 nt, Homo sapiens
  misc_RNA (1)...(19): siRNA sense strand
gaaaucuccuucaaaagaa

SEQ ID NO: 2042241 - RNA, 19 nt, Homo sapiens
  misc_RNA (1)...(19): siRNA sense strand
cagaagauagcuccaguuu

SEQ ID NO: 2042242 - RNA, 19 nt, Homo sapiens
  misc_RNA (1)...(19): siRNA sense strand
ggaaaccagcugaucuaaa

SEQ ID NO: 2042243 - RNA, 19 nt, Homo sapiens
  misc_RNA (1)...(19): siRNA sense strand
gcaagaaguacuaacuaug

SEQ ID NO: 2042244 - RNA, 19 nt, Homo sapiens
  misc_RNA (1)...(19): siRNA sense strand
uaacaggauucagacuaaa

SEQ ID NO: 2042245 - RNA, 19 nt, Homo sapiens
  misc_RNA (1)...(19): siRNA sense strand
gaacaagauccugaaacuu

SEQ ID NO: 2042246 - RNA, 19 nt, Homo sapiens
  misc_RNA (1)...(19): siRNA sense strand
uaagauugaucgagacaag

SEQ ID NO: 2042247 - RNA, 19 nt, Homo sapiens
  misc_RNA (1)...(19): siRNA sense strand
aggaauugcuacacacuuu

SEQ ID NO: 2042248 - RNA, 19 nt, Homo sapiens
  misc_RNA (1)...(19): siRNA sense strand
gcacgggagucauaacacu

SEQ ID NO: 2042249 - RNA, 19 nt, Homo sapiens
  misc_RNA (1)...(19): siRNA sense strand
gaacacauggacaaaauaa

SEQ ID NO: 2042250 - RNA, 19 nt, Homo sapiens
  misc_RNA (1)...(19): siRNA sense strand
cauacagagucuaagauug

SEQ ID NO: 2042251 - RNA, 19 nt, Homo sapiens
  misc_RNA (1)...(19): siRNA sense strand
uauugcaucugucuuagaa

SEQ ID NO: 2042252 - RNA, 19 nt, Homo sapiens
  misc_RNA (1)...(19): siRNA sense strand
gauaaagaccagaguccaa

SEQ ID NO: 2042253 - RNA, 19 nt, Homo sapiens
  misc_RNA (1)...(19): siRNA sense strand
caagaaguacuaacuaugg

SEQ ID NO: 2042254 - RNA, 19 nt, Homo sapiens
  misc_RNA (1)...(19): siRNA sense strand
caaagaccuugcaagaagu

SEQ ID NO: 2042255 - RNA, 19 nt, Homo sapiens
  misc_RNA (1)...(19): siRNA sense strand
uaaagaagugggaacaaga

SEQ ID NO: 2042256 - RNA, 19 nt, Homo sapiens
  misc_RNA (1)...(19): siRNA sense strand
auacagagucuaagauuga

SEQ ID NO: 2042257 - RNA, 19 nt, Homo sapiens
  misc_RNA (1)...(19): siRNA sense strand
agaccaaaguuccucaaug

SEQ ID NO: 2042258 - RNA, 19 nt, Homo sapiens
  misc_RNA (1)...(19): siRNA sense strand
gaaaccuuauguugcacuu

SEQ ID NO: 2042259 - RNA, 19 nt, Homo sapiens
  misc_RNA (1)...(19): siRNA sense strand
gagaagaauauaugcugaa

SEQ ID NO: 2042260 - RNA, 19 nt, Homo sapiens
  misc_RNA (1)...(19): siRNA sense strand
ucuccaacaucucuaaaga

SEQ ID NO: 2042261 - RNA, 19 nt, Homo sapiens
  misc_RNA (1)...(19): siRNA sense strand
cuaaagaagugggaacaag

SEQ ID NO: 2042262 - RNA, 19 nt, Homo sapiens
  misc_RNA (1)...(19): siRNA sense strand
aggcucaugucgagguuua

SEQ ID NO: 2042263 - RNA, 19 nt, Homo sapiens
  misc_RNA (1)...(19): siRNA sense strand
cauguuagaggaagauuug

SEQ ID NO: 2042264 - RNA, 19 nt, Homo sapiens
  misc_RNA (1)...(19): siRNA sense strand
aggaagagauguguacaga

SEQ ID NO: 2042265 - RNA, 19 nt, Homo sapiens
  misc_RNA (1)...(19): siRNA sense strand
ugcaagaaguacuaacuau

SEQ ID NO: 2042266 - RNA, 19 nt, Homo sapiens
  misc_RNA (1)...(19): siRNA sense strand
auaccauacugcaccauuu

SEQ ID NO: 2042267 - RNA, 19 nt, Homo sapiens
  misc_RNA (1)...(19): siRNA sense strand
ccauacagagucuaagauu

SEQ ID NO: 2042268 - RNA, 19 nt, Homo sapiens
  misc_RNA (1)...(19): siRNA sense strand
ggagucauaacacuaaaca

SEQ ID NO: 2042269 - RNA, 19 nt, Homo sapiens
  misc_RNA (1)...(19): siRNA sense strand
cuucaaagaccuugcaaga

SEQ ID NO: 2042270 - RNA, 19 nt, Homo sapiens
  misc_RNA (1)...(19): siRNA sense strand
uaauaugauucggcagauu

SEQ ID NO: 2042271 - RNA, 19 nt, Homo sapiens
  misc_RNA (1)...(19): siRNA sense strand
acacuaaacagaccaaagu

SEQ ID NO: 2042272 - RNA, 19 nt, Homo sapiens
  misc_RNA (1)...(19): siRNA sense strand
cugaggaagauuugaauaa

SEQ ID NO: 2042273 - RNA, 19 nt, Homo sapiens
  misc_RNA (1)...(19): siRNA sense strand
aaccuuauguugcacuuau

SEQ ID NO: 2042274 - RNA, 19 nt, Homo sapiens
  misc_RNA (1)...(19): siRNA sense strand
ugucgagguuuaaugcauu

SEQ ID NO: 2042275 - RNA, 19 nt, Homo sapiens
  misc_RNA (1)...(19): siRNA sense strand
ggaauugcuacacacuuug

SEQ ID NO: 2042276 - RNA, 19 nt, Homo sapiens
  misc_RNA (1)...(19): siRNA sense strand
aauaugauucggcagauuu

SEQ ID NO: 2042277 - RNA, 19 nt, Homo sapiens
  misc_RNA (1)...(19): siRNA sense strand
agucauaacacuaaacaga

SEQ ID NO: 2042278 - RNA, 19 nt, Homo sapiens
  misc_RNA (1)...(19): siRNA sense strand
gaccuugcaagaaguacua

SEQ ID NO: 2042279 - RNA, 19 nt, Homo sapiens
  misc_RNA (1)...(19): siRNA sense strand
ucucuaaagaucacacuaa

SEQ ID NO: 2042280 - RNA, 19 nt, Homo sapiens
  misc_RNA (1)...(19): siRNA sense strand
uuacuuccuugcauuaaca

SEQ ID NO: 2042281 - RNA, 19 nt, Homo sapiens
  misc_RNA (1)...(19): siRNA sense strand
ugauguggguggagguuau

SEQ ID NO: 2042282 - RNA, 19 nt, Homo sapiens
  misc_RNA (1)...(19): siRNA sense strand
ggaggcucaugucgagguu

SEQ ID NO: 2042283 - RNA, 19 nt, Homo sapiens
  misc_RNA (1)...(19): siRNA sense strand
gaauguccaagcacacaga

SEQ ID NO: 2042284 - RNA, 19 nt, Homo sapiens
  misc_RNA (1)...(19): siRNA sense strand
gaauugcuacacacuuugu

SEQ ID NO: 2042285 - RNA, 19 nt, Homo sapiens
  misc_RNA (1)...(19): siRNA sense strand
cucaaugcacugacucuua

SEQ ID NO: 2042286 - RNA, 19 nt, Homo sapiens
  misc_RNA (1)...(19): siRNA sense strand
gaaguuacugaggaagauu

SEQ ID NO: 2042287 - RNA, 19 nt, Homo sapiens
  misc_RNA (1)...(19): siRNA sense strand
aagaaguacuaacuaugga

SEQ ID NO: 2042288 - RNA, 19 nt, Homo sapiens
  misc_RNA (1)...(19): siRNA sense strand
acacagaugcagcagaaga

SEQ ID NO: 2042289 - RNA, 19 nt, Homo sapiens
  misc_RNA (1)...(19): siRNA sense strand
aaagggagcaggaggaaag

SEQ ID NO: 2042290 - RNA, 19 nt, Homo sapiens
  misc_RNA (1)...(19): siRNA sense strand
auaaugcuguugguucuug

SEQ ID NO: 2042291 - RNA, 19 nt, Homo sapiens
  misc_RNA (1)...(19): siRNA sense strand
aaaagaaguuacugaggaa

SEQ ID NO: 2042292 - RNA, 19 nt, Homo sapiens
  misc_RNA (1)...(19): siRNA sense strand
gaguaucggcuaagucaag

SEQ ID NO: 2042293 - RNA, 19 nt, Homo sapiens
  misc_RNA (1)...(19): siRNA sense strand
gcaucugucuuagaaaauu

SEQ ID NO: 2042294 - RNA, 19 nt, Homo sapiens
  misc_RNA (1)...(19): siRNA sense strand
gcagaagaggugcuauugg

SEQ ID NO: 2042295 - RNA, 19 nt, Homo sapiens
  misc_RNA (1)...(19): siRNA sense strand
ugccagaaaccuuauguug

SEQ ID NO: 2042296 - RNA, 19 nt, Homo sapiens
  misc_RNA (1)...(19): siRNA sense strand
agaaguuacugaggaagau

SEQ ID NO: 2042297 - RNA, 19 nt, Homo sapiens
  misc_RNA (1)...(19): siRNA sense strand
gagaauguccaagcacaca

SEQ ID NO: 2042298 - RNA, 19 nt, Homo sapiens
  misc_RNA (1)...(19): siRNA sense strand
ugccacgacuccaaggaaa

SEQ ID NO: 2042299 - RNA, 19 nt, Homo sapiens
  misc_RNA (1)...(19): siRNA sense strand
uuacugaggaagauuugaa

SEQ ID NO: 2042300 - RNA, 19 nt, Homo sapiens
  misc_RNA (1)...(19): siRNA sense strand
aaagaccuugcaagaagua

SEQ ID NO: 2042301 - RNA, 19 nt, Homo sapiens
  misc_RNA (1)...(19): siRNA sense strand
uagagcaauugaagguaau

SEQ ID NO: 2042302 - RNA, 19 nt, Homo sapiens
  misc_RNA (1)...(19): siRNA sense strand
cagccaauacuguggaaga

SEQ ID NO: 2042303 - RNA, 19 nt, Homo sapiens
  misc_RNA (1)...(19): siRNA sense strand
gaaaauauugcaucugucu

SEQ ID NO: 2042304 - RNA, 19 nt, Homo sapiens
  misc_RNA (1)...(19): siRNA sense strand
ugcacugacucuuaauaug

SEQ ID NO: 2042305 - RNA, 19 nt, Homo sapiens
  misc_RNA (1)...(19): siRNA sense strand
gaaacugcaauaggacugu

SEQ ID NO: 2042306 - RNA, 19 nt, Homo sapiens
  misc_RNA (1)...(19): siRNA sense strand
gcugaauaaugcuguuggu

SEQ ID NO: 2042307 - RNA, 19 nt, Homo sapiens
  misc_RNA (1)...(19): siRNA sense strand
gcauucaaaaggacuaaua

SEQ ID NO: 2042308 - RNA, 19 nt, Homo sapiens
  misc_RNA (1)...(19): siRNA sense strand
cacugacucuuaauaugau

SEQ ID NO: 2042309 - RNA, 19 nt, Homo sapiens
  misc_RNA (1)...(19): siRNA sense strand
aaagaagugggaacaagau

SEQ ID NO: 2042310 - RNA, 19 nt, Homo sapiens
  misc_RNA (1)...(19): siRNA sense strand
auaaagaccagaguccaaa

SEQ ID NO: 2042311 - RNA, 19 nt, Homo sapiens
  misc_RNA (1)...(19): siRNA sense strand
acuauggaguaucggcuaa

SEQ ID NO: 2042312 - RNA, 19 nt, Homo sapiens
  misc_RNA (1)...(19): siRNA sense strand
caauacuguggaagaaauu

SEQ ID NO: 2042313 - RNA, 19 nt, Homo sapiens
  misc_RNA (1)...(19): siRNA sense strand
gaaaauuaccauacagagu

SEQ ID NO: 2042314 - RNA, 19 nt, Homo sapiens
  misc_RNA (1)...(19): siRNA sense strand
aaacugcaauaggacuguu

SEQ ID NO: 2042315 - RNA, 19 nt, Homo sapiens
  misc_RNA (1)...(19): siRNA sense strand
gaaaaggcaaaacagaaga

SEQ ID NO: 2042316 - RNA, 19 nt, Homo sapiens
  misc_RNA (1)...(19): siRNA sense strand
gcacacagaugcagcagaa

SEQ ID NO: 2042317 - RNA, 19 nt, Homo sapiens
  misc_RNA (1)...(19): siRNA sense strand
gaagauagcuccaguuuuc

SEQ ID NO: 2042318 - RNA, 19 nt, Homo sapiens
  misc_RNA (1)...(19): siRNA sense strand
ucaaugcacugacucuuaa

SEQ ID NO: 2042319 - RNA, 19 nt, Homo sapiens
  misc_RNA (1)...(19): siRNA sense strand
gcacugacucuuaauauga

SEQ ID NO: 2042320 - RNA, 19 nt, Homo sapiens
  misc_RNA (1)...(19): siRNA sense strand
ucaaagaccuugcaagaag

SEQ ID NO: 2042321 - RNA, 19 nt, Homo sapiens
  misc_RNA (1)...(19): siRNA sense strand
ggaacaagauccugaaacu

SEQ ID NO: 2042322 - RNA, 19 nt, Homo sapiens
  misc_RNA (1)...(19): siRNA sense strand
cagaagaggugcuauugga

SEQ ID NO: 2042323 - RNA, 19 nt, Homo sapiens
  misc_RNA (1)...(19): siRNA sense strand
gcagauuuauccacagcua

SEQ ID NO: 2042324 - RNA, 19 nt, Homo sapiens
  misc_RNA (1)...(19): siRNA sense strand
ccagaaaccuuauguugca

SEQ ID NO: 2042325 - RNA, 19 nt, Homo sapiens
  misc_RNA (1)...(19): siRNA sense strand
gccagaaacugcaauagga

SEQ ID NO: 2042326 - RNA, 19 nt, Homo sapiens
  misc_RNA (1)...(19): siRNA sense strand
gaagaggugcuauuggaaa

SEQ ID NO: 2042327 - RNA, 19 nt, Homo sapiens
  misc_RNA (1)...(19): siRNA sense strand
gaauaaugcuguugguucu

SEQ ID NO: 2042328 - RNA, 19 nt, Homo sapiens
  misc_RNA (1)...(19): siRNA sense strand
caaaaggacuaauaccaua

SEQ ID NO: 2042329 - RNA, 19 nt, Homo sapiens
  misc_RNA (1)...(19): siRNA sense strand
ggguggagguuauuucuug

SEQ ID NO: 2042330 - RNA, 19 nt, Homo sapiens
  misc_RNA (1)...(19): siRNA sense strand
uuaacaggauucagacuaa

SEQ ID NO: 2042331 - RNA, 19 nt, Homo sapiens
  misc_RNA (1)...(19): siRNA sense strand
gaagauuuguuagccuuga

SEQ ID NO: 2042332 - RNA, 19 nt, Homo sapiens
  misc_RNA (1)...(19): siRNA sense strand
gaccaaaguuccucaaugc

SEQ ID NO: 2042333 - RNA, 19 nt, Homo sapiens
  misc_RNA (1)...(19): siRNA sense strand
cuagagcaauugaagguaa

SEQ ID NO: 2042334 - RNA, 19 nt, Homo sapiens
  misc_RNA (1)...(19): siRNA sense strand
ccaauacuguggaagaaau

SEQ ID NO: 2042335 - RNA, 19 nt, Homo sapiens
  misc_RNA (1)...(19): siRNA sense strand
gagguuuaaugcauucaaa

SEQ ID NO: 2042336 - RNA, 19 nt, Homo sapiens
  misc_RNA (1)...(19): siRNA sense strand
guuagaggaagauuuguua

SEQ ID NO: 2042337 - RNA, 19 nt, Homo sapiens
  misc_RNA (1)...(19): siRNA sense strand
aacaagauccugaaacuuu

SEQ ID NO: 2042338 - RNA, 19 nt, Homo sapiens
  misc_RNA (1)...(19): siRNA sense strand
gaaaucuccuucaaaagaa

SEQ ID NO: 2042339 - RNA, 19 nt, Homo sapiens
  misc_RNA (1)...(19): siRNA sense strand
cagaagauagcuccaguuu

SEQ ID NO: 2042340 - RNA, 19 nt, Homo sapiens
  misc_RNA (1)...(19): siRNA sense strand
gcaagaaguacuaacuaug

SEQ ID NO: 2042341 - RNA, 19 nt, Homo sapiens
  misc_RNA (1)...(19): siRNA sense strand
uaacaggauucagacuaaa

SEQ ID NO: 2042342 - RNA, 19 nt, Homo sapiens
  misc_RNA (1)...(19): siRNA sense strand
gaacaagauccugaaacuu

SEQ ID NO: 2042343 - RNA, 19 nt, Homo sapiens
  misc_RNA (1)...(19): siRNA sense strand
uaagauugaucgagacaag

SEQ ID NO: 2042344 - RNA, 19 nt, Homo sapiens
  misc_RNA (1)...(19): siRNA sense strand
aggaauugcuacacacuuu

SEQ ID NO: 2042345 - RNA, 19 nt, Homo sapiens
  misc_RNA (1)...(19): siRNA sense strand
gcacgggagucauaacacu

SEQ ID NO: 2042346 - RNA, 19 nt, Homo sapiens
  misc_RNA (1)...(19): siRNA sense strand
gaacacauggacaaaauaa

SEQ ID NO: 2042347 - RNA, 19 nt, Homo sapiens
  misc_RNA (1)...(19): siRNA sense strand
cauacagagucuaagauug

SEQ ID NO: 2042348 - RNA, 19 nt, Homo sapiens
  misc_RNA (1)...(19): siRNA sense strand
uauugcaucugucuuagaa

SEQ ID NO: 2042349 - RNA, 19 nt, Homo sapiens
  misc_RNA (1)...(19): siRNA sense strand
caagaaguacuaacuaugg

SEQ ID NO: 2042350 - RNA, 19 nt, Homo sapiens
  misc_RNA (1)...(19): siRNA sense strand
caaagaccuugcaagaagu

SEQ ID NO: 2042351 - RNA, 19 nt, Homo sapiens
  misc_RNA (1)...(19): siRNA sense strand
uaaagaagugggaacaaga

SEQ ID NO: 2042352 - RNA, 19 nt, Homo sapiens
  misc_RNA (1)...(19): siRNA sense strand
auacagagucuaagauuga

SEQ ID NO: 2042353 - RNA, 19 nt, Homo sapiens
  misc_RNA (1)...(19): siRNA sense strand
agaccaaaguuccucaaug

SEQ ID NO: 2042354 - RNA, 19 nt, Homo sapiens
  misc_RNA (1)...(19): siRNA sense strand
gaaaccuuauguugcacuu

SEQ ID NO: 2042355 - RNA, 19 nt, Homo sapiens
  misc_RNA (1)...(19): siRNA sense strand
gagaagaauauaugcugaa

SEQ ID NO: 2042356 - RNA, 19 nt, Homo sapiens
  misc_RNA (1)...(19): siRNA sense strand
ucuccaacaucucuaaaga

SEQ ID NO: 2042357 - RNA, 19 nt, Homo sapiens
  misc_RNA (1)...(19): siRNA sense strand
aggcucaugucgagguuua

SEQ ID NO: 2042358 - RNA, 19 nt, Homo sapiens
  misc_RNA (1)...(19): siRNA sense strand
cauguuagaggaagauuug

SEQ ID NO: 2042359 - RNA, 19 nt, Homo sapiens
  misc_RNA (1)...(19): siRNA sense strand
aggaagagauguguacaga

SEQ ID NO: 2042360 - RNA, 19 nt, Homo sapiens
  misc_RNA (1)...(19): siRNA sense strand
cuaaagaagugggaacaag

SEQ ID NO: 2042361 - RNA, 19 nt, Homo sapiens
  misc_RNA (1)...(19): siRNA sense strand
ugcaagaaguacuaacuau

SEQ ID NO: 2042362 - RNA, 19 nt, Homo sapiens
  misc_RNA (1)...(19): siRNA sense strand
auaccauacugcaccauuu

SEQ ID NO: 2042363 - RNA, 19 nt, Homo sapiens
  misc_RNA (1)...(19): siRNA sense strand
ccauacagagucuaagauu

SEQ ID NO: 2042364 - RNA, 19 nt, Homo sapiens
  misc_RNA (1)...(19): siRNA sense strand
ggagucauaacacuaaaca

SEQ ID NO: 2042365 - RNA, 19 nt, Homo sapiens
  misc_RNA (1)...(19): siRNA sense strand
cuucaaagaccuugcaaga

SEQ ID NO: 2042366 - RNA, 19 nt, Homo sapiens
  misc_RNA (1)...(19): siRNA sense strand
uaauaugauucggcagauu

SEQ ID NO: 2042367 - RNA, 19 nt, Homo sapiens
  misc_RNA (1)...(19): siRNA sense strand
acacuaaacagaccaaagu

SEQ ID NO: 2042368 - RNA, 19 nt, Homo sapiens
  misc_RNA (1)...(19): siRNA sense strand
aaccuuauguugcacuuau

SEQ ID NO: 2042369 - RNA, 19 nt, Homo sapiens
  misc_RNA (1)...(19): siRNA sense strand
aauaugauucggcagauuu

SEQ ID NO: 2042370 - RNA, 19 nt, Homo sapiens
  misc_RNA (1)...(19): siRNA sense strand
ggaauugcuacacacuuug

SEQ ID NO: 2042371 - RNA, 19 nt, Homo sapiens
  misc_RNA (1)...(19): siRNA sense strand
ugucgagguuuaaugcauu

SEQ ID NO: 2042372 - RNA, 19 nt, Homo sapiens
  misc_RNA (1)...(19): siRNA sense strand
agucauaacacuaaacaga

SEQ ID NO: 2042373 - RNA, 19 nt, Homo sapiens
  misc_RNA (1)...(19): siRNA sense strand
gaccuugcaagaaguacua

SEQ ID NO: 2042374 - RNA, 19 nt, Homo sapiens
  misc_RNA (1)...(19): siRNA sense strand
ucucuaaagaucacacuaa

SEQ ID NO: 2042375 - RNA, 19 nt, Homo sapiens
  misc_RNA (1)...(19): siRNA sense strand
uuacuuccuugcauuaaca

SEQ ID NO: 2042376 - RNA, 19 nt, Homo sapiens
  misc_RNA (1)...(19): siRNA sense strand
ugauguggguggagguuau

SEQ ID NO: 2042377 - RNA, 19 nt, Homo sapiens
  misc_RNA (1)...(19): siRNA sense strand
ggaggcucaugucgagguu

SEQ ID NO: 2042378 - RNA, 19 nt, Homo sapiens
  misc_RNA (1)...(19): siRNA sense strand
gaauguccaagcacacaga

SEQ ID NO: 2042379 - RNA, 19 nt, Homo sapiens
  misc_RNA (1)...(19): siRNA sense strand
gaauugcuacacacuuugu

SEQ ID NO: 2042380 - RNA, 19 nt, Homo sapiens
  misc_RNA (1)...(19): siRNA sense strand
cucaaugcacugacucuua

SEQ ID NO: 2042381 - RNA, 19 nt, Homo sapiens
  misc_RNA (1)...(19): siRNA sense strand
aagaaguacuaacuaugga

SEQ ID NO: 2042382 - RNA, 19 nt, Homo sapiens
  misc_RNA (1)...(19): siRNA sense strand
acacagaugcagcagaaga

SEQ ID NO: 2042383 - RNA, 19 nt, Homo sapiens
  misc_RNA (1)...(19): siRNA sense strand
aaagggagcaggaggaaag

SEQ ID NO: 2042384 - RNA, 19 nt, Homo sapiens
  misc_RNA (1)...(19): siRNA sense strand
auaaugcuguugguucuug

SEQ ID NO: 2042385 - RNA, 19 nt, Homo sapiens
  misc_RNA (1)...(19): siRNA sense strand
gaguaucggcuaagucaag

SEQ ID NO: 2042386 - RNA, 19 nt, Homo sapiens
  misc_RNA (1)...(19): siRNA sense strand
gcaucugucuuagaaaauu

SEQ ID NO: 2042387 - RNA, 19 nt, Homo sapiens
  misc_RNA (1)...(19): siRNA sense strand
gcagaagaggugcuauugg

SEQ ID NO: 2042388 - RNA, 19 nt, Homo sapiens
  misc_RNA (1)...(19): siRNA sense strand
ugccagaaaccuuauguug

SEQ ID NO: 2042389 - RNA, 19 nt, Homo sapiens
  misc_RNA (1)...(19): siRNA sense strand
gagaauguccaagcacaca

SEQ ID NO: 2042390 - RNA, 19 nt, Homo sapiens
  misc_RNA (1)...(19): siRNA sense strand
ugccacgacuccaaggaaa

SEQ ID NO: 2042391 - RNA, 19 nt, Homo sapiens
  misc_RNA (1)...(19): siRNA sense strand
aaagaccuugcaagaagua

SEQ ID NO: 2042392 - RNA, 19 nt, Homo sapiens
  misc_RNA (1)...(19): siRNA sense strand
uagagcaauugaagguaau

SEQ ID NO: 2042393 - RNA, 19 nt, Homo sapiens
  misc_RNA (1)...(19): siRNA sense strand
cagccaauacuguggaaga

SEQ ID NO: 2042394 - RNA, 19 nt, Homo sapiens
  misc_RNA (1)...(19): siRNA sense strand
gaaaauauugcaucugucu

SEQ ID NO: 2042395 - RNA, 19 nt, Homo sapiens
  misc_RNA (1)...(19): siRNA sense strand
ugcacugacucuuaauaug

SEQ ID NO: 2042396 - RNA, 19 nt, Homo sapiens
  misc_RNA (1)...(19): siRNA sense strand
gaaacugcaauaggacugu

SEQ ID NO: 2042397 - RNA, 19 nt, Homo sapiens
  misc_RNA (1)...(19): siRNA sense strand
gcugaauaaugcuguuggu

SEQ ID NO: 2042398 - RNA, 19 nt, Homo sapiens
  misc_RNA (1)...(19): siRNA sense strand
gcauucaaaaggacuaaua

SEQ ID NO: 2042399 - RNA, 19 nt, Homo sapiens
  misc_RNA (1)...(19): siRNA sense strand
cacugacucuuaauaugau

SEQ ID NO: 2042400 - RNA, 19 nt, Homo sapiens
  misc_RNA (1)...(19): siRNA sense strand
aaagaagugggaacaagau

SEQ ID NO: 2042401 - RNA, 19 nt, Homo sapiens
  misc_RNA (1)...(19): siRNA sense strand
acuauggaguaucggcuaa

SEQ ID NO: 2042402 - RNA, 19 nt, Homo sapiens
  misc_RNA (1)...(19): siRNA sense strand
caauacuguggaagaaauu

SEQ ID NO: 2042403 - RNA, 19 nt, Homo sapiens
  misc_RNA (1)...(19): siRNA sense strand
gaaaauuaccauacagagu

SEQ ID NO: 2042404 - RNA, 19 nt, Homo sapiens
  misc_RNA (1)...(19): siRNA sense strand
aaacugcaauaggacuguu

SEQ ID NO: 2042405 - RNA, 19 nt, Homo sapiens
  misc_RNA (1)...(19): siRNA sense strand
gaaaaggcaaaacagaaga

SEQ ID NO: 2042406 - RNA, 19 nt, Homo sapiens
  misc_RNA (1)...(19): siRNA sense strand
auccacagcuaaagaagug

SEQ ID NO: 2042407 - RNA, 19 nt, Homo sapiens
  misc_RNA (1)...(19): siRNA sense strand
gagauguggaggcucaugu

SEQ ID NO: 2042408 - RNA, 19 nt, Homo sapiens
  misc_RNA (1)...(19): siRNA sense strand
uggaguaucggcuaaguca

SEQ ID NO: 2042409 - RNA, 19 nt, Homo sapiens
  misc_RNA (1)...(19): siRNA sense strand
ggaacacauggacaaaaua

SEQ ID NO: 2042410 - RNA, 19 nt, Homo sapiens
  misc_RNA (1)...(19): siRNA sense strand
auaggacuguucccugaug

SEQ ID NO: 2042411 - RNA, 19 nt, Homo sapiens
  misc_RNA (1)...(19): siRNA sense strand
gcuaaagaagugggaacaa

SEQ ID NO: 2042412 - RNA, 19 nt, Homo sapiens
  misc_RNA (1)...(19): siRNA sense strand
aaacuuacagcaagauggu

SEQ ID NO: 2042413 - RNA, 19 nt, Homo sapiens
  misc_RNA (1)...(19): siRNA sense strand
uaccauacagagucuaaga

SEQ ID NO: 2042414 - RNA, 19 nt, Homo sapiens
  misc_RNA (1)...(19): siRNA sense strand
cucaguccaugggcaauuu

SEQ ID NO: 2042415 - RNA, 19 nt, Homo sapiens
  misc_RNA (1)...(19): siRNA sense strand
gccaauacuguggaagaaa

SEQ ID NO: 2042416 - RNA, 19 nt, Homo sapiens
  misc_RNA (1)...(19): siRNA sense strand
gcuccuagcuuaccucaua

SEQ ID NO: 2042417 - RNA, 19 nt, Homo sapiens
  misc_RNA (1)...(19): siRNA sense strand
ggacaaagccaccaauguu

SEQ ID NO: 2042418 - RNA, 19 nt, Homo sapiens
  misc_RNA (1)...(19): siRNA sense strand
caagaugccuuugcaaauu

SEQ ID NO: 2042419 - RNA, 19 nt, Homo sapiens
  misc_RNA (1)...(19): siRNA sense strand
gacagaaggugaaggaauu

SEQ ID NO: 2042420 - RNA, 19 nt, Homo sapiens
  misc_RNA (1)...(19): siRNA sense strand
gaaauacuccgaugaugaa

SEQ ID NO: 2042421 - RNA, 19 nt, Homo sapiens
  misc_RNA (1)...(19): siRNA sense strand
gaaagaaagcaaagaagaa

SEQ ID NO: 2042422 - RNA, 19 nt, Homo sapiens
  misc_RNA (1)...(19): siRNA sense strand
ggacuugguuugccuaugu

SEQ ID NO: 2042423 - RNA, 19 nt, Homo sapiens
  misc_RNA (1)...(19): siRNA sense strand
ggaaauacuccgaugauga

SEQ ID NO: 2042424 - RNA, 19 nt, Homo sapiens
  misc_RNA (1)...(19): siRNA sense strand
cagcagccaucacugaaua

SEQ ID NO: 2042425 - RNA, 19 nt, Homo sapiens
  misc_RNA (1)...(19): siRNA sense strand
ggagaagaguuuauaaguc

SEQ ID NO: 2042426 - RNA, 19 nt, Homo sapiens
  misc_RNA (1)...(19): siRNA sense strand
ccagagaacacauuuauga

SEQ ID NO: 2042427 - RNA, 19 nt, Homo sapiens
  misc_RNA (1)...(19): siRNA sense strand
gaacuuaugaacaugcuuu

SEQ ID NO: 2042428 - RNA, 19 nt, Homo sapiens
  misc_RNA (1)...(19): siRNA sense strand
gaacaauuuccagaacuua

SEQ ID NO: 2042429 - RNA, 19 nt, Homo sapiens
  misc_RNA (1)...(19): siRNA sense strand
uaggugagcugagugauaa

SEQ ID NO: 2042430 - RNA, 19 nt, Homo sapiens
  misc_RNA (1)...(19): siRNA sense strand
agaagacucuccagaaaga

SEQ ID NO: 2042431 - RNA, 19 nt, Homo sapiens
  misc_RNA (1)...(19): siRNA sense strand
gaagaacaaagacaaguau

SEQ ID NO: 2042432 - RNA, 19 nt, Homo sapiens
  misc_RNA (1)...(19): siRNA sense strand
ccaccaauguuguuaugaa

SEQ ID NO: 2042433 - RNA, 19 nt, Homo sapiens
  misc_RNA (1)...(19): siRNA sense strand
gaucacagaauacagauau

SEQ ID NO: 2042434 - RNA, 19 nt, Homo sapiens
  misc_RNA (1)...(19): siRNA sense strand
ucccaaaggugaauucaaa

SEQ ID NO: 2042435 - RNA, 19 nt, Homo sapiens
  misc_RNA (1)...(19): siRNA sense strand
auucagagaucgagucuaa

SEQ ID NO: 2042436 - RNA, 19 nt, Homo sapiens
  misc_RNA (1)...(19): siRNA sense strand
acaccucagucuucaguua

SEQ ID NO: 2042437 - RNA, 19 nt, Homo sapiens
  misc_RNA (1)...(19): siRNA sense strand
caaagaagaacaaagacaa

SEQ ID NO: 2042438 - RNA, 19 nt, Homo sapiens
  misc_RNA (1)...(19): siRNA sense strand
uaaauuaggugagcugagu

SEQ ID NO: 2042439 - RNA, 19 nt, Homo sapiens
  misc_RNA (1)...(19): siRNA sense strand
cagauacagugaaagauau

SEQ ID NO: 2042440 - RNA, 19 nt, Homo sapiens
  misc_RNA (1)...(19): siRNA sense strand
ucagauacagugaaagaua

SEQ ID NO: 2042441 - RNA, 19 nt, Homo sapiens
  misc_RNA (1)...(19): siRNA sense strand
auacagauaugguccagaa

SEQ ID NO: 2042442 - RNA, 19 nt, Homo sapiens
  misc_RNA (1)...(19): siRNA sense strand
gauuuacgaucccuggaaa

SEQ ID NO: 2042443 - RNA, 19 nt, Homo sapiens
  misc_RNA (1)...(19): siRNA sense strand
caguuucccuucccaagua

SEQ ID NO: 2042444 - RNA, 19 nt, Homo sapiens
  misc_RNA (1)...(19): siRNA sense strand
gaggaaagauagagaagac

SEQ ID NO: 2042445 - RNA, 19 nt, Homo sapiens
  misc_RNA (1)...(19): siRNA sense strand
gaucagagcguguuguuac

SEQ ID NO: 2042446 - RNA, 19 nt, Homo sapiens
  misc_RNA (1)...(19): siRNA sense strand
ucagaccuguuugaucuua

SEQ ID NO: 2042447 - RNA, 19 nt, Homo sapiens
  misc_RNA (1)...(19): siRNA sense strand
cgaaagaaagcaaagaaga

SEQ ID NO: 2042448 - RNA, 19 nt, Homo sapiens
  misc_RNA (1)...(19): siRNA sense strand
caagaucacagaauacaga

SEQ ID NO: 2042449 - RNA, 19 nt, Homo sapiens
  misc_RNA (1)...(19): siRNA sense strand
gaguaugaauuucucuaug

SEQ ID NO: 2042450 - RNA, 19 nt, Homo sapiens
  misc_RNA (1)...(19): siRNA sense strand
ccagaaaucagucagcaaa

SEQ ID NO: 2042451 - RNA, 19 nt, Homo sapiens
  misc_RNA (1)...(19): siRNA sense strand
aaaggugaauucaaagaug

SEQ ID NO: 2042452 - RNA, 19 nt, Homo sapiens
  misc_RNA (1)...(19): siRNA sense strand
aagaugccuuugcaaauuu

SEQ ID NO: 2042453 - RNA, 19 nt, Homo sapiens
  misc_RNA (1)...(19): siRNA sense strand
cggaggauuugcugacuuu

SEQ ID NO: 2042454 - RNA, 19 nt, Homo sapiens
  misc_RNA (1)...(19): siRNA sense strand
ccacacaccucagucuuca

SEQ ID NO: 2042455 - RNA, 19 nt, Homo sapiens
  misc_RNA (1)...(19): siRNA sense strand
gcaaagaagaacaaagaca

SEQ ID NO: 2042456 - RNA, 19 nt, Homo sapiens
  misc_RNA (1)...(19): siRNA sense strand
gacaaagccaccaauguug

SEQ ID NO: 2042457 - RNA, 19 nt, Homo sapiens
  misc_RNA (1)...(19): siRNA sense strand
ugaacaauuuccagaacuu

SEQ ID NO: 2042458 - RNA, 19 nt, Homo sapiens
  misc_RNA (1)...(19): siRNA sense strand
gagcaugcccaaugugaug

SEQ ID NO: 2042459 - RNA, 19 nt, Homo sapiens
  misc_RNA (1)...(19): siRNA sense strand
aagcaaagaagaacaaaga

SEQ ID NO: 2042460 - RNA, 19 nt, Homo sapiens
  misc_RNA (1)...(19): siRNA sense strand
gaaggugaaggaauugguu

SEQ ID NO: 2042461 - RNA, 19 nt, Homo sapiens
  misc_RNA (1)...(19): siRNA sense strand
caugacaucuucccagagu

SEQ ID NO: 2042462 - RNA, 19 nt, Homo sapiens
  misc_RNA (1)...(19): siRNA sense strand
cuucagaccuguuugaucu

SEQ ID NO: 2042463 - RNA, 19 nt, Homo sapiens
  misc_RNA (1)...(19): siRNA sense strand
gagaggcaacgaacgauga

SEQ ID NO: 2042464 - RNA, 19 nt, Homo sapiens
  misc_RNA (1)...(19): siRNA sense strand
gaagagcgaaagaaagcaa

SEQ ID NO: 2042465 - RNA, 19 nt, Homo sapiens
  misc_RNA (1)...(19): siRNA sense strand
uacgaucccuggaaaauua

SEQ ID NO: 2042466 - RNA, 19 nt, Homo sapiens
  misc_RNA (1)...(19): siRNA sense strand
guaaacaucagccuagaca

SEQ ID NO: 2042467 - RNA, 19 nt, Homo sapiens
  misc_RNA (1)...(19): siRNA sense strand
ugaccuuguugaucuguuu

SEQ ID NO: 2042468 - RNA, 19 nt, Homo sapiens
  misc_RNA (1)...(19): siRNA sense strand
ugguaaggaucaagguaua

SEQ ID NO: 2042469 - RNA, 19 nt, Homo sapiens
  misc_RNA (1)...(19): siRNA sense strand
gcuuuggucacgaauguua

SEQ ID NO: 2042470 - RNA, 19 nt, Homo sapiens
  misc_RNA (1)...(19): siRNA sense strand
cagauaugguccagaaauc

SEQ ID NO: 2042471 - RNA, 19 nt, Homo sapiens
  misc_RNA (1)...(19): siRNA sense strand
gcacagcaaauccuuccaa

SEQ ID NO: 2042472 - RNA, 19 nt, Homo sapiens
  misc_RNA (1)...(19): siRNA sense strand
caagagugcuuuuccauuc

SEQ ID NO: 2042473 - RNA, 19 nt, Homo sapiens
  misc_RNA (1)...(19): siRNA sense strand
guaaggaucaagguauaaa

SEQ ID NO: 2042474 - RNA, 19 nt, Homo sapiens
  misc_RNA (1)...(19): siRNA sense strand
caucagccuagacaacuua

SEQ ID NO: 2042475 - RNA, 19 nt, Homo sapiens
  misc_RNA (1)...(19): siRNA sense strand
gaaagcaaagaagaacaaa

SEQ ID NO: 2042476 - RNA, 19 nt, Homo sapiens
  misc_RNA (1)...(19): siRNA sense strand
aaggugaauucaaagauga

SEQ ID NO: 2042477 - RNA, 19 nt, Homo sapiens
  misc_RNA (1)...(19): siRNA sense strand
caacauagccaugacuucu

SEQ ID NO: 2042478 - RNA, 19 nt, Homo sapiens
  misc_RNA (1)...(19): siRNA sense strand
gacacaagcgcacagcaaa

SEQ ID NO: 2042479 - RNA, 19 nt, Homo sapiens
  misc_RNA (1)...(19): siRNA sense strand
ugaaugugaugacucaaag

SEQ ID NO: 2042480 - RNA, 19 nt, Homo sapiens
  misc_RNA (1)...(19): siRNA sense strand
cuaugaaugugaugacuca

SEQ ID NO: 2042481 - RNA, 19 nt, Homo sapiens
  misc_RNA (1)...(19): siRNA sense strand
caaguaacagcaacaagug

SEQ ID NO: 2042482 - RNA, 19 nt, Homo sapiens
  misc_RNA (1)...(19): siRNA sense strand
ccaaguaacagcaacaagu

SEQ ID NO: 2042483 - RNA, 19 nt, Homo sapiens
  misc_RNA (1)...(19): siRNA sense strand
ugccaaggcuacauuuaug

SEQ ID NO: 2042484 - RNA, 19 nt, Homo sapiens
  misc_RNA (1)...(19): siRNA sense strand
ccacagagaccaccacaac

SEQ ID NO: 2042485 - RNA, 19 nt, Homo sapiens
  misc_RNA (1)...(19): siRNA sense strand
aggcagaucucccaaaggu

SEQ ID NO: 2042486 - RNA, 19 nt, Homo sapiens
  misc_RNA (1)...(19): siRNA sense strand
gggaugaggagugggauaa

SEQ ID NO: 2042487 - RNA, 19 nt, Homo sapiens
  misc_RNA (1)...(19): siRNA sense strand
agaagaacaaagacaagua

SEQ ID NO: 2042488 - RNA, 19 nt, Homo sapiens
  misc_RNA (1)...(19): siRNA sense strand
cacagcaaauccuuccaaa

SEQ ID NO: 2042489 - RNA, 19 nt, Homo sapiens
  misc_RNA (1)...(19): siRNA sense strand
caaagcaaguccagaucag

SEQ ID NO: 2042490 - RNA, 19 nt, Homo sapiens
  misc_RNA (1)...(19): siRNA sense strand
gaagaguuuauaagucguu

SEQ ID NO: 2042491 - RNA, 19 nt, Homo sapiens
  misc_RNA (1)...(19): siRNA sense strand
cagccuagacaacuuacua

SEQ ID NO: 2042492 - RNA, 19 nt, Homo sapiens
  misc_RNA (1)...(19): siRNA sense strand
ccaaaggugaauucaaaga

SEQ ID NO: 2042493 - RNA, 19 nt, Homo sapiens
  misc_RNA (1)...(19): siRNA sense strand
agacaguguuggaggauuc

SEQ ID NO: 2042494 - RNA, 19 nt, Homo sapiens
  misc_RNA (1)...(19): siRNA sense strand
gugaaggaauugguugaau

SEQ ID NO: 2042495 - RNA, 19 nt, Homo sapiens
  misc_RNA (1)...(19): siRNA sense strand
gaacugugcaacccaagca

SEQ ID NO: 2042496 - RNA, 19 nt, Homo sapiens
  misc_RNA (1)...(19): siRNA sense strand
caaagccaccaauguuguu

SEQ ID NO: 2042497 - RNA, 19 nt, Homo sapiens
  misc_RNA (1)...(19): siRNA sense strand
auacaaugauucagcaaca

SEQ ID NO: 2042498 - RNA, 19 nt, Homo sapiens
  misc_RNA (1)...(19): siRNA sense strand
guuaguggcucacaaucag

SEQ ID NO: 2042499 - RNA, 19 nt, Homo sapiens
  misc_RNA (1)...(19): siRNA sense strand
caaaggugaauucaaagau

SEQ ID NO: 2042500 - RNA, 19 nt, Homo sapiens
  misc_RNA (1)...(19): siRNA sense strand
ggaaaauuaccacuuugua

SEQ ID NO: 2042501 - RNA, 19 nt, Homo sapiens
  misc_RNA (1)...(19): siRNA sense strand
ccuaugagcaugcccaaug

SEQ ID NO: 2042502 - RNA, 19 nt, Homo sapiens
  misc_RNA (1)...(19): siRNA sense strand
uuccagaacuuaugaacau

SEQ ID NO: 2042503 - RNA, 19 nt, Homo sapiens
  misc_RNA (1)...(19): siRNA sense strand
aaaccuugcccucuacuug

SEQ ID NO: 2042504 - RNA, 19 nt, Homo sapiens
  misc_RNA (1)...(19): siRNA sense strand
caccaauguuguuaugaau

SEQ ID NO: 2042505 - RNA, 19 nt, Homo sapiens
  misc_RNA (1)...(19): siRNA sense strand
guuggaggauucagauaca

SEQ ID NO: 2042506 - RNA, 19 nt, Homo sapiens
  misc_RNA (1)...(19): siRNA sense strand
cgacagaaggugaaggaau

SEQ ID NO: 2042507 - RNA, 19 nt, Homo sapiens
  misc_RNA (1)...(19): siRNA sense strand
gguauaaauauucgacaga

SEQ ID NO: 2042508 - RNA, 19 nt, Homo sapiens
  misc_RNA (1)...(19): siRNA sense strand
agccaucacugaauacaau

SEQ ID NO: 2042509 - RNA, 19 nt, Homo sapiens
  misc_RNA (1)...(19): siRNA sense strand
gguaaggaucaagguauaa

SEQ ID NO: 2042510 - RNA, 19 nt, Homo sapiens
  misc_RNA (1)...(19): siRNA sense strand
ugacaucuucccagaguau

SEQ ID NO: 2042511 - RNA, 19 nt, Homo sapiens
  misc_RNA (1)...(19): siRNA sense strand
ugauuuauucggaggauuu

SEQ ID NO: 2042512 - RNA, 19 nt, Homo sapiens
  misc_RNA (1)...(19): siRNA sense strand
ggaggaaagauagagaaga

SEQ ID NO: 2042513 - RNA, 19 nt, Homo sapiens
  misc_RNA (1)...(19): siRNA sense strand
ucucuaugaugagcacuaa

SEQ ID NO: 2042514 - RNA, 19 nt, Homo sapiens
  misc_RNA (1)...(19): siRNA sense strand
gaauuggagaagaguuuau

SEQ ID NO: 2042515 - RNA, 19 nt, Homo sapiens
  misc_RNA (1)...(19): siRNA sense strand
aaacuaaugcuuugauagg

SEQ ID NO: 2042516 - RNA, 19 nt, Homo sapiens
  misc_RNA (1)...(19): siRNA sense strand
gagcaaagauuauacauga

SEQ ID NO: 2042517 - RNA, 19 nt, Homo sapiens
  misc_RNA (1)...(19): siRNA sense strand
gaacagaggugcccuuuag

SEQ ID NO: 2042518 - RNA, 19 nt, Homo sapiens
  misc_RNA (1)...(19): siRNA sense strand
gaaauuugcugacauccua

SEQ ID NO: 2042519 - RNA, 19 nt, Homo sapiens
  misc_RNA (1)...(19): siRNA sense strand
gaaauaaaguugcugaaca

SEQ ID NO: 2042520 - RNA, 19 nt, Homo sapiens
  misc_RNA (1)...(19): siRNA sense strand
gaaaugcaguuacaauguu

SEQ ID NO: 2042521 - RNA, 19 nt, Homo sapiens
  misc_RNA (1)...(19): siRNA sense strand
gaaaagguauggcgauuua

SEQ ID NO: 2042522 - RNA, 19 nt, Homo sapiens
  misc_RNA (1)...(19): siRNA sense strand
uaaaguugcugaacaucua

SEQ ID NO: 2042523 - RNA, 19 nt, Homo sapiens
  misc_RNA (1)...(19): siRNA sense strand
gaccggaaaucauaugaaa

SEQ ID NO: 2042524 - RNA, 19 nt, Homo sapiens
  misc_RNA (1)...(19): siRNA sense strand
ggacaguuauuuagaagga

SEQ ID NO: 2042525 - RNA, 19 nt, Homo sapiens
  misc_RNA (1)...(19): siRNA sense strand
gaagauaaagcaguagaua

SEQ ID NO: 2042526 - RNA, 19 nt, Homo sapiens
  misc_RNA (1)...(19): siRNA sense strand
uggaaucgauggccaguua

SEQ ID NO: 2042527 - RNA, 19 nt, Homo sapiens
  misc_RNA (1)...(19): siRNA sense strand
gaaacuguguguugggauu

SEQ ID NO: 2042528 - RNA, 19 nt, Homo sapiens
  misc_RNA (1)...(19): siRNA sense strand
aaaggaagauaaagcagua

SEQ ID NO: 2042529 - RNA, 19 nt, Homo sapiens
  misc_RNA (1)...(19): siRNA sense strand
caaaugacauggaugaaca

SEQ ID NO: 2042530 - RNA, 19 nt, Homo sapiens
  misc_RNA (1)...(19): siRNA sense strand
gcagagaugucgaugaagu

SEQ ID NO: 2042531 - RNA, 19 nt, Homo sapiens
  misc_RNA (1)...(19): siRNA sense strand
gcagaccacuugaagaaau

SEQ ID NO: 2042532 - RNA, 19 nt, Homo sapiens
  misc_RNA (1)...(19): siRNA sense strand
ccgcauggcugauauuuau

SEQ ID NO: 2042533 - RNA, 19 nt, Homo sapiens
  misc_RNA (1)...(19): siRNA sense strand
gaauguggaugucuuaucu

SEQ ID NO: 2042534 - RNA, 19 nt, Homo sapiens
  misc_RNA (1)...(19): siRNA sense strand
gaaggugaauuguguugga

SEQ ID NO: 2042535 - RNA, 19 nt, Homo sapiens
  misc_RNA (1)...(19): siRNA sense strand
gaacgagugccuugcuuaa

SEQ ID NO: 2042536 - RNA, 19 nt, Homo sapiens
  misc_RNA (1)...(19): siRNA sense strand
cacgagaacucacuaaaga

SEQ ID NO: 2042537 - RNA, 19 nt, Homo sapiens
  misc_RNA (1)...(19): siRNA sense strand
ggaaguauccagaaggaaa

SEQ ID NO: 2042538 - RNA, 19 nt, Homo sapiens
  misc_RNA (1)...(19): siRNA sense strand
cgagugccuugcuuaaaua

SEQ ID NO: 2042539 - RNA, 19 nt, Homo sapiens
  misc_RNA (1)...(19): siRNA sense strand
gaagaaaugcaguuacaau

SEQ ID NO: 2042540 - RNA, 19 nt, Homo sapiens
  misc_RNA (1)...(19): siRNA sense strand
caaaguagccaccaugaug

SEQ ID NO: 2042541 - RNA, 19 nt, Homo sapiens
  misc_RNA (1)...(19): siRNA sense strand
uaaaucaagugucccagaa

SEQ ID NO: 2042542 - RNA, 19 nt, Homo sapiens
  misc_RNA (1)...(19): siRNA sense strand
aagcagcguucaauguuua

SEQ ID NO: 2042543 - RNA, 19 nt, Homo sapiens
  misc_RNA (1)...(19): siRNA sense strand
aagcagagaugucgaugaa

SEQ ID NO: 2042544 - RNA, 19 nt, Homo sapiens
  misc_RNA (1)...(19): siRNA sense strand
ugacauggaugaacagcaa

SEQ ID NO: 2042545 - RNA, 19 nt, Homo sapiens
  misc_RNA (1)...(19): siRNA sense strand
caagcagcguucaauguuu

SEQ ID NO: 2042546 - RNA, 19 nt, Homo sapiens
  misc_RNA (1)...(19): siRNA sense strand
cauaaugaccaucuaagua

SEQ ID NO: 2042547 - RNA, 19 nt, Homo sapiens
  misc_RNA (1)...(19): siRNA sense strand
auacaagugucccaaauga

SEQ ID NO: 2042548 - RNA, 19 nt, Homo sapiens
  misc_RNA (1)...(19): siRNA sense strand
ggaaauaggagcaguaggu

SEQ ID NO: 2042549 - RNA, 19 nt, Homo sapiens
  misc_RNA (1)...(19): siRNA sense strand
gcaauauuagcuacaagua

SEQ ID NO: 2042550 - RNA, 19 nt, Homo sapiens
  misc_RNA (1)...(19): siRNA sense strand
uaaagaaggacguucacua

SEQ ID NO: 2042551 - RNA, 19 nt, Homo sapiens
  misc_RNA (1)...(19): siRNA sense strand
caaaggaugcucuuagaau

SEQ ID NO: 2042552 - RNA, 19 nt, Homo sapiens
  misc_RNA (1)...(19): siRNA sense strand
guggaugucuuaucuuuca

SEQ ID NO: 2042553 - RNA, 19 nt, Homo sapiens
  misc_RNA (1)...(19): siRNA sense strand
caaaaugguucaagugauu

SEQ ID NO: 2042554 - RNA, 19 nt, Homo sapiens
  misc_RNA (1)...(19): siRNA sense strand
gaaguggcacaauuggaua

SEQ ID NO: 2042555 - RNA, 19 nt, Homo sapiens
  misc_RNA (1)...(19): siRNA sense strand
ugucagcucucauguguau

SEQ ID NO: 2042556 - RNA, 19 nt, Homo sapiens
  misc_RNA (1)...(19): siRNA sense strand
gaaguuuggcugcugcuuu

SEQ ID NO: 2042557 - RNA, 19 nt, Homo sapiens
  misc_RNA (1)...(19): siRNA sense strand
gauauggccuuggcucuuc

SEQ ID NO: 2042558 - RNA, 19 nt, Homo sapiens
  misc_RNA (1)...(19): siRNA sense strand
gaauggaaauuugcugaca

SEQ ID NO: 2042559 - RNA, 19 nt, Homo sapiens
  misc_RNA (1)...(19): siRNA sense strand
auacaaggagcaaagauua

SEQ ID NO: 2042560 - RNA, 19 nt, Homo sapiens
  misc_RNA (1)...(19): siRNA sense strand
gcucuuagaaucccucaaa

SEQ ID NO: 2042561 - RNA, 19 nt, Homo sapiens
  misc_RNA (1)...(19): siRNA sense strand
gcacaacuuagggaaauaa

SEQ ID NO: 2042562 - RNA, 19 nt, Homo sapiens
  misc_RNA (1)...(19): siRNA sense strand
gaauacaaguucuuaugac

SEQ ID NO: 2042563 - RNA, 19 nt, Homo sapiens
  misc_RNA (1)...(19): siRNA sense strand
ugacuacaaugacacaaau

SEQ ID NO: 2042564 - RNA, 19 nt, Homo sapiens
  misc_RNA (1)...(19): siRNA sense strand
guagaaacaaccagaaguu

SEQ ID NO: 2042565 - RNA, 19 nt, Homo sapiens
  misc_RNA (1)...(19): siRNA sense strand
ccagaaauaccacaugcua

SEQ ID NO: 2042566 - RNA, 19 nt, Homo sapiens
  misc_RNA (1)...(19): siRNA sense strand
cuagaaauguguccugcaa

SEQ ID NO: 2042567 - RNA, 19 nt, Homo sapiens
  misc_RNA (1)...(19): siRNA sense strand
ggaggaagcaaucccuuug

SEQ ID NO: 2042568 - RNA, 19 nt, Homo sapiens
  misc_RNA (1)...(19): siRNA sense strand
ccacagcuuucaaauccaa

SEQ ID NO: 2042569 - RNA, 19 nt, Homo sapiens
  misc_RNA (1)...(19): siRNA sense strand
guagauacaucagauuugg

SEQ ID NO: 2042570 - RNA, 19 nt, Homo sapiens
  misc_RNA (1)...(19): siRNA sense strand
uguaauggcuuuccuuugg

SEQ ID NO: 2042571 - RNA, 19 nt, Homo sapiens
  misc_RNA (1)...(19): siRNA sense strand
gagaaagcuuagaggauca

SEQ ID NO: 2042572 - RNA, 19 nt, Homo sapiens
  misc_RNA (1)...(19): siRNA sense strand
uaaaguauccaaaccuaga

SEQ ID NO: 2042573 - RNA, 19 nt, Homo sapiens
  misc_RNA (1)...(19): siRNA sense strand
cuuagaaucccucaaagua

SEQ ID NO: 2042574 - RNA, 19 nt, Homo sapiens
  misc_RNA (1)...(19): siRNA sense strand
agaccagaaucagaauuua

SEQ ID NO: 2042575 - RNA, 19 nt, Homo sapiens
  misc_RNA (1)...(19): siRNA sense strand
uaugucagcucucaugugu

SEQ ID NO: 2042576 - RNA, 19 nt, Homo sapiens
  misc_RNA (1)...(19): siRNA sense strand
caacuuagggaaauaauac

SEQ ID NO: 2042577 - RNA, 19 nt, Homo sapiens
  misc_RNA (1)...(19): siRNA sense strand
ucgaugaaguggcacaauu

SEQ ID NO: 2042578 - RNA, 19 nt, Homo sapiens
  misc_RNA (1)...(19): siRNA sense strand
gcgauuuaguacugcauuu

SEQ ID NO: 2042579 - RNA, 19 nt, Homo sapiens
  misc_RNA (1)...(19): siRNA sense strand
uggaaugugucgcuaggua

SEQ ID NO: 2042580 - RNA, 19 nt, Homo sapiens
  misc_RNA (1)...(19): siRNA sense strand
ucacuuccaucugcaauau

SEQ ID NO: 2042581 - RNA, 19 nt, Homo sapiens
  misc_RNA (1)...(19): siRNA sense strand
cagcacaacuuagggaaau

SEQ ID NO: 2042582 - RNA, 19 nt, Homo sapiens
  misc_RNA (1)...(19): siRNA sense strand
aaaggaugcucuuagaauc

SEQ ID NO: 2042583 - RNA, 19 nt, Homo sapiens
  misc_RNA (1)...(19): siRNA sense strand
gcuguacuauggaauggaa

SEQ ID NO: 2042584 - RNA, 19 nt, Homo sapiens
  misc_RNA (1)...(19): siRNA sense strand
aggaggagcugcagcauuc

SEQ ID NO: 2042585 - RNA, 19 nt, Homo sapiens
  misc_RNA (1)...(19): siRNA sense strand
ggucuaaaccaaaggaaga

SEQ ID NO: 2042586 - RNA, 19 nt, Homo sapiens
  misc_RNA (1)...(19): siRNA sense strand
gaaauaccacaugcuaaug

SEQ ID NO: 2042587 - RNA, 19 nt, Homo sapiens
  misc_RNA (1)...(19): siRNA sense strand
gggauuuccugugauuuga

SEQ ID NO: 2042588 - RNA, 19 nt, Homo sapiens
  misc_RNA (1)...(19): siRNA sense strand
ggaacagaggugcccuuua

SEQ ID NO: 2042589 - RNA, 19 nt, Homo sapiens
  misc_RNA (1)...(19): siRNA sense strand
ccaagcagcguucaauguu

SEQ ID NO: 2042590 - RNA, 19 nt, Homo sapiens
  misc_RNA (1)...(19): siRNA sense strand
guaauggcuuuccuuugga

SEQ ID NO: 2042591 - RNA, 19 nt, Homo sapiens
  misc_RNA (1)...(19): siRNA sense strand
gauuuccugugauuugauu

SEQ ID NO: 2042592 - RNA, 19 nt, Homo sapiens
  misc_RNA (1)...(19): siRNA sense strand
uaccauggcccgaaauaaa

SEQ ID NO: 2042593 - RNA, 19 nt, Homo sapiens
  misc_RNA (1)...(19): siRNA sense strand
guauggcgauuuaguacug

SEQ ID NO: 2042594 - RNA, 19 nt, Homo sapiens
  misc_RNA (1)...(19): siRNA sense strand
ucauguguauccaaguuaa

SEQ ID NO: 2042595 - RNA, 19 nt, Homo sapiens
  misc_RNA (1)...(19): siRNA sense strand
ggaguucagccauguguau

SEQ ID NO: 2042596 - RNA, 19 nt, Homo sapiens
  misc_RNA (1)...(19): siRNA sense strand
acuuccaucugcaauauua

SEQ ID NO: 2042597 - RNA, 19 nt, Homo sapiens
  misc_RNA (1)...(19): siRNA sense strand
ugaugaaggugaaggugaa

SEQ ID NO: 2042598 - RNA, 19 nt, Homo sapiens
  misc_RNA (1)...(19): siRNA sense strand
ggaggaaauaggagcagua

SEQ ID NO: 2042599 - RNA, 19 nt, Homo sapiens
  misc_RNA (1)...(19): siRNA sense strand
aaauacaagugucccaaau

SEQ ID NO: 2042600 - RNA, 19 nt, Homo sapiens
  misc_RNA (1)...(19): siRNA sense strand
uaaguagucuuccuuuuga

SEQ ID NO: 2042601 - RNA, 19 nt, Homo sapiens
  misc_RNA (1)...(19): siRNA sense strand
acaaggagcaaagauuaua

SEQ ID NO: 2042602 - RNA, 19 nt, Homo sapiens
  misc_RNA (1)...(19): siRNA sense strand
gcaaguguggugugcugua

SEQ ID NO: 2042603 - RNA, 19 nt, Homo sapiens
  misc_RNA (1)...(19): siRNA sense strand
agaggugcccuuuagcuua

SEQ ID NO: 2042604 - RNA, 19 nt, Homo sapiens
  misc_RNA (1)...(19): siRNA sense strand
ugacacuucugcucuuugu

SEQ ID NO: 2042605 - RNA, 19 nt, Homo sapiens
  misc_RNA (1)...(19): siRNA sense strand
gagagaaagcuuagaggau

SEQ ID NO: 2042606 - RNA, 19 nt, Homo sapiens
  misc_RNA (1)...(19): siRNA sense strand
agaaauguguccugcaagu

SEQ ID NO: 2042607 - RNA, 19 nt, Homo sapiens
  misc_RNA (1)...(19): siRNA sense strand
ucacuacgcucaguuuuaa

SEQ ID NO: 2042608 - RNA, 19 nt, Homo sapiens
  misc_RNA (1)...(19): siRNA sense strand
gaaguauccagaaggaaau

SEQ ID NO: 2042609 - RNA, 19 nt, Homo sapiens
  misc_RNA (1)...(19): siRNA sense strand
gaggugcccuuuagcuuac

SEQ ID NO: 2042610 - RNA, 19 nt, Homo sapiens
  misc_RNA (1)...(19): siRNA sense strand
acacuucugcucuuuguaa

SEQ ID NO: 2042611 - RNA, 19 nt, Homo sapiens
  misc_RNA (1)...(19): siRNA sense strand
aaucaagugucccagaaau

SEQ ID NO: 2042612 - RNA, 19 nt, Homo sapiens
  misc_RNA (1)...(19): siRNA sense strand
gugccuugcuuaaauagug

SEQ ID NO: 2042613 - RNA, 19 nt, Homo sapiens
  misc_RNA (1)...(19): siRNA sense strand
gcagauaaaagaaaaggua

SEQ ID NO: 2042614 - RNA, 19 nt, Homo sapiens
  misc_RNA (1)...(19): siRNA sense strand
guucaauguuuaccuuugu

SEQ ID NO: 2042615 - RNA, 19 nt, Homo sapiens
  misc_RNA (1)...(19): siRNA sense strand
gaaucagaauuuacauggu

SEQ ID NO: 2042616 - RNA, 19 nt, Homo sapiens
  misc_RNA (1)...(19): siRNA sense strand
agagaaagcuuccaucuac

SEQ ID NO: 2042617 - RNA, 19 nt, Homo sapiens
  misc_RNA (1)...(19): siRNA sense strand
gagcaguacuacaaagaug

SEQ ID NO: 2042618 - RNA, 19 nt, Homo sapiens
  misc_RNA (1)...(19): siRNA sense strand
uggaugaccucgaugauga

SEQ ID NO: 2042619 - RNA, 19 nt, Homo sapiens
  misc_RNA (1)...(19): siRNA sense strand
cgacuuuccuucccaucua

SEQ ID NO: 2042620 - RNA, 19 nt, Homo sapiens
  misc_RNA (1)...(19): siRNA sense strand
ccggacagcuguacuccua

SEQ ID NO: 2042621 - RNA, 19 nt, Homo sapiens
  misc_RNA (1)...(19): siRNA sense strand
caacaacuacugugacuuc

SEQ ID NO: 2042622 - RNA, 19 nt, Homo sapiens
  misc_RNA (1)...(19): siRNA sense strand
cagaugacuuccuggauga

SEQ ID NO: 2042623 - RNA, 19 nt, Homo sapiens
  misc_RNA (1)...(19): siRNA sense strand
ugaagacuaugaagaagau

SEQ ID NO: 2042624 - RNA, 19 nt, Homo sapiens
  misc_RNA (1)...(19): siRNA sense strand
gcucagggcauccaucuug

SEQ ID NO: 2042625 - RNA, 19 nt, Homo sapiens
  misc_RNA (1)...(19): siRNA sense strand
ccagagcaauuguuacauc

SEQ ID NO: 2042626 - RNA, 19 nt, Homo sapiens
  misc_RNA (1)...(19): siRNA sense strand
uuacaaugcucgccucugu

SEQ ID NO: 2042627 - RNA, 19 nt, Homo sapiens
  misc_RNA (1)...(19): siRNA sense strand
gaaccagaacuccucuuga

SEQ ID NO: 2042628 - RNA, 19 nt, Homo sapiens
  misc_RNA (1)...(19): siRNA sense strand
aaaggguccugauggauug

SEQ ID NO: 2042629 - RNA, 19 nt, Homo sapiens
  misc_RNA (1)...(19): siRNA sense strand
caucuugccuccaauuuac

SEQ ID NO: 2042630 - RNA, 19 nt, Homo sapiens
  misc_RNA (1)...(19): siRNA sense strand
ggaguagcccagagcaauu

SEQ ID NO: 2042631 - RNA, 19 nt, Homo sapiens
  misc_RNA (1)...(19): siRNA sense strand
ugaugaagacuaugaagaa

SEQ ID NO: 2042632 - RNA, 19 nt, Homo sapiens
  misc_RNA (1)...(19): siRNA sense strand
caaccacccacuccuguuu

SEQ ID NO: 2042633 - RNA, 19 nt, Homo sapiens
  misc_RNA (1)...(19): siRNA sense strand
ggacaaggaagacucucaa

SEQ ID NO: 2042634 - RNA, 19 nt, Homo sapiens
  misc_RNA (1)...(19): siRNA sense strand
gcauccaucuugccuccaa

SEQ ID NO: 2042635 - RNA, 19 nt, Homo sapiens
  misc_RNA (1)...(19): siRNA sense strand
uggcggcagugaagacaua

SEQ ID NO: 2042636 - RNA, 19 nt, Homo sapiens
  misc_RNA (1)...(19): siRNA sense strand
gaugaagacuaugaagaag

SEQ ID NO: 2042637 - RNA, 19 nt, Homo sapiens
  misc_RNA (1)...(19): siRNA sense strand
gaaccgaccaggccucagu

SEQ ID NO: 2042638 - RNA, 19 nt, Homo sapiens
  misc_RNA (1)...(19): siRNA sense strand
ccaucuugccuccaauuua

SEQ ID NO: 2042639 - RNA, 19 nt, Homo sapiens
  misc_RNA (1)...(19): siRNA sense strand
gucuggaccuguugaaaga

SEQ ID NO: 2042640 - RNA, 19 nt, Homo sapiens
  misc_RNA (1)...(19): siRNA sense strand
ccucgaugaugaagacuau

SEQ ID NO: 2042641 - RNA, 19 nt, Homo sapiens
  misc_RNA (1)...(19): siRNA sense strand
gagcugguguccuguucug

SEQ ID NO: 2042642 - RNA, 19 nt, Homo sapiens
  misc_RNA (1)...(19): siRNA sense strand
caaggaagacucucaacca

SEQ ID NO: 2042643 - RNA, 19 nt, Homo sapiens
  misc_RNA (1)...(19): siRNA sense strand
gagcagugccacaauuaca

SEQ ID NO: 2042644 - RNA, 19 nt, Homo sapiens
  misc_RNA (1)...(19): siRNA sense strand
caguugcucuucugugaug

SEQ ID NO: 2042645 - RNA, 19 nt, Homo sapiens
  misc_RNA (1)...(19): siRNA sense strand
uagcccagagcaauuguua

SEQ ID NO: 2042646 - RNA, 19 nt, Homo sapiens
  misc_RNA (1)...(19): siRNA sense strand
cgagaaugacgaccaguug

SEQ ID NO: 2042647 - RNA, 19 nt, Homo sapiens
  misc_RNA (1)...(19): siRNA sense strand
gaugauggcggcagugaag

SEQ ID NO: 2042648 - RNA, 19 nt, Homo sapiens
  misc_RNA (1)...(19): siRNA sense strand
ggaccgggauaagcccuau

SEQ ID NO: 2042649 - RNA, 19 nt, Homo sapiens
  misc_RNA (1)...(19): siRNA sense strand
aagcuuccaucuaccagaa

SEQ ID NO: 2042650 - RNA, 19 nt, Homo sapiens
  misc_RNA (1)...(19): siRNA sense strand
ggagggcgaggacaaggaa

SEQ ID NO: 2042651 - RNA, 19 nt, Homo sapiens
  misc_RNA (1)...(19): siRNA sense strand
gguggagaauguagugaag

SEQ ID NO: 2042652 - RNA, 19 nt, Homo sapiens
  misc_RNA (1)...(19): siRNA sense strand
gaccaggccucaguuacca

SEQ ID NO: 2042653 - RNA, 19 nt, Homo sapiens
  misc_RNA (1)...(19): siRNA sense strand
gcccuaugccugugacauu

SEQ ID NO: 2042654 - RNA, 19 nt, Homo sapiens
  misc_RNA (1)...(19): siRNA sense strand
acacagaccagacccugaa

SEQ ID NO: 2042655 - RNA, 19 nt, Homo sapiens
  misc_RNA (1)...(19): siRNA sense strand
gcccagagcaauuguuaca

SEQ ID NO: 2042656 - RNA, 19 nt, Homo sapiens
  misc_RNA (1)...(19): siRNA sense strand
uggagcagugccacaauua

SEQ ID NO: 2042657 - RNA, 19 nt, Homo sapiens
  misc_RNA (1)...(19): siRNA sense strand
caggauggcaguaguuuag

SEQ ID NO: 2042658 - RNA, 19 nt, Homo sapiens
  misc_RNA (1)...(19): siRNA sense strand
ggauggcaguaguuuagag

SEQ ID NO: 2042659 - RNA, 19 nt, Homo sapiens
  misc_RNA (1)...(19): siRNA sense strand
aagagaaagcuuccaucua

SEQ ID NO: 2042660 - RNA, 19 nt, Homo sapiens
  misc_RNA (1)...(19): siRNA sense strand
gcagugccacaauuacaau

SEQ ID NO: 2042661 - RNA, 19 nt, Homo sapiens
  misc_RNA (1)...(19): siRNA sense strand
gcaucgagugcaaauguug

SEQ ID NO: 2042662 - RNA, 19 nt, Homo sapiens
  misc_RNA (1)...(19): siRNA sense strand
ggagcaguacuacaaagau

SEQ ID NO: 2042663 - RNA, 19 nt, Homo sapiens
  misc_RNA (1)...(19): siRNA sense strand
cuauuaagccagacacaga

SEQ ID NO: 2042664 - RNA, 19 nt, Homo sapiens
  misc_RNA (1)...(19): siRNA sense strand
gggagcaguacuacaaaga

SEQ ID NO: 2042665 - RNA, 19 nt, Homo sapiens
  misc_RNA (1)...(19): siRNA sense strand
cggcugugguggagaaugu

SEQ ID NO: 2042666 - RNA, 19 nt, Homo sapiens
  misc_RNA (1)...(19): siRNA sense strand
ccuagaaccagaugacuuc

SEQ ID NO: 2042667 - RNA, 19 nt, Homo sapiens
  misc_RNA (1)...(19): siRNA sense strand
gcuaccacauguacugucu

SEQ ID NO: 2042668 - RNA, 19 nt, Homo sapiens
  misc_RNA (1)...(19): siRNA sense strand
accaguugcucuucuguga

SEQ ID NO: 2042669 - RNA, 19 nt, Homo sapiens
  misc_RNA (1)...(19): siRNA sense strand
ugaccucgaugaugaagac

SEQ ID NO: 2042670 - RNA, 19 nt, Homo sapiens
  misc_RNA (1)...(19): siRNA sense strand
cagagcaauuguuacaucu

SEQ ID NO: 2042671 - RNA, 19 nt, Homo sapiens
  misc_RNA (1)...(19): siRNA sense strand
gacuuuccuucccaucuau

SEQ ID NO: 2042672 - RNA, 19 nt, Homo sapiens
  misc_RNA (1)...(19): siRNA sense strand
gaguagcccagagcaauug

SEQ ID NO: 2042673 - RNA, 19 nt, Homo sapiens
  misc_RNA (1)...(19): siRNA sense strand
ggacucaaagauuaacaag

SEQ ID NO: 2042674 - RNA, 19 nt, Homo sapiens
  misc_RNA (1)...(19): siRNA sense strand
ccugugacauuuguggaaa

SEQ ID NO: 2042675 - RNA, 19 nt, Homo sapiens
  misc_RNA (1)...(19): siRNA sense strand
gcaauuguuacaucuggau

SEQ ID NO: 2042676 - RNA, 19 nt, Homo sapiens
  misc_RNA (1)...(19): siRNA sense strand
cagaccagacccugaagaa

SEQ ID NO: 2042677 - RNA, 19 nt, Homo sapiens
  misc_RNA (1)...(19): siRNA sense strand
ucaggauggcaguaguuua

SEQ ID NO: 2042678 - RNA, 19 nt, Homo sapiens
  misc_RNA (1)...(19): siRNA sense strand
uaccacauguacugucuca

SEQ ID NO: 2042679 - RNA, 19 nt, Homo sapiens
  misc_RNA (1)...(19): siRNA sense strand
gguguccuguucugacugu

SEQ ID NO: 2042680 - RNA, 19 nt, Homo sapiens
  misc_RNA (1)...(19): siRNA sense strand
ugacagccugggcgaguuu

SEQ ID NO: 2042681 - RNA, 19 nt, Homo sapiens
  misc_RNA (1)...(19): siRNA sense strand
aaagagaaagcuuccaucu

SEQ ID NO: 2042682 - RNA, 19 nt, Homo sapiens
  misc_RNA (1)...(19): siRNA sense strand
cccuaugccugugacauuu

SEQ ID NO: 2042683 - RNA, 19 nt, Homo sapiens
  misc_RNA (1)...(19): siRNA sense strand
gcgaaagcggauccuagaa

SEQ ID NO: 2042684 - RNA, 19 nt, Homo sapiens
  misc_RNA (1)...(19): siRNA sense strand
ugaaagagaaagcuuccau

SEQ ID NO: 2042685 - RNA, 19 nt, Homo sapiens
  misc_RNA (1)...(19): siRNA sense strand
cgaaagcggauccuagaac

SEQ ID NO: 2042686 - RNA, 19 nt, Homo sapiens
  misc_RNA (1)...(19): siRNA sense strand
ggaccuguugaaagagaaa

SEQ ID NO: 2042687 - RNA, 19 nt, Homo sapiens
  misc_RNA (1)...(19): siRNA sense strand
ggaugaccucgaugaugaa

SEQ ID NO: 2042688 - RNA, 19 nt, Homo sapiens
  misc_RNA (1)...(19): siRNA sense strand
accagacccugaagaagga

SEQ ID NO: 2042689 - RNA, 19 nt, Homo sapiens
  misc_RNA (1)...(19): siRNA sense strand
gcgaguuuccugugaccaa

SEQ ID NO: 2042690 - RNA, 19 nt, Homo sapiens
  misc_RNA (1)...(19): siRNA sense strand
ucgaugaugaagacuauga

SEQ ID NO: 2042691 - RNA, 19 nt, Homo sapiens
  misc_RNA (1)...(19): siRNA sense strand
cugaggagcagaaauccaa

SEQ ID NO: 2042692 - RNA, 19 nt, Homo sapiens
  misc_RNA (1)...(19): siRNA sense strand
ggccucaguuaccacuaug

SEQ ID NO: 2042693 - RNA, 19 nt, Homo sapiens
  misc_RNA (1)...(19): siRNA sense strand
gaagacuaugaagaagaua

SEQ ID NO: 2042694 - RNA, 19 nt, Homo sapiens
  misc_RNA (1)...(19): siRNA sense strand
gcagugcccguaagaagcu

SEQ ID NO: 2042695 - RNA, 19 nt, Homo sapiens
  misc_RNA (1)...(19): siRNA sense strand
ccaucuaccagaaccagaa

SEQ ID NO: 2042696 - RNA, 19 nt, Homo sapiens
  misc_RNA (1)...(19): siRNA sense strand
gggacucaaagauuaacaa

SEQ ID NO: 2042697 - RNA, 19 nt, Homo sapiens
  misc_RNA (1)...(19): siRNA sense strand
agaaccagaacuccucuug

SEQ ID NO: 2042698 - RNA, 19 nt, Homo sapiens
  misc_RNA (1)...(19): siRNA sense strand
ggagcagugccacaauuac

SEQ ID NO: 2042699 - RNA, 19 nt, Homo sapiens
  misc_RNA (1)...(19): siRNA sense strand
ccugaggauccacgacuuu

SEQ ID NO: 2042700 - RNA, 19 nt, Homo sapiens
  misc_RNA (1)...(19): siRNA sense strand
auggagcagugccacaauu

SEQ ID NO: 2042701 - RNA, 19 nt, Homo sapiens
  misc_RNA (1)...(19): siRNA sense strand
gaugaugaagacuaugaag

SEQ ID NO: 2042702 - RNA, 19 nt, Homo sapiens
  misc_RNA (1)...(19): siRNA sense strand
ugaacaaacugcugacuuu

SEQ ID NO: 2042703 - RNA, 19 nt, Homo sapiens
  misc_RNA (1)...(19): siRNA sense strand
gcuagcugcugccuccuua

SEQ ID NO: 2042704 - RNA, 19 nt, Homo sapiens
  misc_RNA (1)...(19): siRNA sense strand
caacucaccucguguggau

SEQ ID NO: 2042705 - RNA, 19 nt, Homo sapiens
  misc_RNA (1)...(19): siRNA sense strand
ccaaaccugugccuaagaa

SEQ ID NO: 2042706 - RNA, 19 nt, Homo sapiens
  misc_RNA (1)...(19): siRNA sense strand
guggaucucuaccuaauga

SEQ ID NO: 2042707 - RNA, 19 nt, Homo sapiens
  misc_RNA (1)...(19): siRNA sense strand
gcaagaaggauaaguuaca

SEQ ID NO: 2042708 - RNA, 19 nt, Homo sapiens
  misc_RNA (1)...(19): siRNA sense strand
caagaaggauaaguuacaa

SEQ ID NO: 2042709 - RNA, 19 nt, Homo sapiens
  misc_RNA (1)...(19): siRNA sense strand
ugaagaagcucggauacug

SEQ ID NO: 2042710 - RNA, 19 nt, Homo sapiens
  misc_RNA (1)...(19): siRNA sense strand
caucaugacccaucugaaa

SEQ ID NO: 2042711 - RNA, 19 nt, Homo sapiens
  misc_RNA (1)...(19): siRNA sense strand
gcugguggaucucuaccua

SEQ ID NO: 2042712 - RNA, 19 nt, Homo sapiens
  misc_RNA (1)...(19): siRNA sense strand
gcagauaugcuagguguau

SEQ ID NO: 2042713 - RNA, 19 nt, Homo sapiens
  misc_RNA (1)...(19): siRNA sense strand
gagaucagcuuuugaagau

SEQ ID NO: 2042714 - RNA, 19 nt, Homo sapiens
  misc_RNA (1)...(19): siRNA sense strand
agaugacccugcaggaaua

SEQ ID NO: 2042715 - RNA, 19 nt, Homo sapiens
  misc_RNA (1)...(19): siRNA sense strand
gagaauugccaaacgaaga

SEQ ID NO: 2042716 - RNA, 19 nt, Homo sapiens
  misc_RNA (1)...(19): siRNA sense strand
gccacugccuuuaugauug

SEQ ID NO: 2042717 - RNA, 19 nt, Homo sapiens
  misc_RNA (1)...(19): siRNA sense strand
gcuccaaaccugugccuaa

SEQ ID NO: 2042718 - RNA, 19 nt, Homo sapiens
  misc_RNA (1)...(19): siRNA sense strand
gagaugacccugcaggaau

SEQ ID NO: 2042719 - RNA, 19 nt, Homo sapiens
  misc_RNA (1)...(19): siRNA sense strand
ugaacguccucaaauguga

SEQ ID NO: 2042720 - RNA, 19 nt, Homo sapiens
  misc_RNA (1)...(19): siRNA sense strand
ccuuugagaugacccauga

SEQ ID NO: 2042721 - RNA, 19 nt, Homo sapiens
  misc_RNA (1)...(19): siRNA sense strand
gcaguaugcaagaaggaua

SEQ ID NO: 2042722 - RNA, 19 nt, Homo sapiens
  misc_RNA (1)...(19): siRNA sense strand
guacucagcauggaaauca

SEQ ID NO: 2042723 - RNA, 19 nt, Homo sapiens
  misc_RNA (1)...(19): siRNA sense strand
cagugaagcugguggaucu

SEQ ID NO: 2042724 - RNA, 19 nt, Homo sapiens
  misc_RNA (1)...(19): siRNA sense strand
gaacaaacugcugacuuuc

SEQ ID NO: 2042725 - RNA, 19 nt, Homo sapiens
  misc_RNA (1)...(19): siRNA sense strand
gcauuacaguggcuacagu

SEQ ID NO: 2042726 - RNA, 19 nt, Homo sapiens
  misc_RNA (1)...(19): siRNA sense strand
gcaggaauaccacuauguc

SEQ ID NO: 2042727 - RNA, 19 nt, Homo sapiens
  misc_RNA (1)...(19): siRNA sense strand
gagguacucagcauggaaa

SEQ ID NO: 2042728 - RNA, 19 nt, Homo sapiens
  misc_RNA (1)...(19): siRNA sense strand
ucucaaggcuguguauuac

SEQ ID NO: 2042729 - RNA, 19 nt, Homo sapiens
  misc_RNA (1)...(19): siRNA sense strand
gucucaaggcuguguauua

SEQ ID NO: 2042730 - RNA, 19 nt, Homo sapiens
  misc_RNA (1)...(19): siRNA sense strand
ggaaaucaacauccugaac

SEQ ID NO: 2042731 - RNA, 19 nt, Homo sapiens
  misc_RNA (1)...(19): siRNA sense strand
uacaguggcuacaguaucu

SEQ ID NO: 2042732 - RNA, 19 nt, Homo sapiens
  misc_RNA (1)...(19): siRNA sense strand
gcaaaauugugcccaguca

SEQ ID NO: 2042733 - RNA, 19 nt, Homo sapiens
  misc_RNA (1)...(19): siRNA sense strand
ugaaggcaguaugcaagaa

SEQ ID NO: 2042734 - RNA, 19 nt, Homo sapiens
  misc_RNA (1)...(19): siRNA sense strand
gaaaucucaguccagcaaa

SEQ ID NO: 2042735 - RNA, 19 nt, Homo sapiens
  misc_RNA (1)...(19): siRNA sense strand
gagucuccaucuucacuuc

SEQ ID NO: 2042736 - RNA, 19 nt, Homo sapiens
  misc_RNA (1)...(19): siRNA sense strand
uguugaagcuggaggagau

SEQ ID NO: 2042737 - RNA, 19 nt, Homo sapiens
  misc_RNA (1)...(19): siRNA sense strand
gcauggaaaucaacauccu

SEQ ID NO: 2042738 - RNA, 19 nt, Homo sapiens
  misc_RNA (1)...(19): siRNA sense strand
gaaggcaguaugcaagaag

SEQ ID NO: 2042739 - RNA, 19 nt, Homo sapiens
  misc_RNA (1)...(19): siRNA sense strand
ugaagcugguggaucucua

SEQ ID NO: 2042740 - RNA, 19 nt, Homo sapiens
  misc_RNA (1)...(19): siRNA sense strand
gaauugccaaacgaagaua

SEQ ID NO: 2042741 - RNA, 19 nt, Homo sapiens
  misc_RNA (1)...(19): siRNA sense strand
agaaaucucaguccagcaa

SEQ ID NO: 2042742 - RNA, 19 nt, Homo sapiens
  misc_RNA (1)...(19): siRNA sense strand
ccacugccuuuaugauugc

SEQ ID NO: 2042743 - RNA, 19 nt, Homo sapiens
  misc_RNA (1)...(19): siRNA sense strand
acaugaagaagcucggaua

SEQ ID NO: 2042744 - RNA, 19 nt, Homo sapiens
  misc_RNA (1)...(19): siRNA sense strand
gaccuugucccgcuacauc

SEQ ID NO: 2042745 - RNA, 19 nt, Homo sapiens
  misc_RNA (1)...(19): siRNA sense strand
uaaugaaggcaguaugcaa

SEQ ID NO: 2042746 - RNA, 19 nt, Homo sapiens
  misc_RNA (1)...(19): siRNA sense strand
gacuuucaguucuuacgau

SEQ ID NO: 2042747 - RNA, 19 nt, Homo sapiens
  misc_RNA (1)...(19): siRNA sense strand
cgagaugacccugcaggaa

SEQ ID NO: 2042748 - RNA, 19 nt, Homo sapiens
  misc_RNA (1)...(19): siRNA sense strand
gggagaauugccaaacgaa

SEQ ID NO: 2042749 - RNA, 19 nt, Homo sapiens
  misc_RNA (1)...(19): siRNA sense strand
augcaagaaggauaaguua

SEQ ID NO: 2042750 - RNA, 19 nt, Homo sapiens
  misc_RNA (1)...(19): siRNA sense strand
caguaugcaagaaggauaa

SEQ ID NO: 2042751 - RNA, 19 nt, Homo sapiens
  misc_RNA (1)...(19): siRNA sense strand
uaugcaagaaggauaaguu

SEQ ID NO: 2042752 - RNA, 19 nt, Homo sapiens
  misc_RNA (1)...(19): siRNA sense strand
acuuucaguucuuacgaua

SEQ ID NO: 2042753 - RNA, 19 nt, Homo sapiens
  misc_RNA (1)...(19): siRNA sense strand
acaccaacaugaagacacu

SEQ ID NO: 2042754 - RNA, 19 nt, Homo sapiens
  misc_RNA (1)...(19): siRNA sense strand
uggaugacuuuguguacau

SEQ ID NO: 2042755 - RNA, 19 nt, Homo sapiens
  misc_RNA (1)...(19): siRNA sense strand
guggaugacuuuguguaca

SEQ ID NO: 2042756 - RNA, 19 nt, Homo sapiens
  misc_RNA (1)...(19): siRNA sense strand
ugguggaucucuaccuaau

SEQ ID NO: 2042757 - RNA, 19 nt, Homo sapiens
  misc_RNA (1)...(19): siRNA sense strand
caaacgaagauaucuccau

SEQ ID NO: 2042758 - RNA, 19 nt, Homo sapiens
  misc_RNA (1)...(19): siRNA sense strand
uuucaguucuuacgauagu

SEQ ID NO: 2042759 - RNA, 19 nt, Homo sapiens
  misc_RNA (1)...(19): siRNA sense strand
cccaugagacccuguacuu

SEQ ID NO: 2042760 - RNA, 19 nt, Homo sapiens
  misc_RNA (1)...(19): siRNA sense strand
gauacuggguucccuuccu

SEQ ID NO: 2042761 - RNA, 19 nt, Homo sapiens
  misc_RNA (1)...(19): siRNA sense strand
aaaccugugccuaagaaau

SEQ ID NO: 2042762 - RNA, 19 nt, Homo sapiens
  misc_RNA (1)...(19): siRNA sense strand
cauccugaacguccucaaa

SEQ ID NO: 2042763 - RNA, 19 nt, Homo sapiens
  misc_RNA (1)...(19): siRNA sense strand
uucccuuccuggagcauua

SEQ ID NO: 2042764 - RNA, 19 nt, Homo sapiens
  misc_RNA (1)...(19): siRNA sense strand
cauuacaguggcuacagua

SEQ ID NO: 2042765 - RNA, 19 nt, Homo sapiens
  misc_RNA (1)...(19): siRNA sense strand
aaaucaacauccugaacgu

SEQ ID NO: 2042766 - RNA, 19 nt, Homo sapiens
  misc_RNA (1)...(19): siRNA sense strand
ccugaacguccucaaaugu

SEQ ID NO: 2042767 - RNA, 19 nt, Homo sapiens
  misc_RNA (1)...(19): siRNA sense strand
gaagcugguggaucucuac

SEQ ID NO: 2042768 - RNA, 19 nt, Homo sapiens
  misc_RNA (1)...(19): siRNA sense strand
cagcauggaaaucaacauc

SEQ ID NO: 2042769 - RNA, 19 nt, Homo sapiens
  misc_RNA (1)...(19): siRNA sense strand
gauaucuccaucuucacuu

SEQ ID NO: 2042770 - RNA, 19 nt, Homo sapiens
  misc_RNA (1)...(19): siRNA sense strand
ccaugagacccuguacuug

SEQ ID NO: 2042771 - RNA, 19 nt, Homo sapiens
  misc_RNA (1)...(19): siRNA sense strand
ugaacaaacugcugacuuu

SEQ ID NO: 2042772 - RNA, 19 nt, Homo sapiens
  misc_RNA (1)...(19): siRNA sense strand
gcuagcugcugccuccuua

SEQ ID NO: 2042773 - RNA, 19 nt, Homo sapiens
  misc_RNA (1)...(19): siRNA sense strand
caacucaccucguguggau

SEQ ID NO: 2042774 - RNA, 19 nt, Homo sapiens
  misc_RNA (1)...(19): siRNA sense strand
ccaaaccugugccuaagaa

SEQ ID NO: 2042775 - RNA, 19 nt, Homo sapiens
  misc_RNA (1)...(19): siRNA sense strand
guggaucucuaccuaauga

SEQ ID NO: 2042776 - RNA, 19 nt, Homo sapiens
  misc_RNA (1)...(19): siRNA sense strand
gcaagaaggauaaguuaca

SEQ ID NO: 2042777 - RNA, 19 nt, Homo sapiens
  misc_RNA (1)...(19): siRNA sense strand
caagaaggauaaguuacaa

SEQ ID NO: 2042778 - RNA, 19 nt, Homo sapiens
  misc_RNA (1)...(19): siRNA sense strand
ugaagaagcucggauacug

SEQ ID NO: 2042779 - RNA, 19 nt, Homo sapiens
  misc_RNA (1)...(19): siRNA sense strand
caucaugacccaucugaaa

SEQ ID NO: 2042780 - RNA, 19 nt, Homo sapiens
  misc_RNA (1)...(19): siRNA sense strand
gcugguggaucucuaccua

SEQ ID NO: 2042781 - RNA, 19 nt, Homo sapiens
  misc_RNA (1)...(19): siRNA sense strand
gcagauaugcuagguguau

SEQ ID NO: 2042782 - RNA, 19 nt, Homo sapiens
  misc_RNA (1)...(19): siRNA sense strand
gagaucagcuuuugaagau

SEQ ID NO: 2042783 - RNA, 19 nt, Homo sapiens
  misc_RNA (1)...(19): siRNA sense strand
agaugacccugcaggaaua

SEQ ID NO: 2042784 - RNA, 19 nt, Homo sapiens
  misc_RNA (1)...(19): siRNA sense strand
gagaauugccaaacgaaga

SEQ ID NO: 2042785 - RNA, 19 nt, Homo sapiens
  misc_RNA (1)...(19): siRNA sense strand
gccacugccuuuaugauug

SEQ ID NO: 2042786 - RNA, 19 nt, Homo sapiens
  misc_RNA (1)...(19): siRNA sense strand
gcuccaaaccugugccuaa

SEQ ID NO: 2042787 - RNA, 19 nt, Homo sapiens
  misc_RNA (1)...(19): siRNA sense strand
gagaugacccugcaggaau

SEQ ID NO: 2042788 - RNA, 19 nt, Homo sapiens
  misc_RNA (1)...(19): siRNA sense strand
ugaacguccucaaauguga

SEQ ID NO: 2042789 - RNA, 19 nt, Homo sapiens
  misc_RNA (1)...(19): siRNA sense strand
ccuuugagaugacccauga

SEQ ID NO: 2042790 - RNA, 19 nt, Homo sapiens
  misc_RNA (1)...(19): siRNA sense strand
gcaguaugcaagaaggaua

SEQ ID NO: 2042791 - RNA, 19 nt, Homo sapiens
  misc_RNA (1)...(19): siRNA sense strand
guacucagcauggaaauca

SEQ ID NO: 2042792 - RNA, 19 nt, Homo sapiens
  misc_RNA (1)...(19): siRNA sense strand
cagugaagcugguggaucu

SEQ ID NO: 2042793 - RNA, 19 nt, Homo sapiens
  misc_RNA (1)...(19): siRNA sense strand
gaacaaacugcugacuuuc

SEQ ID NO: 2042794 - RNA, 19 nt, Homo sapiens
  misc_RNA (1)...(19): siRNA sense strand
gcauuacaguggcuacagu

SEQ ID NO: 2042795 - RNA, 19 nt, Homo sapiens
  misc_RNA (1)...(19): siRNA sense strand
gcaggaauaccacuauguc

SEQ ID NO: 2042796 - RNA, 19 nt, Homo sapiens
  misc_RNA (1)...(19): siRNA sense strand
gagguacucagcauggaaa

SEQ ID NO: 2042797 - RNA, 19 nt, Homo sapiens
  misc_RNA (1)...(19): siRNA sense strand
ucucaaggcuguguauuac

SEQ ID NO: 2042798 - RNA, 19 nt, Homo sapiens
  misc_RNA (1)...(19): siRNA sense strand
gucucaaggcuguguauua

SEQ ID NO: 2042799 - RNA, 19 nt, Homo sapiens
  misc_RNA (1)...(19): siRNA sense strand
ggaaaucaacauccugaac

SEQ ID NO: 2042800 - RNA, 19 nt, Homo sapiens
  misc_RNA (1)...(19): siRNA sense strand
uacaguggcuacaguaucu

SEQ ID NO: 2042801 - RNA, 19 nt, Homo sapiens
  misc_RNA (1)...(19): siRNA sense strand
gcaaaauugugcccaguca

SEQ ID NO: 2042802 - RNA, 19 nt, Homo sapiens
  misc_RNA (1)...(19): siRNA sense strand
ugaaggcaguaugcaagaa

SEQ ID NO: 2042803 - RNA, 19 nt, Homo sapiens
  misc_RNA (1)...(19): siRNA sense strand
gaaaucucaguccagcaaa

SEQ ID NO: 2042804 - RNA, 19 nt, Homo sapiens
  misc_RNA (1)...(19): siRNA sense strand
gagucuccaucuucacuuc

SEQ ID NO: 2042805 - RNA, 19 nt, Homo sapiens
  misc_RNA (1)...(19): siRNA sense strand
uguugaagcuggaggagau

SEQ ID NO: 2042806 - RNA, 19 nt, Homo sapiens
  misc_RNA (1)...(19): siRNA sense strand
gcauggaaaucaacauccu

SEQ ID NO: 2042807 - RNA, 19 nt, Homo sapiens
  misc_RNA (1)...(19): siRNA sense strand
gaaggcaguaugcaagaag

SEQ ID NO: 2042808 - RNA, 19 nt, Homo sapiens
  misc_RNA (1)...(19): siRNA sense strand
ugaagcugguggaucucua

SEQ ID NO: 2042809 - RNA, 19 nt, Homo sapiens
  misc_RNA (1)...(19): siRNA sense strand
gaauugccaaacgaagaua

SEQ ID NO: 2042810 - RNA, 19 nt, Homo sapiens
  misc_RNA (1)...(19): siRNA sense strand
agaaaucucaguccagcaa

SEQ ID NO: 2042811 - RNA, 19 nt, Homo sapiens
  misc_RNA (1)...(19): siRNA sense strand
ccacugccuuuaugauugc

SEQ ID NO: 2042812 - RNA, 19 nt, Homo sapiens
  misc_RNA (1)...(19): siRNA sense strand
acaugaagaagcucggaua

SEQ ID NO: 2042813 - RNA, 19 nt, Homo sapiens
  misc_RNA (1)...(19): siRNA sense strand
gaccuugucccgcuacauc

SEQ ID NO: 2042814 - RNA, 19 nt, Homo sapiens
  misc_RNA (1)...(19): siRNA sense strand
uaaugaaggcaguaugcaa

SEQ ID NO: 2042815 - RNA, 19 nt, Homo sapiens
  misc_RNA (1)...(19): siRNA sense strand
gacuuucaguucuuacgau

SEQ ID NO: 2042816 - RNA, 19 nt, Homo sapiens
  misc_RNA (1)...(19): siRNA sense strand
cgagaugacccugcaggaa

SEQ ID NO: 2042817 - RNA, 19 nt, Homo sapiens
  misc_RNA (1)...(19): siRNA sense strand
gggagaauugccaaacgaa

SEQ ID NO: 2042818 - RNA, 19 nt, Homo sapiens
  misc_RNA (1)...(19): siRNA sense strand
augcaagaaggauaaguua

SEQ ID NO: 2042819 - RNA, 19 nt, Homo sapiens
  misc_RNA (1)...(19): siRNA sense strand
caguaugcaagaaggauaa

SEQ ID NO: 2042820 - RNA, 19 nt, Homo sapiens
  misc_RNA (1)...(19): siRNA sense strand
uaugcaagaaggauaaguu

SEQ ID NO: 2042821 - RNA, 19 nt, Homo sapiens
  misc_RNA (1)...(19): siRNA sense strand
acuuucaguucuuacgaua

SEQ ID NO: 2042822 - RNA, 19 nt, Homo sapiens
  misc_RNA (1)...(19): siRNA sense strand
acaccaacaugaagacacu

SEQ ID NO: 2042823 - RNA, 19 nt, Homo sapiens
  misc_RNA (1)...(19): siRNA sense strand
uggaugacuuuguguacau

SEQ ID NO: 2042824 - RNA, 19 nt, Homo sapiens
  misc_RNA (1)...(19): siRNA sense strand
guggaugacuuuguguaca

SEQ ID NO: 2042825 - RNA, 19 nt, Homo sapiens
  misc_RNA (1)...(19): siRNA sense strand
ugguggaucucuaccuaau

SEQ ID NO: 2042826 - RNA, 19 nt, Homo sapiens
  misc_RNA (1)...(19): siRNA sense strand
caaacgaagauaucuccau

SEQ ID NO: 2042827 - RNA, 19 nt, Homo sapiens
  misc_RNA (1)...(19): siRNA sense strand
uuucaguucuuacgauagu

SEQ ID NO: 2042828 - RNA, 19 nt, Homo sapiens
  misc_RNA (1)...(19): siRNA sense strand
cccaugagacccuguacuu

SEQ ID NO: 2042829 - RNA, 19 nt, Homo sapiens
  misc_RNA (1)...(19): siRNA sense strand
gauacuggguucccuuccu

SEQ ID NO: 2042830 - RNA, 19 nt, Homo sapiens
  misc_RNA (1)...(19): siRNA sense strand
aaaccugugccuaagaaau

SEQ ID NO: 2042831 - RNA, 19 nt, Homo sapiens
  misc_RNA (1)...(19): siRNA sense strand
cauccugaacguccucaaa

SEQ ID NO: 2042832 - RNA, 19 nt, Homo sapiens
  misc_RNA (1)...(19): siRNA sense strand
uucccuuccuggagcauua

SEQ ID NO: 2042833 - RNA, 19 nt, Homo sapiens
  misc_RNA (1)...(19): siRNA sense strand
cauuacaguggcuacagua

SEQ ID NO: 2042834 - RNA, 19 nt, Homo sapiens
  misc_RNA (1)...(19): siRNA sense strand
aaaucaacauccugaacgu

SEQ ID NO: 2042835 - RNA, 19 nt, Homo sapiens
  misc_RNA (1)...(19): siRNA sense strand
ccugaacguccucaaaugu

SEQ ID NO: 2042836 - RNA, 19 nt, Homo sapiens
  misc_RNA (1)...(19): siRNA sense strand
gaagcugguggaucucuac

SEQ ID NO: 2042837 - RNA, 19 nt, Homo sapiens
  misc_RNA (1)...(19): siRNA sense strand
cagcauggaaaucaacauc

SEQ ID NO: 2042838 - RNA, 19 nt, Homo sapiens
  misc_RNA (1)...(19): siRNA sense strand
gauaucuccaucuucacuu

SEQ ID NO: 2042839 - RNA, 19 nt, Homo sapiens
  misc_RNA (1)...(19): siRNA sense strand
ccaugagacccuguacuug

SEQ ID NO: 2042840 - RNA, 19 nt, Homo sapiens
  misc_RNA (1)...(19): siRNA sense strand
ccaaaccugugccuaagaa

SEQ ID NO: 2042841 - RNA, 19 nt, Homo sapiens
  misc_RNA (1)...(19): siRNA sense strand
caucaugacccaucugaaa

SEQ ID NO: 2042842 - RNA, 19 nt, Homo sapiens
  misc_RNA (1)...(19): siRNA sense strand
gagaucagcuuuugaagau

SEQ ID NO: 2042843 - RNA, 19 nt, Homo sapiens
  misc_RNA (1)...(19): siRNA sense strand
gagaauugccaaacgaaga

SEQ ID NO: 2042844 - RNA, 19 nt, Homo sapiens
  misc_RNA (1)...(19): siRNA sense strand
gcuccaaaccugugccuaa

SEQ ID NO: 2042845 - RNA, 19 nt, Homo sapiens
  misc_RNA (1)...(19): siRNA sense strand
gcaaaauugugcccaguca

SEQ ID NO: 2042846 - RNA, 19 nt, Homo sapiens
  misc_RNA (1)...(19): siRNA sense strand
gaaaucucaguccagcaaa

SEQ ID NO: 2042847 - RNA, 19 nt, Homo sapiens
  misc_RNA (1)...(19): siRNA sense strand
gagucuccaucuucacuuc

SEQ ID NO: 2042848 - RNA, 19 nt, Homo sapiens
  misc_RNA (1)...(19): siRNA sense strand
gaauugccaaacgaagaua

SEQ ID NO: 2042849 - RNA, 19 nt, Homo sapiens
  misc_RNA (1)...(19): siRNA sense strand
agaaaucucaguccagcaa

SEQ ID NO: 2042850 - RNA, 19 nt, Homo sapiens
  misc_RNA (1)...(19): siRNA sense strand
gggagaauugccaaacgaa

SEQ ID NO: 2042851 - RNA, 19 nt, Homo sapiens
  misc_RNA (1)...(19): siRNA sense strand
caaacgaagauaucuccau

SEQ ID NO: 2042852 - RNA, 19 nt, Homo sapiens
  misc_RNA (1)...(19): siRNA sense strand
aaaccugugccuaagaaau

SEQ ID NO: 2042853 - RNA, 19 nt, Homo sapiens
  misc_RNA (1)...(19): siRNA sense strand
gauaucuccaucuucacuu

SEQ ID NO: 2042854 - RNA, 19 nt, Homo sapiens
  misc_RNA (1)...(19): siRNA sense strand
gaucaucgcucaguauaaa

SEQ ID NO: 2042855 - RNA, 19 nt, Homo sapiens
  misc_RNA (1)...(19): siRNA sense strand
caacacagauacccuagaa

SEQ ID NO: 2042856 - RNA, 19 nt, Homo sapiens
  misc_RNA (1)...(19): siRNA sense strand
gaugggagguugcagauug

SEQ ID NO: 2042857 - RNA, 19 nt, Homo sapiens
  misc_RNA (1)...(19): siRNA sense strand
gaaccgaggcgaauuguga

SEQ ID NO: 2042858 - RNA, 19 nt, Homo sapiens
  misc_RNA (1)...(19): siRNA sense strand
gauaugaguugcaggugaa

SEQ ID NO: 2042859 - RNA, 19 nt, Homo sapiens
  misc_RNA (1)...(19): siRNA sense strand
gagaaugugcuagagauua

SEQ ID NO: 2042860 - RNA, 19 nt, Homo sapiens
  misc_RNA (1)...(19): siRNA sense strand
gcccugagcuuccgcuuug

SEQ ID NO: 2042861 - RNA, 19 nt, Homo sapiens
  misc_RNA (1)...(19): siRNA sense strand
agaaugugcuagagauuaa

SEQ ID NO: 2042862 - RNA, 19 nt, Homo sapiens
  misc_RNA (1)...(19): siRNA sense strand
gaggaaaucacauuggaaa

SEQ ID NO: 2042863 - RNA, 19 nt, Homo sapiens
  misc_RNA (1)...(19): siRNA sense strand
gggaacagcucaugaacag

SEQ ID NO: 2042864 - RNA, 19 nt, Homo sapiens
  misc_RNA (1)...(19): siRNA sense strand
cgagaguggucaagguuaa

SEQ ID NO: 2042865 - RNA, 19 nt, Homo sapiens
  misc_RNA (1)...(19): siRNA sense strand
gaaauaccgcuaccaagau

SEQ ID NO: 2042866 - RNA, 19 nt, Homo sapiens
  misc_RNA (1)...(19): siRNA sense strand
gcacaucccaggagauaau

SEQ ID NO: 2042867 - RNA, 19 nt, Homo sapiens
  misc_RNA (1)...(19): siRNA sense strand
gagcaggaguucacagagu

SEQ ID NO: 2042868 - RNA, 19 nt, Homo sapiens
  misc_RNA (1)...(19): siRNA sense strand
ggagauggaauacgaggaa

SEQ ID NO: 2042869 - RNA, 19 nt, Homo sapiens
  misc_RNA (1)...(19): siRNA sense strand
uggacauccuggacuauua

SEQ ID NO: 2042870 - RNA, 19 nt, Homo sapiens
  misc_RNA (1)...(19): siRNA sense strand
guacaacagccaccucuau

SEQ ID NO: 2042871 - RNA, 19 nt, Homo sapiens
  misc_RNA (1)...(19): siRNA sense strand
ccgcaaagccuucgacaga

SEQ ID NO: 2042872 - RNA, 19 nt, Homo sapiens
  misc_RNA (1)...(19): siRNA sense strand
agaaauaccgcuaccaaga

SEQ ID NO: 2042873 - RNA, 19 nt, Homo sapiens
  misc_RNA (1)...(19): siRNA sense strand
ggaauacgaggaaaucaca

SEQ ID NO: 2042874 - RNA, 19 nt, Homo sapiens
  misc_RNA (1)...(19): siRNA sense strand
ggacauccuggacuauuau

SEQ ID NO: 2042875 - RNA, 19 nt, Homo sapiens
  misc_RNA (1)...(19): siRNA sense strand
gauguugucuaccuaaagg

SEQ ID NO: 2042876 - RNA, 19 nt, Homo sapiens
  misc_RNA (1)...(19): siRNA sense strand
caaaagggguuucuacauc

SEQ ID NO: 2042877 - RNA, 19 nt, Homo sapiens
  misc_RNA (1)...(19): siRNA sense strand
cagcacaucccaggagaua

SEQ ID NO: 2042878 - RNA, 19 nt, Homo sapiens
  misc_RNA (1)...(19): siRNA sense strand
gagauuaacaagcggauca

SEQ ID NO: 2042879 - RNA, 19 nt, Homo sapiens
  misc_RNA (1)...(19): siRNA sense strand
uagcaucuauguaacaaag

SEQ ID NO: 2042880 - RNA, 19 nt, Homo sapiens
  misc_RNA (1)...(19): siRNA sense strand
ggugacgacccauccauuu

SEQ ID NO: 2042881 - RNA, 19 nt, Homo sapiens
  misc_RNA (1)...(19): siRNA sense strand
caagcgggaguaugagaua

SEQ ID NO: 2042882 - RNA, 19 nt, Homo sapiens
  misc_RNA (1)...(19): siRNA sense strand
aaauaccgcuaccaagaug

SEQ ID NO: 2042883 - RNA, 19 nt, Homo sapiens
  misc_RNA (1)...(19): siRNA sense strand
ugaagaacacguaugaugu

SEQ ID NO: 2042884 - RNA, 19 nt, Homo sapiens
  misc_RNA (1)...(19): siRNA sense strand
gagauggaauacgaggaaa

SEQ ID NO: 2042885 - RNA, 19 nt, Homo sapiens
  misc_RNA (1)...(19): siRNA sense strand
ggagaaugugcuagagauu

SEQ ID NO: 2042886 - RNA, 19 nt, Homo sapiens
  misc_RNA (1)...(19): siRNA sense strand
ggcccaagcgggaguauga

SEQ ID NO: 2042887 - RNA, 19 nt, Homo sapiens
  misc_RNA (1)...(19): siRNA sense strand
gcagauggaagugcacuau

SEQ ID NO: 2042888 - RNA, 19 nt, Homo sapiens
  misc_RNA (1)...(19): siRNA sense strand
gcauccuguuuguaaauga

SEQ ID NO: 2042889 - RNA, 19 nt, Homo sapiens
  misc_RNA (1)...(19): siRNA sense strand
ggaaaucacauuggaaagg

SEQ ID NO: 2042890 - RNA, 19 nt, Homo sapiens
  misc_RNA (1)...(19): siRNA sense strand
gguggaagcccucaaagag

SEQ ID NO: 2042891 - RNA, 19 nt, Homo sapiens
  misc_RNA (1)...(19): siRNA sense strand
cguggagggugacagcuuu

SEQ ID NO: 2042892 - RNA, 19 nt, Homo sapiens
  misc_RNA (1)...(19): siRNA sense strand
cgacgagaguggucaaggu

SEQ ID NO: 2042893 - RNA, 19 nt, Homo sapiens
  misc_RNA (1)...(19): siRNA sense strand
guaugauguugucuaccua

SEQ ID NO: 2042894 - RNA, 19 nt, Homo sapiens
  misc_RNA (1)...(19): siRNA sense strand
gcaaugccuaccugaguga

SEQ ID NO: 2042895 - RNA, 19 nt, Homo sapiens
  misc_RNA (1)...(19): siRNA sense strand
guauaaaccagaagaguac

SEQ ID NO: 2042896 - RNA, 19 nt, Homo sapiens
  misc_RNA (1)...(19): siRNA sense strand
gcaucuucaucuccuuuau

SEQ ID NO: 2042897 - RNA, 19 nt, Homo sapiens
  misc_RNA (1)...(19): siRNA sense strand
gugauugucaacacagaua

SEQ ID NO: 2042898 - RNA, 19 nt, Homo sapiens
  misc_RNA (1)...(19): siRNA sense strand
ucagaaauaccgcuaccaa

SEQ ID NO: 2042899 - RNA, 19 nt, Homo sapiens
  misc_RNA (1)...(19): siRNA sense strand
aguauaaaccagaagagua

SEQ ID NO: 2042900 - RNA, 19 nt, Homo sapiens
  misc_RNA (1)...(19): siRNA sense strand
ggucagacggucacgauca

SEQ ID NO: 2042901 - RNA, 19 nt, Homo sapiens
  misc_RNA (1)...(19): siRNA sense strand
gguguggaccuccgaaaug

SEQ ID NO: 2042902 - RNA, 19 nt, Homo sapiens
  misc_RNA (1)...(19): siRNA sense strand
gagaaggucauggagauca

SEQ ID NO: 2042903 - RNA, 19 nt, Homo sapiens
  misc_RNA (1)...(19): siRNA sense strand
cauccuguuuguaaaugaa

SEQ ID NO: 2042904 - RNA, 19 nt, Homo sapiens
  misc_RNA (1)...(19): siRNA sense strand
uugaggagaucuaccacaa

SEQ ID NO: 2042905 - RNA, 19 nt, Homo sapiens
  misc_RNA (1)...(19): siRNA sense strand
aagacucgguucugagcua

SEQ ID NO: 2042906 - RNA, 19 nt, Homo sapiens
  misc_RNA (1)...(19): siRNA sense strand
cugagaaggucauggagau

SEQ ID NO: 2042907 - RNA, 19 nt, Homo sapiens
  misc_RNA (1)...(19): siRNA sense strand
cgagaaccgaggcgaauug

SEQ ID NO: 2042908 - RNA, 19 nt, Homo sapiens
  misc_RNA (1)...(19): siRNA sense strand
uuaacaagcggaucacaga

SEQ ID NO: 2042909 - RNA, 19 nt, Homo sapiens
  misc_RNA (1)...(19): siRNA sense strand
ggagaucaagcucaucaag

SEQ ID NO: 2042910 - RNA, 19 nt, Homo sapiens
  misc_RNA (1)...(19): siRNA sense strand
uggagaaugugcuagagau

SEQ ID NO: 2042911 - RNA, 19 nt, Homo sapiens
  misc_RNA (1)...(19): siRNA sense strand
gggagaaaauggagaagga

SEQ ID NO: 2042912 - RNA, 19 nt, Homo sapiens
  misc_RNA (1)...(19): siRNA sense strand
ugucaucgaugcuagugau

SEQ ID NO: 2042913 - RNA, 19 nt, Homo sapiens
  misc_RNA (1)...(19): siRNA sense strand
gggaugugcugcaugucau

SEQ ID NO: 2042914 - RNA, 19 nt, Homo sapiens
  misc_RNA (1)...(19): siRNA sense strand
gacaucacaaccucuuauu

SEQ ID NO: 2042915 - RNA, 19 nt, Homo sapiens
  misc_RNA (1)...(19): siRNA sense strand
gcacugacaacccacacau

SEQ ID NO: 2042916 - RNA, 19 nt, Homo sapiens
  misc_RNA (1)...(19): siRNA sense strand
gcagauuggagacaagauc

SEQ ID NO: 2042917 - RNA, 19 nt, Homo sapiens
  misc_RNA (1)...(19): siRNA sense strand
acgaggaaaucacauugga

SEQ ID NO: 2042918 - RNA, 19 nt, Homo sapiens
  misc_RNA (1)...(19): siRNA sense strand
cuaccugagugacagcuau

SEQ ID NO: 2042919 - RNA, 19 nt, Homo sapiens
  misc_RNA (1)...(19): siRNA sense strand
gauggaauacgaggaaauc

SEQ ID NO: 2042920 - RNA, 19 nt, Homo sapiens
  misc_RNA (1)...(19): siRNA sense strand
cugaagaacacguaugaug

SEQ ID NO: 2042921 - RNA, 19 nt, Homo sapiens
  misc_RNA (1)...(19): siRNA sense strand
guucacagagugcuucuca

SEQ ID NO: 2042922 - RNA, 19 nt, Homo sapiens
  misc_RNA (1)...(19): siRNA sense strand
gacgagaguggucaagguu

SEQ ID NO: 2042923 - RNA, 19 nt, Homo sapiens
  misc_RNA (1)...(19): siRNA sense strand
gcaccuggacaaugagauc

SEQ ID NO: 2042924 - RNA, 19 nt, Homo sapiens
  misc_RNA (1)...(19): siRNA sense strand
cagcaaugccuaccugagu

SEQ ID NO: 2042925 - RNA, 19 nt, Homo sapiens
  misc_RNA (1)...(19): siRNA sense strand
ucauggagaucaagcucau

SEQ ID NO: 2042926 - RNA, 19 nt, Homo sapiens
  misc_RNA (1)...(19): siRNA sense strand
gauccuggcggucaacagu

SEQ ID NO: 2042927 - RNA, 19 nt, Homo sapiens
  misc_RNA (1)...(19): siRNA sense strand
gaagaguacagccgauucg

SEQ ID NO: 2042928 - RNA, 19 nt, Homo sapiens
  misc_RNA (1)...(19): siRNA sense strand
acacguaugauguugucua

SEQ ID NO: 2042929 - RNA, 19 nt, Homo sapiens
  misc_RNA (1)...(19): siRNA sense strand
agaaggucauggagaucaa

SEQ ID NO: 2042930 - RNA, 19 nt, Homo sapiens
  misc_RNA (1)...(19): siRNA sense strand
ugacagcuuugaggagauc

SEQ ID NO: 2042931 - RNA, 19 nt, Homo sapiens
  misc_RNA (1)...(19): siRNA sense strand
gcgggaguaugagauagau

SEQ ID NO: 2042932 - RNA, 19 nt, Homo sapiens
  misc_RNA (1)...(19): siRNA sense strand
aaguuuggauccuguguuc

SEQ ID NO: 2042933 - RNA, 19 nt, Homo sapiens
  misc_RNA (1)...(19): siRNA sense strand
gagaguggucaagguuaaa

SEQ ID NO: 2042934 - RNA, 19 nt, Homo sapiens
  misc_RNA (1)...(19): siRNA sense strand
cagcauccuguuuguaaau

SEQ ID NO: 2042935 - RNA, 19 nt, Homo sapiens
  misc_RNA (1)...(19): siRNA sense strand
aaaagggguuucuacauca

SEQ ID NO: 2042936 - RNA, 19 nt, Homo sapiens
  misc_RNA (1)...(19): siRNA sense strand
gacaaugagaucagucaca

SEQ ID NO: 2042937 - RNA, 19 nt, Homo sapiens
  misc_RNA (1)...(19): siRNA sense strand
agacaucacaaccucuuau

SEQ ID NO: 2042938 - RNA, 19 nt, Homo sapiens
  misc_RNA (1)...(19): siRNA sense strand
acaagauccuggcggucaa

SEQ ID NO: 2042939 - RNA, 19 nt, Homo sapiens
  misc_RNA (1)...(19): siRNA sense strand
cuaaaggucuuggcuucag

SEQ ID NO: 2042940 - RNA, 19 nt, Homo sapiens
  misc_RNA (1)...(19): siRNA sense strand
cuccaucguucgccucuau

SEQ ID NO: 2042941 - RNA, 19 nt, Homo sapiens
  misc_RNA (1)...(19): siRNA sense strand
agauggaagugcacuaugc

SEQ ID NO: 2042942 - RNA, 19 nt, Homo sapiens
  misc_RNA (1)...(19): siRNA sense strand
ccagacaucacaaccucuu

SEQ ID NO: 2042943 - RNA, 19 nt, Homo sapiens
  misc_RNA (1)...(19): siRNA sense strand
cguaugauguugucuaccu

SEQ ID NO: 2042944 - RNA, 19 nt, Homo sapiens
  misc_RNA (1)...(19): siRNA sense strand
gguugcagauuggagacaa

SEQ ID NO: 2042945 - RNA, 19 nt, Homo sapiens
  misc_RNA (1)...(19): siRNA sense strand
gaucgcagggucgagaaga

SEQ ID NO: 2042946 - RNA, 19 nt, Homo sapiens
  misc_RNA (1)...(19): siRNA sense strand
ggcaucuucaucuccuuua

SEQ ID NO: 2042947 - RNA, 19 nt, Homo sapiens
  misc_RNA (1)...(19): siRNA sense strand
cgaggaaaucacauuggaa

SEQ ID NO: 2042948 - RNA, 19 nt, Homo sapiens
  misc_RNA (1)...(19): siRNA sense strand
gcuagaggacgucaugcau

SEQ ID NO: 2042949 - RNA, 19 nt, Homo sapiens
  misc_RNA (1)...(19): siRNA sense strand
cgacgacauuggguucauc

SEQ ID NO: 2042950 - RNA, 19 nt, Homo sapiens
  misc_RNA (1)...(19): siRNA sense strand
cagugagaccgacgacauu

SEQ ID NO: 2042951 - RNA, 19 nt, Homo sapiens
  misc_RNA (1)...(19): siRNA sense strand
caucacaaccucuuauucc

SEQ ID NO: 2042952 - RNA, 19 nt, Homo sapiens
  misc_RNA (1)...(19): siRNA sense strand
cagacaucacaaccucuua

SEQ ID NO: 2042953 - RNA, 19 nt, Homo sapiens
  misc_RNA (1)...(19): siRNA sense strand
cagaagaguacagccgauu

SEQ ID NO: 2042954 - RNA, 19 nt, Homo sapiens
  misc_RNA (1)...(19): siRNA sense strand
ugaacaaacugcugacuuu

SEQ ID NO: 2042955 - RNA, 19 nt, Homo sapiens
  misc_RNA (1)...(19): siRNA sense strand
gcuagcugcugccuccuua

SEQ ID NO: 2042956 - RNA, 19 nt, Homo sapiens
  misc_RNA (1)...(19): siRNA sense strand
caacucaccucguguggau

SEQ ID NO: 2042957 - RNA, 19 nt, Homo sapiens
  misc_RNA (1)...(19): siRNA sense strand
ccaaaccugugccuaagaa

SEQ ID NO: 2042958 - RNA, 19 nt, Homo sapiens
  misc_RNA (1)...(19): siRNA sense strand
guggaucucuaccuaauga

SEQ ID NO: 2042959 - RNA, 19 nt, Homo sapiens
  misc_RNA (1)...(19): siRNA sense strand
gcaagaaggauaaguuaca

SEQ ID NO: 2042960 - RNA, 19 nt, Homo sapiens
  misc_RNA (1)...(19): siRNA sense strand
caagaaggauaaguuacaa

SEQ ID NO: 2042961 - RNA, 19 nt, Homo sapiens
  misc_RNA (1)...(19): siRNA sense strand
ugaagaagcucggauacug

SEQ ID NO: 2042962 - RNA, 19 nt, Homo sapiens
  misc_RNA (1)...(19): siRNA sense strand
caucaugacccaucugaaa

SEQ ID NO: 2042963 - RNA, 19 nt, Homo sapiens
  misc_RNA (1)...(19): siRNA sense strand
gcugguggaucucuaccua

SEQ ID NO: 2042964 - RNA, 19 nt, Homo sapiens
  misc_RNA (1)...(19): siRNA sense strand
gcagauaugcuagguguau

SEQ ID NO: 2042965 - RNA, 19 nt, Homo sapiens
  misc_RNA (1)...(19): siRNA sense strand
gagaucagcuuuugaagau

SEQ ID NO: 2042966 - RNA, 19 nt, Homo sapiens
  misc_RNA (1)...(19): siRNA sense strand
agaugacccugcaggaaua

SEQ ID NO: 2042967 - RNA, 19 nt, Homo sapiens
  misc_RNA (1)...(19): siRNA sense strand
gagaauugccaaacgaaga

SEQ ID NO: 2042968 - RNA, 19 nt, Homo sapiens
  misc_RNA (1)...(19): siRNA sense strand
gccacugccuuuaugauug

SEQ ID NO: 2042969 - RNA, 19 nt, Homo sapiens
  misc_RNA (1)...(19): siRNA sense strand
gcuccaaaccugugccuaa

SEQ ID NO: 2042970 - RNA, 19 nt, Homo sapiens
  misc_RNA (1)...(19): siRNA sense strand
gagaugacccugcaggaau

SEQ ID NO: 2042971 - RNA, 19 nt, Homo sapiens
  misc_RNA (1)...(19): siRNA sense strand
ugaacguccucaaauguga

SEQ ID NO: 2042972 - RNA, 19 nt, Homo sapiens
  misc_RNA (1)...(19): siRNA sense strand
ccuuugagaugacccauga

SEQ ID NO: 2042973 - RNA, 19 nt, Homo sapiens
  misc_RNA (1)...(19): siRNA sense strand
gcaguaugcaagaaggaua

SEQ ID NO: 2042974 - RNA, 19 nt, Homo sapiens
  misc_RNA (1)...(19): siRNA sense strand
guacucagcauggaaauca

SEQ ID NO: 2042975 - RNA, 19 nt, Homo sapiens
  misc_RNA (1)...(19): siRNA sense strand
cagugaagcugguggaucu

SEQ ID NO: 2042976 - RNA, 19 nt, Homo sapiens
  misc_RNA (1)...(19): siRNA sense strand
gaacaaacugcugacuuuc

SEQ ID NO: 2042977 - RNA, 19 nt, Homo sapiens
  misc_RNA (1)...(19): siRNA sense strand
gcauuacaguggcuacagu

SEQ ID NO: 2042978 - RNA, 19 nt, Homo sapiens
  misc_RNA (1)...(19): siRNA sense strand
gcaggaauaccacuauguc

SEQ ID NO: 2042979 - RNA, 19 nt, Homo sapiens
  misc_RNA (1)...(19): siRNA sense strand
gagguacucagcauggaaa

SEQ ID NO: 2042980 - RNA, 19 nt, Homo sapiens
  misc_RNA (1)...(19): siRNA sense strand
ucucaaggcuguguauuac

SEQ ID NO: 2042981 - RNA, 19 nt, Homo sapiens
  misc_RNA (1)...(19): siRNA sense strand
gucucaaggcuguguauua

SEQ ID NO: 2042982 - RNA, 19 nt, Homo sapiens
  misc_RNA (1)...(19): siRNA sense strand
ggaaaucaacauccugaac

SEQ ID NO: 2042983 - RNA, 19 nt, Homo sapiens
  misc_RNA (1)...(19): siRNA sense strand
uacaguggcuacaguaucu

SEQ ID NO: 2042984 - RNA, 19 nt, Homo sapiens
  misc_RNA (1)...(19): siRNA sense strand
gcaaaauugugcccaguca

SEQ ID NO: 2042985 - RNA, 19 nt, Homo sapiens
  misc_RNA (1)...(19): siRNA sense strand
ugaaggcaguaugcaagaa

SEQ ID NO: 2042986 - RNA, 19 nt, Homo sapiens
  misc_RNA (1)...(19): siRNA sense strand
gaaaucucaguccagcaaa

SEQ ID NO: 2042987 - RNA, 19 nt, Homo sapiens
  misc_RNA (1)...(19): siRNA sense strand
gagucuccaucuucacuuc

SEQ ID NO: 2042988 - RNA, 19 nt, Homo sapiens
  misc_RNA (1)...(19): siRNA sense strand
uguugaagcuggaggagau

SEQ ID NO: 2042989 - RNA, 19 nt, Homo sapiens
  misc_RNA (1)...(19): siRNA sense strand
gcauggaaaucaacauccu

SEQ ID NO: 2042990 - RNA, 19 nt, Homo sapiens
  misc_RNA (1)...(19): siRNA sense strand
gaaggcaguaugcaagaag

SEQ ID NO: 2042991 - RNA, 19 nt, Homo sapiens
  misc_RNA (1)...(19): siRNA sense strand
ugaagcugguggaucucua

SEQ ID NO: 2042992 - RNA, 19 nt, Homo sapiens
  misc_RNA (1)...(19): siRNA sense strand
gaauugccaaacgaagaua

SEQ ID NO: 2042993 - RNA, 19 nt, Homo sapiens
  misc_RNA (1)...(19): siRNA sense strand
agaaaucucaguccagcaa

SEQ ID NO: 2042994 - RNA, 19 nt, Homo sapiens
  misc_RNA (1)...(19): siRNA sense strand
ccacugccuuuaugauugc

SEQ ID NO: 2042995 - RNA, 19 nt, Homo sapiens
  misc_RNA (1)...(19): siRNA sense strand
acaugaagaagcucggaua

SEQ ID NO: 2042996 - RNA, 19 nt, Homo sapiens
  misc_RNA (1)...(19): siRNA sense strand
gaccuugucccgcuacauc

SEQ ID NO: 2042997 - RNA, 19 nt, Homo sapiens
  misc_RNA (1)...(19): siRNA sense strand
uaaugaaggcaguaugcaa

SEQ ID NO: 2042998 - RNA, 19 nt, Homo sapiens
  misc_RNA (1)...(19): siRNA sense strand
gacuuucaguucuuacgau

SEQ ID NO: 2042999 - RNA, 19 nt, Homo sapiens
  misc_RNA (1)...(19): siRNA sense strand
cgagaugacccugcaggaa

SEQ ID NO: 2043000 - RNA, 19 nt, Homo sapiens
  misc_RNA (1)...(19): siRNA sense strand
gggagaauugccaaacgaa

SEQ ID NO: 2043001 - RNA, 19 nt, Homo sapiens
  misc_RNA (1)...(19): siRNA sense strand
augcaagaaggauaaguua

SEQ ID NO: 2043002 - RNA, 19 nt, Homo sapiens
  misc_RNA (1)...(19): siRNA sense strand
caguaugcaagaaggauaa

SEQ ID NO: 2043003 - RNA, 19 nt, Homo sapiens
  misc_RNA (1)...(19): siRNA sense strand
uaugcaagaaggauaaguu

SEQ ID NO: 2043004 - RNA, 19 nt, Homo sapiens
  misc_RNA (1)...(19): siRNA sense strand
acuuucaguucuuacgaua

SEQ ID NO: 2043005 - RNA, 19 nt, Homo sapiens
  misc_RNA (1)...(19): siRNA sense strand
acaccaacaugaagacacu

SEQ ID NO: 2043006 - RNA, 19 nt, Homo sapiens
  misc_RNA (1)...(19): siRNA sense strand
uggaugacuuuguguacau

SEQ ID NO: 2043007 - RNA, 19 nt, Homo sapiens
  misc_RNA (1)...(19): siRNA sense strand
guggaugacuuuguguaca

SEQ ID NO: 2043008 - RNA, 19 nt, Homo sapiens
  misc_RNA (1)...(19): siRNA sense strand
ugguggaucucuaccuaau

SEQ ID NO: 2043009 - RNA, 19 nt, Homo sapiens
  misc_RNA (1)...(19): siRNA sense strand
caaacgaagauaucuccau

SEQ ID NO: 2043010 - RNA, 19 nt, Homo sapiens
  misc_RNA (1)...(19): siRNA sense strand
uuucaguucuuacgauagu

SEQ ID NO: 2043011 - RNA, 19 nt, Homo sapiens
  misc_RNA (1)...(19): siRNA sense strand
cccaugagacccuguacuu

SEQ ID NO: 2043012 - RNA, 19 nt, Homo sapiens
  misc_RNA (1)...(19): siRNA sense strand
gauacuggguucccuuccu

SEQ ID NO: 2043013 - RNA, 19 nt, Homo sapiens
  misc_RNA (1)...(19): siRNA sense strand
aaaccugugccuaagaaau

SEQ ID NO: 2043014 - RNA, 19 nt, Homo sapiens
  misc_RNA (1)...(19): siRNA sense strand
cauccugaacguccucaaa

SEQ ID NO: 2043015 - RNA, 19 nt, Homo sapiens
  misc_RNA (1)...(19): siRNA sense strand
uucccuuccuggagcauua

SEQ ID NO: 2043016 - RNA, 19 nt, Homo sapiens
  misc_RNA (1)...(19): siRNA sense strand
cauuacaguggcuacagua

SEQ ID NO: 2043017 - RNA, 19 nt, Homo sapiens
  misc_RNA (1)...(19): siRNA sense strand
aaaucaacauccugaacgu

SEQ ID NO: 2043018 - RNA, 19 nt, Homo sapiens
  misc_RNA (1)...(19): siRNA sense strand
ccugaacguccucaaaugu

SEQ ID NO: 2043019 - RNA, 19 nt, Homo sapiens
  misc_RNA (1)...(19): siRNA sense strand
gaagcugguggaucucuac

SEQ ID NO: 2043020 - RNA, 19 nt, Homo sapiens
  misc_RNA (1)...(19): siRNA sense strand
cagcauggaaaucaacauc

SEQ ID NO: 2043021 - RNA, 19 nt, Homo sapiens
  misc_RNA (1)...(19): siRNA sense strand
gauaucuccaucuucacuu

SEQ ID NO: 2043022 - RNA, 19 nt, Homo sapiens
  misc_RNA (1)...(19): siRNA sense strand
ccaugagacccuguacuug

SEQ ID NO: 2043023 - RNA, 19 nt, Homo sapiens
  misc_RNA (1)...(19): siRNA sense strand
ugaacaaacugcugacuuu

SEQ ID NO: 2043024 - RNA, 19 nt, Homo sapiens
  misc_RNA (1)...(19): siRNA sense strand
gcuagcugcugccuccuua

SEQ ID NO: 2043025 - RNA, 19 nt, Homo sapiens
  misc_RNA (1)...(19): siRNA sense strand
caacucaccucguguggau

SEQ ID NO: 2043026 - RNA, 19 nt, Homo sapiens
  misc_RNA (1)...(19): siRNA sense strand
ccaaaccugugccuaagaa

SEQ ID NO: 2043027 - RNA, 19 nt, Homo sapiens
  misc_RNA (1)...(19): siRNA sense strand
guggaucucuaccuaauga

SEQ ID NO: 2043028 - RNA, 19 nt, Homo sapiens
  misc_RNA (1)...(19): siRNA sense strand
gcaagaaggauaaguuaca

SEQ ID NO: 2043029 - RNA, 19 nt, Homo sapiens
  misc_RNA (1)...(19): siRNA sense strand
caagaaggauaaguuacaa

SEQ ID NO: 2043030 - RNA, 19 nt, Homo sapiens
  misc_RNA (1)...(19): siRNA sense strand
ugaagaagcucggauacug

SEQ ID NO: 2043031 - RNA, 19 nt, Homo sapiens
  misc_RNA (1)...(19): siRNA sense strand
caucaugacccaucugaaa

SEQ ID NO: 2043032 - RNA, 19 nt, Homo sapiens
  misc_RNA (1)...(19): siRNA sense strand
gcugguggaucucuaccua

SEQ ID NO: 2043033 - RNA, 19 nt, Homo sapiens
  misc_RNA (1)...(19): siRNA sense strand
gcagauaugcuagguguau

SEQ ID NO: 2043034 - RNA, 19 nt, Homo sapiens
  misc_RNA (1)...(19): siRNA sense strand
gagaucagcuuuugaagau

SEQ ID NO: 2043035 - RNA, 19 nt, Homo sapiens
  misc_RNA (1)...(19): siRNA sense strand
agaugacccugcaggaaua

SEQ ID NO: 2043036 - RNA, 19 nt, Homo sapiens
  misc_RNA (1)...(19): siRNA sense strand
gagaauugccaaacgaaga

SEQ ID NO: 2043037 - RNA, 19 nt, Homo sapiens
  misc_RNA (1)...(19): siRNA sense strand
gccacugccuuuaugauug

SEQ ID NO: 2043038 - RNA, 19 nt, Homo sapiens
  misc_RNA (1)...(19): siRNA sense strand
gcuccaaaccugugccuaa

SEQ ID NO: 2043039 - RNA, 19 nt, Homo sapiens
  misc_RNA (1)...(19): siRNA sense strand
gagaugacccugcaggaau

SEQ ID NO: 2043040 - RNA, 19 nt, Homo sapiens
  misc_RNA (1)...(19): siRNA sense strand
ugaacguccucaaauguga

SEQ ID NO: 2043041 - RNA, 19 nt, Homo sapiens
  misc_RNA (1)...(19): siRNA sense strand
ccuuugagaugacccauga

SEQ ID NO: 2043042 - RNA, 19 nt, Homo sapiens
  misc_RNA (1)...(19): siRNA sense strand
gcaguaugcaagaaggaua

SEQ ID NO: 2043043 - RNA, 19 nt, Homo sapiens
  misc_RNA (1)...(19): siRNA sense strand
guacucagcauggaaauca

SEQ ID NO: 2043044 - RNA, 19 nt, Homo sapiens
  misc_RNA (1)...(19): siRNA sense strand
cagugaagcugguggaucu

SEQ ID NO: 2043045 - RNA, 19 nt, Homo sapiens
  misc_RNA (1)...(19): siRNA sense strand
gaacaaacugcugacuuuc

SEQ ID NO: 2043046 - RNA, 19 nt, Homo sapiens
  misc_RNA (1)...(19): siRNA sense strand
gcauuacaguggcuacagu

SEQ ID NO: 2043047 - RNA, 19 nt, Homo sapiens
  misc_RNA (1)...(19): siRNA sense strand
gcaggaauaccacuauguc

SEQ ID NO: 2043048 - RNA, 19 nt, Homo sapiens
  misc_RNA (1)...(19): siRNA sense strand
gagguacucagcauggaaa

SEQ ID NO: 2043049 - RNA, 19 nt, Homo sapiens
  misc_RNA (1)...(19): siRNA sense strand
ucucaaggcuguguauuac

SEQ ID NO: 2043050 - RNA, 19 nt, Homo sapiens
  misc_RNA (1)...(19): siRNA sense strand
gucucaaggcuguguauua

SEQ ID NO: 2043051 - RNA, 19 nt, Homo sapiens
  misc_RNA (1)...(19): siRNA sense strand
ggaaaucaacauccugaac

SEQ ID NO: 2043052 - RNA, 19 nt, Homo sapiens
  misc_RNA (1)...(19): siRNA sense strand
uacaguggcuacaguaucu

SEQ ID NO: 2043053 - RNA, 19 nt, Homo sapiens
  misc_RNA (1)...(19): siRNA sense strand
gcaaaauugugcccaguca

SEQ ID NO: 2043054 - RNA, 19 nt, Homo sapiens
  misc_RNA (1)...(19): siRNA sense strand
ugaaggcaguaugcaagaa

SEQ ID NO: 2043055 - RNA, 19 nt, Homo sapiens
  misc_RNA (1)...(19): siRNA sense strand
gaaaucucaguccagcaaa

SEQ ID NO: 2043056 - RNA, 19 nt, Homo sapiens
  misc_RNA (1)...(19): siRNA sense strand
gagucuccaucuucacuuc

SEQ ID NO: 2043057 - RNA, 19 nt, Homo sapiens
  misc_RNA (1)...(19): siRNA sense strand
uguugaagcuggaggagau

SEQ ID NO: 2043058 - RNA, 19 nt, Homo sapiens
  misc_RNA (1)...(19): siRNA sense strand
gcauggaaaucaacauccu

SEQ ID NO: 2043059 - RNA, 19 nt, Homo sapiens
  misc_RNA (1)...(19): siRNA sense strand
gaaggcaguaugcaagaag

SEQ ID NO: 2043060 - RNA, 19 nt, Homo sapiens
  misc_RNA (1)...(19): siRNA sense strand
ugaagcugguggaucucua

SEQ ID NO: 2043061 - RNA, 19 nt, Homo sapiens
  misc_RNA (1)...(19): siRNA sense strand
gaauugccaaacgaagaua

SEQ ID NO: 2043062 - RNA, 19 nt, Homo sapiens
  misc_RNA (1)...(19): siRNA sense strand
agaaaucucaguccagcaa

SEQ ID NO: 2043063 - RNA, 19 nt, Homo sapiens
  misc_RNA (1)...(19): siRNA sense strand
ccacugccuuuaugauugc

SEQ ID NO: 2043064 - RNA, 19 nt, Homo sapiens
  misc_RNA (1)...(19): siRNA sense strand
acaugaagaagcucggaua

SEQ ID NO: 2043065 - RNA, 19 nt, Homo sapiens
  misc_RNA (1)...(19): siRNA sense strand
gaccuugucccgcuacauc

SEQ ID NO: 2043066 - RNA, 19 nt, Homo sapiens
  misc_RNA (1)...(19): siRNA sense strand
uaaugaaggcaguaugcaa

SEQ ID NO: 2043067 - RNA, 19 nt, Homo sapiens
  misc_RNA (1)...(19): siRNA sense strand
gacuuucaguucuuacgau

SEQ ID NO: 2043068 - RNA, 19 nt, Homo sapiens
  misc_RNA (1)...(19): siRNA sense strand
cgagaugacccugcaggaa

SEQ ID NO: 2043069 - RNA, 19 nt, Homo sapiens
  misc_RNA (1)...(19): siRNA sense strand
gggagaauugccaaacgaa

SEQ ID NO: 2043070 - RNA, 19 nt, Homo sapiens
  misc_RNA (1)...(19): siRNA sense strand
augcaagaaggauaaguua

SEQ ID NO: 2043071 - RNA, 19 nt, Homo sapiens
  misc_RNA (1)...(19): siRNA sense strand
caguaugcaagaaggauaa

SEQ ID NO: 2043072 - RNA, 19 nt, Homo sapiens
  misc_RNA (1)...(19): siRNA sense strand
uaugcaagaaggauaaguu

SEQ ID NO: 2043073 - RNA, 19 nt, Homo sapiens
  misc_RNA (1)...(19): siRNA sense strand
acuuucaguucuuacgaua

SEQ ID NO: 2043074 - RNA, 19 nt, Homo sapiens
  misc_RNA (1)...(19): siRNA sense strand
acaccaacaugaagacacu

SEQ ID NO: 2043075 - RNA, 19 nt, Homo sapiens
  misc_RNA (1)...(19): siRNA sense strand
uggaugacuuuguguacau

SEQ ID NO: 2043076 - RNA, 19 nt, Homo sapiens
  misc_RNA (1)...(19): siRNA sense strand
guggaugacuuuguguaca

SEQ ID NO: 2043077 - RNA, 19 nt, Homo sapiens
  misc_RNA (1)...(19): siRNA sense strand
ugguggaucucuaccuaau

SEQ ID NO: 2043078 - RNA, 19 nt, Homo sapiens
  misc_RNA (1)...(19): siRNA sense strand
caaacgaagauaucuccau

SEQ ID NO: 2043079 - RNA, 19 nt, Homo sapiens
  misc_RNA (1)...(19): siRNA sense strand
uuucaguucuuacgauagu

SEQ ID NO: 2043080 - RNA, 19 nt, Homo sapiens
  misc_RNA (1)...(19): siRNA sense strand
cccaugagacccuguacuu

SEQ ID NO: 2043081 - RNA, 19 nt, Homo sapiens
  misc_RNA (1)...(19): siRNA sense strand
gauacuggguucccuuccu

SEQ ID NO: 2043082 - RNA, 19 nt, Homo sapiens
  misc_RNA (1)...(19): siRNA sense strand
aaaccugugccuaagaaau

SEQ ID NO: 2043083 - RNA, 19 nt, Homo sapiens
  misc_RNA (1)...(19): siRNA sense strand
cauccugaacguccucaaa

SEQ ID NO: 2043084 - RNA, 19 nt, Homo sapiens
  misc_RNA (1)...(19): siRNA sense strand
uucccuuccuggagcauua

SEQ ID NO: 2043085 - RNA, 19 nt, Homo sapiens
  misc_RNA (1)...(19): siRNA sense strand
cauuacaguggcuacagua

SEQ ID NO: 2043086 - RNA, 19 nt, Homo sapiens
  misc_RNA (1)...(19): siRNA sense strand
aaaucaacauccugaacgu

SEQ ID NO: 2043087 - RNA, 19 nt, Homo sapiens
  misc_RNA (1)...(19): siRNA sense strand
ccugaacguccucaaaugu

SEQ ID NO: 2043088 - RNA, 19 nt, Homo sapiens
  misc_RNA (1)...(19): siRNA sense strand
gaagcugguggaucucuac

SEQ ID NO: 2043089 - RNA, 19 nt, Homo sapiens
  misc_RNA (1)...(19): siRNA sense strand
cagcauggaaaucaacauc

SEQ ID NO: 2043090 - RNA, 19 nt, Homo sapiens
  misc_RNA (1)...(19): siRNA sense strand
gauaucuccaucuucacuu

SEQ ID NO: 2043091 - RNA, 19 nt, Homo sapiens
  misc_RNA (1)...(19): siRNA sense strand
ccaugagacccuguacuug

SEQ ID NO: 2043092 - RNA, 19 nt, Homo sapiens
  misc_RNA (1)...(19): siRNA sense strand
ccaaaccugugccuaagaa

SEQ ID NO: 2043093 - RNA, 19 nt, Homo sapiens
  misc_RNA (1)...(19): siRNA sense strand
caucaugacccaucugaaa

SEQ ID NO: 2043094 - RNA, 19 nt, Homo sapiens
  misc_RNA (1)...(19): siRNA sense strand
gagaucagcuuuugaagau

SEQ ID NO: 2043095 - RNA, 19 nt, Homo sapiens
  misc_RNA (1)...(19): siRNA sense strand
gagaauugccaaacgaaga

SEQ ID NO: 2043096 - RNA, 19 nt, Homo sapiens
  misc_RNA (1)...(19): siRNA sense strand
gcuccaaaccugugccuaa

SEQ ID NO: 2043097 - RNA, 19 nt, Homo sapiens
  misc_RNA (1)...(19): siRNA sense strand
gcaaaauugugcccaguca

SEQ ID NO: 2043098 - RNA, 19 nt, Homo sapiens
  misc_RNA (1)...(19): siRNA sense strand
gaaaucucaguccagcaaa

SEQ ID NO: 2043099 - RNA, 19 nt, Homo sapiens
  misc_RNA (1)...(19): siRNA sense strand
gagucuccaucuucacuuc

SEQ ID NO: 2043100 - RNA, 19 nt, Homo sapiens
  misc_RNA (1)...(19): siRNA sense strand
gaauugccaaacgaagaua

SEQ ID NO: 2043101 - RNA, 19 nt, Homo sapiens
  misc_RNA (1)...(19): siRNA sense strand
agaaaucucaguccagcaa

SEQ ID NO: 2043102 - RNA, 19 nt, Homo sapiens
  misc_RNA (1)...(19): siRNA sense strand
gggagaauugccaaacgaa

SEQ ID NO: 2043103 - RNA, 19 nt, Homo sapiens
  misc_RNA (1)...(19): siRNA sense strand
caaacgaagauaucuccau

SEQ ID NO: 2043104 - RNA, 19 nt, Homo sapiens
  misc_RNA (1)...(19): siRNA sense strand
aaaccugugccuaagaaau

SEQ ID NO: 2043105 - RNA, 19 nt, Homo sapiens
  misc_RNA (1)...(19): siRNA sense strand
gauaucuccaucuucacuu

SEQ ID NO: 2043106 - RNA, 19 nt, Homo sapiens
  misc_RNA (1)...(19): siRNA sense strand
ugaacaaacugcugacuuu

SEQ ID NO: 2043107 - RNA, 19 nt, Homo sapiens
  misc_RNA (1)...(19): siRNA sense strand
gcuagcugcugccuccuua

SEQ ID NO: 2043108 - RNA, 19 nt, Homo sapiens
  misc_RNA (1)...(19): siRNA sense strand
caacucaccucguguggau

SEQ ID NO: 2043109 - RNA, 19 nt, Homo sapiens
  misc_RNA (1)...(19): siRNA sense strand
ccaaaccugugccuaagaa

SEQ ID NO: 2043110 - RNA, 19 nt, Homo sapiens
  misc_RNA (1)...(19): siRNA sense strand
guggaucucuaccuaauga

SEQ ID NO: 2043111 - RNA, 19 nt, Homo sapiens
  misc_RNA (1)...(19): siRNA sense strand
gcaagaaggauaaguuaca

SEQ ID NO: 2043112 - RNA, 19 nt, Homo sapiens
  misc_RNA (1)...(19): siRNA sense strand
caagaaggauaaguuacaa

SEQ ID NO: 2043113 - RNA, 19 nt, Homo sapiens
  misc_RNA (1)...(19): siRNA sense strand
ugaagaagcucggauacug

SEQ ID NO: 2043114 - RNA, 19 nt, Homo sapiens
  misc_RNA (1)...(19): siRNA sense strand
caucaugacccaucugaaa

SEQ ID NO: 2043115 - RNA, 19 nt, Homo sapiens
  misc_RNA (1)...(19): siRNA sense strand
gcugguggaucucuaccua

SEQ ID NO: 2043116 - RNA, 19 nt, Homo sapiens
  misc_RNA (1)...(19): siRNA sense strand
gcagauaugcuagguguau

SEQ ID NO: 2043117 - RNA, 19 nt, Homo sapiens
  misc_RNA (1)...(19): siRNA sense strand
gagaucagcuuuugaagau

SEQ ID NO: 2043118 - RNA, 19 nt, Homo sapiens
  misc_RNA (1)...(19): siRNA sense strand
agaugacccugcaggaaua

SEQ ID NO: 2043119 - RNA, 19 nt, Homo sapiens
  misc_RNA (1)...(19): siRNA sense strand
gagaauugccaaacgaaga

SEQ ID NO: 2043120 - RNA, 19 nt, Homo sapiens
  misc_RNA (1)...(19): siRNA sense strand
gccacugccuuuaugauug

SEQ ID NO: 2043121 - RNA, 19 nt, Homo sapiens
  misc_RNA (1)...(19): siRNA sense strand
gcuccaaaccugugccuaa

SEQ ID NO: 2043122 - RNA, 19 nt, Homo sapiens
  misc_RNA (1)...(19): siRNA sense strand
gagaugacccugcaggaau

SEQ ID NO: 2043123 - RNA, 19 nt, Homo sapiens
  misc_RNA (1)...(19): siRNA sense strand
ugaacguccucaaauguga

SEQ ID NO: 2043124 - RNA, 19 nt, Homo sapiens
  misc_RNA (1)...(19): siRNA sense strand
ccuuugagaugacccauga

SEQ ID NO: 2043125 - RNA, 19 nt, Homo sapiens
  misc_RNA (1)...(19): siRNA sense strand
gcaguaugcaagaaggaua

SEQ ID NO: 2043126 - RNA, 19 nt, Homo sapiens
  misc_RNA (1)...(19): siRNA sense strand
guacucagcauggaaauca

SEQ ID NO: 2043127 - RNA, 19 nt, Homo sapiens
  misc_RNA (1)...(19): siRNA sense strand
cagugaagcugguggaucu

SEQ ID NO: 2043128 - RNA, 19 nt, Homo sapiens
  misc_RNA (1)...(19): siRNA sense strand
gaacaaacugcugacuuuc

SEQ ID NO: 2043129 - RNA, 19 nt, Homo sapiens
  misc_RNA (1)...(19): siRNA sense strand
gcauuacaguggcuacagu

SEQ ID NO: 2043130 - RNA, 19 nt, Homo sapiens
  misc_RNA (1)...(19): siRNA sense strand
gcaggaauaccacuauguc

SEQ ID NO: 2043131 - RNA, 19 nt, Homo sapiens
  misc_RNA (1)...(19): siRNA sense strand
gagguacucagcauggaaa

SEQ ID NO: 2043132 - RNA, 19 nt, Homo sapiens
  misc_RNA (1)...(19): siRNA sense strand
ucucaaggcuguguauuac

SEQ ID NO: 2043133 - RNA, 19 nt, Homo sapiens
  misc_RNA (1)...(19): siRNA sense strand
gucucaaggcuguguauua

SEQ ID NO: 2043134 - RNA, 19 nt, Homo sapiens
  misc_RNA (1)...(19): siRNA sense strand
ggaaaucaacauccugaac

SEQ ID NO: 2043135 - RNA, 19 nt, Homo sapiens
  misc_RNA (1)...(19): siRNA sense strand
uacaguggcuacaguaucu

SEQ ID NO: 2043136 - RNA, 19 nt, Homo sapiens
  misc_RNA (1)...(19): siRNA sense strand
gcaaaauugugcccaguca

SEQ ID NO: 2043137 - RNA, 19 nt, Homo sapiens
  misc_RNA (1)...(19): siRNA sense strand
ugaaggcaguaugcaagaa

SEQ ID NO: 2043138 - RNA, 19 nt, Homo sapiens
  misc_RNA (1)...(19): siRNA sense strand
gaaaucucaguccagcaaa

SEQ ID NO: 2043139 - RNA, 19 nt, Homo sapiens
  misc_RNA (1)...(19): siRNA sense strand
gagucuccaucuucacuuc

SEQ ID NO: 2043140 - RNA, 19 nt, Homo sapiens
  misc_RNA (1)...(19): siRNA sense strand
uguugaagcuggaggagau

SEQ ID NO: 2043141 - RNA, 19 nt, Homo sapiens
  misc_RNA (1)...(19): siRNA sense strand
gcauggaaaucaacauccu

SEQ ID NO: 2043142 - RNA, 19 nt, Homo sapiens
  misc_RNA (1)...(19): siRNA sense strand
gaaggcaguaugcaagaag

SEQ ID NO: 2043143 - RNA, 19 nt, Homo sapiens
  misc_RNA (1)...(19): siRNA sense strand
ugaagcugguggaucucua

SEQ ID NO: 2043144 - RNA, 19 nt, Homo sapiens
  misc_RNA (1)...(19): siRNA sense strand
gaauugccaaacgaagaua

SEQ ID NO: 2043145 - RNA, 19 nt, Homo sapiens
  misc_RNA (1)...(19): siRNA sense strand
agaaaucucaguccagcaa

SEQ ID NO: 2043146 - RNA, 19 nt, Homo sapiens
  misc_RNA (1)...(19): siRNA sense strand
ccacugccuuuaugauugc

SEQ ID NO: 2043147 - RNA, 19 nt, Homo sapiens
  misc_RNA (1)...(19): siRNA sense strand
acaugaagaagcucggaua

SEQ ID NO: 2043148 - RNA, 19 nt, Homo sapiens
  misc_RNA (1)...(19): siRNA sense strand
gaccuugucccgcuacauc

SEQ ID NO: 2043149 - RNA, 19 nt, Homo sapiens
  misc_RNA (1)...(19): siRNA sense strand
uaaugaaggcaguaugcaa

SEQ ID NO: 2043150 - RNA, 19 nt, Homo sapiens
  misc_RNA (1)...(19): siRNA sense strand
gacuuucaguucuuacgau

SEQ ID NO: 2043151 - RNA, 19 nt, Homo sapiens
  misc_RNA (1)...(19): siRNA sense strand
cgagaugacccugcaggaa

SEQ ID NO: 2043152 - RNA, 19 nt, Homo sapiens
  misc_RNA (1)...(19): siRNA sense strand
gggagaauugccaaacgaa

SEQ ID NO: 2043153 - RNA, 19 nt, Homo sapiens
  misc_RNA (1)...(19): siRNA sense strand
augcaagaaggauaaguua

SEQ ID NO: 2043154 - RNA, 19 nt, Homo sapiens
  misc_RNA (1)...(19): siRNA sense strand
caguaugcaagaaggauaa

SEQ ID NO: 2043155 - RNA, 19 nt, Homo sapiens
  misc_RNA (1)...(19): siRNA sense strand
uaugcaagaaggauaaguu

SEQ ID NO: 2043156 - RNA, 19 nt, Homo sapiens
  misc_RNA (1)...(19): siRNA sense strand
acuuucaguucuuacgaua

SEQ ID NO: 2043157 - RNA, 19 nt, Homo sapiens
  misc_RNA (1)...(19): siRNA sense strand
acaccaacaugaagacacu

SEQ ID NO: 2043158 - RNA, 19 nt, Homo sapiens
  misc_RNA (1)...(19): siRNA sense strand
uggaugacuuuguguacau

SEQ ID NO: 2043159 - RNA, 19 nt, Homo sapiens
  misc_RNA (1)...(19): siRNA sense strand
guggaugacuuuguguaca

SEQ ID NO: 2043160 - RNA, 19 nt, Homo sapiens
  misc_RNA (1)...(19): siRNA sense strand
ugguggaucucuaccuaau

SEQ ID NO: 2043161 - RNA, 19 nt, Homo sapiens
  misc_RNA (1)...(19): siRNA sense strand
caaacgaagauaucuccau

SEQ ID NO: 2043162 - RNA, 19 nt, Homo sapiens
  misc_RNA (1)...(19): siRNA sense strand
uuucaguucuuacgauagu

SEQ ID NO: 2043163 - RNA, 19 nt, Homo sapiens
  misc_RNA (1)...(19): siRNA sense strand
cccaugagacccuguacuu

SEQ ID NO: 2043164 - RNA, 19 nt, Homo sapiens
  misc_RNA (1)...(19): siRNA sense strand
gauacuggguucccuuccu

SEQ ID NO: 2043165 - RNA, 19 nt, Homo sapiens
  misc_RNA (1)...(19): siRNA sense strand
aaaccugugccuaagaaau

SEQ ID NO: 2043166 - RNA, 19 nt, Homo sapiens
  misc_RNA (1)...(19): siRNA sense strand
cauccugaacguccucaaa

SEQ ID NO: 2043167 - RNA, 19 nt, Homo sapiens
  misc_RNA (1)...(19): siRNA sense strand
uucccuuccuggagcauua

SEQ ID NO: 2043168 - RNA, 19 nt, Homo sapiens
  misc_RNA (1)...(19): siRNA sense strand
cauuacaguggcuacagua

SEQ ID NO: 2043169 - RNA, 19 nt, Homo sapiens
  misc_RNA (1)...(19): siRNA sense strand
aaaucaacauccugaacgu

SEQ ID NO: 2043170 - RNA, 19 nt, Homo sapiens
  misc_RNA (1)...(19): siRNA sense strand
ccugaacguccucaaaugu

SEQ ID NO: 2043171 - RNA, 19 nt, Homo sapiens
  misc_RNA (1)...(19): siRNA sense strand
gaagcugguggaucucuac

SEQ ID NO: 2043172 - RNA, 19 nt, Homo sapiens
  misc_RNA (1)...(19): siRNA sense strand
cagcauggaaaucaacauc

SEQ ID NO: 2043173 - RNA, 19 nt, Homo sapiens
  misc_RNA (1)...(19): siRNA sense strand
gauaucuccaucuucacuu

SEQ ID NO: 2043174 - RNA, 19 nt, Homo sapiens
  misc_RNA (1)...(19): siRNA sense strand
ccaugagacccuguacuug

SEQ ID NO: 2043175 - RNA, 19 nt, Homo sapiens
  misc_RNA (1)...(19): siRNA sense strand
ugaacaaacugcugacuuu

SEQ ID NO: 2043176 - RNA, 19 nt, Homo sapiens
  misc_RNA (1)...(19): siRNA sense strand
gcuagcugcugccuccuua

SEQ ID NO: 2043177 - RNA, 19 nt, Homo sapiens
  misc_RNA (1)...(19): siRNA sense strand
caacucaccucguguggau

SEQ ID NO: 2043178 - RNA, 19 nt, Homo sapiens
  misc_RNA (1)...(19): siRNA sense strand
ccaaaccugugccuaagaa

SEQ ID NO: 2043179 - RNA, 19 nt, Homo sapiens
  misc_RNA (1)...(19): siRNA sense strand
guggaucucuaccuaauga

SEQ ID NO: 2043180 - RNA, 19 nt, Homo sapiens
  misc_RNA (1)...(19): siRNA sense strand
gcaagaaggauaaguuaca

SEQ ID NO: 2043181 - RNA, 19 nt, Homo sapiens
  misc_RNA (1)...(19): siRNA sense strand
caagaaggauaaguuacaa

SEQ ID NO: 2043182 - RNA, 19 nt, Homo sapiens
  misc_RNA (1)...(19): siRNA sense strand
ugaagaagcucggauacug

SEQ ID NO: 2043183 - RNA, 19 nt, Homo sapiens
  misc_RNA (1)...(19): siRNA sense strand
caucaugacccaucugaaa

SEQ ID NO: 2043184 - RNA, 19 nt, Homo sapiens
  misc_RNA (1)...(19): siRNA sense strand
gcugguggaucucuaccua

SEQ ID NO: 2043185 - RNA, 19 nt, Homo sapiens
  misc_RNA (1)...(19): siRNA sense strand
gcagauaugcuagguguau

SEQ ID NO: 2043186 - RNA, 19 nt, Homo sapiens
  misc_RNA (1)...(19): siRNA sense strand
gagaucagcuuuugaagau

SEQ ID NO: 2043187 - RNA, 19 nt, Homo sapiens
  misc_RNA (1)...(19): siRNA sense strand
agaugacccugcaggaaua

SEQ ID NO: 2043188 - RNA, 19 nt, Homo sapiens
  misc_RNA (1)...(19): siRNA sense strand
gagaauugccaaacgaaga

SEQ ID NO: 2043189 - RNA, 19 nt, Homo sapiens
  misc_RNA (1)...(19): siRNA sense strand
gccacugccuuuaugauug

SEQ ID NO: 2043190 - RNA, 19 nt, Homo sapiens
  misc_RNA (1)...(19): siRNA sense strand
gcuccaaaccugugccuaa

SEQ ID NO: 2043191 - RNA, 19 nt, Homo sapiens
  misc_RNA (1)...(19): siRNA sense strand
gagaugacccugcaggaau

SEQ ID NO: 2043192 - RNA, 19 nt, Homo sapiens
  misc_RNA (1)...(19): siRNA sense strand
ugaacguccucaaauguga

SEQ ID NO: 2043193 - RNA, 19 nt, Homo sapiens
  misc_RNA (1)...(19): siRNA sense strand
ccuuugagaugacccauga

SEQ ID NO: 2043194 - RNA, 19 nt, Homo sapiens
  misc_RNA (1)...(19): siRNA sense strand
gcaguaugcaagaaggaua

SEQ ID NO: 2043195 - RNA, 19 nt, Homo sapiens
  misc_RNA (1)...(19): siRNA sense strand
guacucagcauggaaauca

SEQ ID NO: 2043196 - RNA, 19 nt, Homo sapiens
  misc_RNA (1)...(19): siRNA sense strand
cagugaagcugguggaucu

SEQ ID NO: 2043197 - RNA, 19 nt, Homo sapiens
  misc_RNA (1)...(19): siRNA sense strand
gaacaaacugcugacuuuc

SEQ ID NO: 2043198 - RNA, 19 nt, Homo sapiens
  misc_RNA (1)...(19): siRNA sense strand
gcauuacaguggcuacagu

SEQ ID NO: 2043199 - RNA, 19 nt, Homo sapiens
  misc_RNA (1)...(19): siRNA sense strand
gcaggaauaccacuauguc

SEQ ID NO: 2043200 - RNA, 19 nt, Homo sapiens
  misc_RNA (1)...(19): siRNA sense strand
gagguacucagcauggaaa

SEQ ID NO: 2043201 - RNA, 19 nt, Homo sapiens
  misc_RNA (1)...(19): siRNA sense strand
ucucaaggcuguguauuac

SEQ ID NO: 2043202 - RNA, 19 nt, Homo sapiens
  misc_RNA (1)...(19): siRNA sense strand
gucucaaggcuguguauua

SEQ ID NO: 2043203 - RNA, 19 nt, Homo sapiens
  misc_RNA (1)...(19): siRNA sense strand
ggaaaucaacauccugaac

SEQ ID NO: 2043204 - RNA, 19 nt, Homo sapiens
  misc_RNA (1)...(19): siRNA sense strand
uacaguggcuacaguaucu

SEQ ID NO: 2043205 - RNA, 19 nt, Homo sapiens
  misc_RNA (1)...(19): siRNA sense strand
gcaaaauugugcccaguca

SEQ ID NO: 2043206 - RNA, 19 nt, Homo sapiens
  misc_RNA (1)...(19): siRNA sense strand
ugaaggcaguaugcaagaa

SEQ ID NO: 2043207 - RNA, 19 nt, Homo sapiens
  misc_RNA (1)...(19): siRNA sense strand
gaaaucucaguccagcaaa

SEQ ID NO: 2043208 - RNA, 19 nt, Homo sapiens
  misc_RNA (1)...(19): siRNA sense strand
gagucuccaucuucacuuc

SEQ ID NO: 2043209 - RNA, 19 nt, Homo sapiens
  misc_RNA (1)...(19): siRNA sense strand
uguugaagcuggaggagau

SEQ ID NO: 2043210 - RNA, 19 nt, Homo sapiens
  misc_RNA (1)...(19): siRNA sense strand
gcauggaaaucaacauccu

SEQ ID NO: 2043211 - RNA, 19 nt, Homo sapiens
  misc_RNA (1)...(19): siRNA sense strand
gaaggcaguaugcaagaag

SEQ ID NO: 2043212 - RNA, 19 nt, Homo sapiens
  misc_RNA (1)...(19): siRNA sense strand
ugaagcugguggaucucua

SEQ ID NO: 2043213 - RNA, 19 nt, Homo sapiens
  misc_RNA (1)...(19): siRNA sense strand
gaauugccaaacgaagaua

SEQ ID NO: 2043214 - RNA, 19 nt, Homo sapiens
  misc_RNA (1)...(19): siRNA sense strand
agaaaucucaguccagcaa

SEQ ID NO: 2043215 - RNA, 19 nt, Homo sapiens
  misc_RNA (1)...(19): siRNA sense strand
ccacugccuuuaugauugc

SEQ ID NO: 2043216 - RNA, 19 nt, Homo sapiens
  misc_RNA (1)...(19): siRNA sense strand
acaugaagaagcucggaua

SEQ ID NO: 2043217 - RNA, 19 nt, Homo sapiens
  misc_RNA (1)...(19): siRNA sense strand
gaccuugucccgcuacauc

SEQ ID NO: 2043218 - RNA, 19 nt, Homo sapiens
  misc_RNA (1)...(19): siRNA sense strand
uaaugaaggcaguaugcaa

SEQ ID NO: 2043219 - RNA, 19 nt, Homo sapiens
  misc_RNA (1)...(19): siRNA sense strand
gacuuucaguucuuacgau

SEQ ID NO: 2043220 - RNA, 19 nt, Homo sapiens
  misc_RNA (1)...(19): siRNA sense strand
cgagaugacccugcaggaa

SEQ ID NO: 2043221 - RNA, 19 nt, Homo sapiens
  misc_RNA (1)...(19): siRNA sense strand
gggagaauugccaaacgaa

SEQ ID NO: 2043222 - RNA, 19 nt, Homo sapiens
  misc_RNA (1)...(19): siRNA sense strand
augcaagaaggauaaguua

SEQ ID NO: 2043223 - RNA, 19 nt, Homo sapiens
  misc_RNA (1)...(19): siRNA sense strand
caguaugcaagaaggauaa

SEQ ID NO: 2043224 - RNA, 19 nt, Homo sapiens
  misc_RNA (1)...(19): siRNA sense strand
uaugcaagaaggauaaguu

SEQ ID NO: 2043225 - RNA, 19 nt, Homo sapiens
  misc_RNA (1)...(19): siRNA sense strand
acuuucaguucuuacgaua

SEQ ID NO: 2043226 - RNA, 19 nt, Homo sapiens
  misc_RNA (1)...(19): siRNA sense strand
acaccaacaugaagacacu

SEQ ID NO: 2043227 - RNA, 19 nt, Homo sapiens
  misc_RNA (1)...(19): siRNA sense strand
uggaugacuuuguguacau

SEQ ID NO: 2043228 - RNA, 19 nt, Homo sapiens
  misc_RNA (1)...(19): siRNA sense strand
guggaugacuuuguguaca

SEQ ID NO: 2043229 - RNA, 19 nt, Homo sapiens
  misc_RNA (1)...(19): siRNA sense strand
ugguggaucucuaccuaau

SEQ ID NO: 2043230 - RNA, 19 nt, Homo sapiens
  misc_RNA (1)...(19): siRNA sense strand
caaacgaagauaucuccau

SEQ ID NO: 2043231 - RNA, 19 nt, Homo sapiens
  misc_RNA (1)...(19): siRNA sense strand
uuucaguucuuacgauagu

SEQ ID NO: 2043232 - RNA, 19 nt, Homo sapiens
  misc_RNA (1)...(19): siRNA sense strand
cccaugagacccuguacuu

SEQ ID NO: 2043233 - RNA, 19 nt, Homo sapiens
  misc_RNA (1)...(19): siRNA sense strand
gauacuggguucccuuccu

SEQ ID NO: 2043234 - RNA, 19 nt, Homo sapiens
  misc_RNA (1)...(19): siRNA sense strand
aaaccugugccuaagaaau

SEQ ID NO: 2043235 - RNA, 19 nt, Homo sapiens
  misc_RNA (1)...(19): siRNA sense strand
cauccugaacguccucaaa

SEQ ID NO: 2043236 - RNA, 19 nt, Homo sapiens
  misc_RNA (1)...(19): siRNA sense strand
uucccuuccuggagcauua

SEQ ID NO: 2043237 - RNA, 19 nt, Homo sapiens
  misc_RNA (1)...(19): siRNA sense strand
cauuacaguggcuacagua

SEQ ID NO: 2043238 - RNA, 19 nt, Homo sapiens
  misc_RNA (1)...(19): siRNA sense strand
aaaucaacauccugaacgu

SEQ ID NO: 2043239 - RNA, 19 nt, Homo sapiens
  misc_RNA (1)...(19): siRNA sense strand
ccugaacguccucaaaugu

SEQ ID NO: 2043240 - RNA, 19 nt, Homo sapiens
  misc_RNA (1)...(19): siRNA sense strand
gaagcugguggaucucuac

SEQ ID NO: 2043241 - RNA, 19 nt, Homo sapiens
  misc_RNA (1)...(19): siRNA sense strand
cagcauggaaaucaacauc

SEQ ID NO: 2043242 - RNA, 19 nt, Homo sapiens
  misc_RNA (1)...(19): siRNA sense strand
gauaucuccaucuucacuu

SEQ ID NO: 2043243 - RNA, 19 nt, Homo sapiens
  misc_RNA (1)...(19): siRNA sense strand
ccaugagacccuguacuug

SEQ ID NO: 2043244 - RNA, 19 nt, Homo sapiens
  misc_RNA (1)...(19): siRNA sense strand
ccaaaccugugccuaagaa

SEQ ID NO: 2043245 - RNA, 19 nt, Homo sapiens
  misc_RNA (1)...(19): siRNA sense strand
caucaugacccaucugaaa

SEQ ID NO: 2043246 - RNA, 19 nt, Homo sapiens
  misc_RNA (1)...(19): siRNA sense strand
gagaucagcuuuugaagau

SEQ ID NO: 2043247 - RNA, 19 nt, Homo sapiens
  misc_RNA (1)...(19): siRNA sense strand
gagaauugccaaacgaaga

SEQ ID NO: 2043248 - RNA, 19 nt, Homo sapiens
  misc_RNA (1)...(19): siRNA sense strand
gcuccaaaccugugccuaa

SEQ ID NO: 2043249 - RNA, 19 nt, Homo sapiens
  misc_RNA (1)...(19): siRNA sense strand
gcaaaauugugcccaguca

SEQ ID NO: 2043250 - RNA, 19 nt, Homo sapiens
  misc_RNA (1)...(19): siRNA sense strand
gaaaucucaguccagcaaa

SEQ ID NO: 2043251 - RNA, 19 nt, Homo sapiens
  misc_RNA (1)...(19): siRNA sense strand
gagucuccaucuucacuuc

SEQ ID NO: 2043252 - RNA, 19 nt, Homo sapiens
  misc_RNA (1)...(19): siRNA sense strand
gaauugccaaacgaagaua

SEQ ID NO: 2043253 - RNA, 19 nt, Homo sapiens
  misc_RNA (1)...(19): siRNA sense strand
agaaaucucaguccagcaa

SEQ ID NO: 2043254 - RNA, 19 nt, Homo sapiens
  misc_RNA (1)...(19): siRNA sense strand
gggagaauugccaaacgaa

SEQ ID NO: 2043255 - RNA, 19 nt, Homo sapiens
  misc_RNA (1)...(19): siRNA sense strand
caaacgaagauaucuccau

SEQ ID NO: 2043256 - RNA, 19 nt, Homo sapiens
  misc_RNA (1)...(19): siRNA sense strand
aaaccugugccuaagaaau

SEQ ID NO: 2043257 - RNA, 19 nt, Homo sapiens
  misc_RNA (1)...(19): siRNA sense strand
gauaucuccaucuucacuu

SEQ ID NO: 2043258 - RNA, 19 nt, Homo sapiens
  misc_RNA (1)...(19): siRNA sense strand
ggaaguuucuuuaccaauu

SEQ ID NO: 2043259 - RNA, 19 nt, Homo sapiens
  misc_RNA (1)...(19): siRNA sense strand
guaugagguugaugacuua

SEQ ID NO: 2043260 - RNA, 19 nt, Homo sapiens
  misc_RNA (1)...(19): siRNA sense strand
gaaguuucuuuaccaauuc

SEQ ID NO: 2043261 - RNA, 19 nt, Homo sapiens
  misc_RNA (1)...(19): siRNA sense strand
ugacagugcuacauccuuu

SEQ ID NO: 2043262 - RNA, 19 nt, Homo sapiens
  misc_RNA (1)...(19): siRNA sense strand
ggaggaaguuucuuuacca

SEQ ID NO: 2043263 - RNA, 19 nt, Homo sapiens
  misc_RNA (1)...(19): siRNA sense strand
ucaugaccuucaaagauua

SEQ ID NO: 2043264 - RNA, 19 nt, Homo sapiens
  misc_RNA (1)...(19): siRNA sense strand
gggaagggcugcaugaaaa

SEQ ID NO: 2043265 - RNA, 19 nt, Homo sapiens
  misc_RNA (1)...(19): siRNA sense strand
gaggaaguuucuuuaccaa

SEQ ID NO: 2043266 - RNA, 19 nt, Homo sapiens
  misc_RNA (1)...(19): siRNA sense strand
gaacggcugccacguggaa

SEQ ID NO: 2043267 - RNA, 19 nt, Homo sapiens
  misc_RNA (1)...(19): siRNA sense strand
uguaugagguugaugacuu

SEQ ID NO: 2043268 - RNA, 19 nt, Homo sapiens
  misc_RNA (1)...(19): siRNA sense strand
caucaugaccuucaaagau

SEQ ID NO: 2043269 - RNA, 19 nt, Homo sapiens
  misc_RNA (1)...(19): siRNA sense strand
ugacuuacgagacgcauuu

SEQ ID NO: 2043270 - RNA, 19 nt, Homo sapiens
  misc_RNA (1)...(19): siRNA sense strand
cgagacgcauuucguacuu

SEQ ID NO: 2043271 - RNA, 19 nt, Homo sapiens
  misc_RNA (1)...(19): siRNA sense strand
gugcaaauagccaucauga

SEQ ID NO: 2043272 - RNA, 19 nt, Homo sapiens
  misc_RNA (1)...(19): siRNA sense strand
gagacgcauuucguacuuu

SEQ ID NO: 2043273 - RNA, 19 nt, Homo sapiens
  misc_RNA (1)...(19): siRNA sense strand
ucacuggacuuugguuauc

SEQ ID NO: 2043274 - RNA, 19 nt, Homo sapiens
  misc_RNA (1)...(19): siRNA sense strand
aaauagccaucaugaccuu

SEQ ID NO: 2043275 - RNA, 19 nt, Homo sapiens
  misc_RNA (1)...(19): siRNA sense strand
aucaugaccuucaaagauu

SEQ ID NO: 2043276 - RNA, 19 nt, Homo sapiens
  misc_RNA (1)...(19): siRNA sense strand
cagcuucggcgcauccuuu

SEQ ID NO: 2043277 - RNA, 19 nt, Homo sapiens
  misc_RNA (1)...(19): siRNA sense strand
agacgcauuucguacuuug

SEQ ID NO: 2043278 - RNA, 19 nt, Homo sapiens
  misc_RNA (1)...(19): siRNA sense strand
ugagguugaugacuuacga

SEQ ID NO: 2043279 - RNA, 19 nt, Homo sapiens
  misc_RNA (1)...(19): siRNA sense strand
gcuaagggucggcgugaga

SEQ ID NO: 2043280 - RNA, 19 nt, Homo sapiens
  misc_RNA (1)...(19): siRNA sense strand
cgacugugcccgacaugug

SEQ ID NO: 2043281 - RNA, 19 nt, Homo sapiens
  misc_RNA (1)...(19): siRNA sense strand
uuucguacuuugggacuuu

SEQ ID NO: 2043282 - RNA, 19 nt, Homo sapiens
  misc_RNA (1)...(19): siRNA sense strand
ugggaagggcugcaugaaa

SEQ ID NO: 2043283 - RNA, 19 nt, Homo sapiens
  misc_RNA (1)...(19): siRNA sense strand
gcuaccgcgucaccugguu

SEQ ID NO: 2043284 - RNA, 19 nt, Homo sapiens
  misc_RNA (1)...(19): siRNA sense strand
guagaaaaccaugaaagaa

SEQ ID NO: 2043285 - RNA, 19 nt, Homo sapiens
  misc_RNA (1)...(19): siRNA sense strand
guagugaagaggcgugaca

SEQ ID NO: 2043286 - RNA, 19 nt, Homo sapiens
  misc_RNA (1)...(19): siRNA sense strand
gaugaaccggaggaaguuu

SEQ ID NO: 2043287 - RNA, 19 nt, Homo sapiens
  misc_RNA (1)...(19): siRNA sense strand
gaccuaccugugcuacgua

SEQ ID NO: 2043288 - RNA, 19 nt, Homo sapiens
  misc_RNA (1)...(19): siRNA sense strand
cuacgacugugcccgacau

SEQ ID NO: 2043289 - RNA, 19 nt, Homo sapiens
  misc_RNA (1)...(19): siRNA sense strand
uaccugugcuacguaguga

SEQ ID NO: 2043290 - RNA, 19 nt, Homo sapiens
  misc_RNA (1)...(19): siRNA sense strand
ccacguggaauugcucuuc

SEQ ID NO: 2043291 - RNA, 19 nt, Homo sapiens
  misc_RNA (1)...(19): siRNA sense strand
agaccuaccugugcuacgu

SEQ ID NO: 2043292 - RNA, 19 nt, Homo sapiens
  misc_RNA (1)...(19): siRNA sense strand
aaccggaggaaguuucuuu

SEQ ID NO: 2043293 - RNA, 19 nt, Homo sapiens
  misc_RNA (1)...(19): siRNA sense strand
gaaaguggcgacagguuua

SEQ ID NO: 2043294 - RNA, 19 nt, Homo sapiens
  misc_RNA (1)...(19): siRNA sense strand
gaaacggacuuagaucuga

SEQ ID NO: 2043295 - RNA, 19 nt, Homo sapiens
  misc_RNA (1)...(19): siRNA sense strand
ggaggacccugaagaguug

SEQ ID NO: 2043296 - RNA, 19 nt, Homo sapiens
  misc_RNA (1)...(19): siRNA sense strand
ucacagagcuuugucauca

SEQ ID NO: 2043297 - RNA, 19 nt, Homo sapiens
  misc_RNA (1)...(19): siRNA sense strand
ggaaacaggucugcaagga

SEQ ID NO: 2043298 - RNA, 19 nt, Homo sapiens
  misc_RNA (1)...(19): siRNA sense strand
uuaaggaagucggguauua

SEQ ID NO: 2043299 - RNA, 19 nt, Homo sapiens
  misc_RNA (1)...(19): siRNA sense strand
ggaagucuguccacaaugg

SEQ ID NO: 2043300 - RNA, 19 nt, Homo sapiens
  misc_RNA (1)...(19): siRNA sense strand
gaacucaucucccaguacu

SEQ ID NO: 2043301 - RNA, 19 nt, Homo sapiens
  misc_RNA (1)...(19): siRNA sense strand
gcccacgccuugcaagaua

SEQ ID NO: 2043302 - RNA, 19 nt, Homo sapiens
  misc_RNA (1)...(19): siRNA sense strand
ccaaggagaucgaguuucu

SEQ ID NO: 2043303 - RNA, 19 nt, Homo sapiens
  misc_RNA (1)...(19): siRNA sense strand
uggcagacaucaucgagua

SEQ ID NO: 2043304 - RNA, 19 nt, Homo sapiens
  misc_RNA (1)...(19): siRNA sense strand
ccaguacucugaugaggaa

SEQ ID NO: 2043305 - RNA, 19 nt, Homo sapiens
  misc_RNA (1)...(19): siRNA sense strand
gcacauucccucuacgauu

SEQ ID NO: 2043306 - RNA, 19 nt, Homo sapiens
  misc_RNA (1)...(19): siRNA sense strand
caacaagaucuacaucauu

SEQ ID NO: 2043307 - RNA, 19 nt, Homo sapiens
  misc_RNA (1)...(19): siRNA sense strand
gugcagacaucaagaaagu

SEQ ID NO: 2043308 - RNA, 19 nt, Homo sapiens
  misc_RNA (1)...(19): siRNA sense strand
gaaccacaccuccugcauu

SEQ ID NO: 2043309 - RNA, 19 nt, Homo sapiens
  misc_RNA (1)...(19): siRNA sense strand
ucugagaggucacgaagaa

SEQ ID NO: 2043310 - RNA, 19 nt, Homo sapiens
  misc_RNA (1)...(19): siRNA sense strand
cagcaccuauggcaaguuu

SEQ ID NO: 2043311 - RNA, 19 nt, Homo sapiens
  misc_RNA (1)...(19): siRNA sense strand
guuacaggcuaugauauuu

SEQ ID NO: 2043312 - RNA, 19 nt, Homo sapiens
  misc_RNA (1)...(19): siRNA sense strand
gaacugggugggcacaauu

SEQ ID NO: 2043313 - RNA, 19 nt, Homo sapiens
  misc_RNA (1)...(19): siRNA sense strand
gguggaggcagcacuguua

SEQ ID NO: 2043314 - RNA, 19 nt, Homo sapiens
  misc_RNA (1)...(19): siRNA sense strand
uggaauguaucagguauaa

SEQ ID NO: 2043315 - RNA, 19 nt, Homo sapiens
  misc_RNA (1)...(19): siRNA sense strand
caacgucuaugccaagaag

SEQ ID NO: 2043316 - RNA, 19 nt, Homo sapiens
  misc_RNA (1)...(19): siRNA sense strand
gcagacaucaagaaaguug

SEQ ID NO: 2043317 - RNA, 19 nt, Homo sapiens
  misc_RNA (1)...(19): siRNA sense strand
uuacggauauccuacaaug

SEQ ID NO: 2043318 - RNA, 19 nt, Homo sapiens
  misc_RNA (1)...(19): siRNA sense strand
cacauucccucuacgauug

SEQ ID NO: 2043319 - RNA, 19 nt, Homo sapiens
  misc_RNA (1)...(19): siRNA sense strand
caggaagucuguccacaau

SEQ ID NO: 2043320 - RNA, 19 nt, Homo sapiens
  misc_RNA (1)...(19): siRNA sense strand
gaucugaccguccaggaaa

SEQ ID NO: 2043321 - RNA, 19 nt, Homo sapiens
  misc_RNA (1)...(19): siRNA sense strand
gagcccaccugcugcuuug

SEQ ID NO: 2043322 - RNA, 19 nt, Homo sapiens
  misc_RNA (1)...(19): siRNA sense strand
uuacacgcauuuacggaua

SEQ ID NO: 2043323 - RNA, 19 nt, Homo sapiens
  misc_RNA (1)...(19): siRNA sense strand
aacaagaucuacaucauuc

SEQ ID NO: 2043324 - RNA, 19 nt, Homo sapiens
  misc_RNA (1)...(19): siRNA sense strand
gggaauuccugaagaaggu

SEQ ID NO: 2043325 - RNA, 19 nt, Homo sapiens
  misc_RNA (1)...(19): siRNA sense strand
caacagcgaagacccauuc

SEQ ID NO: 2043326 - RNA, 19 nt, Homo sapiens
  misc_RNA (1)...(19): siRNA sense strand
gaugacuucugguccaaug

SEQ ID NO: 2043327 - RNA, 19 nt, Homo sapiens
  misc_RNA (1)...(19): siRNA sense strand
cagacaucaucgaguauuu

SEQ ID NO: 2043328 - RNA, 19 nt, Homo sapiens
  misc_RNA (1)...(19): siRNA sense strand
ucaacaagaucuacaucau

SEQ ID NO: 2043329 - RNA, 19 nt, Homo sapiens
  misc_RNA (1)...(19): siRNA sense strand
aggaagagauccagcaugu

SEQ ID NO: 2043330 - RNA, 19 nt, Homo sapiens
  misc_RNA (1)...(19): siRNA sense strand
ggaacugggugggcacaau

SEQ ID NO: 2043331 - RNA, 19 nt, Homo sapiens
  misc_RNA (1)...(19): siRNA sense strand
aaccacaccuccugcauug

SEQ ID NO: 2043332 - RNA, 19 nt, Homo sapiens
  misc_RNA (1)...(19): siRNA sense strand
ggaguauagugaugagaca

SEQ ID NO: 2043333 - RNA, 19 nt, Homo sapiens
  misc_RNA (1)...(19): siRNA sense strand
ccaagaaggugcaaaagga

SEQ ID NO: 2043334 - RNA, 19 nt, Homo sapiens
  misc_RNA (1)...(19): siRNA sense strand
gcacaauugcagcugauga

SEQ ID NO: 2043335 - RNA, 19 nt, Homo sapiens
  misc_RNA (1)...(19): siRNA sense strand
uaacugccaccuccaagaa

SEQ ID NO: 2043336 - RNA, 19 nt, Homo sapiens
  misc_RNA (1)...(19): siRNA sense strand
ggaaacggacuuagaucug

SEQ ID NO: 2043337 - RNA, 19 nt, Homo sapiens
  misc_RNA (1)...(19): siRNA sense strand
gcaccuucaugcagauugu

SEQ ID NO: 2043338 - RNA, 19 nt, Homo sapiens
  misc_RNA (1)...(19): siRNA sense strand
gguuacaggcuaugauauu

SEQ ID NO: 2043339 - RNA, 19 nt, Homo sapiens
  misc_RNA (1)...(19): siRNA sense strand
gcaagcagaaggucaucuu

SEQ ID NO: 2043340 - RNA, 19 nt, Homo sapiens
  misc_RNA (1)...(19): siRNA sense strand
caacacacccauugucaag

SEQ ID NO: 2043341 - RNA, 19 nt, Homo sapiens
  misc_RNA (1)...(19): siRNA sense strand
ccuacggcaucuaaacuuu

SEQ ID NO: 2043342 - RNA, 19 nt, Homo sapiens
  misc_RNA (1)...(19): siRNA sense strand
gcagacuccucagcaacaa

SEQ ID NO: 2043343 - RNA, 19 nt, Homo sapiens
  misc_RNA (1)...(19): siRNA sense strand
ggaagcugccggagaacuu

SEQ ID NO: 2043344 - RNA, 19 nt, Homo sapiens
  misc_RNA (1)...(19): siRNA sense strand
gcagacaucaucgaguauu

SEQ ID NO: 2043345 - RNA, 19 nt, Homo sapiens
  misc_RNA (1)...(19): siRNA sense strand
gggaagaaacauuuaacug

SEQ ID NO: 2043346 - RNA, 19 nt, Homo sapiens
  misc_RNA (1)...(19): siRNA sense strand
gccaucugcuucuucuuug

SEQ ID NO: 2043347 - RNA, 19 nt, Homo sapiens
  misc_RNA (1)...(19): siRNA sense strand
guaacaagugcccagauga

SEQ ID NO: 2043348 - RNA, 19 nt, Homo sapiens
  misc_RNA (1)...(19): siRNA sense strand
gccagugccuguaacaagu

SEQ ID NO: 2043349 - RNA, 19 nt, Homo sapiens
  misc_RNA (1)...(19): siRNA sense strand
cggagucuguggaauguau

SEQ ID NO: 2043350 - RNA, 19 nt, Homo sapiens
  misc_RNA (1)...(19): siRNA sense strand
ggcgacagguuuagcaaca

SEQ ID NO: 2043351 - RNA, 19 nt, Homo sapiens
  misc_RNA (1)...(19): siRNA sense strand
ggauacaggauauuugaca

SEQ ID NO: 2043352 - RNA, 19 nt, Homo sapiens
  misc_RNA (1)...(19): siRNA sense strand
caccgcagcucacgcuuuc

SEQ ID NO: 2043353 - RNA, 19 nt, Homo sapiens
  misc_RNA (1)...(19): siRNA sense strand
gcaccgcagcucacgcuuu

SEQ ID NO: 2043354 - RNA, 19 nt, Homo sapiens
  misc_RNA (1)...(19): siRNA sense strand
cuacaucauucucuucaag

SEQ ID NO: 2043355 - RNA, 19 nt, Homo sapiens
  misc_RNA (1)...(19): siRNA sense strand
gcaccuauggcaaguuugu

SEQ ID NO: 2043356 - RNA, 19 nt, Homo sapiens
  misc_RNA (1)...(19): siRNA sense strand
gcaacacacccauugucaa

SEQ ID NO: 2043357 - RNA, 19 nt, Homo sapiens
  misc_RNA (1)...(19): siRNA sense strand
gagaggaagcugaggaaag

SEQ ID NO: 2043358 - RNA, 19 nt, Homo sapiens
  misc_RNA (1)...(19): siRNA sense strand
uguaacaagugcccagaug

SEQ ID NO: 2043359 - RNA, 19 nt, Homo sapiens
  misc_RNA (1)...(19): siRNA sense strand
gaggugcccuucuccaacu

SEQ ID NO: 2043360 - RNA, 19 nt, Homo sapiens
  misc_RNA (1)...(19): siRNA sense strand
gugaacucaucucccagua

SEQ ID NO: 2043361 - RNA, 19 nt, Homo sapiens
  misc_RNA (1)...(19): siRNA sense strand
agaggaagcugaggaaagg

SEQ ID NO: 2043362 - RNA, 19 nt, Homo sapiens
  misc_RNA (1)...(19): siRNA sense strand
gcgugcaucuucuucaaca

SEQ ID NO: 2043363 - RNA, 19 nt, Homo sapiens
  misc_RNA (1)...(19): siRNA sense strand
ccaggaaagggaucauuga

SEQ ID NO: 2043364 - RNA, 19 nt, Homo sapiens
  misc_RNA (1)...(19): siRNA sense strand
gaacuauuccaucaucaac

SEQ ID NO: 2043365 - RNA, 19 nt, Homo sapiens
  misc_RNA (1)...(19): siRNA sense strand
ccagcagacuccucagcaa

SEQ ID NO: 2043366 - RNA, 19 nt, Homo sapiens
  misc_RNA (1)...(19): siRNA sense strand
cuuugaaccuugaugaguu

SEQ ID NO: 2043367 - RNA, 19 nt, Homo sapiens
  misc_RNA (1)...(19): siRNA sense strand
cagaaaacguagugaauuc

SEQ ID NO: 2043368 - RNA, 19 nt, Homo sapiens
  misc_RNA (1)...(19): siRNA sense strand
gacccgacaccagccauua

SEQ ID NO: 2043369 - RNA, 19 nt, Homo sapiens
  misc_RNA (1)...(19): siRNA sense strand
ggaagucggguauuacaac

SEQ ID NO: 2043370 - RNA, 19 nt, Homo sapiens
  misc_RNA (1)...(19): siRNA sense strand
aaucaaggccggagucugu

SEQ ID NO: 2043371 - RNA, 19 nt, Homo sapiens
  misc_RNA (1)...(19): siRNA sense strand
agaaaguggcgacagguuu

SEQ ID NO: 2043372 - RNA, 19 nt, Homo sapiens
  misc_RNA (1)...(19): siRNA sense strand
gaagcugaggaaagggaua

SEQ ID NO: 2043373 - RNA, 19 nt, Homo sapiens
  misc_RNA (1)...(19): siRNA sense strand
caagcagaaggucaucuuu

SEQ ID NO: 2043374 - RNA, 19 nt, Homo sapiens
  misc_RNA (1)...(19): siRNA sense strand
gucuggaucuccuucauuc

SEQ ID NO: 2043375 - RNA, 19 nt, Homo sapiens
  misc_RNA (1)...(19): siRNA sense strand
ggaucgcacucacccucuu

SEQ ID NO: 2043376 - RNA, 19 nt, Homo sapiens
  misc_RNA (1)...(19): siRNA sense strand
gcugggauacaggauauuu

SEQ ID NO: 2043377 - RNA, 19 nt, Homo sapiens
  misc_RNA (1)...(19): siRNA sense strand
ucagcaugcucaucuucuu

SEQ ID NO: 2043378 - RNA, 19 nt, Homo sapiens
  misc_RNA (1)...(19): siRNA sense strand
ggagcccaccugcugcuuu

SEQ ID NO: 2043379 - RNA, 19 nt, Homo sapiens
  misc_RNA (1)...(19): siRNA sense strand
acggucaccuucucacuga

SEQ ID NO: 2043380 - RNA, 19 nt, Homo sapiens
  misc_RNA (1)...(19): siRNA sense strand
gcucuuuccuauucauuuu

SEQ ID NO: 2043381 - RNA, 19 nt, Homo sapiens
  misc_RNA (1)...(19): siRNA sense strand
ucucaugcauccuggugaa

SEQ ID NO: 2043382 - RNA, 19 nt, Homo sapiens
  misc_RNA (1)...(19): siRNA sense strand
gaucgcacucacccucuuu

SEQ ID NO: 2043383 - RNA, 19 nt, Homo sapiens
  misc_RNA (1)...(19): siRNA sense strand
gagcacauucccucuacga

SEQ ID NO: 2043384 - RNA, 19 nt, Homo sapiens
  misc_RNA (1)...(19): siRNA sense strand
ccaggaaacaggucugcaa

SEQ ID NO: 2043385 - RNA, 19 nt, Homo sapiens
  misc_RNA (1)...(19): siRNA sense strand
gcuccaucguguuuaagga

SEQ ID NO: 2043386 - RNA, 19 nt, Homo sapiens
  misc_RNA (1)...(19): siRNA sense strand
ggauaucugcaucgacuuc

SEQ ID NO: 2043387 - RNA, 19 nt, Homo sapiens
  misc_RNA (1)...(19): siRNA sense strand
ccaacuugacgcugggaua

SEQ ID NO: 2043388 - RNA, 19 nt, Homo sapiens
  misc_RNA (1)...(19): siRNA sense strand
gggcacaauugcagcugau

SEQ ID NO: 2043389 - RNA, 19 nt, Homo sapiens
  misc_RNA (1)...(19): siRNA sense strand
aucaagaucucaaaucaag

SEQ ID NO: 2043390 - RNA, 19 nt, Homo sapiens
  misc_RNA (1)...(19): siRNA sense strand
caauaucacgggcaagauc

SEQ ID NO: 2043391 - RNA, 19 nt, Homo sapiens
  misc_RNA (1)...(19): siRNA sense strand
ggugaccuuugaugagugu

SEQ ID NO: 2043392 - RNA, 19 nt, Homo sapiens
  misc_RNA (1)...(19): siRNA sense strand
uuagcagucuacuccauug

SEQ ID NO: 2043393 - RNA, 19 nt, Homo sapiens
  misc_RNA (1)...(19): siRNA sense strand
ucagauaacucaagcuaug

SEQ ID NO: 2043394 - RNA, 19 nt, Homo sapiens
  misc_RNA (1)...(19): siRNA sense strand
ggagauagcagaggaauuc

SEQ ID NO: 2043395 - RNA, 19 nt, Homo sapiens
  misc_RNA (1)...(19): siRNA sense strand
caagugagcccaccaagug

SEQ ID NO: 2043396 - RNA, 19 nt, Homo sapiens
  misc_RNA (1)...(19): siRNA sense strand
gaagacgucuacgaauuca

SEQ ID NO: 2043397 - RNA, 19 nt, Homo sapiens
  misc_RNA (1)...(19): siRNA sense strand
ggguggacuuugccuauaa

SEQ ID NO: 2043398 - RNA, 19 nt, Homo sapiens
  misc_RNA (1)...(19): siRNA sense strand
caaauccugacgcauguua

SEQ ID NO: 2043399 - RNA, 19 nt, Homo sapiens
  misc_RNA (1)...(19): siRNA sense strand
ccagaauggugagaauaaa

SEQ ID NO: 2043400 - RNA, 19 nt, Homo sapiens
  misc_RNA (1)...(19): siRNA sense strand
gcucagauaacucaagcua

SEQ ID NO: 2043401 - RNA, 19 nt, Homo sapiens
  misc_RNA (1)...(19): siRNA sense strand
ucagccagcucaucuacuu

SEQ ID NO: 2043402 - RNA, 19 nt, Homo sapiens
  misc_RNA (1)...(19): siRNA sense strand
ggaaucucaagaagaagua

SEQ ID NO: 2043403 - RNA, 19 nt, Homo sapiens
  misc_RNA (1)...(19): siRNA sense strand
ggaggagcccuaucugcaa

SEQ ID NO: 2043404 - RNA, 19 nt, Homo sapiens
  misc_RNA (1)...(19): siRNA sense strand
caacgugggaugcaccaaa

SEQ ID NO: 2043405 - RNA, 19 nt, Homo sapiens
  misc_RNA (1)...(19): siRNA sense strand
gccagucugccaccacuua

SEQ ID NO: 2043406 - RNA, 19 nt, Homo sapiens
  misc_RNA (1)...(19): siRNA sense strand
caaguggaauguagaagac

SEQ ID NO: 2043407 - RNA, 19 nt, Homo sapiens
  misc_RNA (1)...(19): siRNA sense strand
ccaaguggaauguagaaga

SEQ ID NO: 2043408 - RNA, 19 nt, Homo sapiens
  misc_RNA (1)...(19): siRNA sense strand
caaggaggaccaccugaug

SEQ ID NO: 2043409 - RNA, 19 nt, Homo sapiens
  misc_RNA (1)...(19): siRNA sense strand
ccaaggauaccaagaagca

SEQ ID NO: 2043410 - RNA, 19 nt, Homo sapiens
  misc_RNA (1)...(19): siRNA sense strand
uaacacacagccaggaaga

SEQ ID NO: 2043411 - RNA, 19 nt, Homo sapiens
  misc_RNA (1)...(19): siRNA sense strand
cggguggacuuugccuaua

SEQ ID NO: 2043412 - RNA, 19 nt, Homo sapiens
  misc_RNA (1)...(19): siRNA sense strand
cccagaauggugagaauaa

SEQ ID NO: 2043413 - RNA, 19 nt, Homo sapiens
  misc_RNA (1)...(19): siRNA sense strand
ggagcccuaucugcaagaa

SEQ ID NO: 2043414 - RNA, 19 nt, Homo sapiens
  misc_RNA (1)...(19): siRNA sense strand
agaagacgucuacgaauuc

SEQ ID NO: 2043415 - RNA, 19 nt, Homo sapiens
  misc_RNA (1)...(19): siRNA sense strand
gggcaugggacaccacuuc

SEQ ID NO: 2043416 - RNA, 19 nt, Homo sapiens
  misc_RNA (1)...(19): siRNA sense strand
guuccaagcgcuucuguuc

SEQ ID NO: 2043417 - RNA, 19 nt, Homo sapiens
  misc_RNA (1)...(19): siRNA sense strand
gaacccuugucacccaucu

SEQ ID NO: 2043418 - RNA, 19 nt, Homo sapiens
  misc_RNA (1)...(19): siRNA sense strand
uuaccaaggauaccaagaa

SEQ ID NO: 2043419 - RNA, 19 nt, Homo sapiens
  misc_RNA (1)...(19): siRNA sense strand
ggagauggaggagcccuau

SEQ ID NO: 2043420 - RNA, 19 nt, Homo sapiens
  misc_RNA (1)...(19): siRNA sense strand
gcuaacacacagccaggaa

SEQ ID NO: 2043421 - RNA, 19 nt, Homo sapiens
  misc_RNA (1)...(19): siRNA sense strand
gaaacucugccuccagcau

SEQ ID NO: 2043422 - RNA, 19 nt, Homo sapiens
  misc_RNA (1)...(19): siRNA sense strand
cccucaaacucaaguguga

SEQ ID NO: 2043423 - RNA, 19 nt, Homo sapiens
  misc_RNA (1)...(19): siRNA sense strand
cccaaauccugacgcaugu

SEQ ID NO: 2043424 - RNA, 19 nt, Homo sapiens
  misc_RNA (1)...(19): siRNA sense strand
uaccaaggauaccaagaag

SEQ ID NO: 2043425 - RNA, 19 nt, Homo sapiens
  misc_RNA (1)...(19): siRNA sense strand
ccugacgcauguuaucgaa

SEQ ID NO: 2043426 - RNA, 19 nt, Homo sapiens
  misc_RNA (1)...(19): siRNA sense strand
guuccugccugagaaacuu

SEQ ID NO: 2043427 - RNA, 19 nt, Homo sapiens
  misc_RNA (1)...(19): siRNA sense strand
ugccaccacuuaccaagga

SEQ ID NO: 2043428 - RNA, 19 nt, Homo sapiens
  misc_RNA (1)...(19): siRNA sense strand
uuccauggcuugugcaaag

SEQ ID NO: 2043429 - RNA, 19 nt, Homo sapiens
  misc_RNA (1)...(19): siRNA sense strand
gggaaucucaagaagaagu

SEQ ID NO: 2043430 - RNA, 19 nt, Homo sapiens
  misc_RNA (1)...(19): siRNA sense strand
uaucgaaggguuugugauc

SEQ ID NO: 2043431 - RNA, 19 nt, Homo sapiens
  misc_RNA (1)...(19): siRNA sense strand
ccacugacucggagaugga

SEQ ID NO: 2043432 - RNA, 19 nt, Homo sapiens
  misc_RNA (1)...(19): siRNA sense strand
gguggacuuugccuauaag

SEQ ID NO: 2043433 - RNA, 19 nt, Homo sapiens
  misc_RNA (1)...(19): siRNA sense strand
uccagccguugcucagaua

SEQ ID NO: 2043434 - RNA, 19 nt, Homo sapiens
  misc_RNA (1)...(19): siRNA sense strand
gugcaaagagguacaacgu

SEQ ID NO: 2043435 - RNA, 19 nt, Homo sapiens
  misc_RNA (1)...(19): siRNA sense strand
uccaagcgcuucuguucca

SEQ ID NO: 2043436 - RNA, 19 nt, Homo sapiens
  misc_RNA (1)...(19): siRNA sense strand
ugagcgccaugaacaucaa

SEQ ID NO: 2043437 - RNA, 19 nt, Homo sapiens
  misc_RNA (1)...(19): siRNA sense strand
cagauaacucaagcuauga

SEQ ID NO: 2043438 - RNA, 19 nt, Homo sapiens
  misc_RNA (1)...(19): siRNA sense strand
uggggaaucucaagaagaa

SEQ ID NO: 2043439 - RNA, 19 nt, Homo sapiens
  misc_RNA (1)...(19): siRNA sense strand
gcauguuaucgaaggguuu

SEQ ID NO: 2043440 - RNA, 19 nt, Homo sapiens
  misc_RNA (1)...(19): siRNA sense strand
ccaaacgggugggacuuuu

SEQ ID NO: 2043441 - RNA, 19 nt, Homo sapiens
  misc_RNA (1)...(19): siRNA sense strand
caucucagccagcucaucu

SEQ ID NO: 2043442 - RNA, 19 nt, Homo sapiens
  misc_RNA (1)...(19): siRNA sense strand
ccaagugagcccaccaagu

SEQ ID NO: 2043443 - RNA, 19 nt, Homo sapiens
  misc_RNA (1)...(19): siRNA sense strand
ccaccacuuaccaaggaua

SEQ ID NO: 2043444 - RNA, 19 nt, Homo sapiens
  misc_RNA (1)...(19): siRNA sense strand
aaggaggaccaccugauga

SEQ ID NO: 2043445 - RNA, 19 nt, Homo sapiens
  misc_RNA (1)...(19): siRNA sense strand
ucaaggaggaccaccugau

SEQ ID NO: 2043446 - RNA, 19 nt, Homo sapiens
  misc_RNA (1)...(19): siRNA sense strand
agacgucuacgaauucauc

SEQ ID NO: 2043447 - RNA, 19 nt, Homo sapiens
  misc_RNA (1)...(19): siRNA sense strand
ucagauaacucaagcuaug

SEQ ID NO: 2043448 - RNA, 19 nt, Homo sapiens
  misc_RNA (1)...(19): siRNA sense strand
ggagauagcagaggaauuc

SEQ ID NO: 2043449 - RNA, 19 nt, Homo sapiens
  misc_RNA (1)...(19): siRNA sense strand
caagugagcccaccaagug

SEQ ID NO: 2043450 - RNA, 19 nt, Homo sapiens
  misc_RNA (1)...(19): siRNA sense strand
gaagacgucuacgaauuca

SEQ ID NO: 2043451 - RNA, 19 nt, Homo sapiens
  misc_RNA (1)...(19): siRNA sense strand
ggguggacuuugccuauaa

SEQ ID NO: 2043452 - RNA, 19 nt, Homo sapiens
  misc_RNA (1)...(19): siRNA sense strand
caaauccugacgcauguua

SEQ ID NO: 2043453 - RNA, 19 nt, Homo sapiens
  misc_RNA (1)...(19): siRNA sense strand
ccagaauggugagaauaaa

SEQ ID NO: 2043454 - RNA, 19 nt, Homo sapiens
  misc_RNA (1)...(19): siRNA sense strand
gcucagauaacucaagcua

SEQ ID NO: 2043455 - RNA, 19 nt, Homo sapiens
  misc_RNA (1)...(19): siRNA sense strand
ucagccagcucaucuacuu

SEQ ID NO: 2043456 - RNA, 19 nt, Homo sapiens
  misc_RNA (1)...(19): siRNA sense strand
ggaaucucaagaagaagua

SEQ ID NO: 2043457 - RNA, 19 nt, Homo sapiens
  misc_RNA (1)...(19): siRNA sense strand
ggaggagcccuaucugcaa

SEQ ID NO: 2043458 - RNA, 19 nt, Homo sapiens
  misc_RNA (1)...(19): siRNA sense strand
caacgugggaugcaccaaa

SEQ ID NO: 2043459 - RNA, 19 nt, Homo sapiens
  misc_RNA (1)...(19): siRNA sense strand
gccagucugccaccacuua

SEQ ID NO: 2043460 - RNA, 19 nt, Homo sapiens
  misc_RNA (1)...(19): siRNA sense strand
caaguggaauguagaagac

SEQ ID NO: 2043461 - RNA, 19 nt, Homo sapiens
  misc_RNA (1)...(19): siRNA sense strand
ccaaguggaauguagaaga

SEQ ID NO: 2043462 - RNA, 19 nt, Homo sapiens
  misc_RNA (1)...(19): siRNA sense strand
caaggaggaccaccugaug

SEQ ID NO: 2043463 - RNA, 19 nt, Homo sapiens
  misc_RNA (1)...(19): siRNA sense strand
ccaaggauaccaagaagca

SEQ ID NO: 2043464 - RNA, 19 nt, Homo sapiens
  misc_RNA (1)...(19): siRNA sense strand
uaacacacagccaggaaga

SEQ ID NO: 2043465 - RNA, 19 nt, Homo sapiens
  misc_RNA (1)...(19): siRNA sense strand
cggguggacuuugccuaua

SEQ ID NO: 2043466 - RNA, 19 nt, Homo sapiens
  misc_RNA (1)...(19): siRNA sense strand
cccagaauggugagaauaa

SEQ ID NO: 2043467 - RNA, 19 nt, Homo sapiens
  misc_RNA (1)...(19): siRNA sense strand
ggagcccuaucugcaagaa

SEQ ID NO: 2043468 - RNA, 19 nt, Homo sapiens
  misc_RNA (1)...(19): siRNA sense strand
gggcagggcauuguucaug

SEQ ID NO: 2043469 - RNA, 19 nt, Homo sapiens
  misc_RNA (1)...(19): siRNA sense strand
agaagacgucuacgaauuc

SEQ ID NO: 2043470 - RNA, 19 nt, Homo sapiens
  misc_RNA (1)...(19): siRNA sense strand
gggcaugggacaccacuuc

SEQ ID NO: 2043471 - RNA, 19 nt, Homo sapiens
  misc_RNA (1)...(19): siRNA sense strand
guuccaagcgcuucuguuc

SEQ ID NO: 2043472 - RNA, 19 nt, Homo sapiens
  misc_RNA (1)...(19): siRNA sense strand
gaacccuugucacccaucu

SEQ ID NO: 2043473 - RNA, 19 nt, Homo sapiens
  misc_RNA (1)...(19): siRNA sense strand
uuaccaaggauaccaagaa

SEQ ID NO: 2043474 - RNA, 19 nt, Homo sapiens
  misc_RNA (1)...(19): siRNA sense strand
ggagauggaggagcccuau

SEQ ID NO: 2043475 - RNA, 19 nt, Homo sapiens
  misc_RNA (1)...(19): siRNA sense strand
gaaacucugccuccagcau

SEQ ID NO: 2043476 - RNA, 19 nt, Homo sapiens
  misc_RNA (1)...(19): siRNA sense strand
gcuaacacacagccaggaa

SEQ ID NO: 2043477 - RNA, 19 nt, Homo sapiens
  misc_RNA (1)...(19): siRNA sense strand
ccugacgcauguuaucgaa

SEQ ID NO: 2043478 - RNA, 19 nt, Homo sapiens
  misc_RNA (1)...(19): siRNA sense strand
uaccaaggauaccaagaag

SEQ ID NO: 2043479 - RNA, 19 nt, Homo sapiens
  misc_RNA (1)...(19): siRNA sense strand
cccaaauccugacgcaugu

SEQ ID NO: 2043480 - RNA, 19 nt, Homo sapiens
  misc_RNA (1)...(19): siRNA sense strand
cccucaaacucaaguguga

SEQ ID NO: 2043481 - RNA, 19 nt, Homo sapiens
  misc_RNA (1)...(19): siRNA sense strand
guuccugccugagaaacuu

SEQ ID NO: 2043482 - RNA, 19 nt, Homo sapiens
  misc_RNA (1)...(19): siRNA sense strand
ugccaccacuuaccaagga

SEQ ID NO: 2043483 - RNA, 19 nt, Homo sapiens
  misc_RNA (1)...(19): siRNA sense strand
uuccauggcuugugcaaag

SEQ ID NO: 2043484 - RNA, 19 nt, Homo sapiens
  misc_RNA (1)...(19): siRNA sense strand
uaucgaaggguuugugauc

SEQ ID NO: 2043485 - RNA, 19 nt, Homo sapiens
  misc_RNA (1)...(19): siRNA sense strand
gggaaucucaagaagaagu

SEQ ID NO: 2043486 - RNA, 19 nt, Homo sapiens
  misc_RNA (1)...(19): siRNA sense strand
ccacugacucggagaugga

SEQ ID NO: 2043487 - RNA, 19 nt, Homo sapiens
  misc_RNA (1)...(19): siRNA sense strand
gguggacuuugccuauaag

SEQ ID NO: 2043488 - RNA, 19 nt, Homo sapiens
  misc_RNA (1)...(19): siRNA sense strand
uccagccguugcucagaua

SEQ ID NO: 2043489 - RNA, 19 nt, Homo sapiens
  misc_RNA (1)...(19): siRNA sense strand
gugcaaagagguacaacgu

SEQ ID NO: 2043490 - RNA, 19 nt, Homo sapiens
  misc_RNA (1)...(19): siRNA sense strand
uggggaaucucaagaagaa

SEQ ID NO: 2043491 - RNA, 19 nt, Homo sapiens
  misc_RNA (1)...(19): siRNA sense strand
ugagcgccaugaacaucaa

SEQ ID NO: 2043492 - RNA, 19 nt, Homo sapiens
  misc_RNA (1)...(19): siRNA sense strand
cagauaacucaagcuauga

SEQ ID NO: 2043493 - RNA, 19 nt, Homo sapiens
  misc_RNA (1)...(19): siRNA sense strand
uccaagcgcuucuguucca

SEQ ID NO: 2043494 - RNA, 19 nt, Homo sapiens
  misc_RNA (1)...(19): siRNA sense strand
gcauguuaucgaaggguuu

SEQ ID NO: 2043495 - RNA, 19 nt, Homo sapiens
  misc_RNA (1)...(19): siRNA sense strand
ccaaacgggugggacuuuu

SEQ ID NO: 2043496 - RNA, 19 nt, Homo sapiens
  misc_RNA (1)...(19): siRNA sense strand
caucucagccagcucaucu

SEQ ID NO: 2043497 - RNA, 19 nt, Homo sapiens
  misc_RNA (1)...(19): siRNA sense strand
ccaagugagcccaccaagu

SEQ ID NO: 2043498 - RNA, 19 nt, Homo sapiens
  misc_RNA (1)...(19): siRNA sense strand
ccaccacuuaccaaggaua

SEQ ID NO: 2043499 - RNA, 19 nt, Homo sapiens
  misc_RNA (1)...(19): siRNA sense strand
aaggaggaccaccugauga

SEQ ID NO: 2043500 - RNA, 19 nt, Homo sapiens
  misc_RNA (1)...(19): siRNA sense strand
ucaaggaggaccaccugau

SEQ ID NO: 2043501 - RNA, 19 nt, Homo sapiens
  misc_RNA (1)...(19): siRNA sense strand
agacgucuacgaauucauc

SEQ ID NO: 2043502 - RNA, 19 nt, Homo sapiens
  misc_RNA (1)...(19): siRNA sense strand
ucagauaacucaagcuaug

SEQ ID NO: 2043503 - RNA, 19 nt, Homo sapiens
  misc_RNA (1)...(19): siRNA sense strand
ggagauagcagaggaauuc

SEQ ID NO: 2043504 - RNA, 19 nt, Homo sapiens
  misc_RNA (1)...(19): siRNA sense strand
caagugagcccaccaagug

SEQ ID NO: 2043505 - RNA, 19 nt, Homo sapiens
  misc_RNA (1)...(19): siRNA sense strand
gaagacgucuacgaauuca

SEQ ID NO: 2043506 - RNA, 19 nt, Homo sapiens
  misc_RNA (1)...(19): siRNA sense strand
ggguggacuuugccuauaa

SEQ ID NO: 2043507 - RNA, 19 nt, Homo sapiens
  misc_RNA (1)...(19): siRNA sense strand
caaauccugacgcauguua

SEQ ID NO: 2043508 - RNA, 19 nt, Homo sapiens
  misc_RNA (1)...(19): siRNA sense strand
ccagaauggugagaauaaa

SEQ ID NO: 2043509 - RNA, 19 nt, Homo sapiens
  misc_RNA (1)...(19): siRNA sense strand
gcucagauaacucaagcua

SEQ ID NO: 2043510 - RNA, 19 nt, Homo sapiens
  misc_RNA (1)...(19): siRNA sense strand
ucagccagcucaucuacuu

SEQ ID NO: 2043511 - RNA, 19 nt, Homo sapiens
  misc_RNA (1)...(19): siRNA sense strand
ggaaucucaagaagaagua

SEQ ID NO: 2043512 - RNA, 19 nt, Homo sapiens
  misc_RNA (1)...(19): siRNA sense strand
ggaggagcccuaucugcaa

SEQ ID NO: 2043513 - RNA, 19 nt, Homo sapiens
  misc_RNA (1)...(19): siRNA sense strand
caacgugggaugcaccaaa

SEQ ID NO: 2043514 - RNA, 19 nt, Homo sapiens
  misc_RNA (1)...(19): siRNA sense strand
gccagucugccaccacuua

SEQ ID NO: 2043515 - RNA, 19 nt, Homo sapiens
  misc_RNA (1)...(19): siRNA sense strand
caaguggaauguagaagac

SEQ ID NO: 2043516 - RNA, 19 nt, Homo sapiens
  misc_RNA (1)...(19): siRNA sense strand
ccaaguggaauguagaaga

SEQ ID NO: 2043517 - RNA, 19 nt, Homo sapiens
  misc_RNA (1)...(19): siRNA sense strand
caaggaggaccaccugaug

SEQ ID NO: 2043518 - RNA, 19 nt, Homo sapiens
  misc_RNA (1)...(19): siRNA sense strand
ccaaggauaccaagaagca

SEQ ID NO: 2043519 - RNA, 19 nt, Homo sapiens
  misc_RNA (1)...(19): siRNA sense strand
uaacacacagccaggaaga

SEQ ID NO: 2043520 - RNA, 19 nt, Homo sapiens
  misc_RNA (1)...(19): siRNA sense strand
cggguggacuuugccuaua

SEQ ID NO: 2043521 - RNA, 19 nt, Homo sapiens
  misc_RNA (1)...(19): siRNA sense strand
cccagaauggugagaauaa

SEQ ID NO: 2043522 - RNA, 19 nt, Homo sapiens
  misc_RNA (1)...(19): siRNA sense strand
ggagcccuaucugcaagaa

SEQ ID NO: 2043523 - RNA, 19 nt, Homo sapiens
  misc_RNA (1)...(19): siRNA sense strand
agaagacgucuacgaauuc

SEQ ID NO: 2043524 - RNA, 19 nt, Homo sapiens
  misc_RNA (1)...(19): siRNA sense strand
gggcaugggacaccacuuc

SEQ ID NO: 2043525 - RNA, 19 nt, Homo sapiens
  misc_RNA (1)...(19): siRNA sense strand
guuccaagcgcuucuguuc

SEQ ID NO: 2043526 - RNA, 19 nt, Homo sapiens
  misc_RNA (1)...(19): siRNA sense strand
gaacccuugucacccaucu

SEQ ID NO: 2043527 - RNA, 19 nt, Homo sapiens
  misc_RNA (1)...(19): siRNA sense strand
uuaccaaggauaccaagaa

SEQ ID NO: 2043528 - RNA, 19 nt, Homo sapiens
  misc_RNA (1)...(19): siRNA sense strand
ggagauggaggagcccuau

SEQ ID NO: 2043529 - RNA, 19 nt, Homo sapiens
  misc_RNA (1)...(19): siRNA sense strand
gcuaacacacagccaggaa

SEQ ID NO: 2043530 - RNA, 19 nt, Homo sapiens
  misc_RNA (1)...(19): siRNA sense strand
gaaacucugccuccagcau

SEQ ID NO: 2043531 - RNA, 19 nt, Homo sapiens
  misc_RNA (1)...(19): siRNA sense strand
cccucaaacucaaguguga

SEQ ID NO: 2043532 - RNA, 19 nt, Homo sapiens
  misc_RNA (1)...(19): siRNA sense strand
cccaaauccugacgcaugu

SEQ ID NO: 2043533 - RNA, 19 nt, Homo sapiens
  misc_RNA (1)...(19): siRNA sense strand
uaccaaggauaccaagaag

SEQ ID NO: 2043534 - RNA, 19 nt, Homo sapiens
  misc_RNA (1)...(19): siRNA sense strand
ccugacgcauguuaucgaa

SEQ ID NO: 2043535 - RNA, 19 nt, Homo sapiens
  misc_RNA (1)...(19): siRNA sense strand
guuccugccugagaaacuu

SEQ ID NO: 2043536 - RNA, 19 nt, Homo sapiens
  misc_RNA (1)...(19): siRNA sense strand
ugccaccacuuaccaagga

SEQ ID NO: 2043537 - RNA, 19 nt, Homo sapiens
  misc_RNA (1)...(19): siRNA sense strand
uuccauggcuugugcaaag

SEQ ID NO: 2043538 - RNA, 19 nt, Homo sapiens
  misc_RNA (1)...(19): siRNA sense strand
gggaaucucaagaagaagu

SEQ ID NO: 2043539 - RNA, 19 nt, Homo sapiens
  misc_RNA (1)...(19): siRNA sense strand
uaucgaaggguuugugauc

SEQ ID NO: 2043540 - RNA, 19 nt, Homo sapiens
  misc_RNA (1)...(19): siRNA sense strand
ccacugacucggagaugga

SEQ ID NO: 2043541 - RNA, 19 nt, Homo sapiens
  misc_RNA (1)...(19): siRNA sense strand
gguggacuuugccuauaag

SEQ ID NO: 2043542 - RNA, 19 nt, Homo sapiens
  misc_RNA (1)...(19): siRNA sense strand
uccagccguugcucagaua

SEQ ID NO: 2043543 - RNA, 19 nt, Homo sapiens
  misc_RNA (1)...(19): siRNA sense strand
gugcaaagagguacaacgu

SEQ ID NO: 2043544 - RNA, 19 nt, Homo sapiens
  misc_RNA (1)...(19): siRNA sense strand
uccaagcgcuucuguucca

SEQ ID NO: 2043545 - RNA, 19 nt, Homo sapiens
  misc_RNA (1)...(19): siRNA sense strand
ugagcgccaugaacaucaa

SEQ ID NO: 2043546 - RNA, 19 nt, Homo sapiens
  misc_RNA (1)...(19): siRNA sense strand
cagauaacucaagcuauga

SEQ ID NO: 2043547 - RNA, 19 nt, Homo sapiens
  misc_RNA (1)...(19): siRNA sense strand
uggggaaucucaagaagaa

SEQ ID NO: 2043548 - RNA, 19 nt, Homo sapiens
  misc_RNA (1)...(19): siRNA sense strand
gcauguuaucgaaggguuu

SEQ ID NO: 2043549 - RNA, 19 nt, Homo sapiens
  misc_RNA (1)...(19): siRNA sense strand
ccaaacgggugggacuuuu

SEQ ID NO: 2043550 - RNA, 19 nt, Homo sapiens
  misc_RNA (1)...(19): siRNA sense strand
caucucagccagcucaucu

SEQ ID NO: 2043551 - RNA, 19 nt, Homo sapiens
  misc_RNA (1)...(19): siRNA sense strand
ccaagugagcccaccaagu

SEQ ID NO: 2043552 - RNA, 19 nt, Homo sapiens
  misc_RNA (1)...(19): siRNA sense strand
ccaccacuuaccaaggaua

SEQ ID NO: 2043553 - RNA, 19 nt, Homo sapiens
  misc_RNA (1)...(19): siRNA sense strand
aaggaggaccaccugauga

SEQ ID NO: 2043554 - RNA, 19 nt, Homo sapiens
  misc_RNA (1)...(19): siRNA sense strand
ucaaggaggaccaccugau

SEQ ID NO: 2043555 - RNA, 19 nt, Homo sapiens
  misc_RNA (1)...(19): siRNA sense strand
agacgucuacgaauucauc

SEQ ID NO: 2043556 - RNA, 19 nt, Homo sapiens
  misc_RNA (1)...(19): siRNA sense strand
ucagauaacucaagcuaug

SEQ ID NO: 2043557 - RNA, 19 nt, Homo sapiens
  misc_RNA (1)...(19): siRNA sense strand
ggagauagcagaggaauuc

SEQ ID NO: 2043558 - RNA, 19 nt, Homo sapiens
  misc_RNA (1)...(19): siRNA sense strand
caagugagcccaccaagug

SEQ ID NO: 2043559 - RNA, 19 nt, Homo sapiens
  misc_RNA (1)...(19): siRNA sense strand
gaagacgucuacgaauuca

SEQ ID NO: 2043560 - RNA, 19 nt, Homo sapiens
  misc_RNA (1)...(19): siRNA sense strand
ggguggacuuugccuauaa

SEQ ID NO: 2043561 - RNA, 19 nt, Homo sapiens
  misc_RNA (1)...(19): siRNA sense strand
caaauccugacgcauguua

SEQ ID NO: 2043562 - RNA, 19 nt, Homo sapiens
  misc_RNA (1)...(19): siRNA sense strand
ccagaauggugagaauaaa

SEQ ID NO: 2043563 - RNA, 19 nt, Homo sapiens
  misc_RNA (1)...(19): siRNA sense strand
gcucagauaacucaagcua

SEQ ID NO: 2043564 - RNA, 19 nt, Homo sapiens
  misc_RNA (1)...(19): siRNA sense strand
ucagccagcucaucuacuu

SEQ ID NO: 2043565 - RNA, 19 nt, Homo sapiens
  misc_RNA (1)...(19): siRNA sense strand
ggaaucucaagaagaagua

SEQ ID NO: 2043566 - RNA, 19 nt, Homo sapiens
  misc_RNA (1)...(19): siRNA sense strand
ggaggagcccuaucugcaa

SEQ ID NO: 2043567 - RNA, 19 nt, Homo sapiens
  misc_RNA (1)...(19): siRNA sense strand
caacgugggaugcaccaaa

SEQ ID NO: 2043568 - RNA, 19 nt, Homo sapiens
  misc_RNA (1)...(19): siRNA sense strand
gccagucugccaccacuua

SEQ ID NO: 2043569 - RNA, 19 nt, Homo sapiens
  misc_RNA (1)...(19): siRNA sense strand
caaguggaauguagaagac

SEQ ID NO: 2043570 - RNA, 19 nt, Homo sapiens
  misc_RNA (1)...(19): siRNA sense strand
ccaaguggaauguagaaga

SEQ ID NO: 2043571 - RNA, 19 nt, Homo sapiens
  misc_RNA (1)...(19): siRNA sense strand
caaggaggaccaccugaug

SEQ ID NO: 2043572 - RNA, 19 nt, Homo sapiens
  misc_RNA (1)...(19): siRNA sense strand
ccaaggauaccaagaagca

SEQ ID NO: 2043573 - RNA, 19 nt, Homo sapiens
  misc_RNA (1)...(19): siRNA sense strand
uaacacacagccaggaaga

SEQ ID NO: 2043574 - RNA, 19 nt, Homo sapiens
  misc_RNA (1)...(19): siRNA sense strand
cggguggacuuugccuaua

SEQ ID NO: 2043575 - RNA, 19 nt, Homo sapiens
  misc_RNA (1)...(19): siRNA sense strand
cccagaauggugagaauaa

SEQ ID NO: 2043576 - RNA, 19 nt, Homo sapiens
  misc_RNA (1)...(19): siRNA sense strand
ggagcccuaucugcaagaa

SEQ ID NO: 2043577 - RNA, 19 nt, Homo sapiens
  misc_RNA (1)...(19): siRNA sense strand
gggcagggcauuguucaug

SEQ ID NO: 2043578 - RNA, 19 nt, Homo sapiens
  misc_RNA (1)...(19): siRNA sense strand
agaagacgucuacgaauuc

SEQ ID NO: 2043579 - RNA, 19 nt, Homo sapiens
  misc_RNA (1)...(19): siRNA sense strand
gggcaugggacaccacuuc

SEQ ID NO: 2043580 - RNA, 19 nt, Homo sapiens
  misc_RNA (1)...(19): siRNA sense strand
guuccaagcgcuucuguuc

SEQ ID NO: 2043581 - RNA, 19 nt, Homo sapiens
  misc_RNA (1)...(19): siRNA sense strand
gaacccuugucacccaucu

SEQ ID NO: 2043582 - RNA, 19 nt, Homo sapiens
  misc_RNA (1)...(19): siRNA sense strand
uuaccaaggauaccaagaa

SEQ ID NO: 2043583 - RNA, 19 nt, Homo sapiens
  misc_RNA (1)...(19): siRNA sense strand
ggagauggaggagcccuau

SEQ ID NO: 2043584 - RNA, 19 nt, Homo sapiens
  misc_RNA (1)...(19): siRNA sense strand
gaaacucugccuccagcau

SEQ ID NO: 2043585 - RNA, 19 nt, Homo sapiens
  misc_RNA (1)...(19): siRNA sense strand
gcuaacacacagccaggaa

SEQ ID NO: 2043586 - RNA, 19 nt, Homo sapiens
  misc_RNA (1)...(19): siRNA sense strand
ccugacgcauguuaucgaa

SEQ ID NO: 2043587 - RNA, 19 nt, Homo sapiens
  misc_RNA (1)...(19): siRNA sense strand
uaccaaggauaccaagaag

SEQ ID NO: 2043588 - RNA, 19 nt, Homo sapiens
  misc_RNA (1)...(19): siRNA sense strand
cccaaauccugacgcaugu

SEQ ID NO: 2043589 - RNA, 19 nt, Homo sapiens
  misc_RNA (1)...(19): siRNA sense strand
cccucaaacucaaguguga

SEQ ID NO: 2043590 - RNA, 19 nt, Homo sapiens
  misc_RNA (1)...(19): siRNA sense strand
guuccugccugagaaacuu

SEQ ID NO: 2043591 - RNA, 19 nt, Homo sapiens
  misc_RNA (1)...(19): siRNA sense strand
ugccaccacuuaccaagga

SEQ ID NO: 2043592 - RNA, 19 nt, Homo sapiens
  misc_RNA (1)...(19): siRNA sense strand
uuccauggcuugugcaaag

SEQ ID NO: 2043593 - RNA, 19 nt, Homo sapiens
  misc_RNA (1)...(19): siRNA sense strand
uaucgaaggguuugugauc

SEQ ID NO: 2043594 - RNA, 19 nt, Homo sapiens
  misc_RNA (1)...(19): siRNA sense strand
gggaaucucaagaagaagu

SEQ ID NO: 2043595 - RNA, 19 nt, Homo sapiens
  misc_RNA (1)...(19): siRNA sense strand
ccacugacucggagaugga

SEQ ID NO: 2043596 - RNA, 19 nt, Homo sapiens
  misc_RNA (1)...(19): siRNA sense strand
gguggacuuugccuauaag

SEQ ID NO: 2043597 - RNA, 19 nt, Homo sapiens
  misc_RNA (1)...(19): siRNA sense strand
uccagccguugcucagaua

SEQ ID NO: 2043598 - RNA, 19 nt, Homo sapiens
  misc_RNA (1)...(19): siRNA sense strand
gugcaaagagguacaacgu

SEQ ID NO: 2043599 - RNA, 19 nt, Homo sapiens
  misc_RNA (1)...(19): siRNA sense strand
uggggaaucucaagaagaa

SEQ ID NO: 2043600 - RNA, 19 nt, Homo sapiens
  misc_RNA (1)...(19): siRNA sense strand
ugagcgccaugaacaucaa

SEQ ID NO: 2043601 - RNA, 19 nt, Homo sapiens
  misc_RNA (1)...(19): siRNA sense strand
cagauaacucaagcuauga

SEQ ID NO: 2043602 - RNA, 19 nt, Homo sapiens
  misc_RNA (1)...(19): siRNA sense strand
uccaagcgcuucuguucca

SEQ ID NO: 2043603 - RNA, 19 nt, Homo sapiens
  misc_RNA (1)...(19): siRNA sense strand
gcauguuaucgaaggguuu

SEQ ID NO: 2043604 - RNA, 19 nt, Homo sapiens
  misc_RNA (1)...(19): siRNA sense strand
ccaaacgggugggacuuuu

SEQ ID NO: 2043605 - RNA, 19 nt, Homo sapiens
  misc_RNA (1)...(19): siRNA sense strand
caucucagccagcucaucu

SEQ ID NO: 2043606 - RNA, 19 nt, Homo sapiens
  misc_RNA (1)...(19): siRNA sense strand
ccaagugagcccaccaagu

SEQ ID NO: 2043607 - RNA, 19 nt, Homo sapiens
  misc_RNA (1)...(19): siRNA sense strand
ccaccacuuaccaaggaua

SEQ ID NO: 2043608 - RNA, 19 nt, Homo sapiens
  misc_RNA (1)...(19): siRNA sense strand
aaggaggaccaccugauga

SEQ ID NO: 2043609 - RNA, 19 nt, Homo sapiens
  misc_RNA (1)...(19): siRNA sense strand
ucaaggaggaccaccugau

SEQ ID NO: 2043610 - RNA, 19 nt, Homo sapiens
  misc_RNA (1)...(19): siRNA sense strand
agacgucuacgaauucauc

SEQ ID NO: 2043611 - RNA, 19 nt, Homo sapiens
  misc_RNA (1)...(19): siRNA sense strand
gagcgucccuggagaagaa

SEQ ID NO: 2043612 - RNA, 19 nt, Homo sapiens
  misc_RNA (1)...(19): siRNA sense strand
gggaagaagucuccuuuca

SEQ ID NO: 2043613 - RNA, 19 nt, Homo sapiens
  misc_RNA (1)...(19): siRNA sense strand
ccuacgaccugguauauga

SEQ ID NO: 2043614 - RNA, 19 nt, Homo sapiens
  misc_RNA (1)...(19): siRNA sense strand
ggacaccuacgaccuggua

SEQ ID NO: 2043615 - RNA, 19 nt, Homo sapiens
  misc_RNA (1)...(19): siRNA sense strand
guaccaggcugugcaccaa

SEQ ID NO: 2043616 - RNA, 19 nt, Homo sapiens
  misc_RNA (1)...(19): siRNA sense strand
uauaugagcaggcgaugaa

SEQ ID NO: 2043617 - RNA, 19 nt, Homo sapiens
  misc_RNA (1)...(19): siRNA sense strand
ggaagaagucuccuuucag

SEQ ID NO: 2043618 - RNA, 19 nt, Homo sapiens
  misc_RNA (1)...(19): siRNA sense strand
gagcccagccucuugagau

SEQ ID NO: 2043619 - RNA, 19 nt, Homo sapiens
  misc_RNA (1)...(19): siRNA sense strand
gugggaagaagucuccuuu

SEQ ID NO: 2043620 - RNA, 19 nt, Homo sapiens
  misc_RNA (1)...(19): siRNA sense strand
gcaccaaugggccuucucu

SEQ ID NO: 2043621 - RNA, 19 nt, Homo sapiens
  misc_RNA (1)...(19): siRNA sense strand
acaccuacgaccugguaua

SEQ ID NO: 2043622 - RNA, 19 nt, Homo sapiens
  misc_RNA (1)...(19): siRNA sense strand
ggaccgcaagggcaaauac

SEQ ID NO: 2043623 - RNA, 19 nt, Homo sapiens
  misc_RNA (1)...(19): siRNA sense strand
acgccaugcuggacaccua

SEQ ID NO: 2043624 - RNA, 19 nt, Homo sapiens
  misc_RNA (1)...(19): siRNA sense strand
caggagcccagccucuuga

SEQ ID NO: 2043625 - RNA, 19 nt, Homo sapiens
  misc_RNA (1)...(19): siRNA sense strand
gagagaggacugccuucag

SEQ ID NO: 2043626 - RNA, 19 nt, Homo sapiens
  misc_RNA (1)...(19): siRNA sense strand
caccuacgaccugguauau

SEQ ID NO: 2043627 - RNA, 19 nt, Homo sapiens
  misc_RNA (1)...(19): siRNA sense strand
gagcgucccuggagaagaa

SEQ ID NO: 2043628 - RNA, 19 nt, Homo sapiens
  misc_RNA (1)...(19): siRNA sense strand
gggaagaagucuccuuuca

SEQ ID NO: 2043629 - RNA, 19 nt, Homo sapiens
  misc_RNA (1)...(19): siRNA sense strand
ccuacgaccugguauauga

SEQ ID NO: 2043630 - RNA, 19 nt, Homo sapiens
  misc_RNA (1)...(19): siRNA sense strand
ggacaccuacgaccuggua

SEQ ID NO: 2043631 - RNA, 19 nt, Homo sapiens
  misc_RNA (1)...(19): siRNA sense strand
guaccaggcugugcaccaa

SEQ ID NO: 2043632 - RNA, 19 nt, Homo sapiens
  misc_RNA (1)...(19): siRNA sense strand
uauaugagcaggcgaugaa

SEQ ID NO: 2043633 - RNA, 19 nt, Homo sapiens
  misc_RNA (1)...(19): siRNA sense strand
ggaagaagucuccuuucag

SEQ ID NO: 2043634 - RNA, 19 nt, Homo sapiens
  misc_RNA (1)...(19): siRNA sense strand
gagcccagccucuugagau

SEQ ID NO: 2043635 - RNA, 19 nt, Homo sapiens
  misc_RNA (1)...(19): siRNA sense strand
gugggaagaagucuccuuu

SEQ ID NO: 2043636 - RNA, 19 nt, Homo sapiens
  misc_RNA (1)...(19): siRNA sense strand
uggugacucuuaccuacuu

SEQ ID NO: 2043637 - RNA, 19 nt, Homo sapiens
  misc_RNA (1)...(19): siRNA sense strand
gcaccaaugggccuucucu

SEQ ID NO: 2043638 - RNA, 19 nt, Homo sapiens
  misc_RNA (1)...(19): siRNA sense strand
acaccuacgaccugguaua

SEQ ID NO: 2043639 - RNA, 19 nt, Homo sapiens
  misc_RNA (1)...(19): siRNA sense strand
ggaccgcaagggcaaauac

SEQ ID NO: 2043640 - RNA, 19 nt, Homo sapiens
  misc_RNA (1)...(19): siRNA sense strand
acgccaugcuggacaccua

SEQ ID NO: 2043641 - RNA, 19 nt, Homo sapiens
  misc_RNA (1)...(19): siRNA sense strand
caggagcccagccucuuga

SEQ ID NO: 2043642 - RNA, 19 nt, Homo sapiens
  misc_RNA (1)...(19): siRNA sense strand
gagagaggacugccuucag

SEQ ID NO: 2043643 - RNA, 19 nt, Homo sapiens
  misc_RNA (1)...(19): siRNA sense strand
caccuacgaccugguauau

SEQ ID NO: 2043644 - RNA, 19 nt, Homo sapiens
  misc_RNA (1)...(19): siRNA sense strand
ccauggugacucuuaccua

SEQ ID NO: 2043645 - RNA, 19 nt, Homo sapiens
  misc_RNA (1)...(19): siRNA sense strand
gagcgucccuggagaagaa

SEQ ID NO: 2043646 - RNA, 19 nt, Homo sapiens
  misc_RNA (1)...(19): siRNA sense strand
gggaagaagucuccuuuca

SEQ ID NO: 2043647 - RNA, 19 nt, Homo sapiens
  misc_RNA (1)...(19): siRNA sense strand
ccuacgaccugguauauga

SEQ ID NO: 2043648 - RNA, 19 nt, Homo sapiens
  misc_RNA (1)...(19): siRNA sense strand
ggacaccuacgaccuggua

SEQ ID NO: 2043649 - RNA, 19 nt, Homo sapiens
  misc_RNA (1)...(19): siRNA sense strand
guaccaggcugugcaccaa

SEQ ID NO: 2043650 - RNA, 19 nt, Homo sapiens
  misc_RNA (1)...(19): siRNA sense strand
uauaugagcaggcgaugaa

SEQ ID NO: 2043651 - RNA, 19 nt, Homo sapiens
  misc_RNA (1)...(19): siRNA sense strand
ggaagaagucuccuuucag

SEQ ID NO: 2043652 - RNA, 19 nt, Homo sapiens
  misc_RNA (1)...(19): siRNA sense strand
gugggaagaagucuccuuu

SEQ ID NO: 2043653 - RNA, 19 nt, Homo sapiens
  misc_RNA (1)...(19): siRNA sense strand
gcaccaaugggccuucucu

SEQ ID NO: 2043654 - RNA, 19 nt, Homo sapiens
  misc_RNA (1)...(19): siRNA sense strand
acaccuacgaccugguaua

SEQ ID NO: 2043655 - RNA, 19 nt, Homo sapiens
  misc_RNA (1)...(19): siRNA sense strand
acgccaugcuggacaccua

SEQ ID NO: 2043656 - RNA, 19 nt, Homo sapiens
  misc_RNA (1)...(19): siRNA sense strand
caccuacgaccugguauau

SEQ ID NO: 2043657 - RNA, 19 nt, Homo sapiens
  misc_RNA (1)...(19): siRNA sense strand
gagcgucccuggagaagaa

SEQ ID NO: 2043658 - RNA, 19 nt, Homo sapiens
  misc_RNA (1)...(19): siRNA sense strand
gggaagaagucuccuuuca

SEQ ID NO: 2043659 - RNA, 19 nt, Homo sapiens
  misc_RNA (1)...(19): siRNA sense strand
ccuacgaccugguauauga

SEQ ID NO: 2043660 - RNA, 19 nt, Homo sapiens
  misc_RNA (1)...(19): siRNA sense strand
ggacaccuacgaccuggua

SEQ ID NO: 2043661 - RNA, 19 nt, Homo sapiens
  misc_RNA (1)...(19): siRNA sense strand
guaccaggcugugcaccaa

SEQ ID NO: 2043662 - RNA, 19 nt, Homo sapiens
  misc_RNA (1)...(19): siRNA sense strand
uauaugagcaggcgaugaa

SEQ ID NO: 2043663 - RNA, 19 nt, Homo sapiens
  misc_RNA (1)...(19): siRNA sense strand
ggaagaagucuccuuucag

SEQ ID NO: 2043664 - RNA, 19 nt, Homo sapiens
  misc_RNA (1)...(19): siRNA sense strand
gagcccagccucuugagau

SEQ ID NO: 2043665 - RNA, 19 nt, Homo sapiens
  misc_RNA (1)...(19): siRNA sense strand
gugggaagaagucuccuuu

SEQ ID NO: 2043666 - RNA, 19 nt, Homo sapiens
  misc_RNA (1)...(19): siRNA sense strand
gcaccaaugggccuucucu

SEQ ID NO: 2043667 - RNA, 19 nt, Homo sapiens
  misc_RNA (1)...(19): siRNA sense strand
acaccuacgaccugguaua

SEQ ID NO: 2043668 - RNA, 19 nt, Homo sapiens
  misc_RNA (1)...(19): siRNA sense strand
ggaccgcaagggcaaauac

SEQ ID NO: 2043669 - RNA, 19 nt, Homo sapiens
  misc_RNA (1)...(19): siRNA sense strand
acgccaugcuggacaccua

SEQ ID NO: 2043670 - RNA, 19 nt, Homo sapiens
  misc_RNA (1)...(19): siRNA sense strand
caggagcccagccucuuga

SEQ ID NO: 2043671 - RNA, 19 nt, Homo sapiens
  misc_RNA (1)...(19): siRNA sense strand
gagagaggacugccuucag

SEQ ID NO: 2043672 - RNA, 19 nt, Homo sapiens
  misc_RNA (1)...(19): siRNA sense strand
caccuacgaccugguauau

SEQ ID NO: 2043673 - RNA, 19 nt, Homo sapiens
  misc_RNA (1)...(19): siRNA sense strand
gagcgucccuggagaagaa

SEQ ID NO: 2043674 - RNA, 19 nt, Homo sapiens
  misc_RNA (1)...(19): siRNA sense strand
gggaagaagucuccuuuca

SEQ ID NO: 2043675 - RNA, 19 nt, Homo sapiens
  misc_RNA (1)...(19): siRNA sense strand
ccuacgaccugguauauga

SEQ ID NO: 2043676 - RNA, 19 nt, Homo sapiens
  misc_RNA (1)...(19): siRNA sense strand
ggacaccuacgaccuggua

SEQ ID NO: 2043677 - RNA, 19 nt, Homo sapiens
  misc_RNA (1)...(19): siRNA sense strand
guaccaggcugugcaccaa

SEQ ID NO: 2043678 - RNA, 19 nt, Homo sapiens
  misc_RNA (1)...(19): siRNA sense strand
uauaugagcaggcgaugaa

SEQ ID NO: 2043679 - RNA, 19 nt, Homo sapiens
  misc_RNA (1)...(19): siRNA sense strand
ggaagaagucuccuuucag

SEQ ID NO: 2043680 - RNA, 19 nt, Homo sapiens
  misc_RNA (1)...(19): siRNA sense strand
gagcccagccucuugagau

SEQ ID NO: 2043681 - RNA, 19 nt, Homo sapiens
  misc_RNA (1)...(19): siRNA sense strand
gugggaagaagucuccuuu

SEQ ID NO: 2043682 - RNA, 19 nt, Homo sapiens
  misc_RNA (1)...(19): siRNA sense strand
uggugacucuuaccuacuu

SEQ ID NO: 2043683 - RNA, 19 nt, Homo sapiens
  misc_RNA (1)...(19): siRNA sense strand
gcaccaaugggccuucucu

SEQ ID NO: 2043684 - RNA, 19 nt, Homo sapiens
  misc_RNA (1)...(19): siRNA sense strand
acaccuacgaccugguaua

SEQ ID NO: 2043685 - RNA, 19 nt, Homo sapiens
  misc_RNA (1)...(19): siRNA sense strand
ggaccgcaagggcaaauac

SEQ ID NO: 2043686 - RNA, 19 nt, Homo sapiens
  misc_RNA (1)...(19): siRNA sense strand
acgccaugcuggacaccua

SEQ ID NO: 2043687 - RNA, 19 nt, Homo sapiens
  misc_RNA (1)...(19): siRNA sense strand
caggagcccagccucuuga

SEQ ID NO: 2043688 - RNA, 19 nt, Homo sapiens
  misc_RNA (1)...(19): siRNA sense strand
gagagaggacugccuucag

SEQ ID NO: 2043689 - RNA, 19 nt, Homo sapiens
  misc_RNA (1)...(19): siRNA sense strand
caccuacgaccugguauau

SEQ ID NO: 2043690 - RNA, 19 nt, Homo sapiens
  misc_RNA (1)...(19): siRNA sense strand
ccauggugacucuuaccua

SEQ ID NO: 2043691 - RNA, 19 nt, Homo sapiens
  misc_RNA (1)...(19): siRNA sense strand
gagcgucccuggagaagaa

SEQ ID NO: 2043692 - RNA, 19 nt, Homo sapiens
  misc_RNA (1)...(19): siRNA sense strand
gggaagaagucuccuuuca

SEQ ID NO: 2043693 - RNA, 19 nt, Homo sapiens
  misc_RNA (1)...(19): siRNA sense strand
ccuacgaccugguauauga

SEQ ID NO: 2043694 - RNA, 19 nt, Homo sapiens
  misc_RNA (1)...(19): siRNA sense strand
ggacaccuacgaccuggua

SEQ ID NO: 2043695 - RNA, 19 nt, Homo sapiens
  misc_RNA (1)...(19): siRNA sense strand
guaccaggcugugcaccaa

SEQ ID NO: 2043696 - RNA, 19 nt, Homo sapiens
  misc_RNA (1)...(19): siRNA sense strand
uauaugagcaggcgaugaa

SEQ ID NO: 2043697 - RNA, 19 nt, Homo sapiens
  misc_RNA (1)...(19): siRNA sense strand
ggaagaagucuccuuucag

SEQ ID NO: 2043698 - RNA, 19 nt, Homo sapiens
  misc_RNA (1)...(19): siRNA sense strand
gugggaagaagucuccuuu

SEQ ID NO: 2043699 - RNA, 19 nt, Homo sapiens
  misc_RNA (1)...(19): siRNA sense strand
gcaccaaugggccuucucu

SEQ ID NO: 2043700 - RNA, 19 nt, Homo sapiens
  misc_RNA (1)...(19): siRNA sense strand
acaccuacgaccugguaua

SEQ ID NO: 2043701 - RNA, 19 nt, Homo sapiens
  misc_RNA (1)...(19): siRNA sense strand
acgccaugcuggacaccua

SEQ ID NO: 2043702 - RNA, 19 nt, Homo sapiens
  misc_RNA (1)...(19): siRNA sense strand
caccuacgaccugguauau

SEQ ID NO: 2043703 - RNA, 19 nt, Homo sapiens
  misc_RNA (1)...(19): siRNA sense strand
gagcgucccuggagaagaa

SEQ ID NO: 2043704 - RNA, 19 nt, Homo sapiens
  misc_RNA (1)...(19): siRNA sense strand
gggaagaagucuccuuuca

SEQ ID NO: 2043705 - RNA, 19 nt, Homo sapiens
  misc_RNA (1)...(19): siRNA sense strand
ccuacgaccugguauauga

SEQ ID NO: 2043706 - RNA, 19 nt, Homo sapiens
  misc_RNA (1)...(19): siRNA sense strand
ggacaccuacgaccuggua

SEQ ID NO: 2043707 - RNA, 19 nt, Homo sapiens
  misc_RNA (1)...(19): siRNA sense strand
guaccaggcugugcaccaa

SEQ ID NO: 2043708 - RNA, 19 nt, Homo sapiens
  misc_RNA (1)...(19): siRNA sense strand
uauaugagcaggcgaugaa

SEQ ID NO: 2043709 - RNA, 19 nt, Homo sapiens
  misc_RNA (1)...(19): siRNA sense strand
ggaagaagucuccuuucag

SEQ ID NO: 2043710 - RNA, 19 nt, Homo sapiens
  misc_RNA (1)...(19): siRNA sense strand
gagcccagccucuugagau

SEQ ID NO: 2043711 - RNA, 19 nt, Homo sapiens
  misc_RNA (1)...(19): siRNA sense strand
gugggaagaagucuccuuu

SEQ ID NO: 2043712 - RNA, 19 nt, Homo sapiens
  misc_RNA (1)...(19): siRNA sense strand
gcaccaaugggccuucucu

SEQ ID NO: 2043713 - RNA, 19 nt, Homo sapiens
  misc_RNA (1)...(19): siRNA sense strand
acaccuacgaccugguaua

SEQ ID NO: 2043714 - RNA, 19 nt, Homo sapiens
  misc_RNA (1)...(19): siRNA sense strand
ggaccgcaagggcaaauac

SEQ ID NO: 2043715 - RNA, 19 nt, Homo sapiens
  misc_RNA (1)...(19): siRNA sense strand
acgccaugcuggacaccua

SEQ ID NO: 2043716 - RNA, 19 nt, Homo sapiens
  misc_RNA (1)...(19): siRNA sense strand
caggagcccagccucuuga

SEQ ID NO: 2043717 - RNA, 19 nt, Homo sapiens
  misc_RNA (1)...(19): siRNA sense strand
gagagaggacugccuucag

SEQ ID NO: 2043718 - RNA, 19 nt, Homo sapiens
  misc_RNA (1)...(19): siRNA sense strand
caccuacgaccugguauau

SEQ ID NO: 2043719 - RNA, 19 nt, Homo sapiens
  misc_RNA (1)...(19): siRNA sense strand
gagcgucccuggagaagaa

SEQ ID NO: 2043720 - RNA, 19 nt, Homo sapiens
  misc_RNA (1)...(19): siRNA sense strand
gggaagaagucuccuuuca

SEQ ID NO: 2043721 - RNA, 19 nt, Homo sapiens
  misc_RNA (1)...(19): siRNA sense strand
ccuacgaccugguauauga

SEQ ID NO: 2043722 - RNA, 19 nt, Homo sapiens
  misc_RNA (1)...(19): siRNA sense strand
ggacaccuacgaccuggua

SEQ ID NO: 2043723 - RNA, 19 nt, Homo sapiens
  misc_RNA (1)...(19): siRNA sense strand
guaccaggcugugcaccaa

SEQ ID NO: 2043724 - RNA, 19 nt, Homo sapiens
  misc_RNA (1)...(19): siRNA sense strand
uauaugagcaggcgaugaa

SEQ ID NO: 2043725 - RNA, 19 nt, Homo sapiens
  misc_RNA (1)...(19): siRNA sense strand
ggaagaagucuccuuucag

SEQ ID NO: 2043726 - RNA, 19 nt, Homo sapiens
  misc_RNA (1)...(19): siRNA sense strand
gagcccagccucuugagau

SEQ ID NO: 2043727 - RNA, 19 nt, Homo sapiens
  misc_RNA (1)...(19): siRNA sense strand
gugggaagaagucuccuuu

SEQ ID NO: 2043728 - RNA, 19 nt, Homo sapiens
  misc_RNA (1)...(19): siRNA sense strand
uggugacucuuaccuacuu

SEQ ID NO: 2043729 - RNA, 19 nt, Homo sapiens
  misc_RNA (1)...(19): siRNA sense strand
gcaccaaugggccuucucu

SEQ ID NO: 2043730 - RNA, 19 nt, Homo sapiens
  misc_RNA (1)...(19): siRNA sense strand
acaccuacgaccugguaua

SEQ ID NO: 2043731 - RNA, 19 nt, Homo sapiens
  misc_RNA (1)...(19): siRNA sense strand
ggaccgcaagggcaaauac

SEQ ID NO: 2043732 - RNA, 19 nt, Homo sapiens
  misc_RNA (1)...(19): siRNA sense strand
acgccaugcuggacaccua

SEQ ID NO: 2043733 - RNA, 19 nt, Homo sapiens
  misc_RNA (1)...(19): siRNA sense strand
caggagcccagccucuuga

SEQ ID NO: 2043734 - RNA, 19 nt, Homo sapiens
  misc_RNA (1)...(19): siRNA sense strand
gagagaggacugccuucag

SEQ ID NO: 2043735 - RNA, 19 nt, Homo sapiens
  misc_RNA (1)...(19): siRNA sense strand
caccuacgaccugguauau

SEQ ID NO: 2043736 - RNA, 19 nt, Homo sapiens
  misc_RNA (1)...(19): siRNA sense strand
ccauggugacucuuaccua

SEQ ID NO: 2043737 - RNA, 19 nt, Homo sapiens
  misc_RNA (1)...(19): siRNA sense strand
gagcgucccuggagaagaa

SEQ ID NO: 2043738 - RNA, 19 nt, Homo sapiens
  misc_RNA (1)...(19): siRNA sense strand
gggaagaagucuccuuuca

SEQ ID NO: 2043739 - RNA, 19 nt, Homo sapiens
  misc_RNA (1)...(19): siRNA sense strand
ccuacgaccugguauauga

SEQ ID NO: 2043740 - RNA, 19 nt, Homo sapiens
  misc_RNA (1)...(19): siRNA sense strand
ggacaccuacgaccuggua

SEQ ID NO: 2043741 - RNA, 19 nt, Homo sapiens
  misc_RNA (1)...(19): siRNA sense strand
guaccaggcugugcaccaa

SEQ ID NO: 2043742 - RNA, 19 nt, Homo sapiens
  misc_RNA (1)...(19): siRNA sense strand
uauaugagcaggcgaugaa

SEQ ID NO: 2043743 - RNA, 19 nt, Homo sapiens
  misc_RNA (1)...(19): siRNA sense strand
ggaagaagucuccuuucag

SEQ ID NO: 2043744 - RNA, 19 nt, Homo sapiens
  misc_RNA (1)...(19): siRNA sense strand
gugggaagaagucuccuuu

SEQ ID NO: 2043745 - RNA, 19 nt, Homo sapiens
  misc_RNA (1)...(19): siRNA sense strand
gcaccaaugggccuucucu

SEQ ID NO: 2043746 - RNA, 19 nt, Homo sapiens
  misc_RNA (1)...(19): siRNA sense strand
acaccuacgaccugguaua

SEQ ID NO: 2043747 - RNA, 19 nt, Homo sapiens
  misc_RNA (1)...(19): siRNA sense strand
acgccaugcuggacaccua

SEQ ID NO: 2043748 - RNA, 19 nt, Homo sapiens
  misc_RNA (1)...(19): siRNA sense strand
caccuacgaccugguauau

SEQ ID NO: 2043749 - RNA, 19 nt, Homo sapiens
  misc_RNA (1)...(19): siRNA sense strand
ggacgaagacccugacuua

SEQ ID NO: 2043750 - RNA, 19 nt, Homo sapiens
  misc_RNA (1)...(19): siRNA sense strand
gaaaauggauguuugcuaa

SEQ ID NO: 2043751 - RNA, 19 nt, Homo sapiens
  misc_RNA (1)...(19): siRNA sense strand
guaugaaacuggcaucuuu

SEQ ID NO: 2043752 - RNA, 19 nt, Homo sapiens
  misc_RNA (1)...(19): siRNA sense strand
ggaaagucaugcuuaaaga

SEQ ID NO: 2043753 - RNA, 19 nt, Homo sapiens
  misc_RNA (1)...(19): siRNA sense strand
ggucaugguuuacuaauug

SEQ ID NO: 2043754 - RNA, 19 nt, Homo sapiens
  misc_RNA (1)...(19): siRNA sense strand
gaacuuuccuguagaaucu

SEQ ID NO: 2043755 - RNA, 19 nt, Homo sapiens
  misc_RNA (1)...(19): siRNA sense strand
cgagguaaaugaucuguuu

SEQ ID NO: 2043756 - RNA, 19 nt, Homo sapiens
  misc_RNA (1)...(19): siRNA sense strand
caacaaugaugaagucaau

SEQ ID NO: 2043757 - RNA, 19 nt, Homo sapiens
  misc_RNA (1)...(19): siRNA sense strand
caacaagaguuauaugaca

SEQ ID NO: 2043758 - RNA, 19 nt, Homo sapiens
  misc_RNA (1)...(19): siRNA sense strand
cgaagacccugacuuauuc

SEQ ID NO: 2043759 - RNA, 19 nt, Homo sapiens
  misc_RNA (1)...(19): siRNA sense strand
ccacacaggcgaauuuaua

SEQ ID NO: 2043760 - RNA, 19 nt, Homo sapiens
  misc_RNA (1)...(19): siRNA sense strand
caacaacaaugaugaaguc

SEQ ID NO: 2043761 - RNA, 19 nt, Homo sapiens
  misc_RNA (1)...(19): siRNA sense strand
ggaaguauuugaagauaag

SEQ ID NO: 2043762 - RNA, 19 nt, Homo sapiens
  misc_RNA (1)...(19): siRNA sense strand
caucagaauugcauuguga

SEQ ID NO: 2043763 - RNA, 19 nt, Homo sapiens
  misc_RNA (1)...(19): siRNA sense strand
uuaccaauguggcgauuua

SEQ ID NO: 2043764 - RNA, 19 nt, Homo sapiens
  misc_RNA (1)...(19): siRNA sense strand
gcacuguacugaauguguu

SEQ ID NO: 2043765 - RNA, 19 nt, Homo sapiens
  misc_RNA (1)...(19): siRNA sense strand
ucaagaagcugaagaccau

SEQ ID NO: 2043766 - RNA, 19 nt, Homo sapiens
  misc_RNA (1)...(19): siRNA sense strand
cgacauuguugcccuguuu

SEQ ID NO: 2043767 - RNA, 19 nt, Homo sapiens
  misc_RNA (1)...(19): siRNA sense strand
ggucauguguuucaucaga

SEQ ID NO: 2043768 - RNA, 19 nt, Homo sapiens
  misc_RNA (1)...(19): siRNA sense strand
ucuaugagcuuguggaaga

SEQ ID NO: 2043769 - RNA, 19 nt, Homo sapiens
  misc_RNA (1)...(19): siRNA sense strand
gaagauauggaaccugauu

SEQ ID NO: 2043770 - RNA, 19 nt, Homo sapiens
  misc_RNA (1)...(19): siRNA sense strand
uaacuuggccugcugauau

SEQ ID NO: 2043771 - RNA, 19 nt, Homo sapiens
  misc_RNA (1)...(19): siRNA sense strand
guucaugugccaauaaaua

SEQ ID NO: 2043772 - RNA, 19 nt, Homo sapiens
  misc_RNA (1)...(19): siRNA sense strand
gagcuugguucuaguuaau

SEQ ID NO: 2043773 - RNA, 19 nt, Homo sapiens
  misc_RNA (1)...(19): siRNA sense strand
caaccacacuggcuucaug

SEQ ID NO: 2043774 - RNA, 19 nt, Homo sapiens
  misc_RNA (1)...(19): siRNA sense strand
acaaggagcuaccauaaag

SEQ ID NO: 2043775 - RNA, 19 nt, Homo sapiens
  misc_RNA (1)...(19): siRNA sense strand
gaaggaauuuacagguaug

SEQ ID NO: 2043776 - RNA, 19 nt, Homo sapiens
  misc_RNA (1)...(19): siRNA sense strand
gaacacagacacuuugagu

SEQ ID NO: 2043777 - RNA, 19 nt, Homo sapiens
  misc_RNA (1)...(19): siRNA sense strand
gaaagucaugcuuaaagaa

SEQ ID NO: 2043778 - RNA, 19 nt, Homo sapiens
  misc_RNA (1)...(19): siRNA sense strand
gcacuuuagggacauauaa

SEQ ID NO: 2043779 - RNA, 19 nt, Homo sapiens
  misc_RNA (1)...(19): siRNA sense strand
caccagcccuugucaaaug

SEQ ID NO: 2043780 - RNA, 19 nt, Homo sapiens
  misc_RNA (1)...(19): siRNA sense strand
gaaggaaguauuugaagau

SEQ ID NO: 2043781 - RNA, 19 nt, Homo sapiens
  misc_RNA (1)...(19): siRNA sense strand
gcugaacacuugaaagaag

SEQ ID NO: 2043782 - RNA, 19 nt, Homo sapiens
  misc_RNA (1)...(19): siRNA sense strand
gaaaaugacucggaaagug

SEQ ID NO: 2043783 - RNA, 19 nt, Homo sapiens
  misc_RNA (1)...(19): siRNA sense strand
gcaacaacaacaaugauga

SEQ ID NO: 2043784 - RNA, 19 nt, Homo sapiens
  misc_RNA (1)...(19): siRNA sense strand
ugaaggaauuuacagguau

SEQ ID NO: 2043785 - RNA, 19 nt, Homo sapiens
  misc_RNA (1)...(19): siRNA sense strand
ccaauaacuuagaaugguu

SEQ ID NO: 2043786 - RNA, 19 nt, Homo sapiens
  misc_RNA (1)...(19): siRNA sense strand
gacaacaagaguuauauga

SEQ ID NO: 2043787 - RNA, 19 nt, Homo sapiens
  misc_RNA (1)...(19): siRNA sense strand
gagcuaccauaaagcgauu

SEQ ID NO: 2043788 - RNA, 19 nt, Homo sapiens
  misc_RNA (1)...(19): siRNA sense strand
gaauuuacagguauggaaa

SEQ ID NO: 2043789 - RNA, 19 nt, Homo sapiens
  misc_RNA (1)...(19): siRNA sense strand
ggaagaguugaguuuauuu

SEQ ID NO: 2043790 - RNA, 19 nt, Homo sapiens
  misc_RNA (1)...(19): siRNA sense strand
gccgguggccuucuuauaa

SEQ ID NO: 2043791 - RNA, 19 nt, Homo sapiens
  misc_RNA (1)...(19): siRNA sense strand
gccauugugugguaugaaa

SEQ ID NO: 2043792 - RNA, 19 nt, Homo sapiens
  misc_RNA (1)...(19): siRNA sense strand
agaaggaaguauuugaaga

SEQ ID NO: 2043793 - RNA, 19 nt, Homo sapiens
  misc_RNA (1)...(19): siRNA sense strand
ucagaacuuuccuguagaa

SEQ ID NO: 2043794 - RNA, 19 nt, Homo sapiens
  misc_RNA (1)...(19): siRNA sense strand
uuauaaugcugaacacuug

SEQ ID NO: 2043795 - RNA, 19 nt, Homo sapiens
  misc_RNA (1)...(19): siRNA sense strand
uuucagaacuuuccuguag

SEQ ID NO: 2043796 - RNA, 19 nt, Homo sapiens
  misc_RNA (1)...(19): siRNA sense strand
gaaugguuaucaagucugu

SEQ ID NO: 2043797 - RNA, 19 nt, Homo sapiens
  misc_RNA (1)...(19): siRNA sense strand
caacaacaacaaugaugaa

SEQ ID NO: 2043798 - RNA, 19 nt, Homo sapiens
  misc_RNA (1)...(19): siRNA sense strand
gguaaaugaucuguuuguu

SEQ ID NO: 2043799 - RNA, 19 nt, Homo sapiens
  misc_RNA (1)...(19): siRNA sense strand
cugaaggaauuuacaggua

SEQ ID NO: 2043800 - RNA, 19 nt, Homo sapiens
  misc_RNA (1)...(19): siRNA sense strand
gauccacacucauuauguc

SEQ ID NO: 2043801 - RNA, 19 nt, Homo sapiens
  misc_RNA (1)...(19): siRNA sense strand
ucacaauucuccaggaaca

SEQ ID NO: 2043802 - RNA, 19 nt, Homo sapiens
  misc_RNA (1)...(19): siRNA sense strand
aaaguuuacuggaagaguu

SEQ ID NO: 2043803 - RNA, 19 nt, Homo sapiens
  misc_RNA (1)...(19): siRNA sense strand
guggugaaaugcacuucua

SEQ ID NO: 2043804 - RNA, 19 nt, Homo sapiens
  misc_RNA (1)...(19): siRNA sense strand
gcaaagcguacuucacaau

SEQ ID NO: 2043805 - RNA, 19 nt, Homo sapiens
  misc_RNA (1)...(19): siRNA sense strand
cagcuaccuuacuuagaua

SEQ ID NO: 2043806 - RNA, 19 nt, Homo sapiens
  misc_RNA (1)...(19): siRNA sense strand
acacaaggagcuaccauaa

SEQ ID NO: 2043807 - RNA, 19 nt, Homo sapiens
  misc_RNA (1)...(19): siRNA sense strand
aaagggaaagucaugcuua

SEQ ID NO: 2043808 - RNA, 19 nt, Homo sapiens
  misc_RNA (1)...(19): siRNA sense strand
gcacuucuaugagcuugug

SEQ ID NO: 2043809 - RNA, 19 nt, Homo sapiens
  misc_RNA (1)...(19): siRNA sense strand
gugaaaugcacuucuauga

SEQ ID NO: 2043810 - RNA, 19 nt, Homo sapiens
  misc_RNA (1)...(19): siRNA sense strand
ccagugaucccagauauug

SEQ ID NO: 2043811 - RNA, 19 nt, Homo sapiens
  misc_RNA (1)...(19): siRNA sense strand
ggaauuuacagguauggaa

SEQ ID NO: 2043812 - RNA, 19 nt, Homo sapiens
  misc_RNA (1)...(19): siRNA sense strand
uggaagaguugaguuuauu

SEQ ID NO: 2043813 - RNA, 19 nt, Homo sapiens
  misc_RNA (1)...(19): siRNA sense strand
gacgcaagauugaaguaga

SEQ ID NO: 2043814 - RNA, 19 nt, Homo sapiens
  misc_RNA (1)...(19): siRNA sense strand
aagggaaagucaugcuuaa

SEQ ID NO: 2043815 - RNA, 19 nt, Homo sapiens
  misc_RNA (1)...(19): siRNA sense strand
gcugauaugcugcacugua

SEQ ID NO: 2043816 - RNA, 19 nt, Homo sapiens
  misc_RNA (1)...(19): siRNA sense strand
guagugagaaggaaguauu

SEQ ID NO: 2043817 - RNA, 19 nt, Homo sapiens
  misc_RNA (1)...(19): siRNA sense strand
acagcuaccuuacuuagau

SEQ ID NO: 2043818 - RNA, 19 nt, Homo sapiens
  misc_RNA (1)...(19): siRNA sense strand
uggcuuggauggacuuauu

SEQ ID NO: 2043819 - RNA, 19 nt, Homo sapiens
  misc_RNA (1)...(19): siRNA sense strand
gauggagggugagcucuau

SEQ ID NO: 2043820 - RNA, 19 nt, Homo sapiens
  misc_RNA (1)...(19): siRNA sense strand
cauuaugucuguuccacaa

SEQ ID NO: 2043821 - RNA, 19 nt, Homo sapiens
  misc_RNA (1)...(19): siRNA sense strand
ccgguggccuucuuauaaa

SEQ ID NO: 2043822 - RNA, 19 nt, Homo sapiens
  misc_RNA (1)...(19): siRNA sense strand
caaagcguacuucacaauu

SEQ ID NO: 2043823 - RNA, 19 nt, Homo sapiens
  misc_RNA (1)...(19): siRNA sense strand
gccaauaacuuagaauggu

SEQ ID NO: 2043824 - RNA, 19 nt, Homo sapiens
  misc_RNA (1)...(19): siRNA sense strand
ggacaacaagaguuauaug

SEQ ID NO: 2043825 - RNA, 19 nt, Homo sapiens
  misc_RNA (1)...(19): siRNA sense strand
caucauacauacuuagaac

SEQ ID NO: 2043826 - RNA, 19 nt, Homo sapiens
  misc_RNA (1)...(19): siRNA sense strand
aaaccacacaggcgaauuu

SEQ ID NO: 2043827 - RNA, 19 nt, Homo sapiens
  misc_RNA (1)...(19): siRNA sense strand
ccacaaacaaguacuucaa

SEQ ID NO: 2043828 - RNA, 19 nt, Homo sapiens
  misc_RNA (1)...(19): siRNA sense strand
gaagaagaagcauccgaau

SEQ ID NO: 2043829 - RNA, 19 nt, Homo sapiens
  misc_RNA (1)...(19): siRNA sense strand
agucaaugccaauaacuua

SEQ ID NO: 2043830 - RNA, 19 nt, Homo sapiens
  misc_RNA (1)...(19): siRNA sense strand
aaagugaucaguauugguu

SEQ ID NO: 2043831 - RNA, 19 nt, Homo sapiens
  misc_RNA (1)...(19): siRNA sense strand
auacguacaggcacauuua

SEQ ID NO: 2043832 - RNA, 19 nt, Homo sapiens
  misc_RNA (1)...(19): siRNA sense strand
aaauggauguuugcuaaug

SEQ ID NO: 2043833 - RNA, 19 nt, Homo sapiens
  misc_RNA (1)...(19): siRNA sense strand
aaagcguacuucacaauuc

SEQ ID NO: 2043834 - RNA, 19 nt, Homo sapiens
  misc_RNA (1)...(19): siRNA sense strand
ggaauaaaagugaucagua

SEQ ID NO: 2043835 - RNA, 19 nt, Homo sapiens
  misc_RNA (1)...(19): siRNA sense strand
gggaaagucaugcuuaaag

SEQ ID NO: 2043836 - RNA, 19 nt, Homo sapiens
  misc_RNA (1)...(19): siRNA sense strand
acgaagacccugacuuauu

SEQ ID NO: 2043837 - RNA, 19 nt, Homo sapiens
  misc_RNA (1)...(19): siRNA sense strand
gaugaagucaaugccaaua

SEQ ID NO: 2043838 - RNA, 19 nt, Homo sapiens
  misc_RNA (1)...(19): siRNA sense strand
gaauacaguggacgcaaga

SEQ ID NO: 2043839 - RNA, 19 nt, Homo sapiens
  misc_RNA (1)...(19): siRNA sense strand
ggauggacuuauuuauuac

SEQ ID NO: 2043840 - RNA, 19 nt, Homo sapiens
  misc_RNA (1)...(19): siRNA sense strand
agaauugcauugugaugug

SEQ ID NO: 2043841 - RNA, 19 nt, Homo sapiens
  misc_RNA (1)...(19): siRNA sense strand
acacagacacuuugaguag

SEQ ID NO: 2043842 - RNA, 19 nt, Homo sapiens
  misc_RNA (1)...(19): siRNA sense strand
gagaacacagacacuuuga

SEQ ID NO: 2043843 - RNA, 19 nt, Homo sapiens
  misc_RNA (1)...(19): siRNA sense strand
ccaauguggcgauuuaaau

SEQ ID NO: 2043844 - RNA, 19 nt, Homo sapiens
  misc_RNA (1)...(19): siRNA sense strand
caaugccaauaacuuagaa

SEQ ID NO: 2043845 - RNA, 19 nt, Homo sapiens
  misc_RNA (1)...(19): siRNA sense strand
gaagagaaggcgcaacaac

SEQ ID NO: 2043846 - RNA, 19 nt, Homo sapiens
  misc_RNA (1)...(19): siRNA sense strand
auaccuuggucaugguuua

SEQ ID NO: 2043847 - RNA, 19 nt, Homo sapiens
  misc_RNA (1)...(19): siRNA sense strand
acacuggcuucauggguaa

SEQ ID NO: 2043848 - RNA, 19 nt, Homo sapiens
  misc_RNA (1)...(19): siRNA sense strand
gcucuauucugcucucaag

SEQ ID NO: 2043849 - RNA, 19 nt, Homo sapiens
  misc_RNA (1)...(19): siRNA sense strand
gaucagugcuuggccauaa

SEQ ID NO: 2043850 - RNA, 19 nt, Homo sapiens
  misc_RNA (1)...(19): siRNA sense strand
gagaggauguguuguuaga

SEQ ID NO: 2043851 - RNA, 19 nt, Homo sapiens
  misc_RNA (1)...(19): siRNA sense strand
gaggauguguuguuagaaa

SEQ ID NO: 2043852 - RNA, 19 nt, Homo sapiens
  misc_RNA (1)...(19): siRNA sense strand
aaagauaacuuggcaguca

SEQ ID NO: 2043853 - RNA, 19 nt, Homo sapiens
  misc_RNA (1)...(19): siRNA sense strand
gccaugagaucacagaaga

SEQ ID NO: 2043854 - RNA, 19 nt, Homo sapiens
  misc_RNA (1)...(19): siRNA sense strand
guagaaagaaccaguauca

SEQ ID NO: 2043855 - RNA, 19 nt, Homo sapiens
  misc_RNA (1)...(19): siRNA sense strand
ucccacagaugccaaguua

SEQ ID NO: 2043856 - RNA, 19 nt, Homo sapiens
  misc_RNA (1)...(19): siRNA sense strand
gaaagaaccaguaucaaac

SEQ ID NO: 2043857 - RNA, 19 nt, Homo sapiens
  misc_RNA (1)...(19): siRNA sense strand
agaaagaaccaguaucaaa

SEQ ID NO: 2043858 - RNA, 19 nt, Homo sapiens
  misc_RNA (1)...(19): siRNA sense strand
guuagaaagugguacagaa

SEQ ID NO: 2043859 - RNA, 19 nt, Homo sapiens
  misc_RNA (1)...(19): siRNA sense strand
ggccauaaaucgaaguguu

SEQ ID NO: 2043860 - RNA, 19 nt, Homo sapiens
  misc_RNA (1)...(19): siRNA sense strand
caaaggcaauaauagauac

SEQ ID NO: 2043861 - RNA, 19 nt, Homo sapiens
  misc_RNA (1)...(19): siRNA sense strand
uggagaggauguguuguua

SEQ ID NO: 2043862 - RNA, 19 nt, Homo sapiens
  misc_RNA (1)...(19): siRNA sense strand
caaugcaguugcuuuacaa

SEQ ID NO: 2043863 - RNA, 19 nt, Homo sapiens
  misc_RNA (1)...(19): siRNA sense strand
caaacuagaagacucagaa

SEQ ID NO: 2043864 - RNA, 19 nt, Homo sapiens
  misc_RNA (1)...(19): siRNA sense strand
gcaguugcuuuacaagauc

SEQ ID NO: 2043865 - RNA, 19 nt, Homo sapiens
  misc_RNA (1)...(19): siRNA sense strand
uaaagaagaauucgagcuu

SEQ ID NO: 2043866 - RNA, 19 nt, Homo sapiens
  misc_RNA (1)...(19): siRNA sense strand
guacagaaaccugaggaaa

SEQ ID NO: 2043867 - RNA, 19 nt, Homo sapiens
  misc_RNA (1)...(19): siRNA sense strand
ucaagugugugaccagaau

SEQ ID NO: 2043868 - RNA, 19 nt, Homo sapiens
  misc_RNA (1)...(19): siRNA sense strand
gaucuucaacuucgaaauc

SEQ ID NO: 2043869 - RNA, 19 nt, Homo sapiens
  misc_RNA (1)...(19): siRNA sense strand
ucaaugcaguugcuuuaca

SEQ ID NO: 2043870 - RNA, 19 nt, Homo sapiens
  misc_RNA (1)...(19): siRNA sense strand
aagggucacucaucuaaga

SEQ ID NO: 2043871 - RNA, 19 nt, Homo sapiens
  misc_RNA (1)...(19): siRNA sense strand
gauacaaaggcaauaauag

SEQ ID NO: 2043872 - RNA, 19 nt, Homo sapiens
  misc_RNA (1)...(19): siRNA sense strand
gaagaggaaugggagaaaa

SEQ ID NO: 2043873 - RNA, 19 nt, Homo sapiens
  misc_RNA (1)...(19): siRNA sense strand
gaaaaccuguccucucugu

SEQ ID NO: 2043874 - RNA, 19 nt, Homo sapiens
  misc_RNA (1)...(19): siRNA sense strand
ccacagaugccaaguuaag

SEQ ID NO: 2043875 - RNA, 19 nt, Homo sapiens
  misc_RNA (1)...(19): siRNA sense strand
aaauaagggucacucaucu

SEQ ID NO: 2043876 - RNA, 19 nt, Homo sapiens
  misc_RNA (1)...(19): siRNA sense strand
ccacaaagcaugucuucag

SEQ ID NO: 2043877 - RNA, 19 nt, Homo sapiens
  misc_RNA (1)...(19): siRNA sense strand
agacaggccuccuuuccau

SEQ ID NO: 2043878 - RNA, 19 nt, Homo sapiens
  misc_RNA (1)...(19): siRNA sense strand
uguccucucuguagaaaga

SEQ ID NO: 2043879 - RNA, 19 nt, Homo sapiens
  misc_RNA (1)...(19): siRNA sense strand
aaacaguaccucccacaga

SEQ ID NO: 2043880 - RNA, 19 nt, Homo sapiens
  misc_RNA (1)...(19): siRNA sense strand
cauacaacaccaacauuga

SEQ ID NO: 2043881 - RNA, 19 nt, Homo sapiens
  misc_RNA (1)...(19): siRNA sense strand
gagauacaaaggcaauaau

SEQ ID NO: 2043882 - RNA, 19 nt, Homo sapiens
  misc_RNA (1)...(19): siRNA sense strand
uuagaaagugguacagaaa

SEQ ID NO: 2043883 - RNA, 19 nt, Homo sapiens
  misc_RNA (1)...(19): siRNA sense strand
uaacuuggcagucaaugca

SEQ ID NO: 2043884 - RNA, 19 nt, Homo sapiens
  misc_RNA (1)...(19): siRNA sense strand
agucaaugcaguugcuuua

SEQ ID NO: 2043885 - RNA, 19 nt, Homo sapiens
  misc_RNA (1)...(19): siRNA sense strand
ugagaucacagaagaggaa

SEQ ID NO: 2043886 - RNA, 19 nt, Homo sapiens
  misc_RNA (1)...(19): siRNA sense strand
caccuccacugucaucaga

SEQ ID NO: 2043887 - RNA, 19 nt, Homo sapiens
  misc_RNA (1)...(19): siRNA sense strand
ggcaggcguuccagagaga

SEQ ID NO: 2043888 - RNA, 19 nt, Homo sapiens
  misc_RNA (1)...(19): siRNA sense strand
auaagggucacucaucuaa

SEQ ID NO: 2043889 - RNA, 19 nt, Homo sapiens
  misc_RNA (1)...(19): siRNA sense strand
ucauacaacaccaacauug

SEQ ID NO: 2043890 - RNA, 19 nt, Homo sapiens
  misc_RNA (1)...(19): siRNA sense strand
gcucauacaacaccaacau

SEQ ID NO: 2043891 - RNA, 19 nt, Homo sapiens
  misc_RNA (1)...(19): siRNA sense strand
aacaguaccucccacagau

SEQ ID NO: 2043892 - RNA, 19 nt, Homo sapiens
  misc_RNA (1)...(19): siRNA sense strand
gauguguuguuagaaagug

SEQ ID NO: 2043893 - RNA, 19 nt, Homo sapiens
  misc_RNA (1)...(19): siRNA sense strand
gaucacagaagaggaaugg

SEQ ID NO: 2043894 - RNA, 19 nt, Homo sapiens
  misc_RNA (1)...(19): siRNA sense strand
ggucacucaucuaagaaag

SEQ ID NO: 2043895 - RNA, 19 nt, Homo sapiens
  misc_RNA (1)...(19): siRNA sense strand
aaagagauacaaaggcaau

SEQ ID NO: 2043896 - RNA, 19 nt, Homo sapiens
  misc_RNA (1)...(19): siRNA sense strand
ugcaguugcuuuacaagau

SEQ ID NO: 2043897 - RNA, 19 nt, Homo sapiens
  misc_RNA (1)...(19): siRNA sense strand
auacaacaccaacauugaa

SEQ ID NO: 2043898 - RNA, 19 nt, Homo sapiens
  misc_RNA (1)...(19): siRNA sense strand
cagaugccaaguuaagaaa

SEQ ID NO: 2043899 - RNA, 19 nt, Homo sapiens
  misc_RNA (1)...(19): siRNA sense strand
agagauacaaaggcaauaa

SEQ ID NO: 2043900 - RNA, 19 nt, Homo sapiens
  misc_RNA (1)...(19): siRNA sense strand
aaaccuguccucucuguag

SEQ ID NO: 2043901 - RNA, 19 nt, Homo sapiens
  misc_RNA (1)...(19): siRNA sense strand
aaacuagaagacucagaaa

SEQ ID NO: 2043902 - RNA, 19 nt, Homo sapiens
  misc_RNA (1)...(19): siRNA sense strand
cuucaacuucgaaaucuuu

SEQ ID NO: 2043903 - RNA, 19 nt, Homo sapiens
  misc_RNA (1)...(19): siRNA sense strand
acagaugccaaguuaagaa

SEQ ID NO: 2043904 - RNA, 19 nt, Homo sapiens
  misc_RNA (1)...(19): siRNA sense strand
guccucaggugcugcuuuc

SEQ ID NO: 2043905 - RNA, 19 nt, Homo sapiens
  misc_RNA (1)...(19): siRNA sense strand
gccauaaaucgaaguguuc

SEQ ID NO: 2043906 - RNA, 19 nt, Homo sapiens
  misc_RNA (1)...(19): siRNA sense strand
agacacaaguacaaaagaa

SEQ ID NO: 2043907 - RNA, 19 nt, Homo sapiens
  misc_RNA (1)...(19): siRNA sense strand
uuacaugaucuucaacuuc

SEQ ID NO: 2043908 - RNA, 19 nt, Homo sapiens
  misc_RNA (1)...(19): siRNA sense strand
aagauaacuuggcagucaa

SEQ ID NO: 2043909 - RNA, 19 nt, Homo sapiens
  misc_RNA (1)...(19): siRNA sense strand
caacaccaacauugaagag

SEQ ID NO: 2043910 - RNA, 19 nt, Homo sapiens
  misc_RNA (1)...(19): siRNA sense strand
caagaucacauuuuacaug

SEQ ID NO: 2043911 - RNA, 19 nt, Homo sapiens
  misc_RNA (1)...(19): siRNA sense strand
gcucuuugcagaaaucgau

SEQ ID NO: 2043912 - RNA, 19 nt, Homo sapiens
  misc_RNA (1)...(19): siRNA sense strand
ggagaggauguguuguuag

SEQ ID NO: 2043913 - RNA, 19 nt, Homo sapiens
  misc_RNA (1)...(19): siRNA sense strand
acagcgcucucuccugcaa

SEQ ID NO: 2043914 - RNA, 19 nt, Homo sapiens
  misc_RNA (1)...(19): siRNA sense strand
gagacaggccuccuuucca

SEQ ID NO: 2043915 - RNA, 19 nt, Homo sapiens
  misc_RNA (1)...(19): siRNA sense strand
ccuguccucucuguagaaa

SEQ ID NO: 2043916 - RNA, 19 nt, Homo sapiens
  misc_RNA (1)...(19): siRNA sense strand
aagaaaaccuguccucucu

SEQ ID NO: 2043917 - RNA, 19 nt, Homo sapiens
  misc_RNA (1)...(19): siRNA sense strand
cucaggugcugcuuucaug

SEQ ID NO: 2043918 - RNA, 19 nt, Homo sapiens
  misc_RNA (1)...(19): siRNA sense strand
ucuaagacacaaguacaaa

SEQ ID NO: 2043919 - RNA, 19 nt, Homo sapiens
  misc_RNA (1)...(19): siRNA sense strand
cagaagaggaaugggagaa

SEQ ID NO: 2043920 - RNA, 19 nt, Homo sapiens
  misc_RNA (1)...(19): siRNA sense strand
caagccuacuggagaggau

SEQ ID NO: 2043921 - RNA, 19 nt, Homo sapiens
  misc_RNA (1)...(19): siRNA sense strand
caucuguaaagaagaauuc

SEQ ID NO: 2043922 - RNA, 19 nt, Homo sapiens
  misc_RNA (1)...(19): siRNA sense strand
aauaagggucacucaucua

SEQ ID NO: 2043923 - RNA, 19 nt, Homo sapiens
  misc_RNA (1)...(19): siRNA sense strand
gcuuuacaagaucacauuu

SEQ ID NO: 2043924 - RNA, 19 nt, Homo sapiens
  misc_RNA (1)...(19): siRNA sense strand
agaagaggaaugggagaaa

SEQ ID NO: 2043925 - RNA, 19 nt, Homo sapiens
  misc_RNA (1)...(19): siRNA sense strand
gugcuuggccauaaaucga

SEQ ID NO: 2043926 - RNA, 19 nt, Homo sapiens
  misc_RNA (1)...(19): siRNA sense strand
caguugcagaucauucuaa

SEQ ID NO: 2043927 - RNA, 19 nt, Homo sapiens
  misc_RNA (1)...(19): siRNA sense strand
gcugugggcugcugaauga

SEQ ID NO: 2043928 - RNA, 19 nt, Homo sapiens
  misc_RNA (1)...(19): siRNA sense strand
gagcuucacugucugacuu

SEQ ID NO: 2043929 - RNA, 19 nt, Homo sapiens
  misc_RNA (1)...(19): siRNA sense strand
ggaugaugaugaugaagaa

SEQ ID NO: 2043930 - RNA, 19 nt, Homo sapiens
  misc_RNA (1)...(19): siRNA sense strand
guaaaccgguuauacaaag

SEQ ID NO: 2043931 - RNA, 19 nt, Homo sapiens
  misc_RNA (1)...(19): siRNA sense strand
gaacugguagagaaaguaa

SEQ ID NO: 2043932 - RNA, 19 nt, Homo sapiens
  misc_RNA (1)...(19): siRNA sense strand
caagcagucugaauucuuc

SEQ ID NO: 2043933 - RNA, 19 nt, Homo sapiens
  misc_RNA (1)...(19): siRNA sense strand
gaaaucacuucagcaaaca

SEQ ID NO: 2043934 - RNA, 19 nt, Homo sapiens
  misc_RNA (1)...(19): siRNA sense strand
gcacagguacaaagugaaa

SEQ ID NO: 2043935 - RNA, 19 nt, Homo sapiens
  misc_RNA (1)...(19): siRNA sense strand
ugagaaauauacccauaga

SEQ ID NO: 2043936 - RNA, 19 nt, Homo sapiens
  misc_RNA (1)...(19): siRNA sense strand
gaaaguaaaccgguuauac

SEQ ID NO: 2043937 - RNA, 19 nt, Homo sapiens
  misc_RNA (1)...(19): siRNA sense strand
gaaagaagacuugguggau

SEQ ID NO: 2043938 - RNA, 19 nt, Homo sapiens
  misc_RNA (1)...(19): siRNA sense strand
gaaauauacccauagauac

SEQ ID NO: 2043939 - RNA, 19 nt, Homo sapiens
  misc_RNA (1)...(19): siRNA sense strand
gaagggcccaacauaguuu

SEQ ID NO: 2043940 - RNA, 19 nt, Homo sapiens
  misc_RNA (1)...(19): siRNA sense strand
ggaagggcccaacauaguu

SEQ ID NO: 2043941 - RNA, 19 nt, Homo sapiens
  misc_RNA (1)...(19): siRNA sense strand
gaccaaacauccagaucug

SEQ ID NO: 2043942 - RNA, 19 nt, Homo sapiens
  misc_RNA (1)...(19): siRNA sense strand
gacacaagcagucugaauu

SEQ ID NO: 2043943 - RNA, 19 nt, Homo sapiens
  misc_RNA (1)...(19): siRNA sense strand
ucugagaaauauacccaua

SEQ ID NO: 2043944 - RNA, 19 nt, Homo sapiens
  misc_RNA (1)...(19): siRNA sense strand
ggcccaacauaguuuguaa

SEQ ID NO: 2043945 - RNA, 19 nt, Homo sapiens
  misc_RNA (1)...(19): siRNA sense strand
aaugggaacugguagagaa

SEQ ID NO: 2043946 - RNA, 19 nt, Homo sapiens
  misc_RNA (1)...(19): siRNA sense strand
cggcacagguacaaaguga

SEQ ID NO: 2043947 - RNA, 19 nt, Homo sapiens
  misc_RNA (1)...(19): siRNA sense strand
gcuacuaugucuucguuuc

SEQ ID NO: 2043948 - RNA, 19 nt, Homo sapiens
  misc_RNA (1)...(19): siRNA sense strand
ugacgacgaugaugaggau

SEQ ID NO: 2043949 - RNA, 19 nt, Homo sapiens
  misc_RNA (1)...(19): siRNA sense strand
ccauucagauuuacaccaa

SEQ ID NO: 2043950 - RNA, 19 nt, Homo sapiens
  misc_RNA (1)...(19): siRNA sense strand
acacagaagaugaugauga

SEQ ID NO: 2043951 - RNA, 19 nt, Homo sapiens
  misc_RNA (1)...(19): siRNA sense strand
ggacacaagcagucugaau

SEQ ID NO: 2043952 - RNA, 19 nt, Homo sapiens
  misc_RNA (1)...(19): siRNA sense strand
cagcaaacacagaagauga

SEQ ID NO: 2043953 - RNA, 19 nt, Homo sapiens
  misc_RNA (1)...(19): siRNA sense strand
gcuuauggauggagaccaa

SEQ ID NO: 2043954 - RNA, 19 nt, Homo sapiens
  misc_RNA (1)...(19): siRNA sense strand
aaaguaaaccgguuauaca

SEQ ID NO: 2043955 - RNA, 19 nt, Homo sapiens
  misc_RNA (1)...(19): siRNA sense strand
ugaggaugaugaugaugaa

SEQ ID NO: 2043956 - RNA, 19 nt, Homo sapiens
  misc_RNA (1)...(19): siRNA sense strand
uauucuggcuguugugaaa

SEQ ID NO: 2043957 - RNA, 19 nt, Homo sapiens
  misc_RNA (1)...(19): siRNA sense strand
ugaugaugaugaagaagaa

SEQ ID NO: 2043958 - RNA, 19 nt, Homo sapiens
  misc_RNA (1)...(19): siRNA sense strand
uaaaccgguuauacaaaga

SEQ ID NO: 2043959 - RNA, 19 nt, Homo sapiens
  misc_RNA (1)...(19): siRNA sense strand
auagauacuugucgugaga

SEQ ID NO: 2043960 - RNA, 19 nt, Homo sapiens
  misc_RNA (1)...(19): siRNA sense strand
gucccagacuucuagcuuu

SEQ ID NO: 2043961 - RNA, 19 nt, Homo sapiens
  misc_RNA (1)...(19): siRNA sense strand
ggaacugguagagaaagua

SEQ ID NO: 2043962 - RNA, 19 nt, Homo sapiens
  misc_RNA (1)...(19): siRNA sense strand
agagaaaguaaaccgguua

SEQ ID NO: 2043963 - RNA, 19 nt, Homo sapiens
  misc_RNA (1)...(19): siRNA sense strand
uuagaaagaagcauguuug

SEQ ID NO: 2043964 - RNA, 19 nt, Homo sapiens
  misc_RNA (1)...(19): siRNA sense strand
gguuauacaaagagaauga

SEQ ID NO: 2043965 - RNA, 19 nt, Homo sapiens
  misc_RNA (1)...(19): siRNA sense strand
aaacacagaagaugaugau

SEQ ID NO: 2043966 - RNA, 19 nt, Homo sapiens
  misc_RNA (1)...(19): siRNA sense strand
ggccagcagucagcauuug

SEQ ID NO: 2043967 - RNA, 19 nt, Homo sapiens
  misc_RNA (1)...(19): siRNA sense strand
gcggcaagcgcaugaguga

SEQ ID NO: 2043968 - RNA, 19 nt, Homo sapiens
  misc_RNA (1)...(19): siRNA sense strand
cgucaucgacuguguccua

SEQ ID NO: 2043969 - RNA, 19 nt, Homo sapiens
  misc_RNA (1)...(19): siRNA sense strand
cuaguacugugccaucaug

SEQ ID NO: 2043970 - RNA, 19 nt, Homo sapiens
  misc_RNA (1)...(19): siRNA sense strand
uaaugcgacugaaggugaa

SEQ ID NO: 2043971 - RNA, 19 nt, Homo sapiens
  misc_RNA (1)...(19): siRNA sense strand
uuucagcgcccucaguuaa

SEQ ID NO: 2043972 - RNA, 19 nt, Homo sapiens
  misc_RNA (1)...(19): siRNA sense strand
caucgacuguguccuacug

SEQ ID NO: 2043973 - RNA, 19 nt, Homo sapiens
  misc_RNA (1)...(19): siRNA sense strand
agacuugguggaucuagua

SEQ ID NO: 2043974 - RNA, 19 nt, Homo sapiens
  misc_RNA (1)...(19): siRNA sense strand
ugaugaggaugaugaugau

SEQ ID NO: 2043975 - RNA, 19 nt, Homo sapiens
  misc_RNA (1)...(19): siRNA sense strand
cacagaagaugaugaugac

SEQ ID NO: 2043976 - RNA, 19 nt, Homo sapiens
  misc_RNA (1)...(19): siRNA sense strand
gggaacugguagagaaagu

SEQ ID NO: 2043977 - RNA, 19 nt, Homo sapiens
  misc_RNA (1)...(19): siRNA sense strand
aagaagacuugguggaucu

SEQ ID NO: 2043978 - RNA, 19 nt, Homo sapiens
  misc_RNA (1)...(19): siRNA sense strand
gagaaaguaaaccgguuau

SEQ ID NO: 2043979 - RNA, 19 nt, Homo sapiens
  misc_RNA (1)...(19): siRNA sense strand
ggagagagugagagcuuca

SEQ ID NO: 2043980 - RNA, 19 nt, Homo sapiens
  misc_RNA (1)...(19): siRNA sense strand
accgguccauucagauuua

SEQ ID NO: 2043981 - RNA, 19 nt, Homo sapiens
  misc_RNA (1)...(19): siRNA sense strand
caaggucccagacuucuag

SEQ ID NO: 2043982 - RNA, 19 nt, Homo sapiens
  misc_RNA (1)...(19): siRNA sense strand
acacaagcagucugaauuc

SEQ ID NO: 2043983 - RNA, 19 nt, Homo sapiens
  misc_RNA (1)...(19): siRNA sense strand
cuccguuuguucagucuua

SEQ ID NO: 2043984 - RNA, 19 nt, Homo sapiens
  misc_RNA (1)...(19): siRNA sense strand
caaagagaaugaagaaaac

SEQ ID NO: 2043985 - RNA, 19 nt, Homo sapiens
  misc_RNA (1)...(19): siRNA sense strand
gcucugaggacgacaugga

SEQ ID NO: 2043986 - RNA, 19 nt, Homo sapiens
  misc_RNA (1)...(19): siRNA sense strand
uacaagagacagcauuuca

SEQ ID NO: 2043987 - RNA, 19 nt, Homo sapiens
  misc_RNA (1)...(19): siRNA sense strand
ccaccgguccauucagauu

SEQ ID NO: 2043988 - RNA, 19 nt, Homo sapiens
  misc_RNA (1)...(19): siRNA sense strand
gcaaacacagaagaugaug

SEQ ID NO: 2043989 - RNA, 19 nt, Homo sapiens
  misc_RNA (1)...(19): siRNA sense strand
ucagcgcccucaguuaaug

SEQ ID NO: 2043990 - RNA, 19 nt, Homo sapiens
  misc_RNA (1)...(19): siRNA sense strand
cggaagggcccaacauagu

SEQ ID NO: 2043991 - RNA, 19 nt, Homo sapiens
  misc_RNA (1)...(19): siRNA sense strand
caaacacagaagaugauga

SEQ ID NO: 2043992 - RNA, 19 nt, Homo sapiens
  misc_RNA (1)...(19): siRNA sense strand
cugcuacuaugucuucguu

SEQ ID NO: 2043993 - RNA, 19 nt, Homo sapiens
  misc_RNA (1)...(19): siRNA sense strand
auacuugucgugagaaaga

SEQ ID NO: 2043994 - RNA, 19 nt, Homo sapiens
  misc_RNA (1)...(19): siRNA sense strand
cuacuugucacuuauuaca

SEQ ID NO: 2043995 - RNA, 19 nt, Homo sapiens
  misc_RNA (1)...(19): siRNA sense strand
cgacgaugaugaggaugau

SEQ ID NO: 2043996 - RNA, 19 nt, Homo sapiens
  misc_RNA (1)...(19): siRNA sense strand
ugucacuuauuacaagaga

SEQ ID NO: 2043997 - RNA, 19 nt, Homo sapiens
  misc_RNA (1)...(19): siRNA sense strand
ggcaagcgcaugagugagu

SEQ ID NO: 2043998 - RNA, 19 nt, Homo sapiens
  misc_RNA (1)...(19): siRNA sense strand
uacggaagggcccaacaua

SEQ ID NO: 2043999 - RNA, 19 nt, Homo sapiens
  misc_RNA (1)...(19): siRNA sense strand
gaugauguggaaggaauga

SEQ ID NO: 2044000 - RNA, 19 nt, Homo sapiens
  misc_RNA (1)...(19): siRNA sense strand
ggagccaccgguccauuca

SEQ ID NO: 2044001 - RNA, 19 nt, Homo sapiens
  misc_RNA (1)...(19): siRNA sense strand
aaguaaaccgguuauacaa

SEQ ID NO: 2044002 - RNA, 19 nt, Homo sapiens
  misc_RNA (1)...(19): siRNA sense strand
uugaugauguggaaggaau

SEQ ID NO: 2044003 - RNA, 19 nt, Homo sapiens
  misc_RNA (1)...(19): siRNA sense strand
gagaaauauacccauagau

SEQ ID NO: 2044004 - RNA, 19 nt, Homo sapiens
  misc_RNA (1)...(19): siRNA sense strand
agauacuugucgugagaaa

SEQ ID NO: 2044005 - RNA, 19 nt, Homo sapiens
  misc_RNA (1)...(19): siRNA sense strand
aagccuugaugauguggaa

SEQ ID NO: 2044006 - RNA, 19 nt, Homo sapiens
  misc_RNA (1)...(19): siRNA sense strand
ucacuucagcaaacacaga

SEQ ID NO: 2044007 - RNA, 19 nt, Homo sapiens
  misc_RNA (1)...(19): siRNA sense strand
ucacuuauuacaagagaca

SEQ ID NO: 2044008 - RNA, 19 nt, Homo sapiens
  misc_RNA (1)...(19): siRNA sense strand
acaagaaaaucuccguaga

SEQ ID NO: 2044009 - RNA, 19 nt, Homo sapiens
  misc_RNA (1)...(19): siRNA sense strand
gggccagcagucagcauuu

SEQ ID NO: 2044010 - RNA, 19 nt, Homo sapiens
  misc_RNA (1)...(19): siRNA sense strand
ggagaccaaacauccagau

SEQ ID NO: 2044011 - RNA, 19 nt, Homo sapiens
  misc_RNA (1)...(19): siRNA sense strand
ucagggagagcuuauggau

SEQ ID NO: 2044012 - RNA, 19 nt, Homo sapiens
  misc_RNA (1)...(19): siRNA sense strand
ggucccagacuucuagcuu

SEQ ID NO: 2044013 - RNA, 19 nt, Homo sapiens
  misc_RNA (1)...(19): siRNA sense strand
acaagcagucugaauucuu

SEQ ID NO: 2044014 - RNA, 19 nt, Homo sapiens
  misc_RNA (1)...(19): siRNA sense strand
gcgggugccacgucuaugu

SEQ ID NO: 2044015 - RNA, 19 nt, Homo sapiens
  misc_RNA (1)...(19): siRNA sense strand
aguaaaccgguuauacaaa

SEQ ID NO: 2044016 - RNA, 19 nt, Homo sapiens
  misc_RNA (1)...(19): siRNA sense strand
agaaaguaaaccgguuaua

SEQ ID NO: 2044017 - RNA, 19 nt, Homo sapiens
  misc_RNA (1)...(19): siRNA sense strand
gggcccaacauaguuugua

SEQ ID NO: 2044018 - RNA, 19 nt, Homo sapiens
  misc_RNA (1)...(19): siRNA sense strand
ucaaggucccagacuucua

SEQ ID NO: 2044019 - RNA, 19 nt, Homo sapiens
  misc_RNA (1)...(19): siRNA sense strand
cuugguggaucuaguacug

SEQ ID NO: 2044020 - RNA, 19 nt, Homo sapiens
  misc_RNA (1)...(19): siRNA sense strand
gcagcugcaggaugaggaa

SEQ ID NO: 2044021 - RNA, 19 nt, Homo sapiens
  misc_RNA (1)...(19): siRNA sense strand
gaugaugacgacgaugaug

SEQ ID NO: 2044022 - RNA, 19 nt, Homo sapiens
  misc_RNA (1)...(19): siRNA sense strand
cacaagcagucugaauucu

SEQ ID NO: 2044023 - RNA, 19 nt, Homo sapiens
  misc_RNA (1)...(19): siRNA sense strand
gugacugcaagaaggauuu

SEQ ID NO: 2044024 - RNA, 19 nt, Homo sapiens
  misc_RNA (1)...(19): siRNA sense strand
caccgguccauucagauuu

SEQ ID NO: 2044025 - RNA, 19 nt, Homo sapiens
  misc_RNA (1)...(19): siRNA sense strand
guucuacuugucacuuauu

SEQ ID NO: 2044026 - RNA, 19 nt, Homo sapiens
  misc_RNA (1)...(19): siRNA sense strand
gcccaacauaguuuguaaa

SEQ ID NO: 2044027 - RNA, 19 nt, Homo sapiens
  misc_RNA (1)...(19): siRNA sense strand
gcugugggcugcugaauga

SEQ ID NO: 2044028 - RNA, 19 nt, Homo sapiens
  misc_RNA (1)...(19): siRNA sense strand
gagcuucacugucugacuu

SEQ ID NO: 2044029 - RNA, 19 nt, Homo sapiens
  misc_RNA (1)...(19): siRNA sense strand
ggaugaugaugaugaagaa

SEQ ID NO: 2044030 - RNA, 19 nt, Homo sapiens
  misc_RNA (1)...(19): siRNA sense strand
guaaaccgguuauacaaag

SEQ ID NO: 2044031 - RNA, 19 nt, Homo sapiens
  misc_RNA (1)...(19): siRNA sense strand
gaacugguagagaaaguaa

SEQ ID NO: 2044032 - RNA, 19 nt, Homo sapiens
  misc_RNA (1)...(19): siRNA sense strand
caagcagucugaauucuuc

SEQ ID NO: 2044033 - RNA, 19 nt, Homo sapiens
  misc_RNA (1)...(19): siRNA sense strand
gaaaucacuucagcaaaca

SEQ ID NO: 2044034 - RNA, 19 nt, Homo sapiens
  misc_RNA (1)...(19): siRNA sense strand
gcacagguacaaagugaaa

SEQ ID NO: 2044035 - RNA, 19 nt, Homo sapiens
  misc_RNA (1)...(19): siRNA sense strand
ugagaaauauacccauaga

SEQ ID NO: 2044036 - RNA, 19 nt, Homo sapiens
  misc_RNA (1)...(19): siRNA sense strand
gaaaguaaaccgguuauac

SEQ ID NO: 2044037 - RNA, 19 nt, Homo sapiens
  misc_RNA (1)...(19): siRNA sense strand
gaaagaagacuugguggau

SEQ ID NO: 2044038 - RNA, 19 nt, Homo sapiens
  misc_RNA (1)...(19): siRNA sense strand
gaaauauacccauagauac

SEQ ID NO: 2044039 - RNA, 19 nt, Homo sapiens
  misc_RNA (1)...(19): siRNA sense strand
gaagggcccaacauaguuu

SEQ ID NO: 2044040 - RNA, 19 nt, Homo sapiens
  misc_RNA (1)...(19): siRNA sense strand
ggaagggcccaacauaguu

SEQ ID NO: 2044041 - RNA, 19 nt, Homo sapiens
  misc_RNA (1)...(19): siRNA sense strand
gaccaaacauccagaucug

SEQ ID NO: 2044042 - RNA, 19 nt, Homo sapiens
  misc_RNA (1)...(19): siRNA sense strand
gacacaagcagucugaauu

SEQ ID NO: 2044043 - RNA, 19 nt, Homo sapiens
  misc_RNA (1)...(19): siRNA sense strand
ucugagaaauauacccaua

SEQ ID NO: 2044044 - RNA, 19 nt, Homo sapiens
  misc_RNA (1)...(19): siRNA sense strand
ggcccaacauaguuuguaa

SEQ ID NO: 2044045 - RNA, 19 nt, Homo sapiens
  misc_RNA (1)...(19): siRNA sense strand
aaugggaacugguagagaa

SEQ ID NO: 2044046 - RNA, 19 nt, Homo sapiens
  misc_RNA (1)...(19): siRNA sense strand
cggcacagguacaaaguga

SEQ ID NO: 2044047 - RNA, 19 nt, Homo sapiens
  misc_RNA (1)...(19): siRNA sense strand
gcuacuaugucuucguuuc

SEQ ID NO: 2044048 - RNA, 19 nt, Homo sapiens
  misc_RNA (1)...(19): siRNA sense strand
ugacgacgaugaugaggau

SEQ ID NO: 2044049 - RNA, 19 nt, Homo sapiens
  misc_RNA (1)...(19): siRNA sense strand
ccauucagauuuacaccaa

SEQ ID NO: 2044050 - RNA, 19 nt, Homo sapiens
  misc_RNA (1)...(19): siRNA sense strand
acacagaagaugaugauga

SEQ ID NO: 2044051 - RNA, 19 nt, Homo sapiens
  misc_RNA (1)...(19): siRNA sense strand
ggacacaagcagucugaau

SEQ ID NO: 2044052 - RNA, 19 nt, Homo sapiens
  misc_RNA (1)...(19): siRNA sense strand
cagcaaacacagaagauga

SEQ ID NO: 2044053 - RNA, 19 nt, Homo sapiens
  misc_RNA (1)...(19): siRNA sense strand
gcuuauggauggagaccaa

SEQ ID NO: 2044054 - RNA, 19 nt, Homo sapiens
  misc_RNA (1)...(19): siRNA sense strand
aaaguaaaccgguuauaca

SEQ ID NO: 2044055 - RNA, 19 nt, Homo sapiens
  misc_RNA (1)...(19): siRNA sense strand
ugaggaugaugaugaugaa

SEQ ID NO: 2044056 - RNA, 19 nt, Homo sapiens
  misc_RNA (1)...(19): siRNA sense strand
uauucuggcuguugugaaa

SEQ ID NO: 2044057 - RNA, 19 nt, Homo sapiens
  misc_RNA (1)...(19): siRNA sense strand
ugaugaugaugaagaagaa

SEQ ID NO: 2044058 - RNA, 19 nt, Homo sapiens
  misc_RNA (1)...(19): siRNA sense strand
uaaaccgguuauacaaaga

SEQ ID NO: 2044059 - RNA, 19 nt, Homo sapiens
  misc_RNA (1)...(19): siRNA sense strand
auagauacuugucgugaga

SEQ ID NO: 2044060 - RNA, 19 nt, Homo sapiens
  misc_RNA (1)...(19): siRNA sense strand
gucccagacuucuagcuuu

SEQ ID NO: 2044061 - RNA, 19 nt, Homo sapiens
  misc_RNA (1)...(19): siRNA sense strand
ggaacugguagagaaagua

SEQ ID NO: 2044062 - RNA, 19 nt, Homo sapiens
  misc_RNA (1)...(19): siRNA sense strand
agagaaaguaaaccgguua

SEQ ID NO: 2044063 - RNA, 19 nt, Homo sapiens
  misc_RNA (1)...(19): siRNA sense strand
uuagaaagaagcauguuug

SEQ ID NO: 2044064 - RNA, 19 nt, Homo sapiens
  misc_RNA (1)...(19): siRNA sense strand
gguuauacaaagagaauga

SEQ ID NO: 2044065 - RNA, 19 nt, Homo sapiens
  misc_RNA (1)...(19): siRNA sense strand
aaacacagaagaugaugau

SEQ ID NO: 2044066 - RNA, 19 nt, Homo sapiens
  misc_RNA (1)...(19): siRNA sense strand
ggccagcagucagcauuug

SEQ ID NO: 2044067 - RNA, 19 nt, Homo sapiens
  misc_RNA (1)...(19): siRNA sense strand
gcggcaagcgcaugaguga

SEQ ID NO: 2044068 - RNA, 19 nt, Homo sapiens
  misc_RNA (1)...(19): siRNA sense strand
cgucaucgacuguguccua

SEQ ID NO: 2044069 - RNA, 19 nt, Homo sapiens
  misc_RNA (1)...(19): siRNA sense strand
cuaguacugugccaucaug

SEQ ID NO: 2044070 - RNA, 19 nt, Homo sapiens
  misc_RNA (1)...(19): siRNA sense strand
uaaugcgacugaaggugaa

SEQ ID NO: 2044071 - RNA, 19 nt, Homo sapiens
  misc_RNA (1)...(19): siRNA sense strand
uuucagcgcccucaguuaa

SEQ ID NO: 2044072 - RNA, 19 nt, Homo sapiens
  misc_RNA (1)...(19): siRNA sense strand
caucgacuguguccuacug

SEQ ID NO: 2044073 - RNA, 19 nt, Homo sapiens
  misc_RNA (1)...(19): siRNA sense strand
agacuugguggaucuagua

SEQ ID NO: 2044074 - RNA, 19 nt, Homo sapiens
  misc_RNA (1)...(19): siRNA sense strand
ugaugaggaugaugaugau

SEQ ID NO: 2044075 - RNA, 19 nt, Homo sapiens
  misc_RNA (1)...(19): siRNA sense strand
cacagaagaugaugaugac

SEQ ID NO: 2044076 - RNA, 19 nt, Homo sapiens
  misc_RNA (1)...(19): siRNA sense strand
gggaacugguagagaaagu

SEQ ID NO: 2044077 - RNA, 19 nt, Homo sapiens
  misc_RNA (1)...(19): siRNA sense strand
aagaagacuugguggaucu

SEQ ID NO: 2044078 - RNA, 19 nt, Homo sapiens
  misc_RNA (1)...(19): siRNA sense strand
gagaaaguaaaccgguuau

SEQ ID NO: 2044079 - RNA, 19 nt, Homo sapiens
  misc_RNA (1)...(19): siRNA sense strand
ggagagagugagagcuuca

SEQ ID NO: 2044080 - RNA, 19 nt, Homo sapiens
  misc_RNA (1)...(19): siRNA sense strand
accgguccauucagauuua

SEQ ID NO: 2044081 - RNA, 19 nt, Homo sapiens
  misc_RNA (1)...(19): siRNA sense strand
caaggucccagacuucuag

SEQ ID NO: 2044082 - RNA, 19 nt, Homo sapiens
  misc_RNA (1)...(19): siRNA sense strand
acacaagcagucugaauuc

SEQ ID NO: 2044083 - RNA, 19 nt, Homo sapiens
  misc_RNA (1)...(19): siRNA sense strand
cuccguuuguucagucuua

SEQ ID NO: 2044084 - RNA, 19 nt, Homo sapiens
  misc_RNA (1)...(19): siRNA sense strand
caaagagaaugaagaaaac

SEQ ID NO: 2044085 - RNA, 19 nt, Homo sapiens
  misc_RNA (1)...(19): siRNA sense strand
gcucugaggacgacaugga

SEQ ID NO: 2044086 - RNA, 19 nt, Homo sapiens
  misc_RNA (1)...(19): siRNA sense strand
uacaagagacagcauuuca

SEQ ID NO: 2044087 - RNA, 19 nt, Homo sapiens
  misc_RNA (1)...(19): siRNA sense strand
ccaccgguccauucagauu

SEQ ID NO: 2044088 - RNA, 19 nt, Homo sapiens
  misc_RNA (1)...(19): siRNA sense strand
gcaaacacagaagaugaug

SEQ ID NO: 2044089 - RNA, 19 nt, Homo sapiens
  misc_RNA (1)...(19): siRNA sense strand
ucagcgcccucaguuaaug

SEQ ID NO: 2044090 - RNA, 19 nt, Homo sapiens
  misc_RNA (1)...(19): siRNA sense strand
cggaagggcccaacauagu

SEQ ID NO: 2044091 - RNA, 19 nt, Homo sapiens
  misc_RNA (1)...(19): siRNA sense strand
caaacacagaagaugauga

SEQ ID NO: 2044092 - RNA, 19 nt, Homo sapiens
  misc_RNA (1)...(19): siRNA sense strand
cugcuacuaugucuucguu

SEQ ID NO: 2044093 - RNA, 19 nt, Homo sapiens
  misc_RNA (1)...(19): siRNA sense strand
auacuugucgugagaaaga

SEQ ID NO: 2044094 - RNA, 19 nt, Homo sapiens
  misc_RNA (1)...(19): siRNA sense strand
cuacuugucacuuauuaca

SEQ ID NO: 2044095 - RNA, 19 nt, Homo sapiens
  misc_RNA (1)...(19): siRNA sense strand
cgacgaugaugaggaugau

SEQ ID NO: 2044096 - RNA, 19 nt, Homo sapiens
  misc_RNA (1)...(19): siRNA sense strand
ugucacuuauuacaagaga

SEQ ID NO: 2044097 - RNA, 19 nt, Homo sapiens
  misc_RNA (1)...(19): siRNA sense strand
ggcaagcgcaugagugagu

SEQ ID NO: 2044098 - RNA, 19 nt, Homo sapiens
  misc_RNA (1)...(19): siRNA sense strand
uacggaagggcccaacaua

SEQ ID NO: 2044099 - RNA, 19 nt, Homo sapiens
  misc_RNA (1)...(19): siRNA sense strand
gaugauguggaaggaauga

SEQ ID NO: 2044100 - RNA, 19 nt, Homo sapiens
  misc_RNA (1)...(19): siRNA sense strand
ggagccaccgguccauuca

SEQ ID NO: 2044101 - RNA, 19 nt, Homo sapiens
  misc_RNA (1)...(19): siRNA sense strand
aaguaaaccgguuauacaa

SEQ ID NO: 2044102 - RNA, 19 nt, Homo sapiens
  misc_RNA (1)...(19): siRNA sense strand
uugaugauguggaaggaau

SEQ ID NO: 2044103 - RNA, 19 nt, Homo sapiens
  misc_RNA (1)...(19): siRNA sense strand
gagaaauauacccauagau

SEQ ID NO: 2044104 - RNA, 19 nt, Homo sapiens
  misc_RNA (1)...(19): siRNA sense strand
agauacuugucgugagaaa

SEQ ID NO: 2044105 - RNA, 19 nt, Homo sapiens
  misc_RNA (1)...(19): siRNA sense strand
aagccuugaugauguggaa

SEQ ID NO: 2044106 - RNA, 19 nt, Homo sapiens
  misc_RNA (1)...(19): siRNA sense strand
ucacuucagcaaacacaga

SEQ ID NO: 2044107 - RNA, 19 nt, Homo sapiens
  misc_RNA (1)...(19): siRNA sense strand
ucacuuauuacaagagaca

SEQ ID NO: 2044108 - RNA, 19 nt, Homo sapiens
  misc_RNA (1)...(19): siRNA sense strand
acaagaaaaucuccguaga

SEQ ID NO: 2044109 - RNA, 19 nt, Homo sapiens
  misc_RNA (1)...(19): siRNA sense strand
gggccagcagucagcauuu

SEQ ID NO: 2044110 - RNA, 19 nt, Homo sapiens
  misc_RNA (1)...(19): siRNA sense strand
ggagaccaaacauccagau

SEQ ID NO: 2044111 - RNA, 19 nt, Homo sapiens
  misc_RNA (1)...(19): siRNA sense strand
ucagggagagcuuauggau

SEQ ID NO: 2044112 - RNA, 19 nt, Homo sapiens
  misc_RNA (1)...(19): siRNA sense strand
ggucccagacuucuagcuu

SEQ ID NO: 2044113 - RNA, 19 nt, Homo sapiens
  misc_RNA (1)...(19): siRNA sense strand
acaagcagucugaauucuu

SEQ ID NO: 2044114 - RNA, 19 nt, Homo sapiens
  misc_RNA (1)...(19): siRNA sense strand
gcgggugccacgucuaugu

SEQ ID NO: 2044115 - RNA, 19 nt, Homo sapiens
  misc_RNA (1)...(19): siRNA sense strand
aguaaaccgguuauacaaa

SEQ ID NO: 2044116 - RNA, 19 nt, Homo sapiens
  misc_RNA (1)...(19): siRNA sense strand
agaaaguaaaccgguuaua

SEQ ID NO: 2044117 - RNA, 19 nt, Homo sapiens
  misc_RNA (1)...(19): siRNA sense strand
gggcccaacauaguuugua

SEQ ID NO: 2044118 - RNA, 19 nt, Homo sapiens
  misc_RNA (1)...(19): siRNA sense strand
ucaaggucccagacuucua

SEQ ID NO: 2044119 - RNA, 19 nt, Homo sapiens
  misc_RNA (1)...(19): siRNA sense strand
cuugguggaucuaguacug

SEQ ID NO: 2044120 - RNA, 19 nt, Homo sapiens
  misc_RNA (1)...(19): siRNA sense strand
gcagcugcaggaugaggaa

SEQ ID NO: 2044121 - RNA, 19 nt, Homo sapiens
  misc_RNA (1)...(19): siRNA sense strand
gaugaugacgacgaugaug

SEQ ID NO: 2044122 - RNA, 19 nt, Homo sapiens
  misc_RNA (1)...(19): siRNA sense strand
cacaagcagucugaauucu

SEQ ID NO: 2044123 - RNA, 19 nt, Homo sapiens
  misc_RNA (1)...(19): siRNA sense strand
gugacugcaagaaggauuu

SEQ ID NO: 2044124 - RNA, 19 nt, Homo sapiens
  misc_RNA (1)...(19): siRNA sense strand
caccgguccauucagauuu

SEQ ID NO: 2044125 - RNA, 19 nt, Homo sapiens
  misc_RNA (1)...(19): siRNA sense strand
guucuacuugucacuuauu

SEQ ID NO: 2044126 - RNA, 19 nt, Homo sapiens
  misc_RNA (1)...(19): siRNA sense strand
gcccaacauaguuuguaaa

SEQ ID NO: 2044127 - RNA, 19 nt, Homo sapiens
  misc_RNA (1)...(19): siRNA sense strand
gcugugggcugcugaauga

SEQ ID NO: 2044128 - RNA, 19 nt, Homo sapiens
  misc_RNA (1)...(19): siRNA sense strand
gagcuucacugucugacuu

SEQ ID NO: 2044129 - RNA, 19 nt, Homo sapiens
  misc_RNA (1)...(19): siRNA sense strand
ggaugaugaugaugaagaa

SEQ ID NO: 2044130 - RNA, 19 nt, Homo sapiens
  misc_RNA (1)...(19): siRNA sense strand
guaaaccgguuauacaaag

SEQ ID NO: 2044131 - RNA, 19 nt, Homo sapiens
  misc_RNA (1)...(19): siRNA sense strand
gaacugguagagaaaguaa

SEQ ID NO: 2044132 - RNA, 19 nt, Homo sapiens
  misc_RNA (1)...(19): siRNA sense strand
caagcagucugaauucuuc

SEQ ID NO: 2044133 - RNA, 19 nt, Homo sapiens
  misc_RNA (1)...(19): siRNA sense strand
gaaaucacuucagcaaaca

SEQ ID NO: 2044134 - RNA, 19 nt, Homo sapiens
  misc_RNA (1)...(19): siRNA sense strand
gcacagguacaaagugaaa

SEQ ID NO: 2044135 - RNA, 19 nt, Homo sapiens
  misc_RNA (1)...(19): siRNA sense strand
ugagaaauauacccauaga

SEQ ID NO: 2044136 - RNA, 19 nt, Homo sapiens
  misc_RNA (1)...(19): siRNA sense strand
gaaaguaaaccgguuauac

SEQ ID NO: 2044137 - RNA, 19 nt, Homo sapiens
  misc_RNA (1)...(19): siRNA sense strand
gaaagaagacuugguggau

SEQ ID NO: 2044138 - RNA, 19 nt, Homo sapiens
  misc_RNA (1)...(19): siRNA sense strand
gaaauauacccauagauac

SEQ ID NO: 2044139 - RNA, 19 nt, Homo sapiens
  misc_RNA (1)...(19): siRNA sense strand
gaagggcccaacauaguuu

SEQ ID NO: 2044140 - RNA, 19 nt, Homo sapiens
  misc_RNA (1)...(19): siRNA sense strand
ggaagggcccaacauaguu

SEQ ID NO: 2044141 - RNA, 19 nt, Homo sapiens
  misc_RNA (1)...(19): siRNA sense strand
gaccaaacauccagaucug

SEQ ID NO: 2044142 - RNA, 19 nt, Homo sapiens
  misc_RNA (1)...(19): siRNA sense strand
gacacaagcagucugaauu

SEQ ID NO: 2044143 - RNA, 19 nt, Homo sapiens
  misc_RNA (1)...(19): siRNA sense strand
ucugagaaauauacccaua

SEQ ID NO: 2044144 - RNA, 19 nt, Homo sapiens
  misc_RNA (1)...(19): siRNA sense strand
ggcccaacauaguuuguaa

SEQ ID NO: 2044145 - RNA, 19 nt, Homo sapiens
  misc_RNA (1)...(19): siRNA sense strand
aaugggaacugguagagaa

SEQ ID NO: 2044146 - RNA, 19 nt, Homo sapiens
  misc_RNA (1)...(19): siRNA sense strand
cggcacagguacaaaguga

SEQ ID NO: 2044147 - RNA, 19 nt, Homo sapiens
  misc_RNA (1)...(19): siRNA sense strand
gcuacuaugucuucguuuc

SEQ ID NO: 2044148 - RNA, 19 nt, Homo sapiens
  misc_RNA (1)...(19): siRNA sense strand
ugacgacgaugaugaggau

SEQ ID NO: 2044149 - RNA, 19 nt, Homo sapiens
  misc_RNA (1)...(19): siRNA sense strand
ccauucagauuuacaccaa

SEQ ID NO: 2044150 - RNA, 19 nt, Homo sapiens
  misc_RNA (1)...(19): siRNA sense strand
acacagaagaugaugauga

SEQ ID NO: 2044151 - RNA, 19 nt, Homo sapiens
  misc_RNA (1)...(19): siRNA sense strand
ggacacaagcagucugaau

SEQ ID NO: 2044152 - RNA, 19 nt, Homo sapiens
  misc_RNA (1)...(19): siRNA sense strand
cagcaaacacagaagauga

SEQ ID NO: 2044153 - RNA, 19 nt, Homo sapiens
  misc_RNA (1)...(19): siRNA sense strand
gcuuauggauggagaccaa

SEQ ID NO: 2044154 - RNA, 19 nt, Homo sapiens
  misc_RNA (1)...(19): siRNA sense strand
aaaguaaaccgguuauaca

SEQ ID NO: 2044155 - RNA, 19 nt, Homo sapiens
  misc_RNA (1)...(19): siRNA sense strand
ugaggaugaugaugaugaa

SEQ ID NO: 2044156 - RNA, 19 nt, Homo sapiens
  misc_RNA (1)...(19): siRNA sense strand
uauucuggcuguugugaaa

SEQ ID NO: 2044157 - RNA, 19 nt, Homo sapiens
  misc_RNA (1)...(19): siRNA sense strand
ugaugaugaugaagaagaa

SEQ ID NO: 2044158 - RNA, 19 nt, Homo sapiens
  misc_RNA (1)...(19): siRNA sense strand
uaaaccgguuauacaaaga

SEQ ID NO: 2044159 - RNA, 19 nt, Homo sapiens
  misc_RNA (1)...(19): siRNA sense strand
auagauacuugucgugaga

SEQ ID NO: 2044160 - RNA, 19 nt, Homo sapiens
  misc_RNA (1)...(19): siRNA sense strand
gucccagacuucuagcuuu

SEQ ID NO: 2044161 - RNA, 19 nt, Homo sapiens
  misc_RNA (1)...(19): siRNA sense strand
ggaacugguagagaaagua

SEQ ID NO: 2044162 - RNA, 19 nt, Homo sapiens
  misc_RNA (1)...(19): siRNA sense strand
agagaaaguaaaccgguua

SEQ ID NO: 2044163 - RNA, 19 nt, Homo sapiens
  misc_RNA (1)...(19): siRNA sense strand
uuagaaagaagcauguuug

SEQ ID NO: 2044164 - RNA, 19 nt, Homo sapiens
  misc_RNA (1)...(19): siRNA sense strand
gguuauacaaagagaauga

SEQ ID NO: 2044165 - RNA, 19 nt, Homo sapiens
  misc_RNA (1)...(19): siRNA sense strand
aaacacagaagaugaugau

SEQ ID NO: 2044166 - RNA, 19 nt, Homo sapiens
  misc_RNA (1)...(19): siRNA sense strand
ggccagcagucagcauuug

SEQ ID NO: 2044167 - RNA, 19 nt, Homo sapiens
  misc_RNA (1)...(19): siRNA sense strand
gcggcaagcgcaugaguga

SEQ ID NO: 2044168 - RNA, 19 nt, Homo sapiens
  misc_RNA (1)...(19): siRNA sense strand
cgucaucgacuguguccua

SEQ ID NO: 2044169 - RNA, 19 nt, Homo sapiens
  misc_RNA (1)...(19): siRNA sense strand
cuaguacugugccaucaug

SEQ ID NO: 2044170 - RNA, 19 nt, Homo sapiens
  misc_RNA (1)...(19): siRNA sense strand
uaaugcgacugaaggugaa

SEQ ID NO: 2044171 - RNA, 19 nt, Homo sapiens
  misc_RNA (1)...(19): siRNA sense strand
uuucagcgcccucaguuaa

SEQ ID NO: 2044172 - RNA, 19 nt, Homo sapiens
  misc_RNA (1)...(19): siRNA sense strand
caucgacuguguccuacug

SEQ ID NO: 2044173 - RNA, 19 nt, Homo sapiens
  misc_RNA (1)...(19): siRNA sense strand
agacuugguggaucuagua

SEQ ID NO: 2044174 - RNA, 19 nt, Homo sapiens
  misc_RNA (1)...(19): siRNA sense strand
ugaugaggaugaugaugau

SEQ ID NO: 2044175 - RNA, 19 nt, Homo sapiens
  misc_RNA (1)...(19): siRNA sense strand
cacagaagaugaugaugac

SEQ ID NO: 2044176 - RNA, 19 nt, Homo sapiens
  misc_RNA (1)...(19): siRNA sense strand
gggaacugguagagaaagu

SEQ ID NO: 2044177 - RNA, 19 nt, Homo sapiens
  misc_RNA (1)...(19): siRNA sense strand
aagaagacuugguggaucu

SEQ ID NO: 2044178 - RNA, 19 nt, Homo sapiens
  misc_RNA (1)...(19): siRNA sense strand
gagaaaguaaaccgguuau

SEQ ID NO: 2044179 - RNA, 19 nt, Homo sapiens
  misc_RNA (1)...(19): siRNA sense strand
ggagagagugagagcuuca

SEQ ID NO: 2044180 - RNA, 19 nt, Homo sapiens
  misc_RNA (1)...(19): siRNA sense strand
accgguccauucagauuua

SEQ ID NO: 2044181 - RNA, 19 nt, Homo sapiens
  misc_RNA (1)...(19): siRNA sense strand
caaggucccagacuucuag

SEQ ID NO: 2044182 - RNA, 19 nt, Homo sapiens
  misc_RNA (1)...(19): siRNA sense strand
acacaagcagucugaauuc

SEQ ID NO: 2044183 - RNA, 19 nt, Homo sapiens
  misc_RNA (1)...(19): siRNA sense strand
cuccguuuguucagucuua

SEQ ID NO: 2044184 - RNA, 19 nt, Homo sapiens
  misc_RNA (1)...(19): siRNA sense strand
caaagagaaugaagaaaac

SEQ ID NO: 2044185 - RNA, 19 nt, Homo sapiens
  misc_RNA (1)...(19): siRNA sense strand
gcucugaggacgacaugga

SEQ ID NO: 2044186 - RNA, 19 nt, Homo sapiens
  misc_RNA (1)...(19): siRNA sense strand
uacaagagacagcauuuca

SEQ ID NO: 2044187 - RNA, 19 nt, Homo sapiens
  misc_RNA (1)...(19): siRNA sense strand
ccaccgguccauucagauu

SEQ ID NO: 2044188 - RNA, 19 nt, Homo sapiens
  misc_RNA (1)...(19): siRNA sense strand
gcaaacacagaagaugaug

SEQ ID NO: 2044189 - RNA, 19 nt, Homo sapiens
  misc_RNA (1)...(19): siRNA sense strand
ucagcgcccucaguuaaug

SEQ ID NO: 2044190 - RNA, 19 nt, Homo sapiens
  misc_RNA (1)...(19): siRNA sense strand
cggaagggcccaacauagu

SEQ ID NO: 2044191 - RNA, 19 nt, Homo sapiens
  misc_RNA (1)...(19): siRNA sense strand
caaacacagaagaugauga

SEQ ID NO: 2044192 - RNA, 19 nt, Homo sapiens
  misc_RNA (1)...(19): siRNA sense strand
cugcuacuaugucuucguu

SEQ ID NO: 2044193 - RNA, 19 nt, Homo sapiens
  misc_RNA (1)...(19): siRNA sense strand
auacuugucgugagaaaga

SEQ ID NO: 2044194 - RNA, 19 nt, Homo sapiens
  misc_RNA (1)...(19): siRNA sense strand
cuacuugucacuuauuaca

SEQ ID NO: 2044195 - RNA, 19 nt, Homo sapiens
  misc_RNA (1)...(19): siRNA sense strand
cgacgaugaugaggaugau

SEQ ID NO: 2044196 - RNA, 19 nt, Homo sapiens
  misc_RNA (1)...(19): siRNA sense strand
ugucacuuauuacaagaga

SEQ ID NO: 2044197 - RNA, 19 nt, Homo sapiens
  misc_RNA (1)...(19): siRNA sense strand
ggcaagcgcaugagugagu

SEQ ID NO: 2044198 - RNA, 19 nt, Homo sapiens
  misc_RNA (1)...(19): siRNA sense strand
uacggaagggcccaacaua

SEQ ID NO: 2044199 - RNA, 19 nt, Homo sapiens
  misc_RNA (1)...(19): siRNA sense strand
gaugauguggaaggaauga

SEQ ID NO: 2044200 - RNA, 19 nt, Homo sapiens
  misc_RNA (1)...(19): siRNA sense strand
ggagccaccgguccauuca

SEQ ID NO: 2044201 - RNA, 19 nt, Homo sapiens
  misc_RNA (1)...(19): siRNA sense strand
aaguaaaccgguuauacaa

SEQ ID NO: 2044202 - RNA, 19 nt, Homo sapiens
  misc_RNA (1)...(19): siRNA sense strand
uugaugauguggaaggaau

SEQ ID NO: 2044203 - RNA, 19 nt, Homo sapiens
  misc_RNA (1)...(19): siRNA sense strand
gagaaauauacccauagau

SEQ ID NO: 2044204 - RNA, 19 nt, Homo sapiens
  misc_RNA (1)...(19): siRNA sense strand
agauacuugucgugagaaa

SEQ ID NO: 2044205 - RNA, 19 nt, Homo sapiens
  misc_RNA (1)...(19): siRNA sense strand
aagccuugaugauguggaa

SEQ ID NO: 2044206 - RNA, 19 nt, Homo sapiens
  misc_RNA (1)...(19): siRNA sense strand
ucacuucagcaaacacaga

SEQ ID NO: 2044207 - RNA, 19 nt, Homo sapiens
  misc_RNA (1)...(19): siRNA sense strand
ucacuuauuacaagagaca

SEQ ID NO: 2044208 - RNA, 19 nt, Homo sapiens
  misc_RNA (1)...(19): siRNA sense strand
acaagaaaaucuccguaga

SEQ ID NO: 2044209 - RNA, 19 nt, Homo sapiens
  misc_RNA (1)...(19): siRNA sense strand
gggccagcagucagcauuu

SEQ ID NO: 2044210 - RNA, 19 nt, Homo sapiens
  misc_RNA (1)...(19): siRNA sense strand
ggagaccaaacauccagau

SEQ ID NO: 2044211 - RNA, 19 nt, Homo sapiens
  misc_RNA (1)...(19): siRNA sense strand
ucagggagagcuuauggau

SEQ ID NO: 2044212 - RNA, 19 nt, Homo sapiens
  misc_RNA (1)...(19): siRNA sense strand
ggucccagacuucuagcuu

SEQ ID NO: 2044213 - RNA, 19 nt, Homo sapiens
  misc_RNA (1)...(19): siRNA sense strand
acaagcagucugaauucuu

SEQ ID NO: 2044214 - RNA, 19 nt, Homo sapiens
  misc_RNA (1)...(19): siRNA sense strand
gcgggugccacgucuaugu

SEQ ID NO: 2044215 - RNA, 19 nt, Homo sapiens
  misc_RNA (1)...(19): siRNA sense strand
aguaaaccgguuauacaaa

SEQ ID NO: 2044216 - RNA, 19 nt, Homo sapiens
  misc_RNA (1)...(19): siRNA sense strand
agaaaguaaaccgguuaua

SEQ ID NO: 2044217 - RNA, 19 nt, Homo sapiens
  misc_RNA (1)...(19): siRNA sense strand
gggcccaacauaguuugua

SEQ ID NO: 2044218 - RNA, 19 nt, Homo sapiens
  misc_RNA (1)...(19): siRNA sense strand
ucaaggucccagacuucua

SEQ ID NO: 2044219 - RNA, 19 nt, Homo sapiens
  misc_RNA (1)...(19): siRNA sense strand
cuugguggaucuaguacug

SEQ ID NO: 2044220 - RNA, 19 nt, Homo sapiens
  misc_RNA (1)...(19): siRNA sense strand
gcagcugcaggaugaggaa

SEQ ID NO: 2044221 - RNA, 19 nt, Homo sapiens
  misc_RNA (1)...(19): siRNA sense strand
gaugaugacgacgaugaug

SEQ ID NO: 2044222 - RNA, 19 nt, Homo sapiens
  misc_RNA (1)...(19): siRNA sense strand
cacaagcagucugaauucu

SEQ ID NO: 2044223 - RNA, 19 nt, Homo sapiens
  misc_RNA (1)...(19): siRNA sense strand
gugacugcaagaaggauuu

SEQ ID NO: 2044224 - RNA, 19 nt, Homo sapiens
  misc_RNA (1)...(19): siRNA sense strand
caccgguccauucagauuu

SEQ ID NO: 2044225 - RNA, 19 nt, Homo sapiens
  misc_RNA (1)...(19): siRNA sense strand
guucuacuugucacuuauu

SEQ ID NO: 2044226 - RNA, 19 nt, Homo sapiens
  misc_RNA (1)...(19): siRNA sense strand
gcccaacauaguuuguaaa

SEQ ID NO: 2044227 - RNA, 19 nt, Homo sapiens
  misc_RNA (1)...(19): siRNA sense strand
gcugugggcugcugaauga

SEQ ID NO: 2044228 - RNA, 19 nt, Homo sapiens
  misc_RNA (1)...(19): siRNA sense strand
gagcuucacugucugacuu

SEQ ID NO: 2044229 - RNA, 19 nt, Homo sapiens
  misc_RNA (1)...(19): siRNA sense strand
ggaugaugaugaugaagaa

SEQ ID NO: 2044230 - RNA, 19 nt, Homo sapiens
  misc_RNA (1)...(19): siRNA sense strand
guaaaccgguuauacaaag

SEQ ID NO: 2044231 - RNA, 19 nt, Homo sapiens
  misc_RNA (1)...(19): siRNA sense strand
gaacugguagagaaaguaa

SEQ ID NO: 2044232 - RNA, 19 nt, Homo sapiens
  misc_RNA (1)...(19): siRNA sense strand
caagcagucugaauucuuc

SEQ ID NO: 2044233 - RNA, 19 nt, Homo sapiens
  misc_RNA (1)...(19): siRNA sense strand
gaaaucacuucagcaaaca

SEQ ID NO: 2044234 - RNA, 19 nt, Homo sapiens
  misc_RNA (1)...(19): siRNA sense strand
gcacagguacaaagugaaa

SEQ ID NO: 2044235 - RNA, 19 nt, Homo sapiens
  misc_RNA (1)...(19): siRNA sense strand
ugagaaauauacccauaga

SEQ ID NO: 2044236 - RNA, 19 nt, Homo sapiens
  misc_RNA (1)...(19): siRNA sense strand
gaaaguaaaccgguuauac

SEQ ID NO: 2044237 - RNA, 19 nt, Homo sapiens
  misc_RNA (1)...(19): siRNA sense strand
gaaagaagacuugguggau

SEQ ID NO: 2044238 - RNA, 19 nt, Homo sapiens
  misc_RNA (1)...(19): siRNA sense strand
gaaauauacccauagauac

SEQ ID NO: 2044239 - RNA, 19 nt, Homo sapiens
  misc_RNA (1)...(19): siRNA sense strand
gaagggcccaacauaguuu

SEQ ID NO: 2044240 - RNA, 19 nt, Homo sapiens
  misc_RNA (1)...(19): siRNA sense strand
ggaagggcccaacauaguu

SEQ ID NO: 2044241 - RNA, 19 nt, Homo sapiens
  misc_RNA (1)...(19): siRNA sense strand
gaccaaacauccagaucug

SEQ ID NO: 2044242 - RNA, 19 nt, Homo sapiens
  misc_RNA (1)...(19): siRNA sense strand
gacacaagcagucugaauu

SEQ ID NO: 2044243 - RNA, 19 nt, Homo sapiens
  misc_RNA (1)...(19): siRNA sense strand
ucugagaaauauacccaua

SEQ ID NO: 2044244 - RNA, 19 nt, Homo sapiens
  misc_RNA (1)...(19): siRNA sense strand
ggcccaacauaguuuguaa

SEQ ID NO: 2044245 - RNA, 19 nt, Homo sapiens
  misc_RNA (1)...(19): siRNA sense strand
aaugggaacugguagagaa

SEQ ID NO: 2044246 - RNA, 19 nt, Homo sapiens
  misc_RNA (1)...(19): siRNA sense strand
cggcacagguacaaaguga

SEQ ID NO: 2044247 - RNA, 19 nt, Homo sapiens
  misc_RNA (1)...(19): siRNA sense strand
gcuacuaugucuucguuuc

SEQ ID NO: 2044248 - RNA, 19 nt, Homo sapiens
  misc_RNA (1)...(19): siRNA sense strand
ugacgacgaugaugaggau

SEQ ID NO: 2044249 - RNA, 19 nt, Homo sapiens
  misc_RNA (1)...(19): siRNA sense strand
ccauucagauuuacaccaa

SEQ ID NO: 2044250 - RNA, 19 nt, Homo sapiens
  misc_RNA (1)...(19): siRNA sense strand
acacagaagaugaugauga

SEQ ID NO: 2044251 - RNA, 19 nt, Homo sapiens
  misc_RNA (1)...(19): siRNA sense strand
ggacacaagcagucugaau

SEQ ID NO: 2044252 - RNA, 19 nt, Homo sapiens
  misc_RNA (1)...(19): siRNA sense strand
cagcaaacacagaagauga

SEQ ID NO: 2044253 - RNA, 19 nt, Homo sapiens
  misc_RNA (1)...(19): siRNA sense strand
gcuuauggauggagaccaa

SEQ ID NO: 2044254 - RNA, 19 nt, Homo sapiens
  misc_RNA (1)...(19): siRNA sense strand
aaaguaaaccgguuauaca

SEQ ID NO: 2044255 - RNA, 19 nt, Homo sapiens
  misc_RNA (1)...(19): siRNA sense strand
ugaggaugaugaugaugaa

SEQ ID NO: 2044256 - RNA, 19 nt, Homo sapiens
  misc_RNA (1)...(19): siRNA sense strand
uauucuggcuguugugaaa

SEQ ID NO: 2044257 - RNA, 19 nt, Homo sapiens
  misc_RNA (1)...(19): siRNA sense strand
ugaugaugaugaagaagaa

SEQ ID NO: 2044258 - RNA, 19 nt, Homo sapiens
  misc_RNA (1)...(19): siRNA sense strand
uaaaccgguuauacaaaga

SEQ ID NO: 2044259 - RNA, 19 nt, Homo sapiens
  misc_RNA (1)...(19): siRNA sense strand
auagauacuugucgugaga

SEQ ID NO: 2044260 - RNA, 19 nt, Homo sapiens
  misc_RNA (1)...(19): siRNA sense strand
gucccagacuucuagcuuu

SEQ ID NO: 2044261 - RNA, 19 nt, Homo sapiens
  misc_RNA (1)...(19): siRNA sense strand
ggaacugguagagaaagua

SEQ ID NO: 2044262 - RNA, 19 nt, Homo sapiens
  misc_RNA (1)...(19): siRNA sense strand
agagaaaguaaaccgguua

SEQ ID NO: 2044263 - RNA, 19 nt, Homo sapiens
  misc_RNA (1)...(19): siRNA sense strand
uuagaaagaagcauguuug

SEQ ID NO: 2044264 - RNA, 19 nt, Homo sapiens
  misc_RNA (1)...(19): siRNA sense strand
gguuauacaaagagaauga

SEQ ID NO: 2044265 - RNA, 19 nt, Homo sapiens
  misc_RNA (1)...(19): siRNA sense strand
aaacacagaagaugaugau

SEQ ID NO: 2044266 - RNA, 19 nt, Homo sapiens
  misc_RNA (1)...(19): siRNA sense strand
ggccagcagucagcauuug

SEQ ID NO: 2044267 - RNA, 19 nt, Homo sapiens
  misc_RNA (1)...(19): siRNA sense strand
gcggcaagcgcaugaguga

SEQ ID NO: 2044268 - RNA, 19 nt, Homo sapiens
  misc_RNA (1)...(19): siRNA sense strand
cgucaucgacuguguccua

SEQ ID NO: 2044269 - RNA, 19 nt, Homo sapiens
  misc_RNA (1)...(19): siRNA sense strand
cuaguacugugccaucaug

SEQ ID NO: 2044270 - RNA, 19 nt, Homo sapiens
  misc_RNA (1)...(19): siRNA sense strand
uaaugcgacugaaggugaa

SEQ ID NO: 2044271 - RNA, 19 nt, Homo sapiens
  misc_RNA (1)...(19): siRNA sense strand
uuucagcgcccucaguuaa

SEQ ID NO: 2044272 - RNA, 19 nt, Homo sapiens
  misc_RNA (1)...(19): siRNA sense strand
caucgacuguguccuacug

SEQ ID NO: 2044273 - RNA, 19 nt, Homo sapiens
  misc_RNA (1)...(19): siRNA sense strand
agacuugguggaucuagua

SEQ ID NO: 2044274 - RNA, 19 nt, Homo sapiens
  misc_RNA (1)...(19): siRNA sense strand
ugaugaggaugaugaugau

SEQ ID NO: 2044275 - RNA, 19 nt, Homo sapiens
  misc_RNA (1)...(19): siRNA sense strand
cacagaagaugaugaugac

SEQ ID NO: 2044276 - RNA, 19 nt, Homo sapiens
  misc_RNA (1)...(19): siRNA sense strand
gggaacugguagagaaagu

SEQ ID NO: 2044277 - RNA, 19 nt, Homo sapiens
  misc_RNA (1)...(19): siRNA sense strand
aagaagacuugguggaucu

SEQ ID NO: 2044278 - RNA, 19 nt, Homo sapiens
  misc_RNA (1)...(19): siRNA sense strand
gagaaaguaaaccgguuau

SEQ ID NO: 2044279 - RNA, 19 nt, Homo sapiens
  misc_RNA (1)...(19): siRNA sense strand
ggagagagugagagcuuca

SEQ ID NO: 2044280 - RNA, 19 nt, Homo sapiens
  misc_RNA (1)...(19): siRNA sense strand
accgguccauucagauuua

SEQ ID NO: 2044281 - RNA, 19 nt, Homo sapiens
  misc_RNA (1)...(19): siRNA sense strand
caaggucccagacuucuag

SEQ ID NO: 2044282 - RNA, 19 nt, Homo sapiens
  misc_RNA (1)...(19): siRNA sense strand
acacaagcagucugaauuc

SEQ ID NO: 2044283 - RNA, 19 nt, Homo sapiens
  misc_RNA (1)...(19): siRNA sense strand
cuccguuuguucagucuua

SEQ ID NO: 2044284 - RNA, 19 nt, Homo sapiens
  misc_RNA (1)...(19): siRNA sense strand
caaagagaaugaagaaaac

SEQ ID NO: 2044285 - RNA, 19 nt, Homo sapiens
  misc_RNA (1)...(19): siRNA sense strand
gcucugaggacgacaugga

SEQ ID NO: 2044286 - RNA, 19 nt, Homo sapiens
  misc_RNA (1)...(19): siRNA sense strand
uacaagagacagcauuuca

SEQ ID NO: 2044287 - RNA, 19 nt, Homo sapiens
  misc_RNA (1)...(19): siRNA sense strand
ccaccgguccauucagauu

SEQ ID NO: 2044288 - RNA, 19 nt, Homo sapiens
  misc_RNA (1)...(19): siRNA sense strand
gcaaacacagaagaugaug

SEQ ID NO: 2044289 - RNA, 19 nt, Homo sapiens
  misc_RNA (1)...(19): siRNA sense strand
ucagcgcccucaguuaaug

SEQ ID NO: 2044290 - RNA, 19 nt, Homo sapiens
  misc_RNA (1)...(19): siRNA sense strand
cggaagggcccaacauagu

SEQ ID NO: 2044291 - RNA, 19 nt, Homo sapiens
  misc_RNA (1)...(19): siRNA sense strand
caaacacagaagaugauga

SEQ ID NO: 2044292 - RNA, 19 nt, Homo sapiens
  misc_RNA (1)...(19): siRNA sense strand
cugcuacuaugucuucguu

SEQ ID NO: 2044293 - RNA, 19 nt, Homo sapiens
  misc_RNA (1)...(19): siRNA sense strand
auacuugucgugagaaaga

SEQ ID NO: 2044294 - RNA, 19 nt, Homo sapiens
  misc_RNA (1)...(19): siRNA sense strand
cuacuugucacuuauuaca

SEQ ID NO: 2044295 - RNA, 19 nt, Homo sapiens
  misc_RNA (1)...(19): siRNA sense strand
cgacgaugaugaggaugau

SEQ ID NO: 2044296 - RNA, 19 nt, Homo sapiens
  misc_RNA (1)...(19): siRNA sense strand
ugucacuuauuacaagaga

SEQ ID NO: 2044297 - RNA, 19 nt, Homo sapiens
  misc_RNA (1)...(19): siRNA sense strand
ggcaagcgcaugagugagu

SEQ ID NO: 2044298 - RNA, 19 nt, Homo sapiens
  misc_RNA (1)...(19): siRNA sense strand
uacggaagggcccaacaua

SEQ ID NO: 2044299 - RNA, 19 nt, Homo sapiens
  misc_RNA (1)...(19): siRNA sense strand
gaugauguggaaggaauga

SEQ ID NO: 2044300 - RNA, 19 nt, Homo sapiens
  misc_RNA (1)...(19): siRNA sense strand
ggagccaccgguccauuca

SEQ ID NO: 2044301 - RNA, 19 nt, Homo sapiens
  misc_RNA (1)...(19): siRNA sense strand
aaguaaaccgguuauacaa

SEQ ID NO: 2044302 - RNA, 19 nt, Homo sapiens
  misc_RNA (1)...(19): siRNA sense strand
uugaugauguggaaggaau

SEQ ID NO: 2044303 - RNA, 19 nt, Homo sapiens
  misc_RNA (1)...(19): siRNA sense strand
gagaaauauacccauagau

SEQ ID NO: 2044304 - RNA, 19 nt, Homo sapiens
  misc_RNA (1)...(19): siRNA sense strand
agauacuugucgugagaaa

SEQ ID NO: 2044305 - RNA, 19 nt, Homo sapiens
  misc_RNA (1)...(19): siRNA sense strand
aagccuugaugauguggaa

SEQ ID NO: 2044306 - RNA, 19 nt, Homo sapiens
  misc_RNA (1)...(19): siRNA sense strand
ucacuucagcaaacacaga

SEQ ID NO: 2044307 - RNA, 19 nt, Homo sapiens
  misc_RNA (1)...(19): siRNA sense strand
ucacuuauuacaagagaca

SEQ ID NO: 2044308 - RNA, 19 nt, Homo sapiens
  misc_RNA (1)...(19): siRNA sense strand
acaagaaaaucuccguaga

SEQ ID NO: 2044309 - RNA, 19 nt, Homo sapiens
  misc_RNA (1)...(19): siRNA sense strand
gggccagcagucagcauuu

SEQ ID NO: 2044310 - RNA, 19 nt, Homo sapiens
  misc_RNA (1)...(19): siRNA sense strand
ggagaccaaacauccagau

SEQ ID NO: 2044311 - RNA, 19 nt, Homo sapiens
  misc_RNA (1)...(19): siRNA sense strand
ucagggagagcuuauggau

SEQ ID NO: 2044312 - RNA, 19 nt, Homo sapiens
  misc_RNA (1)...(19): siRNA sense strand
ggucccagacuucuagcuu

SEQ ID NO: 2044313 - RNA, 19 nt, Homo sapiens
  misc_RNA (1)...(19): siRNA sense strand
acaagcagucugaauucuu

SEQ ID NO: 2044314 - RNA, 19 nt, Homo sapiens
  misc_RNA (1)...(19): siRNA sense strand
gcgggugccacgucuaugu

SEQ ID NO: 2044315 - RNA, 19 nt, Homo sapiens
  misc_RNA (1)...(19): siRNA sense strand
aguaaaccgguuauacaaa

SEQ ID NO: 2044316 - RNA, 19 nt, Homo sapiens
  misc_RNA (1)...(19): siRNA sense strand
agaaaguaaaccgguuaua

SEQ ID NO: 2044317 - RNA, 19 nt, Homo sapiens
  misc_RNA (1)...(19): siRNA sense strand
gggcccaacauaguuugua

SEQ ID NO: 2044318 - RNA, 19 nt, Homo sapiens
  misc_RNA (1)...(19): siRNA sense strand
ucaaggucccagacuucua

SEQ ID NO: 2044319 - RNA, 19 nt, Homo sapiens
  misc_RNA (1)...(19): siRNA sense strand
cuugguggaucuaguacug

SEQ ID NO: 2044320 - RNA, 19 nt, Homo sapiens
  misc_RNA (1)...(19): siRNA sense strand
gcagcugcaggaugaggaa

SEQ ID NO: 2044321 - RNA, 19 nt, Homo sapiens
  misc_RNA (1)...(19): siRNA sense strand
gaugaugacgacgaugaug

SEQ ID NO: 2044322 - RNA, 19 nt, Homo sapiens
  misc_RNA (1)...(19): siRNA sense strand
cacaagcagucugaauucu

SEQ ID NO: 2044323 - RNA, 19 nt, Homo sapiens
  misc_RNA (1)...(19): siRNA sense strand
gugacugcaagaaggauuu

SEQ ID NO: 2044324 - RNA, 19 nt, Homo sapiens
  misc_RNA (1)...(19): siRNA sense strand
caccgguccauucagauuu

SEQ ID NO: 2044325 - RNA, 19 nt, Homo sapiens
  misc_RNA (1)...(19): siRNA sense strand
guucuacuugucacuuauu

SEQ ID NO: 2044326 - RNA, 19 nt, Homo sapiens
  misc_RNA (1)...(19): siRNA sense strand
gcccaacauaguuuguaaa

SEQ ID NO: 2044327 - RNA, 19 nt, Homo sapiens
  misc_RNA (1)...(19): siRNA sense strand
gaaccaaacugaucuaaag

SEQ ID NO: 2044328 - RNA, 19 nt, Homo sapiens
  misc_RNA (1)...(19): siRNA sense strand
gagcaaggauucuggcuuu

SEQ ID NO: 2044329 - RNA, 19 nt, Homo sapiens
  misc_RNA (1)...(19): siRNA sense strand
uaacugagcuccgggaaga

SEQ ID NO: 2044330 - RNA, 19 nt, Homo sapiens
  misc_RNA (1)...(19): siRNA sense strand
ucacaacucucuuacauag

SEQ ID NO: 2044331 - RNA, 19 nt, Homo sapiens
  misc_RNA (1)...(19): siRNA sense strand
gaaacuuuaucccuacuuc

SEQ ID NO: 2044332 - RNA, 19 nt, Homo sapiens
  misc_RNA (1)...(19): siRNA sense strand
ucaaagacaucacaacucu

SEQ ID NO: 2044333 - RNA, 19 nt, Homo sapiens
  misc_RNA (1)...(19): siRNA sense strand
caucacaacucucuuacau

SEQ ID NO: 2044334 - RNA, 19 nt, Homo sapiens
  misc_RNA (1)...(19): siRNA sense strand
acaaagguccuauccagua

SEQ ID NO: 2044335 - RNA, 19 nt, Homo sapiens
  misc_RNA (1)...(19): siRNA sense strand
ggauuugccuucuuucagu

SEQ ID NO: 2044336 - RNA, 19 nt, Homo sapiens
  misc_RNA (1)...(19): siRNA sense strand
uaaaacagcucacccaaau

SEQ ID NO: 2044337 - RNA, 19 nt, Homo sapiens
  misc_RNA (1)...(19): siRNA sense strand
aagggcagcuguccucuaa

SEQ ID NO: 2044338 - RNA, 19 nt, Homo sapiens
  misc_RNA (1)...(19): siRNA sense strand
gcaaccagagagcuuauuu

SEQ ID NO: 2044339 - RNA, 19 nt, Homo sapiens
  misc_RNA (1)...(19): siRNA sense strand
ggaaguagaaguagcaaag

SEQ ID NO: 2044340 - RNA, 19 nt, Homo sapiens
  misc_RNA (1)...(19): siRNA sense strand
agacaucacaacucucuua

SEQ ID NO: 2044341 - RNA, 19 nt, Homo sapiens
  misc_RNA (1)...(19): siRNA sense strand
ucuaaaggcucuggauuug

SEQ ID NO: 2044342 - RNA, 19 nt, Homo sapiens
  misc_RNA (1)...(19): siRNA sense strand
gcaaagacggaacaacaga

SEQ ID NO: 2044343 - RNA, 19 nt, Homo sapiens
  misc_RNA (1)...(19): siRNA sense strand
ugaggaacaugcagaagga

SEQ ID NO: 2044344 - RNA, 19 nt, Homo sapiens
  misc_RNA (1)...(19): siRNA sense strand
acagaacuccuucgacuuu

SEQ ID NO: 2044345 - RNA, 19 nt, Homo sapiens
  misc_RNA (1)...(19): siRNA sense strand
aaaccaugacucacauuua

SEQ ID NO: 2044346 - RNA, 19 nt, Homo sapiens
  misc_RNA (1)...(19): siRNA sense strand
gauaaugccugaugauccu

SEQ ID NO: 2044347 - RNA, 19 nt, Homo sapiens
  misc_RNA (1)...(19): siRNA sense strand
gaagauaaugccugaugau

SEQ ID NO: 2044348 - RNA, 19 nt, Homo sapiens
  misc_RNA (1)...(19): siRNA sense strand
guaacacuuucauggagaa

SEQ ID NO: 2044349 - RNA, 19 nt, Homo sapiens
  misc_RNA (1)...(19): siRNA sense strand
ugacucacauuuacaccuu

SEQ ID NO: 2044350 - RNA, 19 nt, Homo sapiens
  misc_RNA (1)...(19): siRNA sense strand
ggaaccaaacugaucuaaa

SEQ ID NO: 2044351 - RNA, 19 nt, Homo sapiens
  misc_RNA (1)...(19): siRNA sense strand
gaucuaaaggcucuggauu

SEQ ID NO: 2044352 - RNA, 19 nt, Homo sapiens
  misc_RNA (1)...(19): siRNA sense strand
ccaggccugucuccacuaa

SEQ ID NO: 2044353 - RNA, 19 nt, Homo sapiens
  misc_RNA (1)...(19): siRNA sense strand
cacuaacucuggacccuaa

SEQ ID NO: 2044354 - RNA, 19 nt, Homo sapiens
  misc_RNA (1)...(19): siRNA sense strand
aaagaaccauugcacaucu

SEQ ID NO: 2044355 - RNA, 19 nt, Homo sapiens
  misc_RNA (1)...(19): siRNA sense strand
agaagauaaugccugauga

SEQ ID NO: 2044356 - RNA, 19 nt, Homo sapiens
  misc_RNA (1)...(19): siRNA sense strand
caaaucuggugcucuccaa

SEQ ID NO: 2044357 - RNA, 19 nt, Homo sapiens
  misc_RNA (1)...(19): siRNA sense strand
caacuggagacaacucuga

SEQ ID NO: 2044358 - RNA, 19 nt, Homo sapiens
  misc_RNA (1)...(19): siRNA sense strand
caaggauucuggcuuuuaa

SEQ ID NO: 2044359 - RNA, 19 nt, Homo sapiens
  misc_RNA (1)...(19): siRNA sense strand
ugaaugaggagauggaguu

SEQ ID NO: 2044360 - RNA, 19 nt, Homo sapiens
  misc_RNA (1)...(19): siRNA sense strand
gggcauauaccuggauuau

SEQ ID NO: 2044361 - RNA, 19 nt, Homo sapiens
  misc_RNA (1)...(19): siRNA sense strand
gaagggcagcuguccucua

SEQ ID NO: 2044362 - RNA, 19 nt, Homo sapiens
  misc_RNA (1)...(19): siRNA sense strand
gaaguagaaguagcaaaga

SEQ ID NO: 2044363 - RNA, 19 nt, Homo sapiens
  misc_RNA (1)...(19): siRNA sense strand
caaagguccuauccaguac

SEQ ID NO: 2044364 - RNA, 19 nt, Homo sapiens
  misc_RNA (1)...(19): siRNA sense strand
ugucagagaauccaucauu

SEQ ID NO: 2044365 - RNA, 19 nt, Homo sapiens
  misc_RNA (1)...(19): siRNA sense strand
gagagaauaaagaaccauu

SEQ ID NO: 2044366 - RNA, 19 nt, Homo sapiens
  misc_RNA (1)...(19): siRNA sense strand
ucgacaaggugggcauaua

SEQ ID NO: 2044367 - RNA, 19 nt, Homo sapiens
  misc_RNA (1)...(19): siRNA sense strand
gggcagcuguccucuaacu

SEQ ID NO: 2044368 - RNA, 19 nt, Homo sapiens
  misc_RNA (1)...(19): siRNA sense strand
cgucuggcauggugacauu

SEQ ID NO: 2044369 - RNA, 19 nt, Homo sapiens
  misc_RNA (1)...(19): siRNA sense strand
ucaggagcaaugucucuua

SEQ ID NO: 2044370 - RNA, 19 nt, Homo sapiens
  misc_RNA (1)...(19): siRNA sense strand
guagaaguagcaaagaaga

SEQ ID NO: 2044371 - RNA, 19 nt, Homo sapiens
  misc_RNA (1)...(19): siRNA sense strand
caaagacggaacaacagaa

SEQ ID NO: 2044372 - RNA, 19 nt, Homo sapiens
  misc_RNA (1)...(19): siRNA sense strand
aaguagaaguagcaaagaa

SEQ ID NO: 2044373 - RNA, 19 nt, Homo sapiens
  misc_RNA (1)...(19): siRNA sense strand
ugacucaaguguggcugua

SEQ ID NO: 2044374 - RNA, 19 nt, Homo sapiens
  misc_RNA (1)...(19): siRNA sense strand
aaacagcucacccaaaucu

SEQ ID NO: 2044375 - RNA, 19 nt, Homo sapiens
  misc_RNA (1)...(19): siRNA sense strand
auaccuggauuaugaagga

SEQ ID NO: 2044376 - RNA, 19 nt, Homo sapiens
  misc_RNA (1)...(19): siRNA sense strand
uaaugaugguggagagaau

SEQ ID NO: 2044377 - RNA, 19 nt, Homo sapiens
  misc_RNA (1)...(19): siRNA sense strand
aaccaugacucacauuuac

SEQ ID NO: 2044378 - RNA, 19 nt, Homo sapiens
  misc_RNA (1)...(19): siRNA sense strand
uucuaaagcugcaucaguu

SEQ ID NO: 2044379 - RNA, 19 nt, Homo sapiens
  misc_RNA (1)...(19): siRNA sense strand
gcucuggauuugccuucuu

SEQ ID NO: 2044380 - RNA, 19 nt, Homo sapiens
  misc_RNA (1)...(19): siRNA sense strand
caagcuacaucugcagcaa

SEQ ID NO: 2044381 - RNA, 19 nt, Homo sapiens
  misc_RNA (1)...(19): siRNA sense strand
caggagcaaugucucuuag

SEQ ID NO: 2044382 - RNA, 19 nt, Homo sapiens
  misc_RNA (1)...(19): siRNA sense strand
augaggagauggaguugaa

SEQ ID NO: 2044383 - RNA, 19 nt, Homo sapiens
  misc_RNA (1)...(19): siRNA sense strand
gcaaggauucuggcuuuua

SEQ ID NO: 2044384 - RNA, 19 nt, Homo sapiens
  misc_RNA (1)...(19): siRNA sense strand
uaaagaaccauugcacauc

SEQ ID NO: 2044385 - RNA, 19 nt, Homo sapiens
  misc_RNA (1)...(19): siRNA sense strand
uacaugguauggagggaaa

SEQ ID NO: 2044386 - RNA, 19 nt, Homo sapiens
  misc_RNA (1)...(19): siRNA sense strand
cuaaggaaccaaacugauc

SEQ ID NO: 2044387 - RNA, 19 nt, Homo sapiens
  misc_RNA (1)...(19): siRNA sense strand
gacuaaggaaccaaacuga

SEQ ID NO: 2044388 - RNA, 19 nt, Homo sapiens
  misc_RNA (1)...(19): siRNA sense strand
gaaguagcaaagaagacaa

SEQ ID NO: 2044389 - RNA, 19 nt, Homo sapiens
  misc_RNA (1)...(19): siRNA sense strand
ccauggaguuucuaaagcu

SEQ ID NO: 2044390 - RNA, 19 nt, Homo sapiens
  misc_RNA (1)...(19): siRNA sense strand
ucaguaacacuuucaugga

SEQ ID NO: 2044391 - RNA, 19 nt, Homo sapiens
  misc_RNA (1)...(19): siRNA sense strand
acaacucucuuacauagcu

SEQ ID NO: 2044392 - RNA, 19 nt, Homo sapiens
  misc_RNA (1)...(19): siRNA sense strand
gagaauaaagaaccauugc

SEQ ID NO: 2044393 - RNA, 19 nt, Homo sapiens
  misc_RNA (1)...(19): siRNA sense strand
gcaaagaagacaaaaugga

SEQ ID NO: 2044394 - RNA, 19 nt, Homo sapiens
  misc_RNA (1)...(19): siRNA sense strand
gaaaugcaggacacucucu

SEQ ID NO: 2044395 - RNA, 19 nt, Homo sapiens
  misc_RNA (1)...(19): siRNA sense strand
gagaaacuuuaucccuacu

SEQ ID NO: 2044396 - RNA, 19 nt, Homo sapiens
  misc_RNA (1)...(19): siRNA sense strand
cgacaaggugggcauauac

SEQ ID NO: 2044397 - RNA, 19 nt, Homo sapiens
  misc_RNA (1)...(19): siRNA sense strand
ggugacauuaagaagauaa

SEQ ID NO: 2044398 - RNA, 19 nt, Homo sapiens
  misc_RNA (1)...(19): siRNA sense strand
caguuggaguugucagaga

SEQ ID NO: 2044399 - RNA, 19 nt, Homo sapiens
  misc_RNA (1)...(19): siRNA sense strand
cugaugauccugagagguu

SEQ ID NO: 2044400 - RNA, 19 nt, Homo sapiens
  misc_RNA (1)...(19): siRNA sense strand
aagaagauaaugccugaug

SEQ ID NO: 2044401 - RNA, 19 nt, Homo sapiens
  misc_RNA (1)...(19): siRNA sense strand
aaagacaucacaacucucu

SEQ ID NO: 2044402 - RNA, 19 nt, Homo sapiens
  misc_RNA (1)...(19): siRNA sense strand
ugacuaacaaccucgacaa

SEQ ID NO: 2044403 - RNA, 19 nt, Homo sapiens
  misc_RNA (1)...(19): siRNA sense strand
gucugacacugacuaacaa

SEQ ID NO: 2044404 - RNA, 19 nt, Homo sapiens
  misc_RNA (1)...(19): siRNA sense strand
cauggugacauuaagaaga

SEQ ID NO: 2044405 - RNA, 19 nt, Homo sapiens
  misc_RNA (1)...(19): siRNA sense strand
caaccagagagcuuauuuc

SEQ ID NO: 2044406 - RNA, 19 nt, Homo sapiens
  misc_RNA (1)...(19): siRNA sense strand
gaggagauggaguugaauc

SEQ ID NO: 2044407 - RNA, 19 nt, Homo sapiens
  misc_RNA (1)...(19): siRNA sense strand
agaaccauugcacaucuua

SEQ ID NO: 2044408 - RNA, 19 nt, Homo sapiens
  misc_RNA (1)...(19): siRNA sense strand
gaaagugguacugggaagu

SEQ ID NO: 2044409 - RNA, 19 nt, Homo sapiens
  misc_RNA (1)...(19): siRNA sense strand
gaaugaggagauggaguug

SEQ ID NO: 2044410 - RNA, 19 nt, Homo sapiens
  misc_RNA (1)...(19): siRNA sense strand
uaaggaaccaaacugaucu

SEQ ID NO: 2044411 - RNA, 19 nt, Homo sapiens
  misc_RNA (1)...(19): siRNA sense strand
ugaugauccugagagguuu

SEQ ID NO: 2044412 - RNA, 19 nt, Homo sapiens
  misc_RNA (1)...(19): siRNA sense strand
gcagaaggaagcuauugcu

SEQ ID NO: 2044413 - RNA, 19 nt, Homo sapiens
  misc_RNA (1)...(19): siRNA sense strand
gggaaaugcaggacacucu

SEQ ID NO: 2044414 - RNA, 19 nt, Homo sapiens
  misc_RNA (1)...(19): siRNA sense strand
gauauguuggugagcauuc

SEQ ID NO: 2044415 - RNA, 19 nt, Homo sapiens
  misc_RNA (1)...(19): siRNA sense strand
ggcauggugacauuaagaa

SEQ ID NO: 2044416 - RNA, 19 nt, Homo sapiens
  misc_RNA (1)...(19): siRNA sense strand
aggcaaagacggaacaaca

SEQ ID NO: 2044417 - RNA, 19 nt, Homo sapiens
  misc_RNA (1)...(19): siRNA sense strand
gugggcauauaccuggauu

SEQ ID NO: 2044418 - RNA, 19 nt, Homo sapiens
  misc_RNA (1)...(19): siRNA sense strand
auaaagaaccauugcacau

SEQ ID NO: 2044419 - RNA, 19 nt, Homo sapiens
  misc_RNA (1)...(19): siRNA sense strand
gaugguggagagaauaaag

SEQ ID NO: 2044420 - RNA, 19 nt, Homo sapiens
  misc_RNA (1)...(19): siRNA sense strand
cacauuuacaccuucagua

SEQ ID NO: 2044421 - RNA, 19 nt, Homo sapiens
  misc_RNA (1)...(19): siRNA sense strand
cuacaucugcagcaacaug

SEQ ID NO: 2044422 - RNA, 19 nt, Homo sapiens
  misc_RNA (1)...(19): siRNA sense strand
uagcaaagaagacaaaaug

SEQ ID NO: 2044423 - RNA, 19 nt, Homo sapiens
  misc_RNA (1)...(19): siRNA sense strand
uauugcugcucacaaggaa

SEQ ID NO: 2044424 - RNA, 19 nt, Homo sapiens
  misc_RNA (1)...(19): siRNA sense strand
cagaacuccuucgacuuuc

SEQ ID NO: 2044425 - RNA, 19 nt, Homo sapiens
  misc_RNA (1)...(19): siRNA sense strand
caccuucaguaacacuuuc

SEQ ID NO: 2044426 - RNA, 19 nt, Homo sapiens
  misc_RNA (1)...(19): siRNA sense strand
caacucucuuacauagcuu

SEQ ID NO: 2044427 - RNA, 19 nt, Homo sapiens
  misc_RNA (1)...(19): siRNA sense strand
gaaccaaacugaucuaaag

SEQ ID NO: 2044428 - RNA, 19 nt, Homo sapiens
  misc_RNA (1)...(19): siRNA sense strand
gagcaaggauucuggcuuu

SEQ ID NO: 2044429 - RNA, 19 nt, Homo sapiens
  misc_RNA (1)...(19): siRNA sense strand
uaacugagcuccgggaaga

SEQ ID NO: 2044430 - RNA, 19 nt, Homo sapiens
  misc_RNA (1)...(19): siRNA sense strand
ucacaacucucuuacauag

SEQ ID NO: 2044431 - RNA, 19 nt, Homo sapiens
  misc_RNA (1)...(19): siRNA sense strand
gaaacuuuaucccuacuuc

SEQ ID NO: 2044432 - RNA, 19 nt, Homo sapiens
  misc_RNA (1)...(19): siRNA sense strand
ucaaagacaucacaacucu

SEQ ID NO: 2044433 - RNA, 19 nt, Homo sapiens
  misc_RNA (1)...(19): siRNA sense strand
caucacaacucucuuacau

SEQ ID NO: 2044434 - RNA, 19 nt, Homo sapiens
  misc_RNA (1)...(19): siRNA sense strand
acaaagguccuauccagua

SEQ ID NO: 2044435 - RNA, 19 nt, Homo sapiens
  misc_RNA (1)...(19): siRNA sense strand
ggauuugccuucuuucagu

SEQ ID NO: 2044436 - RNA, 19 nt, Homo sapiens
  misc_RNA (1)...(19): siRNA sense strand
uaaaacagcucacccaaau

SEQ ID NO: 2044437 - RNA, 19 nt, Homo sapiens
  misc_RNA (1)...(19): siRNA sense strand
aagggcagcuguccucuaa

SEQ ID NO: 2044438 - RNA, 19 nt, Homo sapiens
  misc_RNA (1)...(19): siRNA sense strand
gcaaccagagagcuuauuu

SEQ ID NO: 2044439 - RNA, 19 nt, Homo sapiens
  misc_RNA (1)...(19): siRNA sense strand
ggaaguagaaguagcaaag

SEQ ID NO: 2044440 - RNA, 19 nt, Homo sapiens
  misc_RNA (1)...(19): siRNA sense strand
agacaucacaacucucuua

SEQ ID NO: 2044441 - RNA, 19 nt, Homo sapiens
  misc_RNA (1)...(19): siRNA sense strand
ucuaaaggcucuggauuug

SEQ ID NO: 2044442 - RNA, 19 nt, Homo sapiens
  misc_RNA (1)...(19): siRNA sense strand
gcaaagacggaacaacaga

SEQ ID NO: 2044443 - RNA, 19 nt, Homo sapiens
  misc_RNA (1)...(19): siRNA sense strand
ugaggaacaugcagaagga

SEQ ID NO: 2044444 - RNA, 19 nt, Homo sapiens
  misc_RNA (1)...(19): siRNA sense strand
acagaacuccuucgacuuu

SEQ ID NO: 2044445 - RNA, 19 nt, Homo sapiens
  misc_RNA (1)...(19): siRNA sense strand
aaaccaugacucacauuua

SEQ ID NO: 2044446 - RNA, 19 nt, Homo sapiens
  misc_RNA (1)...(19): siRNA sense strand
gauaaugccugaugauccu

SEQ ID NO: 2044447 - RNA, 19 nt, Homo sapiens
  misc_RNA (1)...(19): siRNA sense strand
gaagauaaugccugaugau

SEQ ID NO: 2044448 - RNA, 19 nt, Homo sapiens
  misc_RNA (1)...(19): siRNA sense strand
guaacacuuucauggagaa

SEQ ID NO: 2044449 - RNA, 19 nt, Homo sapiens
  misc_RNA (1)...(19): siRNA sense strand
ugacucacauuuacaccuu

SEQ ID NO: 2044450 - RNA, 19 nt, Homo sapiens
  misc_RNA (1)...(19): siRNA sense strand
ggaaccaaacugaucuaaa

SEQ ID NO: 2044451 - RNA, 19 nt, Homo sapiens
  misc_RNA (1)...(19): siRNA sense strand
gaucuaaaggcucuggauu

SEQ ID NO: 2044452 - RNA, 19 nt, Homo sapiens
  misc_RNA (1)...(19): siRNA sense strand
ccaggccugucuccacuaa

SEQ ID NO: 2044453 - RNA, 19 nt, Homo sapiens
  misc_RNA (1)...(19): siRNA sense strand
cacuaacucuggacccuaa

SEQ ID NO: 2044454 - RNA, 19 nt, Homo sapiens
  misc_RNA (1)...(19): siRNA sense strand
aaagaaccauugcacaucu

SEQ ID NO: 2044455 - RNA, 19 nt, Homo sapiens
  misc_RNA (1)...(19): siRNA sense strand
agaagauaaugccugauga

SEQ ID NO: 2044456 - RNA, 19 nt, Homo sapiens
  misc_RNA (1)...(19): siRNA sense strand
caaaucuggugcucuccaa

SEQ ID NO: 2044457 - RNA, 19 nt, Homo sapiens
  misc_RNA (1)...(19): siRNA sense strand
caacuggagacaacucuga

SEQ ID NO: 2044458 - RNA, 19 nt, Homo sapiens
  misc_RNA (1)...(19): siRNA sense strand
caaggauucuggcuuuuaa

SEQ ID NO: 2044459 - RNA, 19 nt, Homo sapiens
  misc_RNA (1)...(19): siRNA sense strand
ugaaugaggagauggaguu

SEQ ID NO: 2044460 - RNA, 19 nt, Homo sapiens
  misc_RNA (1)...(19): siRNA sense strand
gggcauauaccuggauuau

SEQ ID NO: 2044461 - RNA, 19 nt, Homo sapiens
  misc_RNA (1)...(19): siRNA sense strand
gaagggcagcuguccucua

SEQ ID NO: 2044462 - RNA, 19 nt, Homo sapiens
  misc_RNA (1)...(19): siRNA sense strand
gaaguagaaguagcaaaga

SEQ ID NO: 2044463 - RNA, 19 nt, Homo sapiens
  misc_RNA (1)...(19): siRNA sense strand
caaagguccuauccaguac

SEQ ID NO: 2044464 - RNA, 19 nt, Homo sapiens
  misc_RNA (1)...(19): siRNA sense strand
ugucagagaauccaucauu

SEQ ID NO: 2044465 - RNA, 19 nt, Homo sapiens
  misc_RNA (1)...(19): siRNA sense strand
gagagaauaaagaaccauu

SEQ ID NO: 2044466 - RNA, 19 nt, Homo sapiens
  misc_RNA (1)...(19): siRNA sense strand
ucgacaaggugggcauaua

SEQ ID NO: 2044467 - RNA, 19 nt, Homo sapiens
  misc_RNA (1)...(19): siRNA sense strand
gggcagcuguccucuaacu

SEQ ID NO: 2044468 - RNA, 19 nt, Homo sapiens
  misc_RNA (1)...(19): siRNA sense strand
cgucuggcauggugacauu

SEQ ID NO: 2044469 - RNA, 19 nt, Homo sapiens
  misc_RNA (1)...(19): siRNA sense strand
ucaggagcaaugucucuua

SEQ ID NO: 2044470 - RNA, 19 nt, Homo sapiens
  misc_RNA (1)...(19): siRNA sense strand
guagaaguagcaaagaaga

SEQ ID NO: 2044471 - RNA, 19 nt, Homo sapiens
  misc_RNA (1)...(19): siRNA sense strand
caaagacggaacaacagaa

SEQ ID NO: 2044472 - RNA, 19 nt, Homo sapiens
  misc_RNA (1)...(19): siRNA sense strand
aaguagaaguagcaaagaa

SEQ ID NO: 2044473 - RNA, 19 nt, Homo sapiens
  misc_RNA (1)...(19): siRNA sense strand
ugacucaaguguggcugua

SEQ ID NO: 2044474 - RNA, 19 nt, Homo sapiens
  misc_RNA (1)...(19): siRNA sense strand
aaacagcucacccaaaucu

SEQ ID NO: 2044475 - RNA, 19 nt, Homo sapiens
  misc_RNA (1)...(19): siRNA sense strand
auaccuggauuaugaagga

SEQ ID NO: 2044476 - RNA, 19 nt, Homo sapiens
  misc_RNA (1)...(19): siRNA sense strand
uaaugaugguggagagaau

SEQ ID NO: 2044477 - RNA, 19 nt, Homo sapiens
  misc_RNA (1)...(19): siRNA sense strand
aaccaugacucacauuuac

SEQ ID NO: 2044478 - RNA, 19 nt, Homo sapiens
  misc_RNA (1)...(19): siRNA sense strand
uucuaaagcugcaucaguu

SEQ ID NO: 2044479 - RNA, 19 nt, Homo sapiens
  misc_RNA (1)...(19): siRNA sense strand
gcucuggauuugccuucuu

SEQ ID NO: 2044480 - RNA, 19 nt, Homo sapiens
  misc_RNA (1)...(19): siRNA sense strand
caagcuacaucugcagcaa

SEQ ID NO: 2044481 - RNA, 19 nt, Homo sapiens
  misc_RNA (1)...(19): siRNA sense strand
caggagcaaugucucuuag

SEQ ID NO: 2044482 - RNA, 19 nt, Homo sapiens
  misc_RNA (1)...(19): siRNA sense strand
augaggagauggaguugaa

SEQ ID NO: 2044483 - RNA, 19 nt, Homo sapiens
  misc_RNA (1)...(19): siRNA sense strand
gcaaggauucuggcuuuua

SEQ ID NO: 2044484 - RNA, 19 nt, Homo sapiens
  misc_RNA (1)...(19): siRNA sense strand
uaaagaaccauugcacauc

SEQ ID NO: 2044485 - RNA, 19 nt, Homo sapiens
  misc_RNA (1)...(19): siRNA sense strand
uacaugguauggagggaaa

SEQ ID NO: 2044486 - RNA, 19 nt, Homo sapiens
  misc_RNA (1)...(19): siRNA sense strand
cuaaggaaccaaacugauc

SEQ ID NO: 2044487 - RNA, 19 nt, Homo sapiens
  misc_RNA (1)...(19): siRNA sense strand
gacuaaggaaccaaacuga

SEQ ID NO: 2044488 - RNA, 19 nt, Homo sapiens
  misc_RNA (1)...(19): siRNA sense strand
gaaguagcaaagaagacaa

SEQ ID NO: 2044489 - RNA, 19 nt, Homo sapiens
  misc_RNA (1)...(19): siRNA sense strand
ccauggaguuucuaaagcu

SEQ ID NO: 2044490 - RNA, 19 nt, Homo sapiens
  misc_RNA (1)...(19): siRNA sense strand
ucaguaacacuuucaugga

SEQ ID NO: 2044491 - RNA, 19 nt, Homo sapiens
  misc_RNA (1)...(19): siRNA sense strand
acaacucucuuacauagcu

SEQ ID NO: 2044492 - RNA, 19 nt, Homo sapiens
  misc_RNA (1)...(19): siRNA sense strand
gagaauaaagaaccauugc

SEQ ID NO: 2044493 - RNA, 19 nt, Homo sapiens
  misc_RNA (1)...(19): siRNA sense strand
gcaaagaagacaaaaugga

SEQ ID NO: 2044494 - RNA, 19 nt, Homo sapiens
  misc_RNA (1)...(19): siRNA sense strand
gaaaugcaggacacucucu

SEQ ID NO: 2044495 - RNA, 19 nt, Homo sapiens
  misc_RNA (1)...(19): siRNA sense strand
gagaaacuuuaucccuacu

SEQ ID NO: 2044496 - RNA, 19 nt, Homo sapiens
  misc_RNA (1)...(19): siRNA sense strand
cgacaaggugggcauauac

SEQ ID NO: 2044497 - RNA, 19 nt, Homo sapiens
  misc_RNA (1)...(19): siRNA sense strand
ggugacauuaagaagauaa

SEQ ID NO: 2044498 - RNA, 19 nt, Homo sapiens
  misc_RNA (1)...(19): siRNA sense strand
caguuggaguugucagaga

SEQ ID NO: 2044499 - RNA, 19 nt, Homo sapiens
  misc_RNA (1)...(19): siRNA sense strand
cugaugauccugagagguu

SEQ ID NO: 2044500 - RNA, 19 nt, Homo sapiens
  misc_RNA (1)...(19): siRNA sense strand
aagaagauaaugccugaug

SEQ ID NO: 2044501 - RNA, 19 nt, Homo sapiens
  misc_RNA (1)...(19): siRNA sense strand
aaagacaucacaacucucu

SEQ ID NO: 2044502 - RNA, 19 nt, Homo sapiens
  misc_RNA (1)...(19): siRNA sense strand
ugacuaacaaccucgacaa

SEQ ID NO: 2044503 - RNA, 19 nt, Homo sapiens
  misc_RNA (1)...(19): siRNA sense strand
gucugacacugacuaacaa

SEQ ID NO: 2044504 - RNA, 19 nt, Homo sapiens
  misc_RNA (1)...(19): siRNA sense strand
cauggugacauuaagaaga

SEQ ID NO: 2044505 - RNA, 19 nt, Homo sapiens
  misc_RNA (1)...(19): siRNA sense strand
caaccagagagcuuauuuc

SEQ ID NO: 2044506 - RNA, 19 nt, Homo sapiens
  misc_RNA (1)...(19): siRNA sense strand
gaggagauggaguugaauc

SEQ ID NO: 2044507 - RNA, 19 nt, Homo sapiens
  misc_RNA (1)...(19): siRNA sense strand
agaaccauugcacaucuua

SEQ ID NO: 2044508 - RNA, 19 nt, Homo sapiens
  misc_RNA (1)...(19): siRNA sense strand
gaaagugguacugggaagu

SEQ ID NO: 2044509 - RNA, 19 nt, Homo sapiens
  misc_RNA (1)...(19): siRNA sense strand
gaaugaggagauggaguug

SEQ ID NO: 2044510 - RNA, 19 nt, Homo sapiens
  misc_RNA (1)...(19): siRNA sense strand
uaaggaaccaaacugaucu

SEQ ID NO: 2044511 - RNA, 19 nt, Homo sapiens
  misc_RNA (1)...(19): siRNA sense strand
ugaugauccugagagguuu

SEQ ID NO: 2044512 - RNA, 19 nt, Homo sapiens
  misc_RNA (1)...(19): siRNA sense strand
gcagaaggaagcuauugcu

SEQ ID NO: 2044513 - RNA, 19 nt, Homo sapiens
  misc_RNA (1)...(19): siRNA sense strand
gggaaaugcaggacacucu

SEQ ID NO: 2044514 - RNA, 19 nt, Homo sapiens
  misc_RNA (1)...(19): siRNA sense strand
gauauguuggugagcauuc

SEQ ID NO: 2044515 - RNA, 19 nt, Homo sapiens
  misc_RNA (1)...(19): siRNA sense strand
ggcauggugacauuaagaa

SEQ ID NO: 2044516 - RNA, 19 nt, Homo sapiens
  misc_RNA (1)...(19): siRNA sense strand
aggcaaagacggaacaaca

SEQ ID NO: 2044517 - RNA, 19 nt, Homo sapiens
  misc_RNA (1)...(19): siRNA sense strand
gugggcauauaccuggauu

SEQ ID NO: 2044518 - RNA, 19 nt, Homo sapiens
  misc_RNA (1)...(19): siRNA sense strand
auaaagaaccauugcacau

SEQ ID NO: 2044519 - RNA, 19 nt, Homo sapiens
  misc_RNA (1)...(19): siRNA sense strand
gaugguggagagaauaaag

SEQ ID NO: 2044520 - RNA, 19 nt, Homo sapiens
  misc_RNA (1)...(19): siRNA sense strand
cacauuuacaccuucagua

SEQ ID NO: 2044521 - RNA, 19 nt, Homo sapiens
  misc_RNA (1)...(19): siRNA sense strand
cuacaucugcagcaacaug

SEQ ID NO: 2044522 - RNA, 19 nt, Homo sapiens
  misc_RNA (1)...(19): siRNA sense strand
uagcaaagaagacaaaaug

SEQ ID NO: 2044523 - RNA, 19 nt, Homo sapiens
  misc_RNA (1)...(19): siRNA sense strand
uauugcugcucacaaggaa

SEQ ID NO: 2044524 - RNA, 19 nt, Homo sapiens
  misc_RNA (1)...(19): siRNA sense strand
cagaacuccuucgacuuuc

SEQ ID NO: 2044525 - RNA, 19 nt, Homo sapiens
  misc_RNA (1)...(19): siRNA sense strand
caccuucaguaacacuuuc

SEQ ID NO: 2044526 - RNA, 19 nt, Homo sapiens
  misc_RNA (1)...(19): siRNA sense strand
caacucucuuacauagcuu

SEQ ID NO: 2044527 - RNA, 19 nt, Homo sapiens
  misc_RNA (1)...(19): siRNA sense strand
gaaccaaacugaucuaaag

SEQ ID NO: 2044528 - RNA, 19 nt, Homo sapiens
  misc_RNA (1)...(19): siRNA sense strand
gagcaaggauucuggcuuu

SEQ ID NO: 2044529 - RNA, 19 nt, Homo sapiens
  misc_RNA (1)...(19): siRNA sense strand
uaacugagcuccgggaaga

SEQ ID NO: 2044530 - RNA, 19 nt, Homo sapiens
  misc_RNA (1)...(19): siRNA sense strand
ucacaacucucuuacauag

SEQ ID NO: 2044531 - RNA, 19 nt, Homo sapiens
  misc_RNA (1)...(19): siRNA sense strand
gaaacuuuaucccuacuuc

SEQ ID NO: 2044532 - RNA, 19 nt, Homo sapiens
  misc_RNA (1)...(19): siRNA sense strand
ucaaagacaucacaacucu

SEQ ID NO: 2044533 - RNA, 19 nt, Homo sapiens
  misc_RNA (1)...(19): siRNA sense strand
caucacaacucucuuacau

SEQ ID NO: 2044534 - RNA, 19 nt, Homo sapiens
  misc_RNA (1)...(19): siRNA sense strand
acaaagguccuauccagua

SEQ ID NO: 2044535 - RNA, 19 nt, Homo sapiens
  misc_RNA (1)...(19): siRNA sense strand
ggauuugccuucuuucagu

SEQ ID NO: 2044536 - RNA, 19 nt, Homo sapiens
  misc_RNA (1)...(19): siRNA sense strand
uaaaacagcucacccaaau

SEQ ID NO: 2044537 - RNA, 19 nt, Homo sapiens
  misc_RNA (1)...(19): siRNA sense strand
aagggcagcuguccucuaa

SEQ ID NO: 2044538 - RNA, 19 nt, Homo sapiens
  misc_RNA (1)...(19): siRNA sense strand
gcaaccagagagcuuauuu

SEQ ID NO: 2044539 - RNA, 19 nt, Homo sapiens
  misc_RNA (1)...(19): siRNA sense strand
ggaaguagaaguagcaaag

SEQ ID NO: 2044540 - RNA, 19 nt, Homo sapiens
  misc_RNA (1)...(19): siRNA sense strand
agacaucacaacucucuua

SEQ ID NO: 2044541 - RNA, 19 nt, Homo sapiens
  misc_RNA (1)...(19): siRNA sense strand
ucuaaaggcucuggauuug

SEQ ID NO: 2044542 - RNA, 19 nt, Homo sapiens
  misc_RNA (1)...(19): siRNA sense strand
gcaaagacggaacaacaga

SEQ ID NO: 2044543 - RNA, 19 nt, Homo sapiens
  misc_RNA (1)...(19): siRNA sense strand
ugaggaacaugcagaagga

SEQ ID NO: 2044544 - RNA, 19 nt, Homo sapiens
  misc_RNA (1)...(19): siRNA sense strand
acagaacuccuucgacuuu

SEQ ID NO: 2044545 - RNA, 19 nt, Homo sapiens
  misc_RNA (1)...(19): siRNA sense strand
aaaccaugacucacauuua

SEQ ID NO: 2044546 - RNA, 19 nt, Homo sapiens
  misc_RNA (1)...(19): siRNA sense strand
gauaaugccugaugauccu

SEQ ID NO: 2044547 - RNA, 19 nt, Homo sapiens
  misc_RNA (1)...(19): siRNA sense strand
gaagauaaugccugaugau

SEQ ID NO: 2044548 - RNA, 19 nt, Homo sapiens
  misc_RNA (1)...(19): siRNA sense strand
guaacacuuucauggagaa

SEQ ID NO: 2044549 - RNA, 19 nt, Homo sapiens
  misc_RNA (1)...(19): siRNA sense strand
ugacucacauuuacaccuu

SEQ ID NO: 2044550 - RNA, 19 nt, Homo sapiens
  misc_RNA (1)...(19): siRNA sense strand
ggaaccaaacugaucuaaa

SEQ ID NO: 2044551 - RNA, 19 nt, Homo sapiens
  misc_RNA (1)...(19): siRNA sense strand
gaucuaaaggcucuggauu

SEQ ID NO: 2044552 - RNA, 19 nt, Homo sapiens
  misc_RNA (1)...(19): siRNA sense strand
ccaggccugucuccacuaa

SEQ ID NO: 2044553 - RNA, 19 nt, Homo sapiens
  misc_RNA (1)...(19): siRNA sense strand
cacuaacucuggacccuaa

SEQ ID NO: 2044554 - RNA, 19 nt, Homo sapiens
  misc_RNA (1)...(19): siRNA sense strand
aaagaaccauugcacaucu

SEQ ID NO: 2044555 - RNA, 19 nt, Homo sapiens
  misc_RNA (1)...(19): siRNA sense strand
agaagauaaugccugauga

SEQ ID NO: 2044556 - RNA, 19 nt, Homo sapiens
  misc_RNA (1)...(19): siRNA sense strand
caaaucuggugcucuccaa

SEQ ID NO: 2044557 - RNA, 19 nt, Homo sapiens
  misc_RNA (1)...(19): siRNA sense strand
caacuggagacaacucuga

SEQ ID NO: 2044558 - RNA, 19 nt, Homo sapiens
  misc_RNA (1)...(19): siRNA sense strand
caaggauucuggcuuuuaa

SEQ ID NO: 2044559 - RNA, 19 nt, Homo sapiens
  misc_RNA (1)...(19): siRNA sense strand
ugaaugaggagauggaguu

SEQ ID NO: 2044560 - RNA, 19 nt, Homo sapiens
  misc_RNA (1)...(19): siRNA sense strand
gggcauauaccuggauuau

SEQ ID NO: 2044561 - RNA, 19 nt, Homo sapiens
  misc_RNA (1)...(19): siRNA sense strand
gaagggcagcuguccucua

SEQ ID NO: 2044562 - RNA, 19 nt, Homo sapiens
  misc_RNA (1)...(19): siRNA sense strand
gaaguagaaguagcaaaga

SEQ ID NO: 2044563 - RNA, 19 nt, Homo sapiens
  misc_RNA (1)...(19): siRNA sense strand
caaagguccuauccaguac

SEQ ID NO: 2044564 - RNA, 19 nt, Homo sapiens
  misc_RNA (1)...(19): siRNA sense strand
ugucagagaauccaucauu

SEQ ID NO: 2044565 - RNA, 19 nt, Homo sapiens
  misc_RNA (1)...(19): siRNA sense strand
gagagaauaaagaaccauu

SEQ ID NO: 2044566 - RNA, 19 nt, Homo sapiens
  misc_RNA (1)...(19): siRNA sense strand
ucgacaaggugggcauaua

SEQ ID NO: 2044567 - RNA, 19 nt, Homo sapiens
  misc_RNA (1)...(19): siRNA sense strand
gggcagcuguccucuaacu

SEQ ID NO: 2044568 - RNA, 19 nt, Homo sapiens
  misc_RNA (1)...(19): siRNA sense strand
cgucuggcauggugacauu

SEQ ID NO: 2044569 - RNA, 19 nt, Homo sapiens
  misc_RNA (1)...(19): siRNA sense strand
ucaggagcaaugucucuua

SEQ ID NO: 2044570 - RNA, 19 nt, Homo sapiens
  misc_RNA (1)...(19): siRNA sense strand
guagaaguagcaaagaaga

SEQ ID NO: 2044571 - RNA, 19 nt, Homo sapiens
  misc_RNA (1)...(19): siRNA sense strand
caaagacggaacaacagaa

SEQ ID NO: 2044572 - RNA, 19 nt, Homo sapiens
  misc_RNA (1)...(19): siRNA sense strand
aaguagaaguagcaaagaa

SEQ ID NO: 2044573 - RNA, 19 nt, Homo sapiens
  misc_RNA (1)...(19): siRNA sense strand
ugacucaaguguggcugua

SEQ ID NO: 2044574 - RNA, 19 nt, Homo sapiens
  misc_RNA (1)...(19): siRNA sense strand
aaacagcucacccaaaucu

SEQ ID NO: 2044575 - RNA, 19 nt, Homo sapiens
  misc_RNA (1)...(19): siRNA sense strand
auaccuggauuaugaagga

SEQ ID NO: 2044576 - RNA, 19 nt, Homo sapiens
  misc_RNA (1)...(19): siRNA sense strand
uaaugaugguggagagaau

SEQ ID NO: 2044577 - RNA, 19 nt, Homo sapiens
  misc_RNA (1)...(19): siRNA sense strand
aaccaugacucacauuuac

SEQ ID NO: 2044578 - RNA, 19 nt, Homo sapiens
  misc_RNA (1)...(19): siRNA sense strand
uucuaaagcugcaucaguu

SEQ ID NO: 2044579 - RNA, 19 nt, Homo sapiens
  misc_RNA (1)...(19): siRNA sense strand
gcucuggauuugccuucuu

SEQ ID NO: 2044580 - RNA, 19 nt, Homo sapiens
  misc_RNA (1)...(19): siRNA sense strand
caagcuacaucugcagcaa

SEQ ID NO: 2044581 - RNA, 19 nt, Homo sapiens
  misc_RNA (1)...(19): siRNA sense strand
caggagcaaugucucuuag

SEQ ID NO: 2044582 - RNA, 19 nt, Homo sapiens
  misc_RNA (1)...(19): siRNA sense strand
augaggagauggaguugaa

SEQ ID NO: 2044583 - RNA, 19 nt, Homo sapiens
  misc_RNA (1)...(19): siRNA sense strand
gcaaggauucuggcuuuua

SEQ ID NO: 2044584 - RNA, 19 nt, Homo sapiens
  misc_RNA (1)...(19): siRNA sense strand
uaaagaaccauugcacauc

SEQ ID NO: 2044585 - RNA, 19 nt, Homo sapiens
  misc_RNA (1)...(19): siRNA sense strand
uacaugguauggagggaaa

SEQ ID NO: 2044586 - RNA, 19 nt, Homo sapiens
  misc_RNA (1)...(19): siRNA sense strand
cuaaggaaccaaacugauc

SEQ ID NO: 2044587 - RNA, 19 nt, Homo sapiens
  misc_RNA (1)...(19): siRNA sense strand
gacuaaggaaccaaacuga

SEQ ID NO: 2044588 - RNA, 19 nt, Homo sapiens
  misc_RNA (1)...(19): siRNA sense strand
gaaguagcaaagaagacaa

SEQ ID NO: 2044589 - RNA, 19 nt, Homo sapiens
  misc_RNA (1)...(19): siRNA sense strand
ccauggaguuucuaaagcu

SEQ ID NO: 2044590 - RNA, 19 nt, Homo sapiens
  misc_RNA (1)...(19): siRNA sense strand
ucaguaacacuuucaugga

SEQ ID NO: 2044591 - RNA, 19 nt, Homo sapiens
  misc_RNA (1)...(19): siRNA sense strand
acaacucucuuacauagcu

SEQ ID NO: 2044592 - RNA, 19 nt, Homo sapiens
  misc_RNA (1)...(19): siRNA sense strand
gagaauaaagaaccauugc

SEQ ID NO: 2044593 - RNA, 19 nt, Homo sapiens
  misc_RNA (1)...(19): siRNA sense strand
gcaaagaagacaaaaugga

SEQ ID NO: 2044594 - RNA, 19 nt, Homo sapiens
  misc_RNA (1)...(19): siRNA sense strand
gaaaugcaggacacucucu

SEQ ID NO: 2044595 - RNA, 19 nt, Homo sapiens
  misc_RNA (1)...(19): siRNA sense strand
gagaaacuuuaucccuacu

SEQ ID NO: 2044596 - RNA, 19 nt, Homo sapiens
  misc_RNA (1)...(19): siRNA sense strand
cgacaaggugggcauauac

SEQ ID NO: 2044597 - RNA, 19 nt, Homo sapiens
  misc_RNA (1)...(19): siRNA sense strand
ggugacauuaagaagauaa

SEQ ID NO: 2044598 - RNA, 19 nt, Homo sapiens
  misc_RNA (1)...(19): siRNA sense strand
caguuggaguugucagaga

SEQ ID NO: 2044599 - RNA, 19 nt, Homo sapiens
  misc_RNA (1)...(19): siRNA sense strand
cugaugauccugagagguu

SEQ ID NO: 2044600 - RNA, 19 nt, Homo sapiens
  misc_RNA (1)...(19): siRNA sense strand
aagaagauaaugccugaug

SEQ ID NO: 2044601 - RNA, 19 nt, Homo sapiens
  misc_RNA (1)...(19): siRNA sense strand
aaagacaucacaacucucu

SEQ ID NO: 2044602 - RNA, 19 nt, Homo sapiens
  misc_RNA (1)...(19): siRNA sense strand
ugacuaacaaccucgacaa

SEQ ID NO: 2044603 - RNA, 19 nt, Homo sapiens
  misc_RNA (1)...(19): siRNA sense strand
gucugacacugacuaacaa

SEQ ID NO: 2044604 - RNA, 19 nt, Homo sapiens
  misc_RNA (1)...(19): siRNA sense strand
cauggugacauuaagaaga

SEQ ID NO: 2044605 - RNA, 19 nt, Homo sapiens
  misc_RNA (1)...(19): siRNA sense strand
caaccagagagcuuauuuc

SEQ ID NO: 2044606 - RNA, 19 nt, Homo sapiens
  misc_RNA (1)...(19): siRNA sense strand
gaggagauggaguugaauc

SEQ ID NO: 2044607 - RNA, 19 nt, Homo sapiens
  misc_RNA (1)...(19): siRNA sense strand
agaaccauugcacaucuua

SEQ ID NO: 2044608 - RNA, 19 nt, Homo sapiens
  misc_RNA (1)...(19): siRNA sense strand
gaaagugguacugggaagu

SEQ ID NO: 2044609 - RNA, 19 nt, Homo sapiens
  misc_RNA (1)...(19): siRNA sense strand
gaaugaggagauggaguug

SEQ ID NO: 2044610 - RNA, 19 nt, Homo sapiens
  misc_RNA (1)...(19): siRNA sense strand
uaaggaaccaaacugaucu

SEQ ID NO: 2044611 - RNA, 19 nt, Homo sapiens
  misc_RNA (1)...(19): siRNA sense strand
ugaugauccugagagguuu

SEQ ID NO: 2044612 - RNA, 19 nt, Homo sapiens
  misc_RNA (1)...(19): siRNA sense strand
gcagaaggaagcuauugcu

SEQ ID NO: 2044613 - RNA, 19 nt, Homo sapiens
  misc_RNA (1)...(19): siRNA sense strand
gggaaaugcaggacacucu

SEQ ID NO: 2044614 - RNA, 19 nt, Homo sapiens
  misc_RNA (1)...(19): siRNA sense strand
gauauguuggugagcauuc

SEQ ID NO: 2044615 - RNA, 19 nt, Homo sapiens
  misc_RNA (1)...(19): siRNA sense strand
ggcauggugacauuaagaa

SEQ ID NO: 2044616 - RNA, 19 nt, Homo sapiens
  misc_RNA (1)...(19): siRNA sense strand
aggcaaagacggaacaaca

SEQ ID NO: 2044617 - RNA, 19 nt, Homo sapiens
  misc_RNA (1)...(19): siRNA sense strand
gugggcauauaccuggauu

SEQ ID NO: 2044618 - RNA, 19 nt, Homo sapiens
  misc_RNA (1)...(19): siRNA sense strand
auaaagaaccauugcacau

SEQ ID NO: 2044619 - RNA, 19 nt, Homo sapiens
  misc_RNA (1)...(19): siRNA sense strand
gaugguggagagaauaaag

SEQ ID NO: 2044620 - RNA, 19 nt, Homo sapiens
  misc_RNA (1)...(19): siRNA sense strand
cacauuuacaccuucagua

SEQ ID NO: 2044621 - RNA, 19 nt, Homo sapiens
  misc_RNA (1)...(19): siRNA sense strand
cuacaucugcagcaacaug

SEQ ID NO: 2044622 - RNA, 19 nt, Homo sapiens
  misc_RNA (1)...(19): siRNA sense strand
uagcaaagaagacaaaaug

SEQ ID NO: 2044623 - RNA, 19 nt, Homo sapiens
  misc_RNA (1)...(19): siRNA sense strand
uauugcugcucacaaggaa

SEQ ID NO: 2044624 - RNA, 19 nt, Homo sapiens
  misc_RNA (1)...(19): siRNA sense strand
cagaacuccuucgacuuuc

SEQ ID NO: 2044625 - RNA, 19 nt, Homo sapiens
  misc_RNA (1)...(19): siRNA sense strand
caccuucaguaacacuuuc

SEQ ID NO: 2044626 - RNA, 19 nt, Homo sapiens
  misc_RNA (1)...(19): siRNA sense strand
caacucucuuacauagcuu

SEQ ID NO: 2044627 - RNA, 19 nt, Homo sapiens
  misc_RNA (1)...(19): siRNA sense strand
gaaccaaacugaucuaaag

SEQ ID NO: 2044628 - RNA, 19 nt, Homo sapiens
  misc_RNA (1)...(19): siRNA sense strand
gagcaaggauucuggcuuu

SEQ ID NO: 2044629 - RNA, 19 nt, Homo sapiens
  misc_RNA (1)...(19): siRNA sense strand
uaacugagcuccgggaaga

SEQ ID NO: 2044630 - RNA, 19 nt, Homo sapiens
  misc_RNA (1)...(19): siRNA sense strand
ucacaacucucuuacauag

SEQ ID NO: 2044631 - RNA, 19 nt, Homo sapiens
  misc_RNA (1)...(19): siRNA sense strand
gaaacuuuaucccuacuuc

SEQ ID NO: 2044632 - RNA, 19 nt, Homo sapiens
  misc_RNA (1)...(19): siRNA sense strand
ucaaagacaucacaacucu

SEQ ID NO: 2044633 - RNA, 19 nt, Homo sapiens
  misc_RNA (1)...(19): siRNA sense strand
caucacaacucucuuacau

SEQ ID NO: 2044634 - RNA, 19 nt, Homo sapiens
  misc_RNA (1)...(19): siRNA sense strand
acaaagguccuauccagua

SEQ ID NO: 2044635 - RNA, 19 nt, Homo sapiens
  misc_RNA (1)...(19): siRNA sense strand
ggauuugccuucuuucagu

SEQ ID NO: 2044636 - RNA, 19 nt, Homo sapiens
  misc_RNA (1)...(19): siRNA sense strand
uaaaacagcucacccaaau

SEQ ID NO: 2044637 - RNA, 19 nt, Homo sapiens
  misc_RNA (1)...(19): siRNA sense strand
aagggcagcuguccucuaa

SEQ ID NO: 2044638 - RNA, 19 nt, Homo sapiens
  misc_RNA (1)...(19): siRNA sense strand
gcaaccagagagcuuauuu

SEQ ID NO: 2044639 - RNA, 19 nt, Homo sapiens
  misc_RNA (1)...(19): siRNA sense strand
ggaaguagaaguagcaaag

SEQ ID NO: 2044640 - RNA, 19 nt, Homo sapiens
  misc_RNA (1)...(19): siRNA sense strand
agacaucacaacucucuua

SEQ ID NO: 2044641 - RNA, 19 nt, Homo sapiens
  misc_RNA (1)...(19): siRNA sense strand
ucuaaaggcucuggauuug

SEQ ID NO: 2044642 - RNA, 19 nt, Homo sapiens
  misc_RNA (1)...(19): siRNA sense strand
gcaaagacggaacaacaga

SEQ ID NO: 2044643 - RNA, 19 nt, Homo sapiens
  misc_RNA (1)...(19): siRNA sense strand
ugaggaacaugcagaagga

SEQ ID NO: 2044644 - RNA, 19 nt, Homo sapiens
  misc_RNA (1)...(19): siRNA sense strand
acagaacuccuucgacuuu

SEQ ID NO: 2044645 - RNA, 19 nt, Homo sapiens
  misc_RNA (1)...(19): siRNA sense strand
aaaccaugacucacauuua

SEQ ID NO: 2044646 - RNA, 19 nt, Homo sapiens
  misc_RNA (1)...(19): siRNA sense strand
gauaaugccugaugauccu

SEQ ID NO: 2044647 - RNA, 19 nt, Homo sapiens
  misc_RNA (1)...(19): siRNA sense strand
gaagauaaugccugaugau

SEQ ID NO: 2044648 - RNA, 19 nt, Homo sapiens
  misc_RNA (1)...(19): siRNA sense strand
guaacacuuucauggagaa

SEQ ID NO: 2044649 - RNA, 19 nt, Homo sapiens
  misc_RNA (1)...(19): siRNA sense strand
ugacucacauuuacaccuu

SEQ ID NO: 2044650 - RNA, 19 nt, Homo sapiens
  misc_RNA (1)...(19): siRNA sense strand
ggaaccaaacugaucuaaa

SEQ ID NO: 2044651 - RNA, 19 nt, Homo sapiens
  misc_RNA (1)...(19): siRNA sense strand
gaucuaaaggcucuggauu

SEQ ID NO: 2044652 - RNA, 19 nt, Homo sapiens
  misc_RNA (1)...(19): siRNA sense strand
ccaggccugucuccacuaa

SEQ ID NO: 2044653 - RNA, 19 nt, Homo sapiens
  misc_RNA (1)...(19): siRNA sense strand
cacuaacucuggacccuaa

SEQ ID NO: 2044654 - RNA, 19 nt, Homo sapiens
  misc_RNA (1)...(19): siRNA sense strand
aaagaaccauugcacaucu

SEQ ID NO: 2044655 - RNA, 19 nt, Homo sapiens
  misc_RNA (1)...(19): siRNA sense strand
agaagauaaugccugauga

SEQ ID NO: 2044656 - RNA, 19 nt, Homo sapiens
  misc_RNA (1)...(19): siRNA sense strand
caaaucuggugcucuccaa

SEQ ID NO: 2044657 - RNA, 19 nt, Homo sapiens
  misc_RNA (1)...(19): siRNA sense strand
caacuggagacaacucuga

SEQ ID NO: 2044658 - RNA, 19 nt, Homo sapiens
  misc_RNA (1)...(19): siRNA sense strand
caaggauucuggcuuuuaa

SEQ ID NO: 2044659 - RNA, 19 nt, Homo sapiens
  misc_RNA (1)...(19): siRNA sense strand
ugaaugaggagauggaguu

SEQ ID NO: 2044660 - RNA, 19 nt, Homo sapiens
  misc_RNA (1)...(19): siRNA sense strand
gggcauauaccuggauuau

SEQ ID NO: 2044661 - RNA, 19 nt, Homo sapiens
  misc_RNA (1)...(19): siRNA sense strand
gaagggcagcuguccucua

SEQ ID NO: 2044662 - RNA, 19 nt, Homo sapiens
  misc_RNA (1)...(19): siRNA sense strand
gaaguagaaguagcaaaga

SEQ ID NO: 2044663 - RNA, 19 nt, Homo sapiens
  misc_RNA (1)...(19): siRNA sense strand
caaagguccuauccaguac

SEQ ID NO: 2044664 - RNA, 19 nt, Homo sapiens
  misc_RNA (1)...(19): siRNA sense strand
ugucagagaauccaucauu

SEQ ID NO: 2044665 - RNA, 19 nt, Homo sapiens
  misc_RNA (1)...(19): siRNA sense strand
gagagaauaaagaaccauu

SEQ ID NO: 2044666 - RNA, 19 nt, Homo sapiens
  misc_RNA (1)...(19): siRNA sense strand
ucgacaaggugggcauaua

SEQ ID NO: 2044667 - RNA, 19 nt, Homo sapiens
  misc_RNA (1)...(19): siRNA sense strand
gggcagcuguccucuaacu

SEQ ID NO: 2044668 - RNA, 19 nt, Homo sapiens
  misc_RNA (1)...(19): siRNA sense strand
cgucuggcauggugacauu

SEQ ID NO: 2044669 - RNA, 19 nt, Homo sapiens
  misc_RNA (1)...(19): siRNA sense strand
ucaggagcaaugucucuua

SEQ ID NO: 2044670 - RNA, 19 nt, Homo sapiens
  misc_RNA (1)...(19): siRNA sense strand
guagaaguagcaaagaaga

SEQ ID NO: 2044671 - RNA, 19 nt, Homo sapiens
  misc_RNA (1)...(19): siRNA sense strand
caaagacggaacaacagaa

SEQ ID NO: 2044672 - RNA, 19 nt, Homo sapiens
  misc_RNA (1)...(19): siRNA sense strand
aaguagaaguagcaaagaa

SEQ ID NO: 2044673 - RNA, 19 nt, Homo sapiens
  misc_RNA (1)...(19): siRNA sense strand
ugacucaaguguggcugua

SEQ ID NO: 2044674 - RNA, 19 nt, Homo sapiens
  misc_RNA (1)...(19): siRNA sense strand
aaacagcucacccaaaucu

SEQ ID NO: 2044675 - RNA, 19 nt, Homo sapiens
  misc_RNA (1)...(19): siRNA sense strand
auaccuggauuaugaagga

SEQ ID NO: 2044676 - RNA, 19 nt, Homo sapiens
  misc_RNA (1)...(19): siRNA sense strand
uaaugaugguggagagaau

SEQ ID NO: 2044677 - RNA, 19 nt, Homo sapiens
  misc_RNA (1)...(19): siRNA sense strand
aaccaugacucacauuuac

SEQ ID NO: 2044678 - RNA, 19 nt, Homo sapiens
  misc_RNA (1)...(19): siRNA sense strand
uucuaaagcugcaucaguu

SEQ ID NO: 2044679 - RNA, 19 nt, Homo sapiens
  misc_RNA (1)...(19): siRNA sense strand
gcucuggauuugccuucuu

SEQ ID NO: 2044680 - RNA, 19 nt, Homo sapiens
  misc_RNA (1)...(19): siRNA sense strand
caagcuacaucugcagcaa

SEQ ID NO: 2044681 - RNA, 19 nt, Homo sapiens
  misc_RNA (1)...(19): siRNA sense strand
caggagcaaugucucuuag

SEQ ID NO: 2044682 - RNA, 19 nt, Homo sapiens
  misc_RNA (1)...(19): siRNA sense strand
augaggagauggaguugaa

SEQ ID NO: 2044683 - RNA, 19 nt, Homo sapiens
  misc_RNA (1)...(19): siRNA sense strand
gcaaggauucuggcuuuua

SEQ ID NO: 2044684 - RNA, 19 nt, Homo sapiens
  misc_RNA (1)...(19): siRNA sense strand
uaaagaaccauugcacauc

SEQ ID NO: 2044685 - RNA, 19 nt, Homo sapiens
  misc_RNA (1)...(19): siRNA sense strand
uacaugguauggagggaaa

SEQ ID NO: 2044686 - RNA, 19 nt, Homo sapiens
  misc_RNA (1)...(19): siRNA sense strand
cuaaggaaccaaacugauc

SEQ ID NO: 2044687 - RNA, 19 nt, Homo sapiens
  misc_RNA (1)...(19): siRNA sense strand
gacuaaggaaccaaacuga

SEQ ID NO: 2044688 - RNA, 19 nt, Homo sapiens
  misc_RNA (1)...(19): siRNA sense strand
gaaguagcaaagaagacaa

SEQ ID NO: 2044689 - RNA, 19 nt, Homo sapiens
  misc_RNA (1)...(19): siRNA sense strand
ccauggaguuucuaaagcu

SEQ ID NO: 2044690 - RNA, 19 nt, Homo sapiens
  misc_RNA (1)...(19): siRNA sense strand
ucaguaacacuuucaugga

SEQ ID NO: 2044691 - RNA, 19 nt, Homo sapiens
  misc_RNA (1)...(19): siRNA sense strand
acaacucucuuacauagcu

SEQ ID NO: 2044692 - RNA, 19 nt, Homo sapiens
  misc_RNA (1)...(19): siRNA sense strand
gagaauaaagaaccauugc

SEQ ID NO: 2044693 - RNA, 19 nt, Homo sapiens
  misc_RNA (1)...(19): siRNA sense strand
gcaaagaagacaaaaugga

SEQ ID NO: 2044694 - RNA, 19 nt, Homo sapiens
  misc_RNA (1)...(19): siRNA sense strand
gaaaugcaggacacucucu

SEQ ID NO: 2044695 - RNA, 19 nt, Homo sapiens
  misc_RNA (1)...(19): siRNA sense strand
gagaaacuuuaucccuacu

SEQ ID NO: 2044696 - RNA, 19 nt, Homo sapiens
  misc_RNA (1)...(19): siRNA sense strand
cgacaaggugggcauauac

SEQ ID NO: 2044697 - RNA, 19 nt, Homo sapiens
  misc_RNA (1)...(19): siRNA sense strand
ggugacauuaagaagauaa

SEQ ID NO: 2044698 - RNA, 19 nt, Homo sapiens
  misc_RNA (1)...(19): siRNA sense strand
caguuggaguugucagaga

SEQ ID NO: 2044699 - RNA, 19 nt, Homo sapiens
  misc_RNA (1)...(19): siRNA sense strand
cugaugauccugagagguu

SEQ ID NO: 2044700 - RNA, 19 nt, Homo sapiens
  misc_RNA (1)...(19): siRNA sense strand
aagaagauaaugccugaug

SEQ ID NO: 2044701 - RNA, 19 nt, Homo sapiens
  misc_RNA (1)...(19): siRNA sense strand
aaagacaucacaacucucu

SEQ ID NO: 2044702 - RNA, 19 nt, Homo sapiens
  misc_RNA (1)...(19): siRNA sense strand
ugacuaacaaccucgacaa

SEQ ID NO: 2044703 - RNA, 19 nt, Homo sapiens
  misc_RNA (1)...(19): siRNA sense strand
gucugacacugacuaacaa

SEQ ID NO: 2044704 - RNA, 19 nt, Homo sapiens
  misc_RNA (1)...(19): siRNA sense strand
cauggugacauuaagaaga

SEQ ID NO: 2044705 - RNA, 19 nt, Homo sapiens
  misc_RNA (1)...(19): siRNA sense strand
caaccagagagcuuauuuc

SEQ ID NO: 2044706 - RNA, 19 nt, Homo sapiens
  misc_RNA (1)...(19): siRNA sense strand
gaggagauggaguugaauc

SEQ ID NO: 2044707 - RNA, 19 nt, Homo sapiens
  misc_RNA (1)...(19): siRNA sense strand
agaaccauugcacaucuua

SEQ ID NO: 2044708 - RNA, 19 nt, Homo sapiens
  misc_RNA (1)...(19): siRNA sense strand
gaaagugguacugggaagu

SEQ ID NO: 2044709 - RNA, 19 nt, Homo sapiens
  misc_RNA (1)...(19): siRNA sense strand
gaaugaggagauggaguug

SEQ ID NO: 2044710 - RNA, 19 nt, Homo sapiens
  misc_RNA (1)...(19): siRNA sense strand
uaaggaaccaaacugaucu

SEQ ID NO: 2044711 - RNA, 19 nt, Homo sapiens
  misc_RNA (1)...(19): siRNA sense strand
ugaugauccugagagguuu

SEQ ID NO: 2044712 - RNA, 19 nt, Homo sapiens
  misc_RNA (1)...(19): siRNA sense strand
gcagaaggaagcuauugcu

SEQ ID NO: 2044713 - RNA, 19 nt, Homo sapiens
  misc_RNA (1)...(19): siRNA sense strand
gggaaaugcaggacacucu

SEQ ID NO: 2044714 - RNA, 19 nt, Homo sapiens
  misc_RNA (1)...(19): siRNA sense strand
gauauguuggugagcauuc

SEQ ID NO: 2044715 - RNA, 19 nt, Homo sapiens
  misc_RNA (1)...(19): siRNA sense strand
ggcauggugacauuaagaa

SEQ ID NO: 2044716 - RNA, 19 nt, Homo sapiens
  misc_RNA (1)...(19): siRNA sense strand
aggcaaagacggaacaaca

SEQ ID NO: 2044717 - RNA, 19 nt, Homo sapiens
  misc_RNA (1)...(19): siRNA sense strand
gugggcauauaccuggauu

SEQ ID NO: 2044718 - RNA, 19 nt, Homo sapiens
  misc_RNA (1)...(19): siRNA sense strand
auaaagaaccauugcacau

SEQ ID NO: 2044719 - RNA, 19 nt, Homo sapiens
  misc_RNA (1)...(19): siRNA sense strand
gaugguggagagaauaaag

SEQ ID NO: 2044720 - RNA, 19 nt, Homo sapiens
  misc_RNA (1)...(19): siRNA sense strand
cacauuuacaccuucagua

SEQ ID NO: 2044721 - RNA, 19 nt, Homo sapiens
  misc_RNA (1)...(19): siRNA sense strand
cuacaucugcagcaacaug

SEQ ID NO: 2044722 - RNA, 19 nt, Homo sapiens
  misc_RNA (1)...(19): siRNA sense strand
uagcaaagaagacaaaaug

SEQ ID NO: 2044723 - RNA, 19 nt, Homo sapiens
  misc_RNA (1)...(19): siRNA sense strand
uauugcugcucacaaggaa

SEQ ID NO: 2044724 - RNA, 19 nt, Homo sapiens
  misc_RNA (1)...(19): siRNA sense strand
cagaacuccuucgacuuuc

SEQ ID NO: 2044725 - RNA, 19 nt, Homo sapiens
  misc_RNA (1)...(19): siRNA sense strand
caccuucaguaacacuuuc

SEQ ID NO: 2044726 - RNA, 19 nt, Homo sapiens
  misc_RNA (1)...(19): siRNA sense strand
caacucucuuacauagcuu

SEQ ID NO: 2044727 - RNA, 19 nt, Homo sapiens
  misc_RNA (1)...(19): siRNA sense strand
ccacagaaccuccucauua

SEQ ID NO: 2044728 - RNA, 19 nt, Homo sapiens
  misc_RNA (1)...(19): siRNA sense strand
gauaaacaguccaccauuu

SEQ ID NO: 2044729 - RNA, 19 nt, Homo sapiens
  misc_RNA (1)...(19): siRNA sense strand
ggaagcagauuagauauug

SEQ ID NO: 2044730 - RNA, 19 nt, Homo sapiens
  misc_RNA (1)...(19): siRNA sense strand
cagaauaccugauggauau

SEQ ID NO: 2044731 - RNA, 19 nt, Homo sapiens
  misc_RNA (1)...(19): siRNA sense strand
gaaaggagaauuaaagcua

SEQ ID NO: 2044732 - RNA, 19 nt, Homo sapiens
  misc_RNA (1)...(19): siRNA sense strand
gaaguaaauugacagagaa

SEQ ID NO: 2044733 - RNA, 19 nt, Homo sapiens
  misc_RNA (1)...(19): siRNA sense strand
ugaauuggcugaacaaaug

SEQ ID NO: 2044734 - RNA, 19 nt, Homo sapiens
  misc_RNA (1)...(19): siRNA sense strand
auaaagaccugaaacagua

SEQ ID NO: 2044735 - RNA, 19 nt, Homo sapiens
  misc_RNA (1)...(19): siRNA sense strand
ggaauugaguugauaacaa

SEQ ID NO: 2044736 - RNA, 19 nt, Homo sapiens
  misc_RNA (1)...(19): siRNA sense strand
gaucaaccguggaagauga

SEQ ID NO: 2044737 - RNA, 19 nt, Homo sapiens
  misc_RNA (1)...(19): siRNA sense strand
ccacaaagaccuacucaaa

SEQ ID NO: 2044738 - RNA, 19 nt, Homo sapiens
  misc_RNA (1)...(19): siRNA sense strand
acaaagaccuacucaaaug

SEQ ID NO: 2044739 - RNA, 19 nt, Homo sapiens
  misc_RNA (1)...(19): siRNA sense strand
cacagaaccuccucauuaa

SEQ ID NO: 2044740 - RNA, 19 nt, Homo sapiens
  misc_RNA (1)...(19): siRNA sense strand
gaagaugaacugcacuuaa

SEQ ID NO: 2044741 - RNA, 19 nt, Homo sapiens
  misc_RNA (1)...(19): siRNA sense strand
gaacaaaugacuauugaag

SEQ ID NO: 2044742 - RNA, 19 nt, Homo sapiens
  misc_RNA (1)...(19): siRNA sense strand
caaaugaggaguucaagaa

SEQ ID NO: 2044743 - RNA, 19 nt, Homo sapiens
  misc_RNA (1)...(19): siRNA sense strand
guacauaugcaacaguaua

SEQ ID NO: 2044744 - RNA, 19 nt, Homo sapiens
  misc_RNA (1)...(19): siRNA sense strand
ggauuuaaauaagcgguua

SEQ ID NO: 2044745 - RNA, 19 nt, Homo sapiens
  misc_RNA (1)...(19): siRNA sense strand
guuagacucugaaggaauu

SEQ ID NO: 2044746 - RNA, 19 nt, Homo sapiens
  misc_RNA (1)...(19): siRNA sense strand
gauaaugagccuauuguga

SEQ ID NO: 2044747 - RNA, 19 nt, Homo sapiens
  misc_RNA (1)...(19): siRNA sense strand
gauaaauccuugacuuugg

SEQ ID NO: 2044748 - RNA, 19 nt, Homo sapiens
  misc_RNA (1)...(19): siRNA sense strand
gaaaacagcagcaaggaua

SEQ ID NO: 2044749 - RNA, 19 nt, Homo sapiens
  misc_RNA (1)...(19): siRNA sense strand
ccaagucaguucccacaaa

SEQ ID NO: 2044750 - RNA, 19 nt, Homo sapiens
  misc_RNA (1)...(19): siRNA sense strand
ugacuuugguguuugagua

SEQ ID NO: 2044751 - RNA, 19 nt, Homo sapiens
  misc_RNA (1)...(19): siRNA sense strand
agaaguaaauugacagaga

SEQ ID NO: 2044752 - RNA, 19 nt, Homo sapiens
  misc_RNA (1)...(19): siRNA sense strand
ggaacuccaucucaggaaa

SEQ ID NO: 2044753 - RNA, 19 nt, Homo sapiens
  misc_RNA (1)...(19): siRNA sense strand
gaccaagaauacaugcuuu

SEQ ID NO: 2044754 - RNA, 19 nt, Homo sapiens
  misc_RNA (1)...(19): siRNA sense strand
ugaaggaauugaguugaua

SEQ ID NO: 2044755 - RNA, 19 nt, Homo sapiens
  misc_RNA (1)...(19): siRNA sense strand
gcaacaguauauaaaggaa

SEQ ID NO: 2044756 - RNA, 19 nt, Homo sapiens
  misc_RNA (1)...(19): siRNA sense strand
ggccagguauuucuucaaa

SEQ ID NO: 2044757 - RNA, 19 nt, Homo sapiens
  misc_RNA (1)...(19): siRNA sense strand
caaaugaaguugucacacu

SEQ ID NO: 2044758 - RNA, 19 nt, Homo sapiens
  misc_RNA (1)...(19): siRNA sense strand
guggaaacaucaugaguau

SEQ ID NO: 2044759 - RNA, 19 nt, Homo sapiens
  misc_RNA (1)...(19): siRNA sense strand
gaucagauggugagaguga

SEQ ID NO: 2044760 - RNA, 19 nt, Homo sapiens
  misc_RNA (1)...(19): siRNA sense strand
gaugaacugcacuuaauuu

SEQ ID NO: 2044761 - RNA, 19 nt, Homo sapiens
  misc_RNA (1)...(19): siRNA sense strand
gguauugcaucgagacuug

SEQ ID NO: 2044762 - RNA, 19 nt, Homo sapiens
  misc_RNA (1)...(19): siRNA sense strand
ggaucucaauggaggauuu

SEQ ID NO: 2044763 - RNA, 19 nt, Homo sapiens
  misc_RNA (1)...(19): siRNA sense strand
aaacauguguacuuucgaa

SEQ ID NO: 2044764 - RNA, 19 nt, Homo sapiens
  misc_RNA (1)...(19): siRNA sense strand
ggaaaccuacaucaaauug

SEQ ID NO: 2044765 - RNA, 19 nt, Homo sapiens
  misc_RNA (1)...(19): siRNA sense strand
ucguagagcuuccuuauca

SEQ ID NO: 2044766 - RNA, 19 nt, Homo sapiens
  misc_RNA (1)...(19): siRNA sense strand
aagaugaacugcacuuaau

SEQ ID NO: 2044767 - RNA, 19 nt, Homo sapiens
  misc_RNA (1)...(19): siRNA sense strand
gaaggaauugaguugauaa

SEQ ID NO: 2044768 - RNA, 19 nt, Homo sapiens
  misc_RNA (1)...(19): siRNA sense strand
aaaccacagccucuaauua

SEQ ID NO: 2044769 - RNA, 19 nt, Homo sapiens
  misc_RNA (1)...(19): siRNA sense strand
ggguacauaugcaacagua

SEQ ID NO: 2044770 - RNA, 19 nt, Homo sapiens
  misc_RNA (1)...(19): siRNA sense strand
ccagaaaguguaucaauau

SEQ ID NO: 2044771 - RNA, 19 nt, Homo sapiens
  misc_RNA (1)...(19): siRNA sense strand
gauaaagaccugaaacagu

SEQ ID NO: 2044772 - RNA, 19 nt, Homo sapiens
  misc_RNA (1)...(19): siRNA sense strand
aaaugaaguugucacacua

SEQ ID NO: 2044773 - RNA, 19 nt, Homo sapiens
  misc_RNA (1)...(19): siRNA sense strand
gaaagagauucaguugcaa

SEQ ID NO: 2044774 - RNA, 19 nt, Homo sapiens
  misc_RNA (1)...(19): siRNA sense strand
gcaaugcccagaaauggaa

SEQ ID NO: 2044775 - RNA, 19 nt, Homo sapiens
  misc_RNA (1)...(19): siRNA sense strand
gggaagaacagaagacaga

SEQ ID NO: 2044776 - RNA, 19 nt, Homo sapiens
  misc_RNA (1)...(19): siRNA sense strand
gaaacuuggccagguauuu

SEQ ID NO: 2044777 - RNA, 19 nt, Homo sapiens
  misc_RNA (1)...(19): siRNA sense strand
caggaaacuuggccaggua

SEQ ID NO: 2044778 - RNA, 19 nt, Homo sapiens
  misc_RNA (1)...(19): siRNA sense strand
acguaaagcuguuucugua

SEQ ID NO: 2044779 - RNA, 19 nt, Homo sapiens
  misc_RNA (1)...(19): siRNA sense strand
ggaaacaucaugaguaugc

SEQ ID NO: 2044780 - RNA, 19 nt, Homo sapiens
  misc_RNA (1)...(19): siRNA sense strand
acagauaaauccuugacuu

SEQ ID NO: 2044781 - RNA, 19 nt, Homo sapiens
  misc_RNA (1)...(19): siRNA sense strand
agaauuugguggcauuaaa

SEQ ID NO: 2044782 - RNA, 19 nt, Homo sapiens
  misc_RNA (1)...(19): siRNA sense strand
aaaccuacaucaaauugga

SEQ ID NO: 2044783 - RNA, 19 nt, Homo sapiens
  misc_RNA (1)...(19): siRNA sense strand
aauggaagcagauuagaua

SEQ ID NO: 2044784 - RNA, 19 nt, Homo sapiens
  misc_RNA (1)...(19): siRNA sense strand
ggaagaugaacugcacuua

SEQ ID NO: 2044785 - RNA, 19 nt, Homo sapiens
  misc_RNA (1)...(19): siRNA sense strand
gaauuaaagcuagcagauu

SEQ ID NO: 2044786 - RNA, 19 nt, Homo sapiens
  misc_RNA (1)...(19): siRNA sense strand
gcauauugccauagaagaa

SEQ ID NO: 2044787 - RNA, 19 nt, Homo sapiens
  misc_RNA (1)...(19): siRNA sense strand
gcaaggauaaugagccuau

SEQ ID NO: 2044788 - RNA, 19 nt, Homo sapiens
  misc_RNA (1)...(19): siRNA sense strand
gaagaaguaaauugacaga

SEQ ID NO: 2044789 - RNA, 19 nt, Homo sapiens
  misc_RNA (1)...(19): siRNA sense strand
ggacaugggaagaacagaa

SEQ ID NO: 2044790 - RNA, 19 nt, Homo sapiens
  misc_RNA (1)...(19): siRNA sense strand
accagaaaguguaucaaua

SEQ ID NO: 2044791 - RNA, 19 nt, Homo sapiens
  misc_RNA (1)...(19): siRNA sense strand
aaccacagccucuaauuaa

SEQ ID NO: 2044792 - RNA, 19 nt, Homo sapiens
  misc_RNA (1)...(19): siRNA sense strand
cugaacaaaugacuauuga

SEQ ID NO: 2044793 - RNA, 19 nt, Homo sapiens
  misc_RNA (1)...(19): siRNA sense strand
ccugauggauaucuugaaa

SEQ ID NO: 2044794 - RNA, 19 nt, Homo sapiens
  misc_RNA (1)...(19): siRNA sense strand
cagauaaauccuugacuuu

SEQ ID NO: 2044795 - RNA, 19 nt, Homo sapiens
  misc_RNA (1)...(19): siRNA sense strand
cagagaauuugguggcauu

SEQ ID NO: 2044796 - RNA, 19 nt, Homo sapiens
  misc_RNA (1)...(19): siRNA sense strand
gggaucagauggugagagu

SEQ ID NO: 2044797 - RNA, 19 nt, Homo sapiens
  misc_RNA (1)...(19): siRNA sense strand
cugcacagcuauaagagaa

SEQ ID NO: 2044798 - RNA, 19 nt, Homo sapiens
  misc_RNA (1)...(19): siRNA sense strand
ucagaaaucguauacauag

SEQ ID NO: 2044799 - RNA, 19 nt, Homo sapiens
  misc_RNA (1)...(19): siRNA sense strand
gcacagcuauaagagaagu

SEQ ID NO: 2044800 - RNA, 19 nt, Homo sapiens
  misc_RNA (1)...(19): siRNA sense strand
ggaccaagaauacaugcuu

SEQ ID NO: 2044801 - RNA, 19 nt, Homo sapiens
  misc_RNA (1)...(19): siRNA sense strand
gaagcagauuagauauugu

SEQ ID NO: 2044802 - RNA, 19 nt, Homo sapiens
  misc_RNA (1)...(19): siRNA sense strand
auacaugcuuuaccagaaa

SEQ ID NO: 2044803 - RNA, 19 nt, Homo sapiens
  misc_RNA (1)...(19): siRNA sense strand
caaagaccuacucaaauga

SEQ ID NO: 2044804 - RNA, 19 nt, Homo sapiens
  misc_RNA (1)...(19): siRNA sense strand
ucucagaaaucguauacau

SEQ ID NO: 2044805 - RNA, 19 nt, Homo sapiens
  misc_RNA (1)...(19): siRNA sense strand
gaugaaguccagucaccua

SEQ ID NO: 2044806 - RNA, 19 nt, Homo sapiens
  misc_RNA (1)...(19): siRNA sense strand
ccuccaacgucucacagua

SEQ ID NO: 2044807 - RNA, 19 nt, Homo sapiens
  misc_RNA (1)...(19): siRNA sense strand
auaaugagccuauugugaa

SEQ ID NO: 2044808 - RNA, 19 nt, Homo sapiens
  misc_RNA (1)...(19): siRNA sense strand
gaacuacaacuuuccaaaa

SEQ ID NO: 2044809 - RNA, 19 nt, Homo sapiens
  misc_RNA (1)...(19): siRNA sense strand
caagucaguucccacaaag

SEQ ID NO: 2044810 - RNA, 19 nt, Homo sapiens
  misc_RNA (1)...(19): siRNA sense strand
gagauccgauuggaacaug

SEQ ID NO: 2044811 - RNA, 19 nt, Homo sapiens
  misc_RNA (1)...(19): siRNA sense strand
cagaaccuccucauuaaug

SEQ ID NO: 2044812 - RNA, 19 nt, Homo sapiens
  misc_RNA (1)...(19): siRNA sense strand
aagaauacaugcuuuacca

SEQ ID NO: 2044813 - RNA, 19 nt, Homo sapiens
  misc_RNA (1)...(19): siRNA sense strand
ggaguacucaacacagauu

SEQ ID NO: 2044814 - RNA, 19 nt, Homo sapiens
  misc_RNA (1)...(19): siRNA sense strand
ugagaaaggagaauuaaag

SEQ ID NO: 2044815 - RNA, 19 nt, Homo sapiens
  misc_RNA (1)...(19): siRNA sense strand
gaaauggaagcagauuaga

SEQ ID NO: 2044816 - RNA, 19 nt, Homo sapiens
  misc_RNA (1)...(19): siRNA sense strand
gcugaacaaaugacuauug

SEQ ID NO: 2044817 - RNA, 19 nt, Homo sapiens
  misc_RNA (1)...(19): siRNA sense strand
gagcuuccuuaucagaaau

SEQ ID NO: 2044818 - RNA, 19 nt, Homo sapiens
  misc_RNA (1)...(19): siRNA sense strand
aauggaaaccuacaucaaa

SEQ ID NO: 2044819 - RNA, 19 nt, Homo sapiens
  misc_RNA (1)...(19): siRNA sense strand
gcacaacguaaagcuguuu

SEQ ID NO: 2044820 - RNA, 19 nt, Homo sapiens
  misc_RNA (1)...(19): siRNA sense strand
ugaaacaguacauggauga

SEQ ID NO: 2044821 - RNA, 19 nt, Homo sapiens
  misc_RNA (1)...(19): siRNA sense strand
cagaaauggaagcagauua

SEQ ID NO: 2044822 - RNA, 19 nt, Homo sapiens
  misc_RNA (1)...(19): siRNA sense strand
guacacaggaucuuucaag

SEQ ID NO: 2044823 - RNA, 19 nt, Homo sapiens
  misc_RNA (1)...(19): siRNA sense strand
uaaacaguccaccauuuga

SEQ ID NO: 2044824 - RNA, 19 nt, Homo sapiens
  misc_RNA (1)...(19): siRNA sense strand
aaccuuacaugacauuguu

SEQ ID NO: 2044825 - RNA, 19 nt, Homo sapiens
  misc_RNA (1)...(19): siRNA sense strand
aauacaugcuuuaccagaa

SEQ ID NO: 2044826 - RNA, 19 nt, Homo sapiens
  misc_RNA (1)...(19): siRNA sense strand
ugacauuguucacacagau

SEQ ID NO: 2044827 - RNA, 19 nt, Homo sapiens
  misc_RNA (1)...(19): siRNA sense strand
gaaaagaccucauuuaugu

SEQ ID NO: 2044828 - RNA, 19 nt, Homo sapiens
  misc_RNA (1)...(19): siRNA sense strand
guacaaagcugguauaucc

SEQ ID NO: 2044829 - RNA, 19 nt, Homo sapiens
  misc_RNA (1)...(19): siRNA sense strand
ccaaagacaugacgacguu

SEQ ID NO: 2044830 - RNA, 19 nt, Homo sapiens
  misc_RNA (1)...(19): siRNA sense strand
ggaaguccaucucaucgaa

SEQ ID NO: 2044831 - RNA, 19 nt, Homo sapiens
  misc_RNA (1)...(19): siRNA sense strand
gcaguuaucuacauuaagg

SEQ ID NO: 2044832 - RNA, 19 nt, Homo sapiens
  misc_RNA (1)...(19): siRNA sense strand
gaaagacucccaguguaua

SEQ ID NO: 2044833 - RNA, 19 nt, Homo sapiens
  misc_RNA (1)...(19): siRNA sense strand
caauacaagugguuuaugu

SEQ ID NO: 2044834 - RNA, 19 nt, Homo sapiens
  misc_RNA (1)...(19): siRNA sense strand
ucaacagacucaauagaaa

SEQ ID NO: 2044835 - RNA, 19 nt, Homo sapiens
  misc_RNA (1)...(19): siRNA sense strand
uagaaagacucccagugua

SEQ ID NO: 2044836 - RNA, 19 nt, Homo sapiens
  misc_RNA (1)...(19): siRNA sense strand
ucagcacucuuuauuguuu

SEQ ID NO: 2044837 - RNA, 19 nt, Homo sapiens
  misc_RNA (1)...(19): siRNA sense strand
gcaccaagaccucguguug

SEQ ID NO: 2044838 - RNA, 19 nt, Homo sapiens
  misc_RNA (1)...(19): siRNA sense strand
aaacugcaauguacuugaa

SEQ ID NO: 2044839 - RNA, 19 nt, Homo sapiens
  misc_RNA (1)...(19): siRNA sense strand
uucaggagcuucuugauuu

SEQ ID NO: 2044840 - RNA, 19 nt, Homo sapiens
  misc_RNA (1)...(19): siRNA sense strand
ggaacaccaugccaacaga

SEQ ID NO: 2044841 - RNA, 19 nt, Homo sapiens
  misc_RNA (1)...(19): siRNA sense strand
gaucagaaaccgacacaau

SEQ ID NO: 2044842 - RNA, 19 nt, Homo sapiens
  misc_RNA (1)...(19): siRNA sense strand
uaagucuccuuccagauaa

SEQ ID NO: 2044843 - RNA, 19 nt, Homo sapiens
  misc_RNA (1)...(19): siRNA sense strand
aaggagaccugaagcugua

SEQ ID NO: 2044844 - RNA, 19 nt, Homo sapiens
  misc_RNA (1)...(19): siRNA sense strand
aaucagcacucuuuauugu

SEQ ID NO: 2044845 - RNA, 19 nt, Homo sapiens
  misc_RNA (1)...(19): siRNA sense strand
guauucaacugcaccaaga

SEQ ID NO: 2044846 - RNA, 19 nt, Homo sapiens
  misc_RNA (1)...(19): siRNA sense strand
ggagguggcguuccuuuga

SEQ ID NO: 2044847 - RNA, 19 nt, Homo sapiens
  misc_RNA (1)...(19): siRNA sense strand
gcaaugagagccacuaugg

SEQ ID NO: 2044848 - RNA, 19 nt, Homo sapiens
  misc_RNA (1)...(19): siRNA sense strand
gaacuugaagaacuaaaug

SEQ ID NO: 2044849 - RNA, 19 nt, Homo sapiens
  misc_RNA (1)...(19): siRNA sense strand
uauuaacucucccgaacua

SEQ ID NO: 2044850 - RNA, 19 nt, Homo sapiens
  misc_RNA (1)...(19): siRNA sense strand
gcagagaacccaaagacau

SEQ ID NO: 2044851 - RNA, 19 nt, Homo sapiens
  misc_RNA (1)...(19): siRNA sense strand
gccagaauguucaguacuu

SEQ ID NO: 2044852 - RNA, 19 nt, Homo sapiens
  misc_RNA (1)...(19): siRNA sense strand
ucaaucagcacucuuuauu

SEQ ID NO: 2044853 - RNA, 19 nt, Homo sapiens
  misc_RNA (1)...(19): siRNA sense strand
cuacaugagucgcauuuca

SEQ ID NO: 2044854 - RNA, 19 nt, Homo sapiens
  misc_RNA (1)...(19): siRNA sense strand
guaaugaggauuugacugu

SEQ ID NO: 2044855 - RNA, 19 nt, Homo sapiens
  misc_RNA (1)...(19): siRNA sense strand
caaaggaaguccaucucau

SEQ ID NO: 2044856 - RNA, 19 nt, Homo sapiens
  misc_RNA (1)...(19): siRNA sense strand
ggauuugacugugaagaug

SEQ ID NO: 2044857 - RNA, 19 nt, Homo sapiens
  misc_RNA (1)...(19): siRNA sense strand
gcauaaauccaaacugcaa

SEQ ID NO: 2044858 - RNA, 19 nt, Homo sapiens
  misc_RNA (1)...(19): siRNA sense strand
gcaaaggaaguccaucuca

SEQ ID NO: 2044859 - RNA, 19 nt, Homo sapiens
  misc_RNA (1)...(19): siRNA sense strand
gaagcuguauucccuagag

SEQ ID NO: 2044860 - RNA, 19 nt, Homo sapiens
  misc_RNA (1)...(19): siRNA sense strand
ucagaaaccgacacaauga

SEQ ID NO: 2044861 - RNA, 19 nt, Homo sapiens
  misc_RNA (1)...(19): siRNA sense strand
cgaacuagaacuugaagaa

SEQ ID NO: 2044862 - RNA, 19 nt, Homo sapiens
  misc_RNA (1)...(19): siRNA sense strand
ggacaaaagugcugaggau

SEQ ID NO: 2044863 - RNA, 19 nt, Homo sapiens
  misc_RNA (1)...(19): siRNA sense strand
gaucagugaaugcuuguga

SEQ ID NO: 2044864 - RNA, 19 nt, Homo sapiens
  misc_RNA (1)...(19): siRNA sense strand
ccagaauguucaguacuuu

SEQ ID NO: 2044865 - RNA, 19 nt, Homo sapiens
  misc_RNA (1)...(19): siRNA sense strand
ggacuucggaucagugaau

SEQ ID NO: 2044866 - RNA, 19 nt, Homo sapiens
  misc_RNA (1)...(19): siRNA sense strand
auaagucuccuuccagaua

SEQ ID NO: 2044867 - RNA, 19 nt, Homo sapiens
  misc_RNA (1)...(19): siRNA sense strand
ggacaccauccguucaauu

SEQ ID NO: 2044868 - RNA, 19 nt, Homo sapiens
  misc_RNA (1)...(19): siRNA sense strand
gacaccauccguucaauug

SEQ ID NO: 2044869 - RNA, 19 nt, Homo sapiens
  misc_RNA (1)...(19): siRNA sense strand
aaacacauuggaagcauaa

SEQ ID NO: 2044870 - RNA, 19 nt, Homo sapiens
  misc_RNA (1)...(19): siRNA sense strand
agaaauaagucuccuucca

SEQ ID NO: 2044871 - RNA, 19 nt, Homo sapiens
  misc_RNA (1)...(19): siRNA sense strand
acuagaacuugaagaacua

SEQ ID NO: 2044872 - RNA, 19 nt, Homo sapiens
  misc_RNA (1)...(19): siRNA sense strand
augagucgcauuucaauua

SEQ ID NO: 2044873 - RNA, 19 nt, Homo sapiens
  misc_RNA (1)...(19): siRNA sense strand
cccagggugugauugaaua

SEQ ID NO: 2044874 - RNA, 19 nt, Homo sapiens
  misc_RNA (1)...(19): siRNA sense strand
gaaagaaauaagucuccuu

SEQ ID NO: 2044875 - RNA, 19 nt, Homo sapiens
  misc_RNA (1)...(19): siRNA sense strand
aaagcugccuggaagcauu

SEQ ID NO: 2044876 - RNA, 19 nt, Homo sapiens
  misc_RNA (1)...(19): siRNA sense strand
ucuaucacaugguguuuga

SEQ ID NO: 2044877 - RNA, 19 nt, Homo sapiens
  misc_RNA (1)...(19): siRNA sense strand
ugaggaugcuaaagcuauu

SEQ ID NO: 2044878 - RNA, 19 nt, Homo sapiens
  misc_RNA (1)...(19): siRNA sense strand
uuggaucgauucuacauga

SEQ ID NO: 2044879 - RNA, 19 nt, Homo sapiens
  misc_RNA (1)...(19): siRNA sense strand
gucaacagacucaauagaa

SEQ ID NO: 2044880 - RNA, 19 nt, Homo sapiens
  misc_RNA (1)...(19): siRNA sense strand
gaaaccgacacaaugaugu

SEQ ID NO: 2044881 - RNA, 19 nt, Homo sapiens
  misc_RNA (1)...(19): siRNA sense strand
ugaagcaguuccuggacuu

SEQ ID NO: 2044882 - RNA, 19 nt, Homo sapiens
  misc_RNA (1)...(19): siRNA sense strand
cacaugguguuugaacuuu

SEQ ID NO: 2044883 - RNA, 19 nt, Homo sapiens
  misc_RNA (1)...(19): siRNA sense strand
ucaacuacauguauucaac

SEQ ID NO: 2044884 - RNA, 19 nt, Homo sapiens
  misc_RNA (1)...(19): siRNA sense strand
aauccaaacugcaauguac

SEQ ID NO: 2044885 - RNA, 19 nt, Homo sapiens
  misc_RNA (1)...(19): siRNA sense strand
caacagacucaauagaaag

SEQ ID NO: 2044886 - RNA, 19 nt, Homo sapiens
  misc_RNA (1)...(19): siRNA sense strand
gaugcaguuaucuacauua

SEQ ID NO: 2044887 - RNA, 19 nt, Homo sapiens
  misc_RNA (1)...(19): siRNA sense strand
agaaagacucccaguguau

SEQ ID NO: 2044888 - RNA, 19 nt, Homo sapiens
  misc_RNA (1)...(19): siRNA sense strand
uuucaagaaugcaaugaga

SEQ ID NO: 2044889 - RNA, 19 nt, Homo sapiens
  misc_RNA (1)...(19): siRNA sense strand
cagagaacccaaagacaug

SEQ ID NO: 2044890 - RNA, 19 nt, Homo sapiens
  misc_RNA (1)...(19): siRNA sense strand
aaugaggauuugacuguga

SEQ ID NO: 2044891 - RNA, 19 nt, Homo sapiens
  misc_RNA (1)...(19): siRNA sense strand
aaugagagccacuauggaa

SEQ ID NO: 2044892 - RNA, 19 nt, Homo sapiens
  misc_RNA (1)...(19): siRNA sense strand
gaaguccaucucaucgaaa

SEQ ID NO: 2044893 - RNA, 19 nt, Homo sapiens
  misc_RNA (1)...(19): siRNA sense strand
aaagacucccaguguauaa

SEQ ID NO: 2044894 - RNA, 19 nt, Homo sapiens
  misc_RNA (1)...(19): siRNA sense strand
cauuaaggcucugucaaca

SEQ ID NO: 2044895 - RNA, 19 nt, Homo sapiens
  misc_RNA (1)...(19): siRNA sense strand
uaacucucccgaacuagaa

SEQ ID NO: 2044896 - RNA, 19 nt, Homo sapiens
  misc_RNA (1)...(19): siRNA sense strand
cuaggcgucugugugauuu

SEQ ID NO: 2044897 - RNA, 19 nt, Homo sapiens
  misc_RNA (1)...(19): siRNA sense strand
gcuaggcgucugugugauu

SEQ ID NO: 2044898 - RNA, 19 nt, Homo sapiens
  misc_RNA (1)...(19): siRNA sense strand
cgggacagaugcaguuauc

SEQ ID NO: 2044899 - RNA, 19 nt, Homo sapiens
  misc_RNA (1)...(19): siRNA sense strand
gaauacaaggagagcuuug

SEQ ID NO: 2044900 - RNA, 19 nt, Homo sapiens
  misc_RNA (1)...(19): siRNA sense strand
ucacaugguguuugaacuu

SEQ ID NO: 2044901 - RNA, 19 nt, Homo sapiens
  misc_RNA (1)...(19): siRNA sense strand
ugucagacuggcaaauaua

SEQ ID NO: 2044902 - RNA, 19 nt, Homo sapiens
  misc_RNA (1)...(19): siRNA sense strand
gaacuagaacuugaagaac

SEQ ID NO: 2044903 - RNA, 19 nt, Homo sapiens
  misc_RNA (1)...(19): siRNA sense strand
ugagucgcauuucaauuag

SEQ ID NO: 2044904 - RNA, 19 nt, Homo sapiens
  misc_RNA (1)...(19): siRNA sense strand
gcccauaucacgucuuuac

SEQ ID NO: 2044905 - RNA, 19 nt, Homo sapiens
  misc_RNA (1)...(19): siRNA sense strand
caucccaucucuaucacau

SEQ ID NO: 2044906 - RNA, 19 nt, Homo sapiens
  misc_RNA (1)...(19): siRNA sense strand
caaacugcaauguacuuga

SEQ ID NO: 2044907 - RNA, 19 nt, Homo sapiens
  misc_RNA (1)...(19): siRNA sense strand
agucgcauuucaauuagaa

SEQ ID NO: 2044908 - RNA, 19 nt, Homo sapiens
  misc_RNA (1)...(19): siRNA sense strand
auagaaagacucccagugu

SEQ ID NO: 2044909 - RNA, 19 nt, Homo sapiens
  misc_RNA (1)...(19): siRNA sense strand
aaagauggcuaugaaaaug

SEQ ID NO: 2044910 - RNA, 19 nt, Homo sapiens
  misc_RNA (1)...(19): siRNA sense strand
gaaaacacauuggaagcau

SEQ ID NO: 2044911 - RNA, 19 nt, Homo sapiens
  misc_RNA (1)...(19): siRNA sense strand
gucagacuggcaaauauaa

SEQ ID NO: 2044912 - RNA, 19 nt, Homo sapiens
  misc_RNA (1)...(19): siRNA sense strand
ggaagcauuacaacaccaa

SEQ ID NO: 2044913 - RNA, 19 nt, Homo sapiens
  misc_RNA (1)...(19): siRNA sense strand
gaggaaaauugacagacuu

SEQ ID NO: 2044914 - RNA, 19 nt, Homo sapiens
  misc_RNA (1)...(19): siRNA sense strand
gauuugacugugaagauga

SEQ ID NO: 2044915 - RNA, 19 nt, Homo sapiens
  misc_RNA (1)...(19): siRNA sense strand
gugaaaagaccucauuuau

SEQ ID NO: 2044916 - RNA, 19 nt, Homo sapiens
  misc_RNA (1)...(19): siRNA sense strand
gcgucugugugauuuguau

SEQ ID NO: 2044917 - RNA, 19 nt, Homo sapiens
  misc_RNA (1)...(19): siRNA sense strand
ccagccagaauguucagua

SEQ ID NO: 2044918 - RNA, 19 nt, Homo sapiens
  misc_RNA (1)...(19): siRNA sense strand
cagacuggcaaauauaaug

SEQ ID NO: 2044919 - RNA, 19 nt, Homo sapiens
  misc_RNA (1)...(19): siRNA sense strand
cagugccucuggcugguuu

SEQ ID NO: 2044920 - RNA, 19 nt, Homo sapiens
  misc_RNA (1)...(19): siRNA sense strand
gagguggcguuccuuugag

SEQ ID NO: 2044921 - RNA, 19 nt, Homo sapiens
  misc_RNA (1)...(19): siRNA sense strand
aaaggaaguccaucucauc

SEQ ID NO: 2044922 - RNA, 19 nt, Homo sapiens
  misc_RNA (1)...(19): siRNA sense strand
gagucgcauuucaauuaga

SEQ ID NO: 2044923 - RNA, 19 nt, Homo sapiens
  misc_RNA (1)...(19): siRNA sense strand
cagcacucuuuauuguuug

SEQ ID NO: 2044924 - RNA, 19 nt, Homo sapiens
  misc_RNA (1)...(19): siRNA sense strand
ugacugugaagaugaguga

SEQ ID NO: 2044925 - RNA, 19 nt, Homo sapiens
  misc_RNA (1)...(19): siRNA sense strand
ccugucagacuggcaaaua

SEQ ID NO: 2044926 - RNA, 19 nt, Homo sapiens
  misc_RNA (1)...(19): siRNA sense strand
uaccaucccaucucuauca

SEQ ID NO: 2044927 - RNA, 19 nt, Homo sapiens
  misc_RNA (1)...(19): siRNA sense strand
gcaggcagcucucaacaaa

SEQ ID NO: 2044928 - RNA, 19 nt, Homo sapiens
  misc_RNA (1)...(19): siRNA sense strand
gaaagagccuccggugaaa

SEQ ID NO: 2044929 - RNA, 19 nt, Homo sapiens
  misc_RNA (1)...(19): siRNA sense strand
cagauaagcugcugggaaa

SEQ ID NO: 2044930 - RNA, 19 nt, Homo sapiens
  misc_RNA (1)...(19): siRNA sense strand
ggccagaagucaagaaaga

SEQ ID NO: 2044931 - RNA, 19 nt, Homo sapiens
  misc_RNA (1)...(19): siRNA sense strand
gcacagcuuucccgucuca

SEQ ID NO: 2044932 - RNA, 19 nt, Homo sapiens
  misc_RNA (1)...(19): siRNA sense strand
gcucuccacuccagacaaa

SEQ ID NO: 2044933 - RNA, 19 nt, Homo sapiens
  misc_RNA (1)...(19): siRNA sense strand
gcagagagaaggccugaga

SEQ ID NO: 2044934 - RNA, 19 nt, Homo sapiens
  misc_RNA (1)...(19): siRNA sense strand
ccagugggcucaccaaugg

SEQ ID NO: 2044935 - RNA, 19 nt, Homo sapiens
  misc_RNA (1)...(19): siRNA sense strand
agaaagagccuccggugaa

SEQ ID NO: 2044936 - RNA, 19 nt, Homo sapiens
  misc_RNA (1)...(19): siRNA sense strand
ccaacgagcccaaggcaaa

SEQ ID NO: 2044937 - RNA, 19 nt, Homo sapiens
  misc_RNA (1)...(19): siRNA sense strand
agaagaagguggagaggau

SEQ ID NO: 2044938 - RNA, 19 nt, Homo sapiens
  misc_RNA (1)...(19): siRNA sense strand
caaaaucgcccacugauga

SEQ ID NO: 2044939 - RNA, 19 nt, Homo sapiens
  misc_RNA (1)...(19): siRNA sense strand
cuauaaagaugagaaggaa

SEQ ID NO: 2044940 - RNA, 19 nt, Homo sapiens
  misc_RNA (1)...(19): siRNA sense strand
ugaaggagaagcagaagaa

SEQ ID NO: 2044941 - RNA, 19 nt, Homo sapiens
  misc_RNA (1)...(19): siRNA sense strand
aaacagcaccauagaguau

SEQ ID NO: 2044942 - RNA, 19 nt, Homo sapiens
  misc_RNA (1)...(19): siRNA sense strand
gggacagccuccacaccua

SEQ ID NO: 2044943 - RNA, 19 nt, Homo sapiens
  misc_RNA (1)...(19): siRNA sense strand
caaacagcaccauagagua

SEQ ID NO: 2044944 - RNA, 19 nt, Homo sapiens
  misc_RNA (1)...(19): siRNA sense strand
gaaaagcugcgacacaaaa

SEQ ID NO: 2044945 - RNA, 19 nt, Homo sapiens
  misc_RNA (1)...(19): siRNA sense strand
ggcagccagucuauuauga

SEQ ID NO: 2044946 - RNA, 19 nt, Homo sapiens
  misc_RNA (1)...(19): siRNA sense strand
agaaccagcucaucaacau

SEQ ID NO: 2044947 - RNA, 19 nt, Homo sapiens
  misc_RNA (1)...(19): siRNA sense strand
cuacagccgugcccgcauu

SEQ ID NO: 2044948 - RNA, 19 nt, Homo sapiens
  misc_RNA (1)...(19): siRNA sense strand
caggagaagcggauugaaa

SEQ ID NO: 2044949 - RNA, 19 nt, Homo sapiens
  misc_RNA (1)...(19): siRNA sense strand
caucagcagugguaagaag

SEQ ID NO: 2044950 - RNA, 19 nt, Homo sapiens
  misc_RNA (1)...(19): siRNA sense strand
ucucugcccugcacgauga

SEQ ID NO: 2044951 - RNA, 19 nt, Homo sapiens
  misc_RNA (1)...(19): siRNA sense strand
ccuccacaccuacaaguua

SEQ ID NO: 2044952 - RNA, 19 nt, Homo sapiens
  misc_RNA (1)...(19): siRNA sense strand
uaaacgagcaagacacaga

SEQ ID NO: 2044953 - RNA, 19 nt, Homo sapiens
  misc_RNA (1)...(19): siRNA sense strand
gagaggaucaagacacuca

SEQ ID NO: 2044954 - RNA, 19 nt, Homo sapiens
  misc_RNA (1)...(19): siRNA sense strand
caaggcaaacuaugaacaa

SEQ ID NO: 2044955 - RNA, 19 nt, Homo sapiens
  misc_RNA (1)...(19): siRNA sense strand
ugacaaacagcaccauaga

SEQ ID NO: 2044956 - RNA, 19 nt, Homo sapiens
  misc_RNA (1)...(19): siRNA sense strand
gcagugaggacaucuaugc

SEQ ID NO: 2044957 - RNA, 19 nt, Homo sapiens
  misc_RNA (1)...(19): siRNA sense strand
ccaaauccaguaugcagaa

SEQ ID NO: 2044958 - RNA, 19 nt, Homo sapiens
  misc_RNA (1)...(19): siRNA sense strand
ggagcagauugaccgaaug

SEQ ID NO: 2044959 - RNA, 19 nt, Homo sapiens
  misc_RNA (1)...(19): siRNA sense strand
ccacggcccugacaaacag

SEQ ID NO: 2044960 - RNA, 19 nt, Homo sapiens
  misc_RNA (1)...(19): siRNA sense strand
caccaacccugacaaaauu

SEQ ID NO: 2044961 - RNA, 19 nt, Homo sapiens
  misc_RNA (1)...(19): siRNA sense strand
aggcagcucucaacaaagu

SEQ ID NO: 2044962 - RNA, 19 nt, Homo sapiens
  misc_RNA (1)...(19): siRNA sense strand
cagccagucuauuaugaug

SEQ ID NO: 2044963 - RNA, 19 nt, Homo sapiens
  misc_RNA (1)...(19): siRNA sense strand
gagaaggagagccuggaaa

SEQ ID NO: 2044964 - RNA, 19 nt, Homo sapiens
  misc_RNA (1)...(19): siRNA sense strand
ccaaugcaccugucaccaa

SEQ ID NO: 2044965 - RNA, 19 nt, Homo sapiens
  misc_RNA (1)...(19): siRNA sense strand
ccagagacaucagccuugu

SEQ ID NO: 2044966 - RNA, 19 nt, Homo sapiens
  misc_RNA (1)...(19): siRNA sense strand
cgccaugccuuccgcaaug

SEQ ID NO: 2044967 - RNA, 19 nt, Homo sapiens
  misc_RNA (1)...(19): siRNA sense strand
cugaggaguugaaggagaa

SEQ ID NO: 2044968 - RNA, 19 nt, Homo sapiens
  misc_RNA (1)...(19): siRNA sense strand
ggacaccgccaagcacaga

SEQ ID NO: 2044969 - RNA, 19 nt, Homo sapiens
  misc_RNA (1)...(19): siRNA sense strand
guggaucgcugccucuucu

SEQ ID NO: 2044970 - RNA, 19 nt, Homo sapiens
  misc_RNA (1)...(19): siRNA sense strand
ggcaaacuaugaacaaagc

SEQ ID NO: 2044971 - RNA, 19 nt, Homo sapiens
  misc_RNA (1)...(19): siRNA sense strand
ccuggaaagugccuugaug

SEQ ID NO: 2044972 - RNA, 19 nt, Homo sapiens
  misc_RNA (1)...(19): siRNA sense strand
cuccacaccuacaaguuaa

SEQ ID NO: 2044973 - RNA, 19 nt, Homo sapiens
  misc_RNA (1)...(19): siRNA sense strand
ggacaaaaucgcccacuga

SEQ ID NO: 2044974 - RNA, 19 nt, Homo sapiens
  misc_RNA (1)...(19): siRNA sense strand
acaaacagcaccauagagu

SEQ ID NO: 2044975 - RNA, 19 nt, Homo sapiens
  misc_RNA (1)...(19): siRNA sense strand
ggaggcugcucgaguacag

SEQ ID NO: 2044976 - RNA, 19 nt, Homo sapiens
  misc_RNA (1)...(19): siRNA sense strand
gcagugguaagaaggaaug

SEQ ID NO: 2044977 - RNA, 19 nt, Homo sapiens
  misc_RNA (1)...(19): siRNA sense strand
cccggcagccagucuauua

SEQ ID NO: 2044978 - RNA, 19 nt, Homo sapiens
  misc_RNA (1)...(19): siRNA sense strand
gcaccaacccugacaaaau

SEQ ID NO: 2044979 - RNA, 19 nt, Homo sapiens
  misc_RNA (1)...(19): siRNA sense strand
gaugagaaggaagagagua

SEQ ID NO: 2044980 - RNA, 19 nt, Homo sapiens
  misc_RNA (1)...(19): siRNA sense strand
cgaccacggcccugacaaa

SEQ ID NO: 2044981 - RNA, 19 nt, Homo sapiens
  misc_RNA (1)...(19): siRNA sense strand
cagaaaagcugcgacacaa

SEQ ID NO: 2044982 - RNA, 19 nt, Homo sapiens
  misc_RNA (1)...(19): siRNA sense strand
gagcuggagauguuuggaa

SEQ ID NO: 2044983 - RNA, 19 nt, Homo sapiens
  misc_RNA (1)...(19): siRNA sense strand
gugcagcccucagacaaca

SEQ ID NO: 2044984 - RNA, 19 nt, Homo sapiens
  misc_RNA (1)...(19): siRNA sense strand
gaggaucaagacacucauu

SEQ ID NO: 2044985 - RNA, 19 nt, Homo sapiens
  misc_RNA (1)...(19): siRNA sense strand
ccugagcccugaggaguug

SEQ ID NO: 2044986 - RNA, 19 nt, Homo sapiens
  misc_RNA (1)...(19): siRNA sense strand
gcccaaggcaaacuaugaa

SEQ ID NO: 2044987 - RNA, 19 nt, Homo sapiens
  misc_RNA (1)...(19): siRNA sense strand
cgggcuggcucuucaaaca

SEQ ID NO: 2044988 - RNA, 19 nt, Homo sapiens
  misc_RNA (1)...(19): siRNA sense strand
gagcaggagaagcggauug

SEQ ID NO: 2044989 - RNA, 19 nt, Homo sapiens
  misc_RNA (1)...(19): siRNA sense strand
ugacauacccaaccacaac

SEQ ID NO: 2044990 - RNA, 19 nt, Homo sapiens
  misc_RNA (1)...(19): siRNA sense strand
auaaagaugagaaggaaga

SEQ ID NO: 2044991 - RNA, 19 nt, Homo sapiens
  misc_RNA (1)...(19): siRNA sense strand
gaggccagaagucaagaaa

SEQ ID NO: 2044992 - RNA, 19 nt, Homo sapiens
  misc_RNA (1)...(19): siRNA sense strand
agacacucauugccaaauc

SEQ ID NO: 2044993 - RNA, 19 nt, Homo sapiens
  misc_RNA (1)...(19): siRNA sense strand
gaaggagagccuggaaagu

SEQ ID NO: 2044994 - RNA, 19 nt, Homo sapiens
  misc_RNA (1)...(19): siRNA sense strand
ggccagggagcacagcuuu

SEQ ID NO: 2044995 - RNA, 19 nt, Homo sapiens
  misc_RNA (1)...(19): siRNA sense strand
augagcaccucgagucuga

SEQ ID NO: 2044996 - RNA, 19 nt, Homo sapiens
  misc_RNA (1)...(19): siRNA sense strand
caagacacucauugccaaa

SEQ ID NO: 2044997 - RNA, 19 nt, Homo sapiens
  misc_RNA (1)...(19): siRNA sense strand
gaagcaggcagcucucaac

SEQ ID NO: 2044998 - RNA, 19 nt, Homo sapiens
  misc_RNA (1)...(19): siRNA sense strand
gguccgcaccuacuucuuc

SEQ ID NO: 2044999 - RNA, 19 nt, Homo sapiens
  misc_RNA (1)...(19): siRNA sense strand
gcccugaggaguugaagga

SEQ ID NO: 2045000 - RNA, 19 nt, Homo sapiens
  misc_RNA (1)...(19): siRNA sense strand
caccagaguggcuccauga

SEQ ID NO: 2045001 - RNA, 19 nt, Homo sapiens
  misc_RNA (1)...(19): siRNA sense strand
gagcguggaggagcagauu

SEQ ID NO: 2045002 - RNA, 19 nt, Homo sapiens
  misc_RNA (1)...(19): siRNA sense strand
caaacuaugaacaaagcaa

SEQ ID NO: 2045003 - RNA, 19 nt, Homo sapiens
  misc_RNA (1)...(19): siRNA sense strand
gccagucuauuaugaugag

SEQ ID NO: 2045004 - RNA, 19 nt, Homo sapiens
  misc_RNA (1)...(19): siRNA sense strand
gaggauccaggacgugaug

SEQ ID NO: 2045005 - RNA, 19 nt, Homo sapiens
  misc_RNA (1)...(19): siRNA sense strand
caugcugucugugcaaugu

SEQ ID NO: 2045006 - RNA, 19 nt, Homo sapiens
  misc_RNA (1)...(19): siRNA sense strand
cagcagugguaagaaggaa

SEQ ID NO: 2045007 - RNA, 19 nt, Homo sapiens
  misc_RNA (1)...(19): siRNA sense strand
aaggcaaacuaugaacaaa

SEQ ID NO: 2045008 - RNA, 19 nt, Homo sapiens
  misc_RNA (1)...(19): siRNA sense strand
gcagugcagcccucagaca

SEQ ID NO: 2045009 - RNA, 19 nt, Homo sapiens
  misc_RNA (1)...(19): siRNA sense strand
aggagaagcggauugaaau

SEQ ID NO: 2045010 - RNA, 19 nt, Homo sapiens
  misc_RNA (1)...(19): siRNA sense strand
gcguggaggagcagauuga

SEQ ID NO: 2045011 - RNA, 19 nt, Homo sapiens
  misc_RNA (1)...(19): siRNA sense strand
aaggagagccuggaaagug

SEQ ID NO: 2045012 - RNA, 19 nt, Homo sapiens
  misc_RNA (1)...(19): siRNA sense strand
guuaaacgagcaagacaca

SEQ ID NO: 2045013 - RNA, 19 nt, Homo sapiens
  misc_RNA (1)...(19): siRNA sense strand
gcugccucuucuacuauaa

SEQ ID NO: 2045014 - RNA, 19 nt, Homo sapiens
  misc_RNA (1)...(19): siRNA sense strand
ggccggagagcaucuguuc

SEQ ID NO: 2045015 - RNA, 19 nt, Homo sapiens
  misc_RNA (1)...(19): siRNA sense strand
gcagccagucuauuaugau

SEQ ID NO: 2045016 - RNA, 19 nt, Homo sapiens
  misc_RNA (1)...(19): siRNA sense strand
gcaagagcuccaugaacca

SEQ ID NO: 2045017 - RNA, 19 nt, Homo sapiens
  misc_RNA (1)...(19): siRNA sense strand
caagagugcuguguuuccu

SEQ ID NO: 2045018 - RNA, 19 nt, Homo sapiens
  misc_RNA (1)...(19): siRNA sense strand
caauuuggacacccagaau

SEQ ID NO: 2045019 - RNA, 19 nt, Homo sapiens
  misc_RNA (1)...(19): siRNA sense strand
gaaaauugugugagcagaa

SEQ ID NO: 2045020 - RNA, 19 nt, Homo sapiens
  misc_RNA (1)...(19): siRNA sense strand
cggagucccucuagguucu

SEQ ID NO: 2045021 - RNA, 19 nt, Homo sapiens
  misc_RNA (1)...(19): siRNA sense strand
aggagcagauugaccgaau

SEQ ID NO: 2045022 - RNA, 19 nt, Homo sapiens
  misc_RNA (1)...(19): siRNA sense strand
gccagugggcucaccaaug

SEQ ID NO: 2045023 - RNA, 19 nt, Homo sapiens
  misc_RNA (1)...(19): siRNA sense strand
caauaaaacaggugggaaa

SEQ ID NO: 2045024 - RNA, 19 nt, Homo sapiens
  misc_RNA (1)...(19): siRNA sense strand
gaaccagcucaucaacauc

SEQ ID NO: 2045025 - RNA, 19 nt, Homo sapiens
  misc_RNA (1)...(19): siRNA sense strand
gcagaaccagcucaucaac

SEQ ID NO: 2045026 - RNA, 19 nt, Homo sapiens
  misc_RNA (1)...(19): siRNA sense strand
ugacccugcugccuaugug

SEQ ID NO: 2045027 - RNA, 19 nt, Homo sapiens
  misc_RNA (1)...(19): siRNA sense strand
acacagacauuaaguauag

SEQ ID NO: 2045028 - RNA, 19 nt, Homo sapiens
  misc_RNA (1)...(19): siRNA sense strand
gaagauccagaaacugaua

SEQ ID NO: 2045029 - RNA, 19 nt, Homo sapiens
  misc_RNA (1)...(19): siRNA sense strand
auacauugcuugucugaaa

SEQ ID NO: 2045030 - RNA, 19 nt, Homo sapiens
  misc_RNA (1)...(19): siRNA sense strand
caacagaugcaaguaguaa

SEQ ID NO: 2045031 - RNA, 19 nt, Homo sapiens
  misc_RNA (1)...(19): siRNA sense strand
cagcuucaguuacaguuaa

SEQ ID NO: 2045032 - RNA, 19 nt, Homo sapiens
  misc_RNA (1)...(19): siRNA sense strand
uaagaaagcaagagaagga

SEQ ID NO: 2045033 - RNA, 19 nt, Homo sapiens
  misc_RNA (1)...(19): siRNA sense strand
gauccaaacugcucugaac

SEQ ID NO: 2045034 - RNA, 19 nt, Homo sapiens
  misc_RNA (1)...(19): siRNA sense strand
ggacaagcaggccauuuau

SEQ ID NO: 2045035 - RNA, 19 nt, Homo sapiens
  misc_RNA (1)...(19): siRNA sense strand
guucaucaaugccagaaga

SEQ ID NO: 2045036 - RNA, 19 nt, Homo sapiens
  misc_RNA (1)...(19): siRNA sense strand
gugaagauccagaaacuga

SEQ ID NO: 2045037 - RNA, 19 nt, Homo sapiens
  misc_RNA (1)...(19): siRNA sense strand
gucaacaacugguucauca

SEQ ID NO: 2045038 - RNA, 19 nt, Homo sapiens
  misc_RNA (1)...(19): siRNA sense strand
gacaagcaggccauuuaua

SEQ ID NO: 2045039 - RNA, 19 nt, Homo sapiens
  misc_RNA (1)...(19): siRNA sense strand
gauucaaguuguucagaga

SEQ ID NO: 2045040 - RNA, 19 nt, Homo sapiens
  misc_RNA (1)...(19): siRNA sense strand
uuaacgaacucugcaaaga

SEQ ID NO: 2045041 - RNA, 19 nt, Homo sapiens
  misc_RNA (1)...(19): siRNA sense strand
ucagacaaauuugacacua

SEQ ID NO: 2045042 - RNA, 19 nt, Homo sapiens
  misc_RNA (1)...(19): siRNA sense strand
cauccacuauuuccauuau

SEQ ID NO: 2045043 - RNA, 19 nt, Homo sapiens
  misc_RNA (1)...(19): siRNA sense strand
caacaacugguucaucaau

SEQ ID NO: 2045044 - RNA, 19 nt, Homo sapiens
  misc_RNA (1)...(19): siRNA sense strand
uggacaagcaggccauuua

SEQ ID NO: 2045045 - RNA, 19 nt, Homo sapiens
  misc_RNA (1)...(19): siRNA sense strand
aaagauuucugcagucgau

SEQ ID NO: 2045046 - RNA, 19 nt, Homo sapiens
  misc_RNA (1)...(19): siRNA sense strand
aacgaacucugcaaagauu

SEQ ID NO: 2045047 - RNA, 19 nt, Homo sapiens
  misc_RNA (1)...(19): siRNA sense strand
gcaacagaugcaaguagua

SEQ ID NO: 2045048 - RNA, 19 nt, Homo sapiens
  misc_RNA (1)...(19): siRNA sense strand
gcaagagaaggaagggaaa

SEQ ID NO: 2045049 - RNA, 19 nt, Homo sapiens
  misc_RNA (1)...(19): siRNA sense strand
cuacacagacauuaaguau

SEQ ID NO: 2045050 - RNA, 19 nt, Homo sapiens
  misc_RNA (1)...(19): siRNA sense strand
ggacaauuaggauccagaa

SEQ ID NO: 2045051 - RNA, 19 nt, Homo sapiens
  misc_RNA (1)...(19): siRNA sense strand
caauuaggauccagaacuc

SEQ ID NO: 2045052 - RNA, 19 nt, Homo sapiens
  misc_RNA (1)...(19): siRNA sense strand
ggcaacagaugcaaguagu

SEQ ID NO: 2045053 - RNA, 19 nt, Homo sapiens
  misc_RNA (1)...(19): siRNA sense strand
gacgaauucuucagccaau

SEQ ID NO: 2045054 - RNA, 19 nt, Homo sapiens
  misc_RNA (1)...(19): siRNA sense strand
acagauugcugcucagaca

SEQ ID NO: 2045055 - RNA, 19 nt, Homo sapiens
  misc_RNA (1)...(19): siRNA sense strand
agacagaacaagauccaaa

SEQ ID NO: 2045056 - RNA, 19 nt, Homo sapiens
  misc_RNA (1)...(19): siRNA sense strand
uaacgaacucugcaaagau

SEQ ID NO: 2045057 - RNA, 19 nt, Homo sapiens
  misc_RNA (1)...(19): siRNA sense strand
acaagcaggccauuuauag

SEQ ID NO: 2045058 - RNA, 19 nt, Homo sapiens
  misc_RNA (1)...(19): siRNA sense strand
cauuaaguauagacagcua

SEQ ID NO: 2045059 - RNA, 19 nt, Homo sapiens
  misc_RNA (1)...(19): siRNA sense strand
guuaaagacagaacaagau

SEQ ID NO: 2045060 - RNA, 19 nt, Homo sapiens
  misc_RNA (1)...(19): siRNA sense strand
gcuacacagacauuaagua

SEQ ID NO: 2045061 - RNA, 19 nt, Homo sapiens
  misc_RNA (1)...(19): siRNA sense strand
gauucaaagugccaucaca

SEQ ID NO: 2045062 - RNA, 19 nt, Homo sapiens
  misc_RNA (1)...(19): siRNA sense strand
cgauggauguggacaagca

SEQ ID NO: 2045063 - RNA, 19 nt, Homo sapiens
  misc_RNA (1)...(19): siRNA sense strand
ggcauccacuauuuccauu

SEQ ID NO: 2045064 - RNA, 19 nt, Homo sapiens
  misc_RNA (1)...(19): siRNA sense strand
ugaacccgaugcagaagga

SEQ ID NO: 2045065 - RNA, 19 nt, Homo sapiens
  misc_RNA (1)...(19): siRNA sense strand
gggcaucccuacccaacag

SEQ ID NO: 2045066 - RNA, 19 nt, Homo sapiens
  misc_RNA (1)...(19): siRNA sense strand
gcauccacuauuuccauua

SEQ ID NO: 2045067 - RNA, 19 nt, Homo sapiens
  misc_RNA (1)...(19): siRNA sense strand
agacaaauuugacacuacu

SEQ ID NO: 2045068 - RNA, 19 nt, Homo sapiens
  misc_RNA (1)...(19): siRNA sense strand
gucgauacauugcuugucu

SEQ ID NO: 2045069 - RNA, 19 nt, Homo sapiens
  misc_RNA (1)...(19): siRNA sense strand
aauguuggauucaaguugu

SEQ ID NO: 2045070 - RNA, 19 nt, Homo sapiens
  misc_RNA (1)...(19): siRNA sense strand
cagacaaauuugacacuac

SEQ ID NO: 2045071 - RNA, 19 nt, Homo sapiens
  misc_RNA (1)...(19): siRNA sense strand
gcgcauucaucuucuugag

SEQ ID NO: 2045072 - RNA, 19 nt, Homo sapiens
  misc_RNA (1)...(19): siRNA sense strand
uuucugcagucgauacauu

SEQ ID NO: 2045073 - RNA, 19 nt, Homo sapiens
  misc_RNA (1)...(19): siRNA sense strand
gauccagaaacugauaauu

SEQ ID NO: 2045074 - RNA, 19 nt, Homo sapiens
  misc_RNA (1)...(19): siRNA sense strand
ugccaaagcaugccacgaa

SEQ ID NO: 2045075 - RNA, 19 nt, Homo sapiens
  misc_RNA (1)...(19): siRNA sense strand
ggaaaagguuaacgaacuc

SEQ ID NO: 2045076 - RNA, 19 nt, Homo sapiens
  misc_RNA (1)...(19): siRNA sense strand
caauguuggauucaaguug

SEQ ID NO: 2045077 - RNA, 19 nt, Homo sapiens
  misc_RNA (1)...(19): siRNA sense strand
uugcugcucagacaaauuu

SEQ ID NO: 2045078 - RNA, 19 nt, Homo sapiens
  misc_RNA (1)...(19): siRNA sense strand
gguuaacgaacucugcaaa

SEQ ID NO: 2045079 - RNA, 19 nt, Homo sapiens
  misc_RNA (1)...(19): siRNA sense strand
gggcaacagaugcaaguag

SEQ ID NO: 2045080 - RNA, 19 nt, Homo sapiens
  misc_RNA (1)...(19): siRNA sense strand
gaauucuucagccaauguu

SEQ ID NO: 2045081 - RNA, 19 nt, Homo sapiens
  misc_RNA (1)...(19): siRNA sense strand
ucaguuacaguuaaaccaa

SEQ ID NO: 2045082 - RNA, 19 nt, Homo sapiens
  misc_RNA (1)...(19): siRNA sense strand
gauggcuacacagacauua

SEQ ID NO: 2045083 - RNA, 19 nt, Homo sapiens
  misc_RNA (1)...(19): siRNA sense strand
gguaaaagcaauccagguu

SEQ ID NO: 2045084 - RNA, 19 nt, Homo sapiens
  misc_RNA (1)...(19): siRNA sense strand
acaacugguucaucaaugc

SEQ ID NO: 2045085 - RNA, 19 nt, Homo sapiens
  misc_RNA (1)...(19): siRNA sense strand
gauugcugcucagacaaau

SEQ ID NO: 2045086 - RNA, 19 nt, Homo sapiens
  misc_RNA (1)...(19): siRNA sense strand
ccagcuucaguuacaguua

SEQ ID NO: 2045087 - RNA, 19 nt, Homo sapiens
  misc_RNA (1)...(19): siRNA sense strand
acucccagcuucaguuaca

SEQ ID NO: 2045088 - RNA, 19 nt, Homo sapiens
  misc_RNA (1)...(19): siRNA sense strand
caaagcaugccacgaacgu

SEQ ID NO: 2045089 - RNA, 19 nt, Homo sapiens
  misc_RNA (1)...(19): siRNA sense strand
cccaacagaggaugagaaa

SEQ ID NO: 2045090 - RNA, 19 nt, Homo sapiens
  misc_RNA (1)...(19): siRNA sense strand
caagucaacaacugguuca

SEQ ID NO: 2045091 - RNA, 19 nt, Homo sapiens
  misc_RNA (1)...(19): siRNA sense strand
cgaauucuucagccaaugu

SEQ ID NO: 2045092 - RNA, 19 nt, Homo sapiens
  misc_RNA (1)...(19): siRNA sense strand
aacaacugguucaucaaug

SEQ ID NO: 2045093 - RNA, 19 nt, Homo sapiens
  misc_RNA (1)...(19): siRNA sense strand
guaaaagcaauccagguuu

SEQ ID NO: 2045094 - RNA, 19 nt, Homo sapiens
  misc_RNA (1)...(19): siRNA sense strand
aaacagauugcugcucaga

SEQ ID NO: 2045095 - RNA, 19 nt, Homo sapiens
  misc_RNA (1)...(19): siRNA sense strand
agaugcaaguaguaacaga

SEQ ID NO: 2045096 - RNA, 19 nt, Homo sapiens
  misc_RNA (1)...(19): siRNA sense strand
gauccagaacucccagcuu

SEQ ID NO: 2045097 - RNA, 19 nt, Homo sapiens
  misc_RNA (1)...(19): siRNA sense strand
caaguggucacacagacau

SEQ ID NO: 2045098 - RNA, 19 nt, Homo sapiens
  misc_RNA (1)...(19): siRNA sense strand
cagaacaagauccaaacug

SEQ ID NO: 2045099 - RNA, 19 nt, Homo sapiens
  misc_RNA (1)...(19): siRNA sense strand
cgauacauugcuugucuga

SEQ ID NO: 2045100 - RNA, 19 nt, Homo sapiens
  misc_RNA (1)...(19): siRNA sense strand
uuaaagacagaacaagauc

SEQ ID NO: 2045101 - RNA, 19 nt, Homo sapiens
  misc_RNA (1)...(19): siRNA sense strand
acaauuaggauccagaacu

SEQ ID NO: 2045102 - RNA, 19 nt, Homo sapiens
  misc_RNA (1)...(19): siRNA sense strand
ccacuauuuccauuauuag

SEQ ID NO: 2045103 - RNA, 19 nt, Homo sapiens
  misc_RNA (1)...(19): siRNA sense strand
gcagguggcacaguguauc

SEQ ID NO: 2045104 - RNA, 19 nt, Homo sapiens
  misc_RNA (1)...(19): siRNA sense strand
caagcaggccauuuauagg

SEQ ID NO: 2045105 - RNA, 19 nt, Homo sapiens
  misc_RNA (1)...(19): siRNA sense strand
acacagacauuaaguauag

SEQ ID NO: 2045106 - RNA, 19 nt, Homo sapiens
  misc_RNA (1)...(19): siRNA sense strand
ggccgagaaugacaucuua

SEQ ID NO: 2045107 - RNA, 19 nt, Homo sapiens
  misc_RNA (1)...(19): siRNA sense strand
gaagauccagaaacugaua

SEQ ID NO: 2045108 - RNA, 19 nt, Homo sapiens
  misc_RNA (1)...(19): siRNA sense strand
auacauugcuugucugaaa

SEQ ID NO: 2045109 - RNA, 19 nt, Homo sapiens
  misc_RNA (1)...(19): siRNA sense strand
caacagaugcaaguaguaa

SEQ ID NO: 2045110 - RNA, 19 nt, Homo sapiens
  misc_RNA (1)...(19): siRNA sense strand
cagcuucaguuacaguuaa

SEQ ID NO: 2045111 - RNA, 19 nt, Homo sapiens
  misc_RNA (1)...(19): siRNA sense strand
uaagaaagcaagagaagga

SEQ ID NO: 2045112 - RNA, 19 nt, Homo sapiens
  misc_RNA (1)...(19): siRNA sense strand
gauccaaacugcucugaac

SEQ ID NO: 2045113 - RNA, 19 nt, Homo sapiens
  misc_RNA (1)...(19): siRNA sense strand
ggacaagcaggccauuuau

SEQ ID NO: 2045114 - RNA, 19 nt, Homo sapiens
  misc_RNA (1)...(19): siRNA sense strand
guucaucaaugccagaaga

SEQ ID NO: 2045115 - RNA, 19 nt, Homo sapiens
  misc_RNA (1)...(19): siRNA sense strand
gugaagauccagaaacuga

SEQ ID NO: 2045116 - RNA, 19 nt, Homo sapiens
  misc_RNA (1)...(19): siRNA sense strand
gucaacaacugguucauca

SEQ ID NO: 2045117 - RNA, 19 nt, Homo sapiens
  misc_RNA (1)...(19): siRNA sense strand
gacaagcaggccauuuaua

SEQ ID NO: 2045118 - RNA, 19 nt, Homo sapiens
  misc_RNA (1)...(19): siRNA sense strand
gauucaaguuguucagaga

SEQ ID NO: 2045119 - RNA, 19 nt, Homo sapiens
  misc_RNA (1)...(19): siRNA sense strand
uuaacgaacucugcaaaga

SEQ ID NO: 2045120 - RNA, 19 nt, Homo sapiens
  misc_RNA (1)...(19): siRNA sense strand
ucagacaaauuugacacua

SEQ ID NO: 2045121 - RNA, 19 nt, Homo sapiens
  misc_RNA (1)...(19): siRNA sense strand
cauccacuauuuccauuau

SEQ ID NO: 2045122 - RNA, 19 nt, Homo sapiens
  misc_RNA (1)...(19): siRNA sense strand
caacaacugguucaucaau

SEQ ID NO: 2045123 - RNA, 19 nt, Homo sapiens
  misc_RNA (1)...(19): siRNA sense strand
uggacaagcaggccauuua

SEQ ID NO: 2045124 - RNA, 19 nt, Homo sapiens
  misc_RNA (1)...(19): siRNA sense strand
aaagauuucugcagucgau

SEQ ID NO: 2045125 - RNA, 19 nt, Homo sapiens
  misc_RNA (1)...(19): siRNA sense strand
aacgaacucugcaaagauu

SEQ ID NO: 2045126 - RNA, 19 nt, Homo sapiens
  misc_RNA (1)...(19): siRNA sense strand
gcaacagaugcaaguagua

SEQ ID NO: 2045127 - RNA, 19 nt, Homo sapiens
  misc_RNA (1)...(19): siRNA sense strand
gcaagagaaggaagggaaa

SEQ ID NO: 2045128 - RNA, 19 nt, Homo sapiens
  misc_RNA (1)...(19): siRNA sense strand
cuacacagacauuaaguau

SEQ ID NO: 2045129 - RNA, 19 nt, Homo sapiens
  misc_RNA (1)...(19): siRNA sense strand
ggacaauuaggauccagaa

SEQ ID NO: 2045130 - RNA, 19 nt, Homo sapiens
  misc_RNA (1)...(19): siRNA sense strand
caauuaggauccagaacuc

SEQ ID NO: 2045131 - RNA, 19 nt, Homo sapiens
  misc_RNA (1)...(19): siRNA sense strand
ggcaacagaugcaaguagu

SEQ ID NO: 2045132 - RNA, 19 nt, Homo sapiens
  misc_RNA (1)...(19): siRNA sense strand
gacgaauucuucagccaau

SEQ ID NO: 2045133 - RNA, 19 nt, Homo sapiens
  misc_RNA (1)...(19): siRNA sense strand
acagauugcugcucagaca

SEQ ID NO: 2045134 - RNA, 19 nt, Homo sapiens
  misc_RNA (1)...(19): siRNA sense strand
agacagaacaagauccaaa

SEQ ID NO: 2045135 - RNA, 19 nt, Homo sapiens
  misc_RNA (1)...(19): siRNA sense strand
uaacgaacucugcaaagau

SEQ ID NO: 2045136 - RNA, 19 nt, Homo sapiens
  misc_RNA (1)...(19): siRNA sense strand
acaagcaggccauuuauag

SEQ ID NO: 2045137 - RNA, 19 nt, Homo sapiens
  misc_RNA (1)...(19): siRNA sense strand
cauuaaguauagacagcua

SEQ ID NO: 2045138 - RNA, 19 nt, Homo sapiens
  misc_RNA (1)...(19): siRNA sense strand
guuaaagacagaacaagau

SEQ ID NO: 2045139 - RNA, 19 nt, Homo sapiens
  misc_RNA (1)...(19): siRNA sense strand
gcuacacagacauuaagua

SEQ ID NO: 2045140 - RNA, 19 nt, Homo sapiens
  misc_RNA (1)...(19): siRNA sense strand
gauucaaagugccaucaca

SEQ ID NO: 2045141 - RNA, 19 nt, Homo sapiens
  misc_RNA (1)...(19): siRNA sense strand
cgauggauguggacaagca

SEQ ID NO: 2045142 - RNA, 19 nt, Homo sapiens
  misc_RNA (1)...(19): siRNA sense strand
ggcauccacuauuuccauu

SEQ ID NO: 2045143 - RNA, 19 nt, Homo sapiens
  misc_RNA (1)...(19): siRNA sense strand
ugaacccgaugcagaagga

SEQ ID NO: 2045144 - RNA, 19 nt, Homo sapiens
  misc_RNA (1)...(19): siRNA sense strand
gggcaucccuacccaacag

SEQ ID NO: 2045145 - RNA, 19 nt, Homo sapiens
  misc_RNA (1)...(19): siRNA sense strand
gcauccacuauuuccauua

SEQ ID NO: 2045146 - RNA, 19 nt, Homo sapiens
  misc_RNA (1)...(19): siRNA sense strand
agacaaauuugacacuacu

SEQ ID NO: 2045147 - RNA, 19 nt, Homo sapiens
  misc_RNA (1)...(19): siRNA sense strand
gucgauacauugcuugucu

SEQ ID NO: 2045148 - RNA, 19 nt, Homo sapiens
  misc_RNA (1)...(19): siRNA sense strand
aauguuggauucaaguugu

SEQ ID NO: 2045149 - RNA, 19 nt, Homo sapiens
  misc_RNA (1)...(19): siRNA sense strand
cagacaaauuugacacuac

SEQ ID NO: 2045150 - RNA, 19 nt, Homo sapiens
  misc_RNA (1)...(19): siRNA sense strand
gcgcauucaucuucuugag

SEQ ID NO: 2045151 - RNA, 19 nt, Homo sapiens
  misc_RNA (1)...(19): siRNA sense strand
uuucugcagucgauacauu

SEQ ID NO: 2045152 - RNA, 19 nt, Homo sapiens
  misc_RNA (1)...(19): siRNA sense strand
gauccagaaacugauaauu

SEQ ID NO: 2045153 - RNA, 19 nt, Homo sapiens
  misc_RNA (1)...(19): siRNA sense strand
ugccaaagcaugccacgaa

SEQ ID NO: 2045154 - RNA, 19 nt, Homo sapiens
  misc_RNA (1)...(19): siRNA sense strand
ggaaaagguuaacgaacuc

SEQ ID NO: 2045155 - RNA, 19 nt, Homo sapiens
  misc_RNA (1)...(19): siRNA sense strand
caauguuggauucaaguug

SEQ ID NO: 2045156 - RNA, 19 nt, Homo sapiens
  misc_RNA (1)...(19): siRNA sense strand
uugcugcucagacaaauuu

SEQ ID NO: 2045157 - RNA, 19 nt, Homo sapiens
  misc_RNA (1)...(19): siRNA sense strand
gguuaacgaacucugcaaa

SEQ ID NO: 2045158 - RNA, 19 nt, Homo sapiens
  misc_RNA (1)...(19): siRNA sense strand
gggcaacagaugcaaguag

SEQ ID NO: 2045159 - RNA, 19 nt, Homo sapiens
  misc_RNA (1)...(19): siRNA sense strand
gaauucuucagccaauguu

SEQ ID NO: 2045160 - RNA, 19 nt, Homo sapiens
  misc_RNA (1)...(19): siRNA sense strand
ucaguuacaguuaaaccaa

SEQ ID NO: 2045161 - RNA, 19 nt, Homo sapiens
  misc_RNA (1)...(19): siRNA sense strand
gauggcuacacagacauua

SEQ ID NO: 2045162 - RNA, 19 nt, Homo sapiens
  misc_RNA (1)...(19): siRNA sense strand
gguaaaagcaauccagguu

SEQ ID NO: 2045163 - RNA, 19 nt, Homo sapiens
  misc_RNA (1)...(19): siRNA sense strand
acaacugguucaucaaugc

SEQ ID NO: 2045164 - RNA, 19 nt, Homo sapiens
  misc_RNA (1)...(19): siRNA sense strand
gauugcugcucagacaaau

SEQ ID NO: 2045165 - RNA, 19 nt, Homo sapiens
  misc_RNA (1)...(19): siRNA sense strand
ccagcuucaguuacaguua

SEQ ID NO: 2045166 - RNA, 19 nt, Homo sapiens
  misc_RNA (1)...(19): siRNA sense strand
acucccagcuucaguuaca

SEQ ID NO: 2045167 - RNA, 19 nt, Homo sapiens
  misc_RNA (1)...(19): siRNA sense strand
caaagcaugccacgaacgu

SEQ ID NO: 2045168 - RNA, 19 nt, Homo sapiens
  misc_RNA (1)...(19): siRNA sense strand
cccaacagaggaugagaaa

SEQ ID NO: 2045169 - RNA, 19 nt, Homo sapiens
  misc_RNA (1)...(19): siRNA sense strand
caagucaacaacugguuca

SEQ ID NO: 2045170 - RNA, 19 nt, Homo sapiens
  misc_RNA (1)...(19): siRNA sense strand
cgaauucuucagccaaugu

SEQ ID NO: 2045171 - RNA, 19 nt, Homo sapiens
  misc_RNA (1)...(19): siRNA sense strand
aacaacugguucaucaaug

SEQ ID NO: 2045172 - RNA, 19 nt, Homo sapiens
  misc_RNA (1)...(19): siRNA sense strand
guaaaagcaauccagguuu

SEQ ID NO: 2045173 - RNA, 19 nt, Homo sapiens
  misc_RNA (1)...(19): siRNA sense strand
aaacagauugcugcucaga

SEQ ID NO: 2045174 - RNA, 19 nt, Homo sapiens
  misc_RNA (1)...(19): siRNA sense strand
caaguggucacacagacau

SEQ ID NO: 2045175 - RNA, 19 nt, Homo sapiens
  misc_RNA (1)...(19): siRNA sense strand
cagaacaagauccaaacug

SEQ ID NO: 2045176 - RNA, 19 nt, Homo sapiens
  misc_RNA (1)...(19): siRNA sense strand
agaugcaaguaguaacaga

SEQ ID NO: 2045177 - RNA, 19 nt, Homo sapiens
  misc_RNA (1)...(19): siRNA sense strand
gauccagaacucccagcuu

SEQ ID NO: 2045178 - RNA, 19 nt, Homo sapiens
  misc_RNA (1)...(19): siRNA sense strand
cgauacauugcuugucuga

SEQ ID NO: 2045179 - RNA, 19 nt, Homo sapiens
  misc_RNA (1)...(19): siRNA sense strand
ccacuauuuccauuauuag

SEQ ID NO: 2045180 - RNA, 19 nt, Homo sapiens
  misc_RNA (1)...(19): siRNA sense strand
uuaaagacagaacaagauc

SEQ ID NO: 2045181 - RNA, 19 nt, Homo sapiens
  misc_RNA (1)...(19): siRNA sense strand
acaauuaggauccagaacu

SEQ ID NO: 2045182 - RNA, 19 nt, Homo sapiens
  misc_RNA (1)...(19): siRNA sense strand
gcagguggcacaguguauc

SEQ ID NO: 2045183 - RNA, 19 nt, Homo sapiens
  misc_RNA (1)...(19): siRNA sense strand
caagcaggccauuuauagg

SEQ ID NO: 2045184 - RNA, 19 nt, Homo sapiens
  misc_RNA (1)...(19): siRNA sense strand
acacagacauuaaguauag

SEQ ID NO: 2045185 - RNA, 19 nt, Homo sapiens
  misc_RNA (1)...(19): siRNA sense strand
gaagauccagaaacugaua

SEQ ID NO: 2045186 - RNA, 19 nt, Homo sapiens
  misc_RNA (1)...(19): siRNA sense strand
auacauugcuugucugaaa

SEQ ID NO: 2045187 - RNA, 19 nt, Homo sapiens
  misc_RNA (1)...(19): siRNA sense strand
caacagaugcaaguaguaa

SEQ ID NO: 2045188 - RNA, 19 nt, Homo sapiens
  misc_RNA (1)...(19): siRNA sense strand
cagcuucaguuacaguuaa

SEQ ID NO: 2045189 - RNA, 19 nt, Homo sapiens
  misc_RNA (1)...(19): siRNA sense strand
uaagaaagcaagagaagga

SEQ ID NO: 2045190 - RNA, 19 nt, Homo sapiens
  misc_RNA (1)...(19): siRNA sense strand
gauccaaacugcucugaac

SEQ ID NO: 2045191 - RNA, 19 nt, Homo sapiens
  misc_RNA (1)...(19): siRNA sense strand
ggacaagcaggccauuuau

SEQ ID NO: 2045192 - RNA, 19 nt, Homo sapiens
  misc_RNA (1)...(19): siRNA sense strand
guucaucaaugccagaaga

SEQ ID NO: 2045193 - RNA, 19 nt, Homo sapiens
  misc_RNA (1)...(19): siRNA sense strand
gugaagauccagaaacuga

SEQ ID NO: 2045194 - RNA, 19 nt, Homo sapiens
  misc_RNA (1)...(19): siRNA sense strand
gucaacaacugguucauca

SEQ ID NO: 2045195 - RNA, 19 nt, Homo sapiens
  misc_RNA (1)...(19): siRNA sense strand
gacaagcaggccauuuaua

SEQ ID NO: 2045196 - RNA, 19 nt, Homo sapiens
  misc_RNA (1)...(19): siRNA sense strand
gauucaaguuguucagaga

SEQ ID NO: 2045197 - RNA, 19 nt, Homo sapiens
  misc_RNA (1)...(19): siRNA sense strand
uuaacgaacucugcaaaga

SEQ ID NO: 2045198 - RNA, 19 nt, Homo sapiens
  misc_RNA (1)...(19): siRNA sense strand
ucagacaaauuugacacua

SEQ ID NO: 2045199 - RNA, 19 nt, Homo sapiens
  misc_RNA (1)...(19): siRNA sense strand
cauccacuauuuccauuau

SEQ ID NO: 2045200 - RNA, 19 nt, Homo sapiens
  misc_RNA (1)...(19): siRNA sense strand
caacaacugguucaucaau

SEQ ID NO: 2045201 - RNA, 19 nt, Homo sapiens
  misc_RNA (1)...(19): siRNA sense strand
uggacaagcaggccauuua

SEQ ID NO: 2045202 - RNA, 19 nt, Homo sapiens
  misc_RNA (1)...(19): siRNA sense strand
aaagauuucugcagucgau

SEQ ID NO: 2045203 - RNA, 19 nt, Homo sapiens
  misc_RNA (1)...(19): siRNA sense strand
aacgaacucugcaaagauu

SEQ ID NO: 2045204 - RNA, 19 nt, Homo sapiens
  misc_RNA (1)...(19): siRNA sense strand
gcaacagaugcaaguagua

SEQ ID NO: 2045205 - RNA, 19 nt, Homo sapiens
  misc_RNA (1)...(19): siRNA sense strand
gcaagagaaggaagggaaa

SEQ ID NO: 2045206 - RNA, 19 nt, Homo sapiens
  misc_RNA (1)...(19): siRNA sense strand
cuacacagacauuaaguau

SEQ ID NO: 2045207 - RNA, 19 nt, Homo sapiens
  misc_RNA (1)...(19): siRNA sense strand
ggacaauuaggauccagaa

SEQ ID NO: 2045208 - RNA, 19 nt, Homo sapiens
  misc_RNA (1)...(19): siRNA sense strand
caauuaggauccagaacuc

SEQ ID NO: 2045209 - RNA, 19 nt, Homo sapiens
  misc_RNA (1)...(19): siRNA sense strand
ggcaacagaugcaaguagu

SEQ ID NO: 2045210 - RNA, 19 nt, Homo sapiens
  misc_RNA (1)...(19): siRNA sense strand
gacgaauucuucagccaau

SEQ ID NO: 2045211 - RNA, 19 nt, Homo sapiens
  misc_RNA (1)...(19): siRNA sense strand
acagauugcugcucagaca

SEQ ID NO: 2045212 - RNA, 19 nt, Homo sapiens
  misc_RNA (1)...(19): siRNA sense strand
agacagaacaagauccaaa

SEQ ID NO: 2045213 - RNA, 19 nt, Homo sapiens
  misc_RNA (1)...(19): siRNA sense strand
uaacgaacucugcaaagau

SEQ ID NO: 2045214 - RNA, 19 nt, Homo sapiens
  misc_RNA (1)...(19): siRNA sense strand
acaagcaggccauuuauag

SEQ ID NO: 2045215 - RNA, 19 nt, Homo sapiens
  misc_RNA (1)...(19): siRNA sense strand
cauuaaguauagacagcua

SEQ ID NO: 2045216 - RNA, 19 nt, Homo sapiens
  misc_RNA (1)...(19): siRNA sense strand
guuaaagacagaacaagau

SEQ ID NO: 2045217 - RNA, 19 nt, Homo sapiens
  misc_RNA (1)...(19): siRNA sense strand
gcuacacagacauuaagua

SEQ ID NO: 2045218 - RNA, 19 nt, Homo sapiens
  misc_RNA (1)...(19): siRNA sense strand
gauucaaagugccaucaca

SEQ ID NO: 2045219 - RNA, 19 nt, Homo sapiens
  misc_RNA (1)...(19): siRNA sense strand
cgauggauguggacaagca

SEQ ID NO: 2045220 - RNA, 19 nt, Homo sapiens
  misc_RNA (1)...(19): siRNA sense strand
ggcauccacuauuuccauu

SEQ ID NO: 2045221 - RNA, 19 nt, Homo sapiens
  misc_RNA (1)...(19): siRNA sense strand
ugaacccgaugcagaagga

SEQ ID NO: 2045222 - RNA, 19 nt, Homo sapiens
  misc_RNA (1)...(19): siRNA sense strand
gggcaucccuacccaacag

SEQ ID NO: 2045223 - RNA, 19 nt, Homo sapiens
  misc_RNA (1)...(19): siRNA sense strand
gcauccacuauuuccauua

SEQ ID NO: 2045224 - RNA, 19 nt, Homo sapiens
  misc_RNA (1)...(19): siRNA sense strand
agacaaauuugacacuacu

SEQ ID NO: 2045225 - RNA, 19 nt, Homo sapiens
  misc_RNA (1)...(19): siRNA sense strand
gucgauacauugcuugucu

SEQ ID NO: 2045226 - RNA, 19 nt, Homo sapiens
  misc_RNA (1)...(19): siRNA sense strand
aauguuggauucaaguugu

SEQ ID NO: 2045227 - RNA, 19 nt, Homo sapiens
  misc_RNA (1)...(19): siRNA sense strand
cagacaaauuugacacuac

SEQ ID NO: 2045228 - RNA, 19 nt, Homo sapiens
  misc_RNA (1)...(19): siRNA sense strand
gcgcauucaucuucuugag

SEQ ID NO: 2045229 - RNA, 19 nt, Homo sapiens
  misc_RNA (1)...(19): siRNA sense strand
uuucugcagucgauacauu

SEQ ID NO: 2045230 - RNA, 19 nt, Homo sapiens
  misc_RNA (1)...(19): siRNA sense strand
gauccagaaacugauaauu

SEQ ID NO: 2045231 - RNA, 19 nt, Homo sapiens
  misc_RNA (1)...(19): siRNA sense strand
ugccaaagcaugccacgaa

SEQ ID NO: 2045232 - RNA, 19 nt, Homo sapiens
  misc_RNA (1)...(19): siRNA sense strand
ggaaaagguuaacgaacuc

SEQ ID NO: 2045233 - RNA, 19 nt, Homo sapiens
  misc_RNA (1)...(19): siRNA sense strand
caauguuggauucaaguug

SEQ ID NO: 2045234 - RNA, 19 nt, Homo sapiens
  misc_RNA (1)...(19): siRNA sense strand
uugcugcucagacaaauuu

SEQ ID NO: 2045235 - RNA, 19 nt, Homo sapiens
  misc_RNA (1)...(19): siRNA sense strand
gguuaacgaacucugcaaa

SEQ ID NO: 2045236 - RNA, 19 nt, Homo sapiens
  misc_RNA (1)...(19): siRNA sense strand
gggcaacagaugcaaguag

SEQ ID NO: 2045237 - RNA, 19 nt, Homo sapiens
  misc_RNA (1)...(19): siRNA sense strand
gaauucuucagccaauguu

SEQ ID NO: 2045238 - RNA, 19 nt, Homo sapiens
  misc_RNA (1)...(19): siRNA sense strand
ucaguuacaguuaaaccaa

SEQ ID NO: 2045239 - RNA, 19 nt, Homo sapiens
  misc_RNA (1)...(19): siRNA sense strand
gauggcuacacagacauua

SEQ ID NO: 2045240 - RNA, 19 nt, Homo sapiens
  misc_RNA (1)...(19): siRNA sense strand
gguaaaagcaauccagguu

SEQ ID NO: 2045241 - RNA, 19 nt, Homo sapiens
  misc_RNA (1)...(19): siRNA sense strand
acaacugguucaucaaugc

SEQ ID NO: 2045242 - RNA, 19 nt, Homo sapiens
  misc_RNA (1)...(19): siRNA sense strand
gauugcugcucagacaaau

SEQ ID NO: 2045243 - RNA, 19 nt, Homo sapiens
  misc_RNA (1)...(19): siRNA sense strand
ccagcuucaguuacaguua

SEQ ID NO: 2045244 - RNA, 19 nt, Homo sapiens
  misc_RNA (1)...(19): siRNA sense strand
acucccagcuucaguuaca

SEQ ID NO: 2045245 - RNA, 19 nt, Homo sapiens
  misc_RNA (1)...(19): siRNA sense strand
caaagcaugccacgaacgu

SEQ ID NO: 2045246 - RNA, 19 nt, Homo sapiens
  misc_RNA (1)...(19): siRNA sense strand
cccaacagaggaugagaaa

SEQ ID NO: 2045247 - RNA, 19 nt, Homo sapiens
  misc_RNA (1)...(19): siRNA sense strand
caagucaacaacugguuca

SEQ ID NO: 2045248 - RNA, 19 nt, Homo sapiens
  misc_RNA (1)...(19): siRNA sense strand
cgaauucuucagccaaugu

SEQ ID NO: 2045249 - RNA, 19 nt, Homo sapiens
  misc_RNA (1)...(19): siRNA sense strand
aacaacugguucaucaaug

SEQ ID NO: 2045250 - RNA, 19 nt, Homo sapiens
  misc_RNA (1)...(19): siRNA sense strand
guaaaagcaauccagguuu

SEQ ID NO: 2045251 - RNA, 19 nt, Homo sapiens
  misc_RNA (1)...(19): siRNA sense strand
aaacagauugcugcucaga

SEQ ID NO: 2045252 - RNA, 19 nt, Homo sapiens
  misc_RNA (1)...(19): siRNA sense strand
agaugcaaguaguaacaga

SEQ ID NO: 2045253 - RNA, 19 nt, Homo sapiens
  misc_RNA (1)...(19): siRNA sense strand
gauccagaacucccagcuu

SEQ ID NO: 2045254 - RNA, 19 nt, Homo sapiens
  misc_RNA (1)...(19): siRNA sense strand
caaguggucacacagacau

SEQ ID NO: 2045255 - RNA, 19 nt, Homo sapiens
  misc_RNA (1)...(19): siRNA sense strand
cagaacaagauccaaacug

SEQ ID NO: 2045256 - RNA, 19 nt, Homo sapiens
  misc_RNA (1)...(19): siRNA sense strand
cgauacauugcuugucuga

SEQ ID NO: 2045257 - RNA, 19 nt, Homo sapiens
  misc_RNA (1)...(19): siRNA sense strand
uuaaagacagaacaagauc

SEQ ID NO: 2045258 - RNA, 19 nt, Homo sapiens
  misc_RNA (1)...(19): siRNA sense strand
acaauuaggauccagaacu

SEQ ID NO: 2045259 - RNA, 19 nt, Homo sapiens
  misc_RNA (1)...(19): siRNA sense strand
ccacuauuuccauuauuag

SEQ ID NO: 2045260 - RNA, 19 nt, Homo sapiens
  misc_RNA (1)...(19): siRNA sense strand
gcagguggcacaguguauc

SEQ ID NO: 2045261 - RNA, 19 nt, Homo sapiens
  misc_RNA (1)...(19): siRNA sense strand
caagcaggccauuuauagg

SEQ ID NO: 2045262 - RNA, 19 nt, Homo sapiens
  misc_RNA (1)...(19): siRNA sense strand
acacagacauuaaguauag

SEQ ID NO: 2045263 - RNA, 19 nt, Homo sapiens
  misc_RNA (1)...(19): siRNA sense strand
ggccgagaaugacaucuua

SEQ ID NO: 2045264 - RNA, 19 nt, Homo sapiens
  misc_RNA (1)...(19): siRNA sense strand
gaagauccagaaacugaua

SEQ ID NO: 2045265 - RNA, 19 nt, Homo sapiens
  misc_RNA (1)...(19): siRNA sense strand
auacauugcuugucugaaa

SEQ ID NO: 2045266 - RNA, 19 nt, Homo sapiens
  misc_RNA (1)...(19): siRNA sense strand
caacagaugcaaguaguaa

SEQ ID NO: 2045267 - RNA, 19 nt, Homo sapiens
  misc_RNA (1)...(19): siRNA sense strand
cagcuucaguuacaguuaa

SEQ ID NO: 2045268 - RNA, 19 nt, Homo sapiens
  misc_RNA (1)...(19): siRNA sense strand
uaagaaagcaagagaagga

SEQ ID NO: 2045269 - RNA, 19 nt, Homo sapiens
  misc_RNA (1)...(19): siRNA sense strand
gauccaaacugcucugaac

SEQ ID NO: 2045270 - RNA, 19 nt, Homo sapiens
  misc_RNA (1)...(19): siRNA sense strand
ggacaagcaggccauuuau

SEQ ID NO: 2045271 - RNA, 19 nt, Homo sapiens
  misc_RNA (1)...(19): siRNA sense strand
guucaucaaugccagaaga

SEQ ID NO: 2045272 - RNA, 19 nt, Homo sapiens
  misc_RNA (1)...(19): siRNA sense strand
gugaagauccagaaacuga

SEQ ID NO: 2045273 - RNA, 19 nt, Homo sapiens
  misc_RNA (1)...(19): siRNA sense strand
gucaacaacugguucauca

SEQ ID NO: 2045274 - RNA, 19 nt, Homo sapiens
  misc_RNA (1)...(19): siRNA sense strand
gacaagcaggccauuuaua

SEQ ID NO: 2045275 - RNA, 19 nt, Homo sapiens
  misc_RNA (1)...(19): siRNA sense strand
gauucaaguuguucagaga

SEQ ID NO: 2045276 - RNA, 19 nt, Homo sapiens
  misc_RNA (1)...(19): siRNA sense strand
uuaacgaacucugcaaaga

SEQ ID NO: 2045277 - RNA, 19 nt, Homo sapiens
  misc_RNA (1)...(19): siRNA sense strand
ucagacaaauuugacacua

SEQ ID NO: 2045278 - RNA, 19 nt, Homo sapiens
  misc_RNA (1)...(19): siRNA sense strand
cauccacuauuuccauuau

SEQ ID NO: 2045279 - RNA, 19 nt, Homo sapiens
  misc_RNA (1)...(19): siRNA sense strand
caacaacugguucaucaau

SEQ ID NO: 2045280 - RNA, 19 nt, Homo sapiens
  misc_RNA (1)...(19): siRNA sense strand
uggacaagcaggccauuua

SEQ ID NO: 2045281 - RNA, 19 nt, Homo sapiens
  misc_RNA (1)...(19): siRNA sense strand
aaagauuucugcagucgau

SEQ ID NO: 2045282 - RNA, 19 nt, Homo sapiens
  misc_RNA (1)...(19): siRNA sense strand
aacgaacucugcaaagauu

SEQ ID NO: 2045283 - RNA, 19 nt, Homo sapiens
  misc_RNA (1)...(19): siRNA sense strand
gcaacagaugcaaguagua

SEQ ID NO: 2045284 - RNA, 19 nt, Homo sapiens
  misc_RNA (1)...(19): siRNA sense strand
gcaagagaaggaagggaaa

SEQ ID NO: 2045285 - RNA, 19 nt, Homo sapiens
  misc_RNA (1)...(19): siRNA sense strand
cuacacagacauuaaguau

SEQ ID NO: 2045286 - RNA, 19 nt, Homo sapiens
  misc_RNA (1)...(19): siRNA sense strand
ggacaauuaggauccagaa

SEQ ID NO: 2045287 - RNA, 19 nt, Homo sapiens
  misc_RNA (1)...(19): siRNA sense strand
caauuaggauccagaacuc

SEQ ID NO: 2045288 - RNA, 19 nt, Homo sapiens
  misc_RNA (1)...(19): siRNA sense strand
ggcaacagaugcaaguagu

SEQ ID NO: 2045289 - RNA, 19 nt, Homo sapiens
  misc_RNA (1)...(19): siRNA sense strand
gacgaauucuucagccaau

SEQ ID NO: 2045290 - RNA, 19 nt, Homo sapiens
  misc_RNA (1)...(19): siRNA sense strand
acagauugcugcucagaca

SEQ ID NO: 2045291 - RNA, 19 nt, Homo sapiens
  misc_RNA (1)...(19): siRNA sense strand
agacagaacaagauccaaa

SEQ ID NO: 2045292 - RNA, 19 nt, Homo sapiens
  misc_RNA (1)...(19): siRNA sense strand
uaacgaacucugcaaagau

SEQ ID NO: 2045293 - RNA, 19 nt, Homo sapiens
  misc_RNA (1)...(19): siRNA sense strand
acaagcaggccauuuauag

SEQ ID NO: 2045294 - RNA, 19 nt, Homo sapiens
  misc_RNA (1)...(19): siRNA sense strand
cauuaaguauagacagcua

SEQ ID NO: 2045295 - RNA, 19 nt, Homo sapiens
  misc_RNA (1)...(19): siRNA sense strand
guuaaagacagaacaagau

SEQ ID NO: 2045296 - RNA, 19 nt, Homo sapiens
  misc_RNA (1)...(19): siRNA sense strand
gcuacacagacauuaagua

SEQ ID NO: 2045297 - RNA, 19 nt, Homo sapiens
  misc_RNA (1)...(19): siRNA sense strand
gauucaaagugccaucaca

SEQ ID NO: 2045298 - RNA, 19 nt, Homo sapiens
  misc_RNA (1)...(19): siRNA sense strand
cgauggauguggacaagca

SEQ ID NO: 2045299 - RNA, 19 nt, Homo sapiens
  misc_RNA (1)...(19): siRNA sense strand
ggcauccacuauuuccauu

SEQ ID NO: 2045300 - RNA, 19 nt, Homo sapiens
  misc_RNA (1)...(19): siRNA sense strand
ugaacccgaugcagaagga

SEQ ID NO: 2045301 - RNA, 19 nt, Homo sapiens
  misc_RNA (1)...(19): siRNA sense strand
gggcaucccuacccaacag

SEQ ID NO: 2045302 - RNA, 19 nt, Homo sapiens
  misc_RNA (1)...(19): siRNA sense strand
gcauccacuauuuccauua

SEQ ID NO: 2045303 - RNA, 19 nt, Homo sapiens
  misc_RNA (1)...(19): siRNA sense strand
agacaaauuugacacuacu

SEQ ID NO: 2045304 - RNA, 19 nt, Homo sapiens
  misc_RNA (1)...(19): siRNA sense strand
gucgauacauugcuugucu

SEQ ID NO: 2045305 - RNA, 19 nt, Homo sapiens
  misc_RNA (1)...(19): siRNA sense strand
aauguuggauucaaguugu

SEQ ID NO: 2045306 - RNA, 19 nt, Homo sapiens
  misc_RNA (1)...(19): siRNA sense strand
cagacaaauuugacacuac

SEQ ID NO: 2045307 - RNA, 19 nt, Homo sapiens
  misc_RNA (1)...(19): siRNA sense strand
gcgcauucaucuucuugag

SEQ ID NO: 2045308 - RNA, 19 nt, Homo sapiens
  misc_RNA (1)...(19): siRNA sense strand
uuucugcagucgauacauu

SEQ ID NO: 2045309 - RNA, 19 nt, Homo sapiens
  misc_RNA (1)...(19): siRNA sense strand
gauccagaaacugauaauu

SEQ ID NO: 2045310 - RNA, 19 nt, Homo sapiens
  misc_RNA (1)...(19): siRNA sense strand
ugccaaagcaugccacgaa

SEQ ID NO: 2045311 - RNA, 19 nt, Homo sapiens
  misc_RNA (1)...(19): siRNA sense strand
ggaaaagguuaacgaacuc

SEQ ID NO: 2045312 - RNA, 19 nt, Homo sapiens
  misc_RNA (1)...(19): siRNA sense strand
caauguuggauucaaguug

SEQ ID NO: 2045313 - RNA, 19 nt, Homo sapiens
  misc_RNA (1)...(19): siRNA sense strand
uugcugcucagacaaauuu

SEQ ID NO: 2045314 - RNA, 19 nt, Homo sapiens
  misc_RNA (1)...(19): siRNA sense strand
gguuaacgaacucugcaaa

SEQ ID NO: 2045315 - RNA, 19 nt, Homo sapiens
  misc_RNA (1)...(19): siRNA sense strand
gggcaacagaugcaaguag

SEQ ID NO: 2045316 - RNA, 19 nt, Homo sapiens
  misc_RNA (1)...(19): siRNA sense strand
gaauucuucagccaauguu

SEQ ID NO: 2045317 - RNA, 19 nt, Homo sapiens
  misc_RNA (1)...(19): siRNA sense strand
ucaguuacaguuaaaccaa

SEQ ID NO: 2045318 - RNA, 19 nt, Homo sapiens
  misc_RNA (1)...(19): siRNA sense strand
gauggcuacacagacauua

SEQ ID NO: 2045319 - RNA, 19 nt, Homo sapiens
  misc_RNA (1)...(19): siRNA sense strand
gguaaaagcaauccagguu

SEQ ID NO: 2045320 - RNA, 19 nt, Homo sapiens
  misc_RNA (1)...(19): siRNA sense strand
acaacugguucaucaaugc

SEQ ID NO: 2045321 - RNA, 19 nt, Homo sapiens
  misc_RNA (1)...(19): siRNA sense strand
gauugcugcucagacaaau

SEQ ID NO: 2045322 - RNA, 19 nt, Homo sapiens
  misc_RNA (1)...(19): siRNA sense strand
ccagcuucaguuacaguua

SEQ ID NO: 2045323 - RNA, 19 nt, Homo sapiens
  misc_RNA (1)...(19): siRNA sense strand
acucccagcuucaguuaca

SEQ ID NO: 2045324 - RNA, 19 nt, Homo sapiens
  misc_RNA (1)...(19): siRNA sense strand
caaagcaugccacgaacgu

SEQ ID NO: 2045325 - RNA, 19 nt, Homo sapiens
  misc_RNA (1)...(19): siRNA sense strand
cccaacagaggaugagaaa

SEQ ID NO: 2045326 - RNA, 19 nt, Homo sapiens
  misc_RNA (1)...(19): siRNA sense strand
caagucaacaacugguuca

SEQ ID NO: 2045327 - RNA, 19 nt, Homo sapiens
  misc_RNA (1)...(19): siRNA sense strand
cgaauucuucagccaaugu

SEQ ID NO: 2045328 - RNA, 19 nt, Homo sapiens
  misc_RNA (1)...(19): siRNA sense strand
aacaacugguucaucaaug

SEQ ID NO: 2045329 - RNA, 19 nt, Homo sapiens
  misc_RNA (1)...(19): siRNA sense strand
guaaaagcaauccagguuu

SEQ ID NO: 2045330 - RNA, 19 nt, Homo sapiens
  misc_RNA (1)...(19): siRNA sense strand
aaacagauugcugcucaga

SEQ ID NO: 2045331 - RNA, 19 nt, Homo sapiens
  misc_RNA (1)...(19): siRNA sense strand
caaguggucacacagacau

SEQ ID NO: 2045332 - RNA, 19 nt, Homo sapiens
  misc_RNA (1)...(19): siRNA sense strand
cagaacaagauccaaacug

SEQ ID NO: 2045333 - RNA, 19 nt, Homo sapiens
  misc_RNA (1)...(19): siRNA sense strand
agaugcaaguaguaacaga

SEQ ID NO: 2045334 - RNA, 19 nt, Homo sapiens
  misc_RNA (1)...(19): siRNA sense strand
gauccagaacucccagcuu

SEQ ID NO: 2045335 - RNA, 19 nt, Homo sapiens
  misc_RNA (1)...(19): siRNA sense strand
cgauacauugcuugucuga

SEQ ID NO: 2045336 - RNA, 19 nt, Homo sapiens
  misc_RNA (1)...(19): siRNA sense strand
ccacuauuuccauuauuag

SEQ ID NO: 2045337 - RNA, 19 nt, Homo sapiens
  misc_RNA (1)...(19): siRNA sense strand
uuaaagacagaacaagauc

SEQ ID NO: 2045338 - RNA, 19 nt, Homo sapiens
  misc_RNA (1)...(19): siRNA sense strand
acaauuaggauccagaacu

SEQ ID NO: 2045339 - RNA, 19 nt, Homo sapiens
  misc_RNA (1)...(19): siRNA sense strand
gcagguggcacaguguauc

SEQ ID NO: 2045340 - RNA, 19 nt, Homo sapiens
  misc_RNA (1)...(19): siRNA sense strand
caagcaggccauuuauagg

SEQ ID NO: 2045341 - RNA, 19 nt, Homo sapiens
  misc_RNA (1)...(19): siRNA sense strand
ggaaagaccuccacaagua

SEQ ID NO: 2045342 - RNA, 19 nt, Homo sapiens
  misc_RNA (1)...(19): siRNA sense strand
gaagaaacgagaaguguua

SEQ ID NO: 2045343 - RNA, 19 nt, Homo sapiens
  misc_RNA (1)...(19): siRNA sense strand
gaagaaagauuaggcaaug

SEQ ID NO: 2045344 - RNA, 19 nt, Homo sapiens
  misc_RNA (1)...(19): siRNA sense strand
ggagaugacucaaggagaa

SEQ ID NO: 2045345 - RNA, 19 nt, Homo sapiens
  misc_RNA (1)...(19): siRNA sense strand
gcaaauaguaguucuggua

SEQ ID NO: 2045346 - RNA, 19 nt, Homo sapiens
  misc_RNA (1)...(19): siRNA sense strand
gcagaauuguguuaaagaa

SEQ ID NO: 2045347 - RNA, 19 nt, Homo sapiens
  misc_RNA (1)...(19): siRNA sense strand
ucaauggacuccugaauau

SEQ ID NO: 2045348 - RNA, 19 nt, Homo sapiens
  misc_RNA (1)...(19): siRNA sense strand
gaguugagaugauuaauag

SEQ ID NO: 2045349 - RNA, 19 nt, Homo sapiens
  misc_RNA (1)...(19): siRNA sense strand
ucaaauaucuucucaugca

SEQ ID NO: 2045350 - RNA, 19 nt, Homo sapiens
  misc_RNA (1)...(19): siRNA sense strand
agaaggaaaugaaugguaa

SEQ ID NO: 2045351 - RNA, 19 nt, Homo sapiens
  misc_RNA (1)...(19): siRNA sense strand
gagcaacagugguaucaga

SEQ ID NO: 2045352 - RNA, 19 nt, Homo sapiens
  misc_RNA (1)...(19): siRNA sense strand
gaaccaccaugcauuagga

SEQ ID NO: 2045353 - RNA, 19 nt, Homo sapiens
  misc_RNA (1)...(19): siRNA sense strand
ggaguugagaugauuaaua

SEQ ID NO: 2045354 - RNA, 19 nt, Homo sapiens
  misc_RNA (1)...(19): siRNA sense strand
agagugagauuccuucuga

SEQ ID NO: 2045355 - RNA, 19 nt, Homo sapiens
  misc_RNA (1)...(19): siRNA sense strand
gauaaagaagucucuguaa

SEQ ID NO: 2045356 - RNA, 19 nt, Homo sapiens
  misc_RNA (1)...(19): siRNA sense strand
uaaagaagucucuguaaga

SEQ ID NO: 2045357 - RNA, 19 nt, Homo sapiens
  misc_RNA (1)...(19): siRNA sense strand
uugaggaacugauucauuu

SEQ ID NO: 2045358 - RNA, 19 nt, Homo sapiens
  misc_RNA (1)...(19): siRNA sense strand
ggauaaagaagucucugua

SEQ ID NO: 2045359 - RNA, 19 nt, Homo sapiens
  misc_RNA (1)...(19): siRNA sense strand
gcgcuuccauuaacaauuc

SEQ ID NO: 2045360 - RNA, 19 nt, Homo sapiens
  misc_RNA (1)...(19): siRNA sense strand
aaauaugccuugcuaccua

SEQ ID NO: 2045361 - RNA, 19 nt, Homo sapiens
  misc_RNA (1)...(19): siRNA sense strand
gcagaaagagauuuguaaa

SEQ ID NO: 2045362 - RNA, 19 nt, Homo sapiens
  misc_RNA (1)...(19): siRNA sense strand
guaucgggauuguuaauga

SEQ ID NO: 2045363 - RNA, 19 nt, Homo sapiens
  misc_RNA (1)...(19): siRNA sense strand
ucacauccguuacauuuca

SEQ ID NO: 2045364 - RNA, 19 nt, Homo sapiens
  misc_RNA (1)...(19): siRNA sense strand
ugaauucucucaccugugu

SEQ ID NO: 2045365 - RNA, 19 nt, Homo sapiens
  misc_RNA (1)...(19): siRNA sense strand
ggaacugauucauuuggaa

SEQ ID NO: 2045366 - RNA, 19 nt, Homo sapiens
  misc_RNA (1)...(19): siRNA sense strand
gagaaggaaaugaauggua

SEQ ID NO: 2045367 - RNA, 19 nt, Homo sapiens
  misc_RNA (1)...(19): siRNA sense strand
ucucaaauaucuucucaug

SEQ ID NO: 2045368 - RNA, 19 nt, Homo sapiens
  misc_RNA (1)...(19): siRNA sense strand
gaaacuggcccuccugcaa

SEQ ID NO: 2045369 - RNA, 19 nt, Homo sapiens
  misc_RNA (1)...(19): siRNA sense strand
gcacuucuauaggagauga

SEQ ID NO: 2045370 - RNA, 19 nt, Homo sapiens
  misc_RNA (1)...(19): siRNA sense strand
agaaugaccucagcaguga

SEQ ID NO: 2045371 - RNA, 19 nt, Homo sapiens
  misc_RNA (1)...(19): siRNA sense strand
gcagaaugcagcagaaguu

SEQ ID NO: 2045372 - RNA, 19 nt, Homo sapiens
  misc_RNA (1)...(19): siRNA sense strand
ccacccagcugucccaguu

SEQ ID NO: 2045373 - RNA, 19 nt, Homo sapiens
  misc_RNA (1)...(19): siRNA sense strand
ggauauuaaugcagaggaa

SEQ ID NO: 2045374 - RNA, 19 nt, Homo sapiens
  misc_RNA (1)...(19): siRNA sense strand
ugagacgucuuccauguau

SEQ ID NO: 2045375 - RNA, 19 nt, Homo sapiens
  misc_RNA (1)...(19): siRNA sense strand
caaggccacuucaucauca

SEQ ID NO: 2045376 - RNA, 19 nt, Homo sapiens
  misc_RNA (1)...(19): siRNA sense strand
gagaagaagauuuguuugu

SEQ ID NO: 2045377 - RNA, 19 nt, Homo sapiens
  misc_RNA (1)...(19): siRNA sense strand
gaaaagacccuguuuacau

SEQ ID NO: 2045378 - RNA, 19 nt, Homo sapiens
  misc_RNA (1)...(19): siRNA sense strand
ccucacauccguuacauuu

SEQ ID NO: 2045379 - RNA, 19 nt, Homo sapiens
  misc_RNA (1)...(19): siRNA sense strand
ccaacucacuuagccagua

SEQ ID NO: 2045380 - RNA, 19 nt, Homo sapiens
  misc_RNA (1)...(19): siRNA sense strand
caaccuuuaucaucaauag

SEQ ID NO: 2045381 - RNA, 19 nt, Homo sapiens
  misc_RNA (1)...(19): siRNA sense strand
cagcuacucuuacaagcaa

SEQ ID NO: 2045382 - RNA, 19 nt, Homo sapiens
  misc_RNA (1)...(19): siRNA sense strand
cuucguaugugcagaauug

SEQ ID NO: 2045383 - RNA, 19 nt, Homo sapiens
  misc_RNA (1)...(19): siRNA sense strand
uaucagaagucauggaagu

SEQ ID NO: 2045384 - RNA, 19 nt, Homo sapiens
  misc_RNA (1)...(19): siRNA sense strand
gagcaggccucugauacug

SEQ ID NO: 2045385 - RNA, 19 nt, Homo sapiens
  misc_RNA (1)...(19): siRNA sense strand
agaauggaaucacaagcua

SEQ ID NO: 2045386 - RNA, 19 nt, Homo sapiens
  misc_RNA (1)...(19): siRNA sense strand
caggaaguauugaugaaga

SEQ ID NO: 2045387 - RNA, 19 nt, Homo sapiens
  misc_RNA (1)...(19): siRNA sense strand
agacuuccaugcagaaaga

SEQ ID NO: 2045388 - RNA, 19 nt, Homo sapiens
  misc_RNA (1)...(19): siRNA sense strand
ugaaggagaagaagauuug

SEQ ID NO: 2045389 - RNA, 19 nt, Homo sapiens
  misc_RNA (1)...(19): siRNA sense strand
caacagugguaucagaagu

SEQ ID NO: 2045390 - RNA, 19 nt, Homo sapiens
  misc_RNA (1)...(19): siRNA sense strand
caagugaugaagauaauga

SEQ ID NO: 2045391 - RNA, 19 nt, Homo sapiens
  misc_RNA (1)...(19): siRNA sense strand
ggaagaagggacugaggaa

SEQ ID NO: 2045392 - RNA, 19 nt, Homo sapiens
  misc_RNA (1)...(19): siRNA sense strand
cuucaucacuuacaauuag

SEQ ID NO: 2045393 - RNA, 19 nt, Homo sapiens
  misc_RNA (1)...(19): siRNA sense strand
gagacugcauccucaugaa

SEQ ID NO: 2045394 - RNA, 19 nt, Homo sapiens
  misc_RNA (1)...(19): siRNA sense strand
gaccugagcaacaguggua

SEQ ID NO: 2045395 - RNA, 19 nt, Homo sapiens
  misc_RNA (1)...(19): siRNA sense strand
acagaaccaccaugcauua

SEQ ID NO: 2045396 - RNA, 19 nt, Homo sapiens
  misc_RNA (1)...(19): siRNA sense strand
ggaagaaacgagaaguguu

SEQ ID NO: 2045397 - RNA, 19 nt, Homo sapiens
  misc_RNA (1)...(19): siRNA sense strand
ccacggaaccgcaguagga

SEQ ID NO: 2045398 - RNA, 19 nt, Homo sapiens
  misc_RNA (1)...(19): siRNA sense strand
ccaaguguguguugaccaa

SEQ ID NO: 2045399 - RNA, 19 nt, Homo sapiens
  misc_RNA (1)...(19): siRNA sense strand
ggacugaggaagacacaga

SEQ ID NO: 2045400 - RNA, 19 nt, Homo sapiens
  misc_RNA (1)...(19): siRNA sense strand
ggacauccucauacaaguu

SEQ ID NO: 2045401 - RNA, 19 nt, Homo sapiens
  misc_RNA (1)...(19): siRNA sense strand
uaacgagcucuacaccuua

SEQ ID NO: 2045402 - RNA, 19 nt, Homo sapiens
  misc_RNA (1)...(19): siRNA sense strand
ucaaggagaacuacaucua

SEQ ID NO: 2045403 - RNA, 19 nt, Homo sapiens
  misc_RNA (1)...(19): siRNA sense strand
ggaagaaagauuaggcaau

SEQ ID NO: 2045404 - RNA, 19 nt, Homo sapiens
  misc_RNA (1)...(19): siRNA sense strand
guucaaaggaggaggauga

SEQ ID NO: 2045405 - RNA, 19 nt, Homo sapiens
  misc_RNA (1)...(19): siRNA sense strand
ucauggagcaucugcauuu

SEQ ID NO: 2045406 - RNA, 19 nt, Homo sapiens
  misc_RNA (1)...(19): siRNA sense strand
auaacgagcucuacaccuu

SEQ ID NO: 2045407 - RNA, 19 nt, Homo sapiens
  misc_RNA (1)...(19): siRNA sense strand
uguacuaucuguuugucua

SEQ ID NO: 2045408 - RNA, 19 nt, Homo sapiens
  misc_RNA (1)...(19): siRNA sense strand
cagccaauuucgcaccaua

SEQ ID NO: 2045409 - RNA, 19 nt, Homo sapiens
  misc_RNA (1)...(19): siRNA sense strand
gaagauuuguuuguuucug

SEQ ID NO: 2045410 - RNA, 19 nt, Homo sapiens
  misc_RNA (1)...(19): siRNA sense strand
ccagguuacugccaaugaa

SEQ ID NO: 2045411 - RNA, 19 nt, Homo sapiens
  misc_RNA (1)...(19): siRNA sense strand
agaggaaggugaagaugug

SEQ ID NO: 2045412 - RNA, 19 nt, Homo sapiens
  misc_RNA (1)...(19): siRNA sense strand
ucacgcaccuccucgacuu

SEQ ID NO: 2045413 - RNA, 19 nt, Homo sapiens
  misc_RNA (1)...(19): siRNA sense strand
ggucaugggcaucauauuc

SEQ ID NO: 2045414 - RNA, 19 nt, Homo sapiens
  misc_RNA (1)...(19): siRNA sense strand
ugacaaggccacuucauca

SEQ ID NO: 2045415 - RNA, 19 nt, Homo sapiens
  misc_RNA (1)...(19): siRNA sense strand
caagucaaccuuuaucauc

SEQ ID NO: 2045416 - RNA, 19 nt, Homo sapiens
  misc_RNA (1)...(19): siRNA sense strand
cucccgagcugcaaucuuu

SEQ ID NO: 2045417 - RNA, 19 nt, Homo sapiens
  misc_RNA (1)...(19): siRNA sense strand
gcaagagaaggaaaugaau

SEQ ID NO: 2045418 - RNA, 19 nt, Homo sapiens
  misc_RNA (1)...(19): siRNA sense strand
cacauaggaugcacccaaa

SEQ ID NO: 2045419 - RNA, 19 nt, Homo sapiens
  misc_RNA (1)...(19): siRNA sense strand
caguacagcugcaccaauc

SEQ ID NO: 2045420 - RNA, 19 nt, Homo sapiens
  misc_RNA (1)...(19): siRNA sense strand
caaauaucuucucaugcaa

SEQ ID NO: 2045421 - RNA, 19 nt, Homo sapiens
  misc_RNA (1)...(19): siRNA sense strand
aauggacuccugaauauaa

SEQ ID NO: 2045422 - RNA, 19 nt, Homo sapiens
  misc_RNA (1)...(19): siRNA sense strand
gaaugcagcagaaguugug

SEQ ID NO: 2045423 - RNA, 19 nt, Homo sapiens
  misc_RNA (1)...(19): siRNA sense strand
ggacacuccagaucucauu

SEQ ID NO: 2045424 - RNA, 19 nt, Homo sapiens
  misc_RNA (1)...(19): siRNA sense strand
ugaagauguuguggugaua

SEQ ID NO: 2045425 - RNA, 19 nt, Homo sapiens
  misc_RNA (1)...(19): siRNA sense strand
cagggaauauuaggacuga

SEQ ID NO: 2045426 - RNA, 19 nt, Homo sapiens
  misc_RNA (1)...(19): siRNA sense strand
gaaagauuaggcaauguca

SEQ ID NO: 2045427 - RNA, 19 nt, Homo sapiens
  misc_RNA (1)...(19): siRNA sense strand
ccacagcccucucucucau

SEQ ID NO: 2045428 - RNA, 19 nt, Homo sapiens
  misc_RNA (1)...(19): siRNA sense strand
ucuaguaguuccagugaga

SEQ ID NO: 2045429 - RNA, 19 nt, Homo sapiens
  misc_RNA (1)...(19): siRNA sense strand
gaauauaacgagcucuaca

SEQ ID NO: 2045430 - RNA, 19 nt, Homo sapiens
  misc_RNA (1)...(19): siRNA sense strand
ugaaagauguacauaucca

SEQ ID NO: 2045431 - RNA, 19 nt, Homo sapiens
  misc_RNA (1)...(19): siRNA sense strand
gcaggaguugagaugauua

SEQ ID NO: 2045432 - RNA, 19 nt, Homo sapiens
  misc_RNA (1)...(19): siRNA sense strand
gcuauccucacauccguua

SEQ ID NO: 2045433 - RNA, 19 nt, Homo sapiens
  misc_RNA (1)...(19): siRNA sense strand
acagugaaguggagauugu

SEQ ID NO: 2045434 - RNA, 19 nt, Homo sapiens
  misc_RNA (1)...(19): siRNA sense strand
aauguuaccucaacugaca

SEQ ID NO: 2045435 - RNA, 19 nt, Homo sapiens
  misc_RNA (1)...(19): siRNA sense strand
cauagugcacggucucaua

SEQ ID NO: 2045436 - RNA, 19 nt, Homo sapiens
  misc_RNA (1)...(19): siRNA sense strand
ggacaccaagugaugaaga

SEQ ID NO: 2045437 - RNA, 19 nt, Homo sapiens
  misc_RNA (1)...(19): siRNA sense strand
gauuguaacaguuggagaa

SEQ ID NO: 2045438 - RNA, 19 nt, Homo sapiens
  misc_RNA (1)...(19): siRNA sense strand
caagagaaggaaaugaaug

SEQ ID NO: 2045439 - RNA, 19 nt, Homo sapiens
  misc_RNA (1)...(19): siRNA sense strand
gcagugaauccucuucuag

SEQ ID NO: 2045440 - RNA, 19 nt, Homo sapiens
  misc_RNA (1)...(19): siRNA sense strand
cuacuagcgcuuccauuaa

SEQ ID NO: 2045441 - RNA, 19 nt, Homo sapiens
  misc_RNA (1)...(19): siRNA sense strand
ggaaauugcucuggauuaa

SEQ ID NO: 2045442 - RNA, 19 nt, Homo sapiens
  misc_RNA (1)...(19): siRNA sense strand
ggcaaaccgugcauuauua

SEQ ID NO: 2045443 - RNA, 19 nt, Homo sapiens
  misc_RNA (1)...(19): siRNA sense strand
ggaagaaauucaucuggaa

SEQ ID NO: 2045444 - RNA, 19 nt, Homo sapiens
  misc_RNA (1)...(19): siRNA sense strand
gaggagacuuuaaucauga

SEQ ID NO: 2045445 - RNA, 19 nt, Homo sapiens
  misc_RNA (1)...(19): siRNA sense strand
cgaaaggucugcagauuca

SEQ ID NO: 2045446 - RNA, 19 nt, Homo sapiens
  misc_RNA (1)...(19): siRNA sense strand
ccagagggaugacaugauu

SEQ ID NO: 2045447 - RNA, 19 nt, Homo sapiens
  misc_RNA (1)...(19): siRNA sense strand
uaacacagauuccucagau

SEQ ID NO: 2045448 - RNA, 19 nt, Homo sapiens
  misc_RNA (1)...(19): siRNA sense strand
ggauaaaguuggaaaugug

SEQ ID NO: 2045449 - RNA, 19 nt, Homo sapiens
  misc_RNA (1)...(19): siRNA sense strand
guacaguucaccaaucuua

SEQ ID NO: 2045450 - RNA, 19 nt, Homo sapiens
  misc_RNA (1)...(19): siRNA sense strand
gaagauaaggauaaaguug

SEQ ID NO: 2045451 - RNA, 19 nt, Homo sapiens
  misc_RNA (1)...(19): siRNA sense strand
gaaauucgcauagagugua

SEQ ID NO: 2045452 - RNA, 19 nt, Homo sapiens
  misc_RNA (1)...(19): siRNA sense strand
gagggcagcuggaagaaau

SEQ ID NO: 2045453 - RNA, 19 nt, Homo sapiens
  misc_RNA (1)...(19): siRNA sense strand
gagaugaagauaaggauaa

SEQ ID NO: 2045454 - RNA, 19 nt, Homo sapiens
  misc_RNA (1)...(19): siRNA sense strand
gguuuaagauccuucuauu

SEQ ID NO: 2045455 - RNA, 19 nt, Homo sapiens
  misc_RNA (1)...(19): siRNA sense strand
cgaggagacuuuaaucaug

SEQ ID NO: 2045456 - RNA, 19 nt, Homo sapiens
  misc_RNA (1)...(19): siRNA sense strand
gggcaaaccgugcauuauu

SEQ ID NO: 2045457 - RNA, 19 nt, Homo sapiens
  misc_RNA (1)...(19): siRNA sense strand
gggaaauugcucuggauua

SEQ ID NO: 2045458 - RNA, 19 nt, Homo sapiens
  misc_RNA (1)...(19): siRNA sense strand
ucaccaaucuuaccaugga

SEQ ID NO: 2045459 - RNA, 19 nt, Homo sapiens
  misc_RNA (1)...(19): siRNA sense strand
caagcgagaugaagauaag

SEQ ID NO: 2045460 - RNA, 19 nt, Homo sapiens
  misc_RNA (1)...(19): siRNA sense strand
gaugaaguauaacccaaau

SEQ ID NO: 2045461 - RNA, 19 nt, Homo sapiens
  misc_RNA (1)...(19): siRNA sense strand
gagggcaaaccgugcauua

SEQ ID NO: 2045462 - RNA, 19 nt, Homo sapiens
  misc_RNA (1)...(19): siRNA sense strand
caaauguccuucccguuca

SEQ ID NO: 2045463 - RNA, 19 nt, Homo sapiens
  misc_RNA (1)...(19): siRNA sense strand
cuaaugaucccaagagcua

SEQ ID NO: 2045464 - RNA, 19 nt, Homo sapiens
  misc_RNA (1)...(19): siRNA sense strand
gaacgaggagacuuuaauc

SEQ ID NO: 2045465 - RNA, 19 nt, Homo sapiens
  misc_RNA (1)...(19): siRNA sense strand
gguggcaguugguuuaaga

SEQ ID NO: 2045466 - RNA, 19 nt, Homo sapiens
  misc_RNA (1)...(19): siRNA sense strand
gaaauugcucuggauuaaa

SEQ ID NO: 2045467 - RNA, 19 nt, Homo sapiens
  misc_RNA (1)...(19): siRNA sense strand
ugaaacuuauggcuacaaa

SEQ ID NO: 2045468 - RNA, 19 nt, Homo sapiens
  misc_RNA (1)...(19): siRNA sense strand
gaauuuaagcccacauauc

SEQ ID NO: 2045469 - RNA, 19 nt, Homo sapiens
  misc_RNA (1)...(19): siRNA sense strand
gcaagcgagaugaagauaa

SEQ ID NO: 2045470 - RNA, 19 nt, Homo sapiens
  misc_RNA (1)...(19): siRNA sense strand
gcaaaccgugcauuauuau

SEQ ID NO: 2045471 - RNA, 19 nt, Homo sapiens
  misc_RNA (1)...(19): siRNA sense strand
aaacuuauggcuacaaaga

SEQ ID NO: 2045472 - RNA, 19 nt, Homo sapiens
  misc_RNA (1)...(19): siRNA sense strand
uugaauggcugggaaauug

SEQ ID NO: 2045473 - RNA, 19 nt, Homo sapiens
  misc_RNA (1)...(19): siRNA sense strand
gcucuggauuaaaugauga

SEQ ID NO: 2045474 - RNA, 19 nt, Homo sapiens
  misc_RNA (1)...(19): siRNA sense strand
uaagauccuucuauucuac

SEQ ID NO: 2045475 - RNA, 19 nt, Homo sapiens
  misc_RNA (1)...(19): siRNA sense strand
acccagugaugaaguauaa

SEQ ID NO: 2045476 - RNA, 19 nt, Homo sapiens
  misc_RNA (1)...(19): siRNA sense strand
gaggagggcagcuggaaga

SEQ ID NO: 2045477 - RNA, 19 nt, Homo sapiens
  misc_RNA (1)...(19): siRNA sense strand
acacugaaauucgcauaga

SEQ ID NO: 2045478 - RNA, 19 nt, Homo sapiens
  misc_RNA (1)...(19): siRNA sense strand
ccagaagacugaaauuucc

SEQ ID NO: 2045479 - RNA, 19 nt, Homo sapiens
  misc_RNA (1)...(19): siRNA sense strand
gaagacugaaauuuccuuu

SEQ ID NO: 2045480 - RNA, 19 nt, Homo sapiens
  misc_RNA (1)...(19): siRNA sense strand
ugaaguauaacccaaaugu

SEQ ID NO: 2045481 - RNA, 19 nt, Homo sapiens
  misc_RNA (1)...(19): siRNA sense strand
gaaauucaucuggaacuca

SEQ ID NO: 2045482 - RNA, 19 nt, Homo sapiens
  misc_RNA (1)...(19): siRNA sense strand
ggacacugaaauucgcaua

SEQ ID NO: 2045483 - RNA, 19 nt, Homo sapiens
  misc_RNA (1)...(19): siRNA sense strand
aaccuaagccucccaagaa

SEQ ID NO: 2045484 - RNA, 19 nt, Homo sapiens
  misc_RNA (1)...(19): siRNA sense strand
cuaagccucccaagaauga

SEQ ID NO: 2045485 - RNA, 19 nt, Homo sapiens
  misc_RNA (1)...(19): siRNA sense strand
aauuuaagcccacauauca

SEQ ID NO: 2045486 - RNA, 19 nt, Homo sapiens
  misc_RNA (1)...(19): siRNA sense strand
caaaccgugcauuauuaua

SEQ ID NO: 2045487 - RNA, 19 nt, Homo sapiens
  misc_RNA (1)...(19): siRNA sense strand
caccaucagugaauuuaag

SEQ ID NO: 2045488 - RNA, 19 nt, Homo sapiens
  misc_RNA (1)...(19): siRNA sense strand
gcgaaaggucugcagauuc

SEQ ID NO: 2045489 - RNA, 19 nt, Homo sapiens
  misc_RNA (1)...(19): siRNA sense strand
agacuuacccagugaugaa

SEQ ID NO: 2045490 - RNA, 19 nt, Homo sapiens
  misc_RNA (1)...(19): siRNA sense strand
cgagaugaagauaaggaua

SEQ ID NO: 2045491 - RNA, 19 nt, Homo sapiens
  misc_RNA (1)...(19): siRNA sense strand
aaauucgcauagaguguaa

SEQ ID NO: 2045492 - RNA, 19 nt, Homo sapiens
  misc_RNA (1)...(19): siRNA sense strand
ccgccaggauuaacacaga

SEQ ID NO: 2045493 - RNA, 19 nt, Homo sapiens
  misc_RNA (1)...(19): siRNA sense strand
uaccauggacacugaaauu

SEQ ID NO: 2045494 - RNA, 19 nt, Homo sapiens
  misc_RNA (1)...(19): siRNA sense strand
agauaaggauaaaguugga

SEQ ID NO: 2045495 - RNA, 19 nt, Homo sapiens
  misc_RNA (1)...(19): siRNA sense strand
caucggaaccauccaagug

SEQ ID NO: 2045496 - RNA, 19 nt, Homo sapiens
  misc_RNA (1)...(19): siRNA sense strand
gaacgaggagagcgaaagg

SEQ ID NO: 2045497 - RNA, 19 nt, Homo sapiens
  misc_RNA (1)...(19): siRNA sense strand
guacugaacauaguuaggu

SEQ ID NO: 2045498 - RNA, 19 nt, Homo sapiens
  misc_RNA (1)...(19): siRNA sense strand
agacuuuaaucaugaacga

SEQ ID NO: 2045499 - RNA, 19 nt, Homo sapiens
  misc_RNA (1)...(19): siRNA sense strand
ucagggacguuuugaugua

SEQ ID NO: 2045500 - RNA, 19 nt, Homo sapiens
  misc_RNA (1)...(19): siRNA sense strand
ggaacucagagaagaagga

SEQ ID NO: 2045501 - RNA, 19 nt, Homo sapiens
  misc_RNA (1)...(19): siRNA sense strand
guggcgaugugcccaguga

SEQ ID NO: 2045502 - RNA, 19 nt, Homo sapiens
  misc_RNA (1)...(19): siRNA sense strand
ggcguacggugagaacauu

SEQ ID NO: 2045503 - RNA, 19 nt, Homo sapiens
  misc_RNA (1)...(19): siRNA sense strand
aggauaaaguuggaaaugu

SEQ ID NO: 2045504 - RNA, 19 nt, Homo sapiens
  misc_RNA (1)...(19): siRNA sense strand
aaaccuaagccucccaaga

SEQ ID NO: 2045505 - RNA, 19 nt, Homo sapiens
  misc_RNA (1)...(19): siRNA sense strand
gcaguugguuuaagauccu

SEQ ID NO: 2045506 - RNA, 19 nt, Homo sapiens
  misc_RNA (1)...(19): siRNA sense strand
gugaauuuaagcccacaua

SEQ ID NO: 2045507 - RNA, 19 nt, Homo sapiens
  misc_RNA (1)...(19): siRNA sense strand
gauccagaagacugaaauu

SEQ ID NO: 2045508 - RNA, 19 nt, Homo sapiens
  misc_RNA (1)...(19): siRNA sense strand
gaaguauaacccaaauguc

SEQ ID NO: 2045509 - RNA, 19 nt, Homo sapiens
  misc_RNA (1)...(19): siRNA sense strand
ggagggcagcuggaagaaa

SEQ ID NO: 2045510 - RNA, 19 nt, Homo sapiens
  misc_RNA (1)...(19): siRNA sense strand
guuuuccucugcaguauua

SEQ ID NO: 2045511 - RNA, 19 nt, Homo sapiens
  misc_RNA (1)...(19): siRNA sense strand
gcacuggcaagcgagauga

SEQ ID NO: 2045512 - RNA, 19 nt, Homo sapiens
  misc_RNA (1)...(19): siRNA sense strand
gagcgaaaggucugcagau

SEQ ID NO: 2045513 - RNA, 19 nt, Homo sapiens
  misc_RNA (1)...(19): siRNA sense strand
ugaagauuguggcgaugug

SEQ ID NO: 2045514 - RNA, 19 nt, Homo sapiens
  misc_RNA (1)...(19): siRNA sense strand
gaugaaacuuauggcuaca

SEQ ID NO: 2045515 - RNA, 19 nt, Homo sapiens
  misc_RNA (1)...(19): siRNA sense strand
aaauuuccuuucguccuaa

SEQ ID NO: 2045516 - RNA, 19 nt, Homo sapiens
  misc_RNA (1)...(19): siRNA sense strand
cuuacccagugaugaagua

SEQ ID NO: 2045517 - RNA, 19 nt, Homo sapiens
  misc_RNA (1)...(19): siRNA sense strand
ggagacuuacccagugaug

SEQ ID NO: 2045518 - RNA, 19 nt, Homo sapiens
  misc_RNA (1)...(19): siRNA sense strand
cgaaagaacgaggagacuu

SEQ ID NO: 2045519 - RNA, 19 nt, Homo sapiens
  misc_RNA (1)...(19): siRNA sense strand
ggaaaaguacaaagauuca

SEQ ID NO: 2045520 - RNA, 19 nt, Homo sapiens
  misc_RNA (1)...(19): siRNA sense strand
ugaggcauauguacugaac

SEQ ID NO: 2045521 - RNA, 19 nt, Homo sapiens
  misc_RNA (1)...(19): siRNA sense strand
uccagaagacugaaauuuc

SEQ ID NO: 2045522 - RNA, 19 nt, Homo sapiens
  misc_RNA (1)...(19): siRNA sense strand
acagugagaaagaccguuu

SEQ ID NO: 2045523 - RNA, 19 nt, Homo sapiens
  misc_RNA (1)...(19): siRNA sense strand
aacauuggguacagugaga

SEQ ID NO: 2045524 - RNA, 19 nt, Homo sapiens
  misc_RNA (1)...(19): siRNA sense strand
ggcaagcgagaugaagaua

SEQ ID NO: 2045525 - RNA, 19 nt, Homo sapiens
  misc_RNA (1)...(19): siRNA sense strand
agcgaaaggucugcagauu

SEQ ID NO: 2045526 - RNA, 19 nt, Homo sapiens
  misc_RNA (1)...(19): siRNA sense strand
agaacgaggagacuuuaau

SEQ ID NO: 2045527 - RNA, 19 nt, Homo sapiens
  misc_RNA (1)...(19): siRNA sense strand
gccguacaguucaccaauc

SEQ ID NO: 2045528 - RNA, 19 nt, Homo sapiens
  misc_RNA (1)...(19): siRNA sense strand
gagacuuacccagugauga

SEQ ID NO: 2045529 - RNA, 19 nt, Homo sapiens
  misc_RNA (1)...(19): siRNA sense strand
ugaugaaguauaacccaaa

SEQ ID NO: 2045530 - RNA, 19 nt, Homo sapiens
  misc_RNA (1)...(19): siRNA sense strand
gggcaacuccccugguuuu

SEQ ID NO: 2045531 - RNA, 19 nt, Homo sapiens
  misc_RNA (1)...(19): siRNA sense strand
ugaauuuaagcccacauau

SEQ ID NO: 2045532 - RNA, 19 nt, Homo sapiens
  misc_RNA (1)...(19): siRNA sense strand
ccguacaguucaccaaucu

SEQ ID NO: 2045533 - RNA, 19 nt, Homo sapiens
  misc_RNA (1)...(19): siRNA sense strand
guauaacccaaauguccuu

SEQ ID NO: 2045534 - RNA, 19 nt, Homo sapiens
  misc_RNA (1)...(19): siRNA sense strand
gcccagagggaugacauga

SEQ ID NO: 2045535 - RNA, 19 nt, Homo sapiens
  misc_RNA (1)...(19): siRNA sense strand
gugagaacauuggguacag

SEQ ID NO: 2045536 - RNA, 19 nt, Homo sapiens
  misc_RNA (1)...(19): siRNA sense strand
auccuucuauucuacguaa

SEQ ID NO: 2045537 - RNA, 19 nt, Homo sapiens
  misc_RNA (1)...(19): siRNA sense strand
uacugaacauaguuagguu

SEQ ID NO: 2045538 - RNA, 19 nt, Homo sapiens
  misc_RNA (1)...(19): siRNA sense strand
gaccgguggcaguugguuu

SEQ ID NO: 2045539 - RNA, 19 nt, Homo sapiens
  misc_RNA (1)...(19): siRNA sense strand
aaagcucaaccgaguucua

SEQ ID NO: 2045540 - RNA, 19 nt, Homo sapiens
  misc_RNA (1)...(19): siRNA sense strand
gaacucagauggagaagua

SEQ ID NO: 2045541 - RNA, 19 nt, Homo sapiens
  misc_RNA (1)...(19): siRNA sense strand
gaacaaagcacaagaguga

SEQ ID NO: 2045542 - RNA, 19 nt, Homo sapiens
  misc_RNA (1)...(19): siRNA sense strand
ggaaaguacuuguguuauu

SEQ ID NO: 2045543 - RNA, 19 nt, Homo sapiens
  misc_RNA (1)...(19): siRNA sense strand
gaaggcugcucuccgaaua

SEQ ID NO: 2045544 - RNA, 19 nt, Homo sapiens
  misc_RNA (1)...(19): siRNA sense strand
gagcaagaguugagagaaa

SEQ ID NO: 2045545 - RNA, 19 nt, Homo sapiens
  misc_RNA (1)...(19): siRNA sense strand
gauggugacuucuaugaaa

SEQ ID NO: 2045546 - RNA, 19 nt, Homo sapiens
  misc_RNA (1)...(19): siRNA sense strand
gaacguguaugcagaugga

SEQ ID NO: 2045547 - RNA, 19 nt, Homo sapiens
  misc_RNA (1)...(19): siRNA sense strand
gaaauggcauggagcacaa

SEQ ID NO: 2045548 - RNA, 19 nt, Homo sapiens
  misc_RNA (1)...(19): siRNA sense strand
guucugaucuucacguuga

SEQ ID NO: 2045549 - RNA, 19 nt, Homo sapiens
  misc_RNA (1)...(19): siRNA sense strand
gagagaacaucccgacugu

SEQ ID NO: 2045550 - RNA, 19 nt, Homo sapiens
  misc_RNA (1)...(19): siRNA sense strand
guacuuguguuauuuccaa

SEQ ID NO: 2045551 - RNA, 19 nt, Homo sapiens
  misc_RNA (1)...(19): siRNA sense strand
ggagaaguauccaguaugc

SEQ ID NO: 2045552 - RNA, 19 nt, Homo sapiens
  misc_RNA (1)...(19): siRNA sense strand
ccaagauggugacuucuau

SEQ ID NO: 2045553 - RNA, 19 nt, Homo sapiens
  misc_RNA (1)...(19): siRNA sense strand
gaacaucccgacuguggaa

SEQ ID NO: 2045554 - RNA, 19 nt, Homo sapiens
  misc_RNA (1)...(19): siRNA sense strand
caaauacaguggagcaaca

SEQ ID NO: 2045555 - RNA, 19 nt, Homo sapiens
  misc_RNA (1)...(19): siRNA sense strand
gaaaagacagccagcauuu

SEQ ID NO: 2045556 - RNA, 19 nt, Homo sapiens
  misc_RNA (1)...(19): siRNA sense strand
guaugcagauggaaaggaa

SEQ ID NO: 2045557 - RNA, 19 nt, Homo sapiens
  misc_RNA (1)...(19): siRNA sense strand
gagcugaagugggugaguu

SEQ ID NO: 2045558 - RNA, 19 nt, Homo sapiens
  misc_RNA (1)...(19): siRNA sense strand
ggagcacaaugaagcaaga

SEQ ID NO: 2045559 - RNA, 19 nt, Homo sapiens
  misc_RNA (1)...(19): siRNA sense strand
gcacuggguucugaucuuc

SEQ ID NO: 2045560 - RNA, 19 nt, Homo sapiens
  misc_RNA (1)...(19): siRNA sense strand
guggaaaguacuuguguua

SEQ ID NO: 2045561 - RNA, 19 nt, Homo sapiens
  misc_RNA (1)...(19): siRNA sense strand
aaagagagagcaagaguug

SEQ ID NO: 2045562 - RNA, 19 nt, Homo sapiens
  misc_RNA (1)...(19): siRNA sense strand
agagagacauucagccuau

SEQ ID NO: 2045563 - RNA, 19 nt, Homo sapiens
  misc_RNA (1)...(19): siRNA sense strand
gagagacauucagccuaua

SEQ ID NO: 2045564 - RNA, 19 nt, Homo sapiens
  misc_RNA (1)...(19): siRNA sense strand
ggaagcaccugugguugca

SEQ ID NO: 2045565 - RNA, 19 nt, Homo sapiens
  misc_RNA (1)...(19): siRNA sense strand
gcaagaacaaagcacaaga

SEQ ID NO: 2045566 - RNA, 19 nt, Homo sapiens
  misc_RNA (1)...(19): siRNA sense strand
gaggaacucagauggagaa

SEQ ID NO: 2045567 - RNA, 19 nt, Homo sapiens
  misc_RNA (1)...(19): siRNA sense strand
gguguauccuguaccauca

SEQ ID NO: 2045568 - RNA, 19 nt, Homo sapiens
  misc_RNA (1)...(19): siRNA sense strand
gcacaaugaagcaagaaca

SEQ ID NO: 2045569 - RNA, 19 nt, Homo sapiens
  misc_RNA (1)...(19): siRNA sense strand
agacucaguucagaaagaa

SEQ ID NO: 2045570 - RNA, 19 nt, Homo sapiens
  misc_RNA (1)...(19): siRNA sense strand
gcaguagcagcaucuguga

SEQ ID NO: 2045571 - RNA, 19 nt, Homo sapiens
  misc_RNA (1)...(19): siRNA sense strand
acgcugaucugcccuguca

SEQ ID NO: 2045572 - RNA, 19 nt, Homo sapiens
  misc_RNA (1)...(19): siRNA sense strand
ugggugaguuccagccuaa

SEQ ID NO: 2045573 - RNA, 19 nt, Homo sapiens
  misc_RNA (1)...(19): siRNA sense strand
acguugaugugaaggguua

SEQ ID NO: 2045574 - RNA, 19 nt, Homo sapiens
  misc_RNA (1)...(19): siRNA sense strand
uuucgugucugccuccuuu

SEQ ID NO: 2045575 - RNA, 19 nt, Homo sapiens
  misc_RNA (1)...(19): siRNA sense strand
ggcagguggugaacgugua

SEQ ID NO: 2045576 - RNA, 19 nt, Homo sapiens
  misc_RNA (1)...(19): siRNA sense strand
uaaggcagguggugaacgu

SEQ ID NO: 2045577 - RNA, 19 nt, Homo sapiens
  misc_RNA (1)...(19): siRNA sense strand
cagagaccauggagcugaa

SEQ ID NO: 2045578 - RNA, 19 nt, Homo sapiens
  misc_RNA (1)...(19): siRNA sense strand
cagcaucugugaucaugag

SEQ ID NO: 2045579 - RNA, 19 nt, Homo sapiens
  misc_RNA (1)...(19): siRNA sense strand
cgagggagaacuucgauuc

SEQ ID NO: 2045580 - RNA, 19 nt, Homo sapiens
  misc_RNA (1)...(19): siRNA sense strand
aagacucaguucagaaaga

SEQ ID NO: 2045581 - RNA, 19 nt, Homo sapiens
  misc_RNA (1)...(19): siRNA sense strand
ggaaggcugcucuccgaau

SEQ ID NO: 2045582 - RNA, 19 nt, Homo sapiens
  misc_RNA (1)...(19): siRNA sense strand
gaggguguauccuguacca

SEQ ID NO: 2045583 - RNA, 19 nt, Homo sapiens
  misc_RNA (1)...(19): siRNA sense strand
gagagcaagaguugagaga

SEQ ID NO: 2045584 - RNA, 19 nt, Homo sapiens
  misc_RNA (1)...(19): siRNA sense strand
caaugaagcaagaacaaag

SEQ ID NO: 2045585 - RNA, 19 nt, Homo sapiens
  misc_RNA (1)...(19): siRNA sense strand
gcaagaguugagagaaaug

SEQ ID NO: 2045586 - RNA, 19 nt, Homo sapiens
  misc_RNA (1)...(19): siRNA sense strand
ugugaaggguuacaaggau

SEQ ID NO: 2045587 - RNA, 19 nt, Homo sapiens
  misc_RNA (1)...(19): siRNA sense strand
uuuccaagauggugacuuc

SEQ ID NO: 2045588 - RNA, 19 nt, Homo sapiens
  misc_RNA (1)...(19): siRNA sense strand
ggaaaagacagccagcauu

SEQ ID NO: 2045589 - RNA, 19 nt, Homo sapiens
  misc_RNA (1)...(19): siRNA sense strand
caacaagggagagaacauc

SEQ ID NO: 2045590 - RNA, 19 nt, Homo sapiens
  misc_RNA (1)...(19): siRNA sense strand
gcagguccacuggcuggua

SEQ ID NO: 2045591 - RNA, 19 nt, Homo sapiens
  misc_RNA (1)...(19): siRNA sense strand
agagacauucagccuauaa

SEQ ID NO: 2045592 - RNA, 19 nt, Homo sapiens
  misc_RNA (1)...(19): siRNA sense strand
ggaaaggaaguggaagaca

SEQ ID NO: 2045593 - RNA, 19 nt, Homo sapiens
  misc_RNA (1)...(19): siRNA sense strand
gcaacaacaagggagagaa

SEQ ID NO: 2045594 - RNA, 19 nt, Homo sapiens
  misc_RNA (1)...(19): siRNA sense strand
uugcagcacuggguucuga

SEQ ID NO: 2045595 - RNA, 19 nt, Homo sapiens
  misc_RNA (1)...(19): siRNA sense strand
gggccuguaugcaguagca

SEQ ID NO: 2045596 - RNA, 19 nt, Homo sapiens
  misc_RNA (1)...(19): siRNA sense strand
caagaacaaagcacaagag

SEQ ID NO: 2045597 - RNA, 19 nt, Homo sapiens
  misc_RNA (1)...(19): siRNA sense strand
caacaacaagggagagaac

SEQ ID NO: 2045598 - RNA, 19 nt, Homo sapiens
  misc_RNA (1)...(19): siRNA sense strand
guagcagcaucugugauca

SEQ ID NO: 2045599 - RNA, 19 nt, Homo sapiens
  misc_RNA (1)...(19): siRNA sense strand
gggaggguguauccuguac

SEQ ID NO: 2045600 - RNA, 19 nt, Homo sapiens
  misc_RNA (1)...(19): siRNA sense strand
gcagguggugaacguguau

SEQ ID NO: 2045601 - RNA, 19 nt, Homo sapiens
  misc_RNA (1)...(19): siRNA sense strand
acaaugaagcaagaacaaa

SEQ ID NO: 2045602 - RNA, 19 nt, Homo sapiens
  misc_RNA (1)...(19): siRNA sense strand
cugcucaacuuucgugucu

SEQ ID NO: 2045603 - RNA, 19 nt, Homo sapiens
  misc_RNA (1)...(19): siRNA sense strand
aagauggugacuucuauga

SEQ ID NO: 2045604 - RNA, 19 nt, Homo sapiens
  misc_RNA (1)...(19): siRNA sense strand
cagccuauaaugaauggaa

SEQ ID NO: 2045605 - RNA, 19 nt, Homo sapiens
  misc_RNA (1)...(19): siRNA sense strand
ccucugacaguggaaagua

SEQ ID NO: 2045606 - RNA, 19 nt, Homo sapiens
  misc_RNA (1)...(19): siRNA sense strand
agaaguauccaguaugcau

SEQ ID NO: 2045607 - RNA, 19 nt, Homo sapiens
  misc_RNA (1)...(19): siRNA sense strand
caagauggugacuucuaug

SEQ ID NO: 2045608 - RNA, 19 nt, Homo sapiens
  misc_RNA (1)...(19): siRNA sense strand
gagacauucagccuauaau

SEQ ID NO: 2045609 - RNA, 19 nt, Homo sapiens
  misc_RNA (1)...(19): siRNA sense strand
cacaaugaagcaagaacaa

SEQ ID NO: 2045610 - RNA, 19 nt, Homo sapiens
  misc_RNA (1)...(19): siRNA sense strand
agacggagugggccuguau

SEQ ID NO: 2045611 - RNA, 19 nt, Homo sapiens
  misc_RNA (1)...(19): siRNA sense strand
ggguucugaucuucacguu

SEQ ID NO: 2045612 - RNA, 19 nt, Homo sapiens
  misc_RNA (1)...(19): siRNA sense strand
uguggaagcaccugugguu

SEQ ID NO: 2045613 - RNA, 19 nt, Homo sapiens
  misc_RNA (1)...(19): siRNA sense strand
agcaagaguugagagaaau

SEQ ID NO: 2045614 - RNA, 19 nt, Homo sapiens
  misc_RNA (1)...(19): siRNA sense strand
uggcauggagcacaaugaa

SEQ ID NO: 2045615 - RNA, 19 nt, Homo sapiens
  misc_RNA (1)...(19): siRNA sense strand
aaaagacucaguucagaaa

SEQ ID NO: 2045616 - RNA, 19 nt, Homo sapiens
  misc_RNA (1)...(19): siRNA sense strand
gagagagcaagaguugaga

SEQ ID NO: 2045617 - RNA, 19 nt, Homo sapiens
  misc_RNA (1)...(19): siRNA sense strand
gaacucagauggagaagua

SEQ ID NO: 2045618 - RNA, 19 nt, Homo sapiens
  misc_RNA (1)...(19): siRNA sense strand
gaacaaagcacaagaguga

SEQ ID NO: 2045619 - RNA, 19 nt, Homo sapiens
  misc_RNA (1)...(19): siRNA sense strand
ggaaaguacuuguguuauu

SEQ ID NO: 2045620 - RNA, 19 nt, Homo sapiens
  misc_RNA (1)...(19): siRNA sense strand
gaaggcugcucuccgaaua

SEQ ID NO: 2045621 - RNA, 19 nt, Homo sapiens
  misc_RNA (1)...(19): siRNA sense strand
gagcaagaguugagagaaa

SEQ ID NO: 2045622 - RNA, 19 nt, Homo sapiens
  misc_RNA (1)...(19): siRNA sense strand
gauggugacuucuaugaaa

SEQ ID NO: 2045623 - RNA, 19 nt, Homo sapiens
  misc_RNA (1)...(19): siRNA sense strand
gaacguguaugcagaugga

SEQ ID NO: 2045624 - RNA, 19 nt, Homo sapiens
  misc_RNA (1)...(19): siRNA sense strand
gaaauggcauggagcacaa

SEQ ID NO: 2045625 - RNA, 19 nt, Homo sapiens
  misc_RNA (1)...(19): siRNA sense strand
guucugaucuucacguuga

SEQ ID NO: 2045626 - RNA, 19 nt, Homo sapiens
  misc_RNA (1)...(19): siRNA sense strand
gagagaacaucccgacugu

SEQ ID NO: 2045627 - RNA, 19 nt, Homo sapiens
  misc_RNA (1)...(19): siRNA sense strand
guacuuguguuauuuccaa

SEQ ID NO: 2045628 - RNA, 19 nt, Homo sapiens
  misc_RNA (1)...(19): siRNA sense strand
ggagaaguauccaguaugc

SEQ ID NO: 2045629 - RNA, 19 nt, Homo sapiens
  misc_RNA (1)...(19): siRNA sense strand
ccaagauggugacuucuau

SEQ ID NO: 2045630 - RNA, 19 nt, Homo sapiens
  misc_RNA (1)...(19): siRNA sense strand
gaacaucccgacuguggaa

SEQ ID NO: 2045631 - RNA, 19 nt, Homo sapiens
  misc_RNA (1)...(19): siRNA sense strand
caaauacaguggagcaaca

SEQ ID NO: 2045632 - RNA, 19 nt, Homo sapiens
  misc_RNA (1)...(19): siRNA sense strand
gaaaagacagccagcauuu

SEQ ID NO: 2045633 - RNA, 19 nt, Homo sapiens
  misc_RNA (1)...(19): siRNA sense strand
guaugcagauggaaaggaa

SEQ ID NO: 2045634 - RNA, 19 nt, Homo sapiens
  misc_RNA (1)...(19): siRNA sense strand
gagcugaagugggugaguu

SEQ ID NO: 2045635 - RNA, 19 nt, Homo sapiens
  misc_RNA (1)...(19): siRNA sense strand
ggagcacaaugaagcaaga

SEQ ID NO: 2045636 - RNA, 19 nt, Homo sapiens
  misc_RNA (1)...(19): siRNA sense strand
gcacuggguucugaucuuc

SEQ ID NO: 2045637 - RNA, 19 nt, Homo sapiens
  misc_RNA (1)...(19): siRNA sense strand
guggaaaguacuuguguua

SEQ ID NO: 2045638 - RNA, 19 nt, Homo sapiens
  misc_RNA (1)...(19): siRNA sense strand
aaagagagagcaagaguug

SEQ ID NO: 2045639 - RNA, 19 nt, Homo sapiens
  misc_RNA (1)...(19): siRNA sense strand
agagagacauucagccuau

SEQ ID NO: 2045640 - RNA, 19 nt, Homo sapiens
  misc_RNA (1)...(19): siRNA sense strand
gagagacauucagccuaua

SEQ ID NO: 2045641 - RNA, 19 nt, Homo sapiens
  misc_RNA (1)...(19): siRNA sense strand
ggaagcaccugugguugca

SEQ ID NO: 2045642 - RNA, 19 nt, Homo sapiens
  misc_RNA (1)...(19): siRNA sense strand
gcaagaacaaagcacaaga

SEQ ID NO: 2045643 - RNA, 19 nt, Homo sapiens
  misc_RNA (1)...(19): siRNA sense strand
gaggaacucagauggagaa

SEQ ID NO: 2045644 - RNA, 19 nt, Homo sapiens
  misc_RNA (1)...(19): siRNA sense strand
gguguauccuguaccauca

SEQ ID NO: 2045645 - RNA, 19 nt, Homo sapiens
  misc_RNA (1)...(19): siRNA sense strand
gcacaaugaagcaagaaca

SEQ ID NO: 2045646 - RNA, 19 nt, Homo sapiens
  misc_RNA (1)...(19): siRNA sense strand
agacucaguucagaaagaa

SEQ ID NO: 2045647 - RNA, 19 nt, Homo sapiens
  misc_RNA (1)...(19): siRNA sense strand
gcaguagcagcaucuguga

SEQ ID NO: 2045648 - RNA, 19 nt, Homo sapiens
  misc_RNA (1)...(19): siRNA sense strand
acgcugaucugcccuguca

SEQ ID NO: 2045649 - RNA, 19 nt, Homo sapiens
  misc_RNA (1)...(19): siRNA sense strand
ugggugaguuccagccuaa

SEQ ID NO: 2045650 - RNA, 19 nt, Homo sapiens
  misc_RNA (1)...(19): siRNA sense strand
acguugaugugaaggguua

SEQ ID NO: 2045651 - RNA, 19 nt, Homo sapiens
  misc_RNA (1)...(19): siRNA sense strand
uuucgugucugccuccuuu

SEQ ID NO: 2045652 - RNA, 19 nt, Homo sapiens
  misc_RNA (1)...(19): siRNA sense strand
ggcagguggugaacgugua

SEQ ID NO: 2045653 - RNA, 19 nt, Homo sapiens
  misc_RNA (1)...(19): siRNA sense strand
uaaggcagguggugaacgu

SEQ ID NO: 2045654 - RNA, 19 nt, Homo sapiens
  misc_RNA (1)...(19): siRNA sense strand
cagagaccauggagcugaa

SEQ ID NO: 2045655 - RNA, 19 nt, Homo sapiens
  misc_RNA (1)...(19): siRNA sense strand
cagcaucugugaucaugag

SEQ ID NO: 2045656 - RNA, 19 nt, Homo sapiens
  misc_RNA (1)...(19): siRNA sense strand
cgagggagaacuucgauuc

SEQ ID NO: 2045657 - RNA, 19 nt, Homo sapiens
  misc_RNA (1)...(19): siRNA sense strand
aagacucaguucagaaaga

SEQ ID NO: 2045658 - RNA, 19 nt, Homo sapiens
  misc_RNA (1)...(19): siRNA sense strand
ggaaggcugcucuccgaau

SEQ ID NO: 2045659 - RNA, 19 nt, Homo sapiens
  misc_RNA (1)...(19): siRNA sense strand
gaggguguauccuguacca

SEQ ID NO: 2045660 - RNA, 19 nt, Homo sapiens
  misc_RNA (1)...(19): siRNA sense strand
gagagcaagaguugagaga

SEQ ID NO: 2045661 - RNA, 19 nt, Homo sapiens
  misc_RNA (1)...(19): siRNA sense strand
caaugaagcaagaacaaag

SEQ ID NO: 2045662 - RNA, 19 nt, Homo sapiens
  misc_RNA (1)...(19): siRNA sense strand
gcaagaguugagagaaaug

SEQ ID NO: 2045663 - RNA, 19 nt, Homo sapiens
  misc_RNA (1)...(19): siRNA sense strand
ugugaaggguuacaaggau

SEQ ID NO: 2045664 - RNA, 19 nt, Homo sapiens
  misc_RNA (1)...(19): siRNA sense strand
uuuccaagauggugacuuc

SEQ ID NO: 2045665 - RNA, 19 nt, Homo sapiens
  misc_RNA (1)...(19): siRNA sense strand
ggaaaagacagccagcauu

SEQ ID NO: 2045666 - RNA, 19 nt, Homo sapiens
  misc_RNA (1)...(19): siRNA sense strand
caacaagggagagaacauc

SEQ ID NO: 2045667 - RNA, 19 nt, Homo sapiens
  misc_RNA (1)...(19): siRNA sense strand
gcagguccacuggcuggua

SEQ ID NO: 2045668 - RNA, 19 nt, Homo sapiens
  misc_RNA (1)...(19): siRNA sense strand
agagacauucagccuauaa

SEQ ID NO: 2045669 - RNA, 19 nt, Homo sapiens
  misc_RNA (1)...(19): siRNA sense strand
ggaaaggaaguggaagaca

SEQ ID NO: 2045670 - RNA, 19 nt, Homo sapiens
  misc_RNA (1)...(19): siRNA sense strand
gcaacaacaagggagagaa

SEQ ID NO: 2045671 - RNA, 19 nt, Homo sapiens
  misc_RNA (1)...(19): siRNA sense strand
uugcagcacuggguucuga

SEQ ID NO: 2045672 - RNA, 19 nt, Homo sapiens
  misc_RNA (1)...(19): siRNA sense strand
gggccuguaugcaguagca

SEQ ID NO: 2045673 - RNA, 19 nt, Homo sapiens
  misc_RNA (1)...(19): siRNA sense strand
caagaacaaagcacaagag

SEQ ID NO: 2045674 - RNA, 19 nt, Homo sapiens
  misc_RNA (1)...(19): siRNA sense strand
caacaacaagggagagaac

SEQ ID NO: 2045675 - RNA, 19 nt, Homo sapiens
  misc_RNA (1)...(19): siRNA sense strand
guagcagcaucugugauca

SEQ ID NO: 2045676 - RNA, 19 nt, Homo sapiens
  misc_RNA (1)...(19): siRNA sense strand
gggaggguguauccuguac

SEQ ID NO: 2045677 - RNA, 19 nt, Homo sapiens
  misc_RNA (1)...(19): siRNA sense strand
gcagguggugaacguguau

SEQ ID NO: 2045678 - RNA, 19 nt, Homo sapiens
  misc_RNA (1)...(19): siRNA sense strand
acaaugaagcaagaacaaa

SEQ ID NO: 2045679 - RNA, 19 nt, Homo sapiens
  misc_RNA (1)...(19): siRNA sense strand
cugcucaacuuucgugucu

SEQ ID NO: 2045680 - RNA, 19 nt, Homo sapiens
  misc_RNA (1)...(19): siRNA sense strand
aagauggugacuucuauga

SEQ ID NO: 2045681 - RNA, 19 nt, Homo sapiens
  misc_RNA (1)...(19): siRNA sense strand
cagccuauaaugaauggaa

SEQ ID NO: 2045682 - RNA, 19 nt, Homo sapiens
  misc_RNA (1)...(19): siRNA sense strand
ccucugacaguggaaagua

SEQ ID NO: 2045683 - RNA, 19 nt, Homo sapiens
  misc_RNA (1)...(19): siRNA sense strand
agaaguauccaguaugcau

SEQ ID NO: 2045684 - RNA, 19 nt, Homo sapiens
  misc_RNA (1)...(19): siRNA sense strand
caagauggugacuucuaug

SEQ ID NO: 2045685 - RNA, 19 nt, Homo sapiens
  misc_RNA (1)...(19): siRNA sense strand
gagacauucagccuauaau

SEQ ID NO: 2045686 - RNA, 19 nt, Homo sapiens
  misc_RNA (1)...(19): siRNA sense strand
cacaaugaagcaagaacaa

SEQ ID NO: 2045687 - RNA, 19 nt, Homo sapiens
  misc_RNA (1)...(19): siRNA sense strand
agacggagugggccuguau

SEQ ID NO: 2045688 - RNA, 19 nt, Homo sapiens
  misc_RNA (1)...(19): siRNA sense strand
ggguucugaucuucacguu

SEQ ID NO: 2045689 - RNA, 19 nt, Homo sapiens
  misc_RNA (1)...(19): siRNA sense strand
uguggaagcaccugugguu

SEQ ID NO: 2045690 - RNA, 19 nt, Homo sapiens
  misc_RNA (1)...(19): siRNA sense strand
agcaagaguugagagaaau

SEQ ID NO: 2045691 - RNA, 19 nt, Homo sapiens
  misc_RNA (1)...(19): siRNA sense strand
uggcauggagcacaaugaa

SEQ ID NO: 2045692 - RNA, 19 nt, Homo sapiens
  misc_RNA (1)...(19): siRNA sense strand
aaaagacucaguucagaaa

SEQ ID NO: 2045693 - RNA, 19 nt, Homo sapiens
  misc_RNA (1)...(19): siRNA sense strand
gagagagcaagaguugaga

SEQ ID NO: 2045694 - RNA, 19 nt, Homo sapiens
  misc_RNA (1)...(19): siRNA sense strand
gcagggaacucuacucaca

SEQ ID NO: 2045695 - RNA, 19 nt, Homo sapiens
  misc_RNA (1)...(19): siRNA sense strand
gaacucuacucacaguguu

SEQ ID NO: 2045696 - RNA, 19 nt, Homo sapiens
  misc_RNA (1)...(19): siRNA sense strand
cuacaaagcaggcagaaga

SEQ ID NO: 2045697 - RNA, 19 nt, Homo sapiens
  misc_RNA (1)...(19): siRNA sense strand
gaagcacaaugaggagauu

SEQ ID NO: 2045698 - RNA, 19 nt, Homo sapiens
  misc_RNA (1)...(19): siRNA sense strand
caacuggaaggcauuauug

SEQ ID NO: 2045699 - RNA, 19 nt, Homo sapiens
  misc_RNA (1)...(19): siRNA sense strand
aaucuugaaugccauacua

SEQ ID NO: 2045700 - RNA, 19 nt, Homo sapiens
  misc_RNA (1)...(19): siRNA sense strand
gcugaaggcccaacuggaa

SEQ ID NO: 2045701 - RNA, 19 nt, Homo sapiens
  misc_RNA (1)...(19): siRNA sense strand
cagacucuuugcucaagua

SEQ ID NO: 2045702 - RNA, 19 nt, Homo sapiens
  misc_RNA (1)...(19): siRNA sense strand
ccaggagcaguuagacuua

SEQ ID NO: 2045703 - RNA, 19 nt, Homo sapiens
  misc_RNA (1)...(19): siRNA sense strand
agucagacauggagaggaa

SEQ ID NO: 2045704 - RNA, 19 nt, Homo sapiens
  misc_RNA (1)...(19): siRNA sense strand
caaagcaggcagaagaaau

SEQ ID NO: 2045705 - RNA, 19 nt, Homo sapiens
  misc_RNA (1)...(19): siRNA sense strand
caggagcaguuagacuuaa

SEQ ID NO: 2045706 - RNA, 19 nt, Homo sapiens
  misc_RNA (1)...(19): siRNA sense strand
ugaacgagcagaaggcaaa

SEQ ID NO: 2045707 - RNA, 19 nt, Homo sapiens
  misc_RNA (1)...(19): siRNA sense strand
gaagacacgcagcuaugga

SEQ ID NO: 2045708 - RNA, 19 nt, Homo sapiens
  misc_RNA (1)...(19): siRNA sense strand
acaaugaggagauucaguu

SEQ ID NO: 2045709 - RNA, 19 nt, Homo sapiens
  misc_RNA (1)...(19): siRNA sense strand
ggaacucuacucacagugu

SEQ ID NO: 2045710 - RNA, 19 nt, Homo sapiens
  misc_RNA (1)...(19): siRNA sense strand
ggaggucaccaucaacugu

SEQ ID NO: 2045711 - RNA, 19 nt, Homo sapiens
  misc_RNA (1)...(19): siRNA sense strand
ccaacuggaaggcauuauu

SEQ ID NO: 2045712 - RNA, 19 nt, Homo sapiens
  misc_RNA (1)...(19): siRNA sense strand
caagggaguggguggaaga

SEQ ID NO: 2045713 - RNA, 19 nt, Homo sapiens
  misc_RNA (1)...(19): siRNA sense strand
gaggagaagaagcacaaug

SEQ ID NO: 2045714 - RNA, 19 nt, Homo sapiens
  misc_RNA (1)...(19): siRNA sense strand
aggagaagaagcacaauga

SEQ ID NO: 2045715 - RNA, 19 nt, Homo sapiens
  misc_RNA (1)...(19): siRNA sense strand
ggaagacacgcagcuaugg

SEQ ID NO: 2045716 - RNA, 19 nt, Homo sapiens
  misc_RNA (1)...(19): siRNA sense strand
gagagcagcguggcguuug

SEQ ID NO: 2045717 - RNA, 19 nt, Homo sapiens
  misc_RNA (1)...(19): siRNA sense strand
gcucggcuacugaaaguca

SEQ ID NO: 2045718 - RNA, 19 nt, Homo sapiens
  misc_RNA (1)...(19): siRNA sense strand
acucuuugcucaaguacga

SEQ ID NO: 2045719 - RNA, 19 nt, Homo sapiens
  misc_RNA (1)...(19): siRNA sense strand
gcagacucuuugcucaagu

SEQ ID NO: 2045720 - RNA, 19 nt, Homo sapiens
  misc_RNA (1)...(19): siRNA sense strand
gaggaaaaucgcagaauug

SEQ ID NO: 2045721 - RNA, 19 nt, Homo sapiens
  misc_RNA (1)...(19): siRNA sense strand
ccaaggcucggcuacugaa

SEQ ID NO: 2045722 - RNA, 19 nt, Homo sapiens
  misc_RNA (1)...(19): siRNA sense strand
aaagcaggcagaagaaauc

SEQ ID NO: 2045723 - RNA, 19 nt, Homo sapiens
  misc_RNA (1)...(19): siRNA sense strand
ggcauuauugcaccaaaga

SEQ ID NO: 2045724 - RNA, 19 nt, Homo sapiens
  misc_RNA (1)...(19): siRNA sense strand
ggagaagaagcacaaugag

SEQ ID NO: 2045725 - RNA, 19 nt, Homo sapiens
  misc_RNA (1)...(19): siRNA sense strand
agaggaaaaucgcagaauu

SEQ ID NO: 2045726 - RNA, 19 nt, Homo sapiens
  misc_RNA (1)...(19): siRNA sense strand
aggagcaguuagacuuaaa

SEQ ID NO: 2045727 - RNA, 19 nt, Homo sapiens
  misc_RNA (1)...(19): siRNA sense strand
gcugcuggguugcuacucu

SEQ ID NO: 2045728 - RNA, 19 nt, Homo sapiens
  misc_RNA (1)...(19): siRNA sense strand
agaaaucuugaaugccaua

SEQ ID NO: 2045729 - RNA, 19 nt, Homo sapiens
  misc_RNA (1)...(19): siRNA sense strand
gcauuauugcaccaaagaa

SEQ ID NO: 2045730 - RNA, 19 nt, Homo sapiens
  misc_RNA (1)...(19): siRNA sense strand
gcaagugaacgagcagaag

SEQ ID NO: 2045731 - RNA, 19 nt, Homo sapiens
  misc_RNA (1)...(19): siRNA sense strand
gaccuggagaggcaaguga

SEQ ID NO: 2045732 - RNA, 19 nt, Homo sapiens
  misc_RNA (1)...(19): siRNA sense strand
ucccagauccuacaaagca

SEQ ID NO: 2045733 - RNA, 19 nt, Homo sapiens
  misc_RNA (1)...(19): siRNA sense strand
gcagaauuggagacggaaa

SEQ ID NO: 2045734 - RNA, 19 nt, Homo sapiens
  misc_RNA (1)...(19): siRNA sense strand
cgagagcagcguggcguuu

SEQ ID NO: 2045735 - RNA, 19 nt, Homo sapiens
  misc_RNA (1)...(19): siRNA sense strand
gcccaacuggaaggcauua

SEQ ID NO: 2045736 - RNA, 19 nt, Homo sapiens
  misc_RNA (1)...(19): siRNA sense strand
caaugaggagauucaguuc

SEQ ID NO: 2045737 - RNA, 19 nt, Homo sapiens
  misc_RNA (1)...(19): siRNA sense strand
uacaaagcaggcagaagaa

SEQ ID NO: 2045738 - RNA, 19 nt, Homo sapiens
  misc_RNA (1)...(19): siRNA sense strand
aaugugaagccacugagaa

SEQ ID NO: 2045739 - RNA, 19 nt, Homo sapiens
  misc_RNA (1)...(19): siRNA sense strand
gcagaaggcaaaaugugaa

SEQ ID NO: 2045740 - RNA, 19 nt, Homo sapiens
  misc_RNA (1)...(19): siRNA sense strand
ugucccagauccuacaaag

SEQ ID NO: 2045741 - RNA, 19 nt, Homo sapiens
  misc_RNA (1)...(19): siRNA sense strand
ccgcagggaacucuacuca

SEQ ID NO: 2045742 - RNA, 19 nt, Homo sapiens
  misc_RNA (1)...(19): siRNA sense strand
uggaagacacgcagcuaug

SEQ ID NO: 2045743 - RNA, 19 nt, Homo sapiens
  misc_RNA (1)...(19): siRNA sense strand
acaaagcaggcagaagaaa

SEQ ID NO: 2045744 - RNA, 19 nt, Homo sapiens
  misc_RNA (1)...(19): siRNA sense strand
gggaagaacuggacucaga

SEQ ID NO: 2045745 - RNA, 19 nt, Homo sapiens
  misc_RNA (1)...(19): siRNA sense strand
ggacacagcccuaucuuca

SEQ ID NO: 2045746 - RNA, 19 nt, Homo sapiens
  misc_RNA (1)...(19): siRNA sense strand
ggaagugagugagaucauu

SEQ ID NO: 2045747 - RNA, 19 nt, Homo sapiens
  misc_RNA (1)...(19): siRNA sense strand
augaggagcuggaauuuaa

SEQ ID NO: 2045748 - RNA, 19 nt, Homo sapiens
  misc_RNA (1)...(19): siRNA sense strand
gcgacgagguggagucuga

SEQ ID NO: 2045749 - RNA, 19 nt, Homo sapiens
  misc_RNA (1)...(19): siRNA sense strand
cgaaacuccuuaccuauca

SEQ ID NO: 2045750 - RNA, 19 nt, Homo sapiens
  misc_RNA (1)...(19): siRNA sense strand
ccaaggugguguucauuga

SEQ ID NO: 2045751 - RNA, 19 nt, Homo sapiens
  misc_RNA (1)...(19): siRNA sense strand
gcacugacauggacuucuc

SEQ ID NO: 2045752 - RNA, 19 nt, Homo sapiens
  misc_RNA (1)...(19): siRNA sense strand
gagccugccucaugcaaug

SEQ ID NO: 2045753 - RNA, 19 nt, Homo sapiens
  misc_RNA (1)...(19): siRNA sense strand
gagcaucccucagaagaca

SEQ ID NO: 2045754 - RNA, 19 nt, Homo sapiens
  misc_RNA (1)...(19): siRNA sense strand
gaugaggagcuggaauuua

SEQ ID NO: 2045755 - RNA, 19 nt, Homo sapiens
  misc_RNA (1)...(19): siRNA sense strand
gaagugagugagaucauug

SEQ ID NO: 2045756 - RNA, 19 nt, Homo sapiens
  misc_RNA (1)...(19): siRNA sense strand
ccacugacccuacagaugu

SEQ ID NO: 2045757 - RNA, 19 nt, Homo sapiens
  misc_RNA (1)...(19): siRNA sense strand
gagagcaucccucagaaga

SEQ ID NO: 2045758 - RNA, 19 nt, Homo sapiens
  misc_RNA (1)...(19): siRNA sense strand
uugcgaaacuccuuaccua

SEQ ID NO: 2045759 - RNA, 19 nt, Homo sapiens
  misc_RNA (1)...(19): siRNA sense strand
ugacucugcugccugagaa

SEQ ID NO: 2045760 - RNA, 19 nt, Homo sapiens
  misc_RNA (1)...(19): siRNA sense strand
gcgggaaggucgucucagu

SEQ ID NO: 2045761 - RNA, 19 nt, Homo sapiens
  misc_RNA (1)...(19): siRNA sense strand
gagguggagucugagcuaa

SEQ ID NO: 2045762 - RNA, 19 nt, Homo sapiens
  misc_RNA (1)...(19): siRNA sense strand
gcaguccuacccagaguuu

SEQ ID NO: 2045763 - RNA, 19 nt, Homo sapiens
  misc_RNA (1)...(19): siRNA sense strand
gcacugcagaugaaaggaa

SEQ ID NO: 2045764 - RNA, 19 nt, Homo sapiens
  misc_RNA (1)...(19): siRNA sense strand
gguggagucugagcuaaau

SEQ ID NO: 2045765 - RNA, 19 nt, Homo sapiens
  misc_RNA (1)...(19): siRNA sense strand
gcugagggauacaauaagg

SEQ ID NO: 2045766 - RNA, 19 nt, Homo sapiens
  misc_RNA (1)...(19): siRNA sense strand
ggaaggucgucucaguaca

SEQ ID NO: 2045767 - RNA, 19 nt, Homo sapiens
  misc_RNA (1)...(19): siRNA sense strand
cagcaucggugcccaucga

SEQ ID NO: 2045768 - RNA, 19 nt, Homo sapiens
  misc_RNA (1)...(19): siRNA sense strand
ggaugaggagcuggaauuu

SEQ ID NO: 2045769 - RNA, 19 nt, Homo sapiens
  misc_RNA (1)...(19): siRNA sense strand
gaauucagacauugagcuu

SEQ ID NO: 2045770 - RNA, 19 nt, Homo sapiens
  misc_RNA (1)...(19): siRNA sense strand
gcgaaacuccuuaccuauc

SEQ ID NO: 2045771 - RNA, 19 nt, Homo sapiens
  misc_RNA (1)...(19): siRNA sense strand
guaucacgcuggaggaagu

SEQ ID NO: 2045772 - RNA, 19 nt, Homo sapiens
  misc_RNA (1)...(19): siRNA sense strand
ugagggauacaauaaggua

SEQ ID NO: 2045773 - RNA, 19 nt, Homo sapiens
  misc_RNA (1)...(19): siRNA sense strand
ugacgaggcagcccuguau

SEQ ID NO: 2045774 - RNA, 19 nt, Homo sapiens
  misc_RNA (1)...(19): siRNA sense strand
cccagugccugcucuguga

SEQ ID NO: 2045775 - RNA, 19 nt, Homo sapiens
  misc_RNA (1)...(19): siRNA sense strand
ucuaucaggugcaccguau

SEQ ID NO: 2045776 - RNA, 19 nt, Homo sapiens
  misc_RNA (1)...(19): siRNA sense strand
gcgcugcaccuaucgguau

SEQ ID NO: 2045777 - RNA, 19 nt, Homo sapiens
  misc_RNA (1)...(19): siRNA sense strand
uaagguagggccaggcuau

SEQ ID NO: 2045778 - RNA, 19 nt, Homo sapiens
  misc_RNA (1)...(19): siRNA sense strand
gcuucggaauucagacauu

SEQ ID NO: 2045779 - RNA, 19 nt, Homo sapiens
  misc_RNA (1)...(19): siRNA sense strand
gaggaggaggccacaguga

SEQ ID NO: 2045780 - RNA, 19 nt, Homo sapiens
  misc_RNA (1)...(19): siRNA sense strand
cagaagacacggcggacuu

SEQ ID NO: 2045781 - RNA, 19 nt, Homo sapiens
  misc_RNA (1)...(19): siRNA sense strand
cugcugagggauacaauaa

SEQ ID NO: 2045782 - RNA, 19 nt, Homo sapiens
  misc_RNA (1)...(19): siRNA sense strand
cugcggauguucccugaga

SEQ ID NO: 2045783 - RNA, 19 nt, Homo sapiens
  misc_RNA (1)...(19): siRNA sense strand
gaaggucgucucaguacag

SEQ ID NO: 2045784 - RNA, 19 nt, Homo sapiens
  misc_RNA (1)...(19): siRNA sense strand
gagaggaggcgaggaacug

SEQ ID NO: 2045785 - RNA, 19 nt, Homo sapiens
  misc_RNA (1)...(19): siRNA sense strand
gaagacccugcuugcgaaa

SEQ ID NO: 2045786 - RNA, 19 nt, Homo sapiens
  misc_RNA (1)...(19): siRNA sense strand
ugaaccgacugcagagcaa

SEQ ID NO: 2045787 - RNA, 19 nt, Homo sapiens
  misc_RNA (1)...(19): siRNA sense strand
gggaaggucgucucaguac

SEQ ID NO: 2045788 - RNA, 19 nt, Homo sapiens
  misc_RNA (1)...(19): siRNA sense strand
gaaacuccuuaccuaucag

SEQ ID NO: 2045789 - RNA, 19 nt, Homo sapiens
  misc_RNA (1)...(19): siRNA sense strand
uacccagaguuucagguuu

SEQ ID NO: 2045790 - RNA, 19 nt, Homo sapiens
  misc_RNA (1)...(19): siRNA sense strand
aaggugguguucauugaga

SEQ ID NO: 2045791 - RNA, 19 nt, Homo sapiens
  misc_RNA (1)...(19): siRNA sense strand
cgagguggagucugagcua

SEQ ID NO: 2045792 - RNA, 19 nt, Homo sapiens
  misc_RNA (1)...(19): siRNA sense strand
ggaggaggccacagugaac

SEQ ID NO: 2045793 - RNA, 19 nt, Homo sapiens
  misc_RNA (1)...(19): siRNA sense strand
cuaugaagccguagucagu

SEQ ID NO: 2045794 - RNA, 19 nt, Homo sapiens
  misc_RNA (1)...(19): siRNA sense strand
cuauggcgcugcaccuauc

SEQ ID NO: 2045795 - RNA, 19 nt, Homo sapiens
  misc_RNA (1)...(19): siRNA sense strand
ggauguucccugagacuag

SEQ ID NO: 2045796 - RNA, 19 nt, Homo sapiens
  misc_RNA (1)...(19): siRNA sense strand
agaagccacugacccuaca

SEQ ID NO: 2045797 - RNA, 19 nt, Homo sapiens
  misc_RNA (1)...(19): siRNA sense strand
ggaggaagugagugagauc

SEQ ID NO: 2045798 - RNA, 19 nt, Homo sapiens
  misc_RNA (1)...(19): siRNA sense strand
acccagaguuucagguuuc

SEQ ID NO: 2045799 - RNA, 19 nt, Homo sapiens
  misc_RNA (1)...(19): siRNA sense strand
gccaguccaggucuacuuu

SEQ ID NO: 2045800 - RNA, 19 nt, Homo sapiens
  misc_RNA (1)...(19): siRNA sense strand
ggccucaugccuucuauca

SEQ ID NO: 2045801 - RNA, 19 nt, Homo sapiens
  misc_RNA (1)...(19): siRNA sense strand
cuccuaggcuacagugaga

SEQ ID NO: 2045802 - RNA, 19 nt, Homo sapiens
  misc_RNA (1)...(19): siRNA sense strand
ccaaccaccugcaguuucc

SEQ ID NO: 2045803 - RNA, 19 nt, Homo sapiens
  misc_RNA (1)...(19): siRNA sense strand
gcccaaccaccugcaguuu

SEQ ID NO: 2045804 - RNA, 19 nt, Homo sapiens
  misc_RNA (1)...(19): siRNA sense strand
uccugaagcuucggaauuc

SEQ ID NO: 2045805 - RNA, 19 nt, Homo sapiens
  misc_RNA (1)...(19): siRNA sense strand
cuucggaauucagacauug

SEQ ID NO: 2045806 - RNA, 19 nt, Homo sapiens
  misc_RNA (1)...(19): siRNA sense strand
cgggaaggucgucucagua

SEQ ID NO: 2045807 - RNA, 19 nt, Homo sapiens
  misc_RNA (1)...(19): siRNA sense strand
uaucaggugcaccguauca

SEQ ID NO: 2045808 - RNA, 19 nt, Homo sapiens
  misc_RNA (1)...(19): siRNA sense strand
caguccaggucuacuuuua

SEQ ID NO: 2045809 - RNA, 19 nt, Homo sapiens
  misc_RNA (1)...(19): siRNA sense strand
aggaugaggagcuggaauu

SEQ ID NO: 2045810 - RNA, 19 nt, Homo sapiens
  misc_RNA (1)...(19): siRNA sense strand
ggaauuuaagcugguguuc

SEQ ID NO: 2045811 - RNA, 19 nt, Homo sapiens
  misc_RNA (1)...(19): siRNA sense strand
ggagcugaggaucgaggua

SEQ ID NO: 2045812 - RNA, 19 nt, Homo sapiens
  misc_RNA (1)...(19): siRNA sense strand
uggagucugagcuaaauga

SEQ ID NO: 2045813 - RNA, 19 nt, Homo sapiens
  misc_RNA (1)...(19): siRNA sense strand
ccgcaucaccuccaucucu

SEQ ID NO: 2045814 - RNA, 19 nt, Homo sapiens
  misc_RNA (1)...(19): siRNA sense strand
ggaagggugagacggacau

SEQ ID NO: 2045815 - RNA, 19 nt, Homo sapiens
  misc_RNA (1)...(19): siRNA sense strand
gaugagaagucaaauggaa

SEQ ID NO: 2045816 - RNA, 19 nt, Homo sapiens
  misc_RNA (1)...(19): siRNA sense strand
aaaccuaacucaccagaaa

SEQ ID NO: 2045817 - RNA, 19 nt, Homo sapiens
  misc_RNA (1)...(19): siRNA sense strand
gaagaaggcaaaccuaaga

SEQ ID NO: 2045818 - RNA, 19 nt, Homo sapiens
  misc_RNA (1)...(19): siRNA sense strand
gagaagugcuugucuuugg

SEQ ID NO: 2045819 - RNA, 19 nt, Homo sapiens
  misc_RNA (1)...(19): siRNA sense strand
ggacgguucuccuuugaug

SEQ ID NO: 2045820 - RNA, 19 nt, Homo sapiens
  misc_RNA (1)...(19): siRNA sense strand
gcaauuuccuauuccaguu

SEQ ID NO: 2045821 - RNA, 19 nt, Homo sapiens
  misc_RNA (1)...(19): siRNA sense strand
ggagaaaacuguuaccuau

SEQ ID NO: 2045822 - RNA, 19 nt, Homo sapiens
  misc_RNA (1)...(19): siRNA sense strand
gaaucugaaucuccaagaa

SEQ ID NO: 2045823 - RNA, 19 nt, Homo sapiens
  misc_RNA (1)...(19): siRNA sense strand
gaagagaguagcaaauugu

SEQ ID NO: 2045824 - RNA, 19 nt, Homo sapiens
  misc_RNA (1)...(19): siRNA sense strand
ugaagagaguagcaaauug

SEQ ID NO: 2045825 - RNA, 19 nt, Homo sapiens
  misc_RNA (1)...(19): siRNA sense strand
cuaaaggucuucaguuucu

SEQ ID NO: 2045826 - RNA, 19 nt, Homo sapiens
  misc_RNA (1)...(19): siRNA sense strand
ggaccagccugaugagaag

SEQ ID NO: 2045827 - RNA, 19 nt, Homo sapiens
  misc_RNA (1)...(19): siRNA sense strand
ccaaguugcugaaaauuaa

SEQ ID NO: 2045828 - RNA, 19 nt, Homo sapiens
  misc_RNA (1)...(19): siRNA sense strand
cuaaagauccagacuguga

SEQ ID NO: 2045829 - RNA, 19 nt, Homo sapiens
  misc_RNA (1)...(19): siRNA sense strand
ggauuaguagugaccauua

SEQ ID NO: 2045830 - RNA, 19 nt, Homo sapiens
  misc_RNA (1)...(19): siRNA sense strand
gaacuucaccaccagaauc

SEQ ID NO: 2045831 - RNA, 19 nt, Homo sapiens
  misc_RNA (1)...(19): siRNA sense strand
ucaaggaaaugauagaaac

SEQ ID NO: 2045832 - RNA, 19 nt, Homo sapiens
  misc_RNA (1)...(19): siRNA sense strand
gagaguagcaaauuguuca

SEQ ID NO: 2045833 - RNA, 19 nt, Homo sapiens
  misc_RNA (1)...(19): siRNA sense strand
gauuaguagugaccauuau

SEQ ID NO: 2045834 - RNA, 19 nt, Homo sapiens
  misc_RNA (1)...(19): siRNA sense strand
gcaaauuguucagcuccuu

SEQ ID NO: 2045835 - RNA, 19 nt, Homo sapiens
  misc_RNA (1)...(19): siRNA sense strand
cagcugaucuggacuucau

SEQ ID NO: 2045836 - RNA, 19 nt, Homo sapiens
  misc_RNA (1)...(19): siRNA sense strand
caagagcaagcaaaccuaa

SEQ ID NO: 2045837 - RNA, 19 nt, Homo sapiens
  misc_RNA (1)...(19): siRNA sense strand
cagaagaaggcaaaccuaa

SEQ ID NO: 2045838 - RNA, 19 nt, Homo sapiens
  misc_RNA (1)...(19): siRNA sense strand
aagaaacacugaagagagu

SEQ ID NO: 2045839 - RNA, 19 nt, Homo sapiens
  misc_RNA (1)...(19): siRNA sense strand
ugaaggaccagccugauga

SEQ ID NO: 2045840 - RNA, 19 nt, Homo sapiens
  misc_RNA (1)...(19): siRNA sense strand
gcaauuaucccaggugucu

SEQ ID NO: 2045841 - RNA, 19 nt, Homo sapiens
  misc_RNA (1)...(19): siRNA sense strand
ugaaugagaaauccaaaga

SEQ ID NO: 2045842 - RNA, 19 nt, Homo sapiens
  misc_RNA (1)...(19): siRNA sense strand
uuagcugccuucaguauau

SEQ ID NO: 2045843 - RNA, 19 nt, Homo sapiens
  misc_RNA (1)...(19): siRNA sense strand
gaacucaaggaaaugauag

SEQ ID NO: 2045844 - RNA, 19 nt, Homo sapiens
  misc_RNA (1)...(19): siRNA sense strand
ugucugaccuccuaacaca

SEQ ID NO: 2045845 - RNA, 19 nt, Homo sapiens
  misc_RNA (1)...(19): siRNA sense strand
gcaacaagcagaagaagcu

SEQ ID NO: 2045846 - RNA, 19 nt, Homo sapiens
  misc_RNA (1)...(19): siRNA sense strand
uaacacaagagcaagcaaa

SEQ ID NO: 2045847 - RNA, 19 nt, Homo sapiens
  misc_RNA (1)...(19): siRNA sense strand
agcuaaaggucuucaguuu

SEQ ID NO: 2045848 - RNA, 19 nt, Homo sapiens
  misc_RNA (1)...(19): siRNA sense strand
cgaacucaaggaaaugaua

SEQ ID NO: 2045849 - RNA, 19 nt, Homo sapiens
  misc_RNA (1)...(19): siRNA sense strand
gcucggaagcugaaugaga

SEQ ID NO: 2045850 - RNA, 19 nt, Homo sapiens
  misc_RNA (1)...(19): siRNA sense strand
gaaacuggagggacagauc

SEQ ID NO: 2045851 - RNA, 19 nt, Homo sapiens
  misc_RNA (1)...(19): siRNA sense strand
gcacagcugaucuggacuu

SEQ ID NO: 2045852 - RNA, 19 nt, Homo sapiens
  misc_RNA (1)...(19): siRNA sense strand
ugagaaauccaaagagcaa

SEQ ID NO: 2045853 - RNA, 19 nt, Homo sapiens
  misc_RNA (1)...(19): siRNA sense strand
cucggaagcugaaugagaa

SEQ ID NO: 2045854 - RNA, 19 nt, Homo sapiens
  misc_RNA (1)...(19): siRNA sense strand
ccaaagagcaaauggaacu

SEQ ID NO: 2045855 - RNA, 19 nt, Homo sapiens
  misc_RNA (1)...(19): siRNA sense strand
ggucuucaguuucuuuacu

SEQ ID NO: 2045856 - RNA, 19 nt, Homo sapiens
  misc_RNA (1)...(19): siRNA sense strand
gcaagcaauuuccuauucc

SEQ ID NO: 2045857 - RNA, 19 nt, Homo sapiens
  misc_RNA (1)...(19): siRNA sense strand
ccaagaaacacugaagaga

SEQ ID NO: 2045858 - RNA, 19 nt, Homo sapiens
  misc_RNA (1)...(19): siRNA sense strand
gaaauccaaagagcaaaug

SEQ ID NO: 2045859 - RNA, 19 nt, Homo sapiens
  misc_RNA (1)...(19): siRNA sense strand
gcuaaaggucuucaguuuc

SEQ ID NO: 2045860 - RNA, 19 nt, Homo sapiens
  misc_RNA (1)...(19): siRNA sense strand
aaaacgaacucaaggaaau

SEQ ID NO: 2045861 - RNA, 19 nt, Homo sapiens
  misc_RNA (1)...(19): siRNA sense strand
gaaaagagccaagagaagu

SEQ ID NO: 2045862 - RNA, 19 nt, Homo sapiens
  misc_RNA (1)...(19): siRNA sense strand
gugcugggcaugcaauuau

SEQ ID NO: 2045863 - RNA, 19 nt, Homo sapiens
  misc_RNA (1)...(19): siRNA sense strand
gaaaacgaacucaaggaaa

SEQ ID NO: 2045864 - RNA, 19 nt, Homo sapiens
  misc_RNA (1)...(19): siRNA sense strand
agcaagcaauuuccuauuc

SEQ ID NO: 2045865 - RNA, 19 nt, Homo sapiens
  misc_RNA (1)...(19): siRNA sense strand
aaaccuaagagcacaguga

SEQ ID NO: 2045866 - RNA, 19 nt, Homo sapiens
  misc_RNA (1)...(19): siRNA sense strand
ggaagcugaaugagaaauc

SEQ ID NO: 2045867 - RNA, 19 nt, Homo sapiens
  misc_RNA (1)...(19): siRNA sense strand
gaagcugaaugagaaaucc

SEQ ID NO: 2045868 - RNA, 19 nt, Homo sapiens
  misc_RNA (1)...(19): siRNA sense strand
caacgaggagcuguuuaug

SEQ ID NO: 2045869 - RNA, 19 nt, Homo sapiens
  misc_RNA (1)...(19): siRNA sense strand
caauuuccuauuccaguuu

SEQ ID NO: 2045870 - RNA, 19 nt, Homo sapiens
  misc_RNA (1)...(19): siRNA sense strand
caagcaauuuccuauucca

SEQ ID NO: 2045871 - RNA, 19 nt, Homo sapiens
  misc_RNA (1)...(19): siRNA sense strand
cagcaagcaauuuccuauu

SEQ ID NO: 2045872 - RNA, 19 nt, Homo sapiens
  misc_RNA (1)...(19): siRNA sense strand
agaagugcuugucuuugga

SEQ ID NO: 2045873 - RNA, 19 nt, Homo sapiens
  misc_RNA (1)...(19): siRNA sense strand
cugaagagaguagcaaauu

SEQ ID NO: 2045874 - RNA, 19 nt, Homo sapiens
  misc_RNA (1)...(19): siRNA sense strand
gaaacacugaagagaguag

SEQ ID NO: 2045875 - RNA, 19 nt, Homo sapiens
  misc_RNA (1)...(19): siRNA sense strand
aaucugaaucuccaagaaa

SEQ ID NO: 2045876 - RNA, 19 nt, Homo sapiens
  misc_RNA (1)...(19): siRNA sense strand
aagagcaaauggaacuuca

SEQ ID NO: 2045877 - RNA, 19 nt, Homo sapiens
  misc_RNA (1)...(19): siRNA sense strand
ccagcaagcaauuuccuau

SEQ ID NO: 2045878 - RNA, 19 nt, Homo sapiens
  misc_RNA (1)...(19): siRNA sense strand
uucaguauaugucagaaga

SEQ ID NO: 2045879 - RNA, 19 nt, Homo sapiens
  misc_RNA (1)...(19): siRNA sense strand
gaaugagaaauccaaagag

SEQ ID NO: 2045880 - RNA, 19 nt, Homo sapiens
  misc_RNA (1)...(19): siRNA sense strand
ucagaagaaggcaaaccua

SEQ ID NO: 2045881 - RNA, 19 nt, Homo sapiens
  misc_RNA (1)...(19): siRNA sense strand
acaacgaggagcuguuuau

SEQ ID NO: 2045882 - RNA, 19 nt, Homo sapiens
  misc_RNA (1)...(19): siRNA sense strand
gaagugcuugucuuuggau

SEQ ID NO: 2045883 - RNA, 19 nt, Homo sapiens
  misc_RNA (1)...(19): siRNA sense strand
caguauaugucagaagaag

SEQ ID NO: 2045884 - RNA, 19 nt, Homo sapiens
  misc_RNA (1)...(19): siRNA sense strand
ggugcugggcaugcaauua

SEQ ID NO: 2045885 - RNA, 19 nt, Homo sapiens
  misc_RNA (1)...(19): siRNA sense strand
uaaagauccagacugugaa

SEQ ID NO: 2045886 - RNA, 19 nt, Homo sapiens
  misc_RNA (1)...(19): siRNA sense strand
agguaccugugcauauaua

SEQ ID NO: 2045887 - RNA, 19 nt, Homo sapiens
  misc_RNA (1)...(19): siRNA sense strand
ggaacuucaccaccagaau

SEQ ID NO: 2045888 - RNA, 19 nt, Homo sapiens
  misc_RNA (1)...(19): siRNA sense strand
gccaaguugcugaaaauua

SEQ ID NO: 2045889 - RNA, 19 nt, Homo sapiens
  misc_RNA (1)...(19): siRNA sense strand
gugaaggaccagccugaug

SEQ ID NO: 2045890 - RNA, 19 nt, Homo sapiens
  misc_RNA (1)...(19): siRNA sense strand
gggauuaguagugaccauu

SEQ ID NO: 2045891 - RNA, 19 nt, Homo sapiens
  misc_RNA (1)...(19): siRNA sense strand
auacaacgaggagcuguuu

SEQ ID NO: 2045892 - RNA, 19 nt, Homo sapiens
  misc_RNA (1)...(19): siRNA sense strand
accuaaagauccagacugu

SEQ ID NO: 2045893 - RNA, 19 nt, Homo sapiens
  misc_RNA (1)...(19): siRNA sense strand
ugccugggauuaguaguga

SEQ ID NO: 2045894 - RNA, 19 nt, Homo sapiens
  misc_RNA (1)...(19): siRNA sense strand
gggaaaagagccaagagaa

SEQ ID NO: 2045895 - RNA, 19 nt, Homo sapiens
  misc_RNA (1)...(19): siRNA sense strand
ucauuuaacugggaaaaga

SEQ ID NO: 2045896 - RNA, 19 nt, Homo sapiens
  misc_RNA (1)...(19): siRNA sense strand
uaaaggucuucaguuucuu

SEQ ID NO: 2045897 - RNA, 19 nt, Homo sapiens
  misc_RNA (1)...(19): siRNA sense strand
gaugccaaguugcugaaaa

SEQ ID NO: 2045898 - RNA, 19 nt, Homo sapiens
  misc_RNA (1)...(19): siRNA sense strand
gagaaauccaaagagcaaa

SEQ ID NO: 2045899 - RNA, 19 nt, Homo sapiens
  misc_RNA (1)...(19): siRNA sense strand
acaagagcaagcaaaccua

SEQ ID NO: 2045900 - RNA, 19 nt, Homo sapiens
  misc_RNA (1)...(19): siRNA sense strand
aagcuaaaggucuucaguu

SEQ ID NO: 2045901 - RNA, 19 nt, Homo sapiens
  misc_RNA (1)...(19): siRNA sense strand
aaacgaacucaaggaaaug

SEQ ID NO: 2045902 - RNA, 19 nt, Homo sapiens
  misc_RNA (1)...(19): siRNA sense strand
cauuuuagcugccuucagu

SEQ ID NO: 2045903 - RNA, 19 nt, Homo sapiens
  misc_RNA (1)...(19): siRNA sense strand
ggagcuguuuaugcggaaa

SEQ ID NO: 2045904 - RNA, 19 nt, Homo sapiens
  misc_RNA (1)...(19): siRNA sense strand
gaaggaccagccugaugag

SEQ ID NO: 2045905 - RNA, 19 nt, Homo sapiens
  misc_RNA (1)...(19): siRNA sense strand
gagaaaacuguuaccuauu

SEQ ID NO: 2045906 - RNA, 19 nt, Homo sapiens
  misc_RNA (1)...(19): siRNA sense strand
gcugaaugagaaauccaaa

SEQ ID NO: 2045907 - RNA, 19 nt, Homo sapiens
  misc_RNA (1)...(19): siRNA sense strand
ggaaaagagccaagagaag

SEQ ID NO: 2045908 - RNA, 19 nt, Homo sapiens
  misc_RNA (1)...(19): siRNA sense strand
gaucuggcauggagaaaac

SEQ ID NO: 2045909 - RNA, 19 nt, Homo sapiens
  misc_RNA (1)...(19): siRNA sense strand
acaaugaacugcagaaaga

SEQ ID NO: 2045910 - RNA, 19 nt, Homo sapiens
  misc_RNA (1)...(19): siRNA sense strand
ggaauccucuucaucuaug

SEQ ID NO: 2045911 - RNA, 19 nt, Homo sapiens
  misc_RNA (1)...(19): siRNA sense strand
gaagagaggaguacgaugu

SEQ ID NO: 2045912 - RNA, 19 nt, Homo sapiens
  misc_RNA (1)...(19): siRNA sense strand
aggaaggccuguacaauga

SEQ ID NO: 2045913 - RNA, 19 nt, Homo sapiens
  misc_RNA (1)...(19): siRNA sense strand
gccagaaccagcucuauaa

SEQ ID NO: 2045914 - RNA, 19 nt, Homo sapiens
  misc_RNA (1)...(19): siRNA sense strand
ggccagaaccagcucuaua

SEQ ID NO: 2045915 - RNA, 19 nt, Homo sapiens
  misc_RNA (1)...(19): siRNA sense strand
agaaccagcucuauaacga

SEQ ID NO: 2045916 - RNA, 19 nt, Homo sapiens
  misc_RNA (1)...(19): siRNA sense strand
cuucaucuauggugucauu

SEQ ID NO: 2045917 - RNA, 19 nt, Homo sapiens
  misc_RNA (1)...(19): siRNA sense strand
gcggaggccuacagugaga

SEQ ID NO: 2045918 - RNA, 19 nt, Homo sapiens
  misc_RNA (1)...(19): siRNA sense strand
acagugagauugggaugaa

SEQ ID NO: 2045919 - RNA, 19 nt, Homo sapiens
  misc_RNA (1)...(19): siRNA sense strand
gaacugcagaaagauaaga

SEQ ID NO: 2045920 - RNA, 19 nt, Homo sapiens
  misc_RNA (1)...(19): siRNA sense strand
cuacgacgcccuucacaug

SEQ ID NO: 2045921 - RNA, 19 nt, Homo sapiens
  misc_RNA (1)...(19): siRNA sense strand
guacaaugaacugcagaaa

SEQ ID NO: 2045922 - RNA, 19 nt, Homo sapiens
  misc_RNA (1)...(19): siRNA sense strand
agagaggaguacgauguuu

SEQ ID NO: 2045923 - RNA, 19 nt, Homo sapiens
  misc_RNA (1)...(19): siRNA sense strand
ggaaggccuguacaaugaa

SEQ ID NO: 2045924 - RNA, 19 nt, Homo sapiens
  misc_RNA (1)...(19): siRNA sense strand
gaaggccuguacaaugaac

SEQ ID NO: 2045925 - RNA, 19 nt, Homo sapiens
  misc_RNA (1)...(19): siRNA sense strand
aaugaacugcagaaagaua

SEQ ID NO: 2045926 - RNA, 19 nt, Homo sapiens
  misc_RNA (1)...(19): siRNA sense strand
uggcggaggccuacaguga

SEQ ID NO: 2045927 - RNA, 19 nt, Homo sapiens
  misc_RNA (1)...(19): siRNA sense strand
cauucucacugccuuguuc

SEQ ID NO: 2045928 - RNA, 19 nt, Homo sapiens
  misc_RNA (1)...(19): siRNA sense strand
uuacagaggcacagagcuu

SEQ ID NO: 2045929 - RNA, 19 nt, Homo sapiens
  misc_RNA (1)...(19): siRNA sense strand
gcuaccugcuggauggaau

SEQ ID NO: 2045930 - RNA, 19 nt, Homo sapiens
  misc_RNA (1)...(19): siRNA sense strand
gcacaguugccgauuacag

SEQ ID NO: 2045931 - RNA, 19 nt, Homo sapiens
  misc_RNA (1)...(19): siRNA sense strand
ggaggccuacagugagauu

SEQ ID NO: 2045932 - RNA, 19 nt, Homo sapiens
  misc_RNA (1)...(19): siRNA sense strand
cacaguugccgauuacaga

SEQ ID NO: 2045933 - RNA, 19 nt, Homo sapiens
  misc_RNA (1)...(19): siRNA sense strand
cuauaacgagcucaaucua

SEQ ID NO: 2045934 - RNA, 19 nt, Homo sapiens
  misc_RNA (1)...(19): siRNA sense strand
caucuauggugucauucuc

SEQ ID NO: 2045935 - RNA, 19 nt, Homo sapiens
  misc_RNA (1)...(19): siRNA sense strand
ccaccaaggacaccuacga

SEQ ID NO: 2045936 - RNA, 19 nt, Homo sapiens
  misc_RNA (1)...(19): siRNA sense strand
uaacgagcucaaucuagga

SEQ ID NO: 2045937 - RNA, 19 nt, Homo sapiens
  misc_RNA (1)...(19): siRNA sense strand
auggaauccucuucaucua

SEQ ID NO: 2045938 - RNA, 19 nt, Homo sapiens
  misc_RNA (1)...(19): siRNA sense strand
uuaccagggucucaguaca

SEQ ID NO: 2045939 - RNA, 19 nt, Homo sapiens
  misc_RNA (1)...(19): siRNA sense strand
gagaggaguacgauguuuu

SEQ ID NO: 2045940 - RNA, 19 nt, Homo sapiens
  misc_RNA (1)...(19): siRNA sense strand
uauaacgagcucaaucuag

SEQ ID NO: 2045941 - RNA, 19 nt, Homo sapiens
  misc_RNA (1)...(19): siRNA sense strand
uggaauccucuucaucuau

SEQ ID NO: 2045942 - RNA, 19 nt, Homo sapiens
  misc_RNA (1)...(19): siRNA sense strand
ucaguacagccaccaagga

SEQ ID NO: 2045943 - RNA, 19 nt, Homo sapiens
  misc_RNA (1)...(19): siRNA sense strand
gaauccucuucaucuaugg

SEQ ID NO: 2045944 - RNA, 19 nt, Homo sapiens
  misc_RNA (1)...(19): siRNA sense strand
gagcucaaucuaggacgaa

SEQ ID NO: 2045945 - RNA, 19 nt, Homo sapiens
  misc_RNA (1)...(19): siRNA sense strand
acaaugaacugcagaaaga

SEQ ID NO: 2045946 - RNA, 19 nt, Homo sapiens
  misc_RNA (1)...(19): siRNA sense strand
ggaauccucuucaucuaug

SEQ ID NO: 2045947 - RNA, 19 nt, Homo sapiens
  misc_RNA (1)...(19): siRNA sense strand
gaagagaggaguacgaugu

SEQ ID NO: 2045948 - RNA, 19 nt, Homo sapiens
  misc_RNA (1)...(19): siRNA sense strand
aggaaggccuguacaauga

SEQ ID NO: 2045949 - RNA, 19 nt, Homo sapiens
  misc_RNA (1)...(19): siRNA sense strand
gccagaaccagcucuauaa

SEQ ID NO: 2045950 - RNA, 19 nt, Homo sapiens
  misc_RNA (1)...(19): siRNA sense strand
ggccagaaccagcucuaua

SEQ ID NO: 2045951 - RNA, 19 nt, Homo sapiens
  misc_RNA (1)...(19): siRNA sense strand
agaaccagcucuauaacga

SEQ ID NO: 2045952 - RNA, 19 nt, Homo sapiens
  misc_RNA (1)...(19): siRNA sense strand
cuucaucuauggugucauu

SEQ ID NO: 2045953 - RNA, 19 nt, Homo sapiens
  misc_RNA (1)...(19): siRNA sense strand
gcggaggccuacagugaga

SEQ ID NO: 2045954 - RNA, 19 nt, Homo sapiens
  misc_RNA (1)...(19): siRNA sense strand
acagugagauugggaugaa

SEQ ID NO: 2045955 - RNA, 19 nt, Homo sapiens
  misc_RNA (1)...(19): siRNA sense strand
gaacugcagaaagauaaga

SEQ ID NO: 2045956 - RNA, 19 nt, Homo sapiens
  misc_RNA (1)...(19): siRNA sense strand
cuacgacgcccuucacaug

SEQ ID NO: 2045957 - RNA, 19 nt, Homo sapiens
  misc_RNA (1)...(19): siRNA sense strand
guacaaugaacugcagaaa

SEQ ID NO: 2045958 - RNA, 19 nt, Homo sapiens
  misc_RNA (1)...(19): siRNA sense strand
agagaggaguacgauguuu

SEQ ID NO: 2045959 - RNA, 19 nt, Homo sapiens
  misc_RNA (1)...(19): siRNA sense strand
ggaaggccuguacaaugaa

SEQ ID NO: 2045960 - RNA, 19 nt, Homo sapiens
  misc_RNA (1)...(19): siRNA sense strand
gaaggccuguacaaugaac

SEQ ID NO: 2045961 - RNA, 19 nt, Homo sapiens
  misc_RNA (1)...(19): siRNA sense strand
aaugaacugcagaaagaua

SEQ ID NO: 2045962 - RNA, 19 nt, Homo sapiens
  misc_RNA (1)...(19): siRNA sense strand
uggcggaggccuacaguga

SEQ ID NO: 2045963 - RNA, 19 nt, Homo sapiens
  misc_RNA (1)...(19): siRNA sense strand
cauucucacugccuuguuc

SEQ ID NO: 2045964 - RNA, 19 nt, Homo sapiens
  misc_RNA (1)...(19): siRNA sense strand
uuacagaggcacagagcuu

SEQ ID NO: 2045965 - RNA, 19 nt, Homo sapiens
  misc_RNA (1)...(19): siRNA sense strand
gcuaccugcuggauggaau

SEQ ID NO: 2045966 - RNA, 19 nt, Homo sapiens
  misc_RNA (1)...(19): siRNA sense strand
gcacaguugccgauuacag

SEQ ID NO: 2045967 - RNA, 19 nt, Homo sapiens
  misc_RNA (1)...(19): siRNA sense strand
ggaggccuacagugagauu

SEQ ID NO: 2045968 - RNA, 19 nt, Homo sapiens
  misc_RNA (1)...(19): siRNA sense strand
cacaguugccgauuacaga

SEQ ID NO: 2045969 - RNA, 19 nt, Homo sapiens
  misc_RNA (1)...(19): siRNA sense strand
cuauaacgagcucaaucua

SEQ ID NO: 2045970 - RNA, 19 nt, Homo sapiens
  misc_RNA (1)...(19): siRNA sense strand
caucuauggugucauucuc

SEQ ID NO: 2045971 - RNA, 19 nt, Homo sapiens
  misc_RNA (1)...(19): siRNA sense strand
ccaccaaggacaccuacga

SEQ ID NO: 2045972 - RNA, 19 nt, Homo sapiens
  misc_RNA (1)...(19): siRNA sense strand
uaacgagcucaaucuagga

SEQ ID NO: 2045973 - RNA, 19 nt, Homo sapiens
  misc_RNA (1)...(19): siRNA sense strand
auggaauccucuucaucua

SEQ ID NO: 2045974 - RNA, 19 nt, Homo sapiens
  misc_RNA (1)...(19): siRNA sense strand
uuaccagggucucaguaca

SEQ ID NO: 2045975 - RNA, 19 nt, Homo sapiens
  misc_RNA (1)...(19): siRNA sense strand
gagaggaguacgauguuuu

SEQ ID NO: 2045976 - RNA, 19 nt, Homo sapiens
  misc_RNA (1)...(19): siRNA sense strand
uauaacgagcucaaucuag

SEQ ID NO: 2045977 - RNA, 19 nt, Homo sapiens
  misc_RNA (1)...(19): siRNA sense strand
uggaauccucuucaucuau

SEQ ID NO: 2045978 - RNA, 19 nt, Homo sapiens
  misc_RNA (1)...(19): siRNA sense strand
ucaguacagccaccaagga

SEQ ID NO: 2045979 - RNA, 19 nt, Homo sapiens
  misc_RNA (1)...(19): siRNA sense strand
gaauccucuucaucuaugg

SEQ ID NO: 2045980 - RNA, 19 nt, Homo sapiens
  misc_RNA (1)...(19): siRNA sense strand
gagcucaaucuaggacgaa

SEQ ID NO: 2045981 - RNA, 19 nt, Homo sapiens
  misc_RNA (1)...(19): siRNA sense strand
acaaugaacugcagaaaga

SEQ ID NO: 2045982 - RNA, 19 nt, Homo sapiens
  misc_RNA (1)...(19): siRNA sense strand
ggaauccucuucaucuaug

SEQ ID NO: 2045983 - RNA, 19 nt, Homo sapiens
  misc_RNA (1)...(19): siRNA sense strand
gaagagaggaguacgaugu

SEQ ID NO: 2045984 - RNA, 19 nt, Homo sapiens
  misc_RNA (1)...(19): siRNA sense strand
aggaaggccuguacaauga

SEQ ID NO: 2045985 - RNA, 19 nt, Homo sapiens
  misc_RNA (1)...(19): siRNA sense strand
gccagaaccagcucuauaa

SEQ ID NO: 2045986 - RNA, 19 nt, Homo sapiens
  misc_RNA (1)...(19): siRNA sense strand
ggccagaaccagcucuaua

SEQ ID NO: 2045987 - RNA, 19 nt, Homo sapiens
  misc_RNA (1)...(19): siRNA sense strand
agaaccagcucuauaacga

SEQ ID NO: 2045988 - RNA, 19 nt, Homo sapiens
  misc_RNA (1)...(19): siRNA sense strand
cuucaucuauggugucauu

SEQ ID NO: 2045989 - RNA, 19 nt, Homo sapiens
  misc_RNA (1)...(19): siRNA sense strand
gcggaggccuacagugaga

SEQ ID NO: 2045990 - RNA, 19 nt, Homo sapiens
  misc_RNA (1)...(19): siRNA sense strand
acagugagauugggaugaa

SEQ ID NO: 2045991 - RNA, 19 nt, Homo sapiens
  misc_RNA (1)...(19): siRNA sense strand
gaacugcagaaagauaaga

SEQ ID NO: 2045992 - RNA, 19 nt, Homo sapiens
  misc_RNA (1)...(19): siRNA sense strand
cuacgacgcccuucacaug

SEQ ID NO: 2045993 - RNA, 19 nt, Homo sapiens
  misc_RNA (1)...(19): siRNA sense strand
guacaaugaacugcagaaa

SEQ ID NO: 2045994 - RNA, 19 nt, Homo sapiens
  misc_RNA (1)...(19): siRNA sense strand
agagaggaguacgauguuu

SEQ ID NO: 2045995 - RNA, 19 nt, Homo sapiens
  misc_RNA (1)...(19): siRNA sense strand
ggaaggccuguacaaugaa

SEQ ID NO: 2045996 - RNA, 19 nt, Homo sapiens
  misc_RNA (1)...(19): siRNA sense strand
gaaggccuguacaaugaac

SEQ ID NO: 2045997 - RNA, 19 nt, Homo sapiens
  misc_RNA (1)...(19): siRNA sense strand
aaugaacugcagaaagaua

SEQ ID NO: 2045998 - RNA, 19 nt, Homo sapiens
  misc_RNA (1)...(19): siRNA sense strand
uggcggaggccuacaguga

SEQ ID NO: 2045999 - RNA, 19 nt, Homo sapiens
  misc_RNA (1)...(19): siRNA sense strand
cauucucacugccuuguuc

SEQ ID NO: 2046000 - RNA, 19 nt, Homo sapiens
  misc_RNA (1)...(19): siRNA sense strand
uuacagaggcacagagcuu

SEQ ID NO: 2046001 - RNA, 19 nt, Homo sapiens
  misc_RNA (1)...(19): siRNA sense strand
gcuaccugcuggauggaau

SEQ ID NO: 2046002 - RNA, 19 nt, Homo sapiens
  misc_RNA (1)...(19): siRNA sense strand
gcacaguugccgauuacag

SEQ ID NO: 2046003 - RNA, 19 nt, Homo sapiens
  misc_RNA (1)...(19): siRNA sense strand
ggaggccuacagugagauu

SEQ ID NO: 2046004 - RNA, 19 nt, Homo sapiens
  misc_RNA (1)...(19): siRNA sense strand
cacaguugccgauuacaga

SEQ ID NO: 2046005 - RNA, 19 nt, Homo sapiens
  misc_RNA (1)...(19): siRNA sense strand
cuauaacgagcucaaucua

SEQ ID NO: 2046006 - RNA, 19 nt, Homo sapiens
  misc_RNA (1)...(19): siRNA sense strand
caucuauggugucauucuc

SEQ ID NO: 2046007 - RNA, 19 nt, Homo sapiens
  misc_RNA (1)...(19): siRNA sense strand
ccaccaaggacaccuacga

SEQ ID NO: 2046008 - RNA, 19 nt, Homo sapiens
  misc_RNA (1)...(19): siRNA sense strand
uaacgagcucaaucuagga

SEQ ID NO: 2046009 - RNA, 19 nt, Homo sapiens
  misc_RNA (1)...(19): siRNA sense strand
auggaauccucuucaucua

SEQ ID NO: 2046010 - RNA, 19 nt, Homo sapiens
  misc_RNA (1)...(19): siRNA sense strand
uuaccagggucucaguaca

SEQ ID NO: 2046011 - RNA, 19 nt, Homo sapiens
  misc_RNA (1)...(19): siRNA sense strand
gagaggaguacgauguuuu

SEQ ID NO: 2046012 - RNA, 19 nt, Homo sapiens
  misc_RNA (1)...(19): siRNA sense strand
uauaacgagcucaaucuag

SEQ ID NO: 2046013 - RNA, 19 nt, Homo sapiens
  misc_RNA (1)...(19): siRNA sense strand
uggaauccucuucaucuau

SEQ ID NO: 2046014 - RNA, 19 nt, Homo sapiens
  misc_RNA (1)...(19): siRNA sense strand
ucaguacagccaccaagga

SEQ ID NO: 2046015 - RNA, 19 nt, Homo sapiens
  misc_RNA (1)...(19): siRNA sense strand
gaauccucuucaucuaugg

SEQ ID NO: 2046016 - RNA, 19 nt, Homo sapiens
  misc_RNA (1)...(19): siRNA sense strand
gagcucaaucuaggacgaa

SEQ ID NO: 2046017 - RNA, 19 nt, Homo sapiens
  misc_RNA (1)...(19): siRNA sense strand
acaaugaacugcagaaaga

SEQ ID NO: 2046018 - RNA, 19 nt, Homo sapiens
  misc_RNA (1)...(19): siRNA sense strand
ggaauccucuucaucuaug

SEQ ID NO: 2046019 - RNA, 19 nt, Homo sapiens
  misc_RNA (1)...(19): siRNA sense strand
gaagagaggaguacgaugu

SEQ ID NO: 2046020 - RNA, 19 nt, Homo sapiens
  misc_RNA (1)...(19): siRNA sense strand
aggaaggccuguacaauga

SEQ ID NO: 2046021 - RNA, 19 nt, Homo sapiens
  misc_RNA (1)...(19): siRNA sense strand
gccagaaccagcucuauaa

SEQ ID NO: 2046022 - RNA, 19 nt, Homo sapiens
  misc_RNA (1)...(19): siRNA sense strand
ggccagaaccagcucuaua

SEQ ID NO: 2046023 - RNA, 19 nt, Homo sapiens
  misc_RNA (1)...(19): siRNA sense strand
agaaccagcucuauaacga

SEQ ID NO: 2046024 - RNA, 19 nt, Homo sapiens
  misc_RNA (1)...(19): siRNA sense strand
cuucaucuauggugucauu

SEQ ID NO: 2046025 - RNA, 19 nt, Homo sapiens
  misc_RNA (1)...(19): siRNA sense strand
gcggaggccuacagugaga

SEQ ID NO: 2046026 - RNA, 19 nt, Homo sapiens
  misc_RNA (1)...(19): siRNA sense strand
acagugagauugggaugaa

SEQ ID NO: 2046027 - RNA, 19 nt, Homo sapiens
  misc_RNA (1)...(19): siRNA sense strand
gaacugcagaaagauaaga

SEQ ID NO: 2046028 - RNA, 19 nt, Homo sapiens
  misc_RNA (1)...(19): siRNA sense strand
cuacgacgcccuucacaug

SEQ ID NO: 2046029 - RNA, 19 nt, Homo sapiens
  misc_RNA (1)...(19): siRNA sense strand
guacaaugaacugcagaaa

SEQ ID NO: 2046030 - RNA, 19 nt, Homo sapiens
  misc_RNA (1)...(19): siRNA sense strand
agagaggaguacgauguuu

SEQ ID NO: 2046031 - RNA, 19 nt, Homo sapiens
  misc_RNA (1)...(19): siRNA sense strand
ggaaggccuguacaaugaa

SEQ ID NO: 2046032 - RNA, 19 nt, Homo sapiens
  misc_RNA (1)...(19): siRNA sense strand
gaaggccuguacaaugaac

SEQ ID NO: 2046033 - RNA, 19 nt, Homo sapiens
  misc_RNA (1)...(19): siRNA sense strand
aaugaacugcagaaagaua

SEQ ID NO: 2046034 - RNA, 19 nt, Homo sapiens
  misc_RNA (1)...(19): siRNA sense strand
uggcggaggccuacaguga

SEQ ID NO: 2046035 - RNA, 19 nt, Homo sapiens
  misc_RNA (1)...(19): siRNA sense strand
cauucucacugccuuguuc

SEQ ID NO: 2046036 - RNA, 19 nt, Homo sapiens
  misc_RNA (1)...(19): siRNA sense strand
uuacagaggcacagagcuu

SEQ ID NO: 2046037 - RNA, 19 nt, Homo sapiens
  misc_RNA (1)...(19): siRNA sense strand
gcuaccugcuggauggaau

SEQ ID NO: 2046038 - RNA, 19 nt, Homo sapiens
  misc_RNA (1)...(19): siRNA sense strand
gcacaguugccgauuacag

SEQ ID NO: 2046039 - RNA, 19 nt, Homo sapiens
  misc_RNA (1)...(19): siRNA sense strand
ggaggccuacagugagauu

SEQ ID NO: 2046040 - RNA, 19 nt, Homo sapiens
  misc_RNA (1)...(19): siRNA sense strand
cacaguugccgauuacaga

SEQ ID NO: 2046041 - RNA, 19 nt, Homo sapiens
  misc_RNA (1)...(19): siRNA sense strand
cuauaacgagcucaaucua

SEQ ID NO: 2046042 - RNA, 19 nt, Homo sapiens
  misc_RNA (1)...(19): siRNA sense strand
caucuauggugucauucuc

SEQ ID NO: 2046043 - RNA, 19 nt, Homo sapiens
  misc_RNA (1)...(19): siRNA sense strand
ccaccaaggacaccuacga

SEQ ID NO: 2046044 - RNA, 19 nt, Homo sapiens
  misc_RNA (1)...(19): siRNA sense strand
uaacgagcucaaucuagga

SEQ ID NO: 2046045 - RNA, 19 nt, Homo sapiens
  misc_RNA (1)...(19): siRNA sense strand
auggaauccucuucaucua

SEQ ID NO: 2046046 - RNA, 19 nt, Homo sapiens
  misc_RNA (1)...(19): siRNA sense strand
uuaccagggucucaguaca

SEQ ID NO: 2046047 - RNA, 19 nt, Homo sapiens
  misc_RNA (1)...(19): siRNA sense strand
gagaggaguacgauguuuu

SEQ ID NO: 2046048 - RNA, 19 nt, Homo sapiens
  misc_RNA (1)...(19): siRNA sense strand
uauaacgagcucaaucuag

SEQ ID NO: 2046049 - RNA, 19 nt, Homo sapiens
  misc_RNA (1)...(19): siRNA sense strand
uggaauccucuucaucuau

SEQ ID NO: 2046050 - RNA, 19 nt, Homo sapiens
  misc_RNA (1)...(19): siRNA sense strand
ucaguacagccaccaagga

SEQ ID NO: 2046051 - RNA, 19 nt, Homo sapiens
  misc_RNA (1)...(19): siRNA sense strand
gaauccucuucaucuaugg

SEQ ID NO: 2046052 - RNA, 19 nt, Homo sapiens
  misc_RNA (1)...(19): siRNA sense strand
gagcucaaucuaggacgaa

SEQ ID NO: 2046053 - RNA, 19 nt, Homo sapiens
  misc_RNA (1)...(19): siRNA sense strand
ggacaucgccuacaucuac

SEQ ID NO: 2046054 - RNA, 19 nt, Homo sapiens
  misc_RNA (1)...(19): siRNA sense strand
caaaacacuucaagacauu

SEQ ID NO: 2046055 - RNA, 19 nt, Homo sapiens
  misc_RNA (1)...(19): siRNA sense strand
acgagccacugaaggaaua

SEQ ID NO: 2046056 - RNA, 19 nt, Homo sapiens
  misc_RNA (1)...(19): siRNA sense strand
ucccauggcucucccaguu

SEQ ID NO: 2046057 - RNA, 19 nt, Homo sapiens
  misc_RNA (1)...(19): siRNA sense strand
ggaauacuacacccucaug

SEQ ID NO: 2046058 - RNA, 19 nt, Homo sapiens
  misc_RNA (1)...(19): siRNA sense strand
ccaaguuucuccgcaacaa

SEQ ID NO: 2046059 - RNA, 19 nt, Homo sapiens
  misc_RNA (1)...(19): siRNA sense strand
ucugagugaugaugagauu

SEQ ID NO: 2046060 - RNA, 19 nt, Homo sapiens
  misc_RNA (1)...(19): siRNA sense strand
ggacgagccacugaaggaa

SEQ ID NO: 2046061 - RNA, 19 nt, Homo sapiens
  misc_RNA (1)...(19): siRNA sense strand
uggagugccugcauuccuu

SEQ ID NO: 2046062 - RNA, 19 nt, Homo sapiens
  misc_RNA (1)...(19): siRNA sense strand
gaauggggauggggacaaa

SEQ ID NO: 2046063 - RNA, 19 nt, Homo sapiens
  misc_RNA (1)...(19): siRNA sense strand
ucauggacaucgccuacau

SEQ ID NO: 2046064 - RNA, 19 nt, Homo sapiens
  misc_RNA (1)...(19): siRNA sense strand
ggacuacacggaucaaaau

SEQ ID NO: 2046065 - RNA, 19 nt, Homo sapiens
  misc_RNA (1)...(19): siRNA sense strand
ugacgugcagguccauaaa

SEQ ID NO: 2046066 - RNA, 19 nt, Homo sapiens
  misc_RNA (1)...(19): siRNA sense strand
agauggaugugcccagcaa

SEQ ID NO: 2046067 - RNA, 19 nt, Homo sapiens
  misc_RNA (1)...(19): siRNA sense strand
ugagugaugaugagauugu

SEQ ID NO: 2046068 - RNA, 19 nt, Homo sapiens
  misc_RNA (1)...(19): siRNA sense strand
caagguggagguucuguac

SEQ ID NO: 2046069 - RNA, 19 nt, Homo sapiens
  misc_RNA (1)...(19): siRNA sense strand
acaaaacacuucaagacau

SEQ ID NO: 2046070 - RNA, 19 nt, Homo sapiens
  misc_RNA (1)...(19): siRNA sense strand
accuggagaccaacaaaua

SEQ ID NO: 2046071 - RNA, 19 nt, Homo sapiens
  misc_RNA (1)...(19): siRNA sense strand
gugacgugcagguccauaa

SEQ ID NO: 2046072 - RNA, 19 nt, Homo sapiens
  misc_RNA (1)...(19): siRNA sense strand
cagccucuccaucgaauuc

SEQ ID NO: 2046073 - RNA, 19 nt, Homo sapiens
  misc_RNA (1)...(19): siRNA sense strand
caucgaauucuacgaaggu

SEQ ID NO: 2046074 - RNA, 19 nt, Homo sapiens
  misc_RNA (1)...(19): siRNA sense strand
gucagccucuccaucgaau

SEQ ID NO: 2046075 - RNA, 19 nt, Homo sapiens
  misc_RNA (1)...(19): siRNA sense strand
uggaugugcccagcaagua

SEQ ID NO: 2046076 - RNA, 19 nt, Homo sapiens
  misc_RNA (1)...(19): siRNA sense strand
gagaaucccugugacuuua

SEQ ID NO: 2046077 - RNA, 19 nt, Homo sapiens
  misc_RNA (1)...(19): siRNA sense strand
cagcaaaccuguccuugua

SEQ ID NO: 2046078 - RNA, 19 nt, Homo sapiens
  misc_RNA (1)...(19): siRNA sense strand
cagaagaaguucacuaaug

SEQ ID NO: 2046079 - RNA, 19 nt, Homo sapiens
  misc_RNA (1)...(19): siRNA sense strand
gcagagagcuccgagaaca

SEQ ID NO: 2046080 - RNA, 19 nt, Homo sapiens
  misc_RNA (1)...(19): siRNA sense strand
gaaccaacacauccauuaa

SEQ ID NO: 2046081 - RNA, 19 nt, Homo sapiens
  misc_RNA (1)...(19): siRNA sense strand
gcacaugggcggucagauu

SEQ ID NO: 2046082 - RNA, 19 nt, Homo sapiens
  misc_RNA (1)...(19): siRNA sense strand
ugucagagcucccucaaga

SEQ ID NO: 2046083 - RNA, 19 nt, Homo sapiens
  misc_RNA (1)...(19): siRNA sense strand
ccaccuccguugugaauaa

SEQ ID NO: 2046084 - RNA, 19 nt, Homo sapiens
  misc_RNA (1)...(19): siRNA sense strand
caugauggcuuccuuagau

SEQ ID NO: 2046085 - RNA, 19 nt, Homo sapiens
  misc_RNA (1)...(19): siRNA sense strand
gaaggaaguuggccaucga

SEQ ID NO: 2046086 - RNA, 19 nt, Homo sapiens
  misc_RNA (1)...(19): siRNA sense strand
gagaacagccgcacugaga

SEQ ID NO: 2046087 - RNA, 19 nt, Homo sapiens
  misc_RNA (1)...(19): siRNA sense strand
ugaaguuccuggcacauuu

SEQ ID NO: 2046088 - RNA, 19 nt, Homo sapiens
  misc_RNA (1)...(19): siRNA sense strand
gaaaugcugugcggaguuc

SEQ ID NO: 2046089 - RNA, 19 nt, Homo sapiens
  misc_RNA (1)...(19): siRNA sense strand
gagagaccguuccagugua

SEQ ID NO: 2046090 - RNA, 19 nt, Homo sapiens
  misc_RNA (1)...(19): siRNA sense strand
ccaaugagaucucugugau

SEQ ID NO: 2046091 - RNA, 19 nt, Homo sapiens
  misc_RNA (1)...(19): siRNA sense strand
gaaccgagucuuucuuuag

SEQ ID NO: 2046092 - RNA, 19 nt, Homo sapiens
  misc_RNA (1)...(19): siRNA sense strand
ccacaugucucagcagguu

SEQ ID NO: 2046093 - RNA, 19 nt, Homo sapiens
  misc_RNA (1)...(19): siRNA sense strand
cagaggacaugaaggagaa

SEQ ID NO: 2046094 - RNA, 19 nt, Homo sapiens
  misc_RNA (1)...(19): siRNA sense strand
ggagagaccguuccagugu

SEQ ID NO: 2046095 - RNA, 19 nt, Homo sapiens
  misc_RNA (1)...(19): siRNA sense strand
ccgaaagcaucaagucaaa

SEQ ID NO: 2046096 - RNA, 19 nt, Homo sapiens
  misc_RNA (1)...(19): siRNA sense strand
cgaaccaacacauccauua

SEQ ID NO: 2046097 - RNA, 19 nt, Homo sapiens
  misc_RNA (1)...(19): siRNA sense strand
gcacaaguguaaguacugu

SEQ ID NO: 2046098 - RNA, 19 nt, Homo sapiens
  misc_RNA (1)...(19): siRNA sense strand
ccacugaucccaacgaaug

SEQ ID NO: 2046099 - RNA, 19 nt, Homo sapiens
  misc_RNA (1)...(19): siRNA sense strand
aagcaucgauguagaggaa

SEQ ID NO: 2046100 - RNA, 19 nt, Homo sapiens
  misc_RNA (1)...(19): siRNA sense strand
gaaagcaucaagucaaagu

SEQ ID NO: 2046101 - RNA, 19 nt, Homo sapiens
  misc_RNA (1)...(19): siRNA sense strand
caagauugcggucagcuaa

SEQ ID NO: 2046102 - RNA, 19 nt, Homo sapiens
  misc_RNA (1)...(19): siRNA sense strand
ugaaccgagucuuucuuua

SEQ ID NO: 2046103 - RNA, 19 nt, Homo sapiens
  misc_RNA (1)...(19): siRNA sense strand
gaacagccgcacugagaug

SEQ ID NO: 2046104 - RNA, 19 nt, Homo sapiens
  misc_RNA (1)...(19): siRNA sense strand
gccagaagaaguucacuaa

SEQ ID NO: 2046105 - RNA, 19 nt, Homo sapiens
  misc_RNA (1)...(19): siRNA sense strand
caaaggcaacuuaaagguu

SEQ ID NO: 2046106 - RNA, 19 nt, Homo sapiens
  misc_RNA (1)...(19): siRNA sense strand
ggaugaagccacaguaaag

SEQ ID NO: 2046107 - RNA, 19 nt, Homo sapiens
  misc_RNA (1)...(19): siRNA sense strand
gcucagaggacaugaagga

SEQ ID NO: 2046108 - RNA, 19 nt, Homo sapiens
  misc_RNA (1)...(19): siRNA sense strand
gaacaucuccgcgguggau

SEQ ID NO: 2046109 - RNA, 19 nt, Homo sapiens
  misc_RNA (1)...(19): siRNA sense strand
agaagaaguucacuaaugc

SEQ ID NO: 2046110 - RNA, 19 nt, Homo sapiens
  misc_RNA (1)...(19): siRNA sense strand
gaggaugaagccacaguaa

SEQ ID NO: 2046111 - RNA, 19 nt, Homo sapiens
  misc_RNA (1)...(19): siRNA sense strand
agagaccguuccaguguaa

SEQ ID NO: 2046112 - RNA, 19 nt, Homo sapiens
  misc_RNA (1)...(19): siRNA sense strand
ggaaguuggccaucgagaa

SEQ ID NO: 2046113 - RNA, 19 nt, Homo sapiens
  misc_RNA (1)...(19): siRNA sense strand
gcuagacacauccaagaaa

SEQ ID NO: 2046114 - RNA, 19 nt, Homo sapiens
  misc_RNA (1)...(19): siRNA sense strand
gaagaccaaugagaucucu

SEQ ID NO: 2046115 - RNA, 19 nt, Homo sapiens
  misc_RNA (1)...(19): siRNA sense strand
uaaguacuguagcaagguu

SEQ ID NO: 2046116 - RNA, 19 nt, Homo sapiens
  misc_RNA (1)...(19): siRNA sense strand
gcaaaccuguccuuguaac

SEQ ID NO: 2046117 - RNA, 19 nt, Homo sapiens
  misc_RNA (1)...(19): siRNA sense strand
gcacgucugugagaaaugc

SEQ ID NO: 2046118 - RNA, 19 nt, Homo sapiens
  misc_RNA (1)...(19): siRNA sense strand
caacuuaaagguucacuac

SEQ ID NO: 2046119 - RNA, 19 nt, Homo sapiens
  misc_RNA (1)...(19): siRNA sense strand
gcauccaggugaacaugug

SEQ ID NO: 2046120 - RNA, 19 nt, Homo sapiens
  misc_RNA (1)...(19): siRNA sense strand
gaaguuggccaucgagaac

SEQ ID NO: 2046121 - RNA, 19 nt, Homo sapiens
  misc_RNA (1)...(19): siRNA sense strand
cagagacccugaaauugca

SEQ ID NO: 2046122 - RNA, 19 nt, Homo sapiens
  misc_RNA (1)...(19): siRNA sense strand
gcuaggguuugccaugaug

SEQ ID NO: 2046123 - RNA, 19 nt, Homo sapiens
  misc_RNA (1)...(19): siRNA sense strand
gaauguggacccuguugug

SEQ ID NO: 2046124 - RNA, 19 nt, Homo sapiens
  misc_RNA (1)...(19): siRNA sense strand
cuuaaagguucacuacaug

SEQ ID NO: 2046125 - RNA, 19 nt, Homo sapiens
  misc_RNA (1)...(19): siRNA sense strand
gaaguuccuggcacauuug

SEQ ID NO: 2046126 - RNA, 19 nt, Homo sapiens
  misc_RNA (1)...(19): siRNA sense strand
aaccgagucuuucuuuaga

SEQ ID NO: 2046127 - RNA, 19 nt, Homo sapiens
  misc_RNA (1)...(19): siRNA sense strand
ggcgcuaucugccaugaug

SEQ ID NO: 2046128 - RNA, 19 nt, Homo sapiens
  misc_RNA (1)...(19): siRNA sense strand
gaucuguggccgagccuuu

SEQ ID NO: 2046129 - RNA, 19 nt, Homo sapiens
  misc_RNA (1)...(19): siRNA sense strand
agagaaucccugugacuuu

SEQ ID NO: 2046130 - RNA, 19 nt, Homo sapiens
  misc_RNA (1)...(19): siRNA sense strand
gaugggagaccaggaguau

SEQ ID NO: 2046131 - RNA, 19 nt, Homo sapiens
  misc_RNA (1)...(19): siRNA sense strand
acacuaacgugaccuugca

SEQ ID NO: 2046132 - RNA, 19 nt, Homo sapiens
  misc_RNA (1)...(19): siRNA sense strand
ccaccaaaggcaacuuaaa

SEQ ID NO: 2046133 - RNA, 19 nt, Homo sapiens
  misc_RNA (1)...(19): siRNA sense strand
ccauuaagacgcagcauuc

SEQ ID NO: 2046134 - RNA, 19 nt, Homo sapiens
  misc_RNA (1)...(19): siRNA sense strand
ucagagcucccucaagaug

SEQ ID NO: 2046135 - RNA, 19 nt, Homo sapiens
  misc_RNA (1)...(19): siRNA sense strand
cuagacacauccaagaaag

SEQ ID NO: 2046136 - RNA, 19 nt, Homo sapiens
  misc_RNA (1)...(19): siRNA sense strand
gggugggaccaaacuauaa

SEQ ID NO: 2046137 - RNA, 19 nt, Homo sapiens
  misc_RNA (1)...(19): siRNA sense strand
caccauggcucuguuaggu

SEQ ID NO: 2046138 - RNA, 19 nt, Homo sapiens
  misc_RNA (1)...(19): siRNA sense strand
gcggaguucuucagcaucu

SEQ ID NO: 2046139 - RNA, 19 nt, Homo sapiens
  misc_RNA (1)...(19): siRNA sense strand
cccaggacauaagcuauuu

SEQ ID NO: 2046140 - RNA, 19 nt, Homo sapiens
  misc_RNA (1)...(19): siRNA sense strand
ggacucacacuggagagaa

SEQ ID NO: 2046141 - RNA, 19 nt, Homo sapiens
  misc_RNA (1)...(19): siRNA sense strand
agacuucuccggagcugua

SEQ ID NO: 2046142 - RNA, 19 nt, Homo sapiens
  misc_RNA (1)...(19): siRNA sense strand
accaacacauccauuaaga

SEQ ID NO: 2046143 - RNA, 19 nt, Homo sapiens
  misc_RNA (1)...(19): siRNA sense strand
ggacugauagcuccuugca

SEQ ID NO: 2046144 - RNA, 19 nt, Homo sapiens
  misc_RNA (1)...(19): siRNA sense strand
cuauuuagccaaaggcaaa

SEQ ID NO: 2046145 - RNA, 19 nt, Homo sapiens
  misc_RNA (1)...(19): siRNA sense strand
guuccuacccucccgguuu

SEQ ID NO: 2046146 - RNA, 19 nt, Homo sapiens
  misc_RNA (1)...(19): siRNA sense strand
gugggacccucgacauugu

SEQ ID NO: 2046147 - RNA, 19 nt, Homo sapiens
  misc_RNA (1)...(19): siRNA sense strand
gcgcuagacacauccaaga

SEQ ID NO: 2046148 - RNA, 19 nt, Homo sapiens
  misc_RNA (1)...(19): siRNA sense strand
ccaagguggcggugaauca

SEQ ID NO: 2046149 - RNA, 19 nt, Homo sapiens
  misc_RNA (1)...(19): siRNA sense strand
ggguaucagugcagaugug

SEQ ID NO: 2046150 - RNA, 19 nt, Homo sapiens
  misc_RNA (1)...(19): siRNA sense strand
caccaaaggcaacuuaaag

SEQ ID NO: 2046151 - RNA, 19 nt, Homo sapiens
  misc_RNA (1)...(19): siRNA sense strand
cagucucccuuccacguuu

SEQ ID NO: 2046152 - RNA, 19 nt, Homo sapiens
  misc_RNA (1)...(19): siRNA sense strand
gcaucgauguagaggaagu

SEQ ID NO: 2046153 - RNA, 19 nt, Homo sapiens
  misc_RNA (1)...(19): siRNA sense strand
cauuugccaccgagucuua

SEQ ID NO: 2046154 - RNA, 19 nt, Homo sapiens
  misc_RNA (1)...(19): siRNA sense strand
auagaugaaccgagucuuu

SEQ ID NO: 2046155 - RNA, 19 nt, Homo sapiens
  misc_RNA (1)...(19): siRNA sense strand
gugaauaacgccacugucu

SEQ ID NO: 2046156 - RNA, 19 nt, Homo sapiens
  misc_RNA (1)...(19): siRNA sense strand
gagaacaccauggcucugu

SEQ ID NO: 2046157 - RNA, 19 nt, Homo sapiens
  misc_RNA (1)...(19): siRNA sense strand
gugcggaguucuucagcau

SEQ ID NO: 2046158 - RNA, 19 nt, Homo sapiens
  misc_RNA (1)...(19): siRNA sense strand
acuuaaagguucacuacau

SEQ ID NO: 2046159 - RNA, 19 nt, Homo sapiens
  misc_RNA (1)...(19): siRNA sense strand
gccgaaagcaucaagucaa

SEQ ID NO: 2046160 - RNA, 19 nt, Homo sapiens
  misc_RNA (1)...(19): siRNA sense strand
gcgauggcuugaccaacga

SEQ ID NO: 2046161 - RNA, 19 nt, Homo sapiens
  misc_RNA (1)...(19): siRNA sense strand
ccaaugaccgugggugaga

SEQ ID NO: 2046162 - RNA, 19 nt, Homo sapiens
  misc_RNA (1)...(19): siRNA sense strand
uaucagugcagauguggaa

SEQ ID NO: 2046163 - RNA, 19 nt, Homo sapiens
  misc_RNA (1)...(19): siRNA sense strand
gcaacuuaaagguucacua

SEQ ID NO: 2046164 - RNA, 19 nt, Homo sapiens
  misc_RNA (1)...(19): siRNA sense strand
cgacaggccaagcaacaug

SEQ ID NO: 2046165 - RNA, 19 nt, Homo sapiens
  misc_RNA (1)...(19): siRNA sense strand
aagcagagagcuccgagaa

SEQ ID NO: 2046166 - RNA, 19 nt, Homo sapiens
  misc_RNA (1)...(19): siRNA sense strand
ccacgccucuucccagcau

SEQ ID NO: 2046167 - RNA, 19 nt, Homo sapiens
  misc_RNA (1)...(19): siRNA sense strand
gaaacaagccaagcuaccu

SEQ ID NO: 2046168 - RNA, 19 nt, Homo sapiens
  misc_RNA (1)...(19): siRNA sense strand
ccaggacauaagcuauuua

SEQ ID NO: 2046169 - RNA, 19 nt, Homo sapiens
  misc_RNA (1)...(19): siRNA sense strand
caaugaccgugggugagaa

SEQ ID NO: 2046170 - RNA, 19 nt, Homo sapiens
  misc_RNA (1)...(19): siRNA sense strand
ccaccagucccggcaguaa

SEQ ID NO: 2046171 - RNA, 19 nt, Homo sapiens
  misc_RNA (1)...(19): siRNA sense strand
ccaaaggcaacuuaaaggu

SEQ ID NO: 2046172 - RNA, 19 nt, Homo sapiens
  misc_RNA (1)...(19): siRNA sense strand
ggagagaagccuuuugugu

SEQ ID NO: 2046173 - RNA, 19 nt, Homo sapiens
  misc_RNA (1)...(19): siRNA sense strand
caccacugaucccaacgaa

SEQ ID NO: 2046174 - RNA, 19 nt, Homo sapiens
  misc_RNA (1)...(19): siRNA sense strand
gacaaggccaccacugauc

SEQ ID NO: 2046175 - RNA, 19 nt, Homo sapiens
  misc_RNA (1)...(19): siRNA sense strand
ccgacacucugaagaccuu

SEQ ID NO: 2046176 - RNA, 19 nt, Homo sapiens
  misc_RNA (1)...(19): siRNA sense strand
cugaggacaucgucacuua

SEQ ID NO: 2046177 - RNA, 19 nt, Homo sapiens
  misc_RNA (1)...(19): siRNA sense strand
gggaggcccugaugcugaa

SEQ ID NO: 2046178 - RNA, 19 nt, Homo sapiens
  misc_RNA (1)...(19): siRNA sense strand
ggacaucgucacuuacauc

SEQ ID NO: 2046179 - RNA, 19 nt, Homo sapiens
  misc_RNA (1)...(19): siRNA sense strand
gcugaagcaucugcaggaa

SEQ ID NO: 2046180 - RNA, 19 nt, Homo sapiens
  misc_RNA (1)...(19): siRNA sense strand
ccggaacuguugagggaaa

SEQ ID NO: 2046181 - RNA, 19 nt, Homo sapiens
  misc_RNA (1)...(19): siRNA sense strand
gaggacaucgucacuuaca

SEQ ID NO: 2046182 - RNA, 19 nt, Homo sapiens
  misc_RNA (1)...(19): siRNA sense strand
ggaggaagaggaggaggaa

SEQ ID NO: 2046183 - RNA, 19 nt, Homo sapiens
  misc_RNA (1)...(19): siRNA sense strand
guggcacgcucgagaacug

SEQ ID NO: 2046184 - RNA, 19 nt, Homo sapiens
  misc_RNA (1)...(19): siRNA sense strand
gccagcggcgucucuacua

SEQ ID NO: 2046185 - RNA, 19 nt, Homo sapiens
  misc_RNA (1)...(19): siRNA sense strand
ugagaauccugccggaacu

SEQ ID NO: 2046186 - RNA, 19 nt, Homo sapiens
  misc_RNA (1)...(19): siRNA sense strand
ggaagaggaggaggaagca

SEQ ID NO: 2046187 - RNA, 19 nt, Homo sapiens
  misc_RNA (1)...(19): siRNA sense strand
gaaaagaggacugggagau

SEQ ID NO: 2046188 - RNA, 19 nt, Homo sapiens
  misc_RNA (1)...(19): siRNA sense strand
cuacuacgucugcgaguuc

SEQ ID NO: 2046189 - RNA, 19 nt, Homo sapiens
  misc_RNA (1)...(19): siRNA sense strand
gaauccugccggaacuguu

SEQ ID NO: 2046190 - RNA, 19 nt, Homo sapiens
  misc_RNA (1)...(19): siRNA sense strand
gaacggagccucugacuuc

SEQ ID NO: 2046191 - RNA, 19 nt, Homo sapiens
  misc_RNA (1)...(19): siRNA sense strand
gcauugaguuccuggauga

SEQ ID NO: 2046192 - RNA, 19 nt, Homo sapiens
  misc_RNA (1)...(19): siRNA sense strand
ggacagcggccucugguuu

SEQ ID NO: 2046193 - RNA, 19 nt, Homo sapiens
  misc_RNA (1)...(19): siRNA sense strand
ggucaaggcuuuugcagaa

SEQ ID NO: 2046194 - RNA, 19 nt, Homo sapiens
  misc_RNA (1)...(19): siRNA sense strand
ggacucacaggaagcauug

SEQ ID NO: 2046195 - RNA, 19 nt, Homo sapiens
  misc_RNA (1)...(19): siRNA sense strand
ccucaugaauccaggcaaa

SEQ ID NO: 2046196 - RNA, 19 nt, Homo sapiens
  misc_RNA (1)...(19): siRNA sense strand
ggacagcacggcacaaugc

SEQ ID NO: 2046197 - RNA, 19 nt, Homo sapiens
  misc_RNA (1)...(19): siRNA sense strand
ugacgcauauggaccgaau

SEQ ID NO: 2046198 - RNA, 19 nt, Homo sapiens
  misc_RNA (1)...(19): siRNA sense strand
gagcauggcaucggaaugg

SEQ ID NO: 2046199 - RNA, 19 nt, Homo sapiens
  misc_RNA (1)...(19): siRNA sense strand
gaccaaggaggaucugaau

SEQ ID NO: 2046200 - RNA, 19 nt, Homo sapiens
  misc_RNA (1)...(19): siRNA sense strand
gaaccaggaggacuucucu

SEQ ID NO: 2046201 - RNA, 19 nt, Homo sapiens
  misc_RNA (1)...(19): siRNA sense strand
ccaaggaggaucugaaugc

SEQ ID NO: 2046202 - RNA, 19 nt, Homo sapiens
  misc_RNA (1)...(19): siRNA sense strand
gcagcgcacagaggagaua

SEQ ID NO: 2046203 - RNA, 19 nt, Homo sapiens
  misc_RNA (1)...(19): siRNA sense strand
gcuugaggguggcgucugu

SEQ ID NO: 2046204 - RNA, 19 nt, Homo sapiens
  misc_RNA (1)...(19): siRNA sense strand
gugcgaaccuccugaugcu

SEQ ID NO: 2046205 - RNA, 19 nt, Homo sapiens
  misc_RNA (1)...(19): siRNA sense strand
gcucugcagggacuucgua

SEQ ID NO: 2046206 - RNA, 19 nt, Homo sapiens
  misc_RNA (1)...(19): siRNA sense strand
gaagcauugucgggcaugu

SEQ ID NO: 2046207 - RNA, 19 nt, Homo sapiens
  misc_RNA (1)...(19): siRNA sense strand
ggagauaguccagcagaac

SEQ ID NO: 2046208 - RNA, 19 nt, Homo sapiens
  misc_RNA (1)...(19): siRNA sense strand
gccaaggugugcccaucau

SEQ ID NO: 2046209 - RNA, 19 nt, Homo sapiens
  misc_RNA (1)...(19): siRNA sense strand
cgacugcucaggucugcaa

SEQ ID NO: 2046210 - RNA, 19 nt, Homo sapiens
  misc_RNA (1)...(19): siRNA sense strand
gacagcggccucugguuuc

SEQ ID NO: 2046211 - RNA, 19 nt, Homo sapiens
  misc_RNA (1)...(19): siRNA sense strand
gaaugccucaggacucaca

SEQ ID NO: 2046212 - RNA, 19 nt, Homo sapiens
  misc_RNA (1)...(19): siRNA sense strand
ugggcagggucaaggcuuu

SEQ ID NO: 2046213 - RNA, 19 nt, Homo sapiens
  misc_RNA (1)...(19): siRNA sense strand
gcucaaggccgugcuagac

SEQ ID NO: 2046214 - RNA, 19 nt, Homo sapiens
  misc_RNA (1)...(19): siRNA sense strand
cccaaggccucaugaaucc

SEQ ID NO: 2046215 - RNA, 19 nt, Homo sapiens
  misc_RNA (1)...(19): siRNA sense strand
gggacaacgugcucaaccu

SEQ ID NO: 2046216 - RNA, 19 nt, Homo sapiens
  misc_RNA (1)...(19): siRNA sense strand
gcagcucaaggccgugcua

SEQ ID NO: 2046217 - RNA, 19 nt, Homo sapiens
  misc_RNA (1)...(19): siRNA sense strand
gaacggagccucugacuuc

SEQ ID NO: 2046218 - RNA, 19 nt, Homo sapiens
  misc_RNA (1)...(19): siRNA sense strand
gcauugaguuccuggauga

SEQ ID NO: 2046219 - RNA, 19 nt, Homo sapiens
  misc_RNA (1)...(19): siRNA sense strand
ggacagcggccucugguuu

SEQ ID NO: 2046220 - RNA, 19 nt, Homo sapiens
  misc_RNA (1)...(19): siRNA sense strand
ggucaaggcuuuugcagaa

SEQ ID NO: 2046221 - RNA, 19 nt, Homo sapiens
  misc_RNA (1)...(19): siRNA sense strand
ggacucacaggaagcauug

SEQ ID NO: 2046222 - RNA, 19 nt, Homo sapiens
  misc_RNA (1)...(19): siRNA sense strand
ccucaugaauccaggcaaa

SEQ ID NO: 2046223 - RNA, 19 nt, Homo sapiens
  misc_RNA (1)...(19): siRNA sense strand
ggacagcacggcacaaugc

SEQ ID NO: 2046224 - RNA, 19 nt, Homo sapiens
  misc_RNA (1)...(19): siRNA sense strand
ugacgcauauggaccgaau

SEQ ID NO: 2046225 - RNA, 19 nt, Homo sapiens
  misc_RNA (1)...(19): siRNA sense strand
gagcauggcaucggaaugg

SEQ ID NO: 2046226 - RNA, 19 nt, Homo sapiens
  misc_RNA (1)...(19): siRNA sense strand
gaccaaggaggaucugaau

SEQ ID NO: 2046227 - RNA, 19 nt, Homo sapiens
  misc_RNA (1)...(19): siRNA sense strand
gaaccaggaggacuucucu

SEQ ID NO: 2046228 - RNA, 19 nt, Homo sapiens
  misc_RNA (1)...(19): siRNA sense strand
ccaaggaggaucugaaugc

SEQ ID NO: 2046229 - RNA, 19 nt, Homo sapiens
  misc_RNA (1)...(19): siRNA sense strand
gcagcgcacagaggagaua

SEQ ID NO: 2046230 - RNA, 19 nt, Homo sapiens
  misc_RNA (1)...(19): siRNA sense strand
gcuugaggguggcgucugu

SEQ ID NO: 2046231 - RNA, 19 nt, Homo sapiens
  misc_RNA (1)...(19): siRNA sense strand
gugcgaaccuccugaugcu

SEQ ID NO: 2046232 - RNA, 19 nt, Homo sapiens
  misc_RNA (1)...(19): siRNA sense strand
gcucugcagggacuucgua

SEQ ID NO: 2046233 - RNA, 19 nt, Homo sapiens
  misc_RNA (1)...(19): siRNA sense strand
gaagcauugucgggcaugu

SEQ ID NO: 2046234 - RNA, 19 nt, Homo sapiens
  misc_RNA (1)...(19): siRNA sense strand
ggagauaguccagcagaac

SEQ ID NO: 2046235 - RNA, 19 nt, Homo sapiens
  misc_RNA (1)...(19): siRNA sense strand
gccaaggugugcccaucau

SEQ ID NO: 2046236 - RNA, 19 nt, Homo sapiens
  misc_RNA (1)...(19): siRNA sense strand
cgacugcucaggucugcaa

SEQ ID NO: 2046237 - RNA, 19 nt, Homo sapiens
  misc_RNA (1)...(19): siRNA sense strand
gacagcggccucugguuuc

SEQ ID NO: 2046238 - RNA, 19 nt, Homo sapiens
  misc_RNA (1)...(19): siRNA sense strand
gaaugccucaggacucaca

SEQ ID NO: 2046239 - RNA, 19 nt, Homo sapiens
  misc_RNA (1)...(19): siRNA sense strand
ugggcagggucaaggcuuu

SEQ ID NO: 2046240 - RNA, 19 nt, Homo sapiens
  misc_RNA (1)...(19): siRNA sense strand
gcucaaggccgugcuagac

SEQ ID NO: 2046241 - RNA, 19 nt, Homo sapiens
  misc_RNA (1)...(19): siRNA sense strand
cccaaggccucaugaaucc

SEQ ID NO: 2046242 - RNA, 19 nt, Homo sapiens
  misc_RNA (1)...(19): siRNA sense strand
gggacaacgugcucaaccu

SEQ ID NO: 2046243 - RNA, 19 nt, Homo sapiens
  misc_RNA (1)...(19): siRNA sense strand
gcagcucaaggccgugcua

SEQ ID NO: 2046244 - RNA, 19 nt, Homo sapiens
  misc_RNA (1)...(19): siRNA sense strand
gaacggagccucugacuuc

SEQ ID NO: 2046245 - RNA, 19 nt, Homo sapiens
  misc_RNA (1)...(19): siRNA sense strand
gcauugaguuccuggauga

SEQ ID NO: 2046246 - RNA, 19 nt, Homo sapiens
  misc_RNA (1)...(19): siRNA sense strand
ggacagcggccucugguuu

SEQ ID NO: 2046247 - RNA, 19 nt, Homo sapiens
  misc_RNA (1)...(19): siRNA sense strand
ggucaaggcuuuugcagaa

SEQ ID NO: 2046248 - RNA, 19 nt, Homo sapiens
  misc_RNA (1)...(19): siRNA sense strand
ggacucacaggaagcauug

SEQ ID NO: 2046249 - RNA, 19 nt, Homo sapiens
  misc_RNA (1)...(19): siRNA sense strand
ccucaugaauccaggcaaa

SEQ ID NO: 2046250 - RNA, 19 nt, Homo sapiens
  misc_RNA (1)...(19): siRNA sense strand
ggacagcacggcacaaugc

SEQ ID NO: 2046251 - RNA, 19 nt, Homo sapiens
  misc_RNA (1)...(19): siRNA sense strand
ugacgcauauggaccgaau

SEQ ID NO: 2046252 - RNA, 19 nt, Homo sapiens
  misc_RNA (1)...(19): siRNA sense strand
gagcauggcaucggaaugg

SEQ ID NO: 2046253 - RNA, 19 nt, Homo sapiens
  misc_RNA (1)...(19): siRNA sense strand
gaccaaggaggaucugaau

SEQ ID NO: 2046254 - RNA, 19 nt, Homo sapiens
  misc_RNA (1)...(19): siRNA sense strand
gaaccaggaggacuucucu

SEQ ID NO: 2046255 - RNA, 19 nt, Homo sapiens
  misc_RNA (1)...(19): siRNA sense strand
ccaaggaggaucugaaugc

SEQ ID NO: 2046256 - RNA, 19 nt, Homo sapiens
  misc_RNA (1)...(19): siRNA sense strand
gcagcgcacagaggagaua

SEQ ID NO: 2046257 - RNA, 19 nt, Homo sapiens
  misc_RNA (1)...(19): siRNA sense strand
gcuugaggguggcgucugu

SEQ ID NO: 2046258 - RNA, 19 nt, Homo sapiens
  misc_RNA (1)...(19): siRNA sense strand
gugcgaaccuccugaugcu

SEQ ID NO: 2046259 - RNA, 19 nt, Homo sapiens
  misc_RNA (1)...(19): siRNA sense strand
gcucugcagggacuucgua

SEQ ID NO: 2046260 - RNA, 19 nt, Homo sapiens
  misc_RNA (1)...(19): siRNA sense strand
gaagcauugucgggcaugu

SEQ ID NO: 2046261 - RNA, 19 nt, Homo sapiens
  misc_RNA (1)...(19): siRNA sense strand
ggagauaguccagcagaac

SEQ ID NO: 2046262 - RNA, 19 nt, Homo sapiens
  misc_RNA (1)...(19): siRNA sense strand
gccaaggugugcccaucau

SEQ ID NO: 2046263 - RNA, 19 nt, Homo sapiens
  misc_RNA (1)...(19): siRNA sense strand
cgacugcucaggucugcaa

SEQ ID NO: 2046264 - RNA, 19 nt, Homo sapiens
  misc_RNA (1)...(19): siRNA sense strand
gacagcggccucugguuuc

SEQ ID NO: 2046265 - RNA, 19 nt, Homo sapiens
  misc_RNA (1)...(19): siRNA sense strand
gaaugccucaggacucaca

SEQ ID NO: 2046266 - RNA, 19 nt, Homo sapiens
  misc_RNA (1)...(19): siRNA sense strand
ugggcagggucaaggcuuu

SEQ ID NO: 2046267 - RNA, 19 nt, Homo sapiens
  misc_RNA (1)...(19): siRNA sense strand
gcucaaggccgugcuagac

SEQ ID NO: 2046268 - RNA, 19 nt, Homo sapiens
  misc_RNA (1)...(19): siRNA sense strand
cccaaggccucaugaaucc

SEQ ID NO: 2046269 - RNA, 19 nt, Homo sapiens
  misc_RNA (1)...(19): siRNA sense strand
gggacaacgugcucaaccu

SEQ ID NO: 2046270 - RNA, 19 nt, Homo sapiens
  misc_RNA (1)...(19): siRNA sense strand
gcagcucaaggccgugcua

SEQ ID NO: 2046271 - RNA, 19 nt, Homo sapiens
  misc_RNA (1)...(19): siRNA sense strand
gaacggagccucugacuuc

SEQ ID NO: 2046272 - RNA, 19 nt, Homo sapiens
  misc_RNA (1)...(19): siRNA sense strand
gcauugaguuccuggauga

SEQ ID NO: 2046273 - RNA, 19 nt, Homo sapiens
  misc_RNA (1)...(19): siRNA sense strand
ggacagcggccucugguuu

SEQ ID NO: 2046274 - RNA, 19 nt, Homo sapiens
  misc_RNA (1)...(19): siRNA sense strand
ggucaaggcuuuugcagaa

SEQ ID NO: 2046275 - RNA, 19 nt, Homo sapiens
  misc_RNA (1)...(19): siRNA sense strand
ggacucacaggaagcauug

SEQ ID NO: 2046276 - RNA, 19 nt, Homo sapiens
  misc_RNA (1)...(19): siRNA sense strand
ccucaugaauccaggcaaa

SEQ ID NO: 2046277 - RNA, 19 nt, Homo sapiens
  misc_RNA (1)...(19): siRNA sense strand
ggacagcacggcacaaugc

SEQ ID NO: 2046278 - RNA, 19 nt, Homo sapiens
  misc_RNA (1)...(19): siRNA sense strand
ugacgcauauggaccgaau

SEQ ID NO: 2046279 - RNA, 19 nt, Homo sapiens
  misc_RNA (1)...(19): siRNA sense strand
gagcauggcaucggaaugg

SEQ ID NO: 2046280 - RNA, 19 nt, Homo sapiens
  misc_RNA (1)...(19): siRNA sense strand
gaccaaggaggaucugaau

SEQ ID NO: 2046281 - RNA, 19 nt, Homo sapiens
  misc_RNA (1)...(19): siRNA sense strand
gaaccaggaggacuucucu

SEQ ID NO: 2046282 - RNA, 19 nt, Homo sapiens
  misc_RNA (1)...(19): siRNA sense strand
ccaaggaggaucugaaugc

SEQ ID NO: 2046283 - RNA, 19 nt, Homo sapiens
  misc_RNA (1)...(19): siRNA sense strand
gcagcgcacagaggagaua

SEQ ID NO: 2046284 - RNA, 19 nt, Homo sapiens
  misc_RNA (1)...(19): siRNA sense strand
gcuugaggguggcgucugu

SEQ ID NO: 2046285 - RNA, 19 nt, Homo sapiens
  misc_RNA (1)...(19): siRNA sense strand
gugcgaaccuccugaugcu

SEQ ID NO: 2046286 - RNA, 19 nt, Homo sapiens
  misc_RNA (1)...(19): siRNA sense strand
gcucugcagggacuucgua

SEQ ID NO: 2046287 - RNA, 19 nt, Homo sapiens
  misc_RNA (1)...(19): siRNA sense strand
gaagcauugucgggcaugu

SEQ ID NO: 2046288 - RNA, 19 nt, Homo sapiens
  misc_RNA (1)...(19): siRNA sense strand
ggagauaguccagcagaac

SEQ ID NO: 2046289 - RNA, 19 nt, Homo sapiens
  misc_RNA (1)...(19): siRNA sense strand
gccaaggugugcccaucau

SEQ ID NO: 2046290 - RNA, 19 nt, Homo sapiens
  misc_RNA (1)...(19): siRNA sense strand
cgacugcucaggucugcaa

SEQ ID NO: 2046291 - RNA, 19 nt, Homo sapiens
  misc_RNA (1)...(19): siRNA sense strand
gacagcggccucugguuuc

SEQ ID NO: 2046292 - RNA, 19 nt, Homo sapiens
  misc_RNA (1)...(19): siRNA sense strand
gaaugccucaggacucaca

SEQ ID NO: 2046293 - RNA, 19 nt, Homo sapiens
  misc_RNA (1)...(19): siRNA sense strand
ugggcagggucaaggcuuu

SEQ ID NO: 2046294 - RNA, 19 nt, Homo sapiens
  misc_RNA (1)...(19): siRNA sense strand
gcucaaggccgugcuagac

SEQ ID NO: 2046295 - RNA, 19 nt, Homo sapiens
  misc_RNA (1)...(19): siRNA sense strand
cccaaggccucaugaaucc

SEQ ID NO: 2046296 - RNA, 19 nt, Homo sapiens
  misc_RNA (1)...(19): siRNA sense strand
gggacaacgugcucaaccu

SEQ ID NO: 2046297 - RNA, 19 nt, Homo sapiens
  misc_RNA (1)...(19): siRNA sense strand
gcagcucaaggccgugcua

SEQ ID NO: 2046298 - RNA, 19 nt, Homo sapiens
  misc_RNA (1)...(19): siRNA sense strand
gcaauuggcugugucuuug

SEQ ID NO: 2046299 - RNA, 19 nt, Homo sapiens
  misc_RNA (1)...(19): siRNA sense strand
gagcauaacuuggcagaca

SEQ ID NO: 2046300 - RNA, 19 nt, Homo sapiens
  misc_RNA (1)...(19): siRNA sense strand
gaacacaacaaaccaacaa

SEQ ID NO: 2046301 - RNA, 19 nt, Homo sapiens
  misc_RNA (1)...(19): siRNA sense strand
caaggaagacccuaagaaa

SEQ ID NO: 2046302 - RNA, 19 nt, Homo sapiens
  misc_RNA (1)...(19): siRNA sense strand
gauuaagcuuugugacuuu

SEQ ID NO: 2046303 - RNA, 19 nt, Homo sapiens
  misc_RNA (1)...(19): siRNA sense strand
uauggaaccacuugaauua

SEQ ID NO: 2046304 - RNA, 19 nt, Homo sapiens
  misc_RNA (1)...(19): siRNA sense strand
gaagauauggaaccacuug

SEQ ID NO: 2046305 - RNA, 19 nt, Homo sapiens
  misc_RNA (1)...(19): siRNA sense strand
gcagcauccuuccagcuuu

SEQ ID NO: 2046306 - RNA, 19 nt, Homo sapiens
  misc_RNA (1)...(19): siRNA sense strand
cagaacaucucgugaagag

SEQ ID NO: 2046307 - RNA, 19 nt, Homo sapiens
  misc_RNA (1)...(19): siRNA sense strand
uggaaccacuugaauuaaa

SEQ ID NO: 2046308 - RNA, 19 nt, Homo sapiens
  misc_RNA (1)...(19): siRNA sense strand
cgaaacauuccgugauuaa

SEQ ID NO: 2046309 - RNA, 19 nt, Homo sapiens
  misc_RNA (1)...(19): siRNA sense strand
acacaguucuccaugaguu

SEQ ID NO: 2046310 - RNA, 19 nt, Homo sapiens
  misc_RNA (1)...(19): siRNA sense strand
cucaaaggcugacauguga

SEQ ID NO: 2046311 - RNA, 19 nt, Homo sapiens
  misc_RNA (1)...(19): siRNA sense strand
gaaggauccuauggaguug

SEQ ID NO: 2046312 - RNA, 19 nt, Homo sapiens
  misc_RNA (1)...(19): siRNA sense strand
caccacugcuuuacagaaa

SEQ ID NO: 2046313 - RNA, 19 nt, Homo sapiens
  misc_RNA (1)...(19): siRNA sense strand
ggacacgggucagauugug

SEQ ID NO: 2046314 - RNA, 19 nt, Homo sapiens
  misc_RNA (1)...(19): siRNA sense strand
ggauguggaucagcuguau

SEQ ID NO: 2046315 - RNA, 19 nt, Homo sapiens
  misc_RNA (1)...(19): siRNA sense strand
ugauuaagcuuugugacuu

SEQ ID NO: 2046316 - RNA, 19 nt, Homo sapiens
  misc_RNA (1)...(19): siRNA sense strand
agaaggauccuauggaguu

SEQ ID NO: 2046317 - RNA, 19 nt, Homo sapiens
  misc_RNA (1)...(19): siRNA sense strand
aaacauccaaguugcagua

SEQ ID NO: 2046318 - RNA, 19 nt, Homo sapiens
  misc_RNA (1)...(19): siRNA sense strand
ggaagacccuaagaaagag

SEQ ID NO: 2046319 - RNA, 19 nt, Homo sapiens
  misc_RNA (1)...(19): siRNA sense strand
gcuguugcaucacccauau

SEQ ID NO: 2046320 - RNA, 19 nt, Homo sapiens
  misc_RNA (1)...(19): siRNA sense strand
ccauaaacacaauugcaua

SEQ ID NO: 2046321 - RNA, 19 nt, Homo sapiens
  misc_RNA (1)...(19): siRNA sense strand
ugugauaccaagaaacuua

SEQ ID NO: 2046322 - RNA, 19 nt, Homo sapiens
  misc_RNA (1)...(19): siRNA sense strand
gcaaguguuuagcacgaau

SEQ ID NO: 2046323 - RNA, 19 nt, Homo sapiens
  misc_RNA (1)...(19): siRNA sense strand
cuacugugauaccaagaaa

SEQ ID NO: 2046324 - RNA, 19 nt, Homo sapiens
  misc_RNA (1)...(19): siRNA sense strand
aggaagacccuaagaaaga

SEQ ID NO: 2046325 - RNA, 19 nt, Homo sapiens
  misc_RNA (1)...(19): siRNA sense strand
ccacacaguucuccaugag

SEQ ID NO: 2046326 - RNA, 19 nt, Homo sapiens
  misc_RNA (1)...(19): siRNA sense strand
ggaaccacuugaauuaaaa

SEQ ID NO: 2046327 - RNA, 19 nt, Homo sapiens
  misc_RNA (1)...(19): siRNA sense strand
gauauggaaccacuugaau

SEQ ID NO: 2046328 - RNA, 19 nt, Homo sapiens
  misc_RNA (1)...(19): siRNA sense strand
ggaccgagugacuacuaua

SEQ ID NO: 2046329 - RNA, 19 nt, Homo sapiens
  misc_RNA (1)...(19): siRNA sense strand
acaauugcauacauagaga

SEQ ID NO: 2046330 - RNA, 19 nt, Homo sapiens
  misc_RNA (1)...(19): siRNA sense strand
gcaccacugcuuuacagaa

SEQ ID NO: 2046331 - RNA, 19 nt, Homo sapiens
  misc_RNA (1)...(19): siRNA sense strand
ggaguuguuuucaaaugua

SEQ ID NO: 2046332 - RNA, 19 nt, Homo sapiens
  misc_RNA (1)...(19): siRNA sense strand
ggcaauuggcugugucuuu

SEQ ID NO: 2046333 - RNA, 19 nt, Homo sapiens
  misc_RNA (1)...(19): siRNA sense strand
cagcauccuuccagcuuug

SEQ ID NO: 2046334 - RNA, 19 nt, Homo sapiens
  misc_RNA (1)...(19): siRNA sense strand
uuacagaaacauccaaguu

SEQ ID NO: 2046335 - RNA, 19 nt, Homo sapiens
  misc_RNA (1)...(19): siRNA sense strand
aagcaucccaaccuuguua

SEQ ID NO: 2046336 - RNA, 19 nt, Homo sapiens
  misc_RNA (1)...(19): siRNA sense strand
acgaaacauuccgugauua

SEQ ID NO: 2046337 - RNA, 19 nt, Homo sapiens
  misc_RNA (1)...(19): siRNA sense strand
aaagggcugucuccacaug

SEQ ID NO: 2046338 - RNA, 19 nt, Homo sapiens
  misc_RNA (1)...(19): siRNA sense strand
gcacgaaucaguacuucag

SEQ ID NO: 2046339 - RNA, 19 nt, Homo sapiens
  misc_RNA (1)...(19): siRNA sense strand
gaaaaucggauguggauca

SEQ ID NO: 2046340 - RNA, 19 nt, Homo sapiens
  misc_RNA (1)...(19): siRNA sense strand
ccacauggacccuacucaa

SEQ ID NO: 2046341 - RNA, 19 nt, Homo sapiens
  misc_RNA (1)...(19): siRNA sense strand
ccacugcuuuacagaaaca

SEQ ID NO: 2046342 - RNA, 19 nt, Homo sapiens
  misc_RNA (1)...(19): siRNA sense strand
gaaaacaucagagaaauag

SEQ ID NO: 2046343 - RNA, 19 nt, Homo sapiens
  misc_RNA (1)...(19): siRNA sense strand
caacaaggaagacccuaag

SEQ ID NO: 2046344 - RNA, 19 nt, Homo sapiens
  misc_RNA (1)...(19): siRNA sense strand
ugacuacuauacagacuac

SEQ ID NO: 2046345 - RNA, 19 nt, Homo sapiens
  misc_RNA (1)...(19): siRNA sense strand
uacagaaacauccaaguug

SEQ ID NO: 2046346 - RNA, 19 nt, Homo sapiens
  misc_RNA (1)...(19): siRNA sense strand
acaaggaagacccuaagaa

SEQ ID NO: 2046347 - RNA, 19 nt, Homo sapiens
  misc_RNA (1)...(19): siRNA sense strand
ccaacaaggaagacccuaa

SEQ ID NO: 2046348 - RNA, 19 nt, Homo sapiens
  misc_RNA (1)...(19): siRNA sense strand
cacauggacccuacucaaa

SEQ ID NO: 2046349 - RNA, 19 nt, Homo sapiens
  misc_RNA (1)...(19): siRNA sense strand
gcuuugugacuuuggauuu

SEQ ID NO: 2046350 - RNA, 19 nt, Homo sapiens
  misc_RNA (1)...(19): siRNA sense strand
acaacaaaccaacaaggaa

SEQ ID NO: 2046351 - RNA, 19 nt, Homo sapiens
  misc_RNA (1)...(19): siRNA sense strand
guggauguuugggcaauug

SEQ ID NO: 2046352 - RNA, 19 nt, Homo sapiens
  misc_RNA (1)...(19): siRNA sense strand
uccagacccugaagauaug

SEQ ID NO: 2046353 - RNA, 19 nt, Homo sapiens
  misc_RNA (1)...(19): siRNA sense strand
cagcuuuggauaauaagaa

SEQ ID NO: 2046354 - RNA, 19 nt, Homo sapiens
  misc_RNA (1)...(19): siRNA sense strand
caucagagaaauagaggau

SEQ ID NO: 2046355 - RNA, 19 nt, Homo sapiens
  misc_RNA (1)...(19): siRNA sense strand
aaaauauccucaucacgaa

SEQ ID NO: 2046356 - RNA, 19 nt, Homo sapiens
  misc_RNA (1)...(19): siRNA sense strand
gugauaccaagaaacuuaa

SEQ ID NO: 2046357 - RNA, 19 nt, Homo sapiens
  misc_RNA (1)...(19): siRNA sense strand
uaagaaagagccgaaagca

SEQ ID NO: 2046358 - RNA, 19 nt, Homo sapiens
  misc_RNA (1)...(19): siRNA sense strand
aaacaucagagaaauagag

SEQ ID NO: 2046359 - RNA, 19 nt, Homo sapiens
  misc_RNA (1)...(19): siRNA sense strand
gaaacauuccgugauuaag

SEQ ID NO: 2046360 - RNA, 19 nt, Homo sapiens
  misc_RNA (1)...(19): siRNA sense strand
ggaggaaacggaggcuuca

SEQ ID NO: 2046361 - RNA, 19 nt, Homo sapiens
  misc_RNA (1)...(19): siRNA sense strand
aaauugcccuucgggaaau

SEQ ID NO: 2046362 - RNA, 19 nt, Homo sapiens
  misc_RNA (1)...(19): siRNA sense strand
cacaacaaaccaacaagga

SEQ ID NO: 2046363 - RNA, 19 nt, Homo sapiens
  misc_RNA (1)...(19): siRNA sense strand
acugcaagcuguaaauuuu

SEQ ID NO: 2046364 - RNA, 19 nt, Homo sapiens
  misc_RNA (1)...(19): siRNA sense strand
ugacuggaccgagugacua

SEQ ID NO: 2046365 - RNA, 19 nt, Homo sapiens
  misc_RNA (1)...(19): siRNA sense strand
uaccagaacaucucgugaa

SEQ ID NO: 2046366 - RNA, 19 nt, Homo sapiens
  misc_RNA (1)...(19): siRNA sense strand
aaagaacacaacaaaccaa

SEQ ID NO: 2046367 - RNA, 19 nt, Homo sapiens
  misc_RNA (1)...(19): siRNA sense strand
uaagcuuugugacuuugga

SEQ ID NO: 2046368 - RNA, 19 nt, Homo sapiens
  misc_RNA (1)...(19): siRNA sense strand
cauaaacacaauugcauac

SEQ ID NO: 2046369 - RNA, 19 nt, Homo sapiens
  misc_RNA (1)...(19): siRNA sense strand
acucaaaggcugacaugug

SEQ ID NO: 2046370 - RNA, 19 nt, Homo sapiens
  misc_RNA (1)...(19): siRNA sense strand
cauggacccuacucaaagg

SEQ ID NO: 2046371 - RNA, 19 nt, Homo sapiens
  misc_RNA (1)...(19): siRNA sense strand
uuccagacccugaagauau

SEQ ID NO: 2046372 - RNA, 19 nt, Homo sapiens
  misc_RNA (1)...(19): siRNA sense strand
uagcacgaaucaguacuuc

SEQ ID NO: 2046373 - RNA, 19 nt, Homo sapiens
  misc_RNA (1)...(19): siRNA sense strand
acucaagcaucccaaccuu

SEQ ID NO: 2046374 - RNA, 19 nt, Homo sapiens
  misc_RNA (1)...(19): siRNA sense strand
gccauaaacacaauugcau

SEQ ID NO: 2046375 - RNA, 19 nt, Homo sapiens
  misc_RNA (1)...(19): siRNA sense strand
ggcaaaagaacacaacaaa

SEQ ID NO: 2046376 - RNA, 19 nt, Homo sapiens
  misc_RNA (1)...(19): siRNA sense strand
gaaaauuccagacccugaa

SEQ ID NO: 2046377 - RNA, 19 nt, Homo sapiens
  misc_RNA (1)...(19): siRNA sense strand
agcuguaucugauuaggaa

SEQ ID NO: 2046378 - RNA, 19 nt, Homo sapiens
  misc_RNA (1)...(19): siRNA sense strand
gguggauguuugggcaauu

SEQ ID NO: 2046379 - RNA, 19 nt, Homo sapiens
  misc_RNA (1)...(19): siRNA sense strand
cgagugacuacuauacaga

SEQ ID NO: 2046380 - RNA, 19 nt, Homo sapiens
  misc_RNA (1)...(19): siRNA sense strand
cacugcaagcuguaaauuu

SEQ ID NO: 2046381 - RNA, 19 nt, Homo sapiens
  misc_RNA (1)...(19): siRNA sense strand
gauuguggccaucaagaag

SEQ ID NO: 2046382 - RNA, 19 nt, Homo sapiens
  misc_RNA (1)...(19): siRNA sense strand
gugccucuguggccaggaa

SEQ ID NO: 2046383 - RNA, 19 nt, Homo sapiens
  misc_RNA (1)...(19): siRNA sense strand
ccaaagagggguaccagaa

SEQ ID NO: 2046384 - RNA, 19 nt, Homo sapiens
  misc_RNA (1)...(19): siRNA sense strand
ucccaaacaucucuuaucc

SEQ ID NO: 2046385 - RNA, 19 nt, Homo sapiens
  misc_RNA (1)...(19): siRNA sense strand
cuauggaguuguuuucaaa

SEQ ID NO: 2046386 - RNA, 19 nt, Homo sapiens
  misc_RNA (1)...(19): siRNA sense strand
ccugguguuugaauauugu

SEQ ID NO: 2046387 - RNA, 19 nt, Homo sapiens
  misc_RNA (1)...(19): siRNA sense strand
ccgagugacuacuauacag

SEQ ID NO: 2046388 - RNA, 19 nt, Homo sapiens
  misc_RNA (1)...(19): siRNA sense strand
cagggacacgggucagauu

SEQ ID NO: 2046389 - RNA, 19 nt, Homo sapiens
  misc_RNA (1)...(19): siRNA sense strand
gcauacauagagacgugaa

SEQ ID NO: 2046390 - RNA, 19 nt, Homo sapiens
  misc_RNA (1)...(19): siRNA sense strand
uguugcaucacccauauuu

SEQ ID NO: 2046391 - RNA, 19 nt, Homo sapiens
  misc_RNA (1)...(19): siRNA sense strand
auauggaaccacuugaauu

SEQ ID NO: 2046392 - RNA, 19 nt, Homo sapiens
  misc_RNA (1)...(19): siRNA sense strand
cagauuguggccaucaaga

SEQ ID NO: 2046393 - RNA, 19 nt, Homo sapiens
  misc_RNA (1)...(19): siRNA sense strand
cauccaaguugcaguaccu

SEQ ID NO: 2046394 - RNA, 19 nt, Homo sapiens
  misc_RNA (1)...(19): siRNA sense strand
caucacccauauuuugaaa

SEQ ID NO: 2046395 - RNA, 19 nt, Homo sapiens
  misc_RNA (1)...(19): siRNA sense strand
agauauggaaccacuugaa

SEQ ID NO: 2046396 - RNA, 19 nt, Homo sapiens
  misc_RNA (1)...(19): siRNA sense strand
gugauuaagcuuugugacu

SEQ ID NO: 2046397 - RNA, 19 nt, Homo sapiens
  misc_RNA (1)...(19): siRNA sense strand
aaacauuccgugauuaagc

SEQ ID NO: 2046398 - RNA, 19 nt, Homo sapiens
  misc_RNA (1)...(19): siRNA sense strand
gcugauacauuucaaaguu

SEQ ID NO: 2046399 - RNA, 19 nt, Homo sapiens
  misc_RNA (1)...(19): siRNA sense strand
gagcuggccuaaacaauga

SEQ ID NO: 2046400 - RNA, 19 nt, Homo sapiens
  misc_RNA (1)...(19): siRNA sense strand
caaaguucaucaaucaaga

SEQ ID NO: 2046401 - RNA, 19 nt, Homo sapiens
  misc_RNA (1)...(19): siRNA sense strand
gcagcaggcucccaaugga

SEQ ID NO: 2046402 - RNA, 19 nt, Homo sapiens
  misc_RNA (1)...(19): siRNA sense strand
ccacaaagaaucccuggaa

SEQ ID NO: 2046403 - RNA, 19 nt, Homo sapiens
  misc_RNA (1)...(19): siRNA sense strand
caaagaaucccuggaaauc

SEQ ID NO: 2046404 - RNA, 19 nt, Homo sapiens
  misc_RNA (1)...(19): siRNA sense strand
cugagugccugacaucuuu

SEQ ID NO: 2046405 - RNA, 19 nt, Homo sapiens
  misc_RNA (1)...(19): siRNA sense strand
ggagcuggccuaaacaaug

SEQ ID NO: 2046406 - RNA, 19 nt, Homo sapiens
  misc_RNA (1)...(19): siRNA sense strand
uugcaggacuuuagcguuu

SEQ ID NO: 2046407 - RNA, 19 nt, Homo sapiens
  misc_RNA (1)...(19): siRNA sense strand
cgacagucccguagauauu

SEQ ID NO: 2046408 - RNA, 19 nt, Homo sapiens
  misc_RNA (1)...(19): siRNA sense strand
cacaaagaaucccuggaaa

SEQ ID NO: 2046409 - RNA, 19 nt, Homo sapiens
  misc_RNA (1)...(19): siRNA sense strand
ugcagcaucugaauuacua

SEQ ID NO: 2046410 - RNA, 19 nt, Homo sapiens
  misc_RNA (1)...(19): siRNA sense strand
ggauuugacugagagacaa

SEQ ID NO: 2046411 - RNA, 19 nt, Homo sapiens
  misc_RNA (1)...(19): siRNA sense strand
gcuuucagaugcaguuuca

SEQ ID NO: 2046412 - RNA, 19 nt, Homo sapiens
  misc_RNA (1)...(19): siRNA sense strand
guagauauuucagcugaca

SEQ ID NO: 2046413 - RNA, 19 nt, Homo sapiens
  misc_RNA (1)...(19): siRNA sense strand
cccugucgcugauacauuu

SEQ ID NO: 2046414 - RNA, 19 nt, Homo sapiens
  misc_RNA (1)...(19): siRNA sense strand
cagacacacucaccacaau

SEQ ID NO: 2046415 - RNA, 19 nt, Homo sapiens
  misc_RNA (1)...(19): siRNA sense strand
gacagucccguagauauuu

SEQ ID NO: 2046416 - RNA, 19 nt, Homo sapiens
  misc_RNA (1)...(19): siRNA sense strand
aucaagaccucgacgcuuu

SEQ ID NO: 2046417 - RNA, 19 nt, Homo sapiens
  misc_RNA (1)...(19): siRNA sense strand
uuucagaaccggaggauga

SEQ ID NO: 2046418 - RNA, 19 nt, Homo sapiens
  misc_RNA (1)...(19): siRNA sense strand
gaauuugagcgagagauug

SEQ ID NO: 2046419 - RNA, 19 nt, Homo sapiens
  misc_RNA (1)...(19): siRNA sense strand
ugaggacuccgagaaagua

SEQ ID NO: 2046420 - RNA, 19 nt, Homo sapiens
  misc_RNA (1)...(19): siRNA sense strand
ucacccaguuugccagguu

SEQ ID NO: 2046421 - RNA, 19 nt, Homo sapiens
  misc_RNA (1)...(19): siRNA sense strand
cgaauuugagcgagagauu

SEQ ID NO: 2046422 - RNA, 19 nt, Homo sapiens
  misc_RNA (1)...(19): siRNA sense strand
acuugcagcaucugaauua

SEQ ID NO: 2046423 - RNA, 19 nt, Homo sapiens
  misc_RNA (1)...(19): siRNA sense strand
caacacacagcuucuagag

SEQ ID NO: 2046424 - RNA, 19 nt, Homo sapiens
  misc_RNA (1)...(19): siRNA sense strand
acaaagaaucccuggaaau

SEQ ID NO: 2046425 - RNA, 19 nt, Homo sapiens
  misc_RNA (1)...(19): siRNA sense strand
gagagacaagugaaagugu

SEQ ID NO: 2046426 - RNA, 19 nt, Homo sapiens
  misc_RNA (1)...(19): siRNA sense strand
gaugcaguuucacccaguu

SEQ ID NO: 2046427 - RNA, 19 nt, Homo sapiens
  misc_RNA (1)...(19): siRNA sense strand
aaacagcgaagggaaaugu

SEQ ID NO: 2046428 - RNA, 19 nt, Homo sapiens
  misc_RNA (1)...(19): siRNA sense strand
caacaaugggccagaacug

SEQ ID NO: 2046429 - RNA, 19 nt, Homo sapiens
  misc_RNA (1)...(19): siRNA sense strand
aauggcgacucccaaaguu

SEQ ID NO: 2046430 - RNA, 19 nt, Homo sapiens
  misc_RNA (1)...(19): siRNA sense strand
gcugagugccugacaucuu

SEQ ID NO: 2046431 - RNA, 19 nt, Homo sapiens
  misc_RNA (1)...(19): siRNA sense strand
agagggaaggcuacacuuu

SEQ ID NO: 2046432 - RNA, 19 nt, Homo sapiens
  misc_RNA (1)...(19): siRNA sense strand
cagcgaagggaaauguaaa

SEQ ID NO: 2046433 - RNA, 19 nt, Homo sapiens
  misc_RNA (1)...(19): siRNA sense strand
guucccaacugcuugucaa

SEQ ID NO: 2046434 - RNA, 19 nt, Homo sapiens
  misc_RNA (1)...(19): siRNA sense strand
gcagacccagugcaaggaa

SEQ ID NO: 2046435 - RNA, 19 nt, Homo sapiens
  misc_RNA (1)...(19): siRNA sense strand
caauggcgacucccaaagu

SEQ ID NO: 2046436 - RNA, 19 nt, Homo sapiens
  misc_RNA (1)...(19): siRNA sense strand
gagggaaggcuacacuuuu

SEQ ID NO: 2046437 - RNA, 19 nt, Homo sapiens
  misc_RNA (1)...(19): siRNA sense strand
ggaggacgaggaagagaag

SEQ ID NO: 2046438 - RNA, 19 nt, Homo sapiens
  misc_RNA (1)...(19): siRNA sense strand
ugacugagagacaagugaa

SEQ ID NO: 2046439 - RNA, 19 nt, Homo sapiens
  misc_RNA (1)...(19): siRNA sense strand
ccucgacagucccguagau

SEQ ID NO: 2046440 - RNA, 19 nt, Homo sapiens
  misc_RNA (1)...(19): siRNA sense strand
uagaggaggacgaggaaga

SEQ ID NO: 2046441 - RNA, 19 nt, Homo sapiens
  misc_RNA (1)...(19): siRNA sense strand
ugagaacugcuuacaccaa

SEQ ID NO: 2046442 - RNA, 19 nt, Homo sapiens
  misc_RNA (1)...(19): siRNA sense strand
ucccaaaguuucccagucu

SEQ ID NO: 2046443 - RNA, 19 nt, Homo sapiens
  misc_RNA (1)...(19): siRNA sense strand
cugauacauuucaaaguuc

SEQ ID NO: 2046444 - RNA, 19 nt, Homo sapiens
  misc_RNA (1)...(19): siRNA sense strand
ggagagggaaggcuacacu

SEQ ID NO: 2046445 - RNA, 19 nt, Homo sapiens
  misc_RNA (1)...(19): siRNA sense strand
ucaaaguucaucaaucaag

SEQ ID NO: 2046446 - RNA, 19 nt, Homo sapiens
  misc_RNA (1)...(19): siRNA sense strand
ccacuguucccaacugcuu

SEQ ID NO: 2046447 - RNA, 19 nt, Homo sapiens
  misc_RNA (1)...(19): siRNA sense strand
ugucaacaaugggccagaa

SEQ ID NO: 2046448 - RNA, 19 nt, Homo sapiens
  misc_RNA (1)...(19): siRNA sense strand
acagcgaagggaaauguaa

SEQ ID NO: 2046449 - RNA, 19 nt, Homo sapiens
  misc_RNA (1)...(19): siRNA sense strand
cgacuugcagcaucugaau

SEQ ID NO: 2046450 - RNA, 19 nt, Homo sapiens
  misc_RNA (1)...(19): siRNA sense strand
caaucgacuugcagcaucu

SEQ ID NO: 2046451 - RNA, 19 nt, Homo sapiens
  misc_RNA (1)...(19): siRNA sense strand
cacaauggcgacucccaaa

SEQ ID NO: 2046452 - RNA, 19 nt, Homo sapiens
  misc_RNA (1)...(19): siRNA sense strand
cagacccagugcaaggaaa

SEQ ID NO: 2046453 - RNA, 19 nt, Homo sapiens
  misc_RNA (1)...(19): siRNA sense strand
ucaccacaaucgacuugca

SEQ ID NO: 2046454 - RNA, 19 nt, Homo sapiens
  misc_RNA (1)...(19): siRNA sense strand
gcagcuuucagaugcaguu

SEQ ID NO: 2046455 - RNA, 19 nt, Homo sapiens
  misc_RNA (1)...(19): siRNA sense strand
uucccagucucgccuuuaa

SEQ ID NO: 2046456 - RNA, 19 nt, Homo sapiens
  misc_RNA (1)...(19): siRNA sense strand
gagagggaaggcuacacuu

SEQ ID NO: 2046457 - RNA, 19 nt, Homo sapiens
  misc_RNA (1)...(19): siRNA sense strand
gcaagcccuuagcgucucu

SEQ ID NO: 2046458 - RNA, 19 nt, Homo sapiens
  misc_RNA (1)...(19): siRNA sense strand
ccaacacacagcuucuaga

SEQ ID NO: 2046459 - RNA, 19 nt, Homo sapiens
  misc_RNA (1)...(19): siRNA sense strand
cuguggagcuggccuaaac

SEQ ID NO: 2046460 - RNA, 19 nt, Homo sapiens
  misc_RNA (1)...(19): siRNA sense strand
gacaagugaaagugugguu

SEQ ID NO: 2046461 - RNA, 19 nt, Homo sapiens
  misc_RNA (1)...(19): siRNA sense strand
ugagagacaagugaaagug

SEQ ID NO: 2046462 - RNA, 19 nt, Homo sapiens
  misc_RNA (1)...(19): siRNA sense strand
ggacuccgagaaaguagag

SEQ ID NO: 2046463 - RNA, 19 nt, Homo sapiens
  misc_RNA (1)...(19): siRNA sense strand
ggaagaaacugcaugaaua

SEQ ID NO: 2046464 - RNA, 19 nt, Homo sapiens
  misc_RNA (1)...(19): siRNA sense strand
caagaaagcucacaaauug

SEQ ID NO: 2046465 - RNA, 19 nt, Homo sapiens
  misc_RNA (1)...(19): siRNA sense strand
gcagugagguugaauauaa

SEQ ID NO: 2046466 - RNA, 19 nt, Homo sapiens
  misc_RNA (1)...(19): siRNA sense strand
caagaaggcuuauggcuua

SEQ ID NO: 2046467 - RNA, 19 nt, Homo sapiens
  misc_RNA (1)...(19): siRNA sense strand
gaaaggcacugcacauuau

SEQ ID NO: 2046468 - RNA, 19 nt, Homo sapiens
  misc_RNA (1)...(19): siRNA sense strand
ccaaugagcuggcaaguga

SEQ ID NO: 2046469 - RNA, 19 nt, Homo sapiens
  misc_RNA (1)...(19): siRNA sense strand
ucagugagguuaaguauaa

SEQ ID NO: 2046470 - RNA, 19 nt, Homo sapiens
  misc_RNA (1)...(19): siRNA sense strand
gggcacagcuucaaaguga

SEQ ID NO: 2046471 - RNA, 19 nt, Homo sapiens
  misc_RNA (1)...(19): siRNA sense strand
ccgcaaagcucagcauuua

SEQ ID NO: 2046472 - RNA, 19 nt, Homo sapiens
  misc_RNA (1)...(19): siRNA sense strand
cagaaucccugcacagaua

SEQ ID NO: 2046473 - RNA, 19 nt, Homo sapiens
  misc_RNA (1)...(19): siRNA sense strand
caagaaagcucacgaacuc

SEQ ID NO: 2046474 - RNA, 19 nt, Homo sapiens
  misc_RNA (1)...(19): siRNA sense strand
cgaaugagcgccucuauaa

SEQ ID NO: 2046475 - RNA, 19 nt, Homo sapiens
  misc_RNA (1)...(19): siRNA sense strand
gcaaccagauaacgaauga

SEQ ID NO: 2046476 - RNA, 19 nt, Homo sapiens
  misc_RNA (1)...(19): siRNA sense strand
gcaaugagcgcauguauag

SEQ ID NO: 2046477 - RNA, 19 nt, Homo sapiens
  misc_RNA (1)...(19): siRNA sense strand
gaucacaccugcuuaucaa

SEQ ID NO: 2046478 - RNA, 19 nt, Homo sapiens
  misc_RNA (1)...(19): siRNA sense strand
gcuacaagcugacaauaga

SEQ ID NO: 2046479 - RNA, 19 nt, Homo sapiens
  misc_RNA (1)...(19): siRNA sense strand
ggaaaggauuugagaugaa

SEQ ID NO: 2046480 - RNA, 19 nt, Homo sapiens
  misc_RNA (1)...(19): siRNA sense strand
caucggaacucaucaguga

SEQ ID NO: 2046481 - RNA, 19 nt, Homo sapiens
  misc_RNA (1)...(19): siRNA sense strand
gaugguggcuauaaacuga

SEQ ID NO: 2046482 - RNA, 19 nt, Homo sapiens
  misc_RNA (1)...(19): siRNA sense strand
agagugaugucaaguauaa

SEQ ID NO: 2046483 - RNA, 19 nt, Homo sapiens
  misc_RNA (1)...(19): siRNA sense strand
gcagagugaugucaaguau

SEQ ID NO: 2046484 - RNA, 19 nt, Homo sapiens
  misc_RNA (1)...(19): siRNA sense strand
cgaacucgcuagugacaua

SEQ ID NO: 2046485 - RNA, 19 nt, Homo sapiens
  misc_RNA (1)...(19): siRNA sense strand
gaaauucagcaaccagaua

SEQ ID NO: 2046486 - RNA, 19 nt, Homo sapiens
  misc_RNA (1)...(19): siRNA sense strand
ccagaugcuuugaaguuua

SEQ ID NO: 2046487 - RNA, 19 nt, Homo sapiens
  misc_RNA (1)...(19): siRNA sense strand
caaggaggauuaugagaga

SEQ ID NO: 2046488 - RNA, 19 nt, Homo sapiens
  misc_RNA (1)...(19): siRNA sense strand
gagguaccaucaacaauau

SEQ ID NO: 2046489 - RNA, 19 nt, Homo sapiens
  misc_RNA (1)...(19): siRNA sense strand
gagaagaucagcuguauag

SEQ ID NO: 2046490 - RNA, 19 nt, Homo sapiens
  misc_RNA (1)...(19): siRNA sense strand
gaauuaccgugcugacuau

SEQ ID NO: 2046491 - RNA, 19 nt, Homo sapiens
  misc_RNA (1)...(19): siRNA sense strand
gaagaaggcccugcuguug

SEQ ID NO: 2046492 - RNA, 19 nt, Homo sapiens
  misc_RNA (1)...(19): siRNA sense strand
uaaagcagcuggagaggau

SEQ ID NO: 2046493 - RNA, 19 nt, Homo sapiens
  misc_RNA (1)...(19): siRNA sense strand
gcgagaaacuguauaagag

SEQ ID NO: 2046494 - RNA, 19 nt, Homo sapiens
  misc_RNA (1)...(19): siRNA sense strand
gggaaaggauuugagauga

SEQ ID NO: 2046495 - RNA, 19 nt, Homo sapiens
  misc_RNA (1)...(19): siRNA sense strand
gcacagauacacccugauu

SEQ ID NO: 2046496 - RNA, 19 nt, Homo sapiens
  misc_RNA (1)...(19): siRNA sense strand
gcaagaugaugcugucugu

SEQ ID NO: 2046497 - RNA, 19 nt, Homo sapiens
  misc_RNA (1)...(19): siRNA sense strand
ccaagaaagcucacaaauu

SEQ ID NO: 2046498 - RNA, 19 nt, Homo sapiens
  misc_RNA (1)...(19): siRNA sense strand
gcauuuagccacagacgua

SEQ ID NO: 2046499 - RNA, 19 nt, Homo sapiens
  misc_RNA (1)...(19): siRNA sense strand
agagugagcuggaguacaa

SEQ ID NO: 2046500 - RNA, 19 nt, Homo sapiens
  misc_RNA (1)...(19): siRNA sense strand
ugaaaggcacugcacauua

SEQ ID NO: 2046501 - RNA, 19 nt, Homo sapiens
  misc_RNA (1)...(19): siRNA sense strand
ggaaugugcagaccaauau

SEQ ID NO: 2046502 - RNA, 19 nt, Homo sapiens
  misc_RNA (1)...(19): siRNA sense strand
ggagauauagccagugauu

SEQ ID NO: 2046503 - RNA, 19 nt, Homo sapiens
  misc_RNA (1)...(19): siRNA sense strand
gcaaaggcuucuggugaaa

SEQ ID NO: 2046504 - RNA, 19 nt, Homo sapiens
  misc_RNA (1)...(19): siRNA sense strand
caaaugagagagccuauug

SEQ ID NO: 2046505 - RNA, 19 nt, Homo sapiens
  misc_RNA (1)...(19): siRNA sense strand
gcuuugaaguuuaccagua

SEQ ID NO: 2046506 - RNA, 19 nt, Homo sapiens
  misc_RNA (1)...(19): siRNA sense strand
gaagaucagcuguauagau

SEQ ID NO: 2046507 - RNA, 19 nt, Homo sapiens
  misc_RNA (1)...(19): siRNA sense strand
gaaaggauuugagaugaag

SEQ ID NO: 2046508 - RNA, 19 nt, Homo sapiens
  misc_RNA (1)...(19): siRNA sense strand
ugaaguacaaggaggauua

SEQ ID NO: 2046509 - RNA, 19 nt, Homo sapiens
  misc_RNA (1)...(19): siRNA sense strand
ugaaagaugccaauuauag

SEQ ID NO: 2046510 - RNA, 19 nt, Homo sapiens
  misc_RNA (1)...(19): siRNA sense strand
ggacacaguaucacaaguu

SEQ ID NO: 2046511 - RNA, 19 nt, Homo sapiens
  misc_RNA (1)...(19): siRNA sense strand
gaacaguguaaaucaguuu

SEQ ID NO: 2046512 - RNA, 19 nt, Homo sapiens
  misc_RNA (1)...(19): siRNA sense strand
cuacagacaugacuuugug

SEQ ID NO: 2046513 - RNA, 19 nt, Homo sapiens
  misc_RNA (1)...(19): siRNA sense strand
ccaagaagauggugaacag

SEQ ID NO: 2046514 - RNA, 19 nt, Homo sapiens
  misc_RNA (1)...(19): siRNA sense strand
ggagaucgccagugauuuc

SEQ ID NO: 2046515 - RNA, 19 nt, Homo sapiens
  misc_RNA (1)...(19): siRNA sense strand
cuagggagaucgccaguga

SEQ ID NO: 2046516 - RNA, 19 nt, Homo sapiens
  misc_RNA (1)...(19): siRNA sense strand
gaaggcaggagaacucauu

SEQ ID NO: 2046517 - RNA, 19 nt, Homo sapiens
  misc_RNA (1)...(19): siRNA sense strand
gggcagaugugaaguggau

SEQ ID NO: 2046518 - RNA, 19 nt, Homo sapiens
  misc_RNA (1)...(19): siRNA sense strand
guaaacaucaggcaugcua

SEQ ID NO: 2046519 - RNA, 19 nt, Homo sapiens
  misc_RNA (1)...(19): siRNA sense strand
aaagaaggcugggagaaga

SEQ ID NO: 2046520 - RNA, 19 nt, Homo sapiens
  misc_RNA (1)...(19): siRNA sense strand
ccagccaaguggaguauaa

SEQ ID NO: 2046521 - RNA, 19 nt, Homo sapiens
  misc_RNA (1)...(19): siRNA sense strand
ugagguaccaucaacaaua

SEQ ID NO: 2046522 - RNA, 19 nt, Homo sapiens
  misc_RNA (1)...(19): siRNA sense strand
aaagaaggcuggagaacuc

SEQ ID NO: 2046523 - RNA, 19 nt, Homo sapiens
  misc_RNA (1)...(19): siRNA sense strand
gcugagcugugccaagaaa

SEQ ID NO: 2046524 - RNA, 19 nt, Homo sapiens
  misc_RNA (1)...(19): siRNA sense strand
gauaucagccuugcacauu

SEQ ID NO: 2046525 - RNA, 19 nt, Homo sapiens
  misc_RNA (1)...(19): siRNA sense strand
gcuauaaacugagguugga

SEQ ID NO: 2046526 - RNA, 19 nt, Homo sapiens
  misc_RNA (1)...(19): siRNA sense strand
cuugaaagaugccaauuau

SEQ ID NO: 2046527 - RNA, 19 nt, Homo sapiens
  misc_RNA (1)...(19): siRNA sense strand
gaaacugcaugaauacacu

SEQ ID NO: 2046528 - RNA, 19 nt, Homo sapiens
  misc_RNA (1)...(19): siRNA sense strand
gacaugacuuugugaagga

SEQ ID NO: 2046529 - RNA, 19 nt, Homo sapiens
  misc_RNA (1)...(19): siRNA sense strand
gaaagcaucggaacucauc

SEQ ID NO: 2046530 - RNA, 19 nt, Homo sapiens
  misc_RNA (1)...(19): siRNA sense strand
ccaagcaguggauagauua

SEQ ID NO: 2046531 - RNA, 19 nt, Homo sapiens
  misc_RNA (1)...(19): siRNA sense strand
gaugugaaguggaugaaag

SEQ ID NO: 2046532 - RNA, 19 nt, Homo sapiens
  misc_RNA (1)...(19): siRNA sense strand
uguccaagcugcagaguga

SEQ ID NO: 2046533 - RNA, 19 nt, Homo sapiens
  misc_RNA (1)...(19): siRNA sense strand
gaagcuggaugccaugucu

SEQ ID NO: 2046534 - RNA, 19 nt, Homo sapiens
  misc_RNA (1)...(19): siRNA sense strand
gugacaaagucuacagaaa

SEQ ID NO: 2046535 - RNA, 19 nt, Homo sapiens
  misc_RNA (1)...(19): siRNA sense strand
cauaaagcaucauuacaca

SEQ ID NO: 2046536 - RNA, 19 nt, Homo sapiens
  misc_RNA (1)...(19): siRNA sense strand
gaagaaacugcaugaauac

SEQ ID NO: 2046537 - RNA, 19 nt, Homo sapiens
  misc_RNA (1)...(19): siRNA sense strand
ggaauauacagaagacuau

SEQ ID NO: 2046538 - RNA, 19 nt, Homo sapiens
  misc_RNA (1)...(19): siRNA sense strand
aagaugaugcugucuguua

SEQ ID NO: 2046539 - RNA, 19 nt, Homo sapiens
  misc_RNA (1)...(19): siRNA sense strand
agagugaugugaauuacaa

SEQ ID NO: 2046540 - RNA, 19 nt, Homo sapiens
  misc_RNA (1)...(19): siRNA sense strand
uaaagacacuccggagaug

SEQ ID NO: 2046541 - RNA, 19 nt, Homo sapiens
  misc_RNA (1)...(19): siRNA sense strand
gaagaaggcaggagaacuc

SEQ ID NO: 2046542 - RNA, 19 nt, Homo sapiens
  misc_RNA (1)...(19): siRNA sense strand
aggcaggacuucaauaaga

SEQ ID NO: 2046543 - RNA, 19 nt, Homo sapiens
  misc_RNA (1)...(19): siRNA sense strand
ggacuaugaacaacaaaga

SEQ ID NO: 2046544 - RNA, 19 nt, Homo sapiens
  misc_RNA (1)...(19): siRNA sense strand
gacaaagucuacagaaacu

SEQ ID NO: 2046545 - RNA, 19 nt, Homo sapiens
  misc_RNA (1)...(19): siRNA sense strand
gaagaaagcaucggaacuc

SEQ ID NO: 2046546 - RNA, 19 nt, Homo sapiens
  misc_RNA (1)...(19): siRNA sense strand
gcaaucaggacuacaaaca

SEQ ID NO: 2046547 - RNA, 19 nt, Homo sapiens
  misc_RNA (1)...(19): siRNA sense strand
gagcaaacuucgagauggu

SEQ ID NO: 2046548 - RNA, 19 nt, Homo sapiens
  misc_RNA (1)...(19): siRNA sense strand
uauaagagcagcugggaaa

SEQ ID NO: 2046549 - RNA, 19 nt, Homo sapiens
  misc_RNA (1)...(19): siRNA sense strand
uaagagagggcaugaugaa

SEQ ID NO: 2046550 - RNA, 19 nt, Homo sapiens
  misc_RNA (1)...(19): siRNA sense strand
gaaggacuuugccaagagu

SEQ ID NO: 2046551 - RNA, 19 nt, Homo sapiens
  misc_RNA (1)...(19): siRNA sense strand
caaccugagugacgcaaga

SEQ ID NO: 2046552 - RNA, 19 nt, Homo sapiens
  misc_RNA (1)...(19): siRNA sense strand
gaacaaggagaaaacauaa

SEQ ID NO: 2046553 - RNA, 19 nt, Homo sapiens
  misc_RNA (1)...(19): siRNA sense strand
agagcgagcugcaguacaa

SEQ ID NO: 2046554 - RNA, 19 nt, Homo sapiens
  misc_RNA (1)...(19): siRNA sense strand
gagguuaaguauaaagaag

SEQ ID NO: 2046555 - RNA, 19 nt, Homo sapiens
  misc_RNA (1)...(19): siRNA sense strand
ucaaacagcuaugaaacug

SEQ ID NO: 2046556 - RNA, 19 nt, Homo sapiens
  misc_RNA (1)...(19): siRNA sense strand
gagcagugagguugaauau

SEQ ID NO: 2046557 - RNA, 19 nt, Homo sapiens
  misc_RNA (1)...(19): siRNA sense strand
agacacgaguauacaauga

SEQ ID NO: 2046558 - RNA, 19 nt, Homo sapiens
  misc_RNA (1)...(19): siRNA sense strand
gaaugagcgccucuauaaa

SEQ ID NO: 2046559 - RNA, 19 nt, Homo sapiens
  misc_RNA (1)...(19): siRNA sense strand
ugaauuaccgugcugacua

SEQ ID NO: 2046560 - RNA, 19 nt, Homo sapiens
  misc_RNA (1)...(19): siRNA sense strand
ucagugagacgcguuauaa

SEQ ID NO: 2046561 - RNA, 19 nt, Homo sapiens
  misc_RNA (1)...(19): siRNA sense strand
cugaagauaugaagacuca

SEQ ID NO: 2046562 - RNA, 19 nt, Homo sapiens
  misc_RNA (1)...(19): siRNA sense strand
ggagcgagggaaacucaua

SEQ ID NO: 2046563 - RNA, 19 nt, Homo sapiens
  misc_RNA (1)...(19): siRNA sense strand
ccaagaggcugcuggagau

SEQ ID NO: 2046564 - RNA, 19 nt, Homo sapiens
  misc_RNA (1)...(19): siRNA sense strand
gaagagggaugaggaugac

SEQ ID NO: 2046565 - RNA, 19 nt, Homo sapiens
  misc_RNA (1)...(19): siRNA sense strand
gcagcgcccagcagaugua

SEQ ID NO: 2046566 - RNA, 19 nt, Homo sapiens
  misc_RNA (1)...(19): siRNA sense strand
ggaguuugcccagaaagug

SEQ ID NO: 2046567 - RNA, 19 nt, Homo sapiens
  misc_RNA (1)...(19): siRNA sense strand
gggcuaagaagagggauga

SEQ ID NO: 2046568 - RNA, 19 nt, Homo sapiens
  misc_RNA (1)...(19): siRNA sense strand
acauguaccuggucaucga

SEQ ID NO: 2046569 - RNA, 19 nt, Homo sapiens
  misc_RNA (1)...(19): siRNA sense strand
agaagagggaugaggauga

SEQ ID NO: 2046570 - RNA, 19 nt, Homo sapiens
  misc_RNA (1)...(19): siRNA sense strand
gcucgaggacaacuacaug

SEQ ID NO: 2046571 - RNA, 19 nt, Homo sapiens
  misc_RNA (1)...(19): siRNA sense strand
ucgaggacaacuacaugua

SEQ ID NO: 2046572 - RNA, 19 nt, Homo sapiens
  misc_RNA (1)...(19): siRNA sense strand
aggaugacgugcccacugu

SEQ ID NO: 2046573 - RNA, 19 nt, Homo sapiens
  misc_RNA (1)...(19): siRNA sense strand
ccacugugccgucgacucu

SEQ ID NO: 2046574 - RNA, 19 nt, Homo sapiens
  misc_RNA (1)...(19): siRNA sense strand
gcuuagcaaccuggaguuu

SEQ ID NO: 2046575 - RNA, 19 nt, Homo sapiens
  misc_RNA (1)...(19): siRNA sense strand
uaagaagagggaugaggau

SEQ ID NO: 2046576 - RNA, 19 nt, Homo sapiens
  misc_RNA (1)...(19): siRNA sense strand
aagcuguccugggcuaaga

SEQ ID NO: 2046577 - RNA, 19 nt, Homo sapiens
  misc_RNA (1)...(19): siRNA sense strand
uggaggcgcuaugcaagga

SEQ ID NO: 2046578 - RNA, 19 nt, Homo sapiens
  misc_RNA (1)...(19): siRNA sense strand
ggccacgagcacacgcuua

SEQ ID NO: 2046579 - RNA, 19 nt, Homo sapiens
  misc_RNA (1)...(19): siRNA sense strand
cugcaacgaccacgugaga

SEQ ID NO: 2046580 - RNA, 19 nt, Homo sapiens
  misc_RNA (1)...(19): siRNA sense strand
agaaauagcucuccgguuu

SEQ ID NO: 2046581 - RNA, 19 nt, Homo sapiens
  misc_RNA (1)...(19): siRNA sense strand
ggaaggaauugcagaaaug

SEQ ID NO: 2046582 - RNA, 19 nt, Homo sapiens
  misc_RNA (1)...(19): siRNA sense strand
gcaacaaucucugauaaga

SEQ ID NO: 2046583 - RNA, 19 nt, Homo sapiens
  misc_RNA (1)...(19): siRNA sense strand
gaguauaucuuucaucaug

SEQ ID NO: 2046584 - RNA, 19 nt, Homo sapiens
  misc_RNA (1)...(19): siRNA sense strand
gaagacccauuacagguuu

SEQ ID NO: 2046585 - RNA, 19 nt, Homo sapiens
  misc_RNA (1)...(19): siRNA sense strand
gaaaugguauacauagaug

SEQ ID NO: 2046586 - RNA, 19 nt, Homo sapiens
  misc_RNA (1)...(19): siRNA sense strand
gcacgcagaugcuggagaa

SEQ ID NO: 2046587 - RNA, 19 nt, Homo sapiens
  misc_RNA (1)...(19): siRNA sense strand
gcaagaaucuaugaggaaa

SEQ ID NO: 2046588 - RNA, 19 nt, Homo sapiens
  misc_RNA (1)...(19): siRNA sense strand
ccaggcagcuuggaucuua

SEQ ID NO: 2046589 - RNA, 19 nt, Homo sapiens
  misc_RNA (1)...(19): siRNA sense strand
caagagcgcuaacagaaau

SEQ ID NO: 2046590 - RNA, 19 nt, Homo sapiens
  misc_RNA (1)...(19): siRNA sense strand
gaaacucccuggaacuaau

SEQ ID NO: 2046591 - RNA, 19 nt, Homo sapiens
  misc_RNA (1)...(19): siRNA sense strand
ggacacacaacauuuaauu

SEQ ID NO: 2046592 - RNA, 19 nt, Homo sapiens
  misc_RNA (1)...(19): siRNA sense strand
gaaaugaugcuggaugaaa

SEQ ID NO: 2046593 - RNA, 19 nt, Homo sapiens
  misc_RNA (1)...(19): siRNA sense strand
ggaauaggagauacaaauu

SEQ ID NO: 2046594 - RNA, 19 nt, Homo sapiens
  misc_RNA (1)...(19): siRNA sense strand
ggaacaggcuaucagaaca

SEQ ID NO: 2046595 - RNA, 19 nt, Homo sapiens
  misc_RNA (1)...(19): siRNA sense strand
gcaaccacuucuauucuga

SEQ ID NO: 2046596 - RNA, 19 nt, Homo sapiens
  misc_RNA (1)...(19): siRNA sense strand
cagaaaugaugcuggauga

SEQ ID NO: 2046597 - RNA, 19 nt, Homo sapiens
  misc_RNA (1)...(19): siRNA sense strand
gcaagggcacuauuacaaa

SEQ ID NO: 2046598 - RNA, 19 nt, Homo sapiens
  misc_RNA (1)...(19): siRNA sense strand
caucagcagcagaauauua

SEQ ID NO: 2046599 - RNA, 19 nt, Homo sapiens
  misc_RNA (1)...(19): siRNA sense strand
acauguagcugugggaaua

SEQ ID NO: 2046600 - RNA, 19 nt, Homo sapiens
  misc_RNA (1)...(19): siRNA sense strand
gcaagagcgcuaacagaaa

SEQ ID NO: 2046601 - RNA, 19 nt, Homo sapiens
  misc_RNA (1)...(19): siRNA sense strand
ggaaaugaacaauauguca

SEQ ID NO: 2046602 - RNA, 19 nt, Homo sapiens
  misc_RNA (1)...(19): siRNA sense strand
gaacgugcccuuucuuugg

SEQ ID NO: 2046603 - RNA, 19 nt, Homo sapiens
  misc_RNA (1)...(19): siRNA sense strand
ggaaaguacagauuggaaa

SEQ ID NO: 2046604 - RNA, 19 nt, Homo sapiens
  misc_RNA (1)...(19): siRNA sense strand
agacaauacucauguggaa

SEQ ID NO: 2046605 - RNA, 19 nt, Homo sapiens
  misc_RNA (1)...(19): siRNA sense strand
caaacugcaucaucauuag

SEQ ID NO: 2046606 - RNA, 19 nt, Homo sapiens
  misc_RNA (1)...(19): siRNA sense strand
ggaagacccauuacagguu

SEQ ID NO: 2046607 - RNA, 19 nt, Homo sapiens
  misc_RNA (1)...(19): siRNA sense strand
acaaacugcaucaucauua

SEQ ID NO: 2046608 - RNA, 19 nt, Homo sapiens
  misc_RNA (1)...(19): siRNA sense strand
gggaauaggagauacaaau

SEQ ID NO: 2046609 - RNA, 19 nt, Homo sapiens
  misc_RNA (1)...(19): siRNA sense strand
gggaauguaucgugaagca

SEQ ID NO: 2046610 - RNA, 19 nt, Homo sapiens
  misc_RNA (1)...(19): siRNA sense strand
ucaaacaaggcuuagauaa

SEQ ID NO: 2046611 - RNA, 19 nt, Homo sapiens
  misc_RNA (1)...(19): siRNA sense strand
gaaggaauugcagaaauga

SEQ ID NO: 2046612 - RNA, 19 nt, Homo sapiens
  misc_RNA (1)...(19): siRNA sense strand
uugcaacaaucucugauaa

SEQ ID NO: 2046613 - RNA, 19 nt, Homo sapiens
  misc_RNA (1)...(19): siRNA sense strand
caagcuggaagacccauua

SEQ ID NO: 2046614 - RNA, 19 nt, Homo sapiens
  misc_RNA (1)...(19): siRNA sense strand
cagaaaugguauacauaga

SEQ ID NO: 2046615 - RNA, 19 nt, Homo sapiens
  misc_RNA (1)...(19): siRNA sense strand
gaagccaucgcaugcauug

SEQ ID NO: 2046616 - RNA, 19 nt, Homo sapiens
  misc_RNA (1)...(19): siRNA sense strand
gauuggagaucugcagaga

SEQ ID NO: 2046617 - RNA, 19 nt, Homo sapiens
  misc_RNA (1)...(19): siRNA sense strand
gaauugcaagaaucuauga

SEQ ID NO: 2046618 - RNA, 19 nt, Homo sapiens
  misc_RNA (1)...(19): siRNA sense strand
auacaaauuuggcccauca

SEQ ID NO: 2046619 - RNA, 19 nt, Homo sapiens
  misc_RNA (1)...(19): siRNA sense strand
gaagucugaagcagcauuu

SEQ ID NO: 2046620 - RNA, 19 nt, Homo sapiens
  misc_RNA (1)...(19): siRNA sense strand
gaagcagcaggaaauggua

SEQ ID NO: 2046621 - RNA, 19 nt, Homo sapiens
  misc_RNA (1)...(19): siRNA sense strand
gaaccgcauuuuaauuuug

SEQ ID NO: 2046622 - RNA, 19 nt, Homo sapiens
  misc_RNA (1)...(19): siRNA sense strand
gaacaggcaagggcacuau

SEQ ID NO: 2046623 - RNA, 19 nt, Homo sapiens
  misc_RNA (1)...(19): siRNA sense strand
gcugaugucugguacaacu

SEQ ID NO: 2046624 - RNA, 19 nt, Homo sapiens
  misc_RNA (1)...(19): siRNA sense strand
gaggaaaugaacaauaugu

SEQ ID NO: 2046625 - RNA, 19 nt, Homo sapiens
  misc_RNA (1)...(19): siRNA sense strand
gugacugcuuuaaaucuuu

SEQ ID NO: 2046626 - RNA, 19 nt, Homo sapiens
  misc_RNA (1)...(19): siRNA sense strand
ggacuggugguggaaagua

SEQ ID NO: 2046627 - RNA, 19 nt, Homo sapiens
  misc_RNA (1)...(19): siRNA sense strand
gaaacaagacaauacucau

SEQ ID NO: 2046628 - RNA, 19 nt, Homo sapiens
  misc_RNA (1)...(19): siRNA sense strand
uaaguuuccaggagaagua

SEQ ID NO: 2046629 - RNA, 19 nt, Homo sapiens
  misc_RNA (1)...(19): siRNA sense strand
caagggcacuauuacaaac

SEQ ID NO: 2046630 - RNA, 19 nt, Homo sapiens
  misc_RNA (1)...(19): siRNA sense strand
ggcaagggcacuauuacaa

SEQ ID NO: 2046631 - RNA, 19 nt, Homo sapiens
  misc_RNA (1)...(19): siRNA sense strand
cagcagaauauuacaaaga

SEQ ID NO: 2046632 - RNA, 19 nt, Homo sapiens
  misc_RNA (1)...(19): siRNA sense strand
ggaauugcaagaaucuaug

SEQ ID NO: 2046633 - RNA, 19 nt, Homo sapiens
  misc_RNA (1)...(19): siRNA sense strand
cagcugaugucugguacaa

SEQ ID NO: 2046634 - RNA, 19 nt, Homo sapiens
  misc_RNA (1)...(19): siRNA sense strand
gaaucuaugaggaaaugaa

SEQ ID NO: 2046635 - RNA, 19 nt, Homo sapiens
  misc_RNA (1)...(19): siRNA sense strand
aagaaucuaugaggaaaug

SEQ ID NO: 2046636 - RNA, 19 nt, Homo sapiens
  misc_RNA (1)...(19): siRNA sense strand
aaacaagacaauacucaug

SEQ ID NO: 2046637 - RNA, 19 nt, Homo sapiens
  misc_RNA (1)...(19): siRNA sense strand
gcccagcaguaugauauga

SEQ ID NO: 2046638 - RNA, 19 nt, Homo sapiens
  misc_RNA (1)...(19): siRNA sense strand
ggaagggccacguugaaca

SEQ ID NO: 2046639 - RNA, 19 nt, Homo sapiens
  misc_RNA (1)...(19): siRNA sense strand
gcagcagaauauuacaaag

SEQ ID NO: 2046640 - RNA, 19 nt, Homo sapiens
  misc_RNA (1)...(19): siRNA sense strand
gcagaauauuacaaagaag

SEQ ID NO: 2046641 - RNA, 19 nt, Homo sapiens
  misc_RNA (1)...(19): siRNA sense strand
cagcuccuccggaagauuu

SEQ ID NO: 2046642 - RNA, 19 nt, Homo sapiens
  misc_RNA (1)...(19): siRNA sense strand
acaggcaagggcacuauua

SEQ ID NO: 2046643 - RNA, 19 nt, Homo sapiens
  misc_RNA (1)...(19): siRNA sense strand
gaaaguacagauuggaaaa

SEQ ID NO: 2046644 - RNA, 19 nt, Homo sapiens
  misc_RNA (1)...(19): siRNA sense strand
ugaaacaagacaauacuca

SEQ ID NO: 2046645 - RNA, 19 nt, Homo sapiens
  misc_RNA (1)...(19): siRNA sense strand
cugcagaugggcauuuaua

SEQ ID NO: 2046646 - RNA, 19 nt, Homo sapiens
  misc_RNA (1)...(19): siRNA sense strand
aaauagcucuccgguuuua

SEQ ID NO: 2046647 - RNA, 19 nt, Homo sapiens
  misc_RNA (1)...(19): siRNA sense strand
ggcaaaaguuuaugucuca

SEQ ID NO: 2046648 - RNA, 19 nt, Homo sapiens
  misc_RNA (1)...(19): siRNA sense strand
gcagagaagcuauguugcu

SEQ ID NO: 2046649 - RNA, 19 nt, Homo sapiens
  misc_RNA (1)...(19): siRNA sense strand
gcagaugggcauuuauaac

SEQ ID NO: 2046650 - RNA, 19 nt, Homo sapiens
  misc_RNA (1)...(19): siRNA sense strand
gucaucagcagcagaauau

SEQ ID NO: 2046651 - RNA, 19 nt, Homo sapiens
  misc_RNA (1)...(19): siRNA sense strand
gcuaucagaacacccagaa

SEQ ID NO: 2046652 - RNA, 19 nt, Homo sapiens
  misc_RNA (1)...(19): siRNA sense strand
gcucugcgccgaucuaugc

SEQ ID NO: 2046653 - RNA, 19 nt, Homo sapiens
  misc_RNA (1)...(19): siRNA sense strand
gaagaagaggcagcugaug

SEQ ID NO: 2046654 - RNA, 19 nt, Homo sapiens
  misc_RNA (1)...(19): siRNA sense strand
ccacuucuauucugaucag

SEQ ID NO: 2046655 - RNA, 19 nt, Homo sapiens
  misc_RNA (1)...(19): siRNA sense strand
aggaaggaauugcagaaau

SEQ ID NO: 2046656 - RNA, 19 nt, Homo sapiens
  misc_RNA (1)...(19): siRNA sense strand
gguggaaaguacagauugg

SEQ ID NO: 2046657 - RNA, 19 nt, Homo sapiens
  misc_RNA (1)...(19): siRNA sense strand
uggcugcccucuccacaga

SEQ ID NO: 2046658 - RNA, 19 nt, Homo sapiens
  misc_RNA (1)...(19): siRNA sense strand
gcggaagggccacguugaa

SEQ ID NO: 2046659 - RNA, 19 nt, Homo sapiens
  misc_RNA (1)...(19): siRNA sense strand
auuacaaacugcaucauca

SEQ ID NO: 2046660 - RNA, 19 nt, Homo sapiens
  misc_RNA (1)...(19): siRNA sense strand
cugcagagaagcuauguug

SEQ ID NO: 2046661 - RNA, 19 nt, Homo sapiens
  misc_RNA (1)...(19): siRNA sense strand
ggaaggccaggcacuaugg

SEQ ID NO: 2046662 - RNA, 19 nt, Homo sapiens
  misc_RNA (1)...(19): siRNA sense strand
guggacacacaacauuuaa

SEQ ID NO: 2046663 - RNA, 19 nt, Homo sapiens
  misc_RNA (1)...(19): siRNA sense strand
acucugaccucauuugaac

SEQ ID NO: 2046664 - RNA, 19 nt, Homo sapiens
  misc_RNA (1)...(19): siRNA sense strand
acaagacaauacucaugug

SEQ ID NO: 2046665 - RNA, 19 nt, Homo sapiens
  misc_RNA (1)...(19): siRNA sense strand
acagaaaugguauacauag

SEQ ID NO: 2046666 - RNA, 19 nt, Homo sapiens
  misc_RNA (1)...(19): siRNA sense strand
cagcaggaaaugguagaua

SEQ ID NO: 2046667 - RNA, 19 nt, Homo sapiens
  misc_RNA (1)...(19): siRNA sense strand
gcaggaaaugguagauaca

SEQ ID NO: 2046668 - RNA, 19 nt, Homo sapiens
  misc_RNA (1)...(19): siRNA sense strand
uuggagaucugcagagaag

SEQ ID NO: 2046669 - RNA, 19 nt, Homo sapiens
  misc_RNA (1)...(19): siRNA sense strand
gggcuguguugcuucuaug

SEQ ID NO: 2046670 - RNA, 19 nt, Homo sapiens
  misc_RNA (1)...(19): siRNA sense strand
gccaucgcaugcauuggaa

SEQ ID NO: 2046671 - RNA, 19 nt, Homo sapiens
  misc_RNA (1)...(19): siRNA sense strand
agauaaguuuccaggagaa

SEQ ID NO: 2046672 - RNA, 19 nt, Homo sapiens
  misc_RNA (1)...(19): siRNA sense strand
ugaaacucccuggaacuaa

SEQ ID NO: 2046673 - RNA, 19 nt, Homo sapiens
  misc_RNA (1)...(19): siRNA sense strand
ggcuggcucuggucaacaa

SEQ ID NO: 2046674 - RNA, 19 nt, Homo sapiens
  misc_RNA (1)...(19): siRNA sense strand
gaaauagcucuccgguuuu

SEQ ID NO: 2046675 - RNA, 19 nt, Homo sapiens
  misc_RNA (1)...(19): siRNA sense strand
ggaagccaucgcaugcauu

SEQ ID NO: 2046676 - RNA, 19 nt, Homo sapiens
  misc_RNA (1)...(19): siRNA sense strand
ugucaucagcagcagaaua

SEQ ID NO: 2046677 - RNA, 19 nt, Homo sapiens
  misc_RNA (1)...(19): siRNA sense strand
ugugacugcuuuaaaucuu

SEQ ID NO: 2046678 - RNA, 19 nt, Homo sapiens
  misc_RNA (1)...(19): siRNA sense strand
gcugugggaauaggagaua

SEQ ID NO: 2046679 - RNA, 19 nt, Homo sapiens
  misc_RNA (1)...(19): siRNA sense strand
gaagggccacguugaacag

SEQ ID NO: 2046680 - RNA, 19 nt, Homo sapiens
  misc_RNA (1)...(19): siRNA sense strand
agaaauagcucuccgguuu

SEQ ID NO: 2046681 - RNA, 19 nt, Homo sapiens
  misc_RNA (1)...(19): siRNA sense strand
ggaaggaauugcagaaaug

SEQ ID NO: 2046682 - RNA, 19 nt, Homo sapiens
  misc_RNA (1)...(19): siRNA sense strand
gcaacaaucucugauaaga

SEQ ID NO: 2046683 - RNA, 19 nt, Homo sapiens
  misc_RNA (1)...(19): siRNA sense strand
gaguauaucuuucaucaug

SEQ ID NO: 2046684 - RNA, 19 nt, Homo sapiens
  misc_RNA (1)...(19): siRNA sense strand
gaagacccauuacagguuu

SEQ ID NO: 2046685 - RNA, 19 nt, Homo sapiens
  misc_RNA (1)...(19): siRNA sense strand
gaaaugguauacauagaug

SEQ ID NO: 2046686 - RNA, 19 nt, Homo sapiens
  misc_RNA (1)...(19): siRNA sense strand
gcacgcagaugcuggagaa

SEQ ID NO: 2046687 - RNA, 19 nt, Homo sapiens
  misc_RNA (1)...(19): siRNA sense strand
gcaagaaucuaugaggaaa

SEQ ID NO: 2046688 - RNA, 19 nt, Homo sapiens
  misc_RNA (1)...(19): siRNA sense strand
ccaggcagcuuggaucuua

SEQ ID NO: 2046689 - RNA, 19 nt, Homo sapiens
  misc_RNA (1)...(19): siRNA sense strand
caagagcgcuaacagaaau

SEQ ID NO: 2046690 - RNA, 19 nt, Homo sapiens
  misc_RNA (1)...(19): siRNA sense strand
gaaacucccuggaacuaau

SEQ ID NO: 2046691 - RNA, 19 nt, Homo sapiens
  misc_RNA (1)...(19): siRNA sense strand
ggacacacaacauuuaauu

SEQ ID NO: 2046692 - RNA, 19 nt, Homo sapiens
  misc_RNA (1)...(19): siRNA sense strand
gaaaugaugcuggaugaaa

SEQ ID NO: 2046693 - RNA, 19 nt, Homo sapiens
  misc_RNA (1)...(19): siRNA sense strand
ggaauaggagauacaaauu

SEQ ID NO: 2046694 - RNA, 19 nt, Homo sapiens
  misc_RNA (1)...(19): siRNA sense strand
ggaacaggcuaucagaaca

SEQ ID NO: 2046695 - RNA, 19 nt, Homo sapiens
  misc_RNA (1)...(19): siRNA sense strand
gcaaccacuucuauucuga

SEQ ID NO: 2046696 - RNA, 19 nt, Homo sapiens
  misc_RNA (1)...(19): siRNA sense strand
cagaaaugaugcuggauga

SEQ ID NO: 2046697 - RNA, 19 nt, Homo sapiens
  misc_RNA (1)...(19): siRNA sense strand
gcaagggcacuauuacaaa

SEQ ID NO: 2046698 - RNA, 19 nt, Homo sapiens
  misc_RNA (1)...(19): siRNA sense strand
caucagcagcagaauauua

SEQ ID NO: 2046699 - RNA, 19 nt, Homo sapiens
  misc_RNA (1)...(19): siRNA sense strand
acauguagcugugggaaua

SEQ ID NO: 2046700 - RNA, 19 nt, Homo sapiens
  misc_RNA (1)...(19): siRNA sense strand
gcaagagcgcuaacagaaa

SEQ ID NO: 2046701 - RNA, 19 nt, Homo sapiens
  misc_RNA (1)...(19): siRNA sense strand
ggaaaugaacaauauguca

SEQ ID NO: 2046702 - RNA, 19 nt, Homo sapiens
  misc_RNA (1)...(19): siRNA sense strand
gaacgugcccuuucuuugg

SEQ ID NO: 2046703 - RNA, 19 nt, Homo sapiens
  misc_RNA (1)...(19): siRNA sense strand
ggaaaguacagauuggaaa

SEQ ID NO: 2046704 - RNA, 19 nt, Homo sapiens
  misc_RNA (1)...(19): siRNA sense strand
agacaauacucauguggaa

SEQ ID NO: 2046705 - RNA, 19 nt, Homo sapiens
  misc_RNA (1)...(19): siRNA sense strand
caaacugcaucaucauuag

SEQ ID NO: 2046706 - RNA, 19 nt, Homo sapiens
  misc_RNA (1)...(19): siRNA sense strand
ggaagacccauuacagguu

SEQ ID NO: 2046707 - RNA, 19 nt, Homo sapiens
  misc_RNA (1)...(19): siRNA sense strand
acaaacugcaucaucauua

SEQ ID NO: 2046708 - RNA, 19 nt, Homo sapiens
  misc_RNA (1)...(19): siRNA sense strand
gggaauaggagauacaaau

SEQ ID NO: 2046709 - RNA, 19 nt, Homo sapiens
  misc_RNA (1)...(19): siRNA sense strand
gggaauguaucgugaagca

SEQ ID NO: 2046710 - RNA, 19 nt, Homo sapiens
  misc_RNA (1)...(19): siRNA sense strand
ucaaacaaggcuuagauaa

SEQ ID NO: 2046711 - RNA, 19 nt, Homo sapiens
  misc_RNA (1)...(19): siRNA sense strand
gaaggaauugcagaaauga

SEQ ID NO: 2046712 - RNA, 19 nt, Homo sapiens
  misc_RNA (1)...(19): siRNA sense strand
uugcaacaaucucugauaa

SEQ ID NO: 2046713 - RNA, 19 nt, Homo sapiens
  misc_RNA (1)...(19): siRNA sense strand
caagcuggaagacccauua

SEQ ID NO: 2046714 - RNA, 19 nt, Homo sapiens
  misc_RNA (1)...(19): siRNA sense strand
cagaaaugguauacauaga

SEQ ID NO: 2046715 - RNA, 19 nt, Homo sapiens
  misc_RNA (1)...(19): siRNA sense strand
gaagccaucgcaugcauug

SEQ ID NO: 2046716 - RNA, 19 nt, Homo sapiens
  misc_RNA (1)...(19): siRNA sense strand
gauuggagaucugcagaga

SEQ ID NO: 2046717 - RNA, 19 nt, Homo sapiens
  misc_RNA (1)...(19): siRNA sense strand
gaauugcaagaaucuauga

SEQ ID NO: 2046718 - RNA, 19 nt, Homo sapiens
  misc_RNA (1)...(19): siRNA sense strand
auacaaauuuggcccauca

SEQ ID NO: 2046719 - RNA, 19 nt, Homo sapiens
  misc_RNA (1)...(19): siRNA sense strand
gaagucugaagcagcauuu

SEQ ID NO: 2046720 - RNA, 19 nt, Homo sapiens
  misc_RNA (1)...(19): siRNA sense strand
gaagcagcaggaaauggua

SEQ ID NO: 2046721 - RNA, 19 nt, Homo sapiens
  misc_RNA (1)...(19): siRNA sense strand
gaaccgcauuuuaauuuug

SEQ ID NO: 2046722 - RNA, 19 nt, Homo sapiens
  misc_RNA (1)...(19): siRNA sense strand
gaacaggcaagggcacuau

SEQ ID NO: 2046723 - RNA, 19 nt, Homo sapiens
  misc_RNA (1)...(19): siRNA sense strand
gcugaugucugguacaacu

SEQ ID NO: 2046724 - RNA, 19 nt, Homo sapiens
  misc_RNA (1)...(19): siRNA sense strand
gaggaaaugaacaauaugu

SEQ ID NO: 2046725 - RNA, 19 nt, Homo sapiens
  misc_RNA (1)...(19): siRNA sense strand
gugacugcuuuaaaucuuu

SEQ ID NO: 2046726 - RNA, 19 nt, Homo sapiens
  misc_RNA (1)...(19): siRNA sense strand
ggacuggugguggaaagua

SEQ ID NO: 2046727 - RNA, 19 nt, Homo sapiens
  misc_RNA (1)...(19): siRNA sense strand
gaaacaagacaauacucau

SEQ ID NO: 2046728 - RNA, 19 nt, Homo sapiens
  misc_RNA (1)...(19): siRNA sense strand
uaaguuuccaggagaagua

SEQ ID NO: 2046729 - RNA, 19 nt, Homo sapiens
  misc_RNA (1)...(19): siRNA sense strand
caagggcacuauuacaaac

SEQ ID NO: 2046730 - RNA, 19 nt, Homo sapiens
  misc_RNA (1)...(19): siRNA sense strand
ggcaagggcacuauuacaa

SEQ ID NO: 2046731 - RNA, 19 nt, Homo sapiens
  misc_RNA (1)...(19): siRNA sense strand
cagcagaauauuacaaaga

SEQ ID NO: 2046732 - RNA, 19 nt, Homo sapiens
  misc_RNA (1)...(19): siRNA sense strand
ggaauugcaagaaucuaug

SEQ ID NO: 2046733 - RNA, 19 nt, Homo sapiens
  misc_RNA (1)...(19): siRNA sense strand
cagcugaugucugguacaa

SEQ ID NO: 2046734 - RNA, 19 nt, Homo sapiens
  misc_RNA (1)...(19): siRNA sense strand
gaaucuaugaggaaaugaa

SEQ ID NO: 2046735 - RNA, 19 nt, Homo sapiens
  misc_RNA (1)...(19): siRNA sense strand
aagaaucuaugaggaaaug

SEQ ID NO: 2046736 - RNA, 19 nt, Homo sapiens
  misc_RNA (1)...(19): siRNA sense strand
aaacaagacaauacucaug

SEQ ID NO: 2046737 - RNA, 19 nt, Homo sapiens
  misc_RNA (1)...(19): siRNA sense strand
gcccagcaguaugauauga

SEQ ID NO: 2046738 - RNA, 19 nt, Homo sapiens
  misc_RNA (1)...(19): siRNA sense strand
ggaagggccacguugaaca

SEQ ID NO: 2046739 - RNA, 19 nt, Homo sapiens
  misc_RNA (1)...(19): siRNA sense strand
gcagcagaauauuacaaag

SEQ ID NO: 2046740 - RNA, 19 nt, Homo sapiens
  misc_RNA (1)...(19): siRNA sense strand
gcagaauauuacaaagaag

SEQ ID NO: 2046741 - RNA, 19 nt, Homo sapiens
  misc_RNA (1)...(19): siRNA sense strand
cagcuccuccggaagauuu

SEQ ID NO: 2046742 - RNA, 19 nt, Homo sapiens
  misc_RNA (1)...(19): siRNA sense strand
acaggcaagggcacuauua

SEQ ID NO: 2046743 - RNA, 19 nt, Homo sapiens
  misc_RNA (1)...(19): siRNA sense strand
gaaaguacagauuggaaaa

SEQ ID NO: 2046744 - RNA, 19 nt, Homo sapiens
  misc_RNA (1)...(19): siRNA sense strand
ugaaacaagacaauacuca

SEQ ID NO: 2046745 - RNA, 19 nt, Homo sapiens
  misc_RNA (1)...(19): siRNA sense strand
cugcagaugggcauuuaua

SEQ ID NO: 2046746 - RNA, 19 nt, Homo sapiens
  misc_RNA (1)...(19): siRNA sense strand
aaauagcucuccgguuuua

SEQ ID NO: 2046747 - RNA, 19 nt, Homo sapiens
  misc_RNA (1)...(19): siRNA sense strand
ggcaaaaguuuaugucuca

SEQ ID NO: 2046748 - RNA, 19 nt, Homo sapiens
  misc_RNA (1)...(19): siRNA sense strand
gcagagaagcuauguugcu

SEQ ID NO: 2046749 - RNA, 19 nt, Homo sapiens
  misc_RNA (1)...(19): siRNA sense strand
gcagaugggcauuuauaac

SEQ ID NO: 2046750 - RNA, 19 nt, Homo sapiens
  misc_RNA (1)...(19): siRNA sense strand
gucaucagcagcagaauau

SEQ ID NO: 2046751 - RNA, 19 nt, Homo sapiens
  misc_RNA (1)...(19): siRNA sense strand
gcuaucagaacacccagaa

SEQ ID NO: 2046752 - RNA, 19 nt, Homo sapiens
  misc_RNA (1)...(19): siRNA sense strand
gcucugcgccgaucuaugc

SEQ ID NO: 2046753 - RNA, 19 nt, Homo sapiens
  misc_RNA (1)...(19): siRNA sense strand
gaagaagaggcagcugaug

SEQ ID NO: 2046754 - RNA, 19 nt, Homo sapiens
  misc_RNA (1)...(19): siRNA sense strand
ccacuucuauucugaucag

SEQ ID NO: 2046755 - RNA, 19 nt, Homo sapiens
  misc_RNA (1)...(19): siRNA sense strand
aggaaggaauugcagaaau

SEQ ID NO: 2046756 - RNA, 19 nt, Homo sapiens
  misc_RNA (1)...(19): siRNA sense strand
gguggaaaguacagauugg

SEQ ID NO: 2046757 - RNA, 19 nt, Homo sapiens
  misc_RNA (1)...(19): siRNA sense strand
uggcugcccucuccacaga

SEQ ID NO: 2046758 - RNA, 19 nt, Homo sapiens
  misc_RNA (1)...(19): siRNA sense strand
gcggaagggccacguugaa

SEQ ID NO: 2046759 - RNA, 19 nt, Homo sapiens
  misc_RNA (1)...(19): siRNA sense strand
auuacaaacugcaucauca

SEQ ID NO: 2046760 - RNA, 19 nt, Homo sapiens
  misc_RNA (1)...(19): siRNA sense strand
cugcagagaagcuauguug

SEQ ID NO: 2046761 - RNA, 19 nt, Homo sapiens
  misc_RNA (1)...(19): siRNA sense strand
ggaaggccaggcacuaugg

SEQ ID NO: 2046762 - RNA, 19 nt, Homo sapiens
  misc_RNA (1)...(19): siRNA sense strand
guggacacacaacauuuaa

SEQ ID NO: 2046763 - RNA, 19 nt, Homo sapiens
  misc_RNA (1)...(19): siRNA sense strand
acucugaccucauuugaac

SEQ ID NO: 2046764 - RNA, 19 nt, Homo sapiens
  misc_RNA (1)...(19): siRNA sense strand
acaagacaauacucaugug

SEQ ID NO: 2046765 - RNA, 19 nt, Homo sapiens
  misc_RNA (1)...(19): siRNA sense strand
acagaaaugguauacauag

SEQ ID NO: 2046766 - RNA, 19 nt, Homo sapiens
  misc_RNA (1)...(19): siRNA sense strand
cagcaggaaaugguagaua

SEQ ID NO: 2046767 - RNA, 19 nt, Homo sapiens
  misc_RNA (1)...(19): siRNA sense strand
gcaggaaaugguagauaca

SEQ ID NO: 2046768 - RNA, 19 nt, Homo sapiens
  misc_RNA (1)...(19): siRNA sense strand
uuggagaucugcagagaag

SEQ ID NO: 2046769 - RNA, 19 nt, Homo sapiens
  misc_RNA (1)...(19): siRNA sense strand
gggcuguguugcuucuaug

SEQ ID NO: 2046770 - RNA, 19 nt, Homo sapiens
  misc_RNA (1)...(19): siRNA sense strand
gccaucgcaugcauuggaa

SEQ ID NO: 2046771 - RNA, 19 nt, Homo sapiens
  misc_RNA (1)...(19): siRNA sense strand
agauaaguuuccaggagaa

SEQ ID NO: 2046772 - RNA, 19 nt, Homo sapiens
  misc_RNA (1)...(19): siRNA sense strand
ugaaacucccuggaacuaa

SEQ ID NO: 2046773 - RNA, 19 nt, Homo sapiens
  misc_RNA (1)...(19): siRNA sense strand
ggcuggcucuggucaacaa

SEQ ID NO: 2046774 - RNA, 19 nt, Homo sapiens
  misc_RNA (1)...(19): siRNA sense strand
gaaauagcucuccgguuuu

SEQ ID NO: 2046775 - RNA, 19 nt, Homo sapiens
  misc_RNA (1)...(19): siRNA sense strand
ggaagccaucgcaugcauu

SEQ ID NO: 2046776 - RNA, 19 nt, Homo sapiens
  misc_RNA (1)...(19): siRNA sense strand
ugucaucagcagcagaaua

SEQ ID NO: 2046777 - RNA, 19 nt, Homo sapiens
  misc_RNA (1)...(19): siRNA sense strand
ugugacugcuuuaaaucuu

SEQ ID NO: 2046778 - RNA, 19 nt, Homo sapiens
  misc_RNA (1)...(19): siRNA sense strand
gcugugggaauaggagaua

SEQ ID NO: 2046779 - RNA, 19 nt, Homo sapiens
  misc_RNA (1)...(19): siRNA sense strand
gaagggccacguugaacag

SEQ ID NO: 2046780 - RNA, 19 nt, Homo sapiens
  misc_RNA (1)...(19): siRNA sense strand
agaaauagcucuccgguuu

SEQ ID NO: 2046781 - RNA, 19 nt, Homo sapiens
  misc_RNA (1)...(19): siRNA sense strand
ggaaggaauugcagaaaug

SEQ ID NO: 2046782 - RNA, 19 nt, Homo sapiens
  misc_RNA (1)...(19): siRNA sense strand
gcaacaaucucugauaaga

SEQ ID NO: 2046783 - RNA, 19 nt, Homo sapiens
  misc_RNA (1)...(19): siRNA sense strand
gaguauaucuuucaucaug

SEQ ID NO: 2046784 - RNA, 19 nt, Homo sapiens
  misc_RNA (1)...(19): siRNA sense strand
gaagacccauuacagguuu

SEQ ID NO: 2046785 - RNA, 19 nt, Homo sapiens
  misc_RNA (1)...(19): siRNA sense strand
gaaaugguauacauagaug

SEQ ID NO: 2046786 - RNA, 19 nt, Homo sapiens
  misc_RNA (1)...(19): siRNA sense strand
gcacgcagaugcuggagaa

SEQ ID NO: 2046787 - RNA, 19 nt, Homo sapiens
  misc_RNA (1)...(19): siRNA sense strand
gcaagaaucuaugaggaaa

SEQ ID NO: 2046788 - RNA, 19 nt, Homo sapiens
  misc_RNA (1)...(19): siRNA sense strand
ccaggcagcuuggaucuua

SEQ ID NO: 2046789 - RNA, 19 nt, Homo sapiens
  misc_RNA (1)...(19): siRNA sense strand
caagagcgcuaacagaaau

SEQ ID NO: 2046790 - RNA, 19 nt, Homo sapiens
  misc_RNA (1)...(19): siRNA sense strand
gaaacucccuggaacuaau

SEQ ID NO: 2046791 - RNA, 19 nt, Homo sapiens
  misc_RNA (1)...(19): siRNA sense strand
ggacacacaacauuuaauu

SEQ ID NO: 2046792 - RNA, 19 nt, Homo sapiens
  misc_RNA (1)...(19): siRNA sense strand
gaaaugaugcuggaugaaa

SEQ ID NO: 2046793 - RNA, 19 nt, Homo sapiens
  misc_RNA (1)...(19): siRNA sense strand
ggaauaggagauacaaauu

SEQ ID NO: 2046794 - RNA, 19 nt, Homo sapiens
  misc_RNA (1)...(19): siRNA sense strand
ggaacaggcuaucagaaca

SEQ ID NO: 2046795 - RNA, 19 nt, Homo sapiens
  misc_RNA (1)...(19): siRNA sense strand
gcaaccacuucuauucuga

SEQ ID NO: 2046796 - RNA, 19 nt, Homo sapiens
  misc_RNA (1)...(19): siRNA sense strand
cagaaaugaugcuggauga

SEQ ID NO: 2046797 - RNA, 19 nt, Homo sapiens
  misc_RNA (1)...(19): siRNA sense strand
gcaagggcacuauuacaaa

SEQ ID NO: 2046798 - RNA, 19 nt, Homo sapiens
  misc_RNA (1)...(19): siRNA sense strand
caucagcagcagaauauua

SEQ ID NO: 2046799 - RNA, 19 nt, Homo sapiens
  misc_RNA (1)...(19): siRNA sense strand
acauguagcugugggaaua

SEQ ID NO: 2046800 - RNA, 19 nt, Homo sapiens
  misc_RNA (1)...(19): siRNA sense strand
gcaagagcgcuaacagaaa

SEQ ID NO: 2046801 - RNA, 19 nt, Homo sapiens
  misc_RNA (1)...(19): siRNA sense strand
ggaaaugaacaauauguca

SEQ ID NO: 2046802 - RNA, 19 nt, Homo sapiens
  misc_RNA (1)...(19): siRNA sense strand
gaacgugcccuuucuuugg

SEQ ID NO: 2046803 - RNA, 19 nt, Homo sapiens
  misc_RNA (1)...(19): siRNA sense strand
ggaaaguacagauuggaaa

SEQ ID NO: 2046804 - RNA, 19 nt, Homo sapiens
  misc_RNA (1)...(19): siRNA sense strand
agacaauacucauguggaa

SEQ ID NO: 2046805 - RNA, 19 nt, Homo sapiens
  misc_RNA (1)...(19): siRNA sense strand
caaacugcaucaucauuag

SEQ ID NO: 2046806 - RNA, 19 nt, Homo sapiens
  misc_RNA (1)...(19): siRNA sense strand
ggaagacccauuacagguu

SEQ ID NO: 2046807 - RNA, 19 nt, Homo sapiens
  misc_RNA (1)...(19): siRNA sense strand
acaaacugcaucaucauua

SEQ ID NO: 2046808 - RNA, 19 nt, Homo sapiens
  misc_RNA (1)...(19): siRNA sense strand
gggaauaggagauacaaau

SEQ ID NO: 2046809 - RNA, 19 nt, Homo sapiens
  misc_RNA (1)...(19): siRNA sense strand
gggaauguaucgugaagca

SEQ ID NO: 2046810 - RNA, 19 nt, Homo sapiens
  misc_RNA (1)...(19): siRNA sense strand
ucaaacaaggcuuagauaa

SEQ ID NO: 2046811 - RNA, 19 nt, Homo sapiens
  misc_RNA (1)...(19): siRNA sense strand
gaaggaauugcagaaauga

SEQ ID NO: 2046812 - RNA, 19 nt, Homo sapiens
  misc_RNA (1)...(19): siRNA sense strand
uugcaacaaucucugauaa

SEQ ID NO: 2046813 - RNA, 19 nt, Homo sapiens
  misc_RNA (1)...(19): siRNA sense strand
caagcuggaagacccauua

SEQ ID NO: 2046814 - RNA, 19 nt, Homo sapiens
  misc_RNA (1)...(19): siRNA sense strand
cagaaaugguauacauaga

SEQ ID NO: 2046815 - RNA, 19 nt, Homo sapiens
  misc_RNA (1)...(19): siRNA sense strand
gaagccaucgcaugcauug

SEQ ID NO: 2046816 - RNA, 19 nt, Homo sapiens
  misc_RNA (1)...(19): siRNA sense strand
gauuggagaucugcagaga

SEQ ID NO: 2046817 - RNA, 19 nt, Homo sapiens
  misc_RNA (1)...(19): siRNA sense strand
gaauugcaagaaucuauga

SEQ ID NO: 2046818 - RNA, 19 nt, Homo sapiens
  misc_RNA (1)...(19): siRNA sense strand
auacaaauuuggcccauca

SEQ ID NO: 2046819 - RNA, 19 nt, Homo sapiens
  misc_RNA (1)...(19): siRNA sense strand
gaagucugaagcagcauuu

SEQ ID NO: 2046820 - RNA, 19 nt, Homo sapiens
  misc_RNA (1)...(19): siRNA sense strand
gaagcagcaggaaauggua

SEQ ID NO: 2046821 - RNA, 19 nt, Homo sapiens
  misc_RNA (1)...(19): siRNA sense strand
gaaccgcauuuuaauuuug

SEQ ID NO: 2046822 - RNA, 19 nt, Homo sapiens
  misc_RNA (1)...(19): siRNA sense strand
gaacaggcaagggcacuau

SEQ ID NO: 2046823 - RNA, 19 nt, Homo sapiens
  misc_RNA (1)...(19): siRNA sense strand
gcugaugucugguacaacu

SEQ ID NO: 2046824 - RNA, 19 nt, Homo sapiens
  misc_RNA (1)...(19): siRNA sense strand
gaggaaaugaacaauaugu

SEQ ID NO: 2046825 - RNA, 19 nt, Homo sapiens
  misc_RNA (1)...(19): siRNA sense strand
gugacugcuuuaaaucuuu

SEQ ID NO: 2046826 - RNA, 19 nt, Homo sapiens
  misc_RNA (1)...(19): siRNA sense strand
ggacuggugguggaaagua

SEQ ID NO: 2046827 - RNA, 19 nt, Homo sapiens
  misc_RNA (1)...(19): siRNA sense strand
gaaacaagacaauacucau

SEQ ID NO: 2046828 - RNA, 19 nt, Homo sapiens
  misc_RNA (1)...(19): siRNA sense strand
uaaguuuccaggagaagua

SEQ ID NO: 2046829 - RNA, 19 nt, Homo sapiens
  misc_RNA (1)...(19): siRNA sense strand
caagggcacuauuacaaac

SEQ ID NO: 2046830 - RNA, 19 nt, Homo sapiens
  misc_RNA (1)...(19): siRNA sense strand
ggcaagggcacuauuacaa

SEQ ID NO: 2046831 - RNA, 19 nt, Homo sapiens
  misc_RNA (1)...(19): siRNA sense strand
cagcagaauauuacaaaga

SEQ ID NO: 2046832 - RNA, 19 nt, Homo sapiens
  misc_RNA (1)...(19): siRNA sense strand
ggaauugcaagaaucuaug

SEQ ID NO: 2046833 - RNA, 19 nt, Homo sapiens
  misc_RNA (1)...(19): siRNA sense strand
cagcugaugucugguacaa

SEQ ID NO: 2046834 - RNA, 19 nt, Homo sapiens
  misc_RNA (1)...(19): siRNA sense strand
gaaucuaugaggaaaugaa

SEQ ID NO: 2046835 - RNA, 19 nt, Homo sapiens
  misc_RNA (1)...(19): siRNA sense strand
aagaaucuaugaggaaaug

SEQ ID NO: 2046836 - RNA, 19 nt, Homo sapiens
  misc_RNA (1)...(19): siRNA sense strand
aaacaagacaauacucaug

SEQ ID NO: 2046837 - RNA, 19 nt, Homo sapiens
  misc_RNA (1)...(19): siRNA sense strand
gcccagcaguaugauauga

SEQ ID NO: 2046838 - RNA, 19 nt, Homo sapiens
  misc_RNA (1)...(19): siRNA sense strand
ggaagggccacguugaaca

SEQ ID NO: 2046839 - RNA, 19 nt, Homo sapiens
  misc_RNA (1)...(19): siRNA sense strand
gcagcagaauauuacaaag

SEQ ID NO: 2046840 - RNA, 19 nt, Homo sapiens
  misc_RNA (1)...(19): siRNA sense strand
gcagaauauuacaaagaag

SEQ ID NO: 2046841 - RNA, 19 nt, Homo sapiens
  misc_RNA (1)...(19): siRNA sense strand
cagcuccuccggaagauuu

SEQ ID NO: 2046842 - RNA, 19 nt, Homo sapiens
  misc_RNA (1)...(19): siRNA sense strand
acaggcaagggcacuauua

SEQ ID NO: 2046843 - RNA, 19 nt, Homo sapiens
  misc_RNA (1)...(19): siRNA sense strand
gaaaguacagauuggaaaa

SEQ ID NO: 2046844 - RNA, 19 nt, Homo sapiens
  misc_RNA (1)...(19): siRNA sense strand
ugaaacaagacaauacuca

SEQ ID NO: 2046845 - RNA, 19 nt, Homo sapiens
  misc_RNA (1)...(19): siRNA sense strand
cugcagaugggcauuuaua

SEQ ID NO: 2046846 - RNA, 19 nt, Homo sapiens
  misc_RNA (1)...(19): siRNA sense strand
aaauagcucuccgguuuua

SEQ ID NO: 2046847 - RNA, 19 nt, Homo sapiens
  misc_RNA (1)...(19): siRNA sense strand
ggcaaaaguuuaugucuca

SEQ ID NO: 2046848 - RNA, 19 nt, Homo sapiens
  misc_RNA (1)...(19): siRNA sense strand
gcagagaagcuauguugcu

SEQ ID NO: 2046849 - RNA, 19 nt, Homo sapiens
  misc_RNA (1)...(19): siRNA sense strand
gcagaugggcauuuauaac

SEQ ID NO: 2046850 - RNA, 19 nt, Homo sapiens
  misc_RNA (1)...(19): siRNA sense strand
gucaucagcagcagaauau

SEQ ID NO: 2046851 - RNA, 19 nt, Homo sapiens
  misc_RNA (1)...(19): siRNA sense strand
gcuaucagaacacccagaa

SEQ ID NO: 2046852 - RNA, 19 nt, Homo sapiens
  misc_RNA (1)...(19): siRNA sense strand
gcucugcgccgaucuaugc

SEQ ID NO: 2046853 - RNA, 19 nt, Homo sapiens
  misc_RNA (1)...(19): siRNA sense strand
gaagaagaggcagcugaug

SEQ ID NO: 2046854 - RNA, 19 nt, Homo sapiens
  misc_RNA (1)...(19): siRNA sense strand
ccacuucuauucugaucag

SEQ ID NO: 2046855 - RNA, 19 nt, Homo sapiens
  misc_RNA (1)...(19): siRNA sense strand
aggaaggaauugcagaaau

SEQ ID NO: 2046856 - RNA, 19 nt, Homo sapiens
  misc_RNA (1)...(19): siRNA sense strand
gguggaaaguacagauugg

SEQ ID NO: 2046857 - RNA, 19 nt, Homo sapiens
  misc_RNA (1)...(19): siRNA sense strand
uggcugcccucuccacaga

SEQ ID NO: 2046858 - RNA, 19 nt, Homo sapiens
  misc_RNA (1)...(19): siRNA sense strand
gcggaagggccacguugaa

SEQ ID NO: 2046859 - RNA, 19 nt, Homo sapiens
  misc_RNA (1)...(19): siRNA sense strand
auuacaaacugcaucauca

SEQ ID NO: 2046860 - RNA, 19 nt, Homo sapiens
  misc_RNA (1)...(19): siRNA sense strand
cugcagagaagcuauguug

SEQ ID NO: 2046861 - RNA, 19 nt, Homo sapiens
  misc_RNA (1)...(19): siRNA sense strand
ggaaggccaggcacuaugg

SEQ ID NO: 2046862 - RNA, 19 nt, Homo sapiens
  misc_RNA (1)...(19): siRNA sense strand
guggacacacaacauuuaa

SEQ ID NO: 2046863 - RNA, 19 nt, Homo sapiens
  misc_RNA (1)...(19): siRNA sense strand
acucugaccucauuugaac

SEQ ID NO: 2046864 - RNA, 19 nt, Homo sapiens
  misc_RNA (1)...(19): siRNA sense strand
acaagacaauacucaugug

SEQ ID NO: 2046865 - RNA, 19 nt, Homo sapiens
  misc_RNA (1)...(19): siRNA sense strand
acagaaaugguauacauag

SEQ ID NO: 2046866 - RNA, 19 nt, Homo sapiens
  misc_RNA (1)...(19): siRNA sense strand
cagcaggaaaugguagaua

SEQ ID NO: 2046867 - RNA, 19 nt, Homo sapiens
  misc_RNA (1)...(19): siRNA sense strand
gcaggaaaugguagauaca

SEQ ID NO: 2046868 - RNA, 19 nt, Homo sapiens
  misc_RNA (1)...(19): siRNA sense strand
uuggagaucugcagagaag

SEQ ID NO: 2046869 - RNA, 19 nt, Homo sapiens
  misc_RNA (1)...(19): siRNA sense strand
gggcuguguugcuucuaug

SEQ ID NO: 2046870 - RNA, 19 nt, Homo sapiens
  misc_RNA (1)...(19): siRNA sense strand
gccaucgcaugcauuggaa

SEQ ID NO: 2046871 - RNA, 19 nt, Homo sapiens
  misc_RNA (1)...(19): siRNA sense strand
agauaaguuuccaggagaa

SEQ ID NO: 2046872 - RNA, 19 nt, Homo sapiens
  misc_RNA (1)...(19): siRNA sense strand
ugaaacucccuggaacuaa

SEQ ID NO: 2046873 - RNA, 19 nt, Homo sapiens
  misc_RNA (1)...(19): siRNA sense strand
ggcuggcucuggucaacaa

SEQ ID NO: 2046874 - RNA, 19 nt, Homo sapiens
  misc_RNA (1)...(19): siRNA sense strand
gaaauagcucuccgguuuu

SEQ ID NO: 2046875 - RNA, 19 nt, Homo sapiens
  misc_RNA (1)...(19): siRNA sense strand
ggaagccaucgcaugcauu

SEQ ID NO: 2046876 - RNA, 19 nt, Homo sapiens
  misc_RNA (1)...(19): siRNA sense strand
ugucaucagcagcagaaua

SEQ ID NO: 2046877 - RNA, 19 nt, Homo sapiens
  misc_RNA (1)...(19): siRNA sense strand
ugugacugcuuuaaaucuu

SEQ ID NO: 2046878 - RNA, 19 nt, Homo sapiens
  misc_RNA (1)...(19): siRNA sense strand
gcugugggaauaggagaua

SEQ ID NO: 2046879 - RNA, 19 nt, Homo sapiens
  misc_RNA (1)...(19): siRNA sense strand
gaagggccacguugaacag

SEQ ID NO: 2046880 - RNA, 19 nt, Homo sapiens
  misc_RNA (1)...(19): siRNA sense strand
gggaaugucuccaaucaau

SEQ ID NO: 2046881 - RNA, 19 nt, Homo sapiens
  misc_RNA (1)...(19): siRNA sense strand
gaaugucuccaaucaauuu

SEQ ID NO: 2046882 - RNA, 19 nt, Homo sapiens
  misc_RNA (1)...(19): siRNA sense strand
ccaguuacuuccuaccuua

SEQ ID NO: 2046883 - RNA, 19 nt, Homo sapiens
  misc_RNA (1)...(19): siRNA sense strand
gcaccuggcucucuugcuu

SEQ ID NO: 2046884 - RNA, 19 nt, Homo sapiens
  misc_RNA (1)...(19): siRNA sense strand
gagagcaucaugaggaaua

SEQ ID NO: 2046885 - RNA, 19 nt, Homo sapiens
  misc_RNA (1)...(19): siRNA sense strand
ggaagaaugugggcgcuau

SEQ ID NO: 2046886 - RNA, 19 nt, Homo sapiens
  misc_RNA (1)...(19): siRNA sense strand
ggaauagcccggagauaau

SEQ ID NO: 2046887 - RNA, 19 nt, Homo sapiens
  misc_RNA (1)...(19): siRNA sense strand
ggagagggacacagucuga

SEQ ID NO: 2046888 - RNA, 19 nt, Homo sapiens
  misc_RNA (1)...(19): siRNA sense strand
uggaauagcccggagauaa

SEQ ID NO: 2046889 - RNA, 19 nt, Homo sapiens
  misc_RNA (1)...(19): siRNA sense strand
gugggaaugucuccaauca

SEQ ID NO: 2046890 - RNA, 19 nt, Homo sapiens
  misc_RNA (1)...(19): siRNA sense strand
gaucaugguggaagaaugu

SEQ ID NO: 2046891 - RNA, 19 nt, Homo sapiens
  misc_RNA (1)...(19): siRNA sense strand
ggagauaaugcaaacaugu

SEQ ID NO: 2046892 - RNA, 19 nt, Homo sapiens
  misc_RNA (1)...(19): siRNA sense strand
gaauagcccggagauaaug

SEQ ID NO: 2046893 - RNA, 19 nt, Homo sapiens
  misc_RNA (1)...(19): siRNA sense strand
ggaaugucuccaaucaauu

SEQ ID NO: 2046894 - RNA, 19 nt, Homo sapiens
  misc_RNA (1)...(19): siRNA sense strand
gagauaaugcaaacaugug

SEQ ID NO: 2046895 - RNA, 19 nt, Homo sapiens
  misc_RNA (1)...(19): siRNA sense strand
gaccauugccucaaaccuu

SEQ ID NO: 2046896 - RNA, 19 nt, Homo sapiens
  misc_RNA (1)...(19): siRNA sense strand
ugaccaguucuaccaguua

SEQ ID NO: 2046897 - RNA, 19 nt, Homo sapiens
  misc_RNA (1)...(19): siRNA sense strand
uaccaauucuuaugcuaug

SEQ ID NO: 2046898 - RNA, 19 nt, Homo sapiens
  misc_RNA (1)...(19): siRNA sense strand
ggagcagccugaccauggu

SEQ ID NO: 2046899 - RNA, 19 nt, Homo sapiens
  misc_RNA (1)...(19): siRNA sense strand
ccaaucaauuucaguuagg

SEQ ID NO: 2046900 - RNA, 19 nt, Homo sapiens
  misc_RNA (1)...(19): siRNA sense strand
gccuuccugucccuuguua

SEQ ID NO: 2046901 - RNA, 19 nt, Homo sapiens
  misc_RNA (1)...(19): siRNA sense strand
gacacagucugaucauggu

SEQ ID NO: 2046902 - RNA, 19 nt, Homo sapiens
  misc_RNA (1)...(19): siRNA sense strand
guuggagggcugcugauaa

SEQ ID NO: 2046903 - RNA, 19 nt, Homo sapiens
  misc_RNA (1)...(19): siRNA sense strand
cuaccuuacuggcucuuug

SEQ ID NO: 2046904 - RNA, 19 nt, Homo sapiens
  misc_RNA (1)...(19): siRNA sense strand
cggcuuggcugggccuauu

SEQ ID NO: 2046905 - RNA, 19 nt, Homo sapiens
  misc_RNA (1)...(19): siRNA sense strand
ggaagccagugucauucag

SEQ ID NO: 2046906 - RNA, 19 nt, Homo sapiens
  misc_RNA (1)...(19): siRNA sense strand
caugggagcagcgcaguuu

SEQ ID NO: 2046907 - RNA, 19 nt, Homo sapiens
  misc_RNA (1)...(19): siRNA sense strand
gagcagcugcagccauguu

SEQ ID NO: 2046908 - RNA, 19 nt, Homo sapiens
  misc_RNA (1)...(19): siRNA sense strand
gcugugccuuauacccuuu

SEQ ID NO: 2046909 - RNA, 19 nt, Homo sapiens
  misc_RNA (1)...(19): siRNA sense strand
gagggacacagucugauca

SEQ ID NO: 2046910 - RNA, 19 nt, Homo sapiens
  misc_RNA (1)...(19): siRNA sense strand
uggagagcaucaugaggaa

SEQ ID NO: 2046911 - RNA, 19 nt, Homo sapiens
  misc_RNA (1)...(19): siRNA sense strand
gcccggagauaaugcaaac

SEQ ID NO: 2046912 - RNA, 19 nt, Homo sapiens
  misc_RNA (1)...(19): siRNA sense strand
gugaccaguucuaccaguu

SEQ ID NO: 2046913 - RNA, 19 nt, Homo sapiens
  misc_RNA (1)...(19): siRNA sense strand
gaccaguucuaccaguuac

SEQ ID NO: 2046914 - RNA, 19 nt, Homo sapiens
  misc_RNA (1)...(19): siRNA sense strand
cuuaugcuauggagcuuga

SEQ ID NO: 2046915 - RNA, 19 nt, Homo sapiens
  misc_RNA (1)...(19): siRNA sense strand
gaagaaugugggcgcuaug

SEQ ID NO: 2046916 - RNA, 19 nt, Homo sapiens
  misc_RNA (1)...(19): siRNA sense strand
gggaagccagugucauuca

SEQ ID NO: 2046917 - RNA, 19 nt, Homo sapiens
  misc_RNA (1)...(19): siRNA sense strand
cggagauaaugcaaacaug

SEQ ID NO: 2046918 - RNA, 19 nt, Homo sapiens
  misc_RNA (1)...(19): siRNA sense strand
uccaaucaauuucaguuag

SEQ ID NO: 2046919 - RNA, 19 nt, Homo sapiens
  misc_RNA (1)...(19): siRNA sense strand
ccccaagccugucauauug

SEQ ID NO: 2046920 - RNA, 19 nt, Homo sapiens
  misc_RNA (1)...(19): siRNA sense strand
gggacacagucugaucaug

SEQ ID NO: 2046921 - RNA, 19 nt, Homo sapiens
  misc_RNA (1)...(19): siRNA sense strand
uggcugggccuauuacugu

SEQ ID NO: 2046922 - RNA, 19 nt, Homo sapiens
  misc_RNA (1)...(19): siRNA sense strand
uuggagggcugcugauaag

SEQ ID NO: 2046923 - RNA, 19 nt, Homo sapiens
  misc_RNA (1)...(19): siRNA sense strand
gcgcuaugccagcuucaau

SEQ ID NO: 2046924 - RNA, 19 nt, Homo sapiens
  misc_RNA (1)...(19): siRNA sense strand
ggagcagcgcaguuuguug

SEQ ID NO: 2046925 - RNA, 19 nt, Homo sapiens
  misc_RNA (1)...(19): siRNA sense strand
gggagcagcgcaguuuguu

SEQ ID NO: 2046926 - RNA, 19 nt, Homo sapiens
  misc_RNA (1)...(19): siRNA sense strand
gggccuuccugucccuugu

SEQ ID NO: 2046927 - RNA, 19 nt, Homo sapiens
  misc_RNA (1)...(19): siRNA sense strand
gauggaauagcccggagau

SEQ ID NO: 2046928 - RNA, 19 nt, Homo sapiens
  misc_RNA (1)...(19): siRNA sense strand
caaucaauuucaguuaggu

SEQ ID NO: 2046929 - RNA, 19 nt, Homo sapiens
  misc_RNA (1)...(19): siRNA sense strand
ucauauugguggagagcau

SEQ ID NO: 2046930 - RNA, 19 nt, Homo sapiens
  misc_RNA (1)...(19): siRNA sense strand
ugaucaugguggaagaaug

SEQ ID NO: 2046931 - RNA, 19 nt, Homo sapiens
  misc_RNA (1)...(19): siRNA sense strand
gaucugcaccuggcucucu

SEQ ID NO: 2046932 - RNA, 19 nt, Homo sapiens
  misc_RNA (1)...(19): siRNA sense strand
gcagcugcagccauguuga

SEQ ID NO: 2046933 - RNA, 19 nt, Homo sapiens
  misc_RNA (1)...(19): siRNA sense strand
augcaaacaugugggaaug

SEQ ID NO: 2046934 - RNA, 19 nt, Homo sapiens
  misc_RNA (1)...(19): siRNA sense strand
gcugugaccaguucuacca

SEQ ID NO: 2046935 - RNA, 19 nt, Homo sapiens
  misc_RNA (1)...(19): siRNA sense strand
caaggaagcuguacaugca

SEQ ID NO: 2046936 - RNA, 19 nt, Homo sapiens
  misc_RNA (1)...(19): siRNA sense strand
ccaaggaccuggagacacu

SEQ ID NO: 2046937 - RNA, 19 nt, Homo sapiens
  misc_RNA (1)...(19): siRNA sense strand
gaucgucaacaacaaguuu

SEQ ID NO: 2046938 - RNA, 19 nt, Homo sapiens
  misc_RNA (1)...(19): siRNA sense strand
uacaaagcaucgugugaga

SEQ ID NO: 2046939 - RNA, 19 nt, Homo sapiens
  misc_RNA (1)...(19): siRNA sense strand
caaagcaucgugugagauc

SEQ ID NO: 2046940 - RNA, 19 nt, Homo sapiens
  misc_RNA (1)...(19): siRNA sense strand
cgcagaagcugaucaugca

SEQ ID NO: 2046941 - RNA, 19 nt, Homo sapiens
  misc_RNA (1)...(19): siRNA sense strand
gaccagggcaacuuuguca

SEQ ID NO: 2046942 - RNA, 19 nt, Homo sapiens
  misc_RNA (1)...(19): siRNA sense strand
ugugagauccgcgugcuua

SEQ ID NO: 2046943 - RNA, 19 nt, Homo sapiens
  misc_RNA (1)...(19): siRNA sense strand
gagaagcgcagacccuacu

SEQ ID NO: 2046944 - RNA, 19 nt, Homo sapiens
  misc_RNA (1)...(19): siRNA sense strand
gagauccgcgugcuuaugc

SEQ ID NO: 2046945 - RNA, 19 nt, Homo sapiens
  misc_RNA (1)...(19): siRNA sense strand
ccagagcggcuucgucagu

SEQ ID NO: 2046946 - RNA, 19 nt, Homo sapiens
  misc_RNA (1)...(19): siRNA sense strand
caguccagaucgucaacaa

SEQ ID NO: 2046947 - RNA, 19 nt, Homo sapiens
  misc_RNA (1)...(19): siRNA sense strand
guccagaucgucaacaaca

SEQ ID NO: 2046948 - RNA, 19 nt, Homo sapiens
  misc_RNA (1)...(19): siRNA sense strand
ggagcaggagcaacagcaa

SEQ ID NO: 2046949 - RNA, 19 nt, Homo sapiens
  misc_RNA (1)...(19): siRNA sense strand
caguuccacuucaccaaca

SEQ ID NO: 2046950 - RNA, 19 nt, Homo sapiens
  misc_RNA (1)...(19): siRNA sense strand
ccaugaccagggcaacuuu

SEQ ID NO: 2046951 - RNA, 19 nt, Homo sapiens
  misc_RNA (1)...(19): siRNA sense strand
gaccuggagacacugaaga

SEQ ID NO: 2046952 - RNA, 19 nt, Homo sapiens
  misc_RNA (1)...(19): siRNA sense strand
aaucuucauuggccucauc

SEQ ID NO: 2046953 - RNA, 19 nt, Homo sapiens
  misc_RNA (1)...(19): siRNA sense strand
gagaugugcugcgauuaua

SEQ ID NO: 2046954 - RNA, 19 nt, Homo sapiens
  misc_RNA (1)...(19): siRNA sense strand
gcagaauacucauccaaga

SEQ ID NO: 2046955 - RNA, 19 nt, Homo sapiens
  misc_RNA (1)...(19): siRNA sense strand
ggaagaaggccuccagcua

SEQ ID NO: 2046956 - RNA, 19 nt, Homo sapiens
  misc_RNA (1)...(19): siRNA sense strand
ugaacauccuggagaaaua

SEQ ID NO: 2046957 - RNA, 19 nt, Homo sapiens
  misc_RNA (1)...(19): siRNA sense strand
gaugauaugcugcagcuuu

SEQ ID NO: 2046958 - RNA, 19 nt, Homo sapiens
  misc_RNA (1)...(19): siRNA sense strand
gcucagaacugcccuacgu

SEQ ID NO: 2046959 - RNA, 19 nt, Homo sapiens
  misc_RNA (1)...(19): siRNA sense strand
gcgauuauauggcuacaca

SEQ ID NO: 2046960 - RNA, 19 nt, Homo sapiens
  misc_RNA (1)...(19): siRNA sense strand
aagacaagguugaagauga

SEQ ID NO: 2046961 - RNA, 19 nt, Homo sapiens
  misc_RNA (1)...(19): siRNA sense strand
ugccagagcuguaccuuug

SEQ ID NO: 2046962 - RNA, 19 nt, Homo sapiens
  misc_RNA (1)...(19): siRNA sense strand
gcuguaccuuugagaauga

SEQ ID NO: 2046963 - RNA, 19 nt, Homo sapiens
  misc_RNA (1)...(19): siRNA sense strand
gcacugcccauccuguaaa

SEQ ID NO: 2046964 - RNA, 19 nt, Homo sapiens
  misc_RNA (1)...(19): siRNA sense strand
agucaagucugguacugua

SEQ ID NO: 2046965 - RNA, 19 nt, Homo sapiens
  misc_RNA (1)...(19): siRNA sense strand
uggagcagcuguuggaaga

SEQ ID NO: 2046966 - RNA, 19 nt, Homo sapiens
  misc_RNA (1)...(19): siRNA sense strand
ggcguggugucaaguuuaa

SEQ ID NO: 2046967 - RNA, 19 nt, Homo sapiens
  misc_RNA (1)...(19): siRNA sense strand
gcugcagcuuucagaauuu

SEQ ID NO: 2046968 - RNA, 19 nt, Homo sapiens
  misc_RNA (1)...(19): siRNA sense strand
gccgagaugugcugcgauu

SEQ ID NO: 2046969 - RNA, 19 nt, Homo sapiens
  misc_RNA (1)...(19): siRNA sense strand
agacaagguugaagaugau

SEQ ID NO: 2046970 - RNA, 19 nt, Homo sapiens
  misc_RNA (1)...(19): siRNA sense strand
uaugccagcucuuuggaaa

SEQ ID NO: 2046971 - RNA, 19 nt, Homo sapiens
  misc_RNA (1)...(19): siRNA sense strand
gaaggccuccagcuaguga

SEQ ID NO: 2046972 - RNA, 19 nt, Homo sapiens
  misc_RNA (1)...(19): siRNA sense strand
guacuggcguggugucaag

SEQ ID NO: 2046973 - RNA, 19 nt, Homo sapiens
  misc_RNA (1)...(19): siRNA sense strand
ccuagaaccugaucuugca

SEQ ID NO: 2046974 - RNA, 19 nt, Homo sapiens
  misc_RNA (1)...(19): siRNA sense strand
ccugugccaugcuaaauga

SEQ ID NO: 2046975 - RNA, 19 nt, Homo sapiens
  misc_RNA (1)...(19): siRNA sense strand
gagcagcuguuggaagaca

SEQ ID NO: 2046976 - RNA, 19 nt, Homo sapiens
  misc_RNA (1)...(19): siRNA sense strand
ggaagacaagguugaagau

SEQ ID NO: 2046977 - RNA, 19 nt, Homo sapiens
  misc_RNA (1)...(19): siRNA sense strand
caagucugguacuguauuc

SEQ ID NO: 2046978 - RNA, 19 nt, Homo sapiens
  misc_RNA (1)...(19): siRNA sense strand
gauuauauggcuacacaga

SEQ ID NO: 2046979 - RNA, 19 nt, Homo sapiens
  misc_RNA (1)...(19): siRNA sense strand
gaagacaagguugaagaug

SEQ ID NO: 2046980 - RNA, 19 nt, Homo sapiens
  misc_RNA (1)...(19): siRNA sense strand
gagcuguaccuuugagaau

SEQ ID NO: 2046981 - RNA, 19 nt, Homo sapiens
  misc_RNA (1)...(19): siRNA sense strand
cgagaugugcugcgauuau

SEQ ID NO: 2046982 - RNA, 19 nt, Homo sapiens
  misc_RNA (1)...(19): siRNA sense strand
gagcucagccugcuauugc

SEQ ID NO: 2046983 - RNA, 19 nt, Homo sapiens
  misc_RNA (1)...(19): siRNA sense strand
ggugguggauucccgagau

SEQ ID NO: 2046984 - RNA, 19 nt, Homo sapiens
  misc_RNA (1)...(19): siRNA sense strand
gaugugcugcgauuauaug

SEQ ID NO: 2046985 - RNA, 19 nt, Homo sapiens
  misc_RNA (1)...(19): siRNA sense strand
gagaagcagcgccaagaca

SEQ ID NO: 2046986 - RNA, 19 nt, Homo sapiens
  misc_RNA (1)...(19): siRNA sense strand
gaacauccuggagaaauac

SEQ ID NO: 2046987 - RNA, 19 nt, Homo sapiens
  misc_RNA (1)...(19): siRNA sense strand
ccagguugcuacagucaca

SEQ ID NO: 2046988 - RNA, 19 nt, Homo sapiens
  misc_RNA (1)...(19): siRNA sense strand
ggcaggaggagccagauga

SEQ ID NO: 2046989 - RNA, 19 nt, Homo sapiens
  misc_RNA (1)...(19): siRNA sense strand
guggagauccugagaagca

SEQ ID NO: 2046990 - RNA, 19 nt, Homo sapiens
  misc_RNA (1)...(19): siRNA sense strand
cguggugucaaguuuaaua

SEQ ID NO: 2046991 - RNA, 19 nt, Homo sapiens
  misc_RNA (1)...(19): siRNA sense strand
aagaaggccuccagcuagu

SEQ ID NO: 2046992 - RNA, 19 nt, Homo sapiens
  misc_RNA (1)...(19): siRNA sense strand
ugcugcagcuuucagaauu

SEQ ID NO: 2046993 - RNA, 19 nt, Homo sapiens
  misc_RNA (1)...(19): siRNA sense strand
caagguugaagaugauaug

SEQ ID NO: 2046994 - RNA, 19 nt, Homo sapiens
  misc_RNA (1)...(19): siRNA sense strand
ccagcuuggugguggauuc

SEQ ID NO: 2046995 - RNA, 19 nt, Homo sapiens
  misc_RNA (1)...(19): siRNA sense strand
aagacaagaugcgggaaga

SEQ ID NO: 2046996 - RNA, 19 nt, Homo sapiens
  misc_RNA (1)...(19): siRNA sense strand
ggguguguguuaugugcaa

SEQ ID NO: 2046997 - RNA, 19 nt, Homo sapiens
  misc_RNA (1)...(19): siRNA sense strand
uguauucacuguaccuucu

SEQ ID NO: 2046998 - RNA, 19 nt, Homo sapiens
  misc_RNA (1)...(19): siRNA sense strand
ccacggcucugaacauccu

SEQ ID NO: 2046999 - RNA, 19 nt, Homo sapiens
  misc_RNA (1)...(19): siRNA sense strand
ucaagucugguacuguauu

SEQ ID NO: 2047000 - RNA, 19 nt, Homo sapiens
  misc_RNA (1)...(19): siRNA sense strand
agaagcagcgccaagacaa

SEQ ID NO: 2047001 - RNA, 19 nt, Homo sapiens
  misc_RNA (1)...(19): siRNA sense strand
uuaauaacccugucuuucg

SEQ ID NO: 2047002 - RNA, 19 nt, Homo sapiens
  misc_RNA (1)...(19): siRNA sense strand
gcuguuggaagacaagguu

SEQ ID NO: 2047003 - RNA, 19 nt, Homo sapiens
  misc_RNA (1)...(19): siRNA sense strand
gaagcagcgccaagacaag

SEQ ID NO: 2047004 - RNA, 19 nt, Homo sapiens
  misc_RNA (1)...(19): siRNA sense strand
ccagagcuguaccuuugag

SEQ ID NO: 2047005 - RNA, 19 nt, Homo sapiens
  misc_RNA (1)...(19): siRNA sense strand
uggaagacaagguugaaga

SEQ ID NO: 2047006 - RNA, 19 nt, Homo sapiens
  misc_RNA (1)...(19): siRNA sense strand
cgucauggcaaccuugaug

SEQ ID NO: 2047007 - RNA, 19 nt, Homo sapiens
  misc_RNA (1)...(19): siRNA sense strand
ggugucaaguuuaauaacc

SEQ ID NO: 2047008 - RNA, 19 nt, Homo sapiens
  misc_RNA (1)...(19): siRNA sense strand
agaauacucauccaagaca

SEQ ID NO: 2047009 - RNA, 19 nt, Homo sapiens
  misc_RNA (1)...(19): siRNA sense strand
guuuaauaacccugucuuu

SEQ ID NO: 2047010 - RNA, 19 nt, Homo sapiens
  misc_RNA (1)...(19): siRNA sense strand
guccacggcucugaacauc

SEQ ID NO: 2047011 - RNA, 19 nt, Homo sapiens
  misc_RNA (1)...(19): siRNA sense strand
gacaagaugcgggaagaag

SEQ ID NO: 2047012 - RNA, 19 nt, Homo sapiens
  misc_RNA (1)...(19): siRNA sense strand
guggugucaaguuuaauaa

SEQ ID NO: 2047013 - RNA, 19 nt, Homo sapiens
  misc_RNA (1)...(19): siRNA sense strand
gacaagguugaagaugaua

SEQ ID NO: 2047014 - RNA, 19 nt, Homo sapiens
  misc_RNA (1)...(19): siRNA sense strand
gcagugguugcgcucagaa

SEQ ID NO: 2047015 - RNA, 19 nt, Homo sapiens
  misc_RNA (1)...(19): siRNA sense strand
ucucggcucugcaguacuc

SEQ ID NO: 2047016 - RNA, 19 nt, Homo sapiens
  misc_RNA (1)...(19): siRNA sense strand
cugcagcuuucagaauuug

SEQ ID NO: 2047017 - RNA, 19 nt, Homo sapiens
  misc_RNA (1)...(19): siRNA sense strand
ggaucgucauggcaaccuu

SEQ ID NO: 2047018 - RNA, 19 nt, Homo sapiens
  misc_RNA (1)...(19): siRNA sense strand
uggcguggugucaaguuua

SEQ ID NO: 2047019 - RNA, 19 nt, Homo sapiens
  misc_RNA (1)...(19): siRNA sense strand
acagagcucagccugcuau

SEQ ID NO: 2047020 - RNA, 19 nt, Homo sapiens
  misc_RNA (1)...(19): siRNA sense strand
cacuguaccuucugcaacu

SEQ ID NO: 2047021 - RNA, 19 nt, Homo sapiens
  misc_RNA (1)...(19): siRNA sense strand
ggaacuggaggccuagaac

SEQ ID NO: 2047022 - RNA, 19 nt, Homo sapiens
  misc_RNA (1)...(19): siRNA sense strand
ggacagagaugauuauuau

SEQ ID NO: 2047023 - RNA, 19 nt, Homo sapiens
  misc_RNA (1)...(19): siRNA sense strand
gaaaucaucucccuuuaaa

SEQ ID NO: 2047024 - RNA, 19 nt, Homo sapiens
  misc_RNA (1)...(19): siRNA sense strand
gaagaaagauacaaagaga

SEQ ID NO: 2047025 - RNA, 19 nt, Homo sapiens
  misc_RNA (1)...(19): siRNA sense strand
gaacagcaaugauaucuuc

SEQ ID NO: 2047026 - RNA, 19 nt, Homo sapiens
  misc_RNA (1)...(19): siRNA sense strand
ggaaauugcuccaaaggaa

SEQ ID NO: 2047027 - RNA, 19 nt, Homo sapiens
  misc_RNA (1)...(19): siRNA sense strand
gcagaaggauuguguuauu

SEQ ID NO: 2047028 - RNA, 19 nt, Homo sapiens
  misc_RNA (1)...(19): siRNA sense strand
ugaaaucugugcaaaguua

SEQ ID NO: 2047029 - RNA, 19 nt, Homo sapiens
  misc_RNA (1)...(19): siRNA sense strand
uaaacgaacuugugaauug

SEQ ID NO: 2047030 - RNA, 19 nt, Homo sapiens
  misc_RNA (1)...(19): siRNA sense strand
gcaaaguuaucacauguaa

SEQ ID NO: 2047031 - RNA, 19 nt, Homo sapiens
  misc_RNA (1)...(19): siRNA sense strand
gcaauaagcucauccuagu

SEQ ID NO: 2047032 - RNA, 19 nt, Homo sapiens
  misc_RNA (1)...(19): siRNA sense strand
ugaaagagcugaagaucaa

SEQ ID NO: 2047033 - RNA, 19 nt, Homo sapiens
  misc_RNA (1)...(19): siRNA sense strand
ggacagcaguuccaagaaa

SEQ ID NO: 2047034 - RNA, 19 nt, Homo sapiens
  misc_RNA (1)...(19): siRNA sense strand
gagcacaaguggugguuua

SEQ ID NO: 2047035 - RNA, 19 nt, Homo sapiens
  misc_RNA (1)...(19): siRNA sense strand
gaagaaaucaucucccuuu

SEQ ID NO: 2047036 - RNA, 19 nt, Homo sapiens
  misc_RNA (1)...(19): siRNA sense strand
gcaaugauaucuucacugu

SEQ ID NO: 2047037 - RNA, 19 nt, Homo sapiens
  misc_RNA (1)...(19): siRNA sense strand
gcaaauagcauccaagguu

SEQ ID NO: 2047038 - RNA, 19 nt, Homo sapiens
  misc_RNA (1)...(19): siRNA sense strand
caaagcagauaacacuaua

SEQ ID NO: 2047039 - RNA, 19 nt, Homo sapiens
  misc_RNA (1)...(19): siRNA sense strand
acagagaccuucacaaauu

SEQ ID NO: 2047040 - RNA, 19 nt, Homo sapiens
  misc_RNA (1)...(19): siRNA sense strand
uacaagaucuccacgaaua

SEQ ID NO: 2047041 - RNA, 19 nt, Homo sapiens
  misc_RNA (1)...(19): siRNA sense strand
gaaauauccuuacuugcuu

SEQ ID NO: 2047042 - RNA, 19 nt, Homo sapiens
  misc_RNA (1)...(19): siRNA sense strand
ggaaauuacucuuacuguu

SEQ ID NO: 2047043 - RNA, 19 nt, Homo sapiens
  misc_RNA (1)...(19): siRNA sense strand
caaaggaacagcaaugaua

SEQ ID NO: 2047044 - RNA, 19 nt, Homo sapiens
  misc_RNA (1)...(19): siRNA sense strand
gaaaucaucuggaaauugc

SEQ ID NO: 2047045 - RNA, 19 nt, Homo sapiens
  misc_RNA (1)...(19): siRNA sense strand
uaaagaagguuaucagcuu

SEQ ID NO: 2047046 - RNA, 19 nt, Homo sapiens
  misc_RNA (1)...(19): siRNA sense strand
ggcaggaacuugcuucuaa

SEQ ID NO: 2047047 - RNA, 19 nt, Homo sapiens
  misc_RNA (1)...(19): siRNA sense strand
gagaauaaaugaagagaag

SEQ ID NO: 2047048 - RNA, 19 nt, Homo sapiens
  misc_RNA (1)...(19): siRNA sense strand
gaacaguaccaacaaauga

SEQ ID NO: 2047049 - RNA, 19 nt, Homo sapiens
  misc_RNA (1)...(19): siRNA sense strand
acaaagaguucgauagaaa

SEQ ID NO: 2047050 - RNA, 19 nt, Homo sapiens
  misc_RNA (1)...(19): siRNA sense strand
gaacuuuccggccaauuua

SEQ ID NO: 2047051 - RNA, 19 nt, Homo sapiens
  misc_RNA (1)...(19): siRNA sense strand
gaagauguauuucguaaac

SEQ ID NO: 2047052 - RNA, 19 nt, Homo sapiens
  misc_RNA (1)...(19): siRNA sense strand
gauuagaagucuccuuaaa

SEQ ID NO: 2047053 - RNA, 19 nt, Homo sapiens
  misc_RNA (1)...(19): siRNA sense strand
gcacgucagucaugcguaa

SEQ ID NO: 2047054 - RNA, 19 nt, Homo sapiens
  misc_RNA (1)...(19): siRNA sense strand
gaaaugacauacaagaucu

SEQ ID NO: 2047055 - RNA, 19 nt, Homo sapiens
  misc_RNA (1)...(19): siRNA sense strand
gaaccagugugauucugua

SEQ ID NO: 2047056 - RNA, 19 nt, Homo sapiens
  misc_RNA (1)...(19): siRNA sense strand
gaaaugagggccagucuga

SEQ ID NO: 2047057 - RNA, 19 nt, Homo sapiens
  misc_RNA (1)...(19): siRNA sense strand
aaacuaagguacagaaaga

SEQ ID NO: 2047058 - RNA, 19 nt, Homo sapiens
  misc_RNA (1)...(19): siRNA sense strand
ggaaauuuaucucuagguu

SEQ ID NO: 2047059 - RNA, 19 nt, Homo sapiens
  misc_RNA (1)...(19): siRNA sense strand
gcucaacucuccaaauaga

SEQ ID NO: 2047060 - RNA, 19 nt, Homo sapiens
  misc_RNA (1)...(19): siRNA sense strand
ucauggaucuuaaggauuu

SEQ ID NO: 2047061 - RNA, 19 nt, Homo sapiens
  misc_RNA (1)...(19): siRNA sense strand
ggacaaagaguucgauaga

SEQ ID NO: 2047062 - RNA, 19 nt, Homo sapiens
  misc_RNA (1)...(19): siRNA sense strand
guaaucaguucucugguaa

SEQ ID NO: 2047063 - RNA, 19 nt, Homo sapiens
  misc_RNA (1)...(19): siRNA sense strand
uagaacaacuccugcuaua

SEQ ID NO: 2047064 - RNA, 19 nt, Homo sapiens
  misc_RNA (1)...(19): siRNA sense strand
agagagagcuugugggaaa

SEQ ID NO: 2047065 - RNA, 19 nt, Homo sapiens
  misc_RNA (1)...(19): siRNA sense strand
cagagaccuucacaaauua

SEQ ID NO: 2047066 - RNA, 19 nt, Homo sapiens
  misc_RNA (1)...(19): siRNA sense strand
ggaagcagaugaugauagu

SEQ ID NO: 2047067 - RNA, 19 nt, Homo sapiens
  misc_RNA (1)...(19): siRNA sense strand
gacgaagacuuucugauug

SEQ ID NO: 2047068 - RNA, 19 nt, Homo sapiens
  misc_RNA (1)...(19): siRNA sense strand
ggacuguacuucaagaaau

SEQ ID NO: 2047069 - RNA, 19 nt, Homo sapiens
  misc_RNA (1)...(19): siRNA sense strand
aagcucaacuuauuccuua

SEQ ID NO: 2047070 - RNA, 19 nt, Homo sapiens
  misc_RNA (1)...(19): siRNA sense strand
gaacaacuccugcuauagu

SEQ ID NO: 2047071 - RNA, 19 nt, Homo sapiens
  misc_RNA (1)...(19): siRNA sense strand
guacagaacccaucaggaa

SEQ ID NO: 2047072 - RNA, 19 nt, Homo sapiens
  misc_RNA (1)...(19): siRNA sense strand
ccaaaggacuguacuucaa

SEQ ID NO: 2047073 - RNA, 19 nt, Homo sapiens
  misc_RNA (1)...(19): siRNA sense strand
uaaaggaugugaaacuaga

SEQ ID NO: 2047074 - RNA, 19 nt, Homo sapiens
  misc_RNA (1)...(19): siRNA sense strand
gaaagcagcagaugaagau

SEQ ID NO: 2047075 - RNA, 19 nt, Homo sapiens
  misc_RNA (1)...(19): siRNA sense strand
guucacaaauggagaauga

SEQ ID NO: 2047076 - RNA, 19 nt, Homo sapiens
  misc_RNA (1)...(19): siRNA sense strand
ccaaagaaauuucgucagu

SEQ ID NO: 2047077 - RNA, 19 nt, Homo sapiens
  misc_RNA (1)...(19): siRNA sense strand
gaugaaaucugugcaaagu

SEQ ID NO: 2047078 - RNA, 19 nt, Homo sapiens
  misc_RNA (1)...(19): siRNA sense strand
gagaugaggagaugaguaa

SEQ ID NO: 2047079 - RNA, 19 nt, Homo sapiens
  misc_RNA (1)...(19): siRNA sense strand
caaugcagcuguugaugaa

SEQ ID NO: 2047080 - RNA, 19 nt, Homo sapiens
  misc_RNA (1)...(19): siRNA sense strand
gagaugaugaugaguuaua

SEQ ID NO: 2047081 - RNA, 19 nt, Homo sapiens
  misc_RNA (1)...(19): siRNA sense strand
caaguaaaccacagaauga

SEQ ID NO: 2047082 - RNA, 19 nt, Homo sapiens
  misc_RNA (1)...(19): siRNA sense strand
uggcucaacucuccaaaua

SEQ ID NO: 2047083 - RNA, 19 nt, Homo sapiens
  misc_RNA (1)...(19): siRNA sense strand
ccagugugauuuauucuaa

SEQ ID NO: 2047084 - RNA, 19 nt, Homo sapiens
  misc_RNA (1)...(19): siRNA sense strand
agaagaaagugaacaaaug

SEQ ID NO: 2047085 - RNA, 19 nt, Homo sapiens
  misc_RNA (1)...(19): siRNA sense strand
ugauugaacugcauagaaa

SEQ ID NO: 2047086 - RNA, 19 nt, Homo sapiens
  misc_RNA (1)...(19): siRNA sense strand
uagcacagguuguuaauca

SEQ ID NO: 2047087 - RNA, 19 nt, Homo sapiens
  misc_RNA (1)...(19): siRNA sense strand
gaaggauuguguuauuguu

SEQ ID NO: 2047088 - RNA, 19 nt, Homo sapiens
  misc_RNA (1)...(19): siRNA sense strand
gcaggaacuugcuucuaaa

SEQ ID NO: 2047089 - RNA, 19 nt, Homo sapiens
  misc_RNA (1)...(19): siRNA sense strand
gagaauuauugcguacuua

SEQ ID NO: 2047090 - RNA, 19 nt, Homo sapiens
  misc_RNA (1)...(19): siRNA sense strand
gaagccaguuggugaaaug

SEQ ID NO: 2047091 - RNA, 19 nt, Homo sapiens
  misc_RNA (1)...(19): siRNA sense strand
caaauuaccuaaguuguag

SEQ ID NO: 2047092 - RNA, 19 nt, Homo sapiens
  misc_RNA (1)...(19): siRNA sense strand
ggucaggguuguacagauu

SEQ ID NO: 2047093 - RNA, 19 nt, Homo sapiens
  misc_RNA (1)...(19): siRNA sense strand
uuaaucaucuguacucuga

SEQ ID NO: 2047094 - RNA, 19 nt, Homo sapiens
  misc_RNA (1)...(19): siRNA sense strand
gaggagaugaguaauagua

SEQ ID NO: 2047095 - RNA, 19 nt, Homo sapiens
  misc_RNA (1)...(19): siRNA sense strand
ggagaugguuucauacaca

SEQ ID NO: 2047096 - RNA, 19 nt, Homo sapiens
  misc_RNA (1)...(19): siRNA sense strand
ucaaagcaccuccauguaa

SEQ ID NO: 2047097 - RNA, 19 nt, Homo sapiens
  misc_RNA (1)...(19): siRNA sense strand
guacuucagucagauauug

SEQ ID NO: 2047098 - RNA, 19 nt, Homo sapiens
  misc_RNA (1)...(19): siRNA sense strand
aaagaguacuucacgaauu

SEQ ID NO: 2047099 - RNA, 19 nt, Homo sapiens
  misc_RNA (1)...(19): siRNA sense strand
gagcugaagaucaaauuaa

SEQ ID NO: 2047100 - RNA, 19 nt, Homo sapiens
  misc_RNA (1)...(19): siRNA sense strand
uuagaagucuccuuaaaga

SEQ ID NO: 2047101 - RNA, 19 nt, Homo sapiens
  misc_RNA (1)...(19): siRNA sense strand
gagaaaucaucuggaaauu

SEQ ID NO: 2047102 - RNA, 19 nt, Homo sapiens
  misc_RNA (1)...(19): siRNA sense strand
gagcuguucugaauccaaa

SEQ ID NO: 2047103 - RNA, 19 nt, Homo sapiens
  misc_RNA (1)...(19): siRNA sense strand
ggaaacuucuucagcacuu

SEQ ID NO: 2047104 - RNA, 19 nt, Homo sapiens
  misc_RNA (1)...(19): siRNA sense strand
caucgcagcugcaaaggaa

SEQ ID NO: 2047105 - RNA, 19 nt, Homo sapiens
  misc_RNA (1)...(19): siRNA sense strand
ggaugaugcucuugcuaaa

SEQ ID NO: 2047106 - RNA, 19 nt, Homo sapiens
  misc_RNA (1)...(19): siRNA sense strand
ccacaucgaaugaagauuu

SEQ ID NO: 2047107 - RNA, 19 nt, Homo sapiens
  misc_RNA (1)...(19): siRNA sense strand
ugacagaggaauaauagua

SEQ ID NO: 2047108 - RNA, 19 nt, Homo sapiens
  misc_RNA (1)...(19): siRNA sense strand
uuagaaaccuuacgucuca

SEQ ID NO: 2047109 - RNA, 19 nt, Homo sapiens
  misc_RNA (1)...(19): siRNA sense strand
gcucaagccaguguuauua

SEQ ID NO: 2047110 - RNA, 19 nt, Homo sapiens
  misc_RNA (1)...(19): siRNA sense strand
gaagcguggugccauuauu

SEQ ID NO: 2047111 - RNA, 19 nt, Homo sapiens
  misc_RNA (1)...(19): siRNA sense strand
gaacuugugaauuguauug

SEQ ID NO: 2047112 - RNA, 19 nt, Homo sapiens
  misc_RNA (1)...(19): siRNA sense strand
gcagccagaucguauacaa

SEQ ID NO: 2047113 - RNA, 19 nt, Homo sapiens
  misc_RNA (1)...(19): siRNA sense strand
ucgaaacauuggcauaaua

SEQ ID NO: 2047114 - RNA, 19 nt, Homo sapiens
  misc_RNA (1)...(19): siRNA sense strand
aaacaugggucuccagcaa

SEQ ID NO: 2047115 - RNA, 19 nt, Homo sapiens
  misc_RNA (1)...(19): siRNA sense strand
cagcacguuucaacaguua

SEQ ID NO: 2047116 - RNA, 19 nt, Homo sapiens
  misc_RNA (1)...(19): siRNA sense strand
guggacagguuauuauuau

SEQ ID NO: 2047117 - RNA, 19 nt, Homo sapiens
  misc_RNA (1)...(19): siRNA sense strand
guaccagugugauuuauuc

SEQ ID NO: 2047118 - RNA, 19 nt, Homo sapiens
  misc_RNA (1)...(19): siRNA sense strand
gaugaggagaugaguaaua

SEQ ID NO: 2047119 - RNA, 19 nt, Homo sapiens
  misc_RNA (1)...(19): siRNA sense strand
aaugauaucuucacuguca

SEQ ID NO: 2047120 - RNA, 19 nt, Homo sapiens
  misc_RNA (1)...(19): siRNA sense strand
agaguuaccuucucauguu

SEQ ID NO: 2047121 - RNA, 19 nt, Homo sapiens
  misc_RNA (1)...(19): siRNA sense strand
ggucaaaggaggaauauuc

SEQ ID NO: 2047122 - RNA, 19 nt, Homo sapiens
  misc_RNA (1)...(19): siRNA sense strand
gaacaugccugcagauuca

SEQ ID NO: 2047123 - RNA, 19 nt, Homo sapiens
  misc_RNA (1)...(19): siRNA sense strand
gagaaagccugcuguguuu

SEQ ID NO: 2047124 - RNA, 19 nt, Homo sapiens
  misc_RNA (1)...(19): siRNA sense strand
ggaaggacaugaagaaaug

SEQ ID NO: 2047125 - RNA, 19 nt, Homo sapiens
  misc_RNA (1)...(19): siRNA sense strand
gcacaaggagcaaauauaa

SEQ ID NO: 2047126 - RNA, 19 nt, Homo sapiens
  misc_RNA (1)...(19): siRNA sense strand
caaagaaagugcucuaaca

SEQ ID NO: 2047127 - RNA, 19 nt, Homo sapiens
  misc_RNA (1)...(19): siRNA sense strand
gaaacacugcgcuaacuua

SEQ ID NO: 2047128 - RNA, 19 nt, Homo sapiens
  misc_RNA (1)...(19): siRNA sense strand
guugcagacuuucuuauua

SEQ ID NO: 2047129 - RNA, 19 nt, Homo sapiens
  misc_RNA (1)...(19): siRNA sense strand
ugaauuagcacaaguauug

SEQ ID NO: 2047130 - RNA, 19 nt, Homo sapiens
  misc_RNA (1)...(19): siRNA sense strand
ggagaaagccugcuguguu

SEQ ID NO: 2047131 - RNA, 19 nt, Homo sapiens
  misc_RNA (1)...(19): siRNA sense strand
gaugaaggcagaaguguaa

SEQ ID NO: 2047132 - RNA, 19 nt, Homo sapiens
  misc_RNA (1)...(19): siRNA sense strand
ggagguuacuuagauauug

SEQ ID NO: 2047133 - RNA, 19 nt, Homo sapiens
  misc_RNA (1)...(19): siRNA sense strand
ggauaugguucgcuuucua

SEQ ID NO: 2047134 - RNA, 19 nt, Homo sapiens
  misc_RNA (1)...(19): siRNA sense strand
caucaacacucauucuaau

SEQ ID NO: 2047135 - RNA, 19 nt, Homo sapiens
  misc_RNA (1)...(19): siRNA sense strand
gcagaagcuuguucagaug

SEQ ID NO: 2047136 - RNA, 19 nt, Homo sapiens
  misc_RNA (1)...(19): siRNA sense strand
gcuagaagcagcaggaauu

SEQ ID NO: 2047137 - RNA, 19 nt, Homo sapiens
  misc_RNA (1)...(19): siRNA sense strand
gaauuggcagcucuacuua

SEQ ID NO: 2047138 - RNA, 19 nt, Homo sapiens
  misc_RNA (1)...(19): siRNA sense strand
gaagaucgagggaauaaag

SEQ ID NO: 2047139 - RNA, 19 nt, Homo sapiens
  misc_RNA (1)...(19): siRNA sense strand
agaagaaacucaagaaacu

SEQ ID NO: 2047140 - RNA, 19 nt, Homo sapiens
  misc_RNA (1)...(19): siRNA sense strand
gaugcacacugccuuaaug

SEQ ID NO: 2047141 - RNA, 19 nt, Homo sapiens
  misc_RNA (1)...(19): siRNA sense strand
gcagaaguguaaaugaaca

SEQ ID NO: 2047142 - RNA, 19 nt, Homo sapiens
  misc_RNA (1)...(19): siRNA sense strand
guucguaaauugcuagaug

SEQ ID NO: 2047143 - RNA, 19 nt, Homo sapiens
  misc_RNA (1)...(19): siRNA sense strand
gcacuacucuuagcacaag

SEQ ID NO: 2047144 - RNA, 19 nt, Homo sapiens
  misc_RNA (1)...(19): siRNA sense strand
ggacauacucccuuaaugg

SEQ ID NO: 2047145 - RNA, 19 nt, Homo sapiens
  misc_RNA (1)...(19): siRNA sense strand
gugcaaauauagaagauca

SEQ ID NO: 2047146 - RNA, 19 nt, Homo sapiens
  misc_RNA (1)...(19): siRNA sense strand
aaauggacauacucccuua

SEQ ID NO: 2047147 - RNA, 19 nt, Homo sapiens
  misc_RNA (1)...(19): siRNA sense strand
uggaggacauguugaauug

SEQ ID NO: 2047148 - RNA, 19 nt, Homo sapiens
  misc_RNA (1)...(19): siRNA sense strand
gaauaaaggagacauaacu

SEQ ID NO: 2047149 - RNA, 19 nt, Homo sapiens
  misc_RNA (1)...(19): siRNA sense strand
ggauaguggugcucaagug

SEQ ID NO: 2047150 - RNA, 19 nt, Homo sapiens
  misc_RNA (1)...(19): siRNA sense strand
agaaacugcucuuacuuug

SEQ ID NO: 2047151 - RNA, 19 nt, Homo sapiens
  misc_RNA (1)...(19): siRNA sense strand
agcaggguauuaugaauua

SEQ ID NO: 2047152 - RNA, 19 nt, Homo sapiens
  misc_RNA (1)...(19): siRNA sense strand
gcaucaacacucauucuaa

SEQ ID NO: 2047153 - RNA, 19 nt, Homo sapiens
  misc_RNA (1)...(19): siRNA sense strand
aaauauaaaugcccagaca

SEQ ID NO: 2047154 - RNA, 19 nt, Homo sapiens
  misc_RNA (1)...(19): siRNA sense strand
agacacagccuuaaccuau

SEQ ID NO: 2047155 - RNA, 19 nt, Homo sapiens
  misc_RNA (1)...(19): siRNA sense strand
gaggauuuguugacauugu

SEQ ID NO: 2047156 - RNA, 19 nt, Homo sapiens
  misc_RNA (1)...(19): siRNA sense strand
gggaauaaaggagacauaa

SEQ ID NO: 2047157 - RNA, 19 nt, Homo sapiens
  misc_RNA (1)...(19): siRNA sense strand
ggacaccuggaauugguua

SEQ ID NO: 2047158 - RNA, 19 nt, Homo sapiens
  misc_RNA (1)...(19): siRNA sense strand
uggcagcucuacuuauuga

SEQ ID NO: 2047159 - RNA, 19 nt, Homo sapiens
  misc_RNA (1)...(19): siRNA sense strand
gcacugacacggaugaaag

SEQ ID NO: 2047160 - RNA, 19 nt, Homo sapiens
  misc_RNA (1)...(19): siRNA sense strand
gagguuacuuagauauugu

SEQ ID NO: 2047161 - RNA, 19 nt, Homo sapiens
  misc_RNA (1)...(19): siRNA sense strand
uguccgagguugaaucauu

SEQ ID NO: 2047162 - RNA, 19 nt, Homo sapiens
  misc_RNA (1)...(19): siRNA sense strand
aggcagaaguguaaaugaa

SEQ ID NO: 2047163 - RNA, 19 nt, Homo sapiens
  misc_RNA (1)...(19): siRNA sense strand
guccgagguugaaucauuu

SEQ ID NO: 2047164 - RNA, 19 nt, Homo sapiens
  misc_RNA (1)...(19): siRNA sense strand
gagguacuccggagacuga

SEQ ID NO: 2047165 - RNA, 19 nt, Homo sapiens
  misc_RNA (1)...(19): siRNA sense strand
ggagggacaccuggaauug

SEQ ID NO: 2047166 - RNA, 19 nt, Homo sapiens
  misc_RNA (1)...(19): siRNA sense strand
gcagcucuacuuauugaaa

SEQ ID NO: 2047167 - RNA, 19 nt, Homo sapiens
  misc_RNA (1)...(19): siRNA sense strand
ucauuugaaucuccauuga

SEQ ID NO: 2047168 - RNA, 19 nt, Homo sapiens
  misc_RNA (1)...(19): siRNA sense strand
gaaggcagaaguguaaaug

SEQ ID NO: 2047169 - RNA, 19 nt, Homo sapiens
  misc_RNA (1)...(19): siRNA sense strand
ccaagaagaucuggauaac

SEQ ID NO: 2047170 - RNA, 19 nt, Homo sapiens
  misc_RNA (1)...(19): siRNA sense strand
gugcaggcaucaacacuca

SEQ ID NO: 2047171 - RNA, 19 nt, Homo sapiens
  misc_RNA (1)...(19): siRNA sense strand
caguggagguuacuuagau

SEQ ID NO: 2047172 - RNA, 19 nt, Homo sapiens
  misc_RNA (1)...(19): siRNA sense strand
gcacaaaacagaugagaug

SEQ ID NO: 2047173 - RNA, 19 nt, Homo sapiens
  misc_RNA (1)...(19): siRNA sense strand
gacacagccuuaaccuaug

SEQ ID NO: 2047174 - RNA, 19 nt, Homo sapiens
  misc_RNA (1)...(19): siRNA sense strand
gacagaagaaacucaagaa

SEQ ID NO: 2047175 - RNA, 19 nt, Homo sapiens
  misc_RNA (1)...(19): siRNA sense strand
caacaucagagauauucuu

SEQ ID NO: 2047176 - RNA, 19 nt, Homo sapiens
  misc_RNA (1)...(19): siRNA sense strand
uggaggauuuguugacauu

SEQ ID NO: 2047177 - RNA, 19 nt, Homo sapiens
  misc_RNA (1)...(19): siRNA sense strand
uaaaugcccagacagaaga

SEQ ID NO: 2047178 - RNA, 19 nt, Homo sapiens
  misc_RNA (1)...(19): siRNA sense strand
aaugguggcacuacucuua

SEQ ID NO: 2047179 - RNA, 19 nt, Homo sapiens
  misc_RNA (1)...(19): siRNA sense strand
acacugcgcuaacuuaugc

SEQ ID NO: 2047180 - RNA, 19 nt, Homo sapiens
  misc_RNA (1)...(19): siRNA sense strand
gggaaggacaugaagaaau

SEQ ID NO: 2047181 - RNA, 19 nt, Homo sapiens
  misc_RNA (1)...(19): siRNA sense strand
ugaauuggcagcucuacuu

SEQ ID NO: 2047182 - RNA, 19 nt, Homo sapiens
  misc_RNA (1)...(19): siRNA sense strand
ggaccaagaagaucuggau

SEQ ID NO: 2047183 - RNA, 19 nt, Homo sapiens
  misc_RNA (1)...(19): siRNA sense strand
auacggauguugcagaugu

SEQ ID NO: 2047184 - RNA, 19 nt, Homo sapiens
  misc_RNA (1)...(19): siRNA sense strand
gauaguggugcucaaguga

SEQ ID NO: 2047185 - RNA, 19 nt, Homo sapiens
  misc_RNA (1)...(19): siRNA sense strand
gcaggcaucaacacucauu

SEQ ID NO: 2047186 - RNA, 19 nt, Homo sapiens
  misc_RNA (1)...(19): siRNA sense strand
ugcaugugcuggaggauuu

SEQ ID NO: 2047187 - RNA, 19 nt, Homo sapiens
  misc_RNA (1)...(19): siRNA sense strand
ggaaacacugcgcuaacuu

SEQ ID NO: 2047188 - RNA, 19 nt, Homo sapiens
  misc_RNA (1)...(19): siRNA sense strand
agacauaacuccccugaug

SEQ ID NO: 2047189 - RNA, 19 nt, Homo sapiens
  misc_RNA (1)...(19): siRNA sense strand
gucaacugcugaugguaaa

SEQ ID NO: 2047190 - RNA, 19 nt, Homo sapiens
  misc_RNA (1)...(19): siRNA sense strand
agaaguuaaugaugaagga

SEQ ID NO: 2047191 - RNA, 19 nt, Homo sapiens
  misc_RNA (1)...(19): siRNA sense strand
ccacaaugcaggacaagug

SEQ ID NO: 2047192 - RNA, 19 nt, Homo sapiens
  misc_RNA (1)...(19): siRNA sense strand
guucagcaggguauuauga

SEQ ID NO: 2047193 - RNA, 19 nt, Homo sapiens
  misc_RNA (1)...(19): siRNA sense strand
gagcagacuuacgcacugu

SEQ ID NO: 2047194 - RNA, 19 nt, Homo sapiens
  misc_RNA (1)...(19): siRNA sense strand
gaaaugguggcacuacucu

SEQ ID NO: 2047195 - RNA, 19 nt, Homo sapiens
  misc_RNA (1)...(19): siRNA sense strand
gacauacucccuuaaugga

SEQ ID NO: 2047196 - RNA, 19 nt, Homo sapiens
  misc_RNA (1)...(19): siRNA sense strand
ggauuuguugacauuguua

SEQ ID NO: 2047197 - RNA, 19 nt, Homo sapiens
  misc_RNA (1)...(19): siRNA sense strand
uaaugcuguucguaaauug

SEQ ID NO: 2047198 - RNA, 19 nt, Homo sapiens
  misc_RNA (1)...(19): siRNA sense strand
ggauaacccagugcuuaaa

SEQ ID NO: 2047199 - RNA, 19 nt, Homo sapiens
  misc_RNA (1)...(19): siRNA sense strand
agcagaagcuuguucagau

SEQ ID NO: 2047200 - RNA, 19 nt, Homo sapiens
  misc_RNA (1)...(19): siRNA sense strand
gaagaaaugguggcacuac

SEQ ID NO: 2047201 - RNA, 19 nt, Homo sapiens
  misc_RNA (1)...(19): siRNA sense strand
gaaaggggagcaaaucuug

SEQ ID NO: 2047202 - RNA, 19 nt, Homo sapiens
  misc_RNA (1)...(19): siRNA sense strand
gagguggcacguuugcuuu

SEQ ID NO: 2047203 - RNA, 19 nt, Homo sapiens
  misc_RNA (1)...(19): siRNA sense strand
ugagaugcacacugccuua

SEQ ID NO: 2047204 - RNA, 19 nt, Homo sapiens
  misc_RNA (1)...(19): siRNA sense strand
uaaagugcuccuuaaugaa

SEQ ID NO: 2047205 - RNA, 19 nt, Homo sapiens
  misc_RNA (1)...(19): siRNA sense strand
ggcgcuggauuucaaguug

SEQ ID NO: 2047206 - RNA, 19 nt, Homo sapiens
  misc_RNA (1)...(19): siRNA sense strand
cagcaggguauuaugaauu

SEQ ID NO: 2047207 - RNA, 19 nt, Homo sapiens
  misc_RNA (1)...(19): siRNA sense strand
guaaaugaacauacagaag

SEQ ID NO: 2047208 - RNA, 19 nt, Homo sapiens
  misc_RNA (1)...(19): siRNA sense strand
uguuaaugcuguucguaaa

SEQ ID NO: 2047209 - RNA, 19 nt, Homo sapiens
  misc_RNA (1)...(19): siRNA sense strand
aggaggaccuggacucugu

SEQ ID NO: 2047210 - RNA, 19 nt, Homo sapiens
  misc_RNA (1)...(19): siRNA sense strand
uaaugugcaugcuacaaca

SEQ ID NO: 2047211 - RNA, 19 nt, Homo sapiens
  misc_RNA (1)...(19): siRNA sense strand
ggcaggggcugauauagaa

SEQ ID NO: 2047212 - RNA, 19 nt, Homo sapiens
  misc_RNA (1)...(19): siRNA sense strand
gauacacucccuugaugga

SEQ ID NO: 2047213 - RNA, 19 nt, Homo sapiens
  misc_RNA (1)...(19): siRNA sense strand
auuggcagcucuacuuauu

SEQ ID NO: 2047214 - RNA, 19 nt, Homo sapiens
  misc_RNA (1)...(19): siRNA sense strand
gagaugcacacugccuuaa

SEQ ID NO: 2047215 - RNA, 19 nt, Homo sapiens
  misc_RNA (1)...(19): siRNA sense strand
gacacaggcacgacuagaa

SEQ ID NO: 2047216 - RNA, 19 nt, Homo sapiens
  misc_RNA (1)...(19): siRNA sense strand
gaaagccugcuguguuugg

SEQ ID NO: 2047217 - RNA, 19 nt, Homo sapiens
  misc_RNA (1)...(19): siRNA sense strand
augguucgcuuucuacuug

SEQ ID NO: 2047218 - RNA, 19 nt, Homo sapiens
  misc_RNA (1)...(19): siRNA sense strand
gagacacagccuuaaccua

SEQ ID NO: 2047219 - RNA, 19 nt, Homo sapiens
  misc_RNA (1)...(19): siRNA sense strand
gaagaaacucaagaaacug

SEQ ID NO: 2047220 - RNA, 19 nt, Homo sapiens
  misc_RNA (1)...(19): siRNA sense strand
aggauacacucccuugaug

SEQ ID NO: 2047221 - RNA, 19 nt, Homo sapiens
  misc_RNA (1)...(19): siRNA sense strand
gaccaagaagaucuggaua

SEQ ID NO: 2047222 - RNA, 19 nt, Homo sapiens
  misc_RNA (1)...(19): siRNA sense strand
gaacaugccugcagauuca

SEQ ID NO: 2047223 - RNA, 19 nt, Homo sapiens
  misc_RNA (1)...(19): siRNA sense strand
gagaaagccugcuguguuu

SEQ ID NO: 2047224 - RNA, 19 nt, Homo sapiens
  misc_RNA (1)...(19): siRNA sense strand
ggaaggacaugaagaaaug

SEQ ID NO: 2047225 - RNA, 19 nt, Homo sapiens
  misc_RNA (1)...(19): siRNA sense strand
gcacaaggagcaaauauaa

SEQ ID NO: 2047226 - RNA, 19 nt, Homo sapiens
  misc_RNA (1)...(19): siRNA sense strand
caaagaaagugcucuaaca

SEQ ID NO: 2047227 - RNA, 19 nt, Homo sapiens
  misc_RNA (1)...(19): siRNA sense strand
gaaacacugcgcuaacuua

SEQ ID NO: 2047228 - RNA, 19 nt, Homo sapiens
  misc_RNA (1)...(19): siRNA sense strand
guugcagacuuucuuauua

SEQ ID NO: 2047229 - RNA, 19 nt, Homo sapiens
  misc_RNA (1)...(19): siRNA sense strand
ugaauuagcacaaguauug

SEQ ID NO: 2047230 - RNA, 19 nt, Homo sapiens
  misc_RNA (1)...(19): siRNA sense strand
ggagaaagccugcuguguu

SEQ ID NO: 2047231 - RNA, 19 nt, Homo sapiens
  misc_RNA (1)...(19): siRNA sense strand
gaugaaggcagaaguguaa

SEQ ID NO: 2047232 - RNA, 19 nt, Homo sapiens
  misc_RNA (1)...(19): siRNA sense strand
ggagguuacuuagauauug

SEQ ID NO: 2047233 - RNA, 19 nt, Homo sapiens
  misc_RNA (1)...(19): siRNA sense strand
ggauaugguucgcuuucua

SEQ ID NO: 2047234 - RNA, 19 nt, Homo sapiens
  misc_RNA (1)...(19): siRNA sense strand
caucaacacucauucuaau

SEQ ID NO: 2047235 - RNA, 19 nt, Homo sapiens
  misc_RNA (1)...(19): siRNA sense strand
gcagaagcuuguucagaug

SEQ ID NO: 2047236 - RNA, 19 nt, Homo sapiens
  misc_RNA (1)...(19): siRNA sense strand
gaauuggcagcucuacuua

SEQ ID NO: 2047237 - RNA, 19 nt, Homo sapiens
  misc_RNA (1)...(19): siRNA sense strand
gaagaucgagggaauaaag

SEQ ID NO: 2047238 - RNA, 19 nt, Homo sapiens
  misc_RNA (1)...(19): siRNA sense strand
agaagaaacucaagaaacu

SEQ ID NO: 2047239 - RNA, 19 nt, Homo sapiens
  misc_RNA (1)...(19): siRNA sense strand
gaugcacacugccuuaaug

SEQ ID NO: 2047240 - RNA, 19 nt, Homo sapiens
  misc_RNA (1)...(19): siRNA sense strand
gcagaaguguaaaugaaca

SEQ ID NO: 2047241 - RNA, 19 nt, Homo sapiens
  misc_RNA (1)...(19): siRNA sense strand
guucguaaauugcuagaug

SEQ ID NO: 2047242 - RNA, 19 nt, Homo sapiens
  misc_RNA (1)...(19): siRNA sense strand
gcacuacucuuagcacaag

SEQ ID NO: 2047243 - RNA, 19 nt, Homo sapiens
  misc_RNA (1)...(19): siRNA sense strand
ggacauacucccuuaaugg

SEQ ID NO: 2047244 - RNA, 19 nt, Homo sapiens
  misc_RNA (1)...(19): siRNA sense strand
gugcaaauauagaagauca

SEQ ID NO: 2047245 - RNA, 19 nt, Homo sapiens
  misc_RNA (1)...(19): siRNA sense strand
aaauggacauacucccuua

SEQ ID NO: 2047246 - RNA, 19 nt, Homo sapiens
  misc_RNA (1)...(19): siRNA sense strand
uggaggacauguugaauug

SEQ ID NO: 2047247 - RNA, 19 nt, Homo sapiens
  misc_RNA (1)...(19): siRNA sense strand
gaauaaaggagacauaacu

SEQ ID NO: 2047248 - RNA, 19 nt, Homo sapiens
  misc_RNA (1)...(19): siRNA sense strand
ggauaguggugcucaagug

SEQ ID NO: 2047249 - RNA, 19 nt, Homo sapiens
  misc_RNA (1)...(19): siRNA sense strand
agaaacugcucuuacuuug

SEQ ID NO: 2047250 - RNA, 19 nt, Homo sapiens
  misc_RNA (1)...(19): siRNA sense strand
agcaggguauuaugaauua

SEQ ID NO: 2047251 - RNA, 19 nt, Homo sapiens
  misc_RNA (1)...(19): siRNA sense strand
gcaucaacacucauucuaa

SEQ ID NO: 2047252 - RNA, 19 nt, Homo sapiens
  misc_RNA (1)...(19): siRNA sense strand
aaauauaaaugcccagaca

SEQ ID NO: 2047253 - RNA, 19 nt, Homo sapiens
  misc_RNA (1)...(19): siRNA sense strand
agacacagccuuaaccuau

SEQ ID NO: 2047254 - RNA, 19 nt, Homo sapiens
  misc_RNA (1)...(19): siRNA sense strand
gaggauuuguugacauugu

SEQ ID NO: 2047255 - RNA, 19 nt, Homo sapiens
  misc_RNA (1)...(19): siRNA sense strand
gggaauaaaggagacauaa

SEQ ID NO: 2047256 - RNA, 19 nt, Homo sapiens
  misc_RNA (1)...(19): siRNA sense strand
ggacaccuggaauugguua

SEQ ID NO: 2047257 - RNA, 19 nt, Homo sapiens
  misc_RNA (1)...(19): siRNA sense strand
uggcagcucuacuuauuga

SEQ ID NO: 2047258 - RNA, 19 nt, Homo sapiens
  misc_RNA (1)...(19): siRNA sense strand
aggcagaaguguaaaugaa

SEQ ID NO: 2047259 - RNA, 19 nt, Homo sapiens
  misc_RNA (1)...(19): siRNA sense strand
gagguuacuuagauauugu

SEQ ID NO: 2047260 - RNA, 19 nt, Homo sapiens
  misc_RNA (1)...(19): siRNA sense strand
gaaggcagaaguguaaaug

SEQ ID NO: 2047261 - RNA, 19 nt, Homo sapiens
  misc_RNA (1)...(19): siRNA sense strand
ggagggacaccuggaauug

SEQ ID NO: 2047262 - RNA, 19 nt, Homo sapiens
  misc_RNA (1)...(19): siRNA sense strand
gcagcucuacuuauugaaa

SEQ ID NO: 2047263 - RNA, 19 nt, Homo sapiens
  misc_RNA (1)...(19): siRNA sense strand
ucauuugaaucuccauuga

SEQ ID NO: 2047264 - RNA, 19 nt, Homo sapiens
  misc_RNA (1)...(19): siRNA sense strand
caguggagguuacuuagau

SEQ ID NO: 2047265 - RNA, 19 nt, Homo sapiens
  misc_RNA (1)...(19): siRNA sense strand
gugcaggcaucaacacuca

SEQ ID NO: 2047266 - RNA, 19 nt, Homo sapiens
  misc_RNA (1)...(19): siRNA sense strand
gcacaaaacagaugagaug

SEQ ID NO: 2047267 - RNA, 19 nt, Homo sapiens
  misc_RNA (1)...(19): siRNA sense strand
gacacagccuuaaccuaug

SEQ ID NO: 2047268 - RNA, 19 nt, Homo sapiens
  misc_RNA (1)...(19): siRNA sense strand
gacagaagaaacucaagaa

SEQ ID NO: 2047269 - RNA, 19 nt, Homo sapiens
  misc_RNA (1)...(19): siRNA sense strand
uggaggauuuguugacauu

SEQ ID NO: 2047270 - RNA, 19 nt, Homo sapiens
  misc_RNA (1)...(19): siRNA sense strand
uaaaugcccagacagaaga

SEQ ID NO: 2047271 - RNA, 19 nt, Homo sapiens
  misc_RNA (1)...(19): siRNA sense strand
aaugguggcacuacucuua

SEQ ID NO: 2047272 - RNA, 19 nt, Homo sapiens
  misc_RNA (1)...(19): siRNA sense strand
acacugcgcuaacuuaugc

SEQ ID NO: 2047273 - RNA, 19 nt, Homo sapiens
  misc_RNA (1)...(19): siRNA sense strand
gggaaggacaugaagaaau

SEQ ID NO: 2047274 - RNA, 19 nt, Homo sapiens
  misc_RNA (1)...(19): siRNA sense strand
ugaauuggcagcucuacuu

SEQ ID NO: 2047275 - RNA, 19 nt, Homo sapiens
  misc_RNA (1)...(19): siRNA sense strand
agacauaacuccccugaug

SEQ ID NO: 2047276 - RNA, 19 nt, Homo sapiens
  misc_RNA (1)...(19): siRNA sense strand
auacggauguugcagaugu

SEQ ID NO: 2047277 - RNA, 19 nt, Homo sapiens
  misc_RNA (1)...(19): siRNA sense strand
gauaguggugcucaaguga

SEQ ID NO: 2047278 - RNA, 19 nt, Homo sapiens
  misc_RNA (1)...(19): siRNA sense strand
gcaggcaucaacacucauu

SEQ ID NO: 2047279 - RNA, 19 nt, Homo sapiens
  misc_RNA (1)...(19): siRNA sense strand
ugcaugugcuggaggauuu

SEQ ID NO: 2047280 - RNA, 19 nt, Homo sapiens
  misc_RNA (1)...(19): siRNA sense strand
ggaaacacugcgcuaacuu

SEQ ID NO: 2047281 - RNA, 19 nt, Homo sapiens
  misc_RNA (1)...(19): siRNA sense strand
ccacaaugcaggacaagug

SEQ ID NO: 2047282 - RNA, 19 nt, Homo sapiens
  misc_RNA (1)...(19): siRNA sense strand
agaaguuaaugaugaagga

SEQ ID NO: 2047283 - RNA, 19 nt, Homo sapiens
  misc_RNA (1)...(19): siRNA sense strand
guucagcaggguauuauga

SEQ ID NO: 2047284 - RNA, 19 nt, Homo sapiens
  misc_RNA (1)...(19): siRNA sense strand
gaaaugguggcacuacucu

SEQ ID NO: 2047285 - RNA, 19 nt, Homo sapiens
  misc_RNA (1)...(19): siRNA sense strand
gacauacucccuuaaugga

SEQ ID NO: 2047286 - RNA, 19 nt, Homo sapiens
  misc_RNA (1)...(19): siRNA sense strand
ggauuuguugacauuguua

SEQ ID NO: 2047287 - RNA, 19 nt, Homo sapiens
  misc_RNA (1)...(19): siRNA sense strand
uaaugcuguucguaaauug

SEQ ID NO: 2047288 - RNA, 19 nt, Homo sapiens
  misc_RNA (1)...(19): siRNA sense strand
guaaaugaacauacagaag

SEQ ID NO: 2047289 - RNA, 19 nt, Homo sapiens
  misc_RNA (1)...(19): siRNA sense strand
gaagaaaugguggcacuac

SEQ ID NO: 2047290 - RNA, 19 nt, Homo sapiens
  misc_RNA (1)...(19): siRNA sense strand
gaaaggggagcaaaucuug

SEQ ID NO: 2047291 - RNA, 19 nt, Homo sapiens
  misc_RNA (1)...(19): siRNA sense strand
gagguggcacguuugcuuu

SEQ ID NO: 2047292 - RNA, 19 nt, Homo sapiens
  misc_RNA (1)...(19): siRNA sense strand
ugagaugcacacugccuua

SEQ ID NO: 2047293 - RNA, 19 nt, Homo sapiens
  misc_RNA (1)...(19): siRNA sense strand
agcagaagcuuguucagau

SEQ ID NO: 2047294 - RNA, 19 nt, Homo sapiens
  misc_RNA (1)...(19): siRNA sense strand
uaaagugcuccuuaaugaa

SEQ ID NO: 2047295 - RNA, 19 nt, Homo sapiens
  misc_RNA (1)...(19): siRNA sense strand
uguuaaugcuguucguaaa

SEQ ID NO: 2047296 - RNA, 19 nt, Homo sapiens
  misc_RNA (1)...(19): siRNA sense strand
cagcaggguauuaugaauu

SEQ ID NO: 2047297 - RNA, 19 nt, Homo sapiens
  misc_RNA (1)...(19): siRNA sense strand
gagaugcacacugccuuaa

SEQ ID NO: 2047298 - RNA, 19 nt, Homo sapiens
  misc_RNA (1)...(19): siRNA sense strand
uaaugugcaugcuacaaca

SEQ ID NO: 2047299 - RNA, 19 nt, Homo sapiens
  misc_RNA (1)...(19): siRNA sense strand
gaaagccugcuguguuugg

SEQ ID NO: 2047300 - RNA, 19 nt, Homo sapiens
  misc_RNA (1)...(19): siRNA sense strand
ggcaggggcugauauagaa

SEQ ID NO: 2047301 - RNA, 19 nt, Homo sapiens
  misc_RNA (1)...(19): siRNA sense strand
gauacacucccuugaugga

SEQ ID NO: 2047302 - RNA, 19 nt, Homo sapiens
  misc_RNA (1)...(19): siRNA sense strand
auuggcagcucuacuuauu

SEQ ID NO: 2047303 - RNA, 19 nt, Homo sapiens
  misc_RNA (1)...(19): siRNA sense strand
uguggaaguugcaagaguu

SEQ ID NO: 2047304 - RNA, 19 nt, Homo sapiens
  misc_RNA (1)...(19): siRNA sense strand
gagacacagccuuaaccua

SEQ ID NO: 2047305 - RNA, 19 nt, Homo sapiens
  misc_RNA (1)...(19): siRNA sense strand
gaagaaacucaagaaacug

SEQ ID NO: 2047306 - RNA, 19 nt, Homo sapiens
  misc_RNA (1)...(19): siRNA sense strand
aggauacacucccuugaug

SEQ ID NO: 2047307 - RNA, 19 nt, Homo sapiens
  misc_RNA (1)...(19): siRNA sense strand
augguucgcuuucuacuug

SEQ ID NO: 2047308 - RNA, 19 nt, Homo sapiens
  misc_RNA (1)...(19): siRNA sense strand
ugaaggugcaaauauagaa

SEQ ID NO: 2047309 - RNA, 19 nt, Homo sapiens
  misc_RNA (1)...(19): siRNA sense strand
ggcuugcuguggaggauuu

SEQ ID NO: 2047310 - RNA, 19 nt, Homo sapiens
  misc_RNA (1)...(19): siRNA sense strand
cagugcaggucauguggaa

SEQ ID NO: 2047311 - RNA, 19 nt, Homo sapiens
  misc_RNA (1)...(19): siRNA sense strand
aacacuugcuugcuacaaa

SEQ ID NO: 2047312 - RNA, 19 nt, Homo sapiens
  misc_RNA (1)...(19): siRNA sense strand
gaaacugcucuuacuuugg

SEQ ID NO: 2047313 - RNA, 19 nt, Homo sapiens
  misc_RNA (1)...(19): siRNA sense strand
cagaagaaacucaagaaac

SEQ ID NO: 2047314 - RNA, 19 nt, Homo sapiens
  misc_RNA (1)...(19): siRNA sense strand
gcagaaaacagccacaaug

SEQ ID NO: 2047315 - RNA, 19 nt, Homo sapiens
  misc_RNA (1)...(19): siRNA sense strand
guggaggacauguugaauu

SEQ ID NO: 2047316 - RNA, 19 nt, Homo sapiens
  misc_RNA (1)...(19): siRNA sense strand
gcaugcuaauguugaagau

SEQ ID NO: 2047317 - RNA, 19 nt, Homo sapiens
  misc_RNA (1)...(19): siRNA sense strand
caaggagcaaauauaaaug

SEQ ID NO: 2047318 - RNA, 19 nt, Homo sapiens
  misc_RNA (1)...(19): siRNA sense strand
gcuggaggauuuguugaca

SEQ ID NO: 2047319 - RNA, 19 nt, Homo sapiens
  misc_RNA (1)...(19): siRNA sense strand
ggauguugcagauguuuua

SEQ ID NO: 2047320 - RNA, 19 nt, Homo sapiens
  misc_RNA (1)...(19): siRNA sense strand
ggcaucaacacucauucua

SEQ ID NO: 2047321 - RNA, 19 nt, Homo sapiens
  misc_RNA (1)...(19): siRNA sense strand
ucagcaggguauuaugaau

SEQ ID NO: 2047322 - RNA, 19 nt, Homo sapiens
  misc_RNA (1)...(19): siRNA sense strand
cgaaaugccucuaauauua

SEQ ID NO: 2047323 - RNA, 19 nt, Homo sapiens
  misc_RNA (1)...(19): siRNA sense strand
ggaagaagcuaaacaagaa

SEQ ID NO: 2047324 - RNA, 19 nt, Homo sapiens
  misc_RNA (1)...(19): siRNA sense strand
ggauguagcugaggaaaua

SEQ ID NO: 2047325 - RNA, 19 nt, Homo sapiens
  misc_RNA (1)...(19): siRNA sense strand
caaaggagcuauugaaugu

SEQ ID NO: 2047326 - RNA, 19 nt, Homo sapiens
  misc_RNA (1)...(19): siRNA sense strand
ggaggauucuuauacuuua

SEQ ID NO: 2047327 - RNA, 19 nt, Homo sapiens
  misc_RNA (1)...(19): siRNA sense strand
acuagaagcuguaacauua

SEQ ID NO: 2047328 - RNA, 19 nt, Homo sapiens
  misc_RNA (1)...(19): siRNA sense strand
agagagagauguagucaua

SEQ ID NO: 2047329 - RNA, 19 nt, Homo sapiens
  misc_RNA (1)...(19): siRNA sense strand
gaaaggaggccauacagaa

SEQ ID NO: 2047330 - RNA, 19 nt, Homo sapiens
  misc_RNA (1)...(19): siRNA sense strand
acaaagagcuaaaugaugu

SEQ ID NO: 2047331 - RNA, 19 nt, Homo sapiens
  misc_RNA (1)...(19): siRNA sense strand
ggacauucccucucuagua

SEQ ID NO: 2047332 - RNA, 19 nt, Homo sapiens
  misc_RNA (1)...(19): siRNA sense strand
gcacauaagaagaacauaa

SEQ ID NO: 2047333 - RNA, 19 nt, Homo sapiens
  misc_RNA (1)...(19): siRNA sense strand
caaacaagccugucuguga

SEQ ID NO: 2047334 - RNA, 19 nt, Homo sapiens
  misc_RNA (1)...(19): siRNA sense strand
uaagaaguguugugaaaga

SEQ ID NO: 2047335 - RNA, 19 nt, Homo sapiens
  misc_RNA (1)...(19): siRNA sense strand
gaaaacagaugaaggcauu

SEQ ID NO: 2047336 - RNA, 19 nt, Homo sapiens
  misc_RNA (1)...(19): siRNA sense strand
gcaggaggcuuugugauau

SEQ ID NO: 2047337 - RNA, 19 nt, Homo sapiens
  misc_RNA (1)...(19): siRNA sense strand
gcauuuaucugcaggugaa

SEQ ID NO: 2047338 - RNA, 19 nt, Homo sapiens
  misc_RNA (1)...(19): siRNA sense strand
gaaagaggcuuguaaaagu

SEQ ID NO: 2047339 - RNA, 19 nt, Homo sapiens
  misc_RNA (1)...(19): siRNA sense strand
ucaacaaggugaugaagaa

SEQ ID NO: 2047340 - RNA, 19 nt, Homo sapiens
  misc_RNA (1)...(19): siRNA sense strand
caauuacucucaccuuuga

SEQ ID NO: 2047341 - RNA, 19 nt, Homo sapiens
  misc_RNA (1)...(19): siRNA sense strand
gaaggaaucucggaaugau

SEQ ID NO: 2047342 - RNA, 19 nt, Homo sapiens
  misc_RNA (1)...(19): siRNA sense strand
ucaaagaaaucacacuguu

SEQ ID NO: 2047343 - RNA, 19 nt, Homo sapiens
  misc_RNA (1)...(19): siRNA sense strand
ggaaagaaaggaugauaau

SEQ ID NO: 2047344 - RNA, 19 nt, Homo sapiens
  misc_RNA (1)...(19): siRNA sense strand
caggaaaggugcagugcua

SEQ ID NO: 2047345 - RNA, 19 nt, Homo sapiens
  misc_RNA (1)...(19): siRNA sense strand
ucagaagacuuaggcauaa

SEQ ID NO: 2047346 - RNA, 19 nt, Homo sapiens
  misc_RNA (1)...(19): siRNA sense strand
gaaccuccaguaccaguua

SEQ ID NO: 2047347 - RNA, 19 nt, Homo sapiens
  misc_RNA (1)...(19): siRNA sense strand
agaggaagauucugacauu

SEQ ID NO: 2047348 - RNA, 19 nt, Homo sapiens
  misc_RNA (1)...(19): siRNA sense strand
ggaagcguuugauucagua

SEQ ID NO: 2047349 - RNA, 19 nt, Homo sapiens
  misc_RNA (1)...(19): siRNA sense strand
cacaucaggugacucuuua

SEQ ID NO: 2047350 - RNA, 19 nt, Homo sapiens
  misc_RNA (1)...(19): siRNA sense strand
ggaaguacacaaacuaaug

SEQ ID NO: 2047351 - RNA, 19 nt, Homo sapiens
  misc_RNA (1)...(19): siRNA sense strand
gcacuucugucaagcuuuc

SEQ ID NO: 2047352 - RNA, 19 nt, Homo sapiens
  misc_RNA (1)...(19): siRNA sense strand
ggaagaaucacaagaaugg

SEQ ID NO: 2047353 - RNA, 19 nt, Homo sapiens
  misc_RNA (1)...(19): siRNA sense strand
gaaccuacaaccuuuaaga

SEQ ID NO: 2047354 - RNA, 19 nt, Homo sapiens
  misc_RNA (1)...(19): siRNA sense strand
uaaagcaguguguucauua

SEQ ID NO: 2047355 - RNA, 19 nt, Homo sapiens
  misc_RNA (1)...(19): siRNA sense strand
gaagcugaguuacauaaag

SEQ ID NO: 2047356 - RNA, 19 nt, Homo sapiens
  misc_RNA (1)...(19): siRNA sense strand
ccacagagcacguagaaau

SEQ ID NO: 2047357 - RNA, 19 nt, Homo sapiens
  misc_RNA (1)...(19): siRNA sense strand
caaaagaacucaaagauac

SEQ ID NO: 2047358 - RNA, 19 nt, Homo sapiens
  misc_RNA (1)...(19): siRNA sense strand
caaaguggauauucuugau

SEQ ID NO: 2047359 - RNA, 19 nt, Homo sapiens
  misc_RNA (1)...(19): siRNA sense strand
aaacagaccauaaagaaug

SEQ ID NO: 2047360 - RNA, 19 nt, Homo sapiens
  misc_RNA (1)...(19): siRNA sense strand
gcaaccaaaucucccaaug

SEQ ID NO: 2047361 - RNA, 19 nt, Homo sapiens
  misc_RNA (1)...(19): siRNA sense strand
aaugccagcuggugaaaua

SEQ ID NO: 2047362 - RNA, 19 nt, Homo sapiens
  misc_RNA (1)...(19): siRNA sense strand
gacagaagggcacuaagua

SEQ ID NO: 2047363 - RNA, 19 nt, Homo sapiens
  misc_RNA (1)...(19): siRNA sense strand
caacugcacauaagaagaa

SEQ ID NO: 2047364 - RNA, 19 nt, Homo sapiens
  misc_RNA (1)...(19): siRNA sense strand
gaacacagcaacccagcaa

SEQ ID NO: 2047365 - RNA, 19 nt, Homo sapiens
  misc_RNA (1)...(19): siRNA sense strand
aaauuaaugugaccucuga

SEQ ID NO: 2047366 - RNA, 19 nt, Homo sapiens
  misc_RNA (1)...(19): siRNA sense strand
gaccuucuguuccuaguga

SEQ ID NO: 2047367 - RNA, 19 nt, Homo sapiens
  misc_RNA (1)...(19): siRNA sense strand
acuaagaaguguugugaaa

SEQ ID NO: 2047368 - RNA, 19 nt, Homo sapiens
  misc_RNA (1)...(19): siRNA sense strand
aaacaaaggagcuauugaa

SEQ ID NO: 2047369 - RNA, 19 nt, Homo sapiens
  misc_RNA (1)...(19): siRNA sense strand
gaaccuccauuugguccua

SEQ ID NO: 2047370 - RNA, 19 nt, Homo sapiens
  misc_RNA (1)...(19): siRNA sense strand
gaagugaguucugcugaca

SEQ ID NO: 2047371 - RNA, 19 nt, Homo sapiens
  misc_RNA (1)...(19): siRNA sense strand
gacauucccucucuaguag

SEQ ID NO: 2047372 - RNA, 19 nt, Homo sapiens
  misc_RNA (1)...(19): siRNA sense strand
aaaugcacauguaccaaua

SEQ ID NO: 2047373 - RNA, 19 nt, Homo sapiens
  misc_RNA (1)...(19): siRNA sense strand
gagagacacuugauaaagc

SEQ ID NO: 2047374 - RNA, 19 nt, Homo sapiens
  misc_RNA (1)...(19): siRNA sense strand
agacagcccuggagauguu

SEQ ID NO: 2047375 - RNA, 19 nt, Homo sapiens
  misc_RNA (1)...(19): siRNA sense strand
caaugaguaugcugaauuc

SEQ ID NO: 2047376 - RNA, 19 nt, Homo sapiens
  misc_RNA (1)...(19): siRNA sense strand
caaagaaaucacacuguuu

SEQ ID NO: 2047377 - RNA, 19 nt, Homo sapiens
  misc_RNA (1)...(19): siRNA sense strand
gagauguagucauaauaga

SEQ ID NO: 2047378 - RNA, 19 nt, Homo sapiens
  misc_RNA (1)...(19): siRNA sense strand
agaagugugugccgccuua

SEQ ID NO: 2047379 - RNA, 19 nt, Homo sapiens
  misc_RNA (1)...(19): siRNA sense strand
gagaagagcaaccaaaucu

SEQ ID NO: 2047380 - RNA, 19 nt, Homo sapiens
  misc_RNA (1)...(19): siRNA sense strand
gaacuaaggaagaaucaca

SEQ ID NO: 2047381 - RNA, 19 nt, Homo sapiens
  misc_RNA (1)...(19): siRNA sense strand
gaaguggacucaucaucag

SEQ ID NO: 2047382 - RNA, 19 nt, Homo sapiens
  misc_RNA (1)...(19): siRNA sense strand
cauggaggcacuaucauua

SEQ ID NO: 2047383 - RNA, 19 nt, Homo sapiens
  misc_RNA (1)...(19): siRNA sense strand
uaacaguuguggagucaga

SEQ ID NO: 2047384 - RNA, 19 nt, Homo sapiens
  misc_RNA (1)...(19): siRNA sense strand
gcagaggaaauuaauguga

SEQ ID NO: 2047385 - RNA, 19 nt, Homo sapiens
  misc_RNA (1)...(19): siRNA sense strand
gagaugcacucaggauuuc

SEQ ID NO: 2047386 - RNA, 19 nt, Homo sapiens
  misc_RNA (1)...(19): siRNA sense strand
gggaagaagcuaaacaaga

SEQ ID NO: 2047387 - RNA, 19 nt, Homo sapiens
  misc_RNA (1)...(19): siRNA sense strand
uaacagacaagccuacuau

SEQ ID NO: 2047388 - RNA, 19 nt, Homo sapiens
  misc_RNA (1)...(19): siRNA sense strand
ggauucaacugcacauaag

SEQ ID NO: 2047389 - RNA, 19 nt, Homo sapiens
  misc_RNA (1)...(19): siRNA sense strand
cagagagaaugauacacua

SEQ ID NO: 2047390 - RNA, 19 nt, Homo sapiens
  misc_RNA (1)...(19): siRNA sense strand
cgaaacagaagacaaauca

SEQ ID NO: 2047391 - RNA, 19 nt, Homo sapiens
  misc_RNA (1)...(19): siRNA sense strand
gaacucaaagauaccauga

SEQ ID NO: 2047392 - RNA, 19 nt, Homo sapiens
  misc_RNA (1)...(19): siRNA sense strand
ggacugcugcgguaaagaa

SEQ ID NO: 2047393 - RNA, 19 nt, Homo sapiens
  misc_RNA (1)...(19): siRNA sense strand
ccaguuugcuuaagaaugg

SEQ ID NO: 2047394 - RNA, 19 nt, Homo sapiens
  misc_RNA (1)...(19): siRNA sense strand
guagagaggucagccuaga

SEQ ID NO: 2047395 - RNA, 19 nt, Homo sapiens
  misc_RNA (1)...(19): siRNA sense strand
uaaggaagaaucacaagaa

SEQ ID NO: 2047396 - RNA, 19 nt, Homo sapiens
  misc_RNA (1)...(19): siRNA sense strand
gacagaagguguaaauacu

SEQ ID NO: 2047397 - RNA, 19 nt, Homo sapiens
  misc_RNA (1)...(19): siRNA sense strand
ugaugaaccuacaaccuuu

SEQ ID NO: 2047398 - RNA, 19 nt, Homo sapiens
  misc_RNA (1)...(19): siRNA sense strand
gaaacaaaggagcuauuga

SEQ ID NO: 2047399 - RNA, 19 nt, Homo sapiens
  misc_RNA (1)...(19): siRNA sense strand
caagugguauagugaaugu

SEQ ID NO: 2047400 - RNA, 19 nt, Homo sapiens
  misc_RNA (1)...(19): siRNA sense strand
cuaacaauaucaccaccua

SEQ ID NO: 2047401 - RNA, 19 nt, Homo sapiens
  misc_RNA (1)...(19): siRNA sense strand
gcaguguguucauuacaga

SEQ ID NO: 2047402 - RNA, 19 nt, Homo sapiens
  misc_RNA (1)...(19): siRNA sense strand
ggacagaagggcacuaagu

SEQ ID NO: 2047403 - RNA, 19 nt, Homo sapiens
  misc_RNA (1)...(19): siRNA sense strand
gaugaggguuuaucuuucu

SEQ ID NO: 2047404 - RNA, 19 nt, Homo sapiens
  misc_RNA (1)...(19): siRNA sense strand
guuggagacuaacgaaauu

SEQ ID NO: 2047405 - RNA, 19 nt, Homo sapiens
  misc_RNA (1)...(19): siRNA sense strand
ggaaauggaagauggaagu

SEQ ID NO: 2047406 - RNA, 19 nt, Homo sapiens
  misc_RNA (1)...(19): siRNA sense strand
gaucacaccuaccaagaac

SEQ ID NO: 2047407 - RNA, 19 nt, Homo sapiens
  misc_RNA (1)...(19): siRNA sense strand
gagagauguagucauaaua

SEQ ID NO: 2047408 - RNA, 19 nt, Homo sapiens
  misc_RNA (1)...(19): siRNA sense strand
ggaguugauuaagcaagua

SEQ ID NO: 2047409 - RNA, 19 nt, Homo sapiens
  misc_RNA (1)...(19): siRNA sense strand
ugauggagcuuauucuaca

SEQ ID NO: 2047410 - RNA, 19 nt, Homo sapiens
  misc_RNA (1)...(19): siRNA sense strand
cagacgaccucacccagaa

SEQ ID NO: 2047411 - RNA, 19 nt, Homo sapiens
  misc_RNA (1)...(19): siRNA sense strand
aaagauaccaugagaacuu

SEQ ID NO: 2047412 - RNA, 19 nt, Homo sapiens
  misc_RNA (1)...(19): siRNA sense strand
agaaggaguugauuaagca

SEQ ID NO: 2047413 - RNA, 19 nt, Homo sapiens
  misc_RNA (1)...(19): siRNA sense strand
caacugaaggaaauuauca

SEQ ID NO: 2047414 - RNA, 19 nt, Homo sapiens
  misc_RNA (1)...(19): siRNA sense strand
gaugaagaauagcaaccaa

SEQ ID NO: 2047415 - RNA, 19 nt, Homo sapiens
  misc_RNA (1)...(19): siRNA sense strand
cagaauccuuugauacuuc

SEQ ID NO: 2047416 - RNA, 19 nt, Homo sapiens
  misc_RNA (1)...(19): siRNA sense strand
gaggcacuaucauuagcua

SEQ ID NO: 2047417 - RNA, 19 nt, Homo sapiens
  misc_RNA (1)...(19): siRNA sense strand
ggaaaggaggccauacaga

SEQ ID NO: 2047418 - RNA, 19 nt, Homo sapiens
  misc_RNA (1)...(19): siRNA sense strand
gugaaggaaucucggaaug

SEQ ID NO: 2047419 - RNA, 19 nt, Homo sapiens
  misc_RNA (1)...(19): siRNA sense strand
caacccagaucuccauugg

SEQ ID NO: 2047420 - RNA, 19 nt, Homo sapiens
  misc_RNA (1)...(19): siRNA sense strand
gcacauaaacuaaaacaga

SEQ ID NO: 2047421 - RNA, 19 nt, Homo sapiens
  misc_RNA (1)...(19): siRNA sense strand
ccucuaauauuaacugauc

SEQ ID NO: 2047422 - RNA, 19 nt, Homo sapiens
  misc_RNA (1)...(19): siRNA sense strand
ccaaaggccuaucauuuaa

SEQ ID NO: 2047423 - RNA, 19 nt, Homo sapiens
  misc_RNA (1)...(19): siRNA sense strand
caaaaugacuucuggaaua

SEQ ID NO: 2047424 - RNA, 19 nt, Homo sapiens
  misc_RNA (1)...(19): siRNA sense strand
gccaaaggccuaucauuua

SEQ ID NO: 2047425 - RNA, 19 nt, Homo sapiens
  misc_RNA (1)...(19): siRNA sense strand
ggagagagccagacuaaau

SEQ ID NO: 2047426 - RNA, 19 nt, Homo sapiens
  misc_RNA (1)...(19): siRNA sense strand
ucacacaauugcucaguuu

SEQ ID NO: 2047427 - RNA, 19 nt, Homo sapiens
  misc_RNA (1)...(19): siRNA sense strand
gaaauugucucucuaaaag

SEQ ID NO: 2047428 - RNA, 19 nt, Homo sapiens
  misc_RNA (1)...(19): siRNA sense strand
uagaauauccguagugauu

SEQ ID NO: 2047429 - RNA, 19 nt, Homo sapiens
  misc_RNA (1)...(19): siRNA sense strand
ugaagaagcucccaauugc

SEQ ID NO: 2047430 - RNA, 19 nt, Homo sapiens
  misc_RNA (1)...(19): siRNA sense strand
agagaagccuugaggauga

SEQ ID NO: 2047431 - RNA, 19 nt, Homo sapiens
  misc_RNA (1)...(19): siRNA sense strand
gagagagccagacuaaauu

SEQ ID NO: 2047432 - RNA, 19 nt, Homo sapiens
  misc_RNA (1)...(19): siRNA sense strand
ccaugugauucuaccauua

SEQ ID NO: 2047433 - RNA, 19 nt, Homo sapiens
  misc_RNA (1)...(19): siRNA sense strand
ggaacuacacgguuuaugu

SEQ ID NO: 2047434 - RNA, 19 nt, Homo sapiens
  misc_RNA (1)...(19): siRNA sense strand
uaacgacuuugacauugaa

SEQ ID NO: 2047435 - RNA, 19 nt, Homo sapiens
  misc_RNA (1)...(19): siRNA sense strand
ggacaagauuaaagucaag

SEQ ID NO: 2047436 - RNA, 19 nt, Homo sapiens
  misc_RNA (1)...(19): siRNA sense strand
ugcauuaccugucaaagaa

SEQ ID NO: 2047437 - RNA, 19 nt, Homo sapiens
  misc_RNA (1)...(19): siRNA sense strand
aaccucagcuguaauguga

SEQ ID NO: 2047438 - RNA, 19 nt, Homo sapiens
  misc_RNA (1)...(19): siRNA sense strand
ggacagcuuucuccuacuc

SEQ ID NO: 2047439 - RNA, 19 nt, Homo sapiens
  misc_RNA (1)...(19): siRNA sense strand
ugagacaacugggucauug

SEQ ID NO: 2047440 - RNA, 19 nt, Homo sapiens
  misc_RNA (1)...(19): siRNA sense strand
ggacauuuauaacuuucga

SEQ ID NO: 2047441 - RNA, 19 nt, Homo sapiens
  misc_RNA (1)...(19): siRNA sense strand
gaaacaguuccaugugauu

SEQ ID NO: 2047442 - RNA, 19 nt, Homo sapiens
  misc_RNA (1)...(19): siRNA sense strand
aagaguggcuacuuucuau

SEQ ID NO: 2047443 - RNA, 19 nt, Homo sapiens
  misc_RNA (1)...(19): siRNA sense strand
uauccaaccuucugaauac

SEQ ID NO: 2047444 - RNA, 19 nt, Homo sapiens
  misc_RNA (1)...(19): siRNA sense strand
gaacuacacgguuuauguc

SEQ ID NO: 2047445 - RNA, 19 nt, Homo sapiens
  misc_RNA (1)...(19): siRNA sense strand
uauagaauauccguaguga

SEQ ID NO: 2047446 - RNA, 19 nt, Homo sapiens
  misc_RNA (1)...(19): siRNA sense strand
gaagcucccaauugcauuu

SEQ ID NO: 2047447 - RNA, 19 nt, Homo sapiens
  misc_RNA (1)...(19): siRNA sense strand
ccagguaucuguugcaaaa

SEQ ID NO: 2047448 - RNA, 19 nt, Homo sapiens
  misc_RNA (1)...(19): siRNA sense strand
uuacaaugcuaccaacaau

SEQ ID NO: 2047449 - RNA, 19 nt, Homo sapiens
  misc_RNA (1)...(19): siRNA sense strand
caagaguggcuacuuucua

SEQ ID NO: 2047450 - RNA, 19 nt, Homo sapiens
  misc_RNA (1)...(19): siRNA sense strand
cgguuuaugucguuaauau

SEQ ID NO: 2047451 - RNA, 19 nt, Homo sapiens
  misc_RNA (1)...(19): siRNA sense strand
ggaaugggaaauuguuguu

SEQ ID NO: 2047452 - RNA, 19 nt, Homo sapiens
  misc_RNA (1)...(19): siRNA sense strand
ugaaacaguuccaugugau

SEQ ID NO: 2047453 - RNA, 19 nt, Homo sapiens
  misc_RNA (1)...(19): siRNA sense strand
cuacacgguuuaugucguu

SEQ ID NO: 2047454 - RNA, 19 nt, Homo sapiens
  misc_RNA (1)...(19): siRNA sense strand
ccucagcuguaaugugaaa

SEQ ID NO: 2047455 - RNA, 19 nt, Homo sapiens
  misc_RNA (1)...(19): siRNA sense strand
gugauucuaccauuaguaa

SEQ ID NO: 2047456 - RNA, 19 nt, Homo sapiens
  misc_RNA (1)...(19): siRNA sense strand
uuaacgacuuugacauuga

SEQ ID NO: 2047457 - RNA, 19 nt, Homo sapiens
  misc_RNA (1)...(19): siRNA sense strand
ugaauacguucuuccuugu

SEQ ID NO: 2047458 - RNA, 19 nt, Homo sapiens
  misc_RNA (1)...(19): siRNA sense strand
gagaggacaagauuaaagu

SEQ ID NO: 2047459 - RNA, 19 nt, Homo sapiens
  misc_RNA (1)...(19): siRNA sense strand
ugagaugcauguguccuuu

SEQ ID NO: 2047460 - RNA, 19 nt, Homo sapiens
  misc_RNA (1)...(19): siRNA sense strand
ugccaaaggccuaucauuu

SEQ ID NO: 2047461 - RNA, 19 nt, Homo sapiens
  misc_RNA (1)...(19): siRNA sense strand
caauugcauuuaugacuca

SEQ ID NO: 2047462 - RNA, 19 nt, Homo sapiens
  misc_RNA (1)...(19): siRNA sense strand
ggagaggacaagauuaaag

SEQ ID NO: 2047463 - RNA, 19 nt, Homo sapiens
  misc_RNA (1)...(19): siRNA sense strand
uuugggcccuucuaguuua

SEQ ID NO: 2047464 - RNA, 19 nt, Homo sapiens
  misc_RNA (1)...(19): siRNA sense strand
gcucuauugguguaaauuu

SEQ ID NO: 2047465 - RNA, 19 nt, Homo sapiens
  misc_RNA (1)...(19): siRNA sense strand
caacugggucauugucuug

SEQ ID NO: 2047466 - RNA, 19 nt, Homo sapiens
  misc_RNA (1)...(19): siRNA sense strand
gaggcuacauacagugaau

SEQ ID NO: 2047467 - RNA, 19 nt, Homo sapiens
  misc_RNA (1)...(19): siRNA sense strand
ucuccaaccucagcuguaa

SEQ ID NO: 2047468 - RNA, 19 nt, Homo sapiens
  misc_RNA (1)...(19): siRNA sense strand
uuccagagcucagugcuuu

SEQ ID NO: 2047469 - RNA, 19 nt, Homo sapiens
  misc_RNA (1)...(19): siRNA sense strand
agagcaagguggcagaaug

SEQ ID NO: 2047470 - RNA, 19 nt, Homo sapiens
  misc_RNA (1)...(19): siRNA sense strand
gcccaguccucuccuguuc

SEQ ID NO: 2047471 - RNA, 19 nt, Homo sapiens
  misc_RNA (1)...(19): siRNA sense strand
gacuuuagcauccagaaga

SEQ ID NO: 2047472 - RNA, 19 nt, Homo sapiens
  misc_RNA (1)...(19): siRNA sense strand
gcuuugggcccuucuaguu

SEQ ID NO: 2047473 - RNA, 19 nt, Homo sapiens
  misc_RNA (1)...(19): siRNA sense strand
aauuggaacuacacgguuu

SEQ ID NO: 2047474 - RNA, 19 nt, Homo sapiens
  misc_RNA (1)...(19): siRNA sense strand
ccaguccucuccuguucuu

SEQ ID NO: 2047475 - RNA, 19 nt, Homo sapiens
  misc_RNA (1)...(19): siRNA sense strand
ccaaccuucugaauacguu

SEQ ID NO: 2047476 - RNA, 19 nt, Homo sapiens
  misc_RNA (1)...(19): siRNA sense strand
gaaggcuugaggcuacaua

SEQ ID NO: 2047477 - RNA, 19 nt, Homo sapiens
  misc_RNA (1)...(19): siRNA sense strand
gaggacaagauuaaaguca

SEQ ID NO: 2047478 - RNA, 19 nt, Homo sapiens
  misc_RNA (1)...(19): siRNA sense strand
cgacuuugacauugaagaa

SEQ ID NO: 2047479 - RNA, 19 nt, Homo sapiens
  misc_RNA (1)...(19): siRNA sense strand
gucauugucuugccaugga

SEQ ID NO: 2047480 - RNA, 19 nt, Homo sapiens
  misc_RNA (1)...(19): siRNA sense strand
auaaugaguccuuggauga

SEQ ID NO: 2047481 - RNA, 19 nt, Homo sapiens
  misc_RNA (1)...(19): siRNA sense strand
gcuaccaacaauacuaauu

SEQ ID NO: 2047482 - RNA, 19 nt, Homo sapiens
  misc_RNA (1)...(19): siRNA sense strand
ccucuccuguucuuauuug

SEQ ID NO: 2047483 - RNA, 19 nt, Homo sapiens
  misc_RNA (1)...(19): siRNA sense strand
gcuacuuucuauccauuuc

SEQ ID NO: 2047484 - RNA, 19 nt, Homo sapiens
  misc_RNA (1)...(19): siRNA sense strand
gaagaagcucccaauugca

SEQ ID NO: 2047485 - RNA, 19 nt, Homo sapiens
  misc_RNA (1)...(19): siRNA sense strand
augaaacaguuccauguga

SEQ ID NO: 2047486 - RNA, 19 nt, Homo sapiens
  misc_RNA (1)...(19): siRNA sense strand
ccgguuauaucauucagau

SEQ ID NO: 2047487 - RNA, 19 nt, Homo sapiens
  misc_RNA (1)...(19): siRNA sense strand
cagaguugccguguccuua

SEQ ID NO: 2047488 - RNA, 19 nt, Homo sapiens
  misc_RNA (1)...(19): siRNA sense strand
gcucccaauugcauuuaug

SEQ ID NO: 2047489 - RNA, 19 nt, Homo sapiens
  misc_RNA (1)...(19): siRNA sense strand
uugaagaagcucccaauug

SEQ ID NO: 2047490 - RNA, 19 nt, Homo sapiens
  misc_RNA (1)...(19): siRNA sense strand
gcuugaggcuacauacagu

SEQ ID NO: 2047491 - RNA, 19 nt, Homo sapiens
  misc_RNA (1)...(19): siRNA sense strand
ccuaacgacuacccaaaca

SEQ ID NO: 2047492 - RNA, 19 nt, Homo sapiens
  misc_RNA (1)...(19): siRNA sense strand
gaaagcugaaagcaaccua

SEQ ID NO: 2047493 - RNA, 19 nt, Homo sapiens
  misc_RNA (1)...(19): siRNA sense strand
gacagugauuggacagcuu

SEQ ID NO: 2047494 - RNA, 19 nt, Homo sapiens
  misc_RNA (1)...(19): siRNA sense strand
gcauccagaagaaagguuu

SEQ ID NO: 2047495 - RNA, 19 nt, Homo sapiens
  misc_RNA (1)...(19): siRNA sense strand
caugcuacccuaacgacua

SEQ ID NO: 2047496 - RNA, 19 nt, Homo sapiens
  misc_RNA (1)...(19): siRNA sense strand
agauuaaagucaagagaag

SEQ ID NO: 2047497 - RNA, 19 nt, Homo sapiens
  misc_RNA (1)...(19): siRNA sense strand
caagauuaaagucaagaga

SEQ ID NO: 2047498 - RNA, 19 nt, Homo sapiens
  misc_RNA (1)...(19): siRNA sense strand
cuggagaggacaagauuaa

SEQ ID NO: 2047499 - RNA, 19 nt, Homo sapiens
  misc_RNA (1)...(19): siRNA sense strand
ucccaaaccuagcucugaa

SEQ ID NO: 2047500 - RNA, 19 nt, Homo sapiens
  misc_RNA (1)...(19): siRNA sense strand
gcucugccuuguuuggaau

SEQ ID NO: 2047501 - RNA, 19 nt, Homo sapiens
  misc_RNA (1)...(19): siRNA sense strand
ugccuuguuuggaauaauu

SEQ ID NO: 2047502 - RNA, 19 nt, Homo sapiens
  misc_RNA (1)...(19): siRNA sense strand
caacccuucugggaccuuu

SEQ ID NO: 2047503 - RNA, 19 nt, Homo sapiens
  misc_RNA (1)...(19): siRNA sense strand
gagcaagguggcagaaugg

SEQ ID NO: 2047504 - RNA, 19 nt, Homo sapiens
  misc_RNA (1)...(19): siRNA sense strand
gaaugggaaauuguuguug

SEQ ID NO: 2047505 - RNA, 19 nt, Homo sapiens
  misc_RNA (1)...(19): siRNA sense strand
cuauccaaccuucugaaua

SEQ ID NO: 2047506 - RNA, 19 nt, Homo sapiens
  misc_RNA (1)...(19): siRNA sense strand
gcuggagaggacaagauua

SEQ ID NO: 2047507 - RNA, 19 nt, Homo sapiens
  misc_RNA (1)...(19): siRNA sense strand
agagagccagacuaaauuu

SEQ ID NO: 2047508 - RNA, 19 nt, Homo sapiens
  misc_RNA (1)...(19): siRNA sense strand
gauucuaccauuaguaaag

SEQ ID NO: 2047509 - RNA, 19 nt, Homo sapiens
  misc_RNA (1)...(19): siRNA sense strand
caaaugcauccuucacaca

SEQ ID NO: 2047510 - RNA, 19 nt, Homo sapiens
  misc_RNA (1)...(19): siRNA sense strand
uuuaacgacuuugacauug

SEQ ID NO: 2047511 - RNA, 19 nt, Homo sapiens
  misc_RNA (1)...(19): siRNA sense strand
gcgaaugagaugcaugugu

SEQ ID NO: 2047512 - RNA, 19 nt, Homo sapiens
  misc_RNA (1)...(19): siRNA sense strand
aggacaagauuaaagucaa

SEQ ID NO: 2047513 - RNA, 19 nt, Homo sapiens
  misc_RNA (1)...(19): siRNA sense strand
guggcagaauggcucaauu

SEQ ID NO: 2047514 - RNA, 19 nt, Homo sapiens
  misc_RNA (1)...(19): siRNA sense strand
acaguuccaugugauucua

SEQ ID NO: 2047515 - RNA, 19 nt, Homo sapiens
  misc_RNA (1)...(19): siRNA sense strand
gcauuaccugucaaagaaa

SEQ ID NO: 2047516 - RNA, 19 nt, Homo sapiens
  misc_RNA (1)...(19): siRNA sense strand
aaaggccuaucauuuaacu

SEQ ID NO: 2047517 - RNA, 19 nt, Homo sapiens
  misc_RNA (1)...(19): siRNA sense strand
guccucuccuguucuuauu

SEQ ID NO: 2047518 - RNA, 19 nt, Homo sapiens
  misc_RNA (1)...(19): siRNA sense strand
guagucgacuggcaaaaug

SEQ ID NO: 2047519 - RNA, 19 nt, Homo sapiens
  misc_RNA (1)...(19): siRNA sense strand
gaguugccguguccuuaag

SEQ ID NO: 2047520 - RNA, 19 nt, Homo sapiens
  misc_RNA (1)...(19): siRNA sense strand
uggcuacuuucuauccauu

SEQ ID NO: 2047521 - RNA, 19 nt, Homo sapiens
  misc_RNA (1)...(19): siRNA sense strand
caaccucagcuguaaugug

SEQ ID NO: 2047522 - RNA, 19 nt, Homo sapiens
  misc_RNA (1)...(19): siRNA sense strand
ccaaaggccuaucauuuaa

SEQ ID NO: 2047523 - RNA, 19 nt, Homo sapiens
  misc_RNA (1)...(19): siRNA sense strand
caaaaugacuucuggaaua

SEQ ID NO: 2047524 - RNA, 19 nt, Homo sapiens
  misc_RNA (1)...(19): siRNA sense strand
gccaaaggccuaucauuua

SEQ ID NO: 2047525 - RNA, 19 nt, Homo sapiens
  misc_RNA (1)...(19): siRNA sense strand
ggagagagccagacuaaau

SEQ ID NO: 2047526 - RNA, 19 nt, Homo sapiens
  misc_RNA (1)...(19): siRNA sense strand
ucacacaauugcucaguuu

SEQ ID NO: 2047527 - RNA, 19 nt, Homo sapiens
  misc_RNA (1)...(19): siRNA sense strand
gaaauugucucucuaaaag

SEQ ID NO: 2047528 - RNA, 19 nt, Homo sapiens
  misc_RNA (1)...(19): siRNA sense strand
uagaauauccguagugauu

SEQ ID NO: 2047529 - RNA, 19 nt, Homo sapiens
  misc_RNA (1)...(19): siRNA sense strand
ugaagaagcucccaauugc

SEQ ID NO: 2047530 - RNA, 19 nt, Homo sapiens
  misc_RNA (1)...(19): siRNA sense strand
agagaagccuugaggauga

SEQ ID NO: 2047531 - RNA, 19 nt, Homo sapiens
  misc_RNA (1)...(19): siRNA sense strand
gagagagccagacuaaauu

SEQ ID NO: 2047532 - RNA, 19 nt, Homo sapiens
  misc_RNA (1)...(19): siRNA sense strand
ccaugugauucuaccauua

SEQ ID NO: 2047533 - RNA, 19 nt, Homo sapiens
  misc_RNA (1)...(19): siRNA sense strand
ggaacuacacgguuuaugu

SEQ ID NO: 2047534 - RNA, 19 nt, Homo sapiens
  misc_RNA (1)...(19): siRNA sense strand
uaacgacuuugacauugaa

SEQ ID NO: 2047535 - RNA, 19 nt, Homo sapiens
  misc_RNA (1)...(19): siRNA sense strand
ggacaagauuaaagucaag

SEQ ID NO: 2047536 - RNA, 19 nt, Homo sapiens
  misc_RNA (1)...(19): siRNA sense strand
ugcauuaccugucaaagaa

SEQ ID NO: 2047537 - RNA, 19 nt, Homo sapiens
  misc_RNA (1)...(19): siRNA sense strand
aaccucagcuguaauguga

SEQ ID NO: 2047538 - RNA, 19 nt, Homo sapiens
  misc_RNA (1)...(19): siRNA sense strand
ggacagcuuucuccuacuc

SEQ ID NO: 2047539 - RNA, 19 nt, Homo sapiens
  misc_RNA (1)...(19): siRNA sense strand
ugagacaacugggucauug

SEQ ID NO: 2047540 - RNA, 19 nt, Homo sapiens
  misc_RNA (1)...(19): siRNA sense strand
ggacauuuauaacuuucga

SEQ ID NO: 2047541 - RNA, 19 nt, Homo sapiens
  misc_RNA (1)...(19): siRNA sense strand
gaaacaguuccaugugauu

SEQ ID NO: 2047542 - RNA, 19 nt, Homo sapiens
  misc_RNA (1)...(19): siRNA sense strand
aagaguggcuacuuucuau

SEQ ID NO: 2047543 - RNA, 19 nt, Homo sapiens
  misc_RNA (1)...(19): siRNA sense strand
uauccaaccuucugaauac

SEQ ID NO: 2047544 - RNA, 19 nt, Homo sapiens
  misc_RNA (1)...(19): siRNA sense strand
gaacuacacgguuuauguc

SEQ ID NO: 2047545 - RNA, 19 nt, Homo sapiens
  misc_RNA (1)...(19): siRNA sense strand
uauagaauauccguaguga

SEQ ID NO: 2047546 - RNA, 19 nt, Homo sapiens
  misc_RNA (1)...(19): siRNA sense strand
gaagcucccaauugcauuu

SEQ ID NO: 2047547 - RNA, 19 nt, Homo sapiens
  misc_RNA (1)...(19): siRNA sense strand
ccagguaucuguugcaaaa

SEQ ID NO: 2047548 - RNA, 19 nt, Homo sapiens
  misc_RNA (1)...(19): siRNA sense strand
uuacaaugcuaccaacaau

SEQ ID NO: 2047549 - RNA, 19 nt, Homo sapiens
  misc_RNA (1)...(19): siRNA sense strand
caagaguggcuacuuucua

SEQ ID NO: 2047550 - RNA, 19 nt, Homo sapiens
  misc_RNA (1)...(19): siRNA sense strand
cgguuuaugucguuaauau

SEQ ID NO: 2047551 - RNA, 19 nt, Homo sapiens
  misc_RNA (1)...(19): siRNA sense strand
ggaaugggaaauuguuguu

SEQ ID NO: 2047552 - RNA, 19 nt, Homo sapiens
  misc_RNA (1)...(19): siRNA sense strand
ugaaacaguuccaugugau

SEQ ID NO: 2047553 - RNA, 19 nt, Homo sapiens
  misc_RNA (1)...(19): siRNA sense strand
cuacacgguuuaugucguu

SEQ ID NO: 2047554 - RNA, 19 nt, Homo sapiens
  misc_RNA (1)...(19): siRNA sense strand
ccucagcuguaaugugaaa

SEQ ID NO: 2047555 - RNA, 19 nt, Homo sapiens
  misc_RNA (1)...(19): siRNA sense strand
gugauucuaccauuaguaa

SEQ ID NO: 2047556 - RNA, 19 nt, Homo sapiens
  misc_RNA (1)...(19): siRNA sense strand
uuaacgacuuugacauuga

SEQ ID NO: 2047557 - RNA, 19 nt, Homo sapiens
  misc_RNA (1)...(19): siRNA sense strand
ugaauacguucuuccuugu

SEQ ID NO: 2047558 - RNA, 19 nt, Homo sapiens
  misc_RNA (1)...(19): siRNA sense strand
gagaggacaagauuaaagu

SEQ ID NO: 2047559 - RNA, 19 nt, Homo sapiens
  misc_RNA (1)...(19): siRNA sense strand
ugagaugcauguguccuuu

SEQ ID NO: 2047560 - RNA, 19 nt, Homo sapiens
  misc_RNA (1)...(19): siRNA sense strand
ugccaaaggccuaucauuu

SEQ ID NO: 2047561 - RNA, 19 nt, Homo sapiens
  misc_RNA (1)...(19): siRNA sense strand
caauugcauuuaugacuca

SEQ ID NO: 2047562 - RNA, 19 nt, Homo sapiens
  misc_RNA (1)...(19): siRNA sense strand
ggagaggacaagauuaaag

SEQ ID NO: 2047563 - RNA, 19 nt, Homo sapiens
  misc_RNA (1)...(19): siRNA sense strand
uuugggcccuucuaguuua

SEQ ID NO: 2047564 - RNA, 19 nt, Homo sapiens
  misc_RNA (1)...(19): siRNA sense strand
gcucuauugguguaaauuu

SEQ ID NO: 2047565 - RNA, 19 nt, Homo sapiens
  misc_RNA (1)...(19): siRNA sense strand
caacugggucauugucuug

SEQ ID NO: 2047566 - RNA, 19 nt, Homo sapiens
  misc_RNA (1)...(19): siRNA sense strand
gaggcuacauacagugaau

SEQ ID NO: 2047567 - RNA, 19 nt, Homo sapiens
  misc_RNA (1)...(19): siRNA sense strand
ucuccaaccucagcuguaa

SEQ ID NO: 2047568 - RNA, 19 nt, Homo sapiens
  misc_RNA (1)...(19): siRNA sense strand
uuccagagcucagugcuuu

SEQ ID NO: 2047569 - RNA, 19 nt, Homo sapiens
  misc_RNA (1)...(19): siRNA sense strand
agagcaagguggcagaaug

SEQ ID NO: 2047570 - RNA, 19 nt, Homo sapiens
  misc_RNA (1)...(19): siRNA sense strand
gcccaguccucuccuguuc

SEQ ID NO: 2047571 - RNA, 19 nt, Homo sapiens
  misc_RNA (1)...(19): siRNA sense strand
gacuuuagcauccagaaga

SEQ ID NO: 2047572 - RNA, 19 nt, Homo sapiens
  misc_RNA (1)...(19): siRNA sense strand
gcuuugggcccuucuaguu

SEQ ID NO: 2047573 - RNA, 19 nt, Homo sapiens
  misc_RNA (1)...(19): siRNA sense strand
aauuggaacuacacgguuu

SEQ ID NO: 2047574 - RNA, 19 nt, Homo sapiens
  misc_RNA (1)...(19): siRNA sense strand
ccaguccucuccuguucuu

SEQ ID NO: 2047575 - RNA, 19 nt, Homo sapiens
  misc_RNA (1)...(19): siRNA sense strand
ccaaccuucugaauacguu

SEQ ID NO: 2047576 - RNA, 19 nt, Homo sapiens
  misc_RNA (1)...(19): siRNA sense strand
gaaggcuugaggcuacaua

SEQ ID NO: 2047577 - RNA, 19 nt, Homo sapiens
  misc_RNA (1)...(19): siRNA sense strand
gaggacaagauuaaaguca

SEQ ID NO: 2047578 - RNA, 19 nt, Homo sapiens
  misc_RNA (1)...(19): siRNA sense strand
cgacuuugacauugaagaa

SEQ ID NO: 2047579 - RNA, 19 nt, Homo sapiens
  misc_RNA (1)...(19): siRNA sense strand
gucauugucuugccaugga

SEQ ID NO: 2047580 - RNA, 19 nt, Homo sapiens
  misc_RNA (1)...(19): siRNA sense strand
auaaugaguccuuggauga

SEQ ID NO: 2047581 - RNA, 19 nt, Homo sapiens
  misc_RNA (1)...(19): siRNA sense strand
gcuaccaacaauacuaauu

SEQ ID NO: 2047582 - RNA, 19 nt, Homo sapiens
  misc_RNA (1)...(19): siRNA sense strand
ccucuccuguucuuauuug

SEQ ID NO: 2047583 - RNA, 19 nt, Homo sapiens
  misc_RNA (1)...(19): siRNA sense strand
gcuacuuucuauccauuuc

SEQ ID NO: 2047584 - RNA, 19 nt, Homo sapiens
  misc_RNA (1)...(19): siRNA sense strand
gaagaagcucccaauugca

SEQ ID NO: 2047585 - RNA, 19 nt, Homo sapiens
  misc_RNA (1)...(19): siRNA sense strand
augaaacaguuccauguga

SEQ ID NO: 2047586 - RNA, 19 nt, Homo sapiens
  misc_RNA (1)...(19): siRNA sense strand
ccgguuauaucauucagau

SEQ ID NO: 2047587 - RNA, 19 nt, Homo sapiens
  misc_RNA (1)...(19): siRNA sense strand
cagaguugccguguccuua

SEQ ID NO: 2047588 - RNA, 19 nt, Homo sapiens
  misc_RNA (1)...(19): siRNA sense strand
gcucccaauugcauuuaug

SEQ ID NO: 2047589 - RNA, 19 nt, Homo sapiens
  misc_RNA (1)...(19): siRNA sense strand
uugaagaagcucccaauug

SEQ ID NO: 2047590 - RNA, 19 nt, Homo sapiens
  misc_RNA (1)...(19): siRNA sense strand
gcuugaggcuacauacagu

SEQ ID NO: 2047591 - RNA, 19 nt, Homo sapiens
  misc_RNA (1)...(19): siRNA sense strand
ccuaacgacuacccaaaca

SEQ ID NO: 2047592 - RNA, 19 nt, Homo sapiens
  misc_RNA (1)...(19): siRNA sense strand
gaaagcugaaagcaaccua

SEQ ID NO: 2047593 - RNA, 19 nt, Homo sapiens
  misc_RNA (1)...(19): siRNA sense strand
gacagugauuggacagcuu

SEQ ID NO: 2047594 - RNA, 19 nt, Homo sapiens
  misc_RNA (1)...(19): siRNA sense strand
gcauccagaagaaagguuu

SEQ ID NO: 2047595 - RNA, 19 nt, Homo sapiens
  misc_RNA (1)...(19): siRNA sense strand
caugcuacccuaacgacua

SEQ ID NO: 2047596 - RNA, 19 nt, Homo sapiens
  misc_RNA (1)...(19): siRNA sense strand
agauuaaagucaagagaag

SEQ ID NO: 2047597 - RNA, 19 nt, Homo sapiens
  misc_RNA (1)...(19): siRNA sense strand
caagauuaaagucaagaga

SEQ ID NO: 2047598 - RNA, 19 nt, Homo sapiens
  misc_RNA (1)...(19): siRNA sense strand
cuggagaggacaagauuaa

SEQ ID NO: 2047599 - RNA, 19 nt, Homo sapiens
  misc_RNA (1)...(19): siRNA sense strand
ucccaaaccuagcucugaa

SEQ ID NO: 2047600 - RNA, 19 nt, Homo sapiens
  misc_RNA (1)...(19): siRNA sense strand
gcucugccuuguuuggaau

SEQ ID NO: 2047601 - RNA, 19 nt, Homo sapiens
  misc_RNA (1)...(19): siRNA sense strand
ugccuuguuuggaauaauu

SEQ ID NO: 2047602 - RNA, 19 nt, Homo sapiens
  misc_RNA (1)...(19): siRNA sense strand
caacccuucugggaccuuu

SEQ ID NO: 2047603 - RNA, 19 nt, Homo sapiens
  misc_RNA (1)...(19): siRNA sense strand
gagcaagguggcagaaugg

SEQ ID NO: 2047604 - RNA, 19 nt, Homo sapiens
  misc_RNA (1)...(19): siRNA sense strand
gaaugggaaauuguuguug

SEQ ID NO: 2047605 - RNA, 19 nt, Homo sapiens
  misc_RNA (1)...(19): siRNA sense strand
cuauccaaccuucugaaua

SEQ ID NO: 2047606 - RNA, 19 nt, Homo sapiens
  misc_RNA (1)...(19): siRNA sense strand
gcuggagaggacaagauua

SEQ ID NO: 2047607 - RNA, 19 nt, Homo sapiens
  misc_RNA (1)...(19): siRNA sense strand
agagagccagacuaaauuu

SEQ ID NO: 2047608 - RNA, 19 nt, Homo sapiens
  misc_RNA (1)...(19): siRNA sense strand
gauucuaccauuaguaaag

SEQ ID NO: 2047609 - RNA, 19 nt, Homo sapiens
  misc_RNA (1)...(19): siRNA sense strand
caaaugcauccuucacaca

SEQ ID NO: 2047610 - RNA, 19 nt, Homo sapiens
  misc_RNA (1)...(19): siRNA sense strand
uuuaacgacuuugacauug

SEQ ID NO: 2047611 - RNA, 19 nt, Homo sapiens
  misc_RNA (1)...(19): siRNA sense strand
gcgaaugagaugcaugugu

SEQ ID NO: 2047612 - RNA, 19 nt, Homo sapiens
  misc_RNA (1)...(19): siRNA sense strand
aggacaagauuaaagucaa

SEQ ID NO: 2047613 - RNA, 19 nt, Homo sapiens
  misc_RNA (1)...(19): siRNA sense strand
guggcagaauggcucaauu

SEQ ID NO: 2047614 - RNA, 19 nt, Homo sapiens
  misc_RNA (1)...(19): siRNA sense strand
acaguuccaugugauucua

SEQ ID NO: 2047615 - RNA, 19 nt, Homo sapiens
  misc_RNA (1)...(19): siRNA sense strand
gcauuaccugucaaagaaa

SEQ ID NO: 2047616 - RNA, 19 nt, Homo sapiens
  misc_RNA (1)...(19): siRNA sense strand
aaaggccuaucauuuaacu

SEQ ID NO: 2047617 - RNA, 19 nt, Homo sapiens
  misc_RNA (1)...(19): siRNA sense strand
guccucuccuguucuuauu

SEQ ID NO: 2047618 - RNA, 19 nt, Homo sapiens
  misc_RNA (1)...(19): siRNA sense strand
guagucgacuggcaaaaug

SEQ ID NO: 2047619 - RNA, 19 nt, Homo sapiens
  misc_RNA (1)...(19): siRNA sense strand
gaguugccguguccuuaag

SEQ ID NO: 2047620 - RNA, 19 nt, Homo sapiens
  misc_RNA (1)...(19): siRNA sense strand
uggcuacuuucuauccauu

SEQ ID NO: 2047621 - RNA, 19 nt, Homo sapiens
  misc_RNA (1)...(19): siRNA sense strand
caaccucagcuguaaugug

SEQ ID NO: 2047622 - RNA, 19 nt, Homo sapiens
  misc_RNA (1)...(19): siRNA sense strand
ccacugagcugguccauca

SEQ ID NO: 2047623 - RNA, 19 nt, Homo sapiens
  misc_RNA (1)...(19): siRNA sense strand
ggacaaacuuucugaacau

SEQ ID NO: 2047624 - RNA, 19 nt, Homo sapiens
  misc_RNA (1)...(19): siRNA sense strand
gaacaccauugaccagcua

SEQ ID NO: 2047625 - RNA, 19 nt, Homo sapiens
  misc_RNA (1)...(19): siRNA sense strand
cagcacagcaggaacauua

SEQ ID NO: 2047626 - RNA, 19 nt, Homo sapiens
  misc_RNA (1)...(19): siRNA sense strand
ggagagaaacgaccagauu

SEQ ID NO: 2047627 - RNA, 19 nt, Homo sapiens
  misc_RNA (1)...(19): siRNA sense strand
acaaggagcugcagaugga

SEQ ID NO: 2047628 - RNA, 19 nt, Homo sapiens
  misc_RNA (1)...(19): siRNA sense strand
ucacaaagcugggaagaag

SEQ ID NO: 2047629 - RNA, 19 nt, Homo sapiens
  misc_RNA (1)...(19): siRNA sense strand
agacaaagacgucaccuaa

SEQ ID NO: 2047630 - RNA, 19 nt, Homo sapiens
  misc_RNA (1)...(19): siRNA sense strand
ggauagaaguaguucacaa

SEQ ID NO: 2047631 - RNA, 19 nt, Homo sapiens
  misc_RNA (1)...(19): siRNA sense strand
uggaagagcugaaggaaca

SEQ ID NO: 2047632 - RNA, 19 nt, Homo sapiens
  misc_RNA (1)...(19): siRNA sense strand
gauagaaguaguucacaaa

SEQ ID NO: 2047633 - RNA, 19 nt, Homo sapiens
  misc_RNA (1)...(19): siRNA sense strand
caagagggauguggauaga

SEQ ID NO: 2047634 - RNA, 19 nt, Homo sapiens
  misc_RNA (1)...(19): siRNA sense strand
gggacaaacuuucugaaca

SEQ ID NO: 2047635 - RNA, 19 nt, Homo sapiens
  misc_RNA (1)...(19): siRNA sense strand
gaggugagcucuggcaaca

SEQ ID NO: 2047636 - RNA, 19 nt, Homo sapiens
  misc_RNA (1)...(19): siRNA sense strand
gcagagggcacccaacuuc

SEQ ID NO: 2047637 - RNA, 19 nt, Homo sapiens
  misc_RNA (1)...(19): siRNA sense strand
ggcaguaaauccacagaga

SEQ ID NO: 2047638 - RNA, 19 nt, Homo sapiens
  misc_RNA (1)...(19): siRNA sense strand
ucugugagcugcaagaaga

SEQ ID NO: 2047639 - RNA, 19 nt, Homo sapiens
  misc_RNA (1)...(19): siRNA sense strand
gacaaacuuucugaacauu

SEQ ID NO: 2047640 - RNA, 19 nt, Homo sapiens
  misc_RNA (1)...(19): siRNA sense strand
ccaaggaacacaucuggaa

SEQ ID NO: 2047641 - RNA, 19 nt, Homo sapiens
  misc_RNA (1)...(19): siRNA sense strand
gaauggaggaggaggaaga

SEQ ID NO: 2047642 - RNA, 19 nt, Homo sapiens
  misc_RNA (1)...(19): siRNA sense strand
gcuggccgcuccucuucua

SEQ ID NO: 2047643 - RNA, 19 nt, Homo sapiens
  misc_RNA (1)...(19): siRNA sense strand
gcacaaacggauuucugaa

SEQ ID NO: 2047644 - RNA, 19 nt, Homo sapiens
  misc_RNA (1)...(19): siRNA sense strand
gcaucaggauuccgaguca

SEQ ID NO: 2047645 - RNA, 19 nt, Homo sapiens
  misc_RNA (1)...(19): siRNA sense strand
acaaacggauuucugaaca

SEQ ID NO: 2047646 - RNA, 19 nt, Homo sapiens
  misc_RNA (1)...(19): siRNA sense strand
ggugagcucuggcaacagu

SEQ ID NO: 2047647 - RNA, 19 nt, Homo sapiens
  misc_RNA (1)...(19): siRNA sense strand
aagcagcccuggcaaagga

SEQ ID NO: 2047648 - RNA, 19 nt, Homo sapiens
  misc_RNA (1)...(19): siRNA sense strand
gaaacgaccagauucuucu

SEQ ID NO: 2047649 - RNA, 19 nt, Homo sapiens
  misc_RNA (1)...(19): siRNA sense strand
ggagcuggaggcagagaua

SEQ ID NO: 2047650 - RNA, 19 nt, Homo sapiens
  misc_RNA (1)...(19): siRNA sense strand
gagagaaacgaccagauuc

SEQ ID NO: 2047651 - RNA, 19 nt, Homo sapiens
  misc_RNA (1)...(19): siRNA sense strand
gagaagcagcccuggcaaa

SEQ ID NO: 2047652 - RNA, 19 nt, Homo sapiens
  misc_RNA (1)...(19): siRNA sense strand
acaaagacgucaccuaagc

SEQ ID NO: 2047653 - RNA, 19 nt, Homo sapiens
  misc_RNA (1)...(19): siRNA sense strand
gcaccugccugcuccuucu

SEQ ID NO: 2047654 - RNA, 19 nt, Homo sapiens
  misc_RNA (1)...(19): siRNA sense strand
gagcgguaccucaguguga

SEQ ID NO: 2047655 - RNA, 19 nt, Homo sapiens
  misc_RNA (1)...(19): siRNA sense strand
gagaccaggccaucuguga

SEQ ID NO: 2047656 - RNA, 19 nt, Homo sapiens
  misc_RNA (1)...(19): siRNA sense strand
ugugaagucucucccagaa

SEQ ID NO: 2047657 - RNA, 19 nt, Homo sapiens
  misc_RNA (1)...(19): siRNA sense strand
gaacuacccacucccugau

SEQ ID NO: 2047658 - RNA, 19 nt, Homo sapiens
  misc_RNA (1)...(19): siRNA sense strand
gcagauggagcaaguuuac

SEQ ID NO: 2047659 - RNA, 19 nt, Homo sapiens
  misc_RNA (1)...(19): siRNA sense strand
gcacaaggagcugcagaug

SEQ ID NO: 2047660 - RNA, 19 nt, Homo sapiens
  misc_RNA (1)...(19): siRNA sense strand
gacagacaguggcuuugug

SEQ ID NO: 2047661 - RNA, 19 nt, Homo sapiens
  misc_RNA (1)...(19): siRNA sense strand
gugacucccuggaaguuga

SEQ ID NO: 2047662 - RNA, 19 nt, Homo sapiens
  misc_RNA (1)...(19): siRNA sense strand
ucggaagucuggagguuga

SEQ ID NO: 2047663 - RNA, 19 nt, Homo sapiens
  misc_RNA (1)...(19): siRNA sense strand
ggaggaggaggaagaagga

SEQ ID NO: 2047664 - RNA, 19 nt, Homo sapiens
  misc_RNA (1)...(19): siRNA sense strand
agaaguaguucacaaagcu

SEQ ID NO: 2047665 - RNA, 19 nt, Homo sapiens
  misc_RNA (1)...(19): siRNA sense strand
gauagauggaggagagaaa

SEQ ID NO: 2047666 - RNA, 19 nt, Homo sapiens
  misc_RNA (1)...(19): siRNA sense strand
uccaucagcuccaggaaga

SEQ ID NO: 2047667 - RNA, 19 nt, Homo sapiens
  misc_RNA (1)...(19): siRNA sense strand
aggcaucccuggcuagaga

SEQ ID NO: 2047668 - RNA, 19 nt, Homo sapiens
  misc_RNA (1)...(19): siRNA sense strand
ggacaagagggauguggau

SEQ ID NO: 2047669 - RNA, 19 nt, Homo sapiens
  misc_RNA (1)...(19): siRNA sense strand
gacaagagggauguggaua

SEQ ID NO: 2047670 - RNA, 19 nt, Homo sapiens
  misc_RNA (1)...(19): siRNA sense strand
ggauguggauagaaguagu

SEQ ID NO: 2047671 - RNA, 19 nt, Homo sapiens
  misc_RNA (1)...(19): siRNA sense strand
acaggcuccucaccaagua

SEQ ID NO: 2047672 - RNA, 19 nt, Homo sapiens
  misc_RNA (1)...(19): siRNA sense strand
ccagaagccacaacaggaa

SEQ ID NO: 2047673 - RNA, 19 nt, Homo sapiens
  misc_RNA (1)...(19): siRNA sense strand
ccaauacacaggccacgaa

SEQ ID NO: 2047674 - RNA, 19 nt, Homo sapiens
  misc_RNA (1)...(19): siRNA sense strand
caccggcucucccacauca

SEQ ID NO: 2047675 - RNA, 19 nt, Homo sapiens
  misc_RNA (1)...(19): siRNA sense strand
gcagcaucccaccaaagua

SEQ ID NO: 2047676 - RNA, 19 nt, Homo sapiens
  misc_RNA (1)...(19): siRNA sense strand
cagauugucccuccaggaa

SEQ ID NO: 2047677 - RNA, 19 nt, Homo sapiens
  misc_RNA (1)...(19): siRNA sense strand
gccacucccuucccgauuc

SEQ ID NO: 2047678 - RNA, 19 nt, Homo sapiens
  misc_RNA (1)...(19): siRNA sense strand
gaacagccccuucccaaca

SEQ ID NO: 2047679 - RNA, 19 nt, Homo sapiens
  misc_RNA (1)...(19): siRNA sense strand
ggcacaaacggauuucuga

SEQ ID NO: 2047680 - RNA, 19 nt, Homo sapiens
  misc_RNA (1)...(19): siRNA sense strand
guuccuggcucagaguuug

SEQ ID NO: 2047681 - RNA, 19 nt, Homo sapiens
  misc_RNA (1)...(19): siRNA sense strand
cuaugaagccaccagguuu

SEQ ID NO: 2047682 - RNA, 19 nt, Homo sapiens
  misc_RNA (1)...(19): siRNA sense strand
gagaauggaggaggaggaa

SEQ ID NO: 2047683 - RNA, 19 nt, Homo sapiens
  misc_RNA (1)...(19): siRNA sense strand
agagggauguggauagaag

SEQ ID NO: 2047684 - RNA, 19 nt, Homo sapiens
  misc_RNA (1)...(19): siRNA sense strand
gaugagaagcucgcuguca

SEQ ID NO: 2047685 - RNA, 19 nt, Homo sapiens
  misc_RNA (1)...(19): siRNA sense strand
caaacuuucugaacauucc

SEQ ID NO: 2047686 - RNA, 19 nt, Homo sapiens
  misc_RNA (1)...(19): siRNA sense strand
ccacgaauaccauguucug

SEQ ID NO: 2047687 - RNA, 19 nt, Homo sapiens
  misc_RNA (1)...(19): siRNA sense strand
ggagggaagcggcaucucu

SEQ ID NO: 2047688 - RNA, 19 nt, Homo sapiens
  misc_RNA (1)...(19): siRNA sense strand
gugacagccuugauucuac

SEQ ID NO: 2047689 - RNA, 19 nt, Homo sapiens
  misc_RNA (1)...(19): siRNA sense strand
ggccgcuccucuucuaaug

SEQ ID NO: 2047690 - RNA, 19 nt, Homo sapiens
  misc_RNA (1)...(19): siRNA sense strand
caguaaauccacagagaga

SEQ ID NO: 2047691 - RNA, 19 nt, Homo sapiens
  misc_RNA (1)...(19): siRNA sense strand
gcaucccaccaaaguagua

SEQ ID NO: 2047692 - RNA, 19 nt, Homo sapiens
  misc_RNA (1)...(19): siRNA sense strand
guugagcaguggagaagca

SEQ ID NO: 2047693 - RNA, 19 nt, Homo sapiens
  misc_RNA (1)...(19): siRNA sense strand
gaggugaagagcagauugu

SEQ ID NO: 2047694 - RNA, 19 nt, Homo sapiens
  misc_RNA (1)...(19): siRNA sense strand
caaacggauuucugaacag

SEQ ID NO: 2047695 - RNA, 19 nt, Homo sapiens
  misc_RNA (1)...(19): siRNA sense strand
cagcaucccaccaaaguag

SEQ ID NO: 2047696 - RNA, 19 nt, Homo sapiens
  misc_RNA (1)...(19): siRNA sense strand
ggcugcaacuccagggaaa

SEQ ID NO: 2047697 - RNA, 19 nt, Homo sapiens
  misc_RNA (1)...(19): siRNA sense strand
gggagaagaggcugaagca

SEQ ID NO: 2047698 - RNA, 19 nt, Homo sapiens
  misc_RNA (1)...(19): siRNA sense strand
gagcugaaggaacacauag

SEQ ID NO: 2047699 - RNA, 19 nt, Homo sapiens
  misc_RNA (1)...(19): siRNA sense strand
ggggacgccuggaagauuu

SEQ ID NO: 2047700 - RNA, 19 nt, Homo sapiens
  misc_RNA (1)...(19): siRNA sense strand
ccacggagaagaugguauc

SEQ ID NO: 2047701 - RNA, 19 nt, Homo sapiens
  misc_RNA (1)...(19): siRNA sense strand
gagagagcuccucaagguu

SEQ ID NO: 2047702 - RNA, 19 nt, Homo sapiens
  misc_RNA (1)...(19): siRNA sense strand
ggccagggguucucugauu

SEQ ID NO: 2047703 - RNA, 19 nt, Homo sapiens
  misc_RNA (1)...(19): siRNA sense strand
agagacagacaguggcuuu

SEQ ID NO: 2047704 - RNA, 19 nt, Homo sapiens
  misc_RNA (1)...(19): siRNA sense strand
gcagcaugccacagauaga

SEQ ID NO: 2047705 - RNA, 19 nt, Homo sapiens
  misc_RNA (1)...(19): siRNA sense strand
ggagccaagcacagaggua

SEQ ID NO: 2047706 - RNA, 19 nt, Homo sapiens
  misc_RNA (1)...(19): siRNA sense strand
guggacagcccagcaaguu

SEQ ID NO: 2047707 - RNA, 19 nt, Homo sapiens
  misc_RNA (1)...(19): siRNA sense strand
caggguaccccaagaauuu

SEQ ID NO: 2047708 - RNA, 19 nt, Homo sapiens
  misc_RNA (1)...(19): siRNA sense strand
acuacccacucccugauuu

SEQ ID NO: 2047709 - RNA, 19 nt, Homo sapiens
  misc_RNA (1)...(19): siRNA sense strand
ccacucccuucccgauuca

SEQ ID NO: 2047710 - RNA, 19 nt, Homo sapiens
  misc_RNA (1)...(19): siRNA sense strand
gguggcuucuggcgaacaa

SEQ ID NO: 2047711 - RNA, 19 nt, Homo sapiens
  misc_RNA (1)...(19): siRNA sense strand
ggccacgaauaccauguuc

SEQ ID NO: 2047712 - RNA, 19 nt, Homo sapiens
  misc_RNA (1)...(19): siRNA sense strand
gauguggauagaaguaguu

SEQ ID NO: 2047713 - RNA, 19 nt, Homo sapiens
  misc_RNA (1)...(19): siRNA sense strand
gcuagagacgggcacaugu

SEQ ID NO: 2047714 - RNA, 19 nt, Homo sapiens
  misc_RNA (1)...(19): siRNA sense strand
ccuagugacagccuugauu

SEQ ID NO: 2047715 - RNA, 19 nt, Homo sapiens
  misc_RNA (1)...(19): siRNA sense strand
aacauuagcccagcccuuu

SEQ ID NO: 2047716 - RNA, 19 nt, Homo sapiens
  misc_RNA (1)...(19): siRNA sense strand
gcccucagcccaaggaaca

SEQ ID NO: 2047717 - RNA, 19 nt, Homo sapiens
  misc_RNA (1)...(19): siRNA sense strand
gacaaagacgucaccuaag

SEQ ID NO: 2047718 - RNA, 19 nt, Homo sapiens
  misc_RNA (1)...(19): siRNA sense strand
auacacaggccacgaauac

SEQ ID NO: 2047719 - RNA, 19 nt, Homo sapiens
  misc_RNA (1)...(19): siRNA sense strand
acaggcagcucgggaugga

SEQ ID NO: 2047720 - RNA, 19 nt, Homo sapiens
  misc_RNA (1)...(19): siRNA sense strand
caucagcacagcaggaaca

SEQ ID NO: 2047721 - RNA, 19 nt, Homo sapiens
  misc_RNA (1)...(19): siRNA sense strand
gcccagcaaguucccauga

SEQ ID NO: 2047722 - RNA, 19 nt, Homo sapiens
  misc_RNA (1)...(19): siRNA sense strand
uaaaggagcuggagagaaa

SEQ ID NO: 2047723 - RNA, 19 nt, Homo sapiens
  misc_RNA (1)...(19): siRNA sense strand
gauacaaacuggcauuuaa

SEQ ID NO: 2047724 - RNA, 19 nt, Homo sapiens
  misc_RNA (1)...(19): siRNA sense strand
gcaaacagucuuccuaaua

SEQ ID NO: 2047725 - RNA, 19 nt, Homo sapiens
  misc_RNA (1)...(19): siRNA sense strand
gaaaagagccuuacacuaa

SEQ ID NO: 2047726 - RNA, 19 nt, Homo sapiens
  misc_RNA (1)...(19): siRNA sense strand
gacauuaucucguuugauu

SEQ ID NO: 2047727 - RNA, 19 nt, Homo sapiens
  misc_RNA (1)...(19): siRNA sense strand
acaacaggcucgagaauua

SEQ ID NO: 2047728 - RNA, 19 nt, Homo sapiens
  misc_RNA (1)...(19): siRNA sense strand
gaaaccagcugaagcguau

SEQ ID NO: 2047729 - RNA, 19 nt, Homo sapiens
  misc_RNA (1)...(19): siRNA sense strand
gcaaugaguuuaccaggaa

SEQ ID NO: 2047730 - RNA, 19 nt, Homo sapiens
  misc_RNA (1)...(19): siRNA sense strand
gaaccaggauuucaguauu

SEQ ID NO: 2047731 - RNA, 19 nt, Homo sapiens
  misc_RNA (1)...(19): siRNA sense strand
gagauggcauggaaauaua

SEQ ID NO: 2047732 - RNA, 19 nt, Homo sapiens
  misc_RNA (1)...(19): siRNA sense strand
cugcaaagcuuaugaauau

SEQ ID NO: 2047733 - RNA, 19 nt, Homo sapiens
  misc_RNA (1)...(19): siRNA sense strand
gcacauuaauggaagguaa

SEQ ID NO: 2047734 - RNA, 19 nt, Homo sapiens
  misc_RNA (1)...(19): siRNA sense strand
gauagacguucaccgcuua

SEQ ID NO: 2047735 - RNA, 19 nt, Homo sapiens
  misc_RNA (1)...(19): siRNA sense strand
gaaaugguaugacaaagca

SEQ ID NO: 2047736 - RNA, 19 nt, Homo sapiens
  misc_RNA (1)...(19): siRNA sense strand
gggaauauauugacagaau

SEQ ID NO: 2047737 - RNA, 19 nt, Homo sapiens
  misc_RNA (1)...(19): siRNA sense strand
gauuauaccuggcacaaga

SEQ ID NO: 2047738 - RNA, 19 nt, Homo sapiens
  misc_RNA (1)...(19): siRNA sense strand
gagcaagcauuaaaucaga

SEQ ID NO: 2047739 - RNA, 19 nt, Homo sapiens
  misc_RNA (1)...(19): siRNA sense strand
caacuagccuugcaggauu

SEQ ID NO: 2047740 - RNA, 19 nt, Homo sapiens
  misc_RNA (1)...(19): siRNA sense strand
ugagagagcuuuuaguuua

SEQ ID NO: 2047741 - RNA, 19 nt, Homo sapiens
  misc_RNA (1)...(19): siRNA sense strand
caaacagucuuccuaauag

SEQ ID NO: 2047742 - RNA, 19 nt, Homo sapiens
  misc_RNA (1)...(19): siRNA sense strand
gaacguaagccagauaauu

SEQ ID NO: 2047743 - RNA, 19 nt, Homo sapiens
  misc_RNA (1)...(19): siRNA sense strand
ggugagagacuauccuuua

SEQ ID NO: 2047744 - RNA, 19 nt, Homo sapiens
  misc_RNA (1)...(19): siRNA sense strand
uggcugagcucuuauuaaa

SEQ ID NO: 2047745 - RNA, 19 nt, Homo sapiens
  misc_RNA (1)...(19): siRNA sense strand
gggcaaagcacuuaucaaa

SEQ ID NO: 2047746 - RNA, 19 nt, Homo sapiens
  misc_RNA (1)...(19): siRNA sense strand
caagauguaucacuuuguu

SEQ ID NO: 2047747 - RNA, 19 nt, Homo sapiens
  misc_RNA (1)...(19): siRNA sense strand
gcaagaaucugugcaacug

SEQ ID NO: 2047748 - RNA, 19 nt, Homo sapiens
  misc_RNA (1)...(19): siRNA sense strand
gaacaagcauuaaauaccu

SEQ ID NO: 2047749 - RNA, 19 nt, Homo sapiens
  misc_RNA (1)...(19): siRNA sense strand
uaaaugaaauccagcaauc

SEQ ID NO: 2047750 - RNA, 19 nt, Homo sapiens
  misc_RNA (1)...(19): siRNA sense strand
aaacguaacuccagagcaa

SEQ ID NO: 2047751 - RNA, 19 nt, Homo sapiens
  misc_RNA (1)...(19): siRNA sense strand
ggauggacguugucaaguu

SEQ ID NO: 2047752 - RNA, 19 nt, Homo sapiens
  misc_RNA (1)...(19): siRNA sense strand
agaaauugcugaaagaaug

SEQ ID NO: 2047753 - RNA, 19 nt, Homo sapiens
  misc_RNA (1)...(19): siRNA sense strand
uaauaaagcucggaaagau

SEQ ID NO: 2047754 - RNA, 19 nt, Homo sapiens
  misc_RNA (1)...(19): siRNA sense strand
ggcaaucacuuacuaugaa

SEQ ID NO: 2047755 - RNA, 19 nt, Homo sapiens
  misc_RNA (1)...(19): siRNA sense strand
gugaaggaauuaagaggua

SEQ ID NO: 2047756 - RNA, 19 nt, Homo sapiens
  misc_RNA (1)...(19): siRNA sense strand
cuaugaagcugcucugaaa

SEQ ID NO: 2047757 - RNA, 19 nt, Homo sapiens
  misc_RNA (1)...(19): siRNA sense strand
gaagagggacuccaagaug

SEQ ID NO: 2047758 - RNA, 19 nt, Homo sapiens
  misc_RNA (1)...(19): siRNA sense strand
ugaccuggcugagcucuua

SEQ ID NO: 2047759 - RNA, 19 nt, Homo sapiens
  misc_RNA (1)...(19): siRNA sense strand
ggugaugcauacaugaaua

SEQ ID NO: 2047760 - RNA, 19 nt, Homo sapiens
  misc_RNA (1)...(19): siRNA sense strand
uaucugagcuucuguccaa

SEQ ID NO: 2047761 - RNA, 19 nt, Homo sapiens
  misc_RNA (1)...(19): siRNA sense strand
agaaauagcagacgcaauu

SEQ ID NO: 2047762 - RNA, 19 nt, Homo sapiens
  misc_RNA (1)...(19): siRNA sense strand
guagucaacuuauucuuca

SEQ ID NO: 2047763 - RNA, 19 nt, Homo sapiens
  misc_RNA (1)...(19): siRNA sense strand
ggaaaacuauugcuuaaug

SEQ ID NO: 2047764 - RNA, 19 nt, Homo sapiens
  misc_RNA (1)...(19): siRNA sense strand
gaaauagcagacgcaauua

SEQ ID NO: 2047765 - RNA, 19 nt, Homo sapiens
  misc_RNA (1)...(19): siRNA sense strand
gagagacuauccuuuauac

SEQ ID NO: 2047766 - RNA, 19 nt, Homo sapiens
  misc_RNA (1)...(19): siRNA sense strand
gcacauuggucgccaugau

SEQ ID NO: 2047767 - RNA, 19 nt, Homo sapiens
  misc_RNA (1)...(19): siRNA sense strand
gagcaagcauauacagaug

SEQ ID NO: 2047768 - RNA, 19 nt, Homo sapiens
  misc_RNA (1)...(19): siRNA sense strand
caauggcaaucacuuacua

SEQ ID NO: 2047769 - RNA, 19 nt, Homo sapiens
  misc_RNA (1)...(19): siRNA sense strand
ggacguagucaacuuauuc

SEQ ID NO: 2047770 - RNA, 19 nt, Homo sapiens
  misc_RNA (1)...(19): siRNA sense strand
gaacacaaucccucuuaug

SEQ ID NO: 2047771 - RNA, 19 nt, Homo sapiens
  misc_RNA (1)...(19): siRNA sense strand
gagaugcgccagaauuauu

SEQ ID NO: 2047772 - RNA, 19 nt, Homo sapiens
  misc_RNA (1)...(19): siRNA sense strand
ugaaauuugugcagagauu

SEQ ID NO: 2047773 - RNA, 19 nt, Homo sapiens
  misc_RNA (1)...(19): siRNA sense strand
gauacaagccaucguuuau

SEQ ID NO: 2047774 - RNA, 19 nt, Homo sapiens
  misc_RNA (1)...(19): siRNA sense strand
ggaauuaagagguauggaa

SEQ ID NO: 2047775 - RNA, 19 nt, Homo sapiens
  misc_RNA (1)...(19): siRNA sense strand
gcaagggaauauauugaca

SEQ ID NO: 2047776 - RNA, 19 nt, Homo sapiens
  misc_RNA (1)...(19): siRNA sense strand
gaauuggaaugcuauugau

SEQ ID NO: 2047777 - RNA, 19 nt, Homo sapiens
  misc_RNA (1)...(19): siRNA sense strand
ggaauauauugacagaaug

SEQ ID NO: 2047778 - RNA, 19 nt, Homo sapiens
  misc_RNA (1)...(19): siRNA sense strand
caaauuguguucucagucu

SEQ ID NO: 2047779 - RNA, 19 nt, Homo sapiens
  misc_RNA (1)...(19): siRNA sense strand
gaaggaacaacguaaagga

SEQ ID NO: 2047780 - RNA, 19 nt, Homo sapiens
  misc_RNA (1)...(19): siRNA sense strand
ggauacaaacuggcauuua

SEQ ID NO: 2047781 - RNA, 19 nt, Homo sapiens
  misc_RNA (1)...(19): siRNA sense strand
uguuggaggugaaguauuu

SEQ ID NO: 2047782 - RNA, 19 nt, Homo sapiens
  misc_RNA (1)...(19): siRNA sense strand
gaagugcggguuaccauug

SEQ ID NO: 2047783 - RNA, 19 nt, Homo sapiens
  misc_RNA (1)...(19): siRNA sense strand
uagagaaauugcugaaaga

SEQ ID NO: 2047784 - RNA, 19 nt, Homo sapiens
  misc_RNA (1)...(19): siRNA sense strand
ggauucaauugacauaugu

SEQ ID NO: 2047785 - RNA, 19 nt, Homo sapiens
  misc_RNA (1)...(19): siRNA sense strand
gaaauagcagcaucugaga

SEQ ID NO: 2047786 - RNA, 19 nt, Homo sapiens
  misc_RNA (1)...(19): siRNA sense strand
guugauagaagggcaauua

SEQ ID NO: 2047787 - RNA, 19 nt, Homo sapiens
  misc_RNA (1)...(19): siRNA sense strand
auagagaucuguuugaauc

SEQ ID NO: 2047788 - RNA, 19 nt, Homo sapiens
  misc_RNA (1)...(19): siRNA sense strand
aacguaagccagauaauua

SEQ ID NO: 2047789 - RNA, 19 nt, Homo sapiens
  misc_RNA (1)...(19): siRNA sense strand
gcaaagcacuuaucaaaac

SEQ ID NO: 2047790 - RNA, 19 nt, Homo sapiens
  misc_RNA (1)...(19): siRNA sense strand
gauaaaagcucagucacaa

SEQ ID NO: 2047791 - RNA, 19 nt, Homo sapiens
  misc_RNA (1)...(19): siRNA sense strand
ccacagaaugcucaacuuu

SEQ ID NO: 2047792 - RNA, 19 nt, Homo sapiens
  misc_RNA (1)...(19): siRNA sense strand
aaacggugccugcgucaua

SEQ ID NO: 2047793 - RNA, 19 nt, Homo sapiens
  misc_RNA (1)...(19): siRNA sense strand
cggcuuauaugaucuugaa

SEQ ID NO: 2047794 - RNA, 19 nt, Homo sapiens
  misc_RNA (1)...(19): siRNA sense strand
ggcaacggcuuauaugauc

SEQ ID NO: 2047795 - RNA, 19 nt, Homo sapiens
  misc_RNA (1)...(19): siRNA sense strand
gaauggcaacggcuuauau

SEQ ID NO: 2047796 - RNA, 19 nt, Homo sapiens
  misc_RNA (1)...(19): siRNA sense strand
cccgaaagauggaacauug

SEQ ID NO: 2047797 - RNA, 19 nt, Homo sapiens
  misc_RNA (1)...(19): siRNA sense strand
uggaacaucugaagaagug

SEQ ID NO: 2047798 - RNA, 19 nt, Homo sapiens
  misc_RNA (1)...(19): siRNA sense strand
ugauagagaucuguuugaa

SEQ ID NO: 2047799 - RNA, 19 nt, Homo sapiens
  misc_RNA (1)...(19): siRNA sense strand
gauggacguugucaaguuc

SEQ ID NO: 2047800 - RNA, 19 nt, Homo sapiens
  misc_RNA (1)...(19): siRNA sense strand
cauaugagcaagcauuaaa

SEQ ID NO: 2047801 - RNA, 19 nt, Homo sapiens
  misc_RNA (1)...(19): siRNA sense strand
gauaaagcaagggaauaua

SEQ ID NO: 2047802 - RNA, 19 nt, Homo sapiens
  misc_RNA (1)...(19): siRNA sense strand
gcauggaaauauagcaauc

SEQ ID NO: 2047803 - RNA, 19 nt, Homo sapiens
  misc_RNA (1)...(19): siRNA sense strand
cgaacagccuuauuuuaua

SEQ ID NO: 2047804 - RNA, 19 nt, Homo sapiens
  misc_RNA (1)...(19): siRNA sense strand
gcauauggcaaugaguuua

SEQ ID NO: 2047805 - RNA, 19 nt, Homo sapiens
  misc_RNA (1)...(19): siRNA sense strand
cgacaagaagaaguuauua

SEQ ID NO: 2047806 - RNA, 19 nt, Homo sapiens
  misc_RNA (1)...(19): siRNA sense strand
uggaaaaucugcggaauua

SEQ ID NO: 2047807 - RNA, 19 nt, Homo sapiens
  misc_RNA (1)...(19): siRNA sense strand
aaucagaauuugcuacaga

SEQ ID NO: 2047808 - RNA, 19 nt, Homo sapiens
  misc_RNA (1)...(19): siRNA sense strand
aaagguugcugcuccaaga

SEQ ID NO: 2047809 - RNA, 19 nt, Homo sapiens
  misc_RNA (1)...(19): siRNA sense strand
gaaugcaggcacucuacua

SEQ ID NO: 2047810 - RNA, 19 nt, Homo sapiens
  misc_RNA (1)...(19): siRNA sense strand
cagaaaggauauacuugau

SEQ ID NO: 2047811 - RNA, 19 nt, Homo sapiens
  misc_RNA (1)...(19): siRNA sense strand
ugaagcacauccaacuuau

SEQ ID NO: 2047812 - RNA, 19 nt, Homo sapiens
  misc_RNA (1)...(19): siRNA sense strand
uauugaugcugaagaguuu

SEQ ID NO: 2047813 - RNA, 19 nt, Homo sapiens
  misc_RNA (1)...(19): siRNA sense strand
cuaccaaacagaaaucuaa

SEQ ID NO: 2047814 - RNA, 19 nt, Homo sapiens
  misc_RNA (1)...(19): siRNA sense strand
caacugagaagcaagaauc

SEQ ID NO: 2047815 - RNA, 19 nt, Homo sapiens
  misc_RNA (1)...(19): siRNA sense strand
gagaauuugaggcuauuaa

SEQ ID NO: 2047816 - RNA, 19 nt, Homo sapiens
  misc_RNA (1)...(19): siRNA sense strand
uaaaucagaacccgaaaga

SEQ ID NO: 2047817 - RNA, 19 nt, Homo sapiens
  misc_RNA (1)...(19): siRNA sense strand
guuuaucgaucuuucuuga

SEQ ID NO: 2047818 - RNA, 19 nt, Homo sapiens
  misc_RNA (1)...(19): siRNA sense strand
gugagagacuauccuuuau

SEQ ID NO: 2047819 - RNA, 19 nt, Homo sapiens
  misc_RNA (1)...(19): siRNA sense strand
aauaugacauggcagaaga

SEQ ID NO: 2047820 - RNA, 19 nt, Homo sapiens
  misc_RNA (1)...(19): siRNA sense strand
ucacuuuguucucuacuug

SEQ ID NO: 2047821 - RNA, 19 nt, Homo sapiens
  misc_RNA (1)...(19): siRNA sense strand
ucagaaaggauauacuuga

SEQ ID NO: 2047822 - RNA, 19 nt, Homo sapiens
  misc_RNA (1)...(19): siRNA sense strand
gaagagagcuacuuauguu

SEQ ID NO: 2047823 - RNA, 19 nt, Homo sapiens
  misc_RNA (1)...(19): siRNA sense strand
caaaucagcuugcgaaauu

SEQ ID NO: 2047824 - RNA, 19 nt, Homo sapiens
  misc_RNA (1)...(19): siRNA sense strand
gaagagagauuaauaacug

SEQ ID NO: 2047825 - RNA, 19 nt, Homo sapiens
  misc_RNA (1)...(19): siRNA sense strand
gauaaaggcugaauuugaa

SEQ ID NO: 2047826 - RNA, 19 nt, Homo sapiens
  misc_RNA (1)...(19): siRNA sense strand
gaagauaaaggcugaauuu

SEQ ID NO: 2047827 - RNA, 19 nt, Homo sapiens
  misc_RNA (1)...(19): siRNA sense strand
gaagcaaagucaaauagaa

SEQ ID NO: 2047828 - RNA, 19 nt, Homo sapiens
  misc_RNA (1)...(19): siRNA sense strand
gaagaggucugaaaucauc

SEQ ID NO: 2047829 - RNA, 19 nt, Homo sapiens
  misc_RNA (1)...(19): siRNA sense strand
gagaagaggucugaaauca

SEQ ID NO: 2047830 - RNA, 19 nt, Homo sapiens
  misc_RNA (1)...(19): siRNA sense strand
agaggaaucugcauuuaua

SEQ ID NO: 2047831 - RNA, 19 nt, Homo sapiens
  misc_RNA (1)...(19): siRNA sense strand
ugagaaaucugaaagagaa

SEQ ID NO: 2047832 - RNA, 19 nt, Homo sapiens
  misc_RNA (1)...(19): siRNA sense strand
agacaccacugcaaaguua

SEQ ID NO: 2047833 - RNA, 19 nt, Homo sapiens
  misc_RNA (1)...(19): siRNA sense strand
caagaggaaucugcauuua

SEQ ID NO: 2047834 - RNA, 19 nt, Homo sapiens
  misc_RNA (1)...(19): siRNA sense strand
gaaaccaggucucuaagug

SEQ ID NO: 2047835 - RNA, 19 nt, Homo sapiens
  misc_RNA (1)...(19): siRNA sense strand
gaaauaaacccacuagucu

SEQ ID NO: 2047836 - RNA, 19 nt, Homo sapiens
  misc_RNA (1)...(19): siRNA sense strand
acaagaaagucguacauuu

SEQ ID NO: 2047837 - RNA, 19 nt, Homo sapiens
  misc_RNA (1)...(19): siRNA sense strand
gaaaguaaagcugaacaua

SEQ ID NO: 2047838 - RNA, 19 nt, Homo sapiens
  misc_RNA (1)...(19): siRNA sense strand
gagaaaagauuccuguuaa

SEQ ID NO: 2047839 - RNA, 19 nt, Homo sapiens
  misc_RNA (1)...(19): siRNA sense strand
caggauggcugauaaguga

SEQ ID NO: 2047840 - RNA, 19 nt, Homo sapiens
  misc_RNA (1)...(19): siRNA sense strand
uaaacaaagucaccaagaa

SEQ ID NO: 2047841 - RNA, 19 nt, Homo sapiens
  misc_RNA (1)...(19): siRNA sense strand
ggauuaacaucuuuaggaa

SEQ ID NO: 2047842 - RNA, 19 nt, Homo sapiens
  misc_RNA (1)...(19): siRNA sense strand
gaaauaaacagaugguuca

SEQ ID NO: 2047843 - RNA, 19 nt, Homo sapiens
  misc_RNA (1)...(19): siRNA sense strand
acgaacaucugaagaauaa

SEQ ID NO: 2047844 - RNA, 19 nt, Homo sapiens
  misc_RNA (1)...(19): siRNA sense strand
ugucagauauggaauguaa

SEQ ID NO: 2047845 - RNA, 19 nt, Homo sapiens
  misc_RNA (1)...(19): siRNA sense strand
gcaagagaguggaagaguu

SEQ ID NO: 2047846 - RNA, 19 nt, Homo sapiens
  misc_RNA (1)...(19): siRNA sense strand
gaagaacugcaacagauuu

SEQ ID NO: 2047847 - RNA, 19 nt, Homo sapiens
  misc_RNA (1)...(19): siRNA sense strand
gaaacaucauccaaaguau

SEQ ID NO: 2047848 - RNA, 19 nt, Homo sapiens
  misc_RNA (1)...(19): siRNA sense strand
caaccucccugucagauau

SEQ ID NO: 2047849 - RNA, 19 nt, Homo sapiens
  misc_RNA (1)...(19): siRNA sense strand
ggaggaauuuggauuaaca

SEQ ID NO: 2047850 - RNA, 19 nt, Homo sapiens
  misc_RNA (1)...(19): siRNA sense strand
ggacuaaauuccacugauc

SEQ ID NO: 2047851 - RNA, 19 nt, Homo sapiens
  misc_RNA (1)...(19): siRNA sense strand
aaacacaacagaagaagua

SEQ ID NO: 2047852 - RNA, 19 nt, Homo sapiens
  misc_RNA (1)...(19): siRNA sense strand
ccaagaggcuccaccaugu

SEQ ID NO: 2047853 - RNA, 19 nt, Homo sapiens
  misc_RNA (1)...(19): siRNA sense strand
ggaaauaaacccacuaguc

SEQ ID NO: 2047854 - RNA, 19 nt, Homo sapiens
  misc_RNA (1)...(19): siRNA sense strand
ugaaacaucauccaaagua

SEQ ID NO: 2047855 - RNA, 19 nt, Homo sapiens
  misc_RNA (1)...(19): siRNA sense strand
guucaugucagcaauaaua

SEQ ID NO: 2047856 - RNA, 19 nt, Homo sapiens
  misc_RNA (1)...(19): siRNA sense strand
caagucuucucuaauacua

SEQ ID NO: 2047857 - RNA, 19 nt, Homo sapiens
  misc_RNA (1)...(19): siRNA sense strand
gugaagaacugcaacagau

SEQ ID NO: 2047858 - RNA, 19 nt, Homo sapiens
  misc_RNA (1)...(19): siRNA sense strand
ggauugcgccucuuauaaa

SEQ ID NO: 2047859 - RNA, 19 nt, Homo sapiens
  misc_RNA (1)...(19): siRNA sense strand
caagagaguggaagaguuu

SEQ ID NO: 2047860 - RNA, 19 nt, Homo sapiens
  misc_RNA (1)...(19): siRNA sense strand
uaaggaggaauuuggauua

SEQ ID NO: 2047861 - RNA, 19 nt, Homo sapiens
  misc_RNA (1)...(19): siRNA sense strand
gagaagagagcuacuuaug

SEQ ID NO: 2047862 - RNA, 19 nt, Homo sapiens
  misc_RNA (1)...(19): siRNA sense strand
gagacuucaugcaacaaua

SEQ ID NO: 2047863 - RNA, 19 nt, Homo sapiens
  misc_RNA (1)...(19): siRNA sense strand
gaagcaagcacugaaugua

SEQ ID NO: 2047864 - RNA, 19 nt, Homo sapiens
  misc_RNA (1)...(19): siRNA sense strand
caagggacauuaugcaauc

SEQ ID NO: 2047865 - RNA, 19 nt, Homo sapiens
  misc_RNA (1)...(19): siRNA sense strand
ucaaaguaaugcucggaua

SEQ ID NO: 2047866 - RNA, 19 nt, Homo sapiens
  misc_RNA (1)...(19): siRNA sense strand
aagcagaacguuauuagua

SEQ ID NO: 2047867 - RNA, 19 nt, Homo sapiens
  misc_RNA (1)...(19): siRNA sense strand
gaacaaaucuuucuuuucc

SEQ ID NO: 2047868 - RNA, 19 nt, Homo sapiens
  misc_RNA (1)...(19): siRNA sense strand
gacauuaucaguuaccuaa

SEQ ID NO: 2047869 - RNA, 19 nt, Homo sapiens
  misc_RNA (1)...(19): siRNA sense strand
caacaaacacaacagaaga

SEQ ID NO: 2047870 - RNA, 19 nt, Homo sapiens
  misc_RNA (1)...(19): siRNA sense strand
aaagacaguuuauccaaug

SEQ ID NO: 2047871 - RNA, 19 nt, Homo sapiens
  misc_RNA (1)...(19): siRNA sense strand
gaaucugcauuuauaagug

SEQ ID NO: 2047872 - RNA, 19 nt, Homo sapiens
  misc_RNA (1)...(19): siRNA sense strand
gaaacaaaccauaacauac

SEQ ID NO: 2047873 - RNA, 19 nt, Homo sapiens
  misc_RNA (1)...(19): siRNA sense strand
acacuucgucgucaaauua

SEQ ID NO: 2047874 - RNA, 19 nt, Homo sapiens
  misc_RNA (1)...(19): siRNA sense strand
gaagacaaagauaagauga

SEQ ID NO: 2047875 - RNA, 19 nt, Homo sapiens
  misc_RNA (1)...(19): siRNA sense strand
gaacagaaaacccuacuaa

SEQ ID NO: 2047876 - RNA, 19 nt, Homo sapiens
  misc_RNA (1)...(19): siRNA sense strand
gaauuuagcggaucugaca

SEQ ID NO: 2047877 - RNA, 19 nt, Homo sapiens
  misc_RNA (1)...(19): siRNA sense strand
uaacagagguggaaaagga

SEQ ID NO: 2047878 - RNA, 19 nt, Homo sapiens
  misc_RNA (1)...(19): siRNA sense strand
ugauucaccuaaagaagua

SEQ ID NO: 2047879 - RNA, 19 nt, Homo sapiens
  misc_RNA (1)...(19): siRNA sense strand
gcugauaagugaagauaag

SEQ ID NO: 2047880 - RNA, 19 nt, Homo sapiens
  misc_RNA (1)...(19): siRNA sense strand
gaaacaagucuucucuaau

SEQ ID NO: 2047881 - RNA, 19 nt, Homo sapiens
  misc_RNA (1)...(19): siRNA sense strand
gaauaaaucagcaccaaag

SEQ ID NO: 2047882 - RNA, 19 nt, Homo sapiens
  misc_RNA (1)...(19): siRNA sense strand
caucaaacuuccaacucua

SEQ ID NO: 2047883 - RNA, 19 nt, Homo sapiens
  misc_RNA (1)...(19): siRNA sense strand
cuaggaguguguucugaua

SEQ ID NO: 2047884 - RNA, 19 nt, Homo sapiens
  misc_RNA (1)...(19): siRNA sense strand
caucaugucuccugcaaca

SEQ ID NO: 2047885 - RNA, 19 nt, Homo sapiens
  misc_RNA (1)...(19): siRNA sense strand
uaagagagaauaugcaguu

SEQ ID NO: 2047886 - RNA, 19 nt, Homo sapiens
  misc_RNA (1)...(19): siRNA sense strand
cagaauccauacagaagaa

SEQ ID NO: 2047887 - RNA, 19 nt, Homo sapiens
  misc_RNA (1)...(19): siRNA sense strand
guucaaaccuuuaccaaaa

SEQ ID NO: 2047888 - RNA, 19 nt, Homo sapiens
  misc_RNA (1)...(19): siRNA sense strand
agagaaaguucaucgaugu

SEQ ID NO: 2047889 - RNA, 19 nt, Homo sapiens
  misc_RNA (1)...(19): siRNA sense strand
gaaaaccucuucauuacau

SEQ ID NO: 2047890 - RNA, 19 nt, Homo sapiens
  misc_RNA (1)...(19): siRNA sense strand
uagaagaguuuaugcaaag

SEQ ID NO: 2047891 - RNA, 19 nt, Homo sapiens
  misc_RNA (1)...(19): siRNA sense strand
acagaccgcugaaaguaaa

SEQ ID NO: 2047892 - RNA, 19 nt, Homo sapiens
  misc_RNA (1)...(19): siRNA sense strand
agaagaaccaggaagauaa

SEQ ID NO: 2047893 - RNA, 19 nt, Homo sapiens
  misc_RNA (1)...(19): siRNA sense strand
gaauguaguacccaacaaa

SEQ ID NO: 2047894 - RNA, 19 nt, Homo sapiens
  misc_RNA (1)...(19): siRNA sense strand
ggagaguucuuacuacaac

SEQ ID NO: 2047895 - RNA, 19 nt, Homo sapiens
  misc_RNA (1)...(19): siRNA sense strand
agacaaagcagaacguuau

SEQ ID NO: 2047896 - RNA, 19 nt, Homo sapiens
  misc_RNA (1)...(19): siRNA sense strand
gaauaugcaguucacauug

SEQ ID NO: 2047897 - RNA, 19 nt, Homo sapiens
  misc_RNA (1)...(19): siRNA sense strand
gaagauaagagagaauaug

SEQ ID NO: 2047898 - RNA, 19 nt, Homo sapiens
  misc_RNA (1)...(19): siRNA sense strand
aaacagaccacagcuauga

SEQ ID NO: 2047899 - RNA, 19 nt, Homo sapiens
  misc_RNA (1)...(19): siRNA sense strand
ucuaaugcaucaucugaaa

SEQ ID NO: 2047900 - RNA, 19 nt, Homo sapiens
  misc_RNA (1)...(19): siRNA sense strand
ugaaaguuaugaugcaguu

SEQ ID NO: 2047901 - RNA, 19 nt, Homo sapiens
  misc_RNA (1)...(19): siRNA sense strand
gaugagaaaucugaaagag

SEQ ID NO: 2047902 - RNA, 19 nt, Homo sapiens
  misc_RNA (1)...(19): siRNA sense strand
ccaagaggaaucugcauuu

SEQ ID NO: 2047903 - RNA, 19 nt, Homo sapiens
  misc_RNA (1)...(19): siRNA sense strand
caaaagacguggcaagaga

SEQ ID NO: 2047904 - RNA, 19 nt, Homo sapiens
  misc_RNA (1)...(19): siRNA sense strand
cccaggaucugcucugaaa

SEQ ID NO: 2047905 - RNA, 19 nt, Homo sapiens
  misc_RNA (1)...(19): siRNA sense strand
ccacuagucuugaugaaac

SEQ ID NO: 2047906 - RNA, 19 nt, Homo sapiens
  misc_RNA (1)...(19): siRNA sense strand
cacaacagaagaaguauuu

SEQ ID NO: 2047907 - RNA, 19 nt, Homo sapiens
  misc_RNA (1)...(19): siRNA sense strand
caacaucgccagaaacagu

SEQ ID NO: 2047908 - RNA, 19 nt, Homo sapiens
  misc_RNA (1)...(19): siRNA sense strand
gagacaaagcagaacguua

SEQ ID NO: 2047909 - RNA, 19 nt, Homo sapiens
  misc_RNA (1)...(19): siRNA sense strand
aaacuucccaagcauauaa

SEQ ID NO: 2047910 - RNA, 19 nt, Homo sapiens
  misc_RNA (1)...(19): siRNA sense strand
gaaagacauuaucaguuac

SEQ ID NO: 2047911 - RNA, 19 nt, Homo sapiens
  misc_RNA (1)...(19): siRNA sense strand
ggucugaaaucaucauguc

SEQ ID NO: 2047912 - RNA, 19 nt, Homo sapiens
  misc_RNA (1)...(19): siRNA sense strand
guagagaagaggucugaaa

SEQ ID NO: 2047913 - RNA, 19 nt, Homo sapiens
  misc_RNA (1)...(19): siRNA sense strand
ucaaagacaccacugcaaa

SEQ ID NO: 2047914 - RNA, 19 nt, Homo sapiens
  misc_RNA (1)...(19): siRNA sense strand
gaaauucacagagcaaaca

SEQ ID NO: 2047915 - RNA, 19 nt, Homo sapiens
  misc_RNA (1)...(19): siRNA sense strand
aaaggacaguuauguugaa

SEQ ID NO: 2047916 - RNA, 19 nt, Homo sapiens
  misc_RNA (1)...(19): siRNA sense strand
caccaaaggucgucaagca

SEQ ID NO: 2047917 - RNA, 19 nt, Homo sapiens
  misc_RNA (1)...(19): siRNA sense strand
aagauaagcucaagauggu

SEQ ID NO: 2047918 - RNA, 19 nt, Homo sapiens
  misc_RNA (1)...(19): siRNA sense strand
cagaagaaccaggaagaua

SEQ ID NO: 2047919 - RNA, 19 nt, Homo sapiens
  misc_RNA (1)...(19): siRNA sense strand
cauuaucaguuaccuaaga

SEQ ID NO: 2047920 - RNA, 19 nt, Homo sapiens
  misc_RNA (1)...(19): siRNA sense strand
gaaaacccaucaggaaauu

SEQ ID NO: 2047921 - RNA, 19 nt, Homo sapiens
  misc_RNA (1)...(19): siRNA sense strand
ugaacccaaucaacuuuaa

SEQ ID NO: 2047922 - RNA, 19 nt, Homo sapiens
  misc_RNA (1)...(19): siRNA sense strand
gaagaccucucaacauuug

SEQ ID NO: 2047923 - RNA, 19 nt, Homo sapiens
  misc_RNA (1)...(19): siRNA sense strand
cagaagaccucucaacauu

SEQ ID NO: 2047924 - RNA, 19 nt, Homo sapiens
  misc_RNA (1)...(19): siRNA sense strand
gaaggucccuacuauuauu

SEQ ID NO: 2047925 - RNA, 19 nt, Homo sapiens
  misc_RNA (1)...(19): siRNA sense strand
gaagcaauguuauggaaga

SEQ ID NO: 2047926 - RNA, 19 nt, Homo sapiens
  misc_RNA (1)...(19): siRNA sense strand
cgaagucgcuuaccagcua

SEQ ID NO: 2047927 - RNA, 19 nt, Homo sapiens
  misc_RNA (1)...(19): siRNA sense strand
ugaagaaggucccuacuau

SEQ ID NO: 2047928 - RNA, 19 nt, Homo sapiens
  misc_RNA (1)...(19): siRNA sense strand
gagcaugaaauucguaaua

SEQ ID NO: 2047929 - RNA, 19 nt, Homo sapiens
  misc_RNA (1)...(19): siRNA sense strand
ccacuacugucauguguuu

SEQ ID NO: 2047930 - RNA, 19 nt, Homo sapiens
  misc_RNA (1)...(19): siRNA sense strand
gcauugggcuaccucagua

SEQ ID NO: 2047931 - RNA, 19 nt, Homo sapiens
  misc_RNA (1)...(19): siRNA sense strand
aagaaggucccuacuauua

SEQ ID NO: 2047932 - RNA, 19 nt, Homo sapiens
  misc_RNA (1)...(19): siRNA sense strand
gaucaggauuuguuggaaa

SEQ ID NO: 2047933 - RNA, 19 nt, Homo sapiens
  misc_RNA (1)...(19): siRNA sense strand
gggaagcaauguuauggaa

SEQ ID NO: 2047934 - RNA, 19 nt, Homo sapiens
  misc_RNA (1)...(19): siRNA sense strand
ccugauggcuaauggauuu

SEQ ID NO: 2047935 - RNA, 19 nt, Homo sapiens
  misc_RNA (1)...(19): siRNA sense strand
gcaauguuauggaagauca

SEQ ID NO: 2047936 - RNA, 19 nt, Homo sapiens
  misc_RNA (1)...(19): siRNA sense strand
gcuaauggauuugacaaug

SEQ ID NO: 2047937 - RNA, 19 nt, Homo sapiens
  misc_RNA (1)...(19): siRNA sense strand
ggacacuccuccacacuuc

SEQ ID NO: 2047938 - RNA, 19 nt, Homo sapiens
  misc_RNA (1)...(19): siRNA sense strand
gaagaaggucccuacuauu

SEQ ID NO: 2047939 - RNA, 19 nt, Homo sapiens
  misc_RNA (1)...(19): siRNA sense strand
gcacagacaaagaauucua

SEQ ID NO: 2047940 - RNA, 19 nt, Homo sapiens
  misc_RNA (1)...(19): siRNA sense strand
cuacagagcaaaugaagaa

SEQ ID NO: 2047941 - RNA, 19 nt, Homo sapiens
  misc_RNA (1)...(19): siRNA sense strand
caauccagcuccuuccaaa

SEQ ID NO: 2047942 - RNA, 19 nt, Homo sapiens
  misc_RNA (1)...(19): siRNA sense strand
gcaugaaauucguaauauc

SEQ ID NO: 2047943 - RNA, 19 nt, Homo sapiens
  misc_RNA (1)...(19): siRNA sense strand
ggacaaugguuggaaagca

SEQ ID NO: 2047944 - RNA, 19 nt, Homo sapiens
  misc_RNA (1)...(19): siRNA sense strand
gcaggaaccaucagagaga

SEQ ID NO: 2047945 - RNA, 19 nt, Homo sapiens
  misc_RNA (1)...(19): siRNA sense strand
ccaaagaugagacccauug

SEQ ID NO: 2047946 - RNA, 19 nt, Homo sapiens
  misc_RNA (1)...(19): siRNA sense strand
agaaccaccugauggcuaa

SEQ ID NO: 2047947 - RNA, 19 nt, Homo sapiens
  misc_RNA (1)...(19): siRNA sense strand
ggacagaaucaacccaaga

SEQ ID NO: 2047948 - RNA, 19 nt, Homo sapiens
  misc_RNA (1)...(19): siRNA sense strand
cagaugcccuguccaaaca

SEQ ID NO: 2047949 - RNA, 19 nt, Homo sapiens
  misc_RNA (1)...(19): siRNA sense strand
gagguugaacuuauuaaug

SEQ ID NO: 2047950 - RNA, 19 nt, Homo sapiens
  misc_RNA (1)...(19): siRNA sense strand
gcaaguccguggaucuucu

SEQ ID NO: 2047951 - RNA, 19 nt, Homo sapiens
  misc_RNA (1)...(19): siRNA sense strand
cuaauggauuugacaaugu

SEQ ID NO: 2047952 - RNA, 19 nt, Homo sapiens
  misc_RNA (1)...(19): siRNA sense strand
ucucaacauuugccuauau

SEQ ID NO: 2047953 - RNA, 19 nt, Homo sapiens
  misc_RNA (1)...(19): siRNA sense strand
ccagucgugugauuacaaa

SEQ ID NO: 2047954 - RNA, 19 nt, Homo sapiens
  misc_RNA (1)...(19): siRNA sense strand
uauggaagaucaggauuug

SEQ ID NO: 2047955 - RNA, 19 nt, Homo sapiens
  misc_RNA (1)...(19): siRNA sense strand
gggcacagacaaagaauuc

SEQ ID NO: 2047956 - RNA, 19 nt, Homo sapiens
  misc_RNA (1)...(19): siRNA sense strand
ucagaagucuacagagcaa

SEQ ID NO: 2047957 - RNA, 19 nt, Homo sapiens
  misc_RNA (1)...(19): siRNA sense strand
ccauugaacugggcgacua

SEQ ID NO: 2047958 - RNA, 19 nt, Homo sapiens
  misc_RNA (1)...(19): siRNA sense strand
ccagaaagcuuugaaaaca

SEQ ID NO: 2047959 - RNA, 19 nt, Homo sapiens
  misc_RNA (1)...(19): siRNA sense strand
uagguucuaugcugauaaa

SEQ ID NO: 2047960 - RNA, 19 nt, Homo sapiens
  misc_RNA (1)...(19): siRNA sense strand
acacuucgauggaccuguu

SEQ ID NO: 2047961 - RNA, 19 nt, Homo sapiens
  misc_RNA (1)...(19): siRNA sense strand
gacaaugguuggaaagcau

SEQ ID NO: 2047962 - RNA, 19 nt, Homo sapiens
  misc_RNA (1)...(19): siRNA sense strand
ggaagaucaggauuuguug

SEQ ID NO: 2047963 - RNA, 19 nt, Homo sapiens
  misc_RNA (1)...(19): siRNA sense strand
gaagucuaaucaccacuac

SEQ ID NO: 2047964 - RNA, 19 nt, Homo sapiens
  misc_RNA (1)...(19): siRNA sense strand
ggaaauuggaauccuuaau

SEQ ID NO: 2047965 - RNA, 19 nt, Homo sapiens
  misc_RNA (1)...(19): siRNA sense strand
uaauggauuugacaaugug

SEQ ID NO: 2047966 - RNA, 19 nt, Homo sapiens
  misc_RNA (1)...(19): siRNA sense strand
ucugggagguugaacuuau

SEQ ID NO: 2047967 - RNA, 19 nt, Homo sapiens
  misc_RNA (1)...(19): siRNA sense strand
ggccacaggaaacguauuu

SEQ ID NO: 2047968 - RNA, 19 nt, Homo sapiens
  misc_RNA (1)...(19): siRNA sense strand
aaagaauucuacaggcaau

SEQ ID NO: 2047969 - RNA, 19 nt, Homo sapiens
  misc_RNA (1)...(19): siRNA sense strand
gaugugaauuuagccuaug

SEQ ID NO: 2047970 - RNA, 19 nt, Homo sapiens
  misc_RNA (1)...(19): siRNA sense strand
cagagcaaaugaagaaggu

SEQ ID NO: 2047971 - RNA, 19 nt, Homo sapiens
  misc_RNA (1)...(19): siRNA sense strand
guagcugaguggcuggauu

SEQ ID NO: 2047972 - RNA, 19 nt, Homo sapiens
  misc_RNA (1)...(19): siRNA sense strand
gggagaaccuuccauuacc

SEQ ID NO: 2047973 - RNA, 19 nt, Homo sapiens
  misc_RNA (1)...(19): siRNA sense strand
guacgagaaccaccugaug

SEQ ID NO: 2047974 - RNA, 19 nt, Homo sapiens
  misc_RNA (1)...(19): siRNA sense strand
cagaaaagcuuaucuucca

SEQ ID NO: 2047975 - RNA, 19 nt, Homo sapiens
  misc_RNA (1)...(19): siRNA sense strand
uggaagaucaggauuuguu

SEQ ID NO: 2047976 - RNA, 19 nt, Homo sapiens
  misc_RNA (1)...(19): siRNA sense strand
gggcaggaaccaucagaga

SEQ ID NO: 2047977 - RNA, 19 nt, Homo sapiens
  misc_RNA (1)...(19): siRNA sense strand
ugaugugaauuuagccuau

SEQ ID NO: 2047978 - RNA, 19 nt, Homo sapiens
  misc_RNA (1)...(19): siRNA sense strand
ccagaagaccucucaacau

SEQ ID NO: 2047979 - RNA, 19 nt, Homo sapiens
  misc_RNA (1)...(19): siRNA sense strand
ggagguugaacuuauuaau

SEQ ID NO: 2047980 - RNA, 19 nt, Homo sapiens
  misc_RNA (1)...(19): siRNA sense strand
ugccuuugaugugaauuua

SEQ ID NO: 2047981 - RNA, 19 nt, Homo sapiens
  misc_RNA (1)...(19): siRNA sense strand
guucuaugcugauaaaaga

SEQ ID NO: 2047982 - RNA, 19 nt, Homo sapiens
  misc_RNA (1)...(19): siRNA sense strand
ggagaaccuuccauuaccu

SEQ ID NO: 2047983 - RNA, 19 nt, Homo sapiens
  misc_RNA (1)...(19): siRNA sense strand
gugggacaaugguuggaaa

SEQ ID NO: 2047984 - RNA, 19 nt, Homo sapiens
  misc_RNA (1)...(19): siRNA sense strand
aaucaccacuacugucaug

SEQ ID NO: 2047985 - RNA, 19 nt, Homo sapiens
  misc_RNA (1)...(19): siRNA sense strand
ggacccagaagaccucuca

SEQ ID NO: 2047986 - RNA, 19 nt, Homo sapiens
  misc_RNA (1)...(19): siRNA sense strand
guuggaaauuggaauccuu

SEQ ID NO: 2047987 - RNA, 19 nt, Homo sapiens
  misc_RNA (1)...(19): siRNA sense strand
uuuaugggaagcaauguua

SEQ ID NO: 2047988 - RNA, 19 nt, Homo sapiens
  misc_RNA (1)...(19): siRNA sense strand
agaagaccucucaacauuu

SEQ ID NO: 2047989 - RNA, 19 nt, Homo sapiens
  misc_RNA (1)...(19): siRNA sense strand
gcaauccagcuccuuccaa

SEQ ID NO: 2047990 - RNA, 19 nt, Homo sapiens
  misc_RNA (1)...(19): siRNA sense strand
gacagaaucaacccaagau

SEQ ID NO: 2047991 - RNA, 19 nt, Homo sapiens
  misc_RNA (1)...(19): siRNA sense strand
gauuugacaaugugcaguu

SEQ ID NO: 2047992 - RNA, 19 nt, Homo sapiens
  misc_RNA (1)...(19): siRNA sense strand
ugaagucuaaucaccacua

SEQ ID NO: 2047993 - RNA, 19 nt, Homo sapiens
  misc_RNA (1)...(19): siRNA sense strand
agaaggucccuacuauuau

SEQ ID NO: 2047994 - RNA, 19 nt, Homo sapiens
  misc_RNA (1)...(19): siRNA sense strand
ccaaacagugggacaaugg

SEQ ID NO: 2047995 - RNA, 19 nt, Homo sapiens
  misc_RNA (1)...(19): siRNA sense strand
uugacaaugugcaguuuau

SEQ ID NO: 2047996 - RNA, 19 nt, Homo sapiens
  misc_RNA (1)...(19): siRNA sense strand
uaauuaauggcuacacuuc

SEQ ID NO: 2047997 - RNA, 19 nt, Homo sapiens
  misc_RNA (1)...(19): siRNA sense strand
gacaaugugcaguuuaugg

SEQ ID NO: 2047998 - RNA, 19 nt, Homo sapiens
  misc_RNA (1)...(19): siRNA sense strand
caccacuacugucaugugu

SEQ ID NO: 2047999 - RNA, 19 nt, Homo sapiens
  misc_RNA (1)...(19): siRNA sense strand
cuaaucaccacuacuguca

SEQ ID NO: 2048000 - RNA, 19 nt, Homo sapiens
  misc_RNA (1)...(19): siRNA sense strand
acauuugccuauaucacaa

SEQ ID NO: 2048001 - RNA, 19 nt, Homo sapiens
  misc_RNA (1)...(19): siRNA sense strand
ccagcuagcacuacaagca

SEQ ID NO: 2048002 - RNA, 19 nt, Homo sapiens
  misc_RNA (1)...(19): siRNA sense strand
uuacugccuuugaugugaa

SEQ ID NO: 2048003 - RNA, 19 nt, Homo sapiens
  misc_RNA (1)...(19): siRNA sense strand
cgggcuaacugucagaagu

SEQ ID NO: 2048004 - RNA, 19 nt, Homo sapiens
  misc_RNA (1)...(19): siRNA sense strand
cugggagguugaacuuauu

SEQ ID NO: 2048005 - RNA, 19 nt, Homo sapiens
  misc_RNA (1)...(19): siRNA sense strand
gugaauuuagccuaugaaa

SEQ ID NO: 2048006 - RNA, 19 nt, Homo sapiens
  misc_RNA (1)...(19): siRNA sense strand
ggaaagcauugggcuaccu

SEQ ID NO: 2048007 - RNA, 19 nt, Homo sapiens
  misc_RNA (1)...(19): siRNA sense strand
gaagucuacagagcaaaug

SEQ ID NO: 2048008 - RNA, 19 nt, Homo sapiens
  misc_RNA (1)...(19): siRNA sense strand
gagaaccuuccauuaccuu

SEQ ID NO: 2048009 - RNA, 19 nt, Homo sapiens
  misc_RNA (1)...(19): siRNA sense strand
ccagcuccuuccaaagaug

SEQ ID NO: 2048010 - RNA, 19 nt, Homo sapiens
  misc_RNA (1)...(19): siRNA sense strand
ccuccacacuuccagaaag

SEQ ID NO: 2048011 - RNA, 19 nt, Homo sapiens
  misc_RNA (1)...(19): siRNA sense strand
gcuaccaucccaccucugu

SEQ ID NO: 2048012 - RNA, 19 nt, Homo sapiens
  misc_RNA (1)...(19): siRNA sense strand
auuaauggcuacacuucga

SEQ ID NO: 2048013 - RNA, 19 nt, Homo sapiens
  misc_RNA (1)...(19): siRNA sense strand
ucauguguuuacugccuuu

SEQ ID NO: 2048014 - RNA, 19 nt, Homo sapiens
  misc_RNA (1)...(19): siRNA sense strand
ccagaugcccuguccaaac

SEQ ID NO: 2048015 - RNA, 19 nt, Homo sapiens
  misc_RNA (1)...(19): siRNA sense strand
gaaucaacccaagaugcuu

SEQ ID NO: 2048016 - RNA, 19 nt, Homo sapiens
  misc_RNA (1)...(19): siRNA sense strand
uuauggaagaucaggauuu

SEQ ID NO: 2048017 - RNA, 19 nt, Homo sapiens
  misc_RNA (1)...(19): siRNA sense strand
gaaaacaaacccuccaaac

SEQ ID NO: 2048018 - RNA, 19 nt, Homo sapiens
  misc_RNA (1)...(19): siRNA sense strand
cagaaagcuuugaaaacaa

SEQ ID NO: 2048019 - RNA, 19 nt, Homo sapiens
  misc_RNA (1)...(19): siRNA sense strand
ucccuacuauuauucuuuc

SEQ ID NO: 2048020 - RNA, 19 nt, Homo sapiens
  misc_RNA (1)...(19): siRNA sense strand
guccguggaucuucuucau

SEQ ID NO: 2048021 - RNA, 19 nt, Homo sapiens
  misc_RNA (1)...(19): siRNA sense strand
gggacacuccuccacacuu

SEQ ID NO: 2048022 - RNA, 19 nt, Homo sapiens
  misc_RNA (1)...(19): siRNA sense strand
gaagaccucucaacauuug

SEQ ID NO: 2048023 - RNA, 19 nt, Homo sapiens
  misc_RNA (1)...(19): siRNA sense strand
cagaagaccucucaacauu

SEQ ID NO: 2048024 - RNA, 19 nt, Homo sapiens
  misc_RNA (1)...(19): siRNA sense strand
gaaggucccuacuauuauu

SEQ ID NO: 2048025 - RNA, 19 nt, Homo sapiens
  misc_RNA (1)...(19): siRNA sense strand
gaagcaauguuauggaaga

SEQ ID NO: 2048026 - RNA, 19 nt, Homo sapiens
  misc_RNA (1)...(19): siRNA sense strand
cgaagucgcuuaccagcua

SEQ ID NO: 2048027 - RNA, 19 nt, Homo sapiens
  misc_RNA (1)...(19): siRNA sense strand
ugaagaaggucccuacuau

SEQ ID NO: 2048028 - RNA, 19 nt, Homo sapiens
  misc_RNA (1)...(19): siRNA sense strand
gagcaugaaauucguaaua

SEQ ID NO: 2048029 - RNA, 19 nt, Homo sapiens
  misc_RNA (1)...(19): siRNA sense strand
ccacuacugucauguguuu

SEQ ID NO: 2048030 - RNA, 19 nt, Homo sapiens
  misc_RNA (1)...(19): siRNA sense strand
gcauugggcuaccucagua

SEQ ID NO: 2048031 - RNA, 19 nt, Homo sapiens
  misc_RNA (1)...(19): siRNA sense strand
aagaaggucccuacuauua

SEQ ID NO: 2048032 - RNA, 19 nt, Homo sapiens
  misc_RNA (1)...(19): siRNA sense strand
gaucaggauuuguuggaaa

SEQ ID NO: 2048033 - RNA, 19 nt, Homo sapiens
  misc_RNA (1)...(19): siRNA sense strand
gggaagcaauguuauggaa

SEQ ID NO: 2048034 - RNA, 19 nt, Homo sapiens
  misc_RNA (1)...(19): siRNA sense strand
ccugauggcuaauggauuu

SEQ ID NO: 2048035 - RNA, 19 nt, Homo sapiens
  misc_RNA (1)...(19): siRNA sense strand
gcaauguuauggaagauca

SEQ ID NO: 2048036 - RNA, 19 nt, Homo sapiens
  misc_RNA (1)...(19): siRNA sense strand
gcuaauggauuugacaaug

SEQ ID NO: 2048037 - RNA, 19 nt, Homo sapiens
  misc_RNA (1)...(19): siRNA sense strand
ggacacuccuccacacuuc

SEQ ID NO: 2048038 - RNA, 19 nt, Homo sapiens
  misc_RNA (1)...(19): siRNA sense strand
gaagaaggucccuacuauu

SEQ ID NO: 2048039 - RNA, 19 nt, Homo sapiens
  misc_RNA (1)...(19): siRNA sense strand
gcacagacaaagaauucua

SEQ ID NO: 2048040 - RNA, 19 nt, Homo sapiens
  misc_RNA (1)...(19): siRNA sense strand
cuacagagcaaaugaagaa

SEQ ID NO: 2048041 - RNA, 19 nt, Homo sapiens
  misc_RNA (1)...(19): siRNA sense strand
caauccagcuccuuccaaa

SEQ ID NO: 2048042 - RNA, 19 nt, Homo sapiens
  misc_RNA (1)...(19): siRNA sense strand
gcaugaaauucguaauauc

SEQ ID NO: 2048043 - RNA, 19 nt, Homo sapiens
  misc_RNA (1)...(19): siRNA sense strand
ggacaaugguuggaaagca

SEQ ID NO: 2048044 - RNA, 19 nt, Homo sapiens
  misc_RNA (1)...(19): siRNA sense strand
gcaggaaccaucagagaga

SEQ ID NO: 2048045 - RNA, 19 nt, Homo sapiens
  misc_RNA (1)...(19): siRNA sense strand
ccaaagaugagacccauug

SEQ ID NO: 2048046 - RNA, 19 nt, Homo sapiens
  misc_RNA (1)...(19): siRNA sense strand
agaaccaccugauggcuaa

SEQ ID NO: 2048047 - RNA, 19 nt, Homo sapiens
  misc_RNA (1)...(19): siRNA sense strand
ggacagaaucaacccaaga

SEQ ID NO: 2048048 - RNA, 19 nt, Homo sapiens
  misc_RNA (1)...(19): siRNA sense strand
cagaugcccuguccaaaca

SEQ ID NO: 2048049 - RNA, 19 nt, Homo sapiens
  misc_RNA (1)...(19): siRNA sense strand
gagguugaacuuauuaaug

SEQ ID NO: 2048050 - RNA, 19 nt, Homo sapiens
  misc_RNA (1)...(19): siRNA sense strand
gcaaguccguggaucuucu

SEQ ID NO: 2048051 - RNA, 19 nt, Homo sapiens
  misc_RNA (1)...(19): siRNA sense strand
cuaauggauuugacaaugu

SEQ ID NO: 2048052 - RNA, 19 nt, Homo sapiens
  misc_RNA (1)...(19): siRNA sense strand
ucucaacauuugccuauau

SEQ ID NO: 2048053 - RNA, 19 nt, Homo sapiens
  misc_RNA (1)...(19): siRNA sense strand
ccagucgugugauuacaaa

SEQ ID NO: 2048054 - RNA, 19 nt, Homo sapiens
  misc_RNA (1)...(19): siRNA sense strand
uauggaagaucaggauuug

SEQ ID NO: 2048055 - RNA, 19 nt, Homo sapiens
  misc_RNA (1)...(19): siRNA sense strand
gggcacagacaaagaauuc

SEQ ID NO: 2048056 - RNA, 19 nt, Homo sapiens
  misc_RNA (1)...(19): siRNA sense strand
ucagaagucuacagagcaa

SEQ ID NO: 2048057 - RNA, 19 nt, Homo sapiens
  misc_RNA (1)...(19): siRNA sense strand
ccauugaacugggcgacua

SEQ ID NO: 2048058 - RNA, 19 nt, Homo sapiens
  misc_RNA (1)...(19): siRNA sense strand
ccagaaagcuuugaaaaca

SEQ ID NO: 2048059 - RNA, 19 nt, Homo sapiens
  misc_RNA (1)...(19): siRNA sense strand
uagguucuaugcugauaaa

SEQ ID NO: 2048060 - RNA, 19 nt, Homo sapiens
  misc_RNA (1)...(19): siRNA sense strand
acacuucgauggaccuguu

SEQ ID NO: 2048061 - RNA, 19 nt, Homo sapiens
  misc_RNA (1)...(19): siRNA sense strand
gacaaugguuggaaagcau

SEQ ID NO: 2048062 - RNA, 19 nt, Homo sapiens
  misc_RNA (1)...(19): siRNA sense strand
ggaagaucaggauuuguug

SEQ ID NO: 2048063 - RNA, 19 nt, Homo sapiens
  misc_RNA (1)...(19): siRNA sense strand
gaagucuaaucaccacuac

SEQ ID NO: 2048064 - RNA, 19 nt, Homo sapiens
  misc_RNA (1)...(19): siRNA sense strand
ggaaauuggaauccuuaau

SEQ ID NO: 2048065 - RNA, 19 nt, Homo sapiens
  misc_RNA (1)...(19): siRNA sense strand
uaauggauuugacaaugug

SEQ ID NO: 2048066 - RNA, 19 nt, Homo sapiens
  misc_RNA (1)...(19): siRNA sense strand
ucugggagguugaacuuau

SEQ ID NO: 2048067 - RNA, 19 nt, Homo sapiens
  misc_RNA (1)...(19): siRNA sense strand
ggccacaggaaacguauuu

SEQ ID NO: 2048068 - RNA, 19 nt, Homo sapiens
  misc_RNA (1)...(19): siRNA sense strand
aaagaauucuacaggcaau

SEQ ID NO: 2048069 - RNA, 19 nt, Homo sapiens
  misc_RNA (1)...(19): siRNA sense strand
gaugugaauuuagccuaug

SEQ ID NO: 2048070 - RNA, 19 nt, Homo sapiens
  misc_RNA (1)...(19): siRNA sense strand
cagagcaaaugaagaaggu

SEQ ID NO: 2048071 - RNA, 19 nt, Homo sapiens
  misc_RNA (1)...(19): siRNA sense strand
guagcugaguggcuggauu

SEQ ID NO: 2048072 - RNA, 19 nt, Homo sapiens
  misc_RNA (1)...(19): siRNA sense strand
gggagaaccuuccauuacc

SEQ ID NO: 2048073 - RNA, 19 nt, Homo sapiens
  misc_RNA (1)...(19): siRNA sense strand
guacgagaaccaccugaug

SEQ ID NO: 2048074 - RNA, 19 nt, Homo sapiens
  misc_RNA (1)...(19): siRNA sense strand
cagaaaagcuuaucuucca

SEQ ID NO: 2048075 - RNA, 19 nt, Homo sapiens
  misc_RNA (1)...(19): siRNA sense strand
uggaagaucaggauuuguu

SEQ ID NO: 2048076 - RNA, 19 nt, Homo sapiens
  misc_RNA (1)...(19): siRNA sense strand
gggcaggaaccaucagaga

SEQ ID NO: 2048077 - RNA, 19 nt, Homo sapiens
  misc_RNA (1)...(19): siRNA sense strand
ugaugugaauuuagccuau

SEQ ID NO: 2048078 - RNA, 19 nt, Homo sapiens
  misc_RNA (1)...(19): siRNA sense strand
ccagaagaccucucaacau

SEQ ID NO: 2048079 - RNA, 19 nt, Homo sapiens
  misc_RNA (1)...(19): siRNA sense strand
ggagguugaacuuauuaau

SEQ ID NO: 2048080 - RNA, 19 nt, Homo sapiens
  misc_RNA (1)...(19): siRNA sense strand
ugccuuugaugugaauuua

SEQ ID NO: 2048081 - RNA, 19 nt, Homo sapiens
  misc_RNA (1)...(19): siRNA sense strand
guucuaugcugauaaaaga

SEQ ID NO: 2048082 - RNA, 19 nt, Homo sapiens
  misc_RNA (1)...(19): siRNA sense strand
ggagaaccuuccauuaccu

SEQ ID NO: 2048083 - RNA, 19 nt, Homo sapiens
  misc_RNA (1)...(19): siRNA sense strand
gugggacaaugguuggaaa

SEQ ID NO: 2048084 - RNA, 19 nt, Homo sapiens
  misc_RNA (1)...(19): siRNA sense strand
aaucaccacuacugucaug

SEQ ID NO: 2048085 - RNA, 19 nt, Homo sapiens
  misc_RNA (1)...(19): siRNA sense strand
ggacccagaagaccucuca

SEQ ID NO: 2048086 - RNA, 19 nt, Homo sapiens
  misc_RNA (1)...(19): siRNA sense strand
guuggaaauuggaauccuu

SEQ ID NO: 2048087 - RNA, 19 nt, Homo sapiens
  misc_RNA (1)...(19): siRNA sense strand
uuuaugggaagcaauguua

SEQ ID NO: 2048088 - RNA, 19 nt, Homo sapiens
  misc_RNA (1)...(19): siRNA sense strand
agaagaccucucaacauuu

SEQ ID NO: 2048089 - RNA, 19 nt, Homo sapiens
  misc_RNA (1)...(19): siRNA sense strand
gcaauccagcuccuuccaa

SEQ ID NO: 2048090 - RNA, 19 nt, Homo sapiens
  misc_RNA (1)...(19): siRNA sense strand
gacagaaucaacccaagau

SEQ ID NO: 2048091 - RNA, 19 nt, Homo sapiens
  misc_RNA (1)...(19): siRNA sense strand
gauuugacaaugugcaguu

SEQ ID NO: 2048092 - RNA, 19 nt, Homo sapiens
  misc_RNA (1)...(19): siRNA sense strand
ugaagucuaaucaccacua

SEQ ID NO: 2048093 - RNA, 19 nt, Homo sapiens
  misc_RNA (1)...(19): siRNA sense strand
agaaggucccuacuauuau

SEQ ID NO: 2048094 - RNA, 19 nt, Homo sapiens
  misc_RNA (1)...(19): siRNA sense strand
ccaaacagugggacaaugg

SEQ ID NO: 2048095 - RNA, 19 nt, Homo sapiens
  misc_RNA (1)...(19): siRNA sense strand
uugacaaugugcaguuuau

SEQ ID NO: 2048096 - RNA, 19 nt, Homo sapiens
  misc_RNA (1)...(19): siRNA sense strand
uaauuaauggcuacacuuc

SEQ ID NO: 2048097 - RNA, 19 nt, Homo sapiens
  misc_RNA (1)...(19): siRNA sense strand
gacaaugugcaguuuaugg

SEQ ID NO: 2048098 - RNA, 19 nt, Homo sapiens
  misc_RNA (1)...(19): siRNA sense strand
caccacuacugucaugugu

SEQ ID NO: 2048099 - RNA, 19 nt, Homo sapiens
  misc_RNA (1)...(19): siRNA sense strand
cuaaucaccacuacuguca

SEQ ID NO: 2048100 - RNA, 19 nt, Homo sapiens
  misc_RNA (1)...(19): siRNA sense strand
acauuugccuauaucacaa

SEQ ID NO: 2048101 - RNA, 19 nt, Homo sapiens
  misc_RNA (1)...(19): siRNA sense strand
ccagcuagcacuacaagca

SEQ ID NO: 2048102 - RNA, 19 nt, Homo sapiens
  misc_RNA (1)...(19): siRNA sense strand
uuacugccuuugaugugaa

SEQ ID NO: 2048103 - RNA, 19 nt, Homo sapiens
  misc_RNA (1)...(19): siRNA sense strand
cgggcuaacugucagaagu

SEQ ID NO: 2048104 - RNA, 19 nt, Homo sapiens
  misc_RNA (1)...(19): siRNA sense strand
cugggagguugaacuuauu

SEQ ID NO: 2048105 - RNA, 19 nt, Homo sapiens
  misc_RNA (1)...(19): siRNA sense strand
gugaauuuagccuaugaaa

SEQ ID NO: 2048106 - RNA, 19 nt, Homo sapiens
  misc_RNA (1)...(19): siRNA sense strand
ggaaagcauugggcuaccu

SEQ ID NO: 2048107 - RNA, 19 nt, Homo sapiens
  misc_RNA (1)...(19): siRNA sense strand
gaagucuacagagcaaaug

SEQ ID NO: 2048108 - RNA, 19 nt, Homo sapiens
  misc_RNA (1)...(19): siRNA sense strand
gagaaccuuccauuaccuu

SEQ ID NO: 2048109 - RNA, 19 nt, Homo sapiens
  misc_RNA (1)...(19): siRNA sense strand
ccagcuccuuccaaagaug

SEQ ID NO: 2048110 - RNA, 19 nt, Homo sapiens
  misc_RNA (1)...(19): siRNA sense strand
ccuccacacuuccagaaag

SEQ ID NO: 2048111 - RNA, 19 nt, Homo sapiens
  misc_RNA (1)...(19): siRNA sense strand
gcuaccaucccaccucugu

SEQ ID NO: 2048112 - RNA, 19 nt, Homo sapiens
  misc_RNA (1)...(19): siRNA sense strand
auuaauggcuacacuucga

SEQ ID NO: 2048113 - RNA, 19 nt, Homo sapiens
  misc_RNA (1)...(19): siRNA sense strand
ucauguguuuacugccuuu

SEQ ID NO: 2048114 - RNA, 19 nt, Homo sapiens
  misc_RNA (1)...(19): siRNA sense strand
ccagaugcccuguccaaac

SEQ ID NO: 2048115 - RNA, 19 nt, Homo sapiens
  misc_RNA (1)...(19): siRNA sense strand
gaaucaacccaagaugcuu

SEQ ID NO: 2048116 - RNA, 19 nt, Homo sapiens
  misc_RNA (1)...(19): siRNA sense strand
uuauggaagaucaggauuu

SEQ ID NO: 2048117 - RNA, 19 nt, Homo sapiens
  misc_RNA (1)...(19): siRNA sense strand
gaaaacaaacccuccaaac

SEQ ID NO: 2048118 - RNA, 19 nt, Homo sapiens
  misc_RNA (1)...(19): siRNA sense strand
cagaaagcuuugaaaacaa

SEQ ID NO: 2048119 - RNA, 19 nt, Homo sapiens
  misc_RNA (1)...(19): siRNA sense strand
ucccuacuauuauucuuuc

SEQ ID NO: 2048120 - RNA, 19 nt, Homo sapiens
  misc_RNA (1)...(19): siRNA sense strand
guccguggaucuucuucau

SEQ ID NO: 2048121 - RNA, 19 nt, Homo sapiens
  misc_RNA (1)...(19): siRNA sense strand
gggacacuccuccacacuu

SEQ ID NO: 2048122 - RNA, 19 nt, Homo sapiens
  misc_RNA (1)...(19): siRNA sense strand
ggaaguauuucacgaauua

SEQ ID NO: 2048123 - RNA, 19 nt, Homo sapiens
  misc_RNA (1)...(19): siRNA sense strand
gaacauagauuacaagaag

SEQ ID NO: 2048124 - RNA, 19 nt, Homo sapiens
  misc_RNA (1)...(19): siRNA sense strand
gaauaaauauggccaauug

SEQ ID NO: 2048125 - RNA, 19 nt, Homo sapiens
  misc_RNA (1)...(19): siRNA sense strand
ugaaagagcugguucuaaa

SEQ ID NO: 2048126 - RNA, 19 nt, Homo sapiens
  misc_RNA (1)...(19): siRNA sense strand
ggagauagccaaugagaua

SEQ ID NO: 2048127 - RNA, 19 nt, Homo sapiens
  misc_RNA (1)...(19): siRNA sense strand
caaggaagguggaguguuu

SEQ ID NO: 2048128 - RNA, 19 nt, Homo sapiens
  misc_RNA (1)...(19): siRNA sense strand
gaucaaagcuuuucacauu

SEQ ID NO: 2048129 - RNA, 19 nt, Homo sapiens
  misc_RNA (1)...(19): siRNA sense strand
agacacagcuguuaacaaa

SEQ ID NO: 2048130 - RNA, 19 nt, Homo sapiens
  misc_RNA (1)...(19): siRNA sense strand
uggagaagcucauacguua

SEQ ID NO: 2048131 - RNA, 19 nt, Homo sapiens
  misc_RNA (1)...(19): siRNA sense strand
ugagauagauggaacguuu

SEQ ID NO: 2048132 - RNA, 19 nt, Homo sapiens
  misc_RNA (1)...(19): siRNA sense strand
cagaaugucuccucucuuu

SEQ ID NO: 2048133 - RNA, 19 nt, Homo sapiens
  misc_RNA (1)...(19): siRNA sense strand
gaaauaaacccaaggaaag

SEQ ID NO: 2048134 - RNA, 19 nt, Homo sapiens
  misc_RNA (1)...(19): siRNA sense strand
gcauugagguuuuaucuua

SEQ ID NO: 2048135 - RNA, 19 nt, Homo sapiens
  misc_RNA (1)...(19): siRNA sense strand
gaggaaacauuuugucuua

SEQ ID NO: 2048136 - RNA, 19 nt, Homo sapiens
  misc_RNA (1)...(19): siRNA sense strand
gaacuuaugggaagcauug

SEQ ID NO: 2048137 - RNA, 19 nt, Homo sapiens
  misc_RNA (1)...(19): siRNA sense strand
ggaaggaacuggaaaagaa

SEQ ID NO: 2048138 - RNA, 19 nt, Homo sapiens
  misc_RNA (1)...(19): siRNA sense strand
uaaacugacuagcuccuua

SEQ ID NO: 2048139 - RNA, 19 nt, Homo sapiens
  misc_RNA (1)...(19): siRNA sense strand
ggagaagcaugcaacaguu

SEQ ID NO: 2048140 - RNA, 19 nt, Homo sapiens
  misc_RNA (1)...(19): siRNA sense strand
ugacauagaggaaacauuu

SEQ ID NO: 2048141 - RNA, 19 nt, Homo sapiens
  misc_RNA (1)...(19): siRNA sense strand
caacaaguuuggucagcua

SEQ ID NO: 2048142 - RNA, 19 nt, Homo sapiens
  misc_RNA (1)...(19): siRNA sense strand
aagcagaucuggacaguga

SEQ ID NO: 2048143 - RNA, 19 nt, Homo sapiens
  misc_RNA (1)...(19): siRNA sense strand
guacaagaauugauagaca

SEQ ID NO: 2048144 - RNA, 19 nt, Homo sapiens
  misc_RNA (1)...(19): siRNA sense strand
gaaauacuacauaggguaa

SEQ ID NO: 2048145 - RNA, 19 nt, Homo sapiens
  misc_RNA (1)...(19): siRNA sense strand
gaagauuccaggcucauuu

SEQ ID NO: 2048146 - RNA, 19 nt, Homo sapiens
  misc_RNA (1)...(19): siRNA sense strand
gaacuaaugccugauguug

SEQ ID NO: 2048147 - RNA, 19 nt, Homo sapiens
  misc_RNA (1)...(19): siRNA sense strand
gauaagacauuugaagaca

SEQ ID NO: 2048148 - RNA, 19 nt, Homo sapiens
  misc_RNA (1)...(19): siRNA sense strand
uagaacagguaccagauuu

SEQ ID NO: 2048149 - RNA, 19 nt, Homo sapiens
  misc_RNA (1)...(19): siRNA sense strand
ggcagaacauccuacgaua

SEQ ID NO: 2048150 - RNA, 19 nt, Homo sapiens
  misc_RNA (1)...(19): siRNA sense strand
gaaguugugguacaucuuu

SEQ ID NO: 2048151 - RNA, 19 nt, Homo sapiens
  misc_RNA (1)...(19): siRNA sense strand
gcagauaucccuguuacaa

SEQ ID NO: 2048152 - RNA, 19 nt, Homo sapiens
  misc_RNA (1)...(19): siRNA sense strand
gaugagugauuccaacaau

SEQ ID NO: 2048153 - RNA, 19 nt, Homo sapiens
  misc_RNA (1)...(19): siRNA sense strand
gcagaacauccuacgauaa

SEQ ID NO: 2048154 - RNA, 19 nt, Homo sapiens
  misc_RNA (1)...(19): siRNA sense strand
gagaagcaugcaacaguua

SEQ ID NO: 2048155 - RNA, 19 nt, Homo sapiens
  misc_RNA (1)...(19): siRNA sense strand
ggacagcuaggucaugaaa

SEQ ID NO: 2048156 - RNA, 19 nt, Homo sapiens
  misc_RNA (1)...(19): siRNA sense strand
ugaaauaaacccaaggaaa

SEQ ID NO: 2048157 - RNA, 19 nt, Homo sapiens
  misc_RNA (1)...(19): siRNA sense strand
cagaacauccuacgauaaa

SEQ ID NO: 2048158 - RNA, 19 nt, Homo sapiens
  misc_RNA (1)...(19): siRNA sense strand
acagugauuuguuccauuu

SEQ ID NO: 2048159 - RNA, 19 nt, Homo sapiens
  misc_RNA (1)...(19): siRNA sense strand
uauuguagcuguuucaugu

SEQ ID NO: 2048160 - RNA, 19 nt, Homo sapiens
  misc_RNA (1)...(19): siRNA sense strand
gcagauggcuauugaucag

SEQ ID NO: 2048161 - RNA, 19 nt, Homo sapiens
  misc_RNA (1)...(19): siRNA sense strand
gcaggccuauggaauguug

SEQ ID NO: 2048162 - RNA, 19 nt, Homo sapiens
  misc_RNA (1)...(19): siRNA sense strand
ugggacagauuauacagua

SEQ ID NO: 2048163 - RNA, 19 nt, Homo sapiens
  misc_RNA (1)...(19): siRNA sense strand
agaguacccagaaauauua

SEQ ID NO: 2048164 - RNA, 19 nt, Homo sapiens
  misc_RNA (1)...(19): siRNA sense strand
gguccgagauguaggaugu

SEQ ID NO: 2048165 - RNA, 19 nt, Homo sapiens
  misc_RNA (1)...(19): siRNA sense strand
acucuacgcucuaaacuga

SEQ ID NO: 2048166 - RNA, 19 nt, Homo sapiens
  misc_RNA (1)...(19): siRNA sense strand
gaagguggaguguuuacuu

SEQ ID NO: 2048167 - RNA, 19 nt, Homo sapiens
  misc_RNA (1)...(19): siRNA sense strand
cuaaugaacuacaagcaau

SEQ ID NO: 2048168 - RNA, 19 nt, Homo sapiens
  misc_RNA (1)...(19): siRNA sense strand
aaacuuuggugcaacagaa

SEQ ID NO: 2048169 - RNA, 19 nt, Homo sapiens
  misc_RNA (1)...(19): siRNA sense strand
gaagaugacauagaggaaa

SEQ ID NO: 2048170 - RNA, 19 nt, Homo sapiens
  misc_RNA (1)...(19): siRNA sense strand
ugaagacagugauuuguuc

SEQ ID NO: 2048171 - RNA, 19 nt, Homo sapiens
  misc_RNA (1)...(19): siRNA sense strand
caggacgaauuuacucuuu

SEQ ID NO: 2048172 - RNA, 19 nt, Homo sapiens
  misc_RNA (1)...(19): siRNA sense strand
ucacuaagaucucagaaaa

SEQ ID NO: 2048173 - RNA, 19 nt, Homo sapiens
  misc_RNA (1)...(19): siRNA sense strand
uaaaucaguggcuuccuua

SEQ ID NO: 2048174 - RNA, 19 nt, Homo sapiens
  misc_RNA (1)...(19): siRNA sense strand
ggaauuauuggauccuaaa

SEQ ID NO: 2048175 - RNA, 19 nt, Homo sapiens
  misc_RNA (1)...(19): siRNA sense strand
gggaauuauuggauccuaa

SEQ ID NO: 2048176 - RNA, 19 nt, Homo sapiens
  misc_RNA (1)...(19): siRNA sense strand
gguuauauuuguuggagaa

SEQ ID NO: 2048177 - RNA, 19 nt, Homo sapiens
  misc_RNA (1)...(19): siRNA sense strand
uguaggagaugcaauggaa

SEQ ID NO: 2048178 - RNA, 19 nt, Homo sapiens
  misc_RNA (1)...(19): siRNA sense strand
ccagaugacuucagauguc

SEQ ID NO: 2048179 - RNA, 19 nt, Homo sapiens
  misc_RNA (1)...(19): siRNA sense strand
guacagcucuugugaaccu

SEQ ID NO: 2048180 - RNA, 19 nt, Homo sapiens
  misc_RNA (1)...(19): siRNA sense strand
gguggcagcuaguuuggaa

SEQ ID NO: 2048181 - RNA, 19 nt, Homo sapiens
  misc_RNA (1)...(19): siRNA sense strand
uaaagucacuaagaucuca

SEQ ID NO: 2048182 - RNA, 19 nt, Homo sapiens
  misc_RNA (1)...(19): siRNA sense strand
gggaaguauuucacgaauu

SEQ ID NO: 2048183 - RNA, 19 nt, Homo sapiens
  misc_RNA (1)...(19): siRNA sense strand
cauaaggucuguggaggaa

SEQ ID NO: 2048184 - RNA, 19 nt, Homo sapiens
  misc_RNA (1)...(19): siRNA sense strand
gagaaaaugggacagauua

SEQ ID NO: 2048185 - RNA, 19 nt, Homo sapiens
  misc_RNA (1)...(19): siRNA sense strand
cuacauaggguaaaugaga

SEQ ID NO: 2048186 - RNA, 19 nt, Homo sapiens
  misc_RNA (1)...(19): siRNA sense strand
cauacugcauuaaagguuu

SEQ ID NO: 2048187 - RNA, 19 nt, Homo sapiens
  misc_RNA (1)...(19): siRNA sense strand
ccacugaaaguacuugaaa

SEQ ID NO: 2048188 - RNA, 19 nt, Homo sapiens
  misc_RNA (1)...(19): siRNA sense strand
ccaacaauuucacaacaau

SEQ ID NO: 2048189 - RNA, 19 nt, Homo sapiens
  misc_RNA (1)...(19): siRNA sense strand
acucagacauacuguguuu

SEQ ID NO: 2048190 - RNA, 19 nt, Homo sapiens
  misc_RNA (1)...(19): siRNA sense strand
ugucagauauccagauugu

SEQ ID NO: 2048191 - RNA, 19 nt, Homo sapiens
  misc_RNA (1)...(19): siRNA sense strand
gaaagagcugguucuaaau

SEQ ID NO: 2048192 - RNA, 19 nt, Homo sapiens
  misc_RNA (1)...(19): siRNA sense strand
gcaauucccuuugguacag

SEQ ID NO: 2048193 - RNA, 19 nt, Homo sapiens
  misc_RNA (1)...(19): siRNA sense strand
ugagugauuccaacaauuu

SEQ ID NO: 2048194 - RNA, 19 nt, Homo sapiens
  misc_RNA (1)...(19): siRNA sense strand
gaugaucacuauagaacag

SEQ ID NO: 2048195 - RNA, 19 nt, Homo sapiens
  misc_RNA (1)...(19): siRNA sense strand
gacagugaaugaagcucua

SEQ ID NO: 2048196 - RNA, 19 nt, Homo sapiens
  misc_RNA (1)...(19): siRNA sense strand
uauggaauguuggcagaua

SEQ ID NO: 2048197 - RNA, 19 nt, Homo sapiens
  misc_RNA (1)...(19): siRNA sense strand
cagaguacccagaaauauu

SEQ ID NO: 2048198 - RNA, 19 nt, Homo sapiens
  misc_RNA (1)...(19): siRNA sense strand
ugaagagucugaaacuagu

SEQ ID NO: 2048199 - RNA, 19 nt, Homo sapiens
  misc_RNA (1)...(19): siRNA sense strand
aucaguggcuuccuuauuu

SEQ ID NO: 2048200 - RNA, 19 nt, Homo sapiens
  misc_RNA (1)...(19): siRNA sense strand
gaaaaugggacagauuaua

SEQ ID NO: 2048201 - RNA, 19 nt, Homo sapiens
  misc_RNA (1)...(19): siRNA sense strand
ugaagaaauuguacuagag

SEQ ID NO: 2048202 - RNA, 19 nt, Homo sapiens
  misc_RNA (1)...(19): siRNA sense strand
gcagguggcagcuaguuug

SEQ ID NO: 2048203 - RNA, 19 nt, Homo sapiens
  misc_RNA (1)...(19): siRNA sense strand
caaagcagaucuggacagu

SEQ ID NO: 2048204 - RNA, 19 nt, Homo sapiens
  misc_RNA (1)...(19): siRNA sense strand
ggaaauugguaccccuaua

SEQ ID NO: 2048205 - RNA, 19 nt, Homo sapiens
  misc_RNA (1)...(19): siRNA sense strand
gacagugauuuguuccauu

SEQ ID NO: 2048206 - RNA, 19 nt, Homo sapiens
  misc_RNA (1)...(19): siRNA sense strand
aaacugauccaagcuauug

SEQ ID NO: 2048207 - RNA, 19 nt, Homo sapiens
  misc_RNA (1)...(19): siRNA sense strand
aagaaacucuacgcucuaa

SEQ ID NO: 2048208 - RNA, 19 nt, Homo sapiens
  misc_RNA (1)...(19): siRNA sense strand
ggacucagacauacugugu

SEQ ID NO: 2048209 - RNA, 19 nt, Homo sapiens
  misc_RNA (1)...(19): siRNA sense strand
gauguaggauguggacuca

SEQ ID NO: 2048210 - RNA, 19 nt, Homo sapiens
  misc_RNA (1)...(19): siRNA sense strand
uaagacauuugaagacagu

SEQ ID NO: 2048211 - RNA, 19 nt, Homo sapiens
  misc_RNA (1)...(19): siRNA sense strand
caagaagccacucaagguu

SEQ ID NO: 2048212 - RNA, 19 nt, Homo sapiens
  misc_RNA (1)...(19): siRNA sense strand
guacuugaaccuccacuau

SEQ ID NO: 2048213 - RNA, 19 nt, Homo sapiens
  misc_RNA (1)...(19): siRNA sense strand
caauagcaauucccuuugg

SEQ ID NO: 2048214 - RNA, 19 nt, Homo sapiens
  misc_RNA (1)...(19): siRNA sense strand
ggcagugucuaccagauau

SEQ ID NO: 2048215 - RNA, 19 nt, Homo sapiens
  misc_RNA (1)...(19): siRNA sense strand
gaaauugguaccccuauaa

SEQ ID NO: 2048216 - RNA, 19 nt, Homo sapiens
  misc_RNA (1)...(19): siRNA sense strand
uggaaucccuuucaugcaa

SEQ ID NO: 2048217 - RNA, 19 nt, Homo sapiens
  misc_RNA (1)...(19): siRNA sense strand
gaucauacugcugcucuaa

SEQ ID NO: 2048218 - RNA, 19 nt, Homo sapiens
  misc_RNA (1)...(19): siRNA sense strand
gcauuccuauucuugguau

SEQ ID NO: 2048219 - RNA, 19 nt, Homo sapiens
  misc_RNA (1)...(19): siRNA sense strand
guagugaucgcauuccuau

SEQ ID NO: 2048220 - RNA, 19 nt, Homo sapiens
  misc_RNA (1)...(19): siRNA sense strand
ggguggaauugaugaagaa

SEQ ID NO: 2048221 - RNA, 19 nt, Homo sapiens
  misc_RNA (1)...(19): siRNA sense strand
caucaugagggaauuauug

SEQ ID NO: 2048222 - RNA, 19 nt, Homo sapiens
  misc_RNA (1)...(19): siRNA sense strand
gcaagaaacugaacuguua

SEQ ID NO: 2048223 - RNA, 19 nt, Homo sapiens
  misc_RNA (1)...(19): siRNA sense strand
aaacugaacuguuacaaga

SEQ ID NO: 2048224 - RNA, 19 nt, Homo sapiens
  misc_RNA (1)...(19): siRNA sense strand
cggcaacucugauuauaga

SEQ ID NO: 2048225 - RNA, 19 nt, Homo sapiens
  misc_RNA (1)...(19): siRNA sense strand
uagaagauguuguuguuag

SEQ ID NO: 2048226 - RNA, 19 nt, Homo sapiens
  misc_RNA (1)...(19): siRNA sense strand
ggagaaggcuugguuuuga

SEQ ID NO: 2048227 - RNA, 19 nt, Homo sapiens
  misc_RNA (1)...(19): siRNA sense strand
caacucugauuauagaaca

SEQ ID NO: 2048228 - RNA, 19 nt, Homo sapiens
  misc_RNA (1)...(19): siRNA sense strand
aguagaagauguuguuguu

SEQ ID NO: 2048229 - RNA, 19 nt, Homo sapiens
  misc_RNA (1)...(19): siRNA sense strand
uaagagaggaagaguagaa

SEQ ID NO: 2048230 - RNA, 19 nt, Homo sapiens
  misc_RNA (1)...(19): siRNA sense strand
gaggaagaguagaagaugu

SEQ ID NO: 2048231 - RNA, 19 nt, Homo sapiens
  misc_RNA (1)...(19): siRNA sense strand
gcuaagagaggaagaguag

SEQ ID NO: 2048232 - RNA, 19 nt, Homo sapiens
  misc_RNA (1)...(19): siRNA sense strand
ugacccaagucuacucaaa

SEQ ID NO: 2048233 - RNA, 19 nt, Homo sapiens
  misc_RNA (1)...(19): siRNA sense strand
ugucggagguuucuaaagu

SEQ ID NO: 2048234 - RNA, 19 nt, Homo sapiens
  misc_RNA (1)...(19): siRNA sense strand
gcagcuuggcaaauuguua

SEQ ID NO: 2048235 - RNA, 19 nt, Homo sapiens
  misc_RNA (1)...(19): siRNA sense strand
gguauugggucagcuaaca

SEQ ID NO: 2048236 - RNA, 19 nt, Homo sapiens
  misc_RNA (1)...(19): siRNA sense strand
cuacaugugucggagguuu

SEQ ID NO: 2048237 - RNA, 19 nt, Homo sapiens
  misc_RNA (1)...(19): siRNA sense strand
gaaacugaacuguuacaag

SEQ ID NO: 2048238 - RNA, 19 nt, Homo sapiens
  misc_RNA (1)...(19): siRNA sense strand
gaauacagcuacauuuucu

SEQ ID NO: 2048239 - RNA, 19 nt, Homo sapiens
  misc_RNA (1)...(19): siRNA sense strand
uaacagagacuggaguugu

SEQ ID NO: 2048240 - RNA, 19 nt, Homo sapiens
  misc_RNA (1)...(19): siRNA sense strand
gucggagguuucuaaagua

SEQ ID NO: 2048241 - RNA, 19 nt, Homo sapiens
  misc_RNA (1)...(19): siRNA sense strand
guagaagauguuguuguua

SEQ ID NO: 2048242 - RNA, 19 nt, Homo sapiens
  misc_RNA (1)...(19): siRNA sense strand
ucagaauacagcuacauuu

SEQ ID NO: 2048243 - RNA, 19 nt, Homo sapiens
  misc_RNA (1)...(19): siRNA sense strand
ucggagguuucuaaaguaa

SEQ ID NO: 2048244 - RNA, 19 nt, Homo sapiens
  misc_RNA (1)...(19): siRNA sense strand
gagaggaagaguagaagau

SEQ ID NO: 2048245 - RNA, 19 nt, Homo sapiens
  misc_RNA (1)...(19): siRNA sense strand
ucuuuguacugcugacuua

SEQ ID NO: 2048246 - RNA, 19 nt, Homo sapiens
  misc_RNA (1)...(19): siRNA sense strand
guacugcugacuuaaauag

SEQ ID NO: 2048247 - RNA, 19 nt, Homo sapiens
  misc_RNA (1)...(19): siRNA sense strand
caagucuacucaaagaagu

SEQ ID NO: 2048248 - RNA, 19 nt, Homo sapiens
  misc_RNA (1)...(19): siRNA sense strand
uacggcaacucugauuaua

SEQ ID NO: 2048249 - RNA, 19 nt, Homo sapiens
  misc_RNA (1)...(19): siRNA sense strand
acugaacuguuacaagauu

SEQ ID NO: 2048250 - RNA, 19 nt, Homo sapiens
  misc_RNA (1)...(19): siRNA sense strand
gcuacggcaacucugauua

SEQ ID NO: 2048251 - RNA, 19 nt, Homo sapiens
  misc_RNA (1)...(19): siRNA sense strand
aagauguuguuguuaguga

SEQ ID NO: 2048252 - RNA, 19 nt, Homo sapiens
  misc_RNA (1)...(19): siRNA sense strand
uaucaacccuuacuuugcu

SEQ ID NO: 2048253 - RNA, 19 nt, Homo sapiens
  misc_RNA (1)...(19): siRNA sense strand
cugaacuguuacaagauua

SEQ ID NO: 2048254 - RNA, 19 nt, Homo sapiens
  misc_RNA (1)...(19): siRNA sense strand
gaagauguuguuguuagug

SEQ ID NO: 2048255 - RNA, 19 nt, Homo sapiens
  misc_RNA (1)...(19): siRNA sense strand
gauuacccuugaaugucua

SEQ ID NO: 2048256 - RNA, 19 nt, Homo sapiens
  misc_RNA (1)...(19): siRNA sense strand
cccaacacauccuggagaa

SEQ ID NO: 2048257 - RNA, 19 nt, Homo sapiens
  misc_RNA (1)...(19): siRNA sense strand
acccaagucuacucaaaga

SEQ ID NO: 2048258 - RNA, 19 nt, Homo sapiens
  misc_RNA (1)...(19): siRNA sense strand
gcuaacagagacuggaguu

SEQ ID NO: 2048259 - RNA, 19 nt, Homo sapiens
  misc_RNA (1)...(19): siRNA sense strand
gagcauaugaagaaaucug

SEQ ID NO: 2048260 - RNA, 19 nt, Homo sapiens
  misc_RNA (1)...(19): siRNA sense strand
gcccugaacaauuuaugaa

SEQ ID NO: 2048261 - RNA, 19 nt, Homo sapiens
  misc_RNA (1)...(19): siRNA sense strand
gcuuggcaaauuguuauua

SEQ ID NO: 2048262 - RNA, 19 nt, Homo sapiens
  misc_RNA (1)...(19): siRNA sense strand
aagaguagaagauguuguu

SEQ ID NO: 2048263 - RNA, 19 nt, Homo sapiens
  misc_RNA (1)...(19): siRNA sense strand
cuacggcaacucugauuau

SEQ ID NO: 2048264 - RNA, 19 nt, Homo sapiens
  misc_RNA (1)...(19): siRNA sense strand
uaagguauugggucagcua

SEQ ID NO: 2048265 - RNA, 19 nt, Homo sapiens
  misc_RNA (1)...(19): siRNA sense strand
ccaagucuacucaaagaag

SEQ ID NO: 2048266 - RNA, 19 nt, Homo sapiens
  misc_RNA (1)...(19): siRNA sense strand
agauuacccuugaaugucu

SEQ ID NO: 2048267 - RNA, 19 nt, Homo sapiens
  misc_RNA (1)...(19): siRNA sense strand
cagcuuggcaaauuguuau

SEQ ID NO: 2048268 - RNA, 19 nt, Homo sapiens
  misc_RNA (1)...(19): siRNA sense strand
ggaagaguagaagauguug

SEQ ID NO: 2048269 - RNA, 19 nt, Homo sapiens
  misc_RNA (1)...(19): siRNA sense strand
ccauuccugugcuaagaga

SEQ ID NO: 2048270 - RNA, 19 nt, Homo sapiens
  misc_RNA (1)...(19): siRNA sense strand
agugaugaaugcagaggaa

SEQ ID NO: 2048271 - RNA, 19 nt, Homo sapiens
  misc_RNA (1)...(19): siRNA sense strand
agaagauguuguuguuagu

SEQ ID NO: 2048272 - RNA, 19 nt, Homo sapiens
  misc_RNA (1)...(19): siRNA sense strand
gaguagaagauguuguugu

SEQ ID NO: 2048273 - RNA, 19 nt, Homo sapiens
  misc_RNA (1)...(19): siRNA sense strand
cagaauacagcuacauuuu

SEQ ID NO: 2048274 - RNA, 19 nt, Homo sapiens
  misc_RNA (1)...(19): siRNA sense strand
uugagcauaugaagaaauc

SEQ ID NO: 2048275 - RNA, 19 nt, Homo sapiens
  misc_RNA (1)...(19): siRNA sense strand
ccuugaaugucuaccacaa

SEQ ID NO: 2048276 - RNA, 19 nt, Homo sapiens
  misc_RNA (1)...(19): siRNA sense strand
gucagaauacagcuacauu

SEQ ID NO: 2048277 - RNA, 19 nt, Homo sapiens
  misc_RNA (1)...(19): siRNA sense strand
gaagaguagaagauguugu

SEQ ID NO: 2048278 - RNA, 19 nt, Homo sapiens
  misc_RNA (1)...(19): siRNA sense strand
gggauuauuauguuacagu

SEQ ID NO: 2048279 - RNA, 19 nt, Homo sapiens
  misc_RNA (1)...(19): siRNA sense strand
gaaugucuaccacaaaaug

SEQ ID NO: 2048280 - RNA, 19 nt, Homo sapiens
  misc_RNA (1)...(19): siRNA sense strand
cugaugaaacuccuauguu

SEQ ID NO: 2048281 - RNA, 19 nt, Homo sapiens
  misc_RNA (1)...(19): siRNA sense strand
gauguuguuguuagugaug

SEQ ID NO: 2048282 - RNA, 19 nt, Homo sapiens
  misc_RNA (1)...(19): siRNA sense strand
gaugugacucuaggacaga

SEQ ID NO: 2048283 - RNA, 19 nt, Homo sapiens
  misc_RNA (1)...(19): siRNA sense strand
cacaaaauguugguuucua

SEQ ID NO: 2048284 - RNA, 19 nt, Homo sapiens
  misc_RNA (1)...(19): siRNA sense strand
gacccaagucuacucaaag

SEQ ID NO: 2048285 - RNA, 19 nt, Homo sapiens
  misc_RNA (1)...(19): siRNA sense strand
gcaacucugauuauagaac

SEQ ID NO: 2048286 - RNA, 19 nt, Homo sapiens
  misc_RNA (1)...(19): siRNA sense strand
aacagagacuggaguuguc

SEQ ID NO: 2048287 - RNA, 19 nt, Homo sapiens
  misc_RNA (1)...(19): siRNA sense strand
aggaagaguagaagauguu

SEQ ID NO: 2048288 - RNA, 19 nt, Homo sapiens
  misc_RNA (1)...(19): siRNA sense strand
ucaaugagauggagaugua

SEQ ID NO: 2048289 - RNA, 19 nt, Homo sapiens
  misc_RNA (1)...(19): siRNA sense strand
gcgcugaacccacuuauuu

SEQ ID NO: 2048290 - RNA, 19 nt, Homo sapiens
  misc_RNA (1)...(19): siRNA sense strand
ggaaauagccaaugugagu

SEQ ID NO: 2048291 - RNA, 19 nt, Homo sapiens
  misc_RNA (1)...(19): siRNA sense strand
gcaacuggcuuguguggau

SEQ ID NO: 2048292 - RNA, 19 nt, Homo sapiens
  misc_RNA (1)...(19): siRNA sense strand
gcaagcuggcgcaaauuua

SEQ ID NO: 2048293 - RNA, 19 nt, Homo sapiens
  misc_RNA (1)...(19): siRNA sense strand
acacgacccucacuagaaa

SEQ ID NO: 2048294 - RNA, 19 nt, Homo sapiens
  misc_RNA (1)...(19): siRNA sense strand
gaaacuguccucuucauag

SEQ ID NO: 2048295 - RNA, 19 nt, Homo sapiens
  misc_RNA (1)...(19): siRNA sense strand
guucauagcucuguucuac

SEQ ID NO: 2048296 - RNA, 19 nt, Homo sapiens
  misc_RNA (1)...(19): siRNA sense strand
ccauuacacugucauuaug

SEQ ID NO: 2048297 - RNA, 19 nt, Homo sapiens
  misc_RNA (1)...(19): siRNA sense strand
ggagcaucaucuucaugua

SEQ ID NO: 2048298 - RNA, 19 nt, Homo sapiens
  misc_RNA (1)...(19): siRNA sense strand
gaagaucaggucagcagaa

SEQ ID NO: 2048299 - RNA, 19 nt, Homo sapiens
  misc_RNA (1)...(19): siRNA sense strand
caacuggcuuguguggaua

SEQ ID NO: 2048300 - RNA, 19 nt, Homo sapiens
  misc_RNA (1)...(19): siRNA sense strand
ccacacaccuauguacuuc

SEQ ID NO: 2048301 - RNA, 19 nt, Homo sapiens
  misc_RNA (1)...(19): siRNA sense strand
ucccacagcuccuggcuaa

SEQ ID NO: 2048302 - RNA, 19 nt, Homo sapiens
  misc_RNA (1)...(19): siRNA sense strand
ccuauguacuucuuucuug

SEQ ID NO: 2048303 - RNA, 19 nt, Homo sapiens
  misc_RNA (1)...(19): siRNA sense strand
gagcaucaucuucauguau

SEQ ID NO: 2048304 - RNA, 19 nt, Homo sapiens
  misc_RNA (1)...(19): siRNA sense strand
acuagaaacuguccucuuc

SEQ ID NO: 2048305 - RNA, 19 nt, Homo sapiens
  misc_RNA (1)...(19): siRNA sense strand
ucauaguugucuugaguuu

SEQ ID NO: 2048306 - RNA, 19 nt, Homo sapiens
  misc_RNA (1)...(19): siRNA sense strand
caggcaagcuggcgcaaau

SEQ ID NO: 2048307 - RNA, 19 nt, Homo sapiens
  misc_RNA (1)...(19): siRNA sense strand
gagggugugugguccaguu

SEQ ID NO: 2048308 - RNA, 19 nt, Homo sapiens
  misc_RNA (1)...(19): siRNA sense strand
aaacuguccucuucauagu

SEQ ID NO: 2048309 - RNA, 19 nt, Homo sapiens
  misc_RNA (1)...(19): siRNA sense strand
gcaaguucauagcucuguu

SEQ ID NO: 2048310 - RNA, 19 nt, Homo sapiens
  misc_RNA (1)...(19): siRNA sense strand
gagcagggcaaguucauag

SEQ ID NO: 2048311 - RNA, 19 nt, Homo sapiens
  misc_RNA (1)...(19): siRNA sense strand
gaaauagccaaugugaguu

SEQ ID NO: 2048312 - RNA, 19 nt, Homo sapiens
  misc_RNA (1)...(19): siRNA sense strand
ggugugugguccaguucua

SEQ ID NO: 2048313 - RNA, 19 nt, Homo sapiens
  misc_RNA (1)...(19): siRNA sense strand
gcagaagggcggagaaagg

SEQ ID NO: 2048314 - RNA, 19 nt, Homo sapiens
  misc_RNA (1)...(19): siRNA sense strand
cuucauaguugucuugagu

SEQ ID NO: 2048315 - RNA, 19 nt, Homo sapiens
  misc_RNA (1)...(19): siRNA sense strand
ggccagcuuugucuuuguu

SEQ ID NO: 2048316 - RNA, 19 nt, Homo sapiens
  misc_RNA (1)...(19): siRNA sense strand
ggcaagcuggcgcaaauuu

SEQ ID NO: 2048317 - RNA, 19 nt, Homo sapiens
  misc_RNA (1)...(19): siRNA sense strand
guaucgaucuugggcaaug

SEQ ID NO: 2048318 - RNA, 19 nt, Homo sapiens
  misc_RNA (1)...(19): siRNA sense strand
gacccucacuagaaacugu

SEQ ID NO: 2048319 - RNA, 19 nt, Homo sapiens
  misc_RNA (1)...(19): siRNA sense strand
ccaagagcaccucccauga

SEQ ID NO: 2048320 - RNA, 19 nt, Homo sapiens
  misc_RNA (1)...(19): siRNA sense strand
acaauugcaucgaccacuu

SEQ ID NO: 2048321 - RNA, 19 nt, Homo sapiens
  misc_RNA (1)...(19): siRNA sense strand
acacaccuauguacuucuu

SEQ ID NO: 2048322 - RNA, 19 nt, Homo sapiens
  misc_RNA (1)...(19): siRNA sense strand
ggagaaaggcauucaacac

SEQ ID NO: 2048323 - RNA, 19 nt, Homo sapiens
  misc_RNA (1)...(19): siRNA sense strand
gcacaugguauuagagaac

SEQ ID NO: 2048324 - RNA, 19 nt, Homo sapiens
  misc_RNA (1)...(19): siRNA sense strand
agauguaccuggccagcuu

SEQ ID NO: 2048325 - RNA, 19 nt, Homo sapiens
  misc_RNA (1)...(19): siRNA sense strand
uagaaacuguccucuucau

SEQ ID NO: 2048326 - RNA, 19 nt, Homo sapiens
  misc_RNA (1)...(19): siRNA sense strand
caagcuggcgcaaauuuag

SEQ ID NO: 2048327 - RNA, 19 nt, Homo sapiens
  misc_RNA (1)...(19): siRNA sense strand
ggcucauccuggucucuua

SEQ ID NO: 2048328 - RNA, 19 nt, Homo sapiens
  misc_RNA (1)...(19): siRNA sense strand
ccacacgacccucacuaga

SEQ ID NO: 2048329 - RNA, 19 nt, Homo sapiens
  misc_RNA (1)...(19): siRNA sense strand
uugcaucgaccacuucuuu

SEQ ID NO: 2048330 - RNA, 19 nt, Homo sapiens
  misc_RNA (1)...(19): siRNA sense strand
gcaggccacuccauuacac

SEQ ID NO: 2048331 - RNA, 19 nt, Homo sapiens
  misc_RNA (1)...(19): siRNA sense strand
agaaacuguccucuucaua

SEQ ID NO: 2048332 - RNA, 19 nt, Homo sapiens
  misc_RNA (1)...(19): siRNA sense strand
caagagcaccucccaugag

SEQ ID NO: 2048333 - RNA, 19 nt, Homo sapiens
  misc_RNA (1)...(19): siRNA sense strand
gggagcaucaucuucaugu

SEQ ID NO: 2048334 - RNA, 19 nt, Homo sapiens
  misc_RNA (1)...(19): siRNA sense strand
cacacgacccucacuagaa

SEQ ID NO: 2048335 - RNA, 19 nt, Homo sapiens
  misc_RNA (1)...(19): siRNA sense strand
guggauaccagccucaaug

SEQ ID NO: 2048336 - RNA, 19 nt, Homo sapiens
  misc_RNA (1)...(19): siRNA sense strand
cauuaugcauccacagcuu

SEQ ID NO: 2048337 - RNA, 19 nt, Homo sapiens
  misc_RNA (1)...(19): siRNA sense strand
uggccaccauguccuauga

SEQ ID NO: 2048338 - RNA, 19 nt, Homo sapiens
  misc_RNA (1)...(19): siRNA sense strand
acaccuauguacuucuuuc

SEQ ID NO: 2048339 - RNA, 19 nt, Homo sapiens
  misc_RNA (1)...(19): siRNA sense strand
uuaugcaacuggcuugugu

SEQ ID NO: 2048340 - RNA, 19 nt, Homo sapiens
  misc_RNA (1)...(19): siRNA sense strand
ucauagcucuguucuacac

SEQ ID NO: 2048341 - RNA, 19 nt, Homo sapiens
  misc_RNA (1)...(19): siRNA sense strand
gcuccacgcucaccaugcu

SEQ ID NO: 2048342 - RNA, 19 nt, Homo sapiens
  misc_RNA (1)...(19): siRNA sense strand
gcugaacccacuuauuuac

SEQ ID NO: 2048343 - RNA, 19 nt, Homo sapiens
  misc_RNA (1)...(19): siRNA sense strand
cgcugaacccacuuauuua

SEQ ID NO: 2048344 - RNA, 19 nt, Homo sapiens
  misc_RNA (1)...(19): siRNA sense strand
acuguccucuucauaguug

SEQ ID NO: 2048345 - RNA, 19 nt, Homo sapiens
  misc_RNA (1)...(19): siRNA sense strand
gagcuucaccacgagcauu

SEQ ID NO: 2048346 - RNA, 19 nt, Homo sapiens
  misc_RNA (1)...(19): siRNA sense strand
ggaacacggaggugaagag

SEQ ID NO: 2048347 - RNA, 19 nt, Homo sapiens
  misc_RNA (1)...(19): siRNA sense strand
ccacuccauuacacuguca

SEQ ID NO: 2048348 - RNA, 19 nt, Homo sapiens
  misc_RNA (1)...(19): siRNA sense strand
ucugcaggccacuccauua

SEQ ID NO: 2048349 - RNA, 19 nt, Homo sapiens
  misc_RNA (1)...(19): siRNA sense strand
cagcagaagggcggagaaa

SEQ ID NO: 2048350 - RNA, 19 nt, Homo sapiens
  misc_RNA (1)...(19): siRNA sense strand
ggcacaugguauuagagaa

SEQ ID NO: 2048351 - RNA, 19 nt, Homo sapiens
  misc_RNA (1)...(19): siRNA sense strand
uccauuacacugucauuau

SEQ ID NO: 2048352 - RNA, 19 nt, Homo sapiens
  misc_RNA (1)...(19): siRNA sense strand
ugaggaacacggaggugaa

SEQ ID NO: 2048353 - RNA, 19 nt, Homo sapiens
  misc_RNA (1)...(19): siRNA sense strand
ggucucccauacagaugug

SEQ ID NO: 2048354 - RNA, 19 nt, Homo sapiens
  misc_RNA (1)...(19): siRNA sense strand
gauggaaauagccaaugug

SEQ ID NO: 2048355 - RNA, 19 nt, Homo sapiens
  misc_RNA (1)...(19): siRNA sense strand
gcaggcaagcuggcgcaaa

SEQ ID NO: 2048356 - RNA, 19 nt, Homo sapiens
  misc_RNA (1)...(19): siRNA sense strand
ugaacccacuuauuuacac

SEQ ID NO: 2048357 - RNA, 19 nt, Homo sapiens
  misc_RNA (1)...(19): siRNA sense strand
caaguucauagcucuguuc

SEQ ID NO: 2048358 - RNA, 19 nt, Homo sapiens
  misc_RNA (1)...(19): siRNA sense strand
gcaucaucuucauguaucu

SEQ ID NO: 2048359 - RNA, 19 nt, Homo sapiens
  misc_RNA (1)...(19): siRNA sense strand
gugguccaguucuauaucu

SEQ ID NO: 2048360 - RNA, 19 nt, Homo sapiens
  misc_RNA (1)...(19): siRNA sense strand
gcuguggugucucuguuuu

SEQ ID NO: 2048361 - RNA, 19 nt, Homo sapiens
  misc_RNA (1)...(19): siRNA sense strand
guaccuggccagcuuuguc

SEQ ID NO: 2048362 - RNA, 19 nt, Homo sapiens
  misc_RNA (1)...(19): siRNA sense strand
gauguaccuggccagcuuu

SEQ ID NO: 2048363 - RNA, 19 nt, Homo sapiens
  misc_RNA (1)...(19): siRNA sense strand
aguucuauaucucccauug

SEQ ID NO: 2048364 - RNA, 19 nt, Homo sapiens
  misc_RNA (1)...(19): siRNA sense strand
cggcacaugguauuagaga

SEQ ID NO: 2048365 - RNA, 19 nt, Homo sapiens
  misc_RNA (1)...(19): siRNA sense strand
gugcaccuccacacaccua

SEQ ID NO: 2048366 - RNA, 19 nt, Homo sapiens
  misc_RNA (1)...(19): siRNA sense strand
ucaaugagauggagaugua

SEQ ID NO: 2048367 - RNA, 19 nt, Homo sapiens
  misc_RNA (1)...(19): siRNA sense strand
gcgcugaacccacuuauuu

SEQ ID NO: 2048368 - RNA, 19 nt, Homo sapiens
  misc_RNA (1)...(19): siRNA sense strand
ggaaauagccaaugugagu

SEQ ID NO: 2048369 - RNA, 19 nt, Homo sapiens
  misc_RNA (1)...(19): siRNA sense strand
gcaacuggcuuguguggau

SEQ ID NO: 2048370 - RNA, 19 nt, Homo sapiens
  misc_RNA (1)...(19): siRNA sense strand
gcaagcuggcgcaaauuua

SEQ ID NO: 2048371 - RNA, 19 nt, Homo sapiens
  misc_RNA (1)...(19): siRNA sense strand
acacgacccucacuagaaa

SEQ ID NO: 2048372 - RNA, 19 nt, Homo sapiens
  misc_RNA (1)...(19): siRNA sense strand
gaaacuguccucuucauag

SEQ ID NO: 2048373 - RNA, 19 nt, Homo sapiens
  misc_RNA (1)...(19): siRNA sense strand
guucauagcucuguucuac

SEQ ID NO: 2048374 - RNA, 19 nt, Homo sapiens
  misc_RNA (1)...(19): siRNA sense strand
ccauuacacugucauuaug

SEQ ID NO: 2048375 - RNA, 19 nt, Homo sapiens
  misc_RNA (1)...(19): siRNA sense strand
ggagcaucaucuucaugua

SEQ ID NO: 2048376 - RNA, 19 nt, Homo sapiens
  misc_RNA (1)...(19): siRNA sense strand
gaagaucaggucagcagaa

SEQ ID NO: 2048377 - RNA, 19 nt, Homo sapiens
  misc_RNA (1)...(19): siRNA sense strand
caacuggcuuguguggaua

SEQ ID NO: 2048378 - RNA, 19 nt, Homo sapiens
  misc_RNA (1)...(19): siRNA sense strand
ccacacaccuauguacuuc

SEQ ID NO: 2048379 - RNA, 19 nt, Homo sapiens
  misc_RNA (1)...(19): siRNA sense strand
ucccacagcuccuggcuaa

SEQ ID NO: 2048380 - RNA, 19 nt, Homo sapiens
  misc_RNA (1)...(19): siRNA sense strand
ccuauguacuucuuucuug

SEQ ID NO: 2048381 - RNA, 19 nt, Homo sapiens
  misc_RNA (1)...(19): siRNA sense strand
gagcaucaucuucauguau

SEQ ID NO: 2048382 - RNA, 19 nt, Homo sapiens
  misc_RNA (1)...(19): siRNA sense strand
acuagaaacuguccucuuc

SEQ ID NO: 2048383 - RNA, 19 nt, Homo sapiens
  misc_RNA (1)...(19): siRNA sense strand
ucauaguugucuugaguuu

SEQ ID NO: 2048384 - RNA, 19 nt, Homo sapiens
  misc_RNA (1)...(19): siRNA sense strand
caggcaagcuggcgcaaau

SEQ ID NO: 2048385 - RNA, 19 nt, Homo sapiens
  misc_RNA (1)...(19): siRNA sense strand
gagggugugugguccaguu

SEQ ID NO: 2048386 - RNA, 19 nt, Homo sapiens
  misc_RNA (1)...(19): siRNA sense strand
aaacuguccucuucauagu

SEQ ID NO: 2048387 - RNA, 19 nt, Homo sapiens
  misc_RNA (1)...(19): siRNA sense strand
gcaaguucauagcucuguu

SEQ ID NO: 2048388 - RNA, 19 nt, Homo sapiens
  misc_RNA (1)...(19): siRNA sense strand
gagcagggcaaguucauag

SEQ ID NO: 2048389 - RNA, 19 nt, Homo sapiens
  misc_RNA (1)...(19): siRNA sense strand
gaaauagccaaugugaguu

SEQ ID NO: 2048390 - RNA, 19 nt, Homo sapiens
  misc_RNA (1)...(19): siRNA sense strand
ggugugugguccaguucua

SEQ ID NO: 2048391 - RNA, 19 nt, Homo sapiens
  misc_RNA (1)...(19): siRNA sense strand
gcagaagggcggagaaagg

SEQ ID NO: 2048392 - RNA, 19 nt, Homo sapiens
  misc_RNA (1)...(19): siRNA sense strand
cuucauaguugucuugagu

SEQ ID NO: 2048393 - RNA, 19 nt, Homo sapiens
  misc_RNA (1)...(19): siRNA sense strand
ggccagcuuugucuuuguu

SEQ ID NO: 2048394 - RNA, 19 nt, Homo sapiens
  misc_RNA (1)...(19): siRNA sense strand
ggcaagcuggcgcaaauuu

SEQ ID NO: 2048395 - RNA, 19 nt, Homo sapiens
  misc_RNA (1)...(19): siRNA sense strand
guaucgaucuugggcaaug

SEQ ID NO: 2048396 - RNA, 19 nt, Homo sapiens
  misc_RNA (1)...(19): siRNA sense strand
gacccucacuagaaacugu

SEQ ID NO: 2048397 - RNA, 19 nt, Homo sapiens
  misc_RNA (1)...(19): siRNA sense strand
ccaagagcaccucccauga

SEQ ID NO: 2048398 - RNA, 19 nt, Homo sapiens
  misc_RNA (1)...(19): siRNA sense strand
acaauugcaucgaccacuu

SEQ ID NO: 2048399 - RNA, 19 nt, Homo sapiens
  misc_RNA (1)...(19): siRNA sense strand
acacaccuauguacuucuu

SEQ ID NO: 2048400 - RNA, 19 nt, Homo sapiens
  misc_RNA (1)...(19): siRNA sense strand
ggagaaaggcauucaacac

SEQ ID NO: 2048401 - RNA, 19 nt, Homo sapiens
  misc_RNA (1)...(19): siRNA sense strand
gcacaugguauuagagaac

SEQ ID NO: 2048402 - RNA, 19 nt, Homo sapiens
  misc_RNA (1)...(19): siRNA sense strand
agauguaccuggccagcuu

SEQ ID NO: 2048403 - RNA, 19 nt, Homo sapiens
  misc_RNA (1)...(19): siRNA sense strand
uagaaacuguccucuucau

SEQ ID NO: 2048404 - RNA, 19 nt, Homo sapiens
  misc_RNA (1)...(19): siRNA sense strand
caagcuggcgcaaauuuag

SEQ ID NO: 2048405 - RNA, 19 nt, Homo sapiens
  misc_RNA (1)...(19): siRNA sense strand
ggcucauccuggucucuua

SEQ ID NO: 2048406 - RNA, 19 nt, Homo sapiens
  misc_RNA (1)...(19): siRNA sense strand
ccacacgacccucacuaga

SEQ ID NO: 2048407 - RNA, 19 nt, Homo sapiens
  misc_RNA (1)...(19): siRNA sense strand
uugcaucgaccacuucuuu

SEQ ID NO: 2048408 - RNA, 19 nt, Homo sapiens
  misc_RNA (1)...(19): siRNA sense strand
gcaggccacuccauuacac

SEQ ID NO: 2048409 - RNA, 19 nt, Homo sapiens
  misc_RNA (1)...(19): siRNA sense strand
agaaacuguccucuucaua

SEQ ID NO: 2048410 - RNA, 19 nt, Homo sapiens
  misc_RNA (1)...(19): siRNA sense strand
caagagcaccucccaugag

SEQ ID NO: 2048411 - RNA, 19 nt, Homo sapiens
  misc_RNA (1)...(19): siRNA sense strand
gggagcaucaucuucaugu

SEQ ID NO: 2048412 - RNA, 19 nt, Homo sapiens
  misc_RNA (1)...(19): siRNA sense strand
cacacgacccucacuagaa

SEQ ID NO: 2048413 - RNA, 19 nt, Homo sapiens
  misc_RNA (1)...(19): siRNA sense strand
guggauaccagccucaaug

SEQ ID NO: 2048414 - RNA, 19 nt, Homo sapiens
  misc_RNA (1)...(19): siRNA sense strand
cauuaugcauccacagcuu

SEQ ID NO: 2048415 - RNA, 19 nt, Homo sapiens
  misc_RNA (1)...(19): siRNA sense strand
uggccaccauguccuauga

SEQ ID NO: 2048416 - RNA, 19 nt, Homo sapiens
  misc_RNA (1)...(19): siRNA sense strand
acaccuauguacuucuuuc

SEQ ID NO: 2048417 - RNA, 19 nt, Homo sapiens
  misc_RNA (1)...(19): siRNA sense strand
uuaugcaacuggcuugugu

SEQ ID NO: 2048418 - RNA, 19 nt, Homo sapiens
  misc_RNA (1)...(19): siRNA sense strand
ucauagcucuguucuacac

SEQ ID NO: 2048419 - RNA, 19 nt, Homo sapiens
  misc_RNA (1)...(19): siRNA sense strand
gcuccacgcucaccaugcu

SEQ ID NO: 2048420 - RNA, 19 nt, Homo sapiens
  misc_RNA (1)...(19): siRNA sense strand
gcugaacccacuuauuuac

SEQ ID NO: 2048421 - RNA, 19 nt, Homo sapiens
  misc_RNA (1)...(19): siRNA sense strand
cgcugaacccacuuauuua

SEQ ID NO: 2048422 - RNA, 19 nt, Homo sapiens
  misc_RNA (1)...(19): siRNA sense strand
acuguccucuucauaguug

SEQ ID NO: 2048423 - RNA, 19 nt, Homo sapiens
  misc_RNA (1)...(19): siRNA sense strand
gagcuucaccacgagcauu

SEQ ID NO: 2048424 - RNA, 19 nt, Homo sapiens
  misc_RNA (1)...(19): siRNA sense strand
ggaacacggaggugaagag

SEQ ID NO: 2048425 - RNA, 19 nt, Homo sapiens
  misc_RNA (1)...(19): siRNA sense strand
ccacuccauuacacuguca

SEQ ID NO: 2048426 - RNA, 19 nt, Homo sapiens
  misc_RNA (1)...(19): siRNA sense strand
ucugcaggccacuccauua

SEQ ID NO: 2048427 - RNA, 19 nt, Homo sapiens
  misc_RNA (1)...(19): siRNA sense strand
cagcagaagggcggagaaa

SEQ ID NO: 2048428 - RNA, 19 nt, Homo sapiens
  misc_RNA (1)...(19): siRNA sense strand
ggcacaugguauuagagaa

SEQ ID NO: 2048429 - RNA, 19 nt, Homo sapiens
  misc_RNA (1)...(19): siRNA sense strand
uccauuacacugucauuau

SEQ ID NO: 2048430 - RNA, 19 nt, Homo sapiens
  misc_RNA (1)...(19): siRNA sense strand
ugaggaacacggaggugaa

SEQ ID NO: 2048431 - RNA, 19 nt, Homo sapiens
  misc_RNA (1)...(19): siRNA sense strand
ggucucccauacagaugug

SEQ ID NO: 2048432 - RNA, 19 nt, Homo sapiens
  misc_RNA (1)...(19): siRNA sense strand
gauggaaauagccaaugug

SEQ ID NO: 2048433 - RNA, 19 nt, Homo sapiens
  misc_RNA (1)...(19): siRNA sense strand
gcaggcaagcuggcgcaaa

SEQ ID NO: 2048434 - RNA, 19 nt, Homo sapiens
  misc_RNA (1)...(19): siRNA sense strand
ugaacccacuuauuuacac

SEQ ID NO: 2048435 - RNA, 19 nt, Homo sapiens
  misc_RNA (1)...(19): siRNA sense strand
caaguucauagcucuguuc

SEQ ID NO: 2048436 - RNA, 19 nt, Homo sapiens
  misc_RNA (1)...(19): siRNA sense strand
gcaucaucuucauguaucu

SEQ ID NO: 2048437 - RNA, 19 nt, Homo sapiens
  misc_RNA (1)...(19): siRNA sense strand
gugguccaguucuauaucu

SEQ ID NO: 2048438 - RNA, 19 nt, Homo sapiens
  misc_RNA (1)...(19): siRNA sense strand
gcuguggugucucuguuuu

SEQ ID NO: 2048439 - RNA, 19 nt, Homo sapiens
  misc_RNA (1)...(19): siRNA sense strand
guaccuggccagcuuuguc

SEQ ID NO: 2048440 - RNA, 19 nt, Homo sapiens
  misc_RNA (1)...(19): siRNA sense strand
gauguaccuggccagcuuu

SEQ ID NO: 2048441 - RNA, 19 nt, Homo sapiens
  misc_RNA (1)...(19): siRNA sense strand
aguucuauaucucccauug

SEQ ID NO: 2048442 - RNA, 19 nt, Homo sapiens
  misc_RNA (1)...(19): siRNA sense strand
cggcacaugguauuagaga

SEQ ID NO: 2048443 - RNA, 19 nt, Homo sapiens
  misc_RNA (1)...(19): siRNA sense strand
gugcaccuccacacaccua

SEQ ID NO: 2048444 - RNA, 19 nt, Homo sapiens
  misc_RNA (1)...(19): siRNA sense strand
gaagucaaauuauguacca

SEQ ID NO: 2048445 - RNA, 19 nt, Homo sapiens
  misc_RNA (1)...(19): siRNA sense strand
gaaggacccucugagcuau

SEQ ID NO: 2048446 - RNA, 19 nt, Homo sapiens
  misc_RNA (1)...(19): siRNA sense strand
gcaauaaaauggucuaaca

SEQ ID NO: 2048447 - RNA, 19 nt, Homo sapiens
  misc_RNA (1)...(19): siRNA sense strand
aagaugagcauacuucuaa

SEQ ID NO: 2048448 - RNA, 19 nt, Homo sapiens
  misc_RNA (1)...(19): siRNA sense strand
caaaguagagccaggagaa

SEQ ID NO: 2048449 - RNA, 19 nt, Homo sapiens
  misc_RNA (1)...(19): siRNA sense strand
acaauccgcucaacaaaca

SEQ ID NO: 2048450 - RNA, 19 nt, Homo sapiens
  misc_RNA (1)...(19): siRNA sense strand
gagcuugacauggcaauaa

SEQ ID NO: 2048451 - RNA, 19 nt, Homo sapiens
  misc_RNA (1)...(19): siRNA sense strand
ggacaauggugaugaugcu

SEQ ID NO: 2048452 - RNA, 19 nt, Homo sapiens
  misc_RNA (1)...(19): siRNA sense strand
ggaccugacgagcuguuua

SEQ ID NO: 2048453 - RNA, 19 nt, Homo sapiens
  misc_RNA (1)...(19): siRNA sense strand
agaaggacccucugagcua

SEQ ID NO: 2048454 - RNA, 19 nt, Homo sapiens
  misc_RNA (1)...(19): siRNA sense strand
caggagaaccagcaaagaa

SEQ ID NO: 2048455 - RNA, 19 nt, Homo sapiens
  misc_RNA (1)...(19): siRNA sense strand
ggagaaccagcaaagaaga

SEQ ID NO: 2048456 - RNA, 19 nt, Homo sapiens
  misc_RNA (1)...(19): siRNA sense strand
ggacgaggaggauaacauc

SEQ ID NO: 2048457 - RNA, 19 nt, Homo sapiens
  misc_RNA (1)...(19): siRNA sense strand
gggaggagacguuggaauc

SEQ ID NO: 2048458 - RNA, 19 nt, Homo sapiens
  misc_RNA (1)...(19): siRNA sense strand
gagaaccagcaaagaagaa

SEQ ID NO: 2048459 - RNA, 19 nt, Homo sapiens
  misc_RNA (1)...(19): siRNA sense strand
ugaugaugcuccacagaau

SEQ ID NO: 2048460 - RNA, 19 nt, Homo sapiens
  misc_RNA (1)...(19): siRNA sense strand
gaggagacgagucgcagaa

SEQ ID NO: 2048461 - RNA, 19 nt, Homo sapiens
  misc_RNA (1)...(19): siRNA sense strand
cuacaauccgcucaacaaa

SEQ ID NO: 2048462 - RNA, 19 nt, Homo sapiens
  misc_RNA (1)...(19): siRNA sense strand
ggaggagacguuggaauca

SEQ ID NO: 2048463 - RNA, 19 nt, Homo sapiens
  misc_RNA (1)...(19): siRNA sense strand
gugaugaugcuccacagaa

SEQ ID NO: 2048464 - RNA, 19 nt, Homo sapiens
  misc_RNA (1)...(19): siRNA sense strand
aaagaugagcauacuucua

SEQ ID NO: 2048465 - RNA, 19 nt, Homo sapiens
  misc_RNA (1)...(19): siRNA sense strand
ggagaggcacgucgucaag

SEQ ID NO: 2048466 - RNA, 19 nt, Homo sapiens
  misc_RNA (1)...(19): siRNA sense strand
gaugaugcuccacagaaug

SEQ ID NO: 2048467 - RNA, 19 nt, Homo sapiens
  misc_RNA (1)...(19): siRNA sense strand
ugaggacaauggugaugau

SEQ ID NO: 2048468 - RNA, 19 nt, Homo sapiens
  misc_RNA (1)...(19): siRNA sense strand
guaggaacaaggcggagaa

SEQ ID NO: 2048469 - RNA, 19 nt, Homo sapiens
  misc_RNA (1)...(19): siRNA sense strand
ccacagaaugcuaagaaag

SEQ ID NO: 2048470 - RNA, 19 nt, Homo sapiens
  misc_RNA (1)...(19): siRNA sense strand
cuacaccacugagaagaag

SEQ ID NO: 2048471 - RNA, 19 nt, Homo sapiens
  misc_RNA (1)...(19): siRNA sense strand
gaggagacguuggaaucag

SEQ ID NO: 2048472 - RNA, 19 nt, Homo sapiens
  misc_RNA (1)...(19): siRNA sense strand
ucuacaauccgcucaacaa

SEQ ID NO: 2048473 - RNA, 19 nt, Homo sapiens
  misc_RNA (1)...(19): siRNA sense strand
aggagacguuggaaucaga

SEQ ID NO: 2048474 - RNA, 19 nt, Homo sapiens
  misc_RNA (1)...(19): siRNA sense strand
gaccugacgagcuguuuag

SEQ ID NO: 2048475 - RNA, 19 nt, Homo sapiens
  misc_RNA (1)...(19): siRNA sense strand
agaccuacaccacugagaa

SEQ ID NO: 2048476 - RNA, 19 nt, Homo sapiens
  misc_RNA (1)...(19): siRNA sense strand
uccacagaaugcuaagaaa

SEQ ID NO: 2048477 - RNA, 19 nt, Homo sapiens
  misc_RNA (1)...(19): siRNA sense strand
agaugagcauacuucuaaa

SEQ ID NO: 2048478 - RNA, 19 nt, Homo sapiens
  misc_RNA (1)...(19): siRNA sense strand
gggagaggcacgucgucaa

SEQ ID NO: 2048479 - RNA, 19 nt, Homo sapiens
  misc_RNA (1)...(19): siRNA sense strand
aggacccucugagcuauuu

SEQ ID NO: 2048480 - RNA, 19 nt, Homo sapiens
  misc_RNA (1)...(19): siRNA sense strand
uaccaccuccugagaccua

SEQ ID NO: 2048481 - RNA, 19 nt, Homo sapiens
  misc_RNA (1)...(19): siRNA sense strand
gaccuacaccacugagaag

SEQ ID NO: 2048482 - RNA, 19 nt, Homo sapiens
  misc_RNA (1)...(19): siRNA sense strand
gaagucaaauuauguacca

SEQ ID NO: 2048483 - RNA, 19 nt, Homo sapiens
  misc_RNA (1)...(19): siRNA sense strand
gaaggacccucugagcuau

SEQ ID NO: 2048484 - RNA, 19 nt, Homo sapiens
  misc_RNA (1)...(19): siRNA sense strand
gcaauaaaauggucuaaca

SEQ ID NO: 2048485 - RNA, 19 nt, Homo sapiens
  misc_RNA (1)...(19): siRNA sense strand
aagaugagcauacuucuaa

SEQ ID NO: 2048486 - RNA, 19 nt, Homo sapiens
  misc_RNA (1)...(19): siRNA sense strand
caaaguagagccaggagaa

SEQ ID NO: 2048487 - RNA, 19 nt, Homo sapiens
  misc_RNA (1)...(19): siRNA sense strand
acaauccgcucaacaaaca

SEQ ID NO: 2048488 - RNA, 19 nt, Homo sapiens
  misc_RNA (1)...(19): siRNA sense strand
gagcuugacauggcaauaa

SEQ ID NO: 2048489 - RNA, 19 nt, Homo sapiens
  misc_RNA (1)...(19): siRNA sense strand
ggacaauggugaugaugcu

SEQ ID NO: 2048490 - RNA, 19 nt, Homo sapiens
  misc_RNA (1)...(19): siRNA sense strand
ggaccugacgagcuguuua

SEQ ID NO: 2048491 - RNA, 19 nt, Homo sapiens
  misc_RNA (1)...(19): siRNA sense strand
agaaggacccucugagcua

SEQ ID NO: 2048492 - RNA, 19 nt, Homo sapiens
  misc_RNA (1)...(19): siRNA sense strand
caggagaaccagcaaagaa

SEQ ID NO: 2048493 - RNA, 19 nt, Homo sapiens
  misc_RNA (1)...(19): siRNA sense strand
ggagaaccagcaaagaaga

SEQ ID NO: 2048494 - RNA, 19 nt, Homo sapiens
  misc_RNA (1)...(19): siRNA sense strand
ggacgaggaggauaacauc

SEQ ID NO: 2048495 - RNA, 19 nt, Homo sapiens
  misc_RNA (1)...(19): siRNA sense strand
gggaggagacguuggaauc

SEQ ID NO: 2048496 - RNA, 19 nt, Homo sapiens
  misc_RNA (1)...(19): siRNA sense strand
gagaaccagcaaagaagaa

SEQ ID NO: 2048497 - RNA, 19 nt, Homo sapiens
  misc_RNA (1)...(19): siRNA sense strand
ugaugaugcuccacagaau

SEQ ID NO: 2048498 - RNA, 19 nt, Homo sapiens
  misc_RNA (1)...(19): siRNA sense strand
gaggagacgagucgcagaa

SEQ ID NO: 2048499 - RNA, 19 nt, Homo sapiens
  misc_RNA (1)...(19): siRNA sense strand
cuacaauccgcucaacaaa

SEQ ID NO: 2048500 - RNA, 19 nt, Homo sapiens
  misc_RNA (1)...(19): siRNA sense strand
ggaggagacguuggaauca

SEQ ID NO: 2048501 - RNA, 19 nt, Homo sapiens
  misc_RNA (1)...(19): siRNA sense strand
gugaugaugcuccacagaa

SEQ ID NO: 2048502 - RNA, 19 nt, Homo sapiens
  misc_RNA (1)...(19): siRNA sense strand
aaagaugagcauacuucua

SEQ ID NO: 2048503 - RNA, 19 nt, Homo sapiens
  misc_RNA (1)...(19): siRNA sense strand
ggagaggcacgucgucaag

SEQ ID NO: 2048504 - RNA, 19 nt, Homo sapiens
  misc_RNA (1)...(19): siRNA sense strand
gaugaugcuccacagaaug

SEQ ID NO: 2048505 - RNA, 19 nt, Homo sapiens
  misc_RNA (1)...(19): siRNA sense strand
ugaggacaauggugaugau

SEQ ID NO: 2048506 - RNA, 19 nt, Homo sapiens
  misc_RNA (1)...(19): siRNA sense strand
guaggaacaaggcggagaa

SEQ ID NO: 2048507 - RNA, 19 nt, Homo sapiens
  misc_RNA (1)...(19): siRNA sense strand
ccacagaaugcuaagaaag

SEQ ID NO: 2048508 - RNA, 19 nt, Homo sapiens
  misc_RNA (1)...(19): siRNA sense strand
cuacaccacugagaagaag

SEQ ID NO: 2048509 - RNA, 19 nt, Homo sapiens
  misc_RNA (1)...(19): siRNA sense strand
gaggagacguuggaaucag

SEQ ID NO: 2048510 - RNA, 19 nt, Homo sapiens
  misc_RNA (1)...(19): siRNA sense strand
ucuacaauccgcucaacaa

SEQ ID NO: 2048511 - RNA, 19 nt, Homo sapiens
  misc_RNA (1)...(19): siRNA sense strand
aggagacguuggaaucaga

SEQ ID NO: 2048512 - RNA, 19 nt, Homo sapiens
  misc_RNA (1)...(19): siRNA sense strand
gaccugacgagcuguuuag

SEQ ID NO: 2048513 - RNA, 19 nt, Homo sapiens
  misc_RNA (1)...(19): siRNA sense strand
agaccuacaccacugagaa

SEQ ID NO: 2048514 - RNA, 19 nt, Homo sapiens
  misc_RNA (1)...(19): siRNA sense strand
uccacagaaugcuaagaaa

SEQ ID NO: 2048515 - RNA, 19 nt, Homo sapiens
  misc_RNA (1)...(19): siRNA sense strand
agaugagcauacuucuaaa

SEQ ID NO: 2048516 - RNA, 19 nt, Homo sapiens
  misc_RNA (1)...(19): siRNA sense strand
gggagaggcacgucgucaa

SEQ ID NO: 2048517 - RNA, 19 nt, Homo sapiens
  misc_RNA (1)...(19): siRNA sense strand
aggacccucugagcuauuu

SEQ ID NO: 2048518 - RNA, 19 nt, Homo sapiens
  misc_RNA (1)...(19): siRNA sense strand
uaccaccuccugagaccua

SEQ ID NO: 2048519 - RNA, 19 nt, Homo sapiens
  misc_RNA (1)...(19): siRNA sense strand
gaccuacaccacugagaag

SEQ ID NO: 2048520 - RNA, 19 nt, Homo sapiens
  misc_RNA (1)...(19): siRNA sense strand
ggaaagaauugccagagaa

SEQ ID NO: 2048521 - RNA, 19 nt, Homo sapiens
  misc_RNA (1)...(19): siRNA sense strand
ccaccucgauccugaaaga

SEQ ID NO: 2048522 - RNA, 19 nt, Homo sapiens
  misc_RNA (1)...(19): siRNA sense strand
gaggagaggaagucccuua

SEQ ID NO: 2048523 - RNA, 19 nt, Homo sapiens
  misc_RNA (1)...(19): siRNA sense strand
gcaaagaauccaggaaaga

SEQ ID NO: 2048524 - RNA, 19 nt, Homo sapiens
  misc_RNA (1)...(19): siRNA sense strand
caaagaauccaggaaagaa

SEQ ID NO: 2048525 - RNA, 19 nt, Homo sapiens
  misc_RNA (1)...(19): siRNA sense strand
ggaugcugguuucauugua

SEQ ID NO: 2048526 - RNA, 19 nt, Homo sapiens
  misc_RNA (1)...(19): siRNA sense strand
gagaggaagucccuuaagc

SEQ ID NO: 2048527 - RNA, 19 nt, Homo sapiens
  misc_RNA (1)...(19): siRNA sense strand
gaaagaauugccagagaag

SEQ ID NO: 2048528 - RNA, 19 nt, Homo sapiens
  misc_RNA (1)...(19): siRNA sense strand
gaugcugguuucauuguag

SEQ ID NO: 2048529 - RNA, 19 nt, Homo sapiens
  misc_RNA (1)...(19): siRNA sense strand
gaauuagaagaucauguga

SEQ ID NO: 2048530 - RNA, 19 nt, Homo sapiens
  misc_RNA (1)...(19): siRNA sense strand
cccuuaagcuccuaggauu

SEQ ID NO: 2048531 - RNA, 19 nt, Homo sapiens
  misc_RNA (1)...(19): siRNA sense strand
ggaguaggaggguuuaucu

SEQ ID NO: 2048532 - RNA, 19 nt, Homo sapiens
  misc_RNA (1)...(19): siRNA sense strand
aagcaaagaauccaggaaa

SEQ ID NO: 2048533 - RNA, 19 nt, Homo sapiens
  misc_RNA (1)...(19): siRNA sense strand
ggguuuaucuuggugacuu

SEQ ID NO: 2048534 - RNA, 19 nt, Homo sapiens
  misc_RNA (1)...(19): siRNA sense strand
aggaaagaauugccagaga

SEQ ID NO: 2048535 - RNA, 19 nt, Homo sapiens
  misc_RNA (1)...(19): siRNA sense strand
ggcauucaauauuguaugg

SEQ ID NO: 2048536 - RNA, 19 nt, Homo sapiens
  misc_RNA (1)...(19): siRNA sense strand
agaauuagaagaucaugug

SEQ ID NO: 2048537 - RNA, 19 nt, Homo sapiens
  misc_RNA (1)...(19): siRNA sense strand
ugccagagaagaaauuaaa

SEQ ID NO: 2048538 - RNA, 19 nt, Homo sapiens
  misc_RNA (1)...(19): siRNA sense strand
guggcuggcuuuggacauu

SEQ ID NO: 2048539 - RNA, 19 nt, Homo sapiens
  misc_RNA (1)...(19): siRNA sense strand
aagaauugccagagaagaa

SEQ ID NO: 2048540 - RNA, 19 nt, Homo sapiens
  misc_RNA (1)...(19): siRNA sense strand
gguuuaucuuggugacuuu

SEQ ID NO: 2048541 - RNA, 19 nt, Homo sapiens
  misc_RNA (1)...(19): siRNA sense strand
gaagucccuuaagcuccua

SEQ ID NO: 2048542 - RNA, 19 nt, Homo sapiens
  misc_RNA (1)...(19): siRNA sense strand
ggagaggaagucccuuaag

SEQ ID NO: 2048543 - RNA, 19 nt, Homo sapiens
  misc_RNA (1)...(19): siRNA sense strand
uugggaugcugguuucauu

SEQ ID NO: 2048544 - RNA, 19 nt, Homo sapiens
  misc_RNA (1)...(19): siRNA sense strand
aagaauccaggaaagaauu

SEQ ID NO: 2048545 - RNA, 19 nt, Homo sapiens
  misc_RNA (1)...(19): siRNA sense strand
guucacuaguagaauuaga

SEQ ID NO: 2048546 - RNA, 19 nt, Homo sapiens
  misc_RNA (1)...(19): siRNA sense strand
aaagaauccaggaaagaau

SEQ ID NO: 2048547 - RNA, 19 nt, Homo sapiens
  misc_RNA (1)...(19): siRNA sense strand
gguauaauuaugcaaagca

SEQ ID NO: 2048548 - RNA, 19 nt, Homo sapiens
  misc_RNA (1)...(19): siRNA sense strand
aguaggaggguuuaucuug

SEQ ID NO: 2048549 - RNA, 19 nt, Homo sapiens
  misc_RNA (1)...(19): siRNA sense strand
gaauugccagagaagaaau

SEQ ID NO: 2048550 - RNA, 19 nt, Homo sapiens
  misc_RNA (1)...(19): siRNA sense strand
cuaguagaauuagaagauc

SEQ ID NO: 2048551 - RNA, 19 nt, Homo sapiens
  misc_RNA (1)...(19): siRNA sense strand
agaauugccagagaagaaa

SEQ ID NO: 2048552 - RNA, 19 nt, Homo sapiens
  misc_RNA (1)...(19): siRNA sense strand
uaggaggguuuaucuuggu

SEQ ID NO: 2048553 - RNA, 19 nt, Homo sapiens
  misc_RNA (1)...(19): siRNA sense strand
uguuguggcuggcuuugga

SEQ ID NO: 2048554 - RNA, 19 nt, Homo sapiens
  misc_RNA (1)...(19): siRNA sense strand
ugguuucauuguagguaua

SEQ ID NO: 2048555 - RNA, 19 nt, Homo sapiens
  misc_RNA (1)...(19): siRNA sense strand
gggaugcugguuucauugu

SEQ ID NO: 2048556 - RNA, 19 nt, Homo sapiens
  misc_RNA (1)...(19): siRNA sense strand
gacuuugggaugcugguuu

SEQ ID NO: 2048557 - RNA, 19 nt, Homo sapiens
  misc_RNA (1)...(19): siRNA sense strand
uggcuggcuuuggacauuu

SEQ ID NO: 2048558 - RNA, 19 nt, Homo sapiens
  misc_RNA (1)...(19): siRNA sense strand
gaaacacgaccucucuuga

SEQ ID NO: 2048559 - RNA, 19 nt, Homo sapiens
  misc_RNA (1)...(19): siRNA sense strand
cgaccucucuugaaggaaa

SEQ ID NO: 2048560 - RNA, 19 nt, Homo sapiens
  misc_RNA (1)...(19): siRNA sense strand
ggcccuaucuggagaggaa

SEQ ID NO: 2048561 - RNA, 19 nt, Homo sapiens
  misc_RNA (1)...(19): siRNA sense strand
gggcuaugguggugagaug

SEQ ID NO: 2048562 - RNA, 19 nt, Homo sapiens
  misc_RNA (1)...(19): siRNA sense strand
aaacacgaccucucuugaa

SEQ ID NO: 2048563 - RNA, 19 nt, Homo sapiens
  misc_RNA (1)...(19): siRNA sense strand
gaacagcaucggcuauguc

SEQ ID NO: 2048564 - RNA, 19 nt, Homo sapiens
  misc_RNA (1)...(19): siRNA sense strand
gaucaagucucggguucuc

SEQ ID NO: 2048565 - RNA, 19 nt, Homo sapiens
  misc_RNA (1)...(19): siRNA sense strand
gauggaaucagucaagaca

SEQ ID NO: 2048566 - RNA, 19 nt, Homo sapiens
  misc_RNA (1)...(19): siRNA sense strand
guggugagauggugucagu

SEQ ID NO: 2048567 - RNA, 19 nt, Homo sapiens
  misc_RNA (1)...(19): siRNA sense strand
gaagccuccugugcgauga

SEQ ID NO: 2048568 - RNA, 19 nt, Homo sapiens
  misc_RNA (1)...(19): siRNA sense strand
cugagaaaguccaggagaa

SEQ ID NO: 2048569 - RNA, 19 nt, Homo sapiens
  misc_RNA (1)...(19): siRNA sense strand
ugagaaaguccaggagaaa

SEQ ID NO: 2048570 - RNA, 19 nt, Homo sapiens
  misc_RNA (1)...(19): siRNA sense strand
ccuccucgcuguacugcaa

SEQ ID NO: 2048571 - RNA, 19 nt, Homo sapiens
  misc_RNA (1)...(19): siRNA sense strand
cacgaccucucuugaagga

SEQ ID NO: 2048572 - RNA, 19 nt, Homo sapiens
  misc_RNA (1)...(19): siRNA sense strand
ccugugcgaugaccucuuc

SEQ ID NO: 2048573 - RNA, 19 nt, Homo sapiens
  misc_RNA (1)...(19): siRNA sense strand
agaaaguccaggagaaaga

SEQ ID NO: 2048574 - RNA, 19 nt, Homo sapiens
  misc_RNA (1)...(19): siRNA sense strand
uggaaucagucaagacagu

SEQ ID NO: 2048575 - RNA, 19 nt, Homo sapiens
  misc_RNA (1)...(19): siRNA sense strand
gaggauggaaucagucaag

SEQ ID NO: 2048576 - RNA, 19 nt, Homo sapiens
  misc_RNA (1)...(19): siRNA sense strand
agaaacacgaccucucuug

SEQ ID NO: 2048577 - RNA, 19 nt, Homo sapiens
  misc_RNA (1)...(19): siRNA sense strand
gaggaagggaggauggaau

SEQ ID NO: 2048578 - RNA, 19 nt, Homo sapiens
  misc_RNA (1)...(19): siRNA sense strand
ucaacaagcaggccaaugc

SEQ ID NO: 2048579 - RNA, 19 nt, Homo sapiens
  misc_RNA (1)...(19): siRNA sense strand
gaaaguccaggagaaagag

SEQ ID NO: 2048580 - RNA, 19 nt, Homo sapiens
  misc_RNA (1)...(19): siRNA sense strand
gcagugccucugagaaagu

SEQ ID NO: 2048581 - RNA, 19 nt, Homo sapiens
  misc_RNA (1)...(19): siRNA sense strand
cugcagugccucugagaaa

SEQ ID NO: 2048582 - RNA, 19 nt, Homo sapiens
  misc_RNA (1)...(19): siRNA sense strand
ugaacagcaucggcuaugu

SEQ ID NO: 2048583 - RNA, 19 nt, Homo sapiens
  misc_RNA (1)...(19): siRNA sense strand
gagaaaguccaggagaaag

SEQ ID NO: 2048584 - RNA, 19 nt, Homo sapiens
  misc_RNA (1)...(19): siRNA sense strand
gcacuagccccaugucuuc

SEQ ID NO: 2048585 - RNA, 19 nt, Homo sapiens
  misc_RNA (1)...(19): siRNA sense strand
gaaucagucaagacaguca

SEQ ID NO: 2048586 - RNA, 19 nt, Homo sapiens
  misc_RNA (1)...(19): siRNA sense strand
caccuccgccuccaccuuu

SEQ ID NO: 2048587 - RNA, 19 nt, Homo sapiens
  misc_RNA (1)...(19): siRNA sense strand
agucucggcuuccuuugau

SEQ ID NO: 2048588 - RNA, 19 nt, Homo sapiens
  misc_RNA (1)...(19): siRNA sense strand
aacacgaccucucuugaag

SEQ ID NO: 2048589 - RNA, 19 nt, Homo sapiens
  misc_RNA (1)...(19): siRNA sense strand
aagggaggauggaaucagu

SEQ ID NO: 2048590 - RNA, 19 nt, Homo sapiens
  misc_RNA (1)...(19): siRNA sense strand
gagccugccuguggugaac

SEQ ID NO: 2048591 - RNA, 19 nt, Homo sapiens
  misc_RNA (1)...(19): siRNA sense strand
gggaggauggaaucaguca

SEQ ID NO: 2048592 - RNA, 19 nt, Homo sapiens
  misc_RNA (1)...(19): siRNA sense strand
ggaagggaggauggaauca

SEQ ID NO: 2048593 - RNA, 19 nt, Homo sapiens
  misc_RNA (1)...(19): siRNA sense strand
cagucugccucuacaucaa

SEQ ID NO: 2048594 - RNA, 19 nt, Homo sapiens
  misc_RNA (1)...(19): siRNA sense strand
ggugagauggugucagucu

SEQ ID NO: 2048595 - RNA, 19 nt, Homo sapiens
  misc_RNA (1)...(19): siRNA sense strand
gaagggaggauggaaucag

SEQ ID NO: 2048596 - RNA, 19 nt, Homo sapiens
  misc_RNA (1)...(19): siRNA sense strand
gucagucucggcuuccuuu

SEQ ID NO: 2048597 - RNA, 19 nt, Homo sapiens
  misc_RNA (1)...(19): siRNA sense strand
gaaacacgaccucucuuga

SEQ ID NO: 2048598 - RNA, 19 nt, Homo sapiens
  misc_RNA (1)...(19): siRNA sense strand
cgaccucucuugaaggaaa

SEQ ID NO: 2048599 - RNA, 19 nt, Homo sapiens
  misc_RNA (1)...(19): siRNA sense strand
cagugaagaucccaaagaa

SEQ ID NO: 2048600 - RNA, 19 nt, Homo sapiens
  misc_RNA (1)...(19): siRNA sense strand
gcagugaagaucccaaaga

SEQ ID NO: 2048601 - RNA, 19 nt, Homo sapiens
  misc_RNA (1)...(19): siRNA sense strand
ggcccuaucuggagaggaa

SEQ ID NO: 2048602 - RNA, 19 nt, Homo sapiens
  misc_RNA (1)...(19): siRNA sense strand
gggcuaugguggugagaug

SEQ ID NO: 2048603 - RNA, 19 nt, Homo sapiens
  misc_RNA (1)...(19): siRNA sense strand
aaacacgaccucucuugaa

SEQ ID NO: 2048604 - RNA, 19 nt, Homo sapiens
  misc_RNA (1)...(19): siRNA sense strand
gaucaagucucggguucuc

SEQ ID NO: 2048605 - RNA, 19 nt, Homo sapiens
  misc_RNA (1)...(19): siRNA sense strand
gaacagcaucggcuauguc

SEQ ID NO: 2048606 - RNA, 19 nt, Homo sapiens
  misc_RNA (1)...(19): siRNA sense strand
gauggaaucagucaagaca

SEQ ID NO: 2048607 - RNA, 19 nt, Homo sapiens
  misc_RNA (1)...(19): siRNA sense strand
ugcuucagcuggcucuuua

SEQ ID NO: 2048608 - RNA, 19 nt, Homo sapiens
  misc_RNA (1)...(19): siRNA sense strand
guggugagauggugucagu

SEQ ID NO: 2048609 - RNA, 19 nt, Homo sapiens
  misc_RNA (1)...(19): siRNA sense strand
gaagccuccugugcgauga

SEQ ID NO: 2048610 - RNA, 19 nt, Homo sapiens
  misc_RNA (1)...(19): siRNA sense strand
cugagaaaguccaggagaa

SEQ ID NO: 2048611 - RNA, 19 nt, Homo sapiens
  misc_RNA (1)...(19): siRNA sense strand
ugagaaaguccaggagaaa

SEQ ID NO: 2048612 - RNA, 19 nt, Homo sapiens
  misc_RNA (1)...(19): siRNA sense strand
uaaccuuuauucugcuuca

SEQ ID NO: 2048613 - RNA, 19 nt, Homo sapiens
  misc_RNA (1)...(19): siRNA sense strand
ccuccucgcuguacugcaa

SEQ ID NO: 2048614 - RNA, 19 nt, Homo sapiens
  misc_RNA (1)...(19): siRNA sense strand
gugaagaucccaaagaaaa

SEQ ID NO: 2048615 - RNA, 19 nt, Homo sapiens
  misc_RNA (1)...(19): siRNA sense strand
cacgaccucucuugaagga

SEQ ID NO: 2048616 - RNA, 19 nt, Homo sapiens
  misc_RNA (1)...(19): siRNA sense strand
ccugugcgaugaccucuuc

SEQ ID NO: 2048617 - RNA, 19 nt, Homo sapiens
  misc_RNA (1)...(19): siRNA sense strand
agaaaguccaggagaaaga

SEQ ID NO: 2048618 - RNA, 19 nt, Homo sapiens
  misc_RNA (1)...(19): siRNA sense strand
uggaaucagucaagacagu

SEQ ID NO: 2048619 - RNA, 19 nt, Homo sapiens
  misc_RNA (1)...(19): siRNA sense strand
gaggauggaaucagucaag

SEQ ID NO: 2048620 - RNA, 19 nt, Homo sapiens
  misc_RNA (1)...(19): siRNA sense strand
agaaacacgaccucucuug

SEQ ID NO: 2048621 - RNA, 19 nt, Homo sapiens
  misc_RNA (1)...(19): siRNA sense strand
gaggaagggaggauggaau

SEQ ID NO: 2048622 - RNA, 19 nt, Homo sapiens
  misc_RNA (1)...(19): siRNA sense strand
ucaacaagcaggccaaugc

SEQ ID NO: 2048623 - RNA, 19 nt, Homo sapiens
  misc_RNA (1)...(19): siRNA sense strand
gaaaguccaggagaaagag

SEQ ID NO: 2048624 - RNA, 19 nt, Homo sapiens
  misc_RNA (1)...(19): siRNA sense strand
gcagugccucugagaaagu

SEQ ID NO: 2048625 - RNA, 19 nt, Homo sapiens
  misc_RNA (1)...(19): siRNA sense strand
cugcagugccucugagaaa

SEQ ID NO: 2048626 - RNA, 19 nt, Homo sapiens
  misc_RNA (1)...(19): siRNA sense strand
ugaacagcaucggcuaugu

SEQ ID NO: 2048627 - RNA, 19 nt, Homo sapiens
  misc_RNA (1)...(19): siRNA sense strand
gagaaaguccaggagaaag

SEQ ID NO: 2048628 - RNA, 19 nt, Homo sapiens
  misc_RNA (1)...(19): siRNA sense strand
gcacuagccccaugucuuc

SEQ ID NO: 2048629 - RNA, 19 nt, Homo sapiens
  misc_RNA (1)...(19): siRNA sense strand
gaaucagucaagacaguca

SEQ ID NO: 2048630 - RNA, 19 nt, Homo sapiens
  misc_RNA (1)...(19): siRNA sense strand
cggaaacccggguacaaga

SEQ ID NO: 2048631 - RNA, 19 nt, Homo sapiens
  misc_RNA (1)...(19): siRNA sense strand
caccuccgccuccaccuuu

SEQ ID NO: 2048632 - RNA, 19 nt, Homo sapiens
  misc_RNA (1)...(19): siRNA sense strand
agucucggcuuccuuugau

SEQ ID NO: 2048633 - RNA, 19 nt, Homo sapiens
  misc_RNA (1)...(19): siRNA sense strand
aacacgaccucucuugaag

SEQ ID NO: 2048634 - RNA, 19 nt, Homo sapiens
  misc_RNA (1)...(19): siRNA sense strand
aagggaggauggaaucagu

SEQ ID NO: 2048635 - RNA, 19 nt, Homo sapiens
  misc_RNA (1)...(19): siRNA sense strand
cagcagugaagaucccaaa

SEQ ID NO: 2048636 - RNA, 19 nt, Homo sapiens
  misc_RNA (1)...(19): siRNA sense strand
cagucugccucuacaucaa

SEQ ID NO: 2048637 - RNA, 19 nt, Homo sapiens
  misc_RNA (1)...(19): siRNA sense strand
gggaggauggaaucaguca

SEQ ID NO: 2048638 - RNA, 19 nt, Homo sapiens
  misc_RNA (1)...(19): siRNA sense strand
ggaagggaggauggaauca

SEQ ID NO: 2048639 - RNA, 19 nt, Homo sapiens
  misc_RNA (1)...(19): siRNA sense strand
gcggaaacccggguacaag

SEQ ID NO: 2048640 - RNA, 19 nt, Homo sapiens
  misc_RNA (1)...(19): siRNA sense strand
gagccugccuguggugaac

SEQ ID NO: 2048641 - RNA, 19 nt, Homo sapiens
  misc_RNA (1)...(19): siRNA sense strand
ggugagauggugucagucu

SEQ ID NO: 2048642 - RNA, 19 nt, Homo sapiens
  misc_RNA (1)...(19): siRNA sense strand
gaagaucccaaagaaaaga

SEQ ID NO: 2048643 - RNA, 19 nt, Homo sapiens
  misc_RNA (1)...(19): siRNA sense strand
gaagggaggauggaaucag

SEQ ID NO: 2048644 - RNA, 19 nt, Homo sapiens
  misc_RNA (1)...(19): siRNA sense strand
gucagucucggcuuccuuu

SEQ ID NO: 2048645 - RNA, 19 nt, Homo sapiens
  misc_RNA (1)...(19): siRNA sense strand
gauacugacuugagaucuu

SEQ ID NO: 2048646 - RNA, 19 nt, Homo sapiens
  misc_RNA (1)...(19): siRNA sense strand
auacugacuugagaucuua

SEQ ID NO: 2048647 - RNA, 19 nt, Homo sapiens
  misc_RNA (1)...(19): siRNA sense strand
gugcugcucuccucugugu

SEQ ID NO: 2048648 - RNA, 19 nt, Homo sapiens
  misc_RNA (1)...(19): siRNA sense strand
gggaggugauacugacuug

SEQ ID NO: 2048649 - RNA, 19 nt, Homo sapiens
  misc_RNA (1)...(19): siRNA sense strand
gaggugauacugacuugag

SEQ ID NO: 2048650 - RNA, 19 nt, Homo sapiens
  misc_RNA (1)...(19): siRNA sense strand
gaguuugugccucacuuug

SEQ ID NO: 2048651 - RNA, 19 nt, Homo sapiens
  misc_RNA (1)...(19): siRNA sense strand
ccaccaucgucgucuugga

SEQ ID NO: 2048652 - RNA, 19 nt, Homo sapiens
  misc_RNA (1)...(19): siRNA sense strand
ucuuauggguguuuuguuu

SEQ ID NO: 2048653 - RNA, 19 nt, Homo sapiens
  misc_RNA (1)...(19): siRNA sense strand
cgaguuugugccucacuuu

SEQ ID NO: 2048654 - RNA, 19 nt, Homo sapiens
  misc_RNA (1)...(19): siRNA sense strand
gggugcugcucuccucugu

SEQ ID NO: 2048655 - RNA, 19 nt, Homo sapiens
  misc_RNA (1)...(19): siRNA sense strand
guuugugccucacuuuguc

SEQ ID NO: 2048656 - RNA, 19 nt, Homo sapiens
  misc_RNA (1)...(19): siRNA sense strand
ucacaaagauccuggaaua

SEQ ID NO: 2048657 - RNA, 19 nt, Homo sapiens
  misc_RNA (1)...(19): siRNA sense strand
gaaacaagcugcucucagu

SEQ ID NO: 2048658 - RNA, 19 nt, Homo sapiens
  misc_RNA (1)...(19): siRNA sense strand
caaagauccuggaauauau

SEQ ID NO: 2048659 - RNA, 19 nt, Homo sapiens
  misc_RNA (1)...(19): siRNA sense strand
gcaaucacauucacagaug

SEQ ID NO: 2048660 - RNA, 19 nt, Homo sapiens
  misc_RNA (1)...(19): siRNA sense strand
gaacugaggaagcggcuaa

SEQ ID NO: 2048661 - RNA, 19 nt, Homo sapiens
  misc_RNA (1)...(19): siRNA sense strand
acaaagauccuggaauaua

SEQ ID NO: 2048662 - RNA, 19 nt, Homo sapiens
  misc_RNA (1)...(19): siRNA sense strand
ggaacuccauuguuuaagu

SEQ ID NO: 2048663 - RNA, 19 nt, Homo sapiens
  misc_RNA (1)...(19): siRNA sense strand
gggaaaagauacugcauaa

SEQ ID NO: 2048664 - RNA, 19 nt, Homo sapiens
  misc_RNA (1)...(19): siRNA sense strand
gaacuccauuguuuaaguc

SEQ ID NO: 2048665 - RNA, 19 nt, Homo sapiens
  misc_RNA (1)...(19): siRNA sense strand
gaaggagaauacacacauc

SEQ ID NO: 2048666 - RNA, 19 nt, Homo sapiens
  misc_RNA (1)...(19): siRNA sense strand
gagaauacacacaucacaa

SEQ ID NO: 2048667 - RNA, 19 nt, Homo sapiens
  misc_RNA (1)...(19): siRNA sense strand
gaucaauucugaggcaauc

SEQ ID NO: 2048668 - RNA, 19 nt, Homo sapiens
  misc_RNA (1)...(19): siRNA sense strand
ggagaaagggaccgaaagu

SEQ ID NO: 2048669 - RNA, 19 nt, Homo sapiens
  misc_RNA (1)...(19): siRNA sense strand
auacacacaucacaaagau

SEQ ID NO: 2048670 - RNA, 19 nt, Homo sapiens
  misc_RNA (1)...(19): siRNA sense strand
ccaugucacucaggagaaa

SEQ ID NO: 2048671 - RNA, 19 nt, Homo sapiens
  misc_RNA (1)...(19): siRNA sense strand
gaacuguaagguggucuuu

SEQ ID NO: 2048672 - RNA, 19 nt, Homo sapiens
  misc_RNA (1)...(19): siRNA sense strand
agaauacacacaucacaaa

SEQ ID NO: 2048673 - RNA, 19 nt, Homo sapiens
  misc_RNA (1)...(19): siRNA sense strand
caaucacauucacagauga

SEQ ID NO: 2048674 - RNA, 19 nt, Homo sapiens
  misc_RNA (1)...(19): siRNA sense strand
agucagaaaccaaauuuga

SEQ ID NO: 2048675 - RNA, 19 nt, Homo sapiens
  misc_RNA (1)...(19): siRNA sense strand
gaugaugggccucguccaa

SEQ ID NO: 2048676 - RNA, 19 nt, Homo sapiens
  misc_RNA (1)...(19): siRNA sense strand
cacauucacagaugacuuu

SEQ ID NO: 2048677 - RNA, 19 nt, Homo sapiens
  misc_RNA (1)...(19): siRNA sense strand
ggagaauacacacaucaca

SEQ ID NO: 2048678 - RNA, 19 nt, Homo sapiens
  misc_RNA (1)...(19): siRNA sense strand
caaauuugacuccgguuca

SEQ ID NO: 2048679 - RNA, 19 nt, Homo sapiens
  misc_RNA (1)...(19): siRNA sense strand
gaauacacacaucacaaag

SEQ ID NO: 2048680 - RNA, 19 nt, Homo sapiens
  misc_RNA (1)...(19): siRNA sense strand
acgaugugaucaauucuga

SEQ ID NO: 2048681 - RNA, 19 nt, Homo sapiens
  misc_RNA (1)...(19): siRNA sense strand
agacaaagcggagcucuag

SEQ ID NO: 2048682 - RNA, 19 nt, Homo sapiens
  misc_RNA (1)...(19): siRNA sense strand
gagaaagggaccgaaagug

SEQ ID NO: 2048683 - RNA, 19 nt, Homo sapiens
  misc_RNA (1)...(19): siRNA sense strand
uaaauucggcugccuuguc

SEQ ID NO: 2048684 - RNA, 19 nt, Homo sapiens
  misc_RNA (1)...(19): siRNA sense strand
ccuggaauauauaaaugug

SEQ ID NO: 2048685 - RNA, 19 nt, Homo sapiens
  misc_RNA (1)...(19): siRNA sense strand
aaauucggcugccuugucu

SEQ ID NO: 2048686 - RNA, 19 nt, Homo sapiens
  misc_RNA (1)...(19): siRNA sense strand
uccacgaugugaucaauuc

SEQ ID NO: 2048687 - RNA, 19 nt, Homo sapiens
  misc_RNA (1)...(19): siRNA sense strand
ugaaggagaauacacacau

SEQ ID NO: 2048688 - RNA, 19 nt, Homo sapiens
  misc_RNA (1)...(19): siRNA sense strand
ggccuucauuccacgaugu

SEQ ID NO: 2048689 - RNA, 19 nt, Homo sapiens
  misc_RNA (1)...(19): siRNA sense strand
caggagaaagggaccgaaa

SEQ ID NO: 2048690 - RNA, 19 nt, Homo sapiens
  misc_RNA (1)...(19): siRNA sense strand
ggcaaucacauucacagau

SEQ ID NO: 2048691 - RNA, 19 nt, Homo sapiens
  misc_RNA (1)...(19): siRNA sense strand
gcucaccuugggcacauuu

SEQ ID NO: 2048692 - RNA, 19 nt, Homo sapiens
  misc_RNA (1)...(19): siRNA sense strand
acagaugacuuuuccuaug

SEQ ID NO: 2048693 - RNA, 19 nt, Homo sapiens
  misc_RNA (1)...(19): siRNA sense strand
aauacacacaucacaaaga

SEQ ID NO: 2048694 - RNA, 19 nt, Homo sapiens
  misc_RNA (1)...(19): siRNA sense strand
ucagaaaccaaauuugacu

SEQ ID NO: 2048695 - RNA, 19 nt, Homo sapiens
  misc_RNA (1)...(19): siRNA sense strand
caucacaaagauccuggaa

SEQ ID NO: 2048696 - RNA, 19 nt, Homo sapiens
  misc_RNA (1)...(19): siRNA sense strand
cagacaaagcggagcucua

SEQ ID NO: 2048697 - RNA, 19 nt, Homo sapiens
  misc_RNA (1)...(19): siRNA sense strand
cuccauuguuuaagucaga

SEQ ID NO: 2048698 - RNA, 19 nt, Homo sapiens
  misc_RNA (1)...(19): siRNA sense strand
guucagguuggccuucauu

SEQ ID NO: 2048699 - RNA, 19 nt, Homo sapiens
  misc_RNA (1)...(19): siRNA sense strand
gaagaugcaucaacuguaa

SEQ ID NO: 2048700 - RNA, 19 nt, Homo sapiens
  misc_RNA (1)...(19): siRNA sense strand
gaaggaagaggaaacauuu

SEQ ID NO: 2048701 - RNA, 19 nt, Homo sapiens
  misc_RNA (1)...(19): siRNA sense strand
gcagaaauacgaacucuaa

SEQ ID NO: 2048702 - RNA, 19 nt, Homo sapiens
  misc_RNA (1)...(19): siRNA sense strand
ccagagaccuucagauuca

SEQ ID NO: 2048703 - RNA, 19 nt, Homo sapiens
  misc_RNA (1)...(19): siRNA sense strand
ugacaagaauggugagauu

SEQ ID NO: 2048704 - RNA, 19 nt, Homo sapiens
  misc_RNA (1)...(19): siRNA sense strand
ucaaauugcucaacuaucu

SEQ ID NO: 2048705 - RNA, 19 nt, Homo sapiens
  misc_RNA (1)...(19): siRNA sense strand
gaagaggaaacauuuaaga

SEQ ID NO: 2048706 - RNA, 19 nt, Homo sapiens
  misc_RNA (1)...(19): siRNA sense strand
gaaacgcgauugcccagau

SEQ ID NO: 2048707 - RNA, 19 nt, Homo sapiens
  misc_RNA (1)...(19): siRNA sense strand
gaagagggagcacgaauuc

SEQ ID NO: 2048708 - RNA, 19 nt, Homo sapiens
  misc_RNA (1)...(19): siRNA sense strand
gaaagggaccagauccaaa

SEQ ID NO: 2048709 - RNA, 19 nt, Homo sapiens
  misc_RNA (1)...(19): siRNA sense strand
gaaggacgcugccauugac

SEQ ID NO: 2048710 - RNA, 19 nt, Homo sapiens
  misc_RNA (1)...(19): siRNA sense strand
gaagauguguuggauccuu

SEQ ID NO: 2048711 - RNA, 19 nt, Homo sapiens
  misc_RNA (1)...(19): siRNA sense strand
ggaagagggagcacgaauu

SEQ ID NO: 2048712 - RNA, 19 nt, Homo sapiens
  misc_RNA (1)...(19): siRNA sense strand
ggagaaggacgcugccauu

SEQ ID NO: 2048713 - RNA, 19 nt, Homo sapiens
  misc_RNA (1)...(19): siRNA sense strand
ggcaaaggcugcagagagu

SEQ ID NO: 2048714 - RNA, 19 nt, Homo sapiens
  misc_RNA (1)...(19): siRNA sense strand
gcucuaagccaucagauuc

SEQ ID NO: 2048715 - RNA, 19 nt, Homo sapiens
  misc_RNA (1)...(19): siRNA sense strand
uacgaacucuaaagcauaa

SEQ ID NO: 2048716 - RNA, 19 nt, Homo sapiens
  misc_RNA (1)...(19): siRNA sense strand
uuaaacuacugcacaaaga

SEQ ID NO: 2048717 - RNA, 19 nt, Homo sapiens
  misc_RNA (1)...(19): siRNA sense strand
gcagcaugaagaagaaaua

SEQ ID NO: 2048718 - RNA, 19 nt, Homo sapiens
  misc_RNA (1)...(19): siRNA sense strand
aagaagaggugaagcucaa

SEQ ID NO: 2048719 - RNA, 19 nt, Homo sapiens
  misc_RNA (1)...(19): siRNA sense strand
gcagagagcacagaugcaa

SEQ ID NO: 2048720 - RNA, 19 nt, Homo sapiens
  misc_RNA (1)...(19): siRNA sense strand
aggauaaacuucacucugu

SEQ ID NO: 2048721 - RNA, 19 nt, Homo sapiens
  misc_RNA (1)...(19): siRNA sense strand
gaaauacgaacucuaaagc

SEQ ID NO: 2048722 - RNA, 19 nt, Homo sapiens
  misc_RNA (1)...(19): siRNA sense strand
gcaugaagaagaaauaagu

SEQ ID NO: 2048723 - RNA, 19 nt, Homo sapiens
  misc_RNA (1)...(19): siRNA sense strand
gaagaaggaagaggaaaca

SEQ ID NO: 2048724 - RNA, 19 nt, Homo sapiens
  misc_RNA (1)...(19): siRNA sense strand
gaucccagcaggacauuga

SEQ ID NO: 2048725 - RNA, 19 nt, Homo sapiens
  misc_RNA (1)...(19): siRNA sense strand
aauggacacuggagagaaa

SEQ ID NO: 2048726 - RNA, 19 nt, Homo sapiens
  misc_RNA (1)...(19): siRNA sense strand
ggacagagugcagcuccua

SEQ ID NO: 2048727 - RNA, 19 nt, Homo sapiens
  misc_RNA (1)...(19): siRNA sense strand
gcuggaggcucugaaggaa

SEQ ID NO: 2048728 - RNA, 19 nt, Homo sapiens
  misc_RNA (1)...(19): siRNA sense strand
ugacacgacucagacagaa

SEQ ID NO: 2048729 - RNA, 19 nt, Homo sapiens
  misc_RNA (1)...(19): siRNA sense strand
gcucaaauugcucaacuau

SEQ ID NO: 2048730 - RNA, 19 nt, Homo sapiens
  misc_RNA (1)...(19): siRNA sense strand
ggaacaguaugaaaaucua

SEQ ID NO: 2048731 - RNA, 19 nt, Homo sapiens
  misc_RNA (1)...(19): siRNA sense strand
ugccugggaugcucaaauu

SEQ ID NO: 2048732 - RNA, 19 nt, Homo sapiens
  misc_RNA (1)...(19): siRNA sense strand
ggaagcaucucaggauagc

SEQ ID NO: 2048733 - RNA, 19 nt, Homo sapiens
  misc_RNA (1)...(19): siRNA sense strand
gcuggaguuugaaucgaaa

SEQ ID NO: 2048734 - RNA, 19 nt, Homo sapiens
  misc_RNA (1)...(19): siRNA sense strand
uguccaagcuggucaagca

SEQ ID NO: 2048735 - RNA, 19 nt, Homo sapiens
  misc_RNA (1)...(19): siRNA sense strand
gcaggaggacuuugucuac

SEQ ID NO: 2048736 - RNA, 19 nt, Homo sapiens
  misc_RNA (1)...(19): siRNA sense strand
gcccagaugaggaaagaaa

SEQ ID NO: 2048737 - RNA, 19 nt, Homo sapiens
  misc_RNA (1)...(19): siRNA sense strand
gagaaggacgcugccauug

SEQ ID NO: 2048738 - RNA, 19 nt, Homo sapiens
  misc_RNA (1)...(19): siRNA sense strand
caagauagaggcagcuaag

SEQ ID NO: 2048739 - RNA, 19 nt, Homo sapiens
  misc_RNA (1)...(19): siRNA sense strand
guuggauccuuuaaagaug

SEQ ID NO: 2048740 - RNA, 19 nt, Homo sapiens
  misc_RNA (1)...(19): siRNA sense strand
acaagaauggugagauuga

SEQ ID NO: 2048741 - RNA, 19 nt, Homo sapiens
  misc_RNA (1)...(19): siRNA sense strand
gaaagaaauggaggcucua

SEQ ID NO: 2048742 - RNA, 19 nt, Homo sapiens
  misc_RNA (1)...(19): siRNA sense strand
agcaggacauugaaaggua

SEQ ID NO: 2048743 - RNA, 19 nt, Homo sapiens
  misc_RNA (1)...(19): siRNA sense strand
ugaagaugcaucaacugua

SEQ ID NO: 2048744 - RNA, 19 nt, Homo sapiens
  misc_RNA (1)...(19): siRNA sense strand
agaaggacgcugccauuga

SEQ ID NO: 2048745 - RNA, 19 nt, Homo sapiens
  misc_RNA (1)...(19): siRNA sense strand
caaauugcucaacuaucua

SEQ ID NO: 2048746 - RNA, 19 nt, Homo sapiens
  misc_RNA (1)...(19): siRNA sense strand
acgccgagcuggagaggaa

SEQ ID NO: 2048747 - RNA, 19 nt, Homo sapiens
  misc_RNA (1)...(19): siRNA sense strand
ggaagaggaaacauuuaag

SEQ ID NO: 2048748 - RNA, 19 nt, Homo sapiens
  misc_RNA (1)...(19): siRNA sense strand
agaaggaagaggaaacauu

SEQ ID NO: 2048749 - RNA, 19 nt, Homo sapiens
  misc_RNA (1)...(19): siRNA sense strand
aggaagaggaaacauuuaa

SEQ ID NO: 2048750 - RNA, 19 nt, Homo sapiens
  misc_RNA (1)...(19): siRNA sense strand
aauacgaacucuaaagcau

SEQ ID NO: 2048751 - RNA, 19 nt, Homo sapiens
  misc_RNA (1)...(19): siRNA sense strand
ggaagaaggaagaggaaac

SEQ ID NO: 2048752 - RNA, 19 nt, Homo sapiens
  misc_RNA (1)...(19): siRNA sense strand
guccgcaccucgacagaga

SEQ ID NO: 2048753 - RNA, 19 nt, Homo sapiens
  misc_RNA (1)...(19): siRNA sense strand
caggcagcaugaagaagaa

SEQ ID NO: 2048754 - RNA, 19 nt, Homo sapiens
  misc_RNA (1)...(19): siRNA sense strand
ccgcugugaugacauugaa

SEQ ID NO: 2048755 - RNA, 19 nt, Homo sapiens
  misc_RNA (1)...(19): siRNA sense strand
aggaaacauuuaagaggaa

SEQ ID NO: 2048756 - RNA, 19 nt, Homo sapiens
  misc_RNA (1)...(19): siRNA sense strand
gagugcagcuccuaaaccu

SEQ ID NO: 2048757 - RNA, 19 nt, Homo sapiens
  misc_RNA (1)...(19): siRNA sense strand
uguguuggauccuuuaaag

SEQ ID NO: 2048758 - RNA, 19 nt, Homo sapiens
  misc_RNA (1)...(19): siRNA sense strand
aagauguguuggauccuuu

SEQ ID NO: 2048759 - RNA, 19 nt, Homo sapiens
  misc_RNA (1)...(19): siRNA sense strand
auacgaacucuaaagcaua

SEQ ID NO: 2048760 - RNA, 19 nt, Homo sapiens
  misc_RNA (1)...(19): siRNA sense strand
gacuuuccauccagugaga

SEQ ID NO: 2048761 - RNA, 19 nt, Homo sapiens
  misc_RNA (1)...(19): siRNA sense strand
ucaggcagcaugaagaaga

SEQ ID NO: 2048762 - RNA, 19 nt, Homo sapiens
  misc_RNA (1)...(19): siRNA sense strand
cauuuaagaggaagcauga

SEQ ID NO: 2048763 - RNA, 19 nt, Homo sapiens
  misc_RNA (1)...(19): siRNA sense strand
uaaccaggaagaaggaaga

SEQ ID NO: 2048764 - RNA, 19 nt, Homo sapiens
  misc_RNA (1)...(19): siRNA sense strand
aagauguccucaccucaug

SEQ ID NO: 2048765 - RNA, 19 nt, Homo sapiens
  misc_RNA (1)...(19): siRNA sense strand
ucuagaagauguguuggau

SEQ ID NO: 2048766 - RNA, 19 nt, Homo sapiens
  misc_RNA (1)...(19): siRNA sense strand
gagagcagaacacgagcuu

SEQ ID NO: 2048767 - RNA, 19 nt, Homo sapiens
  misc_RNA (1)...(19): siRNA sense strand
cagcaugaagaagaaauaa

SEQ ID NO: 2048768 - RNA, 19 nt, Homo sapiens
  misc_RNA (1)...(19): siRNA sense strand
agacagagcaggcgcuaca

SEQ ID NO: 2048769 - RNA, 19 nt, Homo sapiens
  misc_RNA (1)...(19): siRNA sense strand
gugaagaugcaucaacugu

SEQ ID NO: 2048770 - RNA, 19 nt, Homo sapiens
  misc_RNA (1)...(19): siRNA sense strand
ggggaagcaucucaggaua

SEQ ID NO: 2048771 - RNA, 19 nt, Homo sapiens
  misc_RNA (1)...(19): siRNA sense strand
cuccagagaccuucagauu

SEQ ID NO: 2048772 - RNA, 19 nt, Homo sapiens
  misc_RNA (1)...(19): siRNA sense strand
ucugcaggcugacaacaug

SEQ ID NO: 2048773 - RNA, 19 nt, Homo sapiens
  misc_RNA (1)...(19): siRNA sense strand
aaagaaauggaggcucuaa

SEQ ID NO: 2048774 - RNA, 19 nt, Homo sapiens
  misc_RNA (1)...(19): siRNA sense strand
aaacgcgauugcccagaug

SEQ ID NO: 2048775 - RNA, 19 nt, Homo sapiens
  misc_RNA (1)...(19): siRNA sense strand
gacaagaauggugagauug

SEQ ID NO: 2048776 - RNA, 19 nt, Homo sapiens
  misc_RNA (1)...(19): siRNA sense strand
gcugacaacaugagcaaca

SEQ ID NO: 2048777 - RNA, 19 nt, Homo sapiens
  misc_RNA (1)...(19): siRNA sense strand
uuaaaacucuggaaaagca

SEQ ID NO: 2048778 - RNA, 19 nt, Homo sapiens
  misc_RNA (1)...(19): siRNA sense strand
agaaauacgaacucuaaag

SEQ ID NO: 2048779 - RNA, 19 nt, Homo sapiens
  misc_RNA (1)...(19): siRNA sense strand
ccagaugaggaaagaaaug

SEQ ID NO: 2048780 - RNA, 19 nt, Homo sapiens
  misc_RNA (1)...(19): siRNA sense strand
uucagacgcugcaggaaga

SEQ ID NO: 2048781 - RNA, 19 nt, Homo sapiens
  misc_RNA (1)...(19): siRNA sense strand
uugcucaacuaucuaagga

SEQ ID NO: 2048782 - RNA, 19 nt, Homo sapiens
  misc_RNA (1)...(19): siRNA sense strand
ggacgcugccauugaccaa

SEQ ID NO: 2048783 - RNA, 19 nt, Homo sapiens
  misc_RNA (1)...(19): siRNA sense strand
caggaggacuuugucuaca

SEQ ID NO: 2048784 - RNA, 19 nt, Homo sapiens
  misc_RNA (1)...(19): siRNA sense strand
aaggaagaggaaacauuua

SEQ ID NO: 2048785 - RNA, 19 nt, Homo sapiens
  misc_RNA (1)...(19): siRNA sense strand
guuaaacuacugcacaaag

SEQ ID NO: 2048786 - RNA, 19 nt, Homo sapiens
  misc_RNA (1)...(19): siRNA sense strand
gggaagcaucucaggauag

SEQ ID NO: 2048787 - RNA, 19 nt, Homo sapiens
  misc_RNA (1)...(19): siRNA sense strand
gacagagugcagcuccuaa

SEQ ID NO: 2048788 - RNA, 19 nt, Homo sapiens
  misc_RNA (1)...(19): siRNA sense strand
ugaaagggaccagauccaa

SEQ ID NO: 2048789 - RNA, 19 nt, Homo sapiens
  misc_RNA (1)...(19): siRNA sense strand
gcaggaagaagaggugaag

SEQ ID NO: 2048790 - RNA, 19 nt, Homo sapiens
  misc_RNA (1)...(19): siRNA sense strand
caagaauggugagauugac

SEQ ID NO: 2048791 - RNA, 19 nt, Homo sapiens
  misc_RNA (1)...(19): siRNA sense strand
ggcccuugaagcagaaaua

SEQ ID NO: 2048792 - RNA, 19 nt, Homo sapiens
  misc_RNA (1)...(19): siRNA sense strand
cagaaauacgaacucuaaa

SEQ ID NO: 2048793 - RNA, 19 nt, Homo sapiens
  misc_RNA (1)...(19): siRNA sense strand
cguccacagugacaagaau

SEQ ID NO: 2048794 - RNA, 19 nt, Homo sapiens
  misc_RNA (1)...(19): siRNA sense strand
aggaggaucuguccaagcu

SEQ ID NO: 2048795 - RNA, 19 nt, Homo sapiens
  misc_RNA (1)...(19): siRNA sense strand
cgccacuccugauuauguu

SEQ ID NO: 2048796 - RNA, 19 nt, Homo sapiens
  misc_RNA (1)...(19): siRNA sense strand
gaacacgagcuugcgaaac

SEQ ID NO: 2048797 - RNA, 19 nt, Homo sapiens
  misc_RNA (1)...(19): siRNA sense strand
acagagugcagcuccuaaa

SEQ ID NO: 2048798 - RNA, 19 nt, Homo sapiens
  misc_RNA (1)...(19): siRNA sense strand
gcuggugacacgacucaga

SEQ ID NO: 2048799 - RNA, 19 nt, Homo sapiens
  misc_RNA (1)...(19): siRNA sense strand
ggaggcugcugcccuagua

SEQ ID NO: 2048800 - RNA, 19 nt, Homo sapiens
  misc_RNA (1)...(19): siRNA sense strand
gaaagaggagucagagguu

SEQ ID NO: 2048801 - RNA, 19 nt, Homo sapiens
  misc_RNA (1)...(19): siRNA sense strand
aaagaggagucagagguua

SEQ ID NO: 2048802 - RNA, 19 nt, Homo sapiens
  misc_RNA (1)...(19): siRNA sense strand
uuacagaggacucagauuu

SEQ ID NO: 2048803 - RNA, 19 nt, Homo sapiens
  misc_RNA (1)...(19): siRNA sense strand
gcagguccagguaguguaa

SEQ ID NO: 2048804 - RNA, 19 nt, Homo sapiens
  misc_RNA (1)...(19): siRNA sense strand
ccagcgaucugaggaguga

SEQ ID NO: 2048805 - RNA, 19 nt, Homo sapiens
  misc_RNA (1)...(19): siRNA sense strand
cggcauggcuggccuuucu

SEQ ID NO: 2048806 - RNA, 19 nt, Homo sapiens
  misc_RNA (1)...(19): siRNA sense strand
gaaacugagccuccaacuc

SEQ ID NO: 2048807 - RNA, 19 nt, Homo sapiens
  misc_RNA (1)...(19): siRNA sense strand
gagguccuaucagagaaga

SEQ ID NO: 2048808 - RNA, 19 nt, Homo sapiens
  misc_RNA (1)...(19): siRNA sense strand
cuaggacuaugcaggaauc

SEQ ID NO: 2048809 - RNA, 19 nt, Homo sapiens
  misc_RNA (1)...(19): siRNA sense strand
gaggaggcccagagaugug

SEQ ID NO: 2048810 - RNA, 19 nt, Homo sapiens
  misc_RNA (1)...(19): siRNA sense strand
guggcugcguccagaggua

SEQ ID NO: 2048811 - RNA, 19 nt, Homo sapiens
  misc_RNA (1)...(19): siRNA sense strand
guccagagguacgcuccaa

SEQ ID NO: 2048812 - RNA, 19 nt, Homo sapiens
  misc_RNA (1)...(19): siRNA sense strand
gguccuaucagagaagaug

SEQ ID NO: 2048813 - RNA, 19 nt, Homo sapiens
  misc_RNA (1)...(19): siRNA sense strand
cgagugcggccagagcuuu

SEQ ID NO: 2048814 - RNA, 19 nt, Homo sapiens
  misc_RNA (1)...(19): siRNA sense strand
agacaccuccuaggacuau

SEQ ID NO: 2048815 - RNA, 19 nt, Homo sapiens
  misc_RNA (1)...(19): siRNA sense strand
cccaagacaccuccuagga

SEQ ID NO: 2048816 - RNA, 19 nt, Homo sapiens
  misc_RNA (1)...(19): siRNA sense strand
gcagaugcuggagcuguug

SEQ ID NO: 2048817 - RNA, 19 nt, Homo sapiens
  misc_RNA (1)...(19): siRNA sense strand
uacagaggacucagauuuc

SEQ ID NO: 2048818 - RNA, 19 nt, Homo sapiens
  misc_RNA (1)...(19): siRNA sense strand
ggaggcugcugcccuagua

SEQ ID NO: 2048819 - RNA, 19 nt, Homo sapiens
  misc_RNA (1)...(19): siRNA sense strand
gaaagaggagucagagguu

SEQ ID NO: 2048820 - RNA, 19 nt, Homo sapiens
  misc_RNA (1)...(19): siRNA sense strand
aaagaggagucagagguua

SEQ ID NO: 2048821 - RNA, 19 nt, Homo sapiens
  misc_RNA (1)...(19): siRNA sense strand
uuacagaggacucagauuu

SEQ ID NO: 2048822 - RNA, 19 nt, Homo sapiens
  misc_RNA (1)...(19): siRNA sense strand
gcagguccagguaguguaa

SEQ ID NO: 2048823 - RNA, 19 nt, Homo sapiens
  misc_RNA (1)...(19): siRNA sense strand
ccagcgaucugaggaguga

SEQ ID NO: 2048824 - RNA, 19 nt, Homo sapiens
  misc_RNA (1)...(19): siRNA sense strand
cggcauggcuggccuuucu

SEQ ID NO: 2048825 - RNA, 19 nt, Homo sapiens
  misc_RNA (1)...(19): siRNA sense strand
gaaacugagccuccaacuc

SEQ ID NO: 2048826 - RNA, 19 nt, Homo sapiens
  misc_RNA (1)...(19): siRNA sense strand
gagguccuaucagagaaga

SEQ ID NO: 2048827 - RNA, 19 nt, Homo sapiens
  misc_RNA (1)...(19): siRNA sense strand
cuaggacuaugcaggaauc

SEQ ID NO: 2048828 - RNA, 19 nt, Homo sapiens
  misc_RNA (1)...(19): siRNA sense strand
gaggaggcccagagaugug

SEQ ID NO: 2048829 - RNA, 19 nt, Homo sapiens
  misc_RNA (1)...(19): siRNA sense strand
guggcugcguccagaggua

SEQ ID NO: 2048830 - RNA, 19 nt, Homo sapiens
  misc_RNA (1)...(19): siRNA sense strand
guccagagguacgcuccaa

SEQ ID NO: 2048831 - RNA, 19 nt, Homo sapiens
  misc_RNA (1)...(19): siRNA sense strand
gguccuaucagagaagaug

SEQ ID NO: 2048832 - RNA, 19 nt, Homo sapiens
  misc_RNA (1)...(19): siRNA sense strand
cgagugcggccagagcuuu

SEQ ID NO: 2048833 - RNA, 19 nt, Homo sapiens
  misc_RNA (1)...(19): siRNA sense strand
agacaccuccuaggacuau

SEQ ID NO: 2048834 - RNA, 19 nt, Homo sapiens
  misc_RNA (1)...(19): siRNA sense strand
cccaagacaccuccuagga

SEQ ID NO: 2048835 - RNA, 19 nt, Homo sapiens
  misc_RNA (1)...(19): siRNA sense strand
gcagaugcuggagcuguug

SEQ ID NO: 2048836 - RNA, 19 nt, Homo sapiens
  misc_RNA (1)...(19): siRNA sense strand
uacagaggacucagauuuc

SEQ ID NO: 2048837 - RNA, 19 nt, Homo sapiens
  misc_RNA (1)...(19): siRNA sense strand
gcagagaggugauuuccaa

SEQ ID NO: 2048838 - RNA, 19 nt, Homo sapiens
  misc_RNA (1)...(19): siRNA sense strand
ggaaauccuucauuaauca

SEQ ID NO: 2048839 - RNA, 19 nt, Homo sapiens
  misc_RNA (1)...(19): siRNA sense strand
gagcaacguucuguauuua

SEQ ID NO: 2048840 - RNA, 19 nt, Homo sapiens
  misc_RNA (1)...(19): siRNA sense strand
gagagaaaccuuauaaaug

SEQ ID NO: 2048841 - RNA, 19 nt, Homo sapiens
  misc_RNA (1)...(19): siRNA sense strand
gaacacucaugccuuaaga

SEQ ID NO: 2048842 - RNA, 19 nt, Homo sapiens
  misc_RNA (1)...(19): siRNA sense strand
gggagagccuucacuguuu

SEQ ID NO: 2048843 - RNA, 19 nt, Homo sapiens
  misc_RNA (1)...(19): siRNA sense strand
ggagagaaaccuuauaaau

SEQ ID NO: 2048844 - RNA, 19 nt, Homo sapiens
  misc_RNA (1)...(19): siRNA sense strand
gagaaacccuaugaaugua

SEQ ID NO: 2048845 - RNA, 19 nt, Homo sapiens
  misc_RNA (1)...(19): siRNA sense strand
ggaaagccuucacucagaa

SEQ ID NO: 2048846 - RNA, 19 nt, Homo sapiens
  misc_RNA (1)...(19): siRNA sense strand
gggaaagccuucacucaga

SEQ ID NO: 2048847 - RNA, 19 nt, Homo sapiens
  misc_RNA (1)...(19): siRNA sense strand
gaacauacaagaacucaca

SEQ ID NO: 2048848 - RNA, 19 nt, Homo sapiens
  misc_RNA (1)...(19): siRNA sense strand
gagagaaacccuaugaaug

SEQ ID NO: 2048849 - RNA, 19 nt, Homo sapiens
  misc_RNA (1)...(19): siRNA sense strand
gggaaauccuucauuaauc

SEQ ID NO: 2048850 - RNA, 19 nt, Homo sapiens
  misc_RNA (1)...(19): siRNA sense strand
ggagagaggcccuaugaau

SEQ ID NO: 2048851 - RNA, 19 nt, Homo sapiens
  misc_RNA (1)...(19): siRNA sense strand
gggaaagccuucaguucuu

SEQ ID NO: 2048852 - RNA, 19 nt, Homo sapiens
  misc_RNA (1)...(19): siRNA sense strand
ucugggaaauccuucauua

SEQ ID NO: 2048853 - RNA, 19 nt, Homo sapiens
  misc_RNA (1)...(19): siRNA sense strand
cugcauaccuuaauauuca

SEQ ID NO: 2048854 - RNA, 19 nt, Homo sapiens
  misc_RNA (1)...(19): siRNA sense strand
gaacccagauguuguuugc

SEQ ID NO: 2048855 - RNA, 19 nt, Homo sapiens
  misc_RNA (1)...(19): siRNA sense strand
ggagagaaacccuaugaau

SEQ ID NO: 2048856 - RNA, 19 nt, Homo sapiens
  misc_RNA (1)...(19): siRNA sense strand
uggcaaagcuuuuaaguuu

SEQ ID NO: 2048857 - RNA, 19 nt, Homo sapiens
  misc_RNA (1)...(19): siRNA sense strand
acucagaacucagaccuua

SEQ ID NO: 2048858 - RNA, 19 nt, Homo sapiens
  misc_RNA (1)...(19): siRNA sense strand
agagcaacguucuguauuu

SEQ ID NO: 2048859 - RNA, 19 nt, Homo sapiens
  misc_RNA (1)...(19): siRNA sense strand
gggauagccuucacuagau

SEQ ID NO: 2048860 - RNA, 19 nt, Homo sapiens
  misc_RNA (1)...(19): siRNA sense strand
gagagaggcccuaugaaug

SEQ ID NO: 2048861 - RNA, 19 nt, Homo sapiens
  misc_RNA (1)...(19): siRNA sense strand
gcacaggagagaaagcuuu

SEQ ID NO: 2048862 - RNA, 19 nt, Homo sapiens
  misc_RNA (1)...(19): siRNA sense strand
gagaggcccuaugaaugua

SEQ ID NO: 2048863 - RNA, 19 nt, Homo sapiens
  misc_RNA (1)...(19): siRNA sense strand
gauaucagcucuucaaacc

SEQ ID NO: 2048864 - RNA, 19 nt, Homo sapiens
  misc_RNA (1)...(19): siRNA sense strand
ucagugauguuaagcaaug

SEQ ID NO: 2048865 - RNA, 19 nt, Homo sapiens
  misc_RNA (1)...(19): siRNA sense strand
ccaaagaguuagcccuuca

SEQ ID NO: 2048866 - RNA, 19 nt, Homo sapiens
  misc_RNA (1)...(19): siRNA sense strand
ggaaagccuucaguucuuc

SEQ ID NO: 2048867 - RNA, 19 nt, Homo sapiens
  misc_RNA (1)...(19): siRNA sense strand
acgcauuccuccagucuua

SEQ ID NO: 2048868 - RNA, 19 nt, Homo sapiens
  misc_RNA (1)...(19): siRNA sense strand
gugagaagccuuaugaaug

SEQ ID NO: 2048869 - RNA, 19 nt, Homo sapiens
  misc_RNA (1)...(19): siRNA sense strand
ggucagugauguuaagcaa

SEQ ID NO: 2048870 - RNA, 19 nt, Homo sapiens
  misc_RNA (1)...(19): siRNA sense strand
gcaacguucuguauuuagu

SEQ ID NO: 2048871 - RNA, 19 nt, Homo sapiens
  misc_RNA (1)...(19): siRNA sense strand
ggagagcaacguucuguau

SEQ ID NO: 2048872 - RNA, 19 nt, Homo sapiens
  misc_RNA (1)...(19): siRNA sense strand
gaacaagaagagucuagga

SEQ ID NO: 2048873 - RNA, 19 nt, Homo sapiens
  misc_RNA (1)...(19): siRNA sense strand
agagaaacccuaugaaugu

SEQ ID NO: 2048874 - RNA, 19 nt, Homo sapiens
  misc_RNA (1)...(19): siRNA sense strand
gccagauccucucgccuua

SEQ ID NO: 2048875 - RNA, 19 nt, Homo sapiens
  misc_RNA (1)...(19): siRNA sense strand
caccaggucuugucaacuu

SEQ ID NO: 2048876 - RNA, 19 nt, Homo sapiens
  misc_RNA (1)...(19): siRNA sense strand
ggauuuagauauucugcau

SEQ ID NO: 2048877 - RNA, 19 nt, Homo sapiens
  misc_RNA (1)...(19): siRNA sense strand
gggagaggcuuuauucacu

SEQ ID NO: 2048878 - RNA, 19 nt, Homo sapiens
  misc_RNA (1)...(19): siRNA sense strand
gacaaucccuaugagugua

SEQ ID NO: 2048879 - RNA, 19 nt, Homo sapiens
  misc_RNA (1)...(19): siRNA sense strand
ccaauucguuucaguuaca

SEQ ID NO: 2048880 - RNA, 19 nt, Homo sapiens
  misc_RNA (1)...(19): siRNA sense strand
gaauuuggccacaguagga

SEQ ID NO: 2048881 - RNA, 19 nt, Homo sapiens
  misc_RNA (1)...(19): siRNA sense strand
gaauguaagauauguggaa

SEQ ID NO: 2048882 - RNA, 19 nt, Homo sapiens
  misc_RNA (1)...(19): siRNA sense strand
ugagaagccuuaugaaugc

SEQ ID NO: 2048883 - RNA, 19 nt, Homo sapiens
  misc_RNA (1)...(19): siRNA sense strand
ggaggucagugauguuaag

SEQ ID NO: 2048884 - RNA, 19 nt, Homo sapiens
  misc_RNA (1)...(19): siRNA sense strand
cacuagaucuucucaacuu

SEQ ID NO: 2048885 - RNA, 19 nt, Homo sapiens
  misc_RNA (1)...(19): siRNA sense strand
ggagagccuucacuguuuc

SEQ ID NO: 2048886 - RNA, 19 nt, Homo sapiens
  misc_RNA (1)...(19): siRNA sense strand
uuuaagaacucacaaugga

SEQ ID NO: 2048887 - RNA, 19 nt, Homo sapiens
  misc_RNA (1)...(19): siRNA sense strand
aaagaaggcaugcggauga

SEQ ID NO: 2048888 - RNA, 19 nt, Homo sapiens
  misc_RNA (1)...(19): siRNA sense strand
cuggagaacuacaagaauu

SEQ ID NO: 2048889 - RNA, 19 nt, Homo sapiens
  misc_RNA (1)...(19): siRNA sense strand
ccuccagucuuaauaauca

SEQ ID NO: 2048890 - RNA, 19 nt, Homo sapiens
  misc_RNA (1)...(19): siRNA sense strand
ccagugggauucaaaugau

SEQ ID NO: 2048891 - RNA, 19 nt, Homo sapiens
  misc_RNA (1)...(19): siRNA sense strand
ggagagaagcccuuugagu

SEQ ID NO: 2048892 - RNA, 19 nt, Homo sapiens
  misc_RNA (1)...(19): siRNA sense strand
gauguuguuugccagagaa

SEQ ID NO: 2048893 - RNA, 19 nt, Homo sapiens
  misc_RNA (1)...(19): siRNA sense strand
gaaacccuaugaauguaag

SEQ ID NO: 2048894 - RNA, 19 nt, Homo sapiens
  misc_RNA (1)...(19): siRNA sense strand
ccacguguguuaaccuuca

SEQ ID NO: 2048895 - RNA, 19 nt, Homo sapiens
  misc_RNA (1)...(19): siRNA sense strand
gaucuucucaacuuacuga

SEQ ID NO: 2048896 - RNA, 19 nt, Homo sapiens
  misc_RNA (1)...(19): siRNA sense strand
gauauucugcauaccuuaa

SEQ ID NO: 2048897 - RNA, 19 nt, Homo sapiens
  misc_RNA (1)...(19): siRNA sense strand
gagagcaacguucuguauu

SEQ ID NO: 2048898 - RNA, 19 nt, Homo sapiens
  misc_RNA (1)...(19): siRNA sense strand
gaacucacacuggagagaa

SEQ ID NO: 2048899 - RNA, 19 nt, Homo sapiens
  misc_RNA (1)...(19): siRNA sense strand
gaacucacacuggagagaa

SEQ ID NO: 2048900 - RNA, 19 nt, Homo sapiens
  misc_RNA (1)...(19): siRNA sense strand
caaacucacaggucagaaa

SEQ ID NO: 2048901 - RNA, 19 nt, Homo sapiens
  misc_RNA (1)...(19): siRNA sense strand
gaaugugggagaggcuuua

SEQ ID NO: 2048902 - RNA, 19 nt, Homo sapiens
  misc_RNA (1)...(19): siRNA sense strand
ggaaauccuucaguuacuc

SEQ ID NO: 2048903 - RNA, 19 nt, Homo sapiens
  misc_RNA (1)...(19): siRNA sense strand
gagagaagccuuuugaaug

SEQ ID NO: 2048904 - RNA, 19 nt, Homo sapiens
  misc_RNA (1)...(19): siRNA sense strand
ggauagccuucacuagauc

SEQ ID NO: 2048905 - RNA, 19 nt, Homo sapiens
  misc_RNA (1)...(19): siRNA sense strand
gaugagagacugucagcau

SEQ ID NO: 2048906 - RNA, 19 nt, Homo sapiens
  misc_RNA (1)...(19): siRNA sense strand
ggugagaagccuuaugaau

SEQ ID NO: 2048907 - RNA, 19 nt, Homo sapiens
  misc_RNA (1)...(19): siRNA sense strand
gggaaauccuucaguuacu

SEQ ID NO: 2048908 - RNA, 19 nt, Homo sapiens
  misc_RNA (1)...(19): siRNA sense strand
gugggaaauccuucaguua

SEQ ID NO: 2048909 - RNA, 19 nt, Homo sapiens
  misc_RNA (1)...(19): siRNA sense strand
cagugggauucaaaugaua

SEQ ID NO: 2048910 - RNA, 19 nt, Homo sapiens
  misc_RNA (1)...(19): siRNA sense strand
guggagagaggcccuauga

SEQ ID NO: 2048911 - RNA, 19 nt, Homo sapiens
  misc_RNA (1)...(19): siRNA sense strand
gaauguaaggaauguggaa

SEQ ID NO: 2048912 - RNA, 19 nt, Homo sapiens
  misc_RNA (1)...(19): siRNA sense strand
uagauauucugcauaccuu

SEQ ID NO: 2048913 - RNA, 19 nt, Homo sapiens
  misc_RNA (1)...(19): siRNA sense strand
ugagagacugucagcauaa

SEQ ID NO: 2048914 - RNA, 19 nt, Homo sapiens
  misc_RNA (1)...(19): siRNA sense strand
gauccucucgccuuaguga

SEQ ID NO: 2048915 - RNA, 19 nt, Homo sapiens
  misc_RNA (1)...(19): siRNA sense strand
uuuccaagcuucagaaugg

SEQ ID NO: 2048916 - RNA, 19 nt, Homo sapiens
  misc_RNA (1)...(19): siRNA sense strand
ggagaacuacaagaauuug

SEQ ID NO: 2048917 - RNA, 19 nt, Homo sapiens
  misc_RNA (1)...(19): siRNA sense strand
caacuuacucagcacagaa

SEQ ID NO: 2048918 - RNA, 19 nt, Homo sapiens
  misc_RNA (1)...(19): siRNA sense strand
gagaggugauuuccaagcu

SEQ ID NO: 2048919 - RNA, 19 nt, Homo sapiens
  misc_RNA (1)...(19): siRNA sense strand
augagagacugucagcaua

SEQ ID NO: 2048920 - RNA, 19 nt, Homo sapiens
  misc_RNA (1)...(19): siRNA sense strand
ccucaugccucagugauca

SEQ ID NO: 2048921 - RNA, 19 nt, Homo sapiens
  misc_RNA (1)...(19): siRNA sense strand
acucaugccuuaagacaca

SEQ ID NO: 2048922 - RNA, 19 nt, Homo sapiens
  misc_RNA (1)...(19): siRNA sense strand
guuaagcaauguggagaug

SEQ ID NO: 2048923 - RNA, 19 nt, Homo sapiens
  misc_RNA (1)...(19): siRNA sense strand
uaagcaauguggagauguc

SEQ ID NO: 2048924 - RNA, 19 nt, Homo sapiens
  misc_RNA (1)...(19): siRNA sense strand
agagaggcccuaugaaugu

SEQ ID NO: 2048925 - RNA, 19 nt, Homo sapiens
  misc_RNA (1)...(19): siRNA sense strand
uugcuuaagucaacauaug

SEQ ID NO: 2048926 - RNA, 19 nt, Homo sapiens
  misc_RNA (1)...(19): siRNA sense strand
ucagggacauuuaagaacu

SEQ ID NO: 2048927 - RNA, 19 nt, Homo sapiens
  misc_RNA (1)...(19): siRNA sense strand
ugggaaauccuucauuaau

SEQ ID NO: 2048928 - RNA, 19 nt, Homo sapiens
  misc_RNA (1)...(19): siRNA sense strand
ggacauuugagaauucaca

SEQ ID NO: 2048929 - RNA, 19 nt, Homo sapiens
  misc_RNA (1)...(19): siRNA sense strand
cccuauaaauguaaggauu

SEQ ID NO: 2048930 - RNA, 19 nt, Homo sapiens
  misc_RNA (1)...(19): siRNA sense strand
acuagaucuucucaacuua

SEQ ID NO: 2048931 - RNA, 19 nt, Homo sapiens
  misc_RNA (1)...(19): siRNA sense strand
acaagaauuuggccacagu

SEQ ID NO: 2048932 - RNA, 19 nt, Homo sapiens
  misc_RNA (1)...(19): siRNA sense strand
agaccuugcugugcguaua

SEQ ID NO: 2048933 - RNA, 19 nt, Homo sapiens
  misc_RNA (1)...(19): siRNA sense strand
ggacauuuaagaacucaca

SEQ ID NO: 2048934 - RNA, 19 nt, Homo sapiens
  misc_RNA (1)...(19): siRNA sense strand
cuucucaacuuacugaaca

SEQ ID NO: 2048935 - RNA, 19 nt, Homo sapiens
  misc_RNA (1)...(19): siRNA sense strand
ugugggaaauccuucaguu

SEQ ID NO: 2048936 - RNA, 19 nt, Homo sapiens
  misc_RNA (1)...(19): siRNA sense strand
aaacucacacugcaaagga

SEQ ID NO: 2048937 - RNA, 19 nt, Homo sapiens
  misc_RNA (1)...(19): siRNA sense strand
gcagagaggugauuuccaa

SEQ ID NO: 2048938 - RNA, 19 nt, Homo sapiens
  misc_RNA (1)...(19): siRNA sense strand
ggaaauccuucauuaauca

SEQ ID NO: 2048939 - RNA, 19 nt, Homo sapiens
  misc_RNA (1)...(19): siRNA sense strand
gagcaacguucuguauuua

SEQ ID NO: 2048940 - RNA, 19 nt, Homo sapiens
  misc_RNA (1)...(19): siRNA sense strand
gagagaaaccuuauaaaug

SEQ ID NO: 2048941 - RNA, 19 nt, Homo sapiens
  misc_RNA (1)...(19): siRNA sense strand
gaacacucaugccuuaaga

SEQ ID NO: 2048942 - RNA, 19 nt, Homo sapiens
  misc_RNA (1)...(19): siRNA sense strand
gggagagccuucacuguuu

SEQ ID NO: 2048943 - RNA, 19 nt, Homo sapiens
  misc_RNA (1)...(19): siRNA sense strand
ggagagaaaccuuauaaau

SEQ ID NO: 2048944 - RNA, 19 nt, Homo sapiens
  misc_RNA (1)...(19): siRNA sense strand
gagaaacccuaugaaugua

SEQ ID NO: 2048945 - RNA, 19 nt, Homo sapiens
  misc_RNA (1)...(19): siRNA sense strand
ggaaagccuucacucagaa

SEQ ID NO: 2048946 - RNA, 19 nt, Homo sapiens
  misc_RNA (1)...(19): siRNA sense strand
gggaaagccuucacucaga

SEQ ID NO: 2048947 - RNA, 19 nt, Homo sapiens
  misc_RNA (1)...(19): siRNA sense strand
gaacauacaagaacucaca

SEQ ID NO: 2048948 - RNA, 19 nt, Homo sapiens
  misc_RNA (1)...(19): siRNA sense strand
gagagaaacccuaugaaug

SEQ ID NO: 2048949 - RNA, 19 nt, Homo sapiens
  misc_RNA (1)...(19): siRNA sense strand
gggaaauccuucauuaauc

SEQ ID NO: 2048950 - RNA, 19 nt, Homo sapiens
  misc_RNA (1)...(19): siRNA sense strand
ggagagaggcccuaugaau

SEQ ID NO: 2048951 - RNA, 19 nt, Homo sapiens
  misc_RNA (1)...(19): siRNA sense strand
gggaaagccuucaguucuu

SEQ ID NO: 2048952 - RNA, 19 nt, Homo sapiens
  misc_RNA (1)...(19): siRNA sense strand
ucugggaaauccuucauua

SEQ ID NO: 2048953 - RNA, 19 nt, Homo sapiens
  misc_RNA (1)...(19): siRNA sense strand
cugcauaccuuaauauuca

SEQ ID NO: 2048954 - RNA, 19 nt, Homo sapiens
  misc_RNA (1)...(19): siRNA sense strand
gaacccagauguuguuugc

SEQ ID NO: 2048955 - RNA, 19 nt, Homo sapiens
  misc_RNA (1)...(19): siRNA sense strand
ggagagaaacccuaugaau

SEQ ID NO: 2048956 - RNA, 19 nt, Homo sapiens
  misc_RNA (1)...(19): siRNA sense strand
uggcaaagcuuuuaaguuu

SEQ ID NO: 2048957 - RNA, 19 nt, Homo sapiens
  misc_RNA (1)...(19): siRNA sense strand
acucagaacucagaccuua

SEQ ID NO: 2048958 - RNA, 19 nt, Homo sapiens
  misc_RNA (1)...(19): siRNA sense strand
agagcaacguucuguauuu

SEQ ID NO: 2048959 - RNA, 19 nt, Homo sapiens
  misc_RNA (1)...(19): siRNA sense strand
gggauagccuucacuagau

SEQ ID NO: 2048960 - RNA, 19 nt, Homo sapiens
  misc_RNA (1)...(19): siRNA sense strand
gagagaggcccuaugaaug

SEQ ID NO: 2048961 - RNA, 19 nt, Homo sapiens
  misc_RNA (1)...(19): siRNA sense strand
gcacaggagagaaagcuuu

SEQ ID NO: 2048962 - RNA, 19 nt, Homo sapiens
  misc_RNA (1)...(19): siRNA sense strand
gagaggcccuaugaaugua

SEQ ID NO: 2048963 - RNA, 19 nt, Homo sapiens
  misc_RNA (1)...(19): siRNA sense strand
gauaucagcucuucaaacc

SEQ ID NO: 2048964 - RNA, 19 nt, Homo sapiens
  misc_RNA (1)...(19): siRNA sense strand
ucagugauguuaagcaaug

SEQ ID NO: 2048965 - RNA, 19 nt, Homo sapiens
  misc_RNA (1)...(19): siRNA sense strand
ccaaagaguuagcccuuca

SEQ ID NO: 2048966 - RNA, 19 nt, Homo sapiens
  misc_RNA (1)...(19): siRNA sense strand
ggaaagccuucaguucuuc

SEQ ID NO: 2048967 - RNA, 19 nt, Homo sapiens
  misc_RNA (1)...(19): siRNA sense strand
acgcauuccuccagucuua

SEQ ID NO: 2048968 - RNA, 19 nt, Homo sapiens
  misc_RNA (1)...(19): siRNA sense strand
gugagaagccuuaugaaug

SEQ ID NO: 2048969 - RNA, 19 nt, Homo sapiens
  misc_RNA (1)...(19): siRNA sense strand
ggucagugauguuaagcaa

SEQ ID NO: 2048970 - RNA, 19 nt, Homo sapiens
  misc_RNA (1)...(19): siRNA sense strand
gcaacguucuguauuuagu

SEQ ID NO: 2048971 - RNA, 19 nt, Homo sapiens
  misc_RNA (1)...(19): siRNA sense strand
ggagagcaacguucuguau

SEQ ID NO: 2048972 - RNA, 19 nt, Homo sapiens
  misc_RNA (1)...(19): siRNA sense strand
gaacaagaagagucuagga

SEQ ID NO: 2048973 - RNA, 19 nt, Homo sapiens
  misc_RNA (1)...(19): siRNA sense strand
agagaaacccuaugaaugu

SEQ ID NO: 2048974 - RNA, 19 nt, Homo sapiens
  misc_RNA (1)...(19): siRNA sense strand
gccagauccucucgccuua

SEQ ID NO: 2048975 - RNA, 19 nt, Homo sapiens
  misc_RNA (1)...(19): siRNA sense strand
caccaggucuugucaacuu

SEQ ID NO: 2048976 - RNA, 19 nt, Homo sapiens
  misc_RNA (1)...(19): siRNA sense strand
ggauuuagauauucugcau

SEQ ID NO: 2048977 - RNA, 19 nt, Homo sapiens
  misc_RNA (1)...(19): siRNA sense strand
gggagaggcuuuauucacu

SEQ ID NO: 2048978 - RNA, 19 nt, Homo sapiens
  misc_RNA (1)...(19): siRNA sense strand
gacaaucccuaugagugua

SEQ ID NO: 2048979 - RNA, 19 nt, Homo sapiens
  misc_RNA (1)...(19): siRNA sense strand
ccaauucguuucaguuaca

SEQ ID NO: 2048980 - RNA, 19 nt, Homo sapiens
  misc_RNA (1)...(19): siRNA sense strand
gaauuuggccacaguagga

SEQ ID NO: 2048981 - RNA, 19 nt, Homo sapiens
  misc_RNA (1)...(19): siRNA sense strand
gaauguaagauauguggaa

SEQ ID NO: 2048982 - RNA, 19 nt, Homo sapiens
  misc_RNA (1)...(19): siRNA sense strand
ugagaagccuuaugaaugc

SEQ ID NO: 2048983 - RNA, 19 nt, Homo sapiens
  misc_RNA (1)...(19): siRNA sense strand
ggaggucagugauguuaag

SEQ ID NO: 2048984 - RNA, 19 nt, Homo sapiens
  misc_RNA (1)...(19): siRNA sense strand
cacuagaucuucucaacuu

SEQ ID NO: 2048985 - RNA, 19 nt, Homo sapiens
  misc_RNA (1)...(19): siRNA sense strand
ggagagccuucacuguuuc

SEQ ID NO: 2048986 - RNA, 19 nt, Homo sapiens
  misc_RNA (1)...(19): siRNA sense strand
uuuaagaacucacaaugga

SEQ ID NO: 2048987 - RNA, 19 nt, Homo sapiens
  misc_RNA (1)...(19): siRNA sense strand
aaagaaggcaugcggauga

SEQ ID NO: 2048988 - RNA, 19 nt, Homo sapiens
  misc_RNA (1)...(19): siRNA sense strand
cuggagaacuacaagaauu

SEQ ID NO: 2048989 - RNA, 19 nt, Homo sapiens
  misc_RNA (1)...(19): siRNA sense strand
ccuccagucuuaauaauca

SEQ ID NO: 2048990 - RNA, 19 nt, Homo sapiens
  misc_RNA (1)...(19): siRNA sense strand
ccagugggauucaaaugau

SEQ ID NO: 2048991 - RNA, 19 nt, Homo sapiens
  misc_RNA (1)...(19): siRNA sense strand
ggagagaagcccuuugagu

SEQ ID NO: 2048992 - RNA, 19 nt, Homo sapiens
  misc_RNA (1)...(19): siRNA sense strand
gauguuguuugccagagaa

SEQ ID NO: 2048993 - RNA, 19 nt, Homo sapiens
  misc_RNA (1)...(19): siRNA sense strand
gaaacccuaugaauguaag

SEQ ID NO: 2048994 - RNA, 19 nt, Homo sapiens
  misc_RNA (1)...(19): siRNA sense strand
ccacguguguuaaccuuca

SEQ ID NO: 2048995 - RNA, 19 nt, Homo sapiens
  misc_RNA (1)...(19): siRNA sense strand
gaucuucucaacuuacuga

SEQ ID NO: 2048996 - RNA, 19 nt, Homo sapiens
  misc_RNA (1)...(19): siRNA sense strand
gauauucugcauaccuuaa

SEQ ID NO: 2048997 - RNA, 19 nt, Homo sapiens
  misc_RNA (1)...(19): siRNA sense strand
gagagcaacguucuguauu

SEQ ID NO: 2048998 - RNA, 19 nt, Homo sapiens
  misc_RNA (1)...(19): siRNA sense strand
gaacucacacuggagagaa

SEQ ID NO: 2048999 - RNA, 19 nt, Homo sapiens
  misc_RNA (1)...(19): siRNA sense strand
gaacucacacuggagagaa

SEQ ID NO: 2049000 - RNA, 19 nt, Homo sapiens
  misc_RNA (1)...(19): siRNA sense strand
caaacucacaggucagaaa

SEQ ID NO: 2049001 - RNA, 19 nt, Homo sapiens
  misc_RNA (1)...(19): siRNA sense strand
gaaugugggagaggcuuua

SEQ ID NO: 2049002 - RNA, 19 nt, Homo sapiens
  misc_RNA (1)...(19): siRNA sense strand
ggaaauccuucaguuacuc

SEQ ID NO: 2049003 - RNA, 19 nt, Homo sapiens
  misc_RNA (1)...(19): siRNA sense strand
gagagaagccuuuugaaug

SEQ ID NO: 2049004 - RNA, 19 nt, Homo sapiens
  misc_RNA (1)...(19): siRNA sense strand
ggauagccuucacuagauc

SEQ ID NO: 2049005 - RNA, 19 nt, Homo sapiens
  misc_RNA (1)...(19): siRNA sense strand
gaugagagacugucagcau

SEQ ID NO: 2049006 - RNA, 19 nt, Homo sapiens
  misc_RNA (1)...(19): siRNA sense strand
ggugagaagccuuaugaau

SEQ ID NO: 2049007 - RNA, 19 nt, Homo sapiens
  misc_RNA (1)...(19): siRNA sense strand
gggaaauccuucaguuacu

SEQ ID NO: 2049008 - RNA, 19 nt, Homo sapiens
  misc_RNA (1)...(19): siRNA sense strand
gugggaaauccuucaguua

SEQ ID NO: 2049009 - RNA, 19 nt, Homo sapiens
  misc_RNA (1)...(19): siRNA sense strand
cagugggauucaaaugaua

SEQ ID NO: 2049010 - RNA, 19 nt, Homo sapiens
  misc_RNA (1)...(19): siRNA sense strand
guggagagaggcccuauga

SEQ ID NO: 2049011 - RNA, 19 nt, Homo sapiens
  misc_RNA (1)...(19): siRNA sense strand
gaauguaaggaauguggaa

SEQ ID NO: 2049012 - RNA, 19 nt, Homo sapiens
  misc_RNA (1)...(19): siRNA sense strand
uagauauucugcauaccuu

SEQ ID NO: 2049013 - RNA, 19 nt, Homo sapiens
  misc_RNA (1)...(19): siRNA sense strand
ugagagacugucagcauaa

SEQ ID NO: 2049014 - RNA, 19 nt, Homo sapiens
  misc_RNA (1)...(19): siRNA sense strand
gauccucucgccuuaguga

SEQ ID NO: 2049015 - RNA, 19 nt, Homo sapiens
  misc_RNA (1)...(19): siRNA sense strand
uuuccaagcuucagaaugg

SEQ ID NO: 2049016 - RNA, 19 nt, Homo sapiens
  misc_RNA (1)...(19): siRNA sense strand
ggagaacuacaagaauuug

SEQ ID NO: 2049017 - RNA, 19 nt, Homo sapiens
  misc_RNA (1)...(19): siRNA sense strand
caacuuacucagcacagaa

SEQ ID NO: 2049018 - RNA, 19 nt, Homo sapiens
  misc_RNA (1)...(19): siRNA sense strand
gagaggugauuuccaagcu

SEQ ID NO: 2049019 - RNA, 19 nt, Homo sapiens
  misc_RNA (1)...(19): siRNA sense strand
augagagacugucagcaua

SEQ ID NO: 2049020 - RNA, 19 nt, Homo sapiens
  misc_RNA (1)...(19): siRNA sense strand
ccucaugccucagugauca

SEQ ID NO: 2049021 - RNA, 19 nt, Homo sapiens
  misc_RNA (1)...(19): siRNA sense strand
acucaugccuuaagacaca

SEQ ID NO: 2049022 - RNA, 19 nt, Homo sapiens
  misc_RNA (1)...(19): siRNA sense strand
guuaagcaauguggagaug

SEQ ID NO: 2049023 - RNA, 19 nt, Homo sapiens
  misc_RNA (1)...(19): siRNA sense strand
uaagcaauguggagauguc

SEQ ID NO: 2049024 - RNA, 19 nt, Homo sapiens
  misc_RNA (1)...(19): siRNA sense strand
agagaggcccuaugaaugu

SEQ ID NO: 2049025 - RNA, 19 nt, Homo sapiens
  misc_RNA (1)...(19): siRNA sense strand
uugcuuaagucaacauaug

SEQ ID NO: 2049026 - RNA, 19 nt, Homo sapiens
  misc_RNA (1)...(19): siRNA sense strand
ucagggacauuuaagaacu

SEQ ID NO: 2049027 - RNA, 19 nt, Homo sapiens
  misc_RNA (1)...(19): siRNA sense strand
ugggaaauccuucauuaau

SEQ ID NO: 2049028 - RNA, 19 nt, Homo sapiens
  misc_RNA (1)...(19): siRNA sense strand
ggacauuugagaauucaca

SEQ ID NO: 2049029 - RNA, 19 nt, Homo sapiens
  misc_RNA (1)...(19): siRNA sense strand
cccuauaaauguaaggauu

SEQ ID NO: 2049030 - RNA, 19 nt, Homo sapiens
  misc_RNA (1)...(19): siRNA sense strand
acuagaucuucucaacuua

SEQ ID NO: 2049031 - RNA, 19 nt, Homo sapiens
  misc_RNA (1)...(19): siRNA sense strand
acaagaauuuggccacagu

SEQ ID NO: 2049032 - RNA, 19 nt, Homo sapiens
  misc_RNA (1)...(19): siRNA sense strand
agaccuugcugugcguaua

SEQ ID NO: 2049033 - RNA, 19 nt, Homo sapiens
  misc_RNA (1)...(19): siRNA sense strand
ggacauuuaagaacucaca

SEQ ID NO: 2049034 - RNA, 19 nt, Homo sapiens
  misc_RNA (1)...(19): siRNA sense strand
cuucucaacuuacugaaca

SEQ ID NO: 2049035 - RNA, 19 nt, Homo sapiens
  misc_RNA (1)...(19): siRNA sense strand
ugugggaaauccuucaguu

SEQ ID NO: 2049036 - RNA, 19 nt, Homo sapiens
  misc_RNA (1)...(19): siRNA sense strand
aaacucacacugcaaagga

SEQ ID NO: 2049037 - RNA, 19 nt, Homo sapiens
  misc_RNA (1)...(19): siRNA sense strand
ggaggcugcugcccuagua

SEQ ID NO: 2049038 - RNA, 19 nt, Homo sapiens
  misc_RNA (1)...(19): siRNA sense strand
gaaagaggagucagagguu

SEQ ID NO: 2049039 - RNA, 19 nt, Homo sapiens
  misc_RNA (1)...(19): siRNA sense strand
aaagaggagucagagguua

SEQ ID NO: 2049040 - RNA, 19 nt, Homo sapiens
  misc_RNA (1)...(19): siRNA sense strand
uuacagaggacucagauuu

SEQ ID NO: 2049041 - RNA, 19 nt, Homo sapiens
  misc_RNA (1)...(19): siRNA sense strand
gcagguccagguaguguaa

SEQ ID NO: 2049042 - RNA, 19 nt, Homo sapiens
  misc_RNA (1)...(19): siRNA sense strand
ccagcgaucugaggaguga

SEQ ID NO: 2049043 - RNA, 19 nt, Homo sapiens
  misc_RNA (1)...(19): siRNA sense strand
cggcauggcuggccuuucu

SEQ ID NO: 2049044 - RNA, 19 nt, Homo sapiens
  misc_RNA (1)...(19): siRNA sense strand
gaaacugagccuccaacuc

SEQ ID NO: 2049045 - RNA, 19 nt, Homo sapiens
  misc_RNA (1)...(19): siRNA sense strand
gagguccuaucagagaaga

SEQ ID NO: 2049046 - RNA, 19 nt, Homo sapiens
  misc_RNA (1)...(19): siRNA sense strand
cuaggacuaugcaggaauc

SEQ ID NO: 2049047 - RNA, 19 nt, Homo sapiens
  misc_RNA (1)...(19): siRNA sense strand
gaggaggcccagagaugug

SEQ ID NO: 2049048 - RNA, 19 nt, Homo sapiens
  misc_RNA (1)...(19): siRNA sense strand
guggcugcguccagaggua

SEQ ID NO: 2049049 - RNA, 19 nt, Homo sapiens
  misc_RNA (1)...(19): siRNA sense strand
guccagagguacgcuccaa

SEQ ID NO: 2049050 - RNA, 19 nt, Homo sapiens
  misc_RNA (1)...(19): siRNA sense strand
gguccuaucagagaagaug

SEQ ID NO: 2049051 - RNA, 19 nt, Homo sapiens
  misc_RNA (1)...(19): siRNA sense strand
cgagugcggccagagcuuu

SEQ ID NO: 2049052 - RNA, 19 nt, Homo sapiens
  misc_RNA (1)...(19): siRNA sense strand
agacaccuccuaggacuau

SEQ ID NO: 2049053 - RNA, 19 nt, Homo sapiens
  misc_RNA (1)...(19): siRNA sense strand
cccaagacaccuccuagga

SEQ ID NO: 2049054 - RNA, 19 nt, Homo sapiens
  misc_RNA (1)...(19): siRNA sense strand
gcagaugcuggagcuguug

SEQ ID NO: 2049055 - RNA, 19 nt, Homo sapiens
  misc_RNA (1)...(19): siRNA sense strand
uacagaggacucagauuuc

SEQ ID NO: 2049056 - RNA, 19 nt, Homo sapiens
  misc_RNA (1)...(19): siRNA sense strand
ggaggcugcugcccuagua

SEQ ID NO: 2049057 - RNA, 19 nt, Homo sapiens
  misc_RNA (1)...(19): siRNA sense strand
gaaagaggagucagagguu

SEQ ID NO: 2049058 - RNA, 19 nt, Homo sapiens
  misc_RNA (1)...(19): siRNA sense strand
aaagaggagucagagguua

SEQ ID NO: 2049059 - RNA, 19 nt, Homo sapiens
  misc_RNA (1)...(19): siRNA sense strand
uuacagaggacucagauuu

SEQ ID NO: 2049060 - RNA, 19 nt, Homo sapiens
  misc_RNA (1)...(19): siRNA sense strand
gcagguccagguaguguaa

SEQ ID NO: 2049061 - RNA, 19 nt, Homo sapiens
  misc_RNA (1)...(19): siRNA sense strand
ccagcgaucugaggaguga

SEQ ID NO: 2049062 - RNA, 19 nt, Homo sapiens
  misc_RNA (1)...(19): siRNA sense strand
cggcauggcuggccuuucu

SEQ ID NO: 2049063 - RNA, 19 nt, Homo sapiens
  misc_RNA (1)...(19): siRNA sense strand
gaaacugagccuccaacuc

SEQ ID NO: 2049064 - RNA, 19 nt, Homo sapiens
  misc_RNA (1)...(19): siRNA sense strand
gagguccuaucagagaaga

SEQ ID NO: 2049065 - RNA, 19 nt, Homo sapiens
  misc_RNA (1)...(19): siRNA sense strand
cuaggacuaugcaggaauc

SEQ ID NO: 2049066 - RNA, 19 nt, Homo sapiens
  misc_RNA (1)...(19): siRNA sense strand
gaggaggcccagagaugug

SEQ ID NO: 2049067 - RNA, 19 nt, Homo sapiens
  misc_RNA (1)...(19): siRNA sense strand
guggcugcguccagaggua

SEQ ID NO: 2049068 - RNA, 19 nt, Homo sapiens
  misc_RNA (1)...(19): siRNA sense strand
guccagagguacgcuccaa

SEQ ID NO: 2049069 - RNA, 19 nt, Homo sapiens
  misc_RNA (1)...(19): siRNA sense strand
gguccuaucagagaagaug

SEQ ID NO: 2049070 - RNA, 19 nt, Homo sapiens
  misc_RNA (1)...(19): siRNA sense strand
cgagugcggccagagcuuu

SEQ ID NO: 2049071 - RNA, 19 nt, Homo sapiens
  misc_RNA (1)...(19): siRNA sense strand
agacaccuccuaggacuau

SEQ ID NO: 2049072 - RNA, 19 nt, Homo sapiens
  misc_RNA (1)...(19): siRNA sense strand
cccaagacaccuccuagga

SEQ ID NO: 2049073 - RNA, 19 nt, Homo sapiens
  misc_RNA (1)...(19): siRNA sense strand
gcagaugcuggagcuguug

SEQ ID NO: 2049074 - RNA, 19 nt, Homo sapiens
  misc_RNA (1)...(19): siRNA sense strand
uacagaggacucagauuuc

SEQ ID NO: 2049075 - RNA, 19 nt, Homo sapiens
  misc_RNA (1)...(19): siRNA sense strand
gcagagaggugauuuccaa

SEQ ID NO: 2049076 - RNA, 19 nt, Homo sapiens
  misc_RNA (1)...(19): siRNA sense strand
ggaaauccuucauuaauca

SEQ ID NO: 2049077 - RNA, 19 nt, Homo sapiens
  misc_RNA (1)...(19): siRNA sense strand
gagcaacguucuguauuua

SEQ ID NO: 2049078 - RNA, 19 nt, Homo sapiens
  misc_RNA (1)...(19): siRNA sense strand
gagagaaaccuuauaaaug

SEQ ID NO: 2049079 - RNA, 19 nt, Homo sapiens
  misc_RNA (1)...(19): siRNA sense strand
gaacacucaugccuuaaga

SEQ ID NO: 2049080 - RNA, 19 nt, Homo sapiens
  misc_RNA (1)...(19): siRNA sense strand
gggagagccuucacuguuu

SEQ ID NO: 2049081 - RNA, 19 nt, Homo sapiens
  misc_RNA (1)...(19): siRNA sense strand
ggagagaaaccuuauaaau

SEQ ID NO: 2049082 - RNA, 19 nt, Homo sapiens
  misc_RNA (1)...(19): siRNA sense strand
gagaaacccuaugaaugua

SEQ ID NO: 2049083 - RNA, 19 nt, Homo sapiens
  misc_RNA (1)...(19): siRNA sense strand
ggaaagccuucacucagaa

SEQ ID NO: 2049084 - RNA, 19 nt, Homo sapiens
  misc_RNA (1)...(19): siRNA sense strand
gggaaagccuucacucaga

SEQ ID NO: 2049085 - RNA, 19 nt, Homo sapiens
  misc_RNA (1)...(19): siRNA sense strand
gaacauacaagaacucaca

SEQ ID NO: 2049086 - RNA, 19 nt, Homo sapiens
  misc_RNA (1)...(19): siRNA sense strand
gagagaaacccuaugaaug

SEQ ID NO: 2049087 - RNA, 19 nt, Homo sapiens
  misc_RNA (1)...(19): siRNA sense strand
gggaaauccuucauuaauc

SEQ ID NO: 2049088 - RNA, 19 nt, Homo sapiens
  misc_RNA (1)...(19): siRNA sense strand
ggagagaggcccuaugaau

SEQ ID NO: 2049089 - RNA, 19 nt, Homo sapiens
  misc_RNA (1)...(19): siRNA sense strand
gggaaagccuucaguucuu

SEQ ID NO: 2049090 - RNA, 19 nt, Homo sapiens
  misc_RNA (1)...(19): siRNA sense strand
ucugggaaauccuucauua

SEQ ID NO: 2049091 - RNA, 19 nt, Homo sapiens
  misc_RNA (1)...(19): siRNA sense strand
cugcauaccuuaauauuca

SEQ ID NO: 2049092 - RNA, 19 nt, Homo sapiens
  misc_RNA (1)...(19): siRNA sense strand
gaacccagauguuguuugc

SEQ ID NO: 2049093 - RNA, 19 nt, Homo sapiens
  misc_RNA (1)...(19): siRNA sense strand
ggagagaaacccuaugaau

SEQ ID NO: 2049094 - RNA, 19 nt, Homo sapiens
  misc_RNA (1)...(19): siRNA sense strand
uggcaaagcuuuuaaguuu

SEQ ID NO: 2049095 - RNA, 19 nt, Homo sapiens
  misc_RNA (1)...(19): siRNA sense strand
acucagaacucagaccuua

SEQ ID NO: 2049096 - RNA, 19 nt, Homo sapiens
  misc_RNA (1)...(19): siRNA sense strand
agagcaacguucuguauuu

SEQ ID NO: 2049097 - RNA, 19 nt, Homo sapiens
  misc_RNA (1)...(19): siRNA sense strand
gggauagccuucacuagau

SEQ ID NO: 2049098 - RNA, 19 nt, Homo sapiens
  misc_RNA (1)...(19): siRNA sense strand
gagagaggcccuaugaaug

SEQ ID NO: 2049099 - RNA, 19 nt, Homo sapiens
  misc_RNA (1)...(19): siRNA sense strand
gcacaggagagaaagcuuu

SEQ ID NO: 2049100 - RNA, 19 nt, Homo sapiens
  misc_RNA (1)...(19): siRNA sense strand
gagaggcccuaugaaugua

SEQ ID NO: 2049101 - RNA, 19 nt, Homo sapiens
  misc_RNA (1)...(19): siRNA sense strand
gauaucagcucuucaaacc

SEQ ID NO: 2049102 - RNA, 19 nt, Homo sapiens
  misc_RNA (1)...(19): siRNA sense strand
ucagugauguuaagcaaug

SEQ ID NO: 2049103 - RNA, 19 nt, Homo sapiens
  misc_RNA (1)...(19): siRNA sense strand
ccaaagaguuagcccuuca

SEQ ID NO: 2049104 - RNA, 19 nt, Homo sapiens
  misc_RNA (1)...(19): siRNA sense strand
ggaaagccuucaguucuuc

SEQ ID NO: 2049105 - RNA, 19 nt, Homo sapiens
  misc_RNA (1)...(19): siRNA sense strand
acgcauuccuccagucuua

SEQ ID NO: 2049106 - RNA, 19 nt, Homo sapiens
  misc_RNA (1)...(19): siRNA sense strand
gugagaagccuuaugaaug

SEQ ID NO: 2049107 - RNA, 19 nt, Homo sapiens
  misc_RNA (1)...(19): siRNA sense strand
ggucagugauguuaagcaa

SEQ ID NO: 2049108 - RNA, 19 nt, Homo sapiens
  misc_RNA (1)...(19): siRNA sense strand
gcaacguucuguauuuagu

SEQ ID NO: 2049109 - RNA, 19 nt, Homo sapiens
  misc_RNA (1)...(19): siRNA sense strand
ggagagcaacguucuguau

SEQ ID NO: 2049110 - RNA, 19 nt, Homo sapiens
  misc_RNA (1)...(19): siRNA sense strand
gaacaagaagagucuagga

SEQ ID NO: 2049111 - RNA, 19 nt, Homo sapiens
  misc_RNA (1)...(19): siRNA sense strand
agagaaacccuaugaaugu

SEQ ID NO: 2049112 - RNA, 19 nt, Homo sapiens
  misc_RNA (1)...(19): siRNA sense strand
gccagauccucucgccuua

SEQ ID NO: 2049113 - RNA, 19 nt, Homo sapiens
  misc_RNA (1)...(19): siRNA sense strand
caccaggucuugucaacuu

SEQ ID NO: 2049114 - RNA, 19 nt, Homo sapiens
  misc_RNA (1)...(19): siRNA sense strand
ggauuuagauauucugcau

SEQ ID NO: 2049115 - RNA, 19 nt, Homo sapiens
  misc_RNA (1)...(19): siRNA sense strand
gggagaggcuuuauucacu

SEQ ID NO: 2049116 - RNA, 19 nt, Homo sapiens
  misc_RNA (1)...(19): siRNA sense strand
gacaaucccuaugagugua

SEQ ID NO: 2049117 - RNA, 19 nt, Homo sapiens
  misc_RNA (1)...(19): siRNA sense strand
ccaauucguuucaguuaca

SEQ ID NO: 2049118 - RNA, 19 nt, Homo sapiens
  misc_RNA (1)...(19): siRNA sense strand
gaauuuggccacaguagga

SEQ ID NO: 2049119 - RNA, 19 nt, Homo sapiens
  misc_RNA (1)...(19): siRNA sense strand
gaauguaagauauguggaa

SEQ ID NO: 2049120 - RNA, 19 nt, Homo sapiens
  misc_RNA (1)...(19): siRNA sense strand
ugagaagccuuaugaaugc

SEQ ID NO: 2049121 - RNA, 19 nt, Homo sapiens
  misc_RNA (1)...(19): siRNA sense strand
ggaggucagugauguuaag

SEQ ID NO: 2049122 - RNA, 19 nt, Homo sapiens
  misc_RNA (1)...(19): siRNA sense strand
cacuagaucuucucaacuu

SEQ ID NO: 2049123 - RNA, 19 nt, Homo sapiens
  misc_RNA (1)...(19): siRNA sense strand
ggagagccuucacuguuuc

SEQ ID NO: 2049124 - RNA, 19 nt, Homo sapiens
  misc_RNA (1)...(19): siRNA sense strand
uuuaagaacucacaaugga

SEQ ID NO: 2049125 - RNA, 19 nt, Homo sapiens
  misc_RNA (1)...(19): siRNA sense strand
aaagaaggcaugcggauga

SEQ ID NO: 2049126 - RNA, 19 nt, Homo sapiens
  misc_RNA (1)...(19): siRNA sense strand
cuggagaacuacaagaauu

SEQ ID NO: 2049127 - RNA, 19 nt, Homo sapiens
  misc_RNA (1)...(19): siRNA sense strand
ccuccagucuuaauaauca

SEQ ID NO: 2049128 - RNA, 19 nt, Homo sapiens
  misc_RNA (1)...(19): siRNA sense strand
ccagugggauucaaaugau

SEQ ID NO: 2049129 - RNA, 19 nt, Homo sapiens
  misc_RNA (1)...(19): siRNA sense strand
ggagagaagcccuuugagu

SEQ ID NO: 2049130 - RNA, 19 nt, Homo sapiens
  misc_RNA (1)...(19): siRNA sense strand
gauguuguuugccagagaa

SEQ ID NO: 2049131 - RNA, 19 nt, Homo sapiens
  misc_RNA (1)...(19): siRNA sense strand
gaaacccuaugaauguaag

SEQ ID NO: 2049132 - RNA, 19 nt, Homo sapiens
  misc_RNA (1)...(19): siRNA sense strand
ccacguguguuaaccuuca

SEQ ID NO: 2049133 - RNA, 19 nt, Homo sapiens
  misc_RNA (1)...(19): siRNA sense strand
gaucuucucaacuuacuga

SEQ ID NO: 2049134 - RNA, 19 nt, Homo sapiens
  misc_RNA (1)...(19): siRNA sense strand
gauauucugcauaccuuaa

SEQ ID NO: 2049135 - RNA, 19 nt, Homo sapiens
  misc_RNA (1)...(19): siRNA sense strand
gagagcaacguucuguauu

SEQ ID NO: 2049136 - RNA, 19 nt, Homo sapiens
  misc_RNA (1)...(19): siRNA sense strand
gaacucacacuggagagaa

SEQ ID NO: 2049137 - RNA, 19 nt, Homo sapiens
  misc_RNA (1)...(19): siRNA sense strand
gaacucacacuggagagaa

SEQ ID NO: 2049138 - RNA, 19 nt, Homo sapiens
  misc_RNA (1)...(19): siRNA sense strand
caaacucacaggucagaaa

SEQ ID NO: 2049139 - RNA, 19 nt, Homo sapiens
  misc_RNA (1)...(19): siRNA sense strand
gaaugugggagaggcuuua

SEQ ID NO: 2049140 - RNA, 19 nt, Homo sapiens
  misc_RNA (1)...(19): siRNA sense strand
ggaaauccuucaguuacuc

SEQ ID NO: 2049141 - RNA, 19 nt, Homo sapiens
  misc_RNA (1)...(19): siRNA sense strand
gagagaagccuuuugaaug

SEQ ID NO: 2049142 - RNA, 19 nt, Homo sapiens
  misc_RNA (1)...(19): siRNA sense strand
ggauagccuucacuagauc

SEQ ID NO: 2049143 - RNA, 19 nt, Homo sapiens
  misc_RNA (1)...(19): siRNA sense strand
gaugagagacugucagcau

SEQ ID NO: 2049144 - RNA, 19 nt, Homo sapiens
  misc_RNA (1)...(19): siRNA sense strand
ggugagaagccuuaugaau

SEQ ID NO: 2049145 - RNA, 19 nt, Homo sapiens
  misc_RNA (1)...(19): siRNA sense strand
gggaaauccuucaguuacu

SEQ ID NO: 2049146 - RNA, 19 nt, Homo sapiens
  misc_RNA (1)...(19): siRNA sense strand
gugggaaauccuucaguua

SEQ ID NO: 2049147 - RNA, 19 nt, Homo sapiens
  misc_RNA (1)...(19): siRNA sense strand
cagugggauucaaaugaua

SEQ ID NO: 2049148 - RNA, 19 nt, Homo sapiens
  misc_RNA (1)...(19): siRNA sense strand
guggagagaggcccuauga

SEQ ID NO: 2049149 - RNA, 19 nt, Homo sapiens
  misc_RNA (1)...(19): siRNA sense strand
gaauguaaggaauguggaa

SEQ ID NO: 2049150 - RNA, 19 nt, Homo sapiens
  misc_RNA (1)...(19): siRNA sense strand
uagauauucugcauaccuu

SEQ ID NO: 2049151 - RNA, 19 nt, Homo sapiens
  misc_RNA (1)...(19): siRNA sense strand
ugagagacugucagcauaa

SEQ ID NO: 2049152 - RNA, 19 nt, Homo sapiens
  misc_RNA (1)...(19): siRNA sense strand
gauccucucgccuuaguga

SEQ ID NO: 2049153 - RNA, 19 nt, Homo sapiens
  misc_RNA (1)...(19): siRNA sense strand
uuuccaagcuucagaaugg

SEQ ID NO: 2049154 - RNA, 19 nt, Homo sapiens
  misc_RNA (1)...(19): siRNA sense strand
ggagaacuacaagaauuug

SEQ ID NO: 2049155 - RNA, 19 nt, Homo sapiens
  misc_RNA (1)...(19): siRNA sense strand
caacuuacucagcacagaa

SEQ ID NO: 2049156 - RNA, 19 nt, Homo sapiens
  misc_RNA (1)...(19): siRNA sense strand
gagaggugauuuccaagcu

SEQ ID NO: 2049157 - RNA, 19 nt, Homo sapiens
  misc_RNA (1)...(19): siRNA sense strand
augagagacugucagcaua

SEQ ID NO: 2049158 - RNA, 19 nt, Homo sapiens
  misc_RNA (1)...(19): siRNA sense strand
ccucaugccucagugauca

SEQ ID NO: 2049159 - RNA, 19 nt, Homo sapiens
  misc_RNA (1)...(19): siRNA sense strand
acucaugccuuaagacaca

SEQ ID NO: 2049160 - RNA, 19 nt, Homo sapiens
  misc_RNA (1)...(19): siRNA sense strand
guuaagcaauguggagaug

SEQ ID NO: 2049161 - RNA, 19 nt, Homo sapiens
  misc_RNA (1)...(19): siRNA sense strand
uaagcaauguggagauguc

SEQ ID NO: 2049162 - RNA, 19 nt, Homo sapiens
  misc_RNA (1)...(19): siRNA sense strand
agagaggcccuaugaaugu

SEQ ID NO: 2049163 - RNA, 19 nt, Homo sapiens
  misc_RNA (1)...(19): siRNA sense strand
uugcuuaagucaacauaug

SEQ ID NO: 2049164 - RNA, 19 nt, Homo sapiens
  misc_RNA (1)...(19): siRNA sense strand
ucagggacauuuaagaacu

SEQ ID NO: 2049165 - RNA, 19 nt, Homo sapiens
  misc_RNA (1)...(19): siRNA sense strand
ugggaaauccuucauuaau

SEQ ID NO: 2049166 - RNA, 19 nt, Homo sapiens
  misc_RNA (1)...(19): siRNA sense strand
ggacauuugagaauucaca

SEQ ID NO: 2049167 - RNA, 19 nt, Homo sapiens
  misc_RNA (1)...(19): siRNA sense strand
cccuauaaauguaaggauu

SEQ ID NO: 2049168 - RNA, 19 nt, Homo sapiens
  misc_RNA (1)...(19): siRNA sense strand
acuagaucuucucaacuua

SEQ ID NO: 2049169 - RNA, 19 nt, Homo sapiens
  misc_RNA (1)...(19): siRNA sense strand
acaagaauuuggccacagu

SEQ ID NO: 2049170 - RNA, 19 nt, Homo sapiens
  misc_RNA (1)...(19): siRNA sense strand
agaccuugcugugcguaua

SEQ ID NO: 2049171 - RNA, 19 nt, Homo sapiens
  misc_RNA (1)...(19): siRNA sense strand
ggacauuuaagaacucaca

SEQ ID NO: 2049172 - RNA, 19 nt, Homo sapiens
  misc_RNA (1)...(19): siRNA sense strand
cuucucaacuuacugaaca

SEQ ID NO: 2049173 - RNA, 19 nt, Homo sapiens
  misc_RNA (1)...(19): siRNA sense strand
ugugggaaauccuucaguu

SEQ ID NO: 2049174 - RNA, 19 nt, Homo sapiens
  misc_RNA (1)...(19): siRNA sense strand
aaacucacacugcaaagga

SEQ ID NO: 2049175 - RNA, 19 nt, Homo sapiens
  misc_RNA (1)...(19): siRNA sense strand
gcagagaggugauuuccaa

SEQ ID NO: 2049176 - RNA, 19 nt, Homo sapiens
  misc_RNA (1)...(19): siRNA sense strand
ggaaauccuucauuaauca

SEQ ID NO: 2049177 - RNA, 19 nt, Homo sapiens
  misc_RNA (1)...(19): siRNA sense strand
gagcaacguucuguauuua

SEQ ID NO: 2049178 - RNA, 19 nt, Homo sapiens
  misc_RNA (1)...(19): siRNA sense strand
gagagaaaccuuauaaaug

SEQ ID NO: 2049179 - RNA, 19 nt, Homo sapiens
  misc_RNA (1)...(19): siRNA sense strand
gaacacucaugccuuaaga

SEQ ID NO: 2049180 - RNA, 19 nt, Homo sapiens
  misc_RNA (1)...(19): siRNA sense strand
gggagagccuucacuguuu

SEQ ID NO: 2049181 - RNA, 19 nt, Homo sapiens
  misc_RNA (1)...(19): siRNA sense strand
ggagagaaaccuuauaaau

SEQ ID NO: 2049182 - RNA, 19 nt, Homo sapiens
  misc_RNA (1)...(19): siRNA sense strand
gagaaacccuaugaaugua

SEQ ID NO: 2049183 - RNA, 19 nt, Homo sapiens
  misc_RNA (1)...(19): siRNA sense strand
ggaaagccuucacucagaa

SEQ ID NO: 2049184 - RNA, 19 nt, Homo sapiens
  misc_RNA (1)...(19): siRNA sense strand
gggaaagccuucacucaga

SEQ ID NO: 2049185 - RNA, 19 nt, Homo sapiens
  misc_RNA (1)...(19): siRNA sense strand
gaacauacaagaacucaca

SEQ ID NO: 2049186 - RNA, 19 nt, Homo sapiens
  misc_RNA (1)...(19): siRNA sense strand
gagagaaacccuaugaaug

SEQ ID NO: 2049187 - RNA, 19 nt, Homo sapiens
  misc_RNA (1)...(19): siRNA sense strand
gggaaauccuucauuaauc

SEQ ID NO: 2049188 - RNA, 19 nt, Homo sapiens
  misc_RNA (1)...(19): siRNA sense strand
ggagagaggcccuaugaau

SEQ ID NO: 2049189 - RNA, 19 nt, Homo sapiens
  misc_RNA (1)...(19): siRNA sense strand
gggaaagccuucaguucuu

SEQ ID NO: 2049190 - RNA, 19 nt, Homo sapiens
  misc_RNA (1)...(19): siRNA sense strand
ucugggaaauccuucauua

SEQ ID NO: 2049191 - RNA, 19 nt, Homo sapiens
  misc_RNA (1)...(19): siRNA sense strand
cugcauaccuuaauauuca

SEQ ID NO: 2049192 - RNA, 19 nt, Homo sapiens
  misc_RNA (1)...(19): siRNA sense strand
gaacccagauguuguuugc

SEQ ID NO: 2049193 - RNA, 19 nt, Homo sapiens
  misc_RNA (1)...(19): siRNA sense strand
ggagagaaacccuaugaau

SEQ ID NO: 2049194 - RNA, 19 nt, Homo sapiens
  misc_RNA (1)...(19): siRNA sense strand
uggcaaagcuuuuaaguuu

SEQ ID NO: 2049195 - RNA, 19 nt, Homo sapiens
  misc_RNA (1)...(19): siRNA sense strand
acucagaacucagaccuua

SEQ ID NO: 2049196 - RNA, 19 nt, Homo sapiens
  misc_RNA (1)...(19): siRNA sense strand
agagcaacguucuguauuu

SEQ ID NO: 2049197 - RNA, 19 nt, Homo sapiens
  misc_RNA (1)...(19): siRNA sense strand
gggauagccuucacuagau

SEQ ID NO: 2049198 - RNA, 19 nt, Homo sapiens
  misc_RNA (1)...(19): siRNA sense strand
gagagaggcccuaugaaug

SEQ ID NO: 2049199 - RNA, 19 nt, Homo sapiens
  misc_RNA (1)...(19): siRNA sense strand
gcacaggagagaaagcuuu

SEQ ID NO: 2049200 - RNA, 19 nt, Homo sapiens
  misc_RNA (1)...(19): siRNA sense strand
gagaggcccuaugaaugua

SEQ ID NO: 2049201 - RNA, 19 nt, Homo sapiens
  misc_RNA (1)...(19): siRNA sense strand
gauaucagcucuucaaacc

SEQ ID NO: 2049202 - RNA, 19 nt, Homo sapiens
  misc_RNA (1)...(19): siRNA sense strand
ucagugauguuaagcaaug

SEQ ID NO: 2049203 - RNA, 19 nt, Homo sapiens
  misc_RNA (1)...(19): siRNA sense strand
ccaaagaguuagcccuuca

SEQ ID NO: 2049204 - RNA, 19 nt, Homo sapiens
  misc_RNA (1)...(19): siRNA sense strand
ggaaagccuucaguucuuc

SEQ ID NO: 2049205 - RNA, 19 nt, Homo sapiens
  misc_RNA (1)...(19): siRNA sense strand
acgcauuccuccagucuua

SEQ ID NO: 2049206 - RNA, 19 nt, Homo sapiens
  misc_RNA (1)...(19): siRNA sense strand
gugagaagccuuaugaaug

SEQ ID NO: 2049207 - RNA, 19 nt, Homo sapiens
  misc_RNA (1)...(19): siRNA sense strand
ggucagugauguuaagcaa

SEQ ID NO: 2049208 - RNA, 19 nt, Homo sapiens
  misc_RNA (1)...(19): siRNA sense strand
gcaacguucuguauuuagu

SEQ ID NO: 2049209 - RNA, 19 nt, Homo sapiens
  misc_RNA (1)...(19): siRNA sense strand
ggagagcaacguucuguau

SEQ ID NO: 2049210 - RNA, 19 nt, Homo sapiens
  misc_RNA (1)...(19): siRNA sense strand
gaacaagaagagucuagga

SEQ ID NO: 2049211 - RNA, 19 nt, Homo sapiens
  misc_RNA (1)...(19): siRNA sense strand
agagaaacccuaugaaugu

SEQ ID NO: 2049212 - RNA, 19 nt, Homo sapiens
  misc_RNA (1)...(19): siRNA sense strand
gccagauccucucgccuua

SEQ ID NO: 2049213 - RNA, 19 nt, Homo sapiens
  misc_RNA (1)...(19): siRNA sense strand
caccaggucuugucaacuu

SEQ ID NO: 2049214 - RNA, 19 nt, Homo sapiens
  misc_RNA (1)...(19): siRNA sense strand
ggauuuagauauucugcau

SEQ ID NO: 2049215 - RNA, 19 nt, Homo sapiens
  misc_RNA (1)...(19): siRNA sense strand
gggagaggcuuuauucacu

SEQ ID NO: 2049216 - RNA, 19 nt, Homo sapiens
  misc_RNA (1)...(19): siRNA sense strand
gacaaucccuaugagugua

SEQ ID NO: 2049217 - RNA, 19 nt, Homo sapiens
  misc_RNA (1)...(19): siRNA sense strand
ccaauucguuucaguuaca

SEQ ID NO: 2049218 - RNA, 19 nt, Homo sapiens
  misc_RNA (1)...(19): siRNA sense strand
gaauuuggccacaguagga

SEQ ID NO: 2049219 - RNA, 19 nt, Homo sapiens
  misc_RNA (1)...(19): siRNA sense strand
gaauguaagauauguggaa

SEQ ID NO: 2049220 - RNA, 19 nt, Homo sapiens
  misc_RNA (1)...(19): siRNA sense strand
ugagaagccuuaugaaugc

SEQ ID NO: 2049221 - RNA, 19 nt, Homo sapiens
  misc_RNA (1)...(19): siRNA sense strand
ggaggucagugauguuaag

SEQ ID NO: 2049222 - RNA, 19 nt, Homo sapiens
  misc_RNA (1)...(19): siRNA sense strand
cacuagaucuucucaacuu

SEQ ID NO: 2049223 - RNA, 19 nt, Homo sapiens
  misc_RNA (1)...(19): siRNA sense strand
ggagagccuucacuguuuc

SEQ ID NO: 2049224 - RNA, 19 nt, Homo sapiens
  misc_RNA (1)...(19): siRNA sense strand
uuuaagaacucacaaugga

SEQ ID NO: 2049225 - RNA, 19 nt, Homo sapiens
  misc_RNA (1)...(19): siRNA sense strand
aaagaaggcaugcggauga

SEQ ID NO: 2049226 - RNA, 19 nt, Homo sapiens
  misc_RNA (1)...(19): siRNA sense strand
cuggagaacuacaagaauu

SEQ ID NO: 2049227 - RNA, 19 nt, Homo sapiens
  misc_RNA (1)...(19): siRNA sense strand
ccuccagucuuaauaauca

SEQ ID NO: 2049228 - RNA, 19 nt, Homo sapiens
  misc_RNA (1)...(19): siRNA sense strand
ccagugggauucaaaugau

SEQ ID NO: 2049229 - RNA, 19 nt, Homo sapiens
  misc_RNA (1)...(19): siRNA sense strand
ggagagaagcccuuugagu

SEQ ID NO: 2049230 - RNA, 19 nt, Homo sapiens
  misc_RNA (1)...(19): siRNA sense strand
gauguuguuugccagagaa

SEQ ID NO: 2049231 - RNA, 19 nt, Homo sapiens
  misc_RNA (1)...(19): siRNA sense strand
gaaacccuaugaauguaag

SEQ ID NO: 2049232 - RNA, 19 nt, Homo sapiens
  misc_RNA (1)...(19): siRNA sense strand
ccacguguguuaaccuuca

SEQ ID NO: 2049233 - RNA, 19 nt, Homo sapiens
  misc_RNA (1)...(19): siRNA sense strand
gaucuucucaacuuacuga

SEQ ID NO: 2049234 - RNA, 19 nt, Homo sapiens
  misc_RNA (1)...(19): siRNA sense strand
gauauucugcauaccuuaa

SEQ ID NO: 2049235 - RNA, 19 nt, Homo sapiens
  misc_RNA (1)...(19): siRNA sense strand
gagagcaacguucuguauu

SEQ ID NO: 2049236 - RNA, 19 nt, Homo sapiens
  misc_RNA (1)...(19): siRNA sense strand
gaacucacacuggagagaa

SEQ ID NO: 2049237 - RNA, 19 nt, Homo sapiens
  misc_RNA (1)...(19): siRNA sense strand
gaacucacacuggagagaa

SEQ ID NO: 2049238 - RNA, 19 nt, Homo sapiens
  misc_RNA (1)...(19): siRNA sense strand
caaacucacaggucagaaa

SEQ ID NO: 2049239 - RNA, 19 nt, Homo sapiens
  misc_RNA (1)...(19): siRNA sense strand
gaaugugggagaggcuuua

SEQ ID NO: 2049240 - RNA, 19 nt, Homo sapiens
  misc_RNA (1)...(19): siRNA sense strand
ggaaauccuucaguuacuc

SEQ ID NO: 2049241 - RNA, 19 nt, Homo sapiens
  misc_RNA (1)...(19): siRNA sense strand
gagagaagccuuuugaaug

SEQ ID NO: 2049242 - RNA, 19 nt, Homo sapiens
  misc_RNA (1)...(19): siRNA sense strand
ggauagccuucacuagauc

SEQ ID NO: 2049243 - RNA, 19 nt, Homo sapiens
  misc_RNA (1)...(19): siRNA sense strand
gaugagagacugucagcau

SEQ ID NO: 2049244 - RNA, 19 nt, Homo sapiens
  misc_RNA (1)...(19): siRNA sense strand
ggugagaagccuuaugaau

SEQ ID NO: 2049245 - RNA, 19 nt, Homo sapiens
  misc_RNA (1)...(19): siRNA sense strand
gggaaauccuucaguuacu

SEQ ID NO: 2049246 - RNA, 19 nt, Homo sapiens
  misc_RNA (1)...(19): siRNA sense strand
gugggaaauccuucaguua

SEQ ID NO: 2049247 - RNA, 19 nt, Homo sapiens
  misc_RNA (1)...(19): siRNA sense strand
cagugggauucaaaugaua

SEQ ID NO: 2049248 - RNA, 19 nt, Homo sapiens
  misc_RNA (1)...(19): siRNA sense strand
guggagagaggcccuauga

SEQ ID NO: 2049249 - RNA, 19 nt, Homo sapiens
  misc_RNA (1)...(19): siRNA sense strand
gaauguaaggaauguggaa

SEQ ID NO: 2049250 - RNA, 19 nt, Homo sapiens
  misc_RNA (1)...(19): siRNA sense strand
uagauauucugcauaccuu

SEQ ID NO: 2049251 - RNA, 19 nt, Homo sapiens
  misc_RNA (1)...(19): siRNA sense strand
ugagagacugucagcauaa

SEQ ID NO: 2049252 - RNA, 19 nt, Homo sapiens
  misc_RNA (1)...(19): siRNA sense strand
gauccucucgccuuaguga

SEQ ID NO: 2049253 - RNA, 19 nt, Homo sapiens
  misc_RNA (1)...(19): siRNA sense strand
uuuccaagcuucagaaugg

SEQ ID NO: 2049254 - RNA, 19 nt, Homo sapiens
  misc_RNA (1)...(19): siRNA sense strand
ggagaacuacaagaauuug

SEQ ID NO: 2049255 - RNA, 19 nt, Homo sapiens
  misc_RNA (1)...(19): siRNA sense strand
caacuuacucagcacagaa

SEQ ID NO: 2049256 - RNA, 19 nt, Homo sapiens
  misc_RNA (1)...(19): siRNA sense strand
gagaggugauuuccaagcu

SEQ ID NO: 2049257 - RNA, 19 nt, Homo sapiens
  misc_RNA (1)...(19): siRNA sense strand
augagagacugucagcaua

SEQ ID NO: 2049258 - RNA, 19 nt, Homo sapiens
  misc_RNA (1)...(19): siRNA sense strand
ccucaugccucagugauca

SEQ ID NO: 2049259 - RNA, 19 nt, Homo sapiens
  misc_RNA (1)...(19): siRNA sense strand
acucaugccuuaagacaca

SEQ ID NO: 2049260 - RNA, 19 nt, Homo sapiens
  misc_RNA (1)...(19): siRNA sense strand
guuaagcaauguggagaug

SEQ ID NO: 2049261 - RNA, 19 nt, Homo sapiens
  misc_RNA (1)...(19): siRNA sense strand
uaagcaauguggagauguc

SEQ ID NO: 2049262 - RNA, 19 nt, Homo sapiens
  misc_RNA (1)...(19): siRNA sense strand
agagaggcccuaugaaugu

SEQ ID NO: 2049263 - RNA, 19 nt, Homo sapiens
  misc_RNA (1)...(19): siRNA sense strand
uugcuuaagucaacauaug

SEQ ID NO: 2049264 - RNA, 19 nt, Homo sapiens
  misc_RNA (1)...(19): siRNA sense strand
ucagggacauuuaagaacu

SEQ ID NO: 2049265 - RNA, 19 nt, Homo sapiens
  misc_RNA (1)...(19): siRNA sense strand
ugggaaauccuucauuaau

SEQ ID NO: 2049266 - RNA, 19 nt, Homo sapiens
  misc_RNA (1)...(19): siRNA sense strand
ggacauuugagaauucaca

SEQ ID NO: 2049267 - RNA, 19 nt, Homo sapiens
  misc_RNA (1)...(19): siRNA sense strand
cccuauaaauguaaggauu

SEQ ID NO: 2049268 - RNA, 19 nt, Homo sapiens
  misc_RNA (1)...(19): siRNA sense strand
acuagaucuucucaacuua

SEQ ID NO: 2049269 - RNA, 19 nt, Homo sapiens
  misc_RNA (1)...(19): siRNA sense strand
acaagaauuuggccacagu

SEQ ID NO: 2049270 - RNA, 19 nt, Homo sapiens
  misc_RNA (1)...(19): siRNA sense strand
agaccuugcugugcguaua

SEQ ID NO: 2049271 - RNA, 19 nt, Homo sapiens
  misc_RNA (1)...(19): siRNA sense strand
ggacauuuaagaacucaca

SEQ ID NO: 2049272 - RNA, 19 nt, Homo sapiens
  misc_RNA (1)...(19): siRNA sense strand
cuucucaacuuacugaaca

SEQ ID NO: 2049273 - RNA, 19 nt, Homo sapiens
  misc_RNA (1)...(19): siRNA sense strand
ugugggaaauccuucaguu

SEQ ID NO: 2049274 - RNA, 19 nt, Homo sapiens
  misc_RNA (1)...(19): siRNA sense strand
aaacucacacugcaaagga

SEQ ID NO: 2049275 - RNA, 19 nt, Homo sapiens
  misc_RNA (1)...(19): siRNA sense strand
gcacaggacguaugucuau

SEQ ID NO: 2049276 - RNA, 19 nt, Homo sapiens
  misc_RNA (1)...(19): siRNA sense strand
gaaggaagagggaaugguu

SEQ ID NO: 2049277 - RNA, 19 nt, Homo sapiens
  misc_RNA (1)...(19): siRNA sense strand
gaagagggaaugguuuaaa

SEQ ID NO: 2049278 - RNA, 19 nt, Homo sapiens
  misc_RNA (1)...(19): siRNA sense strand
ggaagauucaguuaacauu

SEQ ID NO: 2049279 - RNA, 19 nt, Homo sapiens
  misc_RNA (1)...(19): siRNA sense strand
gaagauucaguuaacauug

SEQ ID NO: 2049280 - RNA, 19 nt, Homo sapiens
  misc_RNA (1)...(19): siRNA sense strand
uaaaagugcugcaguauca

SEQ ID NO: 2049281 - RNA, 19 nt, Homo sapiens
  misc_RNA (1)...(19): siRNA sense strand
gggaagauuaguuggaauu

SEQ ID NO: 2049282 - RNA, 19 nt, Homo sapiens
  misc_RNA (1)...(19): siRNA sense strand
uaaaauagaagacgccaua

SEQ ID NO: 2049283 - RNA, 19 nt, Homo sapiens
  misc_RNA (1)...(19): siRNA sense strand
ggaagauuaguuggaauuu

SEQ ID NO: 2049284 - RNA, 19 nt, Homo sapiens
  misc_RNA (1)...(19): siRNA sense strand
ugaggaggcuggaguaaaa

SEQ ID NO: 2049285 - RNA, 19 nt, Homo sapiens
  misc_RNA (1)...(19): siRNA sense strand
ggaagagggaaugguuuaa

SEQ ID NO: 2049286 - RNA, 19 nt, Homo sapiens
  misc_RNA (1)...(19): siRNA sense strand
ggaagcacaggacguaugu

SEQ ID NO: 2049287 - RNA, 19 nt, Homo sapiens
  misc_RNA (1)...(19): siRNA sense strand
ggaagacugggaagauuca

SEQ ID NO: 2049288 - RNA, 19 nt, Homo sapiens
  misc_RNA (1)...(19): siRNA sense strand
guaugucuaugugcucauu

SEQ ID NO: 2049289 - RNA, 19 nt, Homo sapiens
  misc_RNA (1)...(19): siRNA sense strand
ccauaaaagugcugcagua

SEQ ID NO: 2049290 - RNA, 19 nt, Homo sapiens
  misc_RNA (1)...(19): siRNA sense strand
gggaaugguuuaaaauaga

SEQ ID NO: 2049291 - RNA, 19 nt, Homo sapiens
  misc_RNA (1)...(19): siRNA sense strand
aaagggacauugggaagau

SEQ ID NO: 2049292 - RNA, 19 nt, Homo sapiens
  misc_RNA (1)...(19): siRNA sense strand
aaauagaagacgccauaaa

SEQ ID NO: 2049293 - RNA, 19 nt, Homo sapiens
  misc_RNA (1)...(19): siRNA sense strand
gagggaaugguuuaaaaua

SEQ ID NO: 2049294 - RNA, 19 nt, Homo sapiens
  misc_RNA (1)...(19): siRNA sense strand
aggaagagggaaugguuua

SEQ ID NO: 2049295 - RNA, 19 nt, Homo sapiens
  misc_RNA (1)...(19): siRNA sense strand
gacauugggaagauuaguu

SEQ ID NO: 2049296 - RNA, 19 nt, Homo sapiens
  misc_RNA (1)...(19): siRNA sense strand
aagauucaguuaacauugg

SEQ ID NO: 2049297 - RNA, 19 nt, Homo sapiens
  misc_RNA (1)...(19): siRNA sense strand
agaggaagcacaggacgua

SEQ ID NO: 2049298 - RNA, 19 nt, Homo sapiens
  misc_RNA (1)...(19): siRNA sense strand
caguuaacauuggaaggaa

SEQ ID NO: 2049299 - RNA, 19 nt, Homo sapiens
  misc_RNA (1)...(19): siRNA sense strand
ggcagcaguucgugaaguc

SEQ ID NO: 2049300 - RNA, 19 nt, Homo sapiens
  misc_RNA (1)...(19): siRNA sense strand
cuggaagacugggaagauu

SEQ ID NO: 2049301 - RNA, 19 nt, Homo sapiens
  misc_RNA (1)...(19): siRNA sense strand
caggacguaugucuaugug

SEQ ID NO: 2049302 - RNA, 19 nt, Homo sapiens
  misc_RNA (1)...(19): siRNA sense strand
gugcaggcaucauauuuug

SEQ ID NO: 2049303 - RNA, 19 nt, Homo sapiens
  misc_RNA (1)...(19): siRNA sense strand
gagcaguagucgccaucca

SEQ ID NO: 2049304 - RNA, 19 nt, Homo sapiens
  misc_RNA (1)...(19): siRNA sense strand
gggaagauucaguuaacau

SEQ ID NO: 2049305 - RNA, 19 nt, Homo sapiens
  misc_RNA (1)...(19): siRNA sense strand
ucaguuaacauuggaagga

SEQ ID NO: 2049306 - RNA, 19 nt, Homo sapiens
  misc_RNA (1)...(19): siRNA sense strand
gccaccacauacucgguuu

SEQ ID NO: 2049307 - RNA, 19 nt, Homo sapiens
  misc_RNA (1)...(19): siRNA sense strand
aagagggaaugguuuaaaa

SEQ ID NO: 2049308 - RNA, 19 nt, Homo sapiens
  misc_RNA (1)...(19): siRNA sense strand
gugaggaggcuggaguaaa

SEQ ID NO: 2049309 - RNA, 19 nt, Homo sapiens
  misc_RNA (1)...(19): siRNA sense strand
aauagaagacgccauaaaa

SEQ ID NO: 2049310 - RNA, 19 nt, Homo sapiens
  misc_RNA (1)...(19): siRNA sense strand
uugggaagauuaguuggaa

SEQ ID NO: 2049311 - RNA, 19 nt, Homo sapiens
  misc_RNA (1)...(19): siRNA sense strand
gcuggaagacugggaagau

SEQ ID NO: 2049312 - RNA, 19 nt, Homo sapiens
  misc_RNA (1)...(19): siRNA sense strand
gagcgaggaggaggugcua

SEQ ID NO: 2049313 - RNA, 19 nt, Homo sapiens
  misc_RNA (1)...(19): siRNA sense strand
cugggaagauucaguuaac

SEQ ID NO: 2049314 - RNA, 19 nt, Homo sapiens
  misc_RNA (1)...(19): siRNA sense strand
gcaggcaucauauuuugaa

SEQ ID NO: 2049315 - RNA, 19 nt, Homo sapiens
  misc_RNA (1)...(19): siRNA sense strand
guuaacauuggaaggaaga

SEQ ID NO: 2049316 - RNA, 19 nt, Homo sapiens
  misc_RNA (1)...(19): siRNA sense strand
ggcaucauauuuugaaaca

SEQ ID NO: 2049317 - RNA, 19 nt, Homo sapiens
  misc_RNA (1)...(19): siRNA sense strand
ccuagaagcugcaaagaaa

SEQ ID NO: 2049318 - RNA, 19 nt, Homo sapiens
  misc_RNA (1)...(19): siRNA sense strand
agaaauacccagugaaaua

SEQ ID NO: 2049319 - RNA, 19 nt, Homo sapiens
  misc_RNA (1)...(19): siRNA sense strand
gcuguacucuuguucuaua

SEQ ID NO: 2049320 - RNA, 19 nt, Homo sapiens
  misc_RNA (1)...(19): siRNA sense strand
ggaggcggcuguacucuug

SEQ ID NO: 2049321 - RNA, 19 nt, Homo sapiens
  misc_RNA (1)...(19): siRNA sense strand
gcagcagccucuucucuug

SEQ ID NO: 2049322 - RNA, 19 nt, Homo sapiens
  misc_RNA (1)...(19): siRNA sense strand
ggauauggaacucacguua

SEQ ID NO: 2049323 - RNA, 19 nt, Homo sapiens
  misc_RNA (1)...(19): siRNA sense strand
caagaacccuggcuacuac

SEQ ID NO: 2049324 - RNA, 19 nt, Homo sapiens
  misc_RNA (1)...(19): siRNA sense strand
gaaauacagaucagggaaa

SEQ ID NO: 2049325 - RNA, 19 nt, Homo sapiens
  misc_RNA (1)...(19): siRNA sense strand
ccagaaauacccagugaaa

SEQ ID NO: 2049326 - RNA, 19 nt, Homo sapiens
  misc_RNA (1)...(19): siRNA sense strand
gauauggaacucacguuaa

SEQ ID NO: 2049327 - RNA, 19 nt, Homo sapiens
  misc_RNA (1)...(19): siRNA sense strand
caagaaugguguugucuac

SEQ ID NO: 2049328 - RNA, 19 nt, Homo sapiens
  misc_RNA (1)...(19): siRNA sense strand
ucagggaaauguuggaaug

SEQ ID NO: 2049329 - RNA, 19 nt, Homo sapiens
  misc_RNA (1)...(19): siRNA sense strand
gggaauuuguugcaggauu

SEQ ID NO: 2049330 - RNA, 19 nt, Homo sapiens
  misc_RNA (1)...(19): siRNA sense strand
ugacugggauggauaugga

SEQ ID NO: 2049331 - RNA, 19 nt, Homo sapiens
  misc_RNA (1)...(19): siRNA sense strand
aaggaacgcugccauagug

SEQ ID NO: 2049332 - RNA, 19 nt, Homo sapiens
  misc_RNA (1)...(19): siRNA sense strand
gaaauacccagugaaauac

SEQ ID NO: 2049333 - RNA, 19 nt, Homo sapiens
  misc_RNA (1)...(19): siRNA sense strand
gacugcaucuuauuacuca

SEQ ID NO: 2049334 - RNA, 19 nt, Homo sapiens
  misc_RNA (1)...(19): siRNA sense strand
gcaacugggccaacuacaa

SEQ ID NO: 2049335 - RNA, 19 nt, Homo sapiens
  misc_RNA (1)...(19): siRNA sense strand
uaccagaaauacccaguga

SEQ ID NO: 2049336 - RNA, 19 nt, Homo sapiens
  misc_RNA (1)...(19): siRNA sense strand
gggaaauguuggaaugaca

SEQ ID NO: 2049337 - RNA, 19 nt, Homo sapiens
  misc_RNA (1)...(19): siRNA sense strand
ggaaauguuggaaugacaa

SEQ ID NO: 2049338 - RNA, 19 nt, Homo sapiens
  misc_RNA (1)...(19): siRNA sense strand
guacucuuguucuauagau

SEQ ID NO: 2049339 - RNA, 19 nt, Homo sapiens
  misc_RNA (1)...(19): siRNA sense strand
cagcugcagucgggagaua

SEQ ID NO: 2049340 - RNA, 19 nt, Homo sapiens
  misc_RNA (1)...(19): siRNA sense strand
acaagaacccuggcuacua

SEQ ID NO: 2049341 - RNA, 19 nt, Homo sapiens
  misc_RNA (1)...(19): siRNA sense strand
aaauacagaucagggaaau

SEQ ID NO: 2049342 - RNA, 19 nt, Homo sapiens
  misc_RNA (1)...(19): siRNA sense strand
ccaaggaccugggcaucug

SEQ ID NO: 2049343 - RNA, 19 nt, Homo sapiens
  misc_RNA (1)...(19): siRNA sense strand
agacucugcuuccuguuau

SEQ ID NO: 2049344 - RNA, 19 nt, Homo sapiens
  misc_RNA (1)...(19): siRNA sense strand
cggcuguacucuuguucua

SEQ ID NO: 2049345 - RNA, 19 nt, Homo sapiens
  misc_RNA (1)...(19): siRNA sense strand
ccaagaaugguguugucua

SEQ ID NO: 2049346 - RNA, 19 nt, Homo sapiens
  misc_RNA (1)...(19): siRNA sense strand
cuacaacaccuuuggaucu

SEQ ID NO: 2049347 - RNA, 19 nt, Homo sapiens
  misc_RNA (1)...(19): siRNA sense strand
acugggacauaaucuguuu

SEQ ID NO: 2049348 - RNA, 19 nt, Homo sapiens
  misc_RNA (1)...(19): siRNA sense strand
caacugggccaacuacaac

SEQ ID NO: 2049349 - RNA, 19 nt, Homo sapiens
  misc_RNA (1)...(19): siRNA sense strand
gcuguaacacugagcauca

SEQ ID NO: 2049350 - RNA, 19 nt, Homo sapiens
  misc_RNA (1)...(19): siRNA sense strand
gaaauguuggaaugacaau

SEQ ID NO: 2049351 - RNA, 19 nt, Homo sapiens
  misc_RNA (1)...(19): siRNA sense strand
cauaaucuguuuggcaucu

SEQ ID NO: 2049352 - RNA, 19 nt, Homo sapiens
  misc_RNA (1)...(19): siRNA sense strand
caaggaacgcugccauagu

SEQ ID NO: 2049353 - RNA, 19 nt, Homo sapiens
  misc_RNA (1)...(19): siRNA sense strand
ggacuucuccgccuuugac

SEQ ID NO: 2049354 - RNA, 19 nt, Homo sapiens
  misc_RNA (1)...(19): siRNA sense strand
guucaguuccggguguuua

SEQ ID NO: 2049355 - RNA, 19 nt, Homo sapiens
  misc_RNA (1)...(19): siRNA sense strand
agccauaccuguggucuau

SEQ ID NO: 2049356 - RNA, 19 nt, Homo sapiens
  misc_RNA (1)...(19): siRNA sense strand
gaccuucugugacaugacu

SEQ ID NO: 2049357 - RNA, 19 nt, Homo sapiens
  misc_RNA (1)...(19): siRNA sense strand
gagcagccaacgcccuuug

SEQ ID NO: 2049358 - RNA, 19 nt, Homo sapiens
  misc_RNA (1)...(19): siRNA sense strand
ugacuuuggugaugcuaag

SEQ ID NO: 2049359 - RNA, 19 nt, Homo sapiens
  misc_RNA (1)...(19): siRNA sense strand
cacgagcgaugacuacaag

SEQ ID NO: 2049360 - RNA, 19 nt, Homo sapiens
  misc_RNA (1)...(19): siRNA sense strand
caacuacaacaccuuugga

SEQ ID NO: 2049361 - RNA, 19 nt, Homo sapiens
  misc_RNA (1)...(19): siRNA sense strand
gccuagaagcugcaaagaa

SEQ ID NO: 2049362 - RNA, 19 nt, Homo sapiens
  misc_RNA (1)...(19): siRNA sense strand
gaucagggaaauguuggaa

SEQ ID NO: 2049363 - RNA, 19 nt, Homo sapiens
  misc_RNA (1)...(19): siRNA sense strand
auauggaacucacguuaag

SEQ ID NO: 2049364 - RNA, 19 nt, Homo sapiens
  misc_RNA (1)...(19): siRNA sense strand
gguguuuaauaacgagaga

SEQ ID NO: 2049365 - RNA, 19 nt, Homo sapiens
  misc_RNA (1)...(19): siRNA sense strand
ggccaacuacaacaccuuu

SEQ ID NO: 2049366 - RNA, 19 nt, Homo sapiens
  misc_RNA (1)...(19): siRNA sense strand
auacagaucagggaaaugu

SEQ ID NO: 2049367 - RNA, 19 nt, Homo sapiens
  misc_RNA (1)...(19): siRNA sense strand
acacugagcaucacugcau

SEQ ID NO: 2049368 - RNA, 19 nt, Homo sapiens
  misc_RNA (1)...(19): siRNA sense strand
cgagcgaugacuacaagaa

SEQ ID NO: 2049369 - RNA, 19 nt, Homo sapiens
  misc_RNA (1)...(19): siRNA sense strand
ccagugaaauacagaucag

SEQ ID NO: 2049370 - RNA, 19 nt, Homo sapiens
  misc_RNA (1)...(19): siRNA sense strand
ccagcgugcacgagaauga

SEQ ID NO: 2049371 - RNA, 19 nt, Homo sapiens
  misc_RNA (1)...(19): siRNA sense strand
caguuccggguguuuaaua

SEQ ID NO: 2049372 - RNA, 19 nt, Homo sapiens
  misc_RNA (1)...(19): siRNA sense strand
acagaucagggaaauguug

SEQ ID NO: 2049373 - RNA, 19 nt, Homo sapiens
  misc_RNA (1)...(19): siRNA sense strand
ccacgagcgaugacuacaa

SEQ ID NO: 2049374 - RNA, 19 nt, Homo sapiens
  misc_RNA (1)...(19): siRNA sense strand
uaacggaggcggcuguacu

SEQ ID NO: 2049375 - RNA, 19 nt, Homo sapiens
  misc_RNA (1)...(19): siRNA sense strand
gauaacggaggcggcugua

SEQ ID NO: 2049376 - RNA, 19 nt, Homo sapiens
  misc_RNA (1)...(19): siRNA sense strand
cagcagccucuucucuuga

SEQ ID NO: 2049377 - RNA, 19 nt, Homo sapiens
  misc_RNA (1)...(19): siRNA sense strand
ggugauggccuguauuuuc

SEQ ID NO: 2049378 - RNA, 19 nt, Homo sapiens
  misc_RNA (1)...(19): siRNA sense strand
ucaaggaacgcugccauag

SEQ ID NO: 2049379 - RNA, 19 nt, Homo sapiens
  misc_RNA (1)...(19): siRNA sense strand
agacugggacauaaucugu

SEQ ID NO: 2049380 - RNA, 19 nt, Homo sapiens
  misc_RNA (1)...(19): siRNA sense strand
uacaacaccuuuggaucug

SEQ ID NO: 2049381 - RNA, 19 nt, Homo sapiens
  misc_RNA (1)...(19): siRNA sense strand
cugcaaagaaaucaaggaa

SEQ ID NO: 2049382 - RNA, 19 nt, Homo sapiens
  misc_RNA (1)...(19): siRNA sense strand
uagaagcugcaaagaaauc

SEQ ID NO: 2049383 - RNA, 19 nt, Homo sapiens
  misc_RNA (1)...(19): siRNA sense strand
gagcgaugacuacaagaac

SEQ ID NO: 2049384 - RNA, 19 nt, Homo sapiens
  misc_RNA (1)...(19): siRNA sense strand
ugaggacaaugaccagacu

SEQ ID NO: 2049385 - RNA, 19 nt, Homo sapiens
  misc_RNA (1)...(19): siRNA sense strand
gaagcugcaaagaaaucaa

SEQ ID NO: 2049386 - RNA, 19 nt, Homo sapiens
  misc_RNA (1)...(19): siRNA sense strand
gacucugcuuccuguuauu

SEQ ID NO: 2049387 - RNA, 19 nt, Homo sapiens
  misc_RNA (1)...(19): siRNA sense strand
aguuccggguguuuaauaa

SEQ ID NO: 2049388 - RNA, 19 nt, Homo sapiens
  misc_RNA (1)...(19): siRNA sense strand
uugcaggauucguucaguu

SEQ ID NO: 2049389 - RNA, 19 nt, Homo sapiens
  misc_RNA (1)...(19): siRNA sense strand
gucuaugacuuuggugaug

SEQ ID NO: 2049390 - RNA, 19 nt, Homo sapiens
  misc_RNA (1)...(19): siRNA sense strand
uaccuguggucuaugacuu

SEQ ID NO: 2049391 - RNA, 19 nt, Homo sapiens
  misc_RNA (1)...(19): siRNA sense strand
cagaaauacccagugaaau

SEQ ID NO: 2049392 - RNA, 19 nt, Homo sapiens
  misc_RNA (1)...(19): siRNA sense strand
gcagccaacgcccuuugug

SEQ ID NO: 2049393 - RNA, 19 nt, Homo sapiens
  misc_RNA (1)...(19): siRNA sense strand
gggcaaaccccgucagugu

SEQ ID NO: 2049394 - RNA, 19 nt, Homo sapiens
  misc_RNA (1)...(19): siRNA sense strand
ccagucagcagggcaacaa

SEQ ID NO: 2049395 - RNA, 19 nt, Homo sapiens
  misc_RNA (1)...(19): siRNA sense strand
gggcaacaaagcagacuac

SEQ ID NO: 2049396 - RNA, 19 nt, Homo sapiens
  misc_RNA (1)...(19): siRNA sense strand
gacauaaagccaucucuua

SEQ ID NO: 2049397 - RNA, 19 nt, Homo sapiens
  misc_RNA (1)...(19): siRNA sense strand
gaggagauacaagauauua

SEQ ID NO: 2049398 - RNA, 19 nt, Homo sapiens
  misc_RNA (1)...(19): siRNA sense strand
cagcagauccuuugauuug

SEQ ID NO: 2049399 - RNA, 19 nt, Homo sapiens
  misc_RNA (1)...(19): siRNA sense strand
caacuuaacagcuuacaug

SEQ ID NO: 2049400 - RNA, 19 nt, Homo sapiens
  misc_RNA (1)...(19): siRNA sense strand
gcacagaugaccuaaggaa

SEQ ID NO: 2049401 - RNA, 19 nt, Homo sapiens
  misc_RNA (1)...(19): siRNA sense strand
agccaucucuuauugguua

SEQ ID NO: 2049402 - RNA, 19 nt, Homo sapiens
  misc_RNA (1)...(19): siRNA sense strand
ggagacacauccagacagu

SEQ ID NO: 2049403 - RNA, 19 nt, Homo sapiens
  misc_RNA (1)...(19): siRNA sense strand
gggaccaaauaauagcuua

SEQ ID NO: 2049404 - RNA, 19 nt, Homo sapiens
  misc_RNA (1)...(19): siRNA sense strand
ugacaaagaggaggagaua

SEQ ID NO: 2049405 - RNA, 19 nt, Homo sapiens
  misc_RNA (1)...(19): siRNA sense strand
gaggaggagauacaagaua

SEQ ID NO: 2049406 - RNA, 19 nt, Homo sapiens
  misc_RNA (1)...(19): siRNA sense strand
ugagcaauguaguaacuuu

SEQ ID NO: 2049407 - RNA, 19 nt, Homo sapiens
  misc_RNA (1)...(19): siRNA sense strand
cuuaacagcuuacaugagu

SEQ ID NO: 2049408 - RNA, 19 nt, Homo sapiens
  misc_RNA (1)...(19): siRNA sense strand
ugauuuggcuagcugauug

SEQ ID NO: 2049409 - RNA, 19 nt, Homo sapiens
  misc_RNA (1)...(19): siRNA sense strand
ccucagauauauguagaaa

SEQ ID NO: 2049410 - RNA, 19 nt, Homo sapiens
  misc_RNA (1)...(19): siRNA sense strand
gaaggacucacagagcuuu

SEQ ID NO: 2049411 - RNA, 19 nt, Homo sapiens
  misc_RNA (1)...(19): siRNA sense strand
ccuaacaaacccaaacuuu

SEQ ID NO: 2049412 - RNA, 19 nt, Homo sapiens
  misc_RNA (1)...(19): siRNA sense strand
ggaaagagaaauacguuuu

SEQ ID NO: 2049413 - RNA, 19 nt, Homo sapiens
  misc_RNA (1)...(19): siRNA sense strand
uauguuuccugaagugauu

SEQ ID NO: 2049414 - RNA, 19 nt, Homo sapiens
  misc_RNA (1)...(19): siRNA sense strand
gacaagcugcuaaggacua

SEQ ID NO: 2049415 - RNA, 19 nt, Homo sapiens
  misc_RNA (1)...(19): siRNA sense strand
ggacucacagagcuuugua

SEQ ID NO: 2049416 - RNA, 19 nt, Homo sapiens
  misc_RNA (1)...(19): siRNA sense strand
aggaggagauacaagauau

SEQ ID NO: 2049417 - RNA, 19 nt, Homo sapiens
  misc_RNA (1)...(19): siRNA sense strand
caauuuauggcacagauga

SEQ ID NO: 2049418 - RNA, 19 nt, Homo sapiens
  misc_RNA (1)...(19): siRNA sense strand
ccaaauaauagcuuaguag

SEQ ID NO: 2049419 - RNA, 19 nt, Homo sapiens
  misc_RNA (1)...(19): siRNA sense strand
ccacuugucgccaugauau

SEQ ID NO: 2049420 - RNA, 19 nt, Homo sapiens
  misc_RNA (1)...(19): siRNA sense strand
gcacuucaugggaguaaug

SEQ ID NO: 2049421 - RNA, 19 nt, Homo sapiens
  misc_RNA (1)...(19): siRNA sense strand
gauccggauucaccauugu

SEQ ID NO: 2049422 - RNA, 19 nt, Homo sapiens
  misc_RNA (1)...(19): siRNA sense strand
guugagcccauuccaauug

SEQ ID NO: 2049423 - RNA, 19 nt, Homo sapiens
  misc_RNA (1)...(19): siRNA sense strand
gcggaaagagaaauacguu

SEQ ID NO: 2049424 - RNA, 19 nt, Homo sapiens
  misc_RNA (1)...(19): siRNA sense strand
acagaugaccuaaggaaug

SEQ ID NO: 2049425 - RNA, 19 nt, Homo sapiens
  misc_RNA (1)...(19): siRNA sense strand
caugaguucuggaccacuu

SEQ ID NO: 2049426 - RNA, 19 nt, Homo sapiens
  misc_RNA (1)...(19): siRNA sense strand
ggaggagauacaagauauu

SEQ ID NO: 2049427 - RNA, 19 nt, Homo sapiens
  misc_RNA (1)...(19): siRNA sense strand
acaaagaggaggagauaca

SEQ ID NO: 2049428 - RNA, 19 nt, Homo sapiens
  misc_RNA (1)...(19): siRNA sense strand
gcccugagcaauguaguaa

SEQ ID NO: 2049429 - RNA, 19 nt, Homo sapiens
  misc_RNA (1)...(19): siRNA sense strand
caccucagauauauguaga

SEQ ID NO: 2049430 - RNA, 19 nt, Homo sapiens
  misc_RNA (1)...(19): siRNA sense strand
caaagaggaggagauacaa

SEQ ID NO: 2049431 - RNA, 19 nt, Homo sapiens
  misc_RNA (1)...(19): siRNA sense strand
uggcacagaugaccuaagg

SEQ ID NO: 2049432 - RNA, 19 nt, Homo sapiens
  misc_RNA (1)...(19): siRNA sense strand
caaaccagauauuguugac

SEQ ID NO: 2049433 - RNA, 19 nt, Homo sapiens
  misc_RNA (1)...(19): siRNA sense strand
uaacagcuuacaugaguuc

SEQ ID NO: 2049434 - RNA, 19 nt, Homo sapiens
  misc_RNA (1)...(19): siRNA sense strand
aaagccaucucuuauuggu

SEQ ID NO: 2049435 - RNA, 19 nt, Homo sapiens
  misc_RNA (1)...(19): siRNA sense strand
accagcagauccuuugauu

SEQ ID NO: 2049436 - RNA, 19 nt, Homo sapiens
  misc_RNA (1)...(19): siRNA sense strand
cugcuaaggacuauuuaaa

SEQ ID NO: 2049437 - RNA, 19 nt, Homo sapiens
  misc_RNA (1)...(19): siRNA sense strand
cagaugaccuaaggaaugc

SEQ ID NO: 2049438 - RNA, 19 nt, Homo sapiens
  misc_RNA (1)...(19): siRNA sense strand
ggcaauuuauggcacagau

SEQ ID NO: 2049439 - RNA, 19 nt, Homo sapiens
  misc_RNA (1)...(19): siRNA sense strand
ccauccaauuguagaagaa

SEQ ID NO: 2049440 - RNA, 19 nt, Homo sapiens
  misc_RNA (1)...(19): siRNA sense strand
ccuaaggaaugcacuucau

SEQ ID NO: 2049441 - RNA, 19 nt, Homo sapiens
  misc_RNA (1)...(19): siRNA sense strand
caauuggacaagcugcuaa

SEQ ID NO: 2049442 - RNA, 19 nt, Homo sapiens
  misc_RNA (1)...(19): siRNA sense strand
aagcugcuaaggacuauuu

SEQ ID NO: 2049443 - RNA, 19 nt, Homo sapiens
  misc_RNA (1)...(19): siRNA sense strand
ccugagcaauguaguaacu

SEQ ID NO: 2049444 - RNA, 19 nt, Homo sapiens
  misc_RNA (1)...(19): siRNA sense strand
aagaggaggagauacaaga

SEQ ID NO: 2049445 - RNA, 19 nt, Homo sapiens
  misc_RNA (1)...(19): siRNA sense strand
gacagucugagggcaauuu

SEQ ID NO: 2049446 - RNA, 19 nt, Homo sapiens
  misc_RNA (1)...(19): siRNA sense strand
uuccugaagugauuguuga

SEQ ID NO: 2049447 - RNA, 19 nt, Homo sapiens
  misc_RNA (1)...(19): siRNA sense strand
gcugcuaaggacuauuuaa

SEQ ID NO: 2049448 - RNA, 19 nt, Homo sapiens
  misc_RNA (1)...(19): siRNA sense strand
agacauaaagccaucucuu

SEQ ID NO: 2049449 - RNA, 19 nt, Homo sapiens
  misc_RNA (1)...(19): siRNA sense strand
ggauucaccauuguucaga

SEQ ID NO: 2049450 - RNA, 19 nt, Homo sapiens
  misc_RNA (1)...(19): siRNA sense strand
ccagcagauccuuugauuu

SEQ ID NO: 2049451 - RNA, 19 nt, Homo sapiens
  misc_RNA (1)...(19): siRNA sense strand
ccaauuggacaagcugcua

SEQ ID NO: 2049452 - RNA, 19 nt, Homo sapiens
  misc_RNA (1)...(19): siRNA sense strand
gcaauuuauggcacagaug

SEQ ID NO: 2049453 - RNA, 19 nt, Homo sapiens
  misc_RNA (1)...(19): siRNA sense strand
caucucuuauugguuagaa

SEQ ID NO: 2049454 - RNA, 19 nt, Homo sapiens
  misc_RNA (1)...(19): siRNA sense strand
gccaugauauuagcuagac

SEQ ID NO: 2049455 - RNA, 19 nt, Homo sapiens
  misc_RNA (1)...(19): siRNA sense strand
gaccaaauaauagcuuagu

SEQ ID NO: 2049456 - RNA, 19 nt, Homo sapiens
  misc_RNA (1)...(19): siRNA sense strand
auucuuagauccggauuca

SEQ ID NO: 2049457 - RNA, 19 nt, Homo sapiens
  misc_RNA (1)...(19): siRNA sense strand
caauuguagaagaaccuua

SEQ ID NO: 2049458 - RNA, 19 nt, Homo sapiens
  misc_RNA (1)...(19): siRNA sense strand
uuacauauaaugccaacuc

SEQ ID NO: 2049459 - RNA, 19 nt, Homo sapiens
  misc_RNA (1)...(19): siRNA sense strand
acaagcugcuaaggacuau

SEQ ID NO: 2049460 - RNA, 19 nt, Homo sapiens
  misc_RNA (1)...(19): siRNA sense strand
gaccacuugucgccaugau

SEQ ID NO: 2049461 - RNA, 19 nt, Homo sapiens
  misc_RNA (1)...(19): siRNA sense strand
cuaaggaaugcacuucaug

SEQ ID NO: 2049462 - RNA, 19 nt, Homo sapiens
  misc_RNA (1)...(19): siRNA sense strand
caccauuguucagagaaga

SEQ ID NO: 2049463 - RNA, 19 nt, Homo sapiens
  misc_RNA (1)...(19): siRNA sense strand
agauccggauucaccauug

SEQ ID NO: 2049464 - RNA, 19 nt, Homo sapiens
  misc_RNA (1)...(19): siRNA sense strand
cggaaagagaaauacguuu

SEQ ID NO: 2049465 - RNA, 19 nt, Homo sapiens
  misc_RNA (1)...(19): siRNA sense strand
acagucugagggcaauuua

SEQ ID NO: 2049466 - RNA, 19 nt, Homo sapiens
  misc_RNA (1)...(19): siRNA sense strand
gccuccaccucagauauau

SEQ ID NO: 2049467 - RNA, 19 nt, Homo sapiens
  misc_RNA (1)...(19): siRNA sense strand
acuugucgccaugauauua

SEQ ID NO: 2049468 - RNA, 19 nt, Homo sapiens
  misc_RNA (1)...(19): siRNA sense strand
ucaccauuguucagagaag

SEQ ID NO: 2049469 - RNA, 19 nt, Homo sapiens
  misc_RNA (1)...(19): siRNA sense strand
ggaccaaauaauagcuuag

SEQ ID NO: 2049470 - RNA, 19 nt, Homo sapiens
  misc_RNA (1)...(19): siRNA sense strand
gaaggcaacagcacaguua

SEQ ID NO: 2049471 - RNA, 19 nt, Homo sapiens
  misc_RNA (1)...(19): siRNA sense strand
gaagucugguguccugaaa

SEQ ID NO: 2049472 - RNA, 19 nt, Homo sapiens
  misc_RNA (1)...(19): siRNA sense strand
gaccagucgucccagaaua

SEQ ID NO: 2049473 - RNA, 19 nt, Homo sapiens
  misc_RNA (1)...(19): siRNA sense strand
gggaggaggucaucagcuu

SEQ ID NO: 2049474 - RNA, 19 nt, Homo sapiens
  misc_RNA (1)...(19): siRNA sense strand
gguaccagcugaauuacug

SEQ ID NO: 2049475 - RNA, 19 nt, Homo sapiens
  misc_RNA (1)...(19): siRNA sense strand
agacggaugugccagauau

SEQ ID NO: 2049476 - RNA, 19 nt, Homo sapiens
  misc_RNA (1)...(19): siRNA sense strand
gccaguaccuccuguugug

SEQ ID NO: 2049477 - RNA, 19 nt, Homo sapiens
  misc_RNA (1)...(19): siRNA sense strand
gaguguggcuccagggaau

SEQ ID NO: 2049478 - RNA, 19 nt, Homo sapiens
  misc_RNA (1)...(19): siRNA sense strand
acagcucccugcucacuuu

SEQ ID NO: 2049479 - RNA, 19 nt, Homo sapiens
  misc_RNA (1)...(19): siRNA sense strand
gaggaggucaucagcuuug

SEQ ID NO: 2049480 - RNA, 19 nt, Homo sapiens
  misc_RNA (1)...(19): siRNA sense strand
gaggucaucagcuuugcua

SEQ ID NO: 2049481 - RNA, 19 nt, Homo sapiens
  misc_RNA (1)...(19): siRNA sense strand
ggaggaggucaucagcuuu

SEQ ID NO: 2049482 - RNA, 19 nt, Homo sapiens
  misc_RNA (1)...(19): siRNA sense strand
cagcuuugcuacugucaca

SEQ ID NO: 2049483 - RNA, 19 nt, Homo sapiens
  misc_RNA (1)...(19): siRNA sense strand
caagacggaugugccagau

SEQ ID NO: 2049484 - RNA, 19 nt, Homo sapiens
  misc_RNA (1)...(19): siRNA sense strand
caggcgagaccauuacgua

SEQ ID NO: 2049485 - RNA, 19 nt, Homo sapiens
  misc_RNA (1)...(19): siRNA sense strand
ccuuaacucugcccucuag

SEQ ID NO: 2049486 - RNA, 19 nt, Homo sapiens
  misc_RNA (1)...(19): siRNA sense strand
gcgagaccauuacguagac

SEQ ID NO: 2049487 - RNA, 19 nt, Homo sapiens
  misc_RNA (1)...(19): siRNA sense strand
gagcuagccaagcagcaaa

SEQ ID NO: 2049488 - RNA, 19 nt, Homo sapiens
  misc_RNA (1)...(19): siRNA sense strand
gucaucagcuuugcuacug

SEQ ID NO: 2049489 - RNA, 19 nt, Homo sapiens
  misc_RNA (1)...(19): siRNA sense strand
uccucuaccuggaucauaa

SEQ ID NO: 2049490 - RNA, 19 nt, Homo sapiens
  misc_RNA (1)...(19): siRNA sense strand
guugcaggcgagaccauua

SEQ ID NO: 2049491 - RNA, 19 nt, Homo sapiens
  misc_RNA (1)...(19): siRNA sense strand
ggagcuagccaagcagcaa

SEQ ID NO: 2049492 - RNA, 19 nt, Homo sapiens
  misc_RNA (1)...(19): siRNA sense strand
gggauggcgggacuggaua

SEQ ID NO: 2049493 - RNA, 19 nt, Homo sapiens
  misc_RNA (1)...(19): siRNA sense strand
gggcuggcauaccuuaacu

SEQ ID NO: 2049494 - RNA, 19 nt, Homo sapiens
  misc_RNA (1)...(19): siRNA sense strand
ggaucauaauggcaaugug

SEQ ID NO: 2049495 - RNA, 19 nt, Homo sapiens
  misc_RNA (1)...(19): siRNA sense strand
ggcgagaccauuacguaga

SEQ ID NO: 2049496 - RNA, 19 nt, Homo sapiens
  misc_RNA (1)...(19): siRNA sense strand
acucuuugcuugaggaucu

SEQ ID NO: 2049497 - RNA, 19 nt, Homo sapiens
  misc_RNA (1)...(19): siRNA sense strand
cuuaagauccgagccaaug

SEQ ID NO: 2049498 - RNA, 19 nt, Homo sapiens
  misc_RNA (1)...(19): siRNA sense strand
cgucuucagccuccucaaa

SEQ ID NO: 2049499 - RNA, 19 nt, Homo sapiens
  misc_RNA (1)...(19): siRNA sense strand
ugucacagacuccacuuca

SEQ ID NO: 2049500 - RNA, 19 nt, Homo sapiens
  misc_RNA (1)...(19): siRNA sense strand
uccugaaacugcaacuaga

SEQ ID NO: 2049501 - RNA, 19 nt, Homo sapiens
  misc_RNA (1)...(19): siRNA sense strand
guccugaaacugcaacuag

SEQ ID NO: 2049502 - RNA, 19 nt, Homo sapiens
  misc_RNA (1)...(19): siRNA sense strand
aaagagaguucaccugaua

SEQ ID NO: 2049503 - RNA, 19 nt, Homo sapiens
  misc_RNA (1)...(19): siRNA sense strand
gaagaaagcaguuccauca

SEQ ID NO: 2049504 - RNA, 19 nt, Homo sapiens
  misc_RNA (1)...(19): siRNA sense strand
gguaauggcagaugaguua

SEQ ID NO: 2049505 - RNA, 19 nt, Homo sapiens
  misc_RNA (1)...(19): siRNA sense strand
gagaacugauugcccuuua

SEQ ID NO: 2049506 - RNA, 19 nt, Homo sapiens
  misc_RNA (1)...(19): siRNA sense strand
agagguaaaucgugaguua

SEQ ID NO: 2049507 - RNA, 19 nt, Homo sapiens
  misc_RNA (1)...(19): siRNA sense strand
gcucaagaauucugaaaga

SEQ ID NO: 2049508 - RNA, 19 nt, Homo sapiens
  misc_RNA (1)...(19): siRNA sense strand
gagauggaauggaaacuga

SEQ ID NO: 2049509 - RNA, 19 nt, Homo sapiens
  misc_RNA (1)...(19): siRNA sense strand
uacaagaucuccuaaguga

SEQ ID NO: 2049510 - RNA, 19 nt, Homo sapiens
  misc_RNA (1)...(19): siRNA sense strand
gguaaagaauguauuggaa

SEQ ID NO: 2049511 - RNA, 19 nt, Homo sapiens
  misc_RNA (1)...(19): siRNA sense strand
ggaaaaugcucacugaaaa

SEQ ID NO: 2049512 - RNA, 19 nt, Homo sapiens
  misc_RNA (1)...(19): siRNA sense strand
ccaguuaccugcaaagaga

SEQ ID NO: 2049513 - RNA, 19 nt, Homo sapiens
  misc_RNA (1)...(19): siRNA sense strand
gcaguaaauucucaucuuc

SEQ ID NO: 2049514 - RNA, 19 nt, Homo sapiens
  misc_RNA (1)...(19): siRNA sense strand
ggaguuauagaaccuaaua

SEQ ID NO: 2049515 - RNA, 19 nt, Homo sapiens
  misc_RNA (1)...(19): siRNA sense strand
cgaaguaaauuccuugcaa

SEQ ID NO: 2049516 - RNA, 19 nt, Homo sapiens
  misc_RNA (1)...(19): siRNA sense strand
gagcuagcauuaacaaauc

SEQ ID NO: 2049517 - RNA, 19 nt, Homo sapiens
  misc_RNA (1)...(19): siRNA sense strand
aaugauagcuacccagaaa

SEQ ID NO: 2049518 - RNA, 19 nt, Homo sapiens
  misc_RNA (1)...(19): siRNA sense strand
gaaaccaaagucaccguua

SEQ ID NO: 2049519 - RNA, 19 nt, Homo sapiens
  misc_RNA (1)...(19): siRNA sense strand
ggaacaguuucgucaagaa

SEQ ID NO: 2049520 - RNA, 19 nt, Homo sapiens
  misc_RNA (1)...(19): siRNA sense strand
ccaaccaccuuacuugcua

SEQ ID NO: 2049521 - RNA, 19 nt, Homo sapiens
  misc_RNA (1)...(19): siRNA sense strand
gcucuuaguuuccuugcaa

SEQ ID NO: 2049522 - RNA, 19 nt, Homo sapiens
  misc_RNA (1)...(19): siRNA sense strand
gaagagagcaaacuuacuc

SEQ ID NO: 2049523 - RNA, 19 nt, Homo sapiens
  misc_RNA (1)...(19): siRNA sense strand
ggaaccaccuaaaucuguu

SEQ ID NO: 2049524 - RNA, 19 nt, Homo sapiens
  misc_RNA (1)...(19): siRNA sense strand
ucucagagguaaagaaugu

SEQ ID NO: 2049525 - RNA, 19 nt, Homo sapiens
  misc_RNA (1)...(19): siRNA sense strand
gaucuucaguaucacuuug

SEQ ID NO: 2049526 - RNA, 19 nt, Homo sapiens
  misc_RNA (1)...(19): siRNA sense strand
gaagguuacuacaggacaa

SEQ ID NO: 2049527 - RNA, 19 nt, Homo sapiens
  misc_RNA (1)...(19): siRNA sense strand
gaaguuaaagcuguaagaa

SEQ ID NO: 2049528 - RNA, 19 nt, Homo sapiens
  misc_RNA (1)...(19): siRNA sense strand
cagcagagcuagcauuaac

SEQ ID NO: 2049529 - RNA, 19 nt, Homo sapiens
  misc_RNA (1)...(19): siRNA sense strand
caacucaagagcagcuuua

SEQ ID NO: 2049530 - RNA, 19 nt, Homo sapiens
  misc_RNA (1)...(19): siRNA sense strand
gcaggguaauggcagauga

SEQ ID NO: 2049531 - RNA, 19 nt, Homo sapiens
  misc_RNA (1)...(19): siRNA sense strand
auacaaagguuaagucucu

SEQ ID NO: 2049532 - RNA, 19 nt, Homo sapiens
  misc_RNA (1)...(19): siRNA sense strand
agaaagcaguuccaucaga

SEQ ID NO: 2049533 - RNA, 19 nt, Homo sapiens
  misc_RNA (1)...(19): siRNA sense strand
ccaccuuacuugcuacaaa

SEQ ID NO: 2049534 - RNA, 19 nt, Homo sapiens
  misc_RNA (1)...(19): siRNA sense strand
guuagaacguaugucaaua

SEQ ID NO: 2049535 - RNA, 19 nt, Homo sapiens
  misc_RNA (1)...(19): siRNA sense strand
uggaggagcucuuaguuuc

SEQ ID NO: 2049536 - RNA, 19 nt, Homo sapiens
  misc_RNA (1)...(19): siRNA sense strand
uauacaagaucuccuaagu

SEQ ID NO: 2049537 - RNA, 19 nt, Homo sapiens
  misc_RNA (1)...(19): siRNA sense strand
gauagcuacccagaaauua

SEQ ID NO: 2049538 - RNA, 19 nt, Homo sapiens
  misc_RNA (1)...(19): siRNA sense strand
uggaaaagcucaagaauuc

SEQ ID NO: 2049539 - RNA, 19 nt, Homo sapiens
  misc_RNA (1)...(19): siRNA sense strand
ugugauguauggcgaagua

SEQ ID NO: 2049540 - RNA, 19 nt, Homo sapiens
  misc_RNA (1)...(19): siRNA sense strand
caaagagaguucaccugau

SEQ ID NO: 2049541 - RNA, 19 nt, Homo sapiens
  misc_RNA (1)...(19): siRNA sense strand
ucccaaagcugcuauaacu

SEQ ID NO: 2049542 - RNA, 19 nt, Homo sapiens
  misc_RNA (1)...(19): siRNA sense strand
gggaacaguuucgucaaga

SEQ ID NO: 2049543 - RNA, 19 nt, Homo sapiens
  misc_RNA (1)...(19): siRNA sense strand
gcacagcagagcuagcauu

SEQ ID NO: 2049544 - RNA, 19 nt, Homo sapiens
  misc_RNA (1)...(19): siRNA sense strand
ccaaagcugcuauaacuca

SEQ ID NO: 2049545 - RNA, 19 nt, Homo sapiens
  misc_RNA (1)...(19): siRNA sense strand
gcagagcuagcauuaacaa

SEQ ID NO: 2049546 - RNA, 19 nt, Homo sapiens
  misc_RNA (1)...(19): siRNA sense strand
gaacaguuagaacguaugu

SEQ ID NO: 2049547 - RNA, 19 nt, Homo sapiens
  misc_RNA (1)...(19): siRNA sense strand
gaacgucuagcccgugaga

SEQ ID NO: 2049548 - RNA, 19 nt, Homo sapiens
  misc_RNA (1)...(19): siRNA sense strand
gaaagcaucauagucuuca

SEQ ID NO: 2049549 - RNA, 19 nt, Homo sapiens
  misc_RNA (1)...(19): siRNA sense strand
uaagugaacgggaacaguu

SEQ ID NO: 2049550 - RNA, 19 nt, Homo sapiens
  misc_RNA (1)...(19): siRNA sense strand
gaauauuaguucccaaagc

SEQ ID NO: 2049551 - RNA, 19 nt, Homo sapiens
  misc_RNA (1)...(19): siRNA sense strand
gcuguaagaauauuaguuc

SEQ ID NO: 2049552 - RNA, 19 nt, Homo sapiens
  misc_RNA (1)...(19): siRNA sense strand
cuaaaucuguugaaguuac

SEQ ID NO: 2049553 - RNA, 19 nt, Homo sapiens
  misc_RNA (1)...(19): siRNA sense strand
ccacagcacagcagagcua

SEQ ID NO: 2049554 - RNA, 19 nt, Homo sapiens
  misc_RNA (1)...(19): siRNA sense strand
ggaaguuaaagcuguaaga

SEQ ID NO: 2049555 - RNA, 19 nt, Homo sapiens
  misc_RNA (1)...(19): siRNA sense strand
caaucuagaaagcaucaua

SEQ ID NO: 2049556 - RNA, 19 nt, Homo sapiens
  misc_RNA (1)...(19): siRNA sense strand
agaacugauugcccuuuaa

SEQ ID NO: 2049557 - RNA, 19 nt, Homo sapiens
  misc_RNA (1)...(19): siRNA sense strand
caaaucacaaguuggcaaa

SEQ ID NO: 2049558 - RNA, 19 nt, Homo sapiens
  misc_RNA (1)...(19): siRNA sense strand
aaacugaggaaccaccuaa

SEQ ID NO: 2049559 - RNA, 19 nt, Homo sapiens
  misc_RNA (1)...(19): siRNA sense strand
uagaaagcaucauagucuu

SEQ ID NO: 2049560 - RNA, 19 nt, Homo sapiens
  misc_RNA (1)...(19): siRNA sense strand
cacagcagagcuagcauua

SEQ ID NO: 2049561 - RNA, 19 nt, Homo sapiens
  misc_RNA (1)...(19): siRNA sense strand
caagaucuccuaagugaac

SEQ ID NO: 2049562 - RNA, 19 nt, Homo sapiens
  misc_RNA (1)...(19): siRNA sense strand
caaaccagcuccguguaca

SEQ ID NO: 2049563 - RNA, 19 nt, Homo sapiens
  misc_RNA (1)...(19): siRNA sense strand
ucagucagagggaguuaua

SEQ ID NO: 2049564 - RNA, 19 nt, Homo sapiens
  misc_RNA (1)...(19): siRNA sense strand
cuagaaagcaucauagucu

SEQ ID NO: 2049565 - RNA, 19 nt, Homo sapiens
  misc_RNA (1)...(19): siRNA sense strand
accuaaaucuguugaaguu

SEQ ID NO: 2049566 - RNA, 19 nt, Homo sapiens
  misc_RNA (1)...(19): siRNA sense strand
ucagagagcccaggaguuc

SEQ ID NO: 2049567 - RNA, 19 nt, Homo sapiens
  misc_RNA (1)...(19): siRNA sense strand
caaaagcaguaaauucuca

SEQ ID NO: 2049568 - RNA, 19 nt, Homo sapiens
  misc_RNA (1)...(19): siRNA sense strand
gcugcuauaacucaugaua

SEQ ID NO: 2049569 - RNA, 19 nt, Homo sapiens
  misc_RNA (1)...(19): siRNA sense strand
cccaggaguucuucagcua

SEQ ID NO: 2049570 - RNA, 19 nt, Homo sapiens
  misc_RNA (1)...(19): siRNA sense strand
ucaccaaccaccuuacuug

SEQ ID NO: 2049571 - RNA, 19 nt, Homo sapiens
  misc_RNA (1)...(19): siRNA sense strand
gauguauggcgaaguaaau

SEQ ID NO: 2049572 - RNA, 19 nt, Homo sapiens
  misc_RNA (1)...(19): siRNA sense strand
aauggaaguuaaagcugua

SEQ ID NO: 2049573 - RNA, 19 nt, Homo sapiens
  misc_RNA (1)...(19): siRNA sense strand
gauuucaucccuauacuag

SEQ ID NO: 2049574 - RNA, 19 nt, Homo sapiens
  misc_RNA (1)...(19): siRNA sense strand
ugauagcuacccagaaauu

SEQ ID NO: 2049575 - RNA, 19 nt, Homo sapiens
  misc_RNA (1)...(19): siRNA sense strand
aaaccaaagucaccguuac

SEQ ID NO: 2049576 - RNA, 19 nt, Homo sapiens
  misc_RNA (1)...(19): siRNA sense strand
ucugggacaucauaaagga

SEQ ID NO: 2049577 - RNA, 19 nt, Homo sapiens
  misc_RNA (1)...(19): siRNA sense strand
uuaagucucugggacauca

SEQ ID NO: 2049578 - RNA, 19 nt, Homo sapiens
  misc_RNA (1)...(19): siRNA sense strand
aagcugcuauaacucauga

SEQ ID NO: 2049579 - RNA, 19 nt, Homo sapiens
  misc_RNA (1)...(19): siRNA sense strand
cagaguccauggaagaaag

SEQ ID NO: 2049580 - RNA, 19 nt, Homo sapiens
  misc_RNA (1)...(19): siRNA sense strand
ggagaacugauugcccuuu

SEQ ID NO: 2049581 - RNA, 19 nt, Homo sapiens
  misc_RNA (1)...(19): siRNA sense strand
gggaagagagcaaacuuac

SEQ ID NO: 2049582 - RNA, 19 nt, Homo sapiens
  misc_RNA (1)...(19): siRNA sense strand
uagcuacccagaaauuauu

SEQ ID NO: 2049583 - RNA, 19 nt, Homo sapiens
  misc_RNA (1)...(19): siRNA sense strand
gaaacugaggaaccaccua

SEQ ID NO: 2049584 - RNA, 19 nt, Homo sapiens
  misc_RNA (1)...(19): siRNA sense strand
agaauuccuuggucaguca

SEQ ID NO: 2049585 - RNA, 19 nt, Homo sapiens
  misc_RNA (1)...(19): siRNA sense strand
ggaguccaaucuagaaagc

SEQ ID NO: 2049586 - RNA, 19 nt, Homo sapiens
  misc_RNA (1)...(19): siRNA sense strand
agcaggagauggaauggaa

SEQ ID NO: 2049587 - RNA, 19 nt, Homo sapiens
  misc_RNA (1)...(19): siRNA sense strand
gaguucaccugauaaucca

SEQ ID NO: 2049588 - RNA, 19 nt, Homo sapiens
  misc_RNA (1)...(19): siRNA sense strand
ccaccuaaaucuguugaag

SEQ ID NO: 2049589 - RNA, 19 nt, Homo sapiens
  misc_RNA (1)...(19): siRNA sense strand
caaagcugcuauaacucau

SEQ ID NO: 2049590 - RNA, 19 nt, Homo sapiens
  misc_RNA (1)...(19): siRNA sense strand
uuucaucccuauacuagau

SEQ ID NO: 2049591 - RNA, 19 nt, Homo sapiens
  misc_RNA (1)...(19): siRNA sense strand
ggacgauuucaucccuaua

SEQ ID NO: 2049592 - RNA, 19 nt, Homo sapiens
  misc_RNA (1)...(19): siRNA sense strand
ucugaacaguuagaacgua

SEQ ID NO: 2049593 - RNA, 19 nt, Homo sapiens
  misc_RNA (1)...(19): siRNA sense strand
gagguaaaucgugaguuaa

SEQ ID NO: 2049594 - RNA, 19 nt, Homo sapiens
  misc_RNA (1)...(19): siRNA sense strand
aauauuaguucccaaagcu

SEQ ID NO: 2049595 - RNA, 19 nt, Homo sapiens
  misc_RNA (1)...(19): siRNA sense strand
cuaauaaggaacucucaga

SEQ ID NO: 2049596 - RNA, 19 nt, Homo sapiens
  misc_RNA (1)...(19): siRNA sense strand
ugcuauaacucaugauauc

SEQ ID NO: 2049597 - RNA, 19 nt, Homo sapiens
  misc_RNA (1)...(19): siRNA sense strand
gggaaaaugcucacugaaa

SEQ ID NO: 2049598 - RNA, 19 nt, Homo sapiens
  misc_RNA (1)...(19): siRNA sense strand
auucucaucuucugggaaa

SEQ ID NO: 2049599 - RNA, 19 nt, Homo sapiens
  misc_RNA (1)...(19): siRNA sense strand
agagcuagcauuaacaaau

SEQ ID NO: 2049600 - RNA, 19 nt, Homo sapiens
  misc_RNA (1)...(19): siRNA sense strand
gaaccaccuaaaucuguug

SEQ ID NO: 2049601 - RNA, 19 nt, Homo sapiens
  misc_RNA (1)...(19): siRNA sense strand
cuuacuugcuacaaagaaa

SEQ ID NO: 2049602 - RNA, 19 nt, Homo sapiens
  misc_RNA (1)...(19): siRNA sense strand
gcaggaagaugaugaagua

SEQ ID NO: 2049603 - RNA, 19 nt, Homo sapiens
  misc_RNA (1)...(19): siRNA sense strand
uaacaagccuuucaagaug

SEQ ID NO: 2049604 - RNA, 19 nt, Homo sapiens
  misc_RNA (1)...(19): siRNA sense strand
gaggagauucuugcaauua

SEQ ID NO: 2049605 - RNA, 19 nt, Homo sapiens
  misc_RNA (1)...(19): siRNA sense strand
gaauaucgcccacuuugga

SEQ ID NO: 2049606 - RNA, 19 nt, Homo sapiens
  misc_RNA (1)...(19): siRNA sense strand
ggaagaugaugaaguacug

SEQ ID NO: 2049607 - RNA, 19 nt, Homo sapiens
  misc_RNA (1)...(19): siRNA sense strand
uggcauggcuuccuuguau

SEQ ID NO: 2049608 - RNA, 19 nt, Homo sapiens
  misc_RNA (1)...(19): siRNA sense strand
gcaauuaacaagccuuuca

SEQ ID NO: 2049609 - RNA, 19 nt, Homo sapiens
  misc_RNA (1)...(19): siRNA sense strand
agaaggaaauggacagaga

SEQ ID NO: 2049610 - RNA, 19 nt, Homo sapiens
  misc_RNA (1)...(19): siRNA sense strand
cagcuaagcaggaagauga

SEQ ID NO: 2049611 - RNA, 19 nt, Homo sapiens
  misc_RNA (1)...(19): siRNA sense strand
cgaggagccugaagagaga

SEQ ID NO: 2049612 - RNA, 19 nt, Homo sapiens
  misc_RNA (1)...(19): siRNA sense strand
gcucuaaccugccggugau

SEQ ID NO: 2049613 - RNA, 19 nt, Homo sapiens
  misc_RNA (1)...(19): siRNA sense strand
gcuggccucugccgacuuu

SEQ ID NO: 2049614 - RNA, 19 nt, Homo sapiens
  misc_RNA (1)...(19): siRNA sense strand
uaaauucacugaggaagag

SEQ ID NO: 2049615 - RNA, 19 nt, Homo sapiens
  misc_RNA (1)...(19): siRNA sense strand
cagaauaucgcccacuuug

SEQ ID NO: 2049616 - RNA, 19 nt, Homo sapiens
  misc_RNA (1)...(19): siRNA sense strand
gggccaacuuugcgagaaa

SEQ ID NO: 2049617 - RNA, 19 nt, Homo sapiens
  misc_RNA (1)...(19): siRNA sense strand
aggagauucuugcaauuaa

SEQ ID NO: 2049618 - RNA, 19 nt, Homo sapiens
  misc_RNA (1)...(19): siRNA sense strand
gcagaauaucgcccacuuu

SEQ ID NO: 2049619 - RNA, 19 nt, Homo sapiens
  misc_RNA (1)...(19): siRNA sense strand
ccagcuggcucaagaacau

SEQ ID NO: 2049620 - RNA, 19 nt, Homo sapiens
  misc_RNA (1)...(19): siRNA sense strand
uuaacaagccuuucaagau

SEQ ID NO: 2049621 - RNA, 19 nt, Homo sapiens
  misc_RNA (1)...(19): siRNA sense strand
uguuaacgcugcugauguu

SEQ ID NO: 2049622 - RNA, 19 nt, Homo sapiens
  misc_RNA (1)...(19): siRNA sense strand
gaucuaugauacccagaag

SEQ ID NO: 2049623 - RNA, 19 nt, Homo sapiens
  misc_RNA (1)...(19): siRNA sense strand
gugaccaaguugacucuga

SEQ ID NO: 2049624 - RNA, 19 nt, Homo sapiens
  misc_RNA (1)...(19): siRNA sense strand
gcaguggagucagaguuuc

SEQ ID NO: 2049625 - RNA, 19 nt, Homo sapiens
  misc_RNA (1)...(19): siRNA sense strand
gagcagcuaagcaggaaga

SEQ ID NO: 2049626 - RNA, 19 nt, Homo sapiens
  misc_RNA (1)...(19): siRNA sense strand
gaagaggagcagcuaagca

SEQ ID NO: 2049627 - RNA, 19 nt, Homo sapiens
  misc_RNA (1)...(19): siRNA sense strand
gagugugucuucgcuuguu

SEQ ID NO: 2049628 - RNA, 19 nt, Homo sapiens
  misc_RNA (1)...(19): siRNA sense strand
gcauggcuuccuuguauga

SEQ ID NO: 2049629 - RNA, 19 nt, Homo sapiens
  misc_RNA (1)...(19): siRNA sense strand
agaggagauucuugcaauu

SEQ ID NO: 2049630 - RNA, 19 nt, Homo sapiens
  misc_RNA (1)...(19): siRNA sense strand
agcaauaccugcagcugaa

SEQ ID NO: 2049631 - RNA, 19 nt, Homo sapiens
  misc_RNA (1)...(19): siRNA sense strand
cugcugauguugccuccua

SEQ ID NO: 2049632 - RNA, 19 nt, Homo sapiens
  misc_RNA (1)...(19): siRNA sense strand
uaugauacccagaaggaaa

SEQ ID NO: 2049633 - RNA, 19 nt, Homo sapiens
  misc_RNA (1)...(19): siRNA sense strand
ggagauucuugcaauuaac

SEQ ID NO: 2049634 - RNA, 19 nt, Homo sapiens
  misc_RNA (1)...(19): siRNA sense strand
aacaagccuuucaagauga

SEQ ID NO: 2049635 - RNA, 19 nt, Homo sapiens
  misc_RNA (1)...(19): siRNA sense strand
gcucagucccgcucuccua

SEQ ID NO: 2049636 - RNA, 19 nt, Homo sapiens
  misc_RNA (1)...(19): siRNA sense strand
ggagucuuguccaugugaa

SEQ ID NO: 2049637 - RNA, 19 nt, Homo sapiens
  misc_RNA (1)...(19): siRNA sense strand
gaucccugcacuccaagua

SEQ ID NO: 2049638 - RNA, 19 nt, Homo sapiens
  misc_RNA (1)...(19): siRNA sense strand
gggcuucugcugcuucuug

SEQ ID NO: 2049639 - RNA, 19 nt, Homo sapiens
  misc_RNA (1)...(19): siRNA sense strand
ucaccgcaguggagucaga

SEQ ID NO: 2049640 - RNA, 19 nt, Homo sapiens
  misc_RNA (1)...(19): siRNA sense strand
agaaggcgcugccccaaaa

SEQ ID NO: 2049641 - RNA, 19 nt, Homo sapiens
  misc_RNA (1)...(19): siRNA sense strand
cagaguuucuuagccaguu

SEQ ID NO: 2049642 - RNA, 19 nt, Homo sapiens
  misc_RNA (1)...(19): siRNA sense strand
cuucagcacuggagacaag

SEQ ID NO: 2049643 - RNA, 19 nt, Homo sapiens
  misc_RNA (1)...(19): siRNA sense strand
ugugaucccugcacuccaa

SEQ ID NO: 2049644 - RNA, 19 nt, Homo sapiens
  misc_RNA (1)...(19): siRNA sense strand
ccaaggucaugaggaucua

SEQ ID NO: 2049645 - RNA, 19 nt, Homo sapiens
  misc_RNA (1)...(19): siRNA sense strand
gccuguaccucagcaucua

SEQ ID NO: 2049646 - RNA, 19 nt, Homo sapiens
  misc_RNA (1)...(19): siRNA sense strand
gcacaugaaggcagaccau

SEQ ID NO: 2049647 - RNA, 19 nt, Homo sapiens
  misc_RNA (1)...(19): siRNA sense strand
gagauucuugcaauuaaca

SEQ ID NO: 2049648 - RNA, 19 nt, Homo sapiens
  misc_RNA (1)...(19): siRNA sense strand
caauuaacaagccuuucaa

SEQ ID NO: 2049649 - RNA, 19 nt, Homo sapiens
  misc_RNA (1)...(19): siRNA sense strand
ucuacgaguuccagcauca

SEQ ID NO: 2049650 - RNA, 19 nt, Homo sapiens
  misc_RNA (1)...(19): siRNA sense strand
cagccugucccuagcauug

SEQ ID NO: 2049651 - RNA, 19 nt, Homo sapiens
  misc_RNA (1)...(19): siRNA sense strand
gaggaagaggagcagcuaa

SEQ ID NO: 2049652 - RNA, 19 nt, Homo sapiens
  misc_RNA (1)...(19): siRNA sense strand
ggaucuaugauacccagaa

SEQ ID NO: 2049653 - RNA, 19 nt, Homo sapiens
  misc_RNA (1)...(19): siRNA sense strand
cuuagccaguucaacauga

SEQ ID NO: 2049654 - RNA, 19 nt, Homo sapiens
  misc_RNA (1)...(19): siRNA sense strand
cuaagcaggaagaugauga

SEQ ID NO: 2049655 - RNA, 19 nt, Homo sapiens
  misc_RNA (1)...(19): siRNA sense strand
gcaagaguaaagaggagau

SEQ ID NO: 2049656 - RNA, 19 nt, Homo sapiens
  misc_RNA (1)...(19): siRNA sense strand
uaagcaggaagaugaugaa

SEQ ID NO: 2049657 - RNA, 19 nt, Homo sapiens
  misc_RNA (1)...(19): siRNA sense strand
gcacuccaaguagcacauu

SEQ ID NO: 2049658 - RNA, 19 nt, Homo sapiens
  misc_RNA (1)...(19): siRNA sense strand
ucuaugauacccagaagga

SEQ ID NO: 2049659 - RNA, 19 nt, Homo sapiens
  misc_RNA (1)...(19): siRNA sense strand
gaacguggugguggucauc

SEQ ID NO: 2049660 - RNA, 19 nt, Homo sapiens
  misc_RNA (1)...(19): siRNA sense strand
uuaaauucacugaggaaga

SEQ ID NO: 2049661 - RNA, 19 nt, Homo sapiens
  misc_RNA (1)...(19): siRNA sense strand
ugucaacaacaaugaauuc

SEQ ID NO: 2049662 - RNA, 19 nt, Homo sapiens
  misc_RNA (1)...(19): siRNA sense strand
ggcauggcuuccuuguaug

SEQ ID NO: 2049663 - RNA, 19 nt, Homo sapiens
  misc_RNA (1)...(19): siRNA sense strand
ggccaacuuugcgagaaau

SEQ ID NO: 2049664 - RNA, 19 nt, Homo sapiens
  misc_RNA (1)...(19): siRNA sense strand
gcugagggaggaguacauu

SEQ ID NO: 2049665 - RNA, 19 nt, Homo sapiens
  misc_RNA (1)...(19): siRNA sense strand
caagaguaaagaggagauu

SEQ ID NO: 2049666 - RNA, 19 nt, Homo sapiens
  misc_RNA (1)...(19): siRNA sense strand
gggagucuuguccauguga

SEQ ID NO: 2049667 - RNA, 19 nt, Homo sapiens
  misc_RNA (1)...(19): siRNA sense strand
gccugucccuagcauuguu

SEQ ID NO: 2049668 - RNA, 19 nt, Homo sapiens
  misc_RNA (1)...(19): siRNA sense strand
ggagucagaguuucuuagc

SEQ ID NO: 2049669 - RNA, 19 nt, Homo sapiens
  misc_RNA (1)...(19): siRNA sense strand
cgcaguggagucagaguuu

SEQ ID NO: 2049670 - RNA, 19 nt, Homo sapiens
  misc_RNA (1)...(19): siRNA sense strand
ugaggaagaggagcagcua

SEQ ID NO: 2049671 - RNA, 19 nt, Homo sapiens
  misc_RNA (1)...(19): siRNA sense strand
aagcgcaguuccaggagau

SEQ ID NO: 2049672 - RNA, 19 nt, Homo sapiens
  misc_RNA (1)...(19): siRNA sense strand
guggagucagaguuucuua

SEQ ID NO: 2049673 - RNA, 19 nt, Homo sapiens
  misc_RNA (1)...(19): siRNA sense strand
ccaugcggcugcacagacu

SEQ ID NO: 2049674 - RNA, 19 nt, Homo sapiens
  misc_RNA (1)...(19): siRNA sense strand
ggugucaacaacaaugaau

SEQ ID NO: 2049675 - RNA, 19 nt, Homo sapiens
  misc_RNA (1)...(19): siRNA sense strand
gcaggaagaugaugaagua

SEQ ID NO: 2049676 - RNA, 19 nt, Homo sapiens
  misc_RNA (1)...(19): siRNA sense strand
uaacaagccuuucaagaug

SEQ ID NO: 2049677 - RNA, 19 nt, Homo sapiens
  misc_RNA (1)...(19): siRNA sense strand
gaggagauucuugcaauua

SEQ ID NO: 2049678 - RNA, 19 nt, Homo sapiens
  misc_RNA (1)...(19): siRNA sense strand
gaauaucgcccacuuugga

SEQ ID NO: 2049679 - RNA, 19 nt, Homo sapiens
  misc_RNA (1)...(19): siRNA sense strand
ggaagaugaugaaguacug

SEQ ID NO: 2049680 - RNA, 19 nt, Homo sapiens
  misc_RNA (1)...(19): siRNA sense strand
uggcauggcuuccuuguau

SEQ ID NO: 2049681 - RNA, 19 nt, Homo sapiens
  misc_RNA (1)...(19): siRNA sense strand
gcaauuaacaagccuuuca

SEQ ID NO: 2049682 - RNA, 19 nt, Homo sapiens
  misc_RNA (1)...(19): siRNA sense strand
agaaggaaauggacagaga

SEQ ID NO: 2049683 - RNA, 19 nt, Homo sapiens
  misc_RNA (1)...(19): siRNA sense strand
cagcuaagcaggaagauga

SEQ ID NO: 2049684 - RNA, 19 nt, Homo sapiens
  misc_RNA (1)...(19): siRNA sense strand
cgaggagccugaagagaga

SEQ ID NO: 2049685 - RNA, 19 nt, Homo sapiens
  misc_RNA (1)...(19): siRNA sense strand
gcucuaaccugccggugau

SEQ ID NO: 2049686 - RNA, 19 nt, Homo sapiens
  misc_RNA (1)...(19): siRNA sense strand
gcuggccucugccgacuuu

SEQ ID NO: 2049687 - RNA, 19 nt, Homo sapiens
  misc_RNA (1)...(19): siRNA sense strand
uaaauucacugaggaagag

SEQ ID NO: 2049688 - RNA, 19 nt, Homo sapiens
  misc_RNA (1)...(19): siRNA sense strand
cagaauaucgcccacuuug

SEQ ID NO: 2049689 - RNA, 19 nt, Homo sapiens
  misc_RNA (1)...(19): siRNA sense strand
gggccaacuuugcgagaaa

SEQ ID NO: 2049690 - RNA, 19 nt, Homo sapiens
  misc_RNA (1)...(19): siRNA sense strand
aggagauucuugcaauuaa

SEQ ID NO: 2049691 - RNA, 19 nt, Homo sapiens
  misc_RNA (1)...(19): siRNA sense strand
gcagaauaucgcccacuuu

SEQ ID NO: 2049692 - RNA, 19 nt, Homo sapiens
  misc_RNA (1)...(19): siRNA sense strand
ccagcuggcucaagaacau

SEQ ID NO: 2049693 - RNA, 19 nt, Homo sapiens
  misc_RNA (1)...(19): siRNA sense strand
uuaacaagccuuucaagau

SEQ ID NO: 2049694 - RNA, 19 nt, Homo sapiens
  misc_RNA (1)...(19): siRNA sense strand
uguuaacgcugcugauguu

SEQ ID NO: 2049695 - RNA, 19 nt, Homo sapiens
  misc_RNA (1)...(19): siRNA sense strand
gaucuaugauacccagaag

SEQ ID NO: 2049696 - RNA, 19 nt, Homo sapiens
  misc_RNA (1)...(19): siRNA sense strand
gugaccaaguugacucuga

SEQ ID NO: 2049697 - RNA, 19 nt, Homo sapiens
  misc_RNA (1)...(19): siRNA sense strand
gcaguggagucagaguuuc

SEQ ID NO: 2049698 - RNA, 19 nt, Homo sapiens
  misc_RNA (1)...(19): siRNA sense strand
gagcagcuaagcaggaaga

SEQ ID NO: 2049699 - RNA, 19 nt, Homo sapiens
  misc_RNA (1)...(19): siRNA sense strand
gaagaggagcagcuaagca

SEQ ID NO: 2049700 - RNA, 19 nt, Homo sapiens
  misc_RNA (1)...(19): siRNA sense strand
gagugugucuucgcuuguu

SEQ ID NO: 2049701 - RNA, 19 nt, Homo sapiens
  misc_RNA (1)...(19): siRNA sense strand
gcauggcuuccuuguauga

SEQ ID NO: 2049702 - RNA, 19 nt, Homo sapiens
  misc_RNA (1)...(19): siRNA sense strand
agaggagauucuugcaauu

SEQ ID NO: 2049703 - RNA, 19 nt, Homo sapiens
  misc_RNA (1)...(19): siRNA sense strand
agcaauaccugcagcugaa

SEQ ID NO: 2049704 - RNA, 19 nt, Homo sapiens
  misc_RNA (1)...(19): siRNA sense strand
cugcugauguugccuccua

SEQ ID NO: 2049705 - RNA, 19 nt, Homo sapiens
  misc_RNA (1)...(19): siRNA sense strand
uaugauacccagaaggaaa

SEQ ID NO: 2049706 - RNA, 19 nt, Homo sapiens
  misc_RNA (1)...(19): siRNA sense strand
ggagauucuugcaauuaac

SEQ ID NO: 2049707 - RNA, 19 nt, Homo sapiens
  misc_RNA (1)...(19): siRNA sense strand
aacaagccuuucaagauga

SEQ ID NO: 2049708 - RNA, 19 nt, Homo sapiens
  misc_RNA (1)...(19): siRNA sense strand
gcucagucccgcucuccua

SEQ ID NO: 2049709 - RNA, 19 nt, Homo sapiens
  misc_RNA (1)...(19): siRNA sense strand
ggagucuuguccaugugaa

SEQ ID NO: 2049710 - RNA, 19 nt, Homo sapiens
  misc_RNA (1)...(19): siRNA sense strand
gaucccugcacuccaagua

SEQ ID NO: 2049711 - RNA, 19 nt, Homo sapiens
  misc_RNA (1)...(19): siRNA sense strand
gggcuucugcugcuucuug

SEQ ID NO: 2049712 - RNA, 19 nt, Homo sapiens
  misc_RNA (1)...(19): siRNA sense strand
ucaccgcaguggagucaga

SEQ ID NO: 2049713 - RNA, 19 nt, Homo sapiens
  misc_RNA (1)...(19): siRNA sense strand
agaaggcgcugccccaaaa

SEQ ID NO: 2049714 - RNA, 19 nt, Homo sapiens
  misc_RNA (1)...(19): siRNA sense strand
cagaguuucuuagccaguu

SEQ ID NO: 2049715 - RNA, 19 nt, Homo sapiens
  misc_RNA (1)...(19): siRNA sense strand
cuucagcacuggagacaag

SEQ ID NO: 2049716 - RNA, 19 nt, Homo sapiens
  misc_RNA (1)...(19): siRNA sense strand
ugugaucccugcacuccaa

SEQ ID NO: 2049717 - RNA, 19 nt, Homo sapiens
  misc_RNA (1)...(19): siRNA sense strand
ccaaggucaugaggaucua

SEQ ID NO: 2049718 - RNA, 19 nt, Homo sapiens
  misc_RNA (1)...(19): siRNA sense strand
gccuguaccucagcaucua

SEQ ID NO: 2049719 - RNA, 19 nt, Homo sapiens
  misc_RNA (1)...(19): siRNA sense strand
gcacaugaaggcagaccau

SEQ ID NO: 2049720 - RNA, 19 nt, Homo sapiens
  misc_RNA (1)...(19): siRNA sense strand
gagauucuugcaauuaaca

SEQ ID NO: 2049721 - RNA, 19 nt, Homo sapiens
  misc_RNA (1)...(19): siRNA sense strand
caauuaacaagccuuucaa

SEQ ID NO: 2049722 - RNA, 19 nt, Homo sapiens
  misc_RNA (1)...(19): siRNA sense strand
ucuacgaguuccagcauca

SEQ ID NO: 2049723 - RNA, 19 nt, Homo sapiens
  misc_RNA (1)...(19): siRNA sense strand
cagccugucccuagcauug

SEQ ID NO: 2049724 - RNA, 19 nt, Homo sapiens
  misc_RNA (1)...(19): siRNA sense strand
gaggaagaggagcagcuaa

SEQ ID NO: 2049725 - RNA, 19 nt, Homo sapiens
  misc_RNA (1)...(19): siRNA sense strand
ggaucuaugauacccagaa

SEQ ID NO: 2049726 - RNA, 19 nt, Homo sapiens
  misc_RNA (1)...(19): siRNA sense strand
cuuagccaguucaacauga

SEQ ID NO: 2049727 - RNA, 19 nt, Homo sapiens
  misc_RNA (1)...(19): siRNA sense strand
cuaagcaggaagaugauga

SEQ ID NO: 2049728 - RNA, 19 nt, Homo sapiens
  misc_RNA (1)...(19): siRNA sense strand
gcaagaguaaagaggagau

SEQ ID NO: 2049729 - RNA, 19 nt, Homo sapiens
  misc_RNA (1)...(19): siRNA sense strand
uaagcaggaagaugaugaa

SEQ ID NO: 2049730 - RNA, 19 nt, Homo sapiens
  misc_RNA (1)...(19): siRNA sense strand
gcacuccaaguagcacauu

SEQ ID NO: 2049731 - RNA, 19 nt, Homo sapiens
  misc_RNA (1)...(19): siRNA sense strand
ucuaugauacccagaagga

SEQ ID NO: 2049732 - RNA, 19 nt, Homo sapiens
  misc_RNA (1)...(19): siRNA sense strand
gaacguggugguggucauc

SEQ ID NO: 2049733 - RNA, 19 nt, Homo sapiens
  misc_RNA (1)...(19): siRNA sense strand
uuaaauucacugaggaaga

SEQ ID NO: 2049734 - RNA, 19 nt, Homo sapiens
  misc_RNA (1)...(19): siRNA sense strand
ugucaacaacaaugaauuc

SEQ ID NO: 2049735 - RNA, 19 nt, Homo sapiens
  misc_RNA (1)...(19): siRNA sense strand
ggcauggcuuccuuguaug

SEQ ID NO: 2049736 - RNA, 19 nt, Homo sapiens
  misc_RNA (1)...(19): siRNA sense strand
ggccaacuuugcgagaaau

SEQ ID NO: 2049737 - RNA, 19 nt, Homo sapiens
  misc_RNA (1)...(19): siRNA sense strand
gcugagggaggaguacauu

SEQ ID NO: 2049738 - RNA, 19 nt, Homo sapiens
  misc_RNA (1)...(19): siRNA sense strand
caagaguaaagaggagauu

SEQ ID NO: 2049739 - RNA, 19 nt, Homo sapiens
  misc_RNA (1)...(19): siRNA sense strand
gggagucuuguccauguga

SEQ ID NO: 2049740 - RNA, 19 nt, Homo sapiens
  misc_RNA (1)...(19): siRNA sense strand
gccugucccuagcauuguu

SEQ ID NO: 2049741 - RNA, 19 nt, Homo sapiens
  misc_RNA (1)...(19): siRNA sense strand
ggagucagaguuucuuagc

SEQ ID NO: 2049742 - RNA, 19 nt, Homo sapiens
  misc_RNA (1)...(19): siRNA sense strand
cgcaguggagucagaguuu

SEQ ID NO: 2049743 - RNA, 19 nt, Homo sapiens
  misc_RNA (1)...(19): siRNA sense strand
ugaggaagaggagcagcua

SEQ ID NO: 2049744 - RNA, 19 nt, Homo sapiens
  misc_RNA (1)...(19): siRNA sense strand
aagcgcaguuccaggagau

SEQ ID NO: 2049745 - RNA, 19 nt, Homo sapiens
  misc_RNA (1)...(19): siRNA sense strand
guggagucagaguuucuua

SEQ ID NO: 2049746 - RNA, 19 nt, Homo sapiens
  misc_RNA (1)...(19): siRNA sense strand
ccaugcggcugcacagacu

SEQ ID NO: 2049747 - RNA, 19 nt, Homo sapiens
  misc_RNA (1)...(19): siRNA sense strand
ggugucaacaacaaugaau

SEQ ID NO: 2049748 - RNA, 19 nt, Homo sapiens
  misc_RNA (1)...(19): siRNA sense strand
gcaggaagaugaugaagua

SEQ ID NO: 2049749 - RNA, 19 nt, Homo sapiens
  misc_RNA (1)...(19): siRNA sense strand
uaacaagccuuucaagaug

SEQ ID NO: 2049750 - RNA, 19 nt, Homo sapiens
  misc_RNA (1)...(19): siRNA sense strand
gaggagauucuugcaauua

SEQ ID NO: 2049751 - RNA, 19 nt, Homo sapiens
  misc_RNA (1)...(19): siRNA sense strand
gaauaucgcccacuuugga

SEQ ID NO: 2049752 - RNA, 19 nt, Homo sapiens
  misc_RNA (1)...(19): siRNA sense strand
ggaagaugaugaaguacug

SEQ ID NO: 2049753 - RNA, 19 nt, Homo sapiens
  misc_RNA (1)...(19): siRNA sense strand
uggcauggcuuccuuguau

SEQ ID NO: 2049754 - RNA, 19 nt, Homo sapiens
  misc_RNA (1)...(19): siRNA sense strand
gcaauuaacaagccuuuca

SEQ ID NO: 2049755 - RNA, 19 nt, Homo sapiens
  misc_RNA (1)...(19): siRNA sense strand
agaaggaaauggacagaga

SEQ ID NO: 2049756 - RNA, 19 nt, Homo sapiens
  misc_RNA (1)...(19): siRNA sense strand
cagcuaagcaggaagauga

SEQ ID NO: 2049757 - RNA, 19 nt, Homo sapiens
  misc_RNA (1)...(19): siRNA sense strand
cgaggagccugaagagaga

SEQ ID NO: 2049758 - RNA, 19 nt, Homo sapiens
  misc_RNA (1)...(19): siRNA sense strand
gcucuaaccugccggugau

SEQ ID NO: 2049759 - RNA, 19 nt, Homo sapiens
  misc_RNA (1)...(19): siRNA sense strand
gcuggccucugccgacuuu

SEQ ID NO: 2049760 - RNA, 19 nt, Homo sapiens
  misc_RNA (1)...(19): siRNA sense strand
uaaauucacugaggaagag

SEQ ID NO: 2049761 - RNA, 19 nt, Homo sapiens
  misc_RNA (1)...(19): siRNA sense strand
cagaauaucgcccacuuug

SEQ ID NO: 2049762 - RNA, 19 nt, Homo sapiens
  misc_RNA (1)...(19): siRNA sense strand
gggccaacuuugcgagaaa

SEQ ID NO: 2049763 - RNA, 19 nt, Homo sapiens
  misc_RNA (1)...(19): siRNA sense strand
aggagauucuugcaauuaa

SEQ ID NO: 2049764 - RNA, 19 nt, Homo sapiens
  misc_RNA (1)...(19): siRNA sense strand
gcagaauaucgcccacuuu

SEQ ID NO: 2049765 - RNA, 19 nt, Homo sapiens
  misc_RNA (1)...(19): siRNA sense strand
ccagcuggcucaagaacau

SEQ ID NO: 2049766 - RNA, 19 nt, Homo sapiens
  misc_RNA (1)...(19): siRNA sense strand
uuaacaagccuuucaagau

SEQ ID NO: 2049767 - RNA, 19 nt, Homo sapiens
  misc_RNA (1)...(19): siRNA sense strand
uguuaacgcugcugauguu

SEQ ID NO: 2049768 - RNA, 19 nt, Homo sapiens
  misc_RNA (1)...(19): siRNA sense strand
gaucuaugauacccagaag

SEQ ID NO: 2049769 - RNA, 19 nt, Homo sapiens
  misc_RNA (1)...(19): siRNA sense strand
gugaccaaguugacucuga

SEQ ID NO: 2049770 - RNA, 19 nt, Homo sapiens
  misc_RNA (1)...(19): siRNA sense strand
gcaguggagucagaguuuc

SEQ ID NO: 2049771 - RNA, 19 nt, Homo sapiens
  misc_RNA (1)...(19): siRNA sense strand
gagcagcuaagcaggaaga

SEQ ID NO: 2049772 - RNA, 19 nt, Homo sapiens
  misc_RNA (1)...(19): siRNA sense strand
gaagaggagcagcuaagca

SEQ ID NO: 2049773 - RNA, 19 nt, Homo sapiens
  misc_RNA (1)...(19): siRNA sense strand
gagugugucuucgcuuguu

SEQ ID NO: 2049774 - RNA, 19 nt, Homo sapiens
  misc_RNA (1)...(19): siRNA sense strand
gcauggcuuccuuguauga

SEQ ID NO: 2049775 - RNA, 19 nt, Homo sapiens
  misc_RNA (1)...(19): siRNA sense strand
agaggagauucuugcaauu

SEQ ID NO: 2049776 - RNA, 19 nt, Homo sapiens
  misc_RNA (1)...(19): siRNA sense strand
agcaauaccugcagcugaa

SEQ ID NO: 2049777 - RNA, 19 nt, Homo sapiens
  misc_RNA (1)...(19): siRNA sense strand
cugcugauguugccuccua

SEQ ID NO: 2049778 - RNA, 19 nt, Homo sapiens
  misc_RNA (1)...(19): siRNA sense strand
uaugauacccagaaggaaa

SEQ ID NO: 2049779 - RNA, 19 nt, Homo sapiens
  misc_RNA (1)...(19): siRNA sense strand
ggagauucuugcaauuaac

SEQ ID NO: 2049780 - RNA, 19 nt, Homo sapiens
  misc_RNA (1)...(19): siRNA sense strand
aacaagccuuucaagauga

SEQ ID NO: 2049781 - RNA, 19 nt, Homo sapiens
  misc_RNA (1)...(19): siRNA sense strand
gcucagucccgcucuccua

SEQ ID NO: 2049782 - RNA, 19 nt, Homo sapiens
  misc_RNA (1)...(19): siRNA sense strand
ggagucuuguccaugugaa

SEQ ID NO: 2049783 - RNA, 19 nt, Homo sapiens
  misc_RNA (1)...(19): siRNA sense strand
gaucccugcacuccaagua

SEQ ID NO: 2049784 - RNA, 19 nt, Homo sapiens
  misc_RNA (1)...(19): siRNA sense strand
gggcuucugcugcuucuug

SEQ ID NO: 2049785 - RNA, 19 nt, Homo sapiens
  misc_RNA (1)...(19): siRNA sense strand
ucaccgcaguggagucaga

SEQ ID NO: 2049786 - RNA, 19 nt, Homo sapiens
  misc_RNA (1)...(19): siRNA sense strand
agaaggcgcugccccaaaa

SEQ ID NO: 2049787 - RNA, 19 nt, Homo sapiens
  misc_RNA (1)...(19): siRNA sense strand
cagaguuucuuagccaguu

SEQ ID NO: 2049788 - RNA, 19 nt, Homo sapiens
  misc_RNA (1)...(19): siRNA sense strand
cuucagcacuggagacaag

SEQ ID NO: 2049789 - RNA, 19 nt, Homo sapiens
  misc_RNA (1)...(19): siRNA sense strand
ugugaucccugcacuccaa

SEQ ID NO: 2049790 - RNA, 19 nt, Homo sapiens
  misc_RNA (1)...(19): siRNA sense strand
ccaaggucaugaggaucua

SEQ ID NO: 2049791 - RNA, 19 nt, Homo sapiens
  misc_RNA (1)...(19): siRNA sense strand
gccuguaccucagcaucua

SEQ ID NO: 2049792 - RNA, 19 nt, Homo sapiens
  misc_RNA (1)...(19): siRNA sense strand
gcacaugaaggcagaccau

SEQ ID NO: 2049793 - RNA, 19 nt, Homo sapiens
  misc_RNA (1)...(19): siRNA sense strand
gagauucuugcaauuaaca

SEQ ID NO: 2049794 - RNA, 19 nt, Homo sapiens
  misc_RNA (1)...(19): siRNA sense strand
caauuaacaagccuuucaa

SEQ ID NO: 2049795 - RNA, 19 nt, Homo sapiens
  misc_RNA (1)...(19): siRNA sense strand
ucuacgaguuccagcauca

SEQ ID NO: 2049796 - RNA, 19 nt, Homo sapiens
  misc_RNA (1)...(19): siRNA sense strand
cagccugucccuagcauug

SEQ ID NO: 2049797 - RNA, 19 nt, Homo sapiens
  misc_RNA (1)...(19): siRNA sense strand
gaggaagaggagcagcuaa

SEQ ID NO: 2049798 - RNA, 19 nt, Homo sapiens
  misc_RNA (1)...(19): siRNA sense strand
ggaucuaugauacccagaa

SEQ ID NO: 2049799 - RNA, 19 nt, Homo sapiens
  misc_RNA (1)...(19): siRNA sense strand
cuuagccaguucaacauga

SEQ ID NO: 2049800 - RNA, 19 nt, Homo sapiens
  misc_RNA (1)...(19): siRNA sense strand
cuaagcaggaagaugauga

SEQ ID NO: 2049801 - RNA, 19 nt, Homo sapiens
  misc_RNA (1)...(19): siRNA sense strand
gcaagaguaaagaggagau

SEQ ID NO: 2049802 - RNA, 19 nt, Homo sapiens
  misc_RNA (1)...(19): siRNA sense strand
uaagcaggaagaugaugaa

SEQ ID NO: 2049803 - RNA, 19 nt, Homo sapiens
  misc_RNA (1)...(19): siRNA sense strand
gcacuccaaguagcacauu

SEQ ID NO: 2049804 - RNA, 19 nt, Homo sapiens
  misc_RNA (1)...(19): siRNA sense strand
ucuaugauacccagaagga

SEQ ID NO: 2049805 - RNA, 19 nt, Homo sapiens
  misc_RNA (1)...(19): siRNA sense strand
gaacguggugguggucauc

SEQ ID NO: 2049806 - RNA, 19 nt, Homo sapiens
  misc_RNA (1)...(19): siRNA sense strand
uuaaauucacugaggaaga

SEQ ID NO: 2049807 - RNA, 19 nt, Homo sapiens
  misc_RNA (1)...(19): siRNA sense strand
ugucaacaacaaugaauuc

SEQ ID NO: 2049808 - RNA, 19 nt, Homo sapiens
  misc_RNA (1)...(19): siRNA sense strand
ggcauggcuuccuuguaug

SEQ ID NO: 2049809 - RNA, 19 nt, Homo sapiens
  misc_RNA (1)...(19): siRNA sense strand
ggccaacuuugcgagaaau

SEQ ID NO: 2049810 - RNA, 19 nt, Homo sapiens
  misc_RNA (1)...(19): siRNA sense strand
gcugagggaggaguacauu

SEQ ID NO: 2049811 - RNA, 19 nt, Homo sapiens
  misc_RNA (1)...(19): siRNA sense strand
caagaguaaagaggagauu

SEQ ID NO: 2049812 - RNA, 19 nt, Homo sapiens
  misc_RNA (1)...(19): siRNA sense strand
gggagucuuguccauguga

SEQ ID NO: 2049813 - RNA, 19 nt, Homo sapiens
  misc_RNA (1)...(19): siRNA sense strand
gccugucccuagcauuguu

SEQ ID NO: 2049814 - RNA, 19 nt, Homo sapiens
  misc_RNA (1)...(19): siRNA sense strand
ggagucagaguuucuuagc

SEQ ID NO: 2049815 - RNA, 19 nt, Homo sapiens
  misc_RNA (1)...(19): siRNA sense strand
cgcaguggagucagaguuu

SEQ ID NO: 2049816 - RNA, 19 nt, Homo sapiens
  misc_RNA (1)...(19): siRNA sense strand
ugaggaagaggagcagcua

SEQ ID NO: 2049817 - RNA, 19 nt, Homo sapiens
  misc_RNA (1)...(19): siRNA sense strand
aagcgcaguuccaggagau

SEQ ID NO: 2049818 - RNA, 19 nt, Homo sapiens
  misc_RNA (1)...(19): siRNA sense strand
guggagucagaguuucuua

SEQ ID NO: 2049819 - RNA, 19 nt, Homo sapiens
  misc_RNA (1)...(19): siRNA sense strand
ccaugcggcugcacagacu

SEQ ID NO: 2049820 - RNA, 19 nt, Homo sapiens
  misc_RNA (1)...(19): siRNA sense strand
ggugucaacaacaaugaau

SEQ ID NO: 2049821 - RNA, 19 nt, Homo sapiens
  misc_RNA (1)...(19): siRNA sense strand
gcaggaagaugaugaagua

SEQ ID NO: 2049822 - RNA, 19 nt, Homo sapiens
  misc_RNA (1)...(19): siRNA sense strand
uaacaagccuuucaagaug

SEQ ID NO: 2049823 - RNA, 19 nt, Homo sapiens
  misc_RNA (1)...(19): siRNA sense strand
gaggagauucuugcaauua

SEQ ID NO: 2049824 - RNA, 19 nt, Homo sapiens
  misc_RNA (1)...(19): siRNA sense strand
gaauaucgcccacuuugga

SEQ ID NO: 2049825 - RNA, 19 nt, Homo sapiens
  misc_RNA (1)...(19): siRNA sense strand
ggaagaugaugaaguacug

SEQ ID NO: 2049826 - RNA, 19 nt, Homo sapiens
  misc_RNA (1)...(19): siRNA sense strand
uggcauggcuuccuuguau

SEQ ID NO: 2049827 - RNA, 19 nt, Homo sapiens
  misc_RNA (1)...(19): siRNA sense strand
gcaauuaacaagccuuuca

SEQ ID NO: 2049828 - RNA, 19 nt, Homo sapiens
  misc_RNA (1)...(19): siRNA sense strand
agaaggaaauggacagaga

SEQ ID NO: 2049829 - RNA, 19 nt, Homo sapiens
  misc_RNA (1)...(19): siRNA sense strand
cagcuaagcaggaagauga

SEQ ID NO: 2049830 - RNA, 19 nt, Homo sapiens
  misc_RNA (1)...(19): siRNA sense strand
cgaggagccugaagagaga

SEQ ID NO: 2049831 - RNA, 19 nt, Homo sapiens
  misc_RNA (1)...(19): siRNA sense strand
gcucuaaccugccggugau

SEQ ID NO: 2049832 - RNA, 19 nt, Homo sapiens
  misc_RNA (1)...(19): siRNA sense strand
gcuggccucugccgacuuu

SEQ ID NO: 2049833 - RNA, 19 nt, Homo sapiens
  misc_RNA (1)...(19): siRNA sense strand
uaaauucacugaggaagag

SEQ ID NO: 2049834 - RNA, 19 nt, Homo sapiens
  misc_RNA (1)...(19): siRNA sense strand
cagaauaucgcccacuuug

SEQ ID NO: 2049835 - RNA, 19 nt, Homo sapiens
  misc_RNA (1)...(19): siRNA sense strand
gggccaacuuugcgagaaa

SEQ ID NO: 2049836 - RNA, 19 nt, Homo sapiens
  misc_RNA (1)...(19): siRNA sense strand
aggagauucuugcaauuaa

SEQ ID NO: 2049837 - RNA, 19 nt, Homo sapiens
  misc_RNA (1)...(19): siRNA sense strand
gcagaauaucgcccacuuu

SEQ ID NO: 2049838 - RNA, 19 nt, Homo sapiens
  misc_RNA (1)...(19): siRNA sense strand
ccagcuggcucaagaacau

SEQ ID NO: 2049839 - RNA, 19 nt, Homo sapiens
  misc_RNA (1)...(19): siRNA sense strand
uuaacaagccuuucaagau

SEQ ID NO: 2049840 - RNA, 19 nt, Homo sapiens
  misc_RNA (1)...(19): siRNA sense strand
uguuaacgcugcugauguu

SEQ ID NO: 2049841 - RNA, 19 nt, Homo sapiens
  misc_RNA (1)...(19): siRNA sense strand
gaucuaugauacccagaag

SEQ ID NO: 2049842 - RNA, 19 nt, Homo sapiens
  misc_RNA (1)...(19): siRNA sense strand
gugaccaaguugacucuga

SEQ ID NO: 2049843 - RNA, 19 nt, Homo sapiens
  misc_RNA (1)...(19): siRNA sense strand
gcaguggagucagaguuuc

SEQ ID NO: 2049844 - RNA, 19 nt, Homo sapiens
  misc_RNA (1)...(19): siRNA sense strand
gagcagcuaagcaggaaga

SEQ ID NO: 2049845 - RNA, 19 nt, Homo sapiens
  misc_RNA (1)...(19): siRNA sense strand
gaagaggagcagcuaagca

SEQ ID NO: 2049846 - RNA, 19 nt, Homo sapiens
  misc_RNA (1)...(19): siRNA sense strand
gagugugucuucgcuuguu

SEQ ID NO: 2049847 - RNA, 19 nt, Homo sapiens
  misc_RNA (1)...(19): siRNA sense strand
gcauggcuuccuuguauga

SEQ ID NO: 2049848 - RNA, 19 nt, Homo sapiens
  misc_RNA (1)...(19): siRNA sense strand
agaggagauucuugcaauu

SEQ ID NO: 2049849 - RNA, 19 nt, Homo sapiens
  misc_RNA (1)...(19): siRNA sense strand
agcaauaccugcagcugaa

SEQ ID NO: 2049850 - RNA, 19 nt, Homo sapiens
  misc_RNA (1)...(19): siRNA sense strand
cugcugauguugccuccua

SEQ ID NO: 2049851 - RNA, 19 nt, Homo sapiens
  misc_RNA (1)...(19): siRNA sense strand
uaugauacccagaaggaaa

SEQ ID NO: 2049852 - RNA, 19 nt, Homo sapiens
  misc_RNA (1)...(19): siRNA sense strand
ggagauucuugcaauuaac

SEQ ID NO: 2049853 - RNA, 19 nt, Homo sapiens
  misc_RNA (1)...(19): siRNA sense strand
aacaagccuuucaagauga

SEQ ID NO: 2049854 - RNA, 19 nt, Homo sapiens
  misc_RNA (1)...(19): siRNA sense strand
gcucagucccgcucuccua

SEQ ID NO: 2049855 - RNA, 19 nt, Homo sapiens
  misc_RNA (1)...(19): siRNA sense strand
ggagucuuguccaugugaa

SEQ ID NO: 2049856 - RNA, 19 nt, Homo sapiens
  misc_RNA (1)...(19): siRNA sense strand
gaucccugcacuccaagua

SEQ ID NO: 2049857 - RNA, 19 nt, Homo sapiens
  misc_RNA (1)...(19): siRNA sense strand
gggcuucugcugcuucuug

SEQ ID NO: 2049858 - RNA, 19 nt, Homo sapiens
  misc_RNA (1)...(19): siRNA sense strand
ucaccgcaguggagucaga

SEQ ID NO: 2049859 - RNA, 19 nt, Homo sapiens
  misc_RNA (1)...(19): siRNA sense strand
agaaggcgcugccccaaaa

SEQ ID NO: 2049860 - RNA, 19 nt, Homo sapiens
  misc_RNA (1)...(19): siRNA sense strand
cagaguuucuuagccaguu

SEQ ID NO: 2049861 - RNA, 19 nt, Homo sapiens
  misc_RNA (1)...(19): siRNA sense strand
cuucagcacuggagacaag

SEQ ID NO: 2049862 - RNA, 19 nt, Homo sapiens
  misc_RNA (1)...(19): siRNA sense strand
ugugaucccugcacuccaa

SEQ ID NO: 2049863 - RNA, 19 nt, Homo sapiens
  misc_RNA (1)...(19): siRNA sense strand
ccaaggucaugaggaucua

SEQ ID NO: 2049864 - RNA, 19 nt, Homo sapiens
  misc_RNA (1)...(19): siRNA sense strand
gccuguaccucagcaucua

SEQ ID NO: 2049865 - RNA, 19 nt, Homo sapiens
  misc_RNA (1)...(19): siRNA sense strand
gcacaugaaggcagaccau

SEQ ID NO: 2049866 - RNA, 19 nt, Homo sapiens
  misc_RNA (1)...(19): siRNA sense strand
gagauucuugcaauuaaca

SEQ ID NO: 2049867 - RNA, 19 nt, Homo sapiens
  misc_RNA (1)...(19): siRNA sense strand
caauuaacaagccuuucaa

SEQ ID NO: 2049868 - RNA, 19 nt, Homo sapiens
  misc_RNA (1)...(19): siRNA sense strand
ucuacgaguuccagcauca

SEQ ID NO: 2049869 - RNA, 19 nt, Homo sapiens
  misc_RNA (1)...(19): siRNA sense strand
cagccugucccuagcauug

SEQ ID NO: 2049870 - RNA, 19 nt, Homo sapiens
  misc_RNA (1)...(19): siRNA sense strand
gaggaagaggagcagcuaa

SEQ ID NO: 2049871 - RNA, 19 nt, Homo sapiens
  misc_RNA (1)...(19): siRNA sense strand
ggaucuaugauacccagaa

SEQ ID NO: 2049872 - RNA, 19 nt, Homo sapiens
  misc_RNA (1)...(19): siRNA sense strand
cuuagccaguucaacauga

SEQ ID NO: 2049873 - RNA, 19 nt, Homo sapiens
  misc_RNA (1)...(19): siRNA sense strand
cuaagcaggaagaugauga

SEQ ID NO: 2049874 - RNA, 19 nt, Homo sapiens
  misc_RNA (1)...(19): siRNA sense strand
gcaagaguaaagaggagau

SEQ ID NO: 2049875 - RNA, 19 nt, Homo sapiens
  misc_RNA (1)...(19): siRNA sense strand
uaagcaggaagaugaugaa

SEQ ID NO: 2049876 - RNA, 19 nt, Homo sapiens
  misc_RNA (1)...(19): siRNA sense strand
gcacuccaaguagcacauu

SEQ ID NO: 2049877 - RNA, 19 nt, Homo sapiens
  misc_RNA (1)...(19): siRNA sense strand
ucuaugauacccagaagga

SEQ ID NO: 2049878 - RNA, 19 nt, Homo sapiens
  misc_RNA (1)...(19): siRNA sense strand
gaacguggugguggucauc

SEQ ID NO: 2049879 - RNA, 19 nt, Homo sapiens
  misc_RNA (1)...(19): siRNA sense strand
uuaaauucacugaggaaga

SEQ ID NO: 2049880 - RNA, 19 nt, Homo sapiens
  misc_RNA (1)...(19): siRNA sense strand
ugucaacaacaaugaauuc

SEQ ID NO: 2049881 - RNA, 19 nt, Homo sapiens
  misc_RNA (1)...(19): siRNA sense strand
ggcauggcuuccuuguaug

SEQ ID NO: 2049882 - RNA, 19 nt, Homo sapiens
  misc_RNA (1)...(19): siRNA sense strand
ggccaacuuugcgagaaau

SEQ ID NO: 2049883 - RNA, 19 nt, Homo sapiens
  misc_RNA (1)...(19): siRNA sense strand
gcugagggaggaguacauu

SEQ ID NO: 2049884 - RNA, 19 nt, Homo sapiens
  misc_RNA (1)...(19): siRNA sense strand
caagaguaaagaggagauu

SEQ ID NO: 2049885 - RNA, 19 nt, Homo sapiens
  misc_RNA (1)...(19): siRNA sense strand
gggagucuuguccauguga

SEQ ID NO: 2049886 - RNA, 19 nt, Homo sapiens
  misc_RNA (1)...(19): siRNA sense strand
gccugucccuagcauuguu

SEQ ID NO: 2049887 - RNA, 19 nt, Homo sapiens
  misc_RNA (1)...(19): siRNA sense strand
ggagucagaguuucuuagc

SEQ ID NO: 2049888 - RNA, 19 nt, Homo sapiens
  misc_RNA (1)...(19): siRNA sense strand
cgcaguggagucagaguuu

SEQ ID NO: 2049889 - RNA, 19 nt, Homo sapiens
  misc_RNA (1)...(19): siRNA sense strand
ugaggaagaggagcagcua

SEQ ID NO: 2049890 - RNA, 19 nt, Homo sapiens
  misc_RNA (1)...(19): siRNA sense strand
aagcgcaguuccaggagau

SEQ ID NO: 2049891 - RNA, 19 nt, Homo sapiens
  misc_RNA (1)...(19): siRNA sense strand
guggagucagaguuucuua

SEQ ID NO: 2049892 - RNA, 19 nt, Homo sapiens
  misc_RNA (1)...(19): siRNA sense strand
ccaugcggcugcacagacu

SEQ ID NO: 2049893 - RNA, 19 nt, Homo sapiens
  misc_RNA (1)...(19): siRNA sense strand
ggugucaacaacaaugaau

SEQ ID NO: 2049894 - RNA, 19 nt, Homo sapiens
  misc_RNA (1)...(19): siRNA sense strand
gaucaucaaugccuucuuu

SEQ ID NO: 2049895 - RNA, 19 nt, Homo sapiens
  misc_RNA (1)...(19): siRNA sense strand
gaaaagaucucccgugaug

SEQ ID NO: 2049896 - RNA, 19 nt, Homo sapiens
  misc_RNA (1)...(19): siRNA sense strand
gagcaaagaugugaaugga

SEQ ID NO: 2049897 - RNA, 19 nt, Homo sapiens
  misc_RNA (1)...(19): siRNA sense strand
gaagguggauguagaacag

SEQ ID NO: 2049898 - RNA, 19 nt, Homo sapiens
  misc_RNA (1)...(19): siRNA sense strand
ucaaaucacucgccucuac

SEQ ID NO: 2049899 - RNA, 19 nt, Homo sapiens
  misc_RNA (1)...(19): siRNA sense strand
ugccauaucuuucacagaa

SEQ ID NO: 2049900 - RNA, 19 nt, Homo sapiens
  misc_RNA (1)...(19): siRNA sense strand
cauccgauuucuucacuaa

SEQ ID NO: 2049901 - RNA, 19 nt, Homo sapiens
  misc_RNA (1)...(19): siRNA sense strand
ucacagaauuuguuaaggu

SEQ ID NO: 2049902 - RNA, 19 nt, Homo sapiens
  misc_RNA (1)...(19): siRNA sense strand
gcacuuugcuuuucgacua

SEQ ID NO: 2049903 - RNA, 19 nt, Homo sapiens
  misc_RNA (1)...(19): siRNA sense strand
aaacuuccguggauucaug

SEQ ID NO: 2049904 - RNA, 19 nt, Homo sapiens
  misc_RNA (1)...(19): siRNA sense strand
gagaggaccagguaaacuu

SEQ ID NO: 2049905 - RNA, 19 nt, Homo sapiens
  misc_RNA (1)...(19): siRNA sense strand
gaagauuuccagaggauuc

SEQ ID NO: 2049906 - RNA, 19 nt, Homo sapiens
  misc_RNA (1)...(19): siRNA sense strand
ccauaucuuucacagaauu

SEQ ID NO: 2049907 - RNA, 19 nt, Homo sapiens
  misc_RNA (1)...(19): siRNA sense strand
ggauaaagaugaaaagauc

SEQ ID NO: 2049908 - RNA, 19 nt, Homo sapiens
  misc_RNA (1)...(19): siRNA sense strand
ucgaggagaucaagaagga

SEQ ID NO: 2049909 - RNA, 19 nt, Homo sapiens
  misc_RNA (1)...(19): siRNA sense strand
ggagaagguggauguagaa

SEQ ID NO: 2049910 - RNA, 19 nt, Homo sapiens
  misc_RNA (1)...(19): siRNA sense strand
ggacagugccauaucuuuc

SEQ ID NO: 2049911 - RNA, 19 nt, Homo sapiens
  misc_RNA (1)...(19): siRNA sense strand
acgaagagcucgaggagau

SEQ ID NO: 2049912 - RNA, 19 nt, Homo sapiens
  misc_RNA (1)...(19): siRNA sense strand
cagguaaacuuccguggau

SEQ ID NO: 2049913 - RNA, 19 nt, Homo sapiens
  misc_RNA (1)...(19): siRNA sense strand
gaaaagagcaaagauguga

SEQ ID NO: 2049914 - RNA, 19 nt, Homo sapiens
  misc_RNA (1)...(19): siRNA sense strand
ccagaggauuccagaacuu

SEQ ID NO: 2049915 - RNA, 19 nt, Homo sapiens
  misc_RNA (1)...(19): siRNA sense strand
cacagaauuuguuaagguu

SEQ ID NO: 2049916 - RNA, 19 nt, Homo sapiens
  misc_RNA (1)...(19): siRNA sense strand
uggagaagguggauguaga

SEQ ID NO: 2049917 - RNA, 19 nt, Homo sapiens
  misc_RNA (1)...(19): siRNA sense strand
caacagccgaagcaacaaa

SEQ ID NO: 2049918 - RNA, 19 nt, Homo sapiens
  misc_RNA (1)...(19): siRNA sense strand
caagaaggagaccggcuuu

SEQ ID NO: 2049919 - RNA, 19 nt, Homo sapiens
  misc_RNA (1)...(19): siRNA sense strand
gggacagugccauaucuuu

SEQ ID NO: 2049920 - RNA, 19 nt, Homo sapiens
  misc_RNA (1)...(19): siRNA sense strand
gcaugauggucggaguaaa

SEQ ID NO: 2049921 - RNA, 19 nt, Homo sapiens
  misc_RNA (1)...(19): siRNA sense strand
uuccagaacuugccaucaa

SEQ ID NO: 2049922 - RNA, 19 nt, Homo sapiens
  misc_RNA (1)...(19): siRNA sense strand
gacagugccauaucuuuca

SEQ ID NO: 2049923 - RNA, 19 nt, Homo sapiens
  misc_RNA (1)...(19): siRNA sense strand
uuacaggugcuacgcauga

SEQ ID NO: 2049924 - RNA, 19 nt, Homo sapiens
  misc_RNA (1)...(19): siRNA sense strand
gaagagcucgaggagauca

SEQ ID NO: 2049925 - RNA, 19 nt, Homo sapiens
  misc_RNA (1)...(19): siRNA sense strand
gguaaacuuccguggauuc

SEQ ID NO: 2049926 - RNA, 19 nt, Homo sapiens
  misc_RNA (1)...(19): siRNA sense strand
agagggagaggaccaggua

SEQ ID NO: 2049927 - RNA, 19 nt, Homo sapiens
  misc_RNA (1)...(19): siRNA sense strand
caugauggucggaguaaau

SEQ ID NO: 2049928 - RNA, 19 nt, Homo sapiens
  misc_RNA (1)...(19): siRNA sense strand
guggauucaugcgaacuuu

SEQ ID NO: 2049929 - RNA, 19 nt, Homo sapiens
  misc_RNA (1)...(19): siRNA sense strand
gcauccgauuucuucacua

SEQ ID NO: 2049930 - RNA, 19 nt, Homo sapiens
  misc_RNA (1)...(19): siRNA sense strand
ucgacuauaugauuuggau

SEQ ID NO: 2049931 - RNA, 19 nt, Homo sapiens
  misc_RNA (1)...(19): siRNA sense strand
gaagcaacaaacugcacuu

SEQ ID NO: 2049932 - RNA, 19 nt, Homo sapiens
  misc_RNA (1)...(19): siRNA sense strand
gauggucggaguaaauauc

SEQ ID NO: 2049933 - RNA, 19 nt, Homo sapiens
  misc_RNA (1)...(19): siRNA sense strand
ugcgaacuuuggcucauuu

SEQ ID NO: 2049934 - RNA, 19 nt, Homo sapiens
  misc_RNA (1)...(19): siRNA sense strand
aaagagcaaagaugugaau

SEQ ID NO: 2049935 - RNA, 19 nt, Homo sapiens
  misc_RNA (1)...(19): siRNA sense strand
ggucggaguaaauaucuca

SEQ ID NO: 2049936 - RNA, 19 nt, Homo sapiens
  misc_RNA (1)...(19): siRNA sense strand
gggaccggaucaucaaugc

SEQ ID NO: 2049937 - RNA, 19 nt, Homo sapiens
  misc_RNA (1)...(19): siRNA sense strand
aaagaucucccgugaugag

SEQ ID NO: 2049938 - RNA, 19 nt, Homo sapiens
  misc_RNA (1)...(19): siRNA sense strand
guaaacuuccguggauuca

SEQ ID NO: 2049939 - RNA, 19 nt, Homo sapiens
  misc_RNA (1)...(19): siRNA sense strand
ccacucaacagccgaagca

SEQ ID NO: 2049940 - RNA, 19 nt, Homo sapiens
  misc_RNA (1)...(19): siRNA sense strand
caucaaugccuucuuucca

SEQ ID NO: 2049941 - RNA, 19 nt, Homo sapiens
  misc_RNA (1)...(19): siRNA sense strand
gccauaucuuucacagaau

SEQ ID NO: 2049942 - RNA, 19 nt, Homo sapiens
  misc_RNA (1)...(19): siRNA sense strand
ggauucaugcgaacuuugg

SEQ ID NO: 2049943 - RNA, 19 nt, Homo sapiens
  misc_RNA (1)...(19): siRNA sense strand
ggagaggaccagguaaacu

SEQ ID NO: 2049944 - RNA, 19 nt, Homo sapiens
  misc_RNA (1)...(19): siRNA sense strand
aaacugcacuuugcuuuuc

SEQ ID NO: 2049945 - RNA, 19 nt, Homo sapiens
  misc_RNA (1)...(19): siRNA sense strand
cagaggauuccagaacuug

SEQ ID NO: 2049946 - RNA, 19 nt, Homo sapiens
  misc_RNA (1)...(19): siRNA sense strand
caaaucacucgccucuaca

SEQ ID NO: 2049947 - RNA, 19 nt, Homo sapiens
  misc_RNA (1)...(19): siRNA sense strand
gggaaaugcugguaaagua

SEQ ID NO: 2049948 - RNA, 19 nt, Homo sapiens
  misc_RNA (1)...(19): siRNA sense strand
ccagaaaucucaccagugu

SEQ ID NO: 2049949 - RNA, 19 nt, Homo sapiens
  misc_RNA (1)...(19): siRNA sense strand
cacaggagcugaugaaaga

SEQ ID NO: 2049950 - RNA, 19 nt, Homo sapiens
  misc_RNA (1)...(19): siRNA sense strand
uaagggaaaugcugguaaa

SEQ ID NO: 2049951 - RNA, 19 nt, Homo sapiens
  misc_RNA (1)...(19): siRNA sense strand
ggaaaugcugguaaaguaa

SEQ ID NO: 2049952 - RNA, 19 nt, Homo sapiens
  misc_RNA (1)...(19): siRNA sense strand
gaaaugcugguaaaguaaa

SEQ ID NO: 2049953 - RNA, 19 nt, Homo sapiens
  misc_RNA (1)...(19): siRNA sense strand
caaagcagauacuaaaggu

SEQ ID NO: 2049954 - RNA, 19 nt, Homo sapiens
  misc_RNA (1)...(19): siRNA sense strand
gagccucagucaccucaaa

SEQ ID NO: 2049955 - RNA, 19 nt, Homo sapiens
  misc_RNA (1)...(19): siRNA sense strand
ccucaaagcagauacuaaa

SEQ ID NO: 2049956 - RNA, 19 nt, Homo sapiens
  misc_RNA (1)...(19): siRNA sense strand
aagcagauacuaaagguuu

SEQ ID NO: 2049957 - RNA, 19 nt, Homo sapiens
  misc_RNA (1)...(19): siRNA sense strand
gcaauaucaguuuguuuga

SEQ ID NO: 2049958 - RNA, 19 nt, Homo sapiens
  misc_RNA (1)...(19): siRNA sense strand
acaccaugcugggcuauaa

SEQ ID NO: 2049959 - RNA, 19 nt, Homo sapiens
  misc_RNA (1)...(19): siRNA sense strand
agaacgggcuugcaaguag

SEQ ID NO: 2049960 - RNA, 19 nt, Homo sapiens
  misc_RNA (1)...(19): siRNA sense strand
gaucaccucacccggcaua

SEQ ID NO: 2049961 - RNA, 19 nt, Homo sapiens
  misc_RNA (1)...(19): siRNA sense strand
gcugugaaccuaacaauac

SEQ ID NO: 2049962 - RNA, 19 nt, Homo sapiens
  misc_RNA (1)...(19): siRNA sense strand
ccaagaagacccacucaca

SEQ ID NO: 2049963 - RNA, 19 nt, Homo sapiens
  misc_RNA (1)...(19): siRNA sense strand
aaguaaaccugcccaagga

SEQ ID NO: 2049964 - RNA, 19 nt, Homo sapiens
  misc_RNA (1)...(19): siRNA sense strand
gcagaugcugugaaccuaa

SEQ ID NO: 2049965 - RNA, 19 nt, Homo sapiens
  misc_RNA (1)...(19): siRNA sense strand
ccggaaagaccaccugaaa

SEQ ID NO: 2049966 - RNA, 19 nt, Homo sapiens
  misc_RNA (1)...(19): siRNA sense strand
ugugaaagaugcuucuaca

SEQ ID NO: 2049967 - RNA, 19 nt, Homo sapiens
  misc_RNA (1)...(19): siRNA sense strand
caucucgccuucauuccaa

SEQ ID NO: 2049968 - RNA, 19 nt, Homo sapiens
  misc_RNA (1)...(19): siRNA sense strand
ggaagaaguacaacaccau

SEQ ID NO: 2049969 - RNA, 19 nt, Homo sapiens
  misc_RNA (1)...(19): siRNA sense strand
ucaaagcccaugcggaaga

SEQ ID NO: 2049970 - RNA, 19 nt, Homo sapiens
  misc_RNA (1)...(19): siRNA sense strand
gcuacuggaccaccucaaa

SEQ ID NO: 2049971 - RNA, 19 nt, Homo sapiens
  misc_RNA (1)...(19): siRNA sense strand
ucauuuccaucaugcauuc

SEQ ID NO: 2049972 - RNA, 19 nt, Homo sapiens
  misc_RNA (1)...(19): siRNA sense strand
uaacaauaccugccucucu

SEQ ID NO: 2049973 - RNA, 19 nt, Homo sapiens
  misc_RNA (1)...(19): siRNA sense strand
cagaacgggcuugcaagua

SEQ ID NO: 2049974 - RNA, 19 nt, Homo sapiens
  misc_RNA (1)...(19): siRNA sense strand
gauuugggcgcaaggauca

SEQ ID NO: 2049975 - RNA, 19 nt, Homo sapiens
  misc_RNA (1)...(19): siRNA sense strand
gaagacguucaaccggaaa

SEQ ID NO: 2049976 - RNA, 19 nt, Homo sapiens
  misc_RNA (1)...(19): siRNA sense strand
caauaucaguuuguuugag

SEQ ID NO: 2049977 - RNA, 19 nt, Homo sapiens
  misc_RNA (1)...(19): siRNA sense strand
ugcaauaucaguuuguuug

SEQ ID NO: 2049978 - RNA, 19 nt, Homo sapiens
  misc_RNA (1)...(19): siRNA sense strand
gcugcugccuugccuccuu

SEQ ID NO: 2049979 - RNA, 19 nt, Homo sapiens
  misc_RNA (1)...(19): siRNA sense strand
cauccugccucauuuccau

SEQ ID NO: 2049980 - RNA, 19 nt, Homo sapiens
  misc_RNA (1)...(19): siRNA sense strand
ggacuuccugugccaguuc

SEQ ID NO: 2049981 - RNA, 19 nt, Homo sapiens
  misc_RNA (1)...(19): siRNA sense strand
gcuaagggaaaugcuggua

SEQ ID NO: 2049982 - RNA, 19 nt, Homo sapiens
  misc_RNA (1)...(19): siRNA sense strand
ucacaggagcugaugaaag

SEQ ID NO: 2049983 - RNA, 19 nt, Homo sapiens
  misc_RNA (1)...(19): siRNA sense strand
ccaucaugcauucagauaa

SEQ ID NO: 2049984 - RNA, 19 nt, Homo sapiens
  misc_RNA (1)...(19): siRNA sense strand
cuaagggaaaugcugguaa

SEQ ID NO: 2049985 - RNA, 19 nt, Homo sapiens
  misc_RNA (1)...(19): siRNA sense strand
ucaguuuguuugaggacuu

SEQ ID NO: 2049986 - RNA, 19 nt, Homo sapiens
  misc_RNA (1)...(19): siRNA sense strand
gugcgaccacugugaaaga

SEQ ID NO: 2049987 - RNA, 19 nt, Homo sapiens
  misc_RNA (1)...(19): siRNA sense strand
cugccauccugccucauuu

SEQ ID NO: 2049988 - RNA, 19 nt, Homo sapiens
  misc_RNA (1)...(19): siRNA sense strand
ucacccggcauaccaagaa

SEQ ID NO: 2049989 - RNA, 19 nt, Homo sapiens
  misc_RNA (1)...(19): siRNA sense strand
ucaaagcagauacuaaagg

SEQ ID NO: 2049990 - RNA, 19 nt, Homo sapiens
  misc_RNA (1)...(19): siRNA sense strand
acaccacuucuaccucaua

SEQ ID NO: 2049991 - RNA, 19 nt, Homo sapiens
  misc_RNA (1)...(19): siRNA sense strand
caccaucucgccuucauuc

SEQ ID NO: 2049992 - RNA, 19 nt, Homo sapiens
  misc_RNA (1)...(19): siRNA sense strand
caaagcccaugcggaagag

SEQ ID NO: 2049993 - RNA, 19 nt, Homo sapiens
  misc_RNA (1)...(19): siRNA sense strand
ccacuucuaccucauacuc

SEQ ID NO: 2049994 - RNA, 19 nt, Homo sapiens
  misc_RNA (1)...(19): siRNA sense strand
ggucugugcccuggagcua

SEQ ID NO: 2049995 - RNA, 19 nt, Homo sapiens
  misc_RNA (1)...(19): siRNA sense strand
ccagaacgggcuugcaagu

SEQ ID NO: 2049996 - RNA, 19 nt, Homo sapiens
  misc_RNA (1)...(19): siRNA sense strand
cagaugcugugaaccuaac

SEQ ID NO: 2049997 - RNA, 19 nt, Homo sapiens
  misc_RNA (1)...(19): siRNA sense strand
gggaaaugcugguaaagua

SEQ ID NO: 2049998 - RNA, 19 nt, Homo sapiens
  misc_RNA (1)...(19): siRNA sense strand
ccagaaaucucaccagugu

SEQ ID NO: 2049999 - RNA, 19 nt, Homo sapiens
  misc_RNA (1)...(19): siRNA sense strand
cacaggagcugaugaaaga

SEQ ID NO: 2050000 - RNA, 19 nt, Homo sapiens
  misc_RNA (1)...(19): siRNA sense strand
uaagggaaaugcugguaaa

SEQ ID NO: 2050001 - RNA, 19 nt, Homo sapiens
  misc_RNA (1)...(19): siRNA sense strand
ggaaaugcugguaaaguaa

SEQ ID NO: 2050002 - RNA, 19 nt, Homo sapiens
  misc_RNA (1)...(19): siRNA sense strand
gaaaugcugguaaaguaaa

SEQ ID NO: 2050003 - RNA, 19 nt, Homo sapiens
  misc_RNA (1)...(19): siRNA sense strand
caaagcagauacuaaaggu

SEQ ID NO: 2050004 - RNA, 19 nt, Homo sapiens
  misc_RNA (1)...(19): siRNA sense strand
gagccucagucaccucaaa

SEQ ID NO: 2050005 - RNA, 19 nt, Homo sapiens
  misc_RNA (1)...(19): siRNA sense strand
ccucaaagcagauacuaaa

SEQ ID NO: 2050006 - RNA, 19 nt, Homo sapiens
  misc_RNA (1)...(19): siRNA sense strand
aagcagauacuaaagguuu

SEQ ID NO: 2050007 - RNA, 19 nt, Homo sapiens
  misc_RNA (1)...(19): siRNA sense strand
gcaauaucaguuuguuuga

SEQ ID NO: 2050008 - RNA, 19 nt, Homo sapiens
  misc_RNA (1)...(19): siRNA sense strand
acaccaugcugggcuauaa

SEQ ID NO: 2050009 - RNA, 19 nt, Homo sapiens
  misc_RNA (1)...(19): siRNA sense strand
agaacgggcuugcaaguag

SEQ ID NO: 2050010 - RNA, 19 nt, Homo sapiens
  misc_RNA (1)...(19): siRNA sense strand
gcugugaaccuaacaauac

SEQ ID NO: 2050011 - RNA, 19 nt, Homo sapiens
  misc_RNA (1)...(19): siRNA sense strand
ccaagaagacccacucaca

SEQ ID NO: 2050012 - RNA, 19 nt, Homo sapiens
  misc_RNA (1)...(19): siRNA sense strand
aaguaaaccugcccaagga

SEQ ID NO: 2050013 - RNA, 19 nt, Homo sapiens
  misc_RNA (1)...(19): siRNA sense strand
gcagaugcugugaaccuaa

SEQ ID NO: 2050014 - RNA, 19 nt, Homo sapiens
  misc_RNA (1)...(19): siRNA sense strand
ccggaaagaccaccugaaa

SEQ ID NO: 2050015 - RNA, 19 nt, Homo sapiens
  misc_RNA (1)...(19): siRNA sense strand
ugugaaagaugcuucuaca

SEQ ID NO: 2050016 - RNA, 19 nt, Homo sapiens
  misc_RNA (1)...(19): siRNA sense strand
caucucgccuucauuccaa

SEQ ID NO: 2050017 - RNA, 19 nt, Homo sapiens
  misc_RNA (1)...(19): siRNA sense strand
ggaagaaguacaacaccau

SEQ ID NO: 2050018 - RNA, 19 nt, Homo sapiens
  misc_RNA (1)...(19): siRNA sense strand
ucaaagcccaugcggaaga

SEQ ID NO: 2050019 - RNA, 19 nt, Homo sapiens
  misc_RNA (1)...(19): siRNA sense strand
gcuacuggaccaccucaaa

SEQ ID NO: 2050020 - RNA, 19 nt, Homo sapiens
  misc_RNA (1)...(19): siRNA sense strand
ucauuuccaucaugcauuc

SEQ ID NO: 2050021 - RNA, 19 nt, Homo sapiens
  misc_RNA (1)...(19): siRNA sense strand
uaacaauaccugccucucu

SEQ ID NO: 2050022 - RNA, 19 nt, Homo sapiens
  misc_RNA (1)...(19): siRNA sense strand
cagaacgggcuugcaagua

SEQ ID NO: 2050023 - RNA, 19 nt, Homo sapiens
  misc_RNA (1)...(19): siRNA sense strand
caauaucaguuuguuugag

SEQ ID NO: 2050024 - RNA, 19 nt, Homo sapiens
  misc_RNA (1)...(19): siRNA sense strand
gaagacguucaaccggaaa

SEQ ID NO: 2050025 - RNA, 19 nt, Homo sapiens
  misc_RNA (1)...(19): siRNA sense strand
ugcaauaucaguuuguuug

SEQ ID NO: 2050026 - RNA, 19 nt, Homo sapiens
  misc_RNA (1)...(19): siRNA sense strand
gcugcugccuugccuccuu

SEQ ID NO: 2050027 - RNA, 19 nt, Homo sapiens
  misc_RNA (1)...(19): siRNA sense strand
cauccugccucauuuccau

SEQ ID NO: 2050028 - RNA, 19 nt, Homo sapiens
  misc_RNA (1)...(19): siRNA sense strand
ggacuuccugugccaguuc

SEQ ID NO: 2050029 - RNA, 19 nt, Homo sapiens
  misc_RNA (1)...(19): siRNA sense strand
gcuaagggaaaugcuggua

SEQ ID NO: 2050030 - RNA, 19 nt, Homo sapiens
  misc_RNA (1)...(19): siRNA sense strand
ucacaggagcugaugaaag

SEQ ID NO: 2050031 - RNA, 19 nt, Homo sapiens
  misc_RNA (1)...(19): siRNA sense strand
ccaucaugcauucagauaa

SEQ ID NO: 2050032 - RNA, 19 nt, Homo sapiens
  misc_RNA (1)...(19): siRNA sense strand
cuaagggaaaugcugguaa

SEQ ID NO: 2050033 - RNA, 19 nt, Homo sapiens
  misc_RNA (1)...(19): siRNA sense strand
ucaguuuguuugaggacuu

SEQ ID NO: 2050034 - RNA, 19 nt, Homo sapiens
  misc_RNA (1)...(19): siRNA sense strand
gugcgaccacugugaaaga

SEQ ID NO: 2050035 - RNA, 19 nt, Homo sapiens
  misc_RNA (1)...(19): siRNA sense strand
cugccauccugccucauuu

SEQ ID NO: 2050036 - RNA, 19 nt, Homo sapiens
  misc_RNA (1)...(19): siRNA sense strand
ucacccggcauaccaagaa

SEQ ID NO: 2050037 - RNA, 19 nt, Homo sapiens
  misc_RNA (1)...(19): siRNA sense strand
ucaaagcagauacuaaagg

SEQ ID NO: 2050038 - RNA, 19 nt, Homo sapiens
  misc_RNA (1)...(19): siRNA sense strand
acaccacuucuaccucaua

SEQ ID NO: 2050039 - RNA, 19 nt, Homo sapiens
  misc_RNA (1)...(19): siRNA sense strand
caccaucucgccuucauuc

SEQ ID NO: 2050040 - RNA, 19 nt, Homo sapiens
  misc_RNA (1)...(19): siRNA sense strand
caaagcccaugcggaagag

SEQ ID NO: 2050041 - RNA, 19 nt, Homo sapiens
  misc_RNA (1)...(19): siRNA sense strand
ggucugugcccuggagcua

SEQ ID NO: 2050042 - RNA, 19 nt, Homo sapiens
  misc_RNA (1)...(19): siRNA sense strand
ccacuucuaccucauacuc

SEQ ID NO: 2050043 - RNA, 19 nt, Homo sapiens
  misc_RNA (1)...(19): siRNA sense strand
ccagaacgggcuugcaagu

SEQ ID NO: 2050044 - RNA, 19 nt, Homo sapiens
  misc_RNA (1)...(19): siRNA sense strand
cagaugcugugaaccuaac

SEQ ID NO: 2050045 - RNA, 19 nt, Homo sapiens
  misc_RNA (1)...(19): siRNA sense strand
gggaaaugcugguaaagua

SEQ ID NO: 2050046 - RNA, 19 nt, Homo sapiens
  misc_RNA (1)...(19): siRNA sense strand
ccagaaaucucaccagugu

SEQ ID NO: 2050047 - RNA, 19 nt, Homo sapiens
  misc_RNA (1)...(19): siRNA sense strand
cacaggagcugaugaaaga

SEQ ID NO: 2050048 - RNA, 19 nt, Homo sapiens
  misc_RNA (1)...(19): siRNA sense strand
uaagggaaaugcugguaaa

SEQ ID NO: 2050049 - RNA, 19 nt, Homo sapiens
  misc_RNA (1)...(19): siRNA sense strand
ggaaaugcugguaaaguaa

SEQ ID NO: 2050050 - RNA, 19 nt, Homo sapiens
  misc_RNA (1)...(19): siRNA sense strand
gaaaugcugguaaaguaaa

SEQ ID NO: 2050051 - RNA, 19 nt, Homo sapiens
  misc_RNA (1)...(19): siRNA sense strand
caaagcagauacuaaaggu

SEQ ID NO: 2050052 - RNA, 19 nt, Homo sapiens
  misc_RNA (1)...(19): siRNA sense strand
gagccucagucaccucaaa

SEQ ID NO: 2050053 - RNA, 19 nt, Homo sapiens
  misc_RNA (1)...(19): siRNA sense strand
ccucaaagcagauacuaaa

SEQ ID NO: 2050054 - RNA, 19 nt, Homo sapiens
  misc_RNA (1)...(19): siRNA sense strand
aagcagauacuaaagguuu

SEQ ID NO: 2050055 - RNA, 19 nt, Homo sapiens
  misc_RNA (1)...(19): siRNA sense strand
gcaauaucaguuuguuuga

SEQ ID NO: 2050056 - RNA, 19 nt, Homo sapiens
  misc_RNA (1)...(19): siRNA sense strand
acaccaugcugggcuauaa

SEQ ID NO: 2050057 - RNA, 19 nt, Homo sapiens
  misc_RNA (1)...(19): siRNA sense strand
agaacgggcuugcaaguag

SEQ ID NO: 2050058 - RNA, 19 nt, Homo sapiens
  misc_RNA (1)...(19): siRNA sense strand
gaucaccucacccggcaua

SEQ ID NO: 2050059 - RNA, 19 nt, Homo sapiens
  misc_RNA (1)...(19): siRNA sense strand
gcugugaaccuaacaauac

SEQ ID NO: 2050060 - RNA, 19 nt, Homo sapiens
  misc_RNA (1)...(19): siRNA sense strand
ccaagaagacccacucaca

SEQ ID NO: 2050061 - RNA, 19 nt, Homo sapiens
  misc_RNA (1)...(19): siRNA sense strand
aaguaaaccugcccaagga

SEQ ID NO: 2050062 - RNA, 19 nt, Homo sapiens
  misc_RNA (1)...(19): siRNA sense strand
gcagaugcugugaaccuaa

SEQ ID NO: 2050063 - RNA, 19 nt, Homo sapiens
  misc_RNA (1)...(19): siRNA sense strand
ccggaaagaccaccugaaa

SEQ ID NO: 2050064 - RNA, 19 nt, Homo sapiens
  misc_RNA (1)...(19): siRNA sense strand
ugugaaagaugcuucuaca

SEQ ID NO: 2050065 - RNA, 19 nt, Homo sapiens
  misc_RNA (1)...(19): siRNA sense strand
caucucgccuucauuccaa

SEQ ID NO: 2050066 - RNA, 19 nt, Homo sapiens
  misc_RNA (1)...(19): siRNA sense strand
ggaagaaguacaacaccau

SEQ ID NO: 2050067 - RNA, 19 nt, Homo sapiens
  misc_RNA (1)...(19): siRNA sense strand
ucaaagcccaugcggaaga

SEQ ID NO: 2050068 - RNA, 19 nt, Homo sapiens
  misc_RNA (1)...(19): siRNA sense strand
gcuacuggaccaccucaaa

SEQ ID NO: 2050069 - RNA, 19 nt, Homo sapiens
  misc_RNA (1)...(19): siRNA sense strand
ucauuuccaucaugcauuc

SEQ ID NO: 2050070 - RNA, 19 nt, Homo sapiens
  misc_RNA (1)...(19): siRNA sense strand
uaacaauaccugccucucu

SEQ ID NO: 2050071 - RNA, 19 nt, Homo sapiens
  misc_RNA (1)...(19): siRNA sense strand
cagaacgggcuugcaagua

SEQ ID NO: 2050072 - RNA, 19 nt, Homo sapiens
  misc_RNA (1)...(19): siRNA sense strand
gauuugggcgcaaggauca

SEQ ID NO: 2050073 - RNA, 19 nt, Homo sapiens
  misc_RNA (1)...(19): siRNA sense strand
gaagacguucaaccggaaa

SEQ ID NO: 2050074 - RNA, 19 nt, Homo sapiens
  misc_RNA (1)...(19): siRNA sense strand
caauaucaguuuguuugag

SEQ ID NO: 2050075 - RNA, 19 nt, Homo sapiens
  misc_RNA (1)...(19): siRNA sense strand
ugcaauaucaguuuguuug

SEQ ID NO: 2050076 - RNA, 19 nt, Homo sapiens
  misc_RNA (1)...(19): siRNA sense strand
gcugcugccuugccuccuu

SEQ ID NO: 2050077 - RNA, 19 nt, Homo sapiens
  misc_RNA (1)...(19): siRNA sense strand
cauccugccucauuuccau

SEQ ID NO: 2050078 - RNA, 19 nt, Homo sapiens
  misc_RNA (1)...(19): siRNA sense strand
ggacuuccugugccaguuc

SEQ ID NO: 2050079 - RNA, 19 nt, Homo sapiens
  misc_RNA (1)...(19): siRNA sense strand
gcuaagggaaaugcuggua

SEQ ID NO: 2050080 - RNA, 19 nt, Homo sapiens
  misc_RNA (1)...(19): siRNA sense strand
ucacaggagcugaugaaag

SEQ ID NO: 2050081 - RNA, 19 nt, Homo sapiens
  misc_RNA (1)...(19): siRNA sense strand
ccaucaugcauucagauaa

SEQ ID NO: 2050082 - RNA, 19 nt, Homo sapiens
  misc_RNA (1)...(19): siRNA sense strand
cuaagggaaaugcugguaa

SEQ ID NO: 2050083 - RNA, 19 nt, Homo sapiens
  misc_RNA (1)...(19): siRNA sense strand
ucaguuuguuugaggacuu

SEQ ID NO: 2050084 - RNA, 19 nt, Homo sapiens
  misc_RNA (1)...(19): siRNA sense strand
gugcgaccacugugaaaga

SEQ ID NO: 2050085 - RNA, 19 nt, Homo sapiens
  misc_RNA (1)...(19): siRNA sense strand
cugccauccugccucauuu

SEQ ID NO: 2050086 - RNA, 19 nt, Homo sapiens
  misc_RNA (1)...(19): siRNA sense strand
ucacccggcauaccaagaa

SEQ ID NO: 2050087 - RNA, 19 nt, Homo sapiens
  misc_RNA (1)...(19): siRNA sense strand
ucaaagcagauacuaaagg

SEQ ID NO: 2050088 - RNA, 19 nt, Homo sapiens
  misc_RNA (1)...(19): siRNA sense strand
acaccacuucuaccucaua

SEQ ID NO: 2050089 - RNA, 19 nt, Homo sapiens
  misc_RNA (1)...(19): siRNA sense strand
caccaucucgccuucauuc

SEQ ID NO: 2050090 - RNA, 19 nt, Homo sapiens
  misc_RNA (1)...(19): siRNA sense strand
caaagcccaugcggaagag

SEQ ID NO: 2050091 - RNA, 19 nt, Homo sapiens
  misc_RNA (1)...(19): siRNA sense strand
ccacuucuaccucauacuc

SEQ ID NO: 2050092 - RNA, 19 nt, Homo sapiens
  misc_RNA (1)...(19): siRNA sense strand
ggucugugcccuggagcua

SEQ ID NO: 2050093 - RNA, 19 nt, Homo sapiens
  misc_RNA (1)...(19): siRNA sense strand
ccagaacgggcuugcaagu

SEQ ID NO: 2050094 - RNA, 19 nt, Homo sapiens
  misc_RNA (1)...(19): siRNA sense strand
cagaugcugugaaccuaac

SEQ ID NO: 2050095 - RNA, 19 nt, Homo sapiens
  misc_RNA (1)...(19): siRNA sense strand
gggaaaugcugguaaagua

SEQ ID NO: 2050096 - RNA, 19 nt, Homo sapiens
  misc_RNA (1)...(19): siRNA sense strand
ccagaaaucucaccagugu

SEQ ID NO: 2050097 - RNA, 19 nt, Homo sapiens
  misc_RNA (1)...(19): siRNA sense strand
cacaggagcugaugaaaga

SEQ ID NO: 2050098 - RNA, 19 nt, Homo sapiens
  misc_RNA (1)...(19): siRNA sense strand
uaagggaaaugcugguaaa

SEQ ID NO: 2050099 - RNA, 19 nt, Homo sapiens
  misc_RNA (1)...(19): siRNA sense strand
ggaaaugcugguaaaguaa

SEQ ID NO: 2050100 - RNA, 19 nt, Homo sapiens
  misc_RNA (1)...(19): siRNA sense strand
gaaaugcugguaaaguaaa

SEQ ID NO: 2050101 - RNA, 19 nt, Homo sapiens
  misc_RNA (1)...(19): siRNA sense strand
caaagcagauacuaaaggu

SEQ ID NO: 2050102 - RNA, 19 nt, Homo sapiens
  misc_RNA (1)...(19): siRNA sense strand
gagccucagucaccucaaa

SEQ ID NO: 2050103 - RNA, 19 nt, Homo sapiens
  misc_RNA (1)...(19): siRNA sense strand
ccucaaagcagauacuaaa

SEQ ID NO: 2050104 - RNA, 19 nt, Homo sapiens
  misc_RNA (1)...(19): siRNA sense strand
aagcagauacuaaagguuu

SEQ ID NO: 2050105 - RNA, 19 nt, Homo sapiens
  misc_RNA (1)...(19): siRNA sense strand
gcaauaucaguuuguuuga

SEQ ID NO: 2050106 - RNA, 19 nt, Homo sapiens
  misc_RNA (1)...(19): siRNA sense strand
acaccaugcugggcuauaa

SEQ ID NO: 2050107 - RNA, 19 nt, Homo sapiens
  misc_RNA (1)...(19): siRNA sense strand
agaacgggcuugcaaguag

SEQ ID NO: 2050108 - RNA, 19 nt, Homo sapiens
  misc_RNA (1)...(19): siRNA sense strand
gcugugaaccuaacaauac

SEQ ID NO: 2050109 - RNA, 19 nt, Homo sapiens
  misc_RNA (1)...(19): siRNA sense strand
ccaagaagacccacucaca

SEQ ID NO: 2050110 - RNA, 19 nt, Homo sapiens
  misc_RNA (1)...(19): siRNA sense strand
aaguaaaccugcccaagga

SEQ ID NO: 2050111 - RNA, 19 nt, Homo sapiens
  misc_RNA (1)...(19): siRNA sense strand
gcagaugcugugaaccuaa

SEQ ID NO: 2050112 - RNA, 19 nt, Homo sapiens
  misc_RNA (1)...(19): siRNA sense strand
ccggaaagaccaccugaaa

SEQ ID NO: 2050113 - RNA, 19 nt, Homo sapiens
  misc_RNA (1)...(19): siRNA sense strand
ugugaaagaugcuucuaca

SEQ ID NO: 2050114 - RNA, 19 nt, Homo sapiens
  misc_RNA (1)...(19): siRNA sense strand
caucucgccuucauuccaa

SEQ ID NO: 2050115 - RNA, 19 nt, Homo sapiens
  misc_RNA (1)...(19): siRNA sense strand
ggaagaaguacaacaccau

SEQ ID NO: 2050116 - RNA, 19 nt, Homo sapiens
  misc_RNA (1)...(19): siRNA sense strand
ucaaagcccaugcggaaga

SEQ ID NO: 2050117 - RNA, 19 nt, Homo sapiens
  misc_RNA (1)...(19): siRNA sense strand
gcuacuggaccaccucaaa

SEQ ID NO: 2050118 - RNA, 19 nt, Homo sapiens
  misc_RNA (1)...(19): siRNA sense strand
ucauuuccaucaugcauuc

SEQ ID NO: 2050119 - RNA, 19 nt, Homo sapiens
  misc_RNA (1)...(19): siRNA sense strand
uaacaauaccugccucucu

SEQ ID NO: 2050120 - RNA, 19 nt, Homo sapiens
  misc_RNA (1)...(19): siRNA sense strand
cagaacgggcuugcaagua

SEQ ID NO: 2050121 - RNA, 19 nt, Homo sapiens
  misc_RNA (1)...(19): siRNA sense strand
caauaucaguuuguuugag

SEQ ID NO: 2050122 - RNA, 19 nt, Homo sapiens
  misc_RNA (1)...(19): siRNA sense strand
gaagacguucaaccggaaa

SEQ ID NO: 2050123 - RNA, 19 nt, Homo sapiens
  misc_RNA (1)...(19): siRNA sense strand
ugcaauaucaguuuguuug

SEQ ID NO: 2050124 - RNA, 19 nt, Homo sapiens
  misc_RNA (1)...(19): siRNA sense strand
gcugcugccuugccuccuu

SEQ ID NO: 2050125 - RNA, 19 nt, Homo sapiens
  misc_RNA (1)...(19): siRNA sense strand
cauccugccucauuuccau

SEQ ID NO: 2050126 - RNA, 19 nt, Homo sapiens
  misc_RNA (1)...(19): siRNA sense strand
ggacuuccugugccaguuc

SEQ ID NO: 2050127 - RNA, 19 nt, Homo sapiens
  misc_RNA (1)...(19): siRNA sense strand
gcuaagggaaaugcuggua

SEQ ID NO: 2050128 - RNA, 19 nt, Homo sapiens
  misc_RNA (1)...(19): siRNA sense strand
ucacaggagcugaugaaag

SEQ ID NO: 2050129 - RNA, 19 nt, Homo sapiens
  misc_RNA (1)...(19): siRNA sense strand
ccaucaugcauucagauaa

SEQ ID NO: 2050130 - RNA, 19 nt, Homo sapiens
  misc_RNA (1)...(19): siRNA sense strand
cuaagggaaaugcugguaa

SEQ ID NO: 2050131 - RNA, 19 nt, Homo sapiens
  misc_RNA (1)...(19): siRNA sense strand
ucaguuuguuugaggacuu

SEQ ID NO: 2050132 - RNA, 19 nt, Homo sapiens
  misc_RNA (1)...(19): siRNA sense strand
gugcgaccacugugaaaga

SEQ ID NO: 2050133 - RNA, 19 nt, Homo sapiens
  misc_RNA (1)...(19): siRNA sense strand
cugccauccugccucauuu

SEQ ID NO: 2050134 - RNA, 19 nt, Homo sapiens
  misc_RNA (1)...(19): siRNA sense strand
ucacccggcauaccaagaa

SEQ ID NO: 2050135 - RNA, 19 nt, Homo sapiens
  misc_RNA (1)...(19): siRNA sense strand
ucaaagcagauacuaaagg

SEQ ID NO: 2050136 - RNA, 19 nt, Homo sapiens
  misc_RNA (1)...(19): siRNA sense strand
acaccacuucuaccucaua

SEQ ID NO: 2050137 - RNA, 19 nt, Homo sapiens
  misc_RNA (1)...(19): siRNA sense strand
caccaucucgccuucauuc

SEQ ID NO: 2050138 - RNA, 19 nt, Homo sapiens
  misc_RNA (1)...(19): siRNA sense strand
caaagcccaugcggaagag

SEQ ID NO: 2050139 - RNA, 19 nt, Homo sapiens
  misc_RNA (1)...(19): siRNA sense strand
ggucugugcccuggagcua

SEQ ID NO: 2050140 - RNA, 19 nt, Homo sapiens
  misc_RNA (1)...(19): siRNA sense strand
ccacuucuaccucauacuc

SEQ ID NO: 2050141 - RNA, 19 nt, Homo sapiens
  misc_RNA (1)...(19): siRNA sense strand
ccagaacgggcuugcaagu

SEQ ID NO: 2050142 - RNA, 19 nt, Homo sapiens
  misc_RNA (1)...(19): siRNA sense strand
cagaugcugugaaccuaac

SEQ ID NO: 2050143 - RNA, 19 nt, Homo sapiens
  misc_RNA (1)...(19): siRNA sense strand
ucacacagcuccucaauca

SEQ ID NO: 2050144 - RNA, 19 nt, Homo sapiens
  misc_RNA (1)...(19): siRNA sense strand
gcagggcuacggacaguuu

SEQ ID NO: 2050145 - RNA, 19 nt, Homo sapiens
  misc_RNA (1)...(19): siRNA sense strand
ugucuaaccucacccucua

SEQ ID NO: 2050146 - RNA, 19 nt, Homo sapiens
  misc_RNA (1)...(19): siRNA sense strand
caagaugcgagucugguuu

SEQ ID NO: 2050147 - RNA, 19 nt, Homo sapiens
  misc_RNA (1)...(19): siRNA sense strand
acucaaacccuauggacua

SEQ ID NO: 2050148 - RNA, 19 nt, Homo sapiens
  misc_RNA (1)...(19): siRNA sense strand
gacagaacacggccacgaa

SEQ ID NO: 2050149 - RNA, 19 nt, Homo sapiens
  misc_RNA (1)...(19): siRNA sense strand
gagaccaggagcacagaaa

SEQ ID NO: 2050150 - RNA, 19 nt, Homo sapiens
  misc_RNA (1)...(19): siRNA sense strand
gcuacggacaguuugcuuu

SEQ ID NO: 2050151 - RNA, 19 nt, Homo sapiens
  misc_RNA (1)...(19): siRNA sense strand
acacagcuccucaaucagu

SEQ ID NO: 2050152 - RNA, 19 nt, Homo sapiens
  misc_RNA (1)...(19): siRNA sense strand
cacagcuccucaaucaguu

SEQ ID NO: 2050153 - RNA, 19 nt, Homo sapiens
  misc_RNA (1)...(19): siRNA sense strand
ccaagaugcgagucugguu

SEQ ID NO: 2050154 - RNA, 19 nt, Homo sapiens
  misc_RNA (1)...(19): siRNA sense strand
caucacacagcuccucaau

SEQ ID NO: 2050155 - RNA, 19 nt, Homo sapiens
  misc_RNA (1)...(19): siRNA sense strand
cuacggacaguuugcuuuc

SEQ ID NO: 2050156 - RNA, 19 nt, Homo sapiens
  misc_RNA (1)...(19): siRNA sense strand
gcucgucaacggcaucauc

SEQ ID NO: 2050157 - RNA, 19 nt, Homo sapiens
  misc_RNA (1)...(19): siRNA sense strand
ggauuauaucuguccaaga

SEQ ID NO: 2050158 - RNA, 19 nt, Homo sapiens
  misc_RNA (1)...(19): siRNA sense strand
ucacacagcuccucaauca

SEQ ID NO: 2050159 - RNA, 19 nt, Homo sapiens
  misc_RNA (1)...(19): siRNA sense strand
gcagggcuacggacaguuu

SEQ ID NO: 2050160 - RNA, 19 nt, Homo sapiens
  misc_RNA (1)...(19): siRNA sense strand
caagaugcgagucugguuu

SEQ ID NO: 2050161 - RNA, 19 nt, Homo sapiens
  misc_RNA (1)...(19): siRNA sense strand
acucaaacccuauggacua

SEQ ID NO: 2050162 - RNA, 19 nt, Homo sapiens
  misc_RNA (1)...(19): siRNA sense strand
gacagaacacggccacgaa

SEQ ID NO: 2050163 - RNA, 19 nt, Homo sapiens
  misc_RNA (1)...(19): siRNA sense strand
gagaccaggagcacagaaa

SEQ ID NO: 2050164 - RNA, 19 nt, Homo sapiens
  misc_RNA (1)...(19): siRNA sense strand
gcuacggacaguuugcuuu

SEQ ID NO: 2050165 - RNA, 19 nt, Homo sapiens
  misc_RNA (1)...(19): siRNA sense strand
acacagcuccucaaucagu

SEQ ID NO: 2050166 - RNA, 19 nt, Homo sapiens
  misc_RNA (1)...(19): siRNA sense strand
cacagcuccucaaucaguu

SEQ ID NO: 2050167 - RNA, 19 nt, Homo sapiens
  misc_RNA (1)...(19): siRNA sense strand
ccaagaugcgagucugguu

SEQ ID NO: 2050168 - RNA, 19 nt, Homo sapiens
  misc_RNA (1)...(19): siRNA sense strand
caucacacagcuccucaau

SEQ ID NO: 2050169 - RNA, 19 nt, Homo sapiens
  misc_RNA (1)...(19): siRNA sense strand
cuacggacaguuugcuuuc

SEQ ID NO: 2050170 - RNA, 19 nt, Homo sapiens
  misc_RNA (1)...(19): siRNA sense strand
gcucgucaacggcaucauc

SEQ ID NO: 2050171 - RNA, 19 nt, Homo sapiens
  misc_RNA (1)...(19): siRNA sense strand
ggauuauaucuguccaaga

SEQ ID NO: 2050172 - RNA, 19 nt, Homo sapiens
  misc_RNA (1)...(19): siRNA sense strand
ucacacagcuccucaauca

SEQ ID NO: 2050173 - RNA, 19 nt, Homo sapiens
  misc_RNA (1)...(19): siRNA sense strand
gcagggcuacggacaguuu

SEQ ID NO: 2050174 - RNA, 19 nt, Homo sapiens
  misc_RNA (1)...(19): siRNA sense strand
ugucuaaccucacccucua

SEQ ID NO: 2050175 - RNA, 19 nt, Homo sapiens
  misc_RNA (1)...(19): siRNA sense strand
caagaugcgagucugguuu

SEQ ID NO: 2050176 - RNA, 19 nt, Homo sapiens
  misc_RNA (1)...(19): siRNA sense strand
acucaaacccuauggacua

SEQ ID NO: 2050177 - RNA, 19 nt, Homo sapiens
  misc_RNA (1)...(19): siRNA sense strand
gacagaacacggccacgaa

SEQ ID NO: 2050178 - RNA, 19 nt, Homo sapiens
  misc_RNA (1)...(19): siRNA sense strand
gagaccaggagcacagaaa

SEQ ID NO: 2050179 - RNA, 19 nt, Homo sapiens
  misc_RNA (1)...(19): siRNA sense strand
gcuacggacaguuugcuuu

SEQ ID NO: 2050180 - RNA, 19 nt, Homo sapiens
  misc_RNA (1)...(19): siRNA sense strand
acacagcuccucaaucagu

SEQ ID NO: 2050181 - RNA, 19 nt, Homo sapiens
  misc_RNA (1)...(19): siRNA sense strand
cacagcuccucaaucaguu

SEQ ID NO: 2050182 - RNA, 19 nt, Homo sapiens
  misc_RNA (1)...(19): siRNA sense strand
ccaagaugcgagucugguu

SEQ ID NO: 2050183 - RNA, 19 nt, Homo sapiens
  misc_RNA (1)...(19): siRNA sense strand
caucacacagcuccucaau

SEQ ID NO: 2050184 - RNA, 19 nt, Homo sapiens
  misc_RNA (1)...(19): siRNA sense strand
cuacggacaguuugcuuuc

SEQ ID NO: 2050185 - RNA, 19 nt, Homo sapiens
  misc_RNA (1)...(19): siRNA sense strand
gcucgucaacggcaucauc

SEQ ID NO: 2050186 - RNA, 19 nt, Homo sapiens
  misc_RNA (1)...(19): siRNA sense strand
ggauuauaucuguccaaga

SEQ ID NO: 2050187 - RNA, 19 nt, Homo sapiens
  misc_RNA (1)...(19): siRNA sense strand
ucacacagcuccucaauca

SEQ ID NO: 2050188 - RNA, 19 nt, Homo sapiens
  misc_RNA (1)...(19): siRNA sense strand
gcagggcuacggacaguuu

SEQ ID NO: 2050189 - RNA, 19 nt, Homo sapiens
  misc_RNA (1)...(19): siRNA sense strand
caagaugcgagucugguuu

SEQ ID NO: 2050190 - RNA, 19 nt, Homo sapiens
  misc_RNA (1)...(19): siRNA sense strand
acucaaacccuauggacua

SEQ ID NO: 2050191 - RNA, 19 nt, Homo sapiens
  misc_RNA (1)...(19): siRNA sense strand
gacagaacacggccacgaa

SEQ ID NO: 2050192 - RNA, 19 nt, Homo sapiens
  misc_RNA (1)...(19): siRNA sense strand
gagaccaggagcacagaaa

SEQ ID NO: 2050193 - RNA, 19 nt, Homo sapiens
  misc_RNA (1)...(19): siRNA sense strand
gcuacggacaguuugcuuu

SEQ ID NO: 2050194 - RNA, 19 nt, Homo sapiens
  misc_RNA (1)...(19): siRNA sense strand
acacagcuccucaaucagu

SEQ ID NO: 2050195 - RNA, 19 nt, Homo sapiens
  misc_RNA (1)...(19): siRNA sense strand
cacagcuccucaaucaguu

SEQ ID NO: 2050196 - RNA, 19 nt, Homo sapiens
  misc_RNA (1)...(19): siRNA sense strand
ccaagaugcgagucugguu

SEQ ID NO: 2050197 - RNA, 19 nt, Homo sapiens
  misc_RNA (1)...(19): siRNA sense strand
caucacacagcuccucaau

SEQ ID NO: 2050198 - RNA, 19 nt, Homo sapiens
  misc_RNA (1)...(19): siRNA sense strand
cuacggacaguuugcuuuc

SEQ ID NO: 2050199 - RNA, 19 nt, Homo sapiens
  misc_RNA (1)...(19): siRNA sense strand
gcucgucaacggcaucauc

SEQ ID NO: 2050200 - RNA, 19 nt, Homo sapiens
  misc_RNA (1)...(19): siRNA sense strand
ggauuauaucuguccaaga

SEQ ID NO: 2050201 - RNA, 19 nt, Homo sapiens
  misc_RNA (1)...(19): siRNA sense strand
gaaggaagcuuuaugaaga

SEQ ID NO: 2050202 - RNA, 19 nt, Homo sapiens
  misc_RNA (1)...(19): siRNA sense strand
gaucagaaauguucaauuc

SEQ ID NO: 2050203 - RNA, 19 nt, Homo sapiens
  misc_RNA (1)...(19): siRNA sense strand
ggacaaaccugcucucagu

SEQ ID NO: 2050204 - RNA, 19 nt, Homo sapiens
  misc_RNA (1)...(19): siRNA sense strand
caaaugaccacuugcuuua

SEQ ID NO: 2050205 - RNA, 19 nt, Homo sapiens
  misc_RNA (1)...(19): siRNA sense strand
gcucauagcuaaauuccuu

SEQ ID NO: 2050206 - RNA, 19 nt, Homo sapiens
  misc_RNA (1)...(19): siRNA sense strand
caacacagccgacauugaa

SEQ ID NO: 2050207 - RNA, 19 nt, Homo sapiens
  misc_RNA (1)...(19): siRNA sense strand
gugcugagcucaugggauu

SEQ ID NO: 2050208 - RNA, 19 nt, Homo sapiens
  misc_RNA (1)...(19): siRNA sense strand
ggagauggcagcagucuga

SEQ ID NO: 2050209 - RNA, 19 nt, Homo sapiens
  misc_RNA (1)...(19): siRNA sense strand
ugaaugcgcucuauguaug

SEQ ID NO: 2050210 - RNA, 19 nt, Homo sapiens
  misc_RNA (1)...(19): siRNA sense strand
cgacgcaucugaccuugaa

SEQ ID NO: 2050211 - RNA, 19 nt, Homo sapiens
  misc_RNA (1)...(19): siRNA sense strand
gaacgaaggaagcuuuaug

SEQ ID NO: 2050212 - RNA, 19 nt, Homo sapiens
  misc_RNA (1)...(19): siRNA sense strand
gcucucaguuuaccacuug

SEQ ID NO: 2050213 - RNA, 19 nt, Homo sapiens
  misc_RNA (1)...(19): siRNA sense strand
gugaagcccucgaggugua

SEQ ID NO: 2050214 - RNA, 19 nt, Homo sapiens
  misc_RNA (1)...(19): siRNA sense strand
aaugaccacuugcuuuaua

SEQ ID NO: 2050215 - RNA, 19 nt, Homo sapiens
  misc_RNA (1)...(19): siRNA sense strand
ggacccagcuaaagugaag

SEQ ID NO: 2050216 - RNA, 19 nt, Homo sapiens
  misc_RNA (1)...(19): siRNA sense strand
uaauaaagccuccaagcaa

SEQ ID NO: 2050217 - RNA, 19 nt, Homo sapiens
  misc_RNA (1)...(19): siRNA sense strand
gaggagaagugggaugcua

SEQ ID NO: 2050218 - RNA, 19 nt, Homo sapiens
  misc_RNA (1)...(19): siRNA sense strand
ccaaaugaccacuugcuuu

SEQ ID NO: 2050219 - RNA, 19 nt, Homo sapiens
  misc_RNA (1)...(19): siRNA sense strand
gaagcuuuaugaagaggaa

SEQ ID NO: 2050220 - RNA, 19 nt, Homo sapiens
  misc_RNA (1)...(19): siRNA sense strand
ccggaaaugucauggguuu

SEQ ID NO: 2050221 - RNA, 19 nt, Homo sapiens
  misc_RNA (1)...(19): siRNA sense strand
aaggaaacauugccagauu

SEQ ID NO: 2050222 - RNA, 19 nt, Homo sapiens
  misc_RNA (1)...(19): siRNA sense strand
ugaaagaccaggaagaaga

SEQ ID NO: 2050223 - RNA, 19 nt, Homo sapiens
  misc_RNA (1)...(19): siRNA sense strand
gagcucaugggauuacaua

SEQ ID NO: 2050224 - RNA, 19 nt, Homo sapiens
  misc_RNA (1)...(19): siRNA sense strand
gaaaaugccaggaaaagaa

SEQ ID NO: 2050225 - RNA, 19 nt, Homo sapiens
  misc_RNA (1)...(19): siRNA sense strand
gaacugaaggaacgaagga

SEQ ID NO: 2050226 - RNA, 19 nt, Homo sapiens
  misc_RNA (1)...(19): siRNA sense strand
aaacggggaugccuaauaa

SEQ ID NO: 2050227 - RNA, 19 nt, Homo sapiens
  misc_RNA (1)...(19): siRNA sense strand
ggaaacauugccagauuga

SEQ ID NO: 2050228 - RNA, 19 nt, Homo sapiens
  misc_RNA (1)...(19): siRNA sense strand
guuuaccacuugcaucuuu

SEQ ID NO: 2050229 - RNA, 19 nt, Homo sapiens
  misc_RNA (1)...(19): siRNA sense strand
aaagaugccuagaucacaa

SEQ ID NO: 2050230 - RNA, 19 nt, Homo sapiens
  misc_RNA (1)...(19): siRNA sense strand
gcaagauccucccacugau

SEQ ID NO: 2050231 - RNA, 19 nt, Homo sapiens
  misc_RNA (1)...(19): siRNA sense strand
gcaagcaucauugugguuu

SEQ ID NO: 2050232 - RNA, 19 nt, Homo sapiens
  misc_RNA (1)...(19): siRNA sense strand
gaaagaugccuagaucaca

SEQ ID NO: 2050233 - RNA, 19 nt, Homo sapiens
  misc_RNA (1)...(19): siRNA sense strand
uuacauaacugugucuauc

SEQ ID NO: 2050234 - RNA, 19 nt, Homo sapiens
  misc_RNA (1)...(19): siRNA sense strand
aggcggcacugcucaagua

SEQ ID NO: 2050235 - RNA, 19 nt, Homo sapiens
  misc_RNA (1)...(19): siRNA sense strand
uaaagaaucggauacucaa

SEQ ID NO: 2050236 - RNA, 19 nt, Homo sapiens
  misc_RNA (1)...(19): siRNA sense strand
gcacaucuuugagccuugu

SEQ ID NO: 2050237 - RNA, 19 nt, Homo sapiens
  misc_RNA (1)...(19): siRNA sense strand
ccuuggagauccugucaaa

SEQ ID NO: 2050238 - RNA, 19 nt, Homo sapiens
  misc_RNA (1)...(19): siRNA sense strand
uaaaaugccuagaaagaug

SEQ ID NO: 2050239 - RNA, 19 nt, Homo sapiens
  misc_RNA (1)...(19): siRNA sense strand
ggacagacugaaugguauu

SEQ ID NO: 2050240 - RNA, 19 nt, Homo sapiens
  misc_RNA (1)...(19): siRNA sense strand
ucgcucaaauuaucccuaa

SEQ ID NO: 2050241 - RNA, 19 nt, Homo sapiens
  misc_RNA (1)...(19): siRNA sense strand
gaugauucguagaugcauu

SEQ ID NO: 2050242 - RNA, 19 nt, Homo sapiens
  misc_RNA (1)...(19): siRNA sense strand
caacgcaaaguguccauug

SEQ ID NO: 2050243 - RNA, 19 nt, Homo sapiens
  misc_RNA (1)...(19): siRNA sense strand
ggauugugcugagcucaug

SEQ ID NO: 2050244 - RNA, 19 nt, Homo sapiens
  misc_RNA (1)...(19): siRNA sense strand
cuagagaucagaaauguuc

SEQ ID NO: 2050245 - RNA, 19 nt, Homo sapiens
  misc_RNA (1)...(19): siRNA sense strand
ucacagugcuuggcaucaa

SEQ ID NO: 2050246 - RNA, 19 nt, Homo sapiens
  misc_RNA (1)...(19): siRNA sense strand
aaacauugccagauugaau

SEQ ID NO: 2050247 - RNA, 19 nt, Homo sapiens
  misc_RNA (1)...(19): siRNA sense strand
agaaucggauacucaauca

SEQ ID NO: 2050248 - RNA, 19 nt, Homo sapiens
  misc_RNA (1)...(19): siRNA sense strand
gcaucauugugguuucauu

SEQ ID NO: 2050249 - RNA, 19 nt, Homo sapiens
  misc_RNA (1)...(19): siRNA sense strand
ugaauacauugaagaccaa

SEQ ID NO: 2050250 - RNA, 19 nt, Homo sapiens
  misc_RNA (1)...(19): siRNA sense strand
acacagccgacauugaaua

SEQ ID NO: 2050251 - RNA, 19 nt, Homo sapiens
  misc_RNA (1)...(19): siRNA sense strand
caaaguguccauugugcaa

SEQ ID NO: 2050252 - RNA, 19 nt, Homo sapiens
  misc_RNA (1)...(19): siRNA sense strand
ggucagcagcgacaacuug

SEQ ID NO: 2050253 - RNA, 19 nt, Homo sapiens
  misc_RNA (1)...(19): siRNA sense strand
gaaacggggaugccuaaua

SEQ ID NO: 2050254 - RNA, 19 nt, Homo sapiens
  misc_RNA (1)...(19): siRNA sense strand
caugaaagaccaggaagaa

SEQ ID NO: 2050255 - RNA, 19 nt, Homo sapiens
  misc_RNA (1)...(19): siRNA sense strand
cgacauugaauacauugaa

SEQ ID NO: 2050256 - RNA, 19 nt, Homo sapiens
  misc_RNA (1)...(19): siRNA sense strand
cuacaacacagccgacauu

SEQ ID NO: 2050257 - RNA, 19 nt, Homo sapiens
  misc_RNA (1)...(19): siRNA sense strand
gaaagaccaggaagaagag

SEQ ID NO: 2050258 - RNA, 19 nt, Homo sapiens
  misc_RNA (1)...(19): siRNA sense strand
cggcacugcucaaguacaa

SEQ ID NO: 2050259 - RNA, 19 nt, Homo sapiens
  misc_RNA (1)...(19): siRNA sense strand
guucaauucuuugcugaug

SEQ ID NO: 2050260 - RNA, 19 nt, Homo sapiens
  misc_RNA (1)...(19): siRNA sense strand
ucgaacagaugcugagcuu

SEQ ID NO: 2050261 - RNA, 19 nt, Homo sapiens
  misc_RNA (1)...(19): siRNA sense strand
gcagaaauagcauguaagc

SEQ ID NO: 2050262 - RNA, 19 nt, Homo sapiens
  misc_RNA (1)...(19): siRNA sense strand
uagcaguucuucccuugga

SEQ ID NO: 2050263 - RNA, 19 nt, Homo sapiens
  misc_RNA (1)...(19): siRNA sense strand
gauacucaaucacuuuggu

SEQ ID NO: 2050264 - RNA, 19 nt, Homo sapiens
  misc_RNA (1)...(19): siRNA sense strand
cuaaagaaucggauacuca

SEQ ID NO: 2050265 - RNA, 19 nt, Homo sapiens
  misc_RNA (1)...(19): siRNA sense strand
gacauugaauacauugaag

SEQ ID NO: 2050266 - RNA, 19 nt, Homo sapiens
  misc_RNA (1)...(19): siRNA sense strand
auucguagaugcauugaga

SEQ ID NO: 2050267 - RNA, 19 nt, Homo sapiens
  misc_RNA (1)...(19): siRNA sense strand
cgaaggaagcuuuaugaag

SEQ ID NO: 2050268 - RNA, 19 nt, Homo sapiens
  misc_RNA (1)...(19): siRNA sense strand
gaaugcgcucuauguauga

SEQ ID NO: 2050269 - RNA, 19 nt, Homo sapiens
  misc_RNA (1)...(19): siRNA sense strand
gaccuugaaugcgcucuau

SEQ ID NO: 2050270 - RNA, 19 nt, Homo sapiens
  misc_RNA (1)...(19): siRNA sense strand
guacaacgaggcaguuaag

SEQ ID NO: 2050271 - RNA, 19 nt, Homo sapiens
  misc_RNA (1)...(19): siRNA sense strand
gaggaaauggaagaacuuu

SEQ ID NO: 2050272 - RNA, 19 nt, Homo sapiens
  misc_RNA (1)...(19): siRNA sense strand
gcucagugguugacagcau

SEQ ID NO: 2050273 - RNA, 19 nt, Homo sapiens
  misc_RNA (1)...(19): siRNA sense strand
cagccgacauugaauacau

SEQ ID NO: 2050274 - RNA, 19 nt, Homo sapiens
  misc_RNA (1)...(19): siRNA sense strand
ggucucagauuuauuucac

SEQ ID NO: 2050275 - RNA, 19 nt, Homo sapiens
  misc_RNA (1)...(19): siRNA sense strand
aaggacagacugaauggua

SEQ ID NO: 2050276 - RNA, 19 nt, Homo sapiens
  misc_RNA (1)...(19): siRNA sense strand
ccacaugaaagaccaggaa

SEQ ID NO: 2050277 - RNA, 19 nt, Homo sapiens
  misc_RNA (1)...(19): siRNA sense strand
ggaagaagaggaggagaag

SEQ ID NO: 2050278 - RNA, 19 nt, Homo sapiens
  misc_RNA (1)...(19): siRNA sense strand
agacgccgauccucagaug

SEQ ID NO: 2050279 - RNA, 19 nt, Homo sapiens
  misc_RNA (1)...(19): siRNA sense strand
gcucaaauuaucccuaaag

SEQ ID NO: 2050280 - RNA, 19 nt, Homo sapiens
  misc_RNA (1)...(19): siRNA sense strand
gucauggguuucuaucaga

SEQ ID NO: 2050281 - RNA, 19 nt, Homo sapiens
  misc_RNA (1)...(19): siRNA sense strand
gacaggcacgagacaguuu

SEQ ID NO: 2050282 - RNA, 19 nt, Homo sapiens
  misc_RNA (1)...(19): siRNA sense strand
uuaaaggacagacugaaug

SEQ ID NO: 2050283 - RNA, 19 nt, Homo sapiens
  misc_RNA (1)...(19): siRNA sense strand
ggucagcagcaccacauga

SEQ ID NO: 2050284 - RNA, 19 nt, Homo sapiens
  misc_RNA (1)...(19): siRNA sense strand
cuucauaucccgaaaccaa

SEQ ID NO: 2050285 - RNA, 19 nt, Homo sapiens
  misc_RNA (1)...(19): siRNA sense strand
aggaaacauugccagauug

SEQ ID NO: 2050286 - RNA, 19 nt, Homo sapiens
  misc_RNA (1)...(19): siRNA sense strand
gauggacccagcuaaagug

SEQ ID NO: 2050287 - RNA, 19 nt, Homo sapiens
  misc_RNA (1)...(19): siRNA sense strand
ccucaacgccggagagcaa

SEQ ID NO: 2050288 - RNA, 19 nt, Homo sapiens
  misc_RNA (1)...(19): siRNA sense strand
ggagaaagacgccgauccu

SEQ ID NO: 2050289 - RNA, 19 nt, Homo sapiens
  misc_RNA (1)...(19): siRNA sense strand
gaaauguucaauucuuugc

SEQ ID NO: 2050290 - RNA, 19 nt, Homo sapiens
  misc_RNA (1)...(19): siRNA sense strand
cgagacaguuuggcaugug

SEQ ID NO: 2050291 - RNA, 19 nt, Homo sapiens
  misc_RNA (1)...(19): siRNA sense strand
aauaauggaggagcucaua

SEQ ID NO: 2050292 - RNA, 19 nt, Homo sapiens
  misc_RNA (1)...(19): siRNA sense strand
gggaugcuaccucuccaaa

SEQ ID NO: 2050293 - RNA, 19 nt, Homo sapiens
  misc_RNA (1)...(19): siRNA sense strand
aagaagaggaggagaagug

SEQ ID NO: 2050294 - RNA, 19 nt, Homo sapiens
  misc_RNA (1)...(19): siRNA sense strand
acaacgaggcaguuaaguu

SEQ ID NO: 2050295 - RNA, 19 nt, Homo sapiens
  misc_RNA (1)...(19): siRNA sense strand
cuaauaaagccuccaagca

SEQ ID NO: 2050296 - RNA, 19 nt, Homo sapiens
  misc_RNA (1)...(19): siRNA sense strand
ggcuuuaagugccggaaau

SEQ ID NO: 2050297 - RNA, 19 nt, Homo sapiens
  misc_RNA (1)...(19): siRNA sense strand
uucauucgcucaaauuauc

SEQ ID NO: 2050298 - RNA, 19 nt, Homo sapiens
  misc_RNA (1)...(19): siRNA sense strand
gaagaacugaaggaacgaa

SEQ ID NO: 2050299 - RNA, 19 nt, Homo sapiens
  misc_RNA (1)...(19): siRNA sense strand
caagcaucauugugguuuc

SEQ ID NO: 2050300 - RNA, 19 nt, Homo sapiens
  misc_RNA (1)...(19): siRNA sense strand
uaaaggacagacugaaugg

SEQ ID NO: 2050301 - RNA, 19 nt, Homo sapiens
  misc_RNA (1)...(19): siRNA sense strand
gaaagagaaugccaugugu

SEQ ID NO: 2050302 - RNA, 19 nt, Homo sapiens
  misc_RNA (1)...(19): siRNA sense strand
gcaagucugugcagucaaa

SEQ ID NO: 2050303 - RNA, 19 nt, Homo sapiens
  misc_RNA (1)...(19): siRNA sense strand
gauacaagaugaagagaug

SEQ ID NO: 2050304 - RNA, 19 nt, Homo sapiens
  misc_RNA (1)...(19): siRNA sense strand
ggaaggaucuagaugauac

SEQ ID NO: 2050305 - RNA, 19 nt, Homo sapiens
  misc_RNA (1)...(19): siRNA sense strand
gaaagaggcagaaagagaa

SEQ ID NO: 2050306 - RNA, 19 nt, Homo sapiens
  misc_RNA (1)...(19): siRNA sense strand
ggaucuagaugauaccuuu

SEQ ID NO: 2050307 - RNA, 19 nt, Homo sapiens
  misc_RNA (1)...(19): siRNA sense strand
ggucuauucucuauacuuu

SEQ ID NO: 2050308 - RNA, 19 nt, Homo sapiens
  misc_RNA (1)...(19): siRNA sense strand
gcuaaacaacuccagauua

SEQ ID NO: 2050309 - RNA, 19 nt, Homo sapiens
  misc_RNA (1)...(19): siRNA sense strand
gaaacaaaccuaaauggau

SEQ ID NO: 2050310 - RNA, 19 nt, Homo sapiens
  misc_RNA (1)...(19): siRNA sense strand
gcaauugggcgauacauga

SEQ ID NO: 2050311 - RNA, 19 nt, Homo sapiens
  misc_RNA (1)...(19): siRNA sense strand
ugacugaaauugcuaaaca

SEQ ID NO: 2050312 - RNA, 19 nt, Homo sapiens
  misc_RNA (1)...(19): siRNA sense strand
gcacuacauuugcccuauu

SEQ ID NO: 2050313 - RNA, 19 nt, Homo sapiens
  misc_RNA (1)...(19): siRNA sense strand
gcagucaaaccuggaauua

SEQ ID NO: 2050314 - RNA, 19 nt, Homo sapiens
  misc_RNA (1)...(19): siRNA sense strand
gagaaugccaugugugaaa

SEQ ID NO: 2050315 - RNA, 19 nt, Homo sapiens
  misc_RNA (1)...(19): siRNA sense strand
gaaaagcugugcgauauga

SEQ ID NO: 2050316 - RNA, 19 nt, Homo sapiens
  misc_RNA (1)...(19): siRNA sense strand
ggaaacaaaccuaaaugga

SEQ ID NO: 2050317 - RNA, 19 nt, Homo sapiens
  misc_RNA (1)...(19): siRNA sense strand
uaucaagccauuucaagua

SEQ ID NO: 2050318 - RNA, 19 nt, Homo sapiens
  misc_RNA (1)...(19): siRNA sense strand
cuugagcccuugaggaaua

SEQ ID NO: 2050319 - RNA, 19 nt, Homo sapiens
  misc_RNA (1)...(19): siRNA sense strand
cagaagccguuuggccuua

SEQ ID NO: 2050320 - RNA, 19 nt, Homo sapiens
  misc_RNA (1)...(19): siRNA sense strand
uaacgauuguuucacagaa

SEQ ID NO: 2050321 - RNA, 19 nt, Homo sapiens
  misc_RNA (1)...(19): siRNA sense strand
gaugaagagaugaacauuu

SEQ ID NO: 2050322 - RNA, 19 nt, Homo sapiens
  misc_RNA (1)...(19): siRNA sense strand
cacuacauuugcccuauua

SEQ ID NO: 2050323 - RNA, 19 nt, Homo sapiens
  misc_RNA (1)...(19): siRNA sense strand
gaauauaagagggaagaaa

SEQ ID NO: 2050324 - RNA, 19 nt, Homo sapiens
  misc_RNA (1)...(19): siRNA sense strand
gggcaagucugugcaguca

SEQ ID NO: 2050325 - RNA, 19 nt, Homo sapiens
  misc_RNA (1)...(19): siRNA sense strand
caugaagagugguuauguu

SEQ ID NO: 2050326 - RNA, 19 nt, Homo sapiens
  misc_RNA (1)...(19): siRNA sense strand
caacacagcacauccucaa

SEQ ID NO: 2050327 - RNA, 19 nt, Homo sapiens
  misc_RNA (1)...(19): siRNA sense strand
aaaaugcccugaacucuuu

SEQ ID NO: 2050328 - RNA, 19 nt, Homo sapiens
  misc_RNA (1)...(19): siRNA sense strand
ugaaauugcuaaacaacuc

SEQ ID NO: 2050329 - RNA, 19 nt, Homo sapiens
  misc_RNA (1)...(19): siRNA sense strand
aaaccuaaauggauauugg

SEQ ID NO: 2050330 - RNA, 19 nt, Homo sapiens
  misc_RNA (1)...(19): siRNA sense strand
gauucuagaucucaacaca

SEQ ID NO: 2050331 - RNA, 19 nt, Homo sapiens
  misc_RNA (1)...(19): siRNA sense strand
aaauaugguuucagucuuc

SEQ ID NO: 2050332 - RNA, 19 nt, Homo sapiens
  misc_RNA (1)...(19): siRNA sense strand
gaagugggaaacaaaccua

SEQ ID NO: 2050333 - RNA, 19 nt, Homo sapiens
  misc_RNA (1)...(19): siRNA sense strand
aaacaacuccagauuagga

SEQ ID NO: 2050334 - RNA, 19 nt, Homo sapiens
  misc_RNA (1)...(19): siRNA sense strand
gagucuagcugucccaucu

SEQ ID NO: 2050335 - RNA, 19 nt, Homo sapiens
  misc_RNA (1)...(19): siRNA sense strand
gcacauccucaacuucuug

SEQ ID NO: 2050336 - RNA, 19 nt, Homo sapiens
  misc_RNA (1)...(19): siRNA sense strand
cuagagaucuuauguacac

SEQ ID NO: 2050337 - RNA, 19 nt, Homo sapiens
  misc_RNA (1)...(19): siRNA sense strand
ugacacaagcuaagaguau

SEQ ID NO: 2050338 - RNA, 19 nt, Homo sapiens
  misc_RNA (1)...(19): siRNA sense strand
gaagccguuuggccuuauu

SEQ ID NO: 2050339 - RNA, 19 nt, Homo sapiens
  misc_RNA (1)...(19): siRNA sense strand
gcagauacaagaugaagag

SEQ ID NO: 2050340 - RNA, 19 nt, Homo sapiens
  misc_RNA (1)...(19): siRNA sense strand
gauauugggugugugucaa

SEQ ID NO: 2050341 - RNA, 19 nt, Homo sapiens
  misc_RNA (1)...(19): siRNA sense strand
agagaaagaggcagaaaga

SEQ ID NO: 2050342 - RNA, 19 nt, Homo sapiens
  misc_RNA (1)...(19): siRNA sense strand
guagaacuuucagauuaug

SEQ ID NO: 2050343 - RNA, 19 nt, Homo sapiens
  misc_RNA (1)...(19): siRNA sense strand
cauuugcccuauuaagaaa

SEQ ID NO: 2050344 - RNA, 19 nt, Homo sapiens
  misc_RNA (1)...(19): siRNA sense strand
agaaagaggcagaaagaga

SEQ ID NO: 2050345 - RNA, 19 nt, Homo sapiens
  misc_RNA (1)...(19): siRNA sense strand
gaaugaacaagagaugauu

SEQ ID NO: 2050346 - RNA, 19 nt, Homo sapiens
  misc_RNA (1)...(19): siRNA sense strand
ccacaaguaucaaaaccua

SEQ ID NO: 2050347 - RNA, 19 nt, Homo sapiens
  misc_RNA (1)...(19): siRNA sense strand
gacugaaauugcuaaacaa

SEQ ID NO: 2050348 - RNA, 19 nt, Homo sapiens
  misc_RNA (1)...(19): siRNA sense strand
ugggugaucuuuccuuuua

SEQ ID NO: 2050349 - RNA, 19 nt, Homo sapiens
  misc_RNA (1)...(19): siRNA sense strand
guaaaacccaguaaaauug

SEQ ID NO: 2050350 - RNA, 19 nt, Homo sapiens
  misc_RNA (1)...(19): siRNA sense strand
gacacaagcuaagaguaug

SEQ ID NO: 2050351 - RNA, 19 nt, Homo sapiens
  misc_RNA (1)...(19): siRNA sense strand
gaauuacugacacaagcua

SEQ ID NO: 2050352 - RNA, 19 nt, Homo sapiens
  misc_RNA (1)...(19): siRNA sense strand
uuaggcagauacaagauga

SEQ ID NO: 2050353 - RNA, 19 nt, Homo sapiens
  misc_RNA (1)...(19): siRNA sense strand
cuaaacaccagaagcacua

SEQ ID NO: 2050354 - RNA, 19 nt, Homo sapiens
  misc_RNA (1)...(19): siRNA sense strand
cugacccucuucuguguua

SEQ ID NO: 2050355 - RNA, 19 nt, Homo sapiens
  misc_RNA (1)...(19): siRNA sense strand
uagaaaagcugugcgauau

SEQ ID NO: 2050356 - RNA, 19 nt, Homo sapiens
  misc_RNA (1)...(19): siRNA sense strand
cuaagaguaugcaccacaa

SEQ ID NO: 2050357 - RNA, 19 nt, Homo sapiens
  misc_RNA (1)...(19): siRNA sense strand
gaggaauaauauagaacga

SEQ ID NO: 2050358 - RNA, 19 nt, Homo sapiens
  misc_RNA (1)...(19): siRNA sense strand
ccacuaaacaccagaagca

SEQ ID NO: 2050359 - RNA, 19 nt, Homo sapiens
  misc_RNA (1)...(19): siRNA sense strand
caccagaagcacuacauuu

SEQ ID NO: 2050360 - RNA, 19 nt, Homo sapiens
  misc_RNA (1)...(19): siRNA sense strand
agaaagcugccucuuauca

SEQ ID NO: 2050361 - RNA, 19 nt, Homo sapiens
  misc_RNA (1)...(19): siRNA sense strand
cguuuggccuuauuucuau

SEQ ID NO: 2050362 - RNA, 19 nt, Homo sapiens
  misc_RNA (1)...(19): siRNA sense strand
ugucugcccugcuguccua

SEQ ID NO: 2050363 - RNA, 19 nt, Homo sapiens
  misc_RNA (1)...(19): siRNA sense strand
gcugugcgauaugaaagaa

SEQ ID NO: 2050364 - RNA, 19 nt, Homo sapiens
  misc_RNA (1)...(19): siRNA sense strand
acagaauuaucaagccauu

SEQ ID NO: 2050365 - RNA, 19 nt, Homo sapiens
  misc_RNA (1)...(19): siRNA sense strand
agucaaaccuggaauuacu

SEQ ID NO: 2050366 - RNA, 19 nt, Homo sapiens
  misc_RNA (1)...(19): siRNA sense strand
aaagcugccucuuaucaca

SEQ ID NO: 2050367 - RNA, 19 nt, Homo sapiens
  misc_RNA (1)...(19): siRNA sense strand
ggugaucuuuccuuuuaua

SEQ ID NO: 2050368 - RNA, 19 nt, Homo sapiens
  misc_RNA (1)...(19): siRNA sense strand
ccaaggagauuuuaugucu

SEQ ID NO: 2050369 - RNA, 19 nt, Homo sapiens
  misc_RNA (1)...(19): siRNA sense strand
caagccauuucaaguagau

SEQ ID NO: 2050370 - RNA, 19 nt, Homo sapiens
  misc_RNA (1)...(19): siRNA sense strand
gaugauucuuaggcagaua

SEQ ID NO: 2050371 - RNA, 19 nt, Homo sapiens
  misc_RNA (1)...(19): siRNA sense strand
agaaagagaaugccaugug

SEQ ID NO: 2050372 - RNA, 19 nt, Homo sapiens
  misc_RNA (1)...(19): siRNA sense strand
cuuaaaaucugcucaguau

SEQ ID NO: 2050373 - RNA, 19 nt, Homo sapiens
  misc_RNA (1)...(19): siRNA sense strand
cuucuugucucugaggaua

SEQ ID NO: 2050374 - RNA, 19 nt, Homo sapiens
  misc_RNA (1)...(19): siRNA sense strand
gaguaugcaccacaaguau

SEQ ID NO: 2050375 - RNA, 19 nt, Homo sapiens
  misc_RNA (1)...(19): siRNA sense strand
cagauuaggaggagcaaga

SEQ ID NO: 2050376 - RNA, 19 nt, Homo sapiens
  misc_RNA (1)...(19): siRNA sense strand
ccaucugucuggaguacuu

SEQ ID NO: 2050377 - RNA, 19 nt, Homo sapiens
  misc_RNA (1)...(19): siRNA sense strand
ggagguagagggcaagucu

SEQ ID NO: 2050378 - RNA, 19 nt, Homo sapiens
  misc_RNA (1)...(19): siRNA sense strand
ugacagcccuggugaaccu

SEQ ID NO: 2050379 - RNA, 19 nt, Homo sapiens
  misc_RNA (1)...(19): siRNA sense strand
caucaguucugggcggauu

SEQ ID NO: 2050380 - RNA, 19 nt, Homo sapiens
  misc_RNA (1)...(19): siRNA sense strand
aagagaaugccauguguga

SEQ ID NO: 2050381 - RNA, 19 nt, Homo sapiens
  misc_RNA (1)...(19): siRNA sense strand
ugaauugggugaucuuucc

SEQ ID NO: 2050382 - RNA, 19 nt, Homo sapiens
  misc_RNA (1)...(19): siRNA sense strand
guaguaaaacccaguaaaa

SEQ ID NO: 2050383 - RNA, 19 nt, Homo sapiens
  misc_RNA (1)...(19): siRNA sense strand
cacagcacauccucaacuu

SEQ ID NO: 2050384 - RNA, 19 nt, Homo sapiens
  misc_RNA (1)...(19): siRNA sense strand
agaguaugcaccacaagua

SEQ ID NO: 2050385 - RNA, 19 nt, Homo sapiens
  misc_RNA (1)...(19): siRNA sense strand
gagaucuuauguacacagu

SEQ ID NO: 2050386 - RNA, 19 nt, Homo sapiens
  misc_RNA (1)...(19): siRNA sense strand
uacauuugcccuauuaaga

SEQ ID NO: 2050387 - RNA, 19 nt, Homo sapiens
  misc_RNA (1)...(19): siRNA sense strand
agaauuaucaagccauuuc

SEQ ID NO: 2050388 - RNA, 19 nt, Homo sapiens
  misc_RNA (1)...(19): siRNA sense strand
acauuugcccuauuaagaa

SEQ ID NO: 2050389 - RNA, 19 nt, Homo sapiens
  misc_RNA (1)...(19): siRNA sense strand
gggaaacaaaccuaaaugg

SEQ ID NO: 2050390 - RNA, 19 nt, Homo sapiens
  misc_RNA (1)...(19): siRNA sense strand
caagagaaagaggcagaaa

SEQ ID NO: 2050391 - RNA, 19 nt, Homo sapiens
  misc_RNA (1)...(19): siRNA sense strand
guaugcaccacaaguauca

SEQ ID NO: 2050392 - RNA, 19 nt, Homo sapiens
  misc_RNA (1)...(19): siRNA sense strand
ugaaagacccagugaccau

SEQ ID NO: 2050393 - RNA, 19 nt, Homo sapiens
  misc_RNA (1)...(19): siRNA sense strand
acagauuccgaaccucuua

SEQ ID NO: 2050394 - RNA, 19 nt, Homo sapiens
  misc_RNA (1)...(19): siRNA sense strand
caauugggcgauacaugaa

SEQ ID NO: 2050395 - RNA, 19 nt, Homo sapiens
  misc_RNA (1)...(19): siRNA sense strand
aaauggauauugggugugu

SEQ ID NO: 2050396 - RNA, 19 nt, Homo sapiens
  misc_RNA (1)...(19): siRNA sense strand
gccuugagcccuugaggaa

SEQ ID NO: 2050397 - RNA, 19 nt, Homo sapiens
  misc_RNA (1)...(19): siRNA sense strand
cuccguaauuugacugaaa

SEQ ID NO: 2050398 - RNA, 19 nt, Homo sapiens
  misc_RNA (1)...(19): siRNA sense strand
gaaguagaagugggaaaca

SEQ ID NO: 2050399 - RNA, 19 nt, Homo sapiens
  misc_RNA (1)...(19): siRNA sense strand
ggaaguagaagugggaaac

SEQ ID NO: 2050400 - RNA, 19 nt, Homo sapiens
  misc_RNA (1)...(19): siRNA sense strand
ucagucuuccuccucaaua

SEQ ID NO: 2050401 - RNA, 19 nt, Homo sapiens
  misc_RNA (1)...(19): siRNA sense strand
gagagauccugaagacuua

SEQ ID NO: 2050402 - RNA, 19 nt, Homo sapiens
  misc_RNA (1)...(19): siRNA sense strand
ggaaggagguggucuacuu

SEQ ID NO: 2050403 - RNA, 19 nt, Homo sapiens
  misc_RNA (1)...(19): siRNA sense strand
gaggaugucuugauaaugu

SEQ ID NO: 2050404 - RNA, 19 nt, Homo sapiens
  misc_RNA (1)...(19): siRNA sense strand
gaaggagguggucuacuua

SEQ ID NO: 2050405 - RNA, 19 nt, Homo sapiens
  misc_RNA (1)...(19): siRNA sense strand
caaggaaccugcggccuaa

SEQ ID NO: 2050406 - RNA, 19 nt, Homo sapiens
  misc_RNA (1)...(19): siRNA sense strand
gaaguggccugucccaucu

SEQ ID NO: 2050407 - RNA, 19 nt, Homo sapiens
  misc_RNA (1)...(19): siRNA sense strand
gaagaaagagcaagaagag

SEQ ID NO: 2050408 - RNA, 19 nt, Homo sapiens
  misc_RNA (1)...(19): siRNA sense strand
gggaaaagcugaagauguu

SEQ ID NO: 2050409 - RNA, 19 nt, Homo sapiens
  misc_RNA (1)...(19): siRNA sense strand
ucgaacaucugaagaaaga

SEQ ID NO: 2050410 - RNA, 19 nt, Homo sapiens
  misc_RNA (1)...(19): siRNA sense strand
uaagagagauccugaagac

SEQ ID NO: 2050411 - RNA, 19 nt, Homo sapiens
  misc_RNA (1)...(19): siRNA sense strand
ggaggaugauugcagaguu

SEQ ID NO: 2050412 - RNA, 19 nt, Homo sapiens
  misc_RNA (1)...(19): siRNA sense strand
gaggaugauugcagaguug

SEQ ID NO: 2050413 - RNA, 19 nt, Homo sapiens
  misc_RNA (1)...(19): siRNA sense strand
gcucccacaucuucacuuu

SEQ ID NO: 2050414 - RNA, 19 nt, Homo sapiens
  misc_RNA (1)...(19): siRNA sense strand
gagcaggcaccgaugagua

SEQ ID NO: 2050415 - RNA, 19 nt, Homo sapiens
  misc_RNA (1)...(19): siRNA sense strand
gcugaagggugaccugugu

SEQ ID NO: 2050416 - RNA, 19 nt, Homo sapiens
  misc_RNA (1)...(19): siRNA sense strand
ugaaguuggugaaaggaaa

SEQ ID NO: 2050417 - RNA, 19 nt, Homo sapiens
  misc_RNA (1)...(19): siRNA sense strand
ggauauucaggaaguguua

SEQ ID NO: 2050418 - RNA, 19 nt, Homo sapiens
  misc_RNA (1)...(19): siRNA sense strand
gcagcuggccaauguugua

SEQ ID NO: 2050419 - RNA, 19 nt, Homo sapiens
  misc_RNA (1)...(19): siRNA sense strand
uaccagcgauuacuagaga

SEQ ID NO: 2050420 - RNA, 19 nt, Homo sapiens
  misc_RNA (1)...(19): siRNA sense strand
cccaugacauuucuuucua

SEQ ID NO: 2050421 - RNA, 19 nt, Homo sapiens
  misc_RNA (1)...(19): siRNA sense strand
ggaagccauuguggaagaa

SEQ ID NO: 2050422 - RNA, 19 nt, Homo sapiens
  misc_RNA (1)...(19): siRNA sense strand
gguggaagccauuguggaa

SEQ ID NO: 2050423 - RNA, 19 nt, Homo sapiens
  misc_RNA (1)...(19): siRNA sense strand
gaaaacgugugcacuaugg

SEQ ID NO: 2050424 - RNA, 19 nt, Homo sapiens
  misc_RNA (1)...(19): siRNA sense strand
ccucgaacaucugaagaaa

SEQ ID NO: 2050425 - RNA, 19 nt, Homo sapiens
  misc_RNA (1)...(19): siRNA sense strand
gaagauguucugcaaagag

SEQ ID NO: 2050426 - RNA, 19 nt, Homo sapiens
  misc_RNA (1)...(19): siRNA sense strand
gaagacuuaugcagcugau

SEQ ID NO: 2050427 - RNA, 19 nt, Homo sapiens
  misc_RNA (1)...(19): siRNA sense strand
gcuggccaauguuguagaa

SEQ ID NO: 2050428 - RNA, 19 nt, Homo sapiens
  misc_RNA (1)...(19): siRNA sense strand
uaaacaggagcaaaucuug

SEQ ID NO: 2050429 - RNA, 19 nt, Homo sapiens
  misc_RNA (1)...(19): siRNA sense strand
gcaugaggcccacaguguu

SEQ ID NO: 2050430 - RNA, 19 nt, Homo sapiens
  misc_RNA (1)...(19): siRNA sense strand
gccagacaauccugagaga

SEQ ID NO: 2050431 - RNA, 19 nt, Homo sapiens
  misc_RNA (1)...(19): siRNA sense strand
agagagauccugaagacuu

SEQ ID NO: 2050432 - RNA, 19 nt, Homo sapiens
  misc_RNA (1)...(19): siRNA sense strand
cagcggagaccaugcagaa

SEQ ID NO: 2050433 - RNA, 19 nt, Homo sapiens
  misc_RNA (1)...(19): siRNA sense strand
gaaaacagaguauuguaug

SEQ ID NO: 2050434 - RNA, 19 nt, Homo sapiens
  misc_RNA (1)...(19): siRNA sense strand
uggaagccauuguggaaga

SEQ ID NO: 2050435 - RNA, 19 nt, Homo sapiens
  misc_RNA (1)...(19): siRNA sense strand
gaugauugcagaguugaaa

SEQ ID NO: 2050436 - RNA, 19 nt, Homo sapiens
  misc_RNA (1)...(19): siRNA sense strand
ggaaccugcggccuaauug

SEQ ID NO: 2050437 - RNA, 19 nt, Homo sapiens
  misc_RNA (1)...(19): siRNA sense strand
gcgcuuggauccagauacu

SEQ ID NO: 2050438 - RNA, 19 nt, Homo sapiens
  misc_RNA (1)...(19): siRNA sense strand
gaacugccaccuggaagau

SEQ ID NO: 2050439 - RNA, 19 nt, Homo sapiens
  misc_RNA (1)...(19): siRNA sense strand
cugaagauguucugcaaag

SEQ ID NO: 2050440 - RNA, 19 nt, Homo sapiens
  misc_RNA (1)...(19): siRNA sense strand
ugaagaaagagcaagaaga

SEQ ID NO: 2050441 - RNA, 19 nt, Homo sapiens
  misc_RNA (1)...(19): siRNA sense strand
ugaggaagggaaaugagua

SEQ ID NO: 2050442 - RNA, 19 nt, Homo sapiens
  misc_RNA (1)...(19): siRNA sense strand
ugaagauguucugcaaaga

SEQ ID NO: 2050443 - RNA, 19 nt, Homo sapiens
  misc_RNA (1)...(19): siRNA sense strand
uauggauucugggugauaa

SEQ ID NO: 2050444 - RNA, 19 nt, Homo sapiens
  misc_RNA (1)...(19): siRNA sense strand
gcuggauguugcaggauau

SEQ ID NO: 2050445 - RNA, 19 nt, Homo sapiens
  misc_RNA (1)...(19): siRNA sense strand
gcuugaaguuggugaaagg

SEQ ID NO: 2050446 - RNA, 19 nt, Homo sapiens
  misc_RNA (1)...(19): siRNA sense strand
ggauguugcaggauauuca

SEQ ID NO: 2050447 - RNA, 19 nt, Homo sapiens
  misc_RNA (1)...(19): siRNA sense strand
gcuaagagagauccugaag

SEQ ID NO: 2050448 - RNA, 19 nt, Homo sapiens
  misc_RNA (1)...(19): siRNA sense strand
gauguugccugggaguaca

SEQ ID NO: 2050449 - RNA, 19 nt, Homo sapiens
  misc_RNA (1)...(19): siRNA sense strand
caugacauuucuuucuaca

SEQ ID NO: 2050450 - RNA, 19 nt, Homo sapiens
  misc_RNA (1)...(19): siRNA sense strand
gggagcccaugagcauuga

SEQ ID NO: 2050451 - RNA, 19 nt, Homo sapiens
  misc_RNA (1)...(19): siRNA sense strand
uuaugaggcccaugacauu

SEQ ID NO: 2050452 - RNA, 19 nt, Homo sapiens
  misc_RNA (1)...(19): siRNA sense strand
gcaccgaugaguacccaau

SEQ ID NO: 2050453 - RNA, 19 nt, Homo sapiens
  misc_RNA (1)...(19): siRNA sense strand
accagaaacugccagacaa

SEQ ID NO: 2050454 - RNA, 19 nt, Homo sapiens
  misc_RNA (1)...(19): siRNA sense strand
cagcugaugugcgcuugga

SEQ ID NO: 2050455 - RNA, 19 nt, Homo sapiens
  misc_RNA (1)...(19): siRNA sense strand
caugaggcccacaguguug

SEQ ID NO: 2050456 - RNA, 19 nt, Homo sapiens
  misc_RNA (1)...(19): siRNA sense strand
ggagaucccaggagaaucc

SEQ ID NO: 2050457 - RNA, 19 nt, Homo sapiens
  misc_RNA (1)...(19): siRNA sense strand
ugagggagcccaugagcau

SEQ ID NO: 2050458 - RNA, 19 nt, Homo sapiens
  misc_RNA (1)...(19): siRNA sense strand
cgcuggauguugcaggaua

SEQ ID NO: 2050459 - RNA, 19 nt, Homo sapiens
  misc_RNA (1)...(19): siRNA sense strand
uuaaacaggagcaaaucuu

SEQ ID NO: 2050460 - RNA, 19 nt, Homo sapiens
  misc_RNA (1)...(19): siRNA sense strand
gcaggauauucaggaagug

SEQ ID NO: 2050461 - RNA, 19 nt, Homo sapiens
  misc_RNA (1)...(19): siRNA sense strand
gaagcuugaaguuggugaa

SEQ ID NO: 2050462 - RNA, 19 nt, Homo sapiens
  misc_RNA (1)...(19): siRNA sense strand
guugcaggauauucaggaa

SEQ ID NO: 2050463 - RNA, 19 nt, Homo sapiens
  misc_RNA (1)...(19): siRNA sense strand
ggugaaaggaaacgaacug

SEQ ID NO: 2050464 - RNA, 19 nt, Homo sapiens
  misc_RNA (1)...(19): siRNA sense strand
ccaggagaaucccagaacu

SEQ ID NO: 2050465 - RNA, 19 nt, Homo sapiens
  misc_RNA (1)...(19): siRNA sense strand
ccagaaacugccagacaau

SEQ ID NO: 2050466 - RNA, 19 nt, Homo sapiens
  misc_RNA (1)...(19): siRNA sense strand
cagaaaacgugugcacuau

SEQ ID NO: 2050467 - RNA, 19 nt, Homo sapiens
  misc_RNA (1)...(19): siRNA sense strand
gauauucaggaaguguuaa

SEQ ID NO: 2050468 - RNA, 19 nt, Homo sapiens
  misc_RNA (1)...(19): siRNA sense strand
ugaagggugaccuguguga

SEQ ID NO: 2050469 - RNA, 19 nt, Homo sapiens
  misc_RNA (1)...(19): siRNA sense strand
gaaccugcggccuaauugg

SEQ ID NO: 2050470 - RNA, 19 nt, Homo sapiens
  misc_RNA (1)...(19): siRNA sense strand
ggaagauacagguggaaac

SEQ ID NO: 2050471 - RNA, 19 nt, Homo sapiens
  misc_RNA (1)...(19): siRNA sense strand
ccaugacauuucuuucuac

SEQ ID NO: 2050472 - RNA, 19 nt, Homo sapiens
  misc_RNA (1)...(19): siRNA sense strand
ggauccagauacugcuuac

SEQ ID NO: 2050473 - RNA, 19 nt, Homo sapiens
  misc_RNA (1)...(19): siRNA sense strand
aaggcuacauccaggaaug

SEQ ID NO: 2050474 - RNA, 19 nt, Homo sapiens
  misc_RNA (1)...(19): siRNA sense strand
cgaacugccaccuggaaga

SEQ ID NO: 2050475 - RNA, 19 nt, Homo sapiens
  misc_RNA (1)...(19): siRNA sense strand
ggcgccuccugcccuauuu

SEQ ID NO: 2050476 - RNA, 19 nt, Homo sapiens
  misc_RNA (1)...(19): siRNA sense strand
gcccaugacauuucuuucu

SEQ ID NO: 2050477 - RNA, 19 nt, Homo sapiens
  misc_RNA (1)...(19): siRNA sense strand
ggagacaccaaccagaaac

SEQ ID NO: 2050478 - RNA, 19 nt, Homo sapiens
  misc_RNA (1)...(19): siRNA sense strand
agacuuaugcagcugaugu

SEQ ID NO: 2050479 - RNA, 19 nt, Homo sapiens
  misc_RNA (1)...(19): siRNA sense strand
ugcaggauauucaggaagu

SEQ ID NO: 2050480 - RNA, 19 nt, Homo sapiens
  misc_RNA (1)...(19): siRNA sense strand
gcggagaccaugcagaaac

SEQ ID NO: 2050481 - RNA, 19 nt, Homo sapiens
  misc_RNA (1)...(19): siRNA sense strand
uaugaggcccaugacauuu

SEQ ID NO: 2050482 - RNA, 19 nt, Homo sapiens
  misc_RNA (1)...(19): siRNA sense strand
cugggaguauguaagcaaa

SEQ ID NO: 2050483 - RNA, 19 nt, Homo sapiens
  misc_RNA (1)...(19): siRNA sense strand
ugagagauuuuaccgcuau

SEQ ID NO: 2050484 - RNA, 19 nt, Homo sapiens
  misc_RNA (1)...(19): siRNA sense strand
gcagcagccagaaccaauc

SEQ ID NO: 2050485 - RNA, 19 nt, Homo sapiens
  misc_RNA (1)...(19): siRNA sense strand
gaagauacagguggaaacc

SEQ ID NO: 2050486 - RNA, 19 nt, Homo sapiens
  misc_RNA (1)...(19): siRNA sense strand
gaggaagggaaaugaguac

SEQ ID NO: 2050487 - RNA, 19 nt, Homo sapiens
  misc_RNA (1)...(19): siRNA sense strand
ggagguggucuacuuaucc

SEQ ID NO: 2050488 - RNA, 19 nt, Homo sapiens
  misc_RNA (1)...(19): siRNA sense strand
cggagaccaugcagaaacu

SEQ ID NO: 2050489 - RNA, 19 nt, Homo sapiens
  misc_RNA (1)...(19): siRNA sense strand
ccagcgauuacuagagaaa

SEQ ID NO: 2050490 - RNA, 19 nt, Homo sapiens
  misc_RNA (1)...(19): siRNA sense strand
uggauuaugaggcccauga

SEQ ID NO: 2050491 - RNA, 19 nt, Homo sapiens
  misc_RNA (1)...(19): siRNA sense strand
cuaagagagauccugaaga

SEQ ID NO: 2050492 - RNA, 19 nt, Homo sapiens
  misc_RNA (1)...(19): siRNA sense strand
gcugaagauguucugcaaa

SEQ ID NO: 2050493 - RNA, 19 nt, Homo sapiens
  misc_RNA (1)...(19): siRNA sense strand
agaagaggccuggaagcuu

SEQ ID NO: 2050494 - RNA, 19 nt, Homo sapiens
  misc_RNA (1)...(19): siRNA sense strand
uggagacaccaaccagaaa

SEQ ID NO: 2050495 - RNA, 19 nt, Homo sapiens
  misc_RNA (1)...(19): siRNA sense strand
gaaguuggugaaaggaaac

SEQ ID NO: 2050496 - RNA, 19 nt, Homo sapiens
  misc_RNA (1)...(19): siRNA sense strand
cagagcagcuggagaaguu

SEQ ID NO: 2050497 - RNA, 19 nt, Homo sapiens
  misc_RNA (1)...(19): siRNA sense strand
ccauggaucuggugaagaa

SEQ ID NO: 2050498 - RNA, 19 nt, Homo sapiens
  misc_RNA (1)...(19): siRNA sense strand
gagagcugguggagaagaa

SEQ ID NO: 2050499 - RNA, 19 nt, Homo sapiens
  misc_RNA (1)...(19): siRNA sense strand
uccgagagcugguggagaa

SEQ ID NO: 2050500 - RNA, 19 nt, Homo sapiens
  misc_RNA (1)...(19): siRNA sense strand
gaagaacucccagcuagag

SEQ ID NO: 2050501 - RNA, 19 nt, Homo sapiens
  misc_RNA (1)...(19): siRNA sense strand
ucugauguaugcugugaga

SEQ ID NO: 2050502 - RNA, 19 nt, Homo sapiens
  misc_RNA (1)...(19): siRNA sense strand
ggccauagacaacaagauc

SEQ ID NO: 2050503 - RNA, 19 nt, Homo sapiens
  misc_RNA (1)...(19): siRNA sense strand
gaucgaacaggccauggau

SEQ ID NO: 2050504 - RNA, 19 nt, Homo sapiens
  misc_RNA (1)...(19): siRNA sense strand
ggccauggaucuggugaag

SEQ ID NO: 2050505 - RNA, 19 nt, Homo sapiens
  misc_RNA (1)...(19): siRNA sense strand
ugagagaggagguggagau

SEQ ID NO: 2050506 - RNA, 19 nt, Homo sapiens
  misc_RNA (1)...(19): siRNA sense strand
uggaucuggugaagaauca

SEQ ID NO: 2050507 - RNA, 19 nt, Homo sapiens
  misc_RNA (1)...(19): siRNA sense strand
ccagcgugguggccauaga

SEQ ID NO: 2050508 - RNA, 19 nt, Homo sapiens
  misc_RNA (1)...(19): siRNA sense strand
ugauguaugcugugagaga

SEQ ID NO: 2050509 - RNA, 19 nt, Homo sapiens
  misc_RNA (1)...(19): siRNA sense strand
cagagcagcuggagaaguu

SEQ ID NO: 2050510 - RNA, 19 nt, Homo sapiens
  misc_RNA (1)...(19): siRNA sense strand
ccauggaucuggugaagaa

SEQ ID NO: 2050511 - RNA, 19 nt, Homo sapiens
  misc_RNA (1)...(19): siRNA sense strand
gagagcugguggagaagaa

SEQ ID NO: 2050512 - RNA, 19 nt, Homo sapiens
  misc_RNA (1)...(19): siRNA sense strand
uccgagagcugguggagaa

SEQ ID NO: 2050513 - RNA, 19 nt, Homo sapiens
  misc_RNA (1)...(19): siRNA sense strand
gaagaacucccagcuagag

SEQ ID NO: 2050514 - RNA, 19 nt, Homo sapiens
  misc_RNA (1)...(19): siRNA sense strand
ucugauguaugcugugaga

SEQ ID NO: 2050515 - RNA, 19 nt, Homo sapiens
  misc_RNA (1)...(19): siRNA sense strand
ggccauagacaacaagauc

SEQ ID NO: 2050516 - RNA, 19 nt, Homo sapiens
  misc_RNA (1)...(19): siRNA sense strand
gaucgaacaggccauggau

SEQ ID NO: 2050517 - RNA, 19 nt, Homo sapiens
  misc_RNA (1)...(19): siRNA sense strand
ggccauggaucuggugaag

SEQ ID NO: 2050518 - RNA, 19 nt, Homo sapiens
  misc_RNA (1)...(19): siRNA sense strand
ugagagaggagguggagau

SEQ ID NO: 2050519 - RNA, 19 nt, Homo sapiens
  misc_RNA (1)...(19): siRNA sense strand
uggaucuggugaagaauca

SEQ ID NO: 2050520 - RNA, 19 nt, Homo sapiens
  misc_RNA (1)...(19): siRNA sense strand
ccagcgugguggccauaga

SEQ ID NO: 2050521 - RNA, 19 nt, Homo sapiens
  misc_RNA (1)...(19): siRNA sense strand
ugauguaugcugugagaga

SEQ ID NO: 2050522 - RNA, 19 nt, Homo sapiens
  misc_RNA (1)...(19): siRNA sense strand
cagagcagcuggagaaguu

SEQ ID NO: 2050523 - RNA, 19 nt, Homo sapiens
  misc_RNA (1)...(19): siRNA sense strand
ccauggaucuggugaagaa

SEQ ID NO: 2050524 - RNA, 19 nt, Homo sapiens
  misc_RNA (1)...(19): siRNA sense strand
gagagcugguggagaagaa

SEQ ID NO: 2050525 - RNA, 19 nt, Homo sapiens
  misc_RNA (1)...(19): siRNA sense strand
uccgagagcugguggagaa

SEQ ID NO: 2050526 - RNA, 19 nt, Homo sapiens
  misc_RNA (1)...(19): siRNA sense strand
gaagaacucccagcuagag

SEQ ID NO: 2050527 - RNA, 19 nt, Homo sapiens
  misc_RNA (1)...(19): siRNA sense strand
ucugauguaugcugugaga

SEQ ID NO: 2050528 - RNA, 19 nt, Homo sapiens
  misc_RNA (1)...(19): siRNA sense strand
ggccauagacaacaagauc

SEQ ID NO: 2050529 - RNA, 19 nt, Homo sapiens
  misc_RNA (1)...(19): siRNA sense strand
gaucgaacaggccauggau

SEQ ID NO: 2050530 - RNA, 19 nt, Homo sapiens
  misc_RNA (1)...(19): siRNA sense strand
ggccauggaucuggugaag

SEQ ID NO: 2050531 - RNA, 19 nt, Homo sapiens
  misc_RNA (1)...(19): siRNA sense strand
ugagagaggagguggagau

SEQ ID NO: 2050532 - RNA, 19 nt, Homo sapiens
  misc_RNA (1)...(19): siRNA sense strand
uggaucuggugaagaauca

SEQ ID NO: 2050533 - RNA, 19 nt, Homo sapiens
  misc_RNA (1)...(19): siRNA sense strand
ccagcgugguggccauaga

SEQ ID NO: 2050534 - RNA, 19 nt, Homo sapiens
  misc_RNA (1)...(19): siRNA sense strand
ugauguaugcugugagaga

SEQ ID NO: 2050535 - RNA, 19 nt, Homo sapiens
  misc_RNA (1)...(19): siRNA sense strand
cagagcagcuggagaaguu

SEQ ID NO: 2050536 - RNA, 19 nt, Homo sapiens
  misc_RNA (1)...(19): siRNA sense strand
ccauggaucuggugaagaa

SEQ ID NO: 2050537 - RNA, 19 nt, Homo sapiens
  misc_RNA (1)...(19): siRNA sense strand
gagagcugguggagaagaa

SEQ ID NO: 2050538 - RNA, 19 nt, Homo sapiens
  misc_RNA (1)...(19): siRNA sense strand
uccgagagcugguggagaa

SEQ ID NO: 2050539 - RNA, 19 nt, Homo sapiens
  misc_RNA (1)...(19): siRNA sense strand
gaagaacucccagcuagag

SEQ ID NO: 2050540 - RNA, 19 nt, Homo sapiens
  misc_RNA (1)...(19): siRNA sense strand
ucugauguaugcugugaga

SEQ ID NO: 2050541 - RNA, 19 nt, Homo sapiens
  misc_RNA (1)...(19): siRNA sense strand
ggccauagacaacaagauc

SEQ ID NO: 2050542 - RNA, 19 nt, Homo sapiens
  misc_RNA (1)...(19): siRNA sense strand
gaucgaacaggccauggau

SEQ ID NO: 2050543 - RNA, 19 nt, Homo sapiens
  misc_RNA (1)...(19): siRNA sense strand
ggccauggaucuggugaag

SEQ ID NO: 2050544 - RNA, 19 nt, Homo sapiens
  misc_RNA (1)...(19): siRNA sense strand
ugagagaggagguggagau

SEQ ID NO: 2050545 - RNA, 19 nt, Homo sapiens
  misc_RNA (1)...(19): siRNA sense strand
uggaucuggugaagaauca

SEQ ID NO: 2050546 - RNA, 19 nt, Homo sapiens
  misc_RNA (1)...(19): siRNA sense strand
ccagcgugguggccauaga

SEQ ID NO: 2050547 - RNA, 19 nt, Homo sapiens
  misc_RNA (1)...(19): siRNA sense strand
ugauguaugcugugagaga

SEQ ID NO: 2050548 - RNA, 19 nt, Homo sapiens
  misc_RNA (1)...(19): siRNA sense strand
gcugugcgcuacacuuucu

SEQ ID NO: 2050549 - RNA, 19 nt, Homo sapiens
  misc_RNA (1)...(19): siRNA sense strand
uggcacaggucaagguguu

SEQ ID NO: 2050550 - RNA, 19 nt, Homo sapiens
  misc_RNA (1)...(19): siRNA sense strand
gcaacguggccuucgagaa

SEQ ID NO: 2050551 - RNA, 19 nt, Homo sapiens
  misc_RNA (1)...(19): siRNA sense strand
caccuucggcuuuccagua

SEQ ID NO: 2050552 - RNA, 19 nt, Homo sapiens
  misc_RNA (1)...(19): siRNA sense strand
gagacuacagccucacaug

SEQ ID NO: 2050553 - RNA, 19 nt, Homo sapiens
  misc_RNA (1)...(19): siRNA sense strand
caacgaccaccgagacuac

SEQ ID NO: 2050554 - RNA, 19 nt, Homo sapiens
  misc_RNA (1)...(19): siRNA sense strand
ugucgcggcucgcaaucaa

SEQ ID NO: 2050555 - RNA, 19 nt, Homo sapiens
  misc_RNA (1)...(19): siRNA sense strand
gcucggaccuuggcaucag

SEQ ID NO: 2050556 - RNA, 19 nt, Homo sapiens
  misc_RNA (1)...(19): siRNA sense strand
gcacaggucaagguguuca

SEQ ID NO: 2050557 - RNA, 19 nt, Homo sapiens
  misc_RNA (1)...(19): siRNA sense strand
gccuggagcgugucacuug

SEQ ID NO: 2050558 - RNA, 19 nt, Homo sapiens
  misc_RNA (1)...(19): siRNA sense strand
guacggugcgcgugugcaa

SEQ ID NO: 2050559 - RNA, 19 nt, Homo sapiens
  misc_RNA (1)...(19): siRNA sense strand
gacuacagccucacauguc

SEQ ID NO: 2050560 - RNA, 19 nt, Homo sapiens
  misc_RNA (1)...(19): siRNA sense strand
caaccacgcgcugcacaug

SEQ ID NO: 2050561 - RNA, 19 nt, Homo sapiens
  misc_RNA (1)...(19): siRNA sense strand
gagcuggauccacuucauc

SEQ ID NO: 2050562 - RNA, 19 nt, Homo sapiens
  misc_RNA (1)...(19): siRNA sense strand
uggcugugcgcuacacuuu

SEQ ID NO: 2050563 - RNA, 19 nt, Homo sapiens
  misc_RNA (1)...(19): siRNA sense strand
agacuacagccucacaugu

SEQ ID NO: 2050564 - RNA, 19 nt, Homo sapiens
  misc_RNA (1)...(19): siRNA sense strand
ggacagccuucuucaugua

SEQ ID NO: 2050565 - RNA, 19 nt, Homo sapiens
  misc_RNA (1)...(19): siRNA sense strand
gggacagccuucuucaugu

SEQ ID NO: 2050566 - RNA, 19 nt, Homo sapiens
  misc_RNA (1)...(19): siRNA sense strand
ugccauccuuauuguguua

SEQ ID NO: 2050567 - RNA, 19 nt, Homo sapiens
  misc_RNA (1)...(19): siRNA sense strand
ucucuucucugccauccuu

SEQ ID NO: 2050568 - RNA, 19 nt, Homo sapiens
  misc_RNA (1)...(19): siRNA sense strand
gagcauccacgucaauguc

SEQ ID NO: 2050569 - RNA, 19 nt, Homo sapiens
  misc_RNA (1)...(19): siRNA sense strand
ucucugccauccuuauugu

SEQ ID NO: 2050570 - RNA, 19 nt, Homo sapiens
  misc_RNA (1)...(19): siRNA sense strand
ggacagccuucuucaugua

SEQ ID NO: 2050571 - RNA, 19 nt, Homo sapiens
  misc_RNA (1)...(19): siRNA sense strand
gggacagccuucuucaugu

SEQ ID NO: 2050572 - RNA, 19 nt, Homo sapiens
  misc_RNA (1)...(19): siRNA sense strand
ugccauccuuauuguguua

SEQ ID NO: 2050573 - RNA, 19 nt, Homo sapiens
  misc_RNA (1)...(19): siRNA sense strand
ucucuucucugccauccuu

SEQ ID NO: 2050574 - RNA, 19 nt, Homo sapiens
  misc_RNA (1)...(19): siRNA sense strand
gagcauccacgucaauguc

SEQ ID NO: 2050575 - RNA, 19 nt, Homo sapiens
  misc_RNA (1)...(19): siRNA sense strand
ucucugccauccuuauugu

SEQ ID NO: 2050576 - RNA, 19 nt, Homo sapiens
  misc_RNA (1)...(19): siRNA sense strand
ggacagccuucuucaugua

SEQ ID NO: 2050577 - RNA, 19 nt, Homo sapiens
  misc_RNA (1)...(19): siRNA sense strand
gggacagccuucuucaugu

SEQ ID NO: 2050578 - RNA, 19 nt, Homo sapiens
  misc_RNA (1)...(19): siRNA sense strand
ugccauccuuauuguguua

SEQ ID NO: 2050579 - RNA, 19 nt, Homo sapiens
  misc_RNA (1)...(19): siRNA sense strand
ucucuucucugccauccuu

SEQ ID NO: 2050580 - RNA, 19 nt, Homo sapiens
  misc_RNA (1)...(19): siRNA sense strand
gagcauccacgucaauguc

SEQ ID NO: 2050581 - RNA, 19 nt, Homo sapiens
  misc_RNA (1)...(19): siRNA sense strand
ucucugccauccuuauugu

SEQ ID NO: 2050582 - RNA, 19 nt, Homo sapiens
  misc_RNA (1)...(19): siRNA sense strand
ggacagccuucuucaugua

SEQ ID NO: 2050583 - RNA, 19 nt, Homo sapiens
  misc_RNA (1)...(19): siRNA sense strand
gggacagccuucuucaugu

SEQ ID NO: 2050584 - RNA, 19 nt, Homo sapiens
  misc_RNA (1)...(19): siRNA sense strand
ugccauccuuauuguguua

SEQ ID NO: 2050585 - RNA, 19 nt, Homo sapiens
  misc_RNA (1)...(19): siRNA sense strand
ucucuucucugccauccuu

SEQ ID NO: 2050586 - RNA, 19 nt, Homo sapiens
  misc_RNA (1)...(19): siRNA sense strand
gagcauccacgucaauguc

SEQ ID NO: 2050587 - RNA, 19 nt, Homo sapiens
  misc_RNA (1)...(19): siRNA sense strand
ucucugccauccuuauugu

SEQ ID NO: 2050588 - RNA, 19 nt, Homo sapiens
  misc_RNA (1)...(19): siRNA sense strand
ggacagccuucuucaugua

SEQ ID NO: 2050589 - RNA, 19 nt, Homo sapiens
  misc_RNA (1)...(19): siRNA sense strand
gggacagccuucuucaugu

SEQ ID NO: 2050590 - RNA, 19 nt, Homo sapiens
  misc_RNA (1)...(19): siRNA sense strand
ugccauccuuauuguguua

SEQ ID NO: 2050591 - RNA, 19 nt, Homo sapiens
  misc_RNA (1)...(19): siRNA sense strand
ucucuucucugccauccuu

SEQ ID NO: 2050592 - RNA, 19 nt, Homo sapiens
  misc_RNA (1)...(19): siRNA sense strand
gagcauccacgucaauguc

SEQ ID NO: 2050593 - RNA, 19 nt, Homo sapiens
  misc_RNA (1)...(19): siRNA sense strand
ucucugccauccuuauugu

SEQ ID NO: 2050594 - RNA, 19 nt, Homo sapiens
  misc_RNA (1)...(19): siRNA sense strand
ggacagccuucuucaugua

SEQ ID NO: 2050595 - RNA, 19 nt, Homo sapiens
  misc_RNA (1)...(19): siRNA sense strand
gggacagccuucuucaugu

SEQ ID NO: 2050596 - RNA, 19 nt, Homo sapiens
  misc_RNA (1)...(19): siRNA sense strand
ugccauccuuauuguguua

SEQ ID NO: 2050597 - RNA, 19 nt, Homo sapiens
  misc_RNA (1)...(19): siRNA sense strand
ucucuucucugccauccuu

SEQ ID NO: 2050598 - RNA, 19 nt, Homo sapiens
  misc_RNA (1)...(19): siRNA sense strand
gagcauccacgucaauguc

SEQ ID NO: 2050599 - RNA, 19 nt, Homo sapiens
  misc_RNA (1)...(19): siRNA sense strand
ucucugccauccuuauugu

SEQ ID NO: 2050600 - RNA, 19 nt, Homo sapiens
  misc_RNA (1)...(19): siRNA sense strand
ccacggagcuccccaaaua

SEQ ID NO: 2050601 - RNA, 19 nt, Homo sapiens
  misc_RNA (1)...(19): siRNA sense strand
ucaagacagucaauaacua

SEQ ID NO: 2050602 - RNA, 19 nt, Homo sapiens
  misc_RNA (1)...(19): siRNA sense strand
acacggagcucaagacagu

SEQ ID NO: 2050603 - RNA, 19 nt, Homo sapiens
  misc_RNA (1)...(19): siRNA sense strand
ucaagaggccgacuaagaa

SEQ ID NO: 2050604 - RNA, 19 nt, Homo sapiens
  misc_RNA (1)...(19): siRNA sense strand
aagagacgcuggcgcaaga

SEQ ID NO: 2050605 - RNA, 19 nt, Homo sapiens
  misc_RNA (1)...(19): siRNA sense strand
gacagucaauaacuacuuc

SEQ ID NO: 2050606 - RNA, 19 nt, Homo sapiens
  misc_RNA (1)...(19): siRNA sense strand
caagaggccgacuaagaaa

SEQ ID NO: 2050607 - RNA, 19 nt, Homo sapiens
  misc_RNA (1)...(19): siRNA sense strand
ggaaggaagaagaggaaga

SEQ ID NO: 2050608 - RNA, 19 nt, Homo sapiens
  misc_RNA (1)...(19): siRNA sense strand
gucaagaggccgacuaaga

SEQ ID NO: 2050609 - RNA, 19 nt, Homo sapiens
  misc_RNA (1)...(19): siRNA sense strand
gcuccgaaguggugaucaa

SEQ ID NO: 2050610 - RNA, 19 nt, Homo sapiens
  misc_RNA (1)...(19): siRNA sense strand
gcaaugccuccgucaugaa

SEQ ID NO: 2050611 - RNA, 19 nt, Homo sapiens
  misc_RNA (1)...(19): siRNA sense strand
gagcucaagacagucaaua

SEQ ID NO: 2050612 - RNA, 19 nt, Homo sapiens
  misc_RNA (1)...(19): siRNA sense strand
ccgaaguggugaucaagau

SEQ ID NO: 2050613 - RNA, 19 nt, Homo sapiens
  misc_RNA (1)...(19): siRNA sense strand
gaaggaagaagaggaagag

SEQ ID NO: 2050614 - RNA, 19 nt, Homo sapiens
  misc_RNA (1)...(19): siRNA sense strand
cagcaaugccuccgucaug

SEQ ID NO: 2050615 - RNA, 19 nt, Homo sapiens
  misc_RNA (1)...(19): siRNA sense strand
gcuacgcacucugcaacaa

SEQ ID NO: 2050616 - RNA, 19 nt, Homo sapiens
  misc_RNA (1)...(19): siRNA sense strand
uaagaaagggcgugaucga

SEQ ID NO: 2050617 - RNA, 19 nt, Homo sapiens
  misc_RNA (1)...(19): siRNA sense strand
ggccugugcugaccucauc

SEQ ID NO: 2050618 - RNA, 19 nt, Homo sapiens
  misc_RNA (1)...(19): siRNA sense strand
caacacggagcucaagaca

SEQ ID NO: 2050619 - RNA, 19 nt, Homo sapiens
  misc_RNA (1)...(19): siRNA sense strand
gcaaccugcugguacucau

SEQ ID NO: 2050620 - RNA, 19 nt, Homo sapiens
  misc_RNA (1)...(19): siRNA sense strand
gcaucuaccgggagacaga

SEQ ID NO: 2050621 - RNA, 19 nt, Homo sapiens
  misc_RNA (1)...(19): siRNA sense strand
ugggcacgcuggcuuguga

SEQ ID NO: 2050622 - RNA, 19 nt, Homo sapiens
  misc_RNA (1)...(19): siRNA sense strand
caagacagucaauaacuac

SEQ ID NO: 2050623 - RNA, 19 nt, Homo sapiens
  misc_RNA (1)...(19): siRNA sense strand
gcagugcuacauccaguuc

SEQ ID NO: 2050624 - RNA, 19 nt, Homo sapiens
  misc_RNA (1)...(19): siRNA sense strand
ggcuggcccuggacuaugu

SEQ ID NO: 2050625 - RNA, 19 nt, Homo sapiens
  misc_RNA (1)...(19): siRNA sense strand
gcucaagacagucaauaac

SEQ ID NO: 2050626 - RNA, 19 nt, Homo sapiens
  misc_RNA (1)...(19): siRNA sense strand
uggccuggcugguuuccuu

SEQ ID NO: 2050627 - RNA, 19 nt, Homo sapiens
  misc_RNA (1)...(19): siRNA sense strand
ugaucaagaugccaauggu

SEQ ID NO: 2050628 - RNA, 19 nt, Homo sapiens
  misc_RNA (1)...(19): siRNA sense strand
gcuacuggcugugcuacgu

SEQ ID NO: 2050629 - RNA, 19 nt, Homo sapiens
  misc_RNA (1)...(19): siRNA sense strand
aucgguaccuucuccauga

SEQ ID NO: 2050630 - RNA, 19 nt, Homo sapiens
  misc_RNA (1)...(19): siRNA sense strand
agcaaugccuccgucauga

SEQ ID NO: 2050631 - RNA, 19 nt, Homo sapiens
  misc_RNA (1)...(19): siRNA sense strand
caaugccuccgucaugaau

SEQ ID NO: 2050632 - RNA, 19 nt, Homo sapiens
  misc_RNA (1)...(19): siRNA sense strand
cuacgcacucugcaacaaa

SEQ ID NO: 2050633 - RNA, 19 nt, Homo sapiens
  misc_RNA (1)...(19): siRNA sense strand
ugaaucugcugcucaucag

SEQ ID NO: 2050634 - RNA, 19 nt, Homo sapiens
  misc_RNA (1)...(19): siRNA sense strand
ugugggagcugggcuacug

SEQ ID NO: 2050635 - RNA, 19 nt, Homo sapiens
  misc_RNA (1)...(19): siRNA sense strand
ggacaccguacaacaucau

SEQ ID NO: 2050636 - RNA, 19 nt, Homo sapiens
  misc_RNA (1)...(19): siRNA sense strand
uggacuauguggccagcaa

SEQ ID NO: 2050637 - RNA, 19 nt, Homo sapiens
  misc_RNA (1)...(19): siRNA sense strand
cagcuuugaccgcuacuuc

SEQ ID NO: 2050638 - RNA, 19 nt, Homo sapiens
  misc_RNA (1)...(19): siRNA sense strand
ccgggcagcucugaugauc

SEQ ID NO: 2050639 - RNA, 19 nt, Homo sapiens
  misc_RNA (1)...(19): siRNA sense strand
gccuagagcuggaacguua

SEQ ID NO: 2050640 - RNA, 19 nt, Homo sapiens
  misc_RNA (1)...(19): siRNA sense strand
gcaggaaaguuuacaccaa

SEQ ID NO: 2050641 - RNA, 19 nt, Homo sapiens
  misc_RNA (1)...(19): siRNA sense strand
ugcaagaagugaugaguua

SEQ ID NO: 2050642 - RNA, 19 nt, Homo sapiens
  misc_RNA (1)...(19): siRNA sense strand
aaauugagcuccucuguca

SEQ ID NO: 2050643 - RNA, 19 nt, Homo sapiens
  misc_RNA (1)...(19): siRNA sense strand
caggaaaguuuacaccaaa

SEQ ID NO: 2050644 - RNA, 19 nt, Homo sapiens
  misc_RNA (1)...(19): siRNA sense strand
gaagaucuguggaccaaaa

SEQ ID NO: 2050645 - RNA, 19 nt, Homo sapiens
  misc_RNA (1)...(19): siRNA sense strand
gaggaguacuggcaacaga

SEQ ID NO: 2050646 - RNA, 19 nt, Homo sapiens
  misc_RNA (1)...(19): siRNA sense strand
gaacugagcagggaaccuu

SEQ ID NO: 2050647 - RNA, 19 nt, Homo sapiens
  misc_RNA (1)...(19): siRNA sense strand
gcacgagaccggcuacuuc

SEQ ID NO: 2050648 - RNA, 19 nt, Homo sapiens
  misc_RNA (1)...(19): siRNA sense strand
gagaaaagccuuacagaug

SEQ ID NO: 2050649 - RNA, 19 nt, Homo sapiens
  misc_RNA (1)...(19): siRNA sense strand
ggaggaauccgaacugaag

SEQ ID NO: 2050650 - RNA, 19 nt, Homo sapiens
  misc_RNA (1)...(19): siRNA sense strand
cagggaaccuucucaacug

SEQ ID NO: 2050651 - RNA, 19 nt, Homo sapiens
  misc_RNA (1)...(19): siRNA sense strand
ggaauccgaacugaagaua

SEQ ID NO: 2050652 - RNA, 19 nt, Homo sapiens
  misc_RNA (1)...(19): siRNA sense strand
gagcgagcccugcuauguu

SEQ ID NO: 2050653 - RNA, 19 nt, Homo sapiens
  misc_RNA (1)...(19): siRNA sense strand
caaaagcucccacuugaaa

SEQ ID NO: 2050654 - RNA, 19 nt, Homo sapiens
  misc_RNA (1)...(19): siRNA sense strand
gcagggaaccuucucaacu

SEQ ID NO: 2050655 - RNA, 19 nt, Homo sapiens
  misc_RNA (1)...(19): siRNA sense strand
gcaagaagugaugaguuaa

SEQ ID NO: 2050656 - RNA, 19 nt, Homo sapiens
  misc_RNA (1)...(19): siRNA sense strand
aauccgaacugaagauauc

SEQ ID NO: 2050657 - RNA, 19 nt, Homo sapiens
  misc_RNA (1)...(19): siRNA sense strand
uaaccaggcacuuccgaaa

SEQ ID NO: 2050658 - RNA, 19 nt, Homo sapiens
  misc_RNA (1)...(19): siRNA sense strand
ugccgucucuggaggagua

SEQ ID NO: 2050659 - RNA, 19 nt, Homo sapiens
  misc_RNA (1)...(19): siRNA sense strand
gcaacagaccugccuagag

SEQ ID NO: 2050660 - RNA, 19 nt, Homo sapiens
  misc_RNA (1)...(19): siRNA sense strand
agcgagcccugcuauguuu

SEQ ID NO: 2050661 - RNA, 19 nt, Homo sapiens
  misc_RNA (1)...(19): siRNA sense strand
caaauuugacagccaggaa

SEQ ID NO: 2050662 - RNA, 19 nt, Homo sapiens
  misc_RNA (1)...(19): siRNA sense strand
aggaagaucuguggaccaa

SEQ ID NO: 2050663 - RNA, 19 nt, Homo sapiens
  misc_RNA (1)...(19): siRNA sense strand
gagcagggaaccuucucaa

SEQ ID NO: 2050664 - RNA, 19 nt, Homo sapiens
  misc_RNA (1)...(19): siRNA sense strand
gaauccgaacugaagauau

SEQ ID NO: 2050665 - RNA, 19 nt, Homo sapiens
  misc_RNA (1)...(19): siRNA sense strand
ugacagcuccgaggaacuu

SEQ ID NO: 2050666 - RNA, 19 nt, Homo sapiens
  misc_RNA (1)...(19): siRNA sense strand
gggccaagccuuuuaaaug

SEQ ID NO: 2050667 - RNA, 19 nt, Homo sapiens
  misc_RNA (1)...(19): siRNA sense strand
uuaaaugcucccacuguga

SEQ ID NO: 2050668 - RNA, 19 nt, Homo sapiens
  misc_RNA (1)...(19): siRNA sense strand
uuuaacggcugcaggaaag

SEQ ID NO: 2050669 - RNA, 19 nt, Homo sapiens
  misc_RNA (1)...(19): siRNA sense strand
aaggaggaauccgaacuga

SEQ ID NO: 2050670 - RNA, 19 nt, Homo sapiens
  misc_RNA (1)...(19): siRNA sense strand
caccuggcccugcacauga

SEQ ID NO: 2050671 - RNA, 19 nt, Homo sapiens
  misc_RNA (1)...(19): siRNA sense strand
gaaaauugagcuccucugu

SEQ ID NO: 2050672 - RNA, 19 nt, Homo sapiens
  misc_RNA (1)...(19): siRNA sense strand
ccagagcgagcccugcuau

SEQ ID NO: 2050673 - RNA, 19 nt, Homo sapiens
  misc_RNA (1)...(19): siRNA sense strand
ggucagcucgggaaaauug

SEQ ID NO: 2050674 - RNA, 19 nt, Homo sapiens
  misc_RNA (1)...(19): siRNA sense strand
ggagaaaagccuuacagau

SEQ ID NO: 2050675 - RNA, 19 nt, Homo sapiens
  misc_RNA (1)...(19): siRNA sense strand
gaggaauccgaacugaaga

SEQ ID NO: 2050676 - RNA, 19 nt, Homo sapiens
  misc_RNA (1)...(19): siRNA sense strand
caagaagugaugaguuaac

SEQ ID NO: 2050677 - RNA, 19 nt, Homo sapiens
  misc_RNA (1)...(19): siRNA sense strand
accaaaagcucccacuuga

SEQ ID NO: 2050678 - RNA, 19 nt, Homo sapiens
  misc_RNA (1)...(19): siRNA sense strand
guuacaacuuagagaccaa

SEQ ID NO: 2050679 - RNA, 19 nt, Homo sapiens
  misc_RNA (1)...(19): siRNA sense strand
gaccaacagccugaacuca

SEQ ID NO: 2050680 - RNA, 19 nt, Homo sapiens
  misc_RNA (1)...(19): siRNA sense strand
ggccaagccuuuuaaaugc

SEQ ID NO: 2050681 - RNA, 19 nt, Homo sapiens
  misc_RNA (1)...(19): siRNA sense strand
ucagaugucagcagcgaau

SEQ ID NO: 2050682 - RNA, 19 nt, Homo sapiens
  misc_RNA (1)...(19): siRNA sense strand
uccaggagcuccagaucgu

SEQ ID NO: 2050683 - RNA, 19 nt, Homo sapiens
  misc_RNA (1)...(19): siRNA sense strand
ccuccacgccuccaucuuc

SEQ ID NO: 2050684 - RNA, 19 nt, Homo sapiens
  misc_RNA (1)...(19): siRNA sense strand
gcucaugggaaggguguga

SEQ ID NO: 2050685 - RNA, 19 nt, Homo sapiens
  misc_RNA (1)...(19): siRNA sense strand
uaacggcugcaggaaaguu

SEQ ID NO: 2050686 - RNA, 19 nt, Homo sapiens
  misc_RNA (1)...(19): siRNA sense strand
gaucagcccugguucuuua

SEQ ID NO: 2050687 - RNA, 19 nt, Homo sapiens
  misc_RNA (1)...(19): siRNA sense strand
gaugguagauuggcauuua

SEQ ID NO: 2050688 - RNA, 19 nt, Homo sapiens
  misc_RNA (1)...(19): siRNA sense strand
aagcagaauuccaaagaua

SEQ ID NO: 2050689 - RNA, 19 nt, Homo sapiens
  misc_RNA (1)...(19): siRNA sense strand
ccaaagauaccagcaauuu

SEQ ID NO: 2050690 - RNA, 19 nt, Homo sapiens
  misc_RNA (1)...(19): siRNA sense strand
ugaaguagcuuugcaaucu

SEQ ID NO: 2050691 - RNA, 19 nt, Homo sapiens
  misc_RNA (1)...(19): siRNA sense strand
gaagcagaauuccaaagau

SEQ ID NO: 2050692 - RNA, 19 nt, Homo sapiens
  misc_RNA (1)...(19): siRNA sense strand
guaacuagguugacagagu

SEQ ID NO: 2050693 - RNA, 19 nt, Homo sapiens
  misc_RNA (1)...(19): siRNA sense strand
gcucagccguggcaugaaa

SEQ ID NO: 2050694 - RNA, 19 nt, Homo sapiens
  misc_RNA (1)...(19): siRNA sense strand
augcugggcuuguuuauaa

SEQ ID NO: 2050695 - RNA, 19 nt, Homo sapiens
  misc_RNA (1)...(19): siRNA sense strand
gcaguuugaucaccggauu

SEQ ID NO: 2050696 - RNA, 19 nt, Homo sapiens
  misc_RNA (1)...(19): siRNA sense strand
gauaugacacugacagaau

SEQ ID NO: 2050697 - RNA, 19 nt, Homo sapiens
  misc_RNA (1)...(19): siRNA sense strand
gggaaucacuucagucacu

SEQ ID NO: 2050698 - RNA, 19 nt, Homo sapiens
  misc_RNA (1)...(19): siRNA sense strand
gagaugaagccaccuacaa

SEQ ID NO: 2050699 - RNA, 19 nt, Homo sapiens
  misc_RNA (1)...(19): siRNA sense strand
gaaguagcuuugcaaucug

SEQ ID NO: 2050700 - RNA, 19 nt, Homo sapiens
  misc_RNA (1)...(19): siRNA sense strand
gcaggucugguguuccuua

SEQ ID NO: 2050701 - RNA, 19 nt, Homo sapiens
  misc_RNA (1)...(19): siRNA sense strand
ccgcacaaguugccugaaa

SEQ ID NO: 2050702 - RNA, 19 nt, Homo sapiens
  misc_RNA (1)...(19): siRNA sense strand
ugacagaauucaaguucau

SEQ ID NO: 2050703 - RNA, 19 nt, Homo sapiens
  misc_RNA (1)...(19): siRNA sense strand
gguagauuggcauuuaaua

SEQ ID NO: 2050704 - RNA, 19 nt, Homo sapiens
  misc_RNA (1)...(19): siRNA sense strand
gagacgauuugcucaugga

SEQ ID NO: 2050705 - RNA, 19 nt, Homo sapiens
  misc_RNA (1)...(19): siRNA sense strand
gaaggcaucagaaacaucu

SEQ ID NO: 2050706 - RNA, 19 nt, Homo sapiens
  misc_RNA (1)...(19): siRNA sense strand
cagugucccuucccucaaa

SEQ ID NO: 2050707 - RNA, 19 nt, Homo sapiens
  misc_RNA (1)...(19): siRNA sense strand
cagugacucugcuggcuuu

SEQ ID NO: 2050708 - RNA, 19 nt, Homo sapiens
  misc_RNA (1)...(19): siRNA sense strand
gcuagaugcugggcuuguu

SEQ ID NO: 2050709 - RNA, 19 nt, Homo sapiens
  misc_RNA (1)...(19): siRNA sense strand
ggugaaaaguggacuagaa

SEQ ID NO: 2050710 - RNA, 19 nt, Homo sapiens
  misc_RNA (1)...(19): siRNA sense strand
ggaguacucacaccgaaug

SEQ ID NO: 2050711 - RNA, 19 nt, Homo sapiens
  misc_RNA (1)...(19): siRNA sense strand
aacaguggcuggagcaguu

SEQ ID NO: 2050712 - RNA, 19 nt, Homo sapiens
  misc_RNA (1)...(19): siRNA sense strand
ccauuacagugcucuacuu

SEQ ID NO: 2050713 - RNA, 19 nt, Homo sapiens
  misc_RNA (1)...(19): siRNA sense strand
auaugacacugacagaauu

SEQ ID NO: 2050714 - RNA, 19 nt, Homo sapiens
  misc_RNA (1)...(19): siRNA sense strand
caaagauaccagcaauuuc

SEQ ID NO: 2050715 - RNA, 19 nt, Homo sapiens
  misc_RNA (1)...(19): siRNA sense strand
gaaaaguggacuagaagaa

SEQ ID NO: 2050716 - RNA, 19 nt, Homo sapiens
  misc_RNA (1)...(19): siRNA sense strand
gggaugguauauggugaaa

SEQ ID NO: 2050717 - RNA, 19 nt, Homo sapiens
  misc_RNA (1)...(19): siRNA sense strand
uaccagcaauuuccagaau

SEQ ID NO: 2050718 - RNA, 19 nt, Homo sapiens
  misc_RNA (1)...(19): siRNA sense strand
gaugcugggcuuguuuaua

SEQ ID NO: 2050719 - RNA, 19 nt, Homo sapiens
  misc_RNA (1)...(19): siRNA sense strand
cagcccugguucuuuauug

SEQ ID NO: 2050720 - RNA, 19 nt, Homo sapiens
  misc_RNA (1)...(19): siRNA sense strand
caccaucucugaaguagcu

SEQ ID NO: 2050721 - RNA, 19 nt, Homo sapiens
  misc_RNA (1)...(19): siRNA sense strand
aauucaaguucaucuggua

SEQ ID NO: 2050722 - RNA, 19 nt, Homo sapiens
  misc_RNA (1)...(19): siRNA sense strand
gaugguauauggugaaaag

SEQ ID NO: 2050723 - RNA, 19 nt, Homo sapiens
  misc_RNA (1)...(19): siRNA sense strand
caagauggcagcagugacu

SEQ ID NO: 2050724 - RNA, 19 nt, Homo sapiens
  misc_RNA (1)...(19): siRNA sense strand
ccugucuuauucaacuuua

SEQ ID NO: 2050725 - RNA, 19 nt, Homo sapiens
  misc_RNA (1)...(19): siRNA sense strand
cagcaccaucucugaagua

SEQ ID NO: 2050726 - RNA, 19 nt, Homo sapiens
  misc_RNA (1)...(19): siRNA sense strand
caugaaaggacguguucuu

SEQ ID NO: 2050727 - RNA, 19 nt, Homo sapiens
  misc_RNA (1)...(19): siRNA sense strand
uagaugcugggcuuguuua

SEQ ID NO: 2050728 - RNA, 19 nt, Homo sapiens
  misc_RNA (1)...(19): siRNA sense strand
ugaaacccaccaacuccua

SEQ ID NO: 2050729 - RNA, 19 nt, Homo sapiens
  misc_RNA (1)...(19): siRNA sense strand
ggaucagcccugguucuuu

SEQ ID NO: 2050730 - RNA, 19 nt, Homo sapiens
  misc_RNA (1)...(19): siRNA sense strand
gcaauacagcaccaucucu

SEQ ID NO: 2050731 - RNA, 19 nt, Homo sapiens
  misc_RNA (1)...(19): siRNA sense strand
uuauaacuccuuucccaaa

SEQ ID NO: 2050732 - RNA, 19 nt, Homo sapiens
  misc_RNA (1)...(19): siRNA sense strand
aaaguggacuagaagaaaa

SEQ ID NO: 2050733 - RNA, 19 nt, Homo sapiens
  misc_RNA (1)...(19): siRNA sense strand
aaaucagacucccaugaca

SEQ ID NO: 2050734 - RNA, 19 nt, Homo sapiens
  misc_RNA (1)...(19): siRNA sense strand
gcuuguuuauaacuccuuu

SEQ ID NO: 2050735 - RNA, 19 nt, Homo sapiens
  misc_RNA (1)...(19): siRNA sense strand
gaguaacuagguugacaga

SEQ ID NO: 2050736 - RNA, 19 nt, Homo sapiens
  misc_RNA (1)...(19): siRNA sense strand
acgauuugcucauggaaca

SEQ ID NO: 2050737 - RNA, 19 nt, Homo sapiens
  misc_RNA (1)...(19): siRNA sense strand
gccucucgaugguagauug

SEQ ID NO: 2050738 - RNA, 19 nt, Homo sapiens
  misc_RNA (1)...(19): siRNA sense strand
ggagaugaagccaccuaca

SEQ ID NO: 2050739 - RNA, 19 nt, Homo sapiens
  misc_RNA (1)...(19): siRNA sense strand
cagcaggucugguguuccu

SEQ ID NO: 2050740 - RNA, 19 nt, Homo sapiens
  misc_RNA (1)...(19): siRNA sense strand
gggaucagcccugguucuu

SEQ ID NO: 2050741 - RNA, 19 nt, Homo sapiens
  misc_RNA (1)...(19): siRNA sense strand
cuacaagccaagaggaaug

SEQ ID NO: 2050742 - RNA, 19 nt, Homo sapiens
  misc_RNA (1)...(19): siRNA sense strand
gcuggagcaguuauucuug

SEQ ID NO: 2050743 - RNA, 19 nt, Homo sapiens
  misc_RNA (1)...(19): siRNA sense strand
ggcccugucuuauucaacu

SEQ ID NO: 2050744 - RNA, 19 nt, Homo sapiens
  misc_RNA (1)...(19): siRNA sense strand
ccugccugcugccuacuuu

SEQ ID NO: 2050745 - RNA, 19 nt, Homo sapiens
  misc_RNA (1)...(19): siRNA sense strand
aaagauaccagcaauuucc

SEQ ID NO: 2050746 - RNA, 19 nt, Homo sapiens
  misc_RNA (1)...(19): siRNA sense strand
uuacagugcucuacuuccu

SEQ ID NO: 2050747 - RNA, 19 nt, Homo sapiens
  misc_RNA (1)...(19): siRNA sense strand
ggucuguugggaugguaua

SEQ ID NO: 2050748 - RNA, 19 nt, Homo sapiens
  misc_RNA (1)...(19): siRNA sense strand
uggaguaacuagguugaca

SEQ ID NO: 2050749 - RNA, 19 nt, Homo sapiens
  misc_RNA (1)...(19): siRNA sense strand
cuccuggucugcaguggaa

SEQ ID NO: 2050750 - RNA, 19 nt, Homo sapiens
  misc_RNA (1)...(19): siRNA sense strand
ggcaugaaaggacguguuc

SEQ ID NO: 2050751 - RNA, 19 nt, Homo sapiens
  misc_RNA (1)...(19): siRNA sense strand
uuccaaagauaccagcaau

SEQ ID NO: 2050752 - RNA, 19 nt, Homo sapiens
  misc_RNA (1)...(19): siRNA sense strand
cuacaguugagacgauuug

SEQ ID NO: 2050753 - RNA, 19 nt, Homo sapiens
  misc_RNA (1)...(19): siRNA sense strand
uauaacuccuuucccaaaa

SEQ ID NO: 2050754 - RNA, 19 nt, Homo sapiens
  misc_RNA (1)...(19): siRNA sense strand
cuagaugcugggcuuguuu

SEQ ID NO: 2050755 - RNA, 19 nt, Homo sapiens
  misc_RNA (1)...(19): siRNA sense strand
ucuguggccucgucugcuu

SEQ ID NO: 2050756 - RNA, 19 nt, Homo sapiens
  misc_RNA (1)...(19): siRNA sense strand
gcuacucccuccgcacaag

SEQ ID NO: 2050757 - RNA, 19 nt, Homo sapiens
  misc_RNA (1)...(19): siRNA sense strand
uaacuccuuucccaaaaug

SEQ ID NO: 2050758 - RNA, 19 nt, Homo sapiens
  misc_RNA (1)...(19): siRNA sense strand
gaucagcccugguucuuua

SEQ ID NO: 2050759 - RNA, 19 nt, Homo sapiens
  misc_RNA (1)...(19): siRNA sense strand
gaugguagauuggcauuua

SEQ ID NO: 2050760 - RNA, 19 nt, Homo sapiens
  misc_RNA (1)...(19): siRNA sense strand
aagcagaauuccaaagaua

SEQ ID NO: 2050761 - RNA, 19 nt, Homo sapiens
  misc_RNA (1)...(19): siRNA sense strand
ccaaagauaccagcaauuu

SEQ ID NO: 2050762 - RNA, 19 nt, Homo sapiens
  misc_RNA (1)...(19): siRNA sense strand
ugaaguagcuuugcaaucu

SEQ ID NO: 2050763 - RNA, 19 nt, Homo sapiens
  misc_RNA (1)...(19): siRNA sense strand
gaagcagaauuccaaagau

SEQ ID NO: 2050764 - RNA, 19 nt, Homo sapiens
  misc_RNA (1)...(19): siRNA sense strand
guaacuagguugacagagu

SEQ ID NO: 2050765 - RNA, 19 nt, Homo sapiens
  misc_RNA (1)...(19): siRNA sense strand
gcucagccguggcaugaaa

SEQ ID NO: 2050766 - RNA, 19 nt, Homo sapiens
  misc_RNA (1)...(19): siRNA sense strand
augcugggcuuguuuauaa

SEQ ID NO: 2050767 - RNA, 19 nt, Homo sapiens
  misc_RNA (1)...(19): siRNA sense strand
gcaguuugaucaccggauu

SEQ ID NO: 2050768 - RNA, 19 nt, Homo sapiens
  misc_RNA (1)...(19): siRNA sense strand
gauaugacacugacagaau

SEQ ID NO: 2050769 - RNA, 19 nt, Homo sapiens
  misc_RNA (1)...(19): siRNA sense strand
gggaaucacuucagucacu

SEQ ID NO: 2050770 - RNA, 19 nt, Homo sapiens
  misc_RNA (1)...(19): siRNA sense strand
gagaugaagccaccuacaa

SEQ ID NO: 2050771 - RNA, 19 nt, Homo sapiens
  misc_RNA (1)...(19): siRNA sense strand
gaaguagcuuugcaaucug

SEQ ID NO: 2050772 - RNA, 19 nt, Homo sapiens
  misc_RNA (1)...(19): siRNA sense strand
gcaggucugguguuccuua

SEQ ID NO: 2050773 - RNA, 19 nt, Homo sapiens
  misc_RNA (1)...(19): siRNA sense strand
ccgcacaaguugccugaaa

SEQ ID NO: 2050774 - RNA, 19 nt, Homo sapiens
  misc_RNA (1)...(19): siRNA sense strand
ugacagaauucaaguucau

SEQ ID NO: 2050775 - RNA, 19 nt, Homo sapiens
  misc_RNA (1)...(19): siRNA sense strand
gguagauuggcauuuaaua

SEQ ID NO: 2050776 - RNA, 19 nt, Homo sapiens
  misc_RNA (1)...(19): siRNA sense strand
gagacgauuugcucaugga

SEQ ID NO: 2050777 - RNA, 19 nt, Homo sapiens
  misc_RNA (1)...(19): siRNA sense strand
cagugucccuucccucaaa

SEQ ID NO: 2050778 - RNA, 19 nt, Homo sapiens
  misc_RNA (1)...(19): siRNA sense strand
cagugacucugcuggcuuu

SEQ ID NO: 2050779 - RNA, 19 nt, Homo sapiens
  misc_RNA (1)...(19): siRNA sense strand
gcuagaugcugggcuuguu

SEQ ID NO: 2050780 - RNA, 19 nt, Homo sapiens
  misc_RNA (1)...(19): siRNA sense strand
ggugaaaaguggacuagaa

SEQ ID NO: 2050781 - RNA, 19 nt, Homo sapiens
  misc_RNA (1)...(19): siRNA sense strand
ggaguacucacaccgaaug

SEQ ID NO: 2050782 - RNA, 19 nt, Homo sapiens
  misc_RNA (1)...(19): siRNA sense strand
aacaguggcuggagcaguu

SEQ ID NO: 2050783 - RNA, 19 nt, Homo sapiens
  misc_RNA (1)...(19): siRNA sense strand
ccauuacagugcucuacuu

SEQ ID NO: 2050784 - RNA, 19 nt, Homo sapiens
  misc_RNA (1)...(19): siRNA sense strand
auaugacacugacagaauu

SEQ ID NO: 2050785 - RNA, 19 nt, Homo sapiens
  misc_RNA (1)...(19): siRNA sense strand
caaagauaccagcaauuuc

SEQ ID NO: 2050786 - RNA, 19 nt, Homo sapiens
  misc_RNA (1)...(19): siRNA sense strand
gaaaaguggacuagaagaa

SEQ ID NO: 2050787 - RNA, 19 nt, Homo sapiens
  misc_RNA (1)...(19): siRNA sense strand
gggaugguauauggugaaa

SEQ ID NO: 2050788 - RNA, 19 nt, Homo sapiens
  misc_RNA (1)...(19): siRNA sense strand
uaccagcaauuuccagaau

SEQ ID NO: 2050789 - RNA, 19 nt, Homo sapiens
  misc_RNA (1)...(19): siRNA sense strand
gaugcugggcuuguuuaua

SEQ ID NO: 2050790 - RNA, 19 nt, Homo sapiens
  misc_RNA (1)...(19): siRNA sense strand
caccaucucugaaguagcu

SEQ ID NO: 2050791 - RNA, 19 nt, Homo sapiens
  misc_RNA (1)...(19): siRNA sense strand
cagcccugguucuuuauug

SEQ ID NO: 2050792 - RNA, 19 nt, Homo sapiens
  misc_RNA (1)...(19): siRNA sense strand
aauucaaguucaucuggua

SEQ ID NO: 2050793 - RNA, 19 nt, Homo sapiens
  misc_RNA (1)...(19): siRNA sense strand
gaugguauauggugaaaag

SEQ ID NO: 2050794 - RNA, 19 nt, Homo sapiens
  misc_RNA (1)...(19): siRNA sense strand
caagauggcagcagugacu

SEQ ID NO: 2050795 - RNA, 19 nt, Homo sapiens
  misc_RNA (1)...(19): siRNA sense strand
cagcaccaucucugaagua

SEQ ID NO: 2050796 - RNA, 19 nt, Homo sapiens
  misc_RNA (1)...(19): siRNA sense strand
caugaaaggacguguucuu

SEQ ID NO: 2050797 - RNA, 19 nt, Homo sapiens
  misc_RNA (1)...(19): siRNA sense strand
uagaugcugggcuuguuua

SEQ ID NO: 2050798 - RNA, 19 nt, Homo sapiens
  misc_RNA (1)...(19): siRNA sense strand
ugaaacccaccaacuccua

SEQ ID NO: 2050799 - RNA, 19 nt, Homo sapiens
  misc_RNA (1)...(19): siRNA sense strand
ggaucagcccugguucuuu

SEQ ID NO: 2050800 - RNA, 19 nt, Homo sapiens
  misc_RNA (1)...(19): siRNA sense strand
gcaauacagcaccaucucu

SEQ ID NO: 2050801 - RNA, 19 nt, Homo sapiens
  misc_RNA (1)...(19): siRNA sense strand
uuauaacuccuuucccaaa

SEQ ID NO: 2050802 - RNA, 19 nt, Homo sapiens
  misc_RNA (1)...(19): siRNA sense strand
aaaguggacuagaagaaaa

SEQ ID NO: 2050803 - RNA, 19 nt, Homo sapiens
  misc_RNA (1)...(19): siRNA sense strand
aaaucagacucccaugaca

SEQ ID NO: 2050804 - RNA, 19 nt, Homo sapiens
  misc_RNA (1)...(19): siRNA sense strand
gcuuguuuauaacuccuuu

SEQ ID NO: 2050805 - RNA, 19 nt, Homo sapiens
  misc_RNA (1)...(19): siRNA sense strand
gaguaacuagguugacaga

SEQ ID NO: 2050806 - RNA, 19 nt, Homo sapiens
  misc_RNA (1)...(19): siRNA sense strand
acgauuugcucauggaaca

SEQ ID NO: 2050807 - RNA, 19 nt, Homo sapiens
  misc_RNA (1)...(19): siRNA sense strand
gccucucgaugguagauug

SEQ ID NO: 2050808 - RNA, 19 nt, Homo sapiens
  misc_RNA (1)...(19): siRNA sense strand
ggagaugaagccaccuaca

SEQ ID NO: 2050809 - RNA, 19 nt, Homo sapiens
  misc_RNA (1)...(19): siRNA sense strand
cagcaggucugguguuccu

SEQ ID NO: 2050810 - RNA, 19 nt, Homo sapiens
  misc_RNA (1)...(19): siRNA sense strand
gggaucagcccugguucuu

SEQ ID NO: 2050811 - RNA, 19 nt, Homo sapiens
  misc_RNA (1)...(19): siRNA sense strand
cuacaagccaagaggaaug

SEQ ID NO: 2050812 - RNA, 19 nt, Homo sapiens
  misc_RNA (1)...(19): siRNA sense strand
gcuggagcaguuauucuug

SEQ ID NO: 2050813 - RNA, 19 nt, Homo sapiens
  misc_RNA (1)...(19): siRNA sense strand
ccugccugcugccuacuuu

SEQ ID NO: 2050814 - RNA, 19 nt, Homo sapiens
  misc_RNA (1)...(19): siRNA sense strand
aaagauaccagcaauuucc

SEQ ID NO: 2050815 - RNA, 19 nt, Homo sapiens
  misc_RNA (1)...(19): siRNA sense strand
uuacagugcucuacuuccu

SEQ ID NO: 2050816 - RNA, 19 nt, Homo sapiens
  misc_RNA (1)...(19): siRNA sense strand
ggucuguugggaugguaua

SEQ ID NO: 2050817 - RNA, 19 nt, Homo sapiens
  misc_RNA (1)...(19): siRNA sense strand
uggaguaacuagguugaca

SEQ ID NO: 2050818 - RNA, 19 nt, Homo sapiens
  misc_RNA (1)...(19): siRNA sense strand
ggcaugaaaggacguguuc

SEQ ID NO: 2050819 - RNA, 19 nt, Homo sapiens
  misc_RNA (1)...(19): siRNA sense strand
uuccaaagauaccagcaau

SEQ ID NO: 2050820 - RNA, 19 nt, Homo sapiens
  misc_RNA (1)...(19): siRNA sense strand
cuccuggucugcaguggaa

SEQ ID NO: 2050821 - RNA, 19 nt, Homo sapiens
  misc_RNA (1)...(19): siRNA sense strand
cuacaguugagacgauuug

SEQ ID NO: 2050822 - RNA, 19 nt, Homo sapiens
  misc_RNA (1)...(19): siRNA sense strand
uauaacuccuuucccaaaa

SEQ ID NO: 2050823 - RNA, 19 nt, Homo sapiens
  misc_RNA (1)...(19): siRNA sense strand
cuagaugcugggcuuguuu

SEQ ID NO: 2050824 - RNA, 19 nt, Homo sapiens
  misc_RNA (1)...(19): siRNA sense strand
ucuguggccucgucugcuu

SEQ ID NO: 2050825 - RNA, 19 nt, Homo sapiens
  misc_RNA (1)...(19): siRNA sense strand
gcuacucccuccgcacaag

SEQ ID NO: 2050826 - RNA, 19 nt, Homo sapiens
  misc_RNA (1)...(19): siRNA sense strand
uaacuccuuucccaaaaug

SEQ ID NO: 2050827 - RNA, 19 nt, Homo sapiens
  misc_RNA (1)...(19): siRNA sense strand
gaucagcccugguucuuua

SEQ ID NO: 2050828 - RNA, 19 nt, Homo sapiens
  misc_RNA (1)...(19): siRNA sense strand
gaugguagauuggcauuua

SEQ ID NO: 2050829 - RNA, 19 nt, Homo sapiens
  misc_RNA (1)...(19): siRNA sense strand
aagcagaauuccaaagaua

SEQ ID NO: 2050830 - RNA, 19 nt, Homo sapiens
  misc_RNA (1)...(19): siRNA sense strand
ccaaagauaccagcaauuu

SEQ ID NO: 2050831 - RNA, 19 nt, Homo sapiens
  misc_RNA (1)...(19): siRNA sense strand
ugaaguagcuuugcaaucu

SEQ ID NO: 2050832 - RNA, 19 nt, Homo sapiens
  misc_RNA (1)...(19): siRNA sense strand
gaagcagaauuccaaagau

SEQ ID NO: 2050833 - RNA, 19 nt, Homo sapiens
  misc_RNA (1)...(19): siRNA sense strand
guaacuagguugacagagu

SEQ ID NO: 2050834 - RNA, 19 nt, Homo sapiens
  misc_RNA (1)...(19): siRNA sense strand
gcucagccguggcaugaaa

SEQ ID NO: 2050835 - RNA, 19 nt, Homo sapiens
  misc_RNA (1)...(19): siRNA sense strand
augcugggcuuguuuauaa

SEQ ID NO: 2050836 - RNA, 19 nt, Homo sapiens
  misc_RNA (1)...(19): siRNA sense strand
gcaguuugaucaccggauu

SEQ ID NO: 2050837 - RNA, 19 nt, Homo sapiens
  misc_RNA (1)...(19): siRNA sense strand
gauaugacacugacagaau

SEQ ID NO: 2050838 - RNA, 19 nt, Homo sapiens
  misc_RNA (1)...(19): siRNA sense strand
gggaaucacuucagucacu

SEQ ID NO: 2050839 - RNA, 19 nt, Homo sapiens
  misc_RNA (1)...(19): siRNA sense strand
gagaugaagccaccuacaa

SEQ ID NO: 2050840 - RNA, 19 nt, Homo sapiens
  misc_RNA (1)...(19): siRNA sense strand
gaaguagcuuugcaaucug

SEQ ID NO: 2050841 - RNA, 19 nt, Homo sapiens
  misc_RNA (1)...(19): siRNA sense strand
gcaggucugguguuccuua

SEQ ID NO: 2050842 - RNA, 19 nt, Homo sapiens
  misc_RNA (1)...(19): siRNA sense strand
ccgcacaaguugccugaaa

SEQ ID NO: 2050843 - RNA, 19 nt, Homo sapiens
  misc_RNA (1)...(19): siRNA sense strand
ugacagaauucaaguucau

SEQ ID NO: 2050844 - RNA, 19 nt, Homo sapiens
  misc_RNA (1)...(19): siRNA sense strand
gguagauuggcauuuaaua

SEQ ID NO: 2050845 - RNA, 19 nt, Homo sapiens
  misc_RNA (1)...(19): siRNA sense strand
gagacgauuugcucaugga

SEQ ID NO: 2050846 - RNA, 19 nt, Homo sapiens
  misc_RNA (1)...(19): siRNA sense strand
gaaggcaucagaaacaucu

SEQ ID NO: 2050847 - RNA, 19 nt, Homo sapiens
  misc_RNA (1)...(19): siRNA sense strand
cagugucccuucccucaaa

SEQ ID NO: 2050848 - RNA, 19 nt, Homo sapiens
  misc_RNA (1)...(19): siRNA sense strand
cagugacucugcuggcuuu

SEQ ID NO: 2050849 - RNA, 19 nt, Homo sapiens
  misc_RNA (1)...(19): siRNA sense strand
gcuagaugcugggcuuguu

SEQ ID NO: 2050850 - RNA, 19 nt, Homo sapiens
  misc_RNA (1)...(19): siRNA sense strand
ggugaaaaguggacuagaa

SEQ ID NO: 2050851 - RNA, 19 nt, Homo sapiens
  misc_RNA (1)...(19): siRNA sense strand
ggaguacucacaccgaaug

SEQ ID NO: 2050852 - RNA, 19 nt, Homo sapiens
  misc_RNA (1)...(19): siRNA sense strand
aacaguggcuggagcaguu

SEQ ID NO: 2050853 - RNA, 19 nt, Homo sapiens
  misc_RNA (1)...(19): siRNA sense strand
ccauuacagugcucuacuu

SEQ ID NO: 2050854 - RNA, 19 nt, Homo sapiens
  misc_RNA (1)...(19): siRNA sense strand
auaugacacugacagaauu

SEQ ID NO: 2050855 - RNA, 19 nt, Homo sapiens
  misc_RNA (1)...(19): siRNA sense strand
caaagauaccagcaauuuc

SEQ ID NO: 2050856 - RNA, 19 nt, Homo sapiens
  misc_RNA (1)...(19): siRNA sense strand
gaaaaguggacuagaagaa

SEQ ID NO: 2050857 - RNA, 19 nt, Homo sapiens
  misc_RNA (1)...(19): siRNA sense strand
gggaugguauauggugaaa

SEQ ID NO: 2050858 - RNA, 19 nt, Homo sapiens
  misc_RNA (1)...(19): siRNA sense strand
uaccagcaauuuccagaau

SEQ ID NO: 2050859 - RNA, 19 nt, Homo sapiens
  misc_RNA (1)...(19): siRNA sense strand
gaugcugggcuuguuuaua

SEQ ID NO: 2050860 - RNA, 19 nt, Homo sapiens
  misc_RNA (1)...(19): siRNA sense strand
cagcccugguucuuuauug

SEQ ID NO: 2050861 - RNA, 19 nt, Homo sapiens
  misc_RNA (1)...(19): siRNA sense strand
caccaucucugaaguagcu

SEQ ID NO: 2050862 - RNA, 19 nt, Homo sapiens
  misc_RNA (1)...(19): siRNA sense strand
aauucaaguucaucuggua

SEQ ID NO: 2050863 - RNA, 19 nt, Homo sapiens
  misc_RNA (1)...(19): siRNA sense strand
gaugguauauggugaaaag

SEQ ID NO: 2050864 - RNA, 19 nt, Homo sapiens
  misc_RNA (1)...(19): siRNA sense strand
caagauggcagcagugacu

SEQ ID NO: 2050865 - RNA, 19 nt, Homo sapiens
  misc_RNA (1)...(19): siRNA sense strand
ccugucuuauucaacuuua

SEQ ID NO: 2050866 - RNA, 19 nt, Homo sapiens
  misc_RNA (1)...(19): siRNA sense strand
cagcaccaucucugaagua

SEQ ID NO: 2050867 - RNA, 19 nt, Homo sapiens
  misc_RNA (1)...(19): siRNA sense strand
caugaaaggacguguucuu

SEQ ID NO: 2050868 - RNA, 19 nt, Homo sapiens
  misc_RNA (1)...(19): siRNA sense strand
uagaugcugggcuuguuua

SEQ ID NO: 2050869 - RNA, 19 nt, Homo sapiens
  misc_RNA (1)...(19): siRNA sense strand
ugaaacccaccaacuccua

SEQ ID NO: 2050870 - RNA, 19 nt, Homo sapiens
  misc_RNA (1)...(19): siRNA sense strand
ggaucagcccugguucuuu

SEQ ID NO: 2050871 - RNA, 19 nt, Homo sapiens
  misc_RNA (1)...(19): siRNA sense strand
gcaauacagcaccaucucu

SEQ ID NO: 2050872 - RNA, 19 nt, Homo sapiens
  misc_RNA (1)...(19): siRNA sense strand
uuauaacuccuuucccaaa

SEQ ID NO: 2050873 - RNA, 19 nt, Homo sapiens
  misc_RNA (1)...(19): siRNA sense strand
aaaguggacuagaagaaaa

SEQ ID NO: 2050874 - RNA, 19 nt, Homo sapiens
  misc_RNA (1)...(19): siRNA sense strand
aaaucagacucccaugaca

SEQ ID NO: 2050875 - RNA, 19 nt, Homo sapiens
  misc_RNA (1)...(19): siRNA sense strand
gcuuguuuauaacuccuuu

SEQ ID NO: 2050876 - RNA, 19 nt, Homo sapiens
  misc_RNA (1)...(19): siRNA sense strand
gaguaacuagguugacaga

SEQ ID NO: 2050877 - RNA, 19 nt, Homo sapiens
  misc_RNA (1)...(19): siRNA sense strand
acgauuugcucauggaaca

SEQ ID NO: 2050878 - RNA, 19 nt, Homo sapiens
  misc_RNA (1)...(19): siRNA sense strand
gccucucgaugguagauug

SEQ ID NO: 2050879 - RNA, 19 nt, Homo sapiens
  misc_RNA (1)...(19): siRNA sense strand
ggagaugaagccaccuaca

SEQ ID NO: 2050880 - RNA, 19 nt, Homo sapiens
  misc_RNA (1)...(19): siRNA sense strand
cagcaggucugguguuccu

SEQ ID NO: 2050881 - RNA, 19 nt, Homo sapiens
  misc_RNA (1)...(19): siRNA sense strand
gggaucagcccugguucuu

SEQ ID NO: 2050882 - RNA, 19 nt, Homo sapiens
  misc_RNA (1)...(19): siRNA sense strand
cuacaagccaagaggaaug

SEQ ID NO: 2050883 - RNA, 19 nt, Homo sapiens
  misc_RNA (1)...(19): siRNA sense strand
gcuggagcaguuauucuug

SEQ ID NO: 2050884 - RNA, 19 nt, Homo sapiens
  misc_RNA (1)...(19): siRNA sense strand
ggcccugucuuauucaacu

SEQ ID NO: 2050885 - RNA, 19 nt, Homo sapiens
  misc_RNA (1)...(19): siRNA sense strand
ccugccugcugccuacuuu

SEQ ID NO: 2050886 - RNA, 19 nt, Homo sapiens
  misc_RNA (1)...(19): siRNA sense strand
aaagauaccagcaauuucc

SEQ ID NO: 2050887 - RNA, 19 nt, Homo sapiens
  misc_RNA (1)...(19): siRNA sense strand
uuacagugcucuacuuccu

SEQ ID NO: 2050888 - RNA, 19 nt, Homo sapiens
  misc_RNA (1)...(19): siRNA sense strand
ggucuguugggaugguaua

SEQ ID NO: 2050889 - RNA, 19 nt, Homo sapiens
  misc_RNA (1)...(19): siRNA sense strand
uggaguaacuagguugaca

SEQ ID NO: 2050890 - RNA, 19 nt, Homo sapiens
  misc_RNA (1)...(19): siRNA sense strand
cuccuggucugcaguggaa

SEQ ID NO: 2050891 - RNA, 19 nt, Homo sapiens
  misc_RNA (1)...(19): siRNA sense strand
ggcaugaaaggacguguuc

SEQ ID NO: 2050892 - RNA, 19 nt, Homo sapiens
  misc_RNA (1)...(19): siRNA sense strand
uuccaaagauaccagcaau

SEQ ID NO: 2050893 - RNA, 19 nt, Homo sapiens
  misc_RNA (1)...(19): siRNA sense strand
cuacaguugagacgauuug

SEQ ID NO: 2050894 - RNA, 19 nt, Homo sapiens
  misc_RNA (1)...(19): siRNA sense strand
uauaacuccuuucccaaaa

SEQ ID NO: 2050895 - RNA, 19 nt, Homo sapiens
  misc_RNA (1)...(19): siRNA sense strand
cuagaugcugggcuuguuu

SEQ ID NO: 2050896 - RNA, 19 nt, Homo sapiens
  misc_RNA (1)...(19): siRNA sense strand
ucuguggccucgucugcuu

SEQ ID NO: 2050897 - RNA, 19 nt, Homo sapiens
  misc_RNA (1)...(19): siRNA sense strand
gcuacucccuccgcacaag

SEQ ID NO: 2050898 - RNA, 19 nt, Homo sapiens
  misc_RNA (1)...(19): siRNA sense strand
uaacuccuuucccaaaaug

SEQ ID NO: 2050899 - RNA, 19 nt, Homo sapiens
  misc_RNA (1)...(19): siRNA sense strand
gaucagcccugguucuuua

SEQ ID NO: 2050900 - RNA, 19 nt, Homo sapiens
  misc_RNA (1)...(19): siRNA sense strand
gaugguagauuggcauuua

SEQ ID NO: 2050901 - RNA, 19 nt, Homo sapiens
  misc_RNA (1)...(19): siRNA sense strand
aagcagaauuccaaagaua

SEQ ID NO: 2050902 - RNA, 19 nt, Homo sapiens
  misc_RNA (1)...(19): siRNA sense strand
ccaaagauaccagcaauuu

SEQ ID NO: 2050903 - RNA, 19 nt, Homo sapiens
  misc_RNA (1)...(19): siRNA sense strand
ugaaguagcuuugcaaucu

SEQ ID NO: 2050904 - RNA, 19 nt, Homo sapiens
  misc_RNA (1)...(19): siRNA sense strand
gaagcagaauuccaaagau

SEQ ID NO: 2050905 - RNA, 19 nt, Homo sapiens
  misc_RNA (1)...(19): siRNA sense strand
guaacuagguugacagagu

SEQ ID NO: 2050906 - RNA, 19 nt, Homo sapiens
  misc_RNA (1)...(19): siRNA sense strand
gcucagccguggcaugaaa

SEQ ID NO: 2050907 - RNA, 19 nt, Homo sapiens
  misc_RNA (1)...(19): siRNA sense strand
augcugggcuuguuuauaa

SEQ ID NO: 2050908 - RNA, 19 nt, Homo sapiens
  misc_RNA (1)...(19): siRNA sense strand
gcaguuugaucaccggauu

SEQ ID NO: 2050909 - RNA, 19 nt, Homo sapiens
  misc_RNA (1)...(19): siRNA sense strand
gauaugacacugacagaau

SEQ ID NO: 2050910 - RNA, 19 nt, Homo sapiens
  misc_RNA (1)...(19): siRNA sense strand
gggaaucacuucagucacu

SEQ ID NO: 2050911 - RNA, 19 nt, Homo sapiens
  misc_RNA (1)...(19): siRNA sense strand
gagaugaagccaccuacaa

SEQ ID NO: 2050912 - RNA, 19 nt, Homo sapiens
  misc_RNA (1)...(19): siRNA sense strand
gaaguagcuuugcaaucug

SEQ ID NO: 2050913 - RNA, 19 nt, Homo sapiens
  misc_RNA (1)...(19): siRNA sense strand
gcaggucugguguuccuua

SEQ ID NO: 2050914 - RNA, 19 nt, Homo sapiens
  misc_RNA (1)...(19): siRNA sense strand
ccgcacaaguugccugaaa

SEQ ID NO: 2050915 - RNA, 19 nt, Homo sapiens
  misc_RNA (1)...(19): siRNA sense strand
ugacagaauucaaguucau

SEQ ID NO: 2050916 - RNA, 19 nt, Homo sapiens
  misc_RNA (1)...(19): siRNA sense strand
gguagauuggcauuuaaua

SEQ ID NO: 2050917 - RNA, 19 nt, Homo sapiens
  misc_RNA (1)...(19): siRNA sense strand
gagacgauuugcucaugga

SEQ ID NO: 2050918 - RNA, 19 nt, Homo sapiens
  misc_RNA (1)...(19): siRNA sense strand
cagugucccuucccucaaa

SEQ ID NO: 2050919 - RNA, 19 nt, Homo sapiens
  misc_RNA (1)...(19): siRNA sense strand
cagugacucugcuggcuuu

SEQ ID NO: 2050920 - RNA, 19 nt, Homo sapiens
  misc_RNA (1)...(19): siRNA sense strand
gcuagaugcugggcuuguu

SEQ ID NO: 2050921 - RNA, 19 nt, Homo sapiens
  misc_RNA (1)...(19): siRNA sense strand
ggugaaaaguggacuagaa

SEQ ID NO: 2050922 - RNA, 19 nt, Homo sapiens
  misc_RNA (1)...(19): siRNA sense strand
ggaguacucacaccgaaug

SEQ ID NO: 2050923 - RNA, 19 nt, Homo sapiens
  misc_RNA (1)...(19): siRNA sense strand
aacaguggcuggagcaguu

SEQ ID NO: 2050924 - RNA, 19 nt, Homo sapiens
  misc_RNA (1)...(19): siRNA sense strand
ccauuacagugcucuacuu

SEQ ID NO: 2050925 - RNA, 19 nt, Homo sapiens
  misc_RNA (1)...(19): siRNA sense strand
auaugacacugacagaauu

SEQ ID NO: 2050926 - RNA, 19 nt, Homo sapiens
  misc_RNA (1)...(19): siRNA sense strand
caaagauaccagcaauuuc

SEQ ID NO: 2050927 - RNA, 19 nt, Homo sapiens
  misc_RNA (1)...(19): siRNA sense strand
gaaaaguggacuagaagaa

SEQ ID NO: 2050928 - RNA, 19 nt, Homo sapiens
  misc_RNA (1)...(19): siRNA sense strand
gggaugguauauggugaaa

SEQ ID NO: 2050929 - RNA, 19 nt, Homo sapiens
  misc_RNA (1)...(19): siRNA sense strand
uaccagcaauuuccagaau

SEQ ID NO: 2050930 - RNA, 19 nt, Homo sapiens
  misc_RNA (1)...(19): siRNA sense strand
gaugcugggcuuguuuaua

SEQ ID NO: 2050931 - RNA, 19 nt, Homo sapiens
  misc_RNA (1)...(19): siRNA sense strand
caccaucucugaaguagcu

SEQ ID NO: 2050932 - RNA, 19 nt, Homo sapiens
  misc_RNA (1)...(19): siRNA sense strand
cagcccugguucuuuauug

SEQ ID NO: 2050933 - RNA, 19 nt, Homo sapiens
  misc_RNA (1)...(19): siRNA sense strand
aauucaaguucaucuggua

SEQ ID NO: 2050934 - RNA, 19 nt, Homo sapiens
  misc_RNA (1)...(19): siRNA sense strand
gaugguauauggugaaaag

SEQ ID NO: 2050935 - RNA, 19 nt, Homo sapiens
  misc_RNA (1)...(19): siRNA sense strand
caagauggcagcagugacu

SEQ ID NO: 2050936 - RNA, 19 nt, Homo sapiens
  misc_RNA (1)...(19): siRNA sense strand
cagcaccaucucugaagua

SEQ ID NO: 2050937 - RNA, 19 nt, Homo sapiens
  misc_RNA (1)...(19): siRNA sense strand
caugaaaggacguguucuu

SEQ ID NO: 2050938 - RNA, 19 nt, Homo sapiens
  misc_RNA (1)...(19): siRNA sense strand
uagaugcugggcuuguuua

SEQ ID NO: 2050939 - RNA, 19 nt, Homo sapiens
  misc_RNA (1)...(19): siRNA sense strand
ugaaacccaccaacuccua

SEQ ID NO: 2050940 - RNA, 19 nt, Homo sapiens
  misc_RNA (1)...(19): siRNA sense strand
ggaucagcccugguucuuu

SEQ ID NO: 2050941 - RNA, 19 nt, Homo sapiens
  misc_RNA (1)...(19): siRNA sense strand
gcaauacagcaccaucucu

SEQ ID NO: 2050942 - RNA, 19 nt, Homo sapiens
  misc_RNA (1)...(19): siRNA sense strand
uuauaacuccuuucccaaa

SEQ ID NO: 2050943 - RNA, 19 nt, Homo sapiens
  misc_RNA (1)...(19): siRNA sense strand
aaaguggacuagaagaaaa

SEQ ID NO: 2050944 - RNA, 19 nt, Homo sapiens
  misc_RNA (1)...(19): siRNA sense strand
aaaucagacucccaugaca

SEQ ID NO: 2050945 - RNA, 19 nt, Homo sapiens
  misc_RNA (1)...(19): siRNA sense strand
gcuuguuuauaacuccuuu

SEQ ID NO: 2050946 - RNA, 19 nt, Homo sapiens
  misc_RNA (1)...(19): siRNA sense strand
gaguaacuagguugacaga

SEQ ID NO: 2050947 - RNA, 19 nt, Homo sapiens
  misc_RNA (1)...(19): siRNA sense strand
acgauuugcucauggaaca

SEQ ID NO: 2050948 - RNA, 19 nt, Homo sapiens
  misc_RNA (1)...(19): siRNA sense strand
gccucucgaugguagauug

SEQ ID NO: 2050949 - RNA, 19 nt, Homo sapiens
  misc_RNA (1)...(19): siRNA sense strand
ggagaugaagccaccuaca

SEQ ID NO: 2050950 - RNA, 19 nt, Homo sapiens
  misc_RNA (1)...(19): siRNA sense strand
cagcaggucugguguuccu

SEQ ID NO: 2050951 - RNA, 19 nt, Homo sapiens
  misc_RNA (1)...(19): siRNA sense strand
gggaucagcccugguucuu

SEQ ID NO: 2050952 - RNA, 19 nt, Homo sapiens
  misc_RNA (1)...(19): siRNA sense strand
cuacaagccaagaggaaug

SEQ ID NO: 2050953 - RNA, 19 nt, Homo sapiens
  misc_RNA (1)...(19): siRNA sense strand
gcuggagcaguuauucuug

SEQ ID NO: 2050954 - RNA, 19 nt, Homo sapiens
  misc_RNA (1)...(19): siRNA sense strand
ccugccugcugccuacuuu

SEQ ID NO: 2050955 - RNA, 19 nt, Homo sapiens
  misc_RNA (1)...(19): siRNA sense strand
aaagauaccagcaauuucc

SEQ ID NO: 2050956 - RNA, 19 nt, Homo sapiens
  misc_RNA (1)...(19): siRNA sense strand
uuacagugcucuacuuccu

SEQ ID NO: 2050957 - RNA, 19 nt, Homo sapiens
  misc_RNA (1)...(19): siRNA sense strand
ggucuguugggaugguaua

SEQ ID NO: 2050958 - RNA, 19 nt, Homo sapiens
  misc_RNA (1)...(19): siRNA sense strand
uggaguaacuagguugaca

SEQ ID NO: 2050959 - RNA, 19 nt, Homo sapiens
  misc_RNA (1)...(19): siRNA sense strand
ggcaugaaaggacguguuc

SEQ ID NO: 2050960 - RNA, 19 nt, Homo sapiens
  misc_RNA (1)...(19): siRNA sense strand
uuccaaagauaccagcaau

SEQ ID NO: 2050961 - RNA, 19 nt, Homo sapiens
  misc_RNA (1)...(19): siRNA sense strand
cuccuggucugcaguggaa

SEQ ID NO: 2050962 - RNA, 19 nt, Homo sapiens
  misc_RNA (1)...(19): siRNA sense strand
cuacaguugagacgauuug

SEQ ID NO: 2050963 - RNA, 19 nt, Homo sapiens
  misc_RNA (1)...(19): siRNA sense strand
uauaacuccuuucccaaaa

SEQ ID NO: 2050964 - RNA, 19 nt, Homo sapiens
  misc_RNA (1)...(19): siRNA sense strand
cuagaugcugggcuuguuu

SEQ ID NO: 2050965 - RNA, 19 nt, Homo sapiens
  misc_RNA (1)...(19): siRNA sense strand
ucuguggccucgucugcuu

SEQ ID NO: 2050966 - RNA, 19 nt, Homo sapiens
  misc_RNA (1)...(19): siRNA sense strand
gcuacucccuccgcacaag

SEQ ID NO: 2050967 - RNA, 19 nt, Homo sapiens
  misc_RNA (1)...(19): siRNA sense strand
uaacuccuuucccaaaaug

SEQ ID NO: 2050968 - RNA, 19 nt, Homo sapiens
  misc_RNA (1)...(19): siRNA sense strand
ggaagaagcuccacuuuga

SEQ ID NO: 2050969 - RNA, 19 nt, Homo sapiens
  misc_RNA (1)...(19): siRNA sense strand
gaacagaaccuuugcaagu

SEQ ID NO: 2050970 - RNA, 19 nt, Homo sapiens
  misc_RNA (1)...(19): siRNA sense strand
ggagacaaauaaugaaguu

SEQ ID NO: 2050971 - RNA, 19 nt, Homo sapiens
  misc_RNA (1)...(19): siRNA sense strand
ggaaucauguguugucaga

SEQ ID NO: 2050972 - RNA, 19 nt, Homo sapiens
  misc_RNA (1)...(19): siRNA sense strand
gaagggaguucucauuaca

SEQ ID NO: 2050973 - RNA, 19 nt, Homo sapiens
  misc_RNA (1)...(19): siRNA sense strand
gaaagcacaucaucuggau

SEQ ID NO: 2050974 - RNA, 19 nt, Homo sapiens
  misc_RNA (1)...(19): siRNA sense strand
caacagaucuucagaacac

SEQ ID NO: 2050975 - RNA, 19 nt, Homo sapiens
  misc_RNA (1)...(19): siRNA sense strand
ugucacaacugcuaccuua

SEQ ID NO: 2050976 - RNA, 19 nt, Homo sapiens
  misc_RNA (1)...(19): siRNA sense strand
ugaacugccugaaaccuua

SEQ ID NO: 2050977 - RNA, 19 nt, Homo sapiens
  misc_RNA (1)...(19): siRNA sense strand
caaaugaacugccugaaac

SEQ ID NO: 2050978 - RNA, 19 nt, Homo sapiens
  misc_RNA (1)...(19): siRNA sense strand
gaagaugucguugugguua

SEQ ID NO: 2050979 - RNA, 19 nt, Homo sapiens
  misc_RNA (1)...(19): siRNA sense strand
gagaguggcaggaguuaua

SEQ ID NO: 2050980 - RNA, 19 nt, Homo sapiens
  misc_RNA (1)...(19): siRNA sense strand
gaacacauuuggacaacuc

SEQ ID NO: 2050981 - RNA, 19 nt, Homo sapiens
  misc_RNA (1)...(19): siRNA sense strand
gugaagaggagacaaauaa

SEQ ID NO: 2050982 - RNA, 19 nt, Homo sapiens
  misc_RNA (1)...(19): siRNA sense strand
ccugaaaccuuaucaccua

SEQ ID NO: 2050983 - RNA, 19 nt, Homo sapiens
  misc_RNA (1)...(19): siRNA sense strand
gcaggaaccucagauaaag

SEQ ID NO: 2050984 - RNA, 19 nt, Homo sapiens
  misc_RNA (1)...(19): siRNA sense strand
guggagugaucaucuauaa

SEQ ID NO: 2050985 - RNA, 19 nt, Homo sapiens
  misc_RNA (1)...(19): siRNA sense strand
gaaguucaguguucuuugg

SEQ ID NO: 2050986 - RNA, 19 nt, Homo sapiens
  misc_RNA (1)...(19): siRNA sense strand
gaagaggagacaaauaaug

SEQ ID NO: 2050987 - RNA, 19 nt, Homo sapiens
  misc_RNA (1)...(19): siRNA sense strand
gagcaaguguuguuuggau

SEQ ID NO: 2050988 - RNA, 19 nt, Homo sapiens
  misc_RNA (1)...(19): siRNA sense strand
cuauaagccuaaugacaua

SEQ ID NO: 2050989 - RNA, 19 nt, Homo sapiens
  misc_RNA (1)...(19): siRNA sense strand
gaaacaacacugccucuuc

SEQ ID NO: 2050990 - RNA, 19 nt, Homo sapiens
  misc_RNA (1)...(19): siRNA sense strand
aaauuaaaguggcaacuga

SEQ ID NO: 2050991 - RNA, 19 nt, Homo sapiens
  misc_RNA (1)...(19): siRNA sense strand
gaagagaguggcaggaguu

SEQ ID NO: 2050992 - RNA, 19 nt, Homo sapiens
  misc_RNA (1)...(19): siRNA sense strand
ugacauaguucguauucug

SEQ ID NO: 2050993 - RNA, 19 nt, Homo sapiens
  misc_RNA (1)...(19): siRNA sense strand
ggagaaagcacaucaucug

SEQ ID NO: 2050994 - RNA, 19 nt, Homo sapiens
  misc_RNA (1)...(19): siRNA sense strand
ggggauagcugcguaauuu

SEQ ID NO: 2050995 - RNA, 19 nt, Homo sapiens
  misc_RNA (1)...(19): siRNA sense strand
cauccagccucauucagua

SEQ ID NO: 2050996 - RNA, 19 nt, Homo sapiens
  misc_RNA (1)...(19): siRNA sense strand
gguuguaccuucacacaga

SEQ ID NO: 2050997 - RNA, 19 nt, Homo sapiens
  misc_RNA (1)...(19): siRNA sense strand
gaagaagcuccacuuugaa

SEQ ID NO: 2050998 - RNA, 19 nt, Homo sapiens
  misc_RNA (1)...(19): siRNA sense strand
gcuauaagccuaaugacau

SEQ ID NO: 2050999 - RNA, 19 nt, Homo sapiens
  misc_RNA (1)...(19): siRNA sense strand
cagauaaaguaauccaugu

SEQ ID NO: 2051000 - RNA, 19 nt, Homo sapiens
  misc_RNA (1)...(19): siRNA sense strand
ccaguggagugaucaucua

SEQ ID NO: 2051001 - RNA, 19 nt, Homo sapiens
  misc_RNA (1)...(19): siRNA sense strand
ucaaaugaacugccugaaa

SEQ ID NO: 2051002 - RNA, 19 nt, Homo sapiens
  misc_RNA (1)...(19): siRNA sense strand
cuaaugacauaguucguau

SEQ ID NO: 2051003 - RNA, 19 nt, Homo sapiens
  misc_RNA (1)...(19): siRNA sense strand
gaaaccuuaucaccuagug

SEQ ID NO: 2051004 - RNA, 19 nt, Homo sapiens
  misc_RNA (1)...(19): siRNA sense strand
agaccuggcuugcacuuau

SEQ ID NO: 2051005 - RNA, 19 nt, Homo sapiens
  misc_RNA (1)...(19): siRNA sense strand
gaccuggcuugcacuuauu

SEQ ID NO: 2051006 - RNA, 19 nt, Homo sapiens
  misc_RNA (1)...(19): siRNA sense strand
uaacaacagaucuucagaa

SEQ ID NO: 2051007 - RNA, 19 nt, Homo sapiens
  misc_RNA (1)...(19): siRNA sense strand
aagaggagacaaauaauga

SEQ ID NO: 2051008 - RNA, 19 nt, Homo sapiens
  misc_RNA (1)...(19): siRNA sense strand
gcagagcaaguguuguuug

SEQ ID NO: 2051009 - RNA, 19 nt, Homo sapiens
  misc_RNA (1)...(19): siRNA sense strand
gaucaucuauaacguucca

SEQ ID NO: 2051010 - RNA, 19 nt, Homo sapiens
  misc_RNA (1)...(19): siRNA sense strand
caaguucuaaugucaaaug

SEQ ID NO: 2051011 - RNA, 19 nt, Homo sapiens
  misc_RNA (1)...(19): siRNA sense strand
ccacaagaauugcauugac

SEQ ID NO: 2051012 - RNA, 19 nt, Homo sapiens
  misc_RNA (1)...(19): siRNA sense strand
aacagaaccuuugcaaguu

SEQ ID NO: 2051013 - RNA, 19 nt, Homo sapiens
  misc_RNA (1)...(19): siRNA sense strand
ucauagacuuuguuuagca

SEQ ID NO: 2051014 - RNA, 19 nt, Homo sapiens
  misc_RNA (1)...(19): siRNA sense strand
ggagugaucaucuauaacg

SEQ ID NO: 2051015 - RNA, 19 nt, Homo sapiens
  misc_RNA (1)...(19): siRNA sense strand
guucguauucugacuugua

SEQ ID NO: 2051016 - RNA, 19 nt, Homo sapiens
  misc_RNA (1)...(19): siRNA sense strand
cauagacuuuguuuagcaa

SEQ ID NO: 2051017 - RNA, 19 nt, Homo sapiens
  misc_RNA (1)...(19): siRNA sense strand
ucacauucauagacuuugu

SEQ ID NO: 2051018 - RNA, 19 nt, Homo sapiens
  misc_RNA (1)...(19): siRNA sense strand
cuggaugaaucacuauuug

SEQ ID NO: 2051019 - RNA, 19 nt, Homo sapiens
  misc_RNA (1)...(19): siRNA sense strand
gaaccucagauaaaguaau

SEQ ID NO: 2051020 - RNA, 19 nt, Homo sapiens
  misc_RNA (1)...(19): siRNA sense strand
aguguucuuuggcuuguua

SEQ ID NO: 2051021 - RNA, 19 nt, Homo sapiens
  misc_RNA (1)...(19): siRNA sense strand
aaucauguguugucagagu

SEQ ID NO: 2051022 - RNA, 19 nt, Homo sapiens
  misc_RNA (1)...(19): siRNA sense strand
gacauaguucguauucuga

SEQ ID NO: 2051023 - RNA, 19 nt, Homo sapiens
  misc_RNA (1)...(19): siRNA sense strand
cagagcaaguguuguuugg

SEQ ID NO: 2051024 - RNA, 19 nt, Homo sapiens
  misc_RNA (1)...(19): siRNA sense strand
ggaugaaucacuauuuggu

SEQ ID NO: 2051025 - RNA, 19 nt, Homo sapiens
  misc_RNA (1)...(19): siRNA sense strand
gaucuucagaacacauuug

SEQ ID NO: 2051026 - RNA, 19 nt, Homo sapiens
  misc_RNA (1)...(19): siRNA sense strand
uguaaucccaauaccauuu

SEQ ID NO: 2051027 - RNA, 19 nt, Homo sapiens
  misc_RNA (1)...(19): siRNA sense strand
ugcaaguucuaaugucaaa

SEQ ID NO: 2051028 - RNA, 19 nt, Homo sapiens
  misc_RNA (1)...(19): siRNA sense strand
cugcguaauuugcuuugaa

SEQ ID NO: 2051029 - RNA, 19 nt, Homo sapiens
  misc_RNA (1)...(19): siRNA sense strand
gcgauuaacaacagaucuu

SEQ ID NO: 2051030 - RNA, 19 nt, Homo sapiens
  misc_RNA (1)...(19): siRNA sense strand
uaccuuagcauauuucauc

SEQ ID NO: 2051031 - RNA, 19 nt, Homo sapiens
  misc_RNA (1)...(19): siRNA sense strand
cgaucaaaguacucagaga

SEQ ID NO: 2051032 - RNA, 19 nt, Homo sapiens
  misc_RNA (1)...(19): siRNA sense strand
ugcaggaaccucagauaaa

SEQ ID NO: 2051033 - RNA, 19 nt, Homo sapiens
  misc_RNA (1)...(19): siRNA sense strand
gaacugccugaaaccuuau

SEQ ID NO: 2051034 - RNA, 19 nt, Homo sapiens
  misc_RNA (1)...(19): siRNA sense strand
aaauggaacagaaccuuug

SEQ ID NO: 2051035 - RNA, 19 nt, Homo sapiens
  misc_RNA (1)...(19): siRNA sense strand
ggacaugccccauuugcaa

SEQ ID NO: 2051036 - RNA, 19 nt, Homo sapiens
  misc_RNA (1)...(19): siRNA sense strand
ccuaaugacauaguucgua

SEQ ID NO: 2051037 - RNA, 19 nt, Homo sapiens
  misc_RNA (1)...(19): siRNA sense strand
uaagccuaaugacauaguu

SEQ ID NO: 2051038 - RNA, 19 nt, Homo sapiens
  misc_RNA (1)...(19): siRNA sense strand
ucagaacacauuuggacaa

SEQ ID NO: 2051039 - RNA, 19 nt, Homo sapiens
  misc_RNA (1)...(19): siRNA sense strand
gagauggcagcgauuaaca

SEQ ID NO: 2051040 - RNA, 19 nt, Homo sapiens
  misc_RNA (1)...(19): siRNA sense strand
gaagcuccacuuugaagag

SEQ ID NO: 2051041 - RNA, 19 nt, Homo sapiens
  misc_RNA (1)...(19): siRNA sense strand
uaaaguggcaacugagaag

SEQ ID NO: 2051042 - RNA, 19 nt, Homo sapiens
  misc_RNA (1)...(19): siRNA sense strand
cauguuucaucaggcauuu

SEQ ID NO: 2051043 - RNA, 19 nt, Homo sapiens
  misc_RNA (1)...(19): siRNA sense strand
uggcagcgauuaacaacag

SEQ ID NO: 2051044 - RNA, 19 nt, Homo sapiens
  misc_RNA (1)...(19): siRNA sense strand
gaaucacuauuuggucucu

SEQ ID NO: 2051045 - RNA, 19 nt, Homo sapiens
  misc_RNA (1)...(19): siRNA sense strand
cugcaggaaccucagauaa

SEQ ID NO: 2051046 - RNA, 19 nt, Homo sapiens
  misc_RNA (1)...(19): siRNA sense strand
aaccucagauaaaguaauc

SEQ ID NO: 2051047 - RNA, 19 nt, Homo sapiens
  misc_RNA (1)...(19): siRNA sense strand
cauguaaucccaauaccau

SEQ ID NO: 2051048 - RNA, 19 nt, Homo sapiens
  misc_RNA (1)...(19): siRNA sense strand
aggaaccucagauaaagua

SEQ ID NO: 2051049 - RNA, 19 nt, Homo sapiens
  misc_RNA (1)...(19): siRNA sense strand
gaggagacaaauaaugaag

SEQ ID NO: 2051050 - RNA, 19 nt, Homo sapiens
  misc_RNA (1)...(19): siRNA sense strand
cuagugaagaggagacaaa

SEQ ID NO: 2051051 - RNA, 19 nt, Homo sapiens
  misc_RNA (1)...(19): siRNA sense strand
uuguuuggauggcuuauau

SEQ ID NO: 2051052 - RNA, 19 nt, Homo sapiens
  misc_RNA (1)...(19): siRNA sense strand
aacaacagaucuucagaac

SEQ ID NO: 2051053 - RNA, 19 nt, Homo sapiens
  misc_RNA (1)...(19): siRNA sense strand
uuggauggcuuauaugaac

SEQ ID NO: 2051054 - RNA, 19 nt, Homo sapiens
  misc_RNA (1)...(19): siRNA sense strand
guuguaccuucacacagaa

SEQ ID NO: 2051055 - RNA, 19 nt, Homo sapiens
  misc_RNA (1)...(19): siRNA sense strand
ggagauggcagcgauuaac

SEQ ID NO: 2051056 - RNA, 19 nt, Homo sapiens
  misc_RNA (1)...(19): siRNA sense strand
ugacauccagccucauuca

SEQ ID NO: 2051057 - RNA, 19 nt, Homo sapiens
  misc_RNA (1)...(19): siRNA sense strand
gggagccaguggagugauc

SEQ ID NO: 2051058 - RNA, 19 nt, Homo sapiens
  misc_RNA (1)...(19): siRNA sense strand
guuuggauggcuuauauga

SEQ ID NO: 2051059 - RNA, 19 nt, Homo sapiens
  misc_RNA (1)...(19): siRNA sense strand
gagaccuggcuugcacuua

SEQ ID NO: 2051060 - RNA, 19 nt, Homo sapiens
  misc_RNA (1)...(19): siRNA sense strand
cagaacacauuuggacaac

SEQ ID NO: 2051061 - RNA, 19 nt, Homo sapiens
  misc_RNA (1)...(19): siRNA sense strand
gccucuuccuggcuuauga

SEQ ID NO: 2051062 - RNA, 19 nt, Homo sapiens
  misc_RNA (1)...(19): siRNA sense strand
ugaagaggagacaaauaau

SEQ ID NO: 2051063 - RNA, 19 nt, Homo sapiens
  misc_RNA (1)...(19): siRNA sense strand
cauuucauguugggaauca

SEQ ID NO: 2051064 - RNA, 19 nt, Homo sapiens
  misc_RNA (1)...(19): siRNA sense strand
ggauagcugcguaauuugc

SEQ ID NO: 2051065 - RNA, 19 nt, Homo sapiens
  misc_RNA (1)...(19): siRNA sense strand
ccggagauggcagcgauua

SEQ ID NO: 2051066 - RNA, 19 nt, Homo sapiens
  misc_RNA (1)...(19): siRNA sense strand
uaguucguauucugacuug

SEQ ID NO: 2051067 - RNA, 19 nt, Homo sapiens
  misc_RNA (1)...(19): siRNA sense strand
uucguauucugacuuguaa

SEQ ID NO: 2051068 - RNA, 19 nt, Homo sapiens
  misc_RNA (1)...(19): siRNA sense strand
agacacaaccucuuuauaa

SEQ ID NO: 2051069 - RNA, 19 nt, Homo sapiens
  misc_RNA (1)...(19): siRNA sense strand
ggaaauccgacgugcaaua

SEQ ID NO: 2051070 - RNA, 19 nt, Homo sapiens
  misc_RNA (1)...(19): siRNA sense strand
caacuaccaucacagaaug

SEQ ID NO: 2051071 - RNA, 19 nt, Homo sapiens
  misc_RNA (1)...(19): siRNA sense strand
gauauaaucuguggugauc

SEQ ID NO: 2051072 - RNA, 19 nt, Homo sapiens
  misc_RNA (1)...(19): siRNA sense strand
cagaaugucuucauaccuu

SEQ ID NO: 2051073 - RNA, 19 nt, Homo sapiens
  misc_RNA (1)...(19): siRNA sense strand
gaaguuuguucgaguuuca

SEQ ID NO: 2051074 - RNA, 19 nt, Homo sapiens
  misc_RNA (1)...(19): siRNA sense strand
gaggaggagcgccugauua

SEQ ID NO: 2051075 - RNA, 19 nt, Homo sapiens
  misc_RNA (1)...(19): siRNA sense strand
gaggagcgccugauuaauc

SEQ ID NO: 2051076 - RNA, 19 nt, Homo sapiens
  misc_RNA (1)...(19): siRNA sense strand
gcaauauaguaguacauca

SEQ ID NO: 2051077 - RNA, 19 nt, Homo sapiens
  misc_RNA (1)...(19): siRNA sense strand
gcaacuaccaucacagaau

SEQ ID NO: 2051078 - RNA, 19 nt, Homo sapiens
  misc_RNA (1)...(19): siRNA sense strand
ggagcaguaucaaacucua

SEQ ID NO: 2051079 - RNA, 19 nt, Homo sapiens
  misc_RNA (1)...(19): siRNA sense strand
uguaaaagcugcaucguaa

SEQ ID NO: 2051080 - RNA, 19 nt, Homo sapiens
  misc_RNA (1)...(19): siRNA sense strand
ugauccagcuugucaggua

SEQ ID NO: 2051081 - RNA, 19 nt, Homo sapiens
  misc_RNA (1)...(19): siRNA sense strand
gcaaagguuacuuaauaga

SEQ ID NO: 2051082 - RNA, 19 nt, Homo sapiens
  misc_RNA (1)...(19): siRNA sense strand
aaagaaguuuguucgaguu

SEQ ID NO: 2051083 - RNA, 19 nt, Homo sapiens
  misc_RNA (1)...(19): siRNA sense strand
caucagacacaaccucuuu

SEQ ID NO: 2051084 - RNA, 19 nt, Homo sapiens
  misc_RNA (1)...(19): siRNA sense strand
gacacaaccucuuuauaac

SEQ ID NO: 2051085 - RNA, 19 nt, Homo sapiens
  misc_RNA (1)...(19): siRNA sense strand
gaaauccgacgugcaauag

SEQ ID NO: 2051086 - RNA, 19 nt, Homo sapiens
  misc_RNA (1)...(19): siRNA sense strand
ggacgaggacgaggaguug

SEQ ID NO: 2051087 - RNA, 19 nt, Homo sapiens
  misc_RNA (1)...(19): siRNA sense strand
caacagauguccaaaaugc

SEQ ID NO: 2051088 - RNA, 19 nt, Homo sapiens
  misc_RNA (1)...(19): siRNA sense strand
ggacgaggaguuggaagaa

SEQ ID NO: 2051089 - RNA, 19 nt, Homo sapiens
  misc_RNA (1)...(19): siRNA sense strand
cacaaccucuuuauaacau

SEQ ID NO: 2051090 - RNA, 19 nt, Homo sapiens
  misc_RNA (1)...(19): siRNA sense strand
ucucugagcugaccccaua

SEQ ID NO: 2051091 - RNA, 19 nt, Homo sapiens
  misc_RNA (1)...(19): siRNA sense strand
uaucaaacucuaagggaaa

SEQ ID NO: 2051092 - RNA, 19 nt, Homo sapiens
  misc_RNA (1)...(19): siRNA sense strand
gagcaguaucaaacucuaa

SEQ ID NO: 2051093 - RNA, 19 nt, Homo sapiens
  misc_RNA (1)...(19): siRNA sense strand
cagacacaaccucuuuaua

SEQ ID NO: 2051094 - RNA, 19 nt, Homo sapiens
  misc_RNA (1)...(19): siRNA sense strand
aggaggagcgccugauuaa

SEQ ID NO: 2051095 - RNA, 19 nt, Homo sapiens
  misc_RNA (1)...(19): siRNA sense strand
agaaugucuucauaccuuu

SEQ ID NO: 2051096 - RNA, 19 nt, Homo sapiens
  misc_RNA (1)...(19): siRNA sense strand
ccauacaucuuguguucca

SEQ ID NO: 2051097 - RNA, 19 nt, Homo sapiens
  misc_RNA (1)...(19): siRNA sense strand
gaaggcacgggacauuuua

SEQ ID NO: 2051098 - RNA, 19 nt, Homo sapiens
  misc_RNA (1)...(19): siRNA sense strand
acgaggaguuggaagaaga

SEQ ID NO: 2051099 - RNA, 19 nt, Homo sapiens
  misc_RNA (1)...(19): siRNA sense strand
gcaacuauuggacauguag

SEQ ID NO: 2051100 - RNA, 19 nt, Homo sapiens
  misc_RNA (1)...(19): siRNA sense strand
cagcuugucagguagauau

SEQ ID NO: 2051101 - RNA, 19 nt, Homo sapiens
  misc_RNA (1)...(19): siRNA sense strand
ggaguuggaagaagaagag

SEQ ID NO: 2051102 - RNA, 19 nt, Homo sapiens
  misc_RNA (1)...(19): siRNA sense strand
ucauuauggucuugugguu

SEQ ID NO: 2051103 - RNA, 19 nt, Homo sapiens
  misc_RNA (1)...(19): siRNA sense strand
cauuugcaaagguuacuua

SEQ ID NO: 2051104 - RNA, 19 nt, Homo sapiens
  misc_RNA (1)...(19): siRNA sense strand
aauaggugaugcagcaaug

SEQ ID NO: 2051105 - RNA, 19 nt, Homo sapiens
  misc_RNA (1)...(19): siRNA sense strand
agaagcaacuauuggacau

SEQ ID NO: 2051106 - RNA, 19 nt, Homo sapiens
  misc_RNA (1)...(19): siRNA sense strand
caucuuguguuccauuugc

SEQ ID NO: 2051107 - RNA, 19 nt, Homo sapiens
  misc_RNA (1)...(19): siRNA sense strand
ugcaaagguuacuuaauag

SEQ ID NO: 2051108 - RNA, 19 nt, Homo sapiens
  misc_RNA (1)...(19): siRNA sense strand
acacaaccucuuuauaaca

SEQ ID NO: 2051109 - RNA, 19 nt, Homo sapiens
  misc_RNA (1)...(19): siRNA sense strand
gguuucuccucugaagaua

SEQ ID NO: 2051110 - RNA, 19 nt, Homo sapiens
  misc_RNA (1)...(19): siRNA sense strand
aagcaacuauuggacaugu

SEQ ID NO: 2051111 - RNA, 19 nt, Homo sapiens
  misc_RNA (1)...(19): siRNA sense strand
ucaggagaagcaacuauug

SEQ ID NO: 2051112 - RNA, 19 nt, Homo sapiens
  misc_RNA (1)...(19): siRNA sense strand
ggaggaggaggacaugagu

SEQ ID NO: 2051113 - RNA, 19 nt, Homo sapiens
  misc_RNA (1)...(19): siRNA sense strand
augagucacuucucguuga

SEQ ID NO: 2051114 - RNA, 19 nt, Homo sapiens
  misc_RNA (1)...(19): siRNA sense strand
ucagacacaaccucuuuau

SEQ ID NO: 2051115 - RNA, 19 nt, Homo sapiens
  misc_RNA (1)...(19): siRNA sense strand
uacaucuuguguuccauuu

SEQ ID NO: 2051116 - RNA, 19 nt, Homo sapiens
  misc_RNA (1)...(19): siRNA sense strand
aaagcugcaucguaagaca

SEQ ID NO: 2051117 - RNA, 19 nt, Homo sapiens
  misc_RNA (1)...(19): siRNA sense strand
ucacagaaugucuucauac

SEQ ID NO: 2051118 - RNA, 19 nt, Homo sapiens
  misc_RNA (1)...(19): siRNA sense strand
cgaggaggagcgccugauu

SEQ ID NO: 2051119 - RNA, 19 nt, Homo sapiens
  misc_RNA (1)...(19): siRNA sense strand
gacgaggaguuggaagaag

SEQ ID NO: 2051120 - RNA, 19 nt, Homo sapiens
  misc_RNA (1)...(19): siRNA sense strand
auuauggucuugugguuuc

SEQ ID NO: 2051121 - RNA, 19 nt, Homo sapiens
  misc_RNA (1)...(19): siRNA sense strand
caucacagaaugucuucau

SEQ ID NO: 2051122 - RNA, 19 nt, Homo sapiens
  misc_RNA (1)...(19): siRNA sense strand
ggucugcuuguccuucauu

SEQ ID NO: 2051123 - RNA, 19 nt, Homo sapiens
  misc_RNA (1)...(19): siRNA sense strand
aauccgacgugcaauaggu

SEQ ID NO: 2051124 - RNA, 19 nt, Homo sapiens
  misc_RNA (1)...(19): siRNA sense strand
gaagcaacuauuggacaug

SEQ ID NO: 2051125 - RNA, 19 nt, Homo sapiens
  misc_RNA (1)...(19): siRNA sense strand
ggaggagcgccugauuaau

SEQ ID NO: 2051126 - RNA, 19 nt, Homo sapiens
  misc_RNA (1)...(19): siRNA sense strand
ggagcuggaggaggaagaa

SEQ ID NO: 2051127 - RNA, 19 nt, Homo sapiens
  misc_RNA (1)...(19): siRNA sense strand
ggaggaggaggaggacaug

SEQ ID NO: 2051128 - RNA, 19 nt, Homo sapiens
  misc_RNA (1)...(19): siRNA sense strand
uauaaucuguggugaucac

SEQ ID NO: 2051129 - RNA, 19 nt, Homo sapiens
  misc_RNA (1)...(19): siRNA sense strand
gaggaggacaugagucacu

SEQ ID NO: 2051130 - RNA, 19 nt, Homo sapiens
  misc_RNA (1)...(19): siRNA sense strand
cuugucagguagauauaau

SEQ ID NO: 2051131 - RNA, 19 nt, Homo sapiens
  misc_RNA (1)...(19): siRNA sense strand
uauaguaguacaucagaca

SEQ ID NO: 2051132 - RNA, 19 nt, Homo sapiens
  misc_RNA (1)...(19): siRNA sense strand
caauauaguaguacaucag

SEQ ID NO: 2051133 - RNA, 19 nt, Homo sapiens
  misc_RNA (1)...(19): siRNA sense strand
cugcuuguccuucauuaug

SEQ ID NO: 2051134 - RNA, 19 nt, Homo sapiens
  misc_RNA (1)...(19): siRNA sense strand
aguaguacaucagacacaa

SEQ ID NO: 2051135 - RNA, 19 nt, Homo sapiens
  misc_RNA (1)...(19): siRNA sense strand
uaauagaugcaacuaccau

SEQ ID NO: 2051136 - RNA, 19 nt, Homo sapiens
  misc_RNA (1)...(19): siRNA sense strand
gcuugucagguagauauaa

SEQ ID NO: 2051137 - RNA, 19 nt, Homo sapiens
  misc_RNA (1)...(19): siRNA sense strand
aggagcgccugauuaaucu

SEQ ID NO: 2051138 - RNA, 19 nt, Homo sapiens
  misc_RNA (1)...(19): siRNA sense strand
aucacagaaugucuucaua

SEQ ID NO: 2051139 - RNA, 19 nt, Homo sapiens
  misc_RNA (1)...(19): siRNA sense strand
gaaggacuauggacucuug

SEQ ID NO: 2051140 - RNA, 19 nt, Homo sapiens
  misc_RNA (1)...(19): siRNA sense strand
ugacagagcugguggaaca

SEQ ID NO: 2051141 - RNA, 19 nt, Homo sapiens
  misc_RNA (1)...(19): siRNA sense strand
ucagaagccugcagaauca

SEQ ID NO: 2051142 - RNA, 19 nt, Homo sapiens
  misc_RNA (1)...(19): siRNA sense strand
cauccaaccuuuaacuuga

SEQ ID NO: 2051143 - RNA, 19 nt, Homo sapiens
  misc_RNA (1)...(19): siRNA sense strand
gagaagagcaucacagaag

SEQ ID NO: 2051144 - RNA, 19 nt, Homo sapiens
  misc_RNA (1)...(19): siRNA sense strand
gcaucuggcugaaccuuga

SEQ ID NO: 2051145 - RNA, 19 nt, Homo sapiens
  misc_RNA (1)...(19): siRNA sense strand
uaaagcaaguaaaggugua

SEQ ID NO: 2051146 - RNA, 19 nt, Homo sapiens
  misc_RNA (1)...(19): siRNA sense strand
agggaaagcuugccuucua

SEQ ID NO: 2051147 - RNA, 19 nt, Homo sapiens
  misc_RNA (1)...(19): siRNA sense strand
gcuuacauccuggaaauua

SEQ ID NO: 2051148 - RNA, 19 nt, Homo sapiens
  misc_RNA (1)...(19): siRNA sense strand
ggccauccauccaaccuuu

SEQ ID NO: 2051149 - RNA, 19 nt, Homo sapiens
  misc_RNA (1)...(19): siRNA sense strand
gggaaagcuugccuucuau

SEQ ID NO: 2051150 - RNA, 19 nt, Homo sapiens
  misc_RNA (1)...(19): siRNA sense strand
ggaacaucuuguagacauu

SEQ ID NO: 2051151 - RNA, 19 nt, Homo sapiens
  misc_RNA (1)...(19): siRNA sense strand
gaagagcaucacagaaguu

SEQ ID NO: 2051152 - RNA, 19 nt, Homo sapiens
  misc_RNA (1)...(19): siRNA sense strand
ggacucuuguuguguggaa

SEQ ID NO: 2051153 - RNA, 19 nt, Homo sapiens
  misc_RNA (1)...(19): siRNA sense strand
gaacaucuuguagacauug

SEQ ID NO: 2051154 - RNA, 19 nt, Homo sapiens
  misc_RNA (1)...(19): siRNA sense strand
ggacuauggacucuuguug

SEQ ID NO: 2051155 - RNA, 19 nt, Homo sapiens
  misc_RNA (1)...(19): siRNA sense strand
gaaagcuugccuucuauuc

SEQ ID NO: 2051156 - RNA, 19 nt, Homo sapiens
  misc_RNA (1)...(19): siRNA sense strand
ggaaagcuugccuucuauu

SEQ ID NO: 2051157 - RNA, 19 nt, Homo sapiens
  misc_RNA (1)...(19): siRNA sense strand
ccagccaggucuuauguuc

SEQ ID NO: 2051158 - RNA, 19 nt, Homo sapiens
  misc_RNA (1)...(19): siRNA sense strand
gaccucggcugcaucaucu

SEQ ID NO: 2051159 - RNA, 19 nt, Homo sapiens
  misc_RNA (1)...(19): siRNA sense strand
ggaccuggccgacaaguac

SEQ ID NO: 2051160 - RNA, 19 nt, Homo sapiens
  misc_RNA (1)...(19): siRNA sense strand
ucuauucaguggacaauca

SEQ ID NO: 2051161 - RNA, 19 nt, Homo sapiens
  misc_RNA (1)...(19): siRNA sense strand
ccuggaaauuaccugauaa

SEQ ID NO: 2051162 - RNA, 19 nt, Homo sapiens
  misc_RNA (1)...(19): siRNA sense strand
uggcuuacauccuggaaau

SEQ ID NO: 2051163 - RNA, 19 nt, Homo sapiens
  misc_RNA (1)...(19): siRNA sense strand
uggaacaucuuguagacau

SEQ ID NO: 2051164 - RNA, 19 nt, Homo sapiens
  misc_RNA (1)...(19): siRNA sense strand
gguggaacaucuuguagac

SEQ ID NO: 2051165 - RNA, 19 nt, Homo sapiens
  misc_RNA (1)...(19): siRNA sense strand
aaacuguccuuggcucaga

SEQ ID NO: 2051166 - RNA, 19 nt, Homo sapiens
  misc_RNA (1)...(19): siRNA sense strand
gcugguggaacaucuugua

SEQ ID NO: 2051167 - RNA, 19 nt, Homo sapiens
  misc_RNA (1)...(19): siRNA sense strand
uccuggaaauuaccugaua

SEQ ID NO: 2051168 - RNA, 19 nt, Homo sapiens
  misc_RNA (1)...(19): siRNA sense strand
agaagagcaucacagaagu

SEQ ID NO: 2051169 - RNA, 19 nt, Homo sapiens
  misc_RNA (1)...(19): siRNA sense strand
uagagaagagcaucacaga

SEQ ID NO: 2051170 - RNA, 19 nt, Homo sapiens
  misc_RNA (1)...(19): siRNA sense strand
gucagaagccugcagaauc

SEQ ID NO: 2051171 - RNA, 19 nt, Homo sapiens
  misc_RNA (1)...(19): siRNA sense strand
gggaaggacuauggacucu

SEQ ID NO: 2051172 - RNA, 19 nt, Homo sapiens
  misc_RNA (1)...(19): siRNA sense strand
acuauggacucuuguugug

SEQ ID NO: 2051173 - RNA, 19 nt, Homo sapiens
  misc_RNA (1)...(19): siRNA sense strand
guccaaggauucccguaca

SEQ ID NO: 2051174 - RNA, 19 nt, Homo sapiens
  misc_RNA (1)...(19): siRNA sense strand
ccauccaaccuuuaacuug

SEQ ID NO: 2051175 - RNA, 19 nt, Homo sapiens
  misc_RNA (1)...(19): siRNA sense strand
gagcugguggaacaucuug

SEQ ID NO: 2051176 - RNA, 19 nt, Homo sapiens
  misc_RNA (1)...(19): siRNA sense strand
ggcccugucuucuggaaag

SEQ ID NO: 2051177 - RNA, 19 nt, Homo sapiens
  misc_RNA (1)...(19): siRNA sense strand
ccauccauccaaccuuuaa

SEQ ID NO: 2051178 - RNA, 19 nt, Homo sapiens
  misc_RNA (1)...(19): siRNA sense strand
aaagcuugccuucuauuca

SEQ ID NO: 2051179 - RNA, 19 nt, Homo sapiens
  misc_RNA (1)...(19): siRNA sense strand
ggaccagacaacgaacuga

SEQ ID NO: 2051180 - RNA, 19 nt, Homo sapiens
  misc_RNA (1)...(19): siRNA sense strand
ugucuucuggaaagcauua

SEQ ID NO: 2051181 - RNA, 19 nt, Homo sapiens
  misc_RNA (1)...(19): siRNA sense strand
gcaguagagaagagcauca

SEQ ID NO: 2051182 - RNA, 19 nt, Homo sapiens
  misc_RNA (1)...(19): siRNA sense strand
gacuauggacucuuguugu

SEQ ID NO: 2051183 - RNA, 19 nt, Homo sapiens
  misc_RNA (1)...(19): siRNA sense strand
cuuguuguguggaauggaa

SEQ ID NO: 2051184 - RNA, 19 nt, Homo sapiens
  misc_RNA (1)...(19): siRNA sense strand
guaugaguguaccaucucu

SEQ ID NO: 2051185 - RNA, 19 nt, Homo sapiens
  misc_RNA (1)...(19): siRNA sense strand
aagcuugccuucuauucag

SEQ ID NO: 2051186 - RNA, 19 nt, Homo sapiens
  misc_RNA (1)...(19): siRNA sense strand
gcacauggucaaggaaacu

SEQ ID NO: 2051187 - RNA, 19 nt, Homo sapiens
  misc_RNA (1)...(19): siRNA sense strand
gccauccauccaaccuuua

SEQ ID NO: 2051188 - RNA, 19 nt, Homo sapiens
  misc_RNA (1)...(19): siRNA sense strand
aaggauucccguacaguga

SEQ ID NO: 2051189 - RNA, 19 nt, Homo sapiens
  misc_RNA (1)...(19): siRNA sense strand
gaaagcauuacugggaagu

SEQ ID NO: 2051190 - RNA, 19 nt, Homo sapiens
  misc_RNA (1)...(19): siRNA sense strand
cgaccucggcugcaucauc

SEQ ID NO: 2051191 - RNA, 19 nt, Homo sapiens
  misc_RNA (1)...(19): siRNA sense strand
ugacagagcugguggaaca

SEQ ID NO: 2051192 - RNA, 19 nt, Homo sapiens
  misc_RNA (1)...(19): siRNA sense strand
ucagaagccugcagaauca

SEQ ID NO: 2051193 - RNA, 19 nt, Homo sapiens
  misc_RNA (1)...(19): siRNA sense strand
cauccaaccuuuaacuuga

SEQ ID NO: 2051194 - RNA, 19 nt, Homo sapiens
  misc_RNA (1)...(19): siRNA sense strand
gagaagagcaucacagaag

SEQ ID NO: 2051195 - RNA, 19 nt, Homo sapiens
  misc_RNA (1)...(19): siRNA sense strand
ggccauccauccaaccuuu

SEQ ID NO: 2051196 - RNA, 19 nt, Homo sapiens
  misc_RNA (1)...(19): siRNA sense strand
ggaacaucuuguagacauu

SEQ ID NO: 2051197 - RNA, 19 nt, Homo sapiens
  misc_RNA (1)...(19): siRNA sense strand
gaagagcaucacagaaguu

SEQ ID NO: 2051198 - RNA, 19 nt, Homo sapiens
  misc_RNA (1)...(19): siRNA sense strand
gaacaucuuguagacauug

SEQ ID NO: 2051199 - RNA, 19 nt, Homo sapiens
  misc_RNA (1)...(19): siRNA sense strand
ggaccuggccgacaaguac

SEQ ID NO: 2051200 - RNA, 19 nt, Homo sapiens
  misc_RNA (1)...(19): siRNA sense strand
gaccucggcugcaucaucu

SEQ ID NO: 2051201 - RNA, 19 nt, Homo sapiens
  misc_RNA (1)...(19): siRNA sense strand
uggaacaucuuguagacau

SEQ ID NO: 2051202 - RNA, 19 nt, Homo sapiens
  misc_RNA (1)...(19): siRNA sense strand
gguggaacaucuuguagac

SEQ ID NO: 2051203 - RNA, 19 nt, Homo sapiens
  misc_RNA (1)...(19): siRNA sense strand
agaagagcaucacagaagu

SEQ ID NO: 2051204 - RNA, 19 nt, Homo sapiens
  misc_RNA (1)...(19): siRNA sense strand
gcugguggaacaucuugua

SEQ ID NO: 2051205 - RNA, 19 nt, Homo sapiens
  misc_RNA (1)...(19): siRNA sense strand
uagagaagagcaucacaga

SEQ ID NO: 2051206 - RNA, 19 nt, Homo sapiens
  misc_RNA (1)...(19): siRNA sense strand
gucagaagccugcagaauc

SEQ ID NO: 2051207 - RNA, 19 nt, Homo sapiens
  misc_RNA (1)...(19): siRNA sense strand
ccauccaaccuuuaacuug

SEQ ID NO: 2051208 - RNA, 19 nt, Homo sapiens
  misc_RNA (1)...(19): siRNA sense strand
gagcugguggaacaucuug

SEQ ID NO: 2051209 - RNA, 19 nt, Homo sapiens
  misc_RNA (1)...(19): siRNA sense strand
ccauccauccaaccuuuaa

SEQ ID NO: 2051210 - RNA, 19 nt, Homo sapiens
  misc_RNA (1)...(19): siRNA sense strand
ggaccagacaacgaacuga

SEQ ID NO: 2051211 - RNA, 19 nt, Homo sapiens
  misc_RNA (1)...(19): siRNA sense strand
gcaguagagaagagcauca

SEQ ID NO: 2051212 - RNA, 19 nt, Homo sapiens
  misc_RNA (1)...(19): siRNA sense strand
gccauccauccaaccuuua

SEQ ID NO: 2051213 - RNA, 19 nt, Homo sapiens
  misc_RNA (1)...(19): siRNA sense strand
cgaccucggcugcaucauc

SEQ ID NO: 2051214 - RNA, 19 nt, Homo sapiens
  misc_RNA (1)...(19): siRNA sense strand
gaaggacuauggacucuug

SEQ ID NO: 2051215 - RNA, 19 nt, Homo sapiens
  misc_RNA (1)...(19): siRNA sense strand
ugacagagcugguggaaca

SEQ ID NO: 2051216 - RNA, 19 nt, Homo sapiens
  misc_RNA (1)...(19): siRNA sense strand
ucagaagccugcagaauca

SEQ ID NO: 2051217 - RNA, 19 nt, Homo sapiens
  misc_RNA (1)...(19): siRNA sense strand
cauccaaccuuuaacuuga

SEQ ID NO: 2051218 - RNA, 19 nt, Homo sapiens
  misc_RNA (1)...(19): siRNA sense strand
gagaagagcaucacagaag

SEQ ID NO: 2051219 - RNA, 19 nt, Homo sapiens
  misc_RNA (1)...(19): siRNA sense strand
gcaucuggcugaaccuuga

SEQ ID NO: 2051220 - RNA, 19 nt, Homo sapiens
  misc_RNA (1)...(19): siRNA sense strand
uaaagcaaguaaaggugua

SEQ ID NO: 2051221 - RNA, 19 nt, Homo sapiens
  misc_RNA (1)...(19): siRNA sense strand
agggaaagcuugccuucua

SEQ ID NO: 2051222 - RNA, 19 nt, Homo sapiens
  misc_RNA (1)...(19): siRNA sense strand
gcuuacauccuggaaauua

SEQ ID NO: 2051223 - RNA, 19 nt, Homo sapiens
  misc_RNA (1)...(19): siRNA sense strand
ggccauccauccaaccuuu

SEQ ID NO: 2051224 - RNA, 19 nt, Homo sapiens
  misc_RNA (1)...(19): siRNA sense strand
gggaaagcuugccuucuau

SEQ ID NO: 2051225 - RNA, 19 nt, Homo sapiens
  misc_RNA (1)...(19): siRNA sense strand
ggaacaucuuguagacauu

SEQ ID NO: 2051226 - RNA, 19 nt, Homo sapiens
  misc_RNA (1)...(19): siRNA sense strand
gaagagcaucacagaaguu

SEQ ID NO: 2051227 - RNA, 19 nt, Homo sapiens
  misc_RNA (1)...(19): siRNA sense strand
ggacucuuguuguguggaa

SEQ ID NO: 2051228 - RNA, 19 nt, Homo sapiens
  misc_RNA (1)...(19): siRNA sense strand
gaacaucuuguagacauug

SEQ ID NO: 2051229 - RNA, 19 nt, Homo sapiens
  misc_RNA (1)...(19): siRNA sense strand
ggacuauggacucuuguug

SEQ ID NO: 2051230 - RNA, 19 nt, Homo sapiens
  misc_RNA (1)...(19): siRNA sense strand
gaaagcuugccuucuauuc

SEQ ID NO: 2051231 - RNA, 19 nt, Homo sapiens
  misc_RNA (1)...(19): siRNA sense strand
ggaaagcuugccuucuauu

SEQ ID NO: 2051232 - RNA, 19 nt, Homo sapiens
  misc_RNA (1)...(19): siRNA sense strand
ccagccaggucuuauguuc

SEQ ID NO: 2051233 - RNA, 19 nt, Homo sapiens
  misc_RNA (1)...(19): siRNA sense strand
gaccucggcugcaucaucu

SEQ ID NO: 2051234 - RNA, 19 nt, Homo sapiens
  misc_RNA (1)...(19): siRNA sense strand
ggaccuggccgacaaguac

SEQ ID NO: 2051235 - RNA, 19 nt, Homo sapiens
  misc_RNA (1)...(19): siRNA sense strand
ucuauucaguggacaauca

SEQ ID NO: 2051236 - RNA, 19 nt, Homo sapiens
  misc_RNA (1)...(19): siRNA sense strand
ccuggaaauuaccugauaa

SEQ ID NO: 2051237 - RNA, 19 nt, Homo sapiens
  misc_RNA (1)...(19): siRNA sense strand
uggcuuacauccuggaaau

SEQ ID NO: 2051238 - RNA, 19 nt, Homo sapiens
  misc_RNA (1)...(19): siRNA sense strand
uggaacaucuuguagacau

SEQ ID NO: 2051239 - RNA, 19 nt, Homo sapiens
  misc_RNA (1)...(19): siRNA sense strand
gguggaacaucuuguagac

SEQ ID NO: 2051240 - RNA, 19 nt, Homo sapiens
  misc_RNA (1)...(19): siRNA sense strand
aaacuguccuuggcucaga

SEQ ID NO: 2051241 - RNA, 19 nt, Homo sapiens
  misc_RNA (1)...(19): siRNA sense strand
gcugguggaacaucuugua

SEQ ID NO: 2051242 - RNA, 19 nt, Homo sapiens
  misc_RNA (1)...(19): siRNA sense strand
uccuggaaauuaccugaua

SEQ ID NO: 2051243 - RNA, 19 nt, Homo sapiens
  misc_RNA (1)...(19): siRNA sense strand
agaagagcaucacagaagu

SEQ ID NO: 2051244 - RNA, 19 nt, Homo sapiens
  misc_RNA (1)...(19): siRNA sense strand
uagagaagagcaucacaga

SEQ ID NO: 2051245 - RNA, 19 nt, Homo sapiens
  misc_RNA (1)...(19): siRNA sense strand
gucagaagccugcagaauc

SEQ ID NO: 2051246 - RNA, 19 nt, Homo sapiens
  misc_RNA (1)...(19): siRNA sense strand
gggaaggacuauggacucu

SEQ ID NO: 2051247 - RNA, 19 nt, Homo sapiens
  misc_RNA (1)...(19): siRNA sense strand
acuauggacucuuguugug

SEQ ID NO: 2051248 - RNA, 19 nt, Homo sapiens
  misc_RNA (1)...(19): siRNA sense strand
guccaaggauucccguaca

SEQ ID NO: 2051249 - RNA, 19 nt, Homo sapiens
  misc_RNA (1)...(19): siRNA sense strand
ccauccaaccuuuaacuug

SEQ ID NO: 2051250 - RNA, 19 nt, Homo sapiens
  misc_RNA (1)...(19): siRNA sense strand
gagcugguggaacaucuug

SEQ ID NO: 2051251 - RNA, 19 nt, Homo sapiens
  misc_RNA (1)...(19): siRNA sense strand
ggcccugucuucuggaaag

SEQ ID NO: 2051252 - RNA, 19 nt, Homo sapiens
  misc_RNA (1)...(19): siRNA sense strand
ccauccauccaaccuuuaa

SEQ ID NO: 2051253 - RNA, 19 nt, Homo sapiens
  misc_RNA (1)...(19): siRNA sense strand
aaagcuugccuucuauuca

SEQ ID NO: 2051254 - RNA, 19 nt, Homo sapiens
  misc_RNA (1)...(19): siRNA sense strand
ggaccagacaacgaacuga

SEQ ID NO: 2051255 - RNA, 19 nt, Homo sapiens
  misc_RNA (1)...(19): siRNA sense strand
ugucuucuggaaagcauua

SEQ ID NO: 2051256 - RNA, 19 nt, Homo sapiens
  misc_RNA (1)...(19): siRNA sense strand
gcaguagagaagagcauca

SEQ ID NO: 2051257 - RNA, 19 nt, Homo sapiens
  misc_RNA (1)...(19): siRNA sense strand
gacuauggacucuuguugu

SEQ ID NO: 2051258 - RNA, 19 nt, Homo sapiens
  misc_RNA (1)...(19): siRNA sense strand
cuuguuguguggaauggaa

SEQ ID NO: 2051259 - RNA, 19 nt, Homo sapiens
  misc_RNA (1)...(19): siRNA sense strand
guaugaguguaccaucucu

SEQ ID NO: 2051260 - RNA, 19 nt, Homo sapiens
  misc_RNA (1)...(19): siRNA sense strand
aagcuugccuucuauucag

SEQ ID NO: 2051261 - RNA, 19 nt, Homo sapiens
  misc_RNA (1)...(19): siRNA sense strand
gcacauggucaaggaaacu

SEQ ID NO: 2051262 - RNA, 19 nt, Homo sapiens
  misc_RNA (1)...(19): siRNA sense strand
gccauccauccaaccuuua

SEQ ID NO: 2051263 - RNA, 19 nt, Homo sapiens
  misc_RNA (1)...(19): siRNA sense strand
aaggauucccguacaguga

SEQ ID NO: 2051264 - RNA, 19 nt, Homo sapiens
  misc_RNA (1)...(19): siRNA sense strand
gaaagcauuacugggaagu

SEQ ID NO: 2051265 - RNA, 19 nt, Homo sapiens
  misc_RNA (1)...(19): siRNA sense strand
cgaccucggcugcaucauc

SEQ ID NO: 2051266 - RNA, 19 nt, Homo sapiens
  misc_RNA (1)...(19): siRNA sense strand
ugacagagcugguggaaca

SEQ ID NO: 2051267 - RNA, 19 nt, Homo sapiens
  misc_RNA (1)...(19): siRNA sense strand
ucagaagccugcagaauca

SEQ ID NO: 2051268 - RNA, 19 nt, Homo sapiens
  misc_RNA (1)...(19): siRNA sense strand
cauccaaccuuuaacuuga

SEQ ID NO: 2051269 - RNA, 19 nt, Homo sapiens
  misc_RNA (1)...(19): siRNA sense strand
gagaagagcaucacagaag

SEQ ID NO: 2051270 - RNA, 19 nt, Homo sapiens
  misc_RNA (1)...(19): siRNA sense strand
ggccauccauccaaccuuu

SEQ ID NO: 2051271 - RNA, 19 nt, Homo sapiens
  misc_RNA (1)...(19): siRNA sense strand
ggaacaucuuguagacauu

SEQ ID NO: 2051272 - RNA, 19 nt, Homo sapiens
  misc_RNA (1)...(19): siRNA sense strand
gaagagcaucacagaaguu

SEQ ID NO: 2051273 - RNA, 19 nt, Homo sapiens
  misc_RNA (1)...(19): siRNA sense strand
gaacaucuuguagacauug

SEQ ID NO: 2051274 - RNA, 19 nt, Homo sapiens
  misc_RNA (1)...(19): siRNA sense strand
ggaccuggccgacaaguac

SEQ ID NO: 2051275 - RNA, 19 nt, Homo sapiens
  misc_RNA (1)...(19): siRNA sense strand
gaccucggcugcaucaucu

SEQ ID NO: 2051276 - RNA, 19 nt, Homo sapiens
  misc_RNA (1)...(19): siRNA sense strand
uggaacaucuuguagacau

SEQ ID NO: 2051277 - RNA, 19 nt, Homo sapiens
  misc_RNA (1)...(19): siRNA sense strand
gguggaacaucuuguagac

SEQ ID NO: 2051278 - RNA, 19 nt, Homo sapiens
  misc_RNA (1)...(19): siRNA sense strand
agaagagcaucacagaagu

SEQ ID NO: 2051279 - RNA, 19 nt, Homo sapiens
  misc_RNA (1)...(19): siRNA sense strand
gcugguggaacaucuugua

SEQ ID NO: 2051280 - RNA, 19 nt, Homo sapiens
  misc_RNA (1)...(19): siRNA sense strand
uagagaagagcaucacaga

SEQ ID NO: 2051281 - RNA, 19 nt, Homo sapiens
  misc_RNA (1)...(19): siRNA sense strand
gucagaagccugcagaauc

SEQ ID NO: 2051282 - RNA, 19 nt, Homo sapiens
  misc_RNA (1)...(19): siRNA sense strand
ccauccaaccuuuaacuug

SEQ ID NO: 2051283 - RNA, 19 nt, Homo sapiens
  misc_RNA (1)...(19): siRNA sense strand
gagcugguggaacaucuug

SEQ ID NO: 2051284 - RNA, 19 nt, Homo sapiens
  misc_RNA (1)...(19): siRNA sense strand
ccauccauccaaccuuuaa

SEQ ID NO: 2051285 - RNA, 19 nt, Homo sapiens
  misc_RNA (1)...(19): siRNA sense strand
ggaccagacaacgaacuga

SEQ ID NO: 2051286 - RNA, 19 nt, Homo sapiens
  misc_RNA (1)...(19): siRNA sense strand
gcaguagagaagagcauca

SEQ ID NO: 2051287 - RNA, 19 nt, Homo sapiens
  misc_RNA (1)...(19): siRNA sense strand
gccauccauccaaccuuua

SEQ ID NO: 2051288 - RNA, 19 nt, Homo sapiens
  misc_RNA (1)...(19): siRNA sense strand
cgaccucggcugcaucauc

SEQ ID NO: 2051289 - RNA, 19 nt, Homo sapiens
  misc_RNA (1)...(19): siRNA sense strand
gauaagagcuuucaucaga

SEQ ID NO: 2051290 - RNA, 19 nt, Homo sapiens
  misc_RNA (1)...(19): siRNA sense strand
gaacauaagagaauccaua

SEQ ID NO: 2051291 - RNA, 19 nt, Homo sapiens
  misc_RNA (1)...(19): siRNA sense strand
ggagagagaccuuauaauu

SEQ ID NO: 2051292 - RNA, 19 nt, Homo sapiens
  misc_RNA (1)...(19): siRNA sense strand
caucagagaucagcacuua

SEQ ID NO: 2051293 - RNA, 19 nt, Homo sapiens
  misc_RNA (1)...(19): siRNA sense strand
gguaagaccuucuauuuua

SEQ ID NO: 2051294 - RNA, 19 nt, Homo sapiens
  misc_RNA (1)...(19): siRNA sense strand
ggagagaaaccuuacauuu

SEQ ID NO: 2051295 - RNA, 19 nt, Homo sapiens
  misc_RNA (1)...(19): siRNA sense strand
gaucagcacuuaauguuca

SEQ ID NO: 2051296 - RNA, 19 nt, Homo sapiens
  misc_RNA (1)...(19): siRNA sense strand
gagagaaaccuuacauuug

SEQ ID NO: 2051297 - RNA, 19 nt, Homo sapiens
  misc_RNA (1)...(19): siRNA sense strand
ggacuacccacaauucaua

SEQ ID NO: 2051298 - RNA, 19 nt, Homo sapiens
  misc_RNA (1)...(19): siRNA sense strand
gagagagaccuuauaauug

SEQ ID NO: 2051299 - RNA, 19 nt, Homo sapiens
  misc_RNA (1)...(19): siRNA sense strand
cagcaaaucugggaacaaa

SEQ ID NO: 2051300 - RNA, 19 nt, Homo sapiens
  misc_RNA (1)...(19): siRNA sense strand
gcucacaucugcaaacuca

SEQ ID NO: 2051301 - RNA, 19 nt, Homo sapiens
  misc_RNA (1)...(19): siRNA sense strand
gaggcaagauccaaacuga

SEQ ID NO: 2051302 - RNA, 19 nt, Homo sapiens
  misc_RNA (1)...(19): siRNA sense strand
ucucaggacucuaucauaa

SEQ ID NO: 2051303 - RNA, 19 nt, Homo sapiens
  misc_RNA (1)...(19): siRNA sense strand
gcaaaucugggaacaaauu

SEQ ID NO: 2051304 - RNA, 19 nt, Homo sapiens
  misc_RNA (1)...(19): siRNA sense strand
agagaaaccuuacauuugu

SEQ ID NO: 2051305 - RNA, 19 nt, Homo sapiens
  misc_RNA (1)...(19): siRNA sense strand
agagagaccuuauaauugu

SEQ ID NO: 2051306 - RNA, 19 nt, Homo sapiens
  misc_RNA (1)...(19): siRNA sense strand
caucucagcucuucauguu

SEQ ID NO: 2051307 - RNA, 19 nt, Homo sapiens
  misc_RNA (1)...(19): siRNA sense strand
ggaaagggauuuuauacaa

SEQ ID NO: 2051308 - RNA, 19 nt, Homo sapiens
  misc_RNA (1)...(19): siRNA sense strand
gggaagggcuauguuacua

SEQ ID NO: 2051309 - RNA, 19 nt, Homo sapiens
  misc_RNA (1)...(19): siRNA sense strand
ggcaaggaauuuagucaaa

SEQ ID NO: 2051310 - RNA, 19 nt, Homo sapiens
  misc_RNA (1)...(19): siRNA sense strand
ggagagaaaccauucaaau

SEQ ID NO: 2051311 - RNA, 19 nt, Homo sapiens
  misc_RNA (1)...(19): siRNA sense strand
gagagaaaccguacagaug

SEQ ID NO: 2051312 - RNA, 19 nt, Homo sapiens
  misc_RNA (1)...(19): siRNA sense strand
gcacuuaauguucaucgua

SEQ ID NO: 2051313 - RNA, 19 nt, Homo sapiens
  misc_RNA (1)...(19): siRNA sense strand
guacagaugugagcagugu

SEQ ID NO: 2051314 - RNA, 19 nt, Homo sapiens
  misc_RNA (1)...(19): siRNA sense strand
gagagaccuuauaauugua

SEQ ID NO: 2051315 - RNA, 19 nt, Homo sapiens
  misc_RNA (1)...(19): siRNA sense strand
guaaacaguccaucaguga

SEQ ID NO: 2051316 - RNA, 19 nt, Homo sapiens
  misc_RNA (1)...(19): siRNA sense strand
agagaagucuuauacaugu

SEQ ID NO: 2051317 - RNA, 19 nt, Homo sapiens
  misc_RNA (1)...(19): siRNA sense strand
gagaugugaugcuggagaa

SEQ ID NO: 2051318 - RNA, 19 nt, Homo sapiens
  misc_RNA (1)...(19): siRNA sense strand
guaaagaccagccgagaga

SEQ ID NO: 2051319 - RNA, 19 nt, Homo sapiens
  misc_RNA (1)...(19): siRNA sense strand
gugguaagaccuucuauuu

SEQ ID NO: 2051320 - RNA, 19 nt, Homo sapiens
  misc_RNA (1)...(19): siRNA sense strand
ggacagcaacccaaagaga

SEQ ID NO: 2051321 - RNA, 19 nt, Homo sapiens
  misc_RNA (1)...(19): siRNA sense strand
gcgcuugaaucuggauaua

SEQ ID NO: 2051322 - RNA, 19 nt, Homo sapiens
  misc_RNA (1)...(19): siRNA sense strand
agucguagaucagcacuua

SEQ ID NO: 2051323 - RNA, 19 nt, Homo sapiens
  misc_RNA (1)...(19): siRNA sense strand
ggaaagaggcuuguacaca

SEQ ID NO: 2051324 - RNA, 19 nt, Homo sapiens
  misc_RNA (1)...(19): siRNA sense strand
gaagggcuauguuacuaag

SEQ ID NO: 2051325 - RNA, 19 nt, Homo sapiens
  misc_RNA (1)...(19): siRNA sense strand
uaagagcuuucaucagaga

SEQ ID NO: 2051326 - RNA, 19 nt, Homo sapiens
  misc_RNA (1)...(19): siRNA sense strand
gaaugugggaagaacuuua

SEQ ID NO: 2051327 - RNA, 19 nt, Homo sapiens
  misc_RNA (1)...(19): siRNA sense strand
gcaaggaauuuagucaaag

SEQ ID NO: 2051328 - RNA, 19 nt, Homo sapiens
  misc_RNA (1)...(19): siRNA sense strand
ucaggacucuaucauaaau

SEQ ID NO: 2051329 - RNA, 19 nt, Homo sapiens
  misc_RNA (1)...(19): siRNA sense strand
ggauguggcuguggucuuc

SEQ ID NO: 2051330 - RNA, 19 nt, Homo sapiens
  misc_RNA (1)...(19): siRNA sense strand
ggagagaaaccguacagau

SEQ ID NO: 2051331 - RNA, 19 nt, Homo sapiens
  misc_RNA (1)...(19): siRNA sense strand
gagaaaccguacagaugug

SEQ ID NO: 2051332 - RNA, 19 nt, Homo sapiens
  misc_RNA (1)...(19): siRNA sense strand
ggaagggcuauguuacuaa

SEQ ID NO: 2051333 - RNA, 19 nt, Homo sapiens
  misc_RNA (1)...(19): siRNA sense strand
gggcuauguuacuaaguuu

SEQ ID NO: 2051334 - RNA, 19 nt, Homo sapiens
  misc_RNA (1)...(19): siRNA sense strand
gagaaaccuuacauuugug

SEQ ID NO: 2051335 - RNA, 19 nt, Homo sapiens
  misc_RNA (1)...(19): siRNA sense strand
gaaaagccauauaaaugug

SEQ ID NO: 2051336 - RNA, 19 nt, Homo sapiens
  misc_RNA (1)...(19): siRNA sense strand
gcaggacuacccacaauuc

SEQ ID NO: 2051337 - RNA, 19 nt, Homo sapiens
  misc_RNA (1)...(19): siRNA sense strand
gcaguuauacucagaagag

SEQ ID NO: 2051338 - RNA, 19 nt, Homo sapiens
  misc_RNA (1)...(19): siRNA sense strand
aagcaucuguuacaucuca

SEQ ID NO: 2051339 - RNA, 19 nt, Homo sapiens
  misc_RNA (1)...(19): siRNA sense strand
ggugggaaguguaaacagu

SEQ ID NO: 2051340 - RNA, 19 nt, Homo sapiens
  misc_RNA (1)...(19): siRNA sense strand
cacuuaauguucaucguaa

SEQ ID NO: 2051341 - RNA, 19 nt, Homo sapiens
  misc_RNA (1)...(19): siRNA sense strand
ucucagcucuucauguuca

SEQ ID NO: 2051342 - RNA, 19 nt, Homo sapiens
  misc_RNA (1)...(19): siRNA sense strand
gggaacaaauugcaaaaga

SEQ ID NO: 2051343 - RNA, 19 nt, Homo sapiens
  misc_RNA (1)...(19): siRNA sense strand
caacugucuucccaucaga

SEQ ID NO: 2051344 - RNA, 19 nt, Homo sapiens
  misc_RNA (1)...(19): siRNA sense strand
cauaagagaauccauacug

SEQ ID NO: 2051345 - RNA, 19 nt, Homo sapiens
  misc_RNA (1)...(19): siRNA sense strand
acacaggagagaaaccuua

SEQ ID NO: 2051346 - RNA, 19 nt, Homo sapiens
  misc_RNA (1)...(19): siRNA sense strand
gacagcaacccaaagagaa

SEQ ID NO: 2051347 - RNA, 19 nt, Homo sapiens
  misc_RNA (1)...(19): siRNA sense strand
ugugauauaugugguaaga

SEQ ID NO: 2051348 - RNA, 19 nt, Homo sapiens
  misc_RNA (1)...(19): siRNA sense strand
gaaaacccauccaaaugug

SEQ ID NO: 2051349 - RNA, 19 nt, Homo sapiens
  misc_RNA (1)...(19): siRNA sense strand
caaauucacaacugucuuc

SEQ ID NO: 2051350 - RNA, 19 nt, Homo sapiens
  misc_RNA (1)...(19): siRNA sense strand
ucagagaucagcacuuaau

SEQ ID NO: 2051351 - RNA, 19 nt, Homo sapiens
  misc_RNA (1)...(19): siRNA sense strand
ugugauacaugugauaaga

SEQ ID NO: 2051352 - RNA, 19 nt, Homo sapiens
  misc_RNA (1)...(19): siRNA sense strand
ccaaagagaagggaauuca

SEQ ID NO: 2051353 - RNA, 19 nt, Homo sapiens
  misc_RNA (1)...(19): siRNA sense strand
gcuugaaucuggauauacu

SEQ ID NO: 2051354 - RNA, 19 nt, Homo sapiens
  misc_RNA (1)...(19): siRNA sense strand
gaugugagcaguguggaaa

SEQ ID NO: 2051355 - RNA, 19 nt, Homo sapiens
  misc_RNA (1)...(19): siRNA sense strand
gaagcaggacuacccacaa

SEQ ID NO: 2051356 - RNA, 19 nt, Homo sapiens
  misc_RNA (1)...(19): siRNA sense strand
caaccguuccaccaagaua

SEQ ID NO: 2051357 - RNA, 19 nt, Homo sapiens
  misc_RNA (1)...(19): siRNA sense strand
gauacuugccacuuccuaa

SEQ ID NO: 2051358 - RNA, 19 nt, Homo sapiens
  misc_RNA (1)...(19): siRNA sense strand
guagaucagcacuuaaugu

SEQ ID NO: 2051359 - RNA, 19 nt, Homo sapiens
  misc_RNA (1)...(19): siRNA sense strand
cgggagagagaccuuauaa

SEQ ID NO: 2051360 - RNA, 19 nt, Homo sapiens
  misc_RNA (1)...(19): siRNA sense strand
uagaucagcacuuaauguu

SEQ ID NO: 2051361 - RNA, 19 nt, Homo sapiens
  misc_RNA (1)...(19): siRNA sense strand
gagaucagcacuuaauagg

SEQ ID NO: 2051362 - RNA, 19 nt, Homo sapiens
  misc_RNA (1)...(19): siRNA sense strand
aagcaggacuacccacaau

SEQ ID NO: 2051363 - RNA, 19 nt, Homo sapiens
  misc_RNA (1)...(19): siRNA sense strand
ggaaaacccauccaaaugu

SEQ ID NO: 2051364 - RNA, 19 nt, Homo sapiens
  misc_RNA (1)...(19): siRNA sense strand
ccauuuaggugugauacau

SEQ ID NO: 2051365 - RNA, 19 nt, Homo sapiens
  misc_RNA (1)...(19): siRNA sense strand
gagaagucuuauacaugug

SEQ ID NO: 2051366 - RNA, 19 nt, Homo sapiens
  misc_RNA (1)...(19): siRNA sense strand
acacaggacauaccguaaa

SEQ ID NO: 2051367 - RNA, 19 nt, Homo sapiens
  misc_RNA (1)...(19): siRNA sense strand
agagaaaccguacagaugu

SEQ ID NO: 2051368 - RNA, 19 nt, Homo sapiens
  misc_RNA (1)...(19): siRNA sense strand
gagcuuucaucagagauca

SEQ ID NO: 2051369 - RNA, 19 nt, Homo sapiens
  misc_RNA (1)...(19): siRNA sense strand
uaaggaacauaagagaauc

SEQ ID NO: 2051370 - RNA, 19 nt, Homo sapiens
  misc_RNA (1)...(19): siRNA sense strand
auucaugauucccagcuua

SEQ ID NO: 2051371 - RNA, 19 nt, Homo sapiens
  misc_RNA (1)...(19): siRNA sense strand
gagugguccugccagcaaa

SEQ ID NO: 2051372 - RNA, 19 nt, Homo sapiens
  misc_RNA (1)...(19): siRNA sense strand
ucaaagcucacaucugcaa

SEQ ID NO: 2051373 - RNA, 19 nt, Homo sapiens
  misc_RNA (1)...(19): siRNA sense strand
agaaacucuuuauguguga

SEQ ID NO: 2051374 - RNA, 19 nt, Homo sapiens
  misc_RNA (1)...(19): siRNA sense strand
caaggaauuuagucaaagc

SEQ ID NO: 2051375 - RNA, 19 nt, Homo sapiens
  misc_RNA (1)...(19): siRNA sense strand
gagacuccacugccagaaa

SEQ ID NO: 2051376 - RNA, 19 nt, Homo sapiens
  misc_RNA (1)...(19): siRNA sense strand
gugaaaagccauauaaaug

SEQ ID NO: 2051377 - RNA, 19 nt, Homo sapiens
  misc_RNA (1)...(19): siRNA sense strand
cagagaucagcacuuaaua

SEQ ID NO: 2051378 - RNA, 19 nt, Homo sapiens
  misc_RNA (1)...(19): siRNA sense strand
gaauucaggaggcaagauc

SEQ ID NO: 2051379 - RNA, 19 nt, Homo sapiens
  misc_RNA (1)...(19): siRNA sense strand
ugugaggacuguggaaaga

SEQ ID NO: 2051380 - RNA, 19 nt, Homo sapiens
  misc_RNA (1)...(19): siRNA sense strand
uuauacaugugaugagugu

SEQ ID NO: 2051381 - RNA, 19 nt, Homo sapiens
  misc_RNA (1)...(19): siRNA sense strand
uggcuguggucuucacuga

SEQ ID NO: 2051382 - RNA, 19 nt, Homo sapiens
  misc_RNA (1)...(19): siRNA sense strand
ggaaugugggaagaacuuu

SEQ ID NO: 2051383 - RNA, 19 nt, Homo sapiens
  misc_RNA (1)...(19): siRNA sense strand
ggcaagauccaaacugagu

SEQ ID NO: 2051384 - RNA, 19 nt, Homo sapiens
  misc_RNA (1)...(19): siRNA sense strand
caaaucugggaacaaauug

SEQ ID NO: 2051385 - RNA, 19 nt, Homo sapiens
  misc_RNA (1)...(19): siRNA sense strand
ugaucuuccucagcaguua

SEQ ID NO: 2051386 - RNA, 19 nt, Homo sapiens
  misc_RNA (1)...(19): siRNA sense strand
gcacuuaauaggcauugca

SEQ ID NO: 2051387 - RNA, 19 nt, Homo sapiens
  misc_RNA (1)...(19): siRNA sense strand
cacaggacauaccguaaag

SEQ ID NO: 2051388 - RNA, 19 nt, Homo sapiens
  misc_RNA (1)...(19): siRNA sense strand
uguaaagaaugugggaaga

SEQ ID NO: 2051389 - RNA, 19 nt, Homo sapiens
  misc_RNA (1)...(19): siRNA sense strand
gauaagagcuuucaucaga

SEQ ID NO: 2051390 - RNA, 19 nt, Homo sapiens
  misc_RNA (1)...(19): siRNA sense strand
gaacauaagagaauccaua

SEQ ID NO: 2051391 - RNA, 19 nt, Homo sapiens
  misc_RNA (1)...(19): siRNA sense strand
ggagagagaccuuauaauu

SEQ ID NO: 2051392 - RNA, 19 nt, Homo sapiens
  misc_RNA (1)...(19): siRNA sense strand
caucagagaucagcacuua

SEQ ID NO: 2051393 - RNA, 19 nt, Homo sapiens
  misc_RNA (1)...(19): siRNA sense strand
gguaagaccuucuauuuua

SEQ ID NO: 2051394 - RNA, 19 nt, Homo sapiens
  misc_RNA (1)...(19): siRNA sense strand
ggagagaaaccuuacauuu

SEQ ID NO: 2051395 - RNA, 19 nt, Homo sapiens
  misc_RNA (1)...(19): siRNA sense strand
gaucagcacuuaauguuca

SEQ ID NO: 2051396 - RNA, 19 nt, Homo sapiens
  misc_RNA (1)...(19): siRNA sense strand
gagagaaaccuuacauuug

SEQ ID NO: 2051397 - RNA, 19 nt, Homo sapiens
  misc_RNA (1)...(19): siRNA sense strand
ggacuacccacaauucaua

SEQ ID NO: 2051398 - RNA, 19 nt, Homo sapiens
  misc_RNA (1)...(19): siRNA sense strand
gagagagaccuuauaauug

SEQ ID NO: 2051399 - RNA, 19 nt, Homo sapiens
  misc_RNA (1)...(19): siRNA sense strand
cagcaaaucugggaacaaa

SEQ ID NO: 2051400 - RNA, 19 nt, Homo sapiens
  misc_RNA (1)...(19): siRNA sense strand
gcucacaucugcaaacuca

SEQ ID NO: 2051401 - RNA, 19 nt, Homo sapiens
  misc_RNA (1)...(19): siRNA sense strand
gaggcaagauccaaacuga

SEQ ID NO: 2051402 - RNA, 19 nt, Homo sapiens
  misc_RNA (1)...(19): siRNA sense strand
ucucaggacucuaucauaa

SEQ ID NO: 2051403 - RNA, 19 nt, Homo sapiens
  misc_RNA (1)...(19): siRNA sense strand
gcaaaucugggaacaaauu

SEQ ID NO: 2051404 - RNA, 19 nt, Homo sapiens
  misc_RNA (1)...(19): siRNA sense strand
agagaaaccuuacauuugu

SEQ ID NO: 2051405 - RNA, 19 nt, Homo sapiens
  misc_RNA (1)...(19): siRNA sense strand
agagagaccuuauaauugu

SEQ ID NO: 2051406 - RNA, 19 nt, Homo sapiens
  misc_RNA (1)...(19): siRNA sense strand
caucucagcucuucauguu

SEQ ID NO: 2051407 - RNA, 19 nt, Homo sapiens
  misc_RNA (1)...(19): siRNA sense strand
ggaaagggauuuuauacaa

SEQ ID NO: 2051408 - RNA, 19 nt, Homo sapiens
  misc_RNA (1)...(19): siRNA sense strand
gggaagggcuauguuacua

SEQ ID NO: 2051409 - RNA, 19 nt, Homo sapiens
  misc_RNA (1)...(19): siRNA sense strand
ggcaaggaauuuagucaaa

SEQ ID NO: 2051410 - RNA, 19 nt, Homo sapiens
  misc_RNA (1)...(19): siRNA sense strand
ggagagaaaccauucaaau

SEQ ID NO: 2051411 - RNA, 19 nt, Homo sapiens
  misc_RNA (1)...(19): siRNA sense strand
gagagaaaccguacagaug

SEQ ID NO: 2051412 - RNA, 19 nt, Homo sapiens
  misc_RNA (1)...(19): siRNA sense strand
gcacuuaauguucaucgua

SEQ ID NO: 2051413 - RNA, 19 nt, Homo sapiens
  misc_RNA (1)...(19): siRNA sense strand
guacagaugugagcagugu

SEQ ID NO: 2051414 - RNA, 19 nt, Homo sapiens
  misc_RNA (1)...(19): siRNA sense strand
gagagaccuuauaauugua

SEQ ID NO: 2051415 - RNA, 19 nt, Homo sapiens
  misc_RNA (1)...(19): siRNA sense strand
guaaacaguccaucaguga

SEQ ID NO: 2051416 - RNA, 19 nt, Homo sapiens
  misc_RNA (1)...(19): siRNA sense strand
agagaagucuuauacaugu

SEQ ID NO: 2051417 - RNA, 19 nt, Homo sapiens
  misc_RNA (1)...(19): siRNA sense strand
gagaugugaugcuggagaa

SEQ ID NO: 2051418 - RNA, 19 nt, Homo sapiens
  misc_RNA (1)...(19): siRNA sense strand
guaaagaccagccgagaga

SEQ ID NO: 2051419 - RNA, 19 nt, Homo sapiens
  misc_RNA (1)...(19): siRNA sense strand
gugguaagaccuucuauuu

SEQ ID NO: 2051420 - RNA, 19 nt, Homo sapiens
  misc_RNA (1)...(19): siRNA sense strand
ggacagcaacccaaagaga

SEQ ID NO: 2051421 - RNA, 19 nt, Homo sapiens
  misc_RNA (1)...(19): siRNA sense strand
gcgcuugaaucuggauaua

SEQ ID NO: 2051422 - RNA, 19 nt, Homo sapiens
  misc_RNA (1)...(19): siRNA sense strand
agucguagaucagcacuua

SEQ ID NO: 2051423 - RNA, 19 nt, Homo sapiens
  misc_RNA (1)...(19): siRNA sense strand
ggaaagaggcuuguacaca

SEQ ID NO: 2051424 - RNA, 19 nt, Homo sapiens
  misc_RNA (1)...(19): siRNA sense strand
gaagggcuauguuacuaag

SEQ ID NO: 2051425 - RNA, 19 nt, Homo sapiens
  misc_RNA (1)...(19): siRNA sense strand
uaagagcuuucaucagaga

SEQ ID NO: 2051426 - RNA, 19 nt, Homo sapiens
  misc_RNA (1)...(19): siRNA sense strand
gaaugugggaagaacuuua

SEQ ID NO: 2051427 - RNA, 19 nt, Homo sapiens
  misc_RNA (1)...(19): siRNA sense strand
gcaaggaauuuagucaaag

SEQ ID NO: 2051428 - RNA, 19 nt, Homo sapiens
  misc_RNA (1)...(19): siRNA sense strand
ucaggacucuaucauaaau

SEQ ID NO: 2051429 - RNA, 19 nt, Homo sapiens
  misc_RNA (1)...(19): siRNA sense strand
ggauguggcuguggucuuc

SEQ ID NO: 2051430 - RNA, 19 nt, Homo sapiens
  misc_RNA (1)...(19): siRNA sense strand
ggagagaaaccguacagau

SEQ ID NO: 2051431 - RNA, 19 nt, Homo sapiens
  misc_RNA (1)...(19): siRNA sense strand
gagaaaccguacagaugug

SEQ ID NO: 2051432 - RNA, 19 nt, Homo sapiens
  misc_RNA (1)...(19): siRNA sense strand
ggaagggcuauguuacuaa

SEQ ID NO: 2051433 - RNA, 19 nt, Homo sapiens
  misc_RNA (1)...(19): siRNA sense strand
gggcuauguuacuaaguuu

SEQ ID NO: 2051434 - RNA, 19 nt, Homo sapiens
  misc_RNA (1)...(19): siRNA sense strand
gagaaaccuuacauuugug

SEQ ID NO: 2051435 - RNA, 19 nt, Homo sapiens
  misc_RNA (1)...(19): siRNA sense strand
gaaaagccauauaaaugug

SEQ ID NO: 2051436 - RNA, 19 nt, Homo sapiens
  misc_RNA (1)...(19): siRNA sense strand
gcaggacuacccacaauuc

SEQ ID NO: 2051437 - RNA, 19 nt, Homo sapiens
  misc_RNA (1)...(19): siRNA sense strand
gcaguuauacucagaagag

SEQ ID NO: 2051438 - RNA, 19 nt, Homo sapiens
  misc_RNA (1)...(19): siRNA sense strand
aagcaucuguuacaucuca

SEQ ID NO: 2051439 - RNA, 19 nt, Homo sapiens
  misc_RNA (1)...(19): siRNA sense strand
ggugggaaguguaaacagu

SEQ ID NO: 2051440 - RNA, 19 nt, Homo sapiens
  misc_RNA (1)...(19): siRNA sense strand
cacuuaauguucaucguaa

SEQ ID NO: 2051441 - RNA, 19 nt, Homo sapiens
  misc_RNA (1)...(19): siRNA sense strand
ucucagcucuucauguuca

SEQ ID NO: 2051442 - RNA, 19 nt, Homo sapiens
  misc_RNA (1)...(19): siRNA sense strand
gggaacaaauugcaaaaga

SEQ ID NO: 2051443 - RNA, 19 nt, Homo sapiens
  misc_RNA (1)...(19): siRNA sense strand
caacugucuucccaucaga

SEQ ID NO: 2051444 - RNA, 19 nt, Homo sapiens
  misc_RNA (1)...(19): siRNA sense strand
cauaagagaauccauacug

SEQ ID NO: 2051445 - RNA, 19 nt, Homo sapiens
  misc_RNA (1)...(19): siRNA sense strand
acacaggagagaaaccuua

SEQ ID NO: 2051446 - RNA, 19 nt, Homo sapiens
  misc_RNA (1)...(19): siRNA sense strand
gacagcaacccaaagagaa

SEQ ID NO: 2051447 - RNA, 19 nt, Homo sapiens
  misc_RNA (1)...(19): siRNA sense strand
ugugauauaugugguaaga

SEQ ID NO: 2051448 - RNA, 19 nt, Homo sapiens
  misc_RNA (1)...(19): siRNA sense strand
gaaaacccauccaaaugug

SEQ ID NO: 2051449 - RNA, 19 nt, Homo sapiens
  misc_RNA (1)...(19): siRNA sense strand
caaauucacaacugucuuc

SEQ ID NO: 2051450 - RNA, 19 nt, Homo sapiens
  misc_RNA (1)...(19): siRNA sense strand
ucagagaucagcacuuaau

SEQ ID NO: 2051451 - RNA, 19 nt, Homo sapiens
  misc_RNA (1)...(19): siRNA sense strand
ugugauacaugugauaaga

SEQ ID NO: 2051452 - RNA, 19 nt, Homo sapiens
  misc_RNA (1)...(19): siRNA sense strand
ccaaagagaagggaauuca

SEQ ID NO: 2051453 - RNA, 19 nt, Homo sapiens
  misc_RNA (1)...(19): siRNA sense strand
gcuugaaucuggauauacu

SEQ ID NO: 2051454 - RNA, 19 nt, Homo sapiens
  misc_RNA (1)...(19): siRNA sense strand
gaugugagcaguguggaaa

SEQ ID NO: 2051455 - RNA, 19 nt, Homo sapiens
  misc_RNA (1)...(19): siRNA sense strand
gaagcaggacuacccacaa

SEQ ID NO: 2051456 - RNA, 19 nt, Homo sapiens
  misc_RNA (1)...(19): siRNA sense strand
caaccguuccaccaagaua

SEQ ID NO: 2051457 - RNA, 19 nt, Homo sapiens
  misc_RNA (1)...(19): siRNA sense strand
gauacuugccacuuccuaa

SEQ ID NO: 2051458 - RNA, 19 nt, Homo sapiens
  misc_RNA (1)...(19): siRNA sense strand
guagaucagcacuuaaugu

SEQ ID NO: 2051459 - RNA, 19 nt, Homo sapiens
  misc_RNA (1)...(19): siRNA sense strand
cgggagagagaccuuauaa

SEQ ID NO: 2051460 - RNA, 19 nt, Homo sapiens
  misc_RNA (1)...(19): siRNA sense strand
uagaucagcacuuaauguu

SEQ ID NO: 2051461 - RNA, 19 nt, Homo sapiens
  misc_RNA (1)...(19): siRNA sense strand
gagaucagcacuuaauagg

SEQ ID NO: 2051462 - RNA, 19 nt, Homo sapiens
  misc_RNA (1)...(19): siRNA sense strand
aagcaggacuacccacaau

SEQ ID NO: 2051463 - RNA, 19 nt, Homo sapiens
  misc_RNA (1)...(19): siRNA sense strand
ggaaaacccauccaaaugu

SEQ ID NO: 2051464 - RNA, 19 nt, Homo sapiens
  misc_RNA (1)...(19): siRNA sense strand
ccauuuaggugugauacau

SEQ ID NO: 2051465 - RNA, 19 nt, Homo sapiens
  misc_RNA (1)...(19): siRNA sense strand
gagaagucuuauacaugug

SEQ ID NO: 2051466 - RNA, 19 nt, Homo sapiens
  misc_RNA (1)...(19): siRNA sense strand
acacaggacauaccguaaa

SEQ ID NO: 2051467 - RNA, 19 nt, Homo sapiens
  misc_RNA (1)...(19): siRNA sense strand
agagaaaccguacagaugu

SEQ ID NO: 2051468 - RNA, 19 nt, Homo sapiens
  misc_RNA (1)...(19): siRNA sense strand
gagcuuucaucagagauca

SEQ ID NO: 2051469 - RNA, 19 nt, Homo sapiens
  misc_RNA (1)...(19): siRNA sense strand
uaaggaacauaagagaauc

SEQ ID NO: 2051470 - RNA, 19 nt, Homo sapiens
  misc_RNA (1)...(19): siRNA sense strand
auucaugauucccagcuua

SEQ ID NO: 2051471 - RNA, 19 nt, Homo sapiens
  misc_RNA (1)...(19): siRNA sense strand
gagugguccugccagcaaa

SEQ ID NO: 2051472 - RNA, 19 nt, Homo sapiens
  misc_RNA (1)...(19): siRNA sense strand
ucaaagcucacaucugcaa

SEQ ID NO: 2051473 - RNA, 19 nt, Homo sapiens
  misc_RNA (1)...(19): siRNA sense strand
agaaacucuuuauguguga

SEQ ID NO: 2051474 - RNA, 19 nt, Homo sapiens
  misc_RNA (1)...(19): siRNA sense strand
caaggaauuuagucaaagc

SEQ ID NO: 2051475 - RNA, 19 nt, Homo sapiens
  misc_RNA (1)...(19): siRNA sense strand
gagacuccacugccagaaa

SEQ ID NO: 2051476 - RNA, 19 nt, Homo sapiens
  misc_RNA (1)...(19): siRNA sense strand
gugaaaagccauauaaaug

SEQ ID NO: 2051477 - RNA, 19 nt, Homo sapiens
  misc_RNA (1)...(19): siRNA sense strand
cagagaucagcacuuaaua

SEQ ID NO: 2051478 - RNA, 19 nt, Homo sapiens
  misc_RNA (1)...(19): siRNA sense strand
gaauucaggaggcaagauc

SEQ ID NO: 2051479 - RNA, 19 nt, Homo sapiens
  misc_RNA (1)...(19): siRNA sense strand
ugugaggacuguggaaaga

SEQ ID NO: 2051480 - RNA, 19 nt, Homo sapiens
  misc_RNA (1)...(19): siRNA sense strand
uuauacaugugaugagugu

SEQ ID NO: 2051481 - RNA, 19 nt, Homo sapiens
  misc_RNA (1)...(19): siRNA sense strand
uggcuguggucuucacuga

SEQ ID NO: 2051482 - RNA, 19 nt, Homo sapiens
  misc_RNA (1)...(19): siRNA sense strand
ggaaugugggaagaacuuu

SEQ ID NO: 2051483 - RNA, 19 nt, Homo sapiens
  misc_RNA (1)...(19): siRNA sense strand
ggcaagauccaaacugagu

SEQ ID NO: 2051484 - RNA, 19 nt, Homo sapiens
  misc_RNA (1)...(19): siRNA sense strand
caaaucugggaacaaauug

SEQ ID NO: 2051485 - RNA, 19 nt, Homo sapiens
  misc_RNA (1)...(19): siRNA sense strand
ugaucuuccucagcaguua

SEQ ID NO: 2051486 - RNA, 19 nt, Homo sapiens
  misc_RNA (1)...(19): siRNA sense strand
gcacuuaauaggcauugca

SEQ ID NO: 2051487 - RNA, 19 nt, Homo sapiens
  misc_RNA (1)...(19): siRNA sense strand
cacaggacauaccguaaag

SEQ ID NO: 2051488 - RNA, 19 nt, Homo sapiens
  misc_RNA (1)...(19): siRNA sense strand
uguaaagaaugugggaaga

SEQ ID NO: 2051489 - RNA, 19 nt, Homo sapiens
  misc_RNA (1)...(19): siRNA sense strand
gauaagagcuuucaucaga

SEQ ID NO: 2051490 - RNA, 19 nt, Homo sapiens
  misc_RNA (1)...(19): siRNA sense strand
gaacauaagagaauccaua

SEQ ID NO: 2051491 - RNA, 19 nt, Homo sapiens
  misc_RNA (1)...(19): siRNA sense strand
ggagagagaccuuauaauu

SEQ ID NO: 2051492 - RNA, 19 nt, Homo sapiens
  misc_RNA (1)...(19): siRNA sense strand
caucagagaucagcacuua

SEQ ID NO: 2051493 - RNA, 19 nt, Homo sapiens
  misc_RNA (1)...(19): siRNA sense strand
gguaagaccuucuauuuua

SEQ ID NO: 2051494 - RNA, 19 nt, Homo sapiens
  misc_RNA (1)...(19): siRNA sense strand
ggagagaaaccuuacauuu

SEQ ID NO: 2051495 - RNA, 19 nt, Homo sapiens
  misc_RNA (1)...(19): siRNA sense strand
gaucagcacuuaauguuca

SEQ ID NO: 2051496 - RNA, 19 nt, Homo sapiens
  misc_RNA (1)...(19): siRNA sense strand
gagagaaaccuuacauuug

SEQ ID NO: 2051497 - RNA, 19 nt, Homo sapiens
  misc_RNA (1)...(19): siRNA sense strand
ggacuacccacaauucaua

SEQ ID NO: 2051498 - RNA, 19 nt, Homo sapiens
  misc_RNA (1)...(19): siRNA sense strand
gagagagaccuuauaauug

SEQ ID NO: 2051499 - RNA, 19 nt, Homo sapiens
  misc_RNA (1)...(19): siRNA sense strand
cagcaaaucugggaacaaa

SEQ ID NO: 2051500 - RNA, 19 nt, Homo sapiens
  misc_RNA (1)...(19): siRNA sense strand
gcucacaucugcaaacuca

SEQ ID NO: 2051501 - RNA, 19 nt, Homo sapiens
  misc_RNA (1)...(19): siRNA sense strand
gaggcaagauccaaacuga

SEQ ID NO: 2051502 - RNA, 19 nt, Homo sapiens
  misc_RNA (1)...(19): siRNA sense strand
ucucaggacucuaucauaa

SEQ ID NO: 2051503 - RNA, 19 nt, Homo sapiens
  misc_RNA (1)...(19): siRNA sense strand
gcaaaucugggaacaaauu

SEQ ID NO: 2051504 - RNA, 19 nt, Homo sapiens
  misc_RNA (1)...(19): siRNA sense strand
agagaaaccuuacauuugu

SEQ ID NO: 2051505 - RNA, 19 nt, Homo sapiens
  misc_RNA (1)...(19): siRNA sense strand
agagagaccuuauaauugu

SEQ ID NO: 2051506 - RNA, 19 nt, Homo sapiens
  misc_RNA (1)...(19): siRNA sense strand
caucucagcucuucauguu

SEQ ID NO: 2051507 - RNA, 19 nt, Homo sapiens
  misc_RNA (1)...(19): siRNA sense strand
ggaaagggauuuuauacaa

SEQ ID NO: 2051508 - RNA, 19 nt, Homo sapiens
  misc_RNA (1)...(19): siRNA sense strand
gggaagggcuauguuacua

SEQ ID NO: 2051509 - RNA, 19 nt, Homo sapiens
  misc_RNA (1)...(19): siRNA sense strand
ggcaaggaauuuagucaaa

SEQ ID NO: 2051510 - RNA, 19 nt, Homo sapiens
  misc_RNA (1)...(19): siRNA sense strand
ggagagaaaccauucaaau

SEQ ID NO: 2051511 - RNA, 19 nt, Homo sapiens
  misc_RNA (1)...(19): siRNA sense strand
gagagaaaccguacagaug

SEQ ID NO: 2051512 - RNA, 19 nt, Homo sapiens
  misc_RNA (1)...(19): siRNA sense strand
gcacuuaauguucaucgua

SEQ ID NO: 2051513 - RNA, 19 nt, Homo sapiens
  misc_RNA (1)...(19): siRNA sense strand
guacagaugugagcagugu

SEQ ID NO: 2051514 - RNA, 19 nt, Homo sapiens
  misc_RNA (1)...(19): siRNA sense strand
gagagaccuuauaauugua

SEQ ID NO: 2051515 - RNA, 19 nt, Homo sapiens
  misc_RNA (1)...(19): siRNA sense strand
guaaacaguccaucaguga

SEQ ID NO: 2051516 - RNA, 19 nt, Homo sapiens
  misc_RNA (1)...(19): siRNA sense strand
agagaagucuuauacaugu

SEQ ID NO: 2051517 - RNA, 19 nt, Homo sapiens
  misc_RNA (1)...(19): siRNA sense strand
gagaugugaugcuggagaa

SEQ ID NO: 2051518 - RNA, 19 nt, Homo sapiens
  misc_RNA (1)...(19): siRNA sense strand
guaaagaccagccgagaga

SEQ ID NO: 2051519 - RNA, 19 nt, Homo sapiens
  misc_RNA (1)...(19): siRNA sense strand
gugguaagaccuucuauuu

SEQ ID NO: 2051520 - RNA, 19 nt, Homo sapiens
  misc_RNA (1)...(19): siRNA sense strand
ggacagcaacccaaagaga

SEQ ID NO: 2051521 - RNA, 19 nt, Homo sapiens
  misc_RNA (1)...(19): siRNA sense strand
gcgcuugaaucuggauaua

SEQ ID NO: 2051522 - RNA, 19 nt, Homo sapiens
  misc_RNA (1)...(19): siRNA sense strand
agucguagaucagcacuua

SEQ ID NO: 2051523 - RNA, 19 nt, Homo sapiens
  misc_RNA (1)...(19): siRNA sense strand
ggaaagaggcuuguacaca

SEQ ID NO: 2051524 - RNA, 19 nt, Homo sapiens
  misc_RNA (1)...(19): siRNA sense strand
gaagggcuauguuacuaag

SEQ ID NO: 2051525 - RNA, 19 nt, Homo sapiens
  misc_RNA (1)...(19): siRNA sense strand
uaagagcuuucaucagaga

SEQ ID NO: 2051526 - RNA, 19 nt, Homo sapiens
  misc_RNA (1)...(19): siRNA sense strand
gaaugugggaagaacuuua

SEQ ID NO: 2051527 - RNA, 19 nt, Homo sapiens
  misc_RNA (1)...(19): siRNA sense strand
gcaaggaauuuagucaaag

SEQ ID NO: 2051528 - RNA, 19 nt, Homo sapiens
  misc_RNA (1)...(19): siRNA sense strand
ucaggacucuaucauaaau

SEQ ID NO: 2051529 - RNA, 19 nt, Homo sapiens
  misc_RNA (1)...(19): siRNA sense strand
ggauguggcuguggucuuc

SEQ ID NO: 2051530 - RNA, 19 nt, Homo sapiens
  misc_RNA (1)...(19): siRNA sense strand
ggagagaaaccguacagau

SEQ ID NO: 2051531 - RNA, 19 nt, Homo sapiens
  misc_RNA (1)...(19): siRNA sense strand
gagaaaccguacagaugug

SEQ ID NO: 2051532 - RNA, 19 nt, Homo sapiens
  misc_RNA (1)...(19): siRNA sense strand
ggaagggcuauguuacuaa

SEQ ID NO: 2051533 - RNA, 19 nt, Homo sapiens
  misc_RNA (1)...(19): siRNA sense strand
gggcuauguuacuaaguuu

SEQ ID NO: 2051534 - RNA, 19 nt, Homo sapiens
  misc_RNA (1)...(19): siRNA sense strand
gagaaaccuuacauuugug

SEQ ID NO: 2051535 - RNA, 19 nt, Homo sapiens
  misc_RNA (1)...(19): siRNA sense strand
gaaaagccauauaaaugug

SEQ ID NO: 2051536 - RNA, 19 nt, Homo sapiens
  misc_RNA (1)...(19): siRNA sense strand
gcaggacuacccacaauuc

SEQ ID NO: 2051537 - RNA, 19 nt, Homo sapiens
  misc_RNA (1)...(19): siRNA sense strand
gcaguuauacucagaagag

SEQ ID NO: 2051538 - RNA, 19 nt, Homo sapiens
  misc_RNA (1)...(19): siRNA sense strand
aagcaucuguuacaucuca

SEQ ID NO: 2051539 - RNA, 19 nt, Homo sapiens
  misc_RNA (1)...(19): siRNA sense strand
ggugggaaguguaaacagu

SEQ ID NO: 2051540 - RNA, 19 nt, Homo sapiens
  misc_RNA (1)...(19): siRNA sense strand
cacuuaauguucaucguaa

SEQ ID NO: 2051541 - RNA, 19 nt, Homo sapiens
  misc_RNA (1)...(19): siRNA sense strand
ucucagcucuucauguuca

SEQ ID NO: 2051542 - RNA, 19 nt, Homo sapiens
  misc_RNA (1)...(19): siRNA sense strand
gggaacaaauugcaaaaga

SEQ ID NO: 2051543 - RNA, 19 nt, Homo sapiens
  misc_RNA (1)...(19): siRNA sense strand
caacugucuucccaucaga

SEQ ID NO: 2051544 - RNA, 19 nt, Homo sapiens
  misc_RNA (1)...(19): siRNA sense strand
cauaagagaauccauacug

SEQ ID NO: 2051545 - RNA, 19 nt, Homo sapiens
  misc_RNA (1)...(19): siRNA sense strand
acacaggagagaaaccuua

SEQ ID NO: 2051546 - RNA, 19 nt, Homo sapiens
  misc_RNA (1)...(19): siRNA sense strand
gacagcaacccaaagagaa

SEQ ID NO: 2051547 - RNA, 19 nt, Homo sapiens
  misc_RNA (1)...(19): siRNA sense strand
ugugauauaugugguaaga

SEQ ID NO: 2051548 - RNA, 19 nt, Homo sapiens
  misc_RNA (1)...(19): siRNA sense strand
gaaaacccauccaaaugug

SEQ ID NO: 2051549 - RNA, 19 nt, Homo sapiens
  misc_RNA (1)...(19): siRNA sense strand
caaauucacaacugucuuc

SEQ ID NO: 2051550 - RNA, 19 nt, Homo sapiens
  misc_RNA (1)...(19): siRNA sense strand
ucagagaucagcacuuaau

SEQ ID NO: 2051551 - RNA, 19 nt, Homo sapiens
  misc_RNA (1)...(19): siRNA sense strand
ugugauacaugugauaaga

SEQ ID NO: 2051552 - RNA, 19 nt, Homo sapiens
  misc_RNA (1)...(19): siRNA sense strand
ccaaagagaagggaauuca

SEQ ID NO: 2051553 - RNA, 19 nt, Homo sapiens
  misc_RNA (1)...(19): siRNA sense strand
gcuugaaucuggauauacu

SEQ ID NO: 2051554 - RNA, 19 nt, Homo sapiens
  misc_RNA (1)...(19): siRNA sense strand
gaugugagcaguguggaaa

SEQ ID NO: 2051555 - RNA, 19 nt, Homo sapiens
  misc_RNA (1)...(19): siRNA sense strand
gaagcaggacuacccacaa

SEQ ID NO: 2051556 - RNA, 19 nt, Homo sapiens
  misc_RNA (1)...(19): siRNA sense strand
caaccguuccaccaagaua

SEQ ID NO: 2051557 - RNA, 19 nt, Homo sapiens
  misc_RNA (1)...(19): siRNA sense strand
gauacuugccacuuccuaa

SEQ ID NO: 2051558 - RNA, 19 nt, Homo sapiens
  misc_RNA (1)...(19): siRNA sense strand
guagaucagcacuuaaugu

SEQ ID NO: 2051559 - RNA, 19 nt, Homo sapiens
  misc_RNA (1)...(19): siRNA sense strand
cgggagagagaccuuauaa

SEQ ID NO: 2051560 - RNA, 19 nt, Homo sapiens
  misc_RNA (1)...(19): siRNA sense strand
uagaucagcacuuaauguu

SEQ ID NO: 2051561 - RNA, 19 nt, Homo sapiens
  misc_RNA (1)...(19): siRNA sense strand
gagaucagcacuuaauagg

SEQ ID NO: 2051562 - RNA, 19 nt, Homo sapiens
  misc_RNA (1)...(19): siRNA sense strand
aagcaggacuacccacaau

SEQ ID NO: 2051563 - RNA, 19 nt, Homo sapiens
  misc_RNA (1)...(19): siRNA sense strand
ggaaaacccauccaaaugu

SEQ ID NO: 2051564 - RNA, 19 nt, Homo sapiens
  misc_RNA (1)...(19): siRNA sense strand
ccauuuaggugugauacau

SEQ ID NO: 2051565 - RNA, 19 nt, Homo sapiens
  misc_RNA (1)...(19): siRNA sense strand
gagaagucuuauacaugug

SEQ ID NO: 2051566 - RNA, 19 nt, Homo sapiens
  misc_RNA (1)...(19): siRNA sense strand
acacaggacauaccguaaa

SEQ ID NO: 2051567 - RNA, 19 nt, Homo sapiens
  misc_RNA (1)...(19): siRNA sense strand
agagaaaccguacagaugu

SEQ ID NO: 2051568 - RNA, 19 nt, Homo sapiens
  misc_RNA (1)...(19): siRNA sense strand
gagcuuucaucagagauca

SEQ ID NO: 2051569 - RNA, 19 nt, Homo sapiens
  misc_RNA (1)...(19): siRNA sense strand
uaaggaacauaagagaauc

SEQ ID NO: 2051570 - RNA, 19 nt, Homo sapiens
  misc_RNA (1)...(19): siRNA sense strand
auucaugauucccagcuua

SEQ ID NO: 2051571 - RNA, 19 nt, Homo sapiens
  misc_RNA (1)...(19): siRNA sense strand
gagugguccugccagcaaa

SEQ ID NO: 2051572 - RNA, 19 nt, Homo sapiens
  misc_RNA (1)...(19): siRNA sense strand
ucaaagcucacaucugcaa

SEQ ID NO: 2051573 - RNA, 19 nt, Homo sapiens
  misc_RNA (1)...(19): siRNA sense strand
agaaacucuuuauguguga

SEQ ID NO: 2051574 - RNA, 19 nt, Homo sapiens
  misc_RNA (1)...(19): siRNA sense strand
caaggaauuuagucaaagc

SEQ ID NO: 2051575 - RNA, 19 nt, Homo sapiens
  misc_RNA (1)...(19): siRNA sense strand
gagacuccacugccagaaa

SEQ ID NO: 2051576 - RNA, 19 nt, Homo sapiens
  misc_RNA (1)...(19): siRNA sense strand
gugaaaagccauauaaaug

SEQ ID NO: 2051577 - RNA, 19 nt, Homo sapiens
  misc_RNA (1)...(19): siRNA sense strand
cagagaucagcacuuaaua

SEQ ID NO: 2051578 - RNA, 19 nt, Homo sapiens
  misc_RNA (1)...(19): siRNA sense strand
gaauucaggaggcaagauc

SEQ ID NO: 2051579 - RNA, 19 nt, Homo sapiens
  misc_RNA (1)...(19): siRNA sense strand
ugugaggacuguggaaaga

SEQ ID NO: 2051580 - RNA, 19 nt, Homo sapiens
  misc_RNA (1)...(19): siRNA sense strand
uuauacaugugaugagugu

SEQ ID NO: 2051581 - RNA, 19 nt, Homo sapiens
  misc_RNA (1)...(19): siRNA sense strand
uggcuguggucuucacuga

SEQ ID NO: 2051582 - RNA, 19 nt, Homo sapiens
  misc_RNA (1)...(19): siRNA sense strand
ggaaugugggaagaacuuu

SEQ ID NO: 2051583 - RNA, 19 nt, Homo sapiens
  misc_RNA (1)...(19): siRNA sense strand
ggcaagauccaaacugagu

SEQ ID NO: 2051584 - RNA, 19 nt, Homo sapiens
  misc_RNA (1)...(19): siRNA sense strand
caaaucugggaacaaauug

SEQ ID NO: 2051585 - RNA, 19 nt, Homo sapiens
  misc_RNA (1)...(19): siRNA sense strand
ugaucuuccucagcaguua

SEQ ID NO: 2051586 - RNA, 19 nt, Homo sapiens
  misc_RNA (1)...(19): siRNA sense strand
gcacuuaauaggcauugca

SEQ ID NO: 2051587 - RNA, 19 nt, Homo sapiens
  misc_RNA (1)...(19): siRNA sense strand
cacaggacauaccguaaag

SEQ ID NO: 2051588 - RNA, 19 nt, Homo sapiens
  misc_RNA (1)...(19): siRNA sense strand
uguaaagaaugugggaaga

SEQ ID NO: 2051589 - RNA, 19 nt, Homo sapiens
  misc_RNA (1)...(19): siRNA sense strand
gauaagagcuuucaucaga

SEQ ID NO: 2051590 - RNA, 19 nt, Homo sapiens
  misc_RNA (1)...(19): siRNA sense strand
gaacauaagagaauccaua

SEQ ID NO: 2051591 - RNA, 19 nt, Homo sapiens
  misc_RNA (1)...(19): siRNA sense strand
ggagagagaccuuauaauu

SEQ ID NO: 2051592 - RNA, 19 nt, Homo sapiens
  misc_RNA (1)...(19): siRNA sense strand
caucagagaucagcacuua

SEQ ID NO: 2051593 - RNA, 19 nt, Homo sapiens
  misc_RNA (1)...(19): siRNA sense strand
gguaagaccuucuauuuua

SEQ ID NO: 2051594 - RNA, 19 nt, Homo sapiens
  misc_RNA (1)...(19): siRNA sense strand
ggagagaaaccuuacauuu

SEQ ID NO: 2051595 - RNA, 19 nt, Homo sapiens
  misc_RNA (1)...(19): siRNA sense strand
gaucagcacuuaauguuca

SEQ ID NO: 2051596 - RNA, 19 nt, Homo sapiens
  misc_RNA (1)...(19): siRNA sense strand
gagagaaaccuuacauuug

SEQ ID NO: 2051597 - RNA, 19 nt, Homo sapiens
  misc_RNA (1)...(19): siRNA sense strand
ggacuacccacaauucaua

SEQ ID NO: 2051598 - RNA, 19 nt, Homo sapiens
  misc_RNA (1)...(19): siRNA sense strand
gagagagaccuuauaauug

SEQ ID NO: 2051599 - RNA, 19 nt, Homo sapiens
  misc_RNA (1)...(19): siRNA sense strand
cagcaaaucugggaacaaa

SEQ ID NO: 2051600 - RNA, 19 nt, Homo sapiens
  misc_RNA (1)...(19): siRNA sense strand
gcucacaucugcaaacuca

SEQ ID NO: 2051601 - RNA, 19 nt, Homo sapiens
  misc_RNA (1)...(19): siRNA sense strand
gaggcaagauccaaacuga

SEQ ID NO: 2051602 - RNA, 19 nt, Homo sapiens
  misc_RNA (1)...(19): siRNA sense strand
ucucaggacucuaucauaa

SEQ ID NO: 2051603 - RNA, 19 nt, Homo sapiens
  misc_RNA (1)...(19): siRNA sense strand
gcaaaucugggaacaaauu

SEQ ID NO: 2051604 - RNA, 19 nt, Homo sapiens
  misc_RNA (1)...(19): siRNA sense strand
agagaaaccuuacauuugu

SEQ ID NO: 2051605 - RNA, 19 nt, Homo sapiens
  misc_RNA (1)...(19): siRNA sense strand
agagagaccuuauaauugu

SEQ ID NO: 2051606 - RNA, 19 nt, Homo sapiens
  misc_RNA (1)...(19): siRNA sense strand
caucucagcucuucauguu

SEQ ID NO: 2051607 - RNA, 19 nt, Homo sapiens
  misc_RNA (1)...(19): siRNA sense strand
ggaaagggauuuuauacaa

SEQ ID NO: 2051608 - RNA, 19 nt, Homo sapiens
  misc_RNA (1)...(19): siRNA sense strand
gggaagggcuauguuacua

SEQ ID NO: 2051609 - RNA, 19 nt, Homo sapiens
  misc_RNA (1)...(19): siRNA sense strand
ggcaaggaauuuagucaaa

SEQ ID NO: 2051610 - RNA, 19 nt, Homo sapiens
  misc_RNA (1)...(19): siRNA sense strand
ggagagaaaccauucaaau

SEQ ID NO: 2051611 - RNA, 19 nt, Homo sapiens
  misc_RNA (1)...(19): siRNA sense strand
gagagaaaccguacagaug

SEQ ID NO: 2051612 - RNA, 19 nt, Homo sapiens
  misc_RNA (1)...(19): siRNA sense strand
gcacuuaauguucaucgua

SEQ ID NO: 2051613 - RNA, 19 nt, Homo sapiens
  misc_RNA (1)...(19): siRNA sense strand
guacagaugugagcagugu

SEQ ID NO: 2051614 - RNA, 19 nt, Homo sapiens
  misc_RNA (1)...(19): siRNA sense strand
gagagaccuuauaauugua

SEQ ID NO: 2051615 - RNA, 19 nt, Homo sapiens
  misc_RNA (1)...(19): siRNA sense strand
guaaacaguccaucaguga

SEQ ID NO: 2051616 - RNA, 19 nt, Homo sapiens
  misc_RNA (1)...(19): siRNA sense strand
agagaagucuuauacaugu

SEQ ID NO: 2051617 - RNA, 19 nt, Homo sapiens
  misc_RNA (1)...(19): siRNA sense strand
gagaugugaugcuggagaa

SEQ ID NO: 2051618 - RNA, 19 nt, Homo sapiens
  misc_RNA (1)...(19): siRNA sense strand
guaaagaccagccgagaga

SEQ ID NO: 2051619 - RNA, 19 nt, Homo sapiens
  misc_RNA (1)...(19): siRNA sense strand
gugguaagaccuucuauuu

SEQ ID NO: 2051620 - RNA, 19 nt, Homo sapiens
  misc_RNA (1)...(19): siRNA sense strand
ggacagcaacccaaagaga

SEQ ID NO: 2051621 - RNA, 19 nt, Homo sapiens
  misc_RNA (1)...(19): siRNA sense strand
gcgcuugaaucuggauaua

SEQ ID NO: 2051622 - RNA, 19 nt, Homo sapiens
  misc_RNA (1)...(19): siRNA sense strand
agucguagaucagcacuua

SEQ ID NO: 2051623 - RNA, 19 nt, Homo sapiens
  misc_RNA (1)...(19): siRNA sense strand
ggaaagaggcuuguacaca

SEQ ID NO: 2051624 - RNA, 19 nt, Homo sapiens
  misc_RNA (1)...(19): siRNA sense strand
gaagggcuauguuacuaag

SEQ ID NO: 2051625 - RNA, 19 nt, Homo sapiens
  misc_RNA (1)...(19): siRNA sense strand
uaagagcuuucaucagaga

SEQ ID NO: 2051626 - RNA, 19 nt, Homo sapiens
  misc_RNA (1)...(19): siRNA sense strand
gaaugugggaagaacuuua

SEQ ID NO: 2051627 - RNA, 19 nt, Homo sapiens
  misc_RNA (1)...(19): siRNA sense strand
gcaaggaauuuagucaaag

SEQ ID NO: 2051628 - RNA, 19 nt, Homo sapiens
  misc_RNA (1)...(19): siRNA sense strand
ucaggacucuaucauaaau

SEQ ID NO: 2051629 - RNA, 19 nt, Homo sapiens
  misc_RNA (1)...(19): siRNA sense strand
ggauguggcuguggucuuc

SEQ ID NO: 2051630 - RNA, 19 nt, Homo sapiens
  misc_RNA (1)...(19): siRNA sense strand
ggagagaaaccguacagau

SEQ ID NO: 2051631 - RNA, 19 nt, Homo sapiens
  misc_RNA (1)...(19): siRNA sense strand
gagaaaccguacagaugug

SEQ ID NO: 2051632 - RNA, 19 nt, Homo sapiens
  misc_RNA (1)...(19): siRNA sense strand
ggaagggcuauguuacuaa

SEQ ID NO: 2051633 - RNA, 19 nt, Homo sapiens
  misc_RNA (1)...(19): siRNA sense strand
gggcuauguuacuaaguuu

SEQ ID NO: 2051634 - RNA, 19 nt, Homo sapiens
  misc_RNA (1)...(19): siRNA sense strand
gagaaaccuuacauuugug

SEQ ID NO: 2051635 - RNA, 19 nt, Homo sapiens
  misc_RNA (1)...(19): siRNA sense strand
gaaaagccauauaaaugug

SEQ ID NO: 2051636 - RNA, 19 nt, Homo sapiens
  misc_RNA (1)...(19): siRNA sense strand
gcaggacuacccacaauuc

SEQ ID NO: 2051637 - RNA, 19 nt, Homo sapiens
  misc_RNA (1)...(19): siRNA sense strand
gcaguuauacucagaagag

SEQ ID NO: 2051638 - RNA, 19 nt, Homo sapiens
  misc_RNA (1)...(19): siRNA sense strand
aagcaucuguuacaucuca

SEQ ID NO: 2051639 - RNA, 19 nt, Homo sapiens
  misc_RNA (1)...(19): siRNA sense strand
ggugggaaguguaaacagu

SEQ ID NO: 2051640 - RNA, 19 nt, Homo sapiens
  misc_RNA (1)...(19): siRNA sense strand
cacuuaauguucaucguaa

SEQ ID NO: 2051641 - RNA, 19 nt, Homo sapiens
  misc_RNA (1)...(19): siRNA sense strand
ucucagcucuucauguuca

SEQ ID NO: 2051642 - RNA, 19 nt, Homo sapiens
  misc_RNA (1)...(19): siRNA sense strand
gggaacaaauugcaaaaga

SEQ ID NO: 2051643 - RNA, 19 nt, Homo sapiens
  misc_RNA (1)...(19): siRNA sense strand
caacugucuucccaucaga

SEQ ID NO: 2051644 - RNA, 19 nt, Homo sapiens
  misc_RNA (1)...(19): siRNA sense strand
cauaagagaauccauacug

SEQ ID NO: 2051645 - RNA, 19 nt, Homo sapiens
  misc_RNA (1)...(19): siRNA sense strand
acacaggagagaaaccuua

SEQ ID NO: 2051646 - RNA, 19 nt, Homo sapiens
  misc_RNA (1)...(19): siRNA sense strand
gacagcaacccaaagagaa

SEQ ID NO: 2051647 - RNA, 19 nt, Homo sapiens
  misc_RNA (1)...(19): siRNA sense strand
ugugauauaugugguaaga

SEQ ID NO: 2051648 - RNA, 19 nt, Homo sapiens
  misc_RNA (1)...(19): siRNA sense strand
gaaaacccauccaaaugug

SEQ ID NO: 2051649 - RNA, 19 nt, Homo sapiens
  misc_RNA (1)...(19): siRNA sense strand
caaauucacaacugucuuc

SEQ ID NO: 2051650 - RNA, 19 nt, Homo sapiens
  misc_RNA (1)...(19): siRNA sense strand
ucagagaucagcacuuaau

SEQ ID NO: 2051651 - RNA, 19 nt, Homo sapiens
  misc_RNA (1)...(19): siRNA sense strand
ugugauacaugugauaaga

SEQ ID NO: 2051652 - RNA, 19 nt, Homo sapiens
  misc_RNA (1)...(19): siRNA sense strand
ccaaagagaagggaauuca

SEQ ID NO: 2051653 - RNA, 19 nt, Homo sapiens
  misc_RNA (1)...(19): siRNA sense strand
gcuugaaucuggauauacu

SEQ ID NO: 2051654 - RNA, 19 nt, Homo sapiens
  misc_RNA (1)...(19): siRNA sense strand
gaugugagcaguguggaaa

SEQ ID NO: 2051655 - RNA, 19 nt, Homo sapiens
  misc_RNA (1)...(19): siRNA sense strand
gaagcaggacuacccacaa

SEQ ID NO: 2051656 - RNA, 19 nt, Homo sapiens
  misc_RNA (1)...(19): siRNA sense strand
caaccguuccaccaagaua

SEQ ID NO: 2051657 - RNA, 19 nt, Homo sapiens
  misc_RNA (1)...(19): siRNA sense strand
gauacuugccacuuccuaa

SEQ ID NO: 2051658 - RNA, 19 nt, Homo sapiens
  misc_RNA (1)...(19): siRNA sense strand
guagaucagcacuuaaugu

SEQ ID NO: 2051659 - RNA, 19 nt, Homo sapiens
  misc_RNA (1)...(19): siRNA sense strand
cgggagagagaccuuauaa

SEQ ID NO: 2051660 - RNA, 19 nt, Homo sapiens
  misc_RNA (1)...(19): siRNA sense strand
uagaucagcacuuaauguu

SEQ ID NO: 2051661 - RNA, 19 nt, Homo sapiens
  misc_RNA (1)...(19): siRNA sense strand
gagaucagcacuuaauagg

SEQ ID NO: 2051662 - RNA, 19 nt, Homo sapiens
  misc_RNA (1)...(19): siRNA sense strand
aagcaggacuacccacaau

SEQ ID NO: 2051663 - RNA, 19 nt, Homo sapiens
  misc_RNA (1)...(19): siRNA sense strand
ggaaaacccauccaaaugu

SEQ ID NO: 2051664 - RNA, 19 nt, Homo sapiens
  misc_RNA (1)...(19): siRNA sense strand
ccauuuaggugugauacau

SEQ ID NO: 2051665 - RNA, 19 nt, Homo sapiens
  misc_RNA (1)...(19): siRNA sense strand
gagaagucuuauacaugug

SEQ ID NO: 2051666 - RNA, 19 nt, Homo sapiens
  misc_RNA (1)...(19): siRNA sense strand
acacaggacauaccguaaa

SEQ ID NO: 2051667 - RNA, 19 nt, Homo sapiens
  misc_RNA (1)...(19): siRNA sense strand
agagaaaccguacagaugu

SEQ ID NO: 2051668 - RNA, 19 nt, Homo sapiens
  misc_RNA (1)...(19): siRNA sense strand
gagcuuucaucagagauca

SEQ ID NO: 2051669 - RNA, 19 nt, Homo sapiens
  misc_RNA (1)...(19): siRNA sense strand
uaaggaacauaagagaauc

SEQ ID NO: 2051670 - RNA, 19 nt, Homo sapiens
  misc_RNA (1)...(19): siRNA sense strand
auucaugauucccagcuua

SEQ ID NO: 2051671 - RNA, 19 nt, Homo sapiens
  misc_RNA (1)...(19): siRNA sense strand
gagugguccugccagcaaa

SEQ ID NO: 2051672 - RNA, 19 nt, Homo sapiens
  misc_RNA (1)...(19): siRNA sense strand
ucaaagcucacaucugcaa

SEQ ID NO: 2051673 - RNA, 19 nt, Homo sapiens
  misc_RNA (1)...(19): siRNA sense strand
agaaacucuuuauguguga

SEQ ID NO: 2051674 - RNA, 19 nt, Homo sapiens
  misc_RNA (1)...(19): siRNA sense strand
caaggaauuuagucaaagc

SEQ ID NO: 2051675 - RNA, 19 nt, Homo sapiens
  misc_RNA (1)...(19): siRNA sense strand
gagacuccacugccagaaa

SEQ ID NO: 2051676 - RNA, 19 nt, Homo sapiens
  misc_RNA (1)...(19): siRNA sense strand
gugaaaagccauauaaaug

SEQ ID NO: 2051677 - RNA, 19 nt, Homo sapiens
  misc_RNA (1)...(19): siRNA sense strand
cagagaucagcacuuaaua

SEQ ID NO: 2051678 - RNA, 19 nt, Homo sapiens
  misc_RNA (1)...(19): siRNA sense strand
gaauucaggaggcaagauc

SEQ ID NO: 2051679 - RNA, 19 nt, Homo sapiens
  misc_RNA (1)...(19): siRNA sense strand
ugugaggacuguggaaaga

SEQ ID NO: 2051680 - RNA, 19 nt, Homo sapiens
  misc_RNA (1)...(19): siRNA sense strand
uuauacaugugaugagugu

SEQ ID NO: 2051681 - RNA, 19 nt, Homo sapiens
  misc_RNA (1)...(19): siRNA sense strand
uggcuguggucuucacuga

SEQ ID NO: 2051682 - RNA, 19 nt, Homo sapiens
  misc_RNA (1)...(19): siRNA sense strand
ggaaugugggaagaacuuu

SEQ ID NO: 2051683 - RNA, 19 nt, Homo sapiens
  misc_RNA (1)...(19): siRNA sense strand
ggcaagauccaaacugagu

SEQ ID NO: 2051684 - RNA, 19 nt, Homo sapiens
  misc_RNA (1)...(19): siRNA sense strand
caaaucugggaacaaauug

SEQ ID NO: 2051685 - RNA, 19 nt, Homo sapiens
  misc_RNA (1)...(19): siRNA sense strand
ugaucuuccucagcaguua

SEQ ID NO: 2051686 - RNA, 19 nt, Homo sapiens
  misc_RNA (1)...(19): siRNA sense strand
gcacuuaauaggcauugca

SEQ ID NO: 2051687 - RNA, 19 nt, Homo sapiens
  misc_RNA (1)...(19): siRNA sense strand
cacaggacauaccguaaag

SEQ ID NO: 2051688 - RNA, 19 nt, Homo sapiens
  misc_RNA (1)...(19): siRNA sense strand
uguaaagaaugugggaaga

SEQ ID NO: 2051689 - RNA, 19 nt, Homo sapiens
  misc_RNA (1)...(19): siRNA sense strand
ucaaagagcucauagcaua

SEQ ID NO: 2051690 - RNA, 19 nt, Homo sapiens
  misc_RNA (1)...(19): siRNA sense strand
gaaagaauccugauaaguu

SEQ ID NO: 2051691 - RNA, 19 nt, Homo sapiens
  misc_RNA (1)...(19): siRNA sense strand
guacagagaugugauauug

SEQ ID NO: 2051692 - RNA, 19 nt, Homo sapiens
  misc_RNA (1)...(19): siRNA sense strand
gggaaagccuucaauauga

SEQ ID NO: 2051693 - RNA, 19 nt, Homo sapiens
  misc_RNA (1)...(19): siRNA sense strand
gaagucaucucucagugaa

SEQ ID NO: 2051694 - RNA, 19 nt, Homo sapiens
  misc_RNA (1)...(19): siRNA sense strand
gaauguaguuugugugaga

SEQ ID NO: 2051695 - RNA, 19 nt, Homo sapiens
  misc_RNA (1)...(19): siRNA sense strand
guacaucucagaauucaua

SEQ ID NO: 2051696 - RNA, 19 nt, Homo sapiens
  misc_RNA (1)...(19): siRNA sense strand
aagaugagcuugagaguau

SEQ ID NO: 2051697 - RNA, 19 nt, Homo sapiens
  misc_RNA (1)...(19): siRNA sense strand
ggagagagaccuuaugaau

SEQ ID NO: 2051698 - RNA, 19 nt, Homo sapiens
  misc_RNA (1)...(19): siRNA sense strand
caacugagaagcccuauga

SEQ ID NO: 2051699 - RNA, 19 nt, Homo sapiens
  misc_RNA (1)...(19): siRNA sense strand
ggagagagacccuaugaau

SEQ ID NO: 2051700 - RNA, 19 nt, Homo sapiens
  misc_RNA (1)...(19): siRNA sense strand
ggauauaucuauggaguuc

SEQ ID NO: 2051701 - RNA, 19 nt, Homo sapiens
  misc_RNA (1)...(19): siRNA sense strand
cugauaaguuucaugguua

SEQ ID NO: 2051702 - RNA, 19 nt, Homo sapiens
  misc_RNA (1)...(19): siRNA sense strand
gaagaaugguaccagaaca

SEQ ID NO: 2051703 - RNA, 19 nt, Homo sapiens
  misc_RNA (1)...(19): siRNA sense strand
ggagagaaaccauggaaau

SEQ ID NO: 2051704 - RNA, 19 nt, Homo sapiens
  misc_RNA (1)...(19): siRNA sense strand
ggaaaagccuucacucaga

SEQ ID NO: 2051705 - RNA, 19 nt, Homo sapiens
  misc_RNA (1)...(19): siRNA sense strand
gagagacccuaugaaugua

SEQ ID NO: 2051706 - RNA, 19 nt, Homo sapiens
  misc_RNA (1)...(19): siRNA sense strand
ggaaauccuucuguuggaa

SEQ ID NO: 2051707 - RNA, 19 nt, Homo sapiens
  misc_RNA (1)...(19): siRNA sense strand
guaccaagccugacuuaau

SEQ ID NO: 2051708 - RNA, 19 nt, Homo sapiens
  misc_RNA (1)...(19): siRNA sense strand
ccaagcagaaguuauuuaa

SEQ ID NO: 2051709 - RNA, 19 nt, Homo sapiens
  misc_RNA (1)...(19): siRNA sense strand
ggaguucacacaggaaaua

SEQ ID NO: 2051710 - RNA, 19 nt, Homo sapiens
  misc_RNA (1)...(19): siRNA sense strand
aggcagagcuguccagaug

SEQ ID NO: 2051711 - RNA, 19 nt, Homo sapiens
  misc_RNA (1)...(19): siRNA sense strand
ucagagaacucauucaacu

SEQ ID NO: 2051712 - RNA, 19 nt, Homo sapiens
  misc_RNA (1)...(19): siRNA sense strand
agagagaccuuaugaaugc

SEQ ID NO: 2051713 - RNA, 19 nt, Homo sapiens
  misc_RNA (1)...(19): siRNA sense strand
gagagagaccuuaugaaug

SEQ ID NO: 2051714 - RNA, 19 nt, Homo sapiens
  misc_RNA (1)...(19): siRNA sense strand
gaauucagggcuucguaua

SEQ ID NO: 2051715 - RNA, 19 nt, Homo sapiens
  misc_RNA (1)...(19): siRNA sense strand
guucacauccgaaugcaua

SEQ ID NO: 2051716 - RNA, 19 nt, Homo sapiens
  misc_RNA (1)...(19): siRNA sense strand
ccugauaaguuucaugguu

SEQ ID NO: 2051717 - RNA, 19 nt, Homo sapiens
  misc_RNA (1)...(19): siRNA sense strand
gggaaauccuucuguugga

SEQ ID NO: 2051718 - RNA, 19 nt, Homo sapiens
  misc_RNA (1)...(19): siRNA sense strand
agucauaccuuguuauaca

SEQ ID NO: 2051719 - RNA, 19 nt, Homo sapiens
  misc_RNA (1)...(19): siRNA sense strand
gaaaucacagcuucuuuua

SEQ ID NO: 2051720 - RNA, 19 nt, Homo sapiens
  misc_RNA (1)...(19): siRNA sense strand
acagagaugugauauugga

SEQ ID NO: 2051721 - RNA, 19 nt, Homo sapiens
  misc_RNA (1)...(19): siRNA sense strand
gagagagacccuaugaaug

SEQ ID NO: 2051722 - RNA, 19 nt, Homo sapiens
  misc_RNA (1)...(19): siRNA sense strand
ggagugaaaccguaugaau

SEQ ID NO: 2051723 - RNA, 19 nt, Homo sapiens
  misc_RNA (1)...(19): siRNA sense strand
gggaaagccuacaguugga

SEQ ID NO: 2051724 - RNA, 19 nt, Homo sapiens
  misc_RNA (1)...(19): siRNA sense strand
cauuguacaucucagaauu

SEQ ID NO: 2051725 - RNA, 19 nt, Homo sapiens
  misc_RNA (1)...(19): siRNA sense strand
gcuccaagcagaaguuauu

SEQ ID NO: 2051726 - RNA, 19 nt, Homo sapiens
  misc_RNA (1)...(19): siRNA sense strand
ucaaggauauaucuaugga

SEQ ID NO: 2051727 - RNA, 19 nt, Homo sapiens
  misc_RNA (1)...(19): siRNA sense strand
gaaaagccuucacucagaa

SEQ ID NO: 2051728 - RNA, 19 nt, Homo sapiens
  misc_RNA (1)...(19): siRNA sense strand
ugaaugcaaugaaugugaa

SEQ ID NO: 2051729 - RNA, 19 nt, Homo sapiens
  misc_RNA (1)...(19): siRNA sense strand
agagagacccuaugaaugu

SEQ ID NO: 2051730 - RNA, 19 nt, Homo sapiens
  misc_RNA (1)...(19): siRNA sense strand
uaccaagccugacuuaauc

SEQ ID NO: 2051731 - RNA, 19 nt, Homo sapiens
  misc_RNA (1)...(19): siRNA sense strand
guacaccagagaacucaua

SEQ ID NO: 2051732 - RNA, 19 nt, Homo sapiens
  misc_RNA (1)...(19): siRNA sense strand
ggagagaagcccuauggau

SEQ ID NO: 2051733 - RNA, 19 nt, Homo sapiens
  misc_RNA (1)...(19): siRNA sense strand
gagugaaaccguaugaaug

SEQ ID NO: 2051734 - RNA, 19 nt, Homo sapiens
  misc_RNA (1)...(19): siRNA sense strand
gagagaaaccauggaaaug

SEQ ID NO: 2051735 - RNA, 19 nt, Homo sapiens
  misc_RNA (1)...(19): siRNA sense strand
gagagaaaccuuuuaaaug

SEQ ID NO: 2051736 - RNA, 19 nt, Homo sapiens
  misc_RNA (1)...(19): siRNA sense strand
ccauggaaaugcucugaau

SEQ ID NO: 2051737 - RNA, 19 nt, Homo sapiens
  misc_RNA (1)...(19): siRNA sense strand
gaacaaucaagaugagcuu

SEQ ID NO: 2051738 - RNA, 19 nt, Homo sapiens
  misc_RNA (1)...(19): siRNA sense strand
gagaaaccauggaaaugcu

SEQ ID NO: 2051739 - RNA, 19 nt, Homo sapiens
  misc_RNA (1)...(19): siRNA sense strand
gaacagcucacugcacauc

SEQ ID NO: 2051740 - RNA, 19 nt, Homo sapiens
  misc_RNA (1)...(19): siRNA sense strand
gagcuugagaguauugaaa

SEQ ID NO: 2051741 - RNA, 19 nt, Homo sapiens
  misc_RNA (1)...(19): siRNA sense strand
gaagucuccauucguugua

SEQ ID NO: 2051742 - RNA, 19 nt, Homo sapiens
  misc_RNA (1)...(19): siRNA sense strand
acucagaagucaucucuca

SEQ ID NO: 2051743 - RNA, 19 nt, Homo sapiens
  misc_RNA (1)...(19): siRNA sense strand
gaaagccuacaguuggaaa

SEQ ID NO: 2051744 - RNA, 19 nt, Homo sapiens
  misc_RNA (1)...(19): siRNA sense strand
gaagcccuaugaaugcaau

SEQ ID NO: 2051745 - RNA, 19 nt, Homo sapiens
  misc_RNA (1)...(19): siRNA sense strand
caucagagaacucauucaa

SEQ ID NO: 2051746 - RNA, 19 nt, Homo sapiens
  misc_RNA (1)...(19): siRNA sense strand
ugggaaagccuucaauaug

SEQ ID NO: 2051747 - RNA, 19 nt, Homo sapiens
  misc_RNA (1)...(19): siRNA sense strand
uaaguccuaucuccuuguu

SEQ ID NO: 2051748 - RNA, 19 nt, Homo sapiens
  misc_RNA (1)...(19): siRNA sense strand
ggaaaucacagcuucuuuu

SEQ ID NO: 2051749 - RNA, 19 nt, Homo sapiens
  misc_RNA (1)...(19): siRNA sense strand
gagaguucauacaggagaa

SEQ ID NO: 2051750 - RNA, 19 nt, Homo sapiens
  misc_RNA (1)...(19): siRNA sense strand
ggagagaaaccuuuuaaau

SEQ ID NO: 2051751 - RNA, 19 nt, Homo sapiens
  misc_RNA (1)...(19): siRNA sense strand
gagagagccuuuuguggaa

SEQ ID NO: 2051752 - RNA, 19 nt, Homo sapiens
  misc_RNA (1)...(19): siRNA sense strand
ccagaacaaucaagaugag

SEQ ID NO: 2051753 - RNA, 19 nt, Homo sapiens
  misc_RNA (1)...(19): siRNA sense strand
gaauggcagcuacuggauu

SEQ ID NO: 2051754 - RNA, 19 nt, Homo sapiens
  misc_RNA (1)...(19): siRNA sense strand
ugaaugcaguaaaugugaa

SEQ ID NO: 2051755 - RNA, 19 nt, Homo sapiens
  misc_RNA (1)...(19): siRNA sense strand
caggagagagaccuuauga

SEQ ID NO: 2051756 - RNA, 19 nt, Homo sapiens
  misc_RNA (1)...(19): siRNA sense strand
guaagucacagcucauugu

SEQ ID NO: 2051757 - RNA, 19 nt, Homo sapiens
  misc_RNA (1)...(19): siRNA sense strand
caaguuggaacaaggagaa

SEQ ID NO: 2051758 - RNA, 19 nt, Homo sapiens
  misc_RNA (1)...(19): siRNA sense strand
ggaauucagggcuucguau

SEQ ID NO: 2051759 - RNA, 19 nt, Homo sapiens
  misc_RNA (1)...(19): siRNA sense strand
gagaagcccuaugaaugca

SEQ ID NO: 2051760 - RNA, 19 nt, Homo sapiens
  misc_RNA (1)...(19): siRNA sense strand
agucacagcucauuguaca

SEQ ID NO: 2051761 - RNA, 19 nt, Homo sapiens
  misc_RNA (1)...(19): siRNA sense strand
caucaaagagcucauagca

SEQ ID NO: 2051762 - RNA, 19 nt, Homo sapiens
  misc_RNA (1)...(19): siRNA sense strand
ccuuaaugcucaucagaga

SEQ ID NO: 2051763 - RNA, 19 nt, Homo sapiens
  misc_RNA (1)...(19): siRNA sense strand
cuacuggauucuacacaga

SEQ ID NO: 2051764 - RNA, 19 nt, Homo sapiens
  misc_RNA (1)...(19): siRNA sense strand
agagaacucauucaacuga

SEQ ID NO: 2051765 - RNA, 19 nt, Homo sapiens
  misc_RNA (1)...(19): siRNA sense strand
aagaaagaauccugauaag

SEQ ID NO: 2051766 - RNA, 19 nt, Homo sapiens
  misc_RNA (1)...(19): siRNA sense strand
ggaaggcuuucagcagcaa

SEQ ID NO: 2051767 - RNA, 19 nt, Homo sapiens
  misc_RNA (1)...(19): siRNA sense strand
gaguaaguccuaucuccuu

SEQ ID NO: 2051768 - RNA, 19 nt, Homo sapiens
  misc_RNA (1)...(19): siRNA sense strand
gcucaucagagaguucaua

SEQ ID NO: 2051769 - RNA, 19 nt, Homo sapiens
  misc_RNA (1)...(19): siRNA sense strand
gaaugcaguaaaugugaaa

SEQ ID NO: 2051770 - RNA, 19 nt, Homo sapiens
  misc_RNA (1)...(19): siRNA sense strand
ccuuaugaaugcaguaaau

SEQ ID NO: 2051771 - RNA, 19 nt, Homo sapiens
  misc_RNA (1)...(19): siRNA sense strand
gcuugagaguauugaaaga

SEQ ID NO: 2051772 - RNA, 19 nt, Homo sapiens
  misc_RNA (1)...(19): siRNA sense strand
aggcaucacuucagauaca

SEQ ID NO: 2051773 - RNA, 19 nt, Homo sapiens
  misc_RNA (1)...(19): siRNA sense strand
cugagaagcccuaugaaug

SEQ ID NO: 2051774 - RNA, 19 nt, Homo sapiens
  misc_RNA (1)...(19): siRNA sense strand
gagaagcccuauggaugca

SEQ ID NO: 2051775 - RNA, 19 nt, Homo sapiens
  misc_RNA (1)...(19): siRNA sense strand
uaagucacagcucauugua

SEQ ID NO: 2051776 - RNA, 19 nt, Homo sapiens
  misc_RNA (1)...(19): siRNA sense strand
uuugaagucuccauucguu

SEQ ID NO: 2051777 - RNA, 19 nt, Homo sapiens
  misc_RNA (1)...(19): siRNA sense strand
gaaauccuucuguuggaau

SEQ ID NO: 2051778 - RNA, 19 nt, Homo sapiens
  misc_RNA (1)...(19): siRNA sense strand
gauuauacaucagagaacu

SEQ ID NO: 2051779 - RNA, 19 nt, Homo sapiens
  misc_RNA (1)...(19): siRNA sense strand
gugggaaagccuucaauau

SEQ ID NO: 2051780 - RNA, 19 nt, Homo sapiens
  misc_RNA (1)...(19): siRNA sense strand
ggaagaaugguaccagaac

SEQ ID NO: 2051781 - RNA, 19 nt, Homo sapiens
  misc_RNA (1)...(19): siRNA sense strand
ccgaaugcauacaggagaa

SEQ ID NO: 2051782 - RNA, 19 nt, Homo sapiens
  misc_RNA (1)...(19): siRNA sense strand
ccauaaaugcagugaaugu

SEQ ID NO: 2051783 - RNA, 19 nt, Homo sapiens
  misc_RNA (1)...(19): siRNA sense strand
caucggaagacucauaaau

SEQ ID NO: 2051784 - RNA, 19 nt, Homo sapiens
  misc_RNA (1)...(19): siRNA sense strand
guauacaucggaagacuca

SEQ ID NO: 2051785 - RNA, 19 nt, Homo sapiens
  misc_RNA (1)...(19): siRNA sense strand
gggaagaaugguaccagaa

SEQ ID NO: 2051786 - RNA, 19 nt, Homo sapiens
  misc_RNA (1)...(19): siRNA sense strand
gcaaaacccaugauucuuc

SEQ ID NO: 2051787 - RNA, 19 nt, Homo sapiens
  misc_RNA (1)...(19): siRNA sense strand
aauggcagcuacuggauuc

SEQ ID NO: 2051788 - RNA, 19 nt, Homo sapiens
  misc_RNA (1)...(19): siRNA sense strand
auacaucggaagacucaua

SEQ ID NO: 2051789 - RNA, 19 nt, Homo sapiens
  misc_RNA (1)...(19): siRNA sense strand
gaacagaaaucaugcauua

SEQ ID NO: 2051790 - RNA, 19 nt, Homo sapiens
  misc_RNA (1)...(19): siRNA sense strand
gaaagaaaccuuacaaaug

SEQ ID NO: 2051791 - RNA, 19 nt, Homo sapiens
  misc_RNA (1)...(19): siRNA sense strand
gcaagaaaccuuacaaaug

SEQ ID NO: 2051792 - RNA, 19 nt, Homo sapiens
  misc_RNA (1)...(19): siRNA sense strand
caagaaaccuuacaaaugc

SEQ ID NO: 2051793 - RNA, 19 nt, Homo sapiens
  misc_RNA (1)...(19): siRNA sense strand
gagagaagccuuacaaaug

SEQ ID NO: 2051794 - RNA, 19 nt, Homo sapiens
  misc_RNA (1)...(19): siRNA sense strand
ggaaaugccugaacucuac

SEQ ID NO: 2051795 - RNA, 19 nt, Homo sapiens
  misc_RNA (1)...(19): siRNA sense strand
gaaagaaauugcaacaaag

SEQ ID NO: 2051796 - RNA, 19 nt, Homo sapiens
  misc_RNA (1)...(19): siRNA sense strand
ggagaaaccuuauaaaaga

SEQ ID NO: 2051797 - RNA, 19 nt, Homo sapiens
  misc_RNA (1)...(19): siRNA sense strand
ggaaacaagucuauuaaac

SEQ ID NO: 2051798 - RNA, 19 nt, Homo sapiens
  misc_RNA (1)...(19): siRNA sense strand
agagaaaccuuacaaaugu

SEQ ID NO: 2051799 - RNA, 19 nt, Homo sapiens
  misc_RNA (1)...(19): siRNA sense strand
gguaaagucuucagucaga

SEQ ID NO: 2051800 - RNA, 19 nt, Homo sapiens
  misc_RNA (1)...(19): siRNA sense strand
ggacugauuucaucuguuc

SEQ ID NO: 2051801 - RNA, 19 nt, Homo sapiens
  misc_RNA (1)...(19): siRNA sense strand
ggaaagaaaccuuacaaau

SEQ ID NO: 2051802 - RNA, 19 nt, Homo sapiens
  misc_RNA (1)...(19): siRNA sense strand
gagagaaaccuuacaaaug

SEQ ID NO: 2051803 - RNA, 19 nt, Homo sapiens
  misc_RNA (1)...(19): siRNA sense strand
gagagaaaccuuacaaaug

SEQ ID NO: 2051804 - RNA, 19 nt, Homo sapiens
  misc_RNA (1)...(19): siRNA sense strand
gacaaagccuugaaucaug

SEQ ID NO: 2051805 - RNA, 19 nt, Homo sapiens
  misc_RNA (1)...(19): siRNA sense strand
ggcaaggucuuuagucaaa

SEQ ID NO: 2051806 - RNA, 19 nt, Homo sapiens
  misc_RNA (1)...(19): siRNA sense strand
guggagagaugaugaaaga

SEQ ID NO: 2051807 - RNA, 19 nt, Homo sapiens
  misc_RNA (1)...(19): siRNA sense strand
gacaaggucuucagucgaa

SEQ ID NO: 2051808 - RNA, 19 nt, Homo sapiens
  misc_RNA (1)...(19): siRNA sense strand
gagaaaggauauaaaugug

SEQ ID NO: 2051809 - RNA, 19 nt, Homo sapiens
  misc_RNA (1)...(19): siRNA sense strand
gaacuuaacuacccaucag

SEQ ID NO: 2051810 - RNA, 19 nt, Homo sapiens
  misc_RNA (1)...(19): siRNA sense strand
gcaaggcauuggagaauuc

SEQ ID NO: 2051811 - RNA, 19 nt, Homo sapiens
  misc_RNA (1)...(19): siRNA sense strand
agagaaaccuuacacaugu

SEQ ID NO: 2051812 - RNA, 19 nt, Homo sapiens
  misc_RNA (1)...(19): siRNA sense strand
agagaaaccuuacaagugu

SEQ ID NO: 2051813 - RNA, 19 nt, Homo sapiens
  misc_RNA (1)...(19): siRNA sense strand
ggagagaugaugaaagaaa

SEQ ID NO: 2051814 - RNA, 19 nt, Homo sapiens
  misc_RNA (1)...(19): siRNA sense strand
gagagaaaccuuacaagug

SEQ ID NO: 2051815 - RNA, 19 nt, Homo sapiens
  misc_RNA (1)...(19): siRNA sense strand
gagagaaaccuuacacaug

SEQ ID NO: 2051816 - RNA, 19 nt, Homo sapiens
  misc_RNA (1)...(19): siRNA sense strand
ggagagaaaggauauaaau

SEQ ID NO: 2051817 - RNA, 19 nt, Homo sapiens
  misc_RNA (1)...(19): siRNA sense strand
gagagaaaccauacaaaug

SEQ ID NO: 2051818 - RNA, 19 nt, Homo sapiens
  misc_RNA (1)...(19): siRNA sense strand
ggagagaaaccauacaaau

SEQ ID NO: 2051819 - RNA, 19 nt, Homo sapiens
  misc_RNA (1)...(19): siRNA sense strand
ggagagaaaccuuacaaau

SEQ ID NO: 2051820 - RNA, 19 nt, Homo sapiens
  misc_RNA (1)...(19): siRNA sense strand
ggagaaaccauacaagugu

SEQ ID NO: 2051821 - RNA, 19 nt, Homo sapiens
  misc_RNA (1)...(19): siRNA sense strand
ggagagaaaccuuacaaau

SEQ ID NO: 2051822 - RNA, 19 nt, Homo sapiens
  misc_RNA (1)...(19): siRNA sense strand
gagagaugaugaaagaaau

SEQ ID NO: 2051823 - RNA, 19 nt, Homo sapiens
  misc_RNA (1)...(19): siRNA sense strand
agagaagccuuacaaaugu

SEQ ID NO: 2051824 - RNA, 19 nt, Homo sapiens
  misc_RNA (1)...(19): siRNA sense strand
ggauauaaaugugaucugu

SEQ ID NO: 2051825 - RNA, 19 nt, Homo sapiens
  misc_RNA (1)...(19): siRNA sense strand
ggacguggccaucgaauuc

SEQ ID NO: 2051826 - RNA, 19 nt, Homo sapiens
  misc_RNA (1)...(19): siRNA sense strand
caaugaaugugguaagguu

SEQ ID NO: 2051827 - RNA, 19 nt, Homo sapiens
  misc_RNA (1)...(19): siRNA sense strand
gaagagguauaggaaacaa

SEQ ID NO: 2051828 - RNA, 19 nt, Homo sapiens
  misc_RNA (1)...(19): siRNA sense strand
gcccaaaccucuucagaca

SEQ ID NO: 2051829 - RNA, 19 nt, Homo sapiens
  misc_RNA (1)...(19): siRNA sense strand
gcccaaaccucacuagaca

SEQ ID NO: 2051830 - RNA, 19 nt, Homo sapiens
  misc_RNA (1)...(19): siRNA sense strand
ggagagaagccuuacaaau

SEQ ID NO: 2051831 - RNA, 19 nt, Homo sapiens
  misc_RNA (1)...(19): siRNA sense strand
gauagaagagguauaggaa

SEQ ID NO: 2051832 - RNA, 19 nt, Homo sapiens
  misc_RNA (1)...(19): siRNA sense strand
agagaaaccuuacaaaugc

SEQ ID NO: 2051833 - RNA, 19 nt, Homo sapiens
  misc_RNA (1)...(19): siRNA sense strand
gagaaaccuuacaaauguu

SEQ ID NO: 2051834 - RNA, 19 nt, Homo sapiens
  misc_RNA (1)...(19): siRNA sense strand
ccaaaccucuucagacauc

SEQ ID NO: 2051835 - RNA, 19 nt, Homo sapiens
  misc_RNA (1)...(19): siRNA sense strand
cuacacagaggacuuuaua

SEQ ID NO: 2051836 - RNA, 19 nt, Homo sapiens
  misc_RNA (1)...(19): siRNA sense strand
ggucaacacuuaccaacca

SEQ ID NO: 2051837 - RNA, 19 nt, Homo sapiens
  misc_RNA (1)...(19): siRNA sense strand
ggagagaaaccuuacaagu

SEQ ID NO: 2051838 - RNA, 19 nt, Homo sapiens
  misc_RNA (1)...(19): siRNA sense strand
caaauuauccauacuaagg

SEQ ID NO: 2051839 - RNA, 19 nt, Homo sapiens
  misc_RNA (1)...(19): siRNA sense strand
ggucuucagucgaaauuca

SEQ ID NO: 2051840 - RNA, 19 nt, Homo sapiens
  misc_RNA (1)...(19): siRNA sense strand
gugguaagguuuucaguua

SEQ ID NO: 2051841 - RNA, 19 nt, Homo sapiens
  misc_RNA (1)...(19): siRNA sense strand
gaaguauuccacacaguga

SEQ ID NO: 2051842 - RNA, 19 nt, Homo sapiens
  misc_RNA (1)...(19): siRNA sense strand
ggaucugucucguaacugu

SEQ ID NO: 2051843 - RNA, 19 nt, Homo sapiens
  misc_RNA (1)...(19): siRNA sense strand
uaaugaaugugguaaaguc

SEQ ID NO: 2051844 - RNA, 19 nt, Homo sapiens
  misc_RNA (1)...(19): siRNA sense strand
gggaugugauguuggagaa

SEQ ID NO: 2051845 - RNA, 19 nt, Homo sapiens
  misc_RNA (1)...(19): siRNA sense strand
gacaucaaauuauccauac

SEQ ID NO: 2051846 - RNA, 19 nt, Homo sapiens
  misc_RNA (1)...(19): siRNA sense strand
ucucguaacuguguaauca

SEQ ID NO: 2051847 - RNA, 19 nt, Homo sapiens
  misc_RNA (1)...(19): siRNA sense strand
ggcaagguguucagucaga

SEQ ID NO: 2051848 - RNA, 19 nt, Homo sapiens
  misc_RNA (1)...(19): siRNA sense strand
caacucaugccuugcacua

SEQ ID NO: 2051849 - RNA, 19 nt, Homo sapiens
  misc_RNA (1)...(19): siRNA sense strand
gagagaaaggauauaaaug

SEQ ID NO: 2051850 - RNA, 19 nt, Homo sapiens
  misc_RNA (1)...(19): siRNA sense strand
aaacaucagcuuggauuaa

SEQ ID NO: 2051851 - RNA, 19 nt, Homo sapiens
  misc_RNA (1)...(19): siRNA sense strand
ggagagaaaccuuacacau

SEQ ID NO: 2051852 - RNA, 19 nt, Homo sapiens
  misc_RNA (1)...(19): siRNA sense strand
gaaugugacagaaguuuca

SEQ ID NO: 2051853 - RNA, 19 nt, Homo sapiens
  misc_RNA (1)...(19): siRNA sense strand
uaaugaaugugacagaagu

SEQ ID NO: 2051854 - RNA, 19 nt, Homo sapiens
  misc_RNA (1)...(19): siRNA sense strand
agagaaaccauacaaaugu

SEQ ID NO: 2051855 - RNA, 19 nt, Homo sapiens
  misc_RNA (1)...(19): siRNA sense strand
guaacuguguaaucaagga

SEQ ID NO: 2051856 - RNA, 19 nt, Homo sapiens
  misc_RNA (1)...(19): siRNA sense strand
aaacucauauuggagagaa

SEQ ID NO: 2051857 - RNA, 19 nt, Homo sapiens
  misc_RNA (1)...(19): siRNA sense strand
gaagguaacccaggagaag

SEQ ID NO: 2051858 - RNA, 19 nt, Homo sapiens
  misc_RNA (1)...(19): siRNA sense strand
cuucagacaucaaauuauc

SEQ ID NO: 2051859 - RNA, 19 nt, Homo sapiens
  misc_RNA (1)...(19): siRNA sense strand
gacaucagauaauccauac

SEQ ID NO: 2051860 - RNA, 19 nt, Homo sapiens
  misc_RNA (1)...(19): siRNA sense strand
gugguaaagucuucaguca

SEQ ID NO: 2051861 - RNA, 19 nt, Homo sapiens
  misc_RNA (1)...(19): siRNA sense strand
cgacaaagccuugaaucau

SEQ ID NO: 2051862 - RNA, 19 nt, Homo sapiens
  misc_RNA (1)...(19): siRNA sense strand
ugagaagucugucaaccau

SEQ ID NO: 2051863 - RNA, 19 nt, Homo sapiens
  misc_RNA (1)...(19): siRNA sense strand
guaaccauguugagaaguc

SEQ ID NO: 2051864 - RNA, 19 nt, Homo sapiens
  misc_RNA (1)...(19): siRNA sense strand
gaauguaaccauguugaga

SEQ ID NO: 2051865 - RNA, 19 nt, Homo sapiens
  misc_RNA (1)...(19): siRNA sense strand
uagaagagguauaggaaac

SEQ ID NO: 2051866 - RNA, 19 nt, Homo sapiens
  misc_RNA (1)...(19): siRNA sense strand
gaguguggcaaauccuuua

SEQ ID NO: 2051867 - RNA, 19 nt, Homo sapiens
  misc_RNA (1)...(19): siRNA sense strand
gggagaaaccauacaagug

SEQ ID NO: 2051868 - RNA, 19 nt, Homo sapiens
  misc_RNA (1)...(19): siRNA sense strand
auacagggaugugauguug

SEQ ID NO: 2051869 - RNA, 19 nt, Homo sapiens
  misc_RNA (1)...(19): siRNA sense strand
gauuucaucuguucuucau

SEQ ID NO: 2051870 - RNA, 19 nt, Homo sapiens
  misc_RNA (1)...(19): siRNA sense strand
ggcaagaaaccuuacaaau

SEQ ID NO: 2051871 - RNA, 19 nt, Homo sapiens
  misc_RNA (1)...(19): siRNA sense strand
gaugaaagaaauugcaaca

SEQ ID NO: 2051872 - RNA, 19 nt, Homo sapiens
  misc_RNA (1)...(19): siRNA sense strand
agacaucagauaauccaua

SEQ ID NO: 2051873 - RNA, 19 nt, Homo sapiens
  misc_RNA (1)...(19): siRNA sense strand
ucagaaaacucauauugga

SEQ ID NO: 2051874 - RNA, 19 nt, Homo sapiens
  misc_RNA (1)...(19): siRNA sense strand
ugccugaacucuacacaga

SEQ ID NO: 2051875 - RNA, 19 nt, Homo sapiens
  misc_RNA (1)...(19): siRNA sense strand
ggaacuagcaccacaacag

SEQ ID NO: 2051876 - RNA, 19 nt, Homo sapiens
  misc_RNA (1)...(19): siRNA sense strand
cacaagaacagaaaucaug

SEQ ID NO: 2051877 - RNA, 19 nt, Homo sapiens
  misc_RNA (1)...(19): siRNA sense strand
aacaugacauugaagaguu

SEQ ID NO: 2051878 - RNA, 19 nt, Homo sapiens
  misc_RNA (1)...(19): siRNA sense strand
ugaaugugguaaagucuuc

SEQ ID NO: 2051879 - RNA, 19 nt, Homo sapiens
  misc_RNA (1)...(19): siRNA sense strand
guggcaaggucuuuaguca

SEQ ID NO: 2051880 - RNA, 19 nt, Homo sapiens
  misc_RNA (1)...(19): siRNA sense strand
guacgucagguaagucauu

SEQ ID NO: 2051881 - RNA, 19 nt, Homo sapiens
  misc_RNA (1)...(19): siRNA sense strand
gagaaguauuccacacagu

SEQ ID NO: 2051882 - RNA, 19 nt, Homo sapiens
  misc_RNA (1)...(19): siRNA sense strand
gagaaaccuuacaaaugca

SEQ ID NO: 2051883 - RNA, 19 nt, Homo sapiens
  misc_RNA (1)...(19): siRNA sense strand
guaagucauucuggagaga

SEQ ID NO: 2051884 - RNA, 19 nt, Homo sapiens
  misc_RNA (1)...(19): siRNA sense strand
cuucauuacucacacaaga

SEQ ID NO: 2051885 - RNA, 19 nt, Homo sapiens
  misc_RNA (1)...(19): siRNA sense strand
uaaacaucagcuuggauua

SEQ ID NO: 2051886 - RNA, 19 nt, Homo sapiens
  misc_RNA (1)...(19): siRNA sense strand
gagaugaugaaagaaauug

SEQ ID NO: 2051887 - RNA, 19 nt, Homo sapiens
  misc_RNA (1)...(19): siRNA sense strand
gcacuacaucggagaguuc

SEQ ID NO: 2051888 - RNA, 19 nt, Homo sapiens
  misc_RNA (1)...(19): siRNA sense strand
acacagaggacuuuauaca

SEQ ID NO: 2051889 - RNA, 19 nt, Homo sapiens
  misc_RNA (1)...(19): siRNA sense strand
ugaagaagcuugucuaugu

SEQ ID NO: 2051890 - RNA, 19 nt, Homo sapiens
  misc_RNA (1)...(19): siRNA sense strand
gauugcaccugaugucuua

SEQ ID NO: 2051891 - RNA, 19 nt, Homo sapiens
  misc_RNA (1)...(19): siRNA sense strand
caaaccagcuccagucuug

SEQ ID NO: 2051892 - RNA, 19 nt, Homo sapiens
  misc_RNA (1)...(19): siRNA sense strand
ugaaugagaucacagagaa

SEQ ID NO: 2051893 - RNA, 19 nt, Homo sapiens
  misc_RNA (1)...(19): siRNA sense strand
caacaaggauucucucaag

SEQ ID NO: 2051894 - RNA, 19 nt, Homo sapiens
  misc_RNA (1)...(19): siRNA sense strand
ugaagaacguggccuguaa

SEQ ID NO: 2051895 - RNA, 19 nt, Homo sapiens
  misc_RNA (1)...(19): siRNA sense strand
gaacgaaucccuacuagag

SEQ ID NO: 2051896 - RNA, 19 nt, Homo sapiens
  misc_RNA (1)...(19): siRNA sense strand
ugaccaaccuggccaauga

SEQ ID NO: 2051897 - RNA, 19 nt, Homo sapiens
  misc_RNA (1)...(19): siRNA sense strand
caacauuccuacuguccua

SEQ ID NO: 2051898 - RNA, 19 nt, Homo sapiens
  misc_RNA (1)...(19): siRNA sense strand
gaccagaacuaugauauuc

SEQ ID NO: 2051899 - RNA, 19 nt, Homo sapiens
  misc_RNA (1)...(19): siRNA sense strand
gaugcuagcuaucaaggaa

SEQ ID NO: 2051900 - RNA, 19 nt, Homo sapiens
  misc_RNA (1)...(19): siRNA sense strand
gaagaagcuugucuaugug

SEQ ID NO: 2051901 - RNA, 19 nt, Homo sapiens
  misc_RNA (1)...(19): siRNA sense strand
uggcaaagcuuacagacaa

SEQ ID NO: 2051902 - RNA, 19 nt, Homo sapiens
  misc_RNA (1)...(19): siRNA sense strand
gcagugaguccgacaauga

SEQ ID NO: 2051903 - RNA, 19 nt, Homo sapiens
  misc_RNA (1)...(19): siRNA sense strand
ccaaauaugaccagaacua

SEQ ID NO: 2051904 - RNA, 19 nt, Homo sapiens
  misc_RNA (1)...(19): siRNA sense strand
gaacguggccuguaagaac

SEQ ID NO: 2051905 - RNA, 19 nt, Homo sapiens
  misc_RNA (1)...(19): siRNA sense strand
guaagaacauagaggugaa

SEQ ID NO: 2051906 - RNA, 19 nt, Homo sapiens
  misc_RNA (1)...(19): siRNA sense strand
ugauagaagucauugagaa

SEQ ID NO: 2051907 - RNA, 19 nt, Homo sapiens
  misc_RNA (1)...(19): siRNA sense strand
ccaagcugcugacccagua

SEQ ID NO: 2051908 - RNA, 19 nt, Homo sapiens
  misc_RNA (1)...(19): siRNA sense strand
caccugaugucuuaagaaa

SEQ ID NO: 2051909 - RNA, 19 nt, Homo sapiens
  misc_RNA (1)...(19): siRNA sense strand
gaacauagaggugaagaag

SEQ ID NO: 2051910 - RNA, 19 nt, Homo sapiens
  misc_RNA (1)...(19): siRNA sense strand
gagagugaaucggacagua

SEQ ID NO: 2051911 - RNA, 19 nt, Homo sapiens
  misc_RNA (1)...(19): siRNA sense strand
gcaucgaccugauucacaa

SEQ ID NO: 2051912 - RNA, 19 nt, Homo sapiens
  misc_RNA (1)...(19): siRNA sense strand
gaggaaagaaugcuucaga

SEQ ID NO: 2051913 - RNA, 19 nt, Homo sapiens
  misc_RNA (1)...(19): siRNA sense strand
ggaugaggaugaggagaaa

SEQ ID NO: 2051914 - RNA, 19 nt, Homo sapiens
  misc_RNA (1)...(19): siRNA sense strand
guaagaggaagacaaagaa

SEQ ID NO: 2051915 - RNA, 19 nt, Homo sapiens
  misc_RNA (1)...(19): siRNA sense strand
gaagagaaaggagaaggaa

SEQ ID NO: 2051916 - RNA, 19 nt, Homo sapiens
  misc_RNA (1)...(19): siRNA sense strand
gaaagcugaugggcaugaa

SEQ ID NO: 2051917 - RNA, 19 nt, Homo sapiens
  misc_RNA (1)...(19): siRNA sense strand
gcaucagcauccaagaauu

SEQ ID NO: 2051918 - RNA, 19 nt, Homo sapiens
  misc_RNA (1)...(19): siRNA sense strand
gguaagaggaagacaaaga

SEQ ID NO: 2051919 - RNA, 19 nt, Homo sapiens
  misc_RNA (1)...(19): siRNA sense strand
caucagcauccaagaauuu

SEQ ID NO: 2051920 - RNA, 19 nt, Homo sapiens
  misc_RNA (1)...(19): siRNA sense strand
gaagaaggugccagagaga

SEQ ID NO: 2051921 - RNA, 19 nt, Homo sapiens
  misc_RNA (1)...(19): siRNA sense strand
aauaugaccagaacuauga

SEQ ID NO: 2051922 - RNA, 19 nt, Homo sapiens
  misc_RNA (1)...(19): siRNA sense strand
ggagagaucaucaaacacu

SEQ ID NO: 2051923 - RNA, 19 nt, Homo sapiens
  misc_RNA (1)...(19): siRNA sense strand
gcugguaaaggaugugaua

SEQ ID NO: 2051924 - RNA, 19 nt, Homo sapiens
  misc_RNA (1)...(19): siRNA sense strand
gagagaucaucaaacacuu

SEQ ID NO: 2051925 - RNA, 19 nt, Homo sapiens
  misc_RNA (1)...(19): siRNA sense strand
ccagaacgaaucccuacua

SEQ ID NO: 2051926 - RNA, 19 nt, Homo sapiens
  misc_RNA (1)...(19): siRNA sense strand
agucaguggucgucauuaa

SEQ ID NO: 2051927 - RNA, 19 nt, Homo sapiens
  misc_RNA (1)...(19): siRNA sense strand
ggagaggcagugagaguga

SEQ ID NO: 2051928 - RNA, 19 nt, Homo sapiens
  misc_RNA (1)...(19): siRNA sense strand
caacauggagagaucauca

SEQ ID NO: 2051929 - RNA, 19 nt, Homo sapiens
  misc_RNA (1)...(19): siRNA sense strand
ggaauuccagaccuauauu

SEQ ID NO: 2051930 - RNA, 19 nt, Homo sapiens
  misc_RNA (1)...(19): siRNA sense strand
gagaagcgucauccucuga

SEQ ID NO: 2051931 - RNA, 19 nt, Homo sapiens
  misc_RNA (1)...(19): siRNA sense strand
caaaucgggagaagagaaa

SEQ ID NO: 2051932 - RNA, 19 nt, Homo sapiens
  misc_RNA (1)...(19): siRNA sense strand
gggaauuccagaccuauau

SEQ ID NO: 2051933 - RNA, 19 nt, Homo sapiens
  misc_RNA (1)...(19): siRNA sense strand
gaucacagagaaacucaug

SEQ ID NO: 2051934 - RNA, 19 nt, Homo sapiens
  misc_RNA (1)...(19): siRNA sense strand
ggccaaauaugaccagaac

SEQ ID NO: 2051935 - RNA, 19 nt, Homo sapiens
  misc_RNA (1)...(19): siRNA sense strand
agaccaacauuccuacugu

SEQ ID NO: 2051936 - RNA, 19 nt, Homo sapiens
  misc_RNA (1)...(19): siRNA sense strand
cgugacaccugccucaaug

SEQ ID NO: 2051937 - RNA, 19 nt, Homo sapiens
  misc_RNA (1)...(19): siRNA sense strand
gcucaaaucgggagaagag

SEQ ID NO: 2051938 - RNA, 19 nt, Homo sapiens
  misc_RNA (1)...(19): siRNA sense strand
gguaaaggaugugauacag

SEQ ID NO: 2051939 - RNA, 19 nt, Homo sapiens
  misc_RNA (1)...(19): siRNA sense strand
ggaaagcugaugggcauga

SEQ ID NO: 2051940 - RNA, 19 nt, Homo sapiens
  misc_RNA (1)...(19): siRNA sense strand
acagugacccugagucuga

SEQ ID NO: 2051941 - RNA, 19 nt, Homo sapiens
  misc_RNA (1)...(19): siRNA sense strand
cagaacgaaucccuacuag

SEQ ID NO: 2051942 - RNA, 19 nt, Homo sapiens
  misc_RNA (1)...(19): siRNA sense strand
ucaaagaccgggaccacuu

SEQ ID NO: 2051943 - RNA, 19 nt, Homo sapiens
  misc_RNA (1)...(19): siRNA sense strand
cagcagaggaggauauugu

SEQ ID NO: 2051944 - RNA, 19 nt, Homo sapiens
  misc_RNA (1)...(19): siRNA sense strand
uaagaaauugcuacagaug

SEQ ID NO: 2051945 - RNA, 19 nt, Homo sapiens
  misc_RNA (1)...(19): siRNA sense strand
guaccugaauggaccaagu

SEQ ID NO: 2051946 - RNA, 19 nt, Homo sapiens
  misc_RNA (1)...(19): siRNA sense strand
caaauaugaccagaacuau

SEQ ID NO: 2051947 - RNA, 19 nt, Homo sapiens
  misc_RNA (1)...(19): siRNA sense strand
agaaauugcuacagaugca

SEQ ID NO: 2051948 - RNA, 19 nt, Homo sapiens
  misc_RNA (1)...(19): siRNA sense strand
ggucgucauuaagaaauug

SEQ ID NO: 2051949 - RNA, 19 nt, Homo sapiens
  misc_RNA (1)...(19): siRNA sense strand
gcaugaaugagaucacaga

SEQ ID NO: 2051950 - RNA, 19 nt, Homo sapiens
  misc_RNA (1)...(19): siRNA sense strand
gggcaugaaugagaucaca

SEQ ID NO: 2051951 - RNA, 19 nt, Homo sapiens
  misc_RNA (1)...(19): siRNA sense strand
gauagaagucauugagaag

SEQ ID NO: 2051952 - RNA, 19 nt, Homo sapiens
  misc_RNA (1)...(19): siRNA sense strand
agaggaagacaaagaagaa

SEQ ID NO: 2051953 - RNA, 19 nt, Homo sapiens
  misc_RNA (1)...(19): siRNA sense strand
gagaggcagugagagugaa

SEQ ID NO: 2051954 - RNA, 19 nt, Homo sapiens
  misc_RNA (1)...(19): siRNA sense strand
gaaugcuucagaccuguuu

SEQ ID NO: 2051955 - RNA, 19 nt, Homo sapiens
  misc_RNA (1)...(19): siRNA sense strand
ggagucauccuucaaagac

SEQ ID NO: 2051956 - RNA, 19 nt, Homo sapiens
  misc_RNA (1)...(19): siRNA sense strand
caucauagugcccaucaug

SEQ ID NO: 2051957 - RNA, 19 nt, Homo sapiens
  misc_RNA (1)...(19): siRNA sense strand
gaugauugcccgaggaaag

SEQ ID NO: 2051958 - RNA, 19 nt, Homo sapiens
  misc_RNA (1)...(19): siRNA sense strand
caacguggagguaccugaa

SEQ ID NO: 2051959 - RNA, 19 nt, Homo sapiens
  misc_RNA (1)...(19): siRNA sense strand
ugcugagucuggccaaaua

SEQ ID NO: 2051960 - RNA, 19 nt, Homo sapiens
  misc_RNA (1)...(19): siRNA sense strand
auggagagaucaucaaaca

SEQ ID NO: 2051961 - RNA, 19 nt, Homo sapiens
  misc_RNA (1)...(19): siRNA sense strand
acauagaggugaagaagcu

SEQ ID NO: 2051962 - RNA, 19 nt, Homo sapiens
  misc_RNA (1)...(19): siRNA sense strand
gaaugagaucacagagaaa

SEQ ID NO: 2051963 - RNA, 19 nt, Homo sapiens
  misc_RNA (1)...(19): siRNA sense strand
ggaagacaaagaagaaggu

SEQ ID NO: 2051964 - RNA, 19 nt, Homo sapiens
  misc_RNA (1)...(19): siRNA sense strand
acaaugaagaccaggauga

SEQ ID NO: 2051965 - RNA, 19 nt, Homo sapiens
  misc_RNA (1)...(19): siRNA sense strand
aguaagagcagcagugaga

SEQ ID NO: 2051966 - RNA, 19 nt, Homo sapiens
  misc_RNA (1)...(19): siRNA sense strand
gggagaagagaaaggagaa

SEQ ID NO: 2051967 - RNA, 19 nt, Homo sapiens
  misc_RNA (1)...(19): siRNA sense strand
gaagccgccucggacaugu

SEQ ID NO: 2051968 - RNA, 19 nt, Homo sapiens
  misc_RNA (1)...(19): siRNA sense strand
ccgaaagcccuaugucaug

SEQ ID NO: 2051969 - RNA, 19 nt, Homo sapiens
  misc_RNA (1)...(19): siRNA sense strand
gcuguggacuacaccuuca

SEQ ID NO: 2051970 - RNA, 19 nt, Homo sapiens
  misc_RNA (1)...(19): siRNA sense strand
agcaguagcucaucagagu

SEQ ID NO: 2051971 - RNA, 19 nt, Homo sapiens
  misc_RNA (1)...(19): siRNA sense strand
gcaccugaugucuuaagaa

SEQ ID NO: 2051972 - RNA, 19 nt, Homo sapiens
  misc_RNA (1)...(19): siRNA sense strand
ucaguggucgucauuaaga

SEQ ID NO: 2051973 - RNA, 19 nt, Homo sapiens
  misc_RNA (1)...(19): siRNA sense strand
acagugaggugcaguacgu

SEQ ID NO: 2051974 - RNA, 19 nt, Homo sapiens
  misc_RNA (1)...(19): siRNA sense strand
gaaucugccacugcuguaa

SEQ ID NO: 2051975 - RNA, 19 nt, Homo sapiens
  misc_RNA (1)...(19): siRNA sense strand
agagugaggaggaugguaa

SEQ ID NO: 2051976 - RNA, 19 nt, Homo sapiens
  misc_RNA (1)...(19): siRNA sense strand
agagugaaucggacaguaa

SEQ ID NO: 2051977 - RNA, 19 nt, Homo sapiens
  misc_RNA (1)...(19): siRNA sense strand
ucacugucccaccugcuua

SEQ ID NO: 2051978 - RNA, 19 nt, Homo sapiens
  misc_RNA (1)...(19): siRNA sense strand
ugaccagaacuaugauauu

SEQ ID NO: 2051979 - RNA, 19 nt, Homo sapiens
  misc_RNA (1)...(19): siRNA sense strand
aaacacuuggcaaagcuua

SEQ ID NO: 2051980 - RNA, 19 nt, Homo sapiens
  misc_RNA (1)...(19): siRNA sense strand
cagcauggacaaggacuuu

SEQ ID NO: 2051981 - RNA, 19 nt, Homo sapiens
  misc_RNA (1)...(19): siRNA sense strand
ugcuugaucuagaggauuu

SEQ ID NO: 2051982 - RNA, 19 nt, Homo sapiens
  misc_RNA (1)...(19): siRNA sense strand
aaagggagaggcagugaga

SEQ ID NO: 2051983 - RNA, 19 nt, Homo sapiens
  misc_RNA (1)...(19): siRNA sense strand
ucaaaucgggagaagagaa

SEQ ID NO: 2051984 - RNA, 19 nt, Homo sapiens
  misc_RNA (1)...(19): siRNA sense strand
gcagaggaggauauuguca

SEQ ID NO: 2051985 - RNA, 19 nt, Homo sapiens
  misc_RNA (1)...(19): siRNA sense strand
gcagccagcacaacaugga

SEQ ID NO: 2051986 - RNA, 19 nt, Homo sapiens
  misc_RNA (1)...(19): siRNA sense strand
cugaccaacucuaaacaga

SEQ ID NO: 2051987 - RNA, 19 nt, Homo sapiens
  misc_RNA (1)...(19): siRNA sense strand
gaugguaagaggaagacaa

SEQ ID NO: 2051988 - RNA, 19 nt, Homo sapiens
  misc_RNA (1)...(19): siRNA sense strand
gaagaacguggccuguaag

SEQ ID NO: 2051989 - RNA, 19 nt, Homo sapiens
  misc_RNA (1)...(19): siRNA sense strand
ugaaagggcugccgacuuc

SEQ ID NO: 2051990 - RNA, 19 nt, Homo sapiens
  misc_RNA (1)...(19): siRNA sense strand
ccucagcgcuuacuuugaa

SEQ ID NO: 2051991 - RNA, 19 nt, Homo sapiens
  misc_RNA (1)...(19): siRNA sense strand
caacaccaaugccaacuuc

SEQ ID NO: 2051992 - RNA, 19 nt, Homo sapiens
  misc_RNA (1)...(19): siRNA sense strand
ucacauaccugggcaucaa

SEQ ID NO: 2051993 - RNA, 19 nt, Homo sapiens
  misc_RNA (1)...(19): siRNA sense strand
gaagauggacgucaagucu

SEQ ID NO: 2051994 - RNA, 19 nt, Homo sapiens
  misc_RNA (1)...(19): siRNA sense strand
caaccucagcgcuuacuuu

SEQ ID NO: 2051995 - RNA, 19 nt, Homo sapiens
  misc_RNA (1)...(19): siRNA sense strand
ggcagaagauggacgucaa

SEQ ID NO: 2051996 - RNA, 19 nt, Homo sapiens
  misc_RNA (1)...(19): siRNA sense strand
ccagcucaaugacagacua

SEQ ID NO: 2051997 - RNA, 19 nt, Homo sapiens
  misc_RNA (1)...(19): siRNA sense strand
guuaucgccuaccucauga

SEQ ID NO: 2051998 - RNA, 19 nt, Homo sapiens
  misc_RNA (1)...(19): siRNA sense strand
caaggacuccggcaucaca

SEQ ID NO: 2051999 - RNA, 19 nt, Homo sapiens
  misc_RNA (1)...(19): siRNA sense strand
caucaaggccaacgacaca

SEQ ID NO: 2052000 - RNA, 19 nt, Homo sapiens
  misc_RNA (1)...(19): siRNA sense strand
ccaaugccaacuucuacaa

SEQ ID NO: 2052001 - RNA, 19 nt, Homo sapiens
  misc_RNA (1)...(19): siRNA sense strand
acaccaaugccaacuucua

SEQ ID NO: 2052002 - RNA, 19 nt, Homo sapiens
  misc_RNA (1)...(19): siRNA sense strand
caacgacacacaggaguuc

SEQ ID NO: 2052003 - RNA, 19 nt, Homo sapiens
  misc_RNA (1)...(19): siRNA sense strand
uacaaggacuccggcauca

SEQ ID NO: 2052004 - RNA, 19 nt, Homo sapiens
  misc_RNA (1)...(19): siRNA sense strand
ugaccaggcuuuggcucaa

SEQ ID NO: 2052005 - RNA, 19 nt, Homo sapiens
  misc_RNA (1)...(19): siRNA sense strand
gcugagggcagguccuuca

SEQ ID NO: 2052006 - RNA, 19 nt, Homo sapiens
  misc_RNA (1)...(19): siRNA sense strand
gggcugccgacuucauuga

SEQ ID NO: 2052007 - RNA, 19 nt, Homo sapiens
  misc_RNA (1)...(19): siRNA sense strand
ucaugcacgucaacaccaa

SEQ ID NO: 2052008 - RNA, 19 nt, Homo sapiens
  misc_RNA (1)...(19): siRNA sense strand
ggacuccggcaucacauac

SEQ ID NO: 2052009 - RNA, 19 nt, Homo sapiens
  misc_RNA (1)...(19): siRNA sense strand
ccaacgacacacaggaguu

SEQ ID NO: 2052010 - RNA, 19 nt, Homo sapiens
  misc_RNA (1)...(19): siRNA sense strand
aguucaaccucagcgcuua

SEQ ID NO: 2052011 - RNA, 19 nt, Homo sapiens
  misc_RNA (1)...(19): siRNA sense strand
gcagaagauggacgucaag

SEQ ID NO: 2052012 - RNA, 19 nt, Homo sapiens
  misc_RNA (1)...(19): siRNA sense strand
ccacagaccuggaguauga

SEQ ID NO: 2052013 - RNA, 19 nt, Homo sapiens
  misc_RNA (1)...(19): siRNA sense strand
gcaagaacaucuaccugaa

SEQ ID NO: 2052014 - RNA, 19 nt, Homo sapiens
  misc_RNA (1)...(19): siRNA sense strand
gcaaguacgugguggacaa

SEQ ID NO: 2052015 - RNA, 19 nt, Homo sapiens
  misc_RNA (1)...(19): siRNA sense strand
agaaggagguggacuuuga

SEQ ID NO: 2052016 - RNA, 19 nt, Homo sapiens
  misc_RNA (1)...(19): siRNA sense strand
ggacacgucugugcucuuc

SEQ ID NO: 2052017 - RNA, 19 nt, Homo sapiens
  misc_RNA (1)...(19): siRNA sense strand
gagccacgccgaccucuuu

SEQ ID NO: 2052018 - RNA, 19 nt, Homo sapiens
  misc_RNA (1)...(19): siRNA sense strand
aggagaagguggccuauga

SEQ ID NO: 2052019 - RNA, 19 nt, Homo sapiens
  misc_RNA (1)...(19): siRNA sense strand
ggacucagacuccgacuca

SEQ ID NO: 2052020 - RNA, 19 nt, Homo sapiens
  misc_RNA (1)...(19): siRNA sense strand
ggaaggacaagaccaagga

SEQ ID NO: 2052021 - RNA, 19 nt, Homo sapiens
  misc_RNA (1)...(19): siRNA sense strand
gagaagacgccaagaccaa

SEQ ID NO: 2052022 - RNA, 19 nt, Homo sapiens
  misc_RNA (1)...(19): siRNA sense strand
ccaccaccaucaucccuaa

SEQ ID NO: 2052023 - RNA, 19 nt, Homo sapiens
  misc_RNA (1)...(19): siRNA sense strand
gggauggcguccaagacua

SEQ ID NO: 2052024 - RNA, 19 nt, Homo sapiens
  misc_RNA (1)...(19): siRNA sense strand
ggaaagcccgcucacuaga

SEQ ID NO: 2052025 - RNA, 19 nt, Homo sapiens
  misc_RNA (1)...(19): siRNA sense strand
gggacgaggaguguuauua

SEQ ID NO: 2052026 - RNA, 19 nt, Homo sapiens
  misc_RNA (1)...(19): siRNA sense strand
ggagaaggagguggacuuu

SEQ ID NO: 2052027 - RNA, 19 nt, Homo sapiens
  misc_RNA (1)...(19): siRNA sense strand
ggacuacaacaccagguuu

SEQ ID NO: 2052028 - RNA, 19 nt, Homo sapiens
  misc_RNA (1)...(19): siRNA sense strand
cggcagccacggccuauua

SEQ ID NO: 2052029 - RNA, 19 nt, Homo sapiens
  misc_RNA (1)...(19): siRNA sense strand
aagaacaucuaccugaaug

SEQ ID NO: 2052030 - RNA, 19 nt, Homo sapiens
  misc_RNA (1)...(19): siRNA sense strand
ccaaggaagagaagaguga

SEQ ID NO: 2052031 - RNA, 19 nt, Homo sapiens
  misc_RNA (1)...(19): siRNA sense strand
cgaggagugucucaaguuc

SEQ ID NO: 2052032 - RNA, 19 nt, Homo sapiens
  misc_RNA (1)...(19): siRNA sense strand
gcccggaugugcuggaguu

SEQ ID NO: 2052033 - RNA, 19 nt, Homo sapiens
  misc_RNA (1)...(19): siRNA sense strand
gaugcaagguucucagacu

SEQ ID NO: 2052034 - RNA, 19 nt, Homo sapiens
  misc_RNA (1)...(19): siRNA sense strand
ggacgaggaguguuauuac

SEQ ID NO: 2052035 - RNA, 19 nt, Homo sapiens
  misc_RNA (1)...(19): siRNA sense strand
cggaagggaccaagaagaa

SEQ ID NO: 2052036 - RNA, 19 nt, Homo sapiens
  misc_RNA (1)...(19): siRNA sense strand
cgugaagaccuuugagaaa

SEQ ID NO: 2052037 - RNA, 19 nt, Homo sapiens
  misc_RNA (1)...(19): siRNA sense strand
gggcggauguggacuacuc

SEQ ID NO: 2052038 - RNA, 19 nt, Homo sapiens
  misc_RNA (1)...(19): siRNA sense strand
caagaacaucuaccugaau

SEQ ID NO: 2052039 - RNA, 19 nt, Homo sapiens
  misc_RNA (1)...(19): siRNA sense strand
cacaguccauccuuacaga

SEQ ID NO: 2052040 - RNA, 19 nt, Homo sapiens
  misc_RNA (1)...(19): siRNA sense strand
ggaaccucauggccgacua

SEQ ID NO: 2052041 - RNA, 19 nt, Homo sapiens
  misc_RNA (1)...(19): siRNA sense strand
guccauccuuacagaguuu

SEQ ID NO: 2052042 - RNA, 19 nt, Homo sapiens
  misc_RNA (1)...(19): siRNA sense strand
gaagcucugugaccccuuu

SEQ ID NO: 2052043 - RNA, 19 nt, Homo sapiens
  misc_RNA (1)...(19): siRNA sense strand
gaucuggaagguucgagaa

SEQ ID NO: 2052044 - RNA, 19 nt, Homo sapiens
  misc_RNA (1)...(19): siRNA sense strand
gaucauccaggacaaugug

SEQ ID NO: 2052045 - RNA, 19 nt, Homo sapiens
  misc_RNA (1)...(19): siRNA sense strand
ggaaaacccaagaagaaaa

SEQ ID NO: 2052046 - RNA, 19 nt, Homo sapiens
  misc_RNA (1)...(19): siRNA sense strand
ggacaagaccaaggacaag

SEQ ID NO: 2052047 - RNA, 19 nt, Homo sapiens
  misc_RNA (1)...(19): siRNA sense strand
caucaucccuaagcgaauc

SEQ ID NO: 2052048 - RNA, 19 nt, Homo sapiens
  misc_RNA (1)...(19): siRNA sense strand
cggaugugcuggaguugga

SEQ ID NO: 2052049 - RNA, 19 nt, Homo sapiens
  misc_RNA (1)...(19): siRNA sense strand
aggaccagcucaaggagaa

SEQ ID NO: 2052050 - RNA, 19 nt, Homo sapiens
  misc_RNA (1)...(19): siRNA sense strand
gacagaucauccaggacaa

SEQ ID NO: 2052051 - RNA, 19 nt, Homo sapiens
  misc_RNA (1)...(19): siRNA sense strand
ccacuggccuucgacuaca

SEQ ID NO: 2052052 - RNA, 19 nt, Homo sapiens
  misc_RNA (1)...(19): siRNA sense strand
ccauagagaaggcacugaa

SEQ ID NO: 2052053 - RNA, 19 nt, Homo sapiens
  misc_RNA (1)...(19): siRNA sense strand
ugaacacccucaagaagcu

SEQ ID NO: 2052054 - RNA, 19 nt, Homo sapiens
  misc_RNA (1)...(19): siRNA sense strand
gcggugcccuggaauacgu

SEQ ID NO: 2052055 - RNA, 19 nt, Homo sapiens
  misc_RNA (1)...(19): siRNA sense strand
cgcccacaguccauccuua

SEQ ID NO: 2052056 - RNA, 19 nt, Homo sapiens
  misc_RNA (1)...(19): siRNA sense strand
gggccgacccugagaucaa

SEQ ID NO: 2052057 - RNA, 19 nt, Homo sapiens
  misc_RNA (1)...(19): siRNA sense strand
ucuggaagguucgagaaga

SEQ ID NO: 2052058 - RNA, 19 nt, Homo sapiens
  misc_RNA (1)...(19): siRNA sense strand
aagagaagagugaggagaa

SEQ ID NO: 2052059 - RNA, 19 nt, Homo sapiens
  misc_RNA (1)...(19): siRNA sense strand
gaggagugccugcggaucu

SEQ ID NO: 2052060 - RNA, 19 nt, Homo sapiens
  misc_RNA (1)...(19): siRNA sense strand
gaagcuaguggagcggaaa

SEQ ID NO: 2052061 - RNA, 19 nt, Homo sapiens
  misc_RNA (1)...(19): siRNA sense strand
gcccuggacugcgagaugu

SEQ ID NO: 2052062 - RNA, 19 nt, Homo sapiens
  misc_RNA (1)...(19): siRNA sense strand
acucggcccuggagaagga

SEQ ID NO: 2052063 - RNA, 19 nt, Homo sapiens
  misc_RNA (1)...(19): siRNA sense strand
gaaagcccgcucacuagac

SEQ ID NO: 2052064 - RNA, 19 nt, Homo sapiens
  misc_RNA (1)...(19): siRNA sense strand
uuaaagaaacccauuaucc

SEQ ID NO: 2052065 - RNA, 19 nt, Homo sapiens
  misc_RNA (1)...(19): siRNA sense strand
gcagccacccuccaaagag

SEQ ID NO: 2052066 - RNA, 19 nt, Homo sapiens
  misc_RNA (1)...(19): siRNA sense strand
ccuuacagaguuuaaagaa

SEQ ID NO: 2052067 - RNA, 19 nt, Homo sapiens
  misc_RNA (1)...(19): siRNA sense strand
cggaaagcccgcucacuag

SEQ ID NO: 2052068 - RNA, 19 nt, Homo sapiens
  misc_RNA (1)...(19): siRNA sense strand
acacaccugcucccaagaa

SEQ ID NO: 2052069 - RNA, 19 nt, Homo sapiens
  misc_RNA (1)...(19): siRNA sense strand
ggaagggaccaagaagaag

SEQ ID NO: 2052070 - RNA, 19 nt, Homo sapiens
  misc_RNA (1)...(19): siRNA sense strand
gagaaggagguggacuuug

SEQ ID NO: 2052071 - RNA, 19 nt, Homo sapiens
  misc_RNA (1)...(19): siRNA sense strand
gggcagaagaggaggaucu

SEQ ID NO: 2052072 - RNA, 19 nt, Homo sapiens
  misc_RNA (1)...(19): siRNA sense strand
gcgaugcaagguucucaga

SEQ ID NO: 2052073 - RNA, 19 nt, Homo sapiens
  misc_RNA (1)...(19): siRNA sense strand
ggcagccacggccuauuaa

SEQ ID NO: 2052074 - RNA, 19 nt, Homo sapiens
  misc_RNA (1)...(19): siRNA sense strand
ggccggaagggaccaagaa

SEQ ID NO: 2052075 - RNA, 19 nt, Homo sapiens
  misc_RNA (1)...(19): siRNA sense strand
ggcagccacccuccaaaga

SEQ ID NO: 2052076 - RNA, 19 nt, Homo sapiens
  misc_RNA (1)...(19): siRNA sense strand
gggagacccaguacaugug

SEQ ID NO: 2052077 - RNA, 19 nt, Homo sapiens
  misc_RNA (1)...(19): siRNA sense strand
gccgugaacacccucaaga

SEQ ID NO: 2052078 - RNA, 19 nt, Homo sapiens
  misc_RNA (1)...(19): siRNA sense strand
uagagaaggcacugaacga

SEQ ID NO: 2052079 - RNA, 19 nt, Homo sapiens
  misc_RNA (1)...(19): siRNA sense strand
ccaggaggccauagagaag

SEQ ID NO: 2052080 - RNA, 19 nt, Homo sapiens
  misc_RNA (1)...(19): siRNA sense strand
gagugucucaaguucugua

SEQ ID NO: 2052081 - RNA, 19 nt, Homo sapiens
  misc_RNA (1)...(19): siRNA sense strand
gcugaaaacacgcacauug

SEQ ID NO: 2052082 - RNA, 19 nt, Homo sapiens
  misc_RNA (1)...(19): siRNA sense strand
gacccucucuccaacuacu

SEQ ID NO: 2052083 - RNA, 19 nt, Homo sapiens
  misc_RNA (1)...(19): siRNA sense strand
aggagugucucaaguucug

SEQ ID NO: 2052084 - RNA, 19 nt, Homo sapiens
  misc_RNA (1)...(19): siRNA sense strand
ccgacuaccucagacagau

SEQ ID NO: 2052085 - RNA, 19 nt, Homo sapiens
  misc_RNA (1)...(19): siRNA sense strand
ucucagacucagaagauga

SEQ ID NO: 2052086 - RNA, 19 nt, Homo sapiens
  misc_RNA (1)...(19): siRNA sense strand
gaggaucucccaccuuucc

SEQ ID NO: 2052087 - RNA, 19 nt, Homo sapiens
  misc_RNA (1)...(19): siRNA sense strand
gcugccaagucgcaaagca

SEQ ID NO: 2052088 - RNA, 19 nt, Homo sapiens
  misc_RNA (1)...(19): siRNA sense strand
ccaaccaggaggccauaga

SEQ ID NO: 2052089 - RNA, 19 nt, Homo sapiens
  misc_RNA (1)...(19): siRNA sense strand
aguaugacccucucuccaa

SEQ ID NO: 2052090 - RNA, 19 nt, Homo sapiens
  misc_RNA (1)...(19): siRNA sense strand
ggccgacccugagaucaag

SEQ ID NO: 2052091 - RNA, 19 nt, Homo sapiens
  misc_RNA (1)...(19): siRNA sense strand
agaggaggaucgcccacau

SEQ ID NO: 2052092 - RNA, 19 nt, Homo sapiens
  misc_RNA (1)...(19): siRNA sense strand
ucucccaccuuuccaagca

SEQ ID NO: 2052093 - RNA, 19 nt, Homo sapiens
  misc_RNA (1)...(19): siRNA sense strand
ucgaggagugucucaaguu

SEQ ID NO: 2052094 - RNA, 19 nt, Homo sapiens
  misc_RNA (1)...(19): siRNA sense strand
acgcuccacuggcuucuuc

SEQ ID NO: 2052095 - RNA, 19 nt, Homo sapiens
  misc_RNA (1)...(19): siRNA sense strand
gccauugacugccccuauu

SEQ ID NO: 2052096 - RNA, 19 nt, Homo sapiens
  misc_RNA (1)...(19): siRNA sense strand
caaccaggaggccauagag

SEQ ID NO: 2052097 - RNA, 19 nt, Homo sapiens
  misc_RNA (1)...(19): siRNA sense strand
aggaagaaaugcagaguaa

SEQ ID NO: 2052098 - RNA, 19 nt, Homo sapiens
  misc_RNA (1)...(19): siRNA sense strand
ggagaucacccagcacuuu

SEQ ID NO: 2052099 - RNA, 19 nt, Homo sapiens
  misc_RNA (1)...(19): siRNA sense strand
gcaggcgccuacauccuaa

SEQ ID NO: 2052100 - RNA, 19 nt, Homo sapiens
  misc_RNA (1)...(19): siRNA sense strand
ucgcugaggugaagccuuu

SEQ ID NO: 2052101 - RNA, 19 nt, Homo sapiens
  misc_RNA (1)...(19): siRNA sense strand
cuaacucgauuugcucuaa

SEQ ID NO: 2052102 - RNA, 19 nt, Homo sapiens
  misc_RNA (1)...(19): siRNA sense strand
uaacucgauuugcucuaaa

SEQ ID NO: 2052103 - RNA, 19 nt, Homo sapiens
  misc_RNA (1)...(19): siRNA sense strand
ucgcugaggccuucaagua

SEQ ID NO: 2052104 - RNA, 19 nt, Homo sapiens
  misc_RNA (1)...(19): siRNA sense strand
gaagaaaugcagaguaacg

SEQ ID NO: 2052105 - RNA, 19 nt, Homo sapiens
  misc_RNA (1)...(19): siRNA sense strand
cagcgucacuucucuggau

SEQ ID NO: 2052106 - RNA, 19 nt, Homo sapiens
  misc_RNA (1)...(19): siRNA sense strand
ggcgcgaccuggagauuga

SEQ ID NO: 2052107 - RNA, 19 nt, Homo sapiens
  misc_RNA (1)...(19): siRNA sense strand
ggacaucgagacuuuacau

SEQ ID NO: 2052108 - RNA, 19 nt, Homo sapiens
  misc_RNA (1)...(19): siRNA sense strand
ucaccggccuccugcaaga

SEQ ID NO: 2052109 - RNA, 19 nt, Homo sapiens
  misc_RNA (1)...(19): siRNA sense strand
aaagaccacucuccucaag

SEQ ID NO: 2052110 - RNA, 19 nt, Homo sapiens
  misc_RNA (1)...(19): siRNA sense strand
guggagggccuuguccuua

SEQ ID NO: 2052111 - RNA, 19 nt, Homo sapiens
  misc_RNA (1)...(19): siRNA sense strand
gagaucacccagcacuuug

SEQ ID NO: 2052112 - RNA, 19 nt, Homo sapiens
  misc_RNA (1)...(19): siRNA sense strand
agaccacucuccucaagau

SEQ ID NO: 2052113 - RNA, 19 nt, Homo sapiens
  misc_RNA (1)...(19): siRNA sense strand
ggagggccuuguccuuauc

SEQ ID NO: 2052114 - RNA, 19 nt, Homo sapiens
  misc_RNA (1)...(19): siRNA sense strand
gacuuuacauggcucuguu

SEQ ID NO: 2052115 - RNA, 19 nt, Homo sapiens
  misc_RNA (1)...(19): siRNA sense strand
agcaggacaucgagacuuu

SEQ ID NO: 2052116 - RNA, 19 nt, Homo sapiens
  misc_RNA (1)...(19): siRNA sense strand
uggaguccuucaacaguuu

SEQ ID NO: 2052117 - RNA, 19 nt, Homo sapiens
  misc_RNA (1)...(19): siRNA sense strand
gcaggacaucgagacuuua

SEQ ID NO: 2052118 - RNA, 19 nt, Homo sapiens
  misc_RNA (1)...(19): siRNA sense strand
gcucuaaacaacccugaga

SEQ ID NO: 2052119 - RNA, 19 nt, Homo sapiens
  misc_RNA (1)...(19): siRNA sense strand
guucaucaaugccuacaac

SEQ ID NO: 2052120 - RNA, 19 nt, Homo sapiens
  misc_RNA (1)...(19): siRNA sense strand
uaaacaacccugagauggu

SEQ ID NO: 2052121 - RNA, 19 nt, Homo sapiens
  misc_RNA (1)...(19): siRNA sense strand
gcugaggccuucaaguacu

SEQ ID NO: 2052122 - RNA, 19 nt, Homo sapiens
  misc_RNA (1)...(19): siRNA sense strand
uggagggccuuguccuuau

SEQ ID NO: 2052123 - RNA, 19 nt, Homo sapiens
  misc_RNA (1)...(19): siRNA sense strand
cauccuaacucgauuugcu

SEQ ID NO: 2052124 - RNA, 19 nt, Homo sapiens
  misc_RNA (1)...(19): siRNA sense strand
uagcaugacccgccugaug

SEQ ID NO: 2052125 - RNA, 19 nt, Homo sapiens
  misc_RNA (1)...(19): siRNA sense strand
caaagaccacucuccucaa

SEQ ID NO: 2052126 - RNA, 19 nt, Homo sapiens
  misc_RNA (1)...(19): siRNA sense strand
gaaggaagaaaugcagagu

SEQ ID NO: 2052127 - RNA, 19 nt, Homo sapiens
  misc_RNA (1)...(19): siRNA sense strand
ugaagccuuugguggagaa

SEQ ID NO: 2052128 - RNA, 19 nt, Homo sapiens
  misc_RNA (1)...(19): siRNA sense strand
ggccugucauccucaccua

SEQ ID NO: 2052129 - RNA, 19 nt, Homo sapiens
  misc_RNA (1)...(19): siRNA sense strand
ucgauuugcucuaaacaac

SEQ ID NO: 2052130 - RNA, 19 nt, Homo sapiens
  misc_RNA (1)...(19): siRNA sense strand
gagcaggacaucgagacuu

SEQ ID NO: 2052131 - RNA, 19 nt, Homo sapiens
  misc_RNA (1)...(19): siRNA sense strand
cagcucgccugcaguggau

SEQ ID NO: 2052132 - RNA, 19 nt, Homo sapiens
  misc_RNA (1)...(19): siRNA sense strand
cuggaguccuucaacaguu

SEQ ID NO: 2052133 - RNA, 19 nt, Homo sapiens
  misc_RNA (1)...(19): siRNA sense strand
ucaacaguuugggcugaaa

SEQ ID NO: 2052134 - RNA, 19 nt, Homo sapiens
  misc_RNA (1)...(19): siRNA sense strand
cuacauccuaacucgauuu

SEQ ID NO: 2052135 - RNA, 19 nt, Homo sapiens
  misc_RNA (1)...(19): siRNA sense strand
cugcaccuguucaucaaug

SEQ ID NO: 2052136 - RNA, 19 nt, Homo sapiens
  misc_RNA (1)...(19): siRNA sense strand
ccggcaaccugcaccuguu

SEQ ID NO: 2052137 - RNA, 19 nt, Homo sapiens
  misc_RNA (1)...(19): siRNA sense strand
ggagaugcaggauguagac

SEQ ID NO: 2052138 - RNA, 19 nt, Homo sapiens
  misc_RNA (1)...(19): siRNA sense strand
gggagaugcaggauguaga

SEQ ID NO: 2052139 - RNA, 19 nt, Homo sapiens
  misc_RNA (1)...(19): siRNA sense strand
ucuaaacaacccugagaug

SEQ ID NO: 2052140 - RNA, 19 nt, Homo sapiens
  misc_RNA (1)...(19): siRNA sense strand
gcagaguaacguggaagug

SEQ ID NO: 2052141 - RNA, 19 nt, Homo sapiens
  misc_RNA (1)...(19): siRNA sense strand
acgaggacaugcaggagau

SEQ ID NO: 2052142 - RNA, 19 nt, Homo sapiens
  misc_RNA (1)...(19): siRNA sense strand
aaggaagaaaugcagagua

SEQ ID NO: 2052143 - RNA, 19 nt, Homo sapiens
  misc_RNA (1)...(19): siRNA sense strand
gggcugaaaagcauuauug

SEQ ID NO: 2052144 - RNA, 19 nt, Homo sapiens
  misc_RNA (1)...(19): siRNA sense strand
cccaagcucugccggacau

SEQ ID NO: 2052145 - RNA, 19 nt, Homo sapiens
  misc_RNA (1)...(19): siRNA sense strand
gaaaccggccugucauccu

SEQ ID NO: 2052146 - RNA, 19 nt, Homo sapiens
  misc_RNA (1)...(19): siRNA sense strand
ccuacauccuaacucgauu

SEQ ID NO: 2052147 - RNA, 19 nt, Homo sapiens
  misc_RNA (1)...(19): siRNA sense strand
aagggaaaccggccuguca

SEQ ID NO: 2052148 - RNA, 19 nt, Homo sapiens
  misc_RNA (1)...(19): siRNA sense strand
gaccaucgcccucauguua

SEQ ID NO: 2052149 - RNA, 19 nt, Homo sapiens
  misc_RNA (1)...(19): siRNA sense strand
gcacauacacgcaggacuu

SEQ ID NO: 2052150 - RNA, 19 nt, Homo sapiens
  misc_RNA (1)...(19): siRNA sense strand
gcgguaaucugaguacuug

SEQ ID NO: 2052151 - RNA, 19 nt, Homo sapiens
  misc_RNA (1)...(19): siRNA sense strand
gaucuaagcggugcgguaa

SEQ ID NO: 2052152 - RNA, 19 nt, Homo sapiens
  misc_RNA (1)...(19): siRNA sense strand
ucaacaaguuucacacguu

SEQ ID NO: 2052153 - RNA, 19 nt, Homo sapiens
  misc_RNA (1)...(19): siRNA sense strand
uggagcaccuggaaagaaa

SEQ ID NO: 2052154 - RNA, 19 nt, Homo sapiens
  misc_RNA (1)...(19): siRNA sense strand
ggauauguccagcgacuug

SEQ ID NO: 2052155 - RNA, 19 nt, Homo sapiens
  misc_RNA (1)...(19): siRNA sense strand
ccagcgacuuggagagaga

SEQ ID NO: 2052156 - RNA, 19 nt, Homo sapiens
  misc_RNA (1)...(19): siRNA sense strand
gagagaccaucgcccucau

SEQ ID NO: 2052157 - RNA, 19 nt, Homo sapiens
  misc_RNA (1)...(19): siRNA sense strand
ggagcaggagcaagagaga

SEQ ID NO: 2052158 - RNA, 19 nt, Homo sapiens
  misc_RNA (1)...(19): siRNA sense strand
ucuaagcggugcgguaauc

SEQ ID NO: 2052159 - RNA, 19 nt, Homo sapiens
  misc_RNA (1)...(19): siRNA sense strand
gcggugcgguaaucugagu

SEQ ID NO: 2052160 - RNA, 19 nt, Homo sapiens
  misc_RNA (1)...(19): siRNA sense strand
ggaaagaaaagggauaugu

SEQ ID NO: 2052161 - RNA, 19 nt, Homo sapiens
  misc_RNA (1)...(19): siRNA sense strand
gagaccaucgcccucaugu

SEQ ID NO: 2052162 - RNA, 19 nt, Homo sapiens
  misc_RNA (1)...(19): siRNA sense strand
acacgcaggacuucaacaa

SEQ ID NO: 2052163 - RNA, 19 nt, Homo sapiens
  misc_RNA (1)...(19): siRNA sense strand
gaaagaaaagggauauguc

SEQ ID NO: 2052164 - RNA, 19 nt, Homo sapiens
  misc_RNA (1)...(19): siRNA sense strand
cagcaucuugguccuguug

SEQ ID NO: 2052165 - RNA, 19 nt, Homo sapiens
  misc_RNA (1)...(19): siRNA sense strand
gcaucuugguccuguugca

SEQ ID NO: 2052166 - RNA, 19 nt, Homo sapiens
  misc_RNA (1)...(19): siRNA sense strand
gguaaucugaguacuugca

SEQ ID NO: 2052167 - RNA, 19 nt, Homo sapiens
  misc_RNA (1)...(19): siRNA sense strand
gguuggagcaccuggaaag

SEQ ID NO: 2052168 - RNA, 19 nt, Homo sapiens
  misc_RNA (1)...(19): siRNA sense strand
cauacacgcaggacuucaa

SEQ ID NO: 2052169 - RNA, 19 nt, Homo sapiens
  misc_RNA (1)...(19): siRNA sense strand
gaaguuaucuguaaucuug

SEQ ID NO: 2052170 - RNA, 19 nt, Homo sapiens
  misc_RNA (1)...(19): siRNA sense strand
gaagugaccucaacugugu

SEQ ID NO: 2052171 - RNA, 19 nt, Homo sapiens
  misc_RNA (1)...(19): siRNA sense strand
gaaaguagauacagaugau

SEQ ID NO: 2052172 - RNA, 19 nt, Homo sapiens
  misc_RNA (1)...(19): siRNA sense strand
gcgaggaaguuaucuguaa

SEQ ID NO: 2052173 - RNA, 19 nt, Homo sapiens
  misc_RNA (1)...(19): siRNA sense strand
ugaaggaacucacuuucua

SEQ ID NO: 2052174 - RNA, 19 nt, Homo sapiens
  misc_RNA (1)...(19): siRNA sense strand
ucaaauuucuccugaguuu

SEQ ID NO: 2052175 - RNA, 19 nt, Homo sapiens
  misc_RNA (1)...(19): siRNA sense strand
gagcaucacucugaccaua

SEQ ID NO: 2052176 - RNA, 19 nt, Homo sapiens
  misc_RNA (1)...(19): siRNA sense strand
guacaacacugucucugaa

SEQ ID NO: 2052177 - RNA, 19 nt, Homo sapiens
  misc_RNA (1)...(19): siRNA sense strand
ggaacucacuuucuagaga

SEQ ID NO: 2052178 - RNA, 19 nt, Homo sapiens
  misc_RNA (1)...(19): siRNA sense strand
gaugcuagaucuugucuga

SEQ ID NO: 2052179 - RNA, 19 nt, Homo sapiens
  misc_RNA (1)...(19): siRNA sense strand
ugacuuugcuguucuacua

SEQ ID NO: 2052180 - RNA, 19 nt, Homo sapiens
  misc_RNA (1)...(19): siRNA sense strand
gugauggccugcacaauuu

SEQ ID NO: 2052181 - RNA, 19 nt, Homo sapiens
  misc_RNA (1)...(19): siRNA sense strand
caucaaagcuacugacauc

SEQ ID NO: 2052182 - RNA, 19 nt, Homo sapiens
  misc_RNA (1)...(19): siRNA sense strand
ccaaagaccuauucauuac

SEQ ID NO: 2052183 - RNA, 19 nt, Homo sapiens
  misc_RNA (1)...(19): siRNA sense strand
caagagcccucccacuuug

SEQ ID NO: 2052184 - RNA, 19 nt, Homo sapiens
  misc_RNA (1)...(19): siRNA sense strand
gaucuugucugauucauac

SEQ ID NO: 2052185 - RNA, 19 nt, Homo sapiens
  misc_RNA (1)...(19): siRNA sense strand
gaagaaaccugaaaaugau

SEQ ID NO: 2052186 - RNA, 19 nt, Homo sapiens
  misc_RNA (1)...(19): siRNA sense strand
gaccaugacucagauaguu

SEQ ID NO: 2052187 - RNA, 19 nt, Homo sapiens
  misc_RNA (1)...(19): siRNA sense strand
gaaagugccuauuuugauu

SEQ ID NO: 2052188 - RNA, 19 nt, Homo sapiens
  misc_RNA (1)...(19): siRNA sense strand
uaagcaggcuguccuuuau

SEQ ID NO: 2052189 - RNA, 19 nt, Homo sapiens
  misc_RNA (1)...(19): siRNA sense strand
gaacaugccagugguagaa

SEQ ID NO: 2052190 - RNA, 19 nt, Homo sapiens
  misc_RNA (1)...(19): siRNA sense strand
cacaggaagucuacaauga

SEQ ID NO: 2052191 - RNA, 19 nt, Homo sapiens
  misc_RNA (1)...(19): siRNA sense strand
agaagcaguuguccaagua

SEQ ID NO: 2052192 - RNA, 19 nt, Homo sapiens
  misc_RNA (1)...(19): siRNA sense strand
gcugaaaucccuccaaaga

SEQ ID NO: 2052193 - RNA, 19 nt, Homo sapiens
  misc_RNA (1)...(19): siRNA sense strand
caaaugaaucugugaguga

SEQ ID NO: 2052194 - RNA, 19 nt, Homo sapiens
  misc_RNA (1)...(19): siRNA sense strand
cugaaaugcugcacaauga

SEQ ID NO: 2052195 - RNA, 19 nt, Homo sapiens
  misc_RNA (1)...(19): siRNA sense strand
ggaagucuacaaugaauau

SEQ ID NO: 2052196 - RNA, 19 nt, Homo sapiens
  misc_RNA (1)...(19): siRNA sense strand
uagaagaaagugccuauuu

SEQ ID NO: 2052197 - RNA, 19 nt, Homo sapiens
  misc_RNA (1)...(19): siRNA sense strand
agaagaagaggucaugaua

SEQ ID NO: 2052198 - RNA, 19 nt, Homo sapiens
  misc_RNA (1)...(19): siRNA sense strand
ccauuuccaucaucaguuu

SEQ ID NO: 2052199 - RNA, 19 nt, Homo sapiens
  misc_RNA (1)...(19): siRNA sense strand
ggugauggccugcacaauu

SEQ ID NO: 2052200 - RNA, 19 nt, Homo sapiens
  misc_RNA (1)...(19): siRNA sense strand
gaaucuggcauuaauguug

SEQ ID NO: 2052201 - RNA, 19 nt, Homo sapiens
  misc_RNA (1)...(19): siRNA sense strand
guacuucuguugcuguguu

SEQ ID NO: 2052202 - RNA, 19 nt, Homo sapiens
  misc_RNA (1)...(19): siRNA sense strand
caacaaaugaggagaaagu

SEQ ID NO: 2052203 - RNA, 19 nt, Homo sapiens
  misc_RNA (1)...(19): siRNA sense strand
gaagaaccagcaauggaaa

SEQ ID NO: 2052204 - RNA, 19 nt, Homo sapiens
  misc_RNA (1)...(19): siRNA sense strand
gaauccauauacaccauga

SEQ ID NO: 2052205 - RNA, 19 nt, Homo sapiens
  misc_RNA (1)...(19): siRNA sense strand
caaaugaggagaaaguaga

SEQ ID NO: 2052206 - RNA, 19 nt, Homo sapiens
  misc_RNA (1)...(19): siRNA sense strand
ccaaauugaugcuagaucu

SEQ ID NO: 2052207 - RNA, 19 nt, Homo sapiens
  misc_RNA (1)...(19): siRNA sense strand
caaccaaauugaugcuaga

SEQ ID NO: 2052208 - RNA, 19 nt, Homo sapiens
  misc_RNA (1)...(19): siRNA sense strand
caaagcuacugacaucuca

SEQ ID NO: 2052209 - RNA, 19 nt, Homo sapiens
  misc_RNA (1)...(19): siRNA sense strand
uccaaagaccuauucauua

SEQ ID NO: 2052210 - RNA, 19 nt, Homo sapiens
  misc_RNA (1)...(19): siRNA sense strand
gaaaugcugcacaaugaug

SEQ ID NO: 2052211 - RNA, 19 nt, Homo sapiens
  misc_RNA (1)...(19): siRNA sense strand
gcaucacucugaccauaau

SEQ ID NO: 2052212 - RNA, 19 nt, Homo sapiens
  misc_RNA (1)...(19): siRNA sense strand
gaaggcuuaucaagugguu

SEQ ID NO: 2052213 - RNA, 19 nt, Homo sapiens
  misc_RNA (1)...(19): siRNA sense strand
gaagaagaggucaugauag

SEQ ID NO: 2052214 - RNA, 19 nt, Homo sapiens
  misc_RNA (1)...(19): siRNA sense strand
cccagagggugcaagaaua

SEQ ID NO: 2052215 - RNA, 19 nt, Homo sapiens
  misc_RNA (1)...(19): siRNA sense strand
ggaauggcaacaggaauuu

SEQ ID NO: 2052216 - RNA, 19 nt, Homo sapiens
  misc_RNA (1)...(19): siRNA sense strand
aauguugacuuggcaauuu

SEQ ID NO: 2052217 - RNA, 19 nt, Homo sapiens
  misc_RNA (1)...(19): siRNA sense strand
ggagaaaguagauacagau

SEQ ID NO: 2052218 - RNA, 19 nt, Homo sapiens
  misc_RNA (1)...(19): siRNA sense strand
ccagagggugcaagaauaa

SEQ ID NO: 2052219 - RNA, 19 nt, Homo sapiens
  misc_RNA (1)...(19): siRNA sense strand
caggaagucuacaaugaau

SEQ ID NO: 2052220 - RNA, 19 nt, Homo sapiens
  misc_RNA (1)...(19): siRNA sense strand
gcaauaucaucuacaacag

SEQ ID NO: 2052221 - RNA, 19 nt, Homo sapiens
  misc_RNA (1)...(19): siRNA sense strand
uuaagcaggcuguccuuua

SEQ ID NO: 2052222 - RNA, 19 nt, Homo sapiens
  misc_RNA (1)...(19): siRNA sense strand
ugaauuaggugacuuugcu

SEQ ID NO: 2052223 - RNA, 19 nt, Homo sapiens
  misc_RNA (1)...(19): siRNA sense strand
acugaaggcuuaucaagug

SEQ ID NO: 2052224 - RNA, 19 nt, Homo sapiens
  misc_RNA (1)...(19): siRNA sense strand
ggaagaagaagaggucaug

SEQ ID NO: 2052225 - RNA, 19 nt, Homo sapiens
  misc_RNA (1)...(19): siRNA sense strand
ucagauaguucagguaaag

SEQ ID NO: 2052226 - RNA, 19 nt, Homo sapiens
  misc_RNA (1)...(19): siRNA sense strand
ccucaggaguguuucaaug

SEQ ID NO: 2052227 - RNA, 19 nt, Homo sapiens
  misc_RNA (1)...(19): siRNA sense strand
augaugauguggagauuaa

SEQ ID NO: 2052228 - RNA, 19 nt, Homo sapiens
  misc_RNA (1)...(19): siRNA sense strand
agucaucugucuucucaaa

SEQ ID NO: 2052229 - RNA, 19 nt, Homo sapiens
  misc_RNA (1)...(19): siRNA sense strand
ugaagaaccagcaauggaa

SEQ ID NO: 2052230 - RNA, 19 nt, Homo sapiens
  misc_RNA (1)...(19): siRNA sense strand
guaaagauccuagaaacag

SEQ ID NO: 2052231 - RNA, 19 nt, Homo sapiens
  misc_RNA (1)...(19): siRNA sense strand
gaauugggaaucuggcauu

SEQ ID NO: 2052232 - RNA, 19 nt, Homo sapiens
  misc_RNA (1)...(19): siRNA sense strand
acaagagcccucccacuuu

SEQ ID NO: 2052233 - RNA, 19 nt, Homo sapiens
  misc_RNA (1)...(19): siRNA sense strand
ucucaacuuucaacaaaug

SEQ ID NO: 2052234 - RNA, 19 nt, Homo sapiens
  misc_RNA (1)...(19): siRNA sense strand
caucaucaguuuccugucu

SEQ ID NO: 2052235 - RNA, 19 nt, Homo sapiens
  misc_RNA (1)...(19): siRNA sense strand
gacaauagagacuccaaga

SEQ ID NO: 2052236 - RNA, 19 nt, Homo sapiens
  misc_RNA (1)...(19): siRNA sense strand
guagaaggaaugucaagga

SEQ ID NO: 2052237 - RNA, 19 nt, Homo sapiens
  misc_RNA (1)...(19): siRNA sense strand
ugcuagaucuugucugauu

SEQ ID NO: 2052238 - RNA, 19 nt, Homo sapiens
  misc_RNA (1)...(19): siRNA sense strand
ccagucagacgaucucauu

SEQ ID NO: 2052239 - RNA, 19 nt, Homo sapiens
  misc_RNA (1)...(19): siRNA sense strand
gaagaaagugccuauuuug

SEQ ID NO: 2052240 - RNA, 19 nt, Homo sapiens
  misc_RNA (1)...(19): siRNA sense strand
agaagaaagugccuauuuu

SEQ ID NO: 2052241 - RNA, 19 nt, Homo sapiens
  misc_RNA (1)...(19): siRNA sense strand
gaaccagcaauggaaauga

SEQ ID NO: 2052242 - RNA, 19 nt, Homo sapiens
  misc_RNA (1)...(19): siRNA sense strand
aaucuggcauuaauguuga

SEQ ID NO: 2052243 - RNA, 19 nt, Homo sapiens
  misc_RNA (1)...(19): siRNA sense strand
cgaggaaguuaucuguaau

SEQ ID NO: 2052244 - RNA, 19 nt, Homo sapiens
  misc_RNA (1)...(19): siRNA sense strand
gcaagucaccaccauaguc

SEQ ID NO: 2052245 - RNA, 19 nt, Homo sapiens
  misc_RNA (1)...(19): siRNA sense strand
gaaggaacucacuuucuag

SEQ ID NO: 2052246 - RNA, 19 nt, Homo sapiens
  misc_RNA (1)...(19): siRNA sense strand
ggcaauaucaucuacaaca

SEQ ID NO: 2052247 - RNA, 19 nt, Homo sapiens
  misc_RNA (1)...(19): siRNA sense strand
cacaagagcccucccacuu

SEQ ID NO: 2052248 - RNA, 19 nt, Homo sapiens
  misc_RNA (1)...(19): siRNA sense strand
ugaucgaacugaaggcuau

SEQ ID NO: 2052249 - RNA, 19 nt, Homo sapiens
  misc_RNA (1)...(19): siRNA sense strand
ucucaugaaucggguguuu

SEQ ID NO: 2052250 - RNA, 19 nt, Homo sapiens
  misc_RNA (1)...(19): siRNA sense strand
gaaucucaacuuucaacaa

SEQ ID NO: 2052251 - RNA, 19 nt, Homo sapiens
  misc_RNA (1)...(19): siRNA sense strand
gaugaugauguggagauua

SEQ ID NO: 2052252 - RNA, 19 nt, Homo sapiens
  misc_RNA (1)...(19): siRNA sense strand
ggacaguguuagugcuagu

SEQ ID NO: 2052253 - RNA, 19 nt, Homo sapiens
  misc_RNA (1)...(19): siRNA sense strand
gggaaucuggcauuaaugu

SEQ ID NO: 2052254 - RNA, 19 nt, Homo sapiens
  misc_RNA (1)...(19): siRNA sense strand
ucacaaauccccuucauga

SEQ ID NO: 2052255 - RNA, 19 nt, Homo sapiens
  misc_RNA (1)...(19): siRNA sense strand
uuaagaagcaguuguccaa

SEQ ID NO: 2052256 - RNA, 19 nt, Homo sapiens
  misc_RNA (1)...(19): siRNA sense strand
ggaggccuguauuucaugu

SEQ ID NO: 2052257 - RNA, 19 nt, Homo sapiens
  misc_RNA (1)...(19): siRNA sense strand
gcauccagguuccgcugaa

SEQ ID NO: 2052258 - RNA, 19 nt, Homo sapiens
  misc_RNA (1)...(19): siRNA sense strand
uggcauuaauguugacuug

SEQ ID NO: 2052259 - RNA, 19 nt, Homo sapiens
  misc_RNA (1)...(19): siRNA sense strand
gcccagaccaugacucaga

SEQ ID NO: 2052260 - RNA, 19 nt, Homo sapiens
  misc_RNA (1)...(19): siRNA sense strand
guuucuauguggauauuug

SEQ ID NO: 2052261 - RNA, 19 nt, Homo sapiens
  misc_RNA (1)...(19): siRNA sense strand
aagaagaggucaugauagc

SEQ ID NO: 2052262 - RNA, 19 nt, Homo sapiens
  misc_RNA (1)...(19): siRNA sense strand
gaagaagaagaggucauga

SEQ ID NO: 2052263 - RNA, 19 nt, Homo sapiens
  misc_RNA (1)...(19): siRNA sense strand
gaacugaaggcuauuuacg

SEQ ID NO: 2052264 - RNA, 19 nt, Homo sapiens
  misc_RNA (1)...(19): siRNA sense strand
gcgauggccuagcaauugg

SEQ ID NO: 2052265 - RNA, 19 nt, Homo sapiens
  misc_RNA (1)...(19): siRNA sense strand
cauaaaaucguguuucgua

SEQ ID NO: 2052266 - RNA, 19 nt, Homo sapiens
  misc_RNA (1)...(19): siRNA sense strand
guugauaugguaccugaaa

SEQ ID NO: 2052267 - RNA, 19 nt, Homo sapiens
  misc_RNA (1)...(19): siRNA sense strand
caacaggaauuuucauugg

SEQ ID NO: 2052268 - RNA, 19 nt, Homo sapiens
  misc_RNA (1)...(19): siRNA sense strand
agcaggcuguccuuuauaa

SEQ ID NO: 2052269 - RNA, 19 nt, Homo sapiens
  misc_RNA (1)...(19): siRNA sense strand
gguuaaaggugacugauua

SEQ ID NO: 2052270 - RNA, 19 nt, Homo sapiens
  misc_RNA (1)...(19): siRNA sense strand
gaacauggugucuaucuua

SEQ ID NO: 2052271 - RNA, 19 nt, Homo sapiens
  misc_RNA (1)...(19): siRNA sense strand
gaacgucuacuaccagaua

SEQ ID NO: 2052272 - RNA, 19 nt, Homo sapiens
  misc_RNA (1)...(19): siRNA sense strand
ggagaagucugaacugauc

SEQ ID NO: 2052273 - RNA, 19 nt, Homo sapiens
  misc_RNA (1)...(19): siRNA sense strand
gcaaggagcggcagauuau

SEQ ID NO: 2052274 - RNA, 19 nt, Homo sapiens
  misc_RNA (1)...(19): siRNA sense strand
ccaagaacccggagaagua

SEQ ID NO: 2052275 - RNA, 19 nt, Homo sapiens
  misc_RNA (1)...(19): siRNA sense strand
ccaaagcgcuggaggacuu

SEQ ID NO: 2052276 - RNA, 19 nt, Homo sapiens
  misc_RNA (1)...(19): siRNA sense strand
gcgaccagcucacuaagaa

SEQ ID NO: 2052277 - RNA, 19 nt, Homo sapiens
  misc_RNA (1)...(19): siRNA sense strand
cagguaggcuggaagagua

SEQ ID NO: 2052278 - RNA, 19 nt, Homo sapiens
  misc_RNA (1)...(19): siRNA sense strand
cagacaacaucaagaauga

SEQ ID NO: 2052279 - RNA, 19 nt, Homo sapiens
  misc_RNA (1)...(19): siRNA sense strand
agaaggcaguggaguauuu

SEQ ID NO: 2052280 - RNA, 19 nt, Homo sapiens
  misc_RNA (1)...(19): siRNA sense strand
agaaggagcauuuccauaa

SEQ ID NO: 2052281 - RNA, 19 nt, Homo sapiens
  misc_RNA (1)...(19): siRNA sense strand
cuaagaacauggugucuau

SEQ ID NO: 2052282 - RNA, 19 nt, Homo sapiens
  misc_RNA (1)...(19): siRNA sense strand
gaaggagcauuuccauaag

SEQ ID NO: 2052283 - RNA, 19 nt, Homo sapiens
  misc_RNA (1)...(19): siRNA sense strand
caaccaagauuucaugaac

SEQ ID NO: 2052284 - RNA, 19 nt, Homo sapiens
  misc_RNA (1)...(19): siRNA sense strand
gaauuucgcagccugauga

SEQ ID NO: 2052285 - RNA, 19 nt, Homo sapiens
  misc_RNA (1)...(19): siRNA sense strand
ggacaaggaguacaacaug

SEQ ID NO: 2052286 - RNA, 19 nt, Homo sapiens
  misc_RNA (1)...(19): siRNA sense strand
gcaccuauaucuguaaagu

SEQ ID NO: 2052287 - RNA, 19 nt, Homo sapiens
  misc_RNA (1)...(19): siRNA sense strand
gcccggaacucaacaaagu

SEQ ID NO: 2052288 - RNA, 19 nt, Homo sapiens
  misc_RNA (1)...(19): siRNA sense strand
gcagacaacaucaagaaug

SEQ ID NO: 2052289 - RNA, 19 nt, Homo sapiens
  misc_RNA (1)...(19): siRNA sense strand
cuaagcaccuauaucugua

SEQ ID NO: 2052290 - RNA, 19 nt, Homo sapiens
  misc_RNA (1)...(19): siRNA sense strand
gaccuucgacucccugaua

SEQ ID NO: 2052291 - RNA, 19 nt, Homo sapiens
  misc_RNA (1)...(19): siRNA sense strand
gcacaacaacuacaauuac

SEQ ID NO: 2052292 - RNA, 19 nt, Homo sapiens
  misc_RNA (1)...(19): siRNA sense strand
ggaaagacacaccuaccaa

SEQ ID NO: 2052293 - RNA, 19 nt, Homo sapiens
  misc_RNA (1)...(19): siRNA sense strand
uuuaagggcuucaaugaug

SEQ ID NO: 2052294 - RNA, 19 nt, Homo sapiens
  misc_RNA (1)...(19): siRNA sense strand
gcaggagaauguugagaag

SEQ ID NO: 2052295 - RNA, 19 nt, Homo sapiens
  misc_RNA (1)...(19): siRNA sense strand
agaagaaucuaccuguguu

SEQ ID NO: 2052296 - RNA, 19 nt, Homo sapiens
  misc_RNA (1)...(19): siRNA sense strand
aaaggugacugauuacauc

SEQ ID NO: 2052297 - RNA, 19 nt, Homo sapiens
  misc_RNA (1)...(19): siRNA sense strand
gcuaagcaccuauaucugu

SEQ ID NO: 2052298 - RNA, 19 nt, Homo sapiens
  misc_RNA (1)...(19): siRNA sense strand
ggacuucgcagacaacauc

SEQ ID NO: 2052299 - RNA, 19 nt, Homo sapiens
  misc_RNA (1)...(19): siRNA sense strand
acaauuacauccucaaguc

SEQ ID NO: 2052300 - RNA, 19 nt, Homo sapiens
  misc_RNA (1)...(19): siRNA sense strand
ggagaccaaugccuacauc

SEQ ID NO: 2052301 - RNA, 19 nt, Homo sapiens
  misc_RNA (1)...(19): siRNA sense strand
cagaaggccugggcuauuc

SEQ ID NO: 2052302 - RNA, 19 nt, Homo sapiens
  misc_RNA (1)...(19): siRNA sense strand
gagaagaaucuaccugugu

SEQ ID NO: 2052303 - RNA, 19 nt, Homo sapiens
  misc_RNA (1)...(19): siRNA sense strand
agaccaagccugaguuuga

SEQ ID NO: 2052304 - RNA, 19 nt, Homo sapiens
  misc_RNA (1)...(19): siRNA sense strand
cauggugucuaucuuauca

SEQ ID NO: 2052305 - RNA, 19 nt, Homo sapiens
  misc_RNA (1)...(19): siRNA sense strand
ggcaaggagcggcagauua

SEQ ID NO: 2052306 - RNA, 19 nt, Homo sapiens
  misc_RNA (1)...(19): siRNA sense strand
ucaagucccuggagaaguc

SEQ ID NO: 2052307 - RNA, 19 nt, Homo sapiens
  misc_RNA (1)...(19): siRNA sense strand
aagugaaacugcucuuuga

SEQ ID NO: 2052308 - RNA, 19 nt, Homo sapiens
  misc_RNA (1)...(19): siRNA sense strand
uggaugggcugaugcuuga

SEQ ID NO: 2052309 - RNA, 19 nt, Homo sapiens
  misc_RNA (1)...(19): siRNA sense strand
gugcucaucuuggaucuga

SEQ ID NO: 2052310 - RNA, 19 nt, Homo sapiens
  misc_RNA (1)...(19): siRNA sense strand
agaagaccauugucaagga

SEQ ID NO: 2052311 - RNA, 19 nt, Homo sapiens
  misc_RNA (1)...(19): siRNA sense strand
gagacagccuggagaagag

SEQ ID NO: 2052312 - RNA, 19 nt, Homo sapiens
  misc_RNA (1)...(19): siRNA sense strand
ggaacucaacaaagugaaa

SEQ ID NO: 2052313 - RNA, 19 nt, Homo sapiens
  misc_RNA (1)...(19): siRNA sense strand
gagcagagggacaggauuc

SEQ ID NO: 2052314 - RNA, 19 nt, Homo sapiens
  misc_RNA (1)...(19): siRNA sense strand
uuugagagccgccuuauga

SEQ ID NO: 2052315 - RNA, 19 nt, Homo sapiens
  misc_RNA (1)...(19): siRNA sense strand
caacaacuacaauuacauc

SEQ ID NO: 2052316 - RNA, 19 nt, Homo sapiens
  misc_RNA (1)...(19): siRNA sense strand
cacaacaacuacaauuaca

SEQ ID NO: 2052317 - RNA, 19 nt, Homo sapiens
  misc_RNA (1)...(19): siRNA sense strand
gcagaccaagccugaguuu

SEQ ID NO: 2052318 - RNA, 19 nt, Homo sapiens
  misc_RNA (1)...(19): siRNA sense strand
agaaugacccggacaagga

SEQ ID NO: 2052319 - RNA, 19 nt, Homo sapiens
  misc_RNA (1)...(19): siRNA sense strand
agacacaccuaccaagaag

SEQ ID NO: 2052320 - RNA, 19 nt, Homo sapiens
  misc_RNA (1)...(19): siRNA sense strand
gacaugaucgaucgccuuu

SEQ ID NO: 2052321 - RNA, 19 nt, Homo sapiens
  misc_RNA (1)...(19): siRNA sense strand
ggcgggagauugaggacaa

SEQ ID NO: 2052322 - RNA, 19 nt, Homo sapiens
  misc_RNA (1)...(19): siRNA sense strand
ggaagcauggccaagauuc

SEQ ID NO: 2052323 - RNA, 19 nt, Homo sapiens
  misc_RNA (1)...(19): siRNA sense strand
cugauuacaucgcagagaa

SEQ ID NO: 2052324 - RNA, 19 nt, Homo sapiens
  misc_RNA (1)...(19): siRNA sense strand
caagcugccuggccucauc

SEQ ID NO: 2052325 - RNA, 19 nt, Homo sapiens
  misc_RNA (1)...(19): siRNA sense strand
ggaauauggccgcaaccaa

SEQ ID NO: 2052326 - RNA, 19 nt, Homo sapiens
  misc_RNA (1)...(19): siRNA sense strand
cggagaaguacaucaagua

SEQ ID NO: 2052327 - RNA, 19 nt, Homo sapiens
  misc_RNA (1)...(19): siRNA sense strand
uacacgagcucaccagcaa

SEQ ID NO: 2052328 - RNA, 19 nt, Homo sapiens
  misc_RNA (1)...(19): siRNA sense strand
gcaaccaagauuucaugaa

SEQ ID NO: 2052329 - RNA, 19 nt, Homo sapiens
  misc_RNA (1)...(19): siRNA sense strand
uuaugaagcuggagaacuc

SEQ ID NO: 2052330 - RNA, 19 nt, Homo sapiens
  misc_RNA (1)...(19): siRNA sense strand
gagcaccaccagaagaaga

SEQ ID NO: 2052331 - RNA, 19 nt, Homo sapiens
  misc_RNA (1)...(19): siRNA sense strand
cagaaggagcauuuccaua

SEQ ID NO: 2052332 - RNA, 19 nt, Homo sapiens
  misc_RNA (1)...(19): siRNA sense strand
cccgcuggcugguggaaua

SEQ ID NO: 2052333 - RNA, 19 nt, Homo sapiens
  misc_RNA (1)...(19): siRNA sense strand
cgagacagccuggagaaga

SEQ ID NO: 2052334 - RNA, 19 nt, Homo sapiens
  misc_RNA (1)...(19): siRNA sense strand
gcucuucggccaccagcua

SEQ ID NO: 2052335 - RNA, 19 nt, Homo sapiens
  misc_RNA (1)...(19): siRNA sense strand
caucaucccugugcacaag

SEQ ID NO: 2052336 - RNA, 19 nt, Homo sapiens
  misc_RNA (1)...(19): siRNA sense strand
ggaccgcuccaucaaagga

SEQ ID NO: 2052337 - RNA, 19 nt, Homo sapiens
  misc_RNA (1)...(19): siRNA sense strand
gaagcauggccaagauuca

SEQ ID NO: 2052338 - RNA, 19 nt, Homo sapiens
  misc_RNA (1)...(19): siRNA sense strand
gcaggugggcgacaugauc

SEQ ID NO: 2052339 - RNA, 19 nt, Homo sapiens
  misc_RNA (1)...(19): siRNA sense strand
aaggagcauuuccauaaga

SEQ ID NO: 2052340 - RNA, 19 nt, Homo sapiens
  misc_RNA (1)...(19): siRNA sense strand
aaagacacaccuaccaaga

SEQ ID NO: 2052341 - RNA, 19 nt, Homo sapiens
  misc_RNA (1)...(19): siRNA sense strand
ugaugacgcggcacaguaa

SEQ ID NO: 2052342 - RNA, 19 nt, Homo sapiens
  misc_RNA (1)...(19): siRNA sense strand
gcaaugccauccucuuccu

SEQ ID NO: 2052343 - RNA, 19 nt, Homo sapiens
  misc_RNA (1)...(19): siRNA sense strand
gaagaguaccugggaagca

SEQ ID NO: 2052344 - RNA, 19 nt, Homo sapiens
  misc_RNA (1)...(19): siRNA sense strand
gcaaguccaagguguacga

SEQ ID NO: 2052345 - RNA, 19 nt, Homo sapiens
  misc_RNA (1)...(19): siRNA sense strand
gaccagcucacuaagaaca

SEQ ID NO: 2052346 - RNA, 19 nt, Homo sapiens
  misc_RNA (1)...(19): siRNA sense strand
ccagacagcccggaacuca

SEQ ID NO: 2052347 - RNA, 19 nt, Homo sapiens
  misc_RNA (1)...(19): siRNA sense strand
gaagaacugugcaaaaucc

SEQ ID NO: 2052348 - RNA, 19 nt, Homo sapiens
  misc_RNA (1)...(19): siRNA sense strand
ucaaugauggccucgaaga

SEQ ID NO: 2052349 - RNA, 19 nt, Homo sapiens
  misc_RNA (1)...(19): siRNA sense strand
cuucaaugauggccucgaa

SEQ ID NO: 2052350 - RNA, 19 nt, Homo sapiens
  misc_RNA (1)...(19): siRNA sense strand
gaagaaucuaccuguguuc

SEQ ID NO: 2052351 - RNA, 19 nt, Homo sapiens
  misc_RNA (1)...(19): siRNA sense strand
uaaaggugacugauuacau

SEQ ID NO: 2052352 - RNA, 19 nt, Homo sapiens
  misc_RNA (1)...(19): siRNA sense strand
guaaagugcugggcaaccu

SEQ ID NO: 2052353 - RNA, 19 nt, Homo sapiens
  misc_RNA (1)...(19): siRNA sense strand
ccacagguaggcuggaaga

SEQ ID NO: 2052354 - RNA, 19 nt, Homo sapiens
  misc_RNA (1)...(19): siRNA sense strand
ugcacaacaacuacaauua

SEQ ID NO: 2052355 - RNA, 19 nt, Homo sapiens
  misc_RNA (1)...(19): siRNA sense strand
ucgcagacaacaucaagaa

SEQ ID NO: 2052356 - RNA, 19 nt, Homo sapiens
  misc_RNA (1)...(19): siRNA sense strand
caaugauggccucgaagaa

SEQ ID NO: 2052357 - RNA, 19 nt, Homo sapiens
  misc_RNA (1)...(19): siRNA sense strand
cuggagaagucugaacuga

SEQ ID NO: 2052358 - RNA, 19 nt, Homo sapiens
  misc_RNA (1)...(19): siRNA sense strand
ucagaaggcaguggaguau

SEQ ID NO: 2052359 - RNA, 19 nt, Homo sapiens
  misc_RNA (1)...(19): siRNA sense strand
aagcaccuauaucuguaaa

SEQ ID NO: 2052360 - RNA, 19 nt, Homo sapiens
  misc_RNA (1)...(19): siRNA sense strand
cagcaaugccauccucuuc

SEQ ID NO: 2052361 - RNA, 19 nt, Homo sapiens
  misc_RNA (1)...(19): siRNA sense strand
caacaagaggaaagacaca

SEQ ID NO: 2052362 - RNA, 19 nt, Homo sapiens
  misc_RNA (1)...(19): siRNA sense strand
aaggacagaaggagcauuu

SEQ ID NO: 2052363 - RNA, 19 nt, Homo sapiens
  misc_RNA (1)...(19): siRNA sense strand
gaaggcaguggaguauuuc

SEQ ID NO: 2052364 - RNA, 19 nt, Homo sapiens
  misc_RNA (1)...(19): siRNA sense strand
gcccagaagaccauuguca

SEQ ID NO: 2052365 - RNA, 19 nt, Homo sapiens
  misc_RNA (1)...(19): siRNA sense strand
gaccaagccugaguuugac

SEQ ID NO: 2052366 - RNA, 19 nt, Homo sapiens
  misc_RNA (1)...(19): siRNA sense strand
ucaugaacgucuacuacca

SEQ ID NO: 2052367 - RNA, 19 nt, Homo sapiens
  misc_RNA (1)...(19): siRNA sense strand
ucaccaagaacccggagaa

SEQ ID NO: 2052368 - RNA, 19 nt, Homo sapiens
  misc_RNA (1)...(19): siRNA sense strand
ccggagaaguacaucaagu

SEQ ID NO: 2052369 - RNA, 19 nt, Homo sapiens
  misc_RNA (1)...(19): siRNA sense strand
cgaaacauguuacuucaaa

SEQ ID NO: 2052370 - RNA, 19 nt, Homo sapiens
  misc_RNA (1)...(19): siRNA sense strand
ggacaaugcugccagugaa

SEQ ID NO: 2052371 - RNA, 19 nt, Homo sapiens
  misc_RNA (1)...(19): siRNA sense strand
gaaggcagcuuugaucaug

SEQ ID NO: 2052372 - RNA, 19 nt, Homo sapiens
  misc_RNA (1)...(19): siRNA sense strand
ccaggaagcucgaaacaug

SEQ ID NO: 2052373 - RNA, 19 nt, Homo sapiens
  misc_RNA (1)...(19): siRNA sense strand
ggacauuccuccucugaug

SEQ ID NO: 2052374 - RNA, 19 nt, Homo sapiens
  misc_RNA (1)...(19): siRNA sense strand
gcaagaggauuggagauga

SEQ ID NO: 2052375 - RNA, 19 nt, Homo sapiens
  misc_RNA (1)...(19): siRNA sense strand
cauggaaacugaggucuua

SEQ ID NO: 2052376 - RNA, 19 nt, Homo sapiens
  misc_RNA (1)...(19): siRNA sense strand
gaacaaauccagaaaucca

SEQ ID NO: 2052377 - RNA, 19 nt, Homo sapiens
  misc_RNA (1)...(19): siRNA sense strand
ggagaucccagacugcuaa

SEQ ID NO: 2052378 - RNA, 19 nt, Homo sapiens
  misc_RNA (1)...(19): siRNA sense strand
gcagggagcaggcauacaa

SEQ ID NO: 2052379 - RNA, 19 nt, Homo sapiens
  misc_RNA (1)...(19): siRNA sense strand
gaccuaauguucugcugaa

SEQ ID NO: 2052380 - RNA, 19 nt, Homo sapiens
  misc_RNA (1)...(19): siRNA sense strand
gaagccagccuagcaguuu

SEQ ID NO: 2052381 - RNA, 19 nt, Homo sapiens
  misc_RNA (1)...(19): siRNA sense strand
gcacaaguagugaugagaa

SEQ ID NO: 2052382 - RNA, 19 nt, Homo sapiens
  misc_RNA (1)...(19): siRNA sense strand
gaucccagacugcuaauug

SEQ ID NO: 2052383 - RNA, 19 nt, Homo sapiens
  misc_RNA (1)...(19): siRNA sense strand
ggagaaggcagcuuugauc

SEQ ID NO: 2052384 - RNA, 19 nt, Homo sapiens
  misc_RNA (1)...(19): siRNA sense strand
gaagaccugugaaggacau

SEQ ID NO: 2052385 - RNA, 19 nt, Homo sapiens
  misc_RNA (1)...(19): siRNA sense strand
gugcagaugucagauccua

SEQ ID NO: 2052386 - RNA, 19 nt, Homo sapiens
  misc_RNA (1)...(19): siRNA sense strand
uaaaggaacaaauccagaa

SEQ ID NO: 2052387 - RNA, 19 nt, Homo sapiens
  misc_RNA (1)...(19): siRNA sense strand
agaauaaggaggaguuaaa

SEQ ID NO: 2052388 - RNA, 19 nt, Homo sapiens
  misc_RNA (1)...(19): siRNA sense strand
gcucgaaacauguuacuuc

SEQ ID NO: 2052389 - RNA, 19 nt, Homo sapiens
  misc_RNA (1)...(19): siRNA sense strand
gcagauguuugagcugaug

SEQ ID NO: 2052390 - RNA, 19 nt, Homo sapiens
  misc_RNA (1)...(19): siRNA sense strand
gcagaugucagauccuaga

SEQ ID NO: 2052391 - RNA, 19 nt, Homo sapiens
  misc_RNA (1)...(19): siRNA sense strand
gcuauggcuucugcgaaua

SEQ ID NO: 2052392 - RNA, 19 nt, Homo sapiens
  misc_RNA (1)...(19): siRNA sense strand
gguccuggucccauuaaua

SEQ ID NO: 2052393 - RNA, 19 nt, Homo sapiens
  misc_RNA (1)...(19): siRNA sense strand
gaaguggagcccagagguu

SEQ ID NO: 2052394 - RNA, 19 nt, Homo sapiens
  misc_RNA (1)...(19): siRNA sense strand
gaaacugaggucuuagaga

SEQ ID NO: 2052395 - RNA, 19 nt, Homo sapiens
  misc_RNA (1)...(19): siRNA sense strand
ggagacucgugccauggaa

SEQ ID NO: 2052396 - RNA, 19 nt, Homo sapiens
  misc_RNA (1)...(19): siRNA sense strand
ggagguugguucuguuguc

SEQ ID NO: 2052397 - RNA, 19 nt, Homo sapiens
  misc_RNA (1)...(19): siRNA sense strand
ccaggucacuccacaggau

SEQ ID NO: 2052398 - RNA, 19 nt, Homo sapiens
  misc_RNA (1)...(19): siRNA sense strand
ggagaccugugcgauggaa

SEQ ID NO: 2052399 - RNA, 19 nt, Homo sapiens
  misc_RNA (1)...(19): siRNA sense strand
gagcugaugaagcagauga

SEQ ID NO: 2052400 - RNA, 19 nt, Homo sapiens
  misc_RNA (1)...(19): siRNA sense strand
gagaaggcagcuuugauca

SEQ ID NO: 2052401 - RNA, 19 nt, Homo sapiens
  misc_RNA (1)...(19): siRNA sense strand
gccaauaccagcugcaguu

SEQ ID NO: 2052402 - RNA, 19 nt, Homo sapiens
  misc_RNA (1)...(19): siRNA sense strand
ggcuauggcuucugcgaau

SEQ ID NO: 2052403 - RNA, 19 nt, Homo sapiens
  misc_RNA (1)...(19): siRNA sense strand
cagaguauccugauuuuaa

SEQ ID NO: 2052404 - RNA, 19 nt, Homo sapiens
  misc_RNA (1)...(19): siRNA sense strand
cugcagcgcccauuauuga

SEQ ID NO: 2052405 - RNA, 19 nt, Homo sapiens
  misc_RNA (1)...(19): siRNA sense strand
gaauaaggaggaguuaaag

SEQ ID NO: 2052406 - RNA, 19 nt, Homo sapiens
  misc_RNA (1)...(19): siRNA sense strand
agacaggucccaggcauuu

SEQ ID NO: 2052407 - RNA, 19 nt, Homo sapiens
  misc_RNA (1)...(19): siRNA sense strand
ugagagacccggcaaugga

SEQ ID NO: 2052408 - RNA, 19 nt, Homo sapiens
  misc_RNA (1)...(19): siRNA sense strand
gauccuagagcuccuauac

SEQ ID NO: 2052409 - RNA, 19 nt, Homo sapiens
  misc_RNA (1)...(19): siRNA sense strand
uguuugagcugaugaagca

SEQ ID NO: 2052410 - RNA, 19 nt, Homo sapiens
  misc_RNA (1)...(19): siRNA sense strand
aggaacaaauccagaaauc

SEQ ID NO: 2052411 - RNA, 19 nt, Homo sapiens
  misc_RNA (1)...(19): siRNA sense strand
gaucaugcagguucuucaa

SEQ ID NO: 2052412 - RNA, 19 nt, Homo sapiens
  misc_RNA (1)...(19): siRNA sense strand
gagguugguucuguuguca

SEQ ID NO: 2052413 - RNA, 19 nt, Homo sapiens
  misc_RNA (1)...(19): siRNA sense strand
caagaggauuggagaugag

SEQ ID NO: 2052414 - RNA, 19 nt, Homo sapiens
  misc_RNA (1)...(19): siRNA sense strand
cuagaagaccugugaagga

SEQ ID NO: 2052415 - RNA, 19 nt, Homo sapiens
  misc_RNA (1)...(19): siRNA sense strand
ggaagcucgaaacauguua

SEQ ID NO: 2052416 - RNA, 19 nt, Homo sapiens
  misc_RNA (1)...(19): siRNA sense strand
ccacugaucccaggcaaau

SEQ ID NO: 2052417 - RNA, 19 nt, Homo sapiens
  misc_RNA (1)...(19): siRNA sense strand
gagcaaaggcagaguaucc

SEQ ID NO: 2052418 - RNA, 19 nt, Homo sapiens
  misc_RNA (1)...(19): siRNA sense strand
acaaggaggagguauacaa

SEQ ID NO: 2052419 - RNA, 19 nt, Homo sapiens
  misc_RNA (1)...(19): siRNA sense strand
ggagggacuuugcuuucag

SEQ ID NO: 2052420 - RNA, 19 nt, Homo sapiens
  misc_RNA (1)...(19): siRNA sense strand
ggagggccauuaggagauc

SEQ ID NO: 2052421 - RNA, 19 nt, Homo sapiens
  misc_RNA (1)...(19): siRNA sense strand
ggaagccagccuagcaguu

SEQ ID NO: 2052422 - RNA, 19 nt, Homo sapiens
  misc_RNA (1)...(19): siRNA sense strand
gguacaggcauacaaggaa

SEQ ID NO: 2052423 - RNA, 19 nt, Homo sapiens
  misc_RNA (1)...(19): siRNA sense strand
guccuggucccauuaauau

SEQ ID NO: 2052424 - RNA, 19 nt, Homo sapiens
  misc_RNA (1)...(19): siRNA sense strand
gaucaaaggggucuaccua

SEQ ID NO: 2052425 - RNA, 19 nt, Homo sapiens
  misc_RNA (1)...(19): siRNA sense strand
aggaggagguauacaagga

SEQ ID NO: 2052426 - RNA, 19 nt, Homo sapiens
  misc_RNA (1)...(19): siRNA sense strand
cccuaugacugguggaauu

SEQ ID NO: 2052427 - RNA, 19 nt, Homo sapiens
  misc_RNA (1)...(19): siRNA sense strand
ucccaucgauccagaagau

SEQ ID NO: 2052428 - RNA, 19 nt, Homo sapiens
  misc_RNA (1)...(19): siRNA sense strand
gagggacuuugcuuucagu

SEQ ID NO: 2052429 - RNA, 19 nt, Homo sapiens
  misc_RNA (1)...(19): siRNA sense strand
auacaugucacaccacuga

SEQ ID NO: 2052430 - RNA, 19 nt, Homo sapiens
  misc_RNA (1)...(19): siRNA sense strand
cacaaguagugaugagaau

SEQ ID NO: 2052431 - RNA, 19 nt, Homo sapiens
  misc_RNA (1)...(19): siRNA sense strand
guaauggagaggagaggaa

SEQ ID NO: 2052432 - RNA, 19 nt, Homo sapiens
  misc_RNA (1)...(19): siRNA sense strand
gcaggcacaaguagugaug

SEQ ID NO: 2052433 - RNA, 19 nt, Homo sapiens
  misc_RNA (1)...(19): siRNA sense strand
caaggagucaguauacaag

SEQ ID NO: 2052434 - RNA, 19 nt, Homo sapiens
  misc_RNA (1)...(19): siRNA sense strand
gguagaggugguagagauu

SEQ ID NO: 2052435 - RNA, 19 nt, Homo sapiens
  misc_RNA (1)...(19): siRNA sense strand
caggagaccgcgcuuagug

SEQ ID NO: 2052436 - RNA, 19 nt, Homo sapiens
  misc_RNA (1)...(19): siRNA sense strand
aaaggaacaaauccagaaa

SEQ ID NO: 2052437 - RNA, 19 nt, Homo sapiens
  misc_RNA (1)...(19): siRNA sense strand
aggcagaguauccugauuu

SEQ ID NO: 2052438 - RNA, 19 nt, Homo sapiens
  misc_RNA (1)...(19): siRNA sense strand
gcaggguacaggcauacaa

SEQ ID NO: 2052439 - RNA, 19 nt, Homo sapiens
  misc_RNA (1)...(19): siRNA sense strand
cgaggacuguuaggagaug

SEQ ID NO: 2052440 - RNA, 19 nt, Homo sapiens
  misc_RNA (1)...(19): siRNA sense strand
uugguucuguugucaguuu

SEQ ID NO: 2052441 - RNA, 19 nt, Homo sapiens
  misc_RNA (1)...(19): siRNA sense strand
aaagaauaaggaggaguua

SEQ ID NO: 2052442 - RNA, 19 nt, Homo sapiens
  misc_RNA (1)...(19): siRNA sense strand
gacaaugcugccagugaaa

SEQ ID NO: 2052443 - RNA, 19 nt, Homo sapiens
  misc_RNA (1)...(19): siRNA sense strand
acaaggagucaguauacaa

SEQ ID NO: 2052444 - RNA, 19 nt, Homo sapiens
  misc_RNA (1)...(19): siRNA sense strand
ugguagaggugguagagau

SEQ ID NO: 2052445 - RNA, 19 nt, Homo sapiens
  misc_RNA (1)...(19): siRNA sense strand
ucucggagguugguucugu

SEQ ID NO: 2052446 - RNA, 19 nt, Homo sapiens
  misc_RNA (1)...(19): siRNA sense strand
ggugagagacccggcaaug

SEQ ID NO: 2052447 - RNA, 19 nt, Homo sapiens
  misc_RNA (1)...(19): siRNA sense strand
ccucagcauuuggcuagaa

SEQ ID NO: 2052448 - RNA, 19 nt, Homo sapiens
  misc_RNA (1)...(19): siRNA sense strand
caucggaagauacauguca

SEQ ID NO: 2052449 - RNA, 19 nt, Homo sapiens
  misc_RNA (1)...(19): siRNA sense strand
gaucacugcguuccguguu

SEQ ID NO: 2052450 - RNA, 19 nt, Homo sapiens
  misc_RNA (1)...(19): siRNA sense strand
cugaggagcaguuaaagga

SEQ ID NO: 2052451 - RNA, 19 nt, Homo sapiens
  misc_RNA (1)...(19): siRNA sense strand
gcccagaggccccaugaua

SEQ ID NO: 2052452 - RNA, 19 nt, Homo sapiens
  misc_RNA (1)...(19): siRNA sense strand
cagaucagauugccaugcu

SEQ ID NO: 2052453 - RNA, 19 nt, Homo sapiens
  misc_RNA (1)...(19): siRNA sense strand
gguggaagccagccuagca

SEQ ID NO: 2052454 - RNA, 19 nt, Homo sapiens
  misc_RNA (1)...(19): siRNA sense strand
ggaaacugaggucuuagag

SEQ ID NO: 2052455 - RNA, 19 nt, Homo sapiens
  misc_RNA (1)...(19): siRNA sense strand
gagagacccggcaauggau

SEQ ID NO: 2052456 - RNA, 19 nt, Homo sapiens
  misc_RNA (1)...(19): siRNA sense strand
ucaaaggggucuaccuaug

SEQ ID NO: 2052457 - RNA, 19 nt, Homo sapiens
  misc_RNA (1)...(19): siRNA sense strand
ccagagcaguagccagucu

SEQ ID NO: 2052458 - RNA, 19 nt, Homo sapiens
  misc_RNA (1)...(19): siRNA sense strand
ggcagaguauccugauuuu

SEQ ID NO: 2052459 - RNA, 19 nt, Homo sapiens
  misc_RNA (1)...(19): siRNA sense strand
caaggaggagguauacaag

SEQ ID NO: 2052460 - RNA, 19 nt, Homo sapiens
  misc_RNA (1)...(19): siRNA sense strand
gggagcaggcauacaagga

SEQ ID NO: 2052461 - RNA, 19 nt, Homo sapiens
  misc_RNA (1)...(19): siRNA sense strand
cuccucagccucagcauuu

SEQ ID NO: 2052462 - RNA, 19 nt, Homo sapiens
  misc_RNA (1)...(19): siRNA sense strand
caacuggcuuaugcacugu

SEQ ID NO: 2052463 - RNA, 19 nt, Homo sapiens
  misc_RNA (1)...(19): siRNA sense strand
gaugaagcucuguguccaa

SEQ ID NO: 2052464 - RNA, 19 nt, Homo sapiens
  misc_RNA (1)...(19): siRNA sense strand
aaguggagcccagagguua

SEQ ID NO: 2052465 - RNA, 19 nt, Homo sapiens
  misc_RNA (1)...(19): siRNA sense strand
gagcugguccugguuccuu

SEQ ID NO: 2052466 - RNA, 19 nt, Homo sapiens
  misc_RNA (1)...(19): siRNA sense strand
gcaagcaagcaagguggaa

SEQ ID NO: 2052467 - RNA, 19 nt, Homo sapiens
  misc_RNA (1)...(19): siRNA sense strand
uggagggacuuugcuuuca

SEQ ID NO: 2052468 - RNA, 19 nt, Homo sapiens
  misc_RNA (1)...(19): siRNA sense strand
gguccugguuccuuaacuc

SEQ ID NO: 2052469 - RNA, 19 nt, Homo sapiens
  misc_RNA (1)...(19): siRNA sense strand
ugaaucaccucguugguua

SEQ ID NO: 2052470 - RNA, 19 nt, Homo sapiens
  misc_RNA (1)...(19): siRNA sense strand
ggacuggcuugucuuauug

SEQ ID NO: 2052471 - RNA, 19 nt, Homo sapiens
  misc_RNA (1)...(19): siRNA sense strand
gcagugagauccauaagca

SEQ ID NO: 2052472 - RNA, 19 nt, Homo sapiens
  misc_RNA (1)...(19): siRNA sense strand
caacagauccuacaaaguc

SEQ ID NO: 2052473 - RNA, 19 nt, Homo sapiens
  misc_RNA (1)...(19): siRNA sense strand
ggacaaggagagcucuuua

SEQ ID NO: 2052474 - RNA, 19 nt, Homo sapiens
  misc_RNA (1)...(19): siRNA sense strand
gaccaucagugcugccuuu

SEQ ID NO: 2052475 - RNA, 19 nt, Homo sapiens
  misc_RNA (1)...(19): siRNA sense strand
gaacgguggucuuucucuu

SEQ ID NO: 2052476 - RNA, 19 nt, Homo sapiens
  misc_RNA (1)...(19): siRNA sense strand
aauaugcccuguuaggaua

SEQ ID NO: 2052477 - RNA, 19 nt, Homo sapiens
  misc_RNA (1)...(19): siRNA sense strand
gcugggagaagaagcauua

SEQ ID NO: 2052478 - RNA, 19 nt, Homo sapiens
  misc_RNA (1)...(19): siRNA sense strand
gcagggagacuggaaguuu

SEQ ID NO: 2052479 - RNA, 19 nt, Homo sapiens
  misc_RNA (1)...(19): siRNA sense strand
gaucuagguggaaguauuu

SEQ ID NO: 2052480 - RNA, 19 nt, Homo sapiens
  misc_RNA (1)...(19): siRNA sense strand
gaaguuuccuggaucucuu

SEQ ID NO: 2052481 - RNA, 19 nt, Homo sapiens
  misc_RNA (1)...(19): siRNA sense strand
ugaggaagaggaagaauuu

SEQ ID NO: 2052482 - RNA, 19 nt, Homo sapiens
  misc_RNA (1)...(19): siRNA sense strand
ggaggacuggcuugucuua

SEQ ID NO: 2052483 - RNA, 19 nt, Homo sapiens
  misc_RNA (1)...(19): siRNA sense strand
gauuauugcucccuucauc

SEQ ID NO: 2052484 - RNA, 19 nt, Homo sapiens
  misc_RNA (1)...(19): siRNA sense strand
agacucagaugaucaagug

SEQ ID NO: 2052485 - RNA, 19 nt, Homo sapiens
  misc_RNA (1)...(19): siRNA sense strand
caaaucagagccacgguaa

SEQ ID NO: 2052486 - RNA, 19 nt, Homo sapiens
  misc_RNA (1)...(19): siRNA sense strand
ggagugagagugaggaaga

SEQ ID NO: 2052487 - RNA, 19 nt, Homo sapiens
  misc_RNA (1)...(19): siRNA sense strand
gaagagacucagaugauca

SEQ ID NO: 2052488 - RNA, 19 nt, Homo sapiens
  misc_RNA (1)...(19): siRNA sense strand
gccaacagauccuacaaag

SEQ ID NO: 2052489 - RNA, 19 nt, Homo sapiens
  misc_RNA (1)...(19): siRNA sense strand
gcagggaacgguggucuuu

SEQ ID NO: 2052490 - RNA, 19 nt, Homo sapiens
  misc_RNA (1)...(19): siRNA sense strand
uuucuucagugguguauuu

SEQ ID NO: 2052491 - RNA, 19 nt, Homo sapiens
  misc_RNA (1)...(19): siRNA sense strand
gcacuugcaggaucgauug

SEQ ID NO: 2052492 - RNA, 19 nt, Homo sapiens
  misc_RNA (1)...(19): siRNA sense strand
gcucuugacaucuuauuug

SEQ ID NO: 2052493 - RNA, 19 nt, Homo sapiens
  misc_RNA (1)...(19): siRNA sense strand
uaugaguucuuugcaguaa

SEQ ID NO: 2052494 - RNA, 19 nt, Homo sapiens
  misc_RNA (1)...(19): siRNA sense strand
gcagcuugguguauuaugg

SEQ ID NO: 2052495 - RNA, 19 nt, Homo sapiens
  misc_RNA (1)...(19): siRNA sense strand
gcugguggccuuugucuug

SEQ ID NO: 2052496 - RNA, 19 nt, Homo sapiens
  misc_RNA (1)...(19): siRNA sense strand
ggucggaagcgaacauuau

SEQ ID NO: 2052497 - RNA, 19 nt, Homo sapiens
  misc_RNA (1)...(19): siRNA sense strand
gccuuugucuugcuuaaug

SEQ ID NO: 2052498 - RNA, 19 nt, Homo sapiens
  misc_RNA (1)...(19): siRNA sense strand
ugaucuagguggaaguauu

SEQ ID NO: 2052499 - RNA, 19 nt, Homo sapiens
  misc_RNA (1)...(19): siRNA sense strand
acacuuugauccugauguu

SEQ ID NO: 2052500 - RNA, 19 nt, Homo sapiens
  misc_RNA (1)...(19): siRNA sense strand
uccuggaucucuuucguua

SEQ ID NO: 2052501 - RNA, 19 nt, Homo sapiens
  misc_RNA (1)...(19): siRNA sense strand
ggaggacccuagccauucu

SEQ ID NO: 2052502 - RNA, 19 nt, Homo sapiens
  misc_RNA (1)...(19): siRNA sense strand
ugcccaauaugcccuguua

SEQ ID NO: 2052503 - RNA, 19 nt, Homo sapiens
  misc_RNA (1)...(19): siRNA sense strand
uauuauggccuaacucuga

SEQ ID NO: 2052504 - RNA, 19 nt, Homo sapiens
  misc_RNA (1)...(19): siRNA sense strand
gaugaagagacucagauga

SEQ ID NO: 2052505 - RNA, 19 nt, Homo sapiens
  misc_RNA (1)...(19): siRNA sense strand
caucagugcugccuuuaac

SEQ ID NO: 2052506 - RNA, 19 nt, Homo sapiens
  misc_RNA (1)...(19): siRNA sense strand
aaucuuacccucucuguau

SEQ ID NO: 2052507 - RNA, 19 nt, Homo sapiens
  misc_RNA (1)...(19): siRNA sense strand
cucuguaucuacuugauua

SEQ ID NO: 2052508 - RNA, 19 nt, Homo sapiens
  misc_RNA (1)...(19): siRNA sense strand
gagccacgguaaccaguca

SEQ ID NO: 2052509 - RNA, 19 nt, Homo sapiens
  misc_RNA (1)...(19): siRNA sense strand
ccuccggccuccugaguuu

SEQ ID NO: 2052510 - RNA, 19 nt, Homo sapiens
  misc_RNA (1)...(19): siRNA sense strand
aggacuggcuugucuuauu

SEQ ID NO: 2052511 - RNA, 19 nt, Homo sapiens
  misc_RNA (1)...(19): siRNA sense strand
gcgaacauuaucagcauuu

SEQ ID NO: 2052512 - RNA, 19 nt, Homo sapiens
  misc_RNA (1)...(19): siRNA sense strand
ugaagagacucagaugauc

SEQ ID NO: 2052513 - RNA, 19 nt, Homo sapiens
  misc_RNA (1)...(19): siRNA sense strand
cuugacaucuuauuugcaa

SEQ ID NO: 2052514 - RNA, 19 nt, Homo sapiens
  misc_RNA (1)...(19): siRNA sense strand
gggagaagaagcauuaucu

SEQ ID NO: 2052515 - RNA, 19 nt, Homo sapiens
  misc_RNA (1)...(19): siRNA sense strand
uggcuugucuuauuguaau

SEQ ID NO: 2052516 - RNA, 19 nt, Homo sapiens
  misc_RNA (1)...(19): siRNA sense strand
gaggaagaauuuuaugaug

SEQ ID NO: 2052517 - RNA, 19 nt, Homo sapiens
  misc_RNA (1)...(19): siRNA sense strand
gagcuuuacccuacaguca

SEQ ID NO: 2052518 - RNA, 19 nt, Homo sapiens
  misc_RNA (1)...(19): siRNA sense strand
aagucuaucucacagguuu

SEQ ID NO: 2052519 - RNA, 19 nt, Homo sapiens
  misc_RNA (1)...(19): siRNA sense strand
uccauaagcacgugcauuu

SEQ ID NO: 2052520 - RNA, 19 nt, Homo sapiens
  misc_RNA (1)...(19): siRNA sense strand
cagggagacuggaaguuuc

SEQ ID NO: 2052521 - RNA, 19 nt, Homo sapiens
  misc_RNA (1)...(19): siRNA sense strand
ggucuuucucuuaucuuua

SEQ ID NO: 2052522 - RNA, 19 nt, Homo sapiens
  misc_RNA (1)...(19): siRNA sense strand
gacccuagccauucugguu

SEQ ID NO: 2052523 - RNA, 19 nt, Homo sapiens
  misc_RNA (1)...(19): siRNA sense strand
cauaagcacgugcauuuca

SEQ ID NO: 2052524 - RNA, 19 nt, Homo sapiens
  misc_RNA (1)...(19): siRNA sense strand
caauaugcccuguuaggau

SEQ ID NO: 2052525 - RNA, 19 nt, Homo sapiens
  misc_RNA (1)...(19): siRNA sense strand
cuucagugguguauuuguu

SEQ ID NO: 2052526 - RNA, 19 nt, Homo sapiens
  misc_RNA (1)...(19): siRNA sense strand
cagagcuccugccaaauca

SEQ ID NO: 2052527 - RNA, 19 nt, Homo sapiens
  misc_RNA (1)...(19): siRNA sense strand
ugugcagcuugguguauua

SEQ ID NO: 2052528 - RNA, 19 nt, Homo sapiens
  misc_RNA (1)...(19): siRNA sense strand
gacaucuuauuugcaauug

SEQ ID NO: 2052529 - RNA, 19 nt, Homo sapiens
  misc_RNA (1)...(19): siRNA sense strand
ggaagaauuuuaugaugca

SEQ ID NO: 2052530 - RNA, 19 nt, Homo sapiens
  misc_RNA (1)...(19): siRNA sense strand
aaacucaagugcacguucu

SEQ ID NO: 2052531 - RNA, 19 nt, Homo sapiens
  misc_RNA (1)...(19): siRNA sense strand
gcagaugaagagacucaga

SEQ ID NO: 2052532 - RNA, 19 nt, Homo sapiens
  misc_RNA (1)...(19): siRNA sense strand
uaggaggacuggcuugucu

SEQ ID NO: 2052533 - RNA, 19 nt, Homo sapiens
  misc_RNA (1)...(19): siRNA sense strand
aagaggaaccgcaaacuca

SEQ ID NO: 2052534 - RNA, 19 nt, Homo sapiens
  misc_RNA (1)...(19): siRNA sense strand
ucacugaaauaugugcaau

SEQ ID NO: 2052535 - RNA, 19 nt, Homo sapiens
  misc_RNA (1)...(19): siRNA sense strand
cgaguuggugggauuauug

SEQ ID NO: 2052536 - RNA, 19 nt, Homo sapiens
  misc_RNA (1)...(19): siRNA sense strand
gguggucuuucucuuaucu

SEQ ID NO: 2052537 - RNA, 19 nt, Homo sapiens
  misc_RNA (1)...(19): siRNA sense strand
ggaagaggaagaauuuuau

SEQ ID NO: 2052538 - RNA, 19 nt, Homo sapiens
  misc_RNA (1)...(19): siRNA sense strand
gugaggaagaggaagaauu

SEQ ID NO: 2052539 - RNA, 19 nt, Homo sapiens
  misc_RNA (1)...(19): siRNA sense strand
cauuaucuuuacaggcuuu

SEQ ID NO: 2052540 - RNA, 19 nt, Homo sapiens
  misc_RNA (1)...(19): siRNA sense strand
cuacagucaucaggaaugu

SEQ ID NO: 2052541 - RNA, 19 nt, Homo sapiens
  misc_RNA (1)...(19): siRNA sense strand
gaacauuaucagcauuucu

SEQ ID NO: 2052542 - RNA, 19 nt, Homo sapiens
  misc_RNA (1)...(19): siRNA sense strand
ccaauaugcccuguuagga

SEQ ID NO: 2052543 - RNA, 19 nt, Homo sapiens
  misc_RNA (1)...(19): siRNA sense strand
gugcugccuuuaacauugu

SEQ ID NO: 2052544 - RNA, 19 nt, Homo sapiens
  misc_RNA (1)...(19): siRNA sense strand
aagcgaacauuaucagcau

SEQ ID NO: 2052545 - RNA, 19 nt, Homo sapiens
  misc_RNA (1)...(19): siRNA sense strand
ugucuggccucauagagau

SEQ ID NO: 2052546 - RNA, 19 nt, Homo sapiens
  misc_RNA (1)...(19): siRNA sense strand
gugaacagccauuccuugu

SEQ ID NO: 2052547 - RNA, 19 nt, Homo sapiens
  misc_RNA (1)...(19): siRNA sense strand
caacggcagugagauccau

SEQ ID NO: 2052548 - RNA, 19 nt, Homo sapiens
  misc_RNA (1)...(19): siRNA sense strand
uaacaguccgcugcuagaa

SEQ ID NO: 2052549 - RNA, 19 nt, Homo sapiens
  misc_RNA (1)...(19): siRNA sense strand
ccuccugaguuuguuauug

SEQ ID NO: 2052550 - RNA, 19 nt, Homo sapiens
  misc_RNA (1)...(19): siRNA sense strand
gagcuccugccaaaucaga

SEQ ID NO: 2052551 - RNA, 19 nt, Homo sapiens
  misc_RNA (1)...(19): siRNA sense strand
gugugcagcuugguguauu

SEQ ID NO: 2052552 - RNA, 19 nt, Homo sapiens
  misc_RNA (1)...(19): siRNA sense strand
gcuuuacccuacagucauc

SEQ ID NO: 2052553 - RNA, 19 nt, Homo sapiens
  misc_RNA (1)...(19): siRNA sense strand
cuacaccucugagcuuuac

SEQ ID NO: 2052554 - RNA, 19 nt, Homo sapiens
  misc_RNA (1)...(19): siRNA sense strand
ggugaucuagguggaagua

SEQ ID NO: 2052555 - RNA, 19 nt, Homo sapiens
  misc_RNA (1)...(19): siRNA sense strand
caagaggaaccgcaaacuc

SEQ ID NO: 2052556 - RNA, 19 nt, Homo sapiens
  misc_RNA (1)...(19): siRNA sense strand
acagucaucaggaauguug

SEQ ID NO: 2052557 - RNA, 19 nt, Homo sapiens
  misc_RNA (1)...(19): siRNA sense strand
agugcugccuuuaacauug

SEQ ID NO: 2052558 - RNA, 19 nt, Homo sapiens
  misc_RNA (1)...(19): siRNA sense strand
acgguggucuuucucuuau

SEQ ID NO: 2052559 - RNA, 19 nt, Homo sapiens
  misc_RNA (1)...(19): siRNA sense strand
gugaagaccaggccuuugg

SEQ ID NO: 2052560 - RNA, 19 nt, Homo sapiens
  misc_RNA (1)...(19): siRNA sense strand
gacaaggagagcucuuuag

SEQ ID NO: 2052561 - RNA, 19 nt, Homo sapiens
  misc_RNA (1)...(19): siRNA sense strand
uaucuacaccucugagcuu

SEQ ID NO: 2052562 - RNA, 19 nt, Homo sapiens
  misc_RNA (1)...(19): siRNA sense strand
cauccucauugcacugguu

SEQ ID NO: 2052563 - RNA, 19 nt, Homo sapiens
  misc_RNA (1)...(19): siRNA sense strand
guaucuacuugauuaacca

SEQ ID NO: 2052564 - RNA, 19 nt, Homo sapiens
  misc_RNA (1)...(19): siRNA sense strand
uaacacacccagccaacag

SEQ ID NO: 2052565 - RNA, 19 nt, Homo sapiens
  misc_RNA (1)...(19): siRNA sense strand
gagugcgggugaucuaggu

SEQ ID NO: 2052566 - RNA, 19 nt, Homo sapiens
  misc_RNA (1)...(19): siRNA sense strand
guccgcugcuagaaacauu

SEQ ID NO: 2052567 - RNA, 19 nt, Homo sapiens
  misc_RNA (1)...(19): siRNA sense strand
uaugugcaauggucuuuac

SEQ ID NO: 2052568 - RNA, 19 nt, Homo sapiens
  misc_RNA (1)...(19): siRNA sense strand
ccgaguuggugggauuauu

SEQ ID NO: 2052569 - RNA, 19 nt, Homo sapiens
  misc_RNA (1)...(19): siRNA sense strand
gcgaagaacugcgugagaa

SEQ ID NO: 2052570 - RNA, 19 nt, Homo sapiens
  misc_RNA (1)...(19): siRNA sense strand
acaaggcgcugcacuucua

SEQ ID NO: 2052571 - RNA, 19 nt, Homo sapiens
  misc_RNA (1)...(19): siRNA sense strand
gaagugaagaugaaagaga

SEQ ID NO: 2052572 - RNA, 19 nt, Homo sapiens
  misc_RNA (1)...(19): siRNA sense strand
gauacuggcuccgaccauu

SEQ ID NO: 2052573 - RNA, 19 nt, Homo sapiens
  misc_RNA (1)...(19): siRNA sense strand
gaagaugaaagagaugaaa

SEQ ID NO: 2052574 - RNA, 19 nt, Homo sapiens
  misc_RNA (1)...(19): siRNA sense strand
caagaagcacggaauguga

SEQ ID NO: 2052575 - RNA, 19 nt, Homo sapiens
  misc_RNA (1)...(19): siRNA sense strand
ggacaaggcgcugcacuuc

SEQ ID NO: 2052576 - RNA, 19 nt, Homo sapiens
  misc_RNA (1)...(19): siRNA sense strand
gcaagaagcacggaaugug

SEQ ID NO: 2052577 - RNA, 19 nt, Homo sapiens
  misc_RNA (1)...(19): siRNA sense strand
ugauggaagugaagaugaa

SEQ ID NO: 2052578 - RNA, 19 nt, Homo sapiens
  misc_RNA (1)...(19): siRNA sense strand
gagaugaaaggcagcauuc

SEQ ID NO: 2052579 - RNA, 19 nt, Homo sapiens
  misc_RNA (1)...(19): siRNA sense strand
gcaggcagcagcagcaaca

SEQ ID NO: 2052580 - RNA, 19 nt, Homo sapiens
  misc_RNA (1)...(19): siRNA sense strand
gugccaggcugcuacaaca

SEQ ID NO: 2052581 - RNA, 19 nt, Homo sapiens
  misc_RNA (1)...(19): siRNA sense strand
ugagaaggaucggcugcuu

SEQ ID NO: 2052582 - RNA, 19 nt, Homo sapiens
  misc_RNA (1)...(19): siRNA sense strand
cgucaaugagcgcaaagua

SEQ ID NO: 2052583 - RNA, 19 nt, Homo sapiens
  misc_RNA (1)...(19): siRNA sense strand
aagugaagaugaaagagau

SEQ ID NO: 2052584 - RNA, 19 nt, Homo sapiens
  misc_RNA (1)...(19): siRNA sense strand
ucacagugcaaguggaguu

SEQ ID NO: 2052585 - RNA, 19 nt, Homo sapiens
  misc_RNA (1)...(19): siRNA sense strand
gaccauucguacuccuugu

SEQ ID NO: 2052586 - RNA, 19 nt, Homo sapiens
  misc_RNA (1)...(19): siRNA sense strand
gggacaaggcgcugcacuu

SEQ ID NO: 2052587 - RNA, 19 nt, Homo sapiens
  misc_RNA (1)...(19): siRNA sense strand
ucuacacguuuccaaagga

SEQ ID NO: 2052588 - RNA, 19 nt, Homo sapiens
  misc_RNA (1)...(19): siRNA sense strand
gauggaagugaagaugaaa

SEQ ID NO: 2052589 - RNA, 19 nt, Homo sapiens
  misc_RNA (1)...(19): siRNA sense strand
uccaaaggacgcugaguug

SEQ ID NO: 2052590 - RNA, 19 nt, Homo sapiens
  misc_RNA (1)...(19): siRNA sense strand
aggccaagcugcgcgaaga

SEQ ID NO: 2052591 - RNA, 19 nt, Homo sapiens
  misc_RNA (1)...(19): siRNA sense strand
gugaagaugaaagagauga

SEQ ID NO: 2052592 - RNA, 19 nt, Homo sapiens
  misc_RNA (1)...(19): siRNA sense strand
uggaagugaagaugaaaga

SEQ ID NO: 2052593 - RNA, 19 nt, Homo sapiens
  misc_RNA (1)...(19): siRNA sense strand
gcgccaaccugcucaccua

SEQ ID NO: 2052594 - RNA, 19 nt, Homo sapiens
  misc_RNA (1)...(19): siRNA sense strand
ggacagcagccacuucauc

SEQ ID NO: 2052595 - RNA, 19 nt, Homo sapiens
  misc_RNA (1)...(19): siRNA sense strand
ggaccuggcugagcaccau

SEQ ID NO: 2052596 - RNA, 19 nt, Homo sapiens
  misc_RNA (1)...(19): siRNA sense strand
gcagugagggcuccaucuu

SEQ ID NO: 2052597 - RNA, 19 nt, Homo sapiens
  misc_RNA (1)...(19): siRNA sense strand
ggaccugcacugcggcuuu

SEQ ID NO: 2052598 - RNA, 19 nt, Homo sapiens
  misc_RNA (1)...(19): siRNA sense strand
gaccugcacugcggcuuug

SEQ ID NO: 2052599 - RNA, 19 nt, Homo sapiens
  misc_RNA (1)...(19): siRNA sense strand
gcagcaccauggagaagag

SEQ ID NO: 2052600 - RNA, 19 nt, Homo sapiens
  misc_RNA (1)...(19): siRNA sense strand
gaccagcuccagcagaaga

SEQ ID NO: 2052601 - RNA, 19 nt, Homo sapiens
  misc_RNA (1)...(19): siRNA sense strand
gaccagacggugaagcuau

SEQ ID NO: 2052602 - RNA, 19 nt, Homo sapiens
  misc_RNA (1)...(19): siRNA sense strand
gcugcucaauggcgaguau

SEQ ID NO: 2052603 - RNA, 19 nt, Homo sapiens
  misc_RNA (1)...(19): siRNA sense strand
gcgcagcugggcaagaauu

SEQ ID NO: 2052604 - RNA, 19 nt, Homo sapiens
  misc_RNA (1)...(19): siRNA sense strand
caaaggcccagucaccaau

SEQ ID NO: 2052605 - RNA, 19 nt, Homo sapiens
  misc_RNA (1)...(19): siRNA sense strand
gcugcucuccguccucuuu

SEQ ID NO: 2052606 - RNA, 19 nt, Homo sapiens
  misc_RNA (1)...(19): siRNA sense strand
uggcugagcaccauauguu

SEQ ID NO: 2052607 - RNA, 19 nt, Homo sapiens
  misc_RNA (1)...(19): siRNA sense strand
acaggaaccaggugacuug

SEQ ID NO: 2052608 - RNA, 19 nt, Homo sapiens
  misc_RNA (1)...(19): siRNA sense strand
cagcagccacuucaucuca

SEQ ID NO: 2052609 - RNA, 19 nt, Homo sapiens
  misc_RNA (1)...(19): siRNA sense strand
aggaccagcuccagcagaa

SEQ ID NO: 2052610 - RNA, 19 nt, Homo sapiens
  misc_RNA (1)...(19): siRNA sense strand
ucaaaggcccagucaccaa

SEQ ID NO: 2052611 - RNA, 19 nt, Homo sapiens
  misc_RNA (1)...(19): siRNA sense strand
ggacgucuccugccuucag

SEQ ID NO: 2052612 - RNA, 19 nt, Homo sapiens
  misc_RNA (1)...(19): siRNA sense strand
ggcaggaguugcagaaagc

SEQ ID NO: 2052613 - RNA, 19 nt, Homo sapiens
  misc_RNA (1)...(19): siRNA sense strand
ggaccagacggugaagcua

SEQ ID NO: 2052614 - RNA, 19 nt, Homo sapiens
  misc_RNA (1)...(19): siRNA sense strand
gacagcagccacuucaucu

SEQ ID NO: 2052615 - RNA, 19 nt, Homo sapiens
  misc_RNA (1)...(19): siRNA sense strand
gaucaaucgggaccuguuc

SEQ ID NO: 2052616 - RNA, 19 nt, Homo sapiens
  misc_RNA (1)...(19): siRNA sense strand
uggcaggaguugcagaaag

SEQ ID NO: 2052617 - RNA, 19 nt, Homo sapiens
  misc_RNA (1)...(19): siRNA sense strand
gggccugucaccugucuga

SEQ ID NO: 2052618 - RNA, 19 nt, Homo sapiens
  misc_RNA (1)...(19): siRNA sense strand
cauccugagucgacacuac

SEQ ID NO: 2052619 - RNA, 19 nt, Homo sapiens
  misc_RNA (1)...(19): siRNA sense strand
gcaaccugcgcaagaucaa

SEQ ID NO: 2052620 - RNA, 19 nt, Homo sapiens
  misc_RNA (1)...(19): siRNA sense strand
ccgggaaccuucuggucau

SEQ ID NO: 2052621 - RNA, 19 nt, Homo sapiens
  misc_RNA (1)...(19): siRNA sense strand
gcacaggaaccaggugacu

SEQ ID NO: 2052622 - RNA, 19 nt, Homo sapiens
  misc_RNA (1)...(19): siRNA sense strand
gcuuugagcugaacucuga

SEQ ID NO: 2052623 - RNA, 19 nt, Homo sapiens
  misc_RNA (1)...(19): siRNA sense strand
gaaccugacaucaaacuuu

SEQ ID NO: 2052624 - RNA, 19 nt, Homo sapiens
  misc_RNA (1)...(19): siRNA sense strand
gagcugaacucugagaaug

SEQ ID NO: 2052625 - RNA, 19 nt, Homo sapiens
  misc_RNA (1)...(19): siRNA sense strand
augcuaaccuugaguauaa

SEQ ID NO: 2052626 - RNA, 19 nt, Homo sapiens
  misc_RNA (1)...(19): siRNA sense strand
gcccuuaccugaugcuaaa

SEQ ID NO: 2052627 - RNA, 19 nt, Homo sapiens
  misc_RNA (1)...(19): siRNA sense strand
ggaagugaauguggacuau

SEQ ID NO: 2052628 - RNA, 19 nt, Homo sapiens
  misc_RNA (1)...(19): siRNA sense strand
ggagcaggaugaaauguuc

SEQ ID NO: 2052629 - RNA, 19 nt, Homo sapiens
  misc_RNA (1)...(19): siRNA sense strand
gagcauaauuagcaucauc

SEQ ID NO: 2052630 - RNA, 19 nt, Homo sapiens
  misc_RNA (1)...(19): siRNA sense strand
ggaaugcuaaccuugagua

SEQ ID NO: 2052631 - RNA, 19 nt, Homo sapiens
  misc_RNA (1)...(19): siRNA sense strand
ucaaagaaggcaaagauga

SEQ ID NO: 2052632 - RNA, 19 nt, Homo sapiens
  misc_RNA (1)...(19): siRNA sense strand
gugugucucuucuuucuuu

SEQ ID NO: 2052633 - RNA, 19 nt, Homo sapiens
  misc_RNA (1)...(19): siRNA sense strand
ucugugcucuacaauguua

SEQ ID NO: 2052634 - RNA, 19 nt, Homo sapiens
  misc_RNA (1)...(19): siRNA sense strand
ccaugaagguugugucugu

SEQ ID NO: 2052635 - RNA, 19 nt, Homo sapiens
  misc_RNA (1)...(19): siRNA sense strand
aagugaauguggacuauaa

SEQ ID NO: 2052636 - RNA, 19 nt, Homo sapiens
  misc_RNA (1)...(19): siRNA sense strand
gaagugaauguggacuaua

SEQ ID NO: 2052637 - RNA, 19 nt, Homo sapiens
  misc_RNA (1)...(19): siRNA sense strand
gcuggcaccuacaaauguu

SEQ ID NO: 2052638 - RNA, 19 nt, Homo sapiens
  misc_RNA (1)...(19): siRNA sense strand
ugucugugcucuacaaugu

SEQ ID NO: 2052639 - RNA, 19 nt, Homo sapiens
  misc_RNA (1)...(19): siRNA sense strand
guucaaagaaggcaaagau

SEQ ID NO: 2052640 - RNA, 19 nt, Homo sapiens
  misc_RNA (1)...(19): siRNA sense strand
gcugaacucugagaaugug

SEQ ID NO: 2052641 - RNA, 19 nt, Homo sapiens
  misc_RNA (1)...(19): siRNA sense strand
cucaaaggcuucucugugu

SEQ ID NO: 2052642 - RNA, 19 nt, Homo sapiens
  misc_RNA (1)...(19): siRNA sense strand
gacagaaucggagaucaaa

SEQ ID NO: 2052643 - RNA, 19 nt, Homo sapiens
  misc_RNA (1)...(19): siRNA sense strand
gcacucaucauuggcuuug

SEQ ID NO: 2052644 - RNA, 19 nt, Homo sapiens
  misc_RNA (1)...(19): siRNA sense strand
gccaucagcugggcacuuc

SEQ ID NO: 2052645 - RNA, 19 nt, Homo sapiens
  misc_RNA (1)...(19): siRNA sense strand
cugagaaugugaccaugaa

SEQ ID NO: 2052646 - RNA, 19 nt, Homo sapiens
  misc_RNA (1)...(19): siRNA sense strand
uauucuggcuggagcaauu

SEQ ID NO: 2052647 - RNA, 19 nt, Homo sapiens
  misc_RNA (1)...(19): siRNA sense strand
caaagaaggcaaagaugag

SEQ ID NO: 2052648 - RNA, 19 nt, Homo sapiens
  misc_RNA (1)...(19): siRNA sense strand
gauaucaaagugacagaau

SEQ ID NO: 2052649 - RNA, 19 nt, Homo sapiens
  misc_RNA (1)...(19): siRNA sense strand
aucauuggcuuugguauuu

SEQ ID NO: 2052650 - RNA, 19 nt, Homo sapiens
  misc_RNA (1)...(19): siRNA sense strand
caucauuggcuuugguauu

SEQ ID NO: 2052651 - RNA, 19 nt, Homo sapiens
  misc_RNA (1)...(19): siRNA sense strand
ucucggaagucuccaauac

SEQ ID NO: 2052652 - RNA, 19 nt, Homo sapiens
  misc_RNA (1)...(19): siRNA sense strand
gcaccuacaaauguuauau

SEQ ID NO: 2052653 - RNA, 19 nt, Homo sapiens
  misc_RNA (1)...(19): siRNA sense strand
ucacagaugcuggcaccua

SEQ ID NO: 2052654 - RNA, 19 nt, Homo sapiens
  misc_RNA (1)...(19): siRNA sense strand
ugacagaaucggagaucaa

SEQ ID NO: 2052655 - RNA, 19 nt, Homo sapiens
  misc_RNA (1)...(19): siRNA sense strand
cgccucagcugggaacauu

SEQ ID NO: 2052656 - RNA, 19 nt, Homo sapiens
  misc_RNA (1)...(19): siRNA sense strand
uauaaugccagcucagaga

SEQ ID NO: 2052657 - RNA, 19 nt, Homo sapiens
  misc_RNA (1)...(19): siRNA sense strand
guccaugaguucaaagaag

SEQ ID NO: 2052658 - RNA, 19 nt, Homo sapiens
  misc_RNA (1)...(19): siRNA sense strand
caaaggcuucucugugugu

SEQ ID NO: 2052659 - RNA, 19 nt, Homo sapiens
  misc_RNA (1)...(19): siRNA sense strand
ucuacaauguuacgaucaa

SEQ ID NO: 2052660 - RNA, 19 nt, Homo sapiens
  misc_RNA (1)...(19): siRNA sense strand
gaauccagagcugcacuuu

SEQ ID NO: 2052661 - RNA, 19 nt, Homo sapiens
  misc_RNA (1)...(19): siRNA sense strand
gaaugugaccaugaagguu

SEQ ID NO: 2052662 - RNA, 19 nt, Homo sapiens
  misc_RNA (1)...(19): siRNA sense strand
aaccugacaucaaacuuuc

SEQ ID NO: 2052663 - RNA, 19 nt, Homo sapiens
  misc_RNA (1)...(19): siRNA sense strand
gaugcuggcaccuacaaau

SEQ ID NO: 2052664 - RNA, 19 nt, Homo sapiens
  misc_RNA (1)...(19): siRNA sense strand
aacaacacauacuccugua

SEQ ID NO: 2052665 - RNA, 19 nt, Homo sapiens
  misc_RNA (1)...(19): siRNA sense strand
cagcaugccggaagugaau

SEQ ID NO: 2052666 - RNA, 19 nt, Homo sapiens
  misc_RNA (1)...(19): siRNA sense strand
gcugaaggaagguguuuua

SEQ ID NO: 2052667 - RNA, 19 nt, Homo sapiens
  misc_RNA (1)...(19): siRNA sense strand
uacagcugcuaaacucaaa

SEQ ID NO: 2052668 - RNA, 19 nt, Homo sapiens
  misc_RNA (1)...(19): siRNA sense strand
ugucggagcaggaugaaau

SEQ ID NO: 2052669 - RNA, 19 nt, Homo sapiens
  misc_RNA (1)...(19): siRNA sense strand
gaaugcuaaccuugaguau

SEQ ID NO: 2052670 - RNA, 19 nt, Homo sapiens
  misc_RNA (1)...(19): siRNA sense strand
aguguuugcugaucaagug

SEQ ID NO: 2052671 - RNA, 19 nt, Homo sapiens
  misc_RNA (1)...(19): siRNA sense strand
caagugauaguuggcaaug

SEQ ID NO: 2052672 - RNA, 19 nt, Homo sapiens
  misc_RNA (1)...(19): siRNA sense strand
ucggaagucuccaauacca

SEQ ID NO: 2052673 - RNA, 19 nt, Homo sapiens
  misc_RNA (1)...(19): siRNA sense strand
ggagcaauugcacucauca

SEQ ID NO: 2052674 - RNA, 19 nt, Homo sapiens
  misc_RNA (1)...(19): siRNA sense strand
ggauaucaaagugacagaa

SEQ ID NO: 2052675 - RNA, 19 nt, Homo sapiens
  misc_RNA (1)...(19): siRNA sense strand
gugaauguggacuauaaug

SEQ ID NO: 2052676 - RNA, 19 nt, Homo sapiens
  misc_RNA (1)...(19): siRNA sense strand
cagagaccuugcgguguga

SEQ ID NO: 2052677 - RNA, 19 nt, Homo sapiens
  misc_RNA (1)...(19): siRNA sense strand
gauacaauggcugaaggaa

SEQ ID NO: 2052678 - RNA, 19 nt, Homo sapiens
  misc_RNA (1)...(19): siRNA sense strand
cuacagcugcuaaacucaa

SEQ ID NO: 2052679 - RNA, 19 nt, Homo sapiens
  misc_RNA (1)...(19): siRNA sense strand
uuacgaucaacaacacaua

SEQ ID NO: 2052680 - RNA, 19 nt, Homo sapiens
  misc_RNA (1)...(19): siRNA sense strand
ggaauccagagcugcacuu

SEQ ID NO: 2052681 - RNA, 19 nt, Homo sapiens
  misc_RNA (1)...(19): siRNA sense strand
cauuggcuuugguauuuca

SEQ ID NO: 2052682 - RNA, 19 nt, Homo sapiens
  misc_RNA (1)...(19): siRNA sense strand
gguccaugaguucaaagaa

SEQ ID NO: 2052683 - RNA, 19 nt, Homo sapiens
  misc_RNA (1)...(19): siRNA sense strand
aaugcuaaccuugaguaua

SEQ ID NO: 2052684 - RNA, 19 nt, Homo sapiens
  misc_RNA (1)...(19): siRNA sense strand
caacaggggauaucaaagu

SEQ ID NO: 2052685 - RNA, 19 nt, Homo sapiens
  misc_RNA (1)...(19): siRNA sense strand
ugaguucaaagaaggcaaa

SEQ ID NO: 2052686 - RNA, 19 nt, Homo sapiens
  misc_RNA (1)...(19): siRNA sense strand
ccuguaugauugaaaauga

SEQ ID NO: 2052687 - RNA, 19 nt, Homo sapiens
  misc_RNA (1)...(19): siRNA sense strand
gaccaugaagguugugucu

SEQ ID NO: 2052688 - RNA, 19 nt, Homo sapiens
  misc_RNA (1)...(19): siRNA sense strand
gauccucuucuggagcaua

SEQ ID NO: 2052689 - RNA, 19 nt, Homo sapiens
  misc_RNA (1)...(19): siRNA sense strand
gagccuacauccagaauga

SEQ ID NO: 2052690 - RNA, 19 nt, Homo sapiens
  misc_RNA (1)...(19): siRNA sense strand
gcuuugagcuggugggaau

SEQ ID NO: 2052691 - RNA, 19 nt, Homo sapiens
  misc_RNA (1)...(19): siRNA sense strand
cggcugcgguugagacuga

SEQ ID NO: 2052692 - RNA, 19 nt, Homo sapiens
  misc_RNA (1)...(19): siRNA sense strand
ccucagcaccugccacuuu

SEQ ID NO: 2052693 - RNA, 19 nt, Homo sapiens
  misc_RNA (1)...(19): siRNA sense strand
ccaccauauuugagucuuu

SEQ ID NO: 2052694 - RNA, 19 nt, Homo sapiens
  misc_RNA (1)...(19): siRNA sense strand
ggaaucaguggauaucaca

SEQ ID NO: 2052695 - RNA, 19 nt, Homo sapiens
  misc_RNA (1)...(19): siRNA sense strand
gauaucacaggcuaaagga

SEQ ID NO: 2052696 - RNA, 19 nt, Homo sapiens
  misc_RNA (1)...(19): siRNA sense strand
ggacaaccaagaccaaagg

SEQ ID NO: 2052697 - RNA, 19 nt, Homo sapiens
  misc_RNA (1)...(19): siRNA sense strand
ggauaucacaggcuaaagg

SEQ ID NO: 2052698 - RNA, 19 nt, Homo sapiens
  misc_RNA (1)...(19): siRNA sense strand
agaccaaaggacacaguua

SEQ ID NO: 2052699 - RNA, 19 nt, Homo sapiens
  misc_RNA (1)...(19): siRNA sense strand
cggcaucuccuuccacaga

SEQ ID NO: 2052700 - RNA, 19 nt, Homo sapiens
  misc_RNA (1)...(19): siRNA sense strand
gaccaaaggacacaguuac

SEQ ID NO: 2052701 - RNA, 19 nt, Homo sapiens
  misc_RNA (1)...(19): siRNA sense strand
gggaaucaguggauaucac

SEQ ID NO: 2052702 - RNA, 19 nt, Homo sapiens
  misc_RNA (1)...(19): siRNA sense strand
caccauauuugagucuuuc

SEQ ID NO: 2052703 - RNA, 19 nt, Homo sapiens
  misc_RNA (1)...(19): siRNA sense strand
uccacagacuucccaagaa

SEQ ID NO: 2052704 - RNA, 19 nt, Homo sapiens
  misc_RNA (1)...(19): siRNA sense strand
gcagcgccuuacucuggaa

SEQ ID NO: 2052705 - RNA, 19 nt, Homo sapiens
  misc_RNA (1)...(19): siRNA sense strand
cugcugaugucaccugcuu

SEQ ID NO: 2052706 - RNA, 19 nt, Homo sapiens
  misc_RNA (1)...(19): siRNA sense strand
gcugaugucaccugcuuuc

SEQ ID NO: 2052707 - RNA, 19 nt, Homo sapiens
  misc_RNA (1)...(19): siRNA sense strand
cuucugcuccaaacacuuu

SEQ ID NO: 2052708 - RNA, 19 nt, Homo sapiens
  misc_RNA (1)...(19): siRNA sense strand
guggauaucacaggcuaaa

SEQ ID NO: 2052709 - RNA, 19 nt, Homo sapiens
  misc_RNA (1)...(19): siRNA sense strand
gguugagacugaccaagcu

SEQ ID NO: 2052710 - RNA, 19 nt, Homo sapiens
  misc_RNA (1)...(19): siRNA sense strand
uugagucuuucuccaaguu

SEQ ID NO: 2052711 - RNA, 19 nt, Homo sapiens
  misc_RNA (1)...(19): siRNA sense strand
gagcaugugcaggacuuug

SEQ ID NO: 2052712 - RNA, 19 nt, Homo sapiens
  misc_RNA (1)...(19): siRNA sense strand
cucagcaccugccacuuug

SEQ ID NO: 2052713 - RNA, 19 nt, Homo sapiens
  misc_RNA (1)...(19): siRNA sense strand
caucuacuucugcuccaaa

SEQ ID NO: 2052714 - RNA, 19 nt, Homo sapiens
  misc_RNA (1)...(19): siRNA sense strand
ggugggaaucaguggauau

SEQ ID NO: 2052715 - RNA, 19 nt, Homo sapiens
  misc_RNA (1)...(19): siRNA sense strand
gaagcgggcacaggcagau

SEQ ID NO: 2052716 - RNA, 19 nt, Homo sapiens
  misc_RNA (1)...(19): siRNA sense strand
gagaaaggguuuacgauua

SEQ ID NO: 2052717 - RNA, 19 nt, Homo sapiens
  misc_RNA (1)...(19): siRNA sense strand
gagaucagcucuaucaaua

SEQ ID NO: 2052718 - RNA, 19 nt, Homo sapiens
  misc_RNA (1)...(19): siRNA sense strand
gaacaccucuugguuauuu

SEQ ID NO: 2052719 - RNA, 19 nt, Homo sapiens
  misc_RNA (1)...(19): siRNA sense strand
guaaagaacuacaggauga

SEQ ID NO: 2052720 - RNA, 19 nt, Homo sapiens
  misc_RNA (1)...(19): siRNA sense strand
ggcgaaaucucaucuguua

SEQ ID NO: 2052721 - RNA, 19 nt, Homo sapiens
  misc_RNA (1)...(19): siRNA sense strand
ccagaaagcuuacuauaau

SEQ ID NO: 2052722 - RNA, 19 nt, Homo sapiens
  misc_RNA (1)...(19): siRNA sense strand
guagcaaagucuaugauua

SEQ ID NO: 2052723 - RNA, 19 nt, Homo sapiens
  misc_RNA (1)...(19): siRNA sense strand
ggagaacaccucuugguua

SEQ ID NO: 2052724 - RNA, 19 nt, Homo sapiens
  misc_RNA (1)...(19): siRNA sense strand
agagagaacugauaugaaa

SEQ ID NO: 2052725 - RNA, 19 nt, Homo sapiens
  misc_RNA (1)...(19): siRNA sense strand
gagaacaccucuugguuau

SEQ ID NO: 2052726 - RNA, 19 nt, Homo sapiens
  misc_RNA (1)...(19): siRNA sense strand
guaagcaucuuugacauuu

SEQ ID NO: 2052727 - RNA, 19 nt, Homo sapiens
  misc_RNA (1)...(19): siRNA sense strand
gaacgugguuauccaaaug

SEQ ID NO: 2052728 - RNA, 19 nt, Homo sapiens
  misc_RNA (1)...(19): siRNA sense strand
gacgauaggugcagagaaa

SEQ ID NO: 2052729 - RNA, 19 nt, Homo sapiens
  misc_RNA (1)...(19): siRNA sense strand
agaaaggguuuacgauuaa

SEQ ID NO: 2052730 - RNA, 19 nt, Homo sapiens
  misc_RNA (1)...(19): siRNA sense strand
gaauggagaucagcucuau

SEQ ID NO: 2052731 - RNA, 19 nt, Homo sapiens
  misc_RNA (1)...(19): siRNA sense strand
uaaaauggcucuaccaaaa

SEQ ID NO: 2052732 - RNA, 19 nt, Homo sapiens
  misc_RNA (1)...(19): siRNA sense strand
gaucauaggcgaaaucuca

SEQ ID NO: 2052733 - RNA, 19 nt, Homo sapiens
  misc_RNA (1)...(19): siRNA sense strand
caagauuccucaaggugua

SEQ ID NO: 2052734 - RNA, 19 nt, Homo sapiens
  misc_RNA (1)...(19): siRNA sense strand
caaagggaauuguaucuuc

SEQ ID NO: 2052735 - RNA, 19 nt, Homo sapiens
  misc_RNA (1)...(19): siRNA sense strand
ccgcagaaaugaaacaauu

SEQ ID NO: 2052736 - RNA, 19 nt, Homo sapiens
  misc_RNA (1)...(19): siRNA sense strand
gaguguagccagugcauua

SEQ ID NO: 2052737 - RNA, 19 nt, Homo sapiens
  misc_RNA (1)...(19): siRNA sense strand
ugaauaagcaucucuuuga

SEQ ID NO: 2052738 - RNA, 19 nt, Homo sapiens
  misc_RNA (1)...(19): siRNA sense strand
gaauaagcaucucuuugau

SEQ ID NO: 2052739 - RNA, 19 nt, Homo sapiens
  misc_RNA (1)...(19): siRNA sense strand
gaaacuggcugaggugcaa

SEQ ID NO: 2052740 - RNA, 19 nt, Homo sapiens
  misc_RNA (1)...(19): siRNA sense strand
ggagagaaacagaugagua

SEQ ID NO: 2052741 - RNA, 19 nt, Homo sapiens
  misc_RNA (1)...(19): siRNA sense strand
gaucagggcuguuaaucgu

SEQ ID NO: 2052742 - RNA, 19 nt, Homo sapiens
  misc_RNA (1)...(19): siRNA sense strand
gcuaauaccaguaguaaau

SEQ ID NO: 2052743 - RNA, 19 nt, Homo sapiens
  misc_RNA (1)...(19): siRNA sense strand
guaagaacccauucaagaa

SEQ ID NO: 2052744 - RNA, 19 nt, Homo sapiens
  misc_RNA (1)...(19): siRNA sense strand
ccacccaacucuuuaguga

SEQ ID NO: 2052745 - RNA, 19 nt, Homo sapiens
  misc_RNA (1)...(19): siRNA sense strand
gaaacaauuugcauguaca

SEQ ID NO: 2052746 - RNA, 19 nt, Homo sapiens
  misc_RNA (1)...(19): siRNA sense strand
uuccuuaucuucugacuua

SEQ ID NO: 2052747 - RNA, 19 nt, Homo sapiens
  misc_RNA (1)...(19): siRNA sense strand
agacuuaucuccguaaaga

SEQ ID NO: 2052748 - RNA, 19 nt, Homo sapiens
  misc_RNA (1)...(19): siRNA sense strand
uaaaccacguguuaauuga

SEQ ID NO: 2052749 - RNA, 19 nt, Homo sapiens
  misc_RNA (1)...(19): siRNA sense strand
guguacaucuuaaagguaa

SEQ ID NO: 2052750 - RNA, 19 nt, Homo sapiens
  misc_RNA (1)...(19): siRNA sense strand
ggaauuguaucuucaacag

SEQ ID NO: 2052751 - RNA, 19 nt, Homo sapiens
  misc_RNA (1)...(19): siRNA sense strand
gaagagaaaggguuuacga

SEQ ID NO: 2052752 - RNA, 19 nt, Homo sapiens
  misc_RNA (1)...(19): siRNA sense strand
ucaaguugcuaaaggauau

SEQ ID NO: 2052753 - RNA, 19 nt, Homo sapiens
  misc_RNA (1)...(19): siRNA sense strand
ggagaccagauacaaauuu

SEQ ID NO: 2052754 - RNA, 19 nt, Homo sapiens
  misc_RNA (1)...(19): siRNA sense strand
gggucacuauuauuuguua

SEQ ID NO: 2052755 - RNA, 19 nt, Homo sapiens
  misc_RNA (1)...(19): siRNA sense strand
ccagugcauuagaauauuu

SEQ ID NO: 2052756 - RNA, 19 nt, Homo sapiens
  misc_RNA (1)...(19): siRNA sense strand
gaucagcucuaucaauacu

SEQ ID NO: 2052757 - RNA, 19 nt, Homo sapiens
  misc_RNA (1)...(19): siRNA sense strand
caaauucagucaugaucau

SEQ ID NO: 2052758 - RNA, 19 nt, Homo sapiens
  misc_RNA (1)...(19): siRNA sense strand
gagaccagauacaaauuuc

SEQ ID NO: 2052759 - RNA, 19 nt, Homo sapiens
  misc_RNA (1)...(19): siRNA sense strand
uaaacugagugacauagga

SEQ ID NO: 2052760 - RNA, 19 nt, Homo sapiens
  misc_RNA (1)...(19): siRNA sense strand
ggaggaacaggaauuauca

SEQ ID NO: 2052761 - RNA, 19 nt, Homo sapiens
  misc_RNA (1)...(19): siRNA sense strand
gucaacagauugcauacuu

SEQ ID NO: 2052762 - RNA, 19 nt, Homo sapiens
  misc_RNA (1)...(19): siRNA sense strand
gguuuacgauuaauugaug

SEQ ID NO: 2052763 - RNA, 19 nt, Homo sapiens
  misc_RNA (1)...(19): siRNA sense strand
ggagaagugugugccauca

SEQ ID NO: 2052764 - RNA, 19 nt, Homo sapiens
  misc_RNA (1)...(19): siRNA sense strand
aguaggaacuguuauggaa

SEQ ID NO: 2052765 - RNA, 19 nt, Homo sapiens
  misc_RNA (1)...(19): siRNA sense strand
ccuuagaccugccaccuuu

SEQ ID NO: 2052766 - RNA, 19 nt, Homo sapiens
  misc_RNA (1)...(19): siRNA sense strand
aaacgccacuugcuucaga

SEQ ID NO: 2052767 - RNA, 19 nt, Homo sapiens
  misc_RNA (1)...(19): siRNA sense strand
gauccuagcagucacaguu

SEQ ID NO: 2052768 - RNA, 19 nt, Homo sapiens
  misc_RNA (1)...(19): siRNA sense strand
gaugaguacuccgcagaaa

SEQ ID NO: 2052769 - RNA, 19 nt, Homo sapiens
  misc_RNA (1)...(19): siRNA sense strand
guacuccgcagaaaugaaa

SEQ ID NO: 2052770 - RNA, 19 nt, Homo sapiens
  misc_RNA (1)...(19): siRNA sense strand
ucaggcauuugcuaaguaa

SEQ ID NO: 2052771 - RNA, 19 nt, Homo sapiens
  misc_RNA (1)...(19): siRNA sense strand
cgaaaucucaucuguuaug

SEQ ID NO: 2052772 - RNA, 19 nt, Homo sapiens
  misc_RNA (1)...(19): siRNA sense strand
gaaagaauaccaaguacac

SEQ ID NO: 2052773 - RNA, 19 nt, Homo sapiens
  misc_RNA (1)...(19): siRNA sense strand
ggagaucagcucuaucaau

SEQ ID NO: 2052774 - RNA, 19 nt, Homo sapiens
  misc_RNA (1)...(19): siRNA sense strand
caaguuaucagcucuuuua

SEQ ID NO: 2052775 - RNA, 19 nt, Homo sapiens
  misc_RNA (1)...(19): siRNA sense strand
cagcauccuucaucuucua

SEQ ID NO: 2052776 - RNA, 19 nt, Homo sapiens
  misc_RNA (1)...(19): siRNA sense strand
gaaaggguuuacgauuaau

SEQ ID NO: 2052777 - RNA, 19 nt, Homo sapiens
  misc_RNA (1)...(19): siRNA sense strand
cuacugaggaccauaacua

SEQ ID NO: 2052778 - RNA, 19 nt, Homo sapiens
  misc_RNA (1)...(19): siRNA sense strand
gacacuagcaauaaucaaa

SEQ ID NO: 2052779 - RNA, 19 nt, Homo sapiens
  misc_RNA (1)...(19): siRNA sense strand
caaucuguuugacaucuuu

SEQ ID NO: 2052780 - RNA, 19 nt, Homo sapiens
  misc_RNA (1)...(19): siRNA sense strand
guacugaaagugaauagug

SEQ ID NO: 2052781 - RNA, 19 nt, Homo sapiens
  misc_RNA (1)...(19): siRNA sense strand
ggacuuuggucuuggaaaa

SEQ ID NO: 2052782 - RNA, 19 nt, Homo sapiens
  misc_RNA (1)...(19): siRNA sense strand
uguaagaacccauucaaga

SEQ ID NO: 2052783 - RNA, 19 nt, Homo sapiens
  misc_RNA (1)...(19): siRNA sense strand
ggacuuaaagggccucugu

SEQ ID NO: 2052784 - RNA, 19 nt, Homo sapiens
  misc_RNA (1)...(19): siRNA sense strand
gagagaaacagaugaguac

SEQ ID NO: 2052785 - RNA, 19 nt, Homo sapiens
  misc_RNA (1)...(19): siRNA sense strand
ggaacaggaauuaucaaau

SEQ ID NO: 2052786 - RNA, 19 nt, Homo sapiens
  misc_RNA (1)...(19): siRNA sense strand
ugaaacaauuugcauguac

SEQ ID NO: 2052787 - RNA, 19 nt, Homo sapiens
  misc_RNA (1)...(19): siRNA sense strand
ccucaagguguacaucuua

SEQ ID NO: 2052788 - RNA, 19 nt, Homo sapiens
  misc_RNA (1)...(19): siRNA sense strand
gaaacacuggucaccugua

SEQ ID NO: 2052789 - RNA, 19 nt, Homo sapiens
  misc_RNA (1)...(19): siRNA sense strand
aaacaucauucagagagaa

SEQ ID NO: 2052790 - RNA, 19 nt, Homo sapiens
  misc_RNA (1)...(19): siRNA sense strand
guauaccucucaagcaaca

SEQ ID NO: 2052791 - RNA, 19 nt, Homo sapiens
  misc_RNA (1)...(19): siRNA sense strand
uggcugaggugcaacaaau

SEQ ID NO: 2052792 - RNA, 19 nt, Homo sapiens
  misc_RNA (1)...(19): siRNA sense strand
cucaagaaguugcuacuga

SEQ ID NO: 2052793 - RNA, 19 nt, Homo sapiens
  misc_RNA (1)...(19): siRNA sense strand
cauguacacucuacuugug

SEQ ID NO: 2052794 - RNA, 19 nt, Homo sapiens
  misc_RNA (1)...(19): siRNA sense strand
aaagggaauuguaucuuca

SEQ ID NO: 2052795 - RNA, 19 nt, Homo sapiens
  misc_RNA (1)...(19): siRNA sense strand
cgaagaggguauuugucaa

SEQ ID NO: 2052796 - RNA, 19 nt, Homo sapiens
  misc_RNA (1)...(19): siRNA sense strand
ggugucagcguuacaaaga

SEQ ID NO: 2052797 - RNA, 19 nt, Homo sapiens
  misc_RNA (1)...(19): siRNA sense strand
uaucugacacuagcaauaa

SEQ ID NO: 2052798 - RNA, 19 nt, Homo sapiens
  misc_RNA (1)...(19): siRNA sense strand
ggcagcaccucguggaguu

SEQ ID NO: 2052799 - RNA, 19 nt, Homo sapiens
  misc_RNA (1)...(19): siRNA sense strand
acagauugcauacuucuuu

SEQ ID NO: 2052800 - RNA, 19 nt, Homo sapiens
  misc_RNA (1)...(19): siRNA sense strand
gaugaaacgccacuugcuu

SEQ ID NO: 2052801 - RNA, 19 nt, Homo sapiens
  misc_RNA (1)...(19): siRNA sense strand
caacgaagaguagagaaug

SEQ ID NO: 2052802 - RNA, 19 nt, Homo sapiens
  misc_RNA (1)...(19): siRNA sense strand
ucaagaagagaaaggguuu

SEQ ID NO: 2052803 - RNA, 19 nt, Homo sapiens
  misc_RNA (1)...(19): siRNA sense strand
aguaguaaauucaggcauu

SEQ ID NO: 2052804 - RNA, 19 nt, Homo sapiens
  misc_RNA (1)...(19): siRNA sense strand
uaucagcucuuuuaacuug

SEQ ID NO: 2052805 - RNA, 19 nt, Homo sapiens
  misc_RNA (1)...(19): siRNA sense strand
gaagaggguauuugucaag

SEQ ID NO: 2052806 - RNA, 19 nt, Homo sapiens
  misc_RNA (1)...(19): siRNA sense strand
ucaugaucaucuggaauua

SEQ ID NO: 2052807 - RNA, 19 nt, Homo sapiens
  misc_RNA (1)...(19): siRNA sense strand
gggccucuguugccugaaa

SEQ ID NO: 2052808 - RNA, 19 nt, Homo sapiens
  misc_RNA (1)...(19): siRNA sense strand
ggagcugugccuucuguuu

SEQ ID NO: 2052809 - RNA, 19 nt, Homo sapiens
  misc_RNA (1)...(19): siRNA sense strand
ugacauaggaaucacaguu

SEQ ID NO: 2052810 - RNA, 19 nt, Homo sapiens
  misc_RNA (1)...(19): siRNA sense strand
aaguauaccucucaagcaa

SEQ ID NO: 2052811 - RNA, 19 nt, Homo sapiens
  misc_RNA (1)...(19): siRNA sense strand
gagcucaauuuucagauuu

SEQ ID NO: 2052812 - RNA, 19 nt, Homo sapiens
  misc_RNA (1)...(19): siRNA sense strand
gcuacgagcucaauuuuca

SEQ ID NO: 2052813 - RNA, 19 nt, Homo sapiens
  misc_RNA (1)...(19): siRNA sense strand
ggaaagaauaccaaguaca

SEQ ID NO: 2052814 - RNA, 19 nt, Homo sapiens
  misc_RNA (1)...(19): siRNA sense strand
aaagaagaaugguuugcau

SEQ ID NO: 2052815 - RNA, 19 nt, Homo sapiens
  misc_RNA (1)...(19): siRNA sense strand
agaagugugugccaucaau

SEQ ID NO: 2052816 - RNA, 19 nt, Homo sapiens
  misc_RNA (1)...(19): siRNA sense strand
gagaagcguuuguagauua

SEQ ID NO: 2052817 - RNA, 19 nt, Homo sapiens
  misc_RNA (1)...(19): siRNA sense strand
ggaguugucugcuuaauau

SEQ ID NO: 2052818 - RNA, 19 nt, Homo sapiens
  misc_RNA (1)...(19): siRNA sense strand
ggacagauguuaaauggau

SEQ ID NO: 2052819 - RNA, 19 nt, Homo sapiens
  misc_RNA (1)...(19): siRNA sense strand
gcauagaggcuguguuaua

SEQ ID NO: 2052820 - RNA, 19 nt, Homo sapiens
  misc_RNA (1)...(19): siRNA sense strand
ggucuaagaugcauaccua

SEQ ID NO: 2052821 - RNA, 19 nt, Homo sapiens
  misc_RNA (1)...(19): siRNA sense strand
gaauagcuauggcaagguu

SEQ ID NO: 2052822 - RNA, 19 nt, Homo sapiens
  misc_RNA (1)...(19): siRNA sense strand
gaggacagauguuaaaugg

SEQ ID NO: 2052823 - RNA, 19 nt, Homo sapiens
  misc_RNA (1)...(19): siRNA sense strand
ggaauuacuuguggaguug

SEQ ID NO: 2052824 - RNA, 19 nt, Homo sapiens
  misc_RNA (1)...(19): siRNA sense strand
cauagaggcuguguuauau

SEQ ID NO: 2052825 - RNA, 19 nt, Homo sapiens
  misc_RNA (1)...(19): siRNA sense strand
ggagaagcguuuguagauu

SEQ ID NO: 2052826 - RNA, 19 nt, Homo sapiens
  misc_RNA (1)...(19): siRNA sense strand
uaaccacagugacauugua

SEQ ID NO: 2052827 - RNA, 19 nt, Homo sapiens
  misc_RNA (1)...(19): siRNA sense strand
gcagggcgcauauuaaaga

SEQ ID NO: 2052828 - RNA, 19 nt, Homo sapiens
  misc_RNA (1)...(19): siRNA sense strand
cugcaacacuagcuuauuu

SEQ ID NO: 2052829 - RNA, 19 nt, Homo sapiens
  misc_RNA (1)...(19): siRNA sense strand
uaacugugcuccugacauc

SEQ ID NO: 2052830 - RNA, 19 nt, Homo sapiens
  misc_RNA (1)...(19): siRNA sense strand
ggaguguucuugaauagca

SEQ ID NO: 2052831 - RNA, 19 nt, Homo sapiens
  misc_RNA (1)...(19): siRNA sense strand
auacagaguugucuugguu

SEQ ID NO: 2052832 - RNA, 19 nt, Homo sapiens
  misc_RNA (1)...(19): siRNA sense strand
ucgcauagaggcuguguua

SEQ ID NO: 2052833 - RNA, 19 nt, Homo sapiens
  misc_RNA (1)...(19): siRNA sense strand
gacagacucuaucuugaug

SEQ ID NO: 2052834 - RNA, 19 nt, Homo sapiens
  misc_RNA (1)...(19): siRNA sense strand
caucacacaccuaccuuua

SEQ ID NO: 2052835 - RNA, 19 nt, Homo sapiens
  misc_RNA (1)...(19): siRNA sense strand
gcagcagggcgcauauuaa

SEQ ID NO: 2052836 - RNA, 19 nt, Homo sapiens
  misc_RNA (1)...(19): siRNA sense strand
gaacagcaucacacaccua

SEQ ID NO: 2052837 - RNA, 19 nt, Homo sapiens
  misc_RNA (1)...(19): siRNA sense strand
cagcagggcgcauauuaaa

SEQ ID NO: 2052838 - RNA, 19 nt, Homo sapiens
  misc_RNA (1)...(19): siRNA sense strand
gaacuggucuaagaugcau

SEQ ID NO: 2052839 - RNA, 19 nt, Homo sapiens
  misc_RNA (1)...(19): siRNA sense strand
ggaguucuggacuuaauuu

SEQ ID NO: 2052840 - RNA, 19 nt, Homo sapiens
  misc_RNA (1)...(19): siRNA sense strand
gcagcaccauuucucucua

SEQ ID NO: 2052841 - RNA, 19 nt, Homo sapiens
  misc_RNA (1)...(19): siRNA sense strand
gaugcuggcuggauuggau

SEQ ID NO: 2052842 - RNA, 19 nt, Homo sapiens
  misc_RNA (1)...(19): siRNA sense strand
uaagaugcauaccuauauc

SEQ ID NO: 2052843 - RNA, 19 nt, Homo sapiens
  misc_RNA (1)...(19): siRNA sense strand
caucaaugcucaguuaucu

SEQ ID NO: 2052844 - RNA, 19 nt, Homo sapiens
  misc_RNA (1)...(19): siRNA sense strand
uauuaaagaucgcauagag

SEQ ID NO: 2052845 - RNA, 19 nt, Homo sapiens
  misc_RNA (1)...(19): siRNA sense strand
gguucacccugaccuguuu

SEQ ID NO: 2052846 - RNA, 19 nt, Homo sapiens
  misc_RNA (1)...(19): siRNA sense strand
cuccugacauccuuccuua

SEQ ID NO: 2052847 - RNA, 19 nt, Homo sapiens
  misc_RNA (1)...(19): siRNA sense strand
ucaaugcucaguuaucuug

SEQ ID NO: 2052848 - RNA, 19 nt, Homo sapiens
  misc_RNA (1)...(19): siRNA sense strand
ggaggacagauguuaaaug

SEQ ID NO: 2052849 - RNA, 19 nt, Homo sapiens
  misc_RNA (1)...(19): siRNA sense strand
guuggaggcuguguuguug

SEQ ID NO: 2052850 - RNA, 19 nt, Homo sapiens
  misc_RNA (1)...(19): siRNA sense strand
uuugggaacuggucuaaga

SEQ ID NO: 2052851 - RNA, 19 nt, Homo sapiens
  misc_RNA (1)...(19): siRNA sense strand
ucacacaccuaccuuuaac

SEQ ID NO: 2052852 - RNA, 19 nt, Homo sapiens
  misc_RNA (1)...(19): siRNA sense strand
ggucuggaguucuggacuu

SEQ ID NO: 2052853 - RNA, 19 nt, Homo sapiens
  misc_RNA (1)...(19): siRNA sense strand
cuaagaugcauaccuauau

SEQ ID NO: 2052854 - RNA, 19 nt, Homo sapiens
  misc_RNA (1)...(19): siRNA sense strand
ucauguggcuccuggacaa

SEQ ID NO: 2052855 - RNA, 19 nt, Homo sapiens
  misc_RNA (1)...(19): siRNA sense strand
uaugacagacucuaucuug

SEQ ID NO: 2052856 - RNA, 19 nt, Homo sapiens
  misc_RNA (1)...(19): siRNA sense strand
uagcagcgugccuauauuu

SEQ ID NO: 2052857 - RNA, 19 nt, Homo sapiens
  misc_RNA (1)...(19): siRNA sense strand
gagagcagcagggcgcaua

SEQ ID NO: 2052858 - RNA, 19 nt, Homo sapiens
  misc_RNA (1)...(19): siRNA sense strand
cagggaauccuaugacaga

SEQ ID NO: 2052859 - RNA, 19 nt, Homo sapiens
  misc_RNA (1)...(19): siRNA sense strand
gcauauuaaagaucgcaua

SEQ ID NO: 2052860 - RNA, 19 nt, Homo sapiens
  misc_RNA (1)...(19): siRNA sense strand
gcauaccuauaucagacuu

SEQ ID NO: 2052861 - RNA, 19 nt, Homo sapiens
  misc_RNA (1)...(19): siRNA sense strand
ucuaagaugcauaccuaua

SEQ ID NO: 2052862 - RNA, 19 nt, Homo sapiens
  misc_RNA (1)...(19): siRNA sense strand
cugggaguguucuugaaua

SEQ ID NO: 2052863 - RNA, 19 nt, Homo sapiens
  misc_RNA (1)...(19): siRNA sense strand
gacagauguuaaauggauu

SEQ ID NO: 2052864 - RNA, 19 nt, Homo sapiens
  misc_RNA (1)...(19): siRNA sense strand
aggaauuacuuguggaguu

SEQ ID NO: 2052865 - RNA, 19 nt, Homo sapiens
  misc_RNA (1)...(19): siRNA sense strand
cggagaagcguuuguagau

SEQ ID NO: 2052866 - RNA, 19 nt, Homo sapiens
  misc_RNA (1)...(19): siRNA sense strand
gacaucaccucuucuugcu

SEQ ID NO: 2052867 - RNA, 19 nt, Homo sapiens
  misc_RNA (1)...(19): siRNA sense strand
cggcugaguuaucggagaa

SEQ ID NO: 2052868 - RNA, 19 nt, Homo sapiens
  misc_RNA (1)...(19): siRNA sense strand
gcagguccaacuguaauga

SEQ ID NO: 2052869 - RNA, 19 nt, Homo sapiens
  misc_RNA (1)...(19): siRNA sense strand
cuuguggaguugucacuuu

SEQ ID NO: 2052870 - RNA, 19 nt, Homo sapiens
  misc_RNA (1)...(19): siRNA sense strand
gcgcaugucagccaaguag

SEQ ID NO: 2052871 - RNA, 19 nt, Homo sapiens
  misc_RNA (1)...(19): siRNA sense strand
agaagcguuuguagauuau

SEQ ID NO: 2052872 - RNA, 19 nt, Homo sapiens
  misc_RNA (1)...(19): siRNA sense strand
aaugggacaucaccucuuc

SEQ ID NO: 2052873 - RNA, 19 nt, Homo sapiens
  misc_RNA (1)...(19): siRNA sense strand
ggccacagccacagcuauu

SEQ ID NO: 2052874 - RNA, 19 nt, Homo sapiens
  misc_RNA (1)...(19): siRNA sense strand
ugacauccuuccuuauggu

SEQ ID NO: 2052875 - RNA, 19 nt, Homo sapiens
  misc_RNA (1)...(19): siRNA sense strand
ugacagacucuaucuugau

SEQ ID NO: 2052876 - RNA, 19 nt, Homo sapiens
  misc_RNA (1)...(19): siRNA sense strand
gucuggaguucuggacuua

SEQ ID NO: 2052877 - RNA, 19 nt, Homo sapiens
  misc_RNA (1)...(19): siRNA sense strand
aguagaugcuggcuggauu

SEQ ID NO: 2052878 - RNA, 19 nt, Homo sapiens
  misc_RNA (1)...(19): siRNA sense strand
ccagaaggaauuacuugug

SEQ ID NO: 2052879 - RNA, 19 nt, Homo sapiens
  misc_RNA (1)...(19): siRNA sense strand
cuacccaguuccagaagga

SEQ ID NO: 2052880 - RNA, 19 nt, Homo sapiens
  misc_RNA (1)...(19): siRNA sense strand
gcaucacacaccuaccuuu

SEQ ID NO: 2052881 - RNA, 19 nt, Homo sapiens
  misc_RNA (1)...(19): siRNA sense strand
aggcuguguuguuggaaua

SEQ ID NO: 2052882 - RNA, 19 nt, Homo sapiens
  misc_RNA (1)...(19): siRNA sense strand
gaggcuguguuguuggaau

SEQ ID NO: 2052883 - RNA, 19 nt, Homo sapiens
  misc_RNA (1)...(19): siRNA sense strand
agccacagcuauugcauca

SEQ ID NO: 2052884 - RNA, 19 nt, Homo sapiens
  misc_RNA (1)...(19): siRNA sense strand
cagacucuaucuugaugug

SEQ ID NO: 2052885 - RNA, 19 nt, Homo sapiens
  misc_RNA (1)...(19): siRNA sense strand
uagaggcuguguuauaugc

SEQ ID NO: 2052886 - RNA, 19 nt, Homo sapiens
  misc_RNA (1)...(19): siRNA sense strand
uuaguuggaccacuuguug

SEQ ID NO: 2052887 - RNA, 19 nt, Homo sapiens
  misc_RNA (1)...(19): siRNA sense strand
uuguaugccuccuguauuc

SEQ ID NO: 2052888 - RNA, 19 nt, Homo sapiens
  misc_RNA (1)...(19): siRNA sense strand
gaugcauaccuauaucaga

SEQ ID NO: 2052889 - RNA, 19 nt, Homo sapiens
  misc_RNA (1)...(19): siRNA sense strand
ggauuuugguccauaguug

SEQ ID NO: 2052890 - RNA, 19 nt, Homo sapiens
  misc_RNA (1)...(19): siRNA sense strand
gcaugucagccaaguagau

SEQ ID NO: 2052891 - RNA, 19 nt, Homo sapiens
  misc_RNA (1)...(19): siRNA sense strand
auuuggaguugucugcuua

SEQ ID NO: 2052892 - RNA, 19 nt, Homo sapiens
  misc_RNA (1)...(19): siRNA sense strand
uggaguugucugcuuaaua

SEQ ID NO: 2052893 - RNA, 19 nt, Homo sapiens
  misc_RNA (1)...(19): siRNA sense strand
ggucguguuugcucagucu

SEQ ID NO: 2052894 - RNA, 19 nt, Homo sapiens
  misc_RNA (1)...(19): siRNA sense strand
ccugacauccuuccuuaug

SEQ ID NO: 2052895 - RNA, 19 nt, Homo sapiens
  misc_RNA (1)...(19): siRNA sense strand
uaucggagaagcguuugua

SEQ ID NO: 2052896 - RNA, 19 nt, Homo sapiens
  misc_RNA (1)...(19): siRNA sense strand
guagaugcuggcuggauug

SEQ ID NO: 2052897 - RNA, 19 nt, Homo sapiens
  misc_RNA (1)...(19): siRNA sense strand
gagcagcagggcgcauauu

SEQ ID NO: 2052898 - RNA, 19 nt, Homo sapiens
  misc_RNA (1)...(19): siRNA sense strand
uaauucuucuccuccuguu

SEQ ID NO: 2052899 - RNA, 19 nt, Homo sapiens
  misc_RNA (1)...(19): siRNA sense strand
gguaugcugaaacuaauuc

SEQ ID NO: 2052900 - RNA, 19 nt, Homo sapiens
  misc_RNA (1)...(19): siRNA sense strand
ggaacuggucuaagaugca

SEQ ID NO: 2052901 - RNA, 19 nt, Homo sapiens
  misc_RNA (1)...(19): siRNA sense strand
acagaguugucuugguuca

SEQ ID NO: 2052902 - RNA, 19 nt, Homo sapiens
  misc_RNA (1)...(19): siRNA sense strand
cagcaccauuucucucuac

SEQ ID NO: 2052903 - RNA, 19 nt, Homo sapiens
  misc_RNA (1)...(19): siRNA sense strand
ugggaguguucuugaauag

SEQ ID NO: 2052904 - RNA, 19 nt, Homo sapiens
  misc_RNA (1)...(19): siRNA sense strand
cauuguaugccuccuguau

SEQ ID NO: 2052905 - RNA, 19 nt, Homo sapiens
  misc_RNA (1)...(19): siRNA sense strand
guuauaugcagaauuugga

SEQ ID NO: 2052906 - RNA, 19 nt, Homo sapiens
  misc_RNA (1)...(19): siRNA sense strand
cauauuaaagaucgcauag

SEQ ID NO: 2052907 - RNA, 19 nt, Homo sapiens
  misc_RNA (1)...(19): siRNA sense strand
agcagcagggcgcauauua

SEQ ID NO: 2052908 - RNA, 19 nt, Homo sapiens
  misc_RNA (1)...(19): siRNA sense strand
gaugugguugucuccguuu

SEQ ID NO: 2052909 - RNA, 19 nt, Homo sapiens
  misc_RNA (1)...(19): siRNA sense strand
gcucagucuccuccucauu

SEQ ID NO: 2052910 - RNA, 19 nt, Homo sapiens
  misc_RNA (1)...(19): siRNA sense strand
cuggaguucuggacuuaau

SEQ ID NO: 2052911 - RNA, 19 nt, Homo sapiens
  misc_RNA (1)...(19): siRNA sense strand
guccaacuguaaugaaugc

SEQ ID NO: 2052912 - RNA, 19 nt, Homo sapiens
  misc_RNA (1)...(19): siRNA sense strand
uggaggcuguguuguugga

SEQ ID NO: 2052913 - RNA, 19 nt, Homo sapiens
  misc_RNA (1)...(19): siRNA sense strand
augacagacucuaucuuga

SEQ ID NO: 2052914 - RNA, 19 nt, Homo sapiens
  misc_RNA (1)...(19): siRNA sense strand
cauacagaguugucuuggu

SEQ ID NO: 2052915 - RNA, 19 nt, Homo sapiens
  misc_RNA (1)...(19): siRNA sense strand
ccacagugacauuguaugc

SEQ ID NO: 2052916 - RNA, 19 nt, Homo sapiens
  misc_RNA (1)...(19): siRNA sense strand
gcagggaccucucaaguua

SEQ ID NO: 2052917 - RNA, 19 nt, Homo sapiens
  misc_RNA (1)...(19): siRNA sense strand
gagcaagguucggaaauga

SEQ ID NO: 2052918 - RNA, 19 nt, Homo sapiens
  misc_RNA (1)...(19): siRNA sense strand
gaaugaaggccaagucuau

SEQ ID NO: 2052919 - RNA, 19 nt, Homo sapiens
  misc_RNA (1)...(19): siRNA sense strand
ucaagcagcugaugaugga

SEQ ID NO: 2052920 - RNA, 19 nt, Homo sapiens
  misc_RNA (1)...(19): siRNA sense strand
ggagcaagguucggaaaug

SEQ ID NO: 2052921 - RNA, 19 nt, Homo sapiens
  misc_RNA (1)...(19): siRNA sense strand
ucucaaagguguuguguca

SEQ ID NO: 2052922 - RNA, 19 nt, Homo sapiens
  misc_RNA (1)...(19): siRNA sense strand
ggacaaguuucggagaaug

SEQ ID NO: 2052923 - RNA, 19 nt, Homo sapiens
  misc_RNA (1)...(19): siRNA sense strand
agacgucggucaccauuga

SEQ ID NO: 2052924 - RNA, 19 nt, Homo sapiens
  misc_RNA (1)...(19): siRNA sense strand
ggacuacacguacuucuca

SEQ ID NO: 2052925 - RNA, 19 nt, Homo sapiens
  misc_RNA (1)...(19): siRNA sense strand
ucaaagaagaggagaaaga

SEQ ID NO: 2052926 - RNA, 19 nt, Homo sapiens
  misc_RNA (1)...(19): siRNA sense strand
gcaagacgaugcgguguac

SEQ ID NO: 2052927 - RNA, 19 nt, Homo sapiens
  misc_RNA (1)...(19): siRNA sense strand
ggacaacgucgucacuuuc

SEQ ID NO: 2052928 - RNA, 19 nt, Homo sapiens
  misc_RNA (1)...(19): siRNA sense strand
ggagugguccugagcaaug

SEQ ID NO: 2052929 - RNA, 19 nt, Homo sapiens
  misc_RNA (1)...(19): siRNA sense strand
gagaagggccagaucaagu

SEQ ID NO: 2052930 - RNA, 19 nt, Homo sapiens
  misc_RNA (1)...(19): siRNA sense strand
caagcaggauggcuaugug

SEQ ID NO: 2052931 - RNA, 19 nt, Homo sapiens
  misc_RNA (1)...(19): siRNA sense strand
ggccaagucuauuccuuca

SEQ ID NO: 2052932 - RNA, 19 nt, Homo sapiens
  misc_RNA (1)...(19): siRNA sense strand
gaaagggagaggucaucaa

SEQ ID NO: 2052933 - RNA, 19 nt, Homo sapiens
  misc_RNA (1)...(19): siRNA sense strand
gcuauacgguggagaccau

SEQ ID NO: 2052934 - RNA, 19 nt, Homo sapiens
  misc_RNA (1)...(19): siRNA sense strand
ucaaagagcaccacucaac

SEQ ID NO: 2052935 - RNA, 19 nt, Homo sapiens
  misc_RNA (1)...(19): siRNA sense strand
ggagacgucggucaccauu

SEQ ID NO: 2052936 - RNA, 19 nt, Homo sapiens
  misc_RNA (1)...(19): siRNA sense strand
gagugguccugagcaauga

SEQ ID NO: 2052937 - RNA, 19 nt, Homo sapiens
  misc_RNA (1)...(19): siRNA sense strand
agggagaggucaucaaugg

SEQ ID NO: 2052938 - RNA, 19 nt, Homo sapiens
  misc_RNA (1)...(19): siRNA sense strand
gcaagcaggauggcuaugu

SEQ ID NO: 2052939 - RNA, 19 nt, Homo sapiens
  misc_RNA (1)...(19): siRNA sense strand
aagaagaggagaaagaguu

SEQ ID NO: 2052940 - RNA, 19 nt, Homo sapiens
  misc_RNA (1)...(19): siRNA sense strand
agaagacccugacccucaa

SEQ ID NO: 2052941 - RNA, 19 nt, Homo sapiens
  misc_RNA (1)...(19): siRNA sense strand
aggacaacgucgucacuuu

SEQ ID NO: 2052942 - RNA, 19 nt, Homo sapiens
  misc_RNA (1)...(19): siRNA sense strand
aaggacaaguuucggagaa

SEQ ID NO: 2052943 - RNA, 19 nt, Homo sapiens
  misc_RNA (1)...(19): siRNA sense strand
gacaaguuucggagaauga

SEQ ID NO: 2052944 - RNA, 19 nt, Homo sapiens
  misc_RNA (1)...(19): siRNA sense strand
ggauggcuaugugcaguuc

SEQ ID NO: 2052945 - RNA, 19 nt, Homo sapiens
  misc_RNA (1)...(19): siRNA sense strand
ggcagggaccucucaaguu

SEQ ID NO: 2052946 - RNA, 19 nt, Homo sapiens
  misc_RNA (1)...(19): siRNA sense strand
caaagaagaggagaaagag

SEQ ID NO: 2052947 - RNA, 19 nt, Homo sapiens
  misc_RNA (1)...(19): siRNA sense strand
gauauccgaguggaaauug

SEQ ID NO: 2052948 - RNA, 19 nt, Homo sapiens
  misc_RNA (1)...(19): siRNA sense strand
cagagcccgucuccuguga

SEQ ID NO: 2052949 - RNA, 19 nt, Homo sapiens
  misc_RNA (1)...(19): siRNA sense strand
aaagggagaggucaucaau

SEQ ID NO: 2052950 - RNA, 19 nt, Homo sapiens
  misc_RNA (1)...(19): siRNA sense strand
agaagaggagaaagaguuu

SEQ ID NO: 2052951 - RNA, 19 nt, Homo sapiens
  misc_RNA (1)...(19): siRNA sense strand
cagccuccaucaucugguu

SEQ ID NO: 2052952 - RNA, 19 nt, Homo sapiens
  misc_RNA (1)...(19): siRNA sense strand
gcaagguucggaaaugaag

SEQ ID NO: 2052953 - RNA, 19 nt, Homo sapiens
  misc_RNA (1)...(19): siRNA sense strand
ugaaugaaggccaagucua

SEQ ID NO: 2052954 - RNA, 19 nt, Homo sapiens
  misc_RNA (1)...(19): siRNA sense strand
gcgagaagggccagaucaa

SEQ ID NO: 2052955 - RNA, 19 nt, Homo sapiens
  misc_RNA (1)...(19): siRNA sense strand
gggcagggaccucucaagu

SEQ ID NO: 2052956 - RNA, 19 nt, Homo sapiens
  misc_RNA (1)...(19): siRNA sense strand
gcucuucgucugcuucuuc

SEQ ID NO: 2052957 - RNA, 19 nt, Homo sapiens
  misc_RNA (1)...(19): siRNA sense strand
ggcauguccuucaccaaca

SEQ ID NO: 2052958 - RNA, 19 nt, Homo sapiens
  misc_RNA (1)...(19): siRNA sense strand
acccagcugucacccagua

SEQ ID NO: 2052959 - RNA, 19 nt, Homo sapiens
  misc_RNA (1)...(19): siRNA sense strand
cgucaacaccuucaaagag

SEQ ID NO: 2052960 - RNA, 19 nt, Homo sapiens
  misc_RNA (1)...(19): siRNA sense strand
aaugauauccgaguggaaa

SEQ ID NO: 2052961 - RNA, 19 nt, Homo sapiens
  misc_RNA (1)...(19): siRNA sense strand
gguagggaaccaccuguca

SEQ ID NO: 2052962 - RNA, 19 nt, Homo sapiens
  misc_RNA (1)...(19): siRNA sense strand
gcuaugugcaguucgacaa

SEQ ID NO: 2052963 - RNA, 19 nt, Homo sapiens
  misc_RNA (1)...(19): siRNA sense strand
ccacaggcauguccuucac

SEQ ID NO: 2052964 - RNA, 19 nt, Homo sapiens
  misc_RNA (1)...(19): siRNA sense strand
ccagcucgaucugcucuuc

SEQ ID NO: 2052965 - RNA, 19 nt, Homo sapiens
  misc_RNA (1)...(19): siRNA sense strand
gaagacccugacccucaaa

SEQ ID NO: 2052966 - RNA, 19 nt, Homo sapiens
  misc_RNA (1)...(19): siRNA sense strand
gcacgguugacgucuacuu

SEQ ID NO: 2052967 - RNA, 19 nt, Homo sapiens
  misc_RNA (1)...(19): siRNA sense strand
gggagcaccaccugaagau

SEQ ID NO: 2052968 - RNA, 19 nt, Homo sapiens
  misc_RNA (1)...(19): siRNA sense strand
cuucaaagagcaccacuca

SEQ ID NO: 2052969 - RNA, 19 nt, Homo sapiens
  misc_RNA (1)...(19): siRNA sense strand
ccacagaaccccaauccuu

SEQ ID NO: 2052970 - RNA, 19 nt, Homo sapiens
  misc_RNA (1)...(19): siRNA sense strand
cgucagcacccucuucauc

SEQ ID NO: 2052971 - RNA, 19 nt, Homo sapiens
  misc_RNA (1)...(19): siRNA sense strand
ugaauuccagcaagacuca

SEQ ID NO: 2052972 - RNA, 19 nt, Homo sapiens
  misc_RNA (1)...(19): siRNA sense strand
cagcgucaacaccuucaaa

SEQ ID NO: 2052973 - RNA, 19 nt, Homo sapiens
  misc_RNA (1)...(19): siRNA sense strand
agaagggccagaucaagug

SEQ ID NO: 2052974 - RNA, 19 nt, Homo sapiens
  misc_RNA (1)...(19): siRNA sense strand
gcuucuuccucuucaguca

SEQ ID NO: 2052975 - RNA, 19 nt, Homo sapiens
  misc_RNA (1)...(19): siRNA sense strand
gcgucaacaccuucaaaga

SEQ ID NO: 2052976 - RNA, 19 nt, Homo sapiens
  misc_RNA (1)...(19): siRNA sense strand
agaaaucucaaagguguug

SEQ ID NO: 2052977 - RNA, 19 nt, Homo sapiens
  misc_RNA (1)...(19): siRNA sense strand
ggccagaucaagugcuuca

SEQ ID NO: 2052978 - RNA, 19 nt, Homo sapiens
  misc_RNA (1)...(19): siRNA sense strand
caaguuacccacaguaccu

SEQ ID NO: 2052979 - RNA, 19 nt, Homo sapiens
  misc_RNA (1)...(19): siRNA sense strand
cgacuacgggcagcgguuu

SEQ ID NO: 2052980 - RNA, 19 nt, Homo sapiens
  misc_RNA (1)...(19): siRNA sense strand
caaccaucguggcguucug

SEQ ID NO: 2052981 - RNA, 19 nt, Homo sapiens
  misc_RNA (1)...(19): siRNA sense strand
ccagaucaagugcuucauc

SEQ ID NO: 2052982 - RNA, 19 nt, Homo sapiens
  misc_RNA (1)...(19): siRNA sense strand
ucguggaucugggcucuga

SEQ ID NO: 2052983 - RNA, 19 nt, Homo sapiens
  misc_RNA (1)...(19): siRNA sense strand
gccgcacgguugacgucua

SEQ ID NO: 2052984 - RNA, 19 nt, Homo sapiens
  misc_RNA (1)...(19): siRNA sense strand
gaggacaacgucgucacuu

SEQ ID NO: 2052985 - RNA, 19 nt, Homo sapiens
  misc_RNA (1)...(19): siRNA sense strand
cuggugacguggagaaugg

SEQ ID NO: 2052986 - RNA, 19 nt, Homo sapiens
  misc_RNA (1)...(19): siRNA sense strand
ccggagugguccugagcaa

SEQ ID NO: 2052987 - RNA, 19 nt, Homo sapiens
  misc_RNA (1)...(19): siRNA sense strand
gaacaaaccuggacauaug

SEQ ID NO: 2052988 - RNA, 19 nt, Homo sapiens
  misc_RNA (1)...(19): siRNA sense strand
gcagugaggugccauauaa

SEQ ID NO: 2052989 - RNA, 19 nt, Homo sapiens
  misc_RNA (1)...(19): siRNA sense strand
gaauauacccacauaguua

SEQ ID NO: 2052990 - RNA, 19 nt, Homo sapiens
  misc_RNA (1)...(19): siRNA sense strand
ccacauagcucuaguagug

SEQ ID NO: 2052991 - RNA, 19 nt, Homo sapiens
  misc_RNA (1)...(19): siRNA sense strand
gaacagaaaggcuaauuaa

SEQ ID NO: 2052992 - RNA, 19 nt, Homo sapiens
  misc_RNA (1)...(19): siRNA sense strand
gaaugucacucgagagaua

SEQ ID NO: 2052993 - RNA, 19 nt, Homo sapiens
  misc_RNA (1)...(19): siRNA sense strand
uaacagaguucacauauuc

SEQ ID NO: 2052994 - RNA, 19 nt, Homo sapiens
  misc_RNA (1)...(19): siRNA sense strand
ggagacagaugcacugaaa

SEQ ID NO: 2052995 - RNA, 19 nt, Homo sapiens
  misc_RNA (1)...(19): siRNA sense strand
gaacagaguuggaaaugca

SEQ ID NO: 2052996 - RNA, 19 nt, Homo sapiens
  misc_RNA (1)...(19): siRNA sense strand
ucaaagaaauugucacuga

SEQ ID NO: 2052997 - RNA, 19 nt, Homo sapiens
  misc_RNA (1)...(19): siRNA sense strand
ggaaugacacuuacaaauu

SEQ ID NO: 2052998 - RNA, 19 nt, Homo sapiens
  misc_RNA (1)...(19): siRNA sense strand
ggacuugaauugacuaguu

SEQ ID NO: 2052999 - RNA, 19 nt, Homo sapiens
  misc_RNA (1)...(19): siRNA sense strand
gaauggauuucuccucuaa

SEQ ID NO: 2053000 - RNA, 19 nt, Homo sapiens
  misc_RNA (1)...(19): siRNA sense strand
gaauugacaucuccacuga

SEQ ID NO: 2053001 - RNA, 19 nt, Homo sapiens
  misc_RNA (1)...(19): siRNA sense strand
ggaaaguacuuaccagaau

SEQ ID NO: 2053002 - RNA, 19 nt, Homo sapiens
  misc_RNA (1)...(19): siRNA sense strand
ggauagcccuacacagaua

SEQ ID NO: 2053003 - RNA, 19 nt, Homo sapiens
  misc_RNA (1)...(19): siRNA sense strand
ggguagaaaucauugaaua

SEQ ID NO: 2053004 - RNA, 19 nt, Homo sapiens
  misc_RNA (1)...(19): siRNA sense strand
gaaggagcgugcuaaagaa

SEQ ID NO: 2053005 - RNA, 19 nt, Homo sapiens
  misc_RNA (1)...(19): siRNA sense strand
agaagcagcucuuugagua

SEQ ID NO: 2053006 - RNA, 19 nt, Homo sapiens
  misc_RNA (1)...(19): siRNA sense strand
gaaggaauauggcuggaau

SEQ ID NO: 2053007 - RNA, 19 nt, Homo sapiens
  misc_RNA (1)...(19): siRNA sense strand
ugagacaacuggaagagua

SEQ ID NO: 2053008 - RNA, 19 nt, Homo sapiens
  misc_RNA (1)...(19): siRNA sense strand
ggaccgagccuaugacuau

SEQ ID NO: 2053009 - RNA, 19 nt, Homo sapiens
  misc_RNA (1)...(19): siRNA sense strand
gcagaccuaaguuuaauua

SEQ ID NO: 2053010 - RNA, 19 nt, Homo sapiens
  misc_RNA (1)...(19): siRNA sense strand
gcaaacagcggcauaacaa

SEQ ID NO: 2053011 - RNA, 19 nt, Homo sapiens
  misc_RNA (1)...(19): siRNA sense strand
gaacgugaacgaacagaaa

SEQ ID NO: 2053012 - RNA, 19 nt, Homo sapiens
  misc_RNA (1)...(19): siRNA sense strand
gaaaguacuuaccagaauc

SEQ ID NO: 2053013 - RNA, 19 nt, Homo sapiens
  misc_RNA (1)...(19): siRNA sense strand
cagcuucucucgccaaauu

SEQ ID NO: 2053014 - RNA, 19 nt, Homo sapiens
  misc_RNA (1)...(19): siRNA sense strand
uauaaggacucccagcuaa

SEQ ID NO: 2053015 - RNA, 19 nt, Homo sapiens
  misc_RNA (1)...(19): siRNA sense strand
gaacucaacaagaaggaua

SEQ ID NO: 2053016 - RNA, 19 nt, Homo sapiens
  misc_RNA (1)...(19): siRNA sense strand
gcgacacgcuaauucauuu

SEQ ID NO: 2053017 - RNA, 19 nt, Homo sapiens
  misc_RNA (1)...(19): siRNA sense strand
caaagaaauugucacugaa

SEQ ID NO: 2053018 - RNA, 19 nt, Homo sapiens
  misc_RNA (1)...(19): siRNA sense strand
gcaguaugccaaagaauuu

SEQ ID NO: 2053019 - RNA, 19 nt, Homo sapiens
  misc_RNA (1)...(19): siRNA sense strand
ccaaagagauaagaacaga

SEQ ID NO: 2053020 - RNA, 19 nt, Homo sapiens
  misc_RNA (1)...(19): siRNA sense strand
gaccaagagucccuagaaa

SEQ ID NO: 2053021 - RNA, 19 nt, Homo sapiens
  misc_RNA (1)...(19): siRNA sense strand
caaagaaacauggaucuaa

SEQ ID NO: 2053022 - RNA, 19 nt, Homo sapiens
  misc_RNA (1)...(19): siRNA sense strand
gaugguggguucaguguau

SEQ ID NO: 2053023 - RNA, 19 nt, Homo sapiens
  misc_RNA (1)...(19): siRNA sense strand
ucaaacugcuucagccuuu

SEQ ID NO: 2053024 - RNA, 19 nt, Homo sapiens
  misc_RNA (1)...(19): siRNA sense strand
aaagaaagacgaacgguaa

SEQ ID NO: 2053025 - RNA, 19 nt, Homo sapiens
  misc_RNA (1)...(19): siRNA sense strand
gcagaaggauuuggagaau

SEQ ID NO: 2053026 - RNA, 19 nt, Homo sapiens
  misc_RNA (1)...(19): siRNA sense strand
gaaagcaucguccuaggaa

SEQ ID NO: 2053027 - RNA, 19 nt, Homo sapiens
  misc_RNA (1)...(19): siRNA sense strand
ggcuagaacucaacaagaa

SEQ ID NO: 2053028 - RNA, 19 nt, Homo sapiens
  misc_RNA (1)...(19): siRNA sense strand
gauaacagaguucacauau

SEQ ID NO: 2053029 - RNA, 19 nt, Homo sapiens
  misc_RNA (1)...(19): siRNA sense strand
gaaauagccaccagugaga

SEQ ID NO: 2053030 - RNA, 19 nt, Homo sapiens
  misc_RNA (1)...(19): siRNA sense strand
gaacgaacagaaaggcuaa

SEQ ID NO: 2053031 - RNA, 19 nt, Homo sapiens
  misc_RNA (1)...(19): siRNA sense strand
ggaauggauuucuccucua

SEQ ID NO: 2053032 - RNA, 19 nt, Homo sapiens
  misc_RNA (1)...(19): siRNA sense strand
agaaggauuuggagaauau

SEQ ID NO: 2053033 - RNA, 19 nt, Homo sapiens
  misc_RNA (1)...(19): siRNA sense strand
agagauagauaacuucuuc

SEQ ID NO: 2053034 - RNA, 19 nt, Homo sapiens
  misc_RNA (1)...(19): siRNA sense strand
cagguuagcugggaagaaa

SEQ ID NO: 2053035 - RNA, 19 nt, Homo sapiens
  misc_RNA (1)...(19): siRNA sense strand
agaaauggccaacaaguuu

SEQ ID NO: 2053036 - RNA, 19 nt, Homo sapiens
  misc_RNA (1)...(19): siRNA sense strand
ccuaugcaaugaaggaaua

SEQ ID NO: 2053037 - RNA, 19 nt, Homo sapiens
  misc_RNA (1)...(19): siRNA sense strand
gaacauauggucccacaag

SEQ ID NO: 2053038 - RNA, 19 nt, Homo sapiens
  misc_RNA (1)...(19): siRNA sense strand
gaguagcccugaagacaga

SEQ ID NO: 2053039 - RNA, 19 nt, Homo sapiens
  misc_RNA (1)...(19): siRNA sense strand
gagcaaaggcaaagggaaa

SEQ ID NO: 2053040 - RNA, 19 nt, Homo sapiens
  misc_RNA (1)...(19): siRNA sense strand
aaugagagcugucgacugu

SEQ ID NO: 2053041 - RNA, 19 nt, Homo sapiens
  misc_RNA (1)...(19): siRNA sense strand
gcaaauggugugcaacuug

SEQ ID NO: 2053042 - RNA, 19 nt, Homo sapiens
  misc_RNA (1)...(19): siRNA sense strand
ugaaggagcgugcuaaaga

SEQ ID NO: 2053043 - RNA, 19 nt, Homo sapiens
  misc_RNA (1)...(19): siRNA sense strand
ccagagcgcauaacuacua

SEQ ID NO: 2053044 - RNA, 19 nt, Homo sapiens
  misc_RNA (1)...(19): siRNA sense strand
guacagaucgcauugacuu

SEQ ID NO: 2053045 - RNA, 19 nt, Homo sapiens
  misc_RNA (1)...(19): siRNA sense strand
cgacauaccuacugaacgu

SEQ ID NO: 2053046 - RNA, 19 nt, Homo sapiens
  misc_RNA (1)...(19): siRNA sense strand
gaucaauccucagucaaug

SEQ ID NO: 2053047 - RNA, 19 nt, Homo sapiens
  misc_RNA (1)...(19): siRNA sense strand
gaaacccggucacgaucuu

SEQ ID NO: 2053048 - RNA, 19 nt, Homo sapiens
  misc_RNA (1)...(19): siRNA sense strand
acccauaccuccugucuuu

SEQ ID NO: 2053049 - RNA, 19 nt, Homo sapiens
  misc_RNA (1)...(19): siRNA sense strand
ggauaacagaguucacaua

SEQ ID NO: 2053050 - RNA, 19 nt, Homo sapiens
  misc_RNA (1)...(19): siRNA sense strand
gaacaacucacaacaacag

SEQ ID NO: 2053051 - RNA, 19 nt, Homo sapiens
  misc_RNA (1)...(19): siRNA sense strand
gcgcagaccuaaguuuaau

SEQ ID NO: 2053052 - RNA, 19 nt, Homo sapiens
  misc_RNA (1)...(19): siRNA sense strand
ggaaauacagugggucuga

SEQ ID NO: 2053053 - RNA, 19 nt, Homo sapiens
  misc_RNA (1)...(19): siRNA sense strand
gagaacaaaccuggacaua

SEQ ID NO: 2053054 - RNA, 19 nt, Homo sapiens
  misc_RNA (1)...(19): siRNA sense strand
uaagggagaucaugaugca

SEQ ID NO: 2053055 - RNA, 19 nt, Homo sapiens
  misc_RNA (1)...(19): siRNA sense strand
gauaagaacagaguuggaa

SEQ ID NO: 2053056 - RNA, 19 nt, Homo sapiens
  misc_RNA (1)...(19): siRNA sense strand
ugaggacugugauuccaua

SEQ ID NO: 2053057 - RNA, 19 nt, Homo sapiens
  misc_RNA (1)...(19): siRNA sense strand
gcaaagaaacauggaucua

SEQ ID NO: 2053058 - RNA, 19 nt, Homo sapiens
  misc_RNA (1)...(19): siRNA sense strand
cgaacagaaaggcuaauua

SEQ ID NO: 2053059 - RNA, 19 nt, Homo sapiens
  misc_RNA (1)...(19): siRNA sense strand
cauugaauauacccacaua

SEQ ID NO: 2053060 - RNA, 19 nt, Homo sapiens
  misc_RNA (1)...(19): siRNA sense strand
cgguauaucuugaauguca

SEQ ID NO: 2053061 - RNA, 19 nt, Homo sapiens
  misc_RNA (1)...(19): siRNA sense strand
cagaaggauuuggagaaua

SEQ ID NO: 2053062 - RNA, 19 nt, Homo sapiens
  misc_RNA (1)...(19): siRNA sense strand
caagaaacccggucacgau

SEQ ID NO: 2053063 - RNA, 19 nt, Homo sapiens
  misc_RNA (1)...(19): siRNA sense strand
ugaauugacuaguucugaa

SEQ ID NO: 2053064 - RNA, 19 nt, Homo sapiens
  misc_RNA (1)...(19): siRNA sense strand
aaagacugcuuaccagaga

SEQ ID NO: 2053065 - RNA, 19 nt, Homo sapiens
  misc_RNA (1)...(19): siRNA sense strand
ccaggagucugaaacacaa

SEQ ID NO: 2053066 - RNA, 19 nt, Homo sapiens
  misc_RNA (1)...(19): siRNA sense strand
ggacugugauuccauacca

SEQ ID NO: 2053067 - RNA, 19 nt, Homo sapiens
  misc_RNA (1)...(19): siRNA sense strand
ugaaggaucugaggacugu

SEQ ID NO: 2053068 - RNA, 19 nt, Homo sapiens
  misc_RNA (1)...(19): siRNA sense strand
gcaaaggcaaagggaaaua

SEQ ID NO: 2053069 - RNA, 19 nt, Homo sapiens
  misc_RNA (1)...(19): siRNA sense strand
acagauugaggaugaauua

SEQ ID NO: 2053070 - RNA, 19 nt, Homo sapiens
  misc_RNA (1)...(19): siRNA sense strand
gagccugccuccugugaau

SEQ ID NO: 2053071 - RNA, 19 nt, Homo sapiens
  misc_RNA (1)...(19): siRNA sense strand
ggacauauggagcaagaug

SEQ ID NO: 2053072 - RNA, 19 nt, Homo sapiens
  misc_RNA (1)...(19): siRNA sense strand
gguguugucugaaugaauc

SEQ ID NO: 2053073 - RNA, 19 nt, Homo sapiens
  misc_RNA (1)...(19): siRNA sense strand
ucagaucaauccucaguca

SEQ ID NO: 2053074 - RNA, 19 nt, Homo sapiens
  misc_RNA (1)...(19): siRNA sense strand
ucaaggaguugggcagauu

SEQ ID NO: 2053075 - RNA, 19 nt, Homo sapiens
  misc_RNA (1)...(19): siRNA sense strand
caaaggcaauuucagaacu

SEQ ID NO: 2053076 - RNA, 19 nt, Homo sapiens
  misc_RNA (1)...(19): siRNA sense strand
gcuguaagacuggaaagua

SEQ ID NO: 2053077 - RNA, 19 nt, Homo sapiens
  misc_RNA (1)...(19): siRNA sense strand
ggagaauauuacauccaaa

SEQ ID NO: 2053078 - RNA, 19 nt, Homo sapiens
  misc_RNA (1)...(19): siRNA sense strand
guucuagucagcaguauuu

SEQ ID NO: 2053079 - RNA, 19 nt, Homo sapiens
  misc_RNA (1)...(19): siRNA sense strand
ggagcgugcuaaagaaauc

SEQ ID NO: 2053080 - RNA, 19 nt, Homo sapiens
  misc_RNA (1)...(19): siRNA sense strand
gagcagcacuacagaugag

SEQ ID NO: 2053081 - RNA, 19 nt, Homo sapiens
  misc_RNA (1)...(19): siRNA sense strand
gaaaugagcaaaggcaaag

SEQ ID NO: 2053082 - RNA, 19 nt, Homo sapiens
  misc_RNA (1)...(19): siRNA sense strand
gaagcagcucuuugaguaa

SEQ ID NO: 2053083 - RNA, 19 nt, Homo sapiens
  misc_RNA (1)...(19): siRNA sense strand
caauugccaugcauccaaa

SEQ ID NO: 2053084 - RNA, 19 nt, Homo sapiens
  misc_RNA (1)...(19): siRNA sense strand
gauugaggaugaauuaaac

SEQ ID NO: 2053085 - RNA, 19 nt, Homo sapiens
  misc_RNA (1)...(19): siRNA sense strand
gcaagcaaacagcggcaua

SEQ ID NO: 2053086 - RNA, 19 nt, Homo sapiens
  misc_RNA (1)...(19): siRNA sense strand
caaccaaccccuucuauaa

SEQ ID NO: 2053087 - RNA, 19 nt, Homo sapiens
  misc_RNA (1)...(19): siRNA sense strand
caaauagacuggacacuuu

SEQ ID NO: 2053088 - RNA, 19 nt, Homo sapiens
  misc_RNA (1)...(19): siRNA sense strand
ggacugacauuucacguau

SEQ ID NO: 2053089 - RNA, 19 nt, Homo sapiens
  misc_RNA (1)...(19): siRNA sense strand
gaaagucuacggaauguuu

SEQ ID NO: 2053090 - RNA, 19 nt, Homo sapiens
  misc_RNA (1)...(19): siRNA sense strand
gaacaggacuauauuucau

SEQ ID NO: 2053091 - RNA, 19 nt, Homo sapiens
  misc_RNA (1)...(19): siRNA sense strand
agucauaccuucuaucuuu

SEQ ID NO: 2053092 - RNA, 19 nt, Homo sapiens
  misc_RNA (1)...(19): siRNA sense strand
gaagugcuccaaauauuaa

SEQ ID NO: 2053093 - RNA, 19 nt, Homo sapiens
  misc_RNA (1)...(19): siRNA sense strand
ccaaagaaacuuaagcaua

SEQ ID NO: 2053094 - RNA, 19 nt, Homo sapiens
  misc_RNA (1)...(19): siRNA sense strand
ggaaauggguauuagcaau

SEQ ID NO: 2053095 - RNA, 19 nt, Homo sapiens
  misc_RNA (1)...(19): siRNA sense strand
cagaagugcuccaaauauu

SEQ ID NO: 2053096 - RNA, 19 nt, Homo sapiens
  misc_RNA (1)...(19): siRNA sense strand
ugacagaagugcuccaaau

SEQ ID NO: 2053097 - RNA, 19 nt, Homo sapiens
  misc_RNA (1)...(19): siRNA sense strand
ggaauuaaaggaugaaugu

SEQ ID NO: 2053098 - RNA, 19 nt, Homo sapiens
  misc_RNA (1)...(19): siRNA sense strand
ggaagacaaucagggaauu

SEQ ID NO: 2053099 - RNA, 19 nt, Homo sapiens
  misc_RNA (1)...(19): siRNA sense strand
acugaaaccuggagucaua

SEQ ID NO: 2053100 - RNA, 19 nt, Homo sapiens
  misc_RNA (1)...(19): siRNA sense strand
gaagacagauuuugacaga

SEQ ID NO: 2053101 - RNA, 19 nt, Homo sapiens
  misc_RNA (1)...(19): siRNA sense strand
gaaaagacuugaugugaau

SEQ ID NO: 2053102 - RNA, 19 nt, Homo sapiens
  misc_RNA (1)...(19): siRNA sense strand
gaagacaaucagggaauua

SEQ ID NO: 2053103 - RNA, 19 nt, Homo sapiens
  misc_RNA (1)...(19): siRNA sense strand
ccucauguauugaagaauu

SEQ ID NO: 2053104 - RNA, 19 nt, Homo sapiens
  misc_RNA (1)...(19): siRNA sense strand
gcaaauagacuggacacuu

SEQ ID NO: 2053105 - RNA, 19 nt, Homo sapiens
  misc_RNA (1)...(19): siRNA sense strand
gacagaagugcuccaaaua

SEQ ID NO: 2053106 - RNA, 19 nt, Homo sapiens
  misc_RNA (1)...(19): siRNA sense strand
ggagauguguuguguucga

SEQ ID NO: 2053107 - RNA, 19 nt, Homo sapiens
  misc_RNA (1)...(19): siRNA sense strand
uaacuacaaucaccaucuu

SEQ ID NO: 2053108 - RNA, 19 nt, Homo sapiens
  misc_RNA (1)...(19): siRNA sense strand
gaaauggguauuagcaaug

SEQ ID NO: 2053109 - RNA, 19 nt, Homo sapiens
  misc_RNA (1)...(19): siRNA sense strand
gcuagaggauacaaaggaa

SEQ ID NO: 2053110 - RNA, 19 nt, Homo sapiens
  misc_RNA (1)...(19): siRNA sense strand
ccaagaaacagcaaauaga

SEQ ID NO: 2053111 - RNA, 19 nt, Homo sapiens
  misc_RNA (1)...(19): siRNA sense strand
agaagugcuccaaauauua

SEQ ID NO: 2053112 - RNA, 19 nt, Homo sapiens
  misc_RNA (1)...(19): siRNA sense strand
uaaaaggacugacauuuca

SEQ ID NO: 2053113 - RNA, 19 nt, Homo sapiens
  misc_RNA (1)...(19): siRNA sense strand
aaaggaaagucuacggaau

SEQ ID NO: 2053114 - RNA, 19 nt, Homo sapiens
  misc_RNA (1)...(19): siRNA sense strand
cagaaaucauugaggaaga

SEQ ID NO: 2053115 - RNA, 19 nt, Homo sapiens
  misc_RNA (1)...(19): siRNA sense strand
ggugcuuccucauguauug

SEQ ID NO: 2053116 - RNA, 19 nt, Homo sapiens
  misc_RNA (1)...(19): siRNA sense strand
aaggagauguguuguguuc

SEQ ID NO: 2053117 - RNA, 19 nt, Homo sapiens
  misc_RNA (1)...(19): siRNA sense strand
ucagggaauuaaaggauga

SEQ ID NO: 2053118 - RNA, 19 nt, Homo sapiens
  misc_RNA (1)...(19): siRNA sense strand
gaauuccaaucccaguuca

SEQ ID NO: 2053119 - RNA, 19 nt, Homo sapiens
  misc_RNA (1)...(19): siRNA sense strand
ucgaggcacuuuaagaaga

SEQ ID NO: 2053120 - RNA, 19 nt, Homo sapiens
  misc_RNA (1)...(19): siRNA sense strand
guucgaggcacuuuaagaa

SEQ ID NO: 2053121 - RNA, 19 nt, Homo sapiens
  misc_RNA (1)...(19): siRNA sense strand
gacaguccaaagaaacuua

SEQ ID NO: 2053122 - RNA, 19 nt, Homo sapiens
  misc_RNA (1)...(19): siRNA sense strand
aaauggguauuagcaauga

SEQ ID NO: 2053123 - RNA, 19 nt, Homo sapiens
  misc_RNA (1)...(19): siRNA sense strand
acaggacuauauuucauga

SEQ ID NO: 2053124 - RNA, 19 nt, Homo sapiens
  misc_RNA (1)...(19): siRNA sense strand
ugaaaagacuugaugugaa

SEQ ID NO: 2053125 - RNA, 19 nt, Homo sapiens
  misc_RNA (1)...(19): siRNA sense strand
ucucgcugcuugccaaauu

SEQ ID NO: 2053126 - RNA, 19 nt, Homo sapiens
  misc_RNA (1)...(19): siRNA sense strand
ggagucauaccuucuaucu

SEQ ID NO: 2053127 - RNA, 19 nt, Homo sapiens
  misc_RNA (1)...(19): siRNA sense strand
caaaaggaaauggguauua

SEQ ID NO: 2053128 - RNA, 19 nt, Homo sapiens
  misc_RNA (1)...(19): siRNA sense strand
acagaagugcuccaaauau

SEQ ID NO: 2053129 - RNA, 19 nt, Homo sapiens
  misc_RNA (1)...(19): siRNA sense strand
uaccuucuaucuuugauuc

SEQ ID NO: 2053130 - RNA, 19 nt, Homo sapiens
  misc_RNA (1)...(19): siRNA sense strand
gccaagaaacagcaaauag

SEQ ID NO: 2053131 - RNA, 19 nt, Homo sapiens
  misc_RNA (1)...(19): siRNA sense strand
aaggaugaaugucugauca

SEQ ID NO: 2053132 - RNA, 19 nt, Homo sapiens
  misc_RNA (1)...(19): siRNA sense strand
ggauacaaaggaaagucua

SEQ ID NO: 2053133 - RNA, 19 nt, Homo sapiens
  misc_RNA (1)...(19): siRNA sense strand
gcauaaauuagaucaugug

SEQ ID NO: 2053134 - RNA, 19 nt, Homo sapiens
  misc_RNA (1)...(19): siRNA sense strand
uagaacaggacuauauuuc

SEQ ID NO: 2053135 - RNA, 19 nt, Homo sapiens
  misc_RNA (1)...(19): siRNA sense strand
caagaaacagcaaauagac

SEQ ID NO: 2053136 - RNA, 19 nt, Homo sapiens
  misc_RNA (1)...(19): siRNA sense strand
guuggugcuuccucaugua

SEQ ID NO: 2053137 - RNA, 19 nt, Homo sapiens
  misc_RNA (1)...(19): siRNA sense strand
gacaaucagggaauuaaag

SEQ ID NO: 2053138 - RNA, 19 nt, Homo sapiens
  misc_RNA (1)...(19): siRNA sense strand
ugucugaucagccaagaaa

SEQ ID NO: 2053139 - RNA, 19 nt, Homo sapiens
  misc_RNA (1)...(19): siRNA sense strand
gcuccaaauauuaaacuga

SEQ ID NO: 2053140 - RNA, 19 nt, Homo sapiens
  misc_RNA (1)...(19): siRNA sense strand
gacuggacacuuucuguug

SEQ ID NO: 2053141 - RNA, 19 nt, Homo sapiens
  misc_RNA (1)...(19): siRNA sense strand
aaacugaaaccuggaguca

SEQ ID NO: 2053142 - RNA, 19 nt, Homo sapiens
  misc_RNA (1)...(19): siRNA sense strand
agaacaggacuauauuuca

SEQ ID NO: 2053143 - RNA, 19 nt, Homo sapiens
  misc_RNA (1)...(19): siRNA sense strand
gcaaugaaaagacuugaug

SEQ ID NO: 2053144 - RNA, 19 nt, Homo sapiens
  misc_RNA (1)...(19): siRNA sense strand
gucauaccuucuaucuuug

SEQ ID NO: 2053145 - RNA, 19 nt, Homo sapiens
  misc_RNA (1)...(19): siRNA sense strand
gacugacauuucacguauu

SEQ ID NO: 2053146 - RNA, 19 nt, Homo sapiens
  misc_RNA (1)...(19): siRNA sense strand
aaaaggagauguguugugu

SEQ ID NO: 2053147 - RNA, 19 nt, Homo sapiens
  misc_RNA (1)...(19): siRNA sense strand
acugacauuucacguauuc

SEQ ID NO: 2053148 - RNA, 19 nt, Homo sapiens
  misc_RNA (1)...(19): siRNA sense strand
uugccaaauucgaaguuaa

SEQ ID NO: 2053149 - RNA, 19 nt, Homo sapiens
  misc_RNA (1)...(19): siRNA sense strand
gggaauuaaaggaugaaug

SEQ ID NO: 2053150 - RNA, 19 nt, Homo sapiens
  misc_RNA (1)...(19): siRNA sense strand
agacaaucagggaauuaaa

SEQ ID NO: 2053151 - RNA, 19 nt, Homo sapiens
  misc_RNA (1)...(19): siRNA sense strand
aaggaaagucuacggaaug

SEQ ID NO: 2053152 - RNA, 19 nt, Homo sapiens
  misc_RNA (1)...(19): siRNA sense strand
gaucggcgagcuagaggau

SEQ ID NO: 2053153 - RNA, 19 nt, Homo sapiens
  misc_RNA (1)...(19): siRNA sense strand
ugccaaauucgaaguuaaa

SEQ ID NO: 2053154 - RNA, 19 nt, Homo sapiens
  misc_RNA (1)...(19): siRNA sense strand
aggaaagucuacggaaugu

SEQ ID NO: 2053155 - RNA, 19 nt, Homo sapiens
  misc_RNA (1)...(19): siRNA sense strand
aaaccguuccagccacuaa

SEQ ID NO: 2053156 - RNA, 19 nt, Homo sapiens
  misc_RNA (1)...(19): siRNA sense strand
cuugccaaauucgaaguua

SEQ ID NO: 2053157 - RNA, 19 nt, Homo sapiens
  misc_RNA (1)...(19): siRNA sense strand
aagacaaucagggaauuaa

SEQ ID NO: 2053158 - RNA, 19 nt, Homo sapiens
  misc_RNA (1)...(19): siRNA sense strand
cgaggcacuuuaagaagac

SEQ ID NO: 2053159 - RNA, 19 nt, Homo sapiens
  misc_RNA (1)...(19): siRNA sense strand
agacuggacacuuucuguu

SEQ ID NO: 2053160 - RNA, 19 nt, Homo sapiens
  misc_RNA (1)...(19): siRNA sense strand
aaaaggaaauggguauuag

SEQ ID NO: 2053161 - RNA, 19 nt, Homo sapiens
  misc_RNA (1)...(19): siRNA sense strand
uguguucgaggcacuuuaa

SEQ ID NO: 2053162 - RNA, 19 nt, Homo sapiens
  misc_RNA (1)...(19): siRNA sense strand
aaucagggaauuaaaggau

SEQ ID NO: 2053163 - RNA, 19 nt, Homo sapiens
  misc_RNA (1)...(19): siRNA sense strand
gaaguuaaaaggacugaca

SEQ ID NO: 2053164 - RNA, 19 nt, Homo sapiens
  misc_RNA (1)...(19): siRNA sense strand
cgagcuagaggauacaaag

SEQ ID NO: 2053165 - RNA, 19 nt, Homo sapiens
  misc_RNA (1)...(19): siRNA sense strand
gauacaaaggaaagucuac

SEQ ID NO: 2053166 - RNA, 19 nt, Homo sapiens
  misc_RNA (1)...(19): siRNA sense strand
gaacagaaacguuuaaauc

SEQ ID NO: 2053167 - RNA, 19 nt, Homo sapiens
  misc_RNA (1)...(19): siRNA sense strand
ggauauaacuccugugaug

SEQ ID NO: 2053168 - RNA, 19 nt, Homo sapiens
  misc_RNA (1)...(19): siRNA sense strand
ggcaagauguugaagauuu

SEQ ID NO: 2053169 - RNA, 19 nt, Homo sapiens
  misc_RNA (1)...(19): siRNA sense strand
gaagaaaguguaucauuug

SEQ ID NO: 2053170 - RNA, 19 nt, Homo sapiens
  misc_RNA (1)...(19): siRNA sense strand
ucacagcucucuuccaauu

SEQ ID NO: 2053171 - RNA, 19 nt, Homo sapiens
  misc_RNA (1)...(19): siRNA sense strand
ggaagaaaaugaagaauga

SEQ ID NO: 2053172 - RNA, 19 nt, Homo sapiens
  misc_RNA (1)...(19): siRNA sense strand
gaaacuacuuaccgugaaa

SEQ ID NO: 2053173 - RNA, 19 nt, Homo sapiens
  misc_RNA (1)...(19): siRNA sense strand
caagagagccucaggaaug

SEQ ID NO: 2053174 - RNA, 19 nt, Homo sapiens
  misc_RNA (1)...(19): siRNA sense strand
ggaccacccuuucuauguu

SEQ ID NO: 2053175 - RNA, 19 nt, Homo sapiens
  misc_RNA (1)...(19): siRNA sense strand
caucacagcucucuuccaa

SEQ ID NO: 2053176 - RNA, 19 nt, Homo sapiens
  misc_RNA (1)...(19): siRNA sense strand
gaaccagccuucccucauc

SEQ ID NO: 2053177 - RNA, 19 nt, Homo sapiens
  misc_RNA (1)...(19): siRNA sense strand
gaccacccuuucuauguua

SEQ ID NO: 2053178 - RNA, 19 nt, Homo sapiens
  misc_RNA (1)...(19): siRNA sense strand
caaaucagaugccuaaugc

SEQ ID NO: 2053179 - RNA, 19 nt, Homo sapiens
  misc_RNA (1)...(19): siRNA sense strand
gcugaaggcugugauaaug

SEQ ID NO: 2053180 - RNA, 19 nt, Homo sapiens
  misc_RNA (1)...(19): siRNA sense strand
ucagaugccuaaugcagua

SEQ ID NO: 2053181 - RNA, 19 nt, Homo sapiens
  misc_RNA (1)...(19): siRNA sense strand
ccaauucuuuguaugcuaa

SEQ ID NO: 2053182 - RNA, 19 nt, Homo sapiens
  misc_RNA (1)...(19): siRNA sense strand
ggaggaaacaccaguaaga

SEQ ID NO: 2053183 - RNA, 19 nt, Homo sapiens
  misc_RNA (1)...(19): siRNA sense strand
gaagaacagaaacguuuaa

SEQ ID NO: 2053184 - RNA, 19 nt, Homo sapiens
  misc_RNA (1)...(19): siRNA sense strand
acacgacugugcuuucaua

SEQ ID NO: 2053185 - RNA, 19 nt, Homo sapiens
  misc_RNA (1)...(19): siRNA sense strand
gauuugggauggugcaauu

SEQ ID NO: 2053186 - RNA, 19 nt, Homo sapiens
  misc_RNA (1)...(19): siRNA sense strand
gaagagagaagaauguaca

SEQ ID NO: 2053187 - RNA, 19 nt, Homo sapiens
  misc_RNA (1)...(19): siRNA sense strand
gaagugaagacaaaucaga

SEQ ID NO: 2053188 - RNA, 19 nt, Homo sapiens
  misc_RNA (1)...(19): siRNA sense strand
caucauagccacuagcaaa

SEQ ID NO: 2053189 - RNA, 19 nt, Homo sapiens
  misc_RNA (1)...(19): siRNA sense strand
agacaaaucagaugccuaa

SEQ ID NO: 2053190 - RNA, 19 nt, Homo sapiens
  misc_RNA (1)...(19): siRNA sense strand
guagaagaugguuuacuua

SEQ ID NO: 2053191 - RNA, 19 nt, Homo sapiens
  misc_RNA (1)...(19): siRNA sense strand
ggucaagacuuugcaagau

SEQ ID NO: 2053192 - RNA, 19 nt, Homo sapiens
  misc_RNA (1)...(19): siRNA sense strand
gaaagauaacagagccaua

SEQ ID NO: 2053193 - RNA, 19 nt, Homo sapiens
  misc_RNA (1)...(19): siRNA sense strand
gcaaauagugagucagaau

SEQ ID NO: 2053194 - RNA, 19 nt, Homo sapiens
  misc_RNA (1)...(19): siRNA sense strand
gauaacagagccauaagug

SEQ ID NO: 2053195 - RNA, 19 nt, Homo sapiens
  misc_RNA (1)...(19): siRNA sense strand
gcuaugacuucacaccuau

SEQ ID NO: 2053196 - RNA, 19 nt, Homo sapiens
  misc_RNA (1)...(19): siRNA sense strand
aaauaaagguuggucauca

SEQ ID NO: 2053197 - RNA, 19 nt, Homo sapiens
  misc_RNA (1)...(19): siRNA sense strand
cgacugugcuuucauaagg

SEQ ID NO: 2053198 - RNA, 19 nt, Homo sapiens
  misc_RNA (1)...(19): siRNA sense strand
uggaguugcugcaguguaa

SEQ ID NO: 2053199 - RNA, 19 nt, Homo sapiens
  misc_RNA (1)...(19): siRNA sense strand
aaagauaacagagccauaa

SEQ ID NO: 2053200 - RNA, 19 nt, Homo sapiens
  misc_RNA (1)...(19): siRNA sense strand
ucagauguauccagggaaa

SEQ ID NO: 2053201 - RNA, 19 nt, Homo sapiens
  misc_RNA (1)...(19): siRNA sense strand
gaaggaggaaacaccagua

SEQ ID NO: 2053202 - RNA, 19 nt, Homo sapiens
  misc_RNA (1)...(19): siRNA sense strand
cuaacagaauuggcaaaua

SEQ ID NO: 2053203 - RNA, 19 nt, Homo sapiens
  misc_RNA (1)...(19): siRNA sense strand
gaucaucacagcucucuuc

SEQ ID NO: 2053204 - RNA, 19 nt, Homo sapiens
  misc_RNA (1)...(19): siRNA sense strand
caucuucaccuggauauaa

SEQ ID NO: 2053205 - RNA, 19 nt, Homo sapiens
  misc_RNA (1)...(19): siRNA sense strand
ggauucuucugcaguuuau

SEQ ID NO: 2053206 - RNA, 19 nt, Homo sapiens
  misc_RNA (1)...(19): siRNA sense strand
ucacaccuauggauucuuc

SEQ ID NO: 2053207 - RNA, 19 nt, Homo sapiens
  misc_RNA (1)...(19): siRNA sense strand
cuaaaguuguuaucacaug

SEQ ID NO: 2053208 - RNA, 19 nt, Homo sapiens
  misc_RNA (1)...(19): siRNA sense strand
gcaagauguugaagauuuu

SEQ ID NO: 2053209 - RNA, 19 nt, Homo sapiens
  misc_RNA (1)...(19): siRNA sense strand
gaacacauggagcuugaug

SEQ ID NO: 2053210 - RNA, 19 nt, Homo sapiens
  misc_RNA (1)...(19): siRNA sense strand
gcaguguaaugagaauuug

SEQ ID NO: 2053211 - RNA, 19 nt, Homo sapiens
  misc_RNA (1)...(19): siRNA sense strand
gaaugaagagagaagaaug

SEQ ID NO: 2053212 - RNA, 19 nt, Homo sapiens
  misc_RNA (1)...(19): siRNA sense strand
gacaagagagccucaggaa

SEQ ID NO: 2053213 - RNA, 19 nt, Homo sapiens
  misc_RNA (1)...(19): siRNA sense strand
gcgagucuguacugaaguu

SEQ ID NO: 2053214 - RNA, 19 nt, Homo sapiens
  misc_RNA (1)...(19): siRNA sense strand
ggaaacaccaguaagacau

SEQ ID NO: 2053215 - RNA, 19 nt, Homo sapiens
  misc_RNA (1)...(19): siRNA sense strand
ugaagaacagaaacguuua

SEQ ID NO: 2053216 - RNA, 19 nt, Homo sapiens
  misc_RNA (1)...(19): siRNA sense strand
gaucaucuccuguacacau

SEQ ID NO: 2053217 - RNA, 19 nt, Homo sapiens
  misc_RNA (1)...(19): siRNA sense strand
guuuaaauccugacuguug

SEQ ID NO: 2053218 - RNA, 19 nt, Homo sapiens
  misc_RNA (1)...(19): siRNA sense strand
caagaucuggauucaguaa

SEQ ID NO: 2053219 - RNA, 19 nt, Homo sapiens
  misc_RNA (1)...(19): siRNA sense strand
guuaucacaugaagaaagu

SEQ ID NO: 2053220 - RNA, 19 nt, Homo sapiens
  misc_RNA (1)...(19): siRNA sense strand
aauaaggaauggcaagaug

SEQ ID NO: 2053221 - RNA, 19 nt, Homo sapiens
  misc_RNA (1)...(19): siRNA sense strand
caucaagaauacccaagau

SEQ ID NO: 2053222 - RNA, 19 nt, Homo sapiens
  misc_RNA (1)...(19): siRNA sense strand
uacaguagaagaugguuua

SEQ ID NO: 2053223 - RNA, 19 nt, Homo sapiens
  misc_RNA (1)...(19): siRNA sense strand
ggaauggcaagauguugaa

SEQ ID NO: 2053224 - RNA, 19 nt, Homo sapiens
  misc_RNA (1)...(19): siRNA sense strand
ucaagaauacccaagauca

SEQ ID NO: 2053225 - RNA, 19 nt, Homo sapiens
  misc_RNA (1)...(19): siRNA sense strand
gggcaaauagugagucaga

SEQ ID NO: 2053226 - RNA, 19 nt, Homo sapiens
  misc_RNA (1)...(19): siRNA sense strand
gaaacaccaguaagacaug

SEQ ID NO: 2053227 - RNA, 19 nt, Homo sapiens
  misc_RNA (1)...(19): siRNA sense strand
caaaauaccucagacauac

SEQ ID NO: 2053228 - RNA, 19 nt, Homo sapiens
  misc_RNA (1)...(19): siRNA sense strand
guacacaucauagccacua

SEQ ID NO: 2053229 - RNA, 19 nt, Homo sapiens
  misc_RNA (1)...(19): siRNA sense strand
caguuuauguguuaaguag

SEQ ID NO: 2053230 - RNA, 19 nt, Homo sapiens
  misc_RNA (1)...(19): siRNA sense strand
aagagagccucaggaauga

SEQ ID NO: 2053231 - RNA, 19 nt, Homo sapiens
  misc_RNA (1)...(19): siRNA sense strand
gagcugaaggcugugauaa

SEQ ID NO: 2053232 - RNA, 19 nt, Homo sapiens
  misc_RNA (1)...(19): siRNA sense strand
gauauaacuccugugauga

SEQ ID NO: 2053233 - RNA, 19 nt, Homo sapiens
  misc_RNA (1)...(19): siRNA sense strand
aaugaagaaugaagagaga

SEQ ID NO: 2053234 - RNA, 19 nt, Homo sapiens
  misc_RNA (1)...(19): siRNA sense strand
ugcaagaucuggauucagu

SEQ ID NO: 2053235 - RNA, 19 nt, Homo sapiens
  misc_RNA (1)...(19): siRNA sense strand
guuguuaucacaugaagaa

SEQ ID NO: 2053236 - RNA, 19 nt, Homo sapiens
  misc_RNA (1)...(19): siRNA sense strand
ugugggaagugaagacaaa

SEQ ID NO: 2053237 - RNA, 19 nt, Homo sapiens
  misc_RNA (1)...(19): siRNA sense strand
ucaacugucuggcacuguu

SEQ ID NO: 2053238 - RNA, 19 nt, Homo sapiens
  misc_RNA (1)...(19): siRNA sense strand
ugucagaugaugaugauuu

SEQ ID NO: 2053239 - RNA, 19 nt, Homo sapiens
  misc_RNA (1)...(19): siRNA sense strand
gcaaaaguuuacauuccua

SEQ ID NO: 2053240 - RNA, 19 nt, Homo sapiens
  misc_RNA (1)...(19): siRNA sense strand
gcauguaccagcugaguuc

SEQ ID NO: 2053241 - RNA, 19 nt, Homo sapiens
  misc_RNA (1)...(19): siRNA sense strand
gcaauaaggaauggcaaga

SEQ ID NO: 2053242 - RNA, 19 nt, Homo sapiens
  misc_RNA (1)...(19): siRNA sense strand
aaagugauccuacccaauc

SEQ ID NO: 2053243 - RNA, 19 nt, Homo sapiens
  misc_RNA (1)...(19): siRNA sense strand
cugaagaacagaaacguuu

SEQ ID NO: 2053244 - RNA, 19 nt, Homo sapiens
  misc_RNA (1)...(19): siRNA sense strand
gaagaaugaagagagaaga

SEQ ID NO: 2053245 - RNA, 19 nt, Homo sapiens
  misc_RNA (1)...(19): siRNA sense strand
gcaguuuauguguuaagua

SEQ ID NO: 2053246 - RNA, 19 nt, Homo sapiens
  misc_RNA (1)...(19): siRNA sense strand
gucagaugaugaugauuug

SEQ ID NO: 2053247 - RNA, 19 nt, Homo sapiens
  misc_RNA (1)...(19): siRNA sense strand
caugaaagggcaaauagug

SEQ ID NO: 2053248 - RNA, 19 nt, Homo sapiens
  misc_RNA (1)...(19): siRNA sense strand
gagguggacuggcuaacag

SEQ ID NO: 2053249 - RNA, 19 nt, Homo sapiens
  misc_RNA (1)...(19): siRNA sense strand
agaaacuacuuaccgugaa

SEQ ID NO: 2053250 - RNA, 19 nt, Homo sapiens
  misc_RNA (1)...(19): siRNA sense strand
uaaagguuggucaucauuu

SEQ ID NO: 2053251 - RNA, 19 nt, Homo sapiens
  misc_RNA (1)...(19): siRNA sense strand
gacaugaaagggcaaauag

SEQ ID NO: 2053252 - RNA, 19 nt, Homo sapiens
  misc_RNA (1)...(19): siRNA sense strand
uggacuggcuaacagaauu

SEQ ID NO: 2053253 - RNA, 19 nt, Homo sapiens
  misc_RNA (1)...(19): siRNA sense strand
aaacaccaguaagacauga

SEQ ID NO: 2053254 - RNA, 19 nt, Homo sapiens
  misc_RNA (1)...(19): siRNA sense strand
caauucaggcucacaacaa

SEQ ID NO: 2053255 - RNA, 19 nt, Homo sapiens
  misc_RNA (1)...(19): siRNA sense strand
ggugacagguggaagaaaa

SEQ ID NO: 2053256 - RNA, 19 nt, Homo sapiens
  misc_RNA (1)...(19): siRNA sense strand
caagggcuaugguucugau

SEQ ID NO: 2053257 - RNA, 19 nt, Homo sapiens
  misc_RNA (1)...(19): siRNA sense strand
agacaugaaagggcaaaua

SEQ ID NO: 2053258 - RNA, 19 nt, Homo sapiens
  misc_RNA (1)...(19): siRNA sense strand
aauccugacuguuggaaga

SEQ ID NO: 2053259 - RNA, 19 nt, Homo sapiens
  misc_RNA (1)...(19): siRNA sense strand
gggaagugaagacaaauca

SEQ ID NO: 2053260 - RNA, 19 nt, Homo sapiens
  misc_RNA (1)...(19): siRNA sense strand
uggcucaccuggaucauca

SEQ ID NO: 2053261 - RNA, 19 nt, Homo sapiens
  misc_RNA (1)...(19): siRNA sense strand
ggucuaaaguuguuaucac

SEQ ID NO: 2053262 - RNA, 19 nt, Homo sapiens
  misc_RNA (1)...(19): siRNA sense strand
uaaggaauggcaagauguu

SEQ ID NO: 2053263 - RNA, 19 nt, Homo sapiens
  misc_RNA (1)...(19): siRNA sense strand
gcaagaucuggauucagua

SEQ ID NO: 2053264 - RNA, 19 nt, Homo sapiens
  misc_RNA (1)...(19): siRNA sense strand
gucaagacuuugcaagauc

SEQ ID NO: 2053265 - RNA, 19 nt, Homo sapiens
  misc_RNA (1)...(19): siRNA sense strand
guucugauggucuaaaguu

SEQ ID NO: 2053266 - RNA, 19 nt, Homo sapiens
  misc_RNA (1)...(19): siRNA sense strand
gaagagggcugucagaaau

SEQ ID NO: 2053267 - RNA, 19 nt, Homo sapiens
  misc_RNA (1)...(19): siRNA sense strand
cauggaagcuauugaguuu

SEQ ID NO: 2053268 - RNA, 19 nt, Homo sapiens
  misc_RNA (1)...(19): siRNA sense strand
ggaucuggcugcucuguuu

SEQ ID NO: 2053269 - RNA, 19 nt, Homo sapiens
  misc_RNA (1)...(19): siRNA sense strand
gagcagcaguuacaaagga

SEQ ID NO: 2053270 - RNA, 19 nt, Homo sapiens
  misc_RNA (1)...(19): siRNA sense strand
gaagcaaggucucauaugc

SEQ ID NO: 2053271 - RNA, 19 nt, Homo sapiens
  misc_RNA (1)...(19): siRNA sense strand
gaagauguauaaagcaaag

SEQ ID NO: 2053272 - RNA, 19 nt, Homo sapiens
  misc_RNA (1)...(19): siRNA sense strand
gccaugcccuggagucaua

SEQ ID NO: 2053273 - RNA, 19 nt, Homo sapiens
  misc_RNA (1)...(19): siRNA sense strand
ggaaugucuuacccaauuu

SEQ ID NO: 2053274 - RNA, 19 nt, Homo sapiens
  misc_RNA (1)...(19): siRNA sense strand
uggaaugucuuacccaauu

SEQ ID NO: 2053275 - RNA, 19 nt, Homo sapiens
  misc_RNA (1)...(19): siRNA sense strand
ggagauggcagaaauacug

SEQ ID NO: 2053276 - RNA, 19 nt, Homo sapiens
  misc_RNA (1)...(19): siRNA sense strand
gugaagauguauaaagcaa

SEQ ID NO: 2053277 - RNA, 19 nt, Homo sapiens
  misc_RNA (1)...(19): siRNA sense strand
gcuauggauucccuaguga

SEQ ID NO: 2053278 - RNA, 19 nt, Homo sapiens
  misc_RNA (1)...(19): siRNA sense strand
gcaaguagcuauggauucc

SEQ ID NO: 2053279 - RNA, 19 nt, Homo sapiens
  misc_RNA (1)...(19): siRNA sense strand
cagacacgcuccggaaauu

SEQ ID NO: 2053280 - RNA, 19 nt, Homo sapiens
  misc_RNA (1)...(19): siRNA sense strand
guucaucugugccauggaa

SEQ ID NO: 2053281 - RNA, 19 nt, Homo sapiens
  misc_RNA (1)...(19): siRNA sense strand
gcagcaacccaaucaguga

SEQ ID NO: 2053282 - RNA, 19 nt, Homo sapiens
  misc_RNA (1)...(19): siRNA sense strand
guaaggcugcuaaucugua

SEQ ID NO: 2053283 - RNA, 19 nt, Homo sapiens
  misc_RNA (1)...(19): siRNA sense strand
caaaggaaguaggaaugga

SEQ ID NO: 2053284 - RNA, 19 nt, Homo sapiens
  misc_RNA (1)...(19): siRNA sense strand
uaaggcugcuaaucuguau

SEQ ID NO: 2053285 - RNA, 19 nt, Homo sapiens
  misc_RNA (1)...(19): siRNA sense strand
ugaagagggcugucagaaa

SEQ ID NO: 2053286 - RNA, 19 nt, Homo sapiens
  misc_RNA (1)...(19): siRNA sense strand
acaagaaccucuccaagcu

SEQ ID NO: 2053287 - RNA, 19 nt, Homo sapiens
  misc_RNA (1)...(19): siRNA sense strand
ggaaauucuuauucgaucu

SEQ ID NO: 2053288 - RNA, 19 nt, Homo sapiens
  misc_RNA (1)...(19): siRNA sense strand
uuacccaauuucagguuua

SEQ ID NO: 2053289 - RNA, 19 nt, Homo sapiens
  misc_RNA (1)...(19): siRNA sense strand
gaaaucccgaugaucuuga

SEQ ID NO: 2053290 - RNA, 19 nt, Homo sapiens
  misc_RNA (1)...(19): siRNA sense strand
caagcucccuccugugcaa

SEQ ID NO: 2053291 - RNA, 19 nt, Homo sapiens
  misc_RNA (1)...(19): siRNA sense strand
aagcaaaggauuacaaugu

SEQ ID NO: 2053292 - RNA, 19 nt, Homo sapiens
  misc_RNA (1)...(19): siRNA sense strand
caacaguggcuuugaugug

SEQ ID NO: 2053293 - RNA, 19 nt, Homo sapiens
  misc_RNA (1)...(19): siRNA sense strand
gaaaugcugguguucaucu

SEQ ID NO: 2053294 - RNA, 19 nt, Homo sapiens
  misc_RNA (1)...(19): siRNA sense strand
gaucguggcuaaguaucug

SEQ ID NO: 2053295 - RNA, 19 nt, Homo sapiens
  misc_RNA (1)...(19): siRNA sense strand
uggauucccuagugaagaa

SEQ ID NO: 2053296 - RNA, 19 nt, Homo sapiens
  misc_RNA (1)...(19): siRNA sense strand
gcagacacgcuccggaaau

SEQ ID NO: 2053297 - RNA, 19 nt, Homo sapiens
  misc_RNA (1)...(19): siRNA sense strand
cagguuuagugaagaugua

SEQ ID NO: 2053298 - RNA, 19 nt, Homo sapiens
  misc_RNA (1)...(19): siRNA sense strand
ggcaucggcuuuggaaaug

SEQ ID NO: 2053299 - RNA, 19 nt, Homo sapiens
  misc_RNA (1)...(19): siRNA sense strand
ucagaaaucccgaugaucu

SEQ ID NO: 2053300 - RNA, 19 nt, Homo sapiens
  misc_RNA (1)...(19): siRNA sense strand
ugucagaaaucccgaugau

SEQ ID NO: 2053301 - RNA, 19 nt, Homo sapiens
  misc_RNA (1)...(19): siRNA sense strand
ggaaagggucaccaagcuu

SEQ ID NO: 2053302 - RNA, 19 nt, Homo sapiens
  misc_RNA (1)...(19): siRNA sense strand
ucaggaaccgggagugaaa

SEQ ID NO: 2053303 - RNA, 19 nt, Homo sapiens
  misc_RNA (1)...(19): siRNA sense strand
uauucgaucuggauguuga

SEQ ID NO: 2053304 - RNA, 19 nt, Homo sapiens
  misc_RNA (1)...(19): siRNA sense strand
gcacugccaggauccaaga

SEQ ID NO: 2053305 - RNA, 19 nt, Homo sapiens
  misc_RNA (1)...(19): siRNA sense strand
ggauucaagcuucauggaa

SEQ ID NO: 2053306 - RNA, 19 nt, Homo sapiens
  misc_RNA (1)...(19): siRNA sense strand
ccuagcagcuguugguuac

SEQ ID NO: 2053307 - RNA, 19 nt, Homo sapiens
  misc_RNA (1)...(19): siRNA sense strand
gaaccgggagugaaacuac

SEQ ID NO: 2053308 - RNA, 19 nt, Homo sapiens
  misc_RNA (1)...(19): siRNA sense strand
ucagugacauuugggcuau

SEQ ID NO: 2053309 - RNA, 19 nt, Homo sapiens
  misc_RNA (1)...(19): siRNA sense strand
gaaauucuuauucgaucug

SEQ ID NO: 2053310 - RNA, 19 nt, Homo sapiens
  misc_RNA (1)...(19): siRNA sense strand
ccucuuaagccucugauug

SEQ ID NO: 2053311 - RNA, 19 nt, Homo sapiens
  misc_RNA (1)...(19): siRNA sense strand
cuacugggguugccauuuu

SEQ ID NO: 2053312 - RNA, 19 nt, Homo sapiens
  misc_RNA (1)...(19): siRNA sense strand
caaggucucauaugcacuu

SEQ ID NO: 2053313 - RNA, 19 nt, Homo sapiens
  misc_RNA (1)...(19): siRNA sense strand
ugacuaugaacacuugaaa

SEQ ID NO: 2053314 - RNA, 19 nt, Homo sapiens
  misc_RNA (1)...(19): siRNA sense strand
cauccagcccucauucuga

SEQ ID NO: 2053315 - RNA, 19 nt, Homo sapiens
  misc_RNA (1)...(19): siRNA sense strand
ccagcgguguucacuuuca

SEQ ID NO: 2053316 - RNA, 19 nt, Homo sapiens
  misc_RNA (1)...(19): siRNA sense strand
gaguggaaccaacggauuc

SEQ ID NO: 2053317 - RNA, 19 nt, Homo sapiens
  misc_RNA (1)...(19): siRNA sense strand
uagugaagauguauaaagc

SEQ ID NO: 2053318 - RNA, 19 nt, Homo sapiens
  misc_RNA (1)...(19): siRNA sense strand
uggaaaugcugguguucau

SEQ ID NO: 2053319 - RNA, 19 nt, Homo sapiens
  misc_RNA (1)...(19): siRNA sense strand
ccaauuucagguuuaguga

SEQ ID NO: 2053320 - RNA, 19 nt, Homo sapiens
  misc_RNA (1)...(19): siRNA sense strand
agcaaaggauuacaaugug

SEQ ID NO: 2053321 - RNA, 19 nt, Homo sapiens
  misc_RNA (1)...(19): siRNA sense strand
agggaaagccugugucugu

SEQ ID NO: 2053322 - RNA, 19 nt, Homo sapiens
  misc_RNA (1)...(19): siRNA sense strand
ccaacggauucaagcuuca

SEQ ID NO: 2053323 - RNA, 19 nt, Homo sapiens
  misc_RNA (1)...(19): siRNA sense strand
gccuagcagcuguugguua

SEQ ID NO: 2053324 - RNA, 19 nt, Homo sapiens
  misc_RNA (1)...(19): siRNA sense strand
cgaucuggauguugaugau

SEQ ID NO: 2053325 - RNA, 19 nt, Homo sapiens
  misc_RNA (1)...(19): siRNA sense strand
gcucccuccugugcaagua

SEQ ID NO: 2053326 - RNA, 19 nt, Homo sapiens
  misc_RNA (1)...(19): siRNA sense strand
gaaugucuuacccaauuuc

SEQ ID NO: 2053327 - RNA, 19 nt, Homo sapiens
  misc_RNA (1)...(19): siRNA sense strand
cagaaaucccgaugaucuu

SEQ ID NO: 2053328 - RNA, 19 nt, Homo sapiens
  misc_RNA (1)...(19): siRNA sense strand
ucauggaagcuauugaguu

SEQ ID NO: 2053329 - RNA, 19 nt, Homo sapiens
  misc_RNA (1)...(19): siRNA sense strand
agauauggagcagcaguua

SEQ ID NO: 2053330 - RNA, 19 nt, Homo sapiens
  misc_RNA (1)...(19): siRNA sense strand
aaaucccgaugaucuugaa

SEQ ID NO: 2053331 - RNA, 19 nt, Homo sapiens
  misc_RNA (1)...(19): siRNA sense strand
guggcuaaguaucugaaga

SEQ ID NO: 2053332 - RNA, 19 nt, Homo sapiens
  misc_RNA (1)...(19): siRNA sense strand
uuuccuagauuaugucagu

SEQ ID NO: 2053333 - RNA, 19 nt, Homo sapiens
  misc_RNA (1)...(19): siRNA sense strand
cugauuuccuagauuaugu

SEQ ID NO: 2053334 - RNA, 19 nt, Homo sapiens
  misc_RNA (1)...(19): siRNA sense strand
cuuauucgaucuggauguu

SEQ ID NO: 2053335 - RNA, 19 nt, Homo sapiens
  misc_RNA (1)...(19): siRNA sense strand
uuacaaaggaaguaggaau

SEQ ID NO: 2053336 - RNA, 19 nt, Homo sapiens
  misc_RNA (1)...(19): siRNA sense strand
gugcaaguagcuauggauu

SEQ ID NO: 2053337 - RNA, 19 nt, Homo sapiens
  misc_RNA (1)...(19): siRNA sense strand
guauaaagcaaaggauuac

SEQ ID NO: 2053338 - RNA, 19 nt, Homo sapiens
  misc_RNA (1)...(19): siRNA sense strand
gcggaucguggcuaaguau

SEQ ID NO: 2053339 - RNA, 19 nt, Homo sapiens
  misc_RNA (1)...(19): siRNA sense strand
gggcagcaacccaaucagu

SEQ ID NO: 2053340 - RNA, 19 nt, Homo sapiens
  misc_RNA (1)...(19): siRNA sense strand
acacugggacugauugauc

SEQ ID NO: 2053341 - RNA, 19 nt, Homo sapiens
  misc_RNA (1)...(19): siRNA sense strand
uggaagcuauugaguuugc

SEQ ID NO: 2053342 - RNA, 19 nt, Homo sapiens
  misc_RNA (1)...(19): siRNA sense strand
uggcaucggcuuuggaaau

SEQ ID NO: 2053343 - RNA, 19 nt, Homo sapiens
  misc_RNA (1)...(19): siRNA sense strand
caacccaaucagugacauu

SEQ ID NO: 2053344 - RNA, 19 nt, Homo sapiens
  misc_RNA (1)...(19): siRNA sense strand
ggaaccgggagugaaacua

SEQ ID NO: 2053345 - RNA, 19 nt, Homo sapiens
  misc_RNA (1)...(19): siRNA sense strand
ccuguaaggcugcuaaucu

SEQ ID NO: 2053346 - RNA, 19 nt, Homo sapiens
  misc_RNA (1)...(19): siRNA sense strand
gcuccggaaauucuuauuc

SEQ ID NO: 2053347 - RNA, 19 nt, Homo sapiens
  misc_RNA (1)...(19): siRNA sense strand
gcuggcaucggcuuuggaa

SEQ ID NO: 2053348 - RNA, 19 nt, Homo sapiens
  misc_RNA (1)...(19): siRNA sense strand
ugaagcaaggucucauaug

SEQ ID NO: 2053349 - RNA, 19 nt, Homo sapiens
  misc_RNA (1)...(19): siRNA sense strand
ucacacggccugcguacca

SEQ ID NO: 2053350 - RNA, 19 nt, Homo sapiens
  misc_RNA (1)...(19): siRNA sense strand
caagggaaagccugugucu

SEQ ID NO: 2053351 - RNA, 19 nt, Homo sapiens
  misc_RNA (1)...(19): siRNA sense strand
cauucugauuuccuagauu

SEQ ID NO: 2053352 - RNA, 19 nt, Homo sapiens
  misc_RNA (1)...(19): siRNA sense strand
ccagcccucauucugauuu

SEQ ID NO: 2053353 - RNA, 19 nt, Homo sapiens
  misc_RNA (1)...(19): siRNA sense strand
gaagaauggcauccccuuu

SEQ ID NO: 2053354 - RNA, 19 nt, Homo sapiens
  misc_RNA (1)...(19): siRNA sense strand
gcauccagcccucauucug

SEQ ID NO: 2053355 - RNA, 19 nt, Homo sapiens
  misc_RNA (1)...(19): siRNA sense strand
uacaaaggaaguaggaaug

SEQ ID NO: 2053356 - RNA, 19 nt, Homo sapiens
  misc_RNA (1)...(19): siRNA sense strand
cuguaaggcugcuaaucug

SEQ ID NO: 2053357 - RNA, 19 nt, Homo sapiens
  misc_RNA (1)...(19): siRNA sense strand
gaaccaacggauucaagcu

SEQ ID NO: 2053358 - RNA, 19 nt, Homo sapiens
  misc_RNA (1)...(19): siRNA sense strand
aagaauggcauccccuuua

SEQ ID NO: 2053359 - RNA, 19 nt, Homo sapiens
  misc_RNA (1)...(19): siRNA sense strand
ucauucugauuuccuagau

SEQ ID NO: 2053360 - RNA, 19 nt, Homo sapiens
  misc_RNA (1)...(19): siRNA sense strand
ggaaaugcugguguucauc

SEQ ID NO: 2053361 - RNA, 19 nt, Homo sapiens
  misc_RNA (1)...(19): siRNA sense strand
gaucuggcugcucuguuug

SEQ ID NO: 2053362 - RNA, 19 nt, Homo sapiens
  misc_RNA (1)...(19): siRNA sense strand
gggcugguguuggcagaca

SEQ ID NO: 2053363 - RNA, 19 nt, Homo sapiens
  misc_RNA (1)...(19): siRNA sense strand
ccccagcgguguucacuuu

SEQ ID NO: 2053364 - RNA, 19 nt, Homo sapiens
  misc_RNA (1)...(19): siRNA sense strand
cagacaagaaccucuccaa

SEQ ID NO: 2053365 - RNA, 19 nt, Homo sapiens
  misc_RNA (1)...(19): siRNA sense strand
gcaguuacaaaggaaguag

SEQ ID NO: 2053366 - RNA, 19 nt, Homo sapiens
  misc_RNA (1)...(19): siRNA sense strand
gagaugcacuucagagaua

SEQ ID NO: 2053367 - RNA, 19 nt, Homo sapiens
  misc_RNA (1)...(19): siRNA sense strand
caacaagacaugaugguua

SEQ ID NO: 2053368 - RNA, 19 nt, Homo sapiens
  misc_RNA (1)...(19): siRNA sense strand
caaguuauguggcaucuau

SEQ ID NO: 2053369 - RNA, 19 nt, Homo sapiens
  misc_RNA (1)...(19): siRNA sense strand
gaacgucuuugcauggaaa

SEQ ID NO: 2053370 - RNA, 19 nt, Homo sapiens
  misc_RNA (1)...(19): siRNA sense strand
gagaaaugaucgcauguca

SEQ ID NO: 2053371 - RNA, 19 nt, Homo sapiens
  misc_RNA (1)...(19): siRNA sense strand
ggaugaaaguuauucuaga

SEQ ID NO: 2053372 - RNA, 19 nt, Homo sapiens
  misc_RNA (1)...(19): siRNA sense strand
caucgaaguucccgagaaa

SEQ ID NO: 2053373 - RNA, 19 nt, Homo sapiens
  misc_RNA (1)...(19): siRNA sense strand
caucgaaguucccgagaaa

SEQ ID NO: 2053374 - RNA, 19 nt, Homo sapiens
  misc_RNA (1)...(19): siRNA sense strand
ccaaugagaagaugcuuaa

SEQ ID NO: 2053375 - RNA, 19 nt, Homo sapiens
  misc_RNA (1)...(19): siRNA sense strand
guaauacacgagauagaua

SEQ ID NO: 2053376 - RNA, 19 nt, Homo sapiens
  misc_RNA (1)...(19): siRNA sense strand
ggaugaacauuccucuaga

SEQ ID NO: 2053377 - RNA, 19 nt, Homo sapiens
  misc_RNA (1)...(19): siRNA sense strand
gaugaaaguuauucuagag

SEQ ID NO: 2053378 - RNA, 19 nt, Homo sapiens
  misc_RNA (1)...(19): siRNA sense strand
ggaugaacauuccucuaga

SEQ ID NO: 2053379 - RNA, 19 nt, Homo sapiens
  misc_RNA (1)...(19): siRNA sense strand
gcaagaagcaauaguugga

SEQ ID NO: 2053380 - RNA, 19 nt, Homo sapiens
  misc_RNA (1)...(19): siRNA sense strand
gaaaugaucgcaugucaac

SEQ ID NO: 2053381 - RNA, 19 nt, Homo sapiens
  misc_RNA (1)...(19): siRNA sense strand
gcagaaguugggagaguua

SEQ ID NO: 2053382 - RNA, 19 nt, Homo sapiens
  misc_RNA (1)...(19): siRNA sense strand
gaaaguuauucuagaggau

SEQ ID NO: 2053383 - RNA, 19 nt, Homo sapiens
  misc_RNA (1)...(19): siRNA sense strand
gaacaucuaaguggaaguu

SEQ ID NO: 2053384 - RNA, 19 nt, Homo sapiens
  misc_RNA (1)...(19): siRNA sense strand
gaaaguuauucuagaggau

SEQ ID NO: 2053385 - RNA, 19 nt, Homo sapiens
  misc_RNA (1)...(19): siRNA sense strand
cauccaaguugccaagaaa

SEQ ID NO: 2053386 - RNA, 19 nt, Homo sapiens
  misc_RNA (1)...(19): siRNA sense strand
cgagauagauauggcagaa

SEQ ID NO: 2053387 - RNA, 19 nt, Homo sapiens
  misc_RNA (1)...(19): siRNA sense strand
caaagaagagagaauuaug

SEQ ID NO: 2053388 - RNA, 19 nt, Homo sapiens
  misc_RNA (1)...(19): siRNA sense strand
cagcaaauccagaggcuuu

SEQ ID NO: 2053389 - RNA, 19 nt, Homo sapiens
  misc_RNA (1)...(19): siRNA sense strand
cauccaaguucccgagaaa

SEQ ID NO: 2053390 - RNA, 19 nt, Homo sapiens
  misc_RNA (1)...(19): siRNA sense strand
ggccauggauaccgugauu

SEQ ID NO: 2053391 - RNA, 19 nt, Homo sapiens
  misc_RNA (1)...(19): siRNA sense strand
uaagaaugcugcgaaagau

SEQ ID NO: 2053392 - RNA, 19 nt, Homo sapiens
  misc_RNA (1)...(19): siRNA sense strand
uccagaggcuuugcauuua

SEQ ID NO: 2053393 - RNA, 19 nt, Homo sapiens
  misc_RNA (1)...(19): siRNA sense strand
ccagaggcuuugcauuuau

SEQ ID NO: 2053394 - RNA, 19 nt, Homo sapiens
  misc_RNA (1)...(19): siRNA sense strand
gagacucgagcagauauua

SEQ ID NO: 2053395 - RNA, 19 nt, Homo sapiens
  misc_RNA (1)...(19): siRNA sense strand
ggauauagaaaucaucgaa

SEQ ID NO: 2053396 - RNA, 19 nt, Homo sapiens
  misc_RNA (1)...(19): siRNA sense strand
gccaagaaacgagggauua

SEQ ID NO: 2053397 - RNA, 19 nt, Homo sapiens
  misc_RNA (1)...(19): siRNA sense strand
gcagagcgacaauaucuuc

SEQ ID NO: 2053398 - RNA, 19 nt, Homo sapiens
  misc_RNA (1)...(19): siRNA sense strand
guagagaucauucugaaca

SEQ ID NO: 2053399 - RNA, 19 nt, Homo sapiens
  misc_RNA (1)...(19): siRNA sense strand
ggucccaugucacaaagaa

SEQ ID NO: 2053400 - RNA, 19 nt, Homo sapiens
  misc_RNA (1)...(19): siRNA sense strand
ucacaaagaagagagaauu

SEQ ID NO: 2053401 - RNA, 19 nt, Homo sapiens
  misc_RNA (1)...(19): siRNA sense strand
auacagaaaucaucgaagu

SEQ ID NO: 2053402 - RNA, 19 nt, Homo sapiens
  misc_RNA (1)...(19): siRNA sense strand
ggauuaugcuccaccaucu

SEQ ID NO: 2053403 - RNA, 19 nt, Homo sapiens
  misc_RNA (1)...(19): siRNA sense strand
ggauuaugcuccaccaucu

SEQ ID NO: 2053404 - RNA, 19 nt, Homo sapiens
  misc_RNA (1)...(19): siRNA sense strand
cagaggcuuugcauuuauu

SEQ ID NO: 2053405 - RNA, 19 nt, Homo sapiens
  misc_RNA (1)...(19): siRNA sense strand
cgacaugaaaguuauucua

SEQ ID NO: 2053406 - RNA, 19 nt, Homo sapiens
  misc_RNA (1)...(19): siRNA sense strand
cuaagaaugcugcgaaaga

SEQ ID NO: 2053407 - RNA, 19 nt, Homo sapiens
  misc_RNA (1)...(19): siRNA sense strand
ggaaguucuuauagagaug

SEQ ID NO: 2053408 - RNA, 19 nt, Homo sapiens
  misc_RNA (1)...(19): siRNA sense strand
aacaagacaugaugguuau

SEQ ID NO: 2053409 - RNA, 19 nt, Homo sapiens
  misc_RNA (1)...(19): siRNA sense strand
cacaaagaagagagaauua

SEQ ID NO: 2053410 - RNA, 19 nt, Homo sapiens
  misc_RNA (1)...(19): siRNA sense strand
caaggucccaugucacaaa

SEQ ID NO: 2053411 - RNA, 19 nt, Homo sapiens
  misc_RNA (1)...(19): siRNA sense strand
gaacaagccaagaaaccau

SEQ ID NO: 2053412 - RNA, 19 nt, Homo sapiens
  misc_RNA (1)...(19): siRNA sense strand
gaugaacauuccucuagag

SEQ ID NO: 2053413 - RNA, 19 nt, Homo sapiens
  misc_RNA (1)...(19): siRNA sense strand
gaugaacauuccucuagag

SEQ ID NO: 2053414 - RNA, 19 nt, Homo sapiens
  misc_RNA (1)...(19): siRNA sense strand
caugaaaguuauucuagag

SEQ ID NO: 2053415 - RNA, 19 nt, Homo sapiens
  misc_RNA (1)...(19): siRNA sense strand
ccacgcagagcgacaauau

SEQ ID NO: 2053416 - RNA, 19 nt, Homo sapiens
  misc_RNA (1)...(19): siRNA sense strand
aaaggagacucgagcagau

SEQ ID NO: 2053417 - RNA, 19 nt, Homo sapiens
  misc_RNA (1)...(19): siRNA sense strand
ggauuaugcuccaccacau

SEQ ID NO: 2053418 - RNA, 19 nt, Homo sapiens
  misc_RNA (1)...(19): siRNA sense strand
ggccaugcauaccgugauu

SEQ ID NO: 2053419 - RNA, 19 nt, Homo sapiens
  misc_RNA (1)...(19): siRNA sense strand
gaucgcaugucaacaagac

SEQ ID NO: 2053420 - RNA, 19 nt, Homo sapiens
  misc_RNA (1)...(19): siRNA sense strand
gaagggcaccuggaugaug

SEQ ID NO: 2053421 - RNA, 19 nt, Homo sapiens
  misc_RNA (1)...(19): siRNA sense strand
ccacgcauauaguaauaca

SEQ ID NO: 2053422 - RNA, 19 nt, Homo sapiens
  misc_RNA (1)...(19): siRNA sense strand
gggaugaacauuccucuag

SEQ ID NO: 2053423 - RNA, 19 nt, Homo sapiens
  misc_RNA (1)...(19): siRNA sense strand
gagaaaccaaugagaagau

SEQ ID NO: 2053424 - RNA, 19 nt, Homo sapiens
  misc_RNA (1)...(19): siRNA sense strand
gggaugaacauuccucuag

SEQ ID NO: 2053425 - RNA, 19 nt, Homo sapiens
  misc_RNA (1)...(19): siRNA sense strand
caacuaacgauggaaauca

SEQ ID NO: 2053426 - RNA, 19 nt, Homo sapiens
  misc_RNA (1)...(19): siRNA sense strand
gggacucauuccaguuaaa

SEQ ID NO: 2053427 - RNA, 19 nt, Homo sapiens
  misc_RNA (1)...(19): siRNA sense strand
aagagagaauuauggaguu

SEQ ID NO: 2053428 - RNA, 19 nt, Homo sapiens
  misc_RNA (1)...(19): siRNA sense strand
gaauggaacgucuuugcau

SEQ ID NO: 2053429 - RNA, 19 nt, Homo sapiens
  misc_RNA (1)...(19): siRNA sense strand
gcaccugccacgcauauag

SEQ ID NO: 2053430 - RNA, 19 nt, Homo sapiens
  misc_RNA (1)...(19): siRNA sense strand
ggaacgucuuugcauggaa

SEQ ID NO: 2053431 - RNA, 19 nt, Homo sapiens
  misc_RNA (1)...(19): siRNA sense strand
gaucauccuggcaagcuuu

SEQ ID NO: 2053432 - RNA, 19 nt, Homo sapiens
  misc_RNA (1)...(19): siRNA sense strand
ugguagagaucauucugaa

SEQ ID NO: 2053433 - RNA, 19 nt, Homo sapiens
  misc_RNA (1)...(19): siRNA sense strand
gacuaugcauaccgugauu

SEQ ID NO: 2053434 - RNA, 19 nt, Homo sapiens
  misc_RNA (1)...(19): siRNA sense strand
gacaugaaaguuauucuag

SEQ ID NO: 2053435 - RNA, 19 nt, Homo sapiens
  misc_RNA (1)...(19): siRNA sense strand
ccgagaaacuagggauuau

SEQ ID NO: 2053436 - RNA, 19 nt, Homo sapiens
  misc_RNA (1)...(19): siRNA sense strand
ggcuaugcauaccgugaua

SEQ ID NO: 2053437 - RNA, 19 nt, Homo sapiens
  misc_RNA (1)...(19): siRNA sense strand
uaaagcaguauuugggaaa

SEQ ID NO: 2053438 - RNA, 19 nt, Homo sapiens
  misc_RNA (1)...(19): siRNA sense strand
agauagauauggcagaagu

SEQ ID NO: 2053439 - RNA, 19 nt, Homo sapiens
  misc_RNA (1)...(19): siRNA sense strand
ggauacagaaaucaucgaa

SEQ ID NO: 2053440 - RNA, 19 nt, Homo sapiens
  misc_RNA (1)...(19): siRNA sense strand
gggaugaaaguuauucuag

SEQ ID NO: 2053441 - RNA, 19 nt, Homo sapiens
  misc_RNA (1)...(19): siRNA sense strand
aagccaaggucccauguca

SEQ ID NO: 2053442 - RNA, 19 nt, Homo sapiens
  misc_RNA (1)...(19): siRNA sense strand
uuauguggcaucuauagua

SEQ ID NO: 2053443 - RNA, 19 nt, Homo sapiens
  misc_RNA (1)...(19): siRNA sense strand
uaaaggaucgaaccagcaa

SEQ ID NO: 2053444 - RNA, 19 nt, Homo sapiens
  misc_RNA (1)...(19): siRNA sense strand
gugagcauguuugcagaaa

SEQ ID NO: 2053445 - RNA, 19 nt, Homo sapiens
  misc_RNA (1)...(19): siRNA sense strand
ugccacgcauauaguaaua

SEQ ID NO: 2053446 - RNA, 19 nt, Homo sapiens
  misc_RNA (1)...(19): siRNA sense strand
ccgagaaacuagggaguau

SEQ ID NO: 2053447 - RNA, 19 nt, Homo sapiens
  misc_RNA (1)...(19): siRNA sense strand
caugaugguuaugcaacua

SEQ ID NO: 2053448 - RNA, 19 nt, Homo sapiens
  misc_RNA (1)...(19): siRNA sense strand
ggagaccaccagcuucuuc

SEQ ID NO: 2053449 - RNA, 19 nt, Homo sapiens
  misc_RNA (1)...(19): siRNA sense strand
uggaaguucuuauagagau

SEQ ID NO: 2053450 - RNA, 19 nt, Homo sapiens
  misc_RNA (1)...(19): siRNA sense strand
gauuauggucauucuaguu

SEQ ID NO: 2053451 - RNA, 19 nt, Homo sapiens
  misc_RNA (1)...(19): siRNA sense strand
ggaagucugagaucugcaa

SEQ ID NO: 2053452 - RNA, 19 nt, Homo sapiens
  misc_RNA (1)...(19): siRNA sense strand
ggcagaaguugggagaguu

SEQ ID NO: 2053453 - RNA, 19 nt, Homo sapiens
  misc_RNA (1)...(19): siRNA sense strand
gagaaacuagggauuaugc

SEQ ID NO: 2053454 - RNA, 19 nt, Homo sapiens
  misc_RNA (1)...(19): siRNA sense strand
ucuagaggauacagaaauc

SEQ ID NO: 2053455 - RNA, 19 nt, Homo sapiens
  misc_RNA (1)...(19): siRNA sense strand
gcuguggcaagaagcaaua

SEQ ID NO: 2053456 - RNA, 19 nt, Homo sapiens
  misc_RNA (1)...(19): siRNA sense strand
uauguggcaucuauaguag

SEQ ID NO: 2053457 - RNA, 19 nt, Homo sapiens
  misc_RNA (1)...(19): siRNA sense strand
aaguggaaguucuuauaga

SEQ ID NO: 2053458 - RNA, 19 nt, Homo sapiens
  misc_RNA (1)...(19): siRNA sense strand
gaucauucugaacaucuaa

SEQ ID NO: 2053459 - RNA, 19 nt, Homo sapiens
  misc_RNA (1)...(19): siRNA sense strand
gugaggcccuugguagaga

SEQ ID NO: 2053460 - RNA, 19 nt, Homo sapiens
  misc_RNA (1)...(19): siRNA sense strand
cgagaaaccagggauuaug

SEQ ID NO: 2053461 - RNA, 19 nt, Homo sapiens
  misc_RNA (1)...(19): siRNA sense strand
ucaauagagaaaccaauga

SEQ ID NO: 2053462 - RNA, 19 nt, Homo sapiens
  misc_RNA (1)...(19): siRNA sense strand
auagaaaucauccaaguuc

SEQ ID NO: 2053463 - RNA, 19 nt, Homo sapiens
  misc_RNA (1)...(19): siRNA sense strand
ccauggauaccgugauuau

SEQ ID NO: 2053464 - RNA, 19 nt, Homo sapiens
  misc_RNA (1)...(19): siRNA sense strand
caagaaacgagggauuaug

SEQ ID NO: 2053465 - RNA, 19 nt, Homo sapiens
  misc_RNA (1)...(19): siRNA sense strand
auagagaaaccaaugagaa

SEQ ID NO: 2053466 - RNA, 19 nt, Homo sapiens
  misc_RNA (1)...(19): siRNA sense strand
gcagacaaccgcccuguga

SEQ ID NO: 2053467 - RNA, 19 nt, Homo sapiens
  misc_RNA (1)...(19): siRNA sense strand
ccugugagcuucuacaagu

SEQ ID NO: 2053468 - RNA, 19 nt, Homo sapiens
  misc_RNA (1)...(19): siRNA sense strand
gcagugcccuccaucuucu

SEQ ID NO: 2053469 - RNA, 19 nt, Homo sapiens
  misc_RNA (1)...(19): siRNA sense strand
ucccaaaccuucaccauca

SEQ ID NO: 2053470 - RNA, 19 nt, Homo sapiens
  misc_RNA (1)...(19): siRNA sense strand
gcgccgaacugcuccaaca

SEQ ID NO: 2053471 - RNA, 19 nt, Homo sapiens
  misc_RNA (1)...(19): siRNA sense strand
ugaagucccugcccaacag

SEQ ID NO: 2053472 - RNA, 19 nt, Homo sapiens
  misc_RNA (1)...(19): siRNA sense strand
ugacauagccaugguccuu

SEQ ID NO: 2053473 - RNA, 19 nt, Homo sapiens
  misc_RNA (1)...(19): siRNA sense strand
gggaccaccugccaagagu

SEQ ID NO: 2053474 - RNA, 19 nt, Homo sapiens
  misc_RNA (1)...(19): siRNA sense strand
ccaagacuguggccaccau

SEQ ID NO: 2053475 - RNA, 19 nt, Homo sapiens
  misc_RNA (1)...(19): siRNA sense strand
ucuacaaguucccacugaa

SEQ ID NO: 2053476 - RNA, 19 nt, Homo sapiens
  misc_RNA (1)...(19): siRNA sense strand
gaccaccugccaagaguca

SEQ ID NO: 2053477 - RNA, 19 nt, Homo sapiens
  misc_RNA (1)...(19): siRNA sense strand
gaggaaucccaaaccuuca

SEQ ID NO: 2053478 - RNA, 19 nt, Homo sapiens
  misc_RNA (1)...(19): siRNA sense strand
ggaccugaggaaucccaaa

SEQ ID NO: 2053479 - RNA, 19 nt, Homo sapiens
  misc_RNA (1)...(19): siRNA sense strand
ggccugacauagccauggu

SEQ ID NO: 2053480 - RNA, 19 nt, Homo sapiens
  misc_RNA (1)...(19): siRNA sense strand
ggaccuccaucguguuuga

SEQ ID NO: 2053481 - RNA, 19 nt, Homo sapiens
  misc_RNA (1)...(19): siRNA sense strand
gagccucaccuacaucuug

SEQ ID NO: 2053482 - RNA, 19 nt, Homo sapiens
  misc_RNA (1)...(19): siRNA sense strand
cgcuggagcugcuguguuu

SEQ ID NO: 2053483 - RNA, 19 nt, Homo sapiens
  misc_RNA (1)...(19): siRNA sense strand
ccagcacgcucaucuucuu

SEQ ID NO: 2053484 - RNA, 19 nt, Homo sapiens
  misc_RNA (1)...(19): siRNA sense strand
caccgcaggcuaccucuua

SEQ ID NO: 2053485 - RNA, 19 nt, Homo sapiens
  misc_RNA (1)...(19): siRNA sense strand
caucauggcuguguucaac

SEQ ID NO: 2053486 - RNA, 19 nt, Homo sapiens
  misc_RNA (1)...(19): siRNA sense strand
cagcuguccuccugaacaa

SEQ ID NO: 2053487 - RNA, 19 nt, Homo sapiens
  misc_RNA (1)...(19): siRNA sense strand
gccgugaccuacuucauca

SEQ ID NO: 2053488 - RNA, 19 nt, Homo sapiens
  misc_RNA (1)...(19): siRNA sense strand
gggccuacaugcgcuuuga

SEQ ID NO: 2053489 - RNA, 19 nt, Homo sapiens
  misc_RNA (1)...(19): siRNA sense strand
gaccguguccuacauguca

SEQ ID NO: 2053490 - RNA, 19 nt, Homo sapiens
  misc_RNA (1)...(19): siRNA sense strand
ggacguggacuaccugcau

SEQ ID NO: 2053491 - RNA, 19 nt, Homo sapiens
  misc_RNA (1)...(19): siRNA sense strand
ucacggauacuacauugga

SEQ ID NO: 2053492 - RNA, 19 nt, Homo sapiens
  misc_RNA (1)...(19): siRNA sense strand
uggacuaccugcaucacaa

SEQ ID NO: 2053493 - RNA, 19 nt, Homo sapiens
  misc_RNA (1)...(19): siRNA sense strand
gaccaggccuacgccauca

SEQ ID NO: 2053494 - RNA, 19 nt, Homo sapiens
  misc_RNA (1)...(19): siRNA sense strand
gcagcaauccagcuucuac

SEQ ID NO: 2053495 - RNA, 19 nt, Homo sapiens
  misc_RNA (1)...(19): siRNA sense strand
caucagcaacggcuacuuc

SEQ ID NO: 2053496 - RNA, 19 nt, Homo sapiens
  misc_RNA (1)...(19): siRNA sense strand
ccauacaacagcuucauca

SEQ ID NO: 2053497 - RNA, 19 nt, Homo sapiens
  misc_RNA (1)...(19): siRNA sense strand
gcagcuguccuccugaaca

SEQ ID NO: 2053498 - RNA, 19 nt, Homo sapiens
  misc_RNA (1)...(19): siRNA sense strand
uuucacggauacuacauug

SEQ ID NO: 2053499 - RNA, 19 nt, Homo sapiens
  misc_RNA (1)...(19): siRNA sense strand
gcuucgugcucuucuauac

SEQ ID NO: 2053500 - RNA, 19 nt, Homo sapiens
  misc_RNA (1)...(19): siRNA sense strand
caccuucagagcccuguua

SEQ ID NO: 2053501 - RNA, 19 nt, Homo sapiens
  misc_RNA (1)...(19): siRNA sense strand
gugcagcaauccagcuucu

SEQ ID NO: 2053502 - RNA, 19 nt, Homo sapiens
  misc_RNA (1)...(19): siRNA sense strand
uggcagcuguccuccugaa

SEQ ID NO: 2053503 - RNA, 19 nt, Homo sapiens
  misc_RNA (1)...(19): siRNA sense strand
cauccucgcaggccucuga

SEQ ID NO: 2053504 - RNA, 19 nt, Homo sapiens
  misc_RNA (1)...(19): siRNA sense strand
gggccgacaugcucuccau

SEQ ID NO: 2053505 - RNA, 19 nt, Homo sapiens
  misc_RNA (1)...(19): siRNA sense strand
guuaucacgccaucuacuu

SEQ ID NO: 2053506 - RNA, 19 nt, Homo sapiens
  misc_RNA (1)...(19): siRNA sense strand
cuaccugcaucacaaguac

SEQ ID NO: 2053507 - RNA, 19 nt, Homo sapiens
  misc_RNA (1)...(19): siRNA sense strand
gccuugggcccucuccuuu

SEQ ID NO: 2053508 - RNA, 19 nt, Homo sapiens
  misc_RNA (1)...(19): siRNA sense strand
ccaugaccguguccuacau

SEQ ID NO: 2053509 - RNA, 19 nt, Homo sapiens
  misc_RNA (1)...(19): siRNA sense strand
uaucacgccaucuacuuug

SEQ ID NO: 2053510 - RNA, 19 nt, Homo sapiens
  misc_RNA (1)...(19): siRNA sense strand
ggacuaccugcaucacaag

SEQ ID NO: 2053511 - RNA, 19 nt, Homo sapiens
  misc_RNA (1)...(19): siRNA sense strand
cuucagagcccuguuacug

SEQ ID NO: 2053512 - RNA, 19 nt, Homo sapiens
  misc_RNA (1)...(19): siRNA sense strand
ggcgugaugaucucucuga

SEQ ID NO: 2053513 - RNA, 19 nt, Homo sapiens
  misc_RNA (1)...(19): siRNA sense strand
gugcuucaccuucgacagu

SEQ ID NO: 2053514 - RNA, 19 nt, Homo sapiens
  misc_RNA (1)...(19): siRNA sense strand
gucccagcuuucacggaua

SEQ ID NO: 2053515 - RNA, 19 nt, Homo sapiens
  misc_RNA (1)...(19): siRNA sense strand
ccaucgccgugaccuacuu

SEQ ID NO: 2053516 - RNA, 19 nt, Homo sapiens
  misc_RNA (1)...(19): siRNA sense strand
uuaucacgccaucuacuuu

SEQ ID NO: 2053517 - RNA, 19 nt, Homo sapiens
  misc_RNA (1)...(19): siRNA sense strand
uguucaaccugucagacuu

SEQ ID NO: 2053518 - RNA, 19 nt, Homo sapiens
  misc_RNA (1)...(19): siRNA sense strand
gcuuccugcugccauacaa

SEQ ID NO: 2053519 - RNA, 19 nt, Homo sapiens
  misc_RNA (1)...(19): siRNA sense strand
cagcuggcccaccuucaga

SEQ ID NO: 2053520 - RNA, 19 nt, Homo sapiens
  misc_RNA (1)...(19): siRNA sense strand
ccacagggcuggugaugau

SEQ ID NO: 2053521 - RNA, 19 nt, Homo sapiens
  misc_RNA (1)...(19): siRNA sense strand
gcggguacuucguuccuua

SEQ ID NO: 2053522 - RNA, 19 nt, Homo sapiens
  misc_RNA (1)...(19): siRNA sense strand
gcgaucugcugcaucucua

SEQ ID NO: 2053523 - RNA, 19 nt, Homo sapiens
  misc_RNA (1)...(19): siRNA sense strand
uaggcacccucucgcguua

SEQ ID NO: 2053524 - RNA, 19 nt, Homo sapiens
  misc_RNA (1)...(19): siRNA sense strand
ggaggcuucucucacagau

SEQ ID NO: 2053525 - RNA, 19 nt, Homo sapiens
  misc_RNA (1)...(19): siRNA sense strand
ccgcagccuucgcgauaaa

SEQ ID NO: 2053526 - RNA, 19 nt, Homo sapiens
  misc_RNA (1)...(19): siRNA sense strand
cguggaggcuucucucaca

SEQ ID NO: 2053527 - RNA, 19 nt, Homo sapiens
  misc_RNA (1)...(19): siRNA sense strand
ccuccugucugguucuuug

SEQ ID NO: 2053528 - RNA, 19 nt, Homo sapiens
  misc_RNA (1)...(19): siRNA sense strand
aggcuucucucacagaugu

SEQ ID NO: 2053529 - RNA, 19 nt, Homo sapiens
  misc_RNA (1)...(19): siRNA sense strand
ggaugagacaggagacuuc

SEQ ID NO: 2053530 - RNA, 19 nt, Homo sapiens
  misc_RNA (1)...(19): siRNA sense strand
cgauaaacgggcuguccua

SEQ ID NO: 2053531 - RNA, 19 nt, Homo sapiens
  misc_RNA (1)...(19): siRNA sense strand
gagacuucaccgccucuuu

SEQ ID NO: 2053532 - RNA, 19 nt, Homo sapiens
  misc_RNA (1)...(19): siRNA sense strand
gccgcagccuucgcgauaa

SEQ ID NO: 2053533 - RNA, 19 nt, Homo sapiens
  misc_RNA (1)...(19): siRNA sense strand
agacuucaccgccucuuuc

SEQ ID NO: 2053534 - RNA, 19 nt, Homo sapiens
  misc_RNA (1)...(19): siRNA sense strand
cggcagcuucaucuacaua

SEQ ID NO: 2053535 - RNA, 19 nt, Homo sapiens
  misc_RNA (1)...(19): siRNA sense strand
ugaccuugccgagcacuuu

SEQ ID NO: 2053536 - RNA, 19 nt, Homo sapiens
  misc_RNA (1)...(19): siRNA sense strand
gcagcuucaucuacauagg

SEQ ID NO: 2053537 - RNA, 19 nt, Homo sapiens
  misc_RNA (1)...(19): siRNA sense strand
ccuccucgcuggcuuuggu

SEQ ID NO: 2053538 - RNA, 19 nt, Homo sapiens
  misc_RNA (1)...(19): siRNA sense strand
gaugagacaggagacuuca

SEQ ID NO: 2053539 - RNA, 19 nt, Homo sapiens
  misc_RNA (1)...(19): siRNA sense strand
gcacauacaucaucuucuu

SEQ ID NO: 2053540 - RNA, 19 nt, Homo sapiens
  misc_RNA (1)...(19): siRNA sense strand
caacuuugcugaccuaugu

SEQ ID NO: 2053541 - RNA, 19 nt, Homo sapiens
  misc_RNA (1)...(19): siRNA sense strand
ccauggaacuucuuuauca

SEQ ID NO: 2053542 - RNA, 19 nt, Homo sapiens
  misc_RNA (1)...(19): siRNA sense strand
guacaacuuugcugaccua

SEQ ID NO: 2053543 - RNA, 19 nt, Homo sapiens
  misc_RNA (1)...(19): siRNA sense strand
uaacugcacuggugaaggu

SEQ ID NO: 2053544 - RNA, 19 nt, Homo sapiens
  misc_RNA (1)...(19): siRNA sense strand
gaacucccaagcacugaua

SEQ ID NO: 2053545 - RNA, 19 nt, Homo sapiens
  misc_RNA (1)...(19): siRNA sense strand
ugaacuacuuugagagcua

SEQ ID NO: 2053546 - RNA, 19 nt, Homo sapiens
  misc_RNA (1)...(19): siRNA sense strand
ucacuaccuuccuccugua

SEQ ID NO: 2053547 - RNA, 19 nt, Homo sapiens
  misc_RNA (1)...(19): siRNA sense strand
cagacauccugaacuacuu

SEQ ID NO: 2053548 - RNA, 19 nt, Homo sapiens
  misc_RNA (1)...(19): siRNA sense strand
cggcaugaccggcuccuuu

SEQ ID NO: 2053549 - RNA, 19 nt, Homo sapiens
  misc_RNA (1)...(19): siRNA sense strand
gaguggugauguccuuuua

SEQ ID NO: 2053550 - RNA, 19 nt, Homo sapiens
  misc_RNA (1)...(19): siRNA sense strand
gccaaggaguacuggaugu

SEQ ID NO: 2053551 - RNA, 19 nt, Homo sapiens
  misc_RNA (1)...(19): siRNA sense strand
uaugugugcuugggcuuaa

SEQ ID NO: 2053552 - RNA, 19 nt, Homo sapiens
  misc_RNA (1)...(19): siRNA sense strand
ggacgacuuucagcacagu

SEQ ID NO: 2053553 - RNA, 19 nt, Homo sapiens
  misc_RNA (1)...(19): siRNA sense strand
aggaggcacugcuugagaa

SEQ ID NO: 2053554 - RNA, 19 nt, Homo sapiens
  misc_RNA (1)...(19): siRNA sense strand
cuaccuuccuccuguacaa

SEQ ID NO: 2053555 - RNA, 19 nt, Homo sapiens
  misc_RNA (1)...(19): siRNA sense strand
caacaucgagucccucaac

SEQ ID NO: 2053556 - RNA, 19 nt, Homo sapiens
  misc_RNA (1)...(19): siRNA sense strand
ucaccuacgucuucuucau

SEQ ID NO: 2053557 - RNA, 19 nt, Homo sapiens
  misc_RNA (1)...(19): siRNA sense strand
gccuccagauucauugauu

SEQ ID NO: 2053558 - RNA, 19 nt, Homo sapiens
  misc_RNA (1)...(19): siRNA sense strand
ccaacuuccugcuugucaa

SEQ ID NO: 2053559 - RNA, 19 nt, Homo sapiens
  misc_RNA (1)...(19): siRNA sense strand
uaugccagguacuacauga

SEQ ID NO: 2053560 - RNA, 19 nt, Homo sapiens
  misc_RNA (1)...(19): siRNA sense strand
gaccggcuccuuuccuaug

SEQ ID NO: 2053561 - RNA, 19 nt, Homo sapiens
  misc_RNA (1)...(19): siRNA sense strand
ucagcgccguggccucauu

SEQ ID NO: 2053562 - RNA, 19 nt, Homo sapiens
  misc_RNA (1)...(19): siRNA sense strand
ucucagaggacgacuuuca

SEQ ID NO: 2053563 - RNA, 19 nt, Homo sapiens
  misc_RNA (1)...(19): siRNA sense strand
aaggaguacuggauguuca

SEQ ID NO: 2053564 - RNA, 19 nt, Homo sapiens
  misc_RNA (1)...(19): siRNA sense strand
gcguccaccugaagacugu

SEQ ID NO: 2053565 - RNA, 19 nt, Homo sapiens
  misc_RNA (1)...(19): siRNA sense strand
cuacugccauggaacuucu

SEQ ID NO: 2053566 - RNA, 19 nt, Homo sapiens
  misc_RNA (1)...(19): siRNA sense strand
ugucucagaggacgacuuu

SEQ ID NO: 2053567 - RNA, 19 nt, Homo sapiens
  misc_RNA (1)...(19): siRNA sense strand
ucgguggccuccagauuca

SEQ ID NO: 2053568 - RNA, 19 nt, Homo sapiens
  misc_RNA (1)...(19): siRNA sense strand
caucgagucccucaacaag

SEQ ID NO: 2053569 - RNA, 19 nt, Homo sapiens
  misc_RNA (1)...(19): siRNA sense strand
agacauccugaacuacuuu

SEQ ID NO: 2053570 - RNA, 19 nt, Homo sapiens
  misc_RNA (1)...(19): siRNA sense strand
ccagugaugugaggaacag

SEQ ID NO: 2053571 - RNA, 19 nt, Homo sapiens
  misc_RNA (1)...(19): siRNA sense strand
cauccuggccaucuucaug

SEQ ID NO: 2053572 - RNA, 19 nt, Homo sapiens
  misc_RNA (1)...(19): siRNA sense strand
ccaaggaguacuggauguu

SEQ ID NO: 2053573 - RNA, 19 nt, Homo sapiens
  misc_RNA (1)...(19): siRNA sense strand
ccucuacgggccuaagauu

SEQ ID NO: 2053574 - RNA, 19 nt, Homo sapiens
  misc_RNA (1)...(19): siRNA sense strand
caaggaguacuggauguuc

SEQ ID NO: 2053575 - RNA, 19 nt, Homo sapiens
  misc_RNA (1)...(19): siRNA sense strand
ggaguacuggauguucaaa

SEQ ID NO: 2053576 - RNA, 19 nt, Homo sapiens
  misc_RNA (1)...(19): siRNA sense strand
cgggaguggugauguccuu

SEQ ID NO: 2053577 - RNA, 19 nt, Homo sapiens
  misc_RNA (1)...(19): siRNA sense strand
cuacgggccuaagauugug

SEQ ID NO: 2053578 - RNA, 19 nt, Homo sapiens
  misc_RNA (1)...(19): siRNA sense strand
ccuccagauucauugauuc

SEQ ID NO: 2053579 - RNA, 19 nt, Homo sapiens
  misc_RNA (1)...(19): siRNA sense strand
uacaugaggccuguucuug

SEQ ID NO: 2053580 - RNA, 19 nt, Homo sapiens
  misc_RNA (1)...(19): siRNA sense strand
caggaggcacugcuugaga

SEQ ID NO: 2053581 - RNA, 19 nt, Homo sapiens
  misc_RNA (1)...(19): siRNA sense strand
auccugaacuacuuugaga

SEQ ID NO: 2053582 - RNA, 19 nt, Homo sapiens
  misc_RNA (1)...(19): siRNA sense strand
ggcaugaccggcuccuuuc

SEQ ID NO: 2053583 - RNA, 19 nt, Homo sapiens
  misc_RNA (1)...(19): siRNA sense strand
gguggccuccagauucauu

SEQ ID NO: 2053584 - RNA, 19 nt, Homo sapiens
  misc_RNA (1)...(19): siRNA sense strand
gaagaaggcccagugcaua

SEQ ID NO: 2053585 - RNA, 19 nt, Homo sapiens
  misc_RNA (1)...(19): siRNA sense strand
gauaauccaucuaauacug

SEQ ID NO: 2053586 - RNA, 19 nt, Homo sapiens
  misc_RNA (1)...(19): siRNA sense strand
caucugcucugaccacuuu

SEQ ID NO: 2053587 - RNA, 19 nt, Homo sapiens
  misc_RNA (1)...(19): siRNA sense strand
gcugauaauccaucuaaua

SEQ ID NO: 2053588 - RNA, 19 nt, Homo sapiens
  misc_RNA (1)...(19): siRNA sense strand
gaauuguggucuagaacuu

SEQ ID NO: 2053589 - RNA, 19 nt, Homo sapiens
  misc_RNA (1)...(19): siRNA sense strand
gacauuuacuccagugauu

SEQ ID NO: 2053590 - RNA, 19 nt, Homo sapiens
  misc_RNA (1)...(19): siRNA sense strand
cagagugauuugucuuaua

SEQ ID NO: 2053591 - RNA, 19 nt, Homo sapiens
  misc_RNA (1)...(19): siRNA sense strand
gaacuuccucucucuuuga

SEQ ID NO: 2053592 - RNA, 19 nt, Homo sapiens
  misc_RNA (1)...(19): siRNA sense strand
gaggaauuguggucuagaa

SEQ ID NO: 2053593 - RNA, 19 nt, Homo sapiens
  misc_RNA (1)...(19): siRNA sense strand
gaacagagugauuugucuu

SEQ ID NO: 2053594 - RNA, 19 nt, Homo sapiens
  misc_RNA (1)...(19): siRNA sense strand
gcugcagcuucacagauua

SEQ ID NO: 2053595 - RNA, 19 nt, Homo sapiens
  misc_RNA (1)...(19): siRNA sense strand
ggcugcagcuucacagauu

SEQ ID NO: 2053596 - RNA, 19 nt, Homo sapiens
  misc_RNA (1)...(19): siRNA sense strand
ggugaaagaagaaacaugu

SEQ ID NO: 2053597 - RNA, 19 nt, Homo sapiens
  misc_RNA (1)...(19): siRNA sense strand
ucucuucgguuauccagaa

SEQ ID NO: 2053598 - RNA, 19 nt, Homo sapiens
  misc_RNA (1)...(19): siRNA sense strand
caucuaauacugucacuuc

SEQ ID NO: 2053599 - RNA, 19 nt, Homo sapiens
  misc_RNA (1)...(19): siRNA sense strand
uaucaagagugaacagagu

SEQ ID NO: 2053600 - RNA, 19 nt, Homo sapiens
  misc_RNA (1)...(19): siRNA sense strand
acagaggaauuguggucua

SEQ ID NO: 2053601 - RNA, 19 nt, Homo sapiens
  misc_RNA (1)...(19): siRNA sense strand
uuugacgucucuucgguua

SEQ ID NO: 2053602 - RNA, 19 nt, Homo sapiens
  misc_RNA (1)...(19): siRNA sense strand
ugacgucucuucgguuauc

SEQ ID NO: 2053603 - RNA, 19 nt, Homo sapiens
  misc_RNA (1)...(19): siRNA sense strand
acugggauaucaagaguga

SEQ ID NO: 2053604 - RNA, 19 nt, Homo sapiens
  misc_RNA (1)...(19): siRNA sense strand
uaaugcaacuacucagaca

SEQ ID NO: 2053605 - RNA, 19 nt, Homo sapiens
  misc_RNA (1)...(19): siRNA sense strand
aagaaggcccagugcauaa

SEQ ID NO: 2053606 - RNA, 19 nt, Homo sapiens
  misc_RNA (1)...(19): siRNA sense strand
gguauucaagccaaaguga

SEQ ID NO: 2053607 - RNA, 19 nt, Homo sapiens
  misc_RNA (1)...(19): siRNA sense strand
uagaacuuccucucucuuu

SEQ ID NO: 2053608 - RNA, 19 nt, Homo sapiens
  misc_RNA (1)...(19): siRNA sense strand
ccucucucuuugacauuua

SEQ ID NO: 2053609 - RNA, 19 nt, Homo sapiens
  misc_RNA (1)...(19): siRNA sense strand
agaacuuccucucucuuug

SEQ ID NO: 2053610 - RNA, 19 nt, Homo sapiens
  misc_RNA (1)...(19): siRNA sense strand
agacugggauaucaagagu

SEQ ID NO: 2053611 - RNA, 19 nt, Homo sapiens
  misc_RNA (1)...(19): siRNA sense strand
uuacuccagugauucagaa

SEQ ID NO: 2053612 - RNA, 19 nt, Homo sapiens
  misc_RNA (1)...(19): siRNA sense strand
gaaaaugaacuugugcaaa

SEQ ID NO: 2053613 - RNA, 19 nt, Homo sapiens
  misc_RNA (1)...(19): siRNA sense strand
cuacucagacagaggaauu

SEQ ID NO: 2053614 - RNA, 19 nt, Homo sapiens
  misc_RNA (1)...(19): siRNA sense strand
aaaaugaacuugugcaaac

SEQ ID NO: 2053615 - RNA, 19 nt, Homo sapiens
  misc_RNA (1)...(19): siRNA sense strand
aaagugaaagcguuuggaa

SEQ ID NO: 2053616 - RNA, 19 nt, Homo sapiens
  misc_RNA (1)...(19): siRNA sense strand
ugaacagagugauuugucu

SEQ ID NO: 2053617 - RNA, 19 nt, Homo sapiens
  misc_RNA (1)...(19): siRNA sense strand
agagugaacagagugauuu

SEQ ID NO: 2053618 - RNA, 19 nt, Homo sapiens
  misc_RNA (1)...(19): siRNA sense strand
ugucuuauauggcuguaca

SEQ ID NO: 2053619 - RNA, 19 nt, Homo sapiens
  misc_RNA (1)...(19): siRNA sense strand
acagagugauuugucuuau

SEQ ID NO: 2053620 - RNA, 19 nt, Homo sapiens
  misc_RNA (1)...(19): siRNA sense strand
cagaggaauuguggucuag

SEQ ID NO: 2053621 - RNA, 19 nt, Homo sapiens
  misc_RNA (1)...(19): siRNA sense strand
cuguacaggugaaagaaga

SEQ ID NO: 2053622 - RNA, 19 nt, Homo sapiens
  misc_RNA (1)...(19): siRNA sense strand
acagauacagacugggaua

SEQ ID NO: 2053623 - RNA, 19 nt, Homo sapiens
  misc_RNA (1)...(19): siRNA sense strand
ugaagaaggcccagugcau

SEQ ID NO: 2053624 - RNA, 19 nt, Homo sapiens
  misc_RNA (1)...(19): siRNA sense strand
guacaggugaaagaagaaa

SEQ ID NO: 2053625 - RNA, 19 nt, Homo sapiens
  misc_RNA (1)...(19): siRNA sense strand
gcucggucaucugcucuga

SEQ ID NO: 2053626 - RNA, 19 nt, Homo sapiens
  misc_RNA (1)...(19): siRNA sense strand
gaagucgcuguuccgcuuu

SEQ ID NO: 2053627 - RNA, 19 nt, Homo sapiens
  misc_RNA (1)...(19): siRNA sense strand
ggaauuguggucuagaacu

SEQ ID NO: 2053628 - RNA, 19 nt, Homo sapiens
  misc_RNA (1)...(19): siRNA sense strand
aacagagugauuugucuua

SEQ ID NO: 2053629 - RNA, 19 nt, Homo sapiens
  misc_RNA (1)...(19): siRNA sense strand
gauaucaagagugaacaga

SEQ ID NO: 2053630 - RNA, 19 nt, Homo sapiens
  misc_RNA (1)...(19): siRNA sense strand
gagugaacagagugauuug

SEQ ID NO: 2053631 - RNA, 19 nt, Homo sapiens
  misc_RNA (1)...(19): siRNA sense strand
cagauuacgugugaaaaug

SEQ ID NO: 2053632 - RNA, 19 nt, Homo sapiens
  misc_RNA (1)...(19): siRNA sense strand
gguccagucuccuguacac

SEQ ID NO: 2053633 - RNA, 19 nt, Homo sapiens
  misc_RNA (1)...(19): siRNA sense strand
ccagugauucagaaacaga

SEQ ID NO: 2053634 - RNA, 19 nt, Homo sapiens
  misc_RNA (1)...(19): siRNA sense strand
aaaagacuguguaaugcaa

SEQ ID NO: 2053635 - RNA, 19 nt, Homo sapiens
  misc_RNA (1)...(19): siRNA sense strand
cugauaauccaucuaauac

SEQ ID NO: 2053636 - RNA, 19 nt, Homo sapiens
  misc_RNA (1)...(19): siRNA sense strand
ucuagaacuuccucucucu

SEQ ID NO: 2053637 - RNA, 19 nt, Homo sapiens
  misc_RNA (1)...(19): siRNA sense strand
cuccagugauucagaaaca

SEQ ID NO: 2053638 - RNA, 19 nt, Homo sapiens
  misc_RNA (1)...(19): siRNA sense strand
ggucuagaacuuccucucu

SEQ ID NO: 2053639 - RNA, 19 nt, Homo sapiens
  misc_RNA (1)...(19): siRNA sense strand
ucaagagugaacagaguga

SEQ ID NO: 2053640 - RNA, 19 nt, Homo sapiens
  misc_RNA (1)...(19): siRNA sense strand
gugaacagagugauuuguc

SEQ ID NO: 2053641 - RNA, 19 nt, Homo sapiens
  misc_RNA (1)...(19): siRNA sense strand
gugaaagaagaaacauguu

SEQ ID NO: 2053642 - RNA, 19 nt, Homo sapiens
  misc_RNA (1)...(19): siRNA sense strand
cgacugguacggaggcaau

SEQ ID NO: 2053643 - RNA, 19 nt, Homo sapiens
  misc_RNA (1)...(19): siRNA sense strand
gggagaggagggagaccaa

SEQ ID NO: 2053644 - RNA, 19 nt, Homo sapiens
  misc_RNA (1)...(19): siRNA sense strand
gauuacgugugaaaaugaa

SEQ ID NO: 2053645 - RNA, 19 nt, Homo sapiens
  misc_RNA (1)...(19): siRNA sense strand
gcaagaggcugaagaaaga

SEQ ID NO: 2053646 - RNA, 19 nt, Homo sapiens
  misc_RNA (1)...(19): siRNA sense strand
aaagacagcuucuccaaga

SEQ ID NO: 2053647 - RNA, 19 nt, Homo sapiens
  misc_RNA (1)...(19): siRNA sense strand
gaagaaagauguggaacca

SEQ ID NO: 2053648 - RNA, 19 nt, Homo sapiens
  misc_RNA (1)...(19): siRNA sense strand
ccucccagcucaucacuua

SEQ ID NO: 2053649 - RNA, 19 nt, Homo sapiens
  misc_RNA (1)...(19): siRNA sense strand
gcaagccgaugcacagaga

SEQ ID NO: 2053650 - RNA, 19 nt, Homo sapiens
  misc_RNA (1)...(19): siRNA sense strand
gggagcagguggagaagaa

SEQ ID NO: 2053651 - RNA, 19 nt, Homo sapiens
  misc_RNA (1)...(19): siRNA sense strand
gauaagaguggcauuucua

SEQ ID NO: 2053652 - RNA, 19 nt, Homo sapiens
  misc_RNA (1)...(19): siRNA sense strand
gaacacaggcgugguggaa

SEQ ID NO: 2053653 - RNA, 19 nt, Homo sapiens
  misc_RNA (1)...(19): siRNA sense strand
gcugaauucugaaggcaaa

SEQ ID NO: 2053654 - RNA, 19 nt, Homo sapiens
  misc_RNA (1)...(19): siRNA sense strand
gcauuucuauggaugacuu

SEQ ID NO: 2053655 - RNA, 19 nt, Homo sapiens
  misc_RNA (1)...(19): siRNA sense strand
cagagaguguggcuucauu

SEQ ID NO: 2053656 - RNA, 19 nt, Homo sapiens
  misc_RNA (1)...(19): siRNA sense strand
uaacuggacucccacuaag

SEQ ID NO: 2053657 - RNA, 19 nt, Homo sapiens
  misc_RNA (1)...(19): siRNA sense strand
cgacacagccaaugacuca

SEQ ID NO: 2053658 - RNA, 19 nt, Homo sapiens
  misc_RNA (1)...(19): siRNA sense strand
ggacucccacuaaguauuc

SEQ ID NO: 2053659 - RNA, 19 nt, Homo sapiens
  misc_RNA (1)...(19): siRNA sense strand
ucacuucauucguacaguu

SEQ ID NO: 2053660 - RNA, 19 nt, Homo sapiens
  misc_RNA (1)...(19): siRNA sense strand
gagcagaucacccggaagu

SEQ ID NO: 2053661 - RNA, 19 nt, Homo sapiens
  misc_RNA (1)...(19): siRNA sense strand
cgucuaauccaaugguuaa

SEQ ID NO: 2053662 - RNA, 19 nt, Homo sapiens
  misc_RNA (1)...(19): siRNA sense strand
gcagaucacccggaaguuc

SEQ ID NO: 2053663 - RNA, 19 nt, Homo sapiens
  misc_RNA (1)...(19): siRNA sense strand
ccacagaugcuggcgauga

SEQ ID NO: 2053664 - RNA, 19 nt, Homo sapiens
  misc_RNA (1)...(19): siRNA sense strand
uuuaucggcucacuucauu

SEQ ID NO: 2053665 - RNA, 19 nt, Homo sapiens
  misc_RNA (1)...(19): siRNA sense strand
ccaaagacagcuucuccaa

SEQ ID NO: 2053666 - RNA, 19 nt, Homo sapiens
  misc_RNA (1)...(19): siRNA sense strand
gccaaugacucagcaucuu

SEQ ID NO: 2053667 - RNA, 19 nt, Homo sapiens
  misc_RNA (1)...(19): siRNA sense strand
caaaacgucuaauccaaug

SEQ ID NO: 2053668 - RNA, 19 nt, Homo sapiens
  misc_RNA (1)...(19): siRNA sense strand
gaagaacggcgagcugaag

SEQ ID NO: 2053669 - RNA, 19 nt, Homo sapiens
  misc_RNA (1)...(19): siRNA sense strand
gcaagcugcucugcaaggu

SEQ ID NO: 2053670 - RNA, 19 nt, Homo sapiens
  misc_RNA (1)...(19): siRNA sense strand
gaugagcugaggagaguga

SEQ ID NO: 2053671 - RNA, 19 nt, Homo sapiens
  misc_RNA (1)...(19): siRNA sense strand
gcaaauuuaucggcucacu

SEQ ID NO: 2053672 - RNA, 19 nt, Homo sapiens
  misc_RNA (1)...(19): siRNA sense strand
gcgaugagagcgccacuuc

SEQ ID NO: 2053673 - RNA, 19 nt, Homo sapiens
  misc_RNA (1)...(19): siRNA sense strand
gagcauuucaccaaagaca

SEQ ID NO: 2053674 - RNA, 19 nt, Homo sapiens
  misc_RNA (1)...(19): siRNA sense strand
acacaggcgugguggaagu

SEQ ID NO: 2053675 - RNA, 19 nt, Homo sapiens
  misc_RNA (1)...(19): siRNA sense strand
ucggcucacuucauucgua

SEQ ID NO: 2053676 - RNA, 19 nt, Homo sapiens
  misc_RNA (1)...(19): siRNA sense strand
ccacuaaguauucauuucu

SEQ ID NO: 2053677 - RNA, 19 nt, Homo sapiens
  misc_RNA (1)...(19): siRNA sense strand
uggaugagcugaggagagu

SEQ ID NO: 2053678 - RNA, 19 nt, Homo sapiens
  misc_RNA (1)...(19): siRNA sense strand
ucaccguccucgaguggaa

SEQ ID NO: 2053679 - RNA, 19 nt, Homo sapiens
  misc_RNA (1)...(19): siRNA sense strand
ucgacucacugcacuccua

SEQ ID NO: 2053680 - RNA, 19 nt, Homo sapiens
  misc_RNA (1)...(19): siRNA sense strand
aaauuuaucggcucacuuc

SEQ ID NO: 2053681 - RNA, 19 nt, Homo sapiens
  misc_RNA (1)...(19): siRNA sense strand
gauaacuggacucccacua

SEQ ID NO: 2053682 - RNA, 19 nt, Homo sapiens
  misc_RNA (1)...(19): siRNA sense strand
agaguggcauuucuaugga

SEQ ID NO: 2053683 - RNA, 19 nt, Homo sapiens
  misc_RNA (1)...(19): siRNA sense strand
ugcggaagcuacaggagaa

SEQ ID NO: 2053684 - RNA, 19 nt, Homo sapiens
  misc_RNA (1)...(19): siRNA sense strand
ucacgucaccuacaagaag

SEQ ID NO: 2053685 - RNA, 19 nt, Homo sapiens
  misc_RNA (1)...(19): siRNA sense strand
acagauaagaguggcauuu

SEQ ID NO: 2053686 - RNA, 19 nt, Homo sapiens
  misc_RNA (1)...(19): siRNA sense strand
gagcagguggagaagaaga

SEQ ID NO: 2053687 - RNA, 19 nt, Homo sapiens
  misc_RNA (1)...(19): siRNA sense strand
gcuccaaccggcagggaaa

SEQ ID NO: 2053688 - RNA, 19 nt, Homo sapiens
  misc_RNA (1)...(19): siRNA sense strand
auaacuggacucccacuaa

SEQ ID NO: 2053689 - RNA, 19 nt, Homo sapiens
  misc_RNA (1)...(19): siRNA sense strand
gcugaagaaagauguggaa

SEQ ID NO: 2053690 - RNA, 19 nt, Homo sapiens
  misc_RNA (1)...(19): siRNA sense strand
ccagagucccgcagguuga

SEQ ID NO: 2053691 - RNA, 19 nt, Homo sapiens
  misc_RNA (1)...(19): siRNA sense strand
ccaaugacucagcaucuuc

SEQ ID NO: 2053692 - RNA, 19 nt, Homo sapiens
  misc_RNA (1)...(19): siRNA sense strand
uacaggagaagcuggauga

SEQ ID NO: 2053693 - RNA, 19 nt, Homo sapiens
  misc_RNA (1)...(19): siRNA sense strand
gaguggcauuucuauggau

SEQ ID NO: 2053694 - RNA, 19 nt, Homo sapiens
  misc_RNA (1)...(19): siRNA sense strand
cagaucacccggaaguuca

SEQ ID NO: 2053695 - RNA, 19 nt, Homo sapiens
  misc_RNA (1)...(19): siRNA sense strand
gcagggaaagggcgagaag

SEQ ID NO: 2053696 - RNA, 19 nt, Homo sapiens
  misc_RNA (1)...(19): siRNA sense strand
gcaagcucaucgacucacu

SEQ ID NO: 2053697 - RNA, 19 nt, Homo sapiens
  misc_RNA (1)...(19): siRNA sense strand
cagauaagaguggcauuuc

SEQ ID NO: 2053698 - RNA, 19 nt, Homo sapiens
  misc_RNA (1)...(19): siRNA sense strand
uggaggagguucacaucuc

SEQ ID NO: 2053699 - RNA, 19 nt, Homo sapiens
  misc_RNA (1)...(19): siRNA sense strand
acuggacucccacuaagua

SEQ ID NO: 2053700 - RNA, 19 nt, Homo sapiens
  misc_RNA (1)...(19): siRNA sense strand
agauaagaguggcauuucu

SEQ ID NO: 2053701 - RNA, 19 nt, Homo sapiens
  misc_RNA (1)...(19): siRNA sense strand
gaugagagcgccacuuccu

SEQ ID NO: 2053702 - RNA, 19 nt, Homo sapiens
  misc_RNA (1)...(19): siRNA sense strand
gaauucugaaggcaaacuu

SEQ ID NO: 2053703 - RNA, 19 nt, Homo sapiens
  misc_RNA (1)...(19): siRNA sense strand
aagaguggcauuucuaugg

SEQ ID NO: 2053704 - RNA, 19 nt, Homo sapiens
  misc_RNA (1)...(19): siRNA sense strand
guauucauuucucuguagu

SEQ ID NO: 2053705 - RNA, 19 nt, Homo sapiens
  misc_RNA (1)...(19): siRNA sense strand
uaagaguggcauuucuaug

SEQ ID NO: 2053706 - RNA, 19 nt, Homo sapiens
  misc_RNA (1)...(19): siRNA sense strand
caaugacucagcaucuuca

SEQ ID NO: 2053707 - RNA, 19 nt, Homo sapiens
  misc_RNA (1)...(19): siRNA sense strand
auucauuucucuguaguga

SEQ ID NO: 2053708 - RNA, 19 nt, Homo sapiens
  misc_RNA (1)...(19): siRNA sense strand
gggcgugacagauaagagu

SEQ ID NO: 2053709 - RNA, 19 nt, Homo sapiens
  misc_RNA (1)...(19): siRNA sense strand
cccacuaaguauucauuuc

SEQ ID NO: 2053710 - RNA, 19 nt, Homo sapiens
  misc_RNA (1)...(19): siRNA sense strand
cgcaagaggcugaagaaag

SEQ ID NO: 2053711 - RNA, 19 nt, Homo sapiens
  misc_RNA (1)...(19): siRNA sense strand
caaauuuaucggcucacuu

SEQ ID NO: 2053712 - RNA, 19 nt, Homo sapiens
  misc_RNA (1)...(19): siRNA sense strand
aguauucauuucucuguag

SEQ ID NO: 2053713 - RNA, 19 nt, Homo sapiens
  misc_RNA (1)...(19): siRNA sense strand
ccaaggagccccacguaga

SEQ ID NO: 2053714 - RNA, 19 nt, Homo sapiens
  misc_RNA (1)...(19): siRNA sense strand
cacagaugcuggcgaugag

SEQ ID NO: 2053715 - RNA, 19 nt, Homo sapiens
  misc_RNA (1)...(19): siRNA sense strand
caaccacgacacagccaau

SEQ ID NO: 2053716 - RNA, 19 nt, Homo sapiens
  misc_RNA (1)...(19): siRNA sense strand
gaagaaaacgucaagauua

SEQ ID NO: 2053717 - RNA, 19 nt, Homo sapiens
  misc_RNA (1)...(19): siRNA sense strand
guauaaggauguagacuau

SEQ ID NO: 2053718 - RNA, 19 nt, Homo sapiens
  misc_RNA (1)...(19): siRNA sense strand
aaacaucaguuaaccaaga

SEQ ID NO: 2053719 - RNA, 19 nt, Homo sapiens
  misc_RNA (1)...(19): siRNA sense strand
gcagaaagucucuaagcua

SEQ ID NO: 2053720 - RNA, 19 nt, Homo sapiens
  misc_RNA (1)...(19): siRNA sense strand
ucucuaagcuacauucaaa

SEQ ID NO: 2053721 - RNA, 19 nt, Homo sapiens
  misc_RNA (1)...(19): siRNA sense strand
ggacagaaguuuuacaaau

SEQ ID NO: 2053722 - RNA, 19 nt, Homo sapiens
  misc_RNA (1)...(19): siRNA sense strand
ggaaacaucaguuaaccaa

SEQ ID NO: 2053723 - RNA, 19 nt, Homo sapiens
  misc_RNA (1)...(19): siRNA sense strand
gaaagucucuaagcuacau

SEQ ID NO: 2053724 - RNA, 19 nt, Homo sapiens
  misc_RNA (1)...(19): siRNA sense strand
ucuaaacccucaguuaauu

SEQ ID NO: 2053725 - RNA, 19 nt, Homo sapiens
  misc_RNA (1)...(19): siRNA sense strand
uaaacaacauacugggaaa

SEQ ID NO: 2053726 - RNA, 19 nt, Homo sapiens
  misc_RNA (1)...(19): siRNA sense strand
ggaagacacagacauugaa

SEQ ID NO: 2053727 - RNA, 19 nt, Homo sapiens
  misc_RNA (1)...(19): siRNA sense strand
uaaccaagauacagguaga

SEQ ID NO: 2053728 - RNA, 19 nt, Homo sapiens
  misc_RNA (1)...(19): siRNA sense strand
caacauaugaagucacuau

SEQ ID NO: 2053729 - RNA, 19 nt, Homo sapiens
  misc_RNA (1)...(19): siRNA sense strand
cagaaaguauucaucaauc

SEQ ID NO: 2053730 - RNA, 19 nt, Homo sapiens
  misc_RNA (1)...(19): siRNA sense strand
gagcaacaaacucuaggua

SEQ ID NO: 2053731 - RNA, 19 nt, Homo sapiens
  misc_RNA (1)...(19): siRNA sense strand
gaaucuaccuuggaaacau

SEQ ID NO: 2053732 - RNA, 19 nt, Homo sapiens
  misc_RNA (1)...(19): siRNA sense strand
guaacuaccagucaucuug

SEQ ID NO: 2053733 - RNA, 19 nt, Homo sapiens
  misc_RNA (1)...(19): siRNA sense strand
acaggaaaauccauucuua

SEQ ID NO: 2053734 - RNA, 19 nt, Homo sapiens
  misc_RNA (1)...(19): siRNA sense strand
cuagguagauugaagucuu

SEQ ID NO: 2053735 - RNA, 19 nt, Homo sapiens
  misc_RNA (1)...(19): siRNA sense strand
gcucuuauaaggcagcuaa

SEQ ID NO: 2053736 - RNA, 19 nt, Homo sapiens
  misc_RNA (1)...(19): siRNA sense strand
auugaagacuccuuguaua

SEQ ID NO: 2053737 - RNA, 19 nt, Homo sapiens
  misc_RNA (1)...(19): siRNA sense strand
uagguagauugaagucuuu

SEQ ID NO: 2053738 - RNA, 19 nt, Homo sapiens
  misc_RNA (1)...(19): siRNA sense strand
ugaaguaacuaccagucau

SEQ ID NO: 2053739 - RNA, 19 nt, Homo sapiens
  misc_RNA (1)...(19): siRNA sense strand
cagcacaauuaaucaaaca

SEQ ID NO: 2053740 - RNA, 19 nt, Homo sapiens
  misc_RNA (1)...(19): siRNA sense strand
gaaguaacuaccagucauc

SEQ ID NO: 2053741 - RNA, 19 nt, Homo sapiens
  misc_RNA (1)...(19): siRNA sense strand
ccagucaucuugcuaaucc

SEQ ID NO: 2053742 - RNA, 19 nt, Homo sapiens
  misc_RNA (1)...(19): siRNA sense strand
uugaagacuccuuguauaa

SEQ ID NO: 2053743 - RNA, 19 nt, Homo sapiens
  misc_RNA (1)...(19): siRNA sense strand
gacagaaguuuuacaaauc

SEQ ID NO: 2053744 - RNA, 19 nt, Homo sapiens
  misc_RNA (1)...(19): siRNA sense strand
cuacaacuauuacuuugac

SEQ ID NO: 2053745 - RNA, 19 nt, Homo sapiens
  misc_RNA (1)...(19): siRNA sense strand
uuuggaagcucuuauaagg

SEQ ID NO: 2053746 - RNA, 19 nt, Homo sapiens
  misc_RNA (1)...(19): siRNA sense strand
gcacaauuaaucaaacagu

SEQ ID NO: 2053747 - RNA, 19 nt, Homo sapiens
  misc_RNA (1)...(19): siRNA sense strand
gaaauggaagacacagaca

SEQ ID NO: 2053748 - RNA, 19 nt, Homo sapiens
  misc_RNA (1)...(19): siRNA sense strand
cauugaagacuccuuguau

SEQ ID NO: 2053749 - RNA, 19 nt, Homo sapiens
  misc_RNA (1)...(19): siRNA sense strand
ggaacaucuuuggcagaaa

SEQ ID NO: 2053750 - RNA, 19 nt, Homo sapiens
  misc_RNA (1)...(19): siRNA sense strand
caacuucaaauucagaaag

SEQ ID NO: 2053751 - RNA, 19 nt, Homo sapiens
  misc_RNA (1)...(19): siRNA sense strand
uuacugcagacaagauaua

SEQ ID NO: 2053752 - RNA, 19 nt, Homo sapiens
  misc_RNA (1)...(19): siRNA sense strand
auaaggauguagacuaugg

SEQ ID NO: 2053753 - RNA, 19 nt, Homo sapiens
  misc_RNA (1)...(19): siRNA sense strand
uguauaaggauguagacua

SEQ ID NO: 2053754 - RNA, 19 nt, Homo sapiens
  misc_RNA (1)...(19): siRNA sense strand
gaagacacagacauugaag

SEQ ID NO: 2053755 - RNA, 19 nt, Homo sapiens
  misc_RNA (1)...(19): siRNA sense strand
aacccucaguuaauucuuu

SEQ ID NO: 2053756 - RNA, 19 nt, Homo sapiens
  misc_RNA (1)...(19): siRNA sense strand
ggaaaauccauucuuauuc

SEQ ID NO: 2053757 - RNA, 19 nt, Homo sapiens
  misc_RNA (1)...(19): siRNA sense strand
aggaacaucuuuggcagaa

SEQ ID NO: 2053758 - RNA, 19 nt, Homo sapiens
  misc_RNA (1)...(19): siRNA sense strand
ggcagaaagucucuaagcu

SEQ ID NO: 2053759 - RNA, 19 nt, Homo sapiens
  misc_RNA (1)...(19): siRNA sense strand
ucacacauguuuugagaau

SEQ ID NO: 2053760 - RNA, 19 nt, Homo sapiens
  misc_RNA (1)...(19): siRNA sense strand
gaaaacgucaagauuauag

SEQ ID NO: 2053761 - RNA, 19 nt, Homo sapiens
  misc_RNA (1)...(19): siRNA sense strand
auucuaaacccucaguuaa

SEQ ID NO: 2053762 - RNA, 19 nt, Homo sapiens
  misc_RNA (1)...(19): siRNA sense strand
gcuaauccaaacuuuacaa

SEQ ID NO: 2053763 - RNA, 19 nt, Homo sapiens
  misc_RNA (1)...(19): siRNA sense strand
aauaaagucagcacaggaa

SEQ ID NO: 2053764 - RNA, 19 nt, Homo sapiens
  misc_RNA (1)...(19): siRNA sense strand
aaagaaaccacggaaaugg

SEQ ID NO: 2053765 - RNA, 19 nt, Homo sapiens
  misc_RNA (1)...(19): siRNA sense strand
accagaaucuaccuuggaa

SEQ ID NO: 2053766 - RNA, 19 nt, Homo sapiens
  misc_RNA (1)...(19): siRNA sense strand
uggaagacacagacauuga

SEQ ID NO: 2053767 - RNA, 19 nt, Homo sapiens
  misc_RNA (1)...(19): siRNA sense strand
ugacaacuucaaauucaga

SEQ ID NO: 2053768 - RNA, 19 nt, Homo sapiens
  misc_RNA (1)...(19): siRNA sense strand
guagauugaagucuuugga

SEQ ID NO: 2053769 - RNA, 19 nt, Homo sapiens
  misc_RNA (1)...(19): siRNA sense strand
agaaaccacggaaauggaa

SEQ ID NO: 2053770 - RNA, 19 nt, Homo sapiens
  misc_RNA (1)...(19): siRNA sense strand
aauucuaaacccucaguua

SEQ ID NO: 2053771 - RNA, 19 nt, Homo sapiens
  misc_RNA (1)...(19): siRNA sense strand
cuaccagucaucuugcuaa

SEQ ID NO: 2053772 - RNA, 19 nt, Homo sapiens
  misc_RNA (1)...(19): siRNA sense strand
cugcagacaagauauaaau

SEQ ID NO: 2053773 - RNA, 19 nt, Homo sapiens
  misc_RNA (1)...(19): siRNA sense strand
aaaacuggcuaucugaaga

SEQ ID NO: 2053774 - RNA, 19 nt, Homo sapiens
  misc_RNA (1)...(19): siRNA sense strand
ggaaaccagaaucuaccuu

SEQ ID NO: 2053775 - RNA, 19 nt, Homo sapiens
  misc_RNA (1)...(19): siRNA sense strand
uacaacauaugaagucacu

SEQ ID NO: 2053776 - RNA, 19 nt, Homo sapiens
  misc_RNA (1)...(19): siRNA sense strand
cuauuacuuugacaacuuc

SEQ ID NO: 2053777 - RNA, 19 nt, Homo sapiens
  misc_RNA (1)...(19): siRNA sense strand
aaacuggcuaucugaagaa

SEQ ID NO: 2053778 - RNA, 19 nt, Homo sapiens
  misc_RNA (1)...(19): siRNA sense strand
ucuaagcuacauucaaaga

SEQ ID NO: 2053779 - RNA, 19 nt, Homo sapiens
  misc_RNA (1)...(19): siRNA sense strand
caacuauuacuuugacaac

SEQ ID NO: 2053780 - RNA, 19 nt, Homo sapiens
  misc_RNA (1)...(19): siRNA sense strand
ugaagaaaacgucaagauu

SEQ ID NO: 2053781 - RNA, 19 nt, Homo sapiens
  misc_RNA (1)...(19): siRNA sense strand
ucaucaaucuuuggaaacu

SEQ ID NO: 2053782 - RNA, 19 nt, Homo sapiens
  misc_RNA (1)...(19): siRNA sense strand
acaaaucgaacauucuuac

SEQ ID NO: 2053783 - RNA, 19 nt, Homo sapiens
  misc_RNA (1)...(19): siRNA sense strand
gacuaugggacagaaguuu

SEQ ID NO: 2053784 - RNA, 19 nt, Homo sapiens
  misc_RNA (1)...(19): siRNA sense strand
ucagcacaauuaaucaaac

SEQ ID NO: 2053785 - RNA, 19 nt, Homo sapiens
  misc_RNA (1)...(19): siRNA sense strand
caggaaaacuggcuaucug

SEQ ID NO: 2053786 - RNA, 19 nt, Homo sapiens
  misc_RNA (1)...(19): siRNA sense strand
aaucuaccuuggaaacauc

SEQ ID NO: 2053787 - RNA, 19 nt, Homo sapiens
  misc_RNA (1)...(19): siRNA sense strand
acauugaagacuccuugua

SEQ ID NO: 2053788 - RNA, 19 nt, Homo sapiens
  misc_RNA (1)...(19): siRNA sense strand
gaaucuguuauugccauuu

SEQ ID NO: 2053789 - RNA, 19 nt, Homo sapiens
  misc_RNA (1)...(19): siRNA sense strand
uagauugaagucuuuggaa

SEQ ID NO: 2053790 - RNA, 19 nt, Homo sapiens
  misc_RNA (1)...(19): siRNA sense strand
ugaagacuccuuguauaag

SEQ ID NO: 2053791 - RNA, 19 nt, Homo sapiens
  misc_RNA (1)...(19): siRNA sense strand
cagaaucuaccuuggaaac

SEQ ID NO: 2053792 - RNA, 19 nt, Homo sapiens
  misc_RNA (1)...(19): siRNA sense strand
aaauaaggaacaucuuugg

SEQ ID NO: 2053793 - RNA, 19 nt, Homo sapiens
  misc_RNA (1)...(19): siRNA sense strand
uguagacuaugggacagaa

SEQ ID NO: 2053794 - RNA, 19 nt, Homo sapiens
  misc_RNA (1)...(19): siRNA sense strand
uaccagucaucuugcuaau

SEQ ID NO: 2053795 - RNA, 19 nt, Homo sapiens
  misc_RNA (1)...(19): siRNA sense strand
cuaguuaaacaacauacug

SEQ ID NO: 2053796 - RNA, 19 nt, Homo sapiens
  misc_RNA (1)...(19): siRNA sense strand
gacaacuucaaauucagaa

SEQ ID NO: 2053797 - RNA, 19 nt, Homo sapiens
  misc_RNA (1)...(19): siRNA sense strand
guuaaccaagauacaggua

SEQ ID NO: 2053798 - RNA, 19 nt, Homo sapiens
  misc_RNA (1)...(19): siRNA sense strand
agaaucuguuauugccauu

SEQ ID NO: 2053799 - RNA, 19 nt, Homo sapiens
  misc_RNA (1)...(19): siRNA sense strand
aaagauguguggaccauga

SEQ ID NO: 2053800 - RNA, 19 nt, Homo sapiens
  misc_RNA (1)...(19): siRNA sense strand
gcccaaagcugcugaacag

SEQ ID NO: 2053801 - RNA, 19 nt, Homo sapiens
  misc_RNA (1)...(19): siRNA sense strand
gcucuacucuguggcauga

SEQ ID NO: 2053802 - RNA, 19 nt, Homo sapiens
  misc_RNA (1)...(19): siRNA sense strand
gagcagcacugugggcaau

SEQ ID NO: 2053803 - RNA, 19 nt, Homo sapiens
  misc_RNA (1)...(19): siRNA sense strand
gauccuggccuuucccaaa

SEQ ID NO: 2053804 - RNA, 19 nt, Homo sapiens
  misc_RNA (1)...(19): siRNA sense strand
gggugaagauccacuguag

SEQ ID NO: 2053805 - RNA, 19 nt, Homo sapiens
  misc_RNA (1)...(19): siRNA sense strand
gaccucagccaaugacuug

SEQ ID NO: 2053806 - RNA, 19 nt, Homo sapiens
  misc_RNA (1)...(19): siRNA sense strand
ccaaagauguguggaccau

SEQ ID NO: 2053807 - RNA, 19 nt, Homo sapiens
  misc_RNA (1)...(19): siRNA sense strand
gcucuaggaccaaagaugu

SEQ ID NO: 2053808 - RNA, 19 nt, Homo sapiens
  misc_RNA (1)...(19): siRNA sense strand
gaccaugaccucagccaau

SEQ ID NO: 2053809 - RNA, 19 nt, Homo sapiens
  misc_RNA (1)...(19): siRNA sense strand
gcagccaggugguacuucu

SEQ ID NO: 2053810 - RNA, 19 nt, Homo sapiens
  misc_RNA (1)...(19): siRNA sense strand
gcagcacugugggcaaugu

SEQ ID NO: 2053811 - RNA, 19 nt, Homo sapiens
  misc_RNA (1)...(19): siRNA sense strand
agaagcaccuggagaugca

SEQ ID NO: 2053812 - RNA, 19 nt, Homo sapiens
  misc_RNA (1)...(19): siRNA sense strand
gcauguguucccagaggua

SEQ ID NO: 2053813 - RNA, 19 nt, Homo sapiens
  misc_RNA (1)...(19): siRNA sense strand
aaacuaguggcgucaguga

SEQ ID NO: 2053814 - RNA, 19 nt, Homo sapiens
  misc_RNA (1)...(19): siRNA sense strand
gugaagauccacuguaggu

SEQ ID NO: 2053815 - RNA, 19 nt, Homo sapiens
  misc_RNA (1)...(19): siRNA sense strand
ccaaacuaguggcgucagu

SEQ ID NO: 2053816 - RNA, 19 nt, Homo sapiens
  misc_RNA (1)...(19): siRNA sense strand
gcaccuggagaugcaguuu

SEQ ID NO: 2053817 - RNA, 19 nt, Homo sapiens
  misc_RNA (1)...(19): siRNA sense strand
aagauccacuguagguugu

SEQ ID NO: 2053818 - RNA, 19 nt, Homo sapiens
  misc_RNA (1)...(19): siRNA sense strand
gcucggaaggccagucuca

SEQ ID NO: 2053819 - RNA, 19 nt, Homo sapiens
  misc_RNA (1)...(19): siRNA sense strand
ggaacccgccugagagcau

SEQ ID NO: 2053820 - RNA, 19 nt, Homo sapiens
  misc_RNA (1)...(19): siRNA sense strand
cugaggaugagacuucuaa

SEQ ID NO: 2053821 - RNA, 19 nt, Homo sapiens
  misc_RNA (1)...(19): siRNA sense strand
ccauugcugugcccaccuu

SEQ ID NO: 2053822 - RNA, 19 nt, Homo sapiens
  misc_RNA (1)...(19): siRNA sense strand
gaggaugagacuucuaacu

SEQ ID NO: 2053823 - RNA, 19 nt, Homo sapiens
  misc_RNA (1)...(19): siRNA sense strand
accuggagaugcaguuuga

SEQ ID NO: 2053824 - RNA, 19 nt, Homo sapiens
  misc_RNA (1)...(19): siRNA sense strand
gcuaugcagaggagccauu

SEQ ID NO: 2053825 - RNA, 19 nt, Homo sapiens
  misc_RNA (1)...(19): siRNA sense strand
aaagauguguggaccauga

SEQ ID NO: 2053826 - RNA, 19 nt, Homo sapiens
  misc_RNA (1)...(19): siRNA sense strand
gcccaaagcugcugaacag

SEQ ID NO: 2053827 - RNA, 19 nt, Homo sapiens
  misc_RNA (1)...(19): siRNA sense strand
gcucuacucuguggcauga

SEQ ID NO: 2053828 - RNA, 19 nt, Homo sapiens
  misc_RNA (1)...(19): siRNA sense strand
gagcagcacugugggcaau

SEQ ID NO: 2053829 - RNA, 19 nt, Homo sapiens
  misc_RNA (1)...(19): siRNA sense strand
gauccuggccuuucccaaa

SEQ ID NO: 2053830 - RNA, 19 nt, Homo sapiens
  misc_RNA (1)...(19): siRNA sense strand
gggugaagauccacuguag

SEQ ID NO: 2053831 - RNA, 19 nt, Homo sapiens
  misc_RNA (1)...(19): siRNA sense strand
gaccucagccaaugacuug

SEQ ID NO: 2053832 - RNA, 19 nt, Homo sapiens
  misc_RNA (1)...(19): siRNA sense strand
ccaaagauguguggaccau

SEQ ID NO: 2053833 - RNA, 19 nt, Homo sapiens
  misc_RNA (1)...(19): siRNA sense strand
gcucuaggaccaaagaugu

SEQ ID NO: 2053834 - RNA, 19 nt, Homo sapiens
  misc_RNA (1)...(19): siRNA sense strand
gaccaugaccucagccaau

SEQ ID NO: 2053835 - RNA, 19 nt, Homo sapiens
  misc_RNA (1)...(19): siRNA sense strand
gcagccaggugguacuucu

SEQ ID NO: 2053836 - RNA, 19 nt, Homo sapiens
  misc_RNA (1)...(19): siRNA sense strand
gcagcacugugggcaaugu

SEQ ID NO: 2053837 - RNA, 19 nt, Homo sapiens
  misc_RNA (1)...(19): siRNA sense strand
agaagcaccuggagaugca

SEQ ID NO: 2053838 - RNA, 19 nt, Homo sapiens
  misc_RNA (1)...(19): siRNA sense strand
gcauguguucccagaggua

SEQ ID NO: 2053839 - RNA, 19 nt, Homo sapiens
  misc_RNA (1)...(19): siRNA sense strand
aaacuaguggcgucaguga

SEQ ID NO: 2053840 - RNA, 19 nt, Homo sapiens
  misc_RNA (1)...(19): siRNA sense strand
gugaagauccacuguaggu

SEQ ID NO: 2053841 - RNA, 19 nt, Homo sapiens
  misc_RNA (1)...(19): siRNA sense strand
ccaaacuaguggcgucagu

SEQ ID NO: 2053842 - RNA, 19 nt, Homo sapiens
  misc_RNA (1)...(19): siRNA sense strand
gcaccuggagaugcaguuu

SEQ ID NO: 2053843 - RNA, 19 nt, Homo sapiens
  misc_RNA (1)...(19): siRNA sense strand
aagauccacuguagguugu

SEQ ID NO: 2053844 - RNA, 19 nt, Homo sapiens
  misc_RNA (1)...(19): siRNA sense strand
gcucggaaggccagucuca

SEQ ID NO: 2053845 - RNA, 19 nt, Homo sapiens
  misc_RNA (1)...(19): siRNA sense strand
ggaacccgccugagagcau

SEQ ID NO: 2053846 - RNA, 19 nt, Homo sapiens
  misc_RNA (1)...(19): siRNA sense strand
cugaggaugagacuucuaa

SEQ ID NO: 2053847 - RNA, 19 nt, Homo sapiens
  misc_RNA (1)...(19): siRNA sense strand
ccauugcugugcccaccuu

SEQ ID NO: 2053848 - RNA, 19 nt, Homo sapiens
  misc_RNA (1)...(19): siRNA sense strand
gaggaugagacuucuaacu

SEQ ID NO: 2053849 - RNA, 19 nt, Homo sapiens
  misc_RNA (1)...(19): siRNA sense strand
accuggagaugcaguuuga

SEQ ID NO: 2053850 - RNA, 19 nt, Homo sapiens
  misc_RNA (1)...(19): siRNA sense strand
gcuaugcagaggagccauu

SEQ ID NO: 2053851 - RNA, 19 nt, Homo sapiens
  misc_RNA (1)...(19): siRNA sense strand
uaacauaccugccgaagaa

SEQ ID NO: 2053852 - RNA, 19 nt, Homo sapiens
  misc_RNA (1)...(19): siRNA sense strand
cuacggagcucgaaucaaa

SEQ ID NO: 2053853 - RNA, 19 nt, Homo sapiens
  misc_RNA (1)...(19): siRNA sense strand
gcacacaagugacucaaga

SEQ ID NO: 2053854 - RNA, 19 nt, Homo sapiens
  misc_RNA (1)...(19): siRNA sense strand
gcagggaucuucauuccaa

SEQ ID NO: 2053855 - RNA, 19 nt, Homo sapiens
  misc_RNA (1)...(19): siRNA sense strand
agacauccaugaacuugua

SEQ ID NO: 2053856 - RNA, 19 nt, Homo sapiens
  misc_RNA (1)...(19): siRNA sense strand
gaucugggcugcacacaag

SEQ ID NO: 2053857 - RNA, 19 nt, Homo sapiens
  misc_RNA (1)...(19): siRNA sense strand
gcuguucaccuucuacuua

SEQ ID NO: 2053858 - RNA, 19 nt, Homo sapiens
  misc_RNA (1)...(19): siRNA sense strand
gaaaaugccuugaaacucu

SEQ ID NO: 2053859 - RNA, 19 nt, Homo sapiens
  misc_RNA (1)...(19): siRNA sense strand
caaagaaaaugccuugaaa

SEQ ID NO: 2053860 - RNA, 19 nt, Homo sapiens
  misc_RNA (1)...(19): siRNA sense strand
ggugugaucugguggacuu

SEQ ID NO: 2053861 - RNA, 19 nt, Homo sapiens
  misc_RNA (1)...(19): siRNA sense strand
ucaaagguguggaaguguu

SEQ ID NO: 2053862 - RNA, 19 nt, Homo sapiens
  misc_RNA (1)...(19): siRNA sense strand
ggaggaagccaucacaagu

SEQ ID NO: 2053863 - RNA, 19 nt, Homo sapiens
  misc_RNA (1)...(19): siRNA sense strand
ccgagagacuguccuguga

SEQ ID NO: 2053864 - RNA, 19 nt, Homo sapiens
  misc_RNA (1)...(19): siRNA sense strand
gagcaguccucuuguacca

SEQ ID NO: 2053865 - RNA, 19 nt, Homo sapiens
  misc_RNA (1)...(19): siRNA sense strand
caagugcacagacaaagaa

SEQ ID NO: 2053866 - RNA, 19 nt, Homo sapiens
  misc_RNA (1)...(19): siRNA sense strand
ggucuuugauagauuacaa

SEQ ID NO: 2053867 - RNA, 19 nt, Homo sapiens
  misc_RNA (1)...(19): siRNA sense strand
ccaaaugucagaaggauca

SEQ ID NO: 2053868 - RNA, 19 nt, Homo sapiens
  misc_RNA (1)...(19): siRNA sense strand
gagcagggaucuucauucc

SEQ ID NO: 2053869 - RNA, 19 nt, Homo sapiens
  misc_RNA (1)...(19): siRNA sense strand
aaucaaagguguggaagug

SEQ ID NO: 2053870 - RNA, 19 nt, Homo sapiens
  misc_RNA (1)...(19): siRNA sense strand
gaugguugguccugauguu

SEQ ID NO: 2053871 - RNA, 19 nt, Homo sapiens
  misc_RNA (1)...(19): siRNA sense strand
aggagaggcuugagaucua

SEQ ID NO: 2053872 - RNA, 19 nt, Homo sapiens
  misc_RNA (1)...(19): siRNA sense strand
gaaaaugcauccaccucaa

SEQ ID NO: 2053873 - RNA, 19 nt, Homo sapiens
  misc_RNA (1)...(19): siRNA sense strand
ggacauuccuaacauaccu

SEQ ID NO: 2053874 - RNA, 19 nt, Homo sapiens
  misc_RNA (1)...(19): siRNA sense strand
gauccugcaucgaugaauc

SEQ ID NO: 2053875 - RNA, 19 nt, Homo sapiens
  misc_RNA (1)...(19): siRNA sense strand
gugcugcucucugugguuu

SEQ ID NO: 2053876 - RNA, 19 nt, Homo sapiens
  misc_RNA (1)...(19): siRNA sense strand
gguugguccugauguuauu

SEQ ID NO: 2053877 - RNA, 19 nt, Homo sapiens
  misc_RNA (1)...(19): siRNA sense strand
ggagaggcuugagaucuag

SEQ ID NO: 2053878 - RNA, 19 nt, Homo sapiens
  misc_RNA (1)...(19): siRNA sense strand
gaggaagccaucacaagug

SEQ ID NO: 2053879 - RNA, 19 nt, Homo sapiens
  misc_RNA (1)...(19): siRNA sense strand
aagauuugcuucuguugug

SEQ ID NO: 2053880 - RNA, 19 nt, Homo sapiens
  misc_RNA (1)...(19): siRNA sense strand
gcggcgaccuucacaccuu

SEQ ID NO: 2053881 - RNA, 19 nt, Homo sapiens
  misc_RNA (1)...(19): siRNA sense strand
ggagauccugcaucgauga

SEQ ID NO: 2053882 - RNA, 19 nt, Homo sapiens
  misc_RNA (1)...(19): siRNA sense strand
ggaucuggcugcagugacu

SEQ ID NO: 2053883 - RNA, 19 nt, Homo sapiens
  misc_RNA (1)...(19): siRNA sense strand
ugugguuuguguccucuua

SEQ ID NO: 2053884 - RNA, 19 nt, Homo sapiens
  misc_RNA (1)...(19): siRNA sense strand
cgcggucuuugauagauua

SEQ ID NO: 2053885 - RNA, 19 nt, Homo sapiens
  misc_RNA (1)...(19): siRNA sense strand
ggcuugagaucuagagcuu

SEQ ID NO: 2053886 - RNA, 19 nt, Homo sapiens
  misc_RNA (1)...(19): siRNA sense strand
ccaagugcacagacaaaga

SEQ ID NO: 2053887 - RNA, 19 nt, Homo sapiens
  misc_RNA (1)...(19): siRNA sense strand
cuggagcaguccucuugua

SEQ ID NO: 2053888 - RNA, 19 nt, Homo sapiens
  misc_RNA (1)...(19): siRNA sense strand
guagugcuguucaccuucu

SEQ ID NO: 2053889 - RNA, 19 nt, Homo sapiens
  misc_RNA (1)...(19): siRNA sense strand
caucacaagugccaguuuu

SEQ ID NO: 2053890 - RNA, 19 nt, Homo sapiens
  misc_RNA (1)...(19): siRNA sense strand
aagcugcugugaucccauu

SEQ ID NO: 2053891 - RNA, 19 nt, Homo sapiens
  misc_RNA (1)...(19): siRNA sense strand
cuguucaccuucuacuuaa

SEQ ID NO: 2053892 - RNA, 19 nt, Homo sapiens
  misc_RNA (1)...(19): siRNA sense strand
gaggagaggcuugagaucu

SEQ ID NO: 2053893 - RNA, 19 nt, Homo sapiens
  misc_RNA (1)...(19): siRNA sense strand
ggagcagggaucuucauuc

SEQ ID NO: 2053894 - RNA, 19 nt, Homo sapiens
  misc_RNA (1)...(19): siRNA sense strand
ccagacauccaugaacuug

SEQ ID NO: 2053895 - RNA, 19 nt, Homo sapiens
  misc_RNA (1)...(19): siRNA sense strand
aauccuacauggacaccaa

SEQ ID NO: 2053896 - RNA, 19 nt, Homo sapiens
  misc_RNA (1)...(19): siRNA sense strand
caagauuugcuucuguugu

SEQ ID NO: 2053897 - RNA, 19 nt, Homo sapiens
  misc_RNA (1)...(19): siRNA sense strand
uccgcuaccuccagauauu

SEQ ID NO: 2053898 - RNA, 19 nt, Homo sapiens
  misc_RNA (1)...(19): siRNA sense strand
uccaugaacuuguagaaaa

SEQ ID NO: 2053899 - RNA, 19 nt, Homo sapiens
  misc_RNA (1)...(19): siRNA sense strand
gaaucaaagguguggaagu

SEQ ID NO: 2053900 - RNA, 19 nt, Homo sapiens
  misc_RNA (1)...(19): siRNA sense strand
uguguccucuuaaaucuag

SEQ ID NO: 2053901 - RNA, 19 nt, Homo sapiens
  misc_RNA (1)...(19): siRNA sense strand
acacaagugacucaagaug

SEQ ID NO: 2053902 - RNA, 19 nt, Homo sapiens
  misc_RNA (1)...(19): siRNA sense strand
guucaccuucuacuuaaga

SEQ ID NO: 2053903 - RNA, 19 nt, Homo sapiens
  misc_RNA (1)...(19): siRNA sense strand
ccuggugcguccuaucaga

SEQ ID NO: 2053904 - RNA, 19 nt, Homo sapiens
  misc_RNA (1)...(19): siRNA sense strand
ugguuuguguccucuuaaa

SEQ ID NO: 2053905 - RNA, 19 nt, Homo sapiens
  misc_RNA (1)...(19): siRNA sense strand
caaagguguggaaguguuc

SEQ ID NO: 2053906 - RNA, 19 nt, Homo sapiens
  misc_RNA (1)...(19): siRNA sense strand
gcugcucucugugguuugu

SEQ ID NO: 2053907 - RNA, 19 nt, Homo sapiens
  misc_RNA (1)...(19): siRNA sense strand
gaagaagcggaggaucaug

SEQ ID NO: 2053908 - RNA, 19 nt, Homo sapiens
  misc_RNA (1)...(19): siRNA sense strand
ccagccaagugcacagaca

SEQ ID NO: 2053909 - RNA, 19 nt, Homo sapiens
  misc_RNA (1)...(19): siRNA sense strand
uaggugaaggcaagauuug

SEQ ID NO: 2053910 - RNA, 19 nt, Homo sapiens
  misc_RNA (1)...(19): siRNA sense strand
ccgcggucuuugauagauu

SEQ ID NO: 2053911 - RNA, 19 nt, Homo sapiens
  misc_RNA (1)...(19): siRNA sense strand
gcugcaacacagacugaaa

SEQ ID NO: 2053912 - RNA, 19 nt, Homo sapiens
  misc_RNA (1)...(19): siRNA sense strand
gagauccugcaucgaugaa

SEQ ID NO: 2053913 - RNA, 19 nt, Homo sapiens
  misc_RNA (1)...(19): siRNA sense strand
uuaggugaaggcaagauuu

SEQ ID NO: 2053914 - RNA, 19 nt, Homo sapiens
  misc_RNA (1)...(19): siRNA sense strand
cugaagaagcggaggauca

SEQ ID NO: 2053915 - RNA, 19 nt, Homo sapiens
  misc_RNA (1)...(19): siRNA sense strand
guuuguguccucuuaaauc

SEQ ID NO: 2053916 - RNA, 19 nt, Homo sapiens
  misc_RNA (1)...(19): siRNA sense strand
gaauuucaaccagccaagu

SEQ ID NO: 2053917 - RNA, 19 nt, Homo sapiens
  misc_RNA (1)...(19): siRNA sense strand
ggaucugggcugcacacaa

SEQ ID NO: 2053918 - RNA, 19 nt, Homo sapiens
  misc_RNA (1)...(19): siRNA sense strand
cagggaucuucauuccaaa

SEQ ID NO: 2053919 - RNA, 19 nt, Homo sapiens
  misc_RNA (1)...(19): siRNA sense strand
ccuccgcuaccuccagaua

SEQ ID NO: 2053920 - RNA, 19 nt, Homo sapiens
  misc_RNA (1)...(19): siRNA sense strand
gcaacacagacugaaagga

SEQ ID NO: 2053921 - RNA, 19 nt, Homo sapiens
  misc_RNA (1)...(19): siRNA sense strand
ugaagaagcggaggaucau

SEQ ID NO: 2053922 - RNA, 19 nt, Homo sapiens
  misc_RNA (1)...(19): siRNA sense strand
gaaagaaugccacaaagua

SEQ ID NO: 2053923 - RNA, 19 nt, Homo sapiens
  misc_RNA (1)...(19): siRNA sense strand
gcuaugacaugccuaauuu

SEQ ID NO: 2053924 - RNA, 19 nt, Homo sapiens
  misc_RNA (1)...(19): siRNA sense strand
ggagaaauguggucacuug

SEQ ID NO: 2053925 - RNA, 19 nt, Homo sapiens
  misc_RNA (1)...(19): siRNA sense strand
ggacagaaguugcuuugug

SEQ ID NO: 2053926 - RNA, 19 nt, Homo sapiens
  misc_RNA (1)...(19): siRNA sense strand
aaacaucgcugucacuuug

SEQ ID NO: 2053927 - RNA, 19 nt, Homo sapiens
  misc_RNA (1)...(19): siRNA sense strand
gaaacuaaguguguuaaga

SEQ ID NO: 2053928 - RNA, 19 nt, Homo sapiens
  misc_RNA (1)...(19): siRNA sense strand
gaaauguggucacuugugu

SEQ ID NO: 2053929 - RNA, 19 nt, Homo sapiens
  misc_RNA (1)...(19): siRNA sense strand
gaagaaaucaagaaagcua

SEQ ID NO: 2053930 - RNA, 19 nt, Homo sapiens
  misc_RNA (1)...(19): siRNA sense strand
gcacugugaucaaguaugu

SEQ ID NO: 2053931 - RNA, 19 nt, Homo sapiens
  misc_RNA (1)...(19): siRNA sense strand
gaagagaaaccaagcaguu

SEQ ID NO: 2053932 - RNA, 19 nt, Homo sapiens
  misc_RNA (1)...(19): siRNA sense strand
gaaagaaguugugcaaguc

SEQ ID NO: 2053933 - RNA, 19 nt, Homo sapiens
  misc_RNA (1)...(19): siRNA sense strand
ugacaugccuaauuuguau

SEQ ID NO: 2053934 - RNA, 19 nt, Homo sapiens
  misc_RNA (1)...(19): siRNA sense strand
ggacggacuuuaggaugua

SEQ ID NO: 2053935 - RNA, 19 nt, Homo sapiens
  misc_RNA (1)...(19): siRNA sense strand
aguagaagauccaccuuua

SEQ ID NO: 2053936 - RNA, 19 nt, Homo sapiens
  misc_RNA (1)...(19): siRNA sense strand
ccaccaacuugucaucaua

SEQ ID NO: 2053937 - RNA, 19 nt, Homo sapiens
  misc_RNA (1)...(19): siRNA sense strand
gaauacaaacgaucugaaa

SEQ ID NO: 2053938 - RNA, 19 nt, Homo sapiens
  misc_RNA (1)...(19): siRNA sense strand
gagaguagcaaaucagaaa

SEQ ID NO: 2053939 - RNA, 19 nt, Homo sapiens
  misc_RNA (1)...(19): siRNA sense strand
aaacgaaugccuugucaua

SEQ ID NO: 2053940 - RNA, 19 nt, Homo sapiens
  misc_RNA (1)...(19): siRNA sense strand
cagaagauguaccaacuug

SEQ ID NO: 2053941 - RNA, 19 nt, Homo sapiens
  misc_RNA (1)...(19): siRNA sense strand
ugaaagaaguugugcaagu

SEQ ID NO: 2053942 - RNA, 19 nt, Homo sapiens
  misc_RNA (1)...(19): siRNA sense strand
ugaaacauguagacaagaa

SEQ ID NO: 2053943 - RNA, 19 nt, Homo sapiens
  misc_RNA (1)...(19): siRNA sense strand
gaugugaaguguaauugug

SEQ ID NO: 2053944 - RNA, 19 nt, Homo sapiens
  misc_RNA (1)...(19): siRNA sense strand
ggauguuucuguauauuuc

SEQ ID NO: 2053945 - RNA, 19 nt, Homo sapiens
  misc_RNA (1)...(19): siRNA sense strand
acacauguaugaaagaaug

SEQ ID NO: 2053946 - RNA, 19 nt, Homo sapiens
  misc_RNA (1)...(19): siRNA sense strand
ccaaagauggucacaacua

SEQ ID NO: 2053947 - RNA, 19 nt, Homo sapiens
  misc_RNA (1)...(19): siRNA sense strand
gaaacuguccaccuuguga

SEQ ID NO: 2053948 - RNA, 19 nt, Homo sapiens
  misc_RNA (1)...(19): siRNA sense strand
gaucaagcguuaauaaagc

SEQ ID NO: 2053949 - RNA, 19 nt, Homo sapiens
  misc_RNA (1)...(19): siRNA sense strand
aagcaucaauguagaagaa

SEQ ID NO: 2053950 - RNA, 19 nt, Homo sapiens
  misc_RNA (1)...(19): siRNA sense strand
cagaaucacacauguauga

SEQ ID NO: 2053951 - RNA, 19 nt, Homo sapiens
  misc_RNA (1)...(19): siRNA sense strand
uaugugagcgugaauuuaa

SEQ ID NO: 2053952 - RNA, 19 nt, Homo sapiens
  misc_RNA (1)...(19): siRNA sense strand
acgaaugccuugucauaaa

SEQ ID NO: 2053953 - RNA, 19 nt, Homo sapiens
  misc_RNA (1)...(19): siRNA sense strand
gaagauguaccaacuugug

SEQ ID NO: 2053954 - RNA, 19 nt, Homo sapiens
  misc_RNA (1)...(19): siRNA sense strand
gagccagcauuuauucaga

SEQ ID NO: 2053955 - RNA, 19 nt, Homo sapiens
  misc_RNA (1)...(19): siRNA sense strand
uaaaagaguuuguggaaga

SEQ ID NO: 2053956 - RNA, 19 nt, Homo sapiens
  misc_RNA (1)...(19): siRNA sense strand
ccagaaaacuuguugaaga

SEQ ID NO: 2053957 - RNA, 19 nt, Homo sapiens
  misc_RNA (1)...(19): siRNA sense strand
aaacugaagcucugugauu

SEQ ID NO: 2053958 - RNA, 19 nt, Homo sapiens
  misc_RNA (1)...(19): siRNA sense strand
ccagcgagcuaaugucuca

SEQ ID NO: 2053959 - RNA, 19 nt, Homo sapiens
  misc_RNA (1)...(19): siRNA sense strand
gagcuaaugucucagaaaa

SEQ ID NO: 2053960 - RNA, 19 nt, Homo sapiens
  misc_RNA (1)...(19): siRNA sense strand
caaagauggucacaacuac

SEQ ID NO: 2053961 - RNA, 19 nt, Homo sapiens
  misc_RNA (1)...(19): siRNA sense strand
agaaggagaugaagauuuu

SEQ ID NO: 2053962 - RNA, 19 nt, Homo sapiens
  misc_RNA (1)...(19): siRNA sense strand
aaagaaugccacaaaguaa

SEQ ID NO: 2053963 - RNA, 19 nt, Homo sapiens
  misc_RNA (1)...(19): siRNA sense strand
uaucuucugugacugauga

SEQ ID NO: 2053964 - RNA, 19 nt, Homo sapiens
  misc_RNA (1)...(19): siRNA sense strand
ucagacagauggagauaca

SEQ ID NO: 2053965 - RNA, 19 nt, Homo sapiens
  misc_RNA (1)...(19): siRNA sense strand
caucauacaagucaagaaa

SEQ ID NO: 2053966 - RNA, 19 nt, Homo sapiens
  misc_RNA (1)...(19): siRNA sense strand
gagauacacgugaauuaga

SEQ ID NO: 2053967 - RNA, 19 nt, Homo sapiens
  misc_RNA (1)...(19): siRNA sense strand
gaauuuaaaccuccuugug

SEQ ID NO: 2053968 - RNA, 19 nt, Homo sapiens
  misc_RNA (1)...(19): siRNA sense strand
ucauucauguggccaagua

SEQ ID NO: 2053969 - RNA, 19 nt, Homo sapiens
  misc_RNA (1)...(19): siRNA sense strand
aaaaguagcugaaagaagu

SEQ ID NO: 2053970 - RNA, 19 nt, Homo sapiens
  misc_RNA (1)...(19): siRNA sense strand
ccaaugugcucuucuacuc

SEQ ID NO: 2053971 - RNA, 19 nt, Homo sapiens
  misc_RNA (1)...(19): siRNA sense strand
gaaucacacauguaugaaa

SEQ ID NO: 2053972 - RNA, 19 nt, Homo sapiens
  misc_RNA (1)...(19): siRNA sense strand
ucagaagcaucaauguaga

SEQ ID NO: 2053973 - RNA, 19 nt, Homo sapiens
  misc_RNA (1)...(19): siRNA sense strand
ucacacauguaugaaagaa

SEQ ID NO: 2053974 - RNA, 19 nt, Homo sapiens
  misc_RNA (1)...(19): siRNA sense strand
gaagaaggagaugaagauu

SEQ ID NO: 2053975 - RNA, 19 nt, Homo sapiens
  misc_RNA (1)...(19): siRNA sense strand
caugaucaagcguuaauaa

SEQ ID NO: 2053976 - RNA, 19 nt, Homo sapiens
  misc_RNA (1)...(19): siRNA sense strand
uauggaaugucuugggaaa

SEQ ID NO: 2053977 - RNA, 19 nt, Homo sapiens
  misc_RNA (1)...(19): siRNA sense strand
ggagauacacgugaauuag

SEQ ID NO: 2053978 - RNA, 19 nt, Homo sapiens
  misc_RNA (1)...(19): siRNA sense strand
cuguagaugugaaguguaa

SEQ ID NO: 2053979 - RNA, 19 nt, Homo sapiens
  misc_RNA (1)...(19): siRNA sense strand
caguuuagcucuucaucug

SEQ ID NO: 2053980 - RNA, 19 nt, Homo sapiens
  misc_RNA (1)...(19): siRNA sense strand
gacagccaguuucuuguau

SEQ ID NO: 2053981 - RNA, 19 nt, Homo sapiens
  misc_RNA (1)...(19): siRNA sense strand
ccaaguaugugagcgugaa

SEQ ID NO: 2053982 - RNA, 19 nt, Homo sapiens
  misc_RNA (1)...(19): siRNA sense strand
gaaaguacugugccugauc

SEQ ID NO: 2053983 - RNA, 19 nt, Homo sapiens
  misc_RNA (1)...(19): siRNA sense strand
ggaaacugaagcucuguga

SEQ ID NO: 2053984 - RNA, 19 nt, Homo sapiens
  misc_RNA (1)...(19): siRNA sense strand
uaugaaagaaugccacaaa

SEQ ID NO: 2053985 - RNA, 19 nt, Homo sapiens
  misc_RNA (1)...(19): siRNA sense strand
caacauaagugugaaaauc

SEQ ID NO: 2053986 - RNA, 19 nt, Homo sapiens
  misc_RNA (1)...(19): siRNA sense strand
gccaguuucuuguaucuuc

SEQ ID NO: 2053987 - RNA, 19 nt, Homo sapiens
  misc_RNA (1)...(19): siRNA sense strand
uagaagauccaccuuuaga

SEQ ID NO: 2053988 - RNA, 19 nt, Homo sapiens
  misc_RNA (1)...(19): siRNA sense strand
gaaaguguugcccuggaaa

SEQ ID NO: 2053989 - RNA, 19 nt, Homo sapiens
  misc_RNA (1)...(19): siRNA sense strand
cagaaacuguagaugugaa

SEQ ID NO: 2053990 - RNA, 19 nt, Homo sapiens
  misc_RNA (1)...(19): siRNA sense strand
ucacagaggcaguugcuau

SEQ ID NO: 2053991 - RNA, 19 nt, Homo sapiens
  misc_RNA (1)...(19): siRNA sense strand
gcuugugccucauucaugu

SEQ ID NO: 2053992 - RNA, 19 nt, Homo sapiens
  misc_RNA (1)...(19): siRNA sense strand
caacaggagaguagcaaau

SEQ ID NO: 2053993 - RNA, 19 nt, Homo sapiens
  misc_RNA (1)...(19): siRNA sense strand
acugauggcugcacuggaa

SEQ ID NO: 2053994 - RNA, 19 nt, Homo sapiens
  misc_RNA (1)...(19): siRNA sense strand
guagaugugaaguguaauu

SEQ ID NO: 2053995 - RNA, 19 nt, Homo sapiens
  misc_RNA (1)...(19): siRNA sense strand
gaucugaaacaccuaguag

SEQ ID NO: 2053996 - RNA, 19 nt, Homo sapiens
  misc_RNA (1)...(19): siRNA sense strand
cccagaaacuguagaugug

SEQ ID NO: 2053997 - RNA, 19 nt, Homo sapiens
  misc_RNA (1)...(19): siRNA sense strand
ugaagaaggagaugaagau

SEQ ID NO: 2053998 - RNA, 19 nt, Homo sapiens
  misc_RNA (1)...(19): siRNA sense strand
guccaaagauggucacaac

SEQ ID NO: 2053999 - RNA, 19 nt, Homo sapiens
  misc_RNA (1)...(19): siRNA sense strand
gggauguuucuguauauuu

SEQ ID NO: 2054000 - RNA, 19 nt, Homo sapiens
  misc_RNA (1)...(19): siRNA sense strand
gcugaaagaaguugugcaa

SEQ ID NO: 2054001 - RNA, 19 nt, Homo sapiens
  misc_RNA (1)...(19): siRNA sense strand
cagaaaacuuguugaagaa

SEQ ID NO: 2054002 - RNA, 19 nt, Homo sapiens
  misc_RNA (1)...(19): siRNA sense strand
agaaaguguugcccuggaa

SEQ ID NO: 2054003 - RNA, 19 nt, Homo sapiens
  misc_RNA (1)...(19): siRNA sense strand
aacugaagcucugugauuu

SEQ ID NO: 2054004 - RNA, 19 nt, Homo sapiens
  misc_RNA (1)...(19): siRNA sense strand
aaucacacauguaugaaag

SEQ ID NO: 2054005 - RNA, 19 nt, Homo sapiens
  misc_RNA (1)...(19): siRNA sense strand
ccacaagaccacccaagug

SEQ ID NO: 2054006 - RNA, 19 nt, Homo sapiens
  misc_RNA (1)...(19): siRNA sense strand
cgaaugccuugucauaaac

SEQ ID NO: 2054007 - RNA, 19 nt, Homo sapiens
  misc_RNA (1)...(19): siRNA sense strand
caagauagggaaacugaag

SEQ ID NO: 2054008 - RNA, 19 nt, Homo sapiens
  misc_RNA (1)...(19): siRNA sense strand
gcccagaaacuguagaugu

SEQ ID NO: 2054009 - RNA, 19 nt, Homo sapiens
  misc_RNA (1)...(19): siRNA sense strand
caauguagaagaaaguguu

SEQ ID NO: 2054010 - RNA, 19 nt, Homo sapiens
  misc_RNA (1)...(19): siRNA sense strand
gcaucaauguagaagaaag

SEQ ID NO: 2054011 - RNA, 19 nt, Homo sapiens
  misc_RNA (1)...(19): siRNA sense strand
uggagauacacgugaauua

SEQ ID NO: 2054012 - RNA, 19 nt, Homo sapiens
  misc_RNA (1)...(19): siRNA sense strand
gugacaaaguacuugaaug

SEQ ID NO: 2054013 - RNA, 19 nt, Homo sapiens
  misc_RNA (1)...(19): siRNA sense strand
guaugugagcgugaauuua

SEQ ID NO: 2054014 - RNA, 19 nt, Homo sapiens
  misc_RNA (1)...(19): siRNA sense strand
gcuaaagacagccaguuuc

SEQ ID NO: 2054015 - RNA, 19 nt, Homo sapiens
  misc_RNA (1)...(19): siRNA sense strand
aguagcaaaucagaaagua

SEQ ID NO: 2054016 - RNA, 19 nt, Homo sapiens
  misc_RNA (1)...(19): siRNA sense strand
uggaaugucuugggaaaca

SEQ ID NO: 2054017 - RNA, 19 nt, Homo sapiens
  misc_RNA (1)...(19): siRNA sense strand
ucaaguuccuauuccuaug

SEQ ID NO: 2054018 - RNA, 19 nt, Homo sapiens
  misc_RNA (1)...(19): siRNA sense strand
caagaccacccaagugcaa

SEQ ID NO: 2054019 - RNA, 19 nt, Homo sapiens
  misc_RNA (1)...(19): siRNA sense strand
ugugaaacauguagacaag

SEQ ID NO: 2054020 - RNA, 19 nt, Homo sapiens
  misc_RNA (1)...(19): siRNA sense strand
uuucuuguaucuucuguga

SEQ ID NO: 2054021 - RNA, 19 nt, Homo sapiens
  misc_RNA (1)...(19): siRNA sense strand
agacagccaguuucuugua

SEQ ID NO: 2054022 - RNA, 19 nt, Homo sapiens
  misc_RNA (1)...(19): siRNA sense strand
aagaagaacuuguuugaga

SEQ ID NO: 2054023 - RNA, 19 nt, Homo sapiens
  misc_RNA (1)...(19): siRNA sense strand
gcgaggagauuucccaaga

SEQ ID NO: 2054024 - RNA, 19 nt, Homo sapiens
  misc_RNA (1)...(19): siRNA sense strand
gacaaccacucccacaaga

SEQ ID NO: 2054025 - RNA, 19 nt, Homo sapiens
  misc_RNA (1)...(19): siRNA sense strand
gaggagauuucccaagaag

SEQ ID NO: 2054026 - RNA, 19 nt, Homo sapiens
  misc_RNA (1)...(19): siRNA sense strand
ggagauuucccaagaagug

SEQ ID NO: 2054027 - RNA, 19 nt, Homo sapiens
  misc_RNA (1)...(19): siRNA sense strand
cgaggagauuucccaagaa

SEQ ID NO: 2054028 - RNA, 19 nt, Homo sapiens
  misc_RNA (1)...(19): siRNA sense strand
ggacaagcagggcaacuuc

SEQ ID NO: 2054029 - RNA, 19 nt, Homo sapiens
  misc_RNA (1)...(19): siRNA sense strand
ggacaaccacucccacaag

SEQ ID NO: 2054030 - RNA, 19 nt, Homo sapiens
  misc_RNA (1)...(19): siRNA sense strand
cuacaagguugccuacagu

SEQ ID NO: 2054031 - RNA, 19 nt, Homo sapiens
  misc_RNA (1)...(19): siRNA sense strand
cauccuggcucgcuaugug

SEQ ID NO: 2054032 - RNA, 19 nt, Homo sapiens
  misc_RNA (1)...(19): siRNA sense strand
caaccacugugagacgaaa

SEQ ID NO: 2054033 - RNA, 19 nt, Homo sapiens
  misc_RNA (1)...(19): siRNA sense strand
ggccugcacucugcgcuuu

SEQ ID NO: 2054034 - RNA, 19 nt, Homo sapiens
  misc_RNA (1)...(19): siRNA sense strand
cccugggccugaagaauaa

SEQ ID NO: 2054035 - RNA, 19 nt, Homo sapiens
  misc_RNA (1)...(19): siRNA sense strand
caagguugccuacaguaau

SEQ ID NO: 2054036 - RNA, 19 nt, Homo sapiens
  misc_RNA (1)...(19): siRNA sense strand
ggacacccagcagcaauga

SEQ ID NO: 2054037 - RNA, 19 nt, Homo sapiens
  misc_RNA (1)...(19): siRNA sense strand
cagcagcaaugacgauaac

SEQ ID NO: 2054038 - RNA, 19 nt, Homo sapiens
  misc_RNA (1)...(19): siRNA sense strand
guggguaacuggaacaaaa

SEQ ID NO: 2054039 - RNA, 19 nt, Homo sapiens
  misc_RNA (1)...(19): siRNA sense strand
aagguugccuacaguaaug

SEQ ID NO: 2054040 - RNA, 19 nt, Homo sapiens
  misc_RNA (1)...(19): siRNA sense strand
gagcuacgguaacgaucag

SEQ ID NO: 2054041 - RNA, 19 nt, Homo sapiens
  misc_RNA (1)...(19): siRNA sense strand
uggagcugcugggcuguua

SEQ ID NO: 2054042 - RNA, 19 nt, Homo sapiens
  misc_RNA (1)...(19): siRNA sense strand
caaccacucccacaagaag

SEQ ID NO: 2054043 - RNA, 19 nt, Homo sapiens
  misc_RNA (1)...(19): siRNA sense strand
cuuuggcucuguccaguuu

SEQ ID NO: 2054044 - RNA, 19 nt, Homo sapiens
  misc_RNA (1)...(19): siRNA sense strand
ggaggugacaggcaucauc

SEQ ID NO: 2054045 - RNA, 19 nt, Homo sapiens
  misc_RNA (1)...(19): siRNA sense strand
ggagcuacgguaacgauca

SEQ ID NO: 2054046 - RNA, 19 nt, Homo sapiens
  misc_RNA (1)...(19): siRNA sense strand
gaggugacaggcaucauca

SEQ ID NO: 2054047 - RNA, 19 nt, Homo sapiens
  misc_RNA (1)...(19): siRNA sense strand
acaagguugccuacaguaa

SEQ ID NO: 2054048 - RNA, 19 nt, Homo sapiens
  misc_RNA (1)...(19): siRNA sense strand
ccacugggcauggagaaug

SEQ ID NO: 2054049 - RNA, 19 nt, Homo sapiens
  misc_RNA (1)...(19): siRNA sense strand
caagaagugcgaggagaug

SEQ ID NO: 2054050 - RNA, 19 nt, Homo sapiens
  misc_RNA (1)...(19): siRNA sense strand
aauaacagcaucccugaca

SEQ ID NO: 2054051 - RNA, 19 nt, Homo sapiens
  misc_RNA (1)...(19): siRNA sense strand
uaacagcaucccugacaag

SEQ ID NO: 2054052 - RNA, 19 nt, Homo sapiens
  misc_RNA (1)...(19): siRNA sense strand
ccuacaagguugccuacag

SEQ ID NO: 2054053 - RNA, 19 nt, Homo sapiens
  misc_RNA (1)...(19): siRNA sense strand
ccaagaagugcgaggagau

SEQ ID NO: 2054054 - RNA, 19 nt, Homo sapiens
  misc_RNA (1)...(19): siRNA sense strand
ccagcagcaaugacgauaa

SEQ ID NO: 2054055 - RNA, 19 nt, Homo sapiens
  misc_RNA (1)...(19): siRNA sense strand
gugcgaacuggacugagua

SEQ ID NO: 2054056 - RNA, 19 nt, Homo sapiens
  misc_RNA (1)...(19): siRNA sense strand
gaagugcgaggagaugucu

SEQ ID NO: 2054057 - RNA, 19 nt, Homo sapiens
  misc_RNA (1)...(19): siRNA sense strand
gugcaugucaaccuguuug

SEQ ID NO: 2054058 - RNA, 19 nt, Homo sapiens
  misc_RNA (1)...(19): siRNA sense strand
gcaaccacugugagacgaa

SEQ ID NO: 2054059 - RNA, 19 nt, Homo sapiens
  misc_RNA (1)...(19): siRNA sense strand
ggaacauugccaacucaca

SEQ ID NO: 2054060 - RNA, 19 nt, Homo sapiens
  misc_RNA (1)...(19): siRNA sense strand
gugcgcauccugccuguag

SEQ ID NO: 2054061 - RNA, 19 nt, Homo sapiens
  misc_RNA (1)...(19): siRNA sense strand
gugugaccuucuuggguuu

SEQ ID NO: 2054062 - RNA, 19 nt, Homo sapiens
  misc_RNA (1)...(19): siRNA sense strand
ugggaacauugccaacuca

SEQ ID NO: 2054063 - RNA, 19 nt, Homo sapiens
  misc_RNA (1)...(19): siRNA sense strand
gacaagcagggcaacuuca

SEQ ID NO: 2054064 - RNA, 19 nt, Homo sapiens
  misc_RNA (1)...(19): siRNA sense strand
cugcggaggauguggguaa

SEQ ID NO: 2054065 - RNA, 19 nt, Homo sapiens
  misc_RNA (1)...(19): siRNA sense strand
ggaccaagcugcccauaau

SEQ ID NO: 2054066 - RNA, 19 nt, Homo sapiens
  misc_RNA (1)...(19): siRNA sense strand
gcaguaggcggucgacuua

SEQ ID NO: 2054067 - RNA, 19 nt, Homo sapiens
  misc_RNA (1)...(19): siRNA sense strand
gagaauagucccacaugua

SEQ ID NO: 2054068 - RNA, 19 nt, Homo sapiens
  misc_RNA (1)...(19): siRNA sense strand
gaccggcucuucauucguu

SEQ ID NO: 2054069 - RNA, 19 nt, Homo sapiens
  misc_RNA (1)...(19): siRNA sense strand
ugaggaagcuagagaaggu

SEQ ID NO: 2054070 - RNA, 19 nt, Homo sapiens
  misc_RNA (1)...(19): siRNA sense strand
aguaggcggucgacuuaua

SEQ ID NO: 2054071 - RNA, 19 nt, Homo sapiens
  misc_RNA (1)...(19): siRNA sense strand
ggugcaaucuugguaguga

SEQ ID NO: 2054072 - RNA, 19 nt, Homo sapiens
  misc_RNA (1)...(19): siRNA sense strand
cacacaagcagaacuauga

SEQ ID NO: 2054073 - RNA, 19 nt, Homo sapiens
  misc_RNA (1)...(19): siRNA sense strand
gcacacaagcagaacuaug

SEQ ID NO: 2054074 - RNA, 19 nt, Homo sapiens
  misc_RNA (1)...(19): siRNA sense strand
guaggcggucgacuuauaa

SEQ ID NO: 2054075 - RNA, 19 nt, Homo sapiens
  misc_RNA (1)...(19): siRNA sense strand
gaccaaggcaggugcaauc

SEQ ID NO: 2054076 - RNA, 19 nt, Homo sapiens
  misc_RNA (1)...(19): siRNA sense strand
cuuguucacuggacucuga

SEQ ID NO: 2054077 - RNA, 19 nt, Homo sapiens
  misc_RNA (1)...(19): siRNA sense strand
ugagaauagucccacaugu

SEQ ID NO: 2054078 - RNA, 19 nt, Homo sapiens
  misc_RNA (1)...(19): siRNA sense strand
gaggaggaccggcucuuca

SEQ ID NO: 2054079 - RNA, 19 nt, Homo sapiens
  misc_RNA (1)...(19): siRNA sense strand
ggaggaccggcucuucauu

SEQ ID NO: 2054080 - RNA, 19 nt, Homo sapiens
  misc_RNA (1)...(19): siRNA sense strand
agaauagucccacauguag

SEQ ID NO: 2054081 - RNA, 19 nt, Homo sapiens
  misc_RNA (1)...(19): siRNA sense strand
gaggaccggcucuucauuc

SEQ ID NO: 2054082 - RNA, 19 nt, Homo sapiens
  misc_RNA (1)...(19): siRNA sense strand
cuccggcacuuccuguaua

SEQ ID NO: 2054083 - RNA, 19 nt, Homo sapiens
  misc_RNA (1)...(19): siRNA sense strand
cagcugaccugcaguugcu

SEQ ID NO: 2054084 - RNA, 19 nt, Homo sapiens
  misc_RNA (1)...(19): siRNA sense strand
gcagccagcggaagcaugu

SEQ ID NO: 2054085 - RNA, 19 nt, Homo sapiens
  misc_RNA (1)...(19): siRNA sense strand
ugaccgcccugguguccuu

SEQ ID NO: 2054086 - RNA, 19 nt, Homo sapiens
  misc_RNA (1)...(19): siRNA sense strand
acauguagcccugagagua

SEQ ID NO: 2054087 - RNA, 19 nt, Homo sapiens
  misc_RNA (1)...(19): siRNA sense strand
cagaucgugagcacacuua

SEQ ID NO: 2054088 - RNA, 19 nt, Homo sapiens
  misc_RNA (1)...(19): siRNA sense strand
ggaccgacuucuggacagu

SEQ ID NO: 2054089 - RNA, 19 nt, Homo sapiens
  misc_RNA (1)...(19): siRNA sense strand
gacgagggccuggaggaaa

SEQ ID NO: 2054090 - RNA, 19 nt, Homo sapiens
  misc_RNA (1)...(19): siRNA sense strand
gcggaagcauguguuugug

SEQ ID NO: 2054091 - RNA, 19 nt, Homo sapiens
  misc_RNA (1)...(19): siRNA sense strand
cagcagcccaggagcgaaa

SEQ ID NO: 2054092 - RNA, 19 nt, Homo sapiens
  misc_RNA (1)...(19): siRNA sense strand
aaacaggauccaaggacaa

SEQ ID NO: 2054093 - RNA, 19 nt, Homo sapiens
  misc_RNA (1)...(19): siRNA sense strand
ggcaguaggcggucgacuu

SEQ ID NO: 2054094 - RNA, 19 nt, Homo sapiens
  misc_RNA (1)...(19): siRNA sense strand
ucagaggcccugucaagca

SEQ ID NO: 2054095 - RNA, 19 nt, Homo sapiens
  misc_RNA (1)...(19): siRNA sense strand
ccagugaggaagcuagaga

SEQ ID NO: 2054096 - RNA, 19 nt, Homo sapiens
  misc_RNA (1)...(19): siRNA sense strand
ccuccaaauucgagcucua

SEQ ID NO: 2054097 - RNA, 19 nt, Homo sapiens
  misc_RNA (1)...(19): siRNA sense strand
gaccaagcugcccauaaug

SEQ ID NO: 2054098 - RNA, 19 nt, Homo sapiens
  misc_RNA (1)...(19): siRNA sense strand
uguauaagccgcuggacau

SEQ ID NO: 2054099 - RNA, 19 nt, Homo sapiens
  misc_RNA (1)...(19): siRNA sense strand
cauguagcccugagaguag

SEQ ID NO: 2054100 - RNA, 19 nt, Homo sapiens
  misc_RNA (1)...(19): siRNA sense strand
uccggcacuuccuguauaa

SEQ ID NO: 2054101 - RNA, 19 nt, Homo sapiens
  misc_RNA (1)...(19): siRNA sense strand
gaucgugagcacacuuaca

SEQ ID NO: 2054102 - RNA, 19 nt, Homo sapiens
  misc_RNA (1)...(19): siRNA sense strand
ccaaauucgagcucuauac

SEQ ID NO: 2054103 - RNA, 19 nt, Homo sapiens
  misc_RNA (1)...(19): siRNA sense strand
gguugaagaugggaugcau

SEQ ID NO: 2054104 - RNA, 19 nt, Homo sapiens
  misc_RNA (1)...(19): siRNA sense strand
gcccgcaucuucgcacaca

SEQ ID NO: 2054105 - RNA, 19 nt, Homo sapiens
  misc_RNA (1)...(19): siRNA sense strand
ugggugaccuccaaauucg

SEQ ID NO: 2054106 - RNA, 19 nt, Homo sapiens
  misc_RNA (1)...(19): siRNA sense strand
ccagcggaagcauguguuu

SEQ ID NO: 2054107 - RNA, 19 nt, Homo sapiens
  misc_RNA (1)...(19): siRNA sense strand
caggugcaaucuugguagu

SEQ ID NO: 2054108 - RNA, 19 nt, Homo sapiens
  misc_RNA (1)...(19): siRNA sense strand
ggcaggugcaaucuuggua

SEQ ID NO: 2054109 - RNA, 19 nt, Homo sapiens
  misc_RNA (1)...(19): siRNA sense strand
ucgcacacaagcagaacua

SEQ ID NO: 2054110 - RNA, 19 nt, Homo sapiens
  misc_RNA (1)...(19): siRNA sense strand
gcauguguuugugcugagu

SEQ ID NO: 2054111 - RNA, 19 nt, Homo sapiens
  misc_RNA (1)...(19): siRNA sense strand
ccagucagaggcccuguca

SEQ ID NO: 2054112 - RNA, 19 nt, Homo sapiens
  misc_RNA (1)...(19): siRNA sense strand
gaagagaucaaacaugguu

SEQ ID NO: 2054113 - RNA, 19 nt, Homo sapiens
  misc_RNA (1)...(19): siRNA sense strand
agaaggagauguuugaguu

SEQ ID NO: 2054114 - RNA, 19 nt, Homo sapiens
  misc_RNA (1)...(19): siRNA sense strand
aagaagagacugugaauug

SEQ ID NO: 2054115 - RNA, 19 nt, Homo sapiens
  misc_RNA (1)...(19): siRNA sense strand
gagaggaaguggaagucaa

SEQ ID NO: 2054116 - RNA, 19 nt, Homo sapiens
  misc_RNA (1)...(19): siRNA sense strand
ggacagcagagcuuaaaga

SEQ ID NO: 2054117 - RNA, 19 nt, Homo sapiens
  misc_RNA (1)...(19): siRNA sense strand
gugcucaccugccuaagaa

SEQ ID NO: 2054118 - RNA, 19 nt, Homo sapiens
  misc_RNA (1)...(19): siRNA sense strand
ggaagucaauggcuuugca

SEQ ID NO: 2054119 - RNA, 19 nt, Homo sapiens
  misc_RNA (1)...(19): siRNA sense strand
ggaagaagagacugugaau

SEQ ID NO: 2054120 - RNA, 19 nt, Homo sapiens
  misc_RNA (1)...(19): siRNA sense strand
gaagaagagacugugaauu

SEQ ID NO: 2054121 - RNA, 19 nt, Homo sapiens
  misc_RNA (1)...(19): siRNA sense strand
ccgugaaagugcuaaguaa

SEQ ID NO: 2054122 - RNA, 19 nt, Homo sapiens
  misc_RNA (1)...(19): siRNA sense strand
guucagccgucgagaggaa

SEQ ID NO: 2054123 - RNA, 19 nt, Homo sapiens
  misc_RNA (1)...(19): siRNA sense strand
uaacucacccugcaaagca

SEQ ID NO: 2054124 - RNA, 19 nt, Homo sapiens
  misc_RNA (1)...(19): siRNA sense strand
cccggagccucgaggaaua

SEQ ID NO: 2054125 - RNA, 19 nt, Homo sapiens
  misc_RNA (1)...(19): siRNA sense strand
gaaggagauguuugaguuc

SEQ ID NO: 2054126 - RNA, 19 nt, Homo sapiens
  misc_RNA (1)...(19): siRNA sense strand
ucaauggcuuugcaacaca

SEQ ID NO: 2054127 - RNA, 19 nt, Homo sapiens
  misc_RNA (1)...(19): siRNA sense strand
gccgugaaagugcuaagua

SEQ ID NO: 2054128 - RNA, 19 nt, Homo sapiens
  misc_RNA (1)...(19): siRNA sense strand
ccagugcucaccugccuaa

SEQ ID NO: 2054129 - RNA, 19 nt, Homo sapiens
  misc_RNA (1)...(19): siRNA sense strand
gaagucaauggcuuugcaa

SEQ ID NO: 2054130 - RNA, 19 nt, Homo sapiens
  misc_RNA (1)...(19): siRNA sense strand
gguaagugccacauugaca

SEQ ID NO: 2054131 - RNA, 19 nt, Homo sapiens
  misc_RNA (1)...(19): siRNA sense strand
gcagccaggccgugaaagu

SEQ ID NO: 2054132 - RNA, 19 nt, Homo sapiens
  misc_RNA (1)...(19): siRNA sense strand
guaagugccacauugacau

SEQ ID NO: 2054133 - RNA, 19 nt, Homo sapiens
  misc_RNA (1)...(19): siRNA sense strand
gccaagcucccaggacuga

SEQ ID NO: 2054134 - RNA, 19 nt, Homo sapiens
  misc_RNA (1)...(19): siRNA sense strand
cgaggaauaccgagugaca

SEQ ID NO: 2054135 - RNA, 19 nt, Homo sapiens
  misc_RNA (1)...(19): siRNA sense strand
aaggagauguuugaguuca

SEQ ID NO: 2054136 - RNA, 19 nt, Homo sapiens
  misc_RNA (1)...(19): siRNA sense strand
caaggugucccugguguca

SEQ ID NO: 2054137 - RNA, 19 nt, Homo sapiens
  misc_RNA (1)...(19): siRNA sense strand
gagcuauggccaggacuga

SEQ ID NO: 2054138 - RNA, 19 nt, Homo sapiens
  misc_RNA (1)...(19): siRNA sense strand
agaagagacugugaauugc

SEQ ID NO: 2054139 - RNA, 19 nt, Homo sapiens
  misc_RNA (1)...(19): siRNA sense strand
cgcagaaggagauguuuga

SEQ ID NO: 2054140 - RNA, 19 nt, Homo sapiens
  misc_RNA (1)...(19): siRNA sense strand
uaagugccacauugacaug

SEQ ID NO: 2054141 - RNA, 19 nt, Homo sapiens
  misc_RNA (1)...(19): siRNA sense strand
acagcuggcuccaagaacu

SEQ ID NO: 2054142 - RNA, 19 nt, Homo sapiens
  misc_RNA (1)...(19): siRNA sense strand
gucaauggcuuugcaacac

SEQ ID NO: 2054143 - RNA, 19 nt, Homo sapiens
  misc_RNA (1)...(19): siRNA sense strand
gcucaccugccuaagaauc

SEQ ID NO: 2054144 - RNA, 19 nt, Homo sapiens
  misc_RNA (1)...(19): siRNA sense strand
ccaggaagagaucaaacau

SEQ ID NO: 2054145 - RNA, 19 nt, Homo sapiens
  misc_RNA (1)...(19): siRNA sense strand
caggaagagaucaaacaug

SEQ ID NO: 2054146 - RNA, 19 nt, Homo sapiens
  misc_RNA (1)...(19): siRNA sense strand
ugaaagugcuaaguaaccu

SEQ ID NO: 2054147 - RNA, 19 nt, Homo sapiens
  misc_RNA (1)...(19): siRNA sense strand
gccaaggcccaagugguaa

SEQ ID NO: 2054148 - RNA, 19 nt, Homo sapiens
  misc_RNA (1)...(19): siRNA sense strand
gcuguggaccagagugaug

SEQ ID NO: 2054149 - RNA, 19 nt, Homo sapiens
  misc_RNA (1)...(19): siRNA sense strand
auacagcuggcuccaagaa

SEQ ID NO: 2054150 - RNA, 19 nt, Homo sapiens
  misc_RNA (1)...(19): siRNA sense strand
gagaauaacucaaguauca

SEQ ID NO: 2054151 - RNA, 19 nt, Homo sapiens
  misc_RNA (1)...(19): siRNA sense strand
gaacagaaguugugagaga

SEQ ID NO: 2054152 - RNA, 19 nt, Homo sapiens
  misc_RNA (1)...(19): siRNA sense strand
gcauacaccugaagcuuua

SEQ ID NO: 2054153 - RNA, 19 nt, Homo sapiens
  misc_RNA (1)...(19): siRNA sense strand
gaagagaucacuuuaacaa

SEQ ID NO: 2054154 - RNA, 19 nt, Homo sapiens
  misc_RNA (1)...(19): siRNA sense strand
ccacugacaucuuugauau

SEQ ID NO: 2054155 - RNA, 19 nt, Homo sapiens
  misc_RNA (1)...(19): siRNA sense strand
caaaggaaguucaacacaa

SEQ ID NO: 2054156 - RNA, 19 nt, Homo sapiens
  misc_RNA (1)...(19): siRNA sense strand
gagaucacuuuaacaauug

SEQ ID NO: 2054157 - RNA, 19 nt, Homo sapiens
  misc_RNA (1)...(19): siRNA sense strand
gcaaagauucugagucaaa

SEQ ID NO: 2054158 - RNA, 19 nt, Homo sapiens
  misc_RNA (1)...(19): siRNA sense strand
gagagaugcuguaaggaaa

SEQ ID NO: 2054159 - RNA, 19 nt, Homo sapiens
  misc_RNA (1)...(19): siRNA sense strand
caagacauaucaagaaauc

SEQ ID NO: 2054160 - RNA, 19 nt, Homo sapiens
  misc_RNA (1)...(19): siRNA sense strand
gcagauuucccuccagaua

SEQ ID NO: 2054161 - RNA, 19 nt, Homo sapiens
  misc_RNA (1)...(19): siRNA sense strand
acaagaggauauucacuuu

SEQ ID NO: 2054162 - RNA, 19 nt, Homo sapiens
  misc_RNA (1)...(19): siRNA sense strand
aaaguggaguugcaaauau

SEQ ID NO: 2054163 - RNA, 19 nt, Homo sapiens
  misc_RNA (1)...(19): siRNA sense strand
caggaaauuucuagaauca

SEQ ID NO: 2054164 - RNA, 19 nt, Homo sapiens
  misc_RNA (1)...(19): siRNA sense strand
gaggauauucacuuucaua

SEQ ID NO: 2054165 - RNA, 19 nt, Homo sapiens
  misc_RNA (1)...(19): siRNA sense strand
aaaggaaguucaacacaau

SEQ ID NO: 2054166 - RNA, 19 nt, Homo sapiens
  misc_RNA (1)...(19): siRNA sense strand
uaaaguggaguugcaaaua

SEQ ID NO: 2054167 - RNA, 19 nt, Homo sapiens
  misc_RNA (1)...(19): siRNA sense strand
gaaaaccaacugagaauaa

SEQ ID NO: 2054168 - RNA, 19 nt, Homo sapiens
  misc_RNA (1)...(19): siRNA sense strand
gacaaaacauggaugcaua

SEQ ID NO: 2054169 - RNA, 19 nt, Homo sapiens
  misc_RNA (1)...(19): siRNA sense strand
caaagauucugagucaaau

SEQ ID NO: 2054170 - RNA, 19 nt, Homo sapiens
  misc_RNA (1)...(19): siRNA sense strand
gcccuccacugacaucuuu

SEQ ID NO: 2054171 - RNA, 19 nt, Homo sapiens
  misc_RNA (1)...(19): siRNA sense strand
cuccagauauucaaucaaa

SEQ ID NO: 2054172 - RNA, 19 nt, Homo sapiens
  misc_RNA (1)...(19): siRNA sense strand
aagaggauauucacuuuca

SEQ ID NO: 2054173 - RNA, 19 nt, Homo sapiens
  misc_RNA (1)...(19): siRNA sense strand
ggaccuguuuggagcagaa

SEQ ID NO: 2054174 - RNA, 19 nt, Homo sapiens
  misc_RNA (1)...(19): siRNA sense strand
gacaagaggauauucacuu

SEQ ID NO: 2054175 - RNA, 19 nt, Homo sapiens
  misc_RNA (1)...(19): siRNA sense strand
cuaagucgcccuccacuga

SEQ ID NO: 2054176 - RNA, 19 nt, Homo sapiens
  misc_RNA (1)...(19): siRNA sense strand
aaagugugcugaagagauc

SEQ ID NO: 2054177 - RNA, 19 nt, Homo sapiens
  misc_RNA (1)...(19): siRNA sense strand
agauuucccuccagauauu

SEQ ID NO: 2054178 - RNA, 19 nt, Homo sapiens
  misc_RNA (1)...(19): siRNA sense strand
augcaaagauucugaguca

SEQ ID NO: 2054179 - RNA, 19 nt, Homo sapiens
  misc_RNA (1)...(19): siRNA sense strand
ugcaagacauaucaagaaa

SEQ ID NO: 2054180 - RNA, 19 nt, Homo sapiens
  misc_RNA (1)...(19): siRNA sense strand
acugacaucuuugauauga

SEQ ID NO: 2054181 - RNA, 19 nt, Homo sapiens
  misc_RNA (1)...(19): siRNA sense strand
ugagagaugcuguaaggaa

SEQ ID NO: 2054182 - RNA, 19 nt, Homo sapiens
  misc_RNA (1)...(19): siRNA sense strand
gcugaagagaucacuuuaa

SEQ ID NO: 2054183 - RNA, 19 nt, Homo sapiens
  misc_RNA (1)...(19): siRNA sense strand
cacaauugccagcuucaua

SEQ ID NO: 2054184 - RNA, 19 nt, Homo sapiens
  misc_RNA (1)...(19): siRNA sense strand
caaaguuucuuggcaguac

SEQ ID NO: 2054185 - RNA, 19 nt, Homo sapiens
  misc_RNA (1)...(19): siRNA sense strand
cugaagagaucacuuuaac

SEQ ID NO: 2054186 - RNA, 19 nt, Homo sapiens
  misc_RNA (1)...(19): siRNA sense strand
aaacaaaggaaguucaaca

SEQ ID NO: 2054187 - RNA, 19 nt, Homo sapiens
  misc_RNA (1)...(19): siRNA sense strand
aaaugggacuaacucuuga

SEQ ID NO: 2054188 - RNA, 19 nt, Homo sapiens
  misc_RNA (1)...(19): siRNA sense strand
ugugagagaugcuguaagg

SEQ ID NO: 2054189 - RNA, 19 nt, Homo sapiens
  misc_RNA (1)...(19): siRNA sense strand
caauaucacaccagucuuc

SEQ ID NO: 2054190 - RNA, 19 nt, Homo sapiens
  misc_RNA (1)...(19): siRNA sense strand
gugcugaagagaucacuuu

SEQ ID NO: 2054191 - RNA, 19 nt, Homo sapiens
  misc_RNA (1)...(19): siRNA sense strand
caccugaagcuuuaucaaa

SEQ ID NO: 2054192 - RNA, 19 nt, Homo sapiens
  misc_RNA (1)...(19): siRNA sense strand
ggaguugcaaauaucaauu

SEQ ID NO: 2054193 - RNA, 19 nt, Homo sapiens
  misc_RNA (1)...(19): siRNA sense strand
gcaagacauaucaagaaau

SEQ ID NO: 2054194 - RNA, 19 nt, Homo sapiens
  misc_RNA (1)...(19): siRNA sense strand
gcaaaguuucuuggcagua

SEQ ID NO: 2054195 - RNA, 19 nt, Homo sapiens
  misc_RNA (1)...(19): siRNA sense strand
acaggaaauuucuagaauc

SEQ ID NO: 2054196 - RNA, 19 nt, Homo sapiens
  misc_RNA (1)...(19): siRNA sense strand
gcaggcaguaugacaccua

SEQ ID NO: 2054197 - RNA, 19 nt, Homo sapiens
  misc_RNA (1)...(19): siRNA sense strand
caggcaguaugacaccuaa

SEQ ID NO: 2054198 - RNA, 19 nt, Homo sapiens
  misc_RNA (1)...(19): siRNA sense strand
gaugcuguaaggaaacuaa

SEQ ID NO: 2054199 - RNA, 19 nt, Homo sapiens
  misc_RNA (1)...(19): siRNA sense strand
gcauacaggaaauuucuag

SEQ ID NO: 2054200 - RNA, 19 nt, Homo sapiens
  misc_RNA (1)...(19): siRNA sense strand
ucaacacaauugccagcuu

SEQ ID NO: 2054201 - RNA, 19 nt, Homo sapiens
  misc_RNA (1)...(19): siRNA sense strand
ccagaaaauuccuaaagug

SEQ ID NO: 2054202 - RNA, 19 nt, Homo sapiens
  misc_RNA (1)...(19): siRNA sense strand
ccaccuccaguaccuagua

SEQ ID NO: 2054203 - RNA, 19 nt, Homo sapiens
  misc_RNA (1)...(19): siRNA sense strand
aaacugacaagaggauauu

SEQ ID NO: 2054204 - RNA, 19 nt, Homo sapiens
  misc_RNA (1)...(19): siRNA sense strand
uaacaauuggccaagcauu

SEQ ID NO: 2054205 - RNA, 19 nt, Homo sapiens
  misc_RNA (1)...(19): siRNA sense strand
cagauuucccuccagauau

SEQ ID NO: 2054206 - RNA, 19 nt, Homo sapiens
  misc_RNA (1)...(19): siRNA sense strand
cauuugaccuggcauacag

SEQ ID NO: 2054207 - RNA, 19 nt, Homo sapiens
  misc_RNA (1)...(19): siRNA sense strand
cuaaaguuugcaagacaua

SEQ ID NO: 2054208 - RNA, 19 nt, Homo sapiens
  misc_RNA (1)...(19): siRNA sense strand
gauucugagucaaauaaac

SEQ ID NO: 2054209 - RNA, 19 nt, Homo sapiens
  misc_RNA (1)...(19): siRNA sense strand
ucccuauaaugcaaaguuu

SEQ ID NO: 2054210 - RNA, 19 nt, Homo sapiens
  misc_RNA (1)...(19): siRNA sense strand
aauccaagacuuagaaaca

SEQ ID NO: 2054211 - RNA, 19 nt, Homo sapiens
  misc_RNA (1)...(19): siRNA sense strand
ggaaaaccaacugagaaua

SEQ ID NO: 2054212 - RNA, 19 nt, Homo sapiens
  misc_RNA (1)...(19): siRNA sense strand
ggaagaaagacaaaacaug

SEQ ID NO: 2054213 - RNA, 19 nt, Homo sapiens
  misc_RNA (1)...(19): siRNA sense strand
aagaauccaagacuuagaa

SEQ ID NO: 2054214 - RNA, 19 nt, Homo sapiens
  misc_RNA (1)...(19): siRNA sense strand
caauuggccaagcauuuga

SEQ ID NO: 2054215 - RNA, 19 nt, Homo sapiens
  misc_RNA (1)...(19): siRNA sense strand
acaauuggccaagcauuug

SEQ ID NO: 2054216 - RNA, 19 nt, Homo sapiens
  misc_RNA (1)...(19): siRNA sense strand
agacauaucaagaaaucug

SEQ ID NO: 2054217 - RNA, 19 nt, Homo sapiens
  misc_RNA (1)...(19): siRNA sense strand
gcuguaaggaaacuaaagu

SEQ ID NO: 2054218 - RNA, 19 nt, Homo sapiens
  misc_RNA (1)...(19): siRNA sense strand
ucuugaaggcacaguauuu

SEQ ID NO: 2054219 - RNA, 19 nt, Homo sapiens
  misc_RNA (1)...(19): siRNA sense strand
aacaauuggccaagcauuu

SEQ ID NO: 2054220 - RNA, 19 nt, Homo sapiens
  misc_RNA (1)...(19): siRNA sense strand
gacauaucaagaaaucuga

SEQ ID NO: 2054221 - RNA, 19 nt, Homo sapiens
  misc_RNA (1)...(19): siRNA sense strand
gagaugcuguaaggaaacu

SEQ ID NO: 2054222 - RNA, 19 nt, Homo sapiens
  misc_RNA (1)...(19): siRNA sense strand
uccaagacuuagaaacaga

SEQ ID NO: 2054223 - RNA, 19 nt, Homo sapiens
  misc_RNA (1)...(19): siRNA sense strand
cauuugugcuauguauuug

SEQ ID NO: 2054224 - RNA, 19 nt, Homo sapiens
  misc_RNA (1)...(19): siRNA sense strand
uugcaagacauaucaagaa

SEQ ID NO: 2054225 - RNA, 19 nt, Homo sapiens
  misc_RNA (1)...(19): siRNA sense strand
acaauugccagcuucauag

SEQ ID NO: 2054226 - RNA, 19 nt, Homo sapiens
  misc_RNA (1)...(19): siRNA sense strand
ccaagacuuagaaacagaa

SEQ ID NO: 2054227 - RNA, 19 nt, Homo sapiens
  misc_RNA (1)...(19): siRNA sense strand
caagaggauauucacuuuc

SEQ ID NO: 2054228 - RNA, 19 nt, Homo sapiens
  misc_RNA (1)...(19): siRNA sense strand
gccagaaaauuccuaaagu

SEQ ID NO: 2054229 - RNA, 19 nt, Homo sapiens
  misc_RNA (1)...(19): siRNA sense strand
cuaaaguggaguugcaaau

SEQ ID NO: 2054230 - RNA, 19 nt, Homo sapiens
  misc_RNA (1)...(19): siRNA sense strand
aaaaugggacuaacucuug

SEQ ID NO: 2054231 - RNA, 19 nt, Homo sapiens
  misc_RNA (1)...(19): siRNA sense strand
gcaguaugacaccuaaguc

SEQ ID NO: 2054232 - RNA, 19 nt, Homo sapiens
  misc_RNA (1)...(19): siRNA sense strand
cgaaaagugugcugaagag

SEQ ID NO: 2054233 - RNA, 19 nt, Homo sapiens
  misc_RNA (1)...(19): siRNA sense strand
uugccagcuucauagaaua

SEQ ID NO: 2054234 - RNA, 19 nt, Homo sapiens
  misc_RNA (1)...(19): siRNA sense strand
aaguggaguugcaaauauc

SEQ ID NO: 2054235 - RNA, 19 nt, Homo sapiens
  misc_RNA (1)...(19): siRNA sense strand
ugcauacaccugaagcuuu

SEQ ID NO: 2054236 - RNA, 19 nt, Homo sapiens
  misc_RNA (1)...(19): siRNA sense strand
uccaguaccuaguagaucu

SEQ ID NO: 2054237 - RNA, 19 nt, Homo sapiens
  misc_RNA (1)...(19): siRNA sense strand
uaucacaccagucuucgau

SEQ ID NO: 2054238 - RNA, 19 nt, Homo sapiens
  misc_RNA (1)...(19): siRNA sense strand
uagcaggaagaaagacaaa

SEQ ID NO: 2054239 - RNA, 19 nt, Homo sapiens
  misc_RNA (1)...(19): siRNA sense strand
acaaaggaaguucaacaca

SEQ ID NO: 2054240 - RNA, 19 nt, Homo sapiens
  misc_RNA (1)...(19): siRNA sense strand
gcaccuccagcaggcagua

SEQ ID NO: 2054241 - RNA, 19 nt, Homo sapiens
  misc_RNA (1)...(19): siRNA sense strand
aaacagaucgcaggguuac

SEQ ID NO: 2054242 - RNA, 19 nt, Homo sapiens
  misc_RNA (1)...(19): siRNA sense strand
gcauuugaccuggcauaca

SEQ ID NO: 2054243 - RNA, 19 nt, Homo sapiens
  misc_RNA (1)...(19): siRNA sense strand
caauugccagcuucauaga

SEQ ID NO: 2054244 - RNA, 19 nt, Homo sapiens
  misc_RNA (1)...(19): siRNA sense strand
acagaucgcaggguuacaa

SEQ ID NO: 2054245 - RNA, 19 nt, Homo sapiens
  misc_RNA (1)...(19): siRNA sense strand
ggcaguaugacaccuaagu

SEQ ID NO: 2054246 - RNA, 19 nt, Homo sapiens
  misc_RNA (1)...(19): siRNA sense strand
caagacuuagaaacagaaa

SEQ ID NO: 2054247 - RNA, 19 nt, Homo sapiens
  misc_RNA (1)...(19): siRNA sense strand
aaagaauccaagacuuaga

SEQ ID NO: 2054248 - RNA, 19 nt, Homo sapiens
  misc_RNA (1)...(19): siRNA sense strand
gauuccauuuucuccaaua

SEQ ID NO: 2054249 - RNA, 19 nt, Homo sapiens
  misc_RNA (1)...(19): siRNA sense strand
ccaaagaccucaucuccaa

SEQ ID NO: 2054250 - RNA, 19 nt, Homo sapiens
  misc_RNA (1)...(19): siRNA sense strand
gaagaaaccagccgaacuu

SEQ ID NO: 2054251 - RNA, 19 nt, Homo sapiens
  misc_RNA (1)...(19): siRNA sense strand
ggacuggucagaaccguua

SEQ ID NO: 2054252 - RNA, 19 nt, Homo sapiens
  misc_RNA (1)...(19): siRNA sense strand
ccacggagacucugacuuu

SEQ ID NO: 2054253 - RNA, 19 nt, Homo sapiens
  misc_RNA (1)...(19): siRNA sense strand
cagccgaacuucaggguuu

SEQ ID NO: 2054254 - RNA, 19 nt, Homo sapiens
  misc_RNA (1)...(19): siRNA sense strand
gaaccguuacugugaauga

SEQ ID NO: 2054255 - RNA, 19 nt, Homo sapiens
  misc_RNA (1)...(19): siRNA sense strand
gcuucuaccugguguuuga

SEQ ID NO: 2054256 - RNA, 19 nt, Homo sapiens
  misc_RNA (1)...(19): siRNA sense strand
ggaguacgccgucaagauc

SEQ ID NO: 2054257 - RNA, 19 nt, Homo sapiens
  misc_RNA (1)...(19): siRNA sense strand
gccuuggacuuucugcaua

SEQ ID NO: 2054258 - RNA, 19 nt, Homo sapiens
  misc_RNA (1)...(19): siRNA sense strand
ucagaaccguuacugugaa

SEQ ID NO: 2054259 - RNA, 19 nt, Homo sapiens
  misc_RNA (1)...(19): siRNA sense strand
gaagcagccaggccacauu

SEQ ID NO: 2054260 - RNA, 19 nt, Homo sapiens
  misc_RNA (1)...(19): siRNA sense strand
uccuagagcugauugaguu

SEQ ID NO: 2054261 - RNA, 19 nt, Homo sapiens
  misc_RNA (1)...(19): siRNA sense strand
gaaaccagccgaacuucag

SEQ ID NO: 2054262 - RNA, 19 nt, Homo sapiens
  misc_RNA (1)...(19): siRNA sense strand
ggccagcgccuuggacuuu

SEQ ID NO: 2054263 - RNA, 19 nt, Homo sapiens
  misc_RNA (1)...(19): siRNA sense strand
cgaggaggcuagcaucuac

SEQ ID NO: 2054264 - RNA, 19 nt, Homo sapiens
  misc_RNA (1)...(19): siRNA sense strand
ucuaccagcugcaggaaga

SEQ ID NO: 2054265 - RNA, 19 nt, Homo sapiens
  misc_RNA (1)...(19): siRNA sense strand
gagccugggcgucaucuug

SEQ ID NO: 2054266 - RNA, 19 nt, Homo sapiens
  misc_RNA (1)...(19): siRNA sense strand
ccuuggacuuucugcauaa

SEQ ID NO: 2054267 - RNA, 19 nt, Homo sapiens
  misc_RNA (1)...(19): siRNA sense strand
gcagcggcaucaaacucaa

SEQ ID NO: 2054268 - RNA, 19 nt, Homo sapiens
  misc_RNA (1)...(19): siRNA sense strand
ggacuuucugcauaacaaa

SEQ ID NO: 2054269 - RNA, 19 nt, Homo sapiens
  misc_RNA (1)...(19): siRNA sense strand
gcgaggaggcuagcaucua

SEQ ID NO: 2054270 - RNA, 19 nt, Homo sapiens
  misc_RNA (1)...(19): siRNA sense strand
gaacguccuagagcugauu

SEQ ID NO: 2054271 - RNA, 19 nt, Homo sapiens
  misc_RNA (1)...(19): siRNA sense strand
gucagaaccguuacuguga

SEQ ID NO: 2054272 - RNA, 19 nt, Homo sapiens
  misc_RNA (1)...(19): siRNA sense strand
cggaaaacauccucuguga

SEQ ID NO: 2054273 - RNA, 19 nt, Homo sapiens
  misc_RNA (1)...(19): siRNA sense strand
ggaggaggaccgcuucuac

SEQ ID NO: 2054274 - RNA, 19 nt, Homo sapiens
  misc_RNA (1)...(19): siRNA sense strand
cagaaccguuacugugaau

SEQ ID NO: 2054275 - RNA, 19 nt, Homo sapiens
  misc_RNA (1)...(19): siRNA sense strand
cagcuucucgggcagguuu

SEQ ID NO: 2054276 - RNA, 19 nt, Homo sapiens
  misc_RNA (1)...(19): siRNA sense strand
ggaacguccuagagcugau

SEQ ID NO: 2054277 - RNA, 19 nt, Homo sapiens
  misc_RNA (1)...(19): siRNA sense strand
ggagggcaaguacgaguuc

SEQ ID NO: 2054278 - RNA, 19 nt, Homo sapiens
  misc_RNA (1)...(19): siRNA sense strand
gccugggcgucaucuugua

SEQ ID NO: 2054279 - RNA, 19 nt, Homo sapiens
  misc_RNA (1)...(19): siRNA sense strand
ucagggagguggagaugcu

SEQ ID NO: 2054280 - RNA, 19 nt, Homo sapiens
  misc_RNA (1)...(19): siRNA sense strand
caucuuguauauccuacuc

SEQ ID NO: 2054281 - RNA, 19 nt, Homo sapiens
  misc_RNA (1)...(19): siRNA sense strand
ggcgucaucuuguauaucc

SEQ ID NO: 2054282 - RNA, 19 nt, Homo sapiens
  misc_RNA (1)...(19): siRNA sense strand
gaggugggacagucacuuc

SEQ ID NO: 2054283 - RNA, 19 nt, Homo sapiens
  misc_RNA (1)...(19): siRNA sense strand
uggacuuucugcauaacaa

SEQ ID NO: 2054284 - RNA, 19 nt, Homo sapiens
  misc_RNA (1)...(19): siRNA sense strand
uagagcugauugaguucuu

SEQ ID NO: 2054285 - RNA, 19 nt, Homo sapiens
  misc_RNA (1)...(19): siRNA sense strand
cacggagacucugacuuug

SEQ ID NO: 2054286 - RNA, 19 nt, Homo sapiens
  misc_RNA (1)...(19): siRNA sense strand
gaguacgccgucaagauca

SEQ ID NO: 2054287 - RNA, 19 nt, Homo sapiens
  misc_RNA (1)...(19): siRNA sense strand
gcauccaggagggcaagua

SEQ ID NO: 2054288 - RNA, 19 nt, Homo sapiens
  misc_RNA (1)...(19): siRNA sense strand
cacauucggagcaggguuu

SEQ ID NO: 2054289 - RNA, 19 nt, Homo sapiens
  misc_RNA (1)...(19): siRNA sense strand
gggagguggagaugcugua

SEQ ID NO: 2054290 - RNA, 19 nt, Homo sapiens
  misc_RNA (1)...(19): siRNA sense strand
cgucaucuuguauauccua

SEQ ID NO: 2054291 - RNA, 19 nt, Homo sapiens
  misc_RNA (1)...(19): siRNA sense strand
gggaaaagcuucaaucaua

SEQ ID NO: 2054292 - RNA, 19 nt, Homo sapiens
  misc_RNA (1)...(19): siRNA sense strand
ugaaaguucuuaccucauu

SEQ ID NO: 2054293 - RNA, 19 nt, Homo sapiens
  misc_RNA (1)...(19): siRNA sense strand
gaaaaggaacgacuaaaua

SEQ ID NO: 2054294 - RNA, 19 nt, Homo sapiens
  misc_RNA (1)...(19): siRNA sense strand
gaaaguucuuaccucauuu

SEQ ID NO: 2054295 - RNA, 19 nt, Homo sapiens
  misc_RNA (1)...(19): siRNA sense strand
gggagaagauauuuaagug

SEQ ID NO: 2054296 - RNA, 19 nt, Homo sapiens
  misc_RNA (1)...(19): siRNA sense strand
guagacaucaguauuauug

SEQ ID NO: 2054297 - RNA, 19 nt, Homo sapiens
  misc_RNA (1)...(19): siRNA sense strand
caauaaacaugagcgaauu

SEQ ID NO: 2054298 - RNA, 19 nt, Homo sapiens
  misc_RNA (1)...(19): siRNA sense strand
ggaaaagcuucaaucauaa

SEQ ID NO: 2054299 - RNA, 19 nt, Homo sapiens
  misc_RNA (1)...(19): siRNA sense strand
ugagaaaucuguuaguuac

SEQ ID NO: 2054300 - RNA, 19 nt, Homo sapiens
  misc_RNA (1)...(19): siRNA sense strand
acaaggagaugguacacuu

SEQ ID NO: 2054301 - RNA, 19 nt, Homo sapiens
  misc_RNA (1)...(19): siRNA sense strand
gaccuugguuauuaugaaa

SEQ ID NO: 2054302 - RNA, 19 nt, Homo sapiens
  misc_RNA (1)...(19): siRNA sense strand
gagcuuggauccuacucaa

SEQ ID NO: 2054303 - RNA, 19 nt, Homo sapiens
  misc_RNA (1)...(19): siRNA sense strand
caacaacucacgucagaga

SEQ ID NO: 2054304 - RNA, 19 nt, Homo sapiens
  misc_RNA (1)...(19): siRNA sense strand
caugaaggaauccauauaa

SEQ ID NO: 2054305 - RNA, 19 nt, Homo sapiens
  misc_RNA (1)...(19): siRNA sense strand
ggucggcugucaaacugua

SEQ ID NO: 2054306 - RNA, 19 nt, Homo sapiens
  misc_RNA (1)...(19): siRNA sense strand
gaaugauacuccucuagag

SEQ ID NO: 2054307 - RNA, 19 nt, Homo sapiens
  misc_RNA (1)...(19): siRNA sense strand
gcucaagccuucagaacag

SEQ ID NO: 2054308 - RNA, 19 nt, Homo sapiens
  misc_RNA (1)...(19): siRNA sense strand
gagggaaccuguagaaaau

SEQ ID NO: 2054309 - RNA, 19 nt, Homo sapiens
  misc_RNA (1)...(19): siRNA sense strand
gagaaaccuuauuccuguu

SEQ ID NO: 2054310 - RNA, 19 nt, Homo sapiens
  misc_RNA (1)...(19): siRNA sense strand
gaggaacucucaaaauaug

SEQ ID NO: 2054311 - RNA, 19 nt, Homo sapiens
  misc_RNA (1)...(19): siRNA sense strand
ugaaagaugugagcucaag

SEQ ID NO: 2054312 - RNA, 19 nt, Homo sapiens
  misc_RNA (1)...(19): siRNA sense strand
cagugucucuguauuugaa

SEQ ID NO: 2054313 - RNA, 19 nt, Homo sapiens
  misc_RNA (1)...(19): siRNA sense strand
cgucagagaaggaagauga

SEQ ID NO: 2054314 - RNA, 19 nt, Homo sapiens
  misc_RNA (1)...(19): siRNA sense strand
gagaaaagucuucagauga

SEQ ID NO: 2054315 - RNA, 19 nt, Homo sapiens
  misc_RNA (1)...(19): siRNA sense strand
ugugugagcuuggauccua

SEQ ID NO: 2054316 - RNA, 19 nt, Homo sapiens
  misc_RNA (1)...(19): siRNA sense strand
cgaaaucggaggacaagga

SEQ ID NO: 2054317 - RNA, 19 nt, Homo sapiens
  misc_RNA (1)...(19): siRNA sense strand
ucaauaaacaugagcgaau

SEQ ID NO: 2054318 - RNA, 19 nt, Homo sapiens
  misc_RNA (1)...(19): siRNA sense strand
ggagaagauauuuaagugu

SEQ ID NO: 2054319 - RNA, 19 nt, Homo sapiens
  misc_RNA (1)...(19): siRNA sense strand
agaccuugguuauuaugaa

SEQ ID NO: 2054320 - RNA, 19 nt, Homo sapiens
  misc_RNA (1)...(19): siRNA sense strand
gaaugaggaguuugugcuu

SEQ ID NO: 2054321 - RNA, 19 nt, Homo sapiens
  misc_RNA (1)...(19): siRNA sense strand
ugagaaugauacuccucua

SEQ ID NO: 2054322 - RNA, 19 nt, Homo sapiens
  misc_RNA (1)...(19): siRNA sense strand
gaaaucuguuaguuaccau

SEQ ID NO: 2054323 - RNA, 19 nt, Homo sapiens
  misc_RNA (1)...(19): siRNA sense strand
ggaaaaggaacgacuaaau

SEQ ID NO: 2054324 - RNA, 19 nt, Homo sapiens
  misc_RNA (1)...(19): siRNA sense strand
cccaaagaaugaggaguuu

SEQ ID NO: 2054325 - RNA, 19 nt, Homo sapiens
  misc_RNA (1)...(19): siRNA sense strand
ccauauaagggagaagaua

SEQ ID NO: 2054326 - RNA, 19 nt, Homo sapiens
  misc_RNA (1)...(19): siRNA sense strand
uuauugcccuuacucgaaa

SEQ ID NO: 2054327 - RNA, 19 nt, Homo sapiens
  misc_RNA (1)...(19): siRNA sense strand
gcacuuccucaccuucuug

SEQ ID NO: 2054328 - RNA, 19 nt, Homo sapiens
  misc_RNA (1)...(19): siRNA sense strand
ucaugaaggaauccauaua

SEQ ID NO: 2054329 - RNA, 19 nt, Homo sapiens
  misc_RNA (1)...(19): siRNA sense strand
ugagagggaaccuguagaa

SEQ ID NO: 2054330 - RNA, 19 nt, Homo sapiens
  misc_RNA (1)...(19): siRNA sense strand
cucaacaacucacgucaga

SEQ ID NO: 2054331 - RNA, 19 nt, Homo sapiens
  misc_RNA (1)...(19): siRNA sense strand
auacaggagagaaaccuua

SEQ ID NO: 2054332 - RNA, 19 nt, Homo sapiens
  misc_RNA (1)...(19): siRNA sense strand
caggagagaaaccuuauuc

SEQ ID NO: 2054333 - RNA, 19 nt, Homo sapiens
  misc_RNA (1)...(19): siRNA sense strand
caagaccuacuucgagaug

SEQ ID NO: 2054334 - RNA, 19 nt, Homo sapiens
  misc_RNA (1)...(19): siRNA sense strand
guaagacccgaaagcagaa

SEQ ID NO: 2054335 - RNA, 19 nt, Homo sapiens
  misc_RNA (1)...(19): siRNA sense strand
cgacuaaauacauccauuc

SEQ ID NO: 2054336 - RNA, 19 nt, Homo sapiens
  misc_RNA (1)...(19): siRNA sense strand
gagagggaaccuguagaaa

SEQ ID NO: 2054337 - RNA, 19 nt, Homo sapiens
  misc_RNA (1)...(19): siRNA sense strand
gaaggugaagauccugaga

SEQ ID NO: 2054338 - RNA, 19 nt, Homo sapiens
  misc_RNA (1)...(19): siRNA sense strand
ccaaaggaguccaaaagga

SEQ ID NO: 2054339 - RNA, 19 nt, Homo sapiens
  misc_RNA (1)...(19): siRNA sense strand
agaaugauacuccucuaga

SEQ ID NO: 2054340 - RNA, 19 nt, Homo sapiens
  misc_RNA (1)...(19): siRNA sense strand
caagcugggccaagaccua

SEQ ID NO: 2054341 - RNA, 19 nt, Homo sapiens
  misc_RNA (1)...(19): siRNA sense strand
gaauccauauaagggagaa

SEQ ID NO: 2054342 - RNA, 19 nt, Homo sapiens
  misc_RNA (1)...(19): siRNA sense strand
gaaaccuuauuccuguucu

SEQ ID NO: 2054343 - RNA, 19 nt, Homo sapiens
  misc_RNA (1)...(19): siRNA sense strand
caauggcaguaauccugaa

SEQ ID NO: 2054344 - RNA, 19 nt, Homo sapiens
  misc_RNA (1)...(19): siRNA sense strand
cgucaugaaggaauccaua

SEQ ID NO: 2054345 - RNA, 19 nt, Homo sapiens
  misc_RNA (1)...(19): siRNA sense strand
augaugaaauggauucuuc

SEQ ID NO: 2054346 - RNA, 19 nt, Homo sapiens
  misc_RNA (1)...(19): siRNA sense strand
ggcagucaauggcaguaau

SEQ ID NO: 2054347 - RNA, 19 nt, Homo sapiens
  misc_RNA (1)...(19): siRNA sense strand
gauauuuaaguguccagaa

SEQ ID NO: 2054348 - RNA, 19 nt, Homo sapiens
  misc_RNA (1)...(19): siRNA sense strand
ggagagaaaccuuauuccu

SEQ ID NO: 2054349 - RNA, 19 nt, Homo sapiens
  misc_RNA (1)...(19): siRNA sense strand
gagaaugauacuccucuag

SEQ ID NO: 2054350 - RNA, 19 nt, Homo sapiens
  misc_RNA (1)...(19): siRNA sense strand
caguaauccugaaggugaa

SEQ ID NO: 2054351 - RNA, 19 nt, Homo sapiens
  misc_RNA (1)...(19): siRNA sense strand
agaaaucuguuaguuacca

SEQ ID NO: 2054352 - RNA, 19 nt, Homo sapiens
  misc_RNA (1)...(19): siRNA sense strand
aaaccuucccaaagaauga

SEQ ID NO: 2054353 - RNA, 19 nt, Homo sapiens
  misc_RNA (1)...(19): siRNA sense strand
agaaaagucuucagaugau

SEQ ID NO: 2054354 - RNA, 19 nt, Homo sapiens
  misc_RNA (1)...(19): siRNA sense strand
aaacuuccgucagaauucu

SEQ ID NO: 2054355 - RNA, 19 nt, Homo sapiens
  misc_RNA (1)...(19): siRNA sense strand
ggaggacaaggagauggua

SEQ ID NO: 2054356 - RNA, 19 nt, Homo sapiens
  misc_RNA (1)...(19): siRNA sense strand
caaaggaguccaaaaggaa

SEQ ID NO: 2054357 - RNA, 19 nt, Homo sapiens
  misc_RNA (1)...(19): siRNA sense strand
agagaaaagucuucagaug

SEQ ID NO: 2054358 - RNA, 19 nt, Homo sapiens
  misc_RNA (1)...(19): siRNA sense strand
gcuuggauccuacucaaca

SEQ ID NO: 2054359 - RNA, 19 nt, Homo sapiens
  misc_RNA (1)...(19): siRNA sense strand
gguggucuuugaggauuug

SEQ ID NO: 2054360 - RNA, 19 nt, Homo sapiens
  misc_RNA (1)...(19): siRNA sense strand
cagaugaugaugaaaugga

SEQ ID NO: 2054361 - RNA, 19 nt, Homo sapiens
  misc_RNA (1)...(19): siRNA sense strand
gaaaagucuucagaugaug

SEQ ID NO: 2054362 - RNA, 19 nt, Homo sapiens
  misc_RNA (1)...(19): siRNA sense strand
ggugaagcuucugcccaaa

SEQ ID NO: 2054363 - RNA, 19 nt, Homo sapiens
  misc_RNA (1)...(19): siRNA sense strand
gggaaccuguagaaaauga

SEQ ID NO: 2054364 - RNA, 19 nt, Homo sapiens
  misc_RNA (1)...(19): siRNA sense strand
caagaccauccaccagcua

SEQ ID NO: 2054365 - RNA, 19 nt, Homo sapiens
  misc_RNA (1)...(19): siRNA sense strand
ggagaccuugguuauuaug

SEQ ID NO: 2054366 - RNA, 19 nt, Homo sapiens
  misc_RNA (1)...(19): siRNA sense strand
ugaaggaauccauauaagg

SEQ ID NO: 2054367 - RNA, 19 nt, Homo sapiens
  misc_RNA (1)...(19): siRNA sense strand
gcagucaauggcaguaauc

SEQ ID NO: 2054368 - RNA, 19 nt, Homo sapiens
  misc_RNA (1)...(19): siRNA sense strand
caaacuguacccggcauga

SEQ ID NO: 2054369 - RNA, 19 nt, Homo sapiens
  misc_RNA (1)...(19): siRNA sense strand
gguccagcccagucagaaa

SEQ ID NO: 2054370 - RNA, 19 nt, Homo sapiens
  misc_RNA (1)...(19): siRNA sense strand
acuccaagcugggccaaga

SEQ ID NO: 2054371 - RNA, 19 nt, Homo sapiens
  misc_RNA (1)...(19): siRNA sense strand
ggagucgucaugaaggaau

SEQ ID NO: 2054372 - RNA, 19 nt, Homo sapiens
  misc_RNA (1)...(19): siRNA sense strand
auacauccauuccacaaaa

SEQ ID NO: 2054373 - RNA, 19 nt, Homo sapiens
  misc_RNA (1)...(19): siRNA sense strand
aaauacauccauuccacaa

SEQ ID NO: 2054374 - RNA, 19 nt, Homo sapiens
  misc_RNA (1)...(19): siRNA sense strand
cucagcagccucccgauaa

SEQ ID NO: 2054375 - RNA, 19 nt, Homo sapiens
  misc_RNA (1)...(19): siRNA sense strand
ggucuuugaggauuugaau

SEQ ID NO: 2054376 - RNA, 19 nt, Homo sapiens
  misc_RNA (1)...(19): siRNA sense strand
gaauucauacaggagagaa

SEQ ID NO: 2054377 - RNA, 19 nt, Homo sapiens
  misc_RNA (1)...(19): siRNA sense strand
gaacgacuaaauacaucca

SEQ ID NO: 2054378 - RNA, 19 nt, Homo sapiens
  misc_RNA (1)...(19): siRNA sense strand
aaaggaacgacuaaauaca

SEQ ID NO: 2054379 - RNA, 19 nt, Homo sapiens
  misc_RNA (1)...(19): siRNA sense strand
ucucagcagccucccgaua

SEQ ID NO: 2054380 - RNA, 19 nt, Homo sapiens
  misc_RNA (1)...(19): siRNA sense strand
ugaagcuucugcccaaagg

SEQ ID NO: 2054381 - RNA, 19 nt, Homo sapiens
  misc_RNA (1)...(19): siRNA sense strand
gauccuacucaacaacuca

SEQ ID NO: 2054382 - RNA, 19 nt, Homo sapiens
  misc_RNA (1)...(19): siRNA sense strand
ucacugccaggaagaaugu

SEQ ID NO: 2054383 - RNA, 19 nt, Homo sapiens
  misc_RNA (1)...(19): siRNA sense strand
aagaaugugugagcuugga

SEQ ID NO: 2054384 - RNA, 19 nt, Homo sapiens
  misc_RNA (1)...(19): siRNA sense strand
gacccgaaagcagaaguaa

SEQ ID NO: 2054385 - RNA, 19 nt, Homo sapiens
  misc_RNA (1)...(19): siRNA sense strand
caucggagucgucaugaag

SEQ ID NO: 2054386 - RNA, 19 nt, Homo sapiens
  misc_RNA (1)...(19): siRNA sense strand
ccuugguuauuaugaaaga

SEQ ID NO: 2054387 - RNA, 19 nt, Homo sapiens
  misc_RNA (1)...(19): siRNA sense strand
aggagaccuugguuauuau

SEQ ID NO: 2054388 - RNA, 19 nt, Homo sapiens
  misc_RNA (1)...(19): siRNA sense strand
acgacuaaauacauccauu

SEQ ID NO: 2054389 - RNA, 19 nt, Homo sapiens
  misc_RNA (1)...(19): siRNA sense strand
gaugaugaugaaauggauu

SEQ ID NO: 2054390 - RNA, 19 nt, Homo sapiens
  misc_RNA (1)...(19): siRNA sense strand
gggccaagaccuacuucga

SEQ ID NO: 2054391 - RNA, 19 nt, Homo sapiens
  misc_RNA (1)...(19): siRNA sense strand
gggaaaagcuucaaucaua

SEQ ID NO: 2054392 - RNA, 19 nt, Homo sapiens
  misc_RNA (1)...(19): siRNA sense strand
ugaaaguucuuaccucauu

SEQ ID NO: 2054393 - RNA, 19 nt, Homo sapiens
  misc_RNA (1)...(19): siRNA sense strand
gaaaaggaacgacuaaaua

SEQ ID NO: 2054394 - RNA, 19 nt, Homo sapiens
  misc_RNA (1)...(19): siRNA sense strand
gaaaguucuuaccucauuu

SEQ ID NO: 2054395 - RNA, 19 nt, Homo sapiens
  misc_RNA (1)...(19): siRNA sense strand
gggagaagauauuuaagug

SEQ ID NO: 2054396 - RNA, 19 nt, Homo sapiens
  misc_RNA (1)...(19): siRNA sense strand
guagacaucaguauuauug

SEQ ID NO: 2054397 - RNA, 19 nt, Homo sapiens
  misc_RNA (1)...(19): siRNA sense strand
caauaaacaugagcgaauu

SEQ ID NO: 2054398 - RNA, 19 nt, Homo sapiens
  misc_RNA (1)...(19): siRNA sense strand
ggaaaagcuucaaucauaa

SEQ ID NO: 2054399 - RNA, 19 nt, Homo sapiens
  misc_RNA (1)...(19): siRNA sense strand
ugagaaaucuguuaguuac

SEQ ID NO: 2054400 - RNA, 19 nt, Homo sapiens
  misc_RNA (1)...(19): siRNA sense strand
acaaggagaugguacacuu

SEQ ID NO: 2054401 - RNA, 19 nt, Homo sapiens
  misc_RNA (1)...(19): siRNA sense strand
gaccuugguuauuaugaaa

SEQ ID NO: 2054402 - RNA, 19 nt, Homo sapiens
  misc_RNA (1)...(19): siRNA sense strand
gagcuuggauccuacucaa

SEQ ID NO: 2054403 - RNA, 19 nt, Homo sapiens
  misc_RNA (1)...(19): siRNA sense strand
caacaacucacgucagaga

SEQ ID NO: 2054404 - RNA, 19 nt, Homo sapiens
  misc_RNA (1)...(19): siRNA sense strand
caugaaggaauccauauaa

SEQ ID NO: 2054405 - RNA, 19 nt, Homo sapiens
  misc_RNA (1)...(19): siRNA sense strand
ggucggcugucaaacugua

SEQ ID NO: 2054406 - RNA, 19 nt, Homo sapiens
  misc_RNA (1)...(19): siRNA sense strand
gaaugauacuccucuagag

SEQ ID NO: 2054407 - RNA, 19 nt, Homo sapiens
  misc_RNA (1)...(19): siRNA sense strand
gcucaagccuucagaacag

SEQ ID NO: 2054408 - RNA, 19 nt, Homo sapiens
  misc_RNA (1)...(19): siRNA sense strand
gagggaaccuguagaaaau

SEQ ID NO: 2054409 - RNA, 19 nt, Homo sapiens
  misc_RNA (1)...(19): siRNA sense strand
gagaaaccuuauuccuguu

SEQ ID NO: 2054410 - RNA, 19 nt, Homo sapiens
  misc_RNA (1)...(19): siRNA sense strand
gaggaacucucaaaauaug

SEQ ID NO: 2054411 - RNA, 19 nt, Homo sapiens
  misc_RNA (1)...(19): siRNA sense strand
ugaaagaugugagcucaag

SEQ ID NO: 2054412 - RNA, 19 nt, Homo sapiens
  misc_RNA (1)...(19): siRNA sense strand
cagugucucuguauuugaa

SEQ ID NO: 2054413 - RNA, 19 nt, Homo sapiens
  misc_RNA (1)...(19): siRNA sense strand
cgucagagaaggaagauga

SEQ ID NO: 2054414 - RNA, 19 nt, Homo sapiens
  misc_RNA (1)...(19): siRNA sense strand
gagaaaagucuucagauga

SEQ ID NO: 2054415 - RNA, 19 nt, Homo sapiens
  misc_RNA (1)...(19): siRNA sense strand
ugugugagcuuggauccua

SEQ ID NO: 2054416 - RNA, 19 nt, Homo sapiens
  misc_RNA (1)...(19): siRNA sense strand
cgaaaucggaggacaagga

SEQ ID NO: 2054417 - RNA, 19 nt, Homo sapiens
  misc_RNA (1)...(19): siRNA sense strand
ucaauaaacaugagcgaau

SEQ ID NO: 2054418 - RNA, 19 nt, Homo sapiens
  misc_RNA (1)...(19): siRNA sense strand
ggagaagauauuuaagugu

SEQ ID NO: 2054419 - RNA, 19 nt, Homo sapiens
  misc_RNA (1)...(19): siRNA sense strand
agaccuugguuauuaugaa

SEQ ID NO: 2054420 - RNA, 19 nt, Homo sapiens
  misc_RNA (1)...(19): siRNA sense strand
gaaugaggaguuugugcuu

SEQ ID NO: 2054421 - RNA, 19 nt, Homo sapiens
  misc_RNA (1)...(19): siRNA sense strand
ugagaaugauacuccucua

SEQ ID NO: 2054422 - RNA, 19 nt, Homo sapiens
  misc_RNA (1)...(19): siRNA sense strand
gaaaucuguuaguuaccau

SEQ ID NO: 2054423 - RNA, 19 nt, Homo sapiens
  misc_RNA (1)...(19): siRNA sense strand
ggaaaaggaacgacuaaau

SEQ ID NO: 2054424 - RNA, 19 nt, Homo sapiens
  misc_RNA (1)...(19): siRNA sense strand
cccaaagaaugaggaguuu

SEQ ID NO: 2054425 - RNA, 19 nt, Homo sapiens
  misc_RNA (1)...(19): siRNA sense strand
ccauauaagggagaagaua

SEQ ID NO: 2054426 - RNA, 19 nt, Homo sapiens
  misc_RNA (1)...(19): siRNA sense strand
uuauugcccuuacucgaaa

SEQ ID NO: 2054427 - RNA, 19 nt, Homo sapiens
  misc_RNA (1)...(19): siRNA sense strand
gcacuuccucaccuucuug

SEQ ID NO: 2054428 - RNA, 19 nt, Homo sapiens
  misc_RNA (1)...(19): siRNA sense strand
ucaugaaggaauccauaua

SEQ ID NO: 2054429 - RNA, 19 nt, Homo sapiens
  misc_RNA (1)...(19): siRNA sense strand
ugagagggaaccuguagaa

SEQ ID NO: 2054430 - RNA, 19 nt, Homo sapiens
  misc_RNA (1)...(19): siRNA sense strand
cucaacaacucacgucaga

SEQ ID NO: 2054431 - RNA, 19 nt, Homo sapiens
  misc_RNA (1)...(19): siRNA sense strand
auacaggagagaaaccuua

SEQ ID NO: 2054432 - RNA, 19 nt, Homo sapiens
  misc_RNA (1)...(19): siRNA sense strand
caggagagaaaccuuauuc

SEQ ID NO: 2054433 - RNA, 19 nt, Homo sapiens
  misc_RNA (1)...(19): siRNA sense strand
caagaccuacuucgagaug

SEQ ID NO: 2054434 - RNA, 19 nt, Homo sapiens
  misc_RNA (1)...(19): siRNA sense strand
guaagacccgaaagcagaa

SEQ ID NO: 2054435 - RNA, 19 nt, Homo sapiens
  misc_RNA (1)...(19): siRNA sense strand
cgacuaaauacauccauuc

SEQ ID NO: 2054436 - RNA, 19 nt, Homo sapiens
  misc_RNA (1)...(19): siRNA sense strand
gagagggaaccuguagaaa

SEQ ID NO: 2054437 - RNA, 19 nt, Homo sapiens
  misc_RNA (1)...(19): siRNA sense strand
gaaggugaagauccugaga

SEQ ID NO: 2054438 - RNA, 19 nt, Homo sapiens
  misc_RNA (1)...(19): siRNA sense strand
ccaaaggaguccaaaagga

SEQ ID NO: 2054439 - RNA, 19 nt, Homo sapiens
  misc_RNA (1)...(19): siRNA sense strand
agaaugauacuccucuaga

SEQ ID NO: 2054440 - RNA, 19 nt, Homo sapiens
  misc_RNA (1)...(19): siRNA sense strand
caagcugggccaagaccua

SEQ ID NO: 2054441 - RNA, 19 nt, Homo sapiens
  misc_RNA (1)...(19): siRNA sense strand
gaauccauauaagggagaa

SEQ ID NO: 2054442 - RNA, 19 nt, Homo sapiens
  misc_RNA (1)...(19): siRNA sense strand
gaaaccuuauuccuguucu

SEQ ID NO: 2054443 - RNA, 19 nt, Homo sapiens
  misc_RNA (1)...(19): siRNA sense strand
caauggcaguaauccugaa

SEQ ID NO: 2054444 - RNA, 19 nt, Homo sapiens
  misc_RNA (1)...(19): siRNA sense strand
cgucaugaaggaauccaua

SEQ ID NO: 2054445 - RNA, 19 nt, Homo sapiens
  misc_RNA (1)...(19): siRNA sense strand
augaugaaauggauucuuc

SEQ ID NO: 2054446 - RNA, 19 nt, Homo sapiens
  misc_RNA (1)...(19): siRNA sense strand
ggcagucaauggcaguaau

SEQ ID NO: 2054447 - RNA, 19 nt, Homo sapiens
  misc_RNA (1)...(19): siRNA sense strand
gauauuuaaguguccagaa

SEQ ID NO: 2054448 - RNA, 19 nt, Homo sapiens
  misc_RNA (1)...(19): siRNA sense strand
ggagagaaaccuuauuccu

SEQ ID NO: 2054449 - RNA, 19 nt, Homo sapiens
  misc_RNA (1)...(19): siRNA sense strand
gagaaugauacuccucuag

SEQ ID NO: 2054450 - RNA, 19 nt, Homo sapiens
  misc_RNA (1)...(19): siRNA sense strand
caguaauccugaaggugaa

SEQ ID NO: 2054451 - RNA, 19 nt, Homo sapiens
  misc_RNA (1)...(19): siRNA sense strand
agaaaucuguuaguuacca

SEQ ID NO: 2054452 - RNA, 19 nt, Homo sapiens
  misc_RNA (1)...(19): siRNA sense strand
aaaccuucccaaagaauga

SEQ ID NO: 2054453 - RNA, 19 nt, Homo sapiens
  misc_RNA (1)...(19): siRNA sense strand
agaaaagucuucagaugau

SEQ ID NO: 2054454 - RNA, 19 nt, Homo sapiens
  misc_RNA (1)...(19): siRNA sense strand
aaacuuccgucagaauucu

SEQ ID NO: 2054455 - RNA, 19 nt, Homo sapiens
  misc_RNA (1)...(19): siRNA sense strand
ggaggacaaggagauggua

SEQ ID NO: 2054456 - RNA, 19 nt, Homo sapiens
  misc_RNA (1)...(19): siRNA sense strand
caaaggaguccaaaaggaa

SEQ ID NO: 2054457 - RNA, 19 nt, Homo sapiens
  misc_RNA (1)...(19): siRNA sense strand
agagaaaagucuucagaug

SEQ ID NO: 2054458 - RNA, 19 nt, Homo sapiens
  misc_RNA (1)...(19): siRNA sense strand
gcuuggauccuacucaaca

SEQ ID NO: 2054459 - RNA, 19 nt, Homo sapiens
  misc_RNA (1)...(19): siRNA sense strand
gguggucuuugaggauuug

SEQ ID NO: 2054460 - RNA, 19 nt, Homo sapiens
  misc_RNA (1)...(19): siRNA sense strand
cagaugaugaugaaaugga

SEQ ID NO: 2054461 - RNA, 19 nt, Homo sapiens
  misc_RNA (1)...(19): siRNA sense strand
gaaaagucuucagaugaug

SEQ ID NO: 2054462 - RNA, 19 nt, Homo sapiens
  misc_RNA (1)...(19): siRNA sense strand
ggugaagcuucugcccaaa

SEQ ID NO: 2054463 - RNA, 19 nt, Homo sapiens
  misc_RNA (1)...(19): siRNA sense strand
gggaaccuguagaaaauga

SEQ ID NO: 2054464 - RNA, 19 nt, Homo sapiens
  misc_RNA (1)...(19): siRNA sense strand
caagaccauccaccagcua

SEQ ID NO: 2054465 - RNA, 19 nt, Homo sapiens
  misc_RNA (1)...(19): siRNA sense strand
ggagaccuugguuauuaug

SEQ ID NO: 2054466 - RNA, 19 nt, Homo sapiens
  misc_RNA (1)...(19): siRNA sense strand
ugaaggaauccauauaagg

SEQ ID NO: 2054467 - RNA, 19 nt, Homo sapiens
  misc_RNA (1)...(19): siRNA sense strand
gcagucaauggcaguaauc

SEQ ID NO: 2054468 - RNA, 19 nt, Homo sapiens
  misc_RNA (1)...(19): siRNA sense strand
caaacuguacccggcauga

SEQ ID NO: 2054469 - RNA, 19 nt, Homo sapiens
  misc_RNA (1)...(19): siRNA sense strand
gguccagcccagucagaaa

SEQ ID NO: 2054470 - RNA, 19 nt, Homo sapiens
  misc_RNA (1)...(19): siRNA sense strand
acuccaagcugggccaaga

SEQ ID NO: 2054471 - RNA, 19 nt, Homo sapiens
  misc_RNA (1)...(19): siRNA sense strand
ggagucgucaugaaggaau

SEQ ID NO: 2054472 - RNA, 19 nt, Homo sapiens
  misc_RNA (1)...(19): siRNA sense strand
auacauccauuccacaaaa

SEQ ID NO: 2054473 - RNA, 19 nt, Homo sapiens
  misc_RNA (1)...(19): siRNA sense strand
aaauacauccauuccacaa

SEQ ID NO: 2054474 - RNA, 19 nt, Homo sapiens
  misc_RNA (1)...(19): siRNA sense strand
cucagcagccucccgauaa

SEQ ID NO: 2054475 - RNA, 19 nt, Homo sapiens
  misc_RNA (1)...(19): siRNA sense strand
ggucuuugaggauuugaau

SEQ ID NO: 2054476 - RNA, 19 nt, Homo sapiens
  misc_RNA (1)...(19): siRNA sense strand
gaauucauacaggagagaa

SEQ ID NO: 2054477 - RNA, 19 nt, Homo sapiens
  misc_RNA (1)...(19): siRNA sense strand
gaacgacuaaauacaucca

SEQ ID NO: 2054478 - RNA, 19 nt, Homo sapiens
  misc_RNA (1)...(19): siRNA sense strand
aaaggaacgacuaaauaca

SEQ ID NO: 2054479 - RNA, 19 nt, Homo sapiens
  misc_RNA (1)...(19): siRNA sense strand
ucucagcagccucccgaua

SEQ ID NO: 2054480 - RNA, 19 nt, Homo sapiens
  misc_RNA (1)...(19): siRNA sense strand
ugaagcuucugcccaaagg

SEQ ID NO: 2054481 - RNA, 19 nt, Homo sapiens
  misc_RNA (1)...(19): siRNA sense strand
gauccuacucaacaacuca

SEQ ID NO: 2054482 - RNA, 19 nt, Homo sapiens
  misc_RNA (1)...(19): siRNA sense strand
ucacugccaggaagaaugu

SEQ ID NO: 2054483 - RNA, 19 nt, Homo sapiens
  misc_RNA (1)...(19): siRNA sense strand
aagaaugugugagcuugga

SEQ ID NO: 2054484 - RNA, 19 nt, Homo sapiens
  misc_RNA (1)...(19): siRNA sense strand
gacccgaaagcagaaguaa

SEQ ID NO: 2054485 - RNA, 19 nt, Homo sapiens
  misc_RNA (1)...(19): siRNA sense strand
caucggagucgucaugaag

SEQ ID NO: 2054486 - RNA, 19 nt, Homo sapiens
  misc_RNA (1)...(19): siRNA sense strand
ccuugguuauuaugaaaga

SEQ ID NO: 2054487 - RNA, 19 nt, Homo sapiens
  misc_RNA (1)...(19): siRNA sense strand
aggagaccuugguuauuau

SEQ ID NO: 2054488 - RNA, 19 nt, Homo sapiens
  misc_RNA (1)...(19): siRNA sense strand
acgacuaaauacauccauu

SEQ ID NO: 2054489 - RNA, 19 nt, Homo sapiens
  misc_RNA (1)...(19): siRNA sense strand
gaugaugaugaaauggauu

SEQ ID NO: 2054490 - RNA, 19 nt, Homo sapiens
  misc_RNA (1)...(19): siRNA sense strand
gggccaagaccuacuucga

SEQ ID NO: 2054491 - RNA, 19 nt, Homo sapiens
  misc_RNA (1)...(19): siRNA sense strand
gggaaaagcuucaaucaua

SEQ ID NO: 2054492 - RNA, 19 nt, Homo sapiens
  misc_RNA (1)...(19): siRNA sense strand
ugaaaguucuuaccucauu

SEQ ID NO: 2054493 - RNA, 19 nt, Homo sapiens
  misc_RNA (1)...(19): siRNA sense strand
gaaaaggaacgacuaaaua

SEQ ID NO: 2054494 - RNA, 19 nt, Homo sapiens
  misc_RNA (1)...(19): siRNA sense strand
gaaaguucuuaccucauuu

SEQ ID NO: 2054495 - RNA, 19 nt, Homo sapiens
  misc_RNA (1)...(19): siRNA sense strand
gggagaagauauuuaagug

SEQ ID NO: 2054496 - RNA, 19 nt, Homo sapiens
  misc_RNA (1)...(19): siRNA sense strand
guagacaucaguauuauug

SEQ ID NO: 2054497 - RNA, 19 nt, Homo sapiens
  misc_RNA (1)...(19): siRNA sense strand
caauaaacaugagcgaauu

SEQ ID NO: 2054498 - RNA, 19 nt, Homo sapiens
  misc_RNA (1)...(19): siRNA sense strand
ggaaaagcuucaaucauaa

SEQ ID NO: 2054499 - RNA, 19 nt, Homo sapiens
  misc_RNA (1)...(19): siRNA sense strand
ugagaaaucuguuaguuac

SEQ ID NO: 2054500 - RNA, 19 nt, Homo sapiens
  misc_RNA (1)...(19): siRNA sense strand
acaaggagaugguacacuu

SEQ ID NO: 2054501 - RNA, 19 nt, Homo sapiens
  misc_RNA (1)...(19): siRNA sense strand
gaccuugguuauuaugaaa

SEQ ID NO: 2054502 - RNA, 19 nt, Homo sapiens
  misc_RNA (1)...(19): siRNA sense strand
gagcuuggauccuacucaa

SEQ ID NO: 2054503 - RNA, 19 nt, Homo sapiens
  misc_RNA (1)...(19): siRNA sense strand
caacaacucacgucagaga

SEQ ID NO: 2054504 - RNA, 19 nt, Homo sapiens
  misc_RNA (1)...(19): siRNA sense strand
caugaaggaauccauauaa

SEQ ID NO: 2054505 - RNA, 19 nt, Homo sapiens
  misc_RNA (1)...(19): siRNA sense strand
ggucggcugucaaacugua

SEQ ID NO: 2054506 - RNA, 19 nt, Homo sapiens
  misc_RNA (1)...(19): siRNA sense strand
gaaugauacuccucuagag

SEQ ID NO: 2054507 - RNA, 19 nt, Homo sapiens
  misc_RNA (1)...(19): siRNA sense strand
gcucaagccuucagaacag

SEQ ID NO: 2054508 - RNA, 19 nt, Homo sapiens
  misc_RNA (1)...(19): siRNA sense strand
gagggaaccuguagaaaau

SEQ ID NO: 2054509 - RNA, 19 nt, Homo sapiens
  misc_RNA (1)...(19): siRNA sense strand
gagaaaccuuauuccuguu

SEQ ID NO: 2054510 - RNA, 19 nt, Homo sapiens
  misc_RNA (1)...(19): siRNA sense strand
gaggaacucucaaaauaug

SEQ ID NO: 2054511 - RNA, 19 nt, Homo sapiens
  misc_RNA (1)...(19): siRNA sense strand
ugaaagaugugagcucaag

SEQ ID NO: 2054512 - RNA, 19 nt, Homo sapiens
  misc_RNA (1)...(19): siRNA sense strand
cagugucucuguauuugaa

SEQ ID NO: 2054513 - RNA, 19 nt, Homo sapiens
  misc_RNA (1)...(19): siRNA sense strand
cgucagagaaggaagauga

SEQ ID NO: 2054514 - RNA, 19 nt, Homo sapiens
  misc_RNA (1)...(19): siRNA sense strand
gagaaaagucuucagauga

SEQ ID NO: 2054515 - RNA, 19 nt, Homo sapiens
  misc_RNA (1)...(19): siRNA sense strand
ugugugagcuuggauccua

SEQ ID NO: 2054516 - RNA, 19 nt, Homo sapiens
  misc_RNA (1)...(19): siRNA sense strand
cgaaaucggaggacaagga

SEQ ID NO: 2054517 - RNA, 19 nt, Homo sapiens
  misc_RNA (1)...(19): siRNA sense strand
ucaauaaacaugagcgaau

SEQ ID NO: 2054518 - RNA, 19 nt, Homo sapiens
  misc_RNA (1)...(19): siRNA sense strand
ggagaagauauuuaagugu

SEQ ID NO: 2054519 - RNA, 19 nt, Homo sapiens
  misc_RNA (1)...(19): siRNA sense strand
agaccuugguuauuaugaa

SEQ ID NO: 2054520 - RNA, 19 nt, Homo sapiens
  misc_RNA (1)...(19): siRNA sense strand
gaaugaggaguuugugcuu

SEQ ID NO: 2054521 - RNA, 19 nt, Homo sapiens
  misc_RNA (1)...(19): siRNA sense strand
ugagaaugauacuccucua

SEQ ID NO: 2054522 - RNA, 19 nt, Homo sapiens
  misc_RNA (1)...(19): siRNA sense strand
gaaaucuguuaguuaccau

SEQ ID NO: 2054523 - RNA, 19 nt, Homo sapiens
  misc_RNA (1)...(19): siRNA sense strand
ggaaaaggaacgacuaaau

SEQ ID NO: 2054524 - RNA, 19 nt, Homo sapiens
  misc_RNA (1)...(19): siRNA sense strand
cccaaagaaugaggaguuu

SEQ ID NO: 2054525 - RNA, 19 nt, Homo sapiens
  misc_RNA (1)...(19): siRNA sense strand
ccauauaagggagaagaua

SEQ ID NO: 2054526 - RNA, 19 nt, Homo sapiens
  misc_RNA (1)...(19): siRNA sense strand
uuauugcccuuacucgaaa

SEQ ID NO: 2054527 - RNA, 19 nt, Homo sapiens
  misc_RNA (1)...(19): siRNA sense strand
gcacuuccucaccuucuug

SEQ ID NO: 2054528 - RNA, 19 nt, Homo sapiens
  misc_RNA (1)...(19): siRNA sense strand
ucaugaaggaauccauaua

SEQ ID NO: 2054529 - RNA, 19 nt, Homo sapiens
  misc_RNA (1)...(19): siRNA sense strand
ugagagggaaccuguagaa

SEQ ID NO: 2054530 - RNA, 19 nt, Homo sapiens
  misc_RNA (1)...(19): siRNA sense strand
cucaacaacucacgucaga

SEQ ID NO: 2054531 - RNA, 19 nt, Homo sapiens
  misc_RNA (1)...(19): siRNA sense strand
auacaggagagaaaccuua

SEQ ID NO: 2054532 - RNA, 19 nt, Homo sapiens
  misc_RNA (1)...(19): siRNA sense strand
caggagagaaaccuuauuc

SEQ ID NO: 2054533 - RNA, 19 nt, Homo sapiens
  misc_RNA (1)...(19): siRNA sense strand
caagaccuacuucgagaug

SEQ ID NO: 2054534 - RNA, 19 nt, Homo sapiens
  misc_RNA (1)...(19): siRNA sense strand
guaagacccgaaagcagaa

SEQ ID NO: 2054535 - RNA, 19 nt, Homo sapiens
  misc_RNA (1)...(19): siRNA sense strand
cgacuaaauacauccauuc

SEQ ID NO: 2054536 - RNA, 19 nt, Homo sapiens
  misc_RNA (1)...(19): siRNA sense strand
gagagggaaccuguagaaa

SEQ ID NO: 2054537 - RNA, 19 nt, Homo sapiens
  misc_RNA (1)...(19): siRNA sense strand
gaaggugaagauccugaga

SEQ ID NO: 2054538 - RNA, 19 nt, Homo sapiens
  misc_RNA (1)...(19): siRNA sense strand
ccaaaggaguccaaaagga

SEQ ID NO: 2054539 - RNA, 19 nt, Homo sapiens
  misc_RNA (1)...(19): siRNA sense strand
agaaugauacuccucuaga

SEQ ID NO: 2054540 - RNA, 19 nt, Homo sapiens
  misc_RNA (1)...(19): siRNA sense strand
caagcugggccaagaccua

SEQ ID NO: 2054541 - RNA, 19 nt, Homo sapiens
  misc_RNA (1)...(19): siRNA sense strand
gaauccauauaagggagaa

SEQ ID NO: 2054542 - RNA, 19 nt, Homo sapiens
  misc_RNA (1)...(19): siRNA sense strand
gaaaccuuauuccuguucu

SEQ ID NO: 2054543 - RNA, 19 nt, Homo sapiens
  misc_RNA (1)...(19): siRNA sense strand
caauggcaguaauccugaa

SEQ ID NO: 2054544 - RNA, 19 nt, Homo sapiens
  misc_RNA (1)...(19): siRNA sense strand
cgucaugaaggaauccaua

SEQ ID NO: 2054545 - RNA, 19 nt, Homo sapiens
  misc_RNA (1)...(19): siRNA sense strand
augaugaaauggauucuuc

SEQ ID NO: 2054546 - RNA, 19 nt, Homo sapiens
  misc_RNA (1)...(19): siRNA sense strand
ggcagucaauggcaguaau

SEQ ID NO: 2054547 - RNA, 19 nt, Homo sapiens
  misc_RNA (1)...(19): siRNA sense strand
gauauuuaaguguccagaa

SEQ ID NO: 2054548 - RNA, 19 nt, Homo sapiens
  misc_RNA (1)...(19): siRNA sense strand
ggagagaaaccuuauuccu

SEQ ID NO: 2054549 - RNA, 19 nt, Homo sapiens
  misc_RNA (1)...(19): siRNA sense strand
gagaaugauacuccucuag

SEQ ID NO: 2054550 - RNA, 19 nt, Homo sapiens
  misc_RNA (1)...(19): siRNA sense strand
caguaauccugaaggugaa

SEQ ID NO: 2054551 - RNA, 19 nt, Homo sapiens
  misc_RNA (1)...(19): siRNA sense strand
agaaaucuguuaguuacca

SEQ ID NO: 2054552 - RNA, 19 nt, Homo sapiens
  misc_RNA (1)...(19): siRNA sense strand
aaaccuucccaaagaauga

SEQ ID NO: 2054553 - RNA, 19 nt, Homo sapiens
  misc_RNA (1)...(19): siRNA sense strand
agaaaagucuucagaugau

SEQ ID NO: 2054554 - RNA, 19 nt, Homo sapiens
  misc_RNA (1)...(19): siRNA sense strand
aaacuuccgucagaauucu

SEQ ID NO: 2054555 - RNA, 19 nt, Homo sapiens
  misc_RNA (1)...(19): siRNA sense strand
ggaggacaaggagauggua

SEQ ID NO: 2054556 - RNA, 19 nt, Homo sapiens
  misc_RNA (1)...(19): siRNA sense strand
caaaggaguccaaaaggaa

SEQ ID NO: 2054557 - RNA, 19 nt, Homo sapiens
  misc_RNA (1)...(19): siRNA sense strand
agagaaaagucuucagaug

SEQ ID NO: 2054558 - RNA, 19 nt, Homo sapiens
  misc_RNA (1)...(19): siRNA sense strand
gcuuggauccuacucaaca

SEQ ID NO: 2054559 - RNA, 19 nt, Homo sapiens
  misc_RNA (1)...(19): siRNA sense strand
gguggucuuugaggauuug

SEQ ID NO: 2054560 - RNA, 19 nt, Homo sapiens
  misc_RNA (1)...(19): siRNA sense strand
cagaugaugaugaaaugga

SEQ ID NO: 2054561 - RNA, 19 nt, Homo sapiens
  misc_RNA (1)...(19): siRNA sense strand
gaaaagucuucagaugaug

SEQ ID NO: 2054562 - RNA, 19 nt, Homo sapiens
  misc_RNA (1)...(19): siRNA sense strand
ggugaagcuucugcccaaa

SEQ ID NO: 2054563 - RNA, 19 nt, Homo sapiens
  misc_RNA (1)...(19): siRNA sense strand
gggaaccuguagaaaauga

SEQ ID NO: 2054564 - RNA, 19 nt, Homo sapiens
  misc_RNA (1)...(19): siRNA sense strand
caagaccauccaccagcua

SEQ ID NO: 2054565 - RNA, 19 nt, Homo sapiens
  misc_RNA (1)...(19): siRNA sense strand
ggagaccuugguuauuaug

SEQ ID NO: 2054566 - RNA, 19 nt, Homo sapiens
  misc_RNA (1)...(19): siRNA sense strand
ugaaggaauccauauaagg

SEQ ID NO: 2054567 - RNA, 19 nt, Homo sapiens
  misc_RNA (1)...(19): siRNA sense strand
gcagucaauggcaguaauc

SEQ ID NO: 2054568 - RNA, 19 nt, Homo sapiens
  misc_RNA (1)...(19): siRNA sense strand
caaacuguacccggcauga

SEQ ID NO: 2054569 - RNA, 19 nt, Homo sapiens
  misc_RNA (1)...(19): siRNA sense strand
gguccagcccagucagaaa

SEQ ID NO: 2054570 - RNA, 19 nt, Homo sapiens
  misc_RNA (1)...(19): siRNA sense strand
acuccaagcugggccaaga

SEQ ID NO: 2054571 - RNA, 19 nt, Homo sapiens
  misc_RNA (1)...(19): siRNA sense strand
ggagucgucaugaaggaau

SEQ ID NO: 2054572 - RNA, 19 nt, Homo sapiens
  misc_RNA (1)...(19): siRNA sense strand
auacauccauuccacaaaa

SEQ ID NO: 2054573 - RNA, 19 nt, Homo sapiens
  misc_RNA (1)...(19): siRNA sense strand
aaauacauccauuccacaa

SEQ ID NO: 2054574 - RNA, 19 nt, Homo sapiens
  misc_RNA (1)...(19): siRNA sense strand
cucagcagccucccgauaa

SEQ ID NO: 2054575 - RNA, 19 nt, Homo sapiens
  misc_RNA (1)...(19): siRNA sense strand
ggucuuugaggauuugaau

SEQ ID NO: 2054576 - RNA, 19 nt, Homo sapiens
  misc_RNA (1)...(19): siRNA sense strand
gaauucauacaggagagaa

SEQ ID NO: 2054577 - RNA, 19 nt, Homo sapiens
  misc_RNA (1)...(19): siRNA sense strand
gaacgacuaaauacaucca

SEQ ID NO: 2054578 - RNA, 19 nt, Homo sapiens
  misc_RNA (1)...(19): siRNA sense strand
aaaggaacgacuaaauaca

SEQ ID NO: 2054579 - RNA, 19 nt, Homo sapiens
  misc_RNA (1)...(19): siRNA sense strand
ucucagcagccucccgaua

SEQ ID NO: 2054580 - RNA, 19 nt, Homo sapiens
  misc_RNA (1)...(19): siRNA sense strand
ugaagcuucugcccaaagg

SEQ ID NO: 2054581 - RNA, 19 nt, Homo sapiens
  misc_RNA (1)...(19): siRNA sense strand
gauccuacucaacaacuca

SEQ ID NO: 2054582 - RNA, 19 nt, Homo sapiens
  misc_RNA (1)...(19): siRNA sense strand
ucacugccaggaagaaugu

SEQ ID NO: 2054583 - RNA, 19 nt, Homo sapiens
  misc_RNA (1)...(19): siRNA sense strand
aagaaugugugagcuugga

SEQ ID NO: 2054584 - RNA, 19 nt, Homo sapiens
  misc_RNA (1)...(19): siRNA sense strand
gacccgaaagcagaaguaa

SEQ ID NO: 2054585 - RNA, 19 nt, Homo sapiens
  misc_RNA (1)...(19): siRNA sense strand
caucggagucgucaugaag

SEQ ID NO: 2054586 - RNA, 19 nt, Homo sapiens
  misc_RNA (1)...(19): siRNA sense strand
ccuugguuauuaugaaaga

SEQ ID NO: 2054587 - RNA, 19 nt, Homo sapiens
  misc_RNA (1)...(19): siRNA sense strand
aggagaccuugguuauuau

SEQ ID NO: 2054588 - RNA, 19 nt, Homo sapiens
  misc_RNA (1)...(19): siRNA sense strand
acgacuaaauacauccauu

SEQ ID NO: 2054589 - RNA, 19 nt, Homo sapiens
  misc_RNA (1)...(19): siRNA sense strand
gaugaugaugaaauggauu

SEQ ID NO: 2054590 - RNA, 19 nt, Homo sapiens
  misc_RNA (1)...(19): siRNA sense strand
gggccaagaccuacuucga

SEQ ID NO: 2054591 - RNA, 19 nt, Homo sapiens
  misc_RNA (1)...(19): siRNA sense strand
gggaaaagcuucaaucaua

SEQ ID NO: 2054592 - RNA, 19 nt, Homo sapiens
  misc_RNA (1)...(19): siRNA sense strand
ugaaaguucuuaccucauu

SEQ ID NO: 2054593 - RNA, 19 nt, Homo sapiens
  misc_RNA (1)...(19): siRNA sense strand
gaaaaggaacgacuaaaua

SEQ ID NO: 2054594 - RNA, 19 nt, Homo sapiens
  misc_RNA (1)...(19): siRNA sense strand
gaaaguucuuaccucauuu

SEQ ID NO: 2054595 - RNA, 19 nt, Homo sapiens
  misc_RNA (1)...(19): siRNA sense strand
gggagaagauauuuaagug

SEQ ID NO: 2054596 - RNA, 19 nt, Homo sapiens
  misc_RNA (1)...(19): siRNA sense strand
guagacaucaguauuauug

SEQ ID NO: 2054597 - RNA, 19 nt, Homo sapiens
  misc_RNA (1)...(19): siRNA sense strand
caauaaacaugagcgaauu

SEQ ID NO: 2054598 - RNA, 19 nt, Homo sapiens
  misc_RNA (1)...(19): siRNA sense strand
ggaaaagcuucaaucauaa

SEQ ID NO: 2054599 - RNA, 19 nt, Homo sapiens
  misc_RNA (1)...(19): siRNA sense strand
ugagaaaucuguuaguuac

SEQ ID NO: 2054600 - RNA, 19 nt, Homo sapiens
  misc_RNA (1)...(19): siRNA sense strand
acaaggagaugguacacuu

SEQ ID NO: 2054601 - RNA, 19 nt, Homo sapiens
  misc_RNA (1)...(19): siRNA sense strand
gaccuugguuauuaugaaa

SEQ ID NO: 2054602 - RNA, 19 nt, Homo sapiens
  misc_RNA (1)...(19): siRNA sense strand
gagcuuggauccuacucaa

SEQ ID NO: 2054603 - RNA, 19 nt, Homo sapiens
  misc_RNA (1)...(19): siRNA sense strand
caacaacucacgucagaga

SEQ ID NO: 2054604 - RNA, 19 nt, Homo sapiens
  misc_RNA (1)...(19): siRNA sense strand
caugaaggaauccauauaa

SEQ ID NO: 2054605 - RNA, 19 nt, Homo sapiens
  misc_RNA (1)...(19): siRNA sense strand
ggucggcugucaaacugua

SEQ ID NO: 2054606 - RNA, 19 nt, Homo sapiens
  misc_RNA (1)...(19): siRNA sense strand
gaaugauacuccucuagag

SEQ ID NO: 2054607 - RNA, 19 nt, Homo sapiens
  misc_RNA (1)...(19): siRNA sense strand
gcucaagccuucagaacag

SEQ ID NO: 2054608 - RNA, 19 nt, Homo sapiens
  misc_RNA (1)...(19): siRNA sense strand
gagggaaccuguagaaaau

SEQ ID NO: 2054609 - RNA, 19 nt, Homo sapiens
  misc_RNA (1)...(19): siRNA sense strand
gagaaaccuuauuccuguu

SEQ ID NO: 2054610 - RNA, 19 nt, Homo sapiens
  misc_RNA (1)...(19): siRNA sense strand
gaggaacucucaaaauaug

SEQ ID NO: 2054611 - RNA, 19 nt, Homo sapiens
  misc_RNA (1)...(19): siRNA sense strand
ugaaagaugugagcucaag

SEQ ID NO: 2054612 - RNA, 19 nt, Homo sapiens
  misc_RNA (1)...(19): siRNA sense strand
cagugucucuguauuugaa

SEQ ID NO: 2054613 - RNA, 19 nt, Homo sapiens
  misc_RNA (1)...(19): siRNA sense strand
cgucagagaaggaagauga

SEQ ID NO: 2054614 - RNA, 19 nt, Homo sapiens
  misc_RNA (1)...(19): siRNA sense strand
gagaaaagucuucagauga

SEQ ID NO: 2054615 - RNA, 19 nt, Homo sapiens
  misc_RNA (1)...(19): siRNA sense strand
ugugugagcuuggauccua

SEQ ID NO: 2054616 - RNA, 19 nt, Homo sapiens
  misc_RNA (1)...(19): siRNA sense strand
cgaaaucggaggacaagga

SEQ ID NO: 2054617 - RNA, 19 nt, Homo sapiens
  misc_RNA (1)...(19): siRNA sense strand
ucaauaaacaugagcgaau

SEQ ID NO: 2054618 - RNA, 19 nt, Homo sapiens
  misc_RNA (1)...(19): siRNA sense strand
ggagaagauauuuaagugu

SEQ ID NO: 2054619 - RNA, 19 nt, Homo sapiens
  misc_RNA (1)...(19): siRNA sense strand
agaccuugguuauuaugaa

SEQ ID NO: 2054620 - RNA, 19 nt, Homo sapiens
  misc_RNA (1)...(19): siRNA sense strand
gaaugaggaguuugugcuu

SEQ ID NO: 2054621 - RNA, 19 nt, Homo sapiens
  misc_RNA (1)...(19): siRNA sense strand
ugagaaugauacuccucua

SEQ ID NO: 2054622 - RNA, 19 nt, Homo sapiens
  misc_RNA (1)...(19): siRNA sense strand
gaaaucuguuaguuaccau

SEQ ID NO: 2054623 - RNA, 19 nt, Homo sapiens
  misc_RNA (1)...(19): siRNA sense strand
ggaaaaggaacgacuaaau

SEQ ID NO: 2054624 - RNA, 19 nt, Homo sapiens
  misc_RNA (1)...(19): siRNA sense strand
cccaaagaaugaggaguuu

SEQ ID NO: 2054625 - RNA, 19 nt, Homo sapiens
  misc_RNA (1)...(19): siRNA sense strand
ccauauaagggagaagaua

SEQ ID NO: 2054626 - RNA, 19 nt, Homo sapiens
  misc_RNA (1)...(19): siRNA sense strand
uuauugcccuuacucgaaa

SEQ ID NO: 2054627 - RNA, 19 nt, Homo sapiens
  misc_RNA (1)...(19): siRNA sense strand
gcacuuccucaccuucuug

SEQ ID NO: 2054628 - RNA, 19 nt, Homo sapiens
  misc_RNA (1)...(19): siRNA sense strand
ucaugaaggaauccauaua

SEQ ID NO: 2054629 - RNA, 19 nt, Homo sapiens
  misc_RNA (1)...(19): siRNA sense strand
ugagagggaaccuguagaa

SEQ ID NO: 2054630 - RNA, 19 nt, Homo sapiens
  misc_RNA (1)...(19): siRNA sense strand
cucaacaacucacgucaga

SEQ ID NO: 2054631 - RNA, 19 nt, Homo sapiens
  misc_RNA (1)...(19): siRNA sense strand
auacaggagagaaaccuua

SEQ ID NO: 2054632 - RNA, 19 nt, Homo sapiens
  misc_RNA (1)...(19): siRNA sense strand
caggagagaaaccuuauuc

SEQ ID NO: 2054633 - RNA, 19 nt, Homo sapiens
  misc_RNA (1)...(19): siRNA sense strand
caagaccuacuucgagaug

SEQ ID NO: 2054634 - RNA, 19 nt, Homo sapiens
  misc_RNA (1)...(19): siRNA sense strand
guaagacccgaaagcagaa

SEQ ID NO: 2054635 - RNA, 19 nt, Homo sapiens
  misc_RNA (1)...(19): siRNA sense strand
cgacuaaauacauccauuc

SEQ ID NO: 2054636 - RNA, 19 nt, Homo sapiens
  misc_RNA (1)...(19): siRNA sense strand
gagagggaaccuguagaaa

SEQ ID NO: 2054637 - RNA, 19 nt, Homo sapiens
  misc_RNA (1)...(19): siRNA sense strand
gaaggugaagauccugaga

SEQ ID NO: 2054638 - RNA, 19 nt, Homo sapiens
  misc_RNA (1)...(19): siRNA sense strand
ccaaaggaguccaaaagga

SEQ ID NO: 2054639 - RNA, 19 nt, Homo sapiens
  misc_RNA (1)...(19): siRNA sense strand
agaaugauacuccucuaga

SEQ ID NO: 2054640 - RNA, 19 nt, Homo sapiens
  misc_RNA (1)...(19): siRNA sense strand
caagcugggccaagaccua

SEQ ID NO: 2054641 - RNA, 19 nt, Homo sapiens
  misc_RNA (1)...(19): siRNA sense strand
gaauccauauaagggagaa

SEQ ID NO: 2054642 - RNA, 19 nt, Homo sapiens
  misc_RNA (1)...(19): siRNA sense strand
gaaaccuuauuccuguucu

SEQ ID NO: 2054643 - RNA, 19 nt, Homo sapiens
  misc_RNA (1)...(19): siRNA sense strand
caauggcaguaauccugaa

SEQ ID NO: 2054644 - RNA, 19 nt, Homo sapiens
  misc_RNA (1)...(19): siRNA sense strand
cgucaugaaggaauccaua

SEQ ID NO: 2054645 - RNA, 19 nt, Homo sapiens
  misc_RNA (1)...(19): siRNA sense strand
augaugaaauggauucuuc

SEQ ID NO: 2054646 - RNA, 19 nt, Homo sapiens
  misc_RNA (1)...(19): siRNA sense strand
ggcagucaauggcaguaau

SEQ ID NO: 2054647 - RNA, 19 nt, Homo sapiens
  misc_RNA (1)...(19): siRNA sense strand
gauauuuaaguguccagaa

SEQ ID NO: 2054648 - RNA, 19 nt, Homo sapiens
  misc_RNA (1)...(19): siRNA sense strand
ggagagaaaccuuauuccu

SEQ ID NO: 2054649 - RNA, 19 nt, Homo sapiens
  misc_RNA (1)...(19): siRNA sense strand
gagaaugauacuccucuag

SEQ ID NO: 2054650 - RNA, 19 nt, Homo sapiens
  misc_RNA (1)...(19): siRNA sense strand
caguaauccugaaggugaa

SEQ ID NO: 2054651 - RNA, 19 nt, Homo sapiens
  misc_RNA (1)...(19): siRNA sense strand
agaaaucuguuaguuacca

SEQ ID NO: 2054652 - RNA, 19 nt, Homo sapiens
  misc_RNA (1)...(19): siRNA sense strand
aaaccuucccaaagaauga

SEQ ID NO: 2054653 - RNA, 19 nt, Homo sapiens
  misc_RNA (1)...(19): siRNA sense strand
agaaaagucuucagaugau

SEQ ID NO: 2054654 - RNA, 19 nt, Homo sapiens
  misc_RNA (1)...(19): siRNA sense strand
aaacuuccgucagaauucu

SEQ ID NO: 2054655 - RNA, 19 nt, Homo sapiens
  misc_RNA (1)...(19): siRNA sense strand
ggaggacaaggagauggua

SEQ ID NO: 2054656 - RNA, 19 nt, Homo sapiens
  misc_RNA (1)...(19): siRNA sense strand
caaaggaguccaaaaggaa

SEQ ID NO: 2054657 - RNA, 19 nt, Homo sapiens
  misc_RNA (1)...(19): siRNA sense strand
agagaaaagucuucagaug

SEQ ID NO: 2054658 - RNA, 19 nt, Homo sapiens
  misc_RNA (1)...(19): siRNA sense strand
gcuuggauccuacucaaca

SEQ ID NO: 2054659 - RNA, 19 nt, Homo sapiens
  misc_RNA (1)...(19): siRNA sense strand
gguggucuuugaggauuug

SEQ ID NO: 2054660 - RNA, 19 nt, Homo sapiens
  misc_RNA (1)...(19): siRNA sense strand
cagaugaugaugaaaugga

SEQ ID NO: 2054661 - RNA, 19 nt, Homo sapiens
  misc_RNA (1)...(19): siRNA sense strand
gaaaagucuucagaugaug

SEQ ID NO: 2054662 - RNA, 19 nt, Homo sapiens
  misc_RNA (1)...(19): siRNA sense strand
ggugaagcuucugcccaaa

SEQ ID NO: 2054663 - RNA, 19 nt, Homo sapiens
  misc_RNA (1)...(19): siRNA sense strand
gggaaccuguagaaaauga

SEQ ID NO: 2054664 - RNA, 19 nt, Homo sapiens
  misc_RNA (1)...(19): siRNA sense strand
caagaccauccaccagcua

SEQ ID NO: 2054665 - RNA, 19 nt, Homo sapiens
  misc_RNA (1)...(19): siRNA sense strand
ggagaccuugguuauuaug

SEQ ID NO: 2054666 - RNA, 19 nt, Homo sapiens
  misc_RNA (1)...(19): siRNA sense strand
ugaaggaauccauauaagg

SEQ ID NO: 2054667 - RNA, 19 nt, Homo sapiens
  misc_RNA (1)...(19): siRNA sense strand
gcagucaauggcaguaauc

SEQ ID NO: 2054668 - RNA, 19 nt, Homo sapiens
  misc_RNA (1)...(19): siRNA sense strand
caaacuguacccggcauga

SEQ ID NO: 2054669 - RNA, 19 nt, Homo sapiens
  misc_RNA (1)...(19): siRNA sense strand
gguccagcccagucagaaa

SEQ ID NO: 2054670 - RNA, 19 nt, Homo sapiens
  misc_RNA (1)...(19): siRNA sense strand
acuccaagcugggccaaga

SEQ ID NO: 2054671 - RNA, 19 nt, Homo sapiens
  misc_RNA (1)...(19): siRNA sense strand
ggagucgucaugaaggaau

SEQ ID NO: 2054672 - RNA, 19 nt, Homo sapiens
  misc_RNA (1)...(19): siRNA sense strand
auacauccauuccacaaaa

SEQ ID NO: 2054673 - RNA, 19 nt, Homo sapiens
  misc_RNA (1)...(19): siRNA sense strand
aaauacauccauuccacaa

SEQ ID NO: 2054674 - RNA, 19 nt, Homo sapiens
  misc_RNA (1)...(19): siRNA sense strand
cucagcagccucccgauaa

SEQ ID NO: 2054675 - RNA, 19 nt, Homo sapiens
  misc_RNA (1)...(19): siRNA sense strand
ggucuuugaggauuugaau

SEQ ID NO: 2054676 - RNA, 19 nt, Homo sapiens
  misc_RNA (1)...(19): siRNA sense strand
gaauucauacaggagagaa

SEQ ID NO: 2054677 - RNA, 19 nt, Homo sapiens
  misc_RNA (1)...(19): siRNA sense strand
gaacgacuaaauacaucca

SEQ ID NO: 2054678 - RNA, 19 nt, Homo sapiens
  misc_RNA (1)...(19): siRNA sense strand
aaaggaacgacuaaauaca

SEQ ID NO: 2054679 - RNA, 19 nt, Homo sapiens
  misc_RNA (1)...(19): siRNA sense strand
ucucagcagccucccgaua

SEQ ID NO: 2054680 - RNA, 19 nt, Homo sapiens
  misc_RNA (1)...(19): siRNA sense strand
ugaagcuucugcccaaagg

SEQ ID NO: 2054681 - RNA, 19 nt, Homo sapiens
  misc_RNA (1)...(19): siRNA sense strand
gauccuacucaacaacuca

SEQ ID NO: 2054682 - RNA, 19 nt, Homo sapiens
  misc_RNA (1)...(19): siRNA sense strand
ucacugccaggaagaaugu

SEQ ID NO: 2054683 - RNA, 19 nt, Homo sapiens
  misc_RNA (1)...(19): siRNA sense strand
aagaaugugugagcuugga

SEQ ID NO: 2054684 - RNA, 19 nt, Homo sapiens
  misc_RNA (1)...(19): siRNA sense strand
gacccgaaagcagaaguaa

SEQ ID NO: 2054685 - RNA, 19 nt, Homo sapiens
  misc_RNA (1)...(19): siRNA sense strand
caucggagucgucaugaag

SEQ ID NO: 2054686 - RNA, 19 nt, Homo sapiens
  misc_RNA (1)...(19): siRNA sense strand
ccuugguuauuaugaaaga

SEQ ID NO: 2054687 - RNA, 19 nt, Homo sapiens
  misc_RNA (1)...(19): siRNA sense strand
aggagaccuugguuauuau

SEQ ID NO: 2054688 - RNA, 19 nt, Homo sapiens
  misc_RNA (1)...(19): siRNA sense strand
acgacuaaauacauccauu

SEQ ID NO: 2054689 - RNA, 19 nt, Homo sapiens
  misc_RNA (1)...(19): siRNA sense strand
gaugaugaugaaauggauu

SEQ ID NO: 2054690 - RNA, 19 nt, Homo sapiens
  misc_RNA (1)...(19): siRNA sense strand
gggccaagaccuacuucga

SEQ ID NO: 2054691 - RNA, 19 nt, Homo sapiens
  misc_RNA (1)...(19): siRNA sense strand
gggaaaagcuucaaucaua

SEQ ID NO: 2054692 - RNA, 19 nt, Homo sapiens
  misc_RNA (1)...(19): siRNA sense strand
ugaaaguucuuaccucauu

SEQ ID NO: 2054693 - RNA, 19 nt, Homo sapiens
  misc_RNA (1)...(19): siRNA sense strand
gaaaaggaacgacuaaaua

SEQ ID NO: 2054694 - RNA, 19 nt, Homo sapiens
  misc_RNA (1)...(19): siRNA sense strand
gaaaguucuuaccucauuu

SEQ ID NO: 2054695 - RNA, 19 nt, Homo sapiens
  misc_RNA (1)...(19): siRNA sense strand
gggagaagauauuuaagug

SEQ ID NO: 2054696 - RNA, 19 nt, Homo sapiens
  misc_RNA (1)...(19): siRNA sense strand
guagacaucaguauuauug

SEQ ID NO: 2054697 - RNA, 19 nt, Homo sapiens
  misc_RNA (1)...(19): siRNA sense strand
caauaaacaugagcgaauu

SEQ ID NO: 2054698 - RNA, 19 nt, Homo sapiens
  misc_RNA (1)...(19): siRNA sense strand
ggaaaagcuucaaucauaa

SEQ ID NO: 2054699 - RNA, 19 nt, Homo sapiens
  misc_RNA (1)...(19): siRNA sense strand
ugagaaaucuguuaguuac

SEQ ID NO: 2054700 - RNA, 19 nt, Homo sapiens
  misc_RNA (1)...(19): siRNA sense strand
acaaggagaugguacacuu

SEQ ID NO: 2054701 - RNA, 19 nt, Homo sapiens
  misc_RNA (1)...(19): siRNA sense strand
gaccuugguuauuaugaaa

SEQ ID NO: 2054702 - RNA, 19 nt, Homo sapiens
  misc_RNA (1)...(19): siRNA sense strand
gagcuuggauccuacucaa

SEQ ID NO: 2054703 - RNA, 19 nt, Homo sapiens
  misc_RNA (1)...(19): siRNA sense strand
caacaacucacgucagaga

SEQ ID NO: 2054704 - RNA, 19 nt, Homo sapiens
  misc_RNA (1)...(19): siRNA sense strand
caugaaggaauccauauaa

SEQ ID NO: 2054705 - RNA, 19 nt, Homo sapiens
  misc_RNA (1)...(19): siRNA sense strand
ggucggcugucaaacugua

SEQ ID NO: 2054706 - RNA, 19 nt, Homo sapiens
  misc_RNA (1)...(19): siRNA sense strand
gaaugauacuccucuagag

SEQ ID NO: 2054707 - RNA, 19 nt, Homo sapiens
  misc_RNA (1)...(19): siRNA sense strand
gcucaagccuucagaacag

SEQ ID NO: 2054708 - RNA, 19 nt, Homo sapiens
  misc_RNA (1)...(19): siRNA sense strand
gagggaaccuguagaaaau

SEQ ID NO: 2054709 - RNA, 19 nt, Homo sapiens
  misc_RNA (1)...(19): siRNA sense strand
gagaaaccuuauuccuguu

SEQ ID NO: 2054710 - RNA, 19 nt, Homo sapiens
  misc_RNA (1)...(19): siRNA sense strand
gaggaacucucaaaauaug

SEQ ID NO: 2054711 - RNA, 19 nt, Homo sapiens
  misc_RNA (1)...(19): siRNA sense strand
ugaaagaugugagcucaag

SEQ ID NO: 2054712 - RNA, 19 nt, Homo sapiens
  misc_RNA (1)...(19): siRNA sense strand
cagugucucuguauuugaa

SEQ ID NO: 2054713 - RNA, 19 nt, Homo sapiens
  misc_RNA (1)...(19): siRNA sense strand
cgucagagaaggaagauga

SEQ ID NO: 2054714 - RNA, 19 nt, Homo sapiens
  misc_RNA (1)...(19): siRNA sense strand
gagaaaagucuucagauga

SEQ ID NO: 2054715 - RNA, 19 nt, Homo sapiens
  misc_RNA (1)...(19): siRNA sense strand
ugugugagcuuggauccua

SEQ ID NO: 2054716 - RNA, 19 nt, Homo sapiens
  misc_RNA (1)...(19): siRNA sense strand
cgaaaucggaggacaagga

SEQ ID NO: 2054717 - RNA, 19 nt, Homo sapiens
  misc_RNA (1)...(19): siRNA sense strand
ucaauaaacaugagcgaau

SEQ ID NO: 2054718 - RNA, 19 nt, Homo sapiens
  misc_RNA (1)...(19): siRNA sense strand
ggagaagauauuuaagugu

SEQ ID NO: 2054719 - RNA, 19 nt, Homo sapiens
  misc_RNA (1)...(19): siRNA sense strand
agaccuugguuauuaugaa

SEQ ID NO: 2054720 - RNA, 19 nt, Homo sapiens
  misc_RNA (1)...(19): siRNA sense strand
gaaugaggaguuugugcuu

SEQ ID NO: 2054721 - RNA, 19 nt, Homo sapiens
  misc_RNA (1)...(19): siRNA sense strand
ugagaaugauacuccucua

SEQ ID NO: 2054722 - RNA, 19 nt, Homo sapiens
  misc_RNA (1)...(19): siRNA sense strand
gaaaucuguuaguuaccau

SEQ ID NO: 2054723 - RNA, 19 nt, Homo sapiens
  misc_RNA (1)...(19): siRNA sense strand
ggaaaaggaacgacuaaau

SEQ ID NO: 2054724 - RNA, 19 nt, Homo sapiens
  misc_RNA (1)...(19): siRNA sense strand
cccaaagaaugaggaguuu

SEQ ID NO: 2054725 - RNA, 19 nt, Homo sapiens
  misc_RNA (1)...(19): siRNA sense strand
ccauauaagggagaagaua

SEQ ID NO: 2054726 - RNA, 19 nt, Homo sapiens
  misc_RNA (1)...(19): siRNA sense strand
uuauugcccuuacucgaaa

SEQ ID NO: 2054727 - RNA, 19 nt, Homo sapiens
  misc_RNA (1)...(19): siRNA sense strand
gcacuuccucaccuucuug

SEQ ID NO: 2054728 - RNA, 19 nt, Homo sapiens
  misc_RNA (1)...(19): siRNA sense strand
ucaugaaggaauccauaua

SEQ ID NO: 2054729 - RNA, 19 nt, Homo sapiens
  misc_RNA (1)...(19): siRNA sense strand
ugagagggaaccuguagaa

SEQ ID NO: 2054730 - RNA, 19 nt, Homo sapiens
  misc_RNA (1)...(19): siRNA sense strand
cucaacaacucacgucaga

SEQ ID NO: 2054731 - RNA, 19 nt, Homo sapiens
  misc_RNA (1)...(19): siRNA sense strand
auacaggagagaaaccuua

SEQ ID NO: 2054732 - RNA, 19 nt, Homo sapiens
  misc_RNA (1)...(19): siRNA sense strand
caggagagaaaccuuauuc

SEQ ID NO: 2054733 - RNA, 19 nt, Homo sapiens
  misc_RNA (1)...(19): siRNA sense strand
caagaccuacuucgagaug

SEQ ID NO: 2054734 - RNA, 19 nt, Homo sapiens
  misc_RNA (1)...(19): siRNA sense strand
guaagacccgaaagcagaa

SEQ ID NO: 2054735 - RNA, 19 nt, Homo sapiens
  misc_RNA (1)...(19): siRNA sense strand
cgacuaaauacauccauuc

SEQ ID NO: 2054736 - RNA, 19 nt, Homo sapiens
  misc_RNA (1)...(19): siRNA sense strand
gagagggaaccuguagaaa

SEQ ID NO: 2054737 - RNA, 19 nt, Homo sapiens
  misc_RNA (1)...(19): siRNA sense strand
gaaggugaagauccugaga

SEQ ID NO: 2054738 - RNA, 19 nt, Homo sapiens
  misc_RNA (1)...(19): siRNA sense strand
ccaaaggaguccaaaagga

SEQ ID NO: 2054739 - RNA, 19 nt, Homo sapiens
  misc_RNA (1)...(19): siRNA sense strand
agaaugauacuccucuaga

SEQ ID NO: 2054740 - RNA, 19 nt, Homo sapiens
  misc_RNA (1)...(19): siRNA sense strand
caagcugggccaagaccua

SEQ ID NO: 2054741 - RNA, 19 nt, Homo sapiens
  misc_RNA (1)...(19): siRNA sense strand
gaauccauauaagggagaa

SEQ ID NO: 2054742 - RNA, 19 nt, Homo sapiens
  misc_RNA (1)...(19): siRNA sense strand
gaaaccuuauuccuguucu

SEQ ID NO: 2054743 - RNA, 19 nt, Homo sapiens
  misc_RNA (1)...(19): siRNA sense strand
caauggcaguaauccugaa

SEQ ID NO: 2054744 - RNA, 19 nt, Homo sapiens
  misc_RNA (1)...(19): siRNA sense strand
cgucaugaaggaauccaua

SEQ ID NO: 2054745 - RNA, 19 nt, Homo sapiens
  misc_RNA (1)...(19): siRNA sense strand
augaugaaauggauucuuc

SEQ ID NO: 2054746 - RNA, 19 nt, Homo sapiens
  misc_RNA (1)...(19): siRNA sense strand
ggcagucaauggcaguaau

SEQ ID NO: 2054747 - RNA, 19 nt, Homo sapiens
  misc_RNA (1)...(19): siRNA sense strand
gauauuuaaguguccagaa

SEQ ID NO: 2054748 - RNA, 19 nt, Homo sapiens
  misc_RNA (1)...(19): siRNA sense strand
ggagagaaaccuuauuccu

SEQ ID NO: 2054749 - RNA, 19 nt, Homo sapiens
  misc_RNA (1)...(19): siRNA sense strand
gagaaugauacuccucuag

SEQ ID NO: 2054750 - RNA, 19 nt, Homo sapiens
  misc_RNA (1)...(19): siRNA sense strand
caguaauccugaaggugaa

SEQ ID NO: 2054751 - RNA, 19 nt, Homo sapiens
  misc_RNA (1)...(19): siRNA sense strand
agaaaucuguuaguuacca

SEQ ID NO: 2054752 - RNA, 19 nt, Homo sapiens
  misc_RNA (1)...(19): siRNA sense strand
aaaccuucccaaagaauga

SEQ ID NO: 2054753 - RNA, 19 nt, Homo sapiens
  misc_RNA (1)...(19): siRNA sense strand
agaaaagucuucagaugau

SEQ ID NO: 2054754 - RNA, 19 nt, Homo sapiens
  misc_RNA (1)...(19): siRNA sense strand
aaacuuccgucagaauucu

SEQ ID NO: 2054755 - RNA, 19 nt, Homo sapiens
  misc_RNA (1)...(19): siRNA sense strand
ggaggacaaggagauggua

SEQ ID NO: 2054756 - RNA, 19 nt, Homo sapiens
  misc_RNA (1)...(19): siRNA sense strand
caaaggaguccaaaaggaa

SEQ ID NO: 2054757 - RNA, 19 nt, Homo sapiens
  misc_RNA (1)...(19): siRNA sense strand
agagaaaagucuucagaug

SEQ ID NO: 2054758 - RNA, 19 nt, Homo sapiens
  misc_RNA (1)...(19): siRNA sense strand
gcuuggauccuacucaaca

SEQ ID NO: 2054759 - RNA, 19 nt, Homo sapiens
  misc_RNA (1)...(19): siRNA sense strand
gguggucuuugaggauuug

SEQ ID NO: 2054760 - RNA, 19 nt, Homo sapiens
  misc_RNA (1)...(19): siRNA sense strand
cagaugaugaugaaaugga

SEQ ID NO: 2054761 - RNA, 19 nt, Homo sapiens
  misc_RNA (1)...(19): siRNA sense strand
gaaaagucuucagaugaug

SEQ ID NO: 2054762 - RNA, 19 nt, Homo sapiens
  misc_RNA (1)...(19): siRNA sense strand
ggugaagcuucugcccaaa

SEQ ID NO: 2054763 - RNA, 19 nt, Homo sapiens
  misc_RNA (1)...(19): siRNA sense strand
gggaaccuguagaaaauga

SEQ ID NO: 2054764 - RNA, 19 nt, Homo sapiens
  misc_RNA (1)...(19): siRNA sense strand
caagaccauccaccagcua

SEQ ID NO: 2054765 - RNA, 19 nt, Homo sapiens
  misc_RNA (1)...(19): siRNA sense strand
ggagaccuugguuauuaug

SEQ ID NO: 2054766 - RNA, 19 nt, Homo sapiens
  misc_RNA (1)...(19): siRNA sense strand
ugaaggaauccauauaagg

SEQ ID NO: 2054767 - RNA, 19 nt, Homo sapiens
  misc_RNA (1)...(19): siRNA sense strand
gcagucaauggcaguaauc

SEQ ID NO: 2054768 - RNA, 19 nt, Homo sapiens
  misc_RNA (1)...(19): siRNA sense strand
caaacuguacccggcauga

SEQ ID NO: 2054769 - RNA, 19 nt, Homo sapiens
  misc_RNA (1)...(19): siRNA sense strand
gguccagcccagucagaaa

SEQ ID NO: 2054770 - RNA, 19 nt, Homo sapiens
  misc_RNA (1)...(19): siRNA sense strand
acuccaagcugggccaaga

SEQ ID NO: 2054771 - RNA, 19 nt, Homo sapiens
  misc_RNA (1)...(19): siRNA sense strand
ggagucgucaugaaggaau

SEQ ID NO: 2054772 - RNA, 19 nt, Homo sapiens
  misc_RNA (1)...(19): siRNA sense strand
auacauccauuccacaaaa

SEQ ID NO: 2054773 - RNA, 19 nt, Homo sapiens
  misc_RNA (1)...(19): siRNA sense strand
aaauacauccauuccacaa

SEQ ID NO: 2054774 - RNA, 19 nt, Homo sapiens
  misc_RNA (1)...(19): siRNA sense strand
cucagcagccucccgauaa

SEQ ID NO: 2054775 - RNA, 19 nt, Homo sapiens
  misc_RNA (1)...(19): siRNA sense strand
ggucuuugaggauuugaau

SEQ ID NO: 2054776 - RNA, 19 nt, Homo sapiens
  misc_RNA (1)...(19): siRNA sense strand
gaauucauacaggagagaa

SEQ ID NO: 2054777 - RNA, 19 nt, Homo sapiens
  misc_RNA (1)...(19): siRNA sense strand
gaacgacuaaauacaucca

SEQ ID NO: 2054778 - RNA, 19 nt, Homo sapiens
  misc_RNA (1)...(19): siRNA sense strand
aaaggaacgacuaaauaca

SEQ ID NO: 2054779 - RNA, 19 nt, Homo sapiens
  misc_RNA (1)...(19): siRNA sense strand
ucucagcagccucccgaua

SEQ ID NO: 2054780 - RNA, 19 nt, Homo sapiens
  misc_RNA (1)...(19): siRNA sense strand
ugaagcuucugcccaaagg

SEQ ID NO: 2054781 - RNA, 19 nt, Homo sapiens
  misc_RNA (1)...(19): siRNA sense strand
gauccuacucaacaacuca

SEQ ID NO: 2054782 - RNA, 19 nt, Homo sapiens
  misc_RNA (1)...(19): siRNA sense strand
ucacugccaggaagaaugu

SEQ ID NO: 2054783 - RNA, 19 nt, Homo sapiens
  misc_RNA (1)...(19): siRNA sense strand
aagaaugugugagcuugga

SEQ ID NO: 2054784 - RNA, 19 nt, Homo sapiens
  misc_RNA (1)...(19): siRNA sense strand
gacccgaaagcagaaguaa

SEQ ID NO: 2054785 - RNA, 19 nt, Homo sapiens
  misc_RNA (1)...(19): siRNA sense strand
caucggagucgucaugaag

SEQ ID NO: 2054786 - RNA, 19 nt, Homo sapiens
  misc_RNA (1)...(19): siRNA sense strand
ccuugguuauuaugaaaga

SEQ ID NO: 2054787 - RNA, 19 nt, Homo sapiens
  misc_RNA (1)...(19): siRNA sense strand
aggagaccuugguuauuau

SEQ ID NO: 2054788 - RNA, 19 nt, Homo sapiens
  misc_RNA (1)...(19): siRNA sense strand
acgacuaaauacauccauu

SEQ ID NO: 2054789 - RNA, 19 nt, Homo sapiens
  misc_RNA (1)...(19): siRNA sense strand
gaugaugaugaaauggauu

SEQ ID NO: 2054790 - RNA, 19 nt, Homo sapiens
  misc_RNA (1)...(19): siRNA sense strand
gggccaagaccuacuucga

SEQ ID NO: 2054791 - RNA, 19 nt, Homo sapiens
  misc_RNA (1)...(19): siRNA sense strand
gggaaaagcuucaaucaua

SEQ ID NO: 2054792 - RNA, 19 nt, Homo sapiens
  misc_RNA (1)...(19): siRNA sense strand
ugaaaguucuuaccucauu

SEQ ID NO: 2054793 - RNA, 19 nt, Homo sapiens
  misc_RNA (1)...(19): siRNA sense strand
gaaaaggaacgacuaaaua

SEQ ID NO: 2054794 - RNA, 19 nt, Homo sapiens
  misc_RNA (1)...(19): siRNA sense strand
gaaaguucuuaccucauuu

SEQ ID NO: 2054795 - RNA, 19 nt, Homo sapiens
  misc_RNA (1)...(19): siRNA sense strand
gggagaagauauuuaagug

SEQ ID NO: 2054796 - RNA, 19 nt, Homo sapiens
  misc_RNA (1)...(19): siRNA sense strand
guagacaucaguauuauug

SEQ ID NO: 2054797 - RNA, 19 nt, Homo sapiens
  misc_RNA (1)...(19): siRNA sense strand
caauaaacaugagcgaauu

SEQ ID NO: 2054798 - RNA, 19 nt, Homo sapiens
  misc_RNA (1)...(19): siRNA sense strand
ggaaaagcuucaaucauaa

SEQ ID NO: 2054799 - RNA, 19 nt, Homo sapiens
  misc_RNA (1)...(19): siRNA sense strand
ugagaaaucuguuaguuac

SEQ ID NO: 2054800 - RNA, 19 nt, Homo sapiens
  misc_RNA (1)...(19): siRNA sense strand
acaaggagaugguacacuu

SEQ ID NO: 2054801 - RNA, 19 nt, Homo sapiens
  misc_RNA (1)...(19): siRNA sense strand
gaccuugguuauuaugaaa

SEQ ID NO: 2054802 - RNA, 19 nt, Homo sapiens
  misc_RNA (1)...(19): siRNA sense strand
gagcuuggauccuacucaa

SEQ ID NO: 2054803 - RNA, 19 nt, Homo sapiens
  misc_RNA (1)...(19): siRNA sense strand
caacaacucacgucagaga

SEQ ID NO: 2054804 - RNA, 19 nt, Homo sapiens
  misc_RNA (1)...(19): siRNA sense strand
caugaaggaauccauauaa

SEQ ID NO: 2054805 - RNA, 19 nt, Homo sapiens
  misc_RNA (1)...(19): siRNA sense strand
ggucggcugucaaacugua

SEQ ID NO: 2054806 - RNA, 19 nt, Homo sapiens
  misc_RNA (1)...(19): siRNA sense strand
gaaugauacuccucuagag

SEQ ID NO: 2054807 - RNA, 19 nt, Homo sapiens
  misc_RNA (1)...(19): siRNA sense strand
gcucaagccuucagaacag

SEQ ID NO: 2054808 - RNA, 19 nt, Homo sapiens
  misc_RNA (1)...(19): siRNA sense strand
gagggaaccuguagaaaau

SEQ ID NO: 2054809 - RNA, 19 nt, Homo sapiens
  misc_RNA (1)...(19): siRNA sense strand
gagaaaccuuauuccuguu

SEQ ID NO: 2054810 - RNA, 19 nt, Homo sapiens
  misc_RNA (1)...(19): siRNA sense strand
gaggaacucucaaaauaug

SEQ ID NO: 2054811 - RNA, 19 nt, Homo sapiens
  misc_RNA (1)...(19): siRNA sense strand
ugaaagaugugagcucaag

SEQ ID NO: 2054812 - RNA, 19 nt, Homo sapiens
  misc_RNA (1)...(19): siRNA sense strand
cagugucucuguauuugaa

SEQ ID NO: 2054813 - RNA, 19 nt, Homo sapiens
  misc_RNA (1)...(19): siRNA sense strand
cgucagagaaggaagauga

SEQ ID NO: 2054814 - RNA, 19 nt, Homo sapiens
  misc_RNA (1)...(19): siRNA sense strand
gagaaaagucuucagauga

SEQ ID NO: 2054815 - RNA, 19 nt, Homo sapiens
  misc_RNA (1)...(19): siRNA sense strand
ugugugagcuuggauccua

SEQ ID NO: 2054816 - RNA, 19 nt, Homo sapiens
  misc_RNA (1)...(19): siRNA sense strand
cgaaaucggaggacaagga

SEQ ID NO: 2054817 - RNA, 19 nt, Homo sapiens
  misc_RNA (1)...(19): siRNA sense strand
ucaauaaacaugagcgaau

SEQ ID NO: 2054818 - RNA, 19 nt, Homo sapiens
  misc_RNA (1)...(19): siRNA sense strand
ggagaagauauuuaagugu

SEQ ID NO: 2054819 - RNA, 19 nt, Homo sapiens
  misc_RNA (1)...(19): siRNA sense strand
agaccuugguuauuaugaa

SEQ ID NO: 2054820 - RNA, 19 nt, Homo sapiens
  misc_RNA (1)...(19): siRNA sense strand
gaaugaggaguuugugcuu

SEQ ID NO: 2054821 - RNA, 19 nt, Homo sapiens
  misc_RNA (1)...(19): siRNA sense strand
ugagaaugauacuccucua

SEQ ID NO: 2054822 - RNA, 19 nt, Homo sapiens
  misc_RNA (1)...(19): siRNA sense strand
gaaaucuguuaguuaccau

SEQ ID NO: 2054823 - RNA, 19 nt, Homo sapiens
  misc_RNA (1)...(19): siRNA sense strand
ggaaaaggaacgacuaaau

SEQ ID NO: 2054824 - RNA, 19 nt, Homo sapiens
  misc_RNA (1)...(19): siRNA sense strand
cccaaagaaugaggaguuu

SEQ ID NO: 2054825 - RNA, 19 nt, Homo sapiens
  misc_RNA (1)...(19): siRNA sense strand
ccauauaagggagaagaua

SEQ ID NO: 2054826 - RNA, 19 nt, Homo sapiens
  misc_RNA (1)...(19): siRNA sense strand
uuauugcccuuacucgaaa

SEQ ID NO: 2054827 - RNA, 19 nt, Homo sapiens
  misc_RNA (1)...(19): siRNA sense strand
gcacuuccucaccuucuug

SEQ ID NO: 2054828 - RNA, 19 nt, Homo sapiens
  misc_RNA (1)...(19): siRNA sense strand
ucaugaaggaauccauaua

SEQ ID NO: 2054829 - RNA, 19 nt, Homo sapiens
  misc_RNA (1)...(19): siRNA sense strand
ugagagggaaccuguagaa

SEQ ID NO: 2054830 - RNA, 19 nt, Homo sapiens
  misc_RNA (1)...(19): siRNA sense strand
cucaacaacucacgucaga

SEQ ID NO: 2054831 - RNA, 19 nt, Homo sapiens
  misc_RNA (1)...(19): siRNA sense strand
auacaggagagaaaccuua

SEQ ID NO: 2054832 - RNA, 19 nt, Homo sapiens
  misc_RNA (1)...(19): siRNA sense strand
caggagagaaaccuuauuc

SEQ ID NO: 2054833 - RNA, 19 nt, Homo sapiens
  misc_RNA (1)...(19): siRNA sense strand
caagaccuacuucgagaug

SEQ ID NO: 2054834 - RNA, 19 nt, Homo sapiens
  misc_RNA (1)...(19): siRNA sense strand
guaagacccgaaagcagaa

SEQ ID NO: 2054835 - RNA, 19 nt, Homo sapiens
  misc_RNA (1)...(19): siRNA sense strand
cgacuaaauacauccauuc

SEQ ID NO: 2054836 - RNA, 19 nt, Homo sapiens
  misc_RNA (1)...(19): siRNA sense strand
gagagggaaccuguagaaa

SEQ ID NO: 2054837 - RNA, 19 nt, Homo sapiens
  misc_RNA (1)...(19): siRNA sense strand
gaaggugaagauccugaga

SEQ ID NO: 2054838 - RNA, 19 nt, Homo sapiens
  misc_RNA (1)...(19): siRNA sense strand
ccaaaggaguccaaaagga

SEQ ID NO: 2054839 - RNA, 19 nt, Homo sapiens
  misc_RNA (1)...(19): siRNA sense strand
agaaugauacuccucuaga

SEQ ID NO: 2054840 - RNA, 19 nt, Homo sapiens
  misc_RNA (1)...(19): siRNA sense strand
caagcugggccaagaccua

SEQ ID NO: 2054841 - RNA, 19 nt, Homo sapiens
  misc_RNA (1)...(19): siRNA sense strand
gaauccauauaagggagaa

SEQ ID NO: 2054842 - RNA, 19 nt, Homo sapiens
  misc_RNA (1)...(19): siRNA sense strand
gaaaccuuauuccuguucu

SEQ ID NO: 2054843 - RNA, 19 nt, Homo sapiens
  misc_RNA (1)...(19): siRNA sense strand
caauggcaguaauccugaa

SEQ ID NO: 2054844 - RNA, 19 nt, Homo sapiens
  misc_RNA (1)...(19): siRNA sense strand
cgucaugaaggaauccaua

SEQ ID NO: 2054845 - RNA, 19 nt, Homo sapiens
  misc_RNA (1)...(19): siRNA sense strand
augaugaaauggauucuuc

SEQ ID NO: 2054846 - RNA, 19 nt, Homo sapiens
  misc_RNA (1)...(19): siRNA sense strand
ggcagucaauggcaguaau

SEQ ID NO: 2054847 - RNA, 19 nt, Homo sapiens
  misc_RNA (1)...(19): siRNA sense strand
gauauuuaaguguccagaa

SEQ ID NO: 2054848 - RNA, 19 nt, Homo sapiens
  misc_RNA (1)...(19): siRNA sense strand
ggagagaaaccuuauuccu

SEQ ID NO: 2054849 - RNA, 19 nt, Homo sapiens
  misc_RNA (1)...(19): siRNA sense strand
gagaaugauacuccucuag

SEQ ID NO: 2054850 - RNA, 19 nt, Homo sapiens
  misc_RNA (1)...(19): siRNA sense strand
caguaauccugaaggugaa

SEQ ID NO: 2054851 - RNA, 19 nt, Homo sapiens
  misc_RNA (1)...(19): siRNA sense strand
agaaaucuguuaguuacca

SEQ ID NO: 2054852 - RNA, 19 nt, Homo sapiens
  misc_RNA (1)...(19): siRNA sense strand
aaaccuucccaaagaauga

SEQ ID NO: 2054853 - RNA, 19 nt, Homo sapiens
  misc_RNA (1)...(19): siRNA sense strand
agaaaagucuucagaugau

SEQ ID NO: 2054854 - RNA, 19 nt, Homo sapiens
  misc_RNA (1)...(19): siRNA sense strand
aaacuuccgucagaauucu

SEQ ID NO: 2054855 - RNA, 19 nt, Homo sapiens
  misc_RNA (1)...(19): siRNA sense strand
ggaggacaaggagauggua

SEQ ID NO: 2054856 - RNA, 19 nt, Homo sapiens
  misc_RNA (1)...(19): siRNA sense strand
caaaggaguccaaaaggaa

SEQ ID NO: 2054857 - RNA, 19 nt, Homo sapiens
  misc_RNA (1)...(19): siRNA sense strand
agagaaaagucuucagaug

SEQ ID NO: 2054858 - RNA, 19 nt, Homo sapiens
  misc_RNA (1)...(19): siRNA sense strand
gcuuggauccuacucaaca

SEQ ID NO: 2054859 - RNA, 19 nt, Homo sapiens
  misc_RNA (1)...(19): siRNA sense strand
gguggucuuugaggauuug

SEQ ID NO: 2054860 - RNA, 19 nt, Homo sapiens
  misc_RNA (1)...(19): siRNA sense strand
cagaugaugaugaaaugga

SEQ ID NO: 2054861 - RNA, 19 nt, Homo sapiens
  misc_RNA (1)...(19): siRNA sense strand
gaaaagucuucagaugaug

SEQ ID NO: 2054862 - RNA, 19 nt, Homo sapiens
  misc_RNA (1)...(19): siRNA sense strand
ggugaagcuucugcccaaa

SEQ ID NO: 2054863 - RNA, 19 nt, Homo sapiens
  misc_RNA (1)...(19): siRNA sense strand
gggaaccuguagaaaauga

SEQ ID NO: 2054864 - RNA, 19 nt, Homo sapiens
  misc_RNA (1)...(19): siRNA sense strand
caagaccauccaccagcua

SEQ ID NO: 2054865 - RNA, 19 nt, Homo sapiens
  misc_RNA (1)...(19): siRNA sense strand
ggagaccuugguuauuaug

SEQ ID NO: 2054866 - RNA, 19 nt, Homo sapiens
  misc_RNA (1)...(19): siRNA sense strand
ugaaggaauccauauaagg

SEQ ID NO: 2054867 - RNA, 19 nt, Homo sapiens
  misc_RNA (1)...(19): siRNA sense strand
gcagucaauggcaguaauc

SEQ ID NO: 2054868 - RNA, 19 nt, Homo sapiens
  misc_RNA (1)...(19): siRNA sense strand
caaacuguacccggcauga

SEQ ID NO: 2054869 - RNA, 19 nt, Homo sapiens
  misc_RNA (1)...(19): siRNA sense strand
gguccagcccagucagaaa

SEQ ID NO: 2054870 - RNA, 19 nt, Homo sapiens
  misc_RNA (1)...(19): siRNA sense strand
acuccaagcugggccaaga

SEQ ID NO: 2054871 - RNA, 19 nt, Homo sapiens
  misc_RNA (1)...(19): siRNA sense strand
ggagucgucaugaaggaau

SEQ ID NO: 2054872 - RNA, 19 nt, Homo sapiens
  misc_RNA (1)...(19): siRNA sense strand
auacauccauuccacaaaa

SEQ ID NO: 2054873 - RNA, 19 nt, Homo sapiens
  misc_RNA (1)...(19): siRNA sense strand
aaauacauccauuccacaa

SEQ ID NO: 2054874 - RNA, 19 nt, Homo sapiens
  misc_RNA (1)...(19): siRNA sense strand
cucagcagccucccgauaa

SEQ ID NO: 2054875 - RNA, 19 nt, Homo sapiens
  misc_RNA (1)...(19): siRNA sense strand
ggucuuugaggauuugaau

SEQ ID NO: 2054876 - RNA, 19 nt, Homo sapiens
  misc_RNA (1)...(19): siRNA sense strand
gaauucauacaggagagaa

SEQ ID NO: 2054877 - RNA, 19 nt, Homo sapiens
  misc_RNA (1)...(19): siRNA sense strand
gaacgacuaaauacaucca

SEQ ID NO: 2054878 - RNA, 19 nt, Homo sapiens
  misc_RNA (1)...(19): siRNA sense strand
aaaggaacgacuaaauaca

SEQ ID NO: 2054879 - RNA, 19 nt, Homo sapiens
  misc_RNA (1)...(19): siRNA sense strand
ucucagcagccucccgaua

SEQ ID NO: 2054880 - RNA, 19 nt, Homo sapiens
  misc_RNA (1)...(19): siRNA sense strand
ugaagcuucugcccaaagg

SEQ ID NO: 2054881 - RNA, 19 nt, Homo sapiens
  misc_RNA (1)...(19): siRNA sense strand
gauccuacucaacaacuca

SEQ ID NO: 2054882 - RNA, 19 nt, Homo sapiens
  misc_RNA (1)...(19): siRNA sense strand
ucacugccaggaagaaugu

SEQ ID NO: 2054883 - RNA, 19 nt, Homo sapiens
  misc_RNA (1)...(19): siRNA sense strand
aagaaugugugagcuugga

SEQ ID NO: 2054884 - RNA, 19 nt, Homo sapiens
  misc_RNA (1)...(19): siRNA sense strand
gacccgaaagcagaaguaa

SEQ ID NO: 2054885 - RNA, 19 nt, Homo sapiens
  misc_RNA (1)...(19): siRNA sense strand
caucggagucgucaugaag

SEQ ID NO: 2054886 - RNA, 19 nt, Homo sapiens
  misc_RNA (1)...(19): siRNA sense strand
ccuugguuauuaugaaaga

SEQ ID NO: 2054887 - RNA, 19 nt, Homo sapiens
  misc_RNA (1)...(19): siRNA sense strand
aggagaccuugguuauuau

SEQ ID NO: 2054888 - RNA, 19 nt, Homo sapiens
  misc_RNA (1)...(19): siRNA sense strand
acgacuaaauacauccauu

SEQ ID NO: 2054889 - RNA, 19 nt, Homo sapiens
  misc_RNA (1)...(19): siRNA sense strand
gaugaugaugaaauggauu

SEQ ID NO: 2054890 - RNA, 19 nt, Homo sapiens
  misc_RNA (1)...(19): siRNA sense strand
gggccaagaccuacuucga

SEQ ID NO: 2054891 - RNA, 19 nt, Homo sapiens
  misc_RNA (1)...(19): siRNA sense strand
gcagacaucccgagaguga

SEQ ID NO: 2054892 - RNA, 19 nt, Homo sapiens
  misc_RNA (1)...(19): siRNA sense strand
gaccagagguacacaccaa

SEQ ID NO: 2054893 - RNA, 19 nt, Homo sapiens
  misc_RNA (1)...(19): siRNA sense strand
uaaccaugcugccaaagga

SEQ ID NO: 2054894 - RNA, 19 nt, Homo sapiens
  misc_RNA (1)...(19): siRNA sense strand
gaggaggucaccaccauga

SEQ ID NO: 2054895 - RNA, 19 nt, Homo sapiens
  misc_RNA (1)...(19): siRNA sense strand
gcaagagcaucggccugaa

SEQ ID NO: 2054896 - RNA, 19 nt, Homo sapiens
  misc_RNA (1)...(19): siRNA sense strand
ccaaggagcagauguuaac

SEQ ID NO: 2054897 - RNA, 19 nt, Homo sapiens
  misc_RNA (1)...(19): siRNA sense strand
caagagcaucggccugaaa

SEQ ID NO: 2054898 - RNA, 19 nt, Homo sapiens
  misc_RNA (1)...(19): siRNA sense strand
caccaaggagcagauguua

SEQ ID NO: 2054899 - RNA, 19 nt, Homo sapiens
  misc_RNA (1)...(19): siRNA sense strand
ccacuccgcugagcuccuu

SEQ ID NO: 2054900 - RNA, 19 nt, Homo sapiens
  misc_RNA (1)...(19): siRNA sense strand
ggaggucaccaccaugauc

SEQ ID NO: 2054901 - RNA, 19 nt, Homo sapiens
  misc_RNA (1)...(19): siRNA sense strand
gagcaucggccugaaagca

SEQ ID NO: 2054902 - RNA, 19 nt, Homo sapiens
  misc_RNA (1)...(19): siRNA sense strand
cugcagacaucccgagagu

SEQ ID NO: 2054903 - RNA, 19 nt, Homo sapiens
  misc_RNA (1)...(19): siRNA sense strand
uguuaaccaugcugccaaa

SEQ ID NO: 2054904 - RNA, 19 nt, Homo sapiens
  misc_RNA (1)...(19): siRNA sense strand
acaccaaggagcagauguu

SEQ ID NO: 2054905 - RNA, 19 nt, Homo sapiens
  misc_RNA (1)...(19): siRNA sense strand
aggaggaggucaccaccau

SEQ ID NO: 2054906 - RNA, 19 nt, Homo sapiens
  misc_RNA (1)...(19): siRNA sense strand
ggaggauggcccugagucu

SEQ ID NO: 2054907 - RNA, 19 nt, Homo sapiens
  misc_RNA (1)...(19): siRNA sense strand
aggagcagauguuaaccau

SEQ ID NO: 2054908 - RNA, 19 nt, Homo sapiens
  misc_RNA (1)...(19): siRNA sense strand
gcagacaucccgagaguga

SEQ ID NO: 2054909 - RNA, 19 nt, Homo sapiens
  misc_RNA (1)...(19): siRNA sense strand
gaccagagguacacaccaa

SEQ ID NO: 2054910 - RNA, 19 nt, Homo sapiens
  misc_RNA (1)...(19): siRNA sense strand
uaaccaugcugccaaagga

SEQ ID NO: 2054911 - RNA, 19 nt, Homo sapiens
  misc_RNA (1)...(19): siRNA sense strand
gaggaggucaccaccauga

SEQ ID NO: 2054912 - RNA, 19 nt, Homo sapiens
  misc_RNA (1)...(19): siRNA sense strand
gcaagagcaucggccugaa

SEQ ID NO: 2054913 - RNA, 19 nt, Homo sapiens
  misc_RNA (1)...(19): siRNA sense strand
ccaaggagcagauguuaac

SEQ ID NO: 2054914 - RNA, 19 nt, Homo sapiens
  misc_RNA (1)...(19): siRNA sense strand
caagagcaucggccugaaa

SEQ ID NO: 2054915 - RNA, 19 nt, Homo sapiens
  misc_RNA (1)...(19): siRNA sense strand
caccaaggagcagauguua

SEQ ID NO: 2054916 - RNA, 19 nt, Homo sapiens
  misc_RNA (1)...(19): siRNA sense strand
ccacuccgcugagcuccuu

SEQ ID NO: 2054917 - RNA, 19 nt, Homo sapiens
  misc_RNA (1)...(19): siRNA sense strand
ggaggucaccaccaugauc

SEQ ID NO: 2054918 - RNA, 19 nt, Homo sapiens
  misc_RNA (1)...(19): siRNA sense strand
gagcaucggccugaaagca

SEQ ID NO: 2054919 - RNA, 19 nt, Homo sapiens
  misc_RNA (1)...(19): siRNA sense strand
cugcagacaucccgagagu

SEQ ID NO: 2054920 - RNA, 19 nt, Homo sapiens
  misc_RNA (1)...(19): siRNA sense strand
uguuaaccaugcugccaaa

SEQ ID NO: 2054921 - RNA, 19 nt, Homo sapiens
  misc_RNA (1)...(19): siRNA sense strand
acaccaaggagcagauguu

SEQ ID NO: 2054922 - RNA, 19 nt, Homo sapiens
  misc_RNA (1)...(19): siRNA sense strand
aggaggaggucaccaccau

SEQ ID NO: 2054923 - RNA, 19 nt, Homo sapiens
  misc_RNA (1)...(19): siRNA sense strand
ggaggauggcccugagucu

SEQ ID NO: 2054924 - RNA, 19 nt, Homo sapiens
  misc_RNA (1)...(19): siRNA sense strand
aggagcagauguuaaccau

SEQ ID NO: 2054925 - RNA, 19 nt, Homo sapiens
  misc_RNA (1)...(19): siRNA sense strand
gggaaaagcuucaaucaua

SEQ ID NO: 2054926 - RNA, 19 nt, Homo sapiens
  misc_RNA (1)...(19): siRNA sense strand
ugaaaguucuuaccucauu

SEQ ID NO: 2054927 - RNA, 19 nt, Homo sapiens
  misc_RNA (1)...(19): siRNA sense strand
gaaaaggaacgacuaaaua

SEQ ID NO: 2054928 - RNA, 19 nt, Homo sapiens
  misc_RNA (1)...(19): siRNA sense strand
gaaaguucuuaccucauuu

SEQ ID NO: 2054929 - RNA, 19 nt, Homo sapiens
  misc_RNA (1)...(19): siRNA sense strand
gggagaagauauuuaagug

SEQ ID NO: 2054930 - RNA, 19 nt, Homo sapiens
  misc_RNA (1)...(19): siRNA sense strand
guagacaucaguauuauug

SEQ ID NO: 2054931 - RNA, 19 nt, Homo sapiens
  misc_RNA (1)...(19): siRNA sense strand
caauaaacaugagcgaauu

SEQ ID NO: 2054932 - RNA, 19 nt, Homo sapiens
  misc_RNA (1)...(19): siRNA sense strand
ggaaaagcuucaaucauaa

SEQ ID NO: 2054933 - RNA, 19 nt, Homo sapiens
  misc_RNA (1)...(19): siRNA sense strand
ugagaaaucuguuaguuac

SEQ ID NO: 2054934 - RNA, 19 nt, Homo sapiens
  misc_RNA (1)...(19): siRNA sense strand
acaaggagaugguacacuu

SEQ ID NO: 2054935 - RNA, 19 nt, Homo sapiens
  misc_RNA (1)...(19): siRNA sense strand
gaccuugguuauuaugaaa

SEQ ID NO: 2054936 - RNA, 19 nt, Homo sapiens
  misc_RNA (1)...(19): siRNA sense strand
gagcuuggauccuacucaa

SEQ ID NO: 2054937 - RNA, 19 nt, Homo sapiens
  misc_RNA (1)...(19): siRNA sense strand
caacaacucacgucagaga

SEQ ID NO: 2054938 - RNA, 19 nt, Homo sapiens
  misc_RNA (1)...(19): siRNA sense strand
caugaaggaauccauauaa

SEQ ID NO: 2054939 - RNA, 19 nt, Homo sapiens
  misc_RNA (1)...(19): siRNA sense strand
ggucggcugucaaacugua

SEQ ID NO: 2054940 - RNA, 19 nt, Homo sapiens
  misc_RNA (1)...(19): siRNA sense strand
gaaugauacuccucuagag

SEQ ID NO: 2054941 - RNA, 19 nt, Homo sapiens
  misc_RNA (1)...(19): siRNA sense strand
gcucaagccuucagaacag

SEQ ID NO: 2054942 - RNA, 19 nt, Homo sapiens
  misc_RNA (1)...(19): siRNA sense strand
gagggaaccuguagaaaau

SEQ ID NO: 2054943 - RNA, 19 nt, Homo sapiens
  misc_RNA (1)...(19): siRNA sense strand
gagaaaccuuauuccuguu

SEQ ID NO: 2054944 - RNA, 19 nt, Homo sapiens
  misc_RNA (1)...(19): siRNA sense strand
gaggaacucucaaaauaug

SEQ ID NO: 2054945 - RNA, 19 nt, Homo sapiens
  misc_RNA (1)...(19): siRNA sense strand
ugaaagaugugagcucaag

SEQ ID NO: 2054946 - RNA, 19 nt, Homo sapiens
  misc_RNA (1)...(19): siRNA sense strand
cagugucucuguauuugaa

SEQ ID NO: 2054947 - RNA, 19 nt, Homo sapiens
  misc_RNA (1)...(19): siRNA sense strand
cgucagagaaggaagauga

SEQ ID NO: 2054948 - RNA, 19 nt, Homo sapiens
  misc_RNA (1)...(19): siRNA sense strand
gagaaaagucuucagauga

SEQ ID NO: 2054949 - RNA, 19 nt, Homo sapiens
  misc_RNA (1)...(19): siRNA sense strand
ugugugagcuuggauccua

SEQ ID NO: 2054950 - RNA, 19 nt, Homo sapiens
  misc_RNA (1)...(19): siRNA sense strand
cgaaaucggaggacaagga

SEQ ID NO: 2054951 - RNA, 19 nt, Homo sapiens
  misc_RNA (1)...(19): siRNA sense strand
ucaauaaacaugagcgaau

SEQ ID NO: 2054952 - RNA, 19 nt, Homo sapiens
  misc_RNA (1)...(19): siRNA sense strand
ggagaagauauuuaagugu

SEQ ID NO: 2054953 - RNA, 19 nt, Homo sapiens
  misc_RNA (1)...(19): siRNA sense strand
agaccuugguuauuaugaa

SEQ ID NO: 2054954 - RNA, 19 nt, Homo sapiens
  misc_RNA (1)...(19): siRNA sense strand
gaaugaggaguuugugcuu

SEQ ID NO: 2054955 - RNA, 19 nt, Homo sapiens
  misc_RNA (1)...(19): siRNA sense strand
ugagaaugauacuccucua

SEQ ID NO: 2054956 - RNA, 19 nt, Homo sapiens
  misc_RNA (1)...(19): siRNA sense strand
gaaaucuguuaguuaccau

SEQ ID NO: 2054957 - RNA, 19 nt, Homo sapiens
  misc_RNA (1)...(19): siRNA sense strand
ggaaaaggaacgacuaaau

SEQ ID NO: 2054958 - RNA, 19 nt, Homo sapiens
  misc_RNA (1)...(19): siRNA sense strand
cccaaagaaugaggaguuu

SEQ ID NO: 2054959 - RNA, 19 nt, Homo sapiens
  misc_RNA (1)...(19): siRNA sense strand
ccauauaagggagaagaua

SEQ ID NO: 2054960 - RNA, 19 nt, Homo sapiens
  misc_RNA (1)...(19): siRNA sense strand
uuauugcccuuacucgaaa

SEQ ID NO: 2054961 - RNA, 19 nt, Homo sapiens
  misc_RNA (1)...(19): siRNA sense strand
gcacuuccucaccuucuug

SEQ ID NO: 2054962 - RNA, 19 nt, Homo sapiens
  misc_RNA (1)...(19): siRNA sense strand
ucaugaaggaauccauaua

SEQ ID NO: 2054963 - RNA, 19 nt, Homo sapiens
  misc_RNA (1)...(19): siRNA sense strand
ugagagggaaccuguagaa

SEQ ID NO: 2054964 - RNA, 19 nt, Homo sapiens
  misc_RNA (1)...(19): siRNA sense strand
cucaacaacucacgucaga

SEQ ID NO: 2054965 - RNA, 19 nt, Homo sapiens
  misc_RNA (1)...(19): siRNA sense strand
auacaggagagaaaccuua

SEQ ID NO: 2054966 - RNA, 19 nt, Homo sapiens
  misc_RNA (1)...(19): siRNA sense strand
caggagagaaaccuuauuc

SEQ ID NO: 2054967 - RNA, 19 nt, Homo sapiens
  misc_RNA (1)...(19): siRNA sense strand
caagaccuacuucgagaug

SEQ ID NO: 2054968 - RNA, 19 nt, Homo sapiens
  misc_RNA (1)...(19): siRNA sense strand
guaagacccgaaagcagaa

SEQ ID NO: 2054969 - RNA, 19 nt, Homo sapiens
  misc_RNA (1)...(19): siRNA sense strand
cgacuaaauacauccauuc

SEQ ID NO: 2054970 - RNA, 19 nt, Homo sapiens
  misc_RNA (1)...(19): siRNA sense strand
gagagggaaccuguagaaa

SEQ ID NO: 2054971 - RNA, 19 nt, Homo sapiens
  misc_RNA (1)...(19): siRNA sense strand
gaaggugaagauccugaga

SEQ ID NO: 2054972 - RNA, 19 nt, Homo sapiens
  misc_RNA (1)...(19): siRNA sense strand
ccaaaggaguccaaaagga

SEQ ID NO: 2054973 - RNA, 19 nt, Homo sapiens
  misc_RNA (1)...(19): siRNA sense strand
agaaugauacuccucuaga

SEQ ID NO: 2054974 - RNA, 19 nt, Homo sapiens
  misc_RNA (1)...(19): siRNA sense strand
caagcugggccaagaccua

SEQ ID NO: 2054975 - RNA, 19 nt, Homo sapiens
  misc_RNA (1)...(19): siRNA sense strand
gaauccauauaagggagaa

SEQ ID NO: 2054976 - RNA, 19 nt, Homo sapiens
  misc_RNA (1)...(19): siRNA sense strand
gaaaccuuauuccuguucu

SEQ ID NO: 2054977 - RNA, 19 nt, Homo sapiens
  misc_RNA (1)...(19): siRNA sense strand
caauggcaguaauccugaa

SEQ ID NO: 2054978 - RNA, 19 nt, Homo sapiens
  misc_RNA (1)...(19): siRNA sense strand
cgucaugaaggaauccaua

SEQ ID NO: 2054979 - RNA, 19 nt, Homo sapiens
  misc_RNA (1)...(19): siRNA sense strand
augaugaaauggauucuuc

SEQ ID NO: 2054980 - RNA, 19 nt, Homo sapiens
  misc_RNA (1)...(19): siRNA sense strand
ggcagucaauggcaguaau

SEQ ID NO: 2054981 - RNA, 19 nt, Homo sapiens
  misc_RNA (1)...(19): siRNA sense strand
gauauuuaaguguccagaa

SEQ ID NO: 2054982 - RNA, 19 nt, Homo sapiens
  misc_RNA (1)...(19): siRNA sense strand
ggagagaaaccuuauuccu

SEQ ID NO: 2054983 - RNA, 19 nt, Homo sapiens
  misc_RNA (1)...(19): siRNA sense strand
gagaaugauacuccucuag

SEQ ID NO: 2054984 - RNA, 19 nt, Homo sapiens
  misc_RNA (1)...(19): siRNA sense strand
caguaauccugaaggugaa

SEQ ID NO: 2054985 - RNA, 19 nt, Homo sapiens
  misc_RNA (1)...(19): siRNA sense strand
agaaaucuguuaguuacca

SEQ ID NO: 2054986 - RNA, 19 nt, Homo sapiens
  misc_RNA (1)...(19): siRNA sense strand
aaaccuucccaaagaauga

SEQ ID NO: 2054987 - RNA, 19 nt, Homo sapiens
  misc_RNA (1)...(19): siRNA sense strand
agaaaagucuucagaugau

SEQ ID NO: 2054988 - RNA, 19 nt, Homo sapiens
  misc_RNA (1)...(19): siRNA sense strand
aaacuuccgucagaauucu

SEQ ID NO: 2054989 - RNA, 19 nt, Homo sapiens
  misc_RNA (1)...(19): siRNA sense strand
ggaggacaaggagauggua

SEQ ID NO: 2054990 - RNA, 19 nt, Homo sapiens
  misc_RNA (1)...(19): siRNA sense strand
caaaggaguccaaaaggaa

SEQ ID NO: 2054991 - RNA, 19 nt, Homo sapiens
  misc_RNA (1)...(19): siRNA sense strand
agagaaaagucuucagaug

SEQ ID NO: 2054992 - RNA, 19 nt, Homo sapiens
  misc_RNA (1)...(19): siRNA sense strand
gcuuggauccuacucaaca

SEQ ID NO: 2054993 - RNA, 19 nt, Homo sapiens
  misc_RNA (1)...(19): siRNA sense strand
gguggucuuugaggauuug

SEQ ID NO: 2054994 - RNA, 19 nt, Homo sapiens
  misc_RNA (1)...(19): siRNA sense strand
cagaugaugaugaaaugga

SEQ ID NO: 2054995 - RNA, 19 nt, Homo sapiens
  misc_RNA (1)...(19): siRNA sense strand
gaaaagucuucagaugaug

SEQ ID NO: 2054996 - RNA, 19 nt, Homo sapiens
  misc_RNA (1)...(19): siRNA sense strand
ggugaagcuucugcccaaa

SEQ ID NO: 2054997 - RNA, 19 nt, Homo sapiens
  misc_RNA (1)...(19): siRNA sense strand
gggaaccuguagaaaauga

SEQ ID NO: 2054998 - RNA, 19 nt, Homo sapiens
  misc_RNA (1)...(19): siRNA sense strand
caagaccauccaccagcua

SEQ ID NO: 2054999 - RNA, 19 nt, Homo sapiens
  misc_RNA (1)...(19): siRNA sense strand
ggagaccuugguuauuaug

SEQ ID NO: 2055000 - RNA, 19 nt, Homo sapiens
  misc_RNA (1)...(19): siRNA sense strand
ugaaggaauccauauaagg

SEQ ID NO: 2055001 - RNA, 19 nt, Homo sapiens
  misc_RNA (1)...(19): siRNA sense strand
gcagucaauggcaguaauc

SEQ ID NO: 2055002 - RNA, 19 nt, Homo sapiens
  misc_RNA (1)...(19): siRNA sense strand
caaacuguacccggcauga

SEQ ID NO: 2055003 - RNA, 19 nt, Homo sapiens
  misc_RNA (1)...(19): siRNA sense strand
gguccagcccagucagaaa

SEQ ID NO: 2055004 - RNA, 19 nt, Homo sapiens
  misc_RNA (1)...(19): siRNA sense strand
acuccaagcugggccaaga

SEQ ID NO: 2055005 - RNA, 19 nt, Homo sapiens
  misc_RNA (1)...(19): siRNA sense strand
ggagucgucaugaaggaau

SEQ ID NO: 2055006 - RNA, 19 nt, Homo sapiens
  misc_RNA (1)...(19): siRNA sense strand
auacauccauuccacaaaa

SEQ ID NO: 2055007 - RNA, 19 nt, Homo sapiens
  misc_RNA (1)...(19): siRNA sense strand
aaauacauccauuccacaa

SEQ ID NO: 2055008 - RNA, 19 nt, Homo sapiens
  misc_RNA (1)...(19): siRNA sense strand
cucagcagccucccgauaa

SEQ ID NO: 2055009 - RNA, 19 nt, Homo sapiens
  misc_RNA (1)...(19): siRNA sense strand
ggucuuugaggauuugaau

SEQ ID NO: 2055010 - RNA, 19 nt, Homo sapiens
  misc_RNA (1)...(19): siRNA sense strand
gaauucauacaggagagaa

SEQ ID NO: 2055011 - RNA, 19 nt, Homo sapiens
  misc_RNA (1)...(19): siRNA sense strand
gaacgacuaaauacaucca

SEQ ID NO: 2055012 - RNA, 19 nt, Homo sapiens
  misc_RNA (1)...(19): siRNA sense strand
aaaggaacgacuaaauaca

SEQ ID NO: 2055013 - RNA, 19 nt, Homo sapiens
  misc_RNA (1)...(19): siRNA sense strand
ucucagcagccucccgaua

SEQ ID NO: 2055014 - RNA, 19 nt, Homo sapiens
  misc_RNA (1)...(19): siRNA sense strand
ugaagcuucugcccaaagg

SEQ ID NO: 2055015 - RNA, 19 nt, Homo sapiens
  misc_RNA (1)...(19): siRNA sense strand
gauccuacucaacaacuca

SEQ ID NO: 2055016 - RNA, 19 nt, Homo sapiens
  misc_RNA (1)...(19): siRNA sense strand
ucacugccaggaagaaugu

SEQ ID NO: 2055017 - RNA, 19 nt, Homo sapiens
  misc_RNA (1)...(19): siRNA sense strand
aagaaugugugagcuugga

SEQ ID NO: 2055018 - RNA, 19 nt, Homo sapiens
  misc_RNA (1)...(19): siRNA sense strand
gacccgaaagcagaaguaa

SEQ ID NO: 2055019 - RNA, 19 nt, Homo sapiens
  misc_RNA (1)...(19): siRNA sense strand
caucggagucgucaugaag

SEQ ID NO: 2055020 - RNA, 19 nt, Homo sapiens
  misc_RNA (1)...(19): siRNA sense strand
ccuugguuauuaugaaaga

SEQ ID NO: 2055021 - RNA, 19 nt, Homo sapiens
  misc_RNA (1)...(19): siRNA sense strand
aggagaccuugguuauuau

SEQ ID NO: 2055022 - RNA, 19 nt, Homo sapiens
  misc_RNA (1)...(19): siRNA sense strand
acgacuaaauacauccauu

SEQ ID NO: 2055023 - RNA, 19 nt, Homo sapiens
  misc_RNA (1)...(19): siRNA sense strand
gaugaugaugaaauggauu

SEQ ID NO: 2055024 - RNA, 19 nt, Homo sapiens
  misc_RNA (1)...(19): siRNA sense strand
gggccaagaccuacuucga

SEQ ID NO: 2055025 - RNA, 19 nt, Homo sapiens
  misc_RNA (1)...(19): siRNA sense strand
gggaaaagcuucaaucaua

SEQ ID NO: 2055026 - RNA, 19 nt, Homo sapiens
  misc_RNA (1)...(19): siRNA sense strand
ugaaaguucuuaccucauu

SEQ ID NO: 2055027 - RNA, 19 nt, Homo sapiens
  misc_RNA (1)...(19): siRNA sense strand
gaaaaggaacgacuaaaua

SEQ ID NO: 2055028 - RNA, 19 nt, Homo sapiens
  misc_RNA (1)...(19): siRNA sense strand
gaaaguucuuaccucauuu

SEQ ID NO: 2055029 - RNA, 19 nt, Homo sapiens
  misc_RNA (1)...(19): siRNA sense strand
gggagaagauauuuaagug

SEQ ID NO: 2055030 - RNA, 19 nt, Homo sapiens
  misc_RNA (1)...(19): siRNA sense strand
guagacaucaguauuauug

SEQ ID NO: 2055031 - RNA, 19 nt, Homo sapiens
  misc_RNA (1)...(19): siRNA sense strand
caauaaacaugagcgaauu

SEQ ID NO: 2055032 - RNA, 19 nt, Homo sapiens
  misc_RNA (1)...(19): siRNA sense strand
ggaaaagcuucaaucauaa

SEQ ID NO: 2055033 - RNA, 19 nt, Homo sapiens
  misc_RNA (1)...(19): siRNA sense strand
ugagaaaucuguuaguuac

SEQ ID NO: 2055034 - RNA, 19 nt, Homo sapiens
  misc_RNA (1)...(19): siRNA sense strand
acaaggagaugguacacuu

SEQ ID NO: 2055035 - RNA, 19 nt, Homo sapiens
  misc_RNA (1)...(19): siRNA sense strand
gaccuugguuauuaugaaa

SEQ ID NO: 2055036 - RNA, 19 nt, Homo sapiens
  misc_RNA (1)...(19): siRNA sense strand
gagcuuggauccuacucaa

SEQ ID NO: 2055037 - RNA, 19 nt, Homo sapiens
  misc_RNA (1)...(19): siRNA sense strand
caacaacucacgucagaga

SEQ ID NO: 2055038 - RNA, 19 nt, Homo sapiens
  misc_RNA (1)...(19): siRNA sense strand
caugaaggaauccauauaa

SEQ ID NO: 2055039 - RNA, 19 nt, Homo sapiens
  misc_RNA (1)...(19): siRNA sense strand
ggucggcugucaaacugua

SEQ ID NO: 2055040 - RNA, 19 nt, Homo sapiens
  misc_RNA (1)...(19): siRNA sense strand
gaaugauacuccucuagag

SEQ ID NO: 2055041 - RNA, 19 nt, Homo sapiens
  misc_RNA (1)...(19): siRNA sense strand
gcucaagccuucagaacag

SEQ ID NO: 2055042 - RNA, 19 nt, Homo sapiens
  misc_RNA (1)...(19): siRNA sense strand
gagggaaccuguagaaaau

SEQ ID NO: 2055043 - RNA, 19 nt, Homo sapiens
  misc_RNA (1)...(19): siRNA sense strand
gagaaaccuuauuccuguu

SEQ ID NO: 2055044 - RNA, 19 nt, Homo sapiens
  misc_RNA (1)...(19): siRNA sense strand
gaggaacucucaaaauaug

SEQ ID NO: 2055045 - RNA, 19 nt, Homo sapiens
  misc_RNA (1)...(19): siRNA sense strand
ugaaagaugugagcucaag

SEQ ID NO: 2055046 - RNA, 19 nt, Homo sapiens
  misc_RNA (1)...(19): siRNA sense strand
cagugucucuguauuugaa

SEQ ID NO: 2055047 - RNA, 19 nt, Homo sapiens
  misc_RNA (1)...(19): siRNA sense strand
cgucagagaaggaagauga

SEQ ID NO: 2055048 - RNA, 19 nt, Homo sapiens
  misc_RNA (1)...(19): siRNA sense strand
gagaaaagucuucagauga

SEQ ID NO: 2055049 - RNA, 19 nt, Homo sapiens
  misc_RNA (1)...(19): siRNA sense strand
ugugugagcuuggauccua

SEQ ID NO: 2055050 - RNA, 19 nt, Homo sapiens
  misc_RNA (1)...(19): siRNA sense strand
cgaaaucggaggacaagga

SEQ ID NO: 2055051 - RNA, 19 nt, Homo sapiens
  misc_RNA (1)...(19): siRNA sense strand
ucaauaaacaugagcgaau

SEQ ID NO: 2055052 - RNA, 19 nt, Homo sapiens
  misc_RNA (1)...(19): siRNA sense strand
ggagaagauauuuaagugu

SEQ ID NO: 2055053 - RNA, 19 nt, Homo sapiens
  misc_RNA (1)...(19): siRNA sense strand
agaccuugguuauuaugaa

SEQ ID NO: 2055054 - RNA, 19 nt, Homo sapiens
  misc_RNA (1)...(19): siRNA sense strand
gaaugaggaguuugugcuu

SEQ ID NO: 2055055 - RNA, 19 nt, Homo sapiens
  misc_RNA (1)...(19): siRNA sense strand
ugagaaugauacuccucua

SEQ ID NO: 2055056 - RNA, 19 nt, Homo sapiens
  misc_RNA (1)...(19): siRNA sense strand
gaaaucuguuaguuaccau

SEQ ID NO: 2055057 - RNA, 19 nt, Homo sapiens
  misc_RNA (1)...(19): siRNA sense strand
ggaaaaggaacgacuaaau

SEQ ID NO: 2055058 - RNA, 19 nt, Homo sapiens
  misc_RNA (1)...(19): siRNA sense strand
cccaaagaaugaggaguuu

SEQ ID NO: 2055059 - RNA, 19 nt, Homo sapiens
  misc_RNA (1)...(19): siRNA sense strand
ccauauaagggagaagaua

SEQ ID NO: 2055060 - RNA, 19 nt, Homo sapiens
  misc_RNA (1)...(19): siRNA sense strand
uuauugcccuuacucgaaa

SEQ ID NO: 2055061 - RNA, 19 nt, Homo sapiens
  misc_RNA (1)...(19): siRNA sense strand
gcacuuccucaccuucuug

SEQ ID NO: 2055062 - RNA, 19 nt, Homo sapiens
  misc_RNA (1)...(19): siRNA sense strand
ucaugaaggaauccauaua

SEQ ID NO: 2055063 - RNA, 19 nt, Homo sapiens
  misc_RNA (1)...(19): siRNA sense strand
ugagagggaaccuguagaa

SEQ ID NO: 2055064 - RNA, 19 nt, Homo sapiens
  misc_RNA (1)...(19): siRNA sense strand
cucaacaacucacgucaga

SEQ ID NO: 2055065 - RNA, 19 nt, Homo sapiens
  misc_RNA (1)...(19): siRNA sense strand
auacaggagagaaaccuua

SEQ ID NO: 2055066 - RNA, 19 nt, Homo sapiens
  misc_RNA (1)...(19): siRNA sense strand
caggagagaaaccuuauuc

SEQ ID NO: 2055067 - RNA, 19 nt, Homo sapiens
  misc_RNA (1)...(19): siRNA sense strand
caagaccuacuucgagaug

SEQ ID NO: 2055068 - RNA, 19 nt, Homo sapiens
  misc_RNA (1)...(19): siRNA sense strand
guaagacccgaaagcagaa

SEQ ID NO: 2055069 - RNA, 19 nt, Homo sapiens
  misc_RNA (1)...(19): siRNA sense strand
cgacuaaauacauccauuc

SEQ ID NO: 2055070 - RNA, 19 nt, Homo sapiens
  misc_RNA (1)...(19): siRNA sense strand
gagagggaaccuguagaaa

SEQ ID NO: 2055071 - RNA, 19 nt, Homo sapiens
  misc_RNA (1)...(19): siRNA sense strand
gaaggugaagauccugaga

SEQ ID NO: 2055072 - RNA, 19 nt, Homo sapiens
  misc_RNA (1)...(19): siRNA sense strand
ccaaaggaguccaaaagga

SEQ ID NO: 2055073 - RNA, 19 nt, Homo sapiens
  misc_RNA (1)...(19): siRNA sense strand
agaaugauacuccucuaga

SEQ ID NO: 2055074 - RNA, 19 nt, Homo sapiens
  misc_RNA (1)...(19): siRNA sense strand
caagcugggccaagaccua

SEQ ID NO: 2055075 - RNA, 19 nt, Homo sapiens
  misc_RNA (1)...(19): siRNA sense strand
gaauccauauaagggagaa

SEQ ID NO: 2055076 - RNA, 19 nt, Homo sapiens
  misc_RNA (1)...(19): siRNA sense strand
gaaaccuuauuccuguucu

SEQ ID NO: 2055077 - RNA, 19 nt, Homo sapiens
  misc_RNA (1)...(19): siRNA sense strand
caauggcaguaauccugaa

SEQ ID NO: 2055078 - RNA, 19 nt, Homo sapiens
  misc_RNA (1)...(19): siRNA sense strand
cgucaugaaggaauccaua

SEQ ID NO: 2055079 - RNA, 19 nt, Homo sapiens
  misc_RNA (1)...(19): siRNA sense strand
augaugaaauggauucuuc

SEQ ID NO: 2055080 - RNA, 19 nt, Homo sapiens
  misc_RNA (1)...(19): siRNA sense strand
ggcagucaauggcaguaau

SEQ ID NO: 2055081 - RNA, 19 nt, Homo sapiens
  misc_RNA (1)...(19): siRNA sense strand
gauauuuaaguguccagaa

SEQ ID NO: 2055082 - RNA, 19 nt, Homo sapiens
  misc_RNA (1)...(19): siRNA sense strand
ggagagaaaccuuauuccu

SEQ ID NO: 2055083 - RNA, 19 nt, Homo sapiens
  misc_RNA (1)...(19): siRNA sense strand
gagaaugauacuccucuag

SEQ ID NO: 2055084 - RNA, 19 nt, Homo sapiens
  misc_RNA (1)...(19): siRNA sense strand
caguaauccugaaggugaa

SEQ ID NO: 2055085 - RNA, 19 nt, Homo sapiens
  misc_RNA (1)...(19): siRNA sense strand
agaaaucuguuaguuacca

SEQ ID NO: 2055086 - RNA, 19 nt, Homo sapiens
  misc_RNA (1)...(19): siRNA sense strand
aaaccuucccaaagaauga

SEQ ID NO: 2055087 - RNA, 19 nt, Homo sapiens
  misc_RNA (1)...(19): siRNA sense strand
agaaaagucuucagaugau

SEQ ID NO: 2055088 - RNA, 19 nt, Homo sapiens
  misc_RNA (1)...(19): siRNA sense strand
aaacuuccgucagaauucu

SEQ ID NO: 2055089 - RNA, 19 nt, Homo sapiens
  misc_RNA (1)...(19): siRNA sense strand
ggaggacaaggagauggua

SEQ ID NO: 2055090 - RNA, 19 nt, Homo sapiens
  misc_RNA (1)...(19): siRNA sense strand
caaaggaguccaaaaggaa

SEQ ID NO: 2055091 - RNA, 19 nt, Homo sapiens
  misc_RNA (1)...(19): siRNA sense strand
agagaaaagucuucagaug

SEQ ID NO: 2055092 - RNA, 19 nt, Homo sapiens
  misc_RNA (1)...(19): siRNA sense strand
gcuuggauccuacucaaca

SEQ ID NO: 2055093 - RNA, 19 nt, Homo sapiens
  misc_RNA (1)...(19): siRNA sense strand
gguggucuuugaggauuug

SEQ ID NO: 2055094 - RNA, 19 nt, Homo sapiens
  misc_RNA (1)...(19): siRNA sense strand
cagaugaugaugaaaugga

SEQ ID NO: 2055095 - RNA, 19 nt, Homo sapiens
  misc_RNA (1)...(19): siRNA sense strand
gaaaagucuucagaugaug

SEQ ID NO: 2055096 - RNA, 19 nt, Homo sapiens
  misc_RNA (1)...(19): siRNA sense strand
ggugaagcuucugcccaaa

SEQ ID NO: 2055097 - RNA, 19 nt, Homo sapiens
  misc_RNA (1)...(19): siRNA sense strand
gggaaccuguagaaaauga

SEQ ID NO: 2055098 - RNA, 19 nt, Homo sapiens
  misc_RNA (1)...(19): siRNA sense strand
caagaccauccaccagcua

SEQ ID NO: 2055099 - RNA, 19 nt, Homo sapiens
  misc_RNA (1)...(19): siRNA sense strand
ggagaccuugguuauuaug

SEQ ID NO: 2055100 - RNA, 19 nt, Homo sapiens
  misc_RNA (1)...(19): siRNA sense strand
ugaaggaauccauauaagg

SEQ ID NO: 2055101 - RNA, 19 nt, Homo sapiens
  misc_RNA (1)...(19): siRNA sense strand
gcagucaauggcaguaauc

SEQ ID NO: 2055102 - RNA, 19 nt, Homo sapiens
  misc_RNA (1)...(19): siRNA sense strand
caaacuguacccggcauga

SEQ ID NO: 2055103 - RNA, 19 nt, Homo sapiens
  misc_RNA (1)...(19): siRNA sense strand
gguccagcccagucagaaa

SEQ ID NO: 2055104 - RNA, 19 nt, Homo sapiens
  misc_RNA (1)...(19): siRNA sense strand
acuccaagcugggccaaga

SEQ ID NO: 2055105 - RNA, 19 nt, Homo sapiens
  misc_RNA (1)...(19): siRNA sense strand
ggagucgucaugaaggaau

SEQ ID NO: 2055106 - RNA, 19 nt, Homo sapiens
  misc_RNA (1)...(19): siRNA sense strand
auacauccauuccacaaaa

SEQ ID NO: 2055107 - RNA, 19 nt, Homo sapiens
  misc_RNA (1)...(19): siRNA sense strand
aaauacauccauuccacaa

SEQ ID NO: 2055108 - RNA, 19 nt, Homo sapiens
  misc_RNA (1)...(19): siRNA sense strand
cucagcagccucccgauaa

SEQ ID NO: 2055109 - RNA, 19 nt, Homo sapiens
  misc_RNA (1)...(19): siRNA sense strand
ggucuuugaggauuugaau

SEQ ID NO: 2055110 - RNA, 19 nt, Homo sapiens
  misc_RNA (1)...(19): siRNA sense strand
gaauucauacaggagagaa

SEQ ID NO: 2055111 - RNA, 19 nt, Homo sapiens
  misc_RNA (1)...(19): siRNA sense strand
gaacgacuaaauacaucca

SEQ ID NO: 2055112 - RNA, 19 nt, Homo sapiens
  misc_RNA (1)...(19): siRNA sense strand
aaaggaacgacuaaauaca

SEQ ID NO: 2055113 - RNA, 19 nt, Homo sapiens
  misc_RNA (1)...(19): siRNA sense strand
ucucagcagccucccgaua

SEQ ID NO: 2055114 - RNA, 19 nt, Homo sapiens
  misc_RNA (1)...(19): siRNA sense strand
ugaagcuucugcccaaagg

SEQ ID NO: 2055115 - RNA, 19 nt, Homo sapiens
  misc_RNA (1)...(19): siRNA sense strand
gauccuacucaacaacuca

SEQ ID NO: 2055116 - RNA, 19 nt, Homo sapiens
  misc_RNA (1)...(19): siRNA sense strand
ucacugccaggaagaaugu

SEQ ID NO: 2055117 - RNA, 19 nt, Homo sapiens
  misc_RNA (1)...(19): siRNA sense strand
aagaaugugugagcuugga

SEQ ID NO: 2055118 - RNA, 19 nt, Homo sapiens
  misc_RNA (1)...(19): siRNA sense strand
gacccgaaagcagaaguaa

SEQ ID NO: 2055119 - RNA, 19 nt, Homo sapiens
  misc_RNA (1)...(19): siRNA sense strand
caucggagucgucaugaag

SEQ ID NO: 2055120 - RNA, 19 nt, Homo sapiens
  misc_RNA (1)...(19): siRNA sense strand
ccuugguuauuaugaaaga

SEQ ID NO: 2055121 - RNA, 19 nt, Homo sapiens
  misc_RNA (1)...(19): siRNA sense strand
aggagaccuugguuauuau

SEQ ID NO: 2055122 - RNA, 19 nt, Homo sapiens
  misc_RNA (1)...(19): siRNA sense strand
acgacuaaauacauccauu

SEQ ID NO: 2055123 - RNA, 19 nt, Homo sapiens
  misc_RNA (1)...(19): siRNA sense strand
gaugaugaugaaauggauu

SEQ ID NO: 2055124 - RNA, 19 nt, Homo sapiens
  misc_RNA (1)...(19): siRNA sense strand
gggccaagaccuacuucga

SEQ ID NO: 2055125 - RNA, 19 nt, Homo sapiens
  misc_RNA (1)...(19): siRNA sense strand
gggaaaagcuucaaucaua

SEQ ID NO: 2055126 - RNA, 19 nt, Homo sapiens
  misc_RNA (1)...(19): siRNA sense strand
ugaaaguucuuaccucauu

SEQ ID NO: 2055127 - RNA, 19 nt, Homo sapiens
  misc_RNA (1)...(19): siRNA sense strand
gaaaaggaacgacuaaaua

SEQ ID NO: 2055128 - RNA, 19 nt, Homo sapiens
  misc_RNA (1)...(19): siRNA sense strand
gaaaguucuuaccucauuu

SEQ ID NO: 2055129 - RNA, 19 nt, Homo sapiens
  misc_RNA (1)...(19): siRNA sense strand
gggagaagauauuuaagug

SEQ ID NO: 2055130 - RNA, 19 nt, Homo sapiens
  misc_RNA (1)...(19): siRNA sense strand
guagacaucaguauuauug

SEQ ID NO: 2055131 - RNA, 19 nt, Homo sapiens
  misc_RNA (1)...(19): siRNA sense strand
caauaaacaugagcgaauu

SEQ ID NO: 2055132 - RNA, 19 nt, Homo sapiens
  misc_RNA (1)...(19): siRNA sense strand
ggaaaagcuucaaucauaa

SEQ ID NO: 2055133 - RNA, 19 nt, Homo sapiens
  misc_RNA (1)...(19): siRNA sense strand
ugagaaaucuguuaguuac

SEQ ID NO: 2055134 - RNA, 19 nt, Homo sapiens
  misc_RNA (1)...(19): siRNA sense strand
acaaggagaugguacacuu

SEQ ID NO: 2055135 - RNA, 19 nt, Homo sapiens
  misc_RNA (1)...(19): siRNA sense strand
gaccuugguuauuaugaaa

SEQ ID NO: 2055136 - RNA, 19 nt, Homo sapiens
  misc_RNA (1)...(19): siRNA sense strand
gagcuuggauccuacucaa

SEQ ID NO: 2055137 - RNA, 19 nt, Homo sapiens
  misc_RNA (1)...(19): siRNA sense strand
caacaacucacgucagaga

SEQ ID NO: 2055138 - RNA, 19 nt, Homo sapiens
  misc_RNA (1)...(19): siRNA sense strand
caugaaggaauccauauaa

SEQ ID NO: 2055139 - RNA, 19 nt, Homo sapiens
  misc_RNA (1)...(19): siRNA sense strand
ggucggcugucaaacugua

SEQ ID NO: 2055140 - RNA, 19 nt, Homo sapiens
  misc_RNA (1)...(19): siRNA sense strand
gaaugauacuccucuagag

SEQ ID NO: 2055141 - RNA, 19 nt, Homo sapiens
  misc_RNA (1)...(19): siRNA sense strand
gcucaagccuucagaacag

SEQ ID NO: 2055142 - RNA, 19 nt, Homo sapiens
  misc_RNA (1)...(19): siRNA sense strand
gagggaaccuguagaaaau

SEQ ID NO: 2055143 - RNA, 19 nt, Homo sapiens
  misc_RNA (1)...(19): siRNA sense strand
gagaaaccuuauuccuguu

SEQ ID NO: 2055144 - RNA, 19 nt, Homo sapiens
  misc_RNA (1)...(19): siRNA sense strand
gaggaacucucaaaauaug

SEQ ID NO: 2055145 - RNA, 19 nt, Homo sapiens
  misc_RNA (1)...(19): siRNA sense strand
ugaaagaugugagcucaag

SEQ ID NO: 2055146 - RNA, 19 nt, Homo sapiens
  misc_RNA (1)...(19): siRNA sense strand
cagugucucuguauuugaa

SEQ ID NO: 2055147 - RNA, 19 nt, Homo sapiens
  misc_RNA (1)...(19): siRNA sense strand
cgucagagaaggaagauga

SEQ ID NO: 2055148 - RNA, 19 nt, Homo sapiens
  misc_RNA (1)...(19): siRNA sense strand
gagaaaagucuucagauga

SEQ ID NO: 2055149 - RNA, 19 nt, Homo sapiens
  misc_RNA (1)...(19): siRNA sense strand
ugugugagcuuggauccua

SEQ ID NO: 2055150 - RNA, 19 nt, Homo sapiens
  misc_RNA (1)...(19): siRNA sense strand
cgaaaucggaggacaagga

SEQ ID NO: 2055151 - RNA, 19 nt, Homo sapiens
  misc_RNA (1)...(19): siRNA sense strand
ucaauaaacaugagcgaau

SEQ ID NO: 2055152 - RNA, 19 nt, Homo sapiens
  misc_RNA (1)...(19): siRNA sense strand
ggagaagauauuuaagugu

SEQ ID NO: 2055153 - RNA, 19 nt, Homo sapiens
  misc_RNA (1)...(19): siRNA sense strand
agaccuugguuauuaugaa

SEQ ID NO: 2055154 - RNA, 19 nt, Homo sapiens
  misc_RNA (1)...(19): siRNA sense strand
gaaugaggaguuugugcuu

SEQ ID NO: 2055155 - RNA, 19 nt, Homo sapiens
  misc_RNA (1)...(19): siRNA sense strand
ugagaaugauacuccucua

SEQ ID NO: 2055156 - RNA, 19 nt, Homo sapiens
  misc_RNA (1)...(19): siRNA sense strand
gaaaucuguuaguuaccau

SEQ ID NO: 2055157 - RNA, 19 nt, Homo sapiens
  misc_RNA (1)...(19): siRNA sense strand
ggaaaaggaacgacuaaau

SEQ ID NO: 2055158 - RNA, 19 nt, Homo sapiens
  misc_RNA (1)...(19): siRNA sense strand
cccaaagaaugaggaguuu

SEQ ID NO: 2055159 - RNA, 19 nt, Homo sapiens
  misc_RNA (1)...(19): siRNA sense strand
ccauauaagggagaagaua

SEQ ID NO: 2055160 - RNA, 19 nt, Homo sapiens
  misc_RNA (1)...(19): siRNA sense strand
uuauugcccuuacucgaaa

SEQ ID NO: 2055161 - RNA, 19 nt, Homo sapiens
  misc_RNA (1)...(19): siRNA sense strand
gcacuuccucaccuucuug

SEQ ID NO: 2055162 - RNA, 19 nt, Homo sapiens
  misc_RNA (1)...(19): siRNA sense strand
ucaugaaggaauccauaua

SEQ ID NO: 2055163 - RNA, 19 nt, Homo sapiens
  misc_RNA (1)...(19): siRNA sense strand
ugagagggaaccuguagaa

SEQ ID NO: 2055164 - RNA, 19 nt, Homo sapiens
  misc_RNA (1)...(19): siRNA sense strand
cucaacaacucacgucaga

SEQ ID NO: 2055165 - RNA, 19 nt, Homo sapiens
  misc_RNA (1)...(19): siRNA sense strand
auacaggagagaaaccuua

SEQ ID NO: 2055166 - RNA, 19 nt, Homo sapiens
  misc_RNA (1)...(19): siRNA sense strand
caggagagaaaccuuauuc

SEQ ID NO: 2055167 - RNA, 19 nt, Homo sapiens
  misc_RNA (1)...(19): siRNA sense strand
caagaccuacuucgagaug

SEQ ID NO: 2055168 - RNA, 19 nt, Homo sapiens
  misc_RNA (1)...(19): siRNA sense strand
guaagacccgaaagcagaa

SEQ ID NO: 2055169 - RNA, 19 nt, Homo sapiens
  misc_RNA (1)...(19): siRNA sense strand
cgacuaaauacauccauuc

SEQ ID NO: 2055170 - RNA, 19 nt, Homo sapiens
  misc_RNA (1)...(19): siRNA sense strand
gagagggaaccuguagaaa

SEQ ID NO: 2055171 - RNA, 19 nt, Homo sapiens
  misc_RNA (1)...(19): siRNA sense strand
gaaggugaagauccugaga

SEQ ID NO: 2055172 - RNA, 19 nt, Homo sapiens
  misc_RNA (1)...(19): siRNA sense strand
ccaaaggaguccaaaagga

SEQ ID NO: 2055173 - RNA, 19 nt, Homo sapiens
  misc_RNA (1)...(19): siRNA sense strand
agaaugauacuccucuaga

SEQ ID NO: 2055174 - RNA, 19 nt, Homo sapiens
  misc_RNA (1)...(19): siRNA sense strand
caagcugggccaagaccua

SEQ ID NO: 2055175 - RNA, 19 nt, Homo sapiens
  misc_RNA (1)...(19): siRNA sense strand
gaauccauauaagggagaa

SEQ ID NO: 2055176 - RNA, 19 nt, Homo sapiens
  misc_RNA (1)...(19): siRNA sense strand
gaaaccuuauuccuguucu

SEQ ID NO: 2055177 - RNA, 19 nt, Homo sapiens
  misc_RNA (1)...(19): siRNA sense strand
caauggcaguaauccugaa

SEQ ID NO: 2055178 - RNA, 19 nt, Homo sapiens
  misc_RNA (1)...(19): siRNA sense strand
cgucaugaaggaauccaua

SEQ ID NO: 2055179 - RNA, 19 nt, Homo sapiens
  misc_RNA (1)...(19): siRNA sense strand
augaugaaauggauucuuc

SEQ ID NO: 2055180 - RNA, 19 nt, Homo sapiens
  misc_RNA (1)...(19): siRNA sense strand
ggcagucaauggcaguaau

SEQ ID NO: 2055181 - RNA, 19 nt, Homo sapiens
  misc_RNA (1)...(19): siRNA sense strand
gauauuuaaguguccagaa

SEQ ID NO: 2055182 - RNA, 19 nt, Homo sapiens
  misc_RNA (1)...(19): siRNA sense strand
ggagagaaaccuuauuccu

SEQ ID NO: 2055183 - RNA, 19 nt, Homo sapiens
  misc_RNA (1)...(19): siRNA sense strand
gagaaugauacuccucuag

SEQ ID NO: 2055184 - RNA, 19 nt, Homo sapiens
  misc_RNA (1)...(19): siRNA sense strand
caguaauccugaaggugaa

SEQ ID NO: 2055185 - RNA, 19 nt, Homo sapiens
  misc_RNA (1)...(19): siRNA sense strand
agaaaucuguuaguuacca

SEQ ID NO: 2055186 - RNA, 19 nt, Homo sapiens
  misc_RNA (1)...(19): siRNA sense strand
aaaccuucccaaagaauga

SEQ ID NO: 2055187 - RNA, 19 nt, Homo sapiens
  misc_RNA (1)...(19): siRNA sense strand
agaaaagucuucagaugau

SEQ ID NO: 2055188 - RNA, 19 nt, Homo sapiens
  misc_RNA (1)...(19): siRNA sense strand
aaacuuccgucagaauucu

SEQ ID NO: 2055189 - RNA, 19 nt, Homo sapiens
  misc_RNA (1)...(19): siRNA sense strand
ggaggacaaggagauggua

SEQ ID NO: 2055190 - RNA, 19 nt, Homo sapiens
  misc_RNA (1)...(19): siRNA sense strand
caaaggaguccaaaaggaa

SEQ ID NO: 2055191 - RNA, 19 nt, Homo sapiens
  misc_RNA (1)...(19): siRNA sense strand
agagaaaagucuucagaug

SEQ ID NO: 2055192 - RNA, 19 nt, Homo sapiens
  misc_RNA (1)...(19): siRNA sense strand
gcuuggauccuacucaaca

SEQ ID NO: 2055193 - RNA, 19 nt, Homo sapiens
  misc_RNA (1)...(19): siRNA sense strand
gguggucuuugaggauuug

SEQ ID NO: 2055194 - RNA, 19 nt, Homo sapiens
  misc_RNA (1)...(19): siRNA sense strand
cagaugaugaugaaaugga

SEQ ID NO: 2055195 - RNA, 19 nt, Homo sapiens
  misc_RNA (1)...(19): siRNA sense strand
gaaaagucuucagaugaug

SEQ ID NO: 2055196 - RNA, 19 nt, Homo sapiens
  misc_RNA (1)...(19): siRNA sense strand
ggugaagcuucugcccaaa

SEQ ID NO: 2055197 - RNA, 19 nt, Homo sapiens
  misc_RNA (1)...(19): siRNA sense strand
gggaaccuguagaaaauga

SEQ ID NO: 2055198 - RNA, 19 nt, Homo sapiens
  misc_RNA (1)...(19): siRNA sense strand
caagaccauccaccagcua

SEQ ID NO: 2055199 - RNA, 19 nt, Homo sapiens
  misc_RNA (1)...(19): siRNA sense strand
ggagaccuugguuauuaug

SEQ ID NO: 2055200 - RNA, 19 nt, Homo sapiens
  misc_RNA (1)...(19): siRNA sense strand
ugaaggaauccauauaagg

SEQ ID NO: 2055201 - RNA, 19 nt, Homo sapiens
  misc_RNA (1)...(19): siRNA sense strand
gcagucaauggcaguaauc

SEQ ID NO: 2055202 - RNA, 19 nt, Homo sapiens
  misc_RNA (1)...(19): siRNA sense strand
caaacuguacccggcauga

SEQ ID NO: 2055203 - RNA, 19 nt, Homo sapiens
  misc_RNA (1)...(19): siRNA sense strand
gguccagcccagucagaaa

SEQ ID NO: 2055204 - RNA, 19 nt, Homo sapiens
  misc_RNA (1)...(19): siRNA sense strand
acuccaagcugggccaaga

SEQ ID NO: 2055205 - RNA, 19 nt, Homo sapiens
  misc_RNA (1)...(19): siRNA sense strand
ggagucgucaugaaggaau

SEQ ID NO: 2055206 - RNA, 19 nt, Homo sapiens
  misc_RNA (1)...(19): siRNA sense strand
auacauccauuccacaaaa

SEQ ID NO: 2055207 - RNA, 19 nt, Homo sapiens
  misc_RNA (1)...(19): siRNA sense strand
aaauacauccauuccacaa

SEQ ID NO: 2055208 - RNA, 19 nt, Homo sapiens
  misc_RNA (1)...(19): siRNA sense strand
cucagcagccucccgauaa

SEQ ID NO: 2055209 - RNA, 19 nt, Homo sapiens
  misc_RNA (1)...(19): siRNA sense strand
ggucuuugaggauuugaau

SEQ ID NO: 2055210 - RNA, 19 nt, Homo sapiens
  misc_RNA (1)...(19): siRNA sense strand
gaauucauacaggagagaa

SEQ ID NO: 2055211 - RNA, 19 nt, Homo sapiens
  misc_RNA (1)...(19): siRNA sense strand
gaacgacuaaauacaucca

SEQ ID NO: 2055212 - RNA, 19 nt, Homo sapiens
  misc_RNA (1)...(19): siRNA sense strand
aaaggaacgacuaaauaca

SEQ ID NO: 2055213 - RNA, 19 nt, Homo sapiens
  misc_RNA (1)...(19): siRNA sense strand
ucucagcagccucccgaua

SEQ ID NO: 2055214 - RNA, 19 nt, Homo sapiens
  misc_RNA (1)...(19): siRNA sense strand
ugaagcuucugcccaaagg

SEQ ID NO: 2055215 - RNA, 19 nt, Homo sapiens
  misc_RNA (1)...(19): siRNA sense strand
gauccuacucaacaacuca

SEQ ID NO: 2055216 - RNA, 19 nt, Homo sapiens
  misc_RNA (1)...(19): siRNA sense strand
ucacugccaggaagaaugu

SEQ ID NO: 2055217 - RNA, 19 nt, Homo sapiens
  misc_RNA (1)...(19): siRNA sense strand
aagaaugugugagcuugga

SEQ ID NO: 2055218 - RNA, 19 nt, Homo sapiens
  misc_RNA (1)...(19): siRNA sense strand
gacccgaaagcagaaguaa

SEQ ID NO: 2055219 - RNA, 19 nt, Homo sapiens
  misc_RNA (1)...(19): siRNA sense strand
caucggagucgucaugaag

SEQ ID NO: 2055220 - RNA, 19 nt, Homo sapiens
  misc_RNA (1)...(19): siRNA sense strand
ccuugguuauuaugaaaga

SEQ ID NO: 2055221 - RNA, 19 nt, Homo sapiens
  misc_RNA (1)...(19): siRNA sense strand
aggagaccuugguuauuau

SEQ ID NO: 2055222 - RNA, 19 nt, Homo sapiens
  misc_RNA (1)...(19): siRNA sense strand
acgacuaaauacauccauu

SEQ ID NO: 2055223 - RNA, 19 nt, Homo sapiens
  misc_RNA (1)...(19): siRNA sense strand
gaugaugaugaaauggauu

SEQ ID NO: 2055224 - RNA, 19 nt, Homo sapiens
  misc_RNA (1)...(19): siRNA sense strand
gggccaagaccuacuucga

SEQ ID NO: 2055225 - RNA, 19 nt, Homo sapiens
  misc_RNA (1)...(19): siRNA sense strand
uaugugcaaugaccuauuu

SEQ ID NO: 2055226 - RNA, 19 nt, Homo sapiens
  misc_RNA (1)...(19): siRNA sense strand
gguaaacccauuccaacua

SEQ ID NO: 2055227 - RNA, 19 nt, Homo sapiens
  misc_RNA (1)...(19): siRNA sense strand
guaaacccauuccaacuac

SEQ ID NO: 2055228 - RNA, 19 nt, Homo sapiens
  misc_RNA (1)...(19): siRNA sense strand
uaagguaaacccauuccaa

SEQ ID NO: 2055229 - RNA, 19 nt, Homo sapiens
  misc_RNA (1)...(19): siRNA sense strand
caucuucacccuucagaga

SEQ ID NO: 2055230 - RNA, 19 nt, Homo sapiens
  misc_RNA (1)...(19): siRNA sense strand
ucagagagcaguccuuucu

SEQ ID NO: 2055231 - RNA, 19 nt, Homo sapiens
  misc_RNA (1)...(19): siRNA sense strand
ggaccauaaacucaacuug

SEQ ID NO: 2055232 - RNA, 19 nt, Homo sapiens
  misc_RNA (1)...(19): siRNA sense strand
gugcaaugaccuauuuaag

SEQ ID NO: 2055233 - RNA, 19 nt, Homo sapiens
  misc_RNA (1)...(19): siRNA sense strand
cuucagagagcaguccuuu

SEQ ID NO: 2055234 - RNA, 19 nt, Homo sapiens
  misc_RNA (1)...(19): siRNA sense strand
gcagacaucccgagaguga

SEQ ID NO: 2055235 - RNA, 19 nt, Homo sapiens
  misc_RNA (1)...(19): siRNA sense strand
gaccagagguacacaccaa

SEQ ID NO: 2055236 - RNA, 19 nt, Homo sapiens
  misc_RNA (1)...(19): siRNA sense strand
uaaccaugcugccaaagga

SEQ ID NO: 2055237 - RNA, 19 nt, Homo sapiens
  misc_RNA (1)...(19): siRNA sense strand
gaggaggucaccaccauga

SEQ ID NO: 2055238 - RNA, 19 nt, Homo sapiens
  misc_RNA (1)...(19): siRNA sense strand
gcaagagcaucggccugaa

SEQ ID NO: 2055239 - RNA, 19 nt, Homo sapiens
  misc_RNA (1)...(19): siRNA sense strand
ccaaggagcagauguuaac

SEQ ID NO: 2055240 - RNA, 19 nt, Homo sapiens
  misc_RNA (1)...(19): siRNA sense strand
caagagcaucggccugaaa

SEQ ID NO: 2055241 - RNA, 19 nt, Homo sapiens
  misc_RNA (1)...(19): siRNA sense strand
caccaaggagcagauguua

SEQ ID NO: 2055242 - RNA, 19 nt, Homo sapiens
  misc_RNA (1)...(19): siRNA sense strand
ccacuccgcugagcuccuu

SEQ ID NO: 2055243 - RNA, 19 nt, Homo sapiens
  misc_RNA (1)...(19): siRNA sense strand
ggaggucaccaccaugauc

SEQ ID NO: 2055244 - RNA, 19 nt, Homo sapiens
  misc_RNA (1)...(19): siRNA sense strand
gagcaucggccugaaagca

SEQ ID NO: 2055245 - RNA, 19 nt, Homo sapiens
  misc_RNA (1)...(19): siRNA sense strand
cugcagacaucccgagagu

SEQ ID NO: 2055246 - RNA, 19 nt, Homo sapiens
  misc_RNA (1)...(19): siRNA sense strand
uguuaaccaugcugccaaa

SEQ ID NO: 2055247 - RNA, 19 nt, Homo sapiens
  misc_RNA (1)...(19): siRNA sense strand
acaccaaggagcagauguu

SEQ ID NO: 2055248 - RNA, 19 nt, Homo sapiens
  misc_RNA (1)...(19): siRNA sense strand
aggaggaggucaccaccau

SEQ ID NO: 2055249 - RNA, 19 nt, Homo sapiens
  misc_RNA (1)...(19): siRNA sense strand
ggaggauggcccugagucu

SEQ ID NO: 2055250 - RNA, 19 nt, Homo sapiens
  misc_RNA (1)...(19): siRNA sense strand
aggagcagauguuaaccau

SEQ ID NO: 2055251 - RNA, 19 nt, Homo sapiens
  misc_RNA (1)...(19): siRNA sense strand
gcagacaucccgagaguga

SEQ ID NO: 2055252 - RNA, 19 nt, Homo sapiens
  misc_RNA (1)...(19): siRNA sense strand
gaccagagguacacaccaa

SEQ ID NO: 2055253 - RNA, 19 nt, Homo sapiens
  misc_RNA (1)...(19): siRNA sense strand
uaaccaugcugccaaagga

SEQ ID NO: 2055254 - RNA, 19 nt, Homo sapiens
  misc_RNA (1)...(19): siRNA sense strand
gaggaggucaccaccauga

SEQ ID NO: 2055255 - RNA, 19 nt, Homo sapiens
  misc_RNA (1)...(19): siRNA sense strand
gcaagagcaucggccugaa

SEQ ID NO: 2055256 - RNA, 19 nt, Homo sapiens
  misc_RNA (1)...(19): siRNA sense strand
ccaaggagcagauguuaac

SEQ ID NO: 2055257 - RNA, 19 nt, Homo sapiens
  misc_RNA (1)...(19): siRNA sense strand
caagagcaucggccugaaa

SEQ ID NO: 2055258 - RNA, 19 nt, Homo sapiens
  misc_RNA (1)...(19): siRNA sense strand
caccaaggagcagauguua

SEQ ID NO: 2055259 - RNA, 19 nt, Homo sapiens
  misc_RNA (1)...(19): siRNA sense strand
ccacuccgcugagcuccuu

SEQ ID NO: 2055260 - RNA, 19 nt, Homo sapiens
  misc_RNA (1)...(19): siRNA sense strand
ggaggucaccaccaugauc

SEQ ID NO: 2055261 - RNA, 19 nt, Homo sapiens
  misc_RNA (1)...(19): siRNA sense strand
gagcaucggccugaaagca

SEQ ID NO: 2055262 - RNA, 19 nt, Homo sapiens
  misc_RNA (1)...(19): siRNA sense strand
cugcagacaucccgagagu

SEQ ID NO: 2055263 - RNA, 19 nt, Homo sapiens
  misc_RNA (1)...(19): siRNA sense strand
uguuaaccaugcugccaaa

SEQ ID NO: 2055264 - RNA, 19 nt, Homo sapiens
  misc_RNA (1)...(19): siRNA sense strand
acaccaaggagcagauguu

SEQ ID NO: 2055265 - RNA, 19 nt, Homo sapiens
  misc_RNA (1)...(19): siRNA sense strand
aggaggaggucaccaccau

SEQ ID NO: 2055266 - RNA, 19 nt, Homo sapiens
  misc_RNA (1)...(19): siRNA sense strand
ggaggauggcccugagucu

SEQ ID NO: 2055267 - RNA, 19 nt, Homo sapiens
  misc_RNA (1)...(19): siRNA sense strand
aggagcagauguuaaccau

SEQ ID NO: 2055268 - RNA, 19 nt, Homo sapiens
  misc_RNA (1)...(19): siRNA sense strand
ugacaaagagcuuccauuu

SEQ ID NO: 2055269 - RNA, 19 nt, Homo sapiens
  misc_RNA (1)...(19): siRNA sense strand
ggaggaaggugacaaugag

SEQ ID NO: 2055270 - RNA, 19 nt, Homo sapiens
  misc_RNA (1)...(19): siRNA sense strand
acaaagagcuuccauuucc

SEQ ID NO: 2055271 - RNA, 19 nt, Homo sapiens
  misc_RNA (1)...(19): siRNA sense strand
gaacucggccuccagaauc

SEQ ID NO: 2055272 - RNA, 19 nt, Homo sapiens
  misc_RNA (1)...(19): siRNA sense strand
acaaguggcugacaaagag

SEQ ID NO: 2055273 - RNA, 19 nt, Homo sapiens
  misc_RNA (1)...(19): siRNA sense strand
caacuggagcuuccuguau

SEQ ID NO: 2055274 - RNA, 19 nt, Homo sapiens
  misc_RNA (1)...(19): siRNA sense strand
ucucuuugcuguauuugaa

SEQ ID NO: 2055275 - RNA, 19 nt, Homo sapiens
  misc_RNA (1)...(19): siRNA sense strand
gcuguccucuucaucuuga

SEQ ID NO: 2055276 - RNA, 19 nt, Homo sapiens
  misc_RNA (1)...(19): siRNA sense strand
gggaggaaggugacaauga

SEQ ID NO: 2055277 - RNA, 19 nt, Homo sapiens
  misc_RNA (1)...(19): siRNA sense strand
ggcaucaccuucuacaaca

SEQ ID NO: 2055278 - RNA, 19 nt, Homo sapiens
  misc_RNA (1)...(19): siRNA sense strand
acaaugaggaggaggagua

SEQ ID NO: 2055279 - RNA, 19 nt, Homo sapiens
  misc_RNA (1)...(19): siRNA sense strand
cagccucacucucuccauu

SEQ ID NO: 2055280 - RNA, 19 nt, Homo sapiens
  misc_RNA (1)...(19): siRNA sense strand
gacaaagagcuuccauuuc

SEQ ID NO: 2055281 - RNA, 19 nt, Homo sapiens
  misc_RNA (1)...(19): siRNA sense strand
gguuugggcuucucugagu

SEQ ID NO: 2055282 - RNA, 19 nt, Homo sapiens
  misc_RNA (1)...(19): siRNA sense strand
ggcuggugcuucucuacua

SEQ ID NO: 2055283 - RNA, 19 nt, Homo sapiens
  misc_RNA (1)...(19): siRNA sense strand
gcaccuggccgugaucuuc

SEQ ID NO: 2055284 - RNA, 19 nt, Homo sapiens
  misc_RNA (1)...(19): siRNA sense strand
gacgugggcuuguccaacu

SEQ ID NO: 2055285 - RNA, 19 nt, Homo sapiens
  misc_RNA (1)...(19): siRNA sense strand
gcaucaccuucuacaacaa

SEQ ID NO: 2055286 - RNA, 19 nt, Homo sapiens
  misc_RNA (1)...(19): siRNA sense strand
cagcuguccucuucaucuu

SEQ ID NO: 2055287 - RNA, 19 nt, Homo sapiens
  misc_RNA (1)...(19): siRNA sense strand
gcucuucccucucuuugcu

SEQ ID NO: 2055288 - RNA, 19 nt, Homo sapiens
  misc_RNA (1)...(19): siRNA sense strand
ggaggaggaguacuuugug

SEQ ID NO: 2055289 - RNA, 19 nt, Homo sapiens
  misc_RNA (1)...(19): siRNA sense strand
uacaacaaguggcugacaa

SEQ ID NO: 2055290 - RNA, 19 nt, Homo sapiens
  misc_RNA (1)...(19): siRNA sense strand
gauucucgccuuugguuug

SEQ ID NO: 2055291 - RNA, 19 nt, Homo sapiens
  misc_RNA (1)...(19): siRNA sense strand
gggauucucgccuuugguu

SEQ ID NO: 2055292 - RNA, 19 nt, Homo sapiens
  misc_RNA (1)...(19): siRNA sense strand
gccgugaucuuccucuucu

SEQ ID NO: 2055293 - RNA, 19 nt, Homo sapiens
  misc_RNA (1)...(19): siRNA sense strand
cccagaugcuccugcagaa

SEQ ID NO: 2055294 - RNA, 19 nt, Homo sapiens
  misc_RNA (1)...(19): siRNA sense strand
ccaacuggagcuuccugua

SEQ ID NO: 2055295 - RNA, 19 nt, Homo sapiens
  misc_RNA (1)...(19): siRNA sense strand
ccuccacguugcccucaaa

SEQ ID NO: 2055296 - RNA, 19 nt, Homo sapiens
  misc_RNA (1)...(19): siRNA sense strand
agucugcacuuugcuguug

SEQ ID NO: 2055297 - RNA, 19 nt, Homo sapiens
  misc_RNA (1)...(19): siRNA sense strand
aacuggagcuuccuguaug

SEQ ID NO: 2055298 - RNA, 19 nt, Homo sapiens
  misc_RNA (1)...(19): siRNA sense strand
ccaucggcaucaccuucua

SEQ ID NO: 2055299 - RNA, 19 nt, Homo sapiens
  misc_RNA (1)...(19): siRNA sense strand
uugaaggucuccauuuguc

SEQ ID NO: 2055300 - RNA, 19 nt, Homo sapiens
  misc_RNA (1)...(19): siRNA sense strand
auuugaaggucuccauuug

SEQ ID NO: 2055301 - RNA, 19 nt, Homo sapiens
  misc_RNA (1)...(19): siRNA sense strand
uguacacaaugaccaaauc

SEQ ID NO: 2055302 - RNA, 19 nt, Homo sapiens
  misc_RNA (1)...(19): siRNA sense strand
uauuugaaggucuccauuu

SEQ ID NO: 2055303 - RNA, 19 nt, Homo sapiens
  misc_RNA (1)...(19): siRNA sense strand
acaacaaguggcugacaaa

SEQ ID NO: 2055304 - RNA, 19 nt, Homo sapiens
  misc_RNA (1)...(19): siRNA sense strand
ccucagcuguccucuucau

SEQ ID NO: 2055305 - RNA, 19 nt, Homo sapiens
  misc_RNA (1)...(19): siRNA sense strand
gcgggauucucgccuuugg

SEQ ID NO: 2055306 - RNA, 19 nt, Homo sapiens
  misc_RNA (1)...(19): siRNA sense strand
gaaccuccagccucacucu

SEQ ID NO: 2055307 - RNA, 19 nt, Homo sapiens
  misc_RNA (1)...(19): siRNA sense strand
ccgucucgcuguacacaau

SEQ ID NO: 2055308 - RNA, 19 nt, Homo sapiens
  misc_RNA (1)...(19): siRNA sense strand
gcuggugcuucucuacuac

SEQ ID NO: 2055309 - RNA, 19 nt, Homo sapiens
  misc_RNA (1)...(19): siRNA sense strand
ccucuuccuuggcgggauu

SEQ ID NO: 2055310 - RNA, 19 nt, Homo sapiens
  misc_RNA (1)...(19): siRNA sense strand
ccgacuaccucagaagagu

SEQ ID NO: 2055311 - RNA, 19 nt, Homo sapiens
  misc_RNA (1)...(19): siRNA sense strand
ugaggaggaggaguacuuu

SEQ ID NO: 2055312 - RNA, 19 nt, Homo sapiens
  misc_RNA (1)...(19): siRNA sense strand
ugaacucggccuccagaau

SEQ ID NO: 2055313 - RNA, 19 nt, Homo sapiens
  misc_RNA (1)...(19): siRNA sense strand
auccucagcuguccucuuc

SEQ ID NO: 2055314 - RNA, 19 nt, Homo sapiens
  misc_RNA (1)...(19): siRNA sense strand
gaggaggaggaguacuuug

SEQ ID NO: 2055315 - RNA, 19 nt, Homo sapiens
  misc_RNA (1)...(19): siRNA sense strand
caacaaguggcugacaaag

SEQ ID NO: 2055316 - RNA, 19 nt, Homo sapiens
  misc_RNA (1)...(19): siRNA sense strand
guauuugaaggucuccauu

SEQ ID NO: 2055317 - RNA, 19 nt, Homo sapiens
  misc_RNA (1)...(19): siRNA sense strand
aucuugaucuucucucuga

SEQ ID NO: 2055318 - RNA, 19 nt, Homo sapiens
  misc_RNA (1)...(19): siRNA sense strand
cugagaaaaucuuccguuu

SEQ ID NO: 2055319 - RNA, 19 nt, Homo sapiens
  misc_RNA (1)...(19): siRNA sense strand
ugacaaagagcuuccauuu

SEQ ID NO: 2055320 - RNA, 19 nt, Homo sapiens
  misc_RNA (1)...(19): siRNA sense strand
ggaggaaggugacaaugag

SEQ ID NO: 2055321 - RNA, 19 nt, Homo sapiens
  misc_RNA (1)...(19): siRNA sense strand
acaaagagcuuccauuucc

SEQ ID NO: 2055322 - RNA, 19 nt, Homo sapiens
  misc_RNA (1)...(19): siRNA sense strand
gaacucggccuccagaauc

SEQ ID NO: 2055323 - RNA, 19 nt, Homo sapiens
  misc_RNA (1)...(19): siRNA sense strand
acaaguggcugacaaagag

SEQ ID NO: 2055324 - RNA, 19 nt, Homo sapiens
  misc_RNA (1)...(19): siRNA sense strand
caacuggagcuuccuguau

SEQ ID NO: 2055325 - RNA, 19 nt, Homo sapiens
  misc_RNA (1)...(19): siRNA sense strand
ucucuuugcuguauuugaa

SEQ ID NO: 2055326 - RNA, 19 nt, Homo sapiens
  misc_RNA (1)...(19): siRNA sense strand
gcuguccucuucaucuuga

SEQ ID NO: 2055327 - RNA, 19 nt, Homo sapiens
  misc_RNA (1)...(19): siRNA sense strand
gggaggaaggugacaauga

SEQ ID NO: 2055328 - RNA, 19 nt, Homo sapiens
  misc_RNA (1)...(19): siRNA sense strand
ggcaucaccuucuacaaca

SEQ ID NO: 2055329 - RNA, 19 nt, Homo sapiens
  misc_RNA (1)...(19): siRNA sense strand
acaaugaggaggaggagua

SEQ ID NO: 2055330 - RNA, 19 nt, Homo sapiens
  misc_RNA (1)...(19): siRNA sense strand
cagccucacucucuccauu

SEQ ID NO: 2055331 - RNA, 19 nt, Homo sapiens
  misc_RNA (1)...(19): siRNA sense strand
gacaaagagcuuccauuuc

SEQ ID NO: 2055332 - RNA, 19 nt, Homo sapiens
  misc_RNA (1)...(19): siRNA sense strand
gguuugggcuucucugagu

SEQ ID NO: 2055333 - RNA, 19 nt, Homo sapiens
  misc_RNA (1)...(19): siRNA sense strand
ggcuggugcuucucuacua

SEQ ID NO: 2055334 - RNA, 19 nt, Homo sapiens
  misc_RNA (1)...(19): siRNA sense strand
gcaccuggccgugaucuuc

SEQ ID NO: 2055335 - RNA, 19 nt, Homo sapiens
  misc_RNA (1)...(19): siRNA sense strand
gacgugggcuuguccaacu

SEQ ID NO: 2055336 - RNA, 19 nt, Homo sapiens
  misc_RNA (1)...(19): siRNA sense strand
gcaucaccuucuacaacaa

SEQ ID NO: 2055337 - RNA, 19 nt, Homo sapiens
  misc_RNA (1)...(19): siRNA sense strand
cagcuguccucuucaucuu

SEQ ID NO: 2055338 - RNA, 19 nt, Homo sapiens
  misc_RNA (1)...(19): siRNA sense strand
gcucuucccucucuuugcu

SEQ ID NO: 2055339 - RNA, 19 nt, Homo sapiens
  misc_RNA (1)...(19): siRNA sense strand
ggaggaggaguacuuugug

SEQ ID NO: 2055340 - RNA, 19 nt, Homo sapiens
  misc_RNA (1)...(19): siRNA sense strand
uacaacaaguggcugacaa

SEQ ID NO: 2055341 - RNA, 19 nt, Homo sapiens
  misc_RNA (1)...(19): siRNA sense strand
gauucucgccuuugguuug

SEQ ID NO: 2055342 - RNA, 19 nt, Homo sapiens
  misc_RNA (1)...(19): siRNA sense strand
gggauucucgccuuugguu

SEQ ID NO: 2055343 - RNA, 19 nt, Homo sapiens
  misc_RNA (1)...(19): siRNA sense strand
gccgugaucuuccucuucu

SEQ ID NO: 2055344 - RNA, 19 nt, Homo sapiens
  misc_RNA (1)...(19): siRNA sense strand
cccagaugcuccugcagaa

SEQ ID NO: 2055345 - RNA, 19 nt, Homo sapiens
  misc_RNA (1)...(19): siRNA sense strand
ccaacuggagcuuccugua

SEQ ID NO: 2055346 - RNA, 19 nt, Homo sapiens
  misc_RNA (1)...(19): siRNA sense strand
ccuccacguugcccucaaa

SEQ ID NO: 2055347 - RNA, 19 nt, Homo sapiens
  misc_RNA (1)...(19): siRNA sense strand
agucugcacuuugcuguug

SEQ ID NO: 2055348 - RNA, 19 nt, Homo sapiens
  misc_RNA (1)...(19): siRNA sense strand
aacuggagcuuccuguaug

SEQ ID NO: 2055349 - RNA, 19 nt, Homo sapiens
  misc_RNA (1)...(19): siRNA sense strand
ccaucggcaucaccuucua

SEQ ID NO: 2055350 - RNA, 19 nt, Homo sapiens
  misc_RNA (1)...(19): siRNA sense strand
uugaaggucuccauuuguc

SEQ ID NO: 2055351 - RNA, 19 nt, Homo sapiens
  misc_RNA (1)...(19): siRNA sense strand
auuugaaggucuccauuug

SEQ ID NO: 2055352 - RNA, 19 nt, Homo sapiens
  misc_RNA (1)...(19): siRNA sense strand
uguacacaaugaccaaauc

SEQ ID NO: 2055353 - RNA, 19 nt, Homo sapiens
  misc_RNA (1)...(19): siRNA sense strand
uauuugaaggucuccauuu

SEQ ID NO: 2055354 - RNA, 19 nt, Homo sapiens
  misc_RNA (1)...(19): siRNA sense strand
acaacaaguggcugacaaa

SEQ ID NO: 2055355 - RNA, 19 nt, Homo sapiens
  misc_RNA (1)...(19): siRNA sense strand
ccucagcuguccucuucau

SEQ ID NO: 2055356 - RNA, 19 nt, Homo sapiens
  misc_RNA (1)...(19): siRNA sense strand
gcgggauucucgccuuugg

SEQ ID NO: 2055357 - RNA, 19 nt, Homo sapiens
  misc_RNA (1)...(19): siRNA sense strand
gaaccuccagccucacucu

SEQ ID NO: 2055358 - RNA, 19 nt, Homo sapiens
  misc_RNA (1)...(19): siRNA sense strand
ccgucucgcuguacacaau

SEQ ID NO: 2055359 - RNA, 19 nt, Homo sapiens
  misc_RNA (1)...(19): siRNA sense strand
gcuggugcuucucuacuac

SEQ ID NO: 2055360 - RNA, 19 nt, Homo sapiens
  misc_RNA (1)...(19): siRNA sense strand
ccucuuccuuggcgggauu

SEQ ID NO: 2055361 - RNA, 19 nt, Homo sapiens
  misc_RNA (1)...(19): siRNA sense strand
ccgacuaccucagaagagu

SEQ ID NO: 2055362 - RNA, 19 nt, Homo sapiens
  misc_RNA (1)...(19): siRNA sense strand
ugaggaggaggaguacuuu

SEQ ID NO: 2055363 - RNA, 19 nt, Homo sapiens
  misc_RNA (1)...(19): siRNA sense strand
ugaacucggccuccagaau

SEQ ID NO: 2055364 - RNA, 19 nt, Homo sapiens
  misc_RNA (1)...(19): siRNA sense strand
auccucagcuguccucuuc

SEQ ID NO: 2055365 - RNA, 19 nt, Homo sapiens
  misc_RNA (1)...(19): siRNA sense strand
gaggaggaggaguacuuug

SEQ ID NO: 2055366 - RNA, 19 nt, Homo sapiens
  misc_RNA (1)...(19): siRNA sense strand
caacaaguggcugacaaag

SEQ ID NO: 2055367 - RNA, 19 nt, Homo sapiens
  misc_RNA (1)...(19): siRNA sense strand
guauuugaaggucuccauu

SEQ ID NO: 2055368 - RNA, 19 nt, Homo sapiens
  misc_RNA (1)...(19): siRNA sense strand
aucuugaucuucucucuga

SEQ ID NO: 2055369 - RNA, 19 nt, Homo sapiens
  misc_RNA (1)...(19): siRNA sense strand
cugagaaaaucuuccguuu

SEQ ID NO: 2055370 - RNA, 19 nt, Homo sapiens
  misc_RNA (1)...(19): siRNA sense strand
ugacaaagagcuuccauuu

SEQ ID NO: 2055371 - RNA, 19 nt, Homo sapiens
  misc_RNA (1)...(19): siRNA sense strand
ggaggaaggugacaaugag

SEQ ID NO: 2055372 - RNA, 19 nt, Homo sapiens
  misc_RNA (1)...(19): siRNA sense strand
acaaagagcuuccauuucc

SEQ ID NO: 2055373 - RNA, 19 nt, Homo sapiens
  misc_RNA (1)...(19): siRNA sense strand
gaacucggccuccagaauc

SEQ ID NO: 2055374 - RNA, 19 nt, Homo sapiens
  misc_RNA (1)...(19): siRNA sense strand
acaaguggcugacaaagag

SEQ ID NO: 2055375 - RNA, 19 nt, Homo sapiens
  misc_RNA (1)...(19): siRNA sense strand
caacuggagcuuccuguau

SEQ ID NO: 2055376 - RNA, 19 nt, Homo sapiens
  misc_RNA (1)...(19): siRNA sense strand
ucucuuugcuguauuugaa

SEQ ID NO: 2055377 - RNA, 19 nt, Homo sapiens
  misc_RNA (1)...(19): siRNA sense strand
gcuguccucuucaucuuga

SEQ ID NO: 2055378 - RNA, 19 nt, Homo sapiens
  misc_RNA (1)...(19): siRNA sense strand
gggaggaaggugacaauga

SEQ ID NO: 2055379 - RNA, 19 nt, Homo sapiens
  misc_RNA (1)...(19): siRNA sense strand
ggcaucaccuucuacaaca

SEQ ID NO: 2055380 - RNA, 19 nt, Homo sapiens
  misc_RNA (1)...(19): siRNA sense strand
acaaugaggaggaggagua

SEQ ID NO: 2055381 - RNA, 19 nt, Homo sapiens
  misc_RNA (1)...(19): siRNA sense strand
cagccucacucucuccauu

SEQ ID NO: 2055382 - RNA, 19 nt, Homo sapiens
  misc_RNA (1)...(19): siRNA sense strand
gacaaagagcuuccauuuc

SEQ ID NO: 2055383 - RNA, 19 nt, Homo sapiens
  misc_RNA (1)...(19): siRNA sense strand
gguuugggcuucucugagu

SEQ ID NO: 2055384 - RNA, 19 nt, Homo sapiens
  misc_RNA (1)...(19): siRNA sense strand
ggcuggugcuucucuacua

SEQ ID NO: 2055385 - RNA, 19 nt, Homo sapiens
  misc_RNA (1)...(19): siRNA sense strand
gcaccuggccgugaucuuc

SEQ ID NO: 2055386 - RNA, 19 nt, Homo sapiens
  misc_RNA (1)...(19): siRNA sense strand
gacgugggcuuguccaacu

SEQ ID NO: 2055387 - RNA, 19 nt, Homo sapiens
  misc_RNA (1)...(19): siRNA sense strand
gcaucaccuucuacaacaa

SEQ ID NO: 2055388 - RNA, 19 nt, Homo sapiens
  misc_RNA (1)...(19): siRNA sense strand
cagcuguccucuucaucuu

SEQ ID NO: 2055389 - RNA, 19 nt, Homo sapiens
  misc_RNA (1)...(19): siRNA sense strand
gcucuucccucucuuugcu

SEQ ID NO: 2055390 - RNA, 19 nt, Homo sapiens
  misc_RNA (1)...(19): siRNA sense strand
ggaggaggaguacuuugug

SEQ ID NO: 2055391 - RNA, 19 nt, Homo sapiens
  misc_RNA (1)...(19): siRNA sense strand
uacaacaaguggcugacaa

SEQ ID NO: 2055392 - RNA, 19 nt, Homo sapiens
  misc_RNA (1)...(19): siRNA sense strand
gauucucgccuuugguuug

SEQ ID NO: 2055393 - RNA, 19 nt, Homo sapiens
  misc_RNA (1)...(19): siRNA sense strand
gggauucucgccuuugguu

SEQ ID NO: 2055394 - RNA, 19 nt, Homo sapiens
  misc_RNA (1)...(19): siRNA sense strand
gccgugaucuuccucuucu

SEQ ID NO: 2055395 - RNA, 19 nt, Homo sapiens
  misc_RNA (1)...(19): siRNA sense strand
cccagaugcuccugcagaa

SEQ ID NO: 2055396 - RNA, 19 nt, Homo sapiens
  misc_RNA (1)...(19): siRNA sense strand
ccaacuggagcuuccugua

SEQ ID NO: 2055397 - RNA, 19 nt, Homo sapiens
  misc_RNA (1)...(19): siRNA sense strand
ccuccacguugcccucaaa

SEQ ID NO: 2055398 - RNA, 19 nt, Homo sapiens
  misc_RNA (1)...(19): siRNA sense strand
agucugcacuuugcuguug

SEQ ID NO: 2055399 - RNA, 19 nt, Homo sapiens
  misc_RNA (1)...(19): siRNA sense strand
aacuggagcuuccuguaug

SEQ ID NO: 2055400 - RNA, 19 nt, Homo sapiens
  misc_RNA (1)...(19): siRNA sense strand
ccaucggcaucaccuucua

SEQ ID NO: 2055401 - RNA, 19 nt, Homo sapiens
  misc_RNA (1)...(19): siRNA sense strand
uugaaggucuccauuuguc

SEQ ID NO: 2055402 - RNA, 19 nt, Homo sapiens
  misc_RNA (1)...(19): siRNA sense strand
auuugaaggucuccauuug

SEQ ID NO: 2055403 - RNA, 19 nt, Homo sapiens
  misc_RNA (1)...(19): siRNA sense strand
uguacacaaugaccaaauc

SEQ ID NO: 2055404 - RNA, 19 nt, Homo sapiens
  misc_RNA (1)...(19): siRNA sense strand
uauuugaaggucuccauuu

SEQ ID NO: 2055405 - RNA, 19 nt, Homo sapiens
  misc_RNA (1)...(19): siRNA sense strand
acaacaaguggcugacaaa

SEQ ID NO: 2055406 - RNA, 19 nt, Homo sapiens
  misc_RNA (1)...(19): siRNA sense strand
ccucagcuguccucuucau

SEQ ID NO: 2055407 - RNA, 19 nt, Homo sapiens
  misc_RNA (1)...(19): siRNA sense strand
gcgggauucucgccuuugg

SEQ ID NO: 2055408 - RNA, 19 nt, Homo sapiens
  misc_RNA (1)...(19): siRNA sense strand
gaaccuccagccucacucu

SEQ ID NO: 2055409 - RNA, 19 nt, Homo sapiens
  misc_RNA (1)...(19): siRNA sense strand
ccgucucgcuguacacaau

SEQ ID NO: 2055410 - RNA, 19 nt, Homo sapiens
  misc_RNA (1)...(19): siRNA sense strand
gcuggugcuucucuacuac

SEQ ID NO: 2055411 - RNA, 19 nt, Homo sapiens
  misc_RNA (1)...(19): siRNA sense strand
ccucuuccuuggcgggauu

SEQ ID NO: 2055412 - RNA, 19 nt, Homo sapiens
  misc_RNA (1)...(19): siRNA sense strand
ccgacuaccucagaagagu

SEQ ID NO: 2055413 - RNA, 19 nt, Homo sapiens
  misc_RNA (1)...(19): siRNA sense strand
ugaggaggaggaguacuuu

SEQ ID NO: 2055414 - RNA, 19 nt, Homo sapiens
  misc_RNA (1)...(19): siRNA sense strand
ugaacucggccuccagaau

SEQ ID NO: 2055415 - RNA, 19 nt, Homo sapiens
  misc_RNA (1)...(19): siRNA sense strand
auccucagcuguccucuuc

SEQ ID NO: 2055416 - RNA, 19 nt, Homo sapiens
  misc_RNA (1)...(19): siRNA sense strand
gaggaggaggaguacuuug

SEQ ID NO: 2055417 - RNA, 19 nt, Homo sapiens
  misc_RNA (1)...(19): siRNA sense strand
caacaaguggcugacaaag

SEQ ID NO: 2055418 - RNA, 19 nt, Homo sapiens
  misc_RNA (1)...(19): siRNA sense strand
guauuugaaggucuccauu

SEQ ID NO: 2055419 - RNA, 19 nt, Homo sapiens
  misc_RNA (1)...(19): siRNA sense strand
aucuugaucuucucucuga

SEQ ID NO: 2055420 - RNA, 19 nt, Homo sapiens
  misc_RNA (1)...(19): siRNA sense strand
cugagaaaaucuuccguuu

SEQ ID NO: 2055421 - RNA, 19 nt, Homo sapiens
  misc_RNA (1)...(19): siRNA sense strand
ugacaaagagcuuccauuu

SEQ ID NO: 2055422 - RNA, 19 nt, Homo sapiens
  misc_RNA (1)...(19): siRNA sense strand
ggaggaaggugacaaugag

SEQ ID NO: 2055423 - RNA, 19 nt, Homo sapiens
  misc_RNA (1)...(19): siRNA sense strand
acaaagagcuuccauuucc

SEQ ID NO: 2055424 - RNA, 19 nt, Homo sapiens
  misc_RNA (1)...(19): siRNA sense strand
gaacucggccuccagaauc

SEQ ID NO: 2055425 - RNA, 19 nt, Homo sapiens
  misc_RNA (1)...(19): siRNA sense strand
acaaguggcugacaaagag

SEQ ID NO: 2055426 - RNA, 19 nt, Homo sapiens
  misc_RNA (1)...(19): siRNA sense strand
caacuggagcuuccuguau

SEQ ID NO: 2055427 - RNA, 19 nt, Homo sapiens
  misc_RNA (1)...(19): siRNA sense strand
ucucuuugcuguauuugaa

SEQ ID NO: 2055428 - RNA, 19 nt, Homo sapiens
  misc_RNA (1)...(19): siRNA sense strand
gcuguccucuucaucuuga

SEQ ID NO: 2055429 - RNA, 19 nt, Homo sapiens
  misc_RNA (1)...(19): siRNA sense strand
gggaggaaggugacaauga

SEQ ID NO: 2055430 - RNA, 19 nt, Homo sapiens
  misc_RNA (1)...(19): siRNA sense strand
ggcaucaccuucuacaaca

SEQ ID NO: 2055431 - RNA, 19 nt, Homo sapiens
  misc_RNA (1)...(19): siRNA sense strand
acaaugaggaggaggagua

SEQ ID NO: 2055432 - RNA, 19 nt, Homo sapiens
  misc_RNA (1)...(19): siRNA sense strand
cagccucacucucuccauu

SEQ ID NO: 2055433 - RNA, 19 nt, Homo sapiens
  misc_RNA (1)...(19): siRNA sense strand
gacaaagagcuuccauuuc

SEQ ID NO: 2055434 - RNA, 19 nt, Homo sapiens
  misc_RNA (1)...(19): siRNA sense strand
gguuugggcuucucugagu

SEQ ID NO: 2055435 - RNA, 19 nt, Homo sapiens
  misc_RNA (1)...(19): siRNA sense strand
ggcuggugcuucucuacua

SEQ ID NO: 2055436 - RNA, 19 nt, Homo sapiens
  misc_RNA (1)...(19): siRNA sense strand
gcaccuggccgugaucuuc

SEQ ID NO: 2055437 - RNA, 19 nt, Homo sapiens
  misc_RNA (1)...(19): siRNA sense strand
gacgugggcuuguccaacu

SEQ ID NO: 2055438 - RNA, 19 nt, Homo sapiens
  misc_RNA (1)...(19): siRNA sense strand
gcaucaccuucuacaacaa

SEQ ID NO: 2055439 - RNA, 19 nt, Homo sapiens
  misc_RNA (1)...(19): siRNA sense strand
cagcuguccucuucaucuu

SEQ ID NO: 2055440 - RNA, 19 nt, Homo sapiens
  misc_RNA (1)...(19): siRNA sense strand
gcucuucccucucuuugcu

SEQ ID NO: 2055441 - RNA, 19 nt, Homo sapiens
  misc_RNA (1)...(19): siRNA sense strand
ggaggaggaguacuuugug

SEQ ID NO: 2055442 - RNA, 19 nt, Homo sapiens
  misc_RNA (1)...(19): siRNA sense strand
uacaacaaguggcugacaa

SEQ ID NO: 2055443 - RNA, 19 nt, Homo sapiens
  misc_RNA (1)...(19): siRNA sense strand
gauucucgccuuugguuug

SEQ ID NO: 2055444 - RNA, 19 nt, Homo sapiens
  misc_RNA (1)...(19): siRNA sense strand
gggauucucgccuuugguu

SEQ ID NO: 2055445 - RNA, 19 nt, Homo sapiens
  misc_RNA (1)...(19): siRNA sense strand
gccgugaucuuccucuucu

SEQ ID NO: 2055446 - RNA, 19 nt, Homo sapiens
  misc_RNA (1)...(19): siRNA sense strand
cccagaugcuccugcagaa

SEQ ID NO: 2055447 - RNA, 19 nt, Homo sapiens
  misc_RNA (1)...(19): siRNA sense strand
ccaacuggagcuuccugua

SEQ ID NO: 2055448 - RNA, 19 nt, Homo sapiens
  misc_RNA (1)...(19): siRNA sense strand
ccuccacguugcccucaaa

SEQ ID NO: 2055449 - RNA, 19 nt, Homo sapiens
  misc_RNA (1)...(19): siRNA sense strand
agucugcacuuugcuguug

SEQ ID NO: 2055450 - RNA, 19 nt, Homo sapiens
  misc_RNA (1)...(19): siRNA sense strand
aacuggagcuuccuguaug

SEQ ID NO: 2055451 - RNA, 19 nt, Homo sapiens
  misc_RNA (1)...(19): siRNA sense strand
ccaucggcaucaccuucua

SEQ ID NO: 2055452 - RNA, 19 nt, Homo sapiens
  misc_RNA (1)...(19): siRNA sense strand
uugaaggucuccauuuguc

SEQ ID NO: 2055453 - RNA, 19 nt, Homo sapiens
  misc_RNA (1)...(19): siRNA sense strand
auuugaaggucuccauuug

SEQ ID NO: 2055454 - RNA, 19 nt, Homo sapiens
  misc_RNA (1)...(19): siRNA sense strand
uguacacaaugaccaaauc

SEQ ID NO: 2055455 - RNA, 19 nt, Homo sapiens
  misc_RNA (1)...(19): siRNA sense strand
uauuugaaggucuccauuu

SEQ ID NO: 2055456 - RNA, 19 nt, Homo sapiens
  misc_RNA (1)...(19): siRNA sense strand
acaacaaguggcugacaaa

SEQ ID NO: 2055457 - RNA, 19 nt, Homo sapiens
  misc_RNA (1)...(19): siRNA sense strand
ccucagcuguccucuucau

SEQ ID NO: 2055458 - RNA, 19 nt, Homo sapiens
  misc_RNA (1)...(19): siRNA sense strand
gcgggauucucgccuuugg

SEQ ID NO: 2055459 - RNA, 19 nt, Homo sapiens
  misc_RNA (1)...(19): siRNA sense strand
gaaccuccagccucacucu

SEQ ID NO: 2055460 - RNA, 19 nt, Homo sapiens
  misc_RNA (1)...(19): siRNA sense strand
ccgucucgcuguacacaau

SEQ ID NO: 2055461 - RNA, 19 nt, Homo sapiens
  misc_RNA (1)...(19): siRNA sense strand
gcuggugcuucucuacuac

SEQ ID NO: 2055462 - RNA, 19 nt, Homo sapiens
  misc_RNA (1)...(19): siRNA sense strand
ccucuuccuuggcgggauu

SEQ ID NO: 2055463 - RNA, 19 nt, Homo sapiens
  misc_RNA (1)...(19): siRNA sense strand
ccgacuaccucagaagagu

SEQ ID NO: 2055464 - RNA, 19 nt, Homo sapiens
  misc_RNA (1)...(19): siRNA sense strand
ugaggaggaggaguacuuu

SEQ ID NO: 2055465 - RNA, 19 nt, Homo sapiens
  misc_RNA (1)...(19): siRNA sense strand
ugaacucggccuccagaau

SEQ ID NO: 2055466 - RNA, 19 nt, Homo sapiens
  misc_RNA (1)...(19): siRNA sense strand
auccucagcuguccucuuc

SEQ ID NO: 2055467 - RNA, 19 nt, Homo sapiens
  misc_RNA (1)...(19): siRNA sense strand
gaggaggaggaguacuuug

SEQ ID NO: 2055468 - RNA, 19 nt, Homo sapiens
  misc_RNA (1)...(19): siRNA sense strand
caacaaguggcugacaaag

SEQ ID NO: 2055469 - RNA, 19 nt, Homo sapiens
  misc_RNA (1)...(19): siRNA sense strand
guauuugaaggucuccauu

SEQ ID NO: 2055470 - RNA, 19 nt, Homo sapiens
  misc_RNA (1)...(19): siRNA sense strand
aucuugaucuucucucuga

SEQ ID NO: 2055471 - RNA, 19 nt, Homo sapiens
  misc_RNA (1)...(19): siRNA sense strand
cugagaaaaucuuccguuu

SEQ ID NO: 2055472 - RNA, 19 nt, Homo sapiens
  misc_RNA (1)...(19): siRNA sense strand
ugacaaagagcuuccauuu

SEQ ID NO: 2055473 - RNA, 19 nt, Homo sapiens
  misc_RNA (1)...(19): siRNA sense strand
ggaggaaggugacaaugag

SEQ ID NO: 2055474 - RNA, 19 nt, Homo sapiens
  misc_RNA (1)...(19): siRNA sense strand
acaaagagcuuccauuucc

SEQ ID NO: 2055475 - RNA, 19 nt, Homo sapiens
  misc_RNA (1)...(19): siRNA sense strand
gaacucggccuccagaauc

SEQ ID NO: 2055476 - RNA, 19 nt, Homo sapiens
  misc_RNA (1)...(19): siRNA sense strand
acaaguggcugacaaagag

SEQ ID NO: 2055477 - RNA, 19 nt, Homo sapiens
  misc_RNA (1)...(19): siRNA sense strand
caacuggagcuuccuguau

SEQ ID NO: 2055478 - RNA, 19 nt, Homo sapiens
  misc_RNA (1)...(19): siRNA sense strand
ucucuuugcuguauuugaa

SEQ ID NO: 2055479 - RNA, 19 nt, Homo sapiens
  misc_RNA (1)...(19): siRNA sense strand
gcuguccucuucaucuuga

SEQ ID NO: 2055480 - RNA, 19 nt, Homo sapiens
  misc_RNA (1)...(19): siRNA sense strand
gggaggaaggugacaauga

SEQ ID NO: 2055481 - RNA, 19 nt, Homo sapiens
  misc_RNA (1)...(19): siRNA sense strand
ggcaucaccuucuacaaca

SEQ ID NO: 2055482 - RNA, 19 nt, Homo sapiens
  misc_RNA (1)...(19): siRNA sense strand
acaaugaggaggaggagua

SEQ ID NO: 2055483 - RNA, 19 nt, Homo sapiens
  misc_RNA (1)...(19): siRNA sense strand
cagccucacucucuccauu

SEQ ID NO: 2055484 - RNA, 19 nt, Homo sapiens
  misc_RNA (1)...(19): siRNA sense strand
gacaaagagcuuccauuuc

SEQ ID NO: 2055485 - RNA, 19 nt, Homo sapiens
  misc_RNA (1)...(19): siRNA sense strand
gguuugggcuucucugagu

SEQ ID NO: 2055486 - RNA, 19 nt, Homo sapiens
  misc_RNA (1)...(19): siRNA sense strand
ggcuggugcuucucuacua

SEQ ID NO: 2055487 - RNA, 19 nt, Homo sapiens
  misc_RNA (1)...(19): siRNA sense strand
gcaccuggccgugaucuuc

SEQ ID NO: 2055488 - RNA, 19 nt, Homo sapiens
  misc_RNA (1)...(19): siRNA sense strand
gacgugggcuuguccaacu

SEQ ID NO: 2055489 - RNA, 19 nt, Homo sapiens
  misc_RNA (1)...(19): siRNA sense strand
gcaucaccuucuacaacaa

SEQ ID NO: 2055490 - RNA, 19 nt, Homo sapiens
  misc_RNA (1)...(19): siRNA sense strand
cagcuguccucuucaucuu

SEQ ID NO: 2055491 - RNA, 19 nt, Homo sapiens
  misc_RNA (1)...(19): siRNA sense strand
gcucuucccucucuuugcu

SEQ ID NO: 2055492 - RNA, 19 nt, Homo sapiens
  misc_RNA (1)...(19): siRNA sense strand
ggaggaggaguacuuugug

SEQ ID NO: 2055493 - RNA, 19 nt, Homo sapiens
  misc_RNA (1)...(19): siRNA sense strand
uacaacaaguggcugacaa

SEQ ID NO: 2055494 - RNA, 19 nt, Homo sapiens
  misc_RNA (1)...(19): siRNA sense strand
gauucucgccuuugguuug

SEQ ID NO: 2055495 - RNA, 19 nt, Homo sapiens
  misc_RNA (1)...(19): siRNA sense strand
gggauucucgccuuugguu

SEQ ID NO: 2055496 - RNA, 19 nt, Homo sapiens
  misc_RNA (1)...(19): siRNA sense strand
gccgugaucuuccucuucu

SEQ ID NO: 2055497 - RNA, 19 nt, Homo sapiens
  misc_RNA (1)...(19): siRNA sense strand
cccagaugcuccugcagaa

SEQ ID NO: 2055498 - RNA, 19 nt, Homo sapiens
  misc_RNA (1)...(19): siRNA sense strand
ccaacuggagcuuccugua

SEQ ID NO: 2055499 - RNA, 19 nt, Homo sapiens
  misc_RNA (1)...(19): siRNA sense strand
ccuccacguugcccucaaa

SEQ ID NO: 2055500 - RNA, 19 nt, Homo sapiens
  misc_RNA (1)...(19): siRNA sense strand
agucugcacuuugcuguug

SEQ ID NO: 2055501 - RNA, 19 nt, Homo sapiens
  misc_RNA (1)...(19): siRNA sense strand
aacuggagcuuccuguaug

SEQ ID NO: 2055502 - RNA, 19 nt, Homo sapiens
  misc_RNA (1)...(19): siRNA sense strand
ccaucggcaucaccuucua

SEQ ID NO: 2055503 - RNA, 19 nt, Homo sapiens
  misc_RNA (1)...(19): siRNA sense strand
uugaaggucuccauuuguc

SEQ ID NO: 2055504 - RNA, 19 nt, Homo sapiens
  misc_RNA (1)...(19): siRNA sense strand
auuugaaggucuccauuug

SEQ ID NO: 2055505 - RNA, 19 nt, Homo sapiens
  misc_RNA (1)...(19): siRNA sense strand
uguacacaaugaccaaauc

SEQ ID NO: 2055506 - RNA, 19 nt, Homo sapiens
  misc_RNA (1)...(19): siRNA sense strand
uauuugaaggucuccauuu

SEQ ID NO: 2055507 - RNA, 19 nt, Homo sapiens
  misc_RNA (1)...(19): siRNA sense strand
acaacaaguggcugacaaa

SEQ ID NO: 2055508 - RNA, 19 nt, Homo sapiens
  misc_RNA (1)...(19): siRNA sense strand
ccucagcuguccucuucau

SEQ ID NO: 2055509 - RNA, 19 nt, Homo sapiens
  misc_RNA (1)...(19): siRNA sense strand
gcgggauucucgccuuugg

SEQ ID NO: 2055510 - RNA, 19 nt, Homo sapiens
  misc_RNA (1)...(19): siRNA sense strand
gaaccuccagccucacucu

SEQ ID NO: 2055511 - RNA, 19 nt, Homo sapiens
  misc_RNA (1)...(19): siRNA sense strand
ccgucucgcuguacacaau

SEQ ID NO: 2055512 - RNA, 19 nt, Homo sapiens
  misc_RNA (1)...(19): siRNA sense strand
gcuggugcuucucuacuac

SEQ ID NO: 2055513 - RNA, 19 nt, Homo sapiens
  misc_RNA (1)...(19): siRNA sense strand
ccucuuccuuggcgggauu

SEQ ID NO: 2055514 - RNA, 19 nt, Homo sapiens
  misc_RNA (1)...(19): siRNA sense strand
ccgacuaccucagaagagu

SEQ ID NO: 2055515 - RNA, 19 nt, Homo sapiens
  misc_RNA (1)...(19): siRNA sense strand
ugaggaggaggaguacuuu

SEQ ID NO: 2055516 - RNA, 19 nt, Homo sapiens
  misc_RNA (1)...(19): siRNA sense strand
ugaacucggccuccagaau

SEQ ID NO: 2055517 - RNA, 19 nt, Homo sapiens
  misc_RNA (1)...(19): siRNA sense strand
auccucagcuguccucuuc

SEQ ID NO: 2055518 - RNA, 19 nt, Homo sapiens
  misc_RNA (1)...(19): siRNA sense strand
gaggaggaggaguacuuug

SEQ ID NO: 2055519 - RNA, 19 nt, Homo sapiens
  misc_RNA (1)...(19): siRNA sense strand
caacaaguggcugacaaag

SEQ ID NO: 2055520 - RNA, 19 nt, Homo sapiens
  misc_RNA (1)...(19): siRNA sense strand
guauuugaaggucuccauu

SEQ ID NO: 2055521 - RNA, 19 nt, Homo sapiens
  misc_RNA (1)...(19): siRNA sense strand
aucuugaucuucucucuga

SEQ ID NO: 2055522 - RNA, 19 nt, Homo sapiens
  misc_RNA (1)...(19): siRNA sense strand
cugagaaaaucuuccguuu

SEQ ID NO: 2055523 - RNA, 19 nt, Homo sapiens
  misc_RNA (1)...(19): siRNA sense strand
ugacaaagagcuuccauuu

SEQ ID NO: 2055524 - RNA, 19 nt, Homo sapiens
  misc_RNA (1)...(19): siRNA sense strand
ggaggaaggugacaaugag

SEQ ID NO: 2055525 - RNA, 19 nt, Homo sapiens
  misc_RNA (1)...(19): siRNA sense strand
acaaagagcuuccauuucc

SEQ ID NO: 2055526 - RNA, 19 nt, Homo sapiens
  misc_RNA (1)...(19): siRNA sense strand
gaacucggccuccagaauc

SEQ ID NO: 2055527 - RNA, 19 nt, Homo sapiens
  misc_RNA (1)...(19): siRNA sense strand
acaaguggcugacaaagag

SEQ ID NO: 2055528 - RNA, 19 nt, Homo sapiens
  misc_RNA (1)...(19): siRNA sense strand
caacuggagcuuccuguau

SEQ ID NO: 2055529 - RNA, 19 nt, Homo sapiens
  misc_RNA (1)...(19): siRNA sense strand
ucucuuugcuguauuugaa

SEQ ID NO: 2055530 - RNA, 19 nt, Homo sapiens
  misc_RNA (1)...(19): siRNA sense strand
gcuguccucuucaucuuga

SEQ ID NO: 2055531 - RNA, 19 nt, Homo sapiens
  misc_RNA (1)...(19): siRNA sense strand
gggaggaaggugacaauga

SEQ ID NO: 2055532 - RNA, 19 nt, Homo sapiens
  misc_RNA (1)...(19): siRNA sense strand
ggcaucaccuucuacaaca

SEQ ID NO: 2055533 - RNA, 19 nt, Homo sapiens
  misc_RNA (1)...(19): siRNA sense strand
acaaugaggaggaggagua

SEQ ID NO: 2055534 - RNA, 19 nt, Homo sapiens
  misc_RNA (1)...(19): siRNA sense strand
cagccucacucucuccauu

SEQ ID NO: 2055535 - RNA, 19 nt, Homo sapiens
  misc_RNA (1)...(19): siRNA sense strand
gacaaagagcuuccauuuc

SEQ ID NO: 2055536 - RNA, 19 nt, Homo sapiens
  misc_RNA (1)...(19): siRNA sense strand
gguuugggcuucucugagu

SEQ ID NO: 2055537 - RNA, 19 nt, Homo sapiens
  misc_RNA (1)...(19): siRNA sense strand
ggcuggugcuucucuacua

SEQ ID NO: 2055538 - RNA, 19 nt, Homo sapiens
  misc_RNA (1)...(19): siRNA sense strand
gcaccuggccgugaucuuc

SEQ ID NO: 2055539 - RNA, 19 nt, Homo sapiens
  misc_RNA (1)...(19): siRNA sense strand
gacgugggcuuguccaacu

SEQ ID NO: 2055540 - RNA, 19 nt, Homo sapiens
  misc_RNA (1)...(19): siRNA sense strand
gcaucaccuucuacaacaa

SEQ ID NO: 2055541 - RNA, 19 nt, Homo sapiens
  misc_RNA (1)...(19): siRNA sense strand
cagcuguccucuucaucuu

SEQ ID NO: 2055542 - RNA, 19 nt, Homo sapiens
  misc_RNA (1)...(19): siRNA sense strand
gcucuucccucucuuugcu

SEQ ID NO: 2055543 - RNA, 19 nt, Homo sapiens
  misc_RNA (1)...(19): siRNA sense strand
ggaggaggaguacuuugug

SEQ ID NO: 2055544 - RNA, 19 nt, Homo sapiens
  misc_RNA (1)...(19): siRNA sense strand
uacaacaaguggcugacaa

SEQ ID NO: 2055545 - RNA, 19 nt, Homo sapiens
  misc_RNA (1)...(19): siRNA sense strand
gauucucgccuuugguuug

SEQ ID NO: 2055546 - RNA, 19 nt, Homo sapiens
  misc_RNA (1)...(19): siRNA sense strand
gggauucucgccuuugguu

SEQ ID NO: 2055547 - RNA, 19 nt, Homo sapiens
  misc_RNA (1)...(19): siRNA sense strand
gccgugaucuuccucuucu

SEQ ID NO: 2055548 - RNA, 19 nt, Homo sapiens
  misc_RNA (1)...(19): siRNA sense strand
cccagaugcuccugcagaa

SEQ ID NO: 2055549 - RNA, 19 nt, Homo sapiens
  misc_RNA (1)...(19): siRNA sense strand
ccaacuggagcuuccugua

SEQ ID NO: 2055550 - RNA, 19 nt, Homo sapiens
  misc_RNA (1)...(19): siRNA sense strand
ccuccacguugcccucaaa

SEQ ID NO: 2055551 - RNA, 19 nt, Homo sapiens
  misc_RNA (1)...(19): siRNA sense strand
agucugcacuuugcuguug

SEQ ID NO: 2055552 - RNA, 19 nt, Homo sapiens
  misc_RNA (1)...(19): siRNA sense strand
aacuggagcuuccuguaug

SEQ ID NO: 2055553 - RNA, 19 nt, Homo sapiens
  misc_RNA (1)...(19): siRNA sense strand
ccaucggcaucaccuucua

SEQ ID NO: 2055554 - RNA, 19 nt, Homo sapiens
  misc_RNA (1)...(19): siRNA sense strand
uugaaggucuccauuuguc

SEQ ID NO: 2055555 - RNA, 19 nt, Homo sapiens
  misc_RNA (1)...(19): siRNA sense strand
auuugaaggucuccauuug

SEQ ID NO: 2055556 - RNA, 19 nt, Homo sapiens
  misc_RNA (1)...(19): siRNA sense strand
uguacacaaugaccaaauc

SEQ ID NO: 2055557 - RNA, 19 nt, Homo sapiens
  misc_RNA (1)...(19): siRNA sense strand
uauuugaaggucuccauuu

SEQ ID NO: 2055558 - RNA, 19 nt, Homo sapiens
  misc_RNA (1)...(19): siRNA sense strand
acaacaaguggcugacaaa

SEQ ID NO: 2055559 - RNA, 19 nt, Homo sapiens
  misc_RNA (1)...(19): siRNA sense strand
ccucagcuguccucuucau

SEQ ID NO: 2055560 - RNA, 19 nt, Homo sapiens
  misc_RNA (1)...(19): siRNA sense strand
gcgggauucucgccuuugg

SEQ ID NO: 2055561 - RNA, 19 nt, Homo sapiens
  misc_RNA (1)...(19): siRNA sense strand
gaaccuccagccucacucu

SEQ ID NO: 2055562 - RNA, 19 nt, Homo sapiens
  misc_RNA (1)...(19): siRNA sense strand
ccgucucgcuguacacaau

SEQ ID NO: 2055563 - RNA, 19 nt, Homo sapiens
  misc_RNA (1)...(19): siRNA sense strand
gcuggugcuucucuacuac

SEQ ID NO: 2055564 - RNA, 19 nt, Homo sapiens
  misc_RNA (1)...(19): siRNA sense strand
ccucuuccuuggcgggauu

SEQ ID NO: 2055565 - RNA, 19 nt, Homo sapiens
  misc_RNA (1)...(19): siRNA sense strand
ccgacuaccucagaagagu

SEQ ID NO: 2055566 - RNA, 19 nt, Homo sapiens
  misc_RNA (1)...(19): siRNA sense strand
ugaggaggaggaguacuuu

SEQ ID NO: 2055567 - RNA, 19 nt, Homo sapiens
  misc_RNA (1)...(19): siRNA sense strand
ugaacucggccuccagaau

SEQ ID NO: 2055568 - RNA, 19 nt, Homo sapiens
  misc_RNA (1)...(19): siRNA sense strand
auccucagcuguccucuuc

SEQ ID NO: 2055569 - RNA, 19 nt, Homo sapiens
  misc_RNA (1)...(19): siRNA sense strand
gaggaggaggaguacuuug

SEQ ID NO: 2055570 - RNA, 19 nt, Homo sapiens
  misc_RNA (1)...(19): siRNA sense strand
caacaaguggcugacaaag

SEQ ID NO: 2055571 - RNA, 19 nt, Homo sapiens
  misc_RNA (1)...(19): siRNA sense strand
guauuugaaggucuccauu

SEQ ID NO: 2055572 - RNA, 19 nt, Homo sapiens
  misc_RNA (1)...(19): siRNA sense strand
aucuugaucuucucucuga

SEQ ID NO: 2055573 - RNA, 19 nt, Homo sapiens
  misc_RNA (1)...(19): siRNA sense strand
cugagaaaaucuuccguuu

SEQ ID NO: 2055574 - RNA, 19 nt, Homo sapiens
  misc_RNA (1)...(19): siRNA sense strand
gcaggaagaugaugaugaa

SEQ ID NO: 2055575 - RNA, 19 nt, Homo sapiens
  misc_RNA (1)...(19): siRNA sense strand
ugaaacaguuggaagcaua

SEQ ID NO: 2055576 - RNA, 19 nt, Homo sapiens
  misc_RNA (1)...(19): siRNA sense strand
gaaacaggcaggauuuauu

SEQ ID NO: 2055577 - RNA, 19 nt, Homo sapiens
  misc_RNA (1)...(19): siRNA sense strand
ggaagaugaugaugaaaca

SEQ ID NO: 2055578 - RNA, 19 nt, Homo sapiens
  misc_RNA (1)...(19): siRNA sense strand
gaauacagcaggaagauga

SEQ ID NO: 2055579 - RNA, 19 nt, Homo sapiens
  misc_RNA (1)...(19): siRNA sense strand
ggacugaaagcuacuauga

SEQ ID NO: 2055580 - RNA, 19 nt, Homo sapiens
  misc_RNA (1)...(19): siRNA sense strand
ugugagaaaugaaggaaua

SEQ ID NO: 2055581 - RNA, 19 nt, Homo sapiens
  misc_RNA (1)...(19): siRNA sense strand
gaacugagccgaucguuuu

SEQ ID NO: 2055582 - RNA, 19 nt, Homo sapiens
  misc_RNA (1)...(19): siRNA sense strand
gauguuaagugguggaguu

SEQ ID NO: 2055583 - RNA, 19 nt, Homo sapiens
  misc_RNA (1)...(19): siRNA sense strand
gagaaaugaaggaauagua

SEQ ID NO: 2055584 - RNA, 19 nt, Homo sapiens
  misc_RNA (1)...(19): siRNA sense strand
gaacuaggcccuguccauu

SEQ ID NO: 2055585 - RNA, 19 nt, Homo sapiens
  misc_RNA (1)...(19): siRNA sense strand
acugaaagcuacuaugauu

SEQ ID NO: 2055586 - RNA, 19 nt, Homo sapiens
  misc_RNA (1)...(19): siRNA sense strand
gaagacauacgcccaagug

SEQ ID NO: 2055587 - RNA, 19 nt, Homo sapiens
  misc_RNA (1)...(19): siRNA sense strand
ggagaugucagggaagaua

SEQ ID NO: 2055588 - RNA, 19 nt, Homo sapiens
  misc_RNA (1)...(19): siRNA sense strand
gaauucaaguucuuuccau

SEQ ID NO: 2055589 - RNA, 19 nt, Homo sapiens
  misc_RNA (1)...(19): siRNA sense strand
aaacaggcaggauuuauug

SEQ ID NO: 2055590 - RNA, 19 nt, Homo sapiens
  misc_RNA (1)...(19): siRNA sense strand
caggcaggauuuauuggua

SEQ ID NO: 2055591 - RNA, 19 nt, Homo sapiens
  misc_RNA (1)...(19): siRNA sense strand
ccaguggauuguauuaaau

SEQ ID NO: 2055592 - RNA, 19 nt, Homo sapiens
  misc_RNA (1)...(19): siRNA sense strand
ggaaacaggcaggauuuau

SEQ ID NO: 2055593 - RNA, 19 nt, Homo sapiens
  misc_RNA (1)...(19): siRNA sense strand
cccaguggauuguauuaaa

SEQ ID NO: 2055594 - RNA, 19 nt, Homo sapiens
  misc_RNA (1)...(19): siRNA sense strand
caaguucuuuccauguaug

SEQ ID NO: 2055595 - RNA, 19 nt, Homo sapiens
  misc_RNA (1)...(19): siRNA sense strand
uaaguguugugagaaauga

SEQ ID NO: 2055596 - RNA, 19 nt, Homo sapiens
  misc_RNA (1)...(19): siRNA sense strand
gaauggacaagcaggcaaa

SEQ ID NO: 2055597 - RNA, 19 nt, Homo sapiens
  misc_RNA (1)...(19): siRNA sense strand
guccuucgccucugcauuu

SEQ ID NO: 2055598 - RNA, 19 nt, Homo sapiens
  misc_RNA (1)...(19): siRNA sense strand
gggaaacaggcaggauuua

SEQ ID NO: 2055599 - RNA, 19 nt, Homo sapiens
  misc_RNA (1)...(19): siRNA sense strand
cuuauauucuggacugaaa

SEQ ID NO: 2055600 - RNA, 19 nt, Homo sapiens
  misc_RNA (1)...(19): siRNA sense strand
gccagcaguuugucaggaa

SEQ ID NO: 2055601 - RNA, 19 nt, Homo sapiens
  misc_RNA (1)...(19): siRNA sense strand
ucaggaaaguggcuggaau

SEQ ID NO: 2055602 - RNA, 19 nt, Homo sapiens
  misc_RNA (1)...(19): siRNA sense strand
ucaaguucuuuccauguau

SEQ ID NO: 2055603 - RNA, 19 nt, Homo sapiens
  misc_RNA (1)...(19): siRNA sense strand
gagcaaucccugccaaugg

SEQ ID NO: 2055604 - RNA, 19 nt, Homo sapiens
  misc_RNA (1)...(19): siRNA sense strand
acuaggcccuguccauuug

SEQ ID NO: 2055605 - RNA, 19 nt, Homo sapiens
  misc_RNA (1)...(19): siRNA sense strand
gacguucccugaccuguac

SEQ ID NO: 2055606 - RNA, 19 nt, Homo sapiens
  misc_RNA (1)...(19): siRNA sense strand
aggcaaagcugagugaucu

SEQ ID NO: 2055607 - RNA, 19 nt, Homo sapiens
  misc_RNA (1)...(19): siRNA sense strand
gaaagcuacuaugauucga

SEQ ID NO: 2055608 - RNA, 19 nt, Homo sapiens
  misc_RNA (1)...(19): siRNA sense strand
aagugaagaugcagacguu

SEQ ID NO: 2055609 - RNA, 19 nt, Homo sapiens
  misc_RNA (1)...(19): siRNA sense strand
uucaaguucuuuccaugua

SEQ ID NO: 2055610 - RNA, 19 nt, Homo sapiens
  misc_RNA (1)...(19): siRNA sense strand
ggucugucgugaaggguau

SEQ ID NO: 2055611 - RNA, 19 nt, Homo sapiens
  misc_RNA (1)...(19): siRNA sense strand
ggaaaguggcuggaaugga

SEQ ID NO: 2055612 - RNA, 19 nt, Homo sapiens
  misc_RNA (1)...(19): siRNA sense strand
gugaagugccggcuacaga

SEQ ID NO: 2055613 - RNA, 19 nt, Homo sapiens
  misc_RNA (1)...(19): siRNA sense strand
uguaugaaauggagauguc

SEQ ID NO: 2055614 - RNA, 19 nt, Homo sapiens
  misc_RNA (1)...(19): siRNA sense strand
aggaauaguagccuuauau

SEQ ID NO: 2055615 - RNA, 19 nt, Homo sapiens
  misc_RNA (1)...(19): siRNA sense strand
ucagggagaucaaaagaug

SEQ ID NO: 2055616 - RNA, 19 nt, Homo sapiens
  misc_RNA (1)...(19): siRNA sense strand
gggacagcguguguacuga

SEQ ID NO: 2055617 - RNA, 19 nt, Homo sapiens
  misc_RNA (1)...(19): siRNA sense strand
agaugaugaugaaacaguu

SEQ ID NO: 2055618 - RNA, 19 nt, Homo sapiens
  misc_RNA (1)...(19): siRNA sense strand
ccagcaguuugucaggaaa

SEQ ID NO: 2055619 - RNA, 19 nt, Homo sapiens
  misc_RNA (1)...(19): siRNA sense strand
auaguagccuuauauucug

SEQ ID NO: 2055620 - RNA, 19 nt, Homo sapiens
  misc_RNA (1)...(19): siRNA sense strand
agaaaugaaggaauaguag

SEQ ID NO: 2055621 - RNA, 19 nt, Homo sapiens
  misc_RNA (1)...(19): siRNA sense strand
gcagcccuucgacacaaua

SEQ ID NO: 2055622 - RNA, 19 nt, Homo sapiens
  misc_RNA (1)...(19): siRNA sense strand
ugguggaguugcuggaauu

SEQ ID NO: 2055623 - RNA, 19 nt, Homo sapiens
  misc_RNA (1)...(19): siRNA sense strand
gcugagugaucuccagacu

SEQ ID NO: 2055624 - RNA, 19 nt, Homo sapiens
  misc_RNA (1)...(19): siRNA sense strand
gaugaugaugaaacaguug

SEQ ID NO: 2055625 - RNA, 19 nt, Homo sapiens
  misc_RNA (1)...(19): siRNA sense strand
caauaaaagugaagaugca

SEQ ID NO: 2055626 - RNA, 19 nt, Homo sapiens
  misc_RNA (1)...(19): siRNA sense strand
ugaacugagccgaucguuu

SEQ ID NO: 2055627 - RNA, 19 nt, Homo sapiens
  misc_RNA (1)...(19): siRNA sense strand
ugggaaacaggcaggauuu

SEQ ID NO: 2055628 - RNA, 19 nt, Homo sapiens
  misc_RNA (1)...(19): siRNA sense strand
gaugaugaaacaguuggaa

SEQ ID NO: 2055629 - RNA, 19 nt, Homo sapiens
  misc_RNA (1)...(19): siRNA sense strand
gaaacaguuggaagcauac

SEQ ID NO: 2055630 - RNA, 19 nt, Homo sapiens
  misc_RNA (1)...(19): siRNA sense strand
caggaaaguggcuggaaug

SEQ ID NO: 2055631 - RNA, 19 nt, Homo sapiens
  misc_RNA (1)...(19): siRNA sense strand
ugaaagcuacuaugauucg

SEQ ID NO: 2055632 - RNA, 19 nt, Homo sapiens
  misc_RNA (1)...(19): siRNA sense strand
gaugaaacaguuggaagca

SEQ ID NO: 2055633 - RNA, 19 nt, Homo sapiens
  misc_RNA (1)...(19): siRNA sense strand
ugucagggaagauagcaaa

SEQ ID NO: 2055634 - RNA, 19 nt, Homo sapiens
  misc_RNA (1)...(19): siRNA sense strand
cuacuaugauucgagcaau

SEQ ID NO: 2055635 - RNA, 19 nt, Homo sapiens
  misc_RNA (1)...(19): siRNA sense strand
ccuguccauuugauguuaa

SEQ ID NO: 2055636 - RNA, 19 nt, Homo sapiens
  misc_RNA (1)...(19): siRNA sense strand
agacguucccugaccugua

SEQ ID NO: 2055637 - RNA, 19 nt, Homo sapiens
  misc_RNA (1)...(19): siRNA sense strand
caauuuggucugucgugaa

SEQ ID NO: 2055638 - RNA, 19 nt, Homo sapiens
  misc_RNA (1)...(19): siRNA sense strand
uuucuuugguggcuaugaa

SEQ ID NO: 2055639 - RNA, 19 nt, Homo sapiens
  misc_RNA (1)...(19): siRNA sense strand
cccuguccauuugauguua

SEQ ID NO: 2055640 - RNA, 19 nt, Homo sapiens
  misc_RNA (1)...(19): siRNA sense strand
aaacucgguccucuucaug

SEQ ID NO: 2055641 - RNA, 19 nt, Homo sapiens
  misc_RNA (1)...(19): siRNA sense strand
gcuacuaugauucgagcaa

SEQ ID NO: 2055642 - RNA, 19 nt, Homo sapiens
  misc_RNA (1)...(19): siRNA sense strand
uggaguugcuggaauuugc

SEQ ID NO: 2055643 - RNA, 19 nt, Homo sapiens
  misc_RNA (1)...(19): siRNA sense strand
gagaucaaaagaugaacua

SEQ ID NO: 2055644 - RNA, 19 nt, Homo sapiens
  misc_RNA (1)...(19): siRNA sense strand
guuaagugguggaguugcu

SEQ ID NO: 2055645 - RNA, 19 nt, Homo sapiens
  misc_RNA (1)...(19): siRNA sense strand
guuuguggccuacgaauac

SEQ ID NO: 2055646 - RNA, 19 nt, Homo sapiens
  misc_RNA (1)...(19): siRNA sense strand
gugguggaguugcuggaau

SEQ ID NO: 2055647 - RNA, 19 nt, Homo sapiens
  misc_RNA (1)...(19): siRNA sense strand
uggcuggaauggacaagca

SEQ ID NO: 2055648 - RNA, 19 nt, Homo sapiens
  misc_RNA (1)...(19): siRNA sense strand
cgagcaaucccugccaaug

SEQ ID NO: 2055649 - RNA, 19 nt, Homo sapiens
  misc_RNA (1)...(19): siRNA sense strand
ugacaaagagcuuccauuu

SEQ ID NO: 2055650 - RNA, 19 nt, Homo sapiens
  misc_RNA (1)...(19): siRNA sense strand
ggaggaaggugacaaugag

SEQ ID NO: 2055651 - RNA, 19 nt, Homo sapiens
  misc_RNA (1)...(19): siRNA sense strand
acaaagagcuuccauuucc

SEQ ID NO: 2055652 - RNA, 19 nt, Homo sapiens
  misc_RNA (1)...(19): siRNA sense strand
gaacucggccuccagaauc

SEQ ID NO: 2055653 - RNA, 19 nt, Homo sapiens
  misc_RNA (1)...(19): siRNA sense strand
acaaguggcugacaaagag

SEQ ID NO: 2055654 - RNA, 19 nt, Homo sapiens
  misc_RNA (1)...(19): siRNA sense strand
caacuggagcuuccuguau

SEQ ID NO: 2055655 - RNA, 19 nt, Homo sapiens
  misc_RNA (1)...(19): siRNA sense strand
ucucuuugcuguauuugaa

SEQ ID NO: 2055656 - RNA, 19 nt, Homo sapiens
  misc_RNA (1)...(19): siRNA sense strand
gcuguccucuucaucuuga

SEQ ID NO: 2055657 - RNA, 19 nt, Homo sapiens
  misc_RNA (1)...(19): siRNA sense strand
gggaggaaggugacaauga

SEQ ID NO: 2055658 - RNA, 19 nt, Homo sapiens
  misc_RNA (1)...(19): siRNA sense strand
ggcaucaccuucuacaaca

SEQ ID NO: 2055659 - RNA, 19 nt, Homo sapiens
  misc_RNA (1)...(19): siRNA sense strand
acaaugaggaggaggagua

SEQ ID NO: 2055660 - RNA, 19 nt, Homo sapiens
  misc_RNA (1)...(19): siRNA sense strand
cagccucacucucuccauu

SEQ ID NO: 2055661 - RNA, 19 nt, Homo sapiens
  misc_RNA (1)...(19): siRNA sense strand
gacaaagagcuuccauuuc

SEQ ID NO: 2055662 - RNA, 19 nt, Homo sapiens
  misc_RNA (1)...(19): siRNA sense strand
gguuugggcuucucugagu

SEQ ID NO: 2055663 - RNA, 19 nt, Homo sapiens
  misc_RNA (1)...(19): siRNA sense strand
ggcuggugcuucucuacua

SEQ ID NO: 2055664 - RNA, 19 nt, Homo sapiens
  misc_RNA (1)...(19): siRNA sense strand
gcaccuggccgugaucuuc

SEQ ID NO: 2055665 - RNA, 19 nt, Homo sapiens
  misc_RNA (1)...(19): siRNA sense strand
gacgugggcuuguccaacu

SEQ ID NO: 2055666 - RNA, 19 nt, Homo sapiens
  misc_RNA (1)...(19): siRNA sense strand
gcaucaccuucuacaacaa

SEQ ID NO: 2055667 - RNA, 19 nt, Homo sapiens
  misc_RNA (1)...(19): siRNA sense strand
cagcuguccucuucaucuu

SEQ ID NO: 2055668 - RNA, 19 nt, Homo sapiens
  misc_RNA (1)...(19): siRNA sense strand
gcucuucccucucuuugcu

SEQ ID NO: 2055669 - RNA, 19 nt, Homo sapiens
  misc_RNA (1)...(19): siRNA sense strand
ggaggaggaguacuuugug

SEQ ID NO: 2055670 - RNA, 19 nt, Homo sapiens
  misc_RNA (1)...(19): siRNA sense strand
uacaacaaguggcugacaa

SEQ ID NO: 2055671 - RNA, 19 nt, Homo sapiens
  misc_RNA (1)...(19): siRNA sense strand
gauucucgccuuugguuug

SEQ ID NO: 2055672 - RNA, 19 nt, Homo sapiens
  misc_RNA (1)...(19): siRNA sense strand
gggauucucgccuuugguu

SEQ ID NO: 2055673 - RNA, 19 nt, Homo sapiens
  misc_RNA (1)...(19): siRNA sense strand
gccgugaucuuccucuucu

SEQ ID NO: 2055674 - RNA, 19 nt, Homo sapiens
  misc_RNA (1)...(19): siRNA sense strand
cccagaugcuccugcagaa

SEQ ID NO: 2055675 - RNA, 19 nt, Homo sapiens
  misc_RNA (1)...(19): siRNA sense strand
ccaacuggagcuuccugua

SEQ ID NO: 2055676 - RNA, 19 nt, Homo sapiens
  misc_RNA (1)...(19): siRNA sense strand
ccuccacguugcccucaaa

SEQ ID NO: 2055677 - RNA, 19 nt, Homo sapiens
  misc_RNA (1)...(19): siRNA sense strand
agucugcacuuugcuguug

SEQ ID NO: 2055678 - RNA, 19 nt, Homo sapiens
  misc_RNA (1)...(19): siRNA sense strand
aacuggagcuuccuguaug

SEQ ID NO: 2055679 - RNA, 19 nt, Homo sapiens
  misc_RNA (1)...(19): siRNA sense strand
ccaucggcaucaccuucua

SEQ ID NO: 2055680 - RNA, 19 nt, Homo sapiens
  misc_RNA (1)...(19): siRNA sense strand
uugaaggucuccauuuguc

SEQ ID NO: 2055681 - RNA, 19 nt, Homo sapiens
  misc_RNA (1)...(19): siRNA sense strand
auuugaaggucuccauuug

SEQ ID NO: 2055682 - RNA, 19 nt, Homo sapiens
  misc_RNA (1)...(19): siRNA sense strand
uguacacaaugaccaaauc

SEQ ID NO: 2055683 - RNA, 19 nt, Homo sapiens
  misc_RNA (1)...(19): siRNA sense strand
uauuugaaggucuccauuu

SEQ ID NO: 2055684 - RNA, 19 nt, Homo sapiens
  misc_RNA (1)...(19): siRNA sense strand
acaacaaguggcugacaaa

SEQ ID NO: 2055685 - RNA, 19 nt, Homo sapiens
  misc_RNA (1)...(19): siRNA sense strand
ccucagcuguccucuucau

SEQ ID NO: 2055686 - RNA, 19 nt, Homo sapiens
  misc_RNA (1)...(19): siRNA sense strand
gcgggauucucgccuuugg

SEQ ID NO: 2055687 - RNA, 19 nt, Homo sapiens
  misc_RNA (1)...(19): siRNA sense strand
gaaccuccagccucacucu

SEQ ID NO: 2055688 - RNA, 19 nt, Homo sapiens
  misc_RNA (1)...(19): siRNA sense strand
ccgucucgcuguacacaau

SEQ ID NO: 2055689 - RNA, 19 nt, Homo sapiens
  misc_RNA (1)...(19): siRNA sense strand
gcuggugcuucucuacuac

SEQ ID NO: 2055690 - RNA, 19 nt, Homo sapiens
  misc_RNA (1)...(19): siRNA sense strand
ccucuuccuuggcgggauu

SEQ ID NO: 2055691 - RNA, 19 nt, Homo sapiens
  misc_RNA (1)...(19): siRNA sense strand
ccgacuaccucagaagagu

SEQ ID NO: 2055692 - RNA, 19 nt, Homo sapiens
  misc_RNA (1)...(19): siRNA sense strand
ugaggaggaggaguacuuu

SEQ ID NO: 2055693 - RNA, 19 nt, Homo sapiens
  misc_RNA (1)...(19): siRNA sense strand
ugaacucggccuccagaau

SEQ ID NO: 2055694 - RNA, 19 nt, Homo sapiens
  misc_RNA (1)...(19): siRNA sense strand
auccucagcuguccucuuc

SEQ ID NO: 2055695 - RNA, 19 nt, Homo sapiens
  misc_RNA (1)...(19): siRNA sense strand
gaggaggaggaguacuuug

SEQ ID NO: 2055696 - RNA, 19 nt, Homo sapiens
  misc_RNA (1)...(19): siRNA sense strand
caacaaguggcugacaaag

SEQ ID NO: 2055697 - RNA, 19 nt, Homo sapiens
  misc_RNA (1)...(19): siRNA sense strand
guauuugaaggucuccauu

SEQ ID NO: 2055698 - RNA, 19 nt, Homo sapiens
  misc_RNA (1)...(19): siRNA sense strand
aucuugaucuucucucuga

SEQ ID NO: 2055699 - RNA, 19 nt, Homo sapiens
  misc_RNA (1)...(19): siRNA sense strand
cugagaaaaucuuccguuu

SEQ ID NO: 2055700 - RNA, 19 nt, Homo sapiens
  misc_RNA (1)...(19): siRNA sense strand
ugacaaagagcuuccauuu

SEQ ID NO: 2055701 - RNA, 19 nt, Homo sapiens
  misc_RNA (1)...(19): siRNA sense strand
ggaggaaggugacaaugag

SEQ ID NO: 2055702 - RNA, 19 nt, Homo sapiens
  misc_RNA (1)...(19): siRNA sense strand
acaaagagcuuccauuucc

SEQ ID NO: 2055703 - RNA, 19 nt, Homo sapiens
  misc_RNA (1)...(19): siRNA sense strand
gaacucggccuccagaauc

SEQ ID NO: 2055704 - RNA, 19 nt, Homo sapiens
  misc_RNA (1)...(19): siRNA sense strand
acaaguggcugacaaagag

SEQ ID NO: 2055705 - RNA, 19 nt, Homo sapiens
  misc_RNA (1)...(19): siRNA sense strand
caacuggagcuuccuguau

SEQ ID NO: 2055706 - RNA, 19 nt, Homo sapiens
  misc_RNA (1)...(19): siRNA sense strand
ucucuuugcuguauuugaa

SEQ ID NO: 2055707 - RNA, 19 nt, Homo sapiens
  misc_RNA (1)...(19): siRNA sense strand
gcuguccucuucaucuuga

SEQ ID NO: 2055708 - RNA, 19 nt, Homo sapiens
  misc_RNA (1)...(19): siRNA sense strand
gggaggaaggugacaauga

SEQ ID NO: 2055709 - RNA, 19 nt, Homo sapiens
  misc_RNA (1)...(19): siRNA sense strand
ggcaucaccuucuacaaca

SEQ ID NO: 2055710 - RNA, 19 nt, Homo sapiens
  misc_RNA (1)...(19): siRNA sense strand
acaaugaggaggaggagua

SEQ ID NO: 2055711 - RNA, 19 nt, Homo sapiens
  misc_RNA (1)...(19): siRNA sense strand
cagccucacucucuccauu

SEQ ID NO: 2055712 - RNA, 19 nt, Homo sapiens
  misc_RNA (1)...(19): siRNA sense strand
gacaaagagcuuccauuuc

SEQ ID NO: 2055713 - RNA, 19 nt, Homo sapiens
  misc_RNA (1)...(19): siRNA sense strand
gguuugggcuucucugagu

SEQ ID NO: 2055714 - RNA, 19 nt, Homo sapiens
  misc_RNA (1)...(19): siRNA sense strand
ggcuggugcuucucuacua

SEQ ID NO: 2055715 - RNA, 19 nt, Homo sapiens
  misc_RNA (1)...(19): siRNA sense strand
gcaccuggccgugaucuuc

SEQ ID NO: 2055716 - RNA, 19 nt, Homo sapiens
  misc_RNA (1)...(19): siRNA sense strand
gacgugggcuuguccaacu

SEQ ID NO: 2055717 - RNA, 19 nt, Homo sapiens
  misc_RNA (1)...(19): siRNA sense strand
gcaucaccuucuacaacaa

SEQ ID NO: 2055718 - RNA, 19 nt, Homo sapiens
  misc_RNA (1)...(19): siRNA sense strand
cagcuguccucuucaucuu

SEQ ID NO: 2055719 - RNA, 19 nt, Homo sapiens
  misc_RNA (1)...(19): siRNA sense strand
gcucuucccucucuuugcu

SEQ ID NO: 2055720 - RNA, 19 nt, Homo sapiens
  misc_RNA (1)...(19): siRNA sense strand
ggaggaggaguacuuugug

SEQ ID NO: 2055721 - RNA, 19 nt, Homo sapiens
  misc_RNA (1)...(19): siRNA sense strand
uacaacaaguggcugacaa

SEQ ID NO: 2055722 - RNA, 19 nt, Homo sapiens
  misc_RNA (1)...(19): siRNA sense strand
gauucucgccuuugguuug

SEQ ID NO: 2055723 - RNA, 19 nt, Homo sapiens
  misc_RNA (1)...(19): siRNA sense strand
gggauucucgccuuugguu

SEQ ID NO: 2055724 - RNA, 19 nt, Homo sapiens
  misc_RNA (1)...(19): siRNA sense strand
gccgugaucuuccucuucu

SEQ ID NO: 2055725 - RNA, 19 nt, Homo sapiens
  misc_RNA (1)...(19): siRNA sense strand
cccagaugcuccugcagaa

SEQ ID NO: 2055726 - RNA, 19 nt, Homo sapiens
  misc_RNA (1)...(19): siRNA sense strand
ccaacuggagcuuccugua

SEQ ID NO: 2055727 - RNA, 19 nt, Homo sapiens
  misc_RNA (1)...(19): siRNA sense strand
ccuccacguugcccucaaa

SEQ ID NO: 2055728 - RNA, 19 nt, Homo sapiens
  misc_RNA (1)...(19): siRNA sense strand
agucugcacuuugcuguug

SEQ ID NO: 2055729 - RNA, 19 nt, Homo sapiens
  misc_RNA (1)...(19): siRNA sense strand
aacuggagcuuccuguaug

SEQ ID NO: 2055730 - RNA, 19 nt, Homo sapiens
  misc_RNA (1)...(19): siRNA sense strand
ccaucggcaucaccuucua

SEQ ID NO: 2055731 - RNA, 19 nt, Homo sapiens
  misc_RNA (1)...(19): siRNA sense strand
uugaaggucuccauuuguc

SEQ ID NO: 2055732 - RNA, 19 nt, Homo sapiens
  misc_RNA (1)...(19): siRNA sense strand
auuugaaggucuccauuug

SEQ ID NO: 2055733 - RNA, 19 nt, Homo sapiens
  misc_RNA (1)...(19): siRNA sense strand
uguacacaaugaccaaauc

SEQ ID NO: 2055734 - RNA, 19 nt, Homo sapiens
  misc_RNA (1)...(19): siRNA sense strand
uauuugaaggucuccauuu

SEQ ID NO: 2055735 - RNA, 19 nt, Homo sapiens
  misc_RNA (1)...(19): siRNA sense strand
acaacaaguggcugacaaa

SEQ ID NO: 2055736 - RNA, 19 nt, Homo sapiens
  misc_RNA (1)...(19): siRNA sense strand
ccucagcuguccucuucau

SEQ ID NO: 2055737 - RNA, 19 nt, Homo sapiens
  misc_RNA (1)...(19): siRNA sense strand
gcgggauucucgccuuugg

SEQ ID NO: 2055738 - RNA, 19 nt, Homo sapiens
  misc_RNA (1)...(19): siRNA sense strand
gaaccuccagccucacucu

SEQ ID NO: 2055739 - RNA, 19 nt, Homo sapiens
  misc_RNA (1)...(19): siRNA sense strand
ccgucucgcuguacacaau

SEQ ID NO: 2055740 - RNA, 19 nt, Homo sapiens
  misc_RNA (1)...(19): siRNA sense strand
gcuggugcuucucuacuac

SEQ ID NO: 2055741 - RNA, 19 nt, Homo sapiens
  misc_RNA (1)...(19): siRNA sense strand
ccucuuccuuggcgggauu

SEQ ID NO: 2055742 - RNA, 19 nt, Homo sapiens
  misc_RNA (1)...(19): siRNA sense strand
ccgacuaccucagaagagu

SEQ ID NO: 2055743 - RNA, 19 nt, Homo sapiens
  misc_RNA (1)...(19): siRNA sense strand
ugaggaggaggaguacuuu

SEQ ID NO: 2055744 - RNA, 19 nt, Homo sapiens
  misc_RNA (1)...(19): siRNA sense strand
ugaacucggccuccagaau

SEQ ID NO: 2055745 - RNA, 19 nt, Homo sapiens
  misc_RNA (1)...(19): siRNA sense strand
auccucagcuguccucuuc

SEQ ID NO: 2055746 - RNA, 19 nt, Homo sapiens
  misc_RNA (1)...(19): siRNA sense strand
gaggaggaggaguacuuug

SEQ ID NO: 2055747 - RNA, 19 nt, Homo sapiens
  misc_RNA (1)...(19): siRNA sense strand
caacaaguggcugacaaag

SEQ ID NO: 2055748 - RNA, 19 nt, Homo sapiens
  misc_RNA (1)...(19): siRNA sense strand
guauuugaaggucuccauu

SEQ ID NO: 2055749 - RNA, 19 nt, Homo sapiens
  misc_RNA (1)...(19): siRNA sense strand
aucuugaucuucucucuga

SEQ ID NO: 2055750 - RNA, 19 nt, Homo sapiens
  misc_RNA (1)...(19): siRNA sense strand
cugagaaaaucuuccguuu

SEQ ID NO: 2055751 - RNA, 19 nt, Homo sapiens
  misc_RNA (1)...(19): siRNA sense strand
ugacaaagagcuuccauuu

SEQ ID NO: 2055752 - RNA, 19 nt, Homo sapiens
  misc_RNA (1)...(19): siRNA sense strand
ggaggaaggugacaaugag

SEQ ID NO: 2055753 - RNA, 19 nt, Homo sapiens
  misc_RNA (1)...(19): siRNA sense strand
acaaagagcuuccauuucc

SEQ ID NO: 2055754 - RNA, 19 nt, Homo sapiens
  misc_RNA (1)...(19): siRNA sense strand
gaacucggccuccagaauc

SEQ ID NO: 2055755 - RNA, 19 nt, Homo sapiens
  misc_RNA (1)...(19): siRNA sense strand
acaaguggcugacaaagag

SEQ ID NO: 2055756 - RNA, 19 nt, Homo sapiens
  misc_RNA (1)...(19): siRNA sense strand
caacuggagcuuccuguau

SEQ ID NO: 2055757 - RNA, 19 nt, Homo sapiens
  misc_RNA (1)...(19): siRNA sense strand
ucucuuugcuguauuugaa

SEQ ID NO: 2055758 - RNA, 19 nt, Homo sapiens
  misc_RNA (1)...(19): siRNA sense strand
gcuguccucuucaucuuga

SEQ ID NO: 2055759 - RNA, 19 nt, Homo sapiens
  misc_RNA (1)...(19): siRNA sense strand
gggaggaaggugacaauga

SEQ ID NO: 2055760 - RNA, 19 nt, Homo sapiens
  misc_RNA (1)...(19): siRNA sense strand
ggcaucaccuucuacaaca

SEQ ID NO: 2055761 - RNA, 19 nt, Homo sapiens
  misc_RNA (1)...(19): siRNA sense strand
acaaugaggaggaggagua

SEQ ID NO: 2055762 - RNA, 19 nt, Homo sapiens
  misc_RNA (1)...(19): siRNA sense strand
cagccucacucucuccauu

SEQ ID NO: 2055763 - RNA, 19 nt, Homo sapiens
  misc_RNA (1)...(19): siRNA sense strand
gacaaagagcuuccauuuc

SEQ ID NO: 2055764 - RNA, 19 nt, Homo sapiens
  misc_RNA (1)...(19): siRNA sense strand
gguuugggcuucucugagu

SEQ ID NO: 2055765 - RNA, 19 nt, Homo sapiens
  misc_RNA (1)...(19): siRNA sense strand
ggcuggugcuucucuacua

SEQ ID NO: 2055766 - RNA, 19 nt, Homo sapiens
  misc_RNA (1)...(19): siRNA sense strand
gcaccuggccgugaucuuc

SEQ ID NO: 2055767 - RNA, 19 nt, Homo sapiens
  misc_RNA (1)...(19): siRNA sense strand
gacgugggcuuguccaacu

SEQ ID NO: 2055768 - RNA, 19 nt, Homo sapiens
  misc_RNA (1)...(19): siRNA sense strand
gcaucaccuucuacaacaa

SEQ ID NO: 2055769 - RNA, 19 nt, Homo sapiens
  misc_RNA (1)...(19): siRNA sense strand
cagcuguccucuucaucuu

SEQ ID NO: 2055770 - RNA, 19 nt, Homo sapiens
  misc_RNA (1)...(19): siRNA sense strand
gcucuucccucucuuugcu

SEQ ID NO: 2055771 - RNA, 19 nt, Homo sapiens
  misc_RNA (1)...(19): siRNA sense strand
ggaggaggaguacuuugug

SEQ ID NO: 2055772 - RNA, 19 nt, Homo sapiens
  misc_RNA (1)...(19): siRNA sense strand
uacaacaaguggcugacaa

SEQ ID NO: 2055773 - RNA, 19 nt, Homo sapiens
  misc_RNA (1)...(19): siRNA sense strand
gauucucgccuuugguuug

SEQ ID NO: 2055774 - RNA, 19 nt, Homo sapiens
  misc_RNA (1)...(19): siRNA sense strand
gggauucucgccuuugguu

SEQ ID NO: 2055775 - RNA, 19 nt, Homo sapiens
  misc_RNA (1)...(19): siRNA sense strand
gccgugaucuuccucuucu

SEQ ID NO: 2055776 - RNA, 19 nt, Homo sapiens
  misc_RNA (1)...(19): siRNA sense strand
cccagaugcuccugcagaa

SEQ ID NO: 2055777 - RNA, 19 nt, Homo sapiens
  misc_RNA (1)...(19): siRNA sense strand
ccaacuggagcuuccugua

SEQ ID NO: 2055778 - RNA, 19 nt, Homo sapiens
  misc_RNA (1)...(19): siRNA sense strand
ccuccacguugcccucaaa

SEQ ID NO: 2055779 - RNA, 19 nt, Homo sapiens
  misc_RNA (1)...(19): siRNA sense strand
agucugcacuuugcuguug

SEQ ID NO: 2055780 - RNA, 19 nt, Homo sapiens
  misc_RNA (1)...(19): siRNA sense strand
aacuggagcuuccuguaug

SEQ ID NO: 2055781 - RNA, 19 nt, Homo sapiens
  misc_RNA (1)...(19): siRNA sense strand
ccaucggcaucaccuucua

SEQ ID NO: 2055782 - RNA, 19 nt, Homo sapiens
  misc_RNA (1)...(19): siRNA sense strand
uugaaggucuccauuuguc

SEQ ID NO: 2055783 - RNA, 19 nt, Homo sapiens
  misc_RNA (1)...(19): siRNA sense strand
auuugaaggucuccauuug

SEQ ID NO: 2055784 - RNA, 19 nt, Homo sapiens
  misc_RNA (1)...(19): siRNA sense strand
uguacacaaugaccaaauc

SEQ ID NO: 2055785 - RNA, 19 nt, Homo sapiens
  misc_RNA (1)...(19): siRNA sense strand
uauuugaaggucuccauuu

SEQ ID NO: 2055786 - RNA, 19 nt, Homo sapiens
  misc_RNA (1)...(19): siRNA sense strand
acaacaaguggcugacaaa

SEQ ID NO: 2055787 - RNA, 19 nt, Homo sapiens
  misc_RNA (1)...(19): siRNA sense strand
ccucagcuguccucuucau

SEQ ID NO: 2055788 - RNA, 19 nt, Homo sapiens
  misc_RNA (1)...(19): siRNA sense strand
gcgggauucucgccuuugg

SEQ ID NO: 2055789 - RNA, 19 nt, Homo sapiens
  misc_RNA (1)...(19): siRNA sense strand
gaaccuccagccucacucu

SEQ ID NO: 2055790 - RNA, 19 nt, Homo sapiens
  misc_RNA (1)...(19): siRNA sense strand
ccgucucgcuguacacaau

SEQ ID NO: 2055791 - RNA, 19 nt, Homo sapiens
  misc_RNA (1)...(19): siRNA sense strand
gcuggugcuucucuacuac

SEQ ID NO: 2055792 - RNA, 19 nt, Homo sapiens
  misc_RNA (1)...(19): siRNA sense strand
ccucuuccuuggcgggauu

SEQ ID NO: 2055793 - RNA, 19 nt, Homo sapiens
  misc_RNA (1)...(19): siRNA sense strand
ccgacuaccucagaagagu

SEQ ID NO: 2055794 - RNA, 19 nt, Homo sapiens
  misc_RNA (1)...(19): siRNA sense strand
ugaggaggaggaguacuuu

SEQ ID NO: 2055795 - RNA, 19 nt, Homo sapiens
  misc_RNA (1)...(19): siRNA sense strand
ugaacucggccuccagaau

SEQ ID NO: 2055796 - RNA, 19 nt, Homo sapiens
  misc_RNA (1)...(19): siRNA sense strand
auccucagcuguccucuuc

SEQ ID NO: 2055797 - RNA, 19 nt, Homo sapiens
  misc_RNA (1)...(19): siRNA sense strand
gaggaggaggaguacuuug

SEQ ID NO: 2055798 - RNA, 19 nt, Homo sapiens
  misc_RNA (1)...(19): siRNA sense strand
caacaaguggcugacaaag

SEQ ID NO: 2055799 - RNA, 19 nt, Homo sapiens
  misc_RNA (1)...(19): siRNA sense strand
guauuugaaggucuccauu

SEQ ID NO: 2055800 - RNA, 19 nt, Homo sapiens
  misc_RNA (1)...(19): siRNA sense strand
aucuugaucuucucucuga

SEQ ID NO: 2055801 - RNA, 19 nt, Homo sapiens
  misc_RNA (1)...(19): siRNA sense strand
cugagaaaaucuuccguuu

SEQ ID NO: 2055802 - RNA, 19 nt, Homo sapiens
  misc_RNA (1)...(19): siRNA sense strand
gagaugaccuucaagauca

SEQ ID NO: 2055803 - RNA, 19 nt, Homo sapiens
  misc_RNA (1)...(19): siRNA sense strand
gaacuugaccggagaauug

SEQ ID NO: 2055804 - RNA, 19 nt, Homo sapiens
  misc_RNA (1)...(19): siRNA sense strand
gaagcuggcugaugugaug

SEQ ID NO: 2055805 - RNA, 19 nt, Homo sapiens
  misc_RNA (1)...(19): siRNA sense strand
caacagggcuggaacaucu

SEQ ID NO: 2055806 - RNA, 19 nt, Homo sapiens
  misc_RNA (1)...(19): siRNA sense strand
caacuucgcuuaugucaag

SEQ ID NO: 2055807 - RNA, 19 nt, Homo sapiens
  misc_RNA (1)...(19): siRNA sense strand
ugaagaagcuggcugaugu

SEQ ID NO: 2055808 - RNA, 19 nt, Homo sapiens
  misc_RNA (1)...(19): siRNA sense strand
ggagacagaugaccaaagu

SEQ ID NO: 2055809 - RNA, 19 nt, Homo sapiens
  misc_RNA (1)...(19): siRNA sense strand
ggaacuggcuggacuuuag

SEQ ID NO: 2055810 - RNA, 19 nt, Homo sapiens
  misc_RNA (1)...(19): siRNA sense strand
agacacagaugaccaagaa

SEQ ID NO: 2055811 - RNA, 19 nt, Homo sapiens
  misc_RNA (1)...(19): siRNA sense strand
cggcaccucugauguguua

SEQ ID NO: 2055812 - RNA, 19 nt, Homo sapiens
  misc_RNA (1)...(19): siRNA sense strand
gagggagacuugccuuuga

SEQ ID NO: 2055813 - RNA, 19 nt, Homo sapiens
  misc_RNA (1)...(19): siRNA sense strand
ggaccaaggugaaagucaa

SEQ ID NO: 2055814 - RNA, 19 nt, Homo sapiens
  misc_RNA (1)...(19): siRNA sense strand
uuucugaucugcuugaaua

SEQ ID NO: 2055815 - RNA, 19 nt, Homo sapiens
  misc_RNA (1)...(19): siRNA sense strand
cagcagagaugaccuucaa

SEQ ID NO: 2055816 - RNA, 19 nt, Homo sapiens
  misc_RNA (1)...(19): siRNA sense strand
aaacggaugucuucaggaa

SEQ ID NO: 2055817 - RNA, 19 nt, Homo sapiens
  misc_RNA (1)...(19): siRNA sense strand
cagaggagcagaagaagua

SEQ ID NO: 2055818 - RNA, 19 nt, Homo sapiens
  misc_RNA (1)...(19): siRNA sense strand
gaauacaaccucuacaugu

SEQ ID NO: 2055819 - RNA, 19 nt, Homo sapiens
  misc_RNA (1)...(19): siRNA sense strand
gugaagaucucgccgacuu

SEQ ID NO: 2055820 - RNA, 19 nt, Homo sapiens
  misc_RNA (1)...(19): siRNA sense strand
gagagcggcugugaagauu

SEQ ID NO: 2055821 - RNA, 19 nt, Homo sapiens
  misc_RNA (1)...(19): siRNA sense strand
cagaagaaguacuacaaug

SEQ ID NO: 2055822 - RNA, 19 nt, Homo sapiens
  misc_RNA (1)...(19): siRNA sense strand
ugagagcucugucacgauu

SEQ ID NO: 2055823 - RNA, 19 nt, Homo sapiens
  misc_RNA (1)...(19): siRNA sense strand
uggaaaugcucaagaaaga

SEQ ID NO: 2055824 - RNA, 19 nt, Homo sapiens
  misc_RNA (1)...(19): siRNA sense strand
gcacaugauggacuucuuu

SEQ ID NO: 2055825 - RNA, 19 nt, Homo sapiens
  misc_RNA (1)...(19): siRNA sense strand
ugaccaaaguccugagaaa

SEQ ID NO: 2055826 - RNA, 19 nt, Homo sapiens
  misc_RNA (1)...(19): siRNA sense strand
aaaauuaccugcucaagaa

SEQ ID NO: 2055827 - RNA, 19 nt, Homo sapiens
  misc_RNA (1)...(19): siRNA sense strand
ccauggaaaugcucaagaa

SEQ ID NO: 2055828 - RNA, 19 nt, Homo sapiens
  misc_RNA (1)...(19): siRNA sense strand
gaacggcaccucugaugug

SEQ ID NO: 2055829 - RNA, 19 nt, Homo sapiens
  misc_RNA (1)...(19): siRNA sense strand
caacaugacaagugaauuc

SEQ ID NO: 2055830 - RNA, 19 nt, Homo sapiens
  misc_RNA (1)...(19): siRNA sense strand
ugaagaagcugggcuccaa

SEQ ID NO: 2055831 - RNA, 19 nt, Homo sapiens
  misc_RNA (1)...(19): siRNA sense strand
ggaauacaaccucuacaug

SEQ ID NO: 2055832 - RNA, 19 nt, Homo sapiens
  misc_RNA (1)...(19): siRNA sense strand
ugacagaggagcagaagaa

SEQ ID NO: 2055833 - RNA, 19 nt, Homo sapiens
  misc_RNA (1)...(19): siRNA sense strand
ggaccaaguaugucgagua

SEQ ID NO: 2055834 - RNA, 19 nt, Homo sapiens
  misc_RNA (1)...(19): siRNA sense strand
gcagguggcaacauuuaaa

SEQ ID NO: 2055835 - RNA, 19 nt, Homo sapiens
  misc_RNA (1)...(19): siRNA sense strand
gcagagaugaccuucaaga

SEQ ID NO: 2055836 - RNA, 19 nt, Homo sapiens
  misc_RNA (1)...(19): siRNA sense strand
gcagggaagaucuacauga

SEQ ID NO: 2055837 - RNA, 19 nt, Homo sapiens
  misc_RNA (1)...(19): siRNA sense strand
ccagaggccacucaguuua

SEQ ID NO: 2055838 - RNA, 19 nt, Homo sapiens
  misc_RNA (1)...(19): siRNA sense strand
guacuacaaugccaugaag

SEQ ID NO: 2055839 - RNA, 19 nt, Homo sapiens
  misc_RNA (1)...(19): siRNA sense strand
gagacuugccuuugaacua

SEQ ID NO: 2055840 - RNA, 19 nt, Homo sapiens
  misc_RNA (1)...(19): siRNA sense strand
ugaacacacucaucaagau

SEQ ID NO: 2055841 - RNA, 19 nt, Homo sapiens
  misc_RNA (1)...(19): siRNA sense strand
cagauaagccucaucaaca

SEQ ID NO: 2055842 - RNA, 19 nt, Homo sapiens
  misc_RNA (1)...(19): siRNA sense strand
ggaagaccaucaagguucu

SEQ ID NO: 2055843 - RNA, 19 nt, Homo sapiens
  misc_RNA (1)...(19): siRNA sense strand
ggagagcggcugugaagau

SEQ ID NO: 2055844 - RNA, 19 nt, Homo sapiens
  misc_RNA (1)...(19): siRNA sense strand
gaggacgacuucgauaugu

SEQ ID NO: 2055845 - RNA, 19 nt, Homo sapiens
  misc_RNA (1)...(19): siRNA sense strand
gcuggaauaucuucgacuu

SEQ ID NO: 2055846 - RNA, 19 nt, Homo sapiens
  misc_RNA (1)...(19): siRNA sense strand
gaagauggucccagagcaa

SEQ ID NO: 2055847 - RNA, 19 nt, Homo sapiens
  misc_RNA (1)...(19): siRNA sense strand
uggcuggacuuuaguguga

SEQ ID NO: 2055848 - RNA, 19 nt, Homo sapiens
  misc_RNA (1)...(19): siRNA sense strand
cgacuucgauauguucuau

SEQ ID NO: 2055849 - RNA, 19 nt, Homo sapiens
  misc_RNA (1)...(19): siRNA sense strand
guucaucuacuccaucuuu

SEQ ID NO: 2055850 - RNA, 19 nt, Homo sapiens
  misc_RNA (1)...(19): siRNA sense strand
gagaguggaucgagaccau

SEQ ID NO: 2055851 - RNA, 19 nt, Homo sapiens
  misc_RNA (1)...(19): siRNA sense strand
caagugaauucgaggagau

SEQ ID NO: 2055852 - RNA, 19 nt, Homo sapiens
  misc_RNA (1)...(19): siRNA sense strand
gaccaaguaugucgaguac

SEQ ID NO: 2055853 - RNA, 19 nt, Homo sapiens
  misc_RNA (1)...(19): siRNA sense strand
cauccaagaucuccuacga

SEQ ID NO: 2055854 - RNA, 19 nt, Homo sapiens
  misc_RNA (1)...(19): siRNA sense strand
ucauggcgcuggagcacua

SEQ ID NO: 2055855 - RNA, 19 nt, Homo sapiens
  misc_RNA (1)...(19): siRNA sense strand
ggcgagaccuggguucuga

SEQ ID NO: 2055856 - RNA, 19 nt, Homo sapiens
  misc_RNA (1)...(19): siRNA sense strand
aaacagccaugagagaaga

SEQ ID NO: 2055857 - RNA, 19 nt, Homo sapiens
  misc_RNA (1)...(19): siRNA sense strand
guaaacagccaugagagaa

SEQ ID NO: 2055858 - RNA, 19 nt, Homo sapiens
  misc_RNA (1)...(19): siRNA sense strand
cagggaagaucuacaugau

SEQ ID NO: 2055859 - RNA, 19 nt, Homo sapiens
  misc_RNA (1)...(19): siRNA sense strand
uaugagaucugggagaaau

SEQ ID NO: 2055860 - RNA, 19 nt, Homo sapiens
  misc_RNA (1)...(19): siRNA sense strand
gcaccauccucaccaacug

SEQ ID NO: 2055861 - RNA, 19 nt, Homo sapiens
  misc_RNA (1)...(19): siRNA sense strand
ugacgucaccaucauguuu

SEQ ID NO: 2055862 - RNA, 19 nt, Homo sapiens
  misc_RNA (1)...(19): siRNA sense strand
gaacaacaagagccagugu

SEQ ID NO: 2055863 - RNA, 19 nt, Homo sapiens
  misc_RNA (1)...(19): siRNA sense strand
gaagaagcaagaggagaaa

SEQ ID NO: 2055864 - RNA, 19 nt, Homo sapiens
  misc_RNA (1)...(19): siRNA sense strand
caucaucguguucaucuuu

SEQ ID NO: 2055865 - RNA, 19 nt, Homo sapiens
  misc_RNA (1)...(19): siRNA sense strand
gcauggacauucucuuugc

SEQ ID NO: 2055866 - RNA, 19 nt, Homo sapiens
  misc_RNA (1)...(19): siRNA sense strand
guaccagggcuucauauuc

SEQ ID NO: 2055867 - RNA, 19 nt, Homo sapiens
  misc_RNA (1)...(19): siRNA sense strand
caaguaccagggcuucaua

SEQ ID NO: 2055868 - RNA, 19 nt, Homo sapiens
  misc_RNA (1)...(19): siRNA sense strand
gcagaagaaguacuacaau

SEQ ID NO: 2055869 - RNA, 19 nt, Homo sapiens
  misc_RNA (1)...(19): siRNA sense strand
gggcaaugucucagccuua

SEQ ID NO: 2055870 - RNA, 19 nt, Homo sapiens
  misc_RNA (1)...(19): siRNA sense strand
ugaccaagcaggccuuuga

SEQ ID NO: 2055871 - RNA, 19 nt, Homo sapiens
  misc_RNA (1)...(19): siRNA sense strand
gaacacacucaucaagauc

SEQ ID NO: 2055872 - RNA, 19 nt, Homo sapiens
  misc_RNA (1)...(19): siRNA sense strand
gagcggcugugaagauucu

SEQ ID NO: 2055873 - RNA, 19 nt, Homo sapiens
  misc_RNA (1)...(19): siRNA sense strand
gaaaauuaccugcucaaga

SEQ ID NO: 2055874 - RNA, 19 nt, Homo sapiens
  misc_RNA (1)...(19): siRNA sense strand
gaacuacaccaucgugaac

SEQ ID NO: 2055875 - RNA, 19 nt, Homo sapiens
  misc_RNA (1)...(19): siRNA sense strand
gcugggagcgccucuauca

SEQ ID NO: 2055876 - RNA, 19 nt, Homo sapiens
  misc_RNA (1)...(19): siRNA sense strand
ggacuuuagugugauuauc

SEQ ID NO: 2055877 - RNA, 19 nt, Homo sapiens
  misc_RNA (1)...(19): siRNA sense strand
gacauucucuuugccuuca

SEQ ID NO: 2055878 - RNA, 19 nt, Homo sapiens
  misc_RNA (1)...(19): siRNA sense strand
ggacgacuucgauauguuc

SEQ ID NO: 2055879 - RNA, 19 nt, Homo sapiens
  misc_RNA (1)...(19): siRNA sense strand
gcaugagggugguggucaa

SEQ ID NO: 2055880 - RNA, 19 nt, Homo sapiens
  misc_RNA (1)...(19): siRNA sense strand
gcacucuuccgccugauga

SEQ ID NO: 2055881 - RNA, 19 nt, Homo sapiens
  misc_RNA (1)...(19): siRNA sense strand
ccaaguaugucgaguacac

SEQ ID NO: 2055882 - RNA, 19 nt, Homo sapiens
  misc_RNA (1)...(19): siRNA sense strand
ggagauggacgcccugaag

SEQ ID NO: 2055883 - RNA, 19 nt, Homo sapiens
  misc_RNA (1)...(19): siRNA sense strand
aguauucgguccugucuga

SEQ ID NO: 2055884 - RNA, 19 nt, Homo sapiens
  misc_RNA (1)...(19): siRNA sense strand
ucucggacaucauccagaa

SEQ ID NO: 2055885 - RNA, 19 nt, Homo sapiens
  misc_RNA (1)...(19): siRNA sense strand
gcacagcagacaugaccaa

SEQ ID NO: 2055886 - RNA, 19 nt, Homo sapiens
  misc_RNA (1)...(19): siRNA sense strand
ccaguaaacagccaugaga

SEQ ID NO: 2055887 - RNA, 19 nt, Homo sapiens
  misc_RNA (1)...(19): siRNA sense strand
ucagugauccagaaaauua

SEQ ID NO: 2055888 - RNA, 19 nt, Homo sapiens
  misc_RNA (1)...(19): siRNA sense strand
ggcauacacaacugaauuu

SEQ ID NO: 2055889 - RNA, 19 nt, Homo sapiens
  misc_RNA (1)...(19): siRNA sense strand
gcaacgcucuuugaagcau

SEQ ID NO: 2055890 - RNA, 19 nt, Homo sapiens
  misc_RNA (1)...(19): siRNA sense strand
uggcucaucuucagcauca

SEQ ID NO: 2055891 - RNA, 19 nt, Homo sapiens
  misc_RNA (1)...(19): siRNA sense strand
uuucaugccuuccucauca

SEQ ID NO: 2055892 - RNA, 19 nt, Homo sapiens
  misc_RNA (1)...(19): siRNA sense strand
ucauggacccguuuacuga

SEQ ID NO: 2055893 - RNA, 19 nt, Homo sapiens
  misc_RNA (1)...(19): siRNA sense strand
caugagagaagaagcaaga

SEQ ID NO: 2055894 - RNA, 19 nt, Homo sapiens
  misc_RNA (1)...(19): siRNA sense strand
gaaaugcucaagaaagaac

SEQ ID NO: 2055895 - RNA, 19 nt, Homo sapiens
  misc_RNA (1)...(19): siRNA sense strand
gcccagcgcuaccugaucu

SEQ ID NO: 2055896 - RNA, 19 nt, Homo sapiens
  misc_RNA (1)...(19): siRNA sense strand
gcagccaacccauccaaga

SEQ ID NO: 2055897 - RNA, 19 nt, Homo sapiens
  misc_RNA (1)...(19): siRNA sense strand
gagauggacgcccugaaga

SEQ ID NO: 2055898 - RNA, 19 nt, Homo sapiens
  misc_RNA (1)...(19): siRNA sense strand
ucuaugagaucugggagaa

SEQ ID NO: 2055899 - RNA, 19 nt, Homo sapiens
  misc_RNA (1)...(19): siRNA sense strand
gcauggccaacuucgcuua

SEQ ID NO: 2055900 - RNA, 19 nt, Homo sapiens
  misc_RNA (1)...(19): siRNA sense strand
accaacagcuggaauaucu

SEQ ID NO: 2055901 - RNA, 19 nt, Homo sapiens
  misc_RNA (1)...(19): siRNA sense strand
ugaaguugguggucaugga

SEQ ID NO: 2055902 - RNA, 19 nt, Homo sapiens
  misc_RNA (1)...(19): siRNA sense strand
gagaugaccuucaagauca

SEQ ID NO: 2055903 - RNA, 19 nt, Homo sapiens
  misc_RNA (1)...(19): siRNA sense strand
gaacuugaccggagaauug

SEQ ID NO: 2055904 - RNA, 19 nt, Homo sapiens
  misc_RNA (1)...(19): siRNA sense strand
gaagcuggcugaugugaug

SEQ ID NO: 2055905 - RNA, 19 nt, Homo sapiens
  misc_RNA (1)...(19): siRNA sense strand
caacagggcuggaacaucu

SEQ ID NO: 2055906 - RNA, 19 nt, Homo sapiens
  misc_RNA (1)...(19): siRNA sense strand
caacuucgcuuaugucaag

SEQ ID NO: 2055907 - RNA, 19 nt, Homo sapiens
  misc_RNA (1)...(19): siRNA sense strand
ugaagaagcuggcugaugu

SEQ ID NO: 2055908 - RNA, 19 nt, Homo sapiens
  misc_RNA (1)...(19): siRNA sense strand
ggagacagaugaccaaagu

SEQ ID NO: 2055909 - RNA, 19 nt, Homo sapiens
  misc_RNA (1)...(19): siRNA sense strand
ggaacuggcuggacuuuag

SEQ ID NO: 2055910 - RNA, 19 nt, Homo sapiens
  misc_RNA (1)...(19): siRNA sense strand
agacacagaugaccaagaa

SEQ ID NO: 2055911 - RNA, 19 nt, Homo sapiens
  misc_RNA (1)...(19): siRNA sense strand
cggcaccucugauguguua

SEQ ID NO: 2055912 - RNA, 19 nt, Homo sapiens
  misc_RNA (1)...(19): siRNA sense strand
gagggagacuugccuuuga

SEQ ID NO: 2055913 - RNA, 19 nt, Homo sapiens
  misc_RNA (1)...(19): siRNA sense strand
ggaccaaggugaaagucaa

SEQ ID NO: 2055914 - RNA, 19 nt, Homo sapiens
  misc_RNA (1)...(19): siRNA sense strand
uuucugaucugcuugaaua

SEQ ID NO: 2055915 - RNA, 19 nt, Homo sapiens
  misc_RNA (1)...(19): siRNA sense strand
cagcagagaugaccuucaa

SEQ ID NO: 2055916 - RNA, 19 nt, Homo sapiens
  misc_RNA (1)...(19): siRNA sense strand
aaacggaugucuucaggaa

SEQ ID NO: 2055917 - RNA, 19 nt, Homo sapiens
  misc_RNA (1)...(19): siRNA sense strand
cagaggagcagaagaagua

SEQ ID NO: 2055918 - RNA, 19 nt, Homo sapiens
  misc_RNA (1)...(19): siRNA sense strand
gaauacaaccucuacaugu

SEQ ID NO: 2055919 - RNA, 19 nt, Homo sapiens
  misc_RNA (1)...(19): siRNA sense strand
gugaagaucucgccgacuu

SEQ ID NO: 2055920 - RNA, 19 nt, Homo sapiens
  misc_RNA (1)...(19): siRNA sense strand
gagagcggcugugaagauu

SEQ ID NO: 2055921 - RNA, 19 nt, Homo sapiens
  misc_RNA (1)...(19): siRNA sense strand
cagaagaaguacuacaaug

SEQ ID NO: 2055922 - RNA, 19 nt, Homo sapiens
  misc_RNA (1)...(19): siRNA sense strand
ugagagcucugucacgauu

SEQ ID NO: 2055923 - RNA, 19 nt, Homo sapiens
  misc_RNA (1)...(19): siRNA sense strand
uggaaaugcucaagaaaga

SEQ ID NO: 2055924 - RNA, 19 nt, Homo sapiens
  misc_RNA (1)...(19): siRNA sense strand
gcacaugauggacuucuuu

SEQ ID NO: 2055925 - RNA, 19 nt, Homo sapiens
  misc_RNA (1)...(19): siRNA sense strand
ugaccaaaguccugagaaa

SEQ ID NO: 2055926 - RNA, 19 nt, Homo sapiens
  misc_RNA (1)...(19): siRNA sense strand
aaaauuaccugcucaagaa

SEQ ID NO: 2055927 - RNA, 19 nt, Homo sapiens
  misc_RNA (1)...(19): siRNA sense strand
ccauggaaaugcucaagaa

SEQ ID NO: 2055928 - RNA, 19 nt, Homo sapiens
  misc_RNA (1)...(19): siRNA sense strand
gaacggcaccucugaugug

SEQ ID NO: 2055929 - RNA, 19 nt, Homo sapiens
  misc_RNA (1)...(19): siRNA sense strand
caacaugacaagugaauuc

SEQ ID NO: 2055930 - RNA, 19 nt, Homo sapiens
  misc_RNA (1)...(19): siRNA sense strand
ugaagaagcugggcuccaa

SEQ ID NO: 2055931 - RNA, 19 nt, Homo sapiens
  misc_RNA (1)...(19): siRNA sense strand
ggaauacaaccucuacaug

SEQ ID NO: 2055932 - RNA, 19 nt, Homo sapiens
  misc_RNA (1)...(19): siRNA sense strand
ugacagaggagcagaagaa

SEQ ID NO: 2055933 - RNA, 19 nt, Homo sapiens
  misc_RNA (1)...(19): siRNA sense strand
ggaccaaguaugucgagua

SEQ ID NO: 2055934 - RNA, 19 nt, Homo sapiens
  misc_RNA (1)...(19): siRNA sense strand
gcagguggcaacauuuaaa

SEQ ID NO: 2055935 - RNA, 19 nt, Homo sapiens
  misc_RNA (1)...(19): siRNA sense strand
gcagagaugaccuucaaga

SEQ ID NO: 2055936 - RNA, 19 nt, Homo sapiens
  misc_RNA (1)...(19): siRNA sense strand
gcagggaagaucuacauga

SEQ ID NO: 2055937 - RNA, 19 nt, Homo sapiens
  misc_RNA (1)...(19): siRNA sense strand
ccagaggccacucaguuua

SEQ ID NO: 2055938 - RNA, 19 nt, Homo sapiens
  misc_RNA (1)...(19): siRNA sense strand
guacuacaaugccaugaag

SEQ ID NO: 2055939 - RNA, 19 nt, Homo sapiens
  misc_RNA (1)...(19): siRNA sense strand
gagacuugccuuugaacua

SEQ ID NO: 2055940 - RNA, 19 nt, Homo sapiens
  misc_RNA (1)...(19): siRNA sense strand
ugaacacacucaucaagau

SEQ ID NO: 2055941 - RNA, 19 nt, Homo sapiens
  misc_RNA (1)...(19): siRNA sense strand
cagauaagccucaucaaca

SEQ ID NO: 2055942 - RNA, 19 nt, Homo sapiens
  misc_RNA (1)...(19): siRNA sense strand
ggaagaccaucaagguucu

SEQ ID NO: 2055943 - RNA, 19 nt, Homo sapiens
  misc_RNA (1)...(19): siRNA sense strand
ggagagcggcugugaagau

SEQ ID NO: 2055944 - RNA, 19 nt, Homo sapiens
  misc_RNA (1)...(19): siRNA sense strand
gaggacgacuucgauaugu

SEQ ID NO: 2055945 - RNA, 19 nt, Homo sapiens
  misc_RNA (1)...(19): siRNA sense strand
gcuggaauaucuucgacuu

SEQ ID NO: 2055946 - RNA, 19 nt, Homo sapiens
  misc_RNA (1)...(19): siRNA sense strand
gaagauggucccagagcaa

SEQ ID NO: 2055947 - RNA, 19 nt, Homo sapiens
  misc_RNA (1)...(19): siRNA sense strand
uggcuggacuuuaguguga

SEQ ID NO: 2055948 - RNA, 19 nt, Homo sapiens
  misc_RNA (1)...(19): siRNA sense strand
cgacuucgauauguucuau

SEQ ID NO: 2055949 - RNA, 19 nt, Homo sapiens
  misc_RNA (1)...(19): siRNA sense strand
guucaucuacuccaucuuu

SEQ ID NO: 2055950 - RNA, 19 nt, Homo sapiens
  misc_RNA (1)...(19): siRNA sense strand
gagaguggaucgagaccau

SEQ ID NO: 2055951 - RNA, 19 nt, Homo sapiens
  misc_RNA (1)...(19): siRNA sense strand
caagugaauucgaggagau

SEQ ID NO: 2055952 - RNA, 19 nt, Homo sapiens
  misc_RNA (1)...(19): siRNA sense strand
gaccaaguaugucgaguac

SEQ ID NO: 2055953 - RNA, 19 nt, Homo sapiens
  misc_RNA (1)...(19): siRNA sense strand
cauccaagaucuccuacga

SEQ ID NO: 2055954 - RNA, 19 nt, Homo sapiens
  misc_RNA (1)...(19): siRNA sense strand
ucauggcgcuggagcacua

SEQ ID NO: 2055955 - RNA, 19 nt, Homo sapiens
  misc_RNA (1)...(19): siRNA sense strand
ggcgagaccuggguucuga

SEQ ID NO: 2055956 - RNA, 19 nt, Homo sapiens
  misc_RNA (1)...(19): siRNA sense strand
aaacagccaugagagaaga

SEQ ID NO: 2055957 - RNA, 19 nt, Homo sapiens
  misc_RNA (1)...(19): siRNA sense strand
guaaacagccaugagagaa

SEQ ID NO: 2055958 - RNA, 19 nt, Homo sapiens
  misc_RNA (1)...(19): siRNA sense strand
cagggaagaucuacaugau

SEQ ID NO: 2055959 - RNA, 19 nt, Homo sapiens
  misc_RNA (1)...(19): siRNA sense strand
uaugagaucugggagaaau

SEQ ID NO: 2055960 - RNA, 19 nt, Homo sapiens
  misc_RNA (1)...(19): siRNA sense strand
gcaccauccucaccaacug

SEQ ID NO: 2055961 - RNA, 19 nt, Homo sapiens
  misc_RNA (1)...(19): siRNA sense strand
ugacgucaccaucauguuu

SEQ ID NO: 2055962 - RNA, 19 nt, Homo sapiens
  misc_RNA (1)...(19): siRNA sense strand
gaacaacaagagccagugu

SEQ ID NO: 2055963 - RNA, 19 nt, Homo sapiens
  misc_RNA (1)...(19): siRNA sense strand
gaagaagcaagaggagaaa

SEQ ID NO: 2055964 - RNA, 19 nt, Homo sapiens
  misc_RNA (1)...(19): siRNA sense strand
caucaucguguucaucuuu

SEQ ID NO: 2055965 - RNA, 19 nt, Homo sapiens
  misc_RNA (1)...(19): siRNA sense strand
gcauggacauucucuuugc

SEQ ID NO: 2055966 - RNA, 19 nt, Homo sapiens
  misc_RNA (1)...(19): siRNA sense strand
guaccagggcuucauauuc

SEQ ID NO: 2055967 - RNA, 19 nt, Homo sapiens
  misc_RNA (1)...(19): siRNA sense strand
caaguaccagggcuucaua

SEQ ID NO: 2055968 - RNA, 19 nt, Homo sapiens
  misc_RNA (1)...(19): siRNA sense strand
gcagaagaaguacuacaau

SEQ ID NO: 2055969 - RNA, 19 nt, Homo sapiens
  misc_RNA (1)...(19): siRNA sense strand
gggcaaugucucagccuua

SEQ ID NO: 2055970 - RNA, 19 nt, Homo sapiens
  misc_RNA (1)...(19): siRNA sense strand
ugaccaagcaggccuuuga

SEQ ID NO: 2055971 - RNA, 19 nt, Homo sapiens
  misc_RNA (1)...(19): siRNA sense strand
gaacacacucaucaagauc

SEQ ID NO: 2055972 - RNA, 19 nt, Homo sapiens
  misc_RNA (1)...(19): siRNA sense strand
gagcggcugugaagauucu

SEQ ID NO: 2055973 - RNA, 19 nt, Homo sapiens
  misc_RNA (1)...(19): siRNA sense strand
gaaaauuaccugcucaaga

SEQ ID NO: 2055974 - RNA, 19 nt, Homo sapiens
  misc_RNA (1)...(19): siRNA sense strand
gaacuacaccaucgugaac

SEQ ID NO: 2055975 - RNA, 19 nt, Homo sapiens
  misc_RNA (1)...(19): siRNA sense strand
gcugggagcgccucuauca

SEQ ID NO: 2055976 - RNA, 19 nt, Homo sapiens
  misc_RNA (1)...(19): siRNA sense strand
ggacuuuagugugauuauc

SEQ ID NO: 2055977 - RNA, 19 nt, Homo sapiens
  misc_RNA (1)...(19): siRNA sense strand
gacauucucuuugccuuca

SEQ ID NO: 2055978 - RNA, 19 nt, Homo sapiens
  misc_RNA (1)...(19): siRNA sense strand
ggacgacuucgauauguuc

SEQ ID NO: 2055979 - RNA, 19 nt, Homo sapiens
  misc_RNA (1)...(19): siRNA sense strand
gcaugagggugguggucaa

SEQ ID NO: 2055980 - RNA, 19 nt, Homo sapiens
  misc_RNA (1)...(19): siRNA sense strand
gcacucuuccgccugauga

SEQ ID NO: 2055981 - RNA, 19 nt, Homo sapiens
  misc_RNA (1)...(19): siRNA sense strand
ccaaguaugucgaguacac

SEQ ID NO: 2055982 - RNA, 19 nt, Homo sapiens
  misc_RNA (1)...(19): siRNA sense strand
ggagauggacgcccugaag

SEQ ID NO: 2055983 - RNA, 19 nt, Homo sapiens
  misc_RNA (1)...(19): siRNA sense strand
aguauucgguccugucuga

SEQ ID NO: 2055984 - RNA, 19 nt, Homo sapiens
  misc_RNA (1)...(19): siRNA sense strand
ucucggacaucauccagaa

SEQ ID NO: 2055985 - RNA, 19 nt, Homo sapiens
  misc_RNA (1)...(19): siRNA sense strand
gcacagcagacaugaccaa

SEQ ID NO: 2055986 - RNA, 19 nt, Homo sapiens
  misc_RNA (1)...(19): siRNA sense strand
ccaguaaacagccaugaga

SEQ ID NO: 2055987 - RNA, 19 nt, Homo sapiens
  misc_RNA (1)...(19): siRNA sense strand
ucagugauccagaaaauua

SEQ ID NO: 2055988 - RNA, 19 nt, Homo sapiens
  misc_RNA (1)...(19): siRNA sense strand
ggcauacacaacugaauuu

SEQ ID NO: 2055989 - RNA, 19 nt, Homo sapiens
  misc_RNA (1)...(19): siRNA sense strand
gcaacgcucuuugaagcau

SEQ ID NO: 2055990 - RNA, 19 nt, Homo sapiens
  misc_RNA (1)...(19): siRNA sense strand
uggcucaucuucagcauca

SEQ ID NO: 2055991 - RNA, 19 nt, Homo sapiens
  misc_RNA (1)...(19): siRNA sense strand
uuucaugccuuccucauca

SEQ ID NO: 2055992 - RNA, 19 nt, Homo sapiens
  misc_RNA (1)...(19): siRNA sense strand
ucauggacccguuuacuga

SEQ ID NO: 2055993 - RNA, 19 nt, Homo sapiens
  misc_RNA (1)...(19): siRNA sense strand
caugagagaagaagcaaga

SEQ ID NO: 2055994 - RNA, 19 nt, Homo sapiens
  misc_RNA (1)...(19): siRNA sense strand
gaaaugcucaagaaagaac

SEQ ID NO: 2055995 - RNA, 19 nt, Homo sapiens
  misc_RNA (1)...(19): siRNA sense strand
gcccagcgcuaccugaucu

SEQ ID NO: 2055996 - RNA, 19 nt, Homo sapiens
  misc_RNA (1)...(19): siRNA sense strand
gcagccaacccauccaaga

SEQ ID NO: 2055997 - RNA, 19 nt, Homo sapiens
  misc_RNA (1)...(19): siRNA sense strand
gagauggacgcccugaaga

SEQ ID NO: 2055998 - RNA, 19 nt, Homo sapiens
  misc_RNA (1)...(19): siRNA sense strand
ucuaugagaucugggagaa

SEQ ID NO: 2055999 - RNA, 19 nt, Homo sapiens
  misc_RNA (1)...(19): siRNA sense strand
gcauggccaacuucgcuua

SEQ ID NO: 2056000 - RNA, 19 nt, Homo sapiens
  misc_RNA (1)...(19): siRNA sense strand
accaacagcuggaauaucu

SEQ ID NO: 2056001 - RNA, 19 nt, Homo sapiens
  misc_RNA (1)...(19): siRNA sense strand
ugaaguugguggucaugga

SEQ ID NO: 2056002 - RNA, 19 nt, Homo sapiens
  misc_RNA (1)...(19): siRNA sense strand
gagaugaccuucaagauca

SEQ ID NO: 2056003 - RNA, 19 nt, Homo sapiens
  misc_RNA (1)...(19): siRNA sense strand
gaacuugaccggagaauug

SEQ ID NO: 2056004 - RNA, 19 nt, Homo sapiens
  misc_RNA (1)...(19): siRNA sense strand
gaagcuggcugaugugaug

SEQ ID NO: 2056005 - RNA, 19 nt, Homo sapiens
  misc_RNA (1)...(19): siRNA sense strand
caacagggcuggaacaucu

SEQ ID NO: 2056006 - RNA, 19 nt, Homo sapiens
  misc_RNA (1)...(19): siRNA sense strand
caacuucgcuuaugucaag

SEQ ID NO: 2056007 - RNA, 19 nt, Homo sapiens
  misc_RNA (1)...(19): siRNA sense strand
ugaagaagcuggcugaugu

SEQ ID NO: 2056008 - RNA, 19 nt, Homo sapiens
  misc_RNA (1)...(19): siRNA sense strand
ggagacagaugaccaaagu

SEQ ID NO: 2056009 - RNA, 19 nt, Homo sapiens
  misc_RNA (1)...(19): siRNA sense strand
ggaacuggcuggacuuuag

SEQ ID NO: 2056010 - RNA, 19 nt, Homo sapiens
  misc_RNA (1)...(19): siRNA sense strand
agacacagaugaccaagaa

SEQ ID NO: 2056011 - RNA, 19 nt, Homo sapiens
  misc_RNA (1)...(19): siRNA sense strand
cggcaccucugauguguua

SEQ ID NO: 2056012 - RNA, 19 nt, Homo sapiens
  misc_RNA (1)...(19): siRNA sense strand
gagggagacuugccuuuga

SEQ ID NO: 2056013 - RNA, 19 nt, Homo sapiens
  misc_RNA (1)...(19): siRNA sense strand
ggaccaaggugaaagucaa

SEQ ID NO: 2056014 - RNA, 19 nt, Homo sapiens
  misc_RNA (1)...(19): siRNA sense strand
uuucugaucugcuugaaua

SEQ ID NO: 2056015 - RNA, 19 nt, Homo sapiens
  misc_RNA (1)...(19): siRNA sense strand
cagcagagaugaccuucaa

SEQ ID NO: 2056016 - RNA, 19 nt, Homo sapiens
  misc_RNA (1)...(19): siRNA sense strand
aaacggaugucuucaggaa

SEQ ID NO: 2056017 - RNA, 19 nt, Homo sapiens
  misc_RNA (1)...(19): siRNA sense strand
cagaggagcagaagaagua

SEQ ID NO: 2056018 - RNA, 19 nt, Homo sapiens
  misc_RNA (1)...(19): siRNA sense strand
gaauacaaccucuacaugu

SEQ ID NO: 2056019 - RNA, 19 nt, Homo sapiens
  misc_RNA (1)...(19): siRNA sense strand
gugaagaucucgccgacuu

SEQ ID NO: 2056020 - RNA, 19 nt, Homo sapiens
  misc_RNA (1)...(19): siRNA sense strand
gagagcggcugugaagauu

SEQ ID NO: 2056021 - RNA, 19 nt, Homo sapiens
  misc_RNA (1)...(19): siRNA sense strand
cagaagaaguacuacaaug

SEQ ID NO: 2056022 - RNA, 19 nt, Homo sapiens
  misc_RNA (1)...(19): siRNA sense strand
ugagagcucugucacgauu

SEQ ID NO: 2056023 - RNA, 19 nt, Homo sapiens
  misc_RNA (1)...(19): siRNA sense strand
uggaaaugcucaagaaaga

SEQ ID NO: 2056024 - RNA, 19 nt, Homo sapiens
  misc_RNA (1)...(19): siRNA sense strand
gcacaugauggacuucuuu

SEQ ID NO: 2056025 - RNA, 19 nt, Homo sapiens
  misc_RNA (1)...(19): siRNA sense strand
ugaccaaaguccugagaaa

SEQ ID NO: 2056026 - RNA, 19 nt, Homo sapiens
  misc_RNA (1)...(19): siRNA sense strand
aaaauuaccugcucaagaa

SEQ ID NO: 2056027 - RNA, 19 nt, Homo sapiens
  misc_RNA (1)...(19): siRNA sense strand
ccauggaaaugcucaagaa

SEQ ID NO: 2056028 - RNA, 19 nt, Homo sapiens
  misc_RNA (1)...(19): siRNA sense strand
gaacggcaccucugaugug

SEQ ID NO: 2056029 - RNA, 19 nt, Homo sapiens
  misc_RNA (1)...(19): siRNA sense strand
caacaugacaagugaauuc

SEQ ID NO: 2056030 - RNA, 19 nt, Homo sapiens
  misc_RNA (1)...(19): siRNA sense strand
ugaagaagcugggcuccaa

SEQ ID NO: 2056031 - RNA, 19 nt, Homo sapiens
  misc_RNA (1)...(19): siRNA sense strand
ggaauacaaccucuacaug

SEQ ID NO: 2056032 - RNA, 19 nt, Homo sapiens
  misc_RNA (1)...(19): siRNA sense strand
ugacagaggagcagaagaa

SEQ ID NO: 2056033 - RNA, 19 nt, Homo sapiens
  misc_RNA (1)...(19): siRNA sense strand
ggaccaaguaugucgagua

SEQ ID NO: 2056034 - RNA, 19 nt, Homo sapiens
  misc_RNA (1)...(19): siRNA sense strand
gcagguggcaacauuuaaa

SEQ ID NO: 2056035 - RNA, 19 nt, Homo sapiens
  misc_RNA (1)...(19): siRNA sense strand
gcagagaugaccuucaaga

SEQ ID NO: 2056036 - RNA, 19 nt, Homo sapiens
  misc_RNA (1)...(19): siRNA sense strand
gcagggaagaucuacauga

SEQ ID NO: 2056037 - RNA, 19 nt, Homo sapiens
  misc_RNA (1)...(19): siRNA sense strand
ccagaggccacucaguuua

SEQ ID NO: 2056038 - RNA, 19 nt, Homo sapiens
  misc_RNA (1)...(19): siRNA sense strand
guacuacaaugccaugaag

SEQ ID NO: 2056039 - RNA, 19 nt, Homo sapiens
  misc_RNA (1)...(19): siRNA sense strand
gagacuugccuuugaacua

SEQ ID NO: 2056040 - RNA, 19 nt, Homo sapiens
  misc_RNA (1)...(19): siRNA sense strand
ugaacacacucaucaagau

SEQ ID NO: 2056041 - RNA, 19 nt, Homo sapiens
  misc_RNA (1)...(19): siRNA sense strand
cagauaagccucaucaaca

SEQ ID NO: 2056042 - RNA, 19 nt, Homo sapiens
  misc_RNA (1)...(19): siRNA sense strand
ggaagaccaucaagguucu

SEQ ID NO: 2056043 - RNA, 19 nt, Homo sapiens
  misc_RNA (1)...(19): siRNA sense strand
ggagagcggcugugaagau

SEQ ID NO: 2056044 - RNA, 19 nt, Homo sapiens
  misc_RNA (1)...(19): siRNA sense strand
gaggacgacuucgauaugu

SEQ ID NO: 2056045 - RNA, 19 nt, Homo sapiens
  misc_RNA (1)...(19): siRNA sense strand
gcuggaauaucuucgacuu

SEQ ID NO: 2056046 - RNA, 19 nt, Homo sapiens
  misc_RNA (1)...(19): siRNA sense strand
gaagauggucccagagcaa

SEQ ID NO: 2056047 - RNA, 19 nt, Homo sapiens
  misc_RNA (1)...(19): siRNA sense strand
uggcuggacuuuaguguga

SEQ ID NO: 2056048 - RNA, 19 nt, Homo sapiens
  misc_RNA (1)...(19): siRNA sense strand
cgacuucgauauguucuau

SEQ ID NO: 2056049 - RNA, 19 nt, Homo sapiens
  misc_RNA (1)...(19): siRNA sense strand
guucaucuacuccaucuuu

SEQ ID NO: 2056050 - RNA, 19 nt, Homo sapiens
  misc_RNA (1)...(19): siRNA sense strand
gagaguggaucgagaccau

SEQ ID NO: 2056051 - RNA, 19 nt, Homo sapiens
  misc_RNA (1)...(19): siRNA sense strand
caagugaauucgaggagau

SEQ ID NO: 2056052 - RNA, 19 nt, Homo sapiens
  misc_RNA (1)...(19): siRNA sense strand
gaccaaguaugucgaguac

SEQ ID NO: 2056053 - RNA, 19 nt, Homo sapiens
  misc_RNA (1)...(19): siRNA sense strand
cauccaagaucuccuacga

SEQ ID NO: 2056054 - RNA, 19 nt, Homo sapiens
  misc_RNA (1)...(19): siRNA sense strand
ucauggcgcuggagcacua

SEQ ID NO: 2056055 - RNA, 19 nt, Homo sapiens
  misc_RNA (1)...(19): siRNA sense strand
ggcgagaccuggguucuga

SEQ ID NO: 2056056 - RNA, 19 nt, Homo sapiens
  misc_RNA (1)...(19): siRNA sense strand
aaacagccaugagagaaga

SEQ ID NO: 2056057 - RNA, 19 nt, Homo sapiens
  misc_RNA (1)...(19): siRNA sense strand
guaaacagccaugagagaa

SEQ ID NO: 2056058 - RNA, 19 nt, Homo sapiens
  misc_RNA (1)...(19): siRNA sense strand
cagggaagaucuacaugau

SEQ ID NO: 2056059 - RNA, 19 nt, Homo sapiens
  misc_RNA (1)...(19): siRNA sense strand
uaugagaucugggagaaau

SEQ ID NO: 2056060 - RNA, 19 nt, Homo sapiens
  misc_RNA (1)...(19): siRNA sense strand
gcaccauccucaccaacug

SEQ ID NO: 2056061 - RNA, 19 nt, Homo sapiens
  misc_RNA (1)...(19): siRNA sense strand
ugacgucaccaucauguuu

SEQ ID NO: 2056062 - RNA, 19 nt, Homo sapiens
  misc_RNA (1)...(19): siRNA sense strand
gaacaacaagagccagugu

SEQ ID NO: 2056063 - RNA, 19 nt, Homo sapiens
  misc_RNA (1)...(19): siRNA sense strand
gaagaagcaagaggagaaa

SEQ ID NO: 2056064 - RNA, 19 nt, Homo sapiens
  misc_RNA (1)...(19): siRNA sense strand
caucaucguguucaucuuu

SEQ ID NO: 2056065 - RNA, 19 nt, Homo sapiens
  misc_RNA (1)...(19): siRNA sense strand
gcauggacauucucuuugc

SEQ ID NO: 2056066 - RNA, 19 nt, Homo sapiens
  misc_RNA (1)...(19): siRNA sense strand
guaccagggcuucauauuc

SEQ ID NO: 2056067 - RNA, 19 nt, Homo sapiens
  misc_RNA (1)...(19): siRNA sense strand
caaguaccagggcuucaua

SEQ ID NO: 2056068 - RNA, 19 nt, Homo sapiens
  misc_RNA (1)...(19): siRNA sense strand
gcagaagaaguacuacaau

SEQ ID NO: 2056069 - RNA, 19 nt, Homo sapiens
  misc_RNA (1)...(19): siRNA sense strand
gggcaaugucucagccuua

SEQ ID NO: 2056070 - RNA, 19 nt, Homo sapiens
  misc_RNA (1)...(19): siRNA sense strand
ugaccaagcaggccuuuga

SEQ ID NO: 2056071 - RNA, 19 nt, Homo sapiens
  misc_RNA (1)...(19): siRNA sense strand
gaacacacucaucaagauc

SEQ ID NO: 2056072 - RNA, 19 nt, Homo sapiens
  misc_RNA (1)...(19): siRNA sense strand
gagcggcugugaagauucu

SEQ ID NO: 2056073 - RNA, 19 nt, Homo sapiens
  misc_RNA (1)...(19): siRNA sense strand
gaaaauuaccugcucaaga

SEQ ID NO: 2056074 - RNA, 19 nt, Homo sapiens
  misc_RNA (1)...(19): siRNA sense strand
gaacuacaccaucgugaac

SEQ ID NO: 2056075 - RNA, 19 nt, Homo sapiens
  misc_RNA (1)...(19): siRNA sense strand
gcugggagcgccucuauca

SEQ ID NO: 2056076 - RNA, 19 nt, Homo sapiens
  misc_RNA (1)...(19): siRNA sense strand
ggacuuuagugugauuauc

SEQ ID NO: 2056077 - RNA, 19 nt, Homo sapiens
  misc_RNA (1)...(19): siRNA sense strand
gacauucucuuugccuuca

SEQ ID NO: 2056078 - RNA, 19 nt, Homo sapiens
  misc_RNA (1)...(19): siRNA sense strand
ggacgacuucgauauguuc

SEQ ID NO: 2056079 - RNA, 19 nt, Homo sapiens
  misc_RNA (1)...(19): siRNA sense strand
gcaugagggugguggucaa

SEQ ID NO: 2056080 - RNA, 19 nt, Homo sapiens
  misc_RNA (1)...(19): siRNA sense strand
gcacucuuccgccugauga

SEQ ID NO: 2056081 - RNA, 19 nt, Homo sapiens
  misc_RNA (1)...(19): siRNA sense strand
ccaaguaugucgaguacac

SEQ ID NO: 2056082 - RNA, 19 nt, Homo sapiens
  misc_RNA (1)...(19): siRNA sense strand
ggagauggacgcccugaag

SEQ ID NO: 2056083 - RNA, 19 nt, Homo sapiens
  misc_RNA (1)...(19): siRNA sense strand
aguauucgguccugucuga

SEQ ID NO: 2056084 - RNA, 19 nt, Homo sapiens
  misc_RNA (1)...(19): siRNA sense strand
ucucggacaucauccagaa

SEQ ID NO: 2056085 - RNA, 19 nt, Homo sapiens
  misc_RNA (1)...(19): siRNA sense strand
gcacagcagacaugaccaa

SEQ ID NO: 2056086 - RNA, 19 nt, Homo sapiens
  misc_RNA (1)...(19): siRNA sense strand
ccaguaaacagccaugaga

SEQ ID NO: 2056087 - RNA, 19 nt, Homo sapiens
  misc_RNA (1)...(19): siRNA sense strand
ucagugauccagaaaauua

SEQ ID NO: 2056088 - RNA, 19 nt, Homo sapiens
  misc_RNA (1)...(19): siRNA sense strand
ggcauacacaacugaauuu

SEQ ID NO: 2056089 - RNA, 19 nt, Homo sapiens
  misc_RNA (1)...(19): siRNA sense strand
gcaacgcucuuugaagcau

SEQ ID NO: 2056090 - RNA, 19 nt, Homo sapiens
  misc_RNA (1)...(19): siRNA sense strand
uggcucaucuucagcauca

SEQ ID NO: 2056091 - RNA, 19 nt, Homo sapiens
  misc_RNA (1)...(19): siRNA sense strand
uuucaugccuuccucauca

SEQ ID NO: 2056092 - RNA, 19 nt, Homo sapiens
  misc_RNA (1)...(19): siRNA sense strand
ucauggacccguuuacuga

SEQ ID NO: 2056093 - RNA, 19 nt, Homo sapiens
  misc_RNA (1)...(19): siRNA sense strand
caugagagaagaagcaaga

SEQ ID NO: 2056094 - RNA, 19 nt, Homo sapiens
  misc_RNA (1)...(19): siRNA sense strand
gaaaugcucaagaaagaac

SEQ ID NO: 2056095 - RNA, 19 nt, Homo sapiens
  misc_RNA (1)...(19): siRNA sense strand
gcccagcgcuaccugaucu

SEQ ID NO: 2056096 - RNA, 19 nt, Homo sapiens
  misc_RNA (1)...(19): siRNA sense strand
gcagccaacccauccaaga

SEQ ID NO: 2056097 - RNA, 19 nt, Homo sapiens
  misc_RNA (1)...(19): siRNA sense strand
gagauggacgcccugaaga

SEQ ID NO: 2056098 - RNA, 19 nt, Homo sapiens
  misc_RNA (1)...(19): siRNA sense strand
ucuaugagaucugggagaa

SEQ ID NO: 2056099 - RNA, 19 nt, Homo sapiens
  misc_RNA (1)...(19): siRNA sense strand
gcauggccaacuucgcuua

SEQ ID NO: 2056100 - RNA, 19 nt, Homo sapiens
  misc_RNA (1)...(19): siRNA sense strand
accaacagcuggaauaucu

SEQ ID NO: 2056101 - RNA, 19 nt, Homo sapiens
  misc_RNA (1)...(19): siRNA sense strand
ugaaguugguggucaugga

SEQ ID NO: 2056102 - RNA, 19 nt, Homo sapiens
  misc_RNA (1)...(19): siRNA sense strand
gagaugaccuucaagauca

SEQ ID NO: 2056103 - RNA, 19 nt, Homo sapiens
  misc_RNA (1)...(19): siRNA sense strand
gaacuugaccggagaauug

SEQ ID NO: 2056104 - RNA, 19 nt, Homo sapiens
  misc_RNA (1)...(19): siRNA sense strand
gaagcuggcugaugugaug

SEQ ID NO: 2056105 - RNA, 19 nt, Homo sapiens
  misc_RNA (1)...(19): siRNA sense strand
caacagggcuggaacaucu

SEQ ID NO: 2056106 - RNA, 19 nt, Homo sapiens
  misc_RNA (1)...(19): siRNA sense strand
caacuucgcuuaugucaag

SEQ ID NO: 2056107 - RNA, 19 nt, Homo sapiens
  misc_RNA (1)...(19): siRNA sense strand
ugaagaagcuggcugaugu

SEQ ID NO: 2056108 - RNA, 19 nt, Homo sapiens
  misc_RNA (1)...(19): siRNA sense strand
ggagacagaugaccaaagu

SEQ ID NO: 2056109 - RNA, 19 nt, Homo sapiens
  misc_RNA (1)...(19): siRNA sense strand
ggaacuggcuggacuuuag

SEQ ID NO: 2056110 - RNA, 19 nt, Homo sapiens
  misc_RNA (1)...(19): siRNA sense strand
agacacagaugaccaagaa

SEQ ID NO: 2056111 - RNA, 19 nt, Homo sapiens
  misc_RNA (1)...(19): siRNA sense strand
cggcaccucugauguguua

SEQ ID NO: 2056112 - RNA, 19 nt, Homo sapiens
  misc_RNA (1)...(19): siRNA sense strand
gagggagacuugccuuuga

SEQ ID NO: 2056113 - RNA, 19 nt, Homo sapiens
  misc_RNA (1)...(19): siRNA sense strand
ggaccaaggugaaagucaa

SEQ ID NO: 2056114 - RNA, 19 nt, Homo sapiens
  misc_RNA (1)...(19): siRNA sense strand
uuucugaucugcuugaaua

SEQ ID NO: 2056115 - RNA, 19 nt, Homo sapiens
  misc_RNA (1)...(19): siRNA sense strand
cagcagagaugaccuucaa

SEQ ID NO: 2056116 - RNA, 19 nt, Homo sapiens
  misc_RNA (1)...(19): siRNA sense strand
aaacggaugucuucaggaa

SEQ ID NO: 2056117 - RNA, 19 nt, Homo sapiens
  misc_RNA (1)...(19): siRNA sense strand
cagaggagcagaagaagua

SEQ ID NO: 2056118 - RNA, 19 nt, Homo sapiens
  misc_RNA (1)...(19): siRNA sense strand
gaauacaaccucuacaugu

SEQ ID NO: 2056119 - RNA, 19 nt, Homo sapiens
  misc_RNA (1)...(19): siRNA sense strand
gugaagaucucgccgacuu

SEQ ID NO: 2056120 - RNA, 19 nt, Homo sapiens
  misc_RNA (1)...(19): siRNA sense strand
gagagcggcugugaagauu

SEQ ID NO: 2056121 - RNA, 19 nt, Homo sapiens
  misc_RNA (1)...(19): siRNA sense strand
cagaagaaguacuacaaug

SEQ ID NO: 2056122 - RNA, 19 nt, Homo sapiens
  misc_RNA (1)...(19): siRNA sense strand
ugagagcucugucacgauu

SEQ ID NO: 2056123 - RNA, 19 nt, Homo sapiens
  misc_RNA (1)...(19): siRNA sense strand
uggaaaugcucaagaaaga

SEQ ID NO: 2056124 - RNA, 19 nt, Homo sapiens
  misc_RNA (1)...(19): siRNA sense strand
gcacaugauggacuucuuu

SEQ ID NO: 2056125 - RNA, 19 nt, Homo sapiens
  misc_RNA (1)...(19): siRNA sense strand
ugaccaaaguccugagaaa

SEQ ID NO: 2056126 - RNA, 19 nt, Homo sapiens
  misc_RNA (1)...(19): siRNA sense strand
aaaauuaccugcucaagaa

SEQ ID NO: 2056127 - RNA, 19 nt, Homo sapiens
  misc_RNA (1)...(19): siRNA sense strand
ccauggaaaugcucaagaa

SEQ ID NO: 2056128 - RNA, 19 nt, Homo sapiens
  misc_RNA (1)...(19): siRNA sense strand
gaacggcaccucugaugug

SEQ ID NO: 2056129 - RNA, 19 nt, Homo sapiens
  misc_RNA (1)...(19): siRNA sense strand
caacaugacaagugaauuc

SEQ ID NO: 2056130 - RNA, 19 nt, Homo sapiens
  misc_RNA (1)...(19): siRNA sense strand
ugaagaagcugggcuccaa

SEQ ID NO: 2056131 - RNA, 19 nt, Homo sapiens
  misc_RNA (1)...(19): siRNA sense strand
ggaauacaaccucuacaug

SEQ ID NO: 2056132 - RNA, 19 nt, Homo sapiens
  misc_RNA (1)...(19): siRNA sense strand
ugacagaggagcagaagaa

SEQ ID NO: 2056133 - RNA, 19 nt, Homo sapiens
  misc_RNA (1)...(19): siRNA sense strand
ggaccaaguaugucgagua

SEQ ID NO: 2056134 - RNA, 19 nt, Homo sapiens
  misc_RNA (1)...(19): siRNA sense strand
gcagguggcaacauuuaaa

SEQ ID NO: 2056135 - RNA, 19 nt, Homo sapiens
  misc_RNA (1)...(19): siRNA sense strand
gcagagaugaccuucaaga

SEQ ID NO: 2056136 - RNA, 19 nt, Homo sapiens
  misc_RNA (1)...(19): siRNA sense strand
gcagggaagaucuacauga

SEQ ID NO: 2056137 - RNA, 19 nt, Homo sapiens
  misc_RNA (1)...(19): siRNA sense strand
ccagaggccacucaguuua

SEQ ID NO: 2056138 - RNA, 19 nt, Homo sapiens
  misc_RNA (1)...(19): siRNA sense strand
guacuacaaugccaugaag

SEQ ID NO: 2056139 - RNA, 19 nt, Homo sapiens
  misc_RNA (1)...(19): siRNA sense strand
gagacuugccuuugaacua

SEQ ID NO: 2056140 - RNA, 19 nt, Homo sapiens
  misc_RNA (1)...(19): siRNA sense strand
ugaacacacucaucaagau

SEQ ID NO: 2056141 - RNA, 19 nt, Homo sapiens
  misc_RNA (1)...(19): siRNA sense strand
cagauaagccucaucaaca

SEQ ID NO: 2056142 - RNA, 19 nt, Homo sapiens
  misc_RNA (1)...(19): siRNA sense strand
ggaagaccaucaagguucu

SEQ ID NO: 2056143 - RNA, 19 nt, Homo sapiens
  misc_RNA (1)...(19): siRNA sense strand
ggagagcggcugugaagau

SEQ ID NO: 2056144 - RNA, 19 nt, Homo sapiens
  misc_RNA (1)...(19): siRNA sense strand
gaggacgacuucgauaugu

SEQ ID NO: 2056145 - RNA, 19 nt, Homo sapiens
  misc_RNA (1)...(19): siRNA sense strand
gcuggaauaucuucgacuu

SEQ ID NO: 2056146 - RNA, 19 nt, Homo sapiens
  misc_RNA (1)...(19): siRNA sense strand
gaagauggucccagagcaa

SEQ ID NO: 2056147 - RNA, 19 nt, Homo sapiens
  misc_RNA (1)...(19): siRNA sense strand
uggcuggacuuuaguguga

SEQ ID NO: 2056148 - RNA, 19 nt, Homo sapiens
  misc_RNA (1)...(19): siRNA sense strand
cgacuucgauauguucuau

SEQ ID NO: 2056149 - RNA, 19 nt, Homo sapiens
  misc_RNA (1)...(19): siRNA sense strand
guucaucuacuccaucuuu

SEQ ID NO: 2056150 - RNA, 19 nt, Homo sapiens
  misc_RNA (1)...(19): siRNA sense strand
gagaguggaucgagaccau

SEQ ID NO: 2056151 - RNA, 19 nt, Homo sapiens
  misc_RNA (1)...(19): siRNA sense strand
caagugaauucgaggagau

SEQ ID NO: 2056152 - RNA, 19 nt, Homo sapiens
  misc_RNA (1)...(19): siRNA sense strand
gaccaaguaugucgaguac

SEQ ID NO: 2056153 - RNA, 19 nt, Homo sapiens
  misc_RNA (1)...(19): siRNA sense strand
cauccaagaucuccuacga

SEQ ID NO: 2056154 - RNA, 19 nt, Homo sapiens
  misc_RNA (1)...(19): siRNA sense strand
ucauggcgcuggagcacua

SEQ ID NO: 2056155 - RNA, 19 nt, Homo sapiens
  misc_RNA (1)...(19): siRNA sense strand
ggcgagaccuggguucuga

SEQ ID NO: 2056156 - RNA, 19 nt, Homo sapiens
  misc_RNA (1)...(19): siRNA sense strand
aaacagccaugagagaaga

SEQ ID NO: 2056157 - RNA, 19 nt, Homo sapiens
  misc_RNA (1)...(19): siRNA sense strand
guaaacagccaugagagaa

SEQ ID NO: 2056158 - RNA, 19 nt, Homo sapiens
  misc_RNA (1)...(19): siRNA sense strand
cagggaagaucuacaugau

SEQ ID NO: 2056159 - RNA, 19 nt, Homo sapiens
  misc_RNA (1)...(19): siRNA sense strand
uaugagaucugggagaaau

SEQ ID NO: 2056160 - RNA, 19 nt, Homo sapiens
  misc_RNA (1)...(19): siRNA sense strand
gcaccauccucaccaacug

SEQ ID NO: 2056161 - RNA, 19 nt, Homo sapiens
  misc_RNA (1)...(19): siRNA sense strand
ugacgucaccaucauguuu

SEQ ID NO: 2056162 - RNA, 19 nt, Homo sapiens
  misc_RNA (1)...(19): siRNA sense strand
gaacaacaagagccagugu

SEQ ID NO: 2056163 - RNA, 19 nt, Homo sapiens
  misc_RNA (1)...(19): siRNA sense strand
gaagaagcaagaggagaaa

SEQ ID NO: 2056164 - RNA, 19 nt, Homo sapiens
  misc_RNA (1)...(19): siRNA sense strand
caucaucguguucaucuuu

SEQ ID NO: 2056165 - RNA, 19 nt, Homo sapiens
  misc_RNA (1)...(19): siRNA sense strand
gcauggacauucucuuugc

SEQ ID NO: 2056166 - RNA, 19 nt, Homo sapiens
  misc_RNA (1)...(19): siRNA sense strand
guaccagggcuucauauuc

SEQ ID NO: 2056167 - RNA, 19 nt, Homo sapiens
  misc_RNA (1)...(19): siRNA sense strand
caaguaccagggcuucaua

SEQ ID NO: 2056168 - RNA, 19 nt, Homo sapiens
  misc_RNA (1)...(19): siRNA sense strand
gcagaagaaguacuacaau

SEQ ID NO: 2056169 - RNA, 19 nt, Homo sapiens
  misc_RNA (1)...(19): siRNA sense strand
gggcaaugucucagccuua

SEQ ID NO: 2056170 - RNA, 19 nt, Homo sapiens
  misc_RNA (1)...(19): siRNA sense strand
ugaccaagcaggccuuuga

SEQ ID NO: 2056171 - RNA, 19 nt, Homo sapiens
  misc_RNA (1)...(19): siRNA sense strand
gaacacacucaucaagauc

SEQ ID NO: 2056172 - RNA, 19 nt, Homo sapiens
  misc_RNA (1)...(19): siRNA sense strand
gagcggcugugaagauucu

SEQ ID NO: 2056173 - RNA, 19 nt, Homo sapiens
  misc_RNA (1)...(19): siRNA sense strand
gaaaauuaccugcucaaga

SEQ ID NO: 2056174 - RNA, 19 nt, Homo sapiens
  misc_RNA (1)...(19): siRNA sense strand
gaacuacaccaucgugaac

SEQ ID NO: 2056175 - RNA, 19 nt, Homo sapiens
  misc_RNA (1)...(19): siRNA sense strand
gcugggagcgccucuauca

SEQ ID NO: 2056176 - RNA, 19 nt, Homo sapiens
  misc_RNA (1)...(19): siRNA sense strand
ggacuuuagugugauuauc

SEQ ID NO: 2056177 - RNA, 19 nt, Homo sapiens
  misc_RNA (1)...(19): siRNA sense strand
gacauucucuuugccuuca

SEQ ID NO: 2056178 - RNA, 19 nt, Homo sapiens
  misc_RNA (1)...(19): siRNA sense strand
ggacgacuucgauauguuc

SEQ ID NO: 2056179 - RNA, 19 nt, Homo sapiens
  misc_RNA (1)...(19): siRNA sense strand
gcaugagggugguggucaa

SEQ ID NO: 2056180 - RNA, 19 nt, Homo sapiens
  misc_RNA (1)...(19): siRNA sense strand
gcacucuuccgccugauga

SEQ ID NO: 2056181 - RNA, 19 nt, Homo sapiens
  misc_RNA (1)...(19): siRNA sense strand
ccaaguaugucgaguacac

SEQ ID NO: 2056182 - RNA, 19 nt, Homo sapiens
  misc_RNA (1)...(19): siRNA sense strand
ggagauggacgcccugaag

SEQ ID NO: 2056183 - RNA, 19 nt, Homo sapiens
  misc_RNA (1)...(19): siRNA sense strand
aguauucgguccugucuga

SEQ ID NO: 2056184 - RNA, 19 nt, Homo sapiens
  misc_RNA (1)...(19): siRNA sense strand
ucucggacaucauccagaa

SEQ ID NO: 2056185 - RNA, 19 nt, Homo sapiens
  misc_RNA (1)...(19): siRNA sense strand
gcacagcagacaugaccaa

SEQ ID NO: 2056186 - RNA, 19 nt, Homo sapiens
  misc_RNA (1)...(19): siRNA sense strand
ccaguaaacagccaugaga

SEQ ID NO: 2056187 - RNA, 19 nt, Homo sapiens
  misc_RNA (1)...(19): siRNA sense strand
ucagugauccagaaaauua

SEQ ID NO: 2056188 - RNA, 19 nt, Homo sapiens
  misc_RNA (1)...(19): siRNA sense strand
ggcauacacaacugaauuu

SEQ ID NO: 2056189 - RNA, 19 nt, Homo sapiens
  misc_RNA (1)...(19): siRNA sense strand
gcaacgcucuuugaagcau

SEQ ID NO: 2056190 - RNA, 19 nt, Homo sapiens
  misc_RNA (1)...(19): siRNA sense strand
uggcucaucuucagcauca

SEQ ID NO: 2056191 - RNA, 19 nt, Homo sapiens
  misc_RNA (1)...(19): siRNA sense strand
uuucaugccuuccucauca

SEQ ID NO: 2056192 - RNA, 19 nt, Homo sapiens
  misc_RNA (1)...(19): siRNA sense strand
ucauggacccguuuacuga

SEQ ID NO: 2056193 - RNA, 19 nt, Homo sapiens
  misc_RNA (1)...(19): siRNA sense strand
caugagagaagaagcaaga

SEQ ID NO: 2056194 - RNA, 19 nt, Homo sapiens
  misc_RNA (1)...(19): siRNA sense strand
gaaaugcucaagaaagaac

SEQ ID NO: 2056195 - RNA, 19 nt, Homo sapiens
  misc_RNA (1)...(19): siRNA sense strand
gcccagcgcuaccugaucu

SEQ ID NO: 2056196 - RNA, 19 nt, Homo sapiens
  misc_RNA (1)...(19): siRNA sense strand
gcagccaacccauccaaga

SEQ ID NO: 2056197 - RNA, 19 nt, Homo sapiens
  misc_RNA (1)...(19): siRNA sense strand
gagauggacgcccugaaga

SEQ ID NO: 2056198 - RNA, 19 nt, Homo sapiens
  misc_RNA (1)...(19): siRNA sense strand
ucuaugagaucugggagaa

SEQ ID NO: 2056199 - RNA, 19 nt, Homo sapiens
  misc_RNA (1)...(19): siRNA sense strand
gcauggccaacuucgcuua

SEQ ID NO: 2056200 - RNA, 19 nt, Homo sapiens
  misc_RNA (1)...(19): siRNA sense strand
accaacagcuggaauaucu

SEQ ID NO: 2056201 - RNA, 19 nt, Homo sapiens
  misc_RNA (1)...(19): siRNA sense strand
ugaaguugguggucaugga

SEQ ID NO: 2056202 - RNA, 19 nt, Homo sapiens
  misc_RNA (1)...(19): siRNA sense strand
ggacaucuuuggagacaug

SEQ ID NO: 2056203 - RNA, 19 nt, Homo sapiens
  misc_RNA (1)...(19): siRNA sense strand
gaauucacccuaugacauu

SEQ ID NO: 2056204 - RNA, 19 nt, Homo sapiens
  misc_RNA (1)...(19): siRNA sense strand
gcaaccaccucuuccucaa

SEQ ID NO: 2056205 - RNA, 19 nt, Homo sapiens
  misc_RNA (1)...(19): siRNA sense strand
cuacacccguuacuucgua

SEQ ID NO: 2056206 - RNA, 19 nt, Homo sapiens
  misc_RNA (1)...(19): siRNA sense strand
caauaucagccaccacuuu

SEQ ID NO: 2056207 - RNA, 19 nt, Homo sapiens
  misc_RNA (1)...(19): siRNA sense strand
ggaauucacccuaugacau

SEQ ID NO: 2056208 - RNA, 19 nt, Homo sapiens
  misc_RNA (1)...(19): siRNA sense strand
guucaggucgccaucauaa

SEQ ID NO: 2056209 - RNA, 19 nt, Homo sapiens
  misc_RNA (1)...(19): siRNA sense strand
gcaccugucaccuacacua

SEQ ID NO: 2056210 - RNA, 19 nt, Homo sapiens
  misc_RNA (1)...(19): siRNA sense strand
ugacuuccaugccauccuu

SEQ ID NO: 2056211 - RNA, 19 nt, Homo sapiens
  misc_RNA (1)...(19): siRNA sense strand
cuacuacacccguuacuuc

SEQ ID NO: 2056212 - RNA, 19 nt, Homo sapiens
  misc_RNA (1)...(19): siRNA sense strand
gguggacccuuggccugua

SEQ ID NO: 2056213 - RNA, 19 nt, Homo sapiens
  misc_RNA (1)...(19): siRNA sense strand
cuccaggccuccacauuug

SEQ ID NO: 2056214 - RNA, 19 nt, Homo sapiens
  misc_RNA (1)...(19): siRNA sense strand
caccuacacuaaacacauc

SEQ ID NO: 2056215 - RNA, 19 nt, Homo sapiens
  misc_RNA (1)...(19): siRNA sense strand
ucuccaggccuccacauuu

SEQ ID NO: 2056216 - RNA, 19 nt, Homo sapiens
  misc_RNA (1)...(19): siRNA sense strand
uaaacaacucuaugugcaa

SEQ ID NO: 2056217 - RNA, 19 nt, Homo sapiens
  misc_RNA (1)...(19): siRNA sense strand
ccuaugacauugccuuggu

SEQ ID NO: 2056218 - RNA, 19 nt, Homo sapiens
  misc_RNA (1)...(19): siRNA sense strand
guggacccuuggccuguaa

SEQ ID NO: 2056219 - RNA, 19 nt, Homo sapiens
  misc_RNA (1)...(19): siRNA sense strand
ccacauuugaguuugagaa

SEQ ID NO: 2056220 - RNA, 19 nt, Homo sapiens
  misc_RNA (1)...(19): siRNA sense strand
acaagaauggacuguggua

SEQ ID NO: 2056221 - RNA, 19 nt, Homo sapiens
  misc_RNA (1)...(19): siRNA sense strand
aaacacauccagcccaucu

SEQ ID NO: 2056222 - RNA, 19 nt, Homo sapiens
  misc_RNA (1)...(19): siRNA sense strand
ccuccacauuugaguuuga

SEQ ID NO: 2056223 - RNA, 19 nt, Homo sapiens
  misc_RNA (1)...(19): siRNA sense strand
ggccuccacauuugaguuu

SEQ ID NO: 2056224 - RNA, 19 nt, Homo sapiens
  misc_RNA (1)...(19): siRNA sense strand
aauaucagccaccacuuug

SEQ ID NO: 2056225 - RNA, 19 nt, Homo sapiens
  misc_RNA (1)...(19): siRNA sense strand
gaaguucaggucgccauca

SEQ ID NO: 2056226 - RNA, 19 nt, Homo sapiens
  misc_RNA (1)...(19): siRNA sense strand
aaggacaucuuuggagaca

SEQ ID NO: 2056227 - RNA, 19 nt, Homo sapiens
  misc_RNA (1)...(19): siRNA sense strand
ugucugcaccugucaccua

SEQ ID NO: 2056228 - RNA, 19 nt, Homo sapiens
  misc_RNA (1)...(19): siRNA sense strand
guaucgaauaucuaucuga

SEQ ID NO: 2056229 - RNA, 19 nt, Homo sapiens
  misc_RNA (1)...(19): siRNA sense strand
aaccaccucuuccucaagu

SEQ ID NO: 2056230 - RNA, 19 nt, Homo sapiens
  misc_RNA (1)...(19): siRNA sense strand
ugacauugccuuggugaag

SEQ ID NO: 2056231 - RNA, 19 nt, Homo sapiens
  misc_RNA (1)...(19): siRNA sense strand
gggaauucacccuaugaca

SEQ ID NO: 2056232 - RNA, 19 nt, Homo sapiens
  misc_RNA (1)...(19): siRNA sense strand
ucaggucgccaucauaaac

SEQ ID NO: 2056233 - RNA, 19 nt, Homo sapiens
  misc_RNA (1)...(19): siRNA sense strand
ccugucaccuacacuaaac

SEQ ID NO: 2056234 - RNA, 19 nt, Homo sapiens
  misc_RNA (1)...(19): siRNA sense strand
ggacaucuuuggagacaug

SEQ ID NO: 2056235 - RNA, 19 nt, Homo sapiens
  misc_RNA (1)...(19): siRNA sense strand
gaauucacccuaugacauu

SEQ ID NO: 2056236 - RNA, 19 nt, Homo sapiens
  misc_RNA (1)...(19): siRNA sense strand
gcaaccaccucuuccucaa

SEQ ID NO: 2056237 - RNA, 19 nt, Homo sapiens
  misc_RNA (1)...(19): siRNA sense strand
cuacacccguuacuucgua

SEQ ID NO: 2056238 - RNA, 19 nt, Homo sapiens
  misc_RNA (1)...(19): siRNA sense strand
caauaucagccaccacuuu

SEQ ID NO: 2056239 - RNA, 19 nt, Homo sapiens
  misc_RNA (1)...(19): siRNA sense strand
ggaauucacccuaugacau

SEQ ID NO: 2056240 - RNA, 19 nt, Homo sapiens
  misc_RNA (1)...(19): siRNA sense strand
guucaggucgccaucauaa

SEQ ID NO: 2056241 - RNA, 19 nt, Homo sapiens
  misc_RNA (1)...(19): siRNA sense strand
gcaccugucaccuacacua

SEQ ID NO: 2056242 - RNA, 19 nt, Homo sapiens
  misc_RNA (1)...(19): siRNA sense strand
ugacuuccaugccauccuu

SEQ ID NO: 2056243 - RNA, 19 nt, Homo sapiens
  misc_RNA (1)...(19): siRNA sense strand
cuacuacacccguuacuuc

SEQ ID NO: 2056244 - RNA, 19 nt, Homo sapiens
  misc_RNA (1)...(19): siRNA sense strand
gguggacccuuggccugua

SEQ ID NO: 2056245 - RNA, 19 nt, Homo sapiens
  misc_RNA (1)...(19): siRNA sense strand
cuccaggccuccacauuug

SEQ ID NO: 2056246 - RNA, 19 nt, Homo sapiens
  misc_RNA (1)...(19): siRNA sense strand
caccuacacuaaacacauc

SEQ ID NO: 2056247 - RNA, 19 nt, Homo sapiens
  misc_RNA (1)...(19): siRNA sense strand
ucuccaggccuccacauuu

SEQ ID NO: 2056248 - RNA, 19 nt, Homo sapiens
  misc_RNA (1)...(19): siRNA sense strand
uaaacaacucuaugugcaa

SEQ ID NO: 2056249 - RNA, 19 nt, Homo sapiens
  misc_RNA (1)...(19): siRNA sense strand
ccuaugacauugccuuggu

SEQ ID NO: 2056250 - RNA, 19 nt, Homo sapiens
  misc_RNA (1)...(19): siRNA sense strand
guggacccuuggccuguaa

SEQ ID NO: 2056251 - RNA, 19 nt, Homo sapiens
  misc_RNA (1)...(19): siRNA sense strand
ccacauuugaguuugagaa

SEQ ID NO: 2056252 - RNA, 19 nt, Homo sapiens
  misc_RNA (1)...(19): siRNA sense strand
acaagaauggacuguggua

SEQ ID NO: 2056253 - RNA, 19 nt, Homo sapiens
  misc_RNA (1)...(19): siRNA sense strand
aaacacauccagcccaucu

SEQ ID NO: 2056254 - RNA, 19 nt, Homo sapiens
  misc_RNA (1)...(19): siRNA sense strand
ccuccacauuugaguuuga

SEQ ID NO: 2056255 - RNA, 19 nt, Homo sapiens
  misc_RNA (1)...(19): siRNA sense strand
ggccuccacauuugaguuu

SEQ ID NO: 2056256 - RNA, 19 nt, Homo sapiens
  misc_RNA (1)...(19): siRNA sense strand
aauaucagccaccacuuug

SEQ ID NO: 2056257 - RNA, 19 nt, Homo sapiens
  misc_RNA (1)...(19): siRNA sense strand
gaaguucaggucgccauca

SEQ ID NO: 2056258 - RNA, 19 nt, Homo sapiens
  misc_RNA (1)...(19): siRNA sense strand
aaggacaucuuuggagaca

SEQ ID NO: 2056259 - RNA, 19 nt, Homo sapiens
  misc_RNA (1)...(19): siRNA sense strand
ugucugcaccugucaccua

SEQ ID NO: 2056260 - RNA, 19 nt, Homo sapiens
  misc_RNA (1)...(19): siRNA sense strand
guaucgaauaucuaucuga

SEQ ID NO: 2056261 - RNA, 19 nt, Homo sapiens
  misc_RNA (1)...(19): siRNA sense strand
aaccaccucuuccucaagu

SEQ ID NO: 2056262 - RNA, 19 nt, Homo sapiens
  misc_RNA (1)...(19): siRNA sense strand
ugacauugccuuggugaag

SEQ ID NO: 2056263 - RNA, 19 nt, Homo sapiens
  misc_RNA (1)...(19): siRNA sense strand
gggaauucacccuaugaca

SEQ ID NO: 2056264 - RNA, 19 nt, Homo sapiens
  misc_RNA (1)...(19): siRNA sense strand
ucaggucgccaucauaaac

SEQ ID NO: 2056265 - RNA, 19 nt, Homo sapiens
  misc_RNA (1)...(19): siRNA sense strand
ccugucaccuacacuaaac

SEQ ID NO: 2056266 - RNA, 19 nt, Homo sapiens
  misc_RNA (1)...(19): siRNA sense strand
ggacaucuuuggagacaug

SEQ ID NO: 2056267 - RNA, 19 nt, Homo sapiens
  misc_RNA (1)...(19): siRNA sense strand
gaauucacccuaugacauu

SEQ ID NO: 2056268 - RNA, 19 nt, Homo sapiens
  misc_RNA (1)...(19): siRNA sense strand
gcaaccaccucuuccucaa

SEQ ID NO: 2056269 - RNA, 19 nt, Homo sapiens
  misc_RNA (1)...(19): siRNA sense strand
cuacacccguuacuucgua

SEQ ID NO: 2056270 - RNA, 19 nt, Homo sapiens
  misc_RNA (1)...(19): siRNA sense strand
caauaucagccaccacuuu

SEQ ID NO: 2056271 - RNA, 19 nt, Homo sapiens
  misc_RNA (1)...(19): siRNA sense strand
ggaauucacccuaugacau

SEQ ID NO: 2056272 - RNA, 19 nt, Homo sapiens
  misc_RNA (1)...(19): siRNA sense strand
guucaggucgccaucauaa

SEQ ID NO: 2056273 - RNA, 19 nt, Homo sapiens
  misc_RNA (1)...(19): siRNA sense strand
gcaccugucaccuacacua

SEQ ID NO: 2056274 - RNA, 19 nt, Homo sapiens
  misc_RNA (1)...(19): siRNA sense strand
ugacuuccaugccauccuu

SEQ ID NO: 2056275 - RNA, 19 nt, Homo sapiens
  misc_RNA (1)...(19): siRNA sense strand
cuacuacacccguuacuuc

SEQ ID NO: 2056276 - RNA, 19 nt, Homo sapiens
  misc_RNA (1)...(19): siRNA sense strand
gguggacccuuggccugua

SEQ ID NO: 2056277 - RNA, 19 nt, Homo sapiens
  misc_RNA (1)...(19): siRNA sense strand
cuccaggccuccacauuug

SEQ ID NO: 2056278 - RNA, 19 nt, Homo sapiens
  misc_RNA (1)...(19): siRNA sense strand
caccuacacuaaacacauc

SEQ ID NO: 2056279 - RNA, 19 nt, Homo sapiens
  misc_RNA (1)...(19): siRNA sense strand
ucuccaggccuccacauuu

SEQ ID NO: 2056280 - RNA, 19 nt, Homo sapiens
  misc_RNA (1)...(19): siRNA sense strand
uaaacaacucuaugugcaa

SEQ ID NO: 2056281 - RNA, 19 nt, Homo sapiens
  misc_RNA (1)...(19): siRNA sense strand
ccuaugacauugccuuggu

SEQ ID NO: 2056282 - RNA, 19 nt, Homo sapiens
  misc_RNA (1)...(19): siRNA sense strand
guggacccuuggccuguaa

SEQ ID NO: 2056283 - RNA, 19 nt, Homo sapiens
  misc_RNA (1)...(19): siRNA sense strand
ccacauuugaguuugagaa

SEQ ID NO: 2056284 - RNA, 19 nt, Homo sapiens
  misc_RNA (1)...(19): siRNA sense strand
acaagaauggacuguggua

SEQ ID NO: 2056285 - RNA, 19 nt, Homo sapiens
  misc_RNA (1)...(19): siRNA sense strand
aaacacauccagcccaucu

SEQ ID NO: 2056286 - RNA, 19 nt, Homo sapiens
  misc_RNA (1)...(19): siRNA sense strand
ccuccacauuugaguuuga

SEQ ID NO: 2056287 - RNA, 19 nt, Homo sapiens
  misc_RNA (1)...(19): siRNA sense strand
ggccuccacauuugaguuu

SEQ ID NO: 2056288 - RNA, 19 nt, Homo sapiens
  misc_RNA (1)...(19): siRNA sense strand
aauaucagccaccacuuug

SEQ ID NO: 2056289 - RNA, 19 nt, Homo sapiens
  misc_RNA (1)...(19): siRNA sense strand
gaaguucaggucgccauca

SEQ ID NO: 2056290 - RNA, 19 nt, Homo sapiens
  misc_RNA (1)...(19): siRNA sense strand
aaggacaucuuuggagaca

SEQ ID NO: 2056291 - RNA, 19 nt, Homo sapiens
  misc_RNA (1)...(19): siRNA sense strand
ugucugcaccugucaccua

SEQ ID NO: 2056292 - RNA, 19 nt, Homo sapiens
  misc_RNA (1)...(19): siRNA sense strand
guaucgaauaucuaucuga

SEQ ID NO: 2056293 - RNA, 19 nt, Homo sapiens
  misc_RNA (1)...(19): siRNA sense strand
aaccaccucuuccucaagu

SEQ ID NO: 2056294 - RNA, 19 nt, Homo sapiens
  misc_RNA (1)...(19): siRNA sense strand
ugacauugccuuggugaag

SEQ ID NO: 2056295 - RNA, 19 nt, Homo sapiens
  misc_RNA (1)...(19): siRNA sense strand
gggaauucacccuaugaca

SEQ ID NO: 2056296 - RNA, 19 nt, Homo sapiens
  misc_RNA (1)...(19): siRNA sense strand
ucaggucgccaucauaaac

SEQ ID NO: 2056297 - RNA, 19 nt, Homo sapiens
  misc_RNA (1)...(19): siRNA sense strand
ccugucaccuacacuaaac

SEQ ID NO: 2056298 - RNA, 19 nt, Homo sapiens
  misc_RNA (1)...(19): siRNA sense strand
gggcauaucuuccuucaga

SEQ ID NO: 2056299 - RNA, 19 nt, Homo sapiens
  misc_RNA (1)...(19): siRNA sense strand
gaaaugagggcacauauuc

SEQ ID NO: 2056300 - RNA, 19 nt, Homo sapiens
  misc_RNA (1)...(19): siRNA sense strand
ugucagaaguacauagaua

SEQ ID NO: 2056301 - RNA, 19 nt, Homo sapiens
  misc_RNA (1)...(19): siRNA sense strand
uaagacaucugcaaguuag

SEQ ID NO: 2056302 - RNA, 19 nt, Homo sapiens
  misc_RNA (1)...(19): siRNA sense strand
cagcuucaguggcaguuua

SEQ ID NO: 2056303 - RNA, 19 nt, Homo sapiens
  misc_RNA (1)...(19): siRNA sense strand
agagggaacuguaugaaga

SEQ ID NO: 2056304 - RNA, 19 nt, Homo sapiens
  misc_RNA (1)...(19): siRNA sense strand
ggucacuucuugaauaugu

SEQ ID NO: 2056305 - RNA, 19 nt, Homo sapiens
  misc_RNA (1)...(19): siRNA sense strand
gaaaucagaguauaagaac

SEQ ID NO: 2056306 - RNA, 19 nt, Homo sapiens
  misc_RNA (1)...(19): siRNA sense strand
aauaagacaucugcaaguu

SEQ ID NO: 2056307 - RNA, 19 nt, Homo sapiens
  misc_RNA (1)...(19): siRNA sense strand
gggcacauauucggacuug

SEQ ID NO: 2056308 - RNA, 19 nt, Homo sapiens
  misc_RNA (1)...(19): siRNA sense strand
uauaagaacugcgcugagu

SEQ ID NO: 2056309 - RNA, 19 nt, Homo sapiens
  misc_RNA (1)...(19): siRNA sense strand
gcacauauucggacuuguc

SEQ ID NO: 2056310 - RNA, 19 nt, Homo sapiens
  misc_RNA (1)...(19): siRNA sense strand
guauggaccacuacaagaa

SEQ ID NO: 2056311 - RNA, 19 nt, Homo sapiens
  misc_RNA (1)...(19): siRNA sense strand
ccaaaagaaugaaaucaga

SEQ ID NO: 2056312 - RNA, 19 nt, Homo sapiens
  misc_RNA (1)...(19): siRNA sense strand
uuagaccggucacuucuug

SEQ ID NO: 2056313 - RNA, 19 nt, Homo sapiens
  misc_RNA (1)...(19): siRNA sense strand
ccacuuugccguuuaauac

SEQ ID NO: 2056314 - RNA, 19 nt, Homo sapiens
  misc_RNA (1)...(19): siRNA sense strand
agauaaguauggaccacua

SEQ ID NO: 2056315 - RNA, 19 nt, Homo sapiens
  misc_RNA (1)...(19): siRNA sense strand
cuaccagucuaaagaacaa

SEQ ID NO: 2056316 - RNA, 19 nt, Homo sapiens
  misc_RNA (1)...(19): siRNA sense strand
ccuguguucuguccacuuu

SEQ ID NO: 2056317 - RNA, 19 nt, Homo sapiens
  misc_RNA (1)...(19): siRNA sense strand
ugaaaugagggcacauauu

SEQ ID NO: 2056318 - RNA, 19 nt, Homo sapiens
  misc_RNA (1)...(19): siRNA sense strand
caguggcaguuuaauaaga

SEQ ID NO: 2056319 - RNA, 19 nt, Homo sapiens
  misc_RNA (1)...(19): siRNA sense strand
gcagcaagguguguauguc

SEQ ID NO: 2056320 - RNA, 19 nt, Homo sapiens
  misc_RNA (1)...(19): siRNA sense strand
accggucacuucuugaaua

SEQ ID NO: 2056321 - RNA, 19 nt, Homo sapiens
  misc_RNA (1)...(19): siRNA sense strand
gucagaaguacauagauaa

SEQ ID NO: 2056322 - RNA, 19 nt, Homo sapiens
  misc_RNA (1)...(19): siRNA sense strand
auaagacaucugcaaguua

SEQ ID NO: 2056323 - RNA, 19 nt, Homo sapiens
  misc_RNA (1)...(19): siRNA sense strand
uaagaacugcgcugagugu

SEQ ID NO: 2056324 - RNA, 19 nt, Homo sapiens
  misc_RNA (1)...(19): siRNA sense strand
uuuaauacccgaugagaau

SEQ ID NO: 2056325 - RNA, 19 nt, Homo sapiens
  misc_RNA (1)...(19): siRNA sense strand
caacugauguagccaaaag

SEQ ID NO: 2056326 - RNA, 19 nt, Homo sapiens
  misc_RNA (1)...(19): siRNA sense strand
ccggucacuucuugaauau

SEQ ID NO: 2056327 - RNA, 19 nt, Homo sapiens
  misc_RNA (1)...(19): siRNA sense strand
cuucaguggcaguuuaaua

SEQ ID NO: 2056328 - RNA, 19 nt, Homo sapiens
  misc_RNA (1)...(19): siRNA sense strand
gagcaccgacagcggcaaa

SEQ ID NO: 2056329 - RNA, 19 nt, Homo sapiens
  misc_RNA (1)...(19): siRNA sense strand
uucaguggcaguuuaauaa

SEQ ID NO: 2056330 - RNA, 19 nt, Homo sapiens
  misc_RNA (1)...(19): siRNA sense strand
gaucauuguauuacucauc

SEQ ID NO: 2056331 - RNA, 19 nt, Homo sapiens
  misc_RNA (1)...(19): siRNA sense strand
cauauucggacuugucaga

SEQ ID NO: 2056332 - RNA, 19 nt, Homo sapiens
  misc_RNA (1)...(19): siRNA sense strand
uaauaagacaucugcaagu

SEQ ID NO: 2056333 - RNA, 19 nt, Homo sapiens
  misc_RNA (1)...(19): siRNA sense strand
uguccacuuugccguuuaa

SEQ ID NO: 2056334 - RNA, 19 nt, Homo sapiens
  misc_RNA (1)...(19): siRNA sense strand
cgugugccuugagguguua

SEQ ID NO: 2056335 - RNA, 19 nt, Homo sapiens
  misc_RNA (1)...(19): siRNA sense strand
guaugucccuuuugucaga

SEQ ID NO: 2056336 - RNA, 19 nt, Homo sapiens
  misc_RNA (1)...(19): siRNA sense strand
ucacucgaacaccacauaa

SEQ ID NO: 2056337 - RNA, 19 nt, Homo sapiens
  misc_RNA (1)...(19): siRNA sense strand
ggcauaucuuccuucagaa

SEQ ID NO: 2056338 - RNA, 19 nt, Homo sapiens
  misc_RNA (1)...(19): siRNA sense strand
gugaaaugagggcacauau

SEQ ID NO: 2056339 - RNA, 19 nt, Homo sapiens
  misc_RNA (1)...(19): siRNA sense strand
ucagaaggaguuccagcaa

SEQ ID NO: 2056340 - RNA, 19 nt, Homo sapiens
  misc_RNA (1)...(19): siRNA sense strand
uaauugaggaagcucuuau

SEQ ID NO: 2056341 - RNA, 19 nt, Homo sapiens
  misc_RNA (1)...(19): siRNA sense strand
guauucugccguuccugua

SEQ ID NO: 2056342 - RNA, 19 nt, Homo sapiens
  misc_RNA (1)...(19): siRNA sense strand
aaucagaguauaagaacug

SEQ ID NO: 2056343 - RNA, 19 nt, Homo sapiens
  misc_RNA (1)...(19): siRNA sense strand
uaaguauggaccacuacaa

SEQ ID NO: 2056344 - RNA, 19 nt, Homo sapiens
  misc_RNA (1)...(19): siRNA sense strand
ugccguuccuguauugcua

SEQ ID NO: 2056345 - RNA, 19 nt, Homo sapiens
  misc_RNA (1)...(19): siRNA sense strand
gcaguuuaauaagacaucu

SEQ ID NO: 2056346 - RNA, 19 nt, Homo sapiens
  misc_RNA (1)...(19): siRNA sense strand
guauuacucaucacagauc

SEQ ID NO: 2056347 - RNA, 19 nt, Homo sapiens
  misc_RNA (1)...(19): siRNA sense strand
cuugcuggaucauuguauu

SEQ ID NO: 2056348 - RNA, 19 nt, Homo sapiens
  misc_RNA (1)...(19): siRNA sense strand
uugcuggaucauuguauua

SEQ ID NO: 2056349 - RNA, 19 nt, Homo sapiens
  misc_RNA (1)...(19): siRNA sense strand
gccguuuaauacccgauga

SEQ ID NO: 2056350 - RNA, 19 nt, Homo sapiens
  misc_RNA (1)...(19): siRNA sense strand
gcaccgacagcggcaaauc

SEQ ID NO: 2056351 - RNA, 19 nt, Homo sapiens
  misc_RNA (1)...(19): siRNA sense strand
gacagcagcaaggugugua

SEQ ID NO: 2056352 - RNA, 19 nt, Homo sapiens
  misc_RNA (1)...(19): siRNA sense strand
ggacaucuuuggagacaug

SEQ ID NO: 2056353 - RNA, 19 nt, Homo sapiens
  misc_RNA (1)...(19): siRNA sense strand
gaauucacccuaugacauu

SEQ ID NO: 2056354 - RNA, 19 nt, Homo sapiens
  misc_RNA (1)...(19): siRNA sense strand
gcaaccaccucuuccucaa

SEQ ID NO: 2056355 - RNA, 19 nt, Homo sapiens
  misc_RNA (1)...(19): siRNA sense strand
cuacacccguuacuucgua

SEQ ID NO: 2056356 - RNA, 19 nt, Homo sapiens
  misc_RNA (1)...(19): siRNA sense strand
caauaucagccaccacuuu

SEQ ID NO: 2056357 - RNA, 19 nt, Homo sapiens
  misc_RNA (1)...(19): siRNA sense strand
ggaauucacccuaugacau

SEQ ID NO: 2056358 - RNA, 19 nt, Homo sapiens
  misc_RNA (1)...(19): siRNA sense strand
guucaggucgccaucauaa

SEQ ID NO: 2056359 - RNA, 19 nt, Homo sapiens
  misc_RNA (1)...(19): siRNA sense strand
gcaccugucaccuacacua

SEQ ID NO: 2056360 - RNA, 19 nt, Homo sapiens
  misc_RNA (1)...(19): siRNA sense strand
ugacuuccaugccauccuu

SEQ ID NO: 2056361 - RNA, 19 nt, Homo sapiens
  misc_RNA (1)...(19): siRNA sense strand
cuacuacacccguuacuuc

SEQ ID NO: 2056362 - RNA, 19 nt, Homo sapiens
  misc_RNA (1)...(19): siRNA sense strand
gguggacccuuggccugua

SEQ ID NO: 2056363 - RNA, 19 nt, Homo sapiens
  misc_RNA (1)...(19): siRNA sense strand
cuccaggccuccacauuug

SEQ ID NO: 2056364 - RNA, 19 nt, Homo sapiens
  misc_RNA (1)...(19): siRNA sense strand
caccuacacuaaacacauc

SEQ ID NO: 2056365 - RNA, 19 nt, Homo sapiens
  misc_RNA (1)...(19): siRNA sense strand
ucuccaggccuccacauuu

SEQ ID NO: 2056366 - RNA, 19 nt, Homo sapiens
  misc_RNA (1)...(19): siRNA sense strand
uaaacaacucuaugugcaa

SEQ ID NO: 2056367 - RNA, 19 nt, Homo sapiens
  misc_RNA (1)...(19): siRNA sense strand
ccuaugacauugccuuggu

SEQ ID NO: 2056368 - RNA, 19 nt, Homo sapiens
  misc_RNA (1)...(19): siRNA sense strand
guggacccuuggccuguaa

SEQ ID NO: 2056369 - RNA, 19 nt, Homo sapiens
  misc_RNA (1)...(19): siRNA sense strand
ccacauuugaguuugagaa

SEQ ID NO: 2056370 - RNA, 19 nt, Homo sapiens
  misc_RNA (1)...(19): siRNA sense strand
acaagaauggacuguggua

SEQ ID NO: 2056371 - RNA, 19 nt, Homo sapiens
  misc_RNA (1)...(19): siRNA sense strand
aaacacauccagcccaucu

SEQ ID NO: 2056372 - RNA, 19 nt, Homo sapiens
  misc_RNA (1)...(19): siRNA sense strand
ccuccacauuugaguuuga

SEQ ID NO: 2056373 - RNA, 19 nt, Homo sapiens
  misc_RNA (1)...(19): siRNA sense strand
ggccuccacauuugaguuu

SEQ ID NO: 2056374 - RNA, 19 nt, Homo sapiens
  misc_RNA (1)...(19): siRNA sense strand
aauaucagccaccacuuug

SEQ ID NO: 2056375 - RNA, 19 nt, Homo sapiens
  misc_RNA (1)...(19): siRNA sense strand
gaaguucaggucgccauca

SEQ ID NO: 2056376 - RNA, 19 nt, Homo sapiens
  misc_RNA (1)...(19): siRNA sense strand
aaggacaucuuuggagaca

SEQ ID NO: 2056377 - RNA, 19 nt, Homo sapiens
  misc_RNA (1)...(19): siRNA sense strand
ugucugcaccugucaccua

SEQ ID NO: 2056378 - RNA, 19 nt, Homo sapiens
  misc_RNA (1)...(19): siRNA sense strand
guaucgaauaucuaucuga

SEQ ID NO: 2056379 - RNA, 19 nt, Homo sapiens
  misc_RNA (1)...(19): siRNA sense strand
aaccaccucuuccucaagu

SEQ ID NO: 2056380 - RNA, 19 nt, Homo sapiens
  misc_RNA (1)...(19): siRNA sense strand
ugacauugccuuggugaag

SEQ ID NO: 2056381 - RNA, 19 nt, Homo sapiens
  misc_RNA (1)...(19): siRNA sense strand
gggaauucacccuaugaca

SEQ ID NO: 2056382 - RNA, 19 nt, Homo sapiens
  misc_RNA (1)...(19): siRNA sense strand
ucaggucgccaucauaaac

SEQ ID NO: 2056383 - RNA, 19 nt, Homo sapiens
  misc_RNA (1)...(19): siRNA sense strand
ccugucaccuacacuaaac

SEQ ID NO: 2056384 - RNA, 19 nt, Homo sapiens
  misc_RNA (1)...(19): siRNA sense strand
ggacaucuuuggagacaug

SEQ ID NO: 2056385 - RNA, 19 nt, Homo sapiens
  misc_RNA (1)...(19): siRNA sense strand
gaauucacccuaugacauu

SEQ ID NO: 2056386 - RNA, 19 nt, Homo sapiens
  misc_RNA (1)...(19): siRNA sense strand
gcaaccaccucuuccucaa

SEQ ID NO: 2056387 - RNA, 19 nt, Homo sapiens
  misc_RNA (1)...(19): siRNA sense strand
cuacacccguuacuucgua

SEQ ID NO: 2056388 - RNA, 19 nt, Homo sapiens
  misc_RNA (1)...(19): siRNA sense strand
caauaucagccaccacuuu

SEQ ID NO: 2056389 - RNA, 19 nt, Homo sapiens
  misc_RNA (1)...(19): siRNA sense strand
ggaauucacccuaugacau

SEQ ID NO: 2056390 - RNA, 19 nt, Homo sapiens
  misc_RNA (1)...(19): siRNA sense strand
guucaggucgccaucauaa

SEQ ID NO: 2056391 - RNA, 19 nt, Homo sapiens
  misc_RNA (1)...(19): siRNA sense strand
gcaccugucaccuacacua

SEQ ID NO: 2056392 - RNA, 19 nt, Homo sapiens
  misc_RNA (1)...(19): siRNA sense strand
ugacuuccaugccauccuu

SEQ ID NO: 2056393 - RNA, 19 nt, Homo sapiens
  misc_RNA (1)...(19): siRNA sense strand
cuacuacacccguuacuuc

SEQ ID NO: 2056394 - RNA, 19 nt, Homo sapiens
  misc_RNA (1)...(19): siRNA sense strand
gguggacccuuggccugua

SEQ ID NO: 2056395 - RNA, 19 nt, Homo sapiens
  misc_RNA (1)...(19): siRNA sense strand
cuccaggccuccacauuug

SEQ ID NO: 2056396 - RNA, 19 nt, Homo sapiens
  misc_RNA (1)...(19): siRNA sense strand
caccuacacuaaacacauc

SEQ ID NO: 2056397 - RNA, 19 nt, Homo sapiens
  misc_RNA (1)...(19): siRNA sense strand
ucuccaggccuccacauuu

SEQ ID NO: 2056398 - RNA, 19 nt, Homo sapiens
  misc_RNA (1)...(19): siRNA sense strand
uaaacaacucuaugugcaa

SEQ ID NO: 2056399 - RNA, 19 nt, Homo sapiens
  misc_RNA (1)...(19): siRNA sense strand
ccuaugacauugccuuggu

SEQ ID NO: 2056400 - RNA, 19 nt, Homo sapiens
  misc_RNA (1)...(19): siRNA sense strand
guggacccuuggccuguaa

SEQ ID NO: 2056401 - RNA, 19 nt, Homo sapiens
  misc_RNA (1)...(19): siRNA sense strand
ccacauuugaguuugagaa

SEQ ID NO: 2056402 - RNA, 19 nt, Homo sapiens
  misc_RNA (1)...(19): siRNA sense strand
acaagaauggacuguggua

SEQ ID NO: 2056403 - RNA, 19 nt, Homo sapiens
  misc_RNA (1)...(19): siRNA sense strand
aaacacauccagcccaucu

SEQ ID NO: 2056404 - RNA, 19 nt, Homo sapiens
  misc_RNA (1)...(19): siRNA sense strand
ccuccacauuugaguuuga

SEQ ID NO: 2056405 - RNA, 19 nt, Homo sapiens
  misc_RNA (1)...(19): siRNA sense strand
ggccuccacauuugaguuu

SEQ ID NO: 2056406 - RNA, 19 nt, Homo sapiens
  misc_RNA (1)...(19): siRNA sense strand
aauaucagccaccacuuug

SEQ ID NO: 2056407 - RNA, 19 nt, Homo sapiens
  misc_RNA (1)...(19): siRNA sense strand
gaaguucaggucgccauca

SEQ ID NO: 2056408 - RNA, 19 nt, Homo sapiens
  misc_RNA (1)...(19): siRNA sense strand
aaggacaucuuuggagaca

SEQ ID NO: 2056409 - RNA, 19 nt, Homo sapiens
  misc_RNA (1)...(19): siRNA sense strand
ugucugcaccugucaccua

SEQ ID NO: 2056410 - RNA, 19 nt, Homo sapiens
  misc_RNA (1)...(19): siRNA sense strand
guaucgaauaucuaucuga

SEQ ID NO: 2056411 - RNA, 19 nt, Homo sapiens
  misc_RNA (1)...(19): siRNA sense strand
aaccaccucuuccucaagu

SEQ ID NO: 2056412 - RNA, 19 nt, Homo sapiens
  misc_RNA (1)...(19): siRNA sense strand
ugacauugccuuggugaag

SEQ ID NO: 2056413 - RNA, 19 nt, Homo sapiens
  misc_RNA (1)...(19): siRNA sense strand
gggaauucacccuaugaca

SEQ ID NO: 2056414 - RNA, 19 nt, Homo sapiens
  misc_RNA (1)...(19): siRNA sense strand
ucaggucgccaucauaaac

SEQ ID NO: 2056415 - RNA, 19 nt, Homo sapiens
  misc_RNA (1)...(19): siRNA sense strand
ccugucaccuacacuaaac

SEQ ID NO: 2056416 - RNA, 19 nt, Homo sapiens
  misc_RNA (1)...(19): siRNA sense strand
ggacaucuuuggagacaug

SEQ ID NO: 2056417 - RNA, 19 nt, Homo sapiens
  misc_RNA (1)...(19): siRNA sense strand
gaauucacccuaugacauu

SEQ ID NO: 2056418 - RNA, 19 nt, Homo sapiens
  misc_RNA (1)...(19): siRNA sense strand
gcaaccaccucuuccucaa

SEQ ID NO: 2056419 - RNA, 19 nt, Homo sapiens
  misc_RNA (1)...(19): siRNA sense strand
cuacacccguuacuucgua

SEQ ID NO: 2056420 - RNA, 19 nt, Homo sapiens
  misc_RNA (1)...(19): siRNA sense strand
caauaucagccaccacuuu

SEQ ID NO: 2056421 - RNA, 19 nt, Homo sapiens
  misc_RNA (1)...(19): siRNA sense strand
ggaauucacccuaugacau

SEQ ID NO: 2056422 - RNA, 19 nt, Homo sapiens
  misc_RNA (1)...(19): siRNA sense strand
guucaggucgccaucauaa

SEQ ID NO: 2056423 - RNA, 19 nt, Homo sapiens
  misc_RNA (1)...(19): siRNA sense strand
gcaccugucaccuacacua

SEQ ID NO: 2056424 - RNA, 19 nt, Homo sapiens
  misc_RNA (1)...(19): siRNA sense strand
ugacuuccaugccauccuu

SEQ ID NO: 2056425 - RNA, 19 nt, Homo sapiens
  misc_RNA (1)...(19): siRNA sense strand
cuacuacacccguuacuuc

SEQ ID NO: 2056426 - RNA, 19 nt, Homo sapiens
  misc_RNA (1)...(19): siRNA sense strand
gguggacccuuggccugua

SEQ ID NO: 2056427 - RNA, 19 nt, Homo sapiens
  misc_RNA (1)...(19): siRNA sense strand
cuccaggccuccacauuug

SEQ ID NO: 2056428 - RNA, 19 nt, Homo sapiens
  misc_RNA (1)...(19): siRNA sense strand
caccuacacuaaacacauc

SEQ ID NO: 2056429 - RNA, 19 nt, Homo sapiens
  misc_RNA (1)...(19): siRNA sense strand
ucuccaggccuccacauuu

SEQ ID NO: 2056430 - RNA, 19 nt, Homo sapiens
  misc_RNA (1)...(19): siRNA sense strand
uaaacaacucuaugugcaa

SEQ ID NO: 2056431 - RNA, 19 nt, Homo sapiens
  misc_RNA (1)...(19): siRNA sense strand
ccuaugacauugccuuggu

SEQ ID NO: 2056432 - RNA, 19 nt, Homo sapiens
  misc_RNA (1)...(19): siRNA sense strand
guggacccuuggccuguaa

SEQ ID NO: 2056433 - RNA, 19 nt, Homo sapiens
  misc_RNA (1)...(19): siRNA sense strand
ccacauuugaguuugagaa

SEQ ID NO: 2056434 - RNA, 19 nt, Homo sapiens
  misc_RNA (1)...(19): siRNA sense strand
acaagaauggacuguggua

SEQ ID NO: 2056435 - RNA, 19 nt, Homo sapiens
  misc_RNA (1)...(19): siRNA sense strand
aaacacauccagcccaucu

SEQ ID NO: 2056436 - RNA, 19 nt, Homo sapiens
  misc_RNA (1)...(19): siRNA sense strand
ccuccacauuugaguuuga

SEQ ID NO: 2056437 - RNA, 19 nt, Homo sapiens
  misc_RNA (1)...(19): siRNA sense strand
ggccuccacauuugaguuu

SEQ ID NO: 2056438 - RNA, 19 nt, Homo sapiens
  misc_RNA (1)...(19): siRNA sense strand
aauaucagccaccacuuug

SEQ ID NO: 2056439 - RNA, 19 nt, Homo sapiens
  misc_RNA (1)...(19): siRNA sense strand
gaaguucaggucgccauca

SEQ ID NO: 2056440 - RNA, 19 nt, Homo sapiens
  misc_RNA (1)...(19): siRNA sense strand
aaggacaucuuuggagaca

SEQ ID NO: 2056441 - RNA, 19 nt, Homo sapiens
  misc_RNA (1)...(19): siRNA sense strand
ugucugcaccugucaccua

SEQ ID NO: 2056442 - RNA, 19 nt, Homo sapiens
  misc_RNA (1)...(19): siRNA sense strand
guaucgaauaucuaucuga

SEQ ID NO: 2056443 - RNA, 19 nt, Homo sapiens
  misc_RNA (1)...(19): siRNA sense strand
aaccaccucuuccucaagu

SEQ ID NO: 2056444 - RNA, 19 nt, Homo sapiens
  misc_RNA (1)...(19): siRNA sense strand
ugacauugccuuggugaag

SEQ ID NO: 2056445 - RNA, 19 nt, Homo sapiens
  misc_RNA (1)...(19): siRNA sense strand
gggaauucacccuaugaca

SEQ ID NO: 2056446 - RNA, 19 nt, Homo sapiens
  misc_RNA (1)...(19): siRNA sense strand
ucaggucgccaucauaaac

SEQ ID NO: 2056447 - RNA, 19 nt, Homo sapiens
  misc_RNA (1)...(19): siRNA sense strand
ccugucaccuacacuaaac

SEQ ID NO: 2056448 - RNA, 19 nt, Homo sapiens
  misc_RNA (1)...(19): siRNA sense strand
ggacaucuuuggagacaug

SEQ ID NO: 2056449 - RNA, 19 nt, Homo sapiens
  misc_RNA (1)...(19): siRNA sense strand
gaauucacccuaugacauu

SEQ ID NO: 2056450 - RNA, 19 nt, Homo sapiens
  misc_RNA (1)...(19): siRNA sense strand
gcaaccaccucuuccucaa

SEQ ID NO: 2056451 - RNA, 19 nt, Homo sapiens
  misc_RNA (1)...(19): siRNA sense strand
cuacacccguuacuucgua

SEQ ID NO: 2056452 - RNA, 19 nt, Homo sapiens
  misc_RNA (1)...(19): siRNA sense strand
caauaucagccaccacuuu

SEQ ID NO: 2056453 - RNA, 19 nt, Homo sapiens
  misc_RNA (1)...(19): siRNA sense strand
ggaauucacccuaugacau

SEQ ID NO: 2056454 - RNA, 19 nt, Homo sapiens
  misc_RNA (1)...(19): siRNA sense strand
guucaggucgccaucauaa

SEQ ID NO: 2056455 - RNA, 19 nt, Homo sapiens
  misc_RNA (1)...(19): siRNA sense strand
gcaccugucaccuacacua

SEQ ID NO: 2056456 - RNA, 19 nt, Homo sapiens
  misc_RNA (1)...(19): siRNA sense strand
ugacuuccaugccauccuu

SEQ ID NO: 2056457 - RNA, 19 nt, Homo sapiens
  misc_RNA (1)...(19): siRNA sense strand
cuacuacacccguuacuuc

SEQ ID NO: 2056458 - RNA, 19 nt, Homo sapiens
  misc_RNA (1)...(19): siRNA sense strand
gguggacccuuggccugua

SEQ ID NO: 2056459 - RNA, 19 nt, Homo sapiens
  misc_RNA (1)...(19): siRNA sense strand
cuccaggccuccacauuug

SEQ ID NO: 2056460 - RNA, 19 nt, Homo sapiens
  misc_RNA (1)...(19): siRNA sense strand
caccuacacuaaacacauc

SEQ ID NO: 2056461 - RNA, 19 nt, Homo sapiens
  misc_RNA (1)...(19): siRNA sense strand
ucuccaggccuccacauuu

SEQ ID NO: 2056462 - RNA, 19 nt, Homo sapiens
  misc_RNA (1)...(19): siRNA sense strand
uaaacaacucuaugugcaa

SEQ ID NO: 2056463 - RNA, 19 nt, Homo sapiens
  misc_RNA (1)...(19): siRNA sense strand
ccuaugacauugccuuggu

SEQ ID NO: 2056464 - RNA, 19 nt, Homo sapiens
  misc_RNA (1)...(19): siRNA sense strand
guggacccuuggccuguaa

SEQ ID NO: 2056465 - RNA, 19 nt, Homo sapiens
  misc_RNA (1)...(19): siRNA sense strand
ccacauuugaguuugagaa

SEQ ID NO: 2056466 - RNA, 19 nt, Homo sapiens
  misc_RNA (1)...(19): siRNA sense strand
acaagaauggacuguggua

SEQ ID NO: 2056467 - RNA, 19 nt, Homo sapiens
  misc_RNA (1)...(19): siRNA sense strand
aaacacauccagcccaucu

SEQ ID NO: 2056468 - RNA, 19 nt, Homo sapiens
  misc_RNA (1)...(19): siRNA sense strand
ccuccacauuugaguuuga

SEQ ID NO: 2056469 - RNA, 19 nt, Homo sapiens
  misc_RNA (1)...(19): siRNA sense strand
ggccuccacauuugaguuu

SEQ ID NO: 2056470 - RNA, 19 nt, Homo sapiens
  misc_RNA (1)...(19): siRNA sense strand
aauaucagccaccacuuug

SEQ ID NO: 2056471 - RNA, 19 nt, Homo sapiens
  misc_RNA (1)...(19): siRNA sense strand
gaaguucaggucgccauca

SEQ ID NO: 2056472 - RNA, 19 nt, Homo sapiens
  misc_RNA (1)...(19): siRNA sense strand
aaggacaucuuuggagaca

SEQ ID NO: 2056473 - RNA, 19 nt, Homo sapiens
  misc_RNA (1)...(19): siRNA sense strand
ugucugcaccugucaccua

SEQ ID NO: 2056474 - RNA, 19 nt, Homo sapiens
  misc_RNA (1)...(19): siRNA sense strand
guaucgaauaucuaucuga

SEQ ID NO: 2056475 - RNA, 19 nt, Homo sapiens
  misc_RNA (1)...(19): siRNA sense strand
aaccaccucuuccucaagu

SEQ ID NO: 2056476 - RNA, 19 nt, Homo sapiens
  misc_RNA (1)...(19): siRNA sense strand
ugacauugccuuggugaag

SEQ ID NO: 2056477 - RNA, 19 nt, Homo sapiens
  misc_RNA (1)...(19): siRNA sense strand
gggaauucacccuaugaca

SEQ ID NO: 2056478 - RNA, 19 nt, Homo sapiens
  misc_RNA (1)...(19): siRNA sense strand
ucaggucgccaucauaaac

SEQ ID NO: 2056479 - RNA, 19 nt, Homo sapiens
  misc_RNA (1)...(19): siRNA sense strand
ccugucaccuacacuaaac

SEQ ID NO: 2056480 - RNA, 19 nt, Homo sapiens
  misc_RNA (1)...(19): siRNA sense strand
ggacaucuuuggagacaug

SEQ ID NO: 2056481 - RNA, 19 nt, Homo sapiens
  misc_RNA (1)...(19): siRNA sense strand
gaauucacccuaugacauu

SEQ ID NO: 2056482 - RNA, 19 nt, Homo sapiens
  misc_RNA (1)...(19): siRNA sense strand
gcaaccaccucuuccucaa

SEQ ID NO: 2056483 - RNA, 19 nt, Homo sapiens
  misc_RNA (1)...(19): siRNA sense strand
cuacacccguuacuucgua

SEQ ID NO: 2056484 - RNA, 19 nt, Homo sapiens
  misc_RNA (1)...(19): siRNA sense strand
caauaucagccaccacuuu

SEQ ID NO: 2056485 - RNA, 19 nt, Homo sapiens
  misc_RNA (1)...(19): siRNA sense strand
ggaauucacccuaugacau

SEQ ID NO: 2056486 - RNA, 19 nt, Homo sapiens
  misc_RNA (1)...(19): siRNA sense strand
guucaggucgccaucauaa

SEQ ID NO: 2056487 - RNA, 19 nt, Homo sapiens
  misc_RNA (1)...(19): siRNA sense strand
gcaccugucaccuacacua

SEQ ID NO: 2056488 - RNA, 19 nt, Homo sapiens
  misc_RNA (1)...(19): siRNA sense strand
ugacuuccaugccauccuu

SEQ ID NO: 2056489 - RNA, 19 nt, Homo sapiens
  misc_RNA (1)...(19): siRNA sense strand
cuacuacacccguuacuuc

SEQ ID NO: 2056490 - RNA, 19 nt, Homo sapiens
  misc_RNA (1)...(19): siRNA sense strand
gguggacccuuggccugua

SEQ ID NO: 2056491 - RNA, 19 nt, Homo sapiens
  misc_RNA (1)...(19): siRNA sense strand
cuccaggccuccacauuug

SEQ ID NO: 2056492 - RNA, 19 nt, Homo sapiens
  misc_RNA (1)...(19): siRNA sense strand
caccuacacuaaacacauc

SEQ ID NO: 2056493 - RNA, 19 nt, Homo sapiens
  misc_RNA (1)...(19): siRNA sense strand
ucuccaggccuccacauuu

SEQ ID NO: 2056494 - RNA, 19 nt, Homo sapiens
  misc_RNA (1)...(19): siRNA sense strand
uaaacaacucuaugugcaa

SEQ ID NO: 2056495 - RNA, 19 nt, Homo sapiens
  misc_RNA (1)...(19): siRNA sense strand
ccuaugacauugccuuggu

SEQ ID NO: 2056496 - RNA, 19 nt, Homo sapiens
  misc_RNA (1)...(19): siRNA sense strand
guggacccuuggccuguaa

SEQ ID NO: 2056497 - RNA, 19 nt, Homo sapiens
  misc_RNA (1)...(19): siRNA sense strand
ccacauuugaguuugagaa

SEQ ID NO: 2056498 - RNA, 19 nt, Homo sapiens
  misc_RNA (1)...(19): siRNA sense strand
acaagaauggacuguggua

SEQ ID NO: 2056499 - RNA, 19 nt, Homo sapiens
  misc_RNA (1)...(19): siRNA sense strand
aaacacauccagcccaucu

SEQ ID NO: 2056500 - RNA, 19 nt, Homo sapiens
  misc_RNA (1)...(19): siRNA sense strand
ccuccacauuugaguuuga

SEQ ID NO: 2056501 - RNA, 19 nt, Homo sapiens
  misc_RNA (1)...(19): siRNA sense strand
ggccuccacauuugaguuu

SEQ ID NO: 2056502 - RNA, 19 nt, Homo sapiens
  misc_RNA (1)...(19): siRNA sense strand
aauaucagccaccacuuug

SEQ ID NO: 2056503 - RNA, 19 nt, Homo sapiens
  misc_RNA (1)...(19): siRNA sense strand
gaaguucaggucgccauca

SEQ ID NO: 2056504 - RNA, 19 nt, Homo sapiens
  misc_RNA (1)...(19): siRNA sense strand
aaggacaucuuuggagaca

SEQ ID NO: 2056505 - RNA, 19 nt, Homo sapiens
  misc_RNA (1)...(19): siRNA sense strand
ugucugcaccugucaccua

SEQ ID NO: 2056506 - RNA, 19 nt, Homo sapiens
  misc_RNA (1)...(19): siRNA sense strand
guaucgaauaucuaucuga

SEQ ID NO: 2056507 - RNA, 19 nt, Homo sapiens
  misc_RNA (1)...(19): siRNA sense strand
aaccaccucuuccucaagu

SEQ ID NO: 2056508 - RNA, 19 nt, Homo sapiens
  misc_RNA (1)...(19): siRNA sense strand
ugacauugccuuggugaag

SEQ ID NO: 2056509 - RNA, 19 nt, Homo sapiens
  misc_RNA (1)...(19): siRNA sense strand
gggaauucacccuaugaca

SEQ ID NO: 2056510 - RNA, 19 nt, Homo sapiens
  misc_RNA (1)...(19): siRNA sense strand
ucaggucgccaucauaaac

SEQ ID NO: 2056511 - RNA, 19 nt, Homo sapiens
  misc_RNA (1)...(19): siRNA sense strand
ccugucaccuacacuaaac

SEQ ID NO: 2056512 - RNA, 19 nt, Homo sapiens
  misc_RNA (1)...(19): siRNA sense strand
ggacaucuuuggagacaug

SEQ ID NO: 2056513 - RNA, 19 nt, Homo sapiens
  misc_RNA (1)...(19): siRNA sense strand
gaauucacccuaugacauu

SEQ ID NO: 2056514 - RNA, 19 nt, Homo sapiens
  misc_RNA (1)...(19): siRNA sense strand
gcaaccaccucuuccucaa

SEQ ID NO: 2056515 - RNA, 19 nt, Homo sapiens
  misc_RNA (1)...(19): siRNA sense strand
cuacacccguuacuucgua

SEQ ID NO: 2056516 - RNA, 19 nt, Homo sapiens
  misc_RNA (1)...(19): siRNA sense strand
caauaucagccaccacuuu

SEQ ID NO: 2056517 - RNA, 19 nt, Homo sapiens
  misc_RNA (1)...(19): siRNA sense strand
ggaauucacccuaugacau

SEQ ID NO: 2056518 - RNA, 19 nt, Homo sapiens
  misc_RNA (1)...(19): siRNA sense strand
guucaggucgccaucauaa

SEQ ID NO: 2056519 - RNA, 19 nt, Homo sapiens
  misc_RNA (1)...(19): siRNA sense strand
gcaccugucaccuacacua

SEQ ID NO: 2056520 - RNA, 19 nt, Homo sapiens
  misc_RNA (1)...(19): siRNA sense strand
ugacuuccaugccauccuu

SEQ ID NO: 2056521 - RNA, 19 nt, Homo sapiens
  misc_RNA (1)...(19): siRNA sense strand
cuacuacacccguuacuuc

SEQ ID NO: 2056522 - RNA, 19 nt, Homo sapiens
  misc_RNA (1)...(19): siRNA sense strand
gguggacccuuggccugua

SEQ ID NO: 2056523 - RNA, 19 nt, Homo sapiens
  misc_RNA (1)...(19): siRNA sense strand
cuccaggccuccacauuug

SEQ ID NO: 2056524 - RNA, 19 nt, Homo sapiens
  misc_RNA (1)...(19): siRNA sense strand
caccuacacuaaacacauc

SEQ ID NO: 2056525 - RNA, 19 nt, Homo sapiens
  misc_RNA (1)...(19): siRNA sense strand
ucuccaggccuccacauuu

SEQ ID NO: 2056526 - RNA, 19 nt, Homo sapiens
  misc_RNA (1)...(19): siRNA sense strand
uaaacaacucuaugugcaa

SEQ ID NO: 2056527 - RNA, 19 nt, Homo sapiens
  misc_RNA (1)...(19): siRNA sense strand
ccuaugacauugccuuggu

SEQ ID NO: 2056528 - RNA, 19 nt, Homo sapiens
  misc_RNA (1)...(19): siRNA sense strand
guggacccuuggccuguaa

SEQ ID NO: 2056529 - RNA, 19 nt, Homo sapiens
  misc_RNA (1)...(19): siRNA sense strand
ccacauuugaguuugagaa

SEQ ID NO: 2056530 - RNA, 19 nt, Homo sapiens
  misc_RNA (1)...(19): siRNA sense strand
acaagaauggacuguggua

SEQ ID NO: 2056531 - RNA, 19 nt, Homo sapiens
  misc_RNA (1)...(19): siRNA sense strand
aaacacauccagcccaucu

SEQ ID NO: 2056532 - RNA, 19 nt, Homo sapiens
  misc_RNA (1)...(19): siRNA sense strand
ccuccacauuugaguuuga

SEQ ID NO: 2056533 - RNA, 19 nt, Homo sapiens
  misc_RNA (1)...(19): siRNA sense strand
ggccuccacauuugaguuu

SEQ ID NO: 2056534 - RNA, 19 nt, Homo sapiens
  misc_RNA (1)...(19): siRNA sense strand
aauaucagccaccacuuug

SEQ ID NO: 2056535 - RNA, 19 nt, Homo sapiens
  misc_RNA (1)...(19): siRNA sense strand
gaaguucaggucgccauca

SEQ ID NO: 2056536 - RNA, 19 nt, Homo sapiens
  misc_RNA (1)...(19): siRNA sense strand
aaggacaucuuuggagaca

SEQ ID NO: 2056537 - RNA, 19 nt, Homo sapiens
  misc_RNA (1)...(19): siRNA sense strand
ugucugcaccugucaccua

SEQ ID NO: 2056538 - RNA, 19 nt, Homo sapiens
  misc_RNA (1)...(19): siRNA sense strand
guaucgaauaucuaucuga

SEQ ID NO: 2056539 - RNA, 19 nt, Homo sapiens
  misc_RNA (1)...(19): siRNA sense strand
aaccaccucuuccucaagu

SEQ ID NO: 2056540 - RNA, 19 nt, Homo sapiens
  misc_RNA (1)...(19): siRNA sense strand
ugacauugccuuggugaag

SEQ ID NO: 2056541 - RNA, 19 nt, Homo sapiens
  misc_RNA (1)...(19): siRNA sense strand
gggaauucacccuaugaca

SEQ ID NO: 2056542 - RNA, 19 nt, Homo sapiens
  misc_RNA (1)...(19): siRNA sense strand
ucaggucgccaucauaaac

SEQ ID NO: 2056543 - RNA, 19 nt, Homo sapiens
  misc_RNA (1)...(19): siRNA sense strand
ccugucaccuacacuaaac

SEQ ID NO: 2056544 - RNA, 19 nt, Homo sapiens
  misc_RNA (1)...(19): siRNA sense strand
ggacaaagaugaguggaua

SEQ ID NO: 2056545 - RNA, 19 nt, Homo sapiens
  misc_RNA (1)...(19): siRNA sense strand
gaaaucaugucaacuguga

SEQ ID NO: 2056546 - RNA, 19 nt, Homo sapiens
  misc_RNA (1)...(19): siRNA sense strand
gaaaaggccuuagcaauua

SEQ ID NO: 2056547 - RNA, 19 nt, Homo sapiens
  misc_RNA (1)...(19): siRNA sense strand
gcacuggaaucuauaaaga

SEQ ID NO: 2056548 - RNA, 19 nt, Homo sapiens
  misc_RNA (1)...(19): siRNA sense strand
gcacagauccgagaaguuu

SEQ ID NO: 2056549 - RNA, 19 nt, Homo sapiens
  misc_RNA (1)...(19): siRNA sense strand
ccagagaucuucaaaauuu

SEQ ID NO: 2056550 - RNA, 19 nt, Homo sapiens
  misc_RNA (1)...(19): siRNA sense strand
gacaauggcagaaacuuua

SEQ ID NO: 2056551 - RNA, 19 nt, Homo sapiens
  misc_RNA (1)...(19): siRNA sense strand
gaaaagaagugccggguuu

SEQ ID NO: 2056552 - RNA, 19 nt, Homo sapiens
  misc_RNA (1)...(19): siRNA sense strand
ggacagcaccuuaauggaa

SEQ ID NO: 2056553 - RNA, 19 nt, Homo sapiens
  misc_RNA (1)...(19): siRNA sense strand
gagaaaacauugcugauaa

SEQ ID NO: 2056554 - RNA, 19 nt, Homo sapiens
  misc_RNA (1)...(19): siRNA sense strand
ugaaugcacuggaaucuau

SEQ ID NO: 2056555 - RNA, 19 nt, Homo sapiens
  misc_RNA (1)...(19): siRNA sense strand
gaaauucagccaaaguaaa

SEQ ID NO: 2056556 - RNA, 19 nt, Homo sapiens
  misc_RNA (1)...(19): siRNA sense strand
gagaaaagguggacaaaga

SEQ ID NO: 2056557 - RNA, 19 nt, Homo sapiens
  misc_RNA (1)...(19): siRNA sense strand
aggaagaugugguuguuua

SEQ ID NO: 2056558 - RNA, 19 nt, Homo sapiens
  misc_RNA (1)...(19): siRNA sense strand
ccaggcaauuucaggauua

SEQ ID NO: 2056559 - RNA, 19 nt, Homo sapiens
  misc_RNA (1)...(19): siRNA sense strand
gaaagucagauggauauaa

SEQ ID NO: 2056560 - RNA, 19 nt, Homo sapiens
  misc_RNA (1)...(19): siRNA sense strand
guaaacaacugaagaagcu

SEQ ID NO: 2056561 - RNA, 19 nt, Homo sapiens
  misc_RNA (1)...(19): siRNA sense strand
gcacugaugauaagaauuc

SEQ ID NO: 2056562 - RNA, 19 nt, Homo sapiens
  misc_RNA (1)...(19): siRNA sense strand
gaaccuauaggccagagua

SEQ ID NO: 2056563 - RNA, 19 nt, Homo sapiens
  misc_RNA (1)...(19): siRNA sense strand
uggagaaccucuacucaaa

SEQ ID NO: 2056564 - RNA, 19 nt, Homo sapiens
  misc_RNA (1)...(19): siRNA sense strand
gagccuaucagaauuauau

SEQ ID NO: 2056565 - RNA, 19 nt, Homo sapiens
  misc_RNA (1)...(19): siRNA sense strand
uugcacaacugaauucuaa

SEQ ID NO: 2056566 - RNA, 19 nt, Homo sapiens
  misc_RNA (1)...(19): siRNA sense strand
gaaagauguccuucaagaa

SEQ ID NO: 2056567 - RNA, 19 nt, Homo sapiens
  misc_RNA (1)...(19): siRNA sense strand
gaacuacaaagaagaugaa

SEQ ID NO: 2056568 - RNA, 19 nt, Homo sapiens
  misc_RNA (1)...(19): siRNA sense strand
ggaggcugguugaaacgua

SEQ ID NO: 2056569 - RNA, 19 nt, Homo sapiens
  misc_RNA (1)...(19): siRNA sense strand
ugaccuaaaucacaaacaa

SEQ ID NO: 2056570 - RNA, 19 nt, Homo sapiens
  misc_RNA (1)...(19): siRNA sense strand
ggacuugaccuaaaucaca

SEQ ID NO: 2056571 - RNA, 19 nt, Homo sapiens
  misc_RNA (1)...(19): siRNA sense strand
gauccaaugcuucuguaua

SEQ ID NO: 2056572 - RNA, 19 nt, Homo sapiens
  misc_RNA (1)...(19): siRNA sense strand
gaaaugauccaaugcuucu

SEQ ID NO: 2056573 - RNA, 19 nt, Homo sapiens
  misc_RNA (1)...(19): siRNA sense strand
aaagaugaguggauaagug

SEQ ID NO: 2056574 - RNA, 19 nt, Homo sapiens
  misc_RNA (1)...(19): siRNA sense strand
caaaguaaacaacugaaga

SEQ ID NO: 2056575 - RNA, 19 nt, Homo sapiens
  misc_RNA (1)...(19): siRNA sense strand
gacagcaccuuaauggaau

SEQ ID NO: 2056576 - RNA, 19 nt, Homo sapiens
  misc_RNA (1)...(19): siRNA sense strand
cgacuuggccucccuucua

SEQ ID NO: 2056577 - RNA, 19 nt, Homo sapiens
  misc_RNA (1)...(19): siRNA sense strand
guaucaguauggaaacuuu

SEQ ID NO: 2056578 - RNA, 19 nt, Homo sapiens
  misc_RNA (1)...(19): siRNA sense strand
uagaugaccucacuuggau

SEQ ID NO: 2056579 - RNA, 19 nt, Homo sapiens
  misc_RNA (1)...(19): siRNA sense strand
auacagagccuaucagaau

SEQ ID NO: 2056580 - RNA, 19 nt, Homo sapiens
  misc_RNA (1)...(19): siRNA sense strand
cugaugacauuguuucaaa

SEQ ID NO: 2056581 - RNA, 19 nt, Homo sapiens
  misc_RNA (1)...(19): siRNA sense strand
aaagagagcugaagaaaag

SEQ ID NO: 2056582 - RNA, 19 nt, Homo sapiens
  misc_RNA (1)...(19): siRNA sense strand
gcacaacugaauucuaaau

SEQ ID NO: 2056583 - RNA, 19 nt, Homo sapiens
  misc_RNA (1)...(19): siRNA sense strand
cauaauggaucuuguaagc

SEQ ID NO: 2056584 - RNA, 19 nt, Homo sapiens
  misc_RNA (1)...(19): siRNA sense strand
gaggcugguugaaacguaa

SEQ ID NO: 2056585 - RNA, 19 nt, Homo sapiens
  misc_RNA (1)...(19): siRNA sense strand
ggucauaggacacgaaauc

SEQ ID NO: 2056586 - RNA, 19 nt, Homo sapiens
  misc_RNA (1)...(19): siRNA sense strand
aaagauugcccaucgauga

SEQ ID NO: 2056587 - RNA, 19 nt, Homo sapiens
  misc_RNA (1)...(19): siRNA sense strand
gagaaccucuacucaaacu

SEQ ID NO: 2056588 - RNA, 19 nt, Homo sapiens
  misc_RNA (1)...(19): siRNA sense strand
guacagcauauguggauuu

SEQ ID NO: 2056589 - RNA, 19 nt, Homo sapiens
  misc_RNA (1)...(19): siRNA sense strand
gaugauaagaauucuguga

SEQ ID NO: 2056590 - RNA, 19 nt, Homo sapiens
  misc_RNA (1)...(19): siRNA sense strand
gaaccucuacucaaacugu

SEQ ID NO: 2056591 - RNA, 19 nt, Homo sapiens
  misc_RNA (1)...(19): siRNA sense strand
auccaaugcuucuguauaa

SEQ ID NO: 2056592 - RNA, 19 nt, Homo sapiens
  misc_RNA (1)...(19): siRNA sense strand
ccgcaagaauucauacaug

SEQ ID NO: 2056593 - RNA, 19 nt, Homo sapiens
  misc_RNA (1)...(19): siRNA sense strand
cuacaaagaagaugaauac

SEQ ID NO: 2056594 - RNA, 19 nt, Homo sapiens
  misc_RNA (1)...(19): siRNA sense strand
caugucaacugugaauauu

SEQ ID NO: 2056595 - RNA, 19 nt, Homo sapiens
  misc_RNA (1)...(19): siRNA sense strand
ugaggaagaugugguuguu

SEQ ID NO: 2056596 - RNA, 19 nt, Homo sapiens
  misc_RNA (1)...(19): siRNA sense strand
uaauggaggucuuggucaa

SEQ ID NO: 2056597 - RNA, 19 nt, Homo sapiens
  misc_RNA (1)...(19): siRNA sense strand
ggccuuagcaauuaaagaa

SEQ ID NO: 2056598 - RNA, 19 nt, Homo sapiens
  misc_RNA (1)...(19): siRNA sense strand
ggauggaugccgagacaaa

SEQ ID NO: 2056599 - RNA, 19 nt, Homo sapiens
  misc_RNA (1)...(19): siRNA sense strand
ucagaaagucagauggaua

SEQ ID NO: 2056600 - RNA, 19 nt, Homo sapiens
  misc_RNA (1)...(19): siRNA sense strand
uggagcagcuguagucaau

SEQ ID NO: 2056601 - RNA, 19 nt, Homo sapiens
  misc_RNA (1)...(19): siRNA sense strand
uacaaggaguccagaaaug

SEQ ID NO: 2056602 - RNA, 19 nt, Homo sapiens
  misc_RNA (1)...(19): siRNA sense strand
cagaaagucagauggauau

SEQ ID NO: 2056603 - RNA, 19 nt, Homo sapiens
  misc_RNA (1)...(19): siRNA sense strand
gcacaguccaggcaauuuc

SEQ ID NO: 2056604 - RNA, 19 nt, Homo sapiens
  misc_RNA (1)...(19): siRNA sense strand
uggcagaaacuuuaacaaa

SEQ ID NO: 2056605 - RNA, 19 nt, Homo sapiens
  misc_RNA (1)...(19): siRNA sense strand
gagcagcuguagucaaugc

SEQ ID NO: 2056606 - RNA, 19 nt, Homo sapiens
  misc_RNA (1)...(19): siRNA sense strand
ggucuuguauaaaugaauc

SEQ ID NO: 2056607 - RNA, 19 nt, Homo sapiens
  misc_RNA (1)...(19): siRNA sense strand
ugaagaagcuccgagaaaa

SEQ ID NO: 2056608 - RNA, 19 nt, Homo sapiens
  misc_RNA (1)...(19): siRNA sense strand
gagacguugugcaaacuau

SEQ ID NO: 2056609 - RNA, 19 nt, Homo sapiens
  misc_RNA (1)...(19): siRNA sense strand
cagcauauguggauuuuau

SEQ ID NO: 2056610 - RNA, 19 nt, Homo sapiens
  misc_RNA (1)...(19): siRNA sense strand
caaugcuucuguauaacaa

SEQ ID NO: 2056611 - RNA, 19 nt, Homo sapiens
  misc_RNA (1)...(19): siRNA sense strand
gacuugaccuaaaucacaa

SEQ ID NO: 2056612 - RNA, 19 nt, Homo sapiens
  misc_RNA (1)...(19): siRNA sense strand
gcauacagagccuaucaga

SEQ ID NO: 2056613 - RNA, 19 nt, Homo sapiens
  misc_RNA (1)...(19): siRNA sense strand
ugacaauggcagaaacuuu

SEQ ID NO: 2056614 - RNA, 19 nt, Homo sapiens
  misc_RNA (1)...(19): siRNA sense strand
gaauacuucgagaacauaa

SEQ ID NO: 2056615 - RNA, 19 nt, Homo sapiens
  misc_RNA (1)...(19): siRNA sense strand
gaugaauacuucgagaaca

SEQ ID NO: 2056616 - RNA, 19 nt, Homo sapiens
  misc_RNA (1)...(19): siRNA sense strand
ugucaacugugaauauuag

SEQ ID NO: 2056617 - RNA, 19 nt, Homo sapiens
  misc_RNA (1)...(19): siRNA sense strand
gcagaaagcaaaagcauug

SEQ ID NO: 2056618 - RNA, 19 nt, Homo sapiens
  misc_RNA (1)...(19): siRNA sense strand
ggagaaaacauugcugaua

SEQ ID NO: 2056619 - RNA, 19 nt, Homo sapiens
  misc_RNA (1)...(19): siRNA sense strand
aaagucagauggauauaac

SEQ ID NO: 2056620 - RNA, 19 nt, Homo sapiens
  misc_RNA (1)...(19): siRNA sense strand
caaacugaauaaugaguac

SEQ ID NO: 2056621 - RNA, 19 nt, Homo sapiens
  misc_RNA (1)...(19): siRNA sense strand
cggcuauccugaugacauu

SEQ ID NO: 2056622 - RNA, 19 nt, Homo sapiens
  misc_RNA (1)...(19): siRNA sense strand
gaagaugugguuguuuaug

SEQ ID NO: 2056623 - RNA, 19 nt, Homo sapiens
  misc_RNA (1)...(19): siRNA sense strand
gauaaguggagcagcugua

SEQ ID NO: 2056624 - RNA, 19 nt, Homo sapiens
  misc_RNA (1)...(19): siRNA sense strand
acagagccuaucagaauua

SEQ ID NO: 2056625 - RNA, 19 nt, Homo sapiens
  misc_RNA (1)...(19): siRNA sense strand
uacagagccuaucagaauu

SEQ ID NO: 2056626 - RNA, 19 nt, Homo sapiens
  misc_RNA (1)...(19): siRNA sense strand
gaaugcacuggaaucuaua

SEQ ID NO: 2056627 - RNA, 19 nt, Homo sapiens
  misc_RNA (1)...(19): siRNA sense strand
uuaauguccuggagauuca

SEQ ID NO: 2056628 - RNA, 19 nt, Homo sapiens
  misc_RNA (1)...(19): siRNA sense strand
ggcuaaaccugaagaucga

SEQ ID NO: 2056629 - RNA, 19 nt, Homo sapiens
  misc_RNA (1)...(19): siRNA sense strand
cagauugauucgucaggaa

SEQ ID NO: 2056630 - RNA, 19 nt, Homo sapiens
  misc_RNA (1)...(19): siRNA sense strand
uauaguagcagugcagaaa

SEQ ID NO: 2056631 - RNA, 19 nt, Homo sapiens
  misc_RNA (1)...(19): siRNA sense strand
ggauuugauugcacagauc

SEQ ID NO: 2056632 - RNA, 19 nt, Homo sapiens
  misc_RNA (1)...(19): siRNA sense strand
ggaagaugugguuguuuau

SEQ ID NO: 2056633 - RNA, 19 nt, Homo sapiens
  misc_RNA (1)...(19): siRNA sense strand
cagcuugcuuuggaaauga

SEQ ID NO: 2056634 - RNA, 19 nt, Homo sapiens
  misc_RNA (1)...(19): siRNA sense strand
caaacuguuaccagacaua

SEQ ID NO: 2056635 - RNA, 19 nt, Homo sapiens
  misc_RNA (1)...(19): siRNA sense strand
acccaaaacugaagauaua

SEQ ID NO: 2056636 - RNA, 19 nt, Homo sapiens
  misc_RNA (1)...(19): siRNA sense strand
ggugugguguggaaccuau

SEQ ID NO: 2056637 - RNA, 19 nt, Homo sapiens
  misc_RNA (1)...(19): siRNA sense strand
acucaacagucugcaagua

SEQ ID NO: 2056638 - RNA, 19 nt, Homo sapiens
  misc_RNA (1)...(19): siRNA sense strand
uguuuaugcuccagaauau

SEQ ID NO: 2056639 - RNA, 19 nt, Homo sapiens
  misc_RNA (1)...(19): siRNA sense strand
ccagcuugcuuuggaaaug

SEQ ID NO: 2056640 - RNA, 19 nt, Homo sapiens
  misc_RNA (1)...(19): siRNA sense strand
gggcaucggcauggucaua

SEQ ID NO: 2056641 - RNA, 19 nt, Homo sapiens
  misc_RNA (1)...(19): siRNA sense strand
augaguaccucgaguugaa

SEQ ID NO: 2056642 - RNA, 19 nt, Homo sapiens
  misc_RNA (1)...(19): siRNA sense strand
aaccuacgaugaugguauu

SEQ ID NO: 2056643 - RNA, 19 nt, Homo sapiens
  misc_RNA (1)...(19): siRNA sense strand
ggccagaguaugcgguuaa

SEQ ID NO: 2056644 - RNA, 19 nt, Homo sapiens
  misc_RNA (1)...(19): siRNA sense strand
ggacaaagaugaguggaua

SEQ ID NO: 2056645 - RNA, 19 nt, Homo sapiens
  misc_RNA (1)...(19): siRNA sense strand
gaaaucaugucaacuguga

SEQ ID NO: 2056646 - RNA, 19 nt, Homo sapiens
  misc_RNA (1)...(19): siRNA sense strand
gaaaaggccuuagcaauua

SEQ ID NO: 2056647 - RNA, 19 nt, Homo sapiens
  misc_RNA (1)...(19): siRNA sense strand
gcacuggaaucuauaaaga

SEQ ID NO: 2056648 - RNA, 19 nt, Homo sapiens
  misc_RNA (1)...(19): siRNA sense strand
gcacagauccgagaaguuu

SEQ ID NO: 2056649 - RNA, 19 nt, Homo sapiens
  misc_RNA (1)...(19): siRNA sense strand
ccagagaucuucaaaauuu

SEQ ID NO: 2056650 - RNA, 19 nt, Homo sapiens
  misc_RNA (1)...(19): siRNA sense strand
gacaauggcagaaacuuua

SEQ ID NO: 2056651 - RNA, 19 nt, Homo sapiens
  misc_RNA (1)...(19): siRNA sense strand
gaaaagaagugccggguuu

SEQ ID NO: 2056652 - RNA, 19 nt, Homo sapiens
  misc_RNA (1)...(19): siRNA sense strand
ggacagcaccuuaauggaa

SEQ ID NO: 2056653 - RNA, 19 nt, Homo sapiens
  misc_RNA (1)...(19): siRNA sense strand
gagaaaacauugcugauaa

SEQ ID NO: 2056654 - RNA, 19 nt, Homo sapiens
  misc_RNA (1)...(19): siRNA sense strand
ugaaugcacuggaaucuau

SEQ ID NO: 2056655 - RNA, 19 nt, Homo sapiens
  misc_RNA (1)...(19): siRNA sense strand
gaaauucagccaaaguaaa

SEQ ID NO: 2056656 - RNA, 19 nt, Homo sapiens
  misc_RNA (1)...(19): siRNA sense strand
gagaaaagguggacaaaga

SEQ ID NO: 2056657 - RNA, 19 nt, Homo sapiens
  misc_RNA (1)...(19): siRNA sense strand
aggaagaugugguuguuua

SEQ ID NO: 2056658 - RNA, 19 nt, Homo sapiens
  misc_RNA (1)...(19): siRNA sense strand
ccaggcaauuucaggauua

SEQ ID NO: 2056659 - RNA, 19 nt, Homo sapiens
  misc_RNA (1)...(19): siRNA sense strand
gaaagucagauggauauaa

SEQ ID NO: 2056660 - RNA, 19 nt, Homo sapiens
  misc_RNA (1)...(19): siRNA sense strand
guaaacaacugaagaagcu

SEQ ID NO: 2056661 - RNA, 19 nt, Homo sapiens
  misc_RNA (1)...(19): siRNA sense strand
gcacugaugauaagaauuc

SEQ ID NO: 2056662 - RNA, 19 nt, Homo sapiens
  misc_RNA (1)...(19): siRNA sense strand
gaaccuauaggccagagua

SEQ ID NO: 2056663 - RNA, 19 nt, Homo sapiens
  misc_RNA (1)...(19): siRNA sense strand
uggagaaccucuacucaaa

SEQ ID NO: 2056664 - RNA, 19 nt, Homo sapiens
  misc_RNA (1)...(19): siRNA sense strand
gagccuaucagaauuauau

SEQ ID NO: 2056665 - RNA, 19 nt, Homo sapiens
  misc_RNA (1)...(19): siRNA sense strand
uugcacaacugaauucuaa

SEQ ID NO: 2056666 - RNA, 19 nt, Homo sapiens
  misc_RNA (1)...(19): siRNA sense strand
gaaagauguccuucaagaa

SEQ ID NO: 2056667 - RNA, 19 nt, Homo sapiens
  misc_RNA (1)...(19): siRNA sense strand
gaacuacaaagaagaugaa

SEQ ID NO: 2056668 - RNA, 19 nt, Homo sapiens
  misc_RNA (1)...(19): siRNA sense strand
ggaggcugguugaaacgua

SEQ ID NO: 2056669 - RNA, 19 nt, Homo sapiens
  misc_RNA (1)...(19): siRNA sense strand
ugaccuaaaucacaaacaa

SEQ ID NO: 2056670 - RNA, 19 nt, Homo sapiens
  misc_RNA (1)...(19): siRNA sense strand
ggacuugaccuaaaucaca

SEQ ID NO: 2056671 - RNA, 19 nt, Homo sapiens
  misc_RNA (1)...(19): siRNA sense strand
gauccaaugcuucuguaua

SEQ ID NO: 2056672 - RNA, 19 nt, Homo sapiens
  misc_RNA (1)...(19): siRNA sense strand
gaaaugauccaaugcuucu

SEQ ID NO: 2056673 - RNA, 19 nt, Homo sapiens
  misc_RNA (1)...(19): siRNA sense strand
aaagaugaguggauaagug

SEQ ID NO: 2056674 - RNA, 19 nt, Homo sapiens
  misc_RNA (1)...(19): siRNA sense strand
caaaguaaacaacugaaga

SEQ ID NO: 2056675 - RNA, 19 nt, Homo sapiens
  misc_RNA (1)...(19): siRNA sense strand
gacagcaccuuaauggaau

SEQ ID NO: 2056676 - RNA, 19 nt, Homo sapiens
  misc_RNA (1)...(19): siRNA sense strand
cgacuuggccucccuucua

SEQ ID NO: 2056677 - RNA, 19 nt, Homo sapiens
  misc_RNA (1)...(19): siRNA sense strand
guaucaguauggaaacuuu

SEQ ID NO: 2056678 - RNA, 19 nt, Homo sapiens
  misc_RNA (1)...(19): siRNA sense strand
uagaugaccucacuuggau

SEQ ID NO: 2056679 - RNA, 19 nt, Homo sapiens
  misc_RNA (1)...(19): siRNA sense strand
auacagagccuaucagaau

SEQ ID NO: 2056680 - RNA, 19 nt, Homo sapiens
  misc_RNA (1)...(19): siRNA sense strand
cugaugacauuguuucaaa

SEQ ID NO: 2056681 - RNA, 19 nt, Homo sapiens
  misc_RNA (1)...(19): siRNA sense strand
aaagagagcugaagaaaag

SEQ ID NO: 2056682 - RNA, 19 nt, Homo sapiens
  misc_RNA (1)...(19): siRNA sense strand
gcacaacugaauucuaaau

SEQ ID NO: 2056683 - RNA, 19 nt, Homo sapiens
  misc_RNA (1)...(19): siRNA sense strand
cauaauggaucuuguaagc

SEQ ID NO: 2056684 - RNA, 19 nt, Homo sapiens
  misc_RNA (1)...(19): siRNA sense strand
gaggcugguugaaacguaa

SEQ ID NO: 2056685 - RNA, 19 nt, Homo sapiens
  misc_RNA (1)...(19): siRNA sense strand
ggucauaggacacgaaauc

SEQ ID NO: 2056686 - RNA, 19 nt, Homo sapiens
  misc_RNA (1)...(19): siRNA sense strand
aaagauugcccaucgauga

SEQ ID NO: 2056687 - RNA, 19 nt, Homo sapiens
  misc_RNA (1)...(19): siRNA sense strand
gagaaccucuacucaaacu

SEQ ID NO: 2056688 - RNA, 19 nt, Homo sapiens
  misc_RNA (1)...(19): siRNA sense strand
guacagcauauguggauuu

SEQ ID NO: 2056689 - RNA, 19 nt, Homo sapiens
  misc_RNA (1)...(19): siRNA sense strand
gaugauaagaauucuguga

SEQ ID NO: 2056690 - RNA, 19 nt, Homo sapiens
  misc_RNA (1)...(19): siRNA sense strand
gaaccucuacucaaacugu

SEQ ID NO: 2056691 - RNA, 19 nt, Homo sapiens
  misc_RNA (1)...(19): siRNA sense strand
auccaaugcuucuguauaa

SEQ ID NO: 2056692 - RNA, 19 nt, Homo sapiens
  misc_RNA (1)...(19): siRNA sense strand
ccgcaagaauucauacaug

SEQ ID NO: 2056693 - RNA, 19 nt, Homo sapiens
  misc_RNA (1)...(19): siRNA sense strand
cuacaaagaagaugaauac

SEQ ID NO: 2056694 - RNA, 19 nt, Homo sapiens
  misc_RNA (1)...(19): siRNA sense strand
caugucaacugugaauauu

SEQ ID NO: 2056695 - RNA, 19 nt, Homo sapiens
  misc_RNA (1)...(19): siRNA sense strand
ugaggaagaugugguuguu

SEQ ID NO: 2056696 - RNA, 19 nt, Homo sapiens
  misc_RNA (1)...(19): siRNA sense strand
uaauggaggucuuggucaa

SEQ ID NO: 2056697 - RNA, 19 nt, Homo sapiens
  misc_RNA (1)...(19): siRNA sense strand
ggccuuagcaauuaaagaa

SEQ ID NO: 2056698 - RNA, 19 nt, Homo sapiens
  misc_RNA (1)...(19): siRNA sense strand
ggauggaugccgagacaaa

SEQ ID NO: 2056699 - RNA, 19 nt, Homo sapiens
  misc_RNA (1)...(19): siRNA sense strand
ucagaaagucagauggaua

SEQ ID NO: 2056700 - RNA, 19 nt, Homo sapiens
  misc_RNA (1)...(19): siRNA sense strand
uggagcagcuguagucaau

SEQ ID NO: 2056701 - RNA, 19 nt, Homo sapiens
  misc_RNA (1)...(19): siRNA sense strand
uacaaggaguccagaaaug

SEQ ID NO: 2056702 - RNA, 19 nt, Homo sapiens
  misc_RNA (1)...(19): siRNA sense strand
cagaaagucagauggauau

SEQ ID NO: 2056703 - RNA, 19 nt, Homo sapiens
  misc_RNA (1)...(19): siRNA sense strand
gcacaguccaggcaauuuc

SEQ ID NO: 2056704 - RNA, 19 nt, Homo sapiens
  misc_RNA (1)...(19): siRNA sense strand
uggcagaaacuuuaacaaa

SEQ ID NO: 2056705 - RNA, 19 nt, Homo sapiens
  misc_RNA (1)...(19): siRNA sense strand
gagcagcuguagucaaugc

SEQ ID NO: 2056706 - RNA, 19 nt, Homo sapiens
  misc_RNA (1)...(19): siRNA sense strand
ggucuuguauaaaugaauc

SEQ ID NO: 2056707 - RNA, 19 nt, Homo sapiens
  misc_RNA (1)...(19): siRNA sense strand
ugaagaagcuccgagaaaa

SEQ ID NO: 2056708 - RNA, 19 nt, Homo sapiens
  misc_RNA (1)...(19): siRNA sense strand
gagacguugugcaaacuau

SEQ ID NO: 2056709 - RNA, 19 nt, Homo sapiens
  misc_RNA (1)...(19): siRNA sense strand
cagcauauguggauuuuau

SEQ ID NO: 2056710 - RNA, 19 nt, Homo sapiens
  misc_RNA (1)...(19): siRNA sense strand
caaugcuucuguauaacaa

SEQ ID NO: 2056711 - RNA, 19 nt, Homo sapiens
  misc_RNA (1)...(19): siRNA sense strand
gacuugaccuaaaucacaa

SEQ ID NO: 2056712 - RNA, 19 nt, Homo sapiens
  misc_RNA (1)...(19): siRNA sense strand
gcauacagagccuaucaga

SEQ ID NO: 2056713 - RNA, 19 nt, Homo sapiens
  misc_RNA (1)...(19): siRNA sense strand
ugacaauggcagaaacuuu

SEQ ID NO: 2056714 - RNA, 19 nt, Homo sapiens
  misc_RNA (1)...(19): siRNA sense strand
gaauacuucgagaacauaa

SEQ ID NO: 2056715 - RNA, 19 nt, Homo sapiens
  misc_RNA (1)...(19): siRNA sense strand
gaugaauacuucgagaaca

SEQ ID NO: 2056716 - RNA, 19 nt, Homo sapiens
  misc_RNA (1)...(19): siRNA sense strand
ugucaacugugaauauuag

SEQ ID NO: 2056717 - RNA, 19 nt, Homo sapiens
  misc_RNA (1)...(19): siRNA sense strand
gcagaaagcaaaagcauug

SEQ ID NO: 2056718 - RNA, 19 nt, Homo sapiens
  misc_RNA (1)...(19): siRNA sense strand
ggagaaaacauugcugaua

SEQ ID NO: 2056719 - RNA, 19 nt, Homo sapiens
  misc_RNA (1)...(19): siRNA sense strand
aaagucagauggauauaac

SEQ ID NO: 2056720 - RNA, 19 nt, Homo sapiens
  misc_RNA (1)...(19): siRNA sense strand
caaacugaauaaugaguac

SEQ ID NO: 2056721 - RNA, 19 nt, Homo sapiens
  misc_RNA (1)...(19): siRNA sense strand
cggcuauccugaugacauu

SEQ ID NO: 2056722 - RNA, 19 nt, Homo sapiens
  misc_RNA (1)...(19): siRNA sense strand
gaagaugugguuguuuaug

SEQ ID NO: 2056723 - RNA, 19 nt, Homo sapiens
  misc_RNA (1)...(19): siRNA sense strand
gauaaguggagcagcugua

SEQ ID NO: 2056724 - RNA, 19 nt, Homo sapiens
  misc_RNA (1)...(19): siRNA sense strand
acagagccuaucagaauua

SEQ ID NO: 2056725 - RNA, 19 nt, Homo sapiens
  misc_RNA (1)...(19): siRNA sense strand
uacagagccuaucagaauu

SEQ ID NO: 2056726 - RNA, 19 nt, Homo sapiens
  misc_RNA (1)...(19): siRNA sense strand
gaaugcacuggaaucuaua

SEQ ID NO: 2056727 - RNA, 19 nt, Homo sapiens
  misc_RNA (1)...(19): siRNA sense strand
uuaauguccuggagauuca

SEQ ID NO: 2056728 - RNA, 19 nt, Homo sapiens
  misc_RNA (1)...(19): siRNA sense strand
ggcuaaaccugaagaucga

SEQ ID NO: 2056729 - RNA, 19 nt, Homo sapiens
  misc_RNA (1)...(19): siRNA sense strand
cagauugauucgucaggaa

SEQ ID NO: 2056730 - RNA, 19 nt, Homo sapiens
  misc_RNA (1)...(19): siRNA sense strand
uauaguagcagugcagaaa

SEQ ID NO: 2056731 - RNA, 19 nt, Homo sapiens
  misc_RNA (1)...(19): siRNA sense strand
ggauuugauugcacagauc

SEQ ID NO: 2056732 - RNA, 19 nt, Homo sapiens
  misc_RNA (1)...(19): siRNA sense strand
ggaagaugugguuguuuau

SEQ ID NO: 2056733 - RNA, 19 nt, Homo sapiens
  misc_RNA (1)...(19): siRNA sense strand
cagcuugcuuuggaaauga

SEQ ID NO: 2056734 - RNA, 19 nt, Homo sapiens
  misc_RNA (1)...(19): siRNA sense strand
caaacuguuaccagacaua

SEQ ID NO: 2056735 - RNA, 19 nt, Homo sapiens
  misc_RNA (1)...(19): siRNA sense strand
acccaaaacugaagauaua

SEQ ID NO: 2056736 - RNA, 19 nt, Homo sapiens
  misc_RNA (1)...(19): siRNA sense strand
ggugugguguggaaccuau

SEQ ID NO: 2056737 - RNA, 19 nt, Homo sapiens
  misc_RNA (1)...(19): siRNA sense strand
acucaacagucugcaagua

SEQ ID NO: 2056738 - RNA, 19 nt, Homo sapiens
  misc_RNA (1)...(19): siRNA sense strand
uguuuaugcuccagaauau

SEQ ID NO: 2056739 - RNA, 19 nt, Homo sapiens
  misc_RNA (1)...(19): siRNA sense strand
ccagcuugcuuuggaaaug

SEQ ID NO: 2056740 - RNA, 19 nt, Homo sapiens
  misc_RNA (1)...(19): siRNA sense strand
gggcaucggcauggucaua

SEQ ID NO: 2056741 - RNA, 19 nt, Homo sapiens
  misc_RNA (1)...(19): siRNA sense strand
augaguaccucgaguugaa

SEQ ID NO: 2056742 - RNA, 19 nt, Homo sapiens
  misc_RNA (1)...(19): siRNA sense strand
aaccuacgaugaugguauu

SEQ ID NO: 2056743 - RNA, 19 nt, Homo sapiens
  misc_RNA (1)...(19): siRNA sense strand
ggccagaguaugcgguuaa

SEQ ID NO: 2056744 - RNA, 19 nt, Homo sapiens
  misc_RNA (1)...(19): siRNA sense strand
ggacaaagaugaguggaua

SEQ ID NO: 2056745 - RNA, 19 nt, Homo sapiens
  misc_RNA (1)...(19): siRNA sense strand
gaaaucaugucaacuguga

SEQ ID NO: 2056746 - RNA, 19 nt, Homo sapiens
  misc_RNA (1)...(19): siRNA sense strand
gaaaaggccuuagcaauua

SEQ ID NO: 2056747 - RNA, 19 nt, Homo sapiens
  misc_RNA (1)...(19): siRNA sense strand
gcacuggaaucuauaaaga

SEQ ID NO: 2056748 - RNA, 19 nt, Homo sapiens
  misc_RNA (1)...(19): siRNA sense strand
gcacagauccgagaaguuu

SEQ ID NO: 2056749 - RNA, 19 nt, Homo sapiens
  misc_RNA (1)...(19): siRNA sense strand
ccagagaucuucaaaauuu

SEQ ID NO: 2056750 - RNA, 19 nt, Homo sapiens
  misc_RNA (1)...(19): siRNA sense strand
gacaauggcagaaacuuua

SEQ ID NO: 2056751 - RNA, 19 nt, Homo sapiens
  misc_RNA (1)...(19): siRNA sense strand
gaaaagaagugccggguuu

SEQ ID NO: 2056752 - RNA, 19 nt, Homo sapiens
  misc_RNA (1)...(19): siRNA sense strand
ggacagcaccuuaauggaa

SEQ ID NO: 2056753 - RNA, 19 nt, Homo sapiens
  misc_RNA (1)...(19): siRNA sense strand
gagaaaacauugcugauaa

SEQ ID NO: 2056754 - RNA, 19 nt, Homo sapiens
  misc_RNA (1)...(19): siRNA sense strand
ugaaugcacuggaaucuau

SEQ ID NO: 2056755 - RNA, 19 nt, Homo sapiens
  misc_RNA (1)...(19): siRNA sense strand
gaaauucagccaaaguaaa

SEQ ID NO: 2056756 - RNA, 19 nt, Homo sapiens
  misc_RNA (1)...(19): siRNA sense strand
gagaaaagguggacaaaga

SEQ ID NO: 2056757 - RNA, 19 nt, Homo sapiens
  misc_RNA (1)...(19): siRNA sense strand
aggaagaugugguuguuua

SEQ ID NO: 2056758 - RNA, 19 nt, Homo sapiens
  misc_RNA (1)...(19): siRNA sense strand
ccaggcaauuucaggauua

SEQ ID NO: 2056759 - RNA, 19 nt, Homo sapiens
  misc_RNA (1)...(19): siRNA sense strand
gaaagucagauggauauaa

SEQ ID NO: 2056760 - RNA, 19 nt, Homo sapiens
  misc_RNA (1)...(19): siRNA sense strand
guaaacaacugaagaagcu

SEQ ID NO: 2056761 - RNA, 19 nt, Homo sapiens
  misc_RNA (1)...(19): siRNA sense strand
gcacugaugauaagaauuc

SEQ ID NO: 2056762 - RNA, 19 nt, Homo sapiens
  misc_RNA (1)...(19): siRNA sense strand
gaaccuauaggccagagua

SEQ ID NO: 2056763 - RNA, 19 nt, Homo sapiens
  misc_RNA (1)...(19): siRNA sense strand
uggagaaccucuacucaaa

SEQ ID NO: 2056764 - RNA, 19 nt, Homo sapiens
  misc_RNA (1)...(19): siRNA sense strand
gagccuaucagaauuauau

SEQ ID NO: 2056765 - RNA, 19 nt, Homo sapiens
  misc_RNA (1)...(19): siRNA sense strand
uugcacaacugaauucuaa

SEQ ID NO: 2056766 - RNA, 19 nt, Homo sapiens
  misc_RNA (1)...(19): siRNA sense strand
gaaagauguccuucaagaa

SEQ ID NO: 2056767 - RNA, 19 nt, Homo sapiens
  misc_RNA (1)...(19): siRNA sense strand
gaacuacaaagaagaugaa

SEQ ID NO: 2056768 - RNA, 19 nt, Homo sapiens
  misc_RNA (1)...(19): siRNA sense strand
ggaggcugguugaaacgua

SEQ ID NO: 2056769 - RNA, 19 nt, Homo sapiens
  misc_RNA (1)...(19): siRNA sense strand
ugaccuaaaucacaaacaa

SEQ ID NO: 2056770 - RNA, 19 nt, Homo sapiens
  misc_RNA (1)...(19): siRNA sense strand
ggacuugaccuaaaucaca

SEQ ID NO: 2056771 - RNA, 19 nt, Homo sapiens
  misc_RNA (1)...(19): siRNA sense strand
gauccaaugcuucuguaua

SEQ ID NO: 2056772 - RNA, 19 nt, Homo sapiens
  misc_RNA (1)...(19): siRNA sense strand
gaaaugauccaaugcuucu

SEQ ID NO: 2056773 - RNA, 19 nt, Homo sapiens
  misc_RNA (1)...(19): siRNA sense strand
aaagaugaguggauaagug

SEQ ID NO: 2056774 - RNA, 19 nt, Homo sapiens
  misc_RNA (1)...(19): siRNA sense strand
caaaguaaacaacugaaga

SEQ ID NO: 2056775 - RNA, 19 nt, Homo sapiens
  misc_RNA (1)...(19): siRNA sense strand
gacagcaccuuaauggaau

SEQ ID NO: 2056776 - RNA, 19 nt, Homo sapiens
  misc_RNA (1)...(19): siRNA sense strand
cgacuuggccucccuucua

SEQ ID NO: 2056777 - RNA, 19 nt, Homo sapiens
  misc_RNA (1)...(19): siRNA sense strand
guaucaguauggaaacuuu

SEQ ID NO: 2056778 - RNA, 19 nt, Homo sapiens
  misc_RNA (1)...(19): siRNA sense strand
uagaugaccucacuuggau

SEQ ID NO: 2056779 - RNA, 19 nt, Homo sapiens
  misc_RNA (1)...(19): siRNA sense strand
auacagagccuaucagaau

SEQ ID NO: 2056780 - RNA, 19 nt, Homo sapiens
  misc_RNA (1)...(19): siRNA sense strand
cugaugacauuguuucaaa

SEQ ID NO: 2056781 - RNA, 19 nt, Homo sapiens
  misc_RNA (1)...(19): siRNA sense strand
aaagagagcugaagaaaag

SEQ ID NO: 2056782 - RNA, 19 nt, Homo sapiens
  misc_RNA (1)...(19): siRNA sense strand
gcacaacugaauucuaaau

SEQ ID NO: 2056783 - RNA, 19 nt, Homo sapiens
  misc_RNA (1)...(19): siRNA sense strand
cauaauggaucuuguaagc

SEQ ID NO: 2056784 - RNA, 19 nt, Homo sapiens
  misc_RNA (1)...(19): siRNA sense strand
gaggcugguugaaacguaa

SEQ ID NO: 2056785 - RNA, 19 nt, Homo sapiens
  misc_RNA (1)...(19): siRNA sense strand
ggucauaggacacgaaauc

SEQ ID NO: 2056786 - RNA, 19 nt, Homo sapiens
  misc_RNA (1)...(19): siRNA sense strand
aaagauugcccaucgauga

SEQ ID NO: 2056787 - RNA, 19 nt, Homo sapiens
  misc_RNA (1)...(19): siRNA sense strand
gagaaccucuacucaaacu

SEQ ID NO: 2056788 - RNA, 19 nt, Homo sapiens
  misc_RNA (1)...(19): siRNA sense strand
guacagcauauguggauuu

SEQ ID NO: 2056789 - RNA, 19 nt, Homo sapiens
  misc_RNA (1)...(19): siRNA sense strand
gaugauaagaauucuguga

SEQ ID NO: 2056790 - RNA, 19 nt, Homo sapiens
  misc_RNA (1)...(19): siRNA sense strand
gaaccucuacucaaacugu

SEQ ID NO: 2056791 - RNA, 19 nt, Homo sapiens
  misc_RNA (1)...(19): siRNA sense strand
auccaaugcuucuguauaa

SEQ ID NO: 2056792 - RNA, 19 nt, Homo sapiens
  misc_RNA (1)...(19): siRNA sense strand
ccgcaagaauucauacaug

SEQ ID NO: 2056793 - RNA, 19 nt, Homo sapiens
  misc_RNA (1)...(19): siRNA sense strand
cuacaaagaagaugaauac

SEQ ID NO: 2056794 - RNA, 19 nt, Homo sapiens
  misc_RNA (1)...(19): siRNA sense strand
caugucaacugugaauauu

SEQ ID NO: 2056795 - RNA, 19 nt, Homo sapiens
  misc_RNA (1)...(19): siRNA sense strand
ugaggaagaugugguuguu

SEQ ID NO: 2056796 - RNA, 19 nt, Homo sapiens
  misc_RNA (1)...(19): siRNA sense strand
uaauggaggucuuggucaa

SEQ ID NO: 2056797 - RNA, 19 nt, Homo sapiens
  misc_RNA (1)...(19): siRNA sense strand
ggccuuagcaauuaaagaa

SEQ ID NO: 2056798 - RNA, 19 nt, Homo sapiens
  misc_RNA (1)...(19): siRNA sense strand
ggauggaugccgagacaaa

SEQ ID NO: 2056799 - RNA, 19 nt, Homo sapiens
  misc_RNA (1)...(19): siRNA sense strand
ucagaaagucagauggaua

SEQ ID NO: 2056800 - RNA, 19 nt, Homo sapiens
  misc_RNA (1)...(19): siRNA sense strand
uggagcagcuguagucaau

SEQ ID NO: 2056801 - RNA, 19 nt, Homo sapiens
  misc_RNA (1)...(19): siRNA sense strand
uacaaggaguccagaaaug

SEQ ID NO: 2056802 - RNA, 19 nt, Homo sapiens
  misc_RNA (1)...(19): siRNA sense strand
cagaaagucagauggauau

SEQ ID NO: 2056803 - RNA, 19 nt, Homo sapiens
  misc_RNA (1)...(19): siRNA sense strand
gcacaguccaggcaauuuc

SEQ ID NO: 2056804 - RNA, 19 nt, Homo sapiens
  misc_RNA (1)...(19): siRNA sense strand
uggcagaaacuuuaacaaa

SEQ ID NO: 2056805 - RNA, 19 nt, Homo sapiens
  misc_RNA (1)...(19): siRNA sense strand
gagcagcuguagucaaugc

SEQ ID NO: 2056806 - RNA, 19 nt, Homo sapiens
  misc_RNA (1)...(19): siRNA sense strand
ggucuuguauaaaugaauc

SEQ ID NO: 2056807 - RNA, 19 nt, Homo sapiens
  misc_RNA (1)...(19): siRNA sense strand
ugaagaagcuccgagaaaa

SEQ ID NO: 2056808 - RNA, 19 nt, Homo sapiens
  misc_RNA (1)...(19): siRNA sense strand
gagacguugugcaaacuau

SEQ ID NO: 2056809 - RNA, 19 nt, Homo sapiens
  misc_RNA (1)...(19): siRNA sense strand
cagcauauguggauuuuau

SEQ ID NO: 2056810 - RNA, 19 nt, Homo sapiens
  misc_RNA (1)...(19): siRNA sense strand
caaugcuucuguauaacaa

SEQ ID NO: 2056811 - RNA, 19 nt, Homo sapiens
  misc_RNA (1)...(19): siRNA sense strand
gacuugaccuaaaucacaa

SEQ ID NO: 2056812 - RNA, 19 nt, Homo sapiens
  misc_RNA (1)...(19): siRNA sense strand
gcauacagagccuaucaga

SEQ ID NO: 2056813 - RNA, 19 nt, Homo sapiens
  misc_RNA (1)...(19): siRNA sense strand
ugacaauggcagaaacuuu

SEQ ID NO: 2056814 - RNA, 19 nt, Homo sapiens
  misc_RNA (1)...(19): siRNA sense strand
gaauacuucgagaacauaa

SEQ ID NO: 2056815 - RNA, 19 nt, Homo sapiens
  misc_RNA (1)...(19): siRNA sense strand
gaugaauacuucgagaaca

SEQ ID NO: 2056816 - RNA, 19 nt, Homo sapiens
  misc_RNA (1)...(19): siRNA sense strand
ugucaacugugaauauuag

SEQ ID NO: 2056817 - RNA, 19 nt, Homo sapiens
  misc_RNA (1)...(19): siRNA sense strand
gcagaaagcaaaagcauug

SEQ ID NO: 2056818 - RNA, 19 nt, Homo sapiens
  misc_RNA (1)...(19): siRNA sense strand
ggagaaaacauugcugaua

SEQ ID NO: 2056819 - RNA, 19 nt, Homo sapiens
  misc_RNA (1)...(19): siRNA sense strand
aaagucagauggauauaac

SEQ ID NO: 2056820 - RNA, 19 nt, Homo sapiens
  misc_RNA (1)...(19): siRNA sense strand
caaacugaauaaugaguac

SEQ ID NO: 2056821 - RNA, 19 nt, Homo sapiens
  misc_RNA (1)...(19): siRNA sense strand
cggcuauccugaugacauu

SEQ ID NO: 2056822 - RNA, 19 nt, Homo sapiens
  misc_RNA (1)...(19): siRNA sense strand
gaagaugugguuguuuaug

SEQ ID NO: 2056823 - RNA, 19 nt, Homo sapiens
  misc_RNA (1)...(19): siRNA sense strand
gauaaguggagcagcugua

SEQ ID NO: 2056824 - RNA, 19 nt, Homo sapiens
  misc_RNA (1)...(19): siRNA sense strand
acagagccuaucagaauua

SEQ ID NO: 2056825 - RNA, 19 nt, Homo sapiens
  misc_RNA (1)...(19): siRNA sense strand
uacagagccuaucagaauu

SEQ ID NO: 2056826 - RNA, 19 nt, Homo sapiens
  misc_RNA (1)...(19): siRNA sense strand
gaaugcacuggaaucuaua

SEQ ID NO: 2056827 - RNA, 19 nt, Homo sapiens
  misc_RNA (1)...(19): siRNA sense strand
uuaauguccuggagauuca

SEQ ID NO: 2056828 - RNA, 19 nt, Homo sapiens
  misc_RNA (1)...(19): siRNA sense strand
ggcuaaaccugaagaucga

SEQ ID NO: 2056829 - RNA, 19 nt, Homo sapiens
  misc_RNA (1)...(19): siRNA sense strand
cagauugauucgucaggaa

SEQ ID NO: 2056830 - RNA, 19 nt, Homo sapiens
  misc_RNA (1)...(19): siRNA sense strand
uauaguagcagugcagaaa

SEQ ID NO: 2056831 - RNA, 19 nt, Homo sapiens
  misc_RNA (1)...(19): siRNA sense strand
ggauuugauugcacagauc

SEQ ID NO: 2056832 - RNA, 19 nt, Homo sapiens
  misc_RNA (1)...(19): siRNA sense strand
ggaagaugugguuguuuau

SEQ ID NO: 2056833 - RNA, 19 nt, Homo sapiens
  misc_RNA (1)...(19): siRNA sense strand
cagcuugcuuuggaaauga

SEQ ID NO: 2056834 - RNA, 19 nt, Homo sapiens
  misc_RNA (1)...(19): siRNA sense strand
caaacuguuaccagacaua

SEQ ID NO: 2056835 - RNA, 19 nt, Homo sapiens
  misc_RNA (1)...(19): siRNA sense strand
acccaaaacugaagauaua

SEQ ID NO: 2056836 - RNA, 19 nt, Homo sapiens
  misc_RNA (1)...(19): siRNA sense strand
ggugugguguggaaccuau

SEQ ID NO: 2056837 - RNA, 19 nt, Homo sapiens
  misc_RNA (1)...(19): siRNA sense strand
acucaacagucugcaagua

SEQ ID NO: 2056838 - RNA, 19 nt, Homo sapiens
  misc_RNA (1)...(19): siRNA sense strand
uguuuaugcuccagaauau

SEQ ID NO: 2056839 - RNA, 19 nt, Homo sapiens
  misc_RNA (1)...(19): siRNA sense strand
ccagcuugcuuuggaaaug

SEQ ID NO: 2056840 - RNA, 19 nt, Homo sapiens
  misc_RNA (1)...(19): siRNA sense strand
gggcaucggcauggucaua

SEQ ID NO: 2056841 - RNA, 19 nt, Homo sapiens
  misc_RNA (1)...(19): siRNA sense strand
augaguaccucgaguugaa

SEQ ID NO: 2056842 - RNA, 19 nt, Homo sapiens
  misc_RNA (1)...(19): siRNA sense strand
aaccuacgaugaugguauu

SEQ ID NO: 2056843 - RNA, 19 nt, Homo sapiens
  misc_RNA (1)...(19): siRNA sense strand
ggccagaguaugcgguuaa

SEQ ID NO: 2056844 - RNA, 19 nt, Homo sapiens
  misc_RNA (1)...(19): siRNA sense strand
ggacaaagaugaguggaua

SEQ ID NO: 2056845 - RNA, 19 nt, Homo sapiens
  misc_RNA (1)...(19): siRNA sense strand
gaaaucaugucaacuguga

SEQ ID NO: 2056846 - RNA, 19 nt, Homo sapiens
  misc_RNA (1)...(19): siRNA sense strand
gaaaaggccuuagcaauua

SEQ ID NO: 2056847 - RNA, 19 nt, Homo sapiens
  misc_RNA (1)...(19): siRNA sense strand
gcacuggaaucuauaaaga

SEQ ID NO: 2056848 - RNA, 19 nt, Homo sapiens
  misc_RNA (1)...(19): siRNA sense strand
gcacagauccgagaaguuu

SEQ ID NO: 2056849 - RNA, 19 nt, Homo sapiens
  misc_RNA (1)...(19): siRNA sense strand
ccagagaucuucaaaauuu

SEQ ID NO: 2056850 - RNA, 19 nt, Homo sapiens
  misc_RNA (1)...(19): siRNA sense strand
gacaauggcagaaacuuua

SEQ ID NO: 2056851 - RNA, 19 nt, Homo sapiens
  misc_RNA (1)...(19): siRNA sense strand
gaaaagaagugccggguuu

SEQ ID NO: 2056852 - RNA, 19 nt, Homo sapiens
  misc_RNA (1)...(19): siRNA sense strand
ggacagcaccuuaauggaa

SEQ ID NO: 2056853 - RNA, 19 nt, Homo sapiens
  misc_RNA (1)...(19): siRNA sense strand
gagaaaacauugcugauaa

SEQ ID NO: 2056854 - RNA, 19 nt, Homo sapiens
  misc_RNA (1)...(19): siRNA sense strand
ugaaugcacuggaaucuau

SEQ ID NO: 2056855 - RNA, 19 nt, Homo sapiens
  misc_RNA (1)...(19): siRNA sense strand
gaaauucagccaaaguaaa

SEQ ID NO: 2056856 - RNA, 19 nt, Homo sapiens
  misc_RNA (1)...(19): siRNA sense strand
gagaaaagguggacaaaga

SEQ ID NO: 2056857 - RNA, 19 nt, Homo sapiens
  misc_RNA (1)...(19): siRNA sense strand
aggaagaugugguuguuua

SEQ ID NO: 2056858 - RNA, 19 nt, Homo sapiens
  misc_RNA (1)...(19): siRNA sense strand
ccaggcaauuucaggauua

SEQ ID NO: 2056859 - RNA, 19 nt, Homo sapiens
  misc_RNA (1)...(19): siRNA sense strand
gaaagucagauggauauaa

SEQ ID NO: 2056860 - RNA, 19 nt, Homo sapiens
  misc_RNA (1)...(19): siRNA sense strand
guaaacaacugaagaagcu

SEQ ID NO: 2056861 - RNA, 19 nt, Homo sapiens
  misc_RNA (1)...(19): siRNA sense strand
gcacugaugauaagaauuc

SEQ ID NO: 2056862 - RNA, 19 nt, Homo sapiens
  misc_RNA (1)...(19): siRNA sense strand
gaaccuauaggccagagua

SEQ ID NO: 2056863 - RNA, 19 nt, Homo sapiens
  misc_RNA (1)...(19): siRNA sense strand
uggagaaccucuacucaaa

SEQ ID NO: 2056864 - RNA, 19 nt, Homo sapiens
  misc_RNA (1)...(19): siRNA sense strand
gagccuaucagaauuauau

SEQ ID NO: 2056865 - RNA, 19 nt, Homo sapiens
  misc_RNA (1)...(19): siRNA sense strand
uugcacaacugaauucuaa

SEQ ID NO: 2056866 - RNA, 19 nt, Homo sapiens
  misc_RNA (1)...(19): siRNA sense strand
gaaagauguccuucaagaa

SEQ ID NO: 2056867 - RNA, 19 nt, Homo sapiens
  misc_RNA (1)...(19): siRNA sense strand
gaacuacaaagaagaugaa

SEQ ID NO: 2056868 - RNA, 19 nt, Homo sapiens
  misc_RNA (1)...(19): siRNA sense strand
ggaggcugguugaaacgua

SEQ ID NO: 2056869 - RNA, 19 nt, Homo sapiens
  misc_RNA (1)...(19): siRNA sense strand
ugaccuaaaucacaaacaa

SEQ ID NO: 2056870 - RNA, 19 nt, Homo sapiens
  misc_RNA (1)...(19): siRNA sense strand
ggacuugaccuaaaucaca

SEQ ID NO: 2056871 - RNA, 19 nt, Homo sapiens
  misc_RNA (1)...(19): siRNA sense strand
gauccaaugcuucuguaua

SEQ ID NO: 2056872 - RNA, 19 nt, Homo sapiens
  misc_RNA (1)...(19): siRNA sense strand
gaaaugauccaaugcuucu

SEQ ID NO: 2056873 - RNA, 19 nt, Homo sapiens
  misc_RNA (1)...(19): siRNA sense strand
aaagaugaguggauaagug

SEQ ID NO: 2056874 - RNA, 19 nt, Homo sapiens
  misc_RNA (1)...(19): siRNA sense strand
caaaguaaacaacugaaga

SEQ ID NO: 2056875 - RNA, 19 nt, Homo sapiens
  misc_RNA (1)...(19): siRNA sense strand
gacagcaccuuaauggaau

SEQ ID NO: 2056876 - RNA, 19 nt, Homo sapiens
  misc_RNA (1)...(19): siRNA sense strand
cgacuuggccucccuucua

SEQ ID NO: 2056877 - RNA, 19 nt, Homo sapiens
  misc_RNA (1)...(19): siRNA sense strand
guaucaguauggaaacuuu

SEQ ID NO: 2056878 - RNA, 19 nt, Homo sapiens
  misc_RNA (1)...(19): siRNA sense strand
uagaugaccucacuuggau

SEQ ID NO: 2056879 - RNA, 19 nt, Homo sapiens
  misc_RNA (1)...(19): siRNA sense strand
auacagagccuaucagaau

SEQ ID NO: 2056880 - RNA, 19 nt, Homo sapiens
  misc_RNA (1)...(19): siRNA sense strand
cugaugacauuguuucaaa

SEQ ID NO: 2056881 - RNA, 19 nt, Homo sapiens
  misc_RNA (1)...(19): siRNA sense strand
aaagagagcugaagaaaag

SEQ ID NO: 2056882 - RNA, 19 nt, Homo sapiens
  misc_RNA (1)...(19): siRNA sense strand
gcacaacugaauucuaaau

SEQ ID NO: 2056883 - RNA, 19 nt, Homo sapiens
  misc_RNA (1)...(19): siRNA sense strand
cauaauggaucuuguaagc

SEQ ID NO: 2056884 - RNA, 19 nt, Homo sapiens
  misc_RNA (1)...(19): siRNA sense strand
gaggcugguugaaacguaa

SEQ ID NO: 2056885 - RNA, 19 nt, Homo sapiens
  misc_RNA (1)...(19): siRNA sense strand
ggucauaggacacgaaauc

SEQ ID NO: 2056886 - RNA, 19 nt, Homo sapiens
  misc_RNA (1)...(19): siRNA sense strand
aaagauugcccaucgauga

SEQ ID NO: 2056887 - RNA, 19 nt, Homo sapiens
  misc_RNA (1)...(19): siRNA sense strand
gagaaccucuacucaaacu

SEQ ID NO: 2056888 - RNA, 19 nt, Homo sapiens
  misc_RNA (1)...(19): siRNA sense strand
guacagcauauguggauuu

SEQ ID NO: 2056889 - RNA, 19 nt, Homo sapiens
  misc_RNA (1)...(19): siRNA sense strand
gaugauaagaauucuguga

SEQ ID NO: 2056890 - RNA, 19 nt, Homo sapiens
  misc_RNA (1)...(19): siRNA sense strand
gaaccucuacucaaacugu

SEQ ID NO: 2056891 - RNA, 19 nt, Homo sapiens
  misc_RNA (1)...(19): siRNA sense strand
auccaaugcuucuguauaa

SEQ ID NO: 2056892 - RNA, 19 nt, Homo sapiens
  misc_RNA (1)...(19): siRNA sense strand
ccgcaagaauucauacaug

SEQ ID NO: 2056893 - RNA, 19 nt, Homo sapiens
  misc_RNA (1)...(19): siRNA sense strand
cuacaaagaagaugaauac

SEQ ID NO: 2056894 - RNA, 19 nt, Homo sapiens
  misc_RNA (1)...(19): siRNA sense strand
caugucaacugugaauauu

SEQ ID NO: 2056895 - RNA, 19 nt, Homo sapiens
  misc_RNA (1)...(19): siRNA sense strand
ugaggaagaugugguuguu

SEQ ID NO: 2056896 - RNA, 19 nt, Homo sapiens
  misc_RNA (1)...(19): siRNA sense strand
uaauggaggucuuggucaa

SEQ ID NO: 2056897 - RNA, 19 nt, Homo sapiens
  misc_RNA (1)...(19): siRNA sense strand
ggccuuagcaauuaaagaa

SEQ ID NO: 2056898 - RNA, 19 nt, Homo sapiens
  misc_RNA (1)...(19): siRNA sense strand
ggauggaugccgagacaaa

SEQ ID NO: 2056899 - RNA, 19 nt, Homo sapiens
  misc_RNA (1)...(19): siRNA sense strand
ucagaaagucagauggaua

SEQ ID NO: 2056900 - RNA, 19 nt, Homo sapiens
  misc_RNA (1)...(19): siRNA sense strand
uggagcagcuguagucaau

SEQ ID NO: 2056901 - RNA, 19 nt, Homo sapiens
  misc_RNA (1)...(19): siRNA sense strand
uacaaggaguccagaaaug

SEQ ID NO: 2056902 - RNA, 19 nt, Homo sapiens
  misc_RNA (1)...(19): siRNA sense strand
cagaaagucagauggauau

SEQ ID NO: 2056903 - RNA, 19 nt, Homo sapiens
  misc_RNA (1)...(19): siRNA sense strand
gcacaguccaggcaauuuc

SEQ ID NO: 2056904 - RNA, 19 nt, Homo sapiens
  misc_RNA (1)...(19): siRNA sense strand
uggcagaaacuuuaacaaa

SEQ ID NO: 2056905 - RNA, 19 nt, Homo sapiens
  misc_RNA (1)...(19): siRNA sense strand
gagcagcuguagucaaugc

SEQ ID NO: 2056906 - RNA, 19 nt, Homo sapiens
  misc_RNA (1)...(19): siRNA sense strand
ggucuuguauaaaugaauc

SEQ ID NO: 2056907 - RNA, 19 nt, Homo sapiens
  misc_RNA (1)...(19): siRNA sense strand
ugaagaagcuccgagaaaa

SEQ ID NO: 2056908 - RNA, 19 nt, Homo sapiens
  misc_RNA (1)...(19): siRNA sense strand
gagacguugugcaaacuau

SEQ ID NO: 2056909 - RNA, 19 nt, Homo sapiens
  misc_RNA (1)...(19): siRNA sense strand
cagcauauguggauuuuau

SEQ ID NO: 2056910 - RNA, 19 nt, Homo sapiens
  misc_RNA (1)...(19): siRNA sense strand
caaugcuucuguauaacaa

SEQ ID NO: 2056911 - RNA, 19 nt, Homo sapiens
  misc_RNA (1)...(19): siRNA sense strand
gacuugaccuaaaucacaa

SEQ ID NO: 2056912 - RNA, 19 nt, Homo sapiens
  misc_RNA (1)...(19): siRNA sense strand
gcauacagagccuaucaga

SEQ ID NO: 2056913 - RNA, 19 nt, Homo sapiens
  misc_RNA (1)...(19): siRNA sense strand
ugacaauggcagaaacuuu

SEQ ID NO: 2056914 - RNA, 19 nt, Homo sapiens
  misc_RNA (1)...(19): siRNA sense strand
gaauacuucgagaacauaa

SEQ ID NO: 2056915 - RNA, 19 nt, Homo sapiens
  misc_RNA (1)...(19): siRNA sense strand
gaugaauacuucgagaaca

SEQ ID NO: 2056916 - RNA, 19 nt, Homo sapiens
  misc_RNA (1)...(19): siRNA sense strand
ugucaacugugaauauuag

SEQ ID NO: 2056917 - RNA, 19 nt, Homo sapiens
  misc_RNA (1)...(19): siRNA sense strand
gcagaaagcaaaagcauug

SEQ ID NO: 2056918 - RNA, 19 nt, Homo sapiens
  misc_RNA (1)...(19): siRNA sense strand
ggagaaaacauugcugaua

SEQ ID NO: 2056919 - RNA, 19 nt, Homo sapiens
  misc_RNA (1)...(19): siRNA sense strand
aaagucagauggauauaac

SEQ ID NO: 2056920 - RNA, 19 nt, Homo sapiens
  misc_RNA (1)...(19): siRNA sense strand
caaacugaauaaugaguac

SEQ ID NO: 2056921 - RNA, 19 nt, Homo sapiens
  misc_RNA (1)...(19): siRNA sense strand
cggcuauccugaugacauu

SEQ ID NO: 2056922 - RNA, 19 nt, Homo sapiens
  misc_RNA (1)...(19): siRNA sense strand
gaagaugugguuguuuaug

SEQ ID NO: 2056923 - RNA, 19 nt, Homo sapiens
  misc_RNA (1)...(19): siRNA sense strand
gauaaguggagcagcugua

SEQ ID NO: 2056924 - RNA, 19 nt, Homo sapiens
  misc_RNA (1)...(19): siRNA sense strand
acagagccuaucagaauua

SEQ ID NO: 2056925 - RNA, 19 nt, Homo sapiens
  misc_RNA (1)...(19): siRNA sense strand
uacagagccuaucagaauu

SEQ ID NO: 2056926 - RNA, 19 nt, Homo sapiens
  misc_RNA (1)...(19): siRNA sense strand
gaaugcacuggaaucuaua

SEQ ID NO: 2056927 - RNA, 19 nt, Homo sapiens
  misc_RNA (1)...(19): siRNA sense strand
uuaauguccuggagauuca

SEQ ID NO: 2056928 - RNA, 19 nt, Homo sapiens
  misc_RNA (1)...(19): siRNA sense strand
ggcuaaaccugaagaucga

SEQ ID NO: 2056929 - RNA, 19 nt, Homo sapiens
  misc_RNA (1)...(19): siRNA sense strand
cagauugauucgucaggaa

SEQ ID NO: 2056930 - RNA, 19 nt, Homo sapiens
  misc_RNA (1)...(19): siRNA sense strand
uauaguagcagugcagaaa

SEQ ID NO: 2056931 - RNA, 19 nt, Homo sapiens
  misc_RNA (1)...(19): siRNA sense strand
ggauuugauugcacagauc

SEQ ID NO: 2056932 - RNA, 19 nt, Homo sapiens
  misc_RNA (1)...(19): siRNA sense strand
ggaagaugugguuguuuau

SEQ ID NO: 2056933 - RNA, 19 nt, Homo sapiens
  misc_RNA (1)...(19): siRNA sense strand
cagcuugcuuuggaaauga

SEQ ID NO: 2056934 - RNA, 19 nt, Homo sapiens
  misc_RNA (1)...(19): siRNA sense strand
caaacuguuaccagacaua

SEQ ID NO: 2056935 - RNA, 19 nt, Homo sapiens
  misc_RNA (1)...(19): siRNA sense strand
acccaaaacugaagauaua

SEQ ID NO: 2056936 - RNA, 19 nt, Homo sapiens
  misc_RNA (1)...(19): siRNA sense strand
ggugugguguggaaccuau

SEQ ID NO: 2056937 - RNA, 19 nt, Homo sapiens
  misc_RNA (1)...(19): siRNA sense strand
acucaacagucugcaagua

SEQ ID NO: 2056938 - RNA, 19 nt, Homo sapiens
  misc_RNA (1)...(19): siRNA sense strand
uguuuaugcuccagaauau

SEQ ID NO: 2056939 - RNA, 19 nt, Homo sapiens
  misc_RNA (1)...(19): siRNA sense strand
ccagcuugcuuuggaaaug

SEQ ID NO: 2056940 - RNA, 19 nt, Homo sapiens
  misc_RNA (1)...(19): siRNA sense strand
gggcaucggcauggucaua

SEQ ID NO: 2056941 - RNA, 19 nt, Homo sapiens
  misc_RNA (1)...(19): siRNA sense strand
augaguaccucgaguugaa

SEQ ID NO: 2056942 - RNA, 19 nt, Homo sapiens
  misc_RNA (1)...(19): siRNA sense strand
aaccuacgaugaugguauu

SEQ ID NO: 2056943 - RNA, 19 nt, Homo sapiens
  misc_RNA (1)...(19): siRNA sense strand
ggccagaguaugcgguuaa

SEQ ID NO: 2056944 - RNA, 19 nt, Homo sapiens
  misc_RNA (1)...(19): siRNA sense strand
ggacaaagaugaguggaua

SEQ ID NO: 2056945 - RNA, 19 nt, Homo sapiens
  misc_RNA (1)...(19): siRNA sense strand
gaaaucaugucaacuguga

SEQ ID NO: 2056946 - RNA, 19 nt, Homo sapiens
  misc_RNA (1)...(19): siRNA sense strand
gaaaaggccuuagcaauua

SEQ ID NO: 2056947 - RNA, 19 nt, Homo sapiens
  misc_RNA (1)...(19): siRNA sense strand
gcacuggaaucuauaaaga

SEQ ID NO: 2056948 - RNA, 19 nt, Homo sapiens
  misc_RNA (1)...(19): siRNA sense strand
gcacagauccgagaaguuu

SEQ ID NO: 2056949 - RNA, 19 nt, Homo sapiens
  misc_RNA (1)...(19): siRNA sense strand
ccagagaucuucaaaauuu

SEQ ID NO: 2056950 - RNA, 19 nt, Homo sapiens
  misc_RNA (1)...(19): siRNA sense strand
gacaauggcagaaacuuua

SEQ ID NO: 2056951 - RNA, 19 nt, Homo sapiens
  misc_RNA (1)...(19): siRNA sense strand
gaaaagaagugccggguuu

SEQ ID NO: 2056952 - RNA, 19 nt, Homo sapiens
  misc_RNA (1)...(19): siRNA sense strand
ggacagcaccuuaauggaa

SEQ ID NO: 2056953 - RNA, 19 nt, Homo sapiens
  misc_RNA (1)...(19): siRNA sense strand
gagaaaacauugcugauaa

SEQ ID NO: 2056954 - RNA, 19 nt, Homo sapiens
  misc_RNA (1)...(19): siRNA sense strand
ugaaugcacuggaaucuau

SEQ ID NO: 2056955 - RNA, 19 nt, Homo sapiens
  misc_RNA (1)...(19): siRNA sense strand
gaaauucagccaaaguaaa

SEQ ID NO: 2056956 - RNA, 19 nt, Homo sapiens
  misc_RNA (1)...(19): siRNA sense strand
gagaaaagguggacaaaga

SEQ ID NO: 2056957 - RNA, 19 nt, Homo sapiens
  misc_RNA (1)...(19): siRNA sense strand
aggaagaugugguuguuua

SEQ ID NO: 2056958 - RNA, 19 nt, Homo sapiens
  misc_RNA (1)...(19): siRNA sense strand
ccaggcaauuucaggauua

SEQ ID NO: 2056959 - RNA, 19 nt, Homo sapiens
  misc_RNA (1)...(19): siRNA sense strand
gaaagucagauggauauaa

SEQ ID NO: 2056960 - RNA, 19 nt, Homo sapiens
  misc_RNA (1)...(19): siRNA sense strand
guaaacaacugaagaagcu

SEQ ID NO: 2056961 - RNA, 19 nt, Homo sapiens
  misc_RNA (1)...(19): siRNA sense strand
gcacugaugauaagaauuc

SEQ ID NO: 2056962 - RNA, 19 nt, Homo sapiens
  misc_RNA (1)...(19): siRNA sense strand
gaaccuauaggccagagua

SEQ ID NO: 2056963 - RNA, 19 nt, Homo sapiens
  misc_RNA (1)...(19): siRNA sense strand
uggagaaccucuacucaaa

SEQ ID NO: 2056964 - RNA, 19 nt, Homo sapiens
  misc_RNA (1)...(19): siRNA sense strand
gagccuaucagaauuauau

SEQ ID NO: 2056965 - RNA, 19 nt, Homo sapiens
  misc_RNA (1)...(19): siRNA sense strand
uugcacaacugaauucuaa

SEQ ID NO: 2056966 - RNA, 19 nt, Homo sapiens
  misc_RNA (1)...(19): siRNA sense strand
gaaagauguccuucaagaa

SEQ ID NO: 2056967 - RNA, 19 nt, Homo sapiens
  misc_RNA (1)...(19): siRNA sense strand
gaacuacaaagaagaugaa

SEQ ID NO: 2056968 - RNA, 19 nt, Homo sapiens
  misc_RNA (1)...(19): siRNA sense strand
ggaggcugguugaaacgua

SEQ ID NO: 2056969 - RNA, 19 nt, Homo sapiens
  misc_RNA (1)...(19): siRNA sense strand
ugaccuaaaucacaaacaa

SEQ ID NO: 2056970 - RNA, 19 nt, Homo sapiens
  misc_RNA (1)...(19): siRNA sense strand
ggacuugaccuaaaucaca

SEQ ID NO: 2056971 - RNA, 19 nt, Homo sapiens
  misc_RNA (1)...(19): siRNA sense strand
gauccaaugcuucuguaua

SEQ ID NO: 2056972 - RNA, 19 nt, Homo sapiens
  misc_RNA (1)...(19): siRNA sense strand
gaaaugauccaaugcuucu

SEQ ID NO: 2056973 - RNA, 19 nt, Homo sapiens
  misc_RNA (1)...(19): siRNA sense strand
aaagaugaguggauaagug

SEQ ID NO: 2056974 - RNA, 19 nt, Homo sapiens
  misc_RNA (1)...(19): siRNA sense strand
caaaguaaacaacugaaga

SEQ ID NO: 2056975 - RNA, 19 nt, Homo sapiens
  misc_RNA (1)...(19): siRNA sense strand
gacagcaccuuaauggaau

SEQ ID NO: 2056976 - RNA, 19 nt, Homo sapiens
  misc_RNA (1)...(19): siRNA sense strand
cgacuuggccucccuucua

SEQ ID NO: 2056977 - RNA, 19 nt, Homo sapiens
  misc_RNA (1)...(19): siRNA sense strand
guaucaguauggaaacuuu

SEQ ID NO: 2056978 - RNA, 19 nt, Homo sapiens
  misc_RNA (1)...(19): siRNA sense strand
uagaugaccucacuuggau

SEQ ID NO: 2056979 - RNA, 19 nt, Homo sapiens
  misc_RNA (1)...(19): siRNA sense strand
auacagagccuaucagaau

SEQ ID NO: 2056980 - RNA, 19 nt, Homo sapiens
  misc_RNA (1)...(19): siRNA sense strand
cugaugacauuguuucaaa

SEQ ID NO: 2056981 - RNA, 19 nt, Homo sapiens
  misc_RNA (1)...(19): siRNA sense strand
aaagagagcugaagaaaag

SEQ ID NO: 2056982 - RNA, 19 nt, Homo sapiens
  misc_RNA (1)...(19): siRNA sense strand
gcacaacugaauucuaaau

SEQ ID NO: 2056983 - RNA, 19 nt, Homo sapiens
  misc_RNA (1)...(19): siRNA sense strand
cauaauggaucuuguaagc

SEQ ID NO: 2056984 - RNA, 19 nt, Homo sapiens
  misc_RNA (1)...(19): siRNA sense strand
gaggcugguugaaacguaa

SEQ ID NO: 2056985 - RNA, 19 nt, Homo sapiens
  misc_RNA (1)...(19): siRNA sense strand
ggucauaggacacgaaauc

SEQ ID NO: 2056986 - RNA, 19 nt, Homo sapiens
  misc_RNA (1)...(19): siRNA sense strand
aaagauugcccaucgauga

SEQ ID NO: 2056987 - RNA, 19 nt, Homo sapiens
  misc_RNA (1)...(19): siRNA sense strand
gagaaccucuacucaaacu

SEQ ID NO: 2056988 - RNA, 19 nt, Homo sapiens
  misc_RNA (1)...(19): siRNA sense strand
guacagcauauguggauuu

SEQ ID NO: 2056989 - RNA, 19 nt, Homo sapiens
  misc_RNA (1)...(19): siRNA sense strand
gaugauaagaauucuguga

SEQ ID NO: 2056990 - RNA, 19 nt, Homo sapiens
  misc_RNA (1)...(19): siRNA sense strand
gaaccucuacucaaacugu

SEQ ID NO: 2056991 - RNA, 19 nt, Homo sapiens
  misc_RNA (1)...(19): siRNA sense strand
auccaaugcuucuguauaa

SEQ ID NO: 2056992 - RNA, 19 nt, Homo sapiens
  misc_RNA (1)...(19): siRNA sense strand
ccgcaagaauucauacaug

SEQ ID NO: 2056993 - RNA, 19 nt, Homo sapiens
  misc_RNA (1)...(19): siRNA sense strand
cuacaaagaagaugaauac

SEQ ID NO: 2056994 - RNA, 19 nt, Homo sapiens
  misc_RNA (1)...(19): siRNA sense strand
caugucaacugugaauauu

SEQ ID NO: 2056995 - RNA, 19 nt, Homo sapiens
  misc_RNA (1)...(19): siRNA sense strand
ugaggaagaugugguuguu

SEQ ID NO: 2056996 - RNA, 19 nt, Homo sapiens
  misc_RNA (1)...(19): siRNA sense strand
uaauggaggucuuggucaa

SEQ ID NO: 2056997 - RNA, 19 nt, Homo sapiens
  misc_RNA (1)...(19): siRNA sense strand
ggccuuagcaauuaaagaa

SEQ ID NO: 2056998 - RNA, 19 nt, Homo sapiens
  misc_RNA (1)...(19): siRNA sense strand
ggauggaugccgagacaaa

SEQ ID NO: 2056999 - RNA, 19 nt, Homo sapiens
  misc_RNA (1)...(19): siRNA sense strand
ucagaaagucagauggaua

SEQ ID NO: 2057000 - RNA, 19 nt, Homo sapiens
  misc_RNA (1)...(19): siRNA sense strand
uggagcagcuguagucaau

SEQ ID NO: 2057001 - RNA, 19 nt, Homo sapiens
  misc_RNA (1)...(19): siRNA sense strand
uacaaggaguccagaaaug

SEQ ID NO: 2057002 - RNA, 19 nt, Homo sapiens
  misc_RNA (1)...(19): siRNA sense strand
cagaaagucagauggauau

SEQ ID NO: 2057003 - RNA, 19 nt, Homo sapiens
  misc_RNA (1)...(19): siRNA sense strand
gcacaguccaggcaauuuc

SEQ ID NO: 2057004 - RNA, 19 nt, Homo sapiens
  misc_RNA (1)...(19): siRNA sense strand
uggcagaaacuuuaacaaa

SEQ ID NO: 2057005 - RNA, 19 nt, Homo sapiens
  misc_RNA (1)...(19): siRNA sense strand
gagcagcuguagucaaugc

SEQ ID NO: 2057006 - RNA, 19 nt, Homo sapiens
  misc_RNA (1)...(19): siRNA sense strand
ggucuuguauaaaugaauc

SEQ ID NO: 2057007 - RNA, 19 nt, Homo sapiens
  misc_RNA (1)...(19): siRNA sense strand
ugaagaagcuccgagaaaa

SEQ ID NO: 2057008 - RNA, 19 nt, Homo sapiens
  misc_RNA (1)...(19): siRNA sense strand
gagacguugugcaaacuau

SEQ ID NO: 2057009 - RNA, 19 nt, Homo sapiens
  misc_RNA (1)...(19): siRNA sense strand
cagcauauguggauuuuau

SEQ ID NO: 2057010 - RNA, 19 nt, Homo sapiens
  misc_RNA (1)...(19): siRNA sense strand
caaugcuucuguauaacaa

SEQ ID NO: 2057011 - RNA, 19 nt, Homo sapiens
  misc_RNA (1)...(19): siRNA sense strand
gacuugaccuaaaucacaa

SEQ ID NO: 2057012 - RNA, 19 nt, Homo sapiens
  misc_RNA (1)...(19): siRNA sense strand
gcauacagagccuaucaga

SEQ ID NO: 2057013 - RNA, 19 nt, Homo sapiens
  misc_RNA (1)...(19): siRNA sense strand
ugacaauggcagaaacuuu

SEQ ID NO: 2057014 - RNA, 19 nt, Homo sapiens
  misc_RNA (1)...(19): siRNA sense strand
gaauacuucgagaacauaa

SEQ ID NO: 2057015 - RNA, 19 nt, Homo sapiens
  misc_RNA (1)...(19): siRNA sense strand
gaugaauacuucgagaaca

SEQ ID NO: 2057016 - RNA, 19 nt, Homo sapiens
  misc_RNA (1)...(19): siRNA sense strand
ugucaacugugaauauuag

SEQ ID NO: 2057017 - RNA, 19 nt, Homo sapiens
  misc_RNA (1)...(19): siRNA sense strand
gcagaaagcaaaagcauug

SEQ ID NO: 2057018 - RNA, 19 nt, Homo sapiens
  misc_RNA (1)...(19): siRNA sense strand
ggagaaaacauugcugaua

SEQ ID NO: 2057019 - RNA, 19 nt, Homo sapiens
  misc_RNA (1)...(19): siRNA sense strand
aaagucagauggauauaac

SEQ ID NO: 2057020 - RNA, 19 nt, Homo sapiens
  misc_RNA (1)...(19): siRNA sense strand
caaacugaauaaugaguac

SEQ ID NO: 2057021 - RNA, 19 nt, Homo sapiens
  misc_RNA (1)...(19): siRNA sense strand
cggcuauccugaugacauu

SEQ ID NO: 2057022 - RNA, 19 nt, Homo sapiens
  misc_RNA (1)...(19): siRNA sense strand
gaagaugugguuguuuaug

SEQ ID NO: 2057023 - RNA, 19 nt, Homo sapiens
  misc_RNA (1)...(19): siRNA sense strand
gauaaguggagcagcugua

SEQ ID NO: 2057024 - RNA, 19 nt, Homo sapiens
  misc_RNA (1)...(19): siRNA sense strand
acagagccuaucagaauua

SEQ ID NO: 2057025 - RNA, 19 nt, Homo sapiens
  misc_RNA (1)...(19): siRNA sense strand
uacagagccuaucagaauu

SEQ ID NO: 2057026 - RNA, 19 nt, Homo sapiens
  misc_RNA (1)...(19): siRNA sense strand
gaaugcacuggaaucuaua

SEQ ID NO: 2057027 - RNA, 19 nt, Homo sapiens
  misc_RNA (1)...(19): siRNA sense strand
uuaauguccuggagauuca

SEQ ID NO: 2057028 - RNA, 19 nt, Homo sapiens
  misc_RNA (1)...(19): siRNA sense strand
ggcuaaaccugaagaucga

SEQ ID NO: 2057029 - RNA, 19 nt, Homo sapiens
  misc_RNA (1)...(19): siRNA sense strand
cagauugauucgucaggaa

SEQ ID NO: 2057030 - RNA, 19 nt, Homo sapiens
  misc_RNA (1)...(19): siRNA sense strand
uauaguagcagugcagaaa

SEQ ID NO: 2057031 - RNA, 19 nt, Homo sapiens
  misc_RNA (1)...(19): siRNA sense strand
ggauuugauugcacagauc

SEQ ID NO: 2057032 - RNA, 19 nt, Homo sapiens
  misc_RNA (1)...(19): siRNA sense strand
ggaagaugugguuguuuau

SEQ ID NO: 2057033 - RNA, 19 nt, Homo sapiens
  misc_RNA (1)...(19): siRNA sense strand
cagcuugcuuuggaaauga

SEQ ID NO: 2057034 - RNA, 19 nt, Homo sapiens
  misc_RNA (1)...(19): siRNA sense strand
caaacuguuaccagacaua

SEQ ID NO: 2057035 - RNA, 19 nt, Homo sapiens
  misc_RNA (1)...(19): siRNA sense strand
acccaaaacugaagauaua

SEQ ID NO: 2057036 - RNA, 19 nt, Homo sapiens
  misc_RNA (1)...(19): siRNA sense strand
ggugugguguggaaccuau

SEQ ID NO: 2057037 - RNA, 19 nt, Homo sapiens
  misc_RNA (1)...(19): siRNA sense strand
acucaacagucugcaagua

SEQ ID NO: 2057038 - RNA, 19 nt, Homo sapiens
  misc_RNA (1)...(19): siRNA sense strand
uguuuaugcuccagaauau

SEQ ID NO: 2057039 - RNA, 19 nt, Homo sapiens
  misc_RNA (1)...(19): siRNA sense strand
ccagcuugcuuuggaaaug

SEQ ID NO: 2057040 - RNA, 19 nt, Homo sapiens
  misc_RNA (1)...(19): siRNA sense strand
gggcaucggcauggucaua

SEQ ID NO: 2057041 - RNA, 19 nt, Homo sapiens
  misc_RNA (1)...(19): siRNA sense strand
augaguaccucgaguugaa

SEQ ID NO: 2057042 - RNA, 19 nt, Homo sapiens
  misc_RNA (1)...(19): siRNA sense strand
aaccuacgaugaugguauu

SEQ ID NO: 2057043 - RNA, 19 nt, Homo sapiens
  misc_RNA (1)...(19): siRNA sense strand
ggccagaguaugcgguuaa

SEQ ID NO: 2057044 - RNA, 19 nt, Homo sapiens
  misc_RNA (1)...(19): siRNA sense strand
ggacaaagaugaguggaua

SEQ ID NO: 2057045 - RNA, 19 nt, Homo sapiens
  misc_RNA (1)...(19): siRNA sense strand
gaaaucaugucaacuguga

SEQ ID NO: 2057046 - RNA, 19 nt, Homo sapiens
  misc_RNA (1)...(19): siRNA sense strand
gaaaaggccuuagcaauua

SEQ ID NO: 2057047 - RNA, 19 nt, Homo sapiens
  misc_RNA (1)...(19): siRNA sense strand
gcacuggaaucuauaaaga

SEQ ID NO: 2057048 - RNA, 19 nt, Homo sapiens
  misc_RNA (1)...(19): siRNA sense strand
gcacagauccgagaaguuu

SEQ ID NO: 2057049 - RNA, 19 nt, Homo sapiens
  misc_RNA (1)...(19): siRNA sense strand
ccagagaucuucaaaauuu

SEQ ID NO: 2057050 - RNA, 19 nt, Homo sapiens
  misc_RNA (1)...(19): siRNA sense strand
gacaauggcagaaacuuua

SEQ ID NO: 2057051 - RNA, 19 nt, Homo sapiens
  misc_RNA (1)...(19): siRNA sense strand
gaaaagaagugccggguuu

SEQ ID NO: 2057052 - RNA, 19 nt, Homo sapiens
  misc_RNA (1)...(19): siRNA sense strand
ggacagcaccuuaauggaa

SEQ ID NO: 2057053 - RNA, 19 nt, Homo sapiens
  misc_RNA (1)...(19): siRNA sense strand
gagaaaacauugcugauaa

SEQ ID NO: 2057054 - RNA, 19 nt, Homo sapiens
  misc_RNA (1)...(19): siRNA sense strand
ugaaugcacuggaaucuau

SEQ ID NO: 2057055 - RNA, 19 nt, Homo sapiens
  misc_RNA (1)...(19): siRNA sense strand
gaaauucagccaaaguaaa

SEQ ID NO: 2057056 - RNA, 19 nt, Homo sapiens
  misc_RNA (1)...(19): siRNA sense strand
gagaaaagguggacaaaga

SEQ ID NO: 2057057 - RNA, 19 nt, Homo sapiens
  misc_RNA (1)...(19): siRNA sense strand
aggaagaugugguuguuua

SEQ ID NO: 2057058 - RNA, 19 nt, Homo sapiens
  misc_RNA (1)...(19): siRNA sense strand
ccaggcaauuucaggauua

SEQ ID NO: 2057059 - RNA, 19 nt, Homo sapiens
  misc_RNA (1)...(19): siRNA sense strand
gaaagucagauggauauaa

SEQ ID NO: 2057060 - RNA, 19 nt, Homo sapiens
  misc_RNA (1)...(19): siRNA sense strand
guaaacaacugaagaagcu

SEQ ID NO: 2057061 - RNA, 19 nt, Homo sapiens
  misc_RNA (1)...(19): siRNA sense strand
gcacugaugauaagaauuc

SEQ ID NO: 2057062 - RNA, 19 nt, Homo sapiens
  misc_RNA (1)...(19): siRNA sense strand
gaaccuauaggccagagua

SEQ ID NO: 2057063 - RNA, 19 nt, Homo sapiens
  misc_RNA (1)...(19): siRNA sense strand
uggagaaccucuacucaaa

SEQ ID NO: 2057064 - RNA, 19 nt, Homo sapiens
  misc_RNA (1)...(19): siRNA sense strand
gagccuaucagaauuauau

SEQ ID NO: 2057065 - RNA, 19 nt, Homo sapiens
  misc_RNA (1)...(19): siRNA sense strand
uugcacaacugaauucuaa

SEQ ID NO: 2057066 - RNA, 19 nt, Homo sapiens
  misc_RNA (1)...(19): siRNA sense strand
gaaagauguccuucaagaa

SEQ ID NO: 2057067 - RNA, 19 nt, Homo sapiens
  misc_RNA (1)...(19): siRNA sense strand
gaacuacaaagaagaugaa

SEQ ID NO: 2057068 - RNA, 19 nt, Homo sapiens
  misc_RNA (1)...(19): siRNA sense strand
ggaggcugguugaaacgua

SEQ ID NO: 2057069 - RNA, 19 nt, Homo sapiens
  misc_RNA (1)...(19): siRNA sense strand
ugaccuaaaucacaaacaa

SEQ ID NO: 2057070 - RNA, 19 nt, Homo sapiens
  misc_RNA (1)...(19): siRNA sense strand
ggacuugaccuaaaucaca

SEQ ID NO: 2057071 - RNA, 19 nt, Homo sapiens
  misc_RNA (1)...(19): siRNA sense strand
gauccaaugcuucuguaua

SEQ ID NO: 2057072 - RNA, 19 nt, Homo sapiens
  misc_RNA (1)...(19): siRNA sense strand
gaaaugauccaaugcuucu

SEQ ID NO: 2057073 - RNA, 19 nt, Homo sapiens
  misc_RNA (1)...(19): siRNA sense strand
aaagaugaguggauaagug

SEQ ID NO: 2057074 - RNA, 19 nt, Homo sapiens
  misc_RNA (1)...(19): siRNA sense strand
caaaguaaacaacugaaga

SEQ ID NO: 2057075 - RNA, 19 nt, Homo sapiens
  misc_RNA (1)...(19): siRNA sense strand
gacagcaccuuaauggaau

SEQ ID NO: 2057076 - RNA, 19 nt, Homo sapiens
  misc_RNA (1)...(19): siRNA sense strand
cgacuuggccucccuucua

SEQ ID NO: 2057077 - RNA, 19 nt, Homo sapiens
  misc_RNA (1)...(19): siRNA sense strand
guaucaguauggaaacuuu

SEQ ID NO: 2057078 - RNA, 19 nt, Homo sapiens
  misc_RNA (1)...(19): siRNA sense strand
uagaugaccucacuuggau

SEQ ID NO: 2057079 - RNA, 19 nt, Homo sapiens
  misc_RNA (1)...(19): siRNA sense strand
auacagagccuaucagaau

SEQ ID NO: 2057080 - RNA, 19 nt, Homo sapiens
  misc_RNA (1)...(19): siRNA sense strand
cugaugacauuguuucaaa

SEQ ID NO: 2057081 - RNA, 19 nt, Homo sapiens
  misc_RNA (1)...(19): siRNA sense strand
aaagagagcugaagaaaag

SEQ ID NO: 2057082 - RNA, 19 nt, Homo sapiens
  misc_RNA (1)...(19): siRNA sense strand
gcacaacugaauucuaaau

SEQ ID NO: 2057083 - RNA, 19 nt, Homo sapiens
  misc_RNA (1)...(19): siRNA sense strand
cauaauggaucuuguaagc

SEQ ID NO: 2057084 - RNA, 19 nt, Homo sapiens
  misc_RNA (1)...(19): siRNA sense strand
gaggcugguugaaacguaa

SEQ ID NO: 2057085 - RNA, 19 nt, Homo sapiens
  misc_RNA (1)...(19): siRNA sense strand
ggucauaggacacgaaauc

SEQ ID NO: 2057086 - RNA, 19 nt, Homo sapiens
  misc_RNA (1)...(19): siRNA sense strand
aaagauugcccaucgauga

SEQ ID NO: 2057087 - RNA, 19 nt, Homo sapiens
  misc_RNA (1)...(19): siRNA sense strand
gagaaccucuacucaaacu

SEQ ID NO: 2057088 - RNA, 19 nt, Homo sapiens
  misc_RNA (1)...(19): siRNA sense strand
guacagcauauguggauuu

SEQ ID NO: 2057089 - RNA, 19 nt, Homo sapiens
  misc_RNA (1)...(19): siRNA sense strand
gaugauaagaauucuguga

SEQ ID NO: 2057090 - RNA, 19 nt, Homo sapiens
  misc_RNA (1)...(19): siRNA sense strand
gaaccucuacucaaacugu

SEQ ID NO: 2057091 - RNA, 19 nt, Homo sapiens
  misc_RNA (1)...(19): siRNA sense strand
auccaaugcuucuguauaa

SEQ ID NO: 2057092 - RNA, 19 nt, Homo sapiens
  misc_RNA (1)...(19): siRNA sense strand
ccgcaagaauucauacaug

SEQ ID NO: 2057093 - RNA, 19 nt, Homo sapiens
  misc_RNA (1)...(19): siRNA sense strand
cuacaaagaagaugaauac

SEQ ID NO: 2057094 - RNA, 19 nt, Homo sapiens
  misc_RNA (1)...(19): siRNA sense strand
caugucaacugugaauauu

SEQ ID NO: 2057095 - RNA, 19 nt, Homo sapiens
  misc_RNA (1)...(19): siRNA sense strand
ugaggaagaugugguuguu

SEQ ID NO: 2057096 - RNA, 19 nt, Homo sapiens
  misc_RNA (1)...(19): siRNA sense strand
uaauggaggucuuggucaa

SEQ ID NO: 2057097 - RNA, 19 nt, Homo sapiens
  misc_RNA (1)...(19): siRNA sense strand
ggccuuagcaauuaaagaa

SEQ ID NO: 2057098 - RNA, 19 nt, Homo sapiens
  misc_RNA (1)...(19): siRNA sense strand
ggauggaugccgagacaaa

SEQ ID NO: 2057099 - RNA, 19 nt, Homo sapiens
  misc_RNA (1)...(19): siRNA sense strand
ucagaaagucagauggaua

SEQ ID NO: 2057100 - RNA, 19 nt, Homo sapiens
  misc_RNA (1)...(19): siRNA sense strand
uggagcagcuguagucaau

SEQ ID NO: 2057101 - RNA, 19 nt, Homo sapiens
  misc_RNA (1)...(19): siRNA sense strand
uacaaggaguccagaaaug

SEQ ID NO: 2057102 - RNA, 19 nt, Homo sapiens
  misc_RNA (1)...(19): siRNA sense strand
cagaaagucagauggauau

SEQ ID NO: 2057103 - RNA, 19 nt, Homo sapiens
  misc_RNA (1)...(19): siRNA sense strand
gcacaguccaggcaauuuc

SEQ ID NO: 2057104 - RNA, 19 nt, Homo sapiens
  misc_RNA (1)...(19): siRNA sense strand
uggcagaaacuuuaacaaa

SEQ ID NO: 2057105 - RNA, 19 nt, Homo sapiens
  misc_RNA (1)...(19): siRNA sense strand
gagcagcuguagucaaugc

SEQ ID NO: 2057106 - RNA, 19 nt, Homo sapiens
  misc_RNA (1)...(19): siRNA sense strand
ggucuuguauaaaugaauc

SEQ ID NO: 2057107 - RNA, 19 nt, Homo sapiens
  misc_RNA (1)...(19): siRNA sense strand
ugaagaagcuccgagaaaa

SEQ ID NO: 2057108 - RNA, 19 nt, Homo sapiens
  misc_RNA (1)...(19): siRNA sense strand
gagacguugugcaaacuau

SEQ ID NO: 2057109 - RNA, 19 nt, Homo sapiens
  misc_RNA (1)...(19): siRNA sense strand
cagcauauguggauuuuau

SEQ ID NO: 2057110 - RNA, 19 nt, Homo sapiens
  misc_RNA (1)...(19): siRNA sense strand
caaugcuucuguauaacaa

SEQ ID NO: 2057111 - RNA, 19 nt, Homo sapiens
  misc_RNA (1)...(19): siRNA sense strand
gacuugaccuaaaucacaa

SEQ ID NO: 2057112 - RNA, 19 nt, Homo sapiens
  misc_RNA (1)...(19): siRNA sense strand
gcauacagagccuaucaga

SEQ ID NO: 2057113 - RNA, 19 nt, Homo sapiens
  misc_RNA (1)...(19): siRNA sense strand
ugacaauggcagaaacuuu

SEQ ID NO: 2057114 - RNA, 19 nt, Homo sapiens
  misc_RNA (1)...(19): siRNA sense strand
gaauacuucgagaacauaa

SEQ ID NO: 2057115 - RNA, 19 nt, Homo sapiens
  misc_RNA (1)...(19): siRNA sense strand
gaugaauacuucgagaaca

SEQ ID NO: 2057116 - RNA, 19 nt, Homo sapiens
  misc_RNA (1)...(19): siRNA sense strand
ugucaacugugaauauuag

SEQ ID NO: 2057117 - RNA, 19 nt, Homo sapiens
  misc_RNA (1)...(19): siRNA sense strand
gcagaaagcaaaagcauug

SEQ ID NO: 2057118 - RNA, 19 nt, Homo sapiens
  misc_RNA (1)...(19): siRNA sense strand
ggagaaaacauugcugaua

SEQ ID NO: 2057119 - RNA, 19 nt, Homo sapiens
  misc_RNA (1)...(19): siRNA sense strand
aaagucagauggauauaac

SEQ ID NO: 2057120 - RNA, 19 nt, Homo sapiens
  misc_RNA (1)...(19): siRNA sense strand
caaacugaauaaugaguac

SEQ ID NO: 2057121 - RNA, 19 nt, Homo sapiens
  misc_RNA (1)...(19): siRNA sense strand
cggcuauccugaugacauu

SEQ ID NO: 2057122 - RNA, 19 nt, Homo sapiens
  misc_RNA (1)...(19): siRNA sense strand
gaagaugugguuguuuaug

SEQ ID NO: 2057123 - RNA, 19 nt, Homo sapiens
  misc_RNA (1)...(19): siRNA sense strand
gauaaguggagcagcugua

SEQ ID NO: 2057124 - RNA, 19 nt, Homo sapiens
  misc_RNA (1)...(19): siRNA sense strand
acagagccuaucagaauua

SEQ ID NO: 2057125 - RNA, 19 nt, Homo sapiens
  misc_RNA (1)...(19): siRNA sense strand
uacagagccuaucagaauu

SEQ ID NO: 2057126 - RNA, 19 nt, Homo sapiens
  misc_RNA (1)...(19): siRNA sense strand
gaaugcacuggaaucuaua

SEQ ID NO: 2057127 - RNA, 19 nt, Homo sapiens
  misc_RNA (1)...(19): siRNA sense strand
uuaauguccuggagauuca

SEQ ID NO: 2057128 - RNA, 19 nt, Homo sapiens
  misc_RNA (1)...(19): siRNA sense strand
ggcuaaaccugaagaucga

SEQ ID NO: 2057129 - RNA, 19 nt, Homo sapiens
  misc_RNA (1)...(19): siRNA sense strand
cagauugauucgucaggaa

SEQ ID NO: 2057130 - RNA, 19 nt, Homo sapiens
  misc_RNA (1)...(19): siRNA sense strand
uauaguagcagugcagaaa

SEQ ID NO: 2057131 - RNA, 19 nt, Homo sapiens
  misc_RNA (1)...(19): siRNA sense strand
ggauuugauugcacagauc

SEQ ID NO: 2057132 - RNA, 19 nt, Homo sapiens
  misc_RNA (1)...(19): siRNA sense strand
ggaagaugugguuguuuau

SEQ ID NO: 2057133 - RNA, 19 nt, Homo sapiens
  misc_RNA (1)...(19): siRNA sense strand
cagcuugcuuuggaaauga

SEQ ID NO: 2057134 - RNA, 19 nt, Homo sapiens
  misc_RNA (1)...(19): siRNA sense strand
caaacuguuaccagacaua

SEQ ID NO: 2057135 - RNA, 19 nt, Homo sapiens
  misc_RNA (1)...(19): siRNA sense strand
acccaaaacugaagauaua

SEQ ID NO: 2057136 - RNA, 19 nt, Homo sapiens
  misc_RNA (1)...(19): siRNA sense strand
ggugugguguggaaccuau

SEQ ID NO: 2057137 - RNA, 19 nt, Homo sapiens
  misc_RNA (1)...(19): siRNA sense strand
acucaacagucugcaagua

SEQ ID NO: 2057138 - RNA, 19 nt, Homo sapiens
  misc_RNA (1)...(19): siRNA sense strand
uguuuaugcuccagaauau

SEQ ID NO: 2057139 - RNA, 19 nt, Homo sapiens
  misc_RNA (1)...(19): siRNA sense strand
ccagcuugcuuuggaaaug

SEQ ID NO: 2057140 - RNA, 19 nt, Homo sapiens
  misc_RNA (1)...(19): siRNA sense strand
gggcaucggcauggucaua

SEQ ID NO: 2057141 - RNA, 19 nt, Homo sapiens
  misc_RNA (1)...(19): siRNA sense strand
augaguaccucgaguugaa

SEQ ID NO: 2057142 - RNA, 19 nt, Homo sapiens
  misc_RNA (1)...(19): siRNA sense strand
aaccuacgaugaugguauu

SEQ ID NO: 2057143 - RNA, 19 nt, Homo sapiens
  misc_RNA (1)...(19): siRNA sense strand
ggccagaguaugcgguuaa

SEQ ID NO: 2057144 - RNA, 19 nt, Homo sapiens
  misc_RNA (1)...(19): siRNA sense strand
ggacaaagaugaguggaua

SEQ ID NO: 2057145 - RNA, 19 nt, Homo sapiens
  misc_RNA (1)...(19): siRNA sense strand
gaaaucaugucaacuguga

SEQ ID NO: 2057146 - RNA, 19 nt, Homo sapiens
  misc_RNA (1)...(19): siRNA sense strand
gaaaaggccuuagcaauua

SEQ ID NO: 2057147 - RNA, 19 nt, Homo sapiens
  misc_RNA (1)...(19): siRNA sense strand
gcacuggaaucuauaaaga

SEQ ID NO: 2057148 - RNA, 19 nt, Homo sapiens
  misc_RNA (1)...(19): siRNA sense strand
gcacagauccgagaaguuu

SEQ ID NO: 2057149 - RNA, 19 nt, Homo sapiens
  misc_RNA (1)...(19): siRNA sense strand
ccagagaucuucaaaauuu

SEQ ID NO: 2057150 - RNA, 19 nt, Homo sapiens
  misc_RNA (1)...(19): siRNA sense strand
gacaauggcagaaacuuua

SEQ ID NO: 2057151 - RNA, 19 nt, Homo sapiens
  misc_RNA (1)...(19): siRNA sense strand
gaaaagaagugccggguuu

SEQ ID NO: 2057152 - RNA, 19 nt, Homo sapiens
  misc_RNA (1)...(19): siRNA sense strand
ggacagcaccuuaauggaa

SEQ ID NO: 2057153 - RNA, 19 nt, Homo sapiens
  misc_RNA (1)...(19): siRNA sense strand
gagaaaacauugcugauaa

SEQ ID NO: 2057154 - RNA, 19 nt, Homo sapiens
  misc_RNA (1)...(19): siRNA sense strand
ugaaugcacuggaaucuau

SEQ ID NO: 2057155 - RNA, 19 nt, Homo sapiens
  misc_RNA (1)...(19): siRNA sense strand
gaaauucagccaaaguaaa

SEQ ID NO: 2057156 - RNA, 19 nt, Homo sapiens
  misc_RNA (1)...(19): siRNA sense strand
gagaaaagguggacaaaga

SEQ ID NO: 2057157 - RNA, 19 nt, Homo sapiens
  misc_RNA (1)...(19): siRNA sense strand
aggaagaugugguuguuua

SEQ ID NO: 2057158 - RNA, 19 nt, Homo sapiens
  misc_RNA (1)...(19): siRNA sense strand
ccaggcaauuucaggauua

SEQ ID NO: 2057159 - RNA, 19 nt, Homo sapiens
  misc_RNA (1)...(19): siRNA sense strand
gaaagucagauggauauaa

SEQ ID NO: 2057160 - RNA, 19 nt, Homo sapiens
  misc_RNA (1)...(19): siRNA sense strand
guaaacaacugaagaagcu

SEQ ID NO: 2057161 - RNA, 19 nt, Homo sapiens
  misc_RNA (1)...(19): siRNA sense strand
gcacugaugauaagaauuc

SEQ ID NO: 2057162 - RNA, 19 nt, Homo sapiens
  misc_RNA (1)...(19): siRNA sense strand
gaaccuauaggccagagua

SEQ ID NO: 2057163 - RNA, 19 nt, Homo sapiens
  misc_RNA (1)...(19): siRNA sense strand
uggagaaccucuacucaaa

SEQ ID NO: 2057164 - RNA, 19 nt, Homo sapiens
  misc_RNA (1)...(19): siRNA sense strand
gagccuaucagaauuauau

SEQ ID NO: 2057165 - RNA, 19 nt, Homo sapiens
  misc_RNA (1)...(19): siRNA sense strand
uugcacaacugaauucuaa

SEQ ID NO: 2057166 - RNA, 19 nt, Homo sapiens
  misc_RNA (1)...(19): siRNA sense strand
gaaagauguccuucaagaa

SEQ ID NO: 2057167 - RNA, 19 nt, Homo sapiens
  misc_RNA (1)...(19): siRNA sense strand
gaacuacaaagaagaugaa

SEQ ID NO: 2057168 - RNA, 19 nt, Homo sapiens
  misc_RNA (1)...(19): siRNA sense strand
ggaggcugguugaaacgua

SEQ ID NO: 2057169 - RNA, 19 nt, Homo sapiens
  misc_RNA (1)...(19): siRNA sense strand
ugaccuaaaucacaaacaa

SEQ ID NO: 2057170 - RNA, 19 nt, Homo sapiens
  misc_RNA (1)...(19): siRNA sense strand
ggacuugaccuaaaucaca

SEQ ID NO: 2057171 - RNA, 19 nt, Homo sapiens
  misc_RNA (1)...(19): siRNA sense strand
gauccaaugcuucuguaua

SEQ ID NO: 2057172 - RNA, 19 nt, Homo sapiens
  misc_RNA (1)...(19): siRNA sense strand
gaaaugauccaaugcuucu

SEQ ID NO: 2057173 - RNA, 19 nt, Homo sapiens
  misc_RNA (1)...(19): siRNA sense strand
aaagaugaguggauaagug

SEQ ID NO: 2057174 - RNA, 19 nt, Homo sapiens
  misc_RNA (1)...(19): siRNA sense strand
caaaguaaacaacugaaga

SEQ ID NO: 2057175 - RNA, 19 nt, Homo sapiens
  misc_RNA (1)...(19): siRNA sense strand
gacagcaccuuaauggaau

SEQ ID NO: 2057176 - RNA, 19 nt, Homo sapiens
  misc_RNA (1)...(19): siRNA sense strand
cgacuuggccucccuucua

SEQ ID NO: 2057177 - RNA, 19 nt, Homo sapiens
  misc_RNA (1)...(19): siRNA sense strand
guaucaguauggaaacuuu

SEQ ID NO: 2057178 - RNA, 19 nt, Homo sapiens
  misc_RNA (1)...(19): siRNA sense strand
uagaugaccucacuuggau

SEQ ID NO: 2057179 - RNA, 19 nt, Homo sapiens
  misc_RNA (1)...(19): siRNA sense strand
auacagagccuaucagaau

SEQ ID NO: 2057180 - RNA, 19 nt, Homo sapiens
  misc_RNA (1)...(19): siRNA sense strand
cugaugacauuguuucaaa

SEQ ID NO: 2057181 - RNA, 19 nt, Homo sapiens
  misc_RNA (1)...(19): siRNA sense strand
aaagagagcugaagaaaag

SEQ ID NO: 2057182 - RNA, 19 nt, Homo sapiens
  misc_RNA (1)...(19): siRNA sense strand
gcacaacugaauucuaaau

SEQ ID NO: 2057183 - RNA, 19 nt, Homo sapiens
  misc_RNA (1)...(19): siRNA sense strand
cauaauggaucuuguaagc

SEQ ID NO: 2057184 - RNA, 19 nt, Homo sapiens
  misc_RNA (1)...(19): siRNA sense strand
gaggcugguugaaacguaa

SEQ ID NO: 2057185 - RNA, 19 nt, Homo sapiens
  misc_RNA (1)...(19): siRNA sense strand
ggucauaggacacgaaauc

SEQ ID NO: 2057186 - RNA, 19 nt, Homo sapiens
  misc_RNA (1)...(19): siRNA sense strand
aaagauugcccaucgauga

SEQ ID NO: 2057187 - RNA, 19 nt, Homo sapiens
  misc_RNA (1)...(19): siRNA sense strand
gagaaccucuacucaaacu

SEQ ID NO: 2057188 - RNA, 19 nt, Homo sapiens
  misc_RNA (1)...(19): siRNA sense strand
guacagcauauguggauuu

SEQ ID NO: 2057189 - RNA, 19 nt, Homo sapiens
  misc_RNA (1)...(19): siRNA sense strand
gaugauaagaauucuguga

SEQ ID NO: 2057190 - RNA, 19 nt, Homo sapiens
  misc_RNA (1)...(19): siRNA sense strand
gaaccucuacucaaacugu

SEQ ID NO: 2057191 - RNA, 19 nt, Homo sapiens
  misc_RNA (1)...(19): siRNA sense strand
auccaaugcuucuguauaa

SEQ ID NO: 2057192 - RNA, 19 nt, Homo sapiens
  misc_RNA (1)...(19): siRNA sense strand
ccgcaagaauucauacaug

SEQ ID NO: 2057193 - RNA, 19 nt, Homo sapiens
  misc_RNA (1)...(19): siRNA sense strand
cuacaaagaagaugaauac

SEQ ID NO: 2057194 - RNA, 19 nt, Homo sapiens
  misc_RNA (1)...(19): siRNA sense strand
caugucaacugugaauauu

SEQ ID NO: 2057195 - RNA, 19 nt, Homo sapiens
  misc_RNA (1)...(19): siRNA sense strand
ugaggaagaugugguuguu

SEQ ID NO: 2057196 - RNA, 19 nt, Homo sapiens
  misc_RNA (1)...(19): siRNA sense strand
uaauggaggucuuggucaa

SEQ ID NO: 2057197 - RNA, 19 nt, Homo sapiens
  misc_RNA (1)...(19): siRNA sense strand
ggccuuagcaauuaaagaa

SEQ ID NO: 2057198 - RNA, 19 nt, Homo sapiens
  misc_RNA (1)...(19): siRNA sense strand
ggauggaugccgagacaaa

SEQ ID NO: 2057199 - RNA, 19 nt, Homo sapiens
  misc_RNA (1)...(19): siRNA sense strand
ucagaaagucagauggaua

SEQ ID NO: 2057200 - RNA, 19 nt, Homo sapiens
  misc_RNA (1)...(19): siRNA sense strand
uggagcagcuguagucaau

SEQ ID NO: 2057201 - RNA, 19 nt, Homo sapiens
  misc_RNA (1)...(19): siRNA sense strand
uacaaggaguccagaaaug

SEQ ID NO: 2057202 - RNA, 19 nt, Homo sapiens
  misc_RNA (1)...(19): siRNA sense strand
cagaaagucagauggauau

SEQ ID NO: 2057203 - RNA, 19 nt, Homo sapiens
  misc_RNA (1)...(19): siRNA sense strand
gcacaguccaggcaauuuc

SEQ ID NO: 2057204 - RNA, 19 nt, Homo sapiens
  misc_RNA (1)...(19): siRNA sense strand
uggcagaaacuuuaacaaa

SEQ ID NO: 2057205 - RNA, 19 nt, Homo sapiens
  misc_RNA (1)...(19): siRNA sense strand
gagcagcuguagucaaugc

SEQ ID NO: 2057206 - RNA, 19 nt, Homo sapiens
  misc_RNA (1)...(19): siRNA sense strand
ggucuuguauaaaugaauc

SEQ ID NO: 2057207 - RNA, 19 nt, Homo sapiens
  misc_RNA (1)...(19): siRNA sense strand
ugaagaagcuccgagaaaa

SEQ ID NO: 2057208 - RNA, 19 nt, Homo sapiens
  misc_RNA (1)...(19): siRNA sense strand
gagacguugugcaaacuau

SEQ ID NO: 2057209 - RNA, 19 nt, Homo sapiens
  misc_RNA (1)...(19): siRNA sense strand
cagcauauguggauuuuau

SEQ ID NO: 2057210 - RNA, 19 nt, Homo sapiens
  misc_RNA (1)...(19): siRNA sense strand
caaugcuucuguauaacaa

SEQ ID NO: 2057211 - RNA, 19 nt, Homo sapiens
  misc_RNA (1)...(19): siRNA sense strand
gacuugaccuaaaucacaa

SEQ ID NO: 2057212 - RNA, 19 nt, Homo sapiens
  misc_RNA (1)...(19): siRNA sense strand
gcauacagagccuaucaga

SEQ ID NO: 2057213 - RNA, 19 nt, Homo sapiens
  misc_RNA (1)...(19): siRNA sense strand
ugacaauggcagaaacuuu

SEQ ID NO: 2057214 - RNA, 19 nt, Homo sapiens
  misc_RNA (1)...(19): siRNA sense strand
gaauacuucgagaacauaa

SEQ ID NO: 2057215 - RNA, 19 nt, Homo sapiens
  misc_RNA (1)...(19): siRNA sense strand
gaugaauacuucgagaaca

SEQ ID NO: 2057216 - RNA, 19 nt, Homo sapiens
  misc_RNA (1)...(19): siRNA sense strand
ugucaacugugaauauuag

SEQ ID NO: 2057217 - RNA, 19 nt, Homo sapiens
  misc_RNA (1)...(19): siRNA sense strand
gcagaaagcaaaagcauug

SEQ ID NO: 2057218 - RNA, 19 nt, Homo sapiens
  misc_RNA (1)...(19): siRNA sense strand
ggagaaaacauugcugaua

SEQ ID NO: 2057219 - RNA, 19 nt, Homo sapiens
  misc_RNA (1)...(19): siRNA sense strand
aaagucagauggauauaac

SEQ ID NO: 2057220 - RNA, 19 nt, Homo sapiens
  misc_RNA (1)...(19): siRNA sense strand
caaacugaauaaugaguac

SEQ ID NO: 2057221 - RNA, 19 nt, Homo sapiens
  misc_RNA (1)...(19): siRNA sense strand
cggcuauccugaugacauu

SEQ ID NO: 2057222 - RNA, 19 nt, Homo sapiens
  misc_RNA (1)...(19): siRNA sense strand
gaagaugugguuguuuaug

SEQ ID NO: 2057223 - RNA, 19 nt, Homo sapiens
  misc_RNA (1)...(19): siRNA sense strand
gauaaguggagcagcugua

SEQ ID NO: 2057224 - RNA, 19 nt, Homo sapiens
  misc_RNA (1)...(19): siRNA sense strand
acagagccuaucagaauua

SEQ ID NO: 2057225 - RNA, 19 nt, Homo sapiens
  misc_RNA (1)...(19): siRNA sense strand
uacagagccuaucagaauu

SEQ ID NO: 2057226 - RNA, 19 nt, Homo sapiens
  misc_RNA (1)...(19): siRNA sense strand
gaaugcacuggaaucuaua

SEQ ID NO: 2057227 - RNA, 19 nt, Homo sapiens
  misc_RNA (1)...(19): siRNA sense strand
uuaauguccuggagauuca

SEQ ID NO: 2057228 - RNA, 19 nt, Homo sapiens
  misc_RNA (1)...(19): siRNA sense strand
ggcuaaaccugaagaucga

SEQ ID NO: 2057229 - RNA, 19 nt, Homo sapiens
  misc_RNA (1)...(19): siRNA sense strand
cagauugauucgucaggaa

SEQ ID NO: 2057230 - RNA, 19 nt, Homo sapiens
  misc_RNA (1)...(19): siRNA sense strand
uauaguagcagugcagaaa

SEQ ID NO: 2057231 - RNA, 19 nt, Homo sapiens
  misc_RNA (1)...(19): siRNA sense strand
ggauuugauugcacagauc

SEQ ID NO: 2057232 - RNA, 19 nt, Homo sapiens
  misc_RNA (1)...(19): siRNA sense strand
ggaagaugugguuguuuau

SEQ ID NO: 2057233 - RNA, 19 nt, Homo sapiens
  misc_RNA (1)...(19): siRNA sense strand
cagcuugcuuuggaaauga

SEQ ID NO: 2057234 - RNA, 19 nt, Homo sapiens
  misc_RNA (1)...(19): siRNA sense strand
caaacuguuaccagacaua

SEQ ID NO: 2057235 - RNA, 19 nt, Homo sapiens
  misc_RNA (1)...(19): siRNA sense strand
acccaaaacugaagauaua

SEQ ID NO: 2057236 - RNA, 19 nt, Homo sapiens
  misc_RNA (1)...(19): siRNA sense strand
ggugugguguggaaccuau

SEQ ID NO: 2057237 - RNA, 19 nt, Homo sapiens
  misc_RNA (1)...(19): siRNA sense strand
acucaacagucugcaagua

SEQ ID NO: 2057238 - RNA, 19 nt, Homo sapiens
  misc_RNA (1)...(19): siRNA sense strand
uguuuaugcuccagaauau

SEQ ID NO: 2057239 - RNA, 19 nt, Homo sapiens
  misc_RNA (1)...(19): siRNA sense strand
ccagcuugcuuuggaaaug

SEQ ID NO: 2057240 - RNA, 19 nt, Homo sapiens
  misc_RNA (1)...(19): siRNA sense strand
gggcaucggcauggucaua

SEQ ID NO: 2057241 - RNA, 19 nt, Homo sapiens
  misc_RNA (1)...(19): siRNA sense strand
augaguaccucgaguugaa

SEQ ID NO: 2057242 - RNA, 19 nt, Homo sapiens
  misc_RNA (1)...(19): siRNA sense strand
aaccuacgaugaugguauu

SEQ ID NO: 2057243 - RNA, 19 nt, Homo sapiens
  misc_RNA (1)...(19): siRNA sense strand
ggccagaguaugcgguuaa

SEQ ID NO: 2057244 - RNA, 19 nt, Homo sapiens
  misc_RNA (1)...(19): siRNA sense strand
ggacaaagaugaguggaua

SEQ ID NO: 2057245 - RNA, 19 nt, Homo sapiens
  misc_RNA (1)...(19): siRNA sense strand
gaaaucaugucaacuguga

SEQ ID NO: 2057246 - RNA, 19 nt, Homo sapiens
  misc_RNA (1)...(19): siRNA sense strand
gaaaaggccuuagcaauua

SEQ ID NO: 2057247 - RNA, 19 nt, Homo sapiens
  misc_RNA (1)...(19): siRNA sense strand
gcacuggaaucuauaaaga

SEQ ID NO: 2057248 - RNA, 19 nt, Homo sapiens
  misc_RNA (1)...(19): siRNA sense strand
gcacagauccgagaaguuu

SEQ ID NO: 2057249 - RNA, 19 nt, Homo sapiens
  misc_RNA (1)...(19): siRNA sense strand
ccagagaucuucaaaauuu

SEQ ID NO: 2057250 - RNA, 19 nt, Homo sapiens
  misc_RNA (1)...(19): siRNA sense strand
gacaauggcagaaacuuua

SEQ ID NO: 2057251 - RNA, 19 nt, Homo sapiens
  misc_RNA (1)...(19): siRNA sense strand
gaaaagaagugccggguuu

SEQ ID NO: 2057252 - RNA, 19 nt, Homo sapiens
  misc_RNA (1)...(19): siRNA sense strand
ggacagcaccuuaauggaa

SEQ ID NO: 2057253 - RNA, 19 nt, Homo sapiens
  misc_RNA (1)...(19): siRNA sense strand
gagaaaacauugcugauaa

SEQ ID NO: 2057254 - RNA, 19 nt, Homo sapiens
  misc_RNA (1)...(19): siRNA sense strand
ugaaugcacuggaaucuau

SEQ ID NO: 2057255 - RNA, 19 nt, Homo sapiens
  misc_RNA (1)...(19): siRNA sense strand
gaaauucagccaaaguaaa

SEQ ID NO: 2057256 - RNA, 19 nt, Homo sapiens
  misc_RNA (1)...(19): siRNA sense strand
gagaaaagguggacaaaga

SEQ ID NO: 2057257 - RNA, 19 nt, Homo sapiens
  misc_RNA (1)...(19): siRNA sense strand
aggaagaugugguuguuua

SEQ ID NO: 2057258 - RNA, 19 nt, Homo sapiens
  misc_RNA (1)...(19): siRNA sense strand
ccaggcaauuucaggauua

SEQ ID NO: 2057259 - RNA, 19 nt, Homo sapiens
  misc_RNA (1)...(19): siRNA sense strand
gaaagucagauggauauaa

SEQ ID NO: 2057260 - RNA, 19 nt, Homo sapiens
  misc_RNA (1)...(19): siRNA sense strand
guaaacaacugaagaagcu

SEQ ID NO: 2057261 - RNA, 19 nt, Homo sapiens
  misc_RNA (1)...(19): siRNA sense strand
gcacugaugauaagaauuc

SEQ ID NO: 2057262 - RNA, 19 nt, Homo sapiens
  misc_RNA (1)...(19): siRNA sense strand
gaaccuauaggccagagua

SEQ ID NO: 2057263 - RNA, 19 nt, Homo sapiens
  misc_RNA (1)...(19): siRNA sense strand
uggagaaccucuacucaaa

SEQ ID NO: 2057264 - RNA, 19 nt, Homo sapiens
  misc_RNA (1)...(19): siRNA sense strand
gagccuaucagaauuauau

SEQ ID NO: 2057265 - RNA, 19 nt, Homo sapiens
  misc_RNA (1)...(19): siRNA sense strand
uugcacaacugaauucuaa

SEQ ID NO: 2057266 - RNA, 19 nt, Homo sapiens
  misc_RNA (1)...(19): siRNA sense strand
gaaagauguccuucaagaa

SEQ ID NO: 2057267 - RNA, 19 nt, Homo sapiens
  misc_RNA (1)...(19): siRNA sense strand
gaacuacaaagaagaugaa

SEQ ID NO: 2057268 - RNA, 19 nt, Homo sapiens
  misc_RNA (1)...(19): siRNA sense strand
ggaggcugguugaaacgua

SEQ ID NO: 2057269 - RNA, 19 nt, Homo sapiens
  misc_RNA (1)...(19): siRNA sense strand
ugaccuaaaucacaaacaa

SEQ ID NO: 2057270 - RNA, 19 nt, Homo sapiens
  misc_RNA (1)...(19): siRNA sense strand
ggacuugaccuaaaucaca

SEQ ID NO: 2057271 - RNA, 19 nt, Homo sapiens
  misc_RNA (1)...(19): siRNA sense strand
gauccaaugcuucuguaua

SEQ ID NO: 2057272 - RNA, 19 nt, Homo sapiens
  misc_RNA (1)...(19): siRNA sense strand
gaaaugauccaaugcuucu

SEQ ID NO: 2057273 - RNA, 19 nt, Homo sapiens
  misc_RNA (1)...(19): siRNA sense strand
aaagaugaguggauaagug

SEQ ID NO: 2057274 - RNA, 19 nt, Homo sapiens
  misc_RNA (1)...(19): siRNA sense strand
caaaguaaacaacugaaga

SEQ ID NO: 2057275 - RNA, 19 nt, Homo sapiens
  misc_RNA (1)...(19): siRNA sense strand
gacagcaccuuaauggaau

SEQ ID NO: 2057276 - RNA, 19 nt, Homo sapiens
  misc_RNA (1)...(19): siRNA sense strand
cgacuuggccucccuucua

SEQ ID NO: 2057277 - RNA, 19 nt, Homo sapiens
  misc_RNA (1)...(19): siRNA sense strand
guaucaguauggaaacuuu

SEQ ID NO: 2057278 - RNA, 19 nt, Homo sapiens
  misc_RNA (1)...(19): siRNA sense strand
uagaugaccucacuuggau

SEQ ID NO: 2057279 - RNA, 19 nt, Homo sapiens
  misc_RNA (1)...(19): siRNA sense strand
auacagagccuaucagaau

SEQ ID NO: 2057280 - RNA, 19 nt, Homo sapiens
  misc_RNA (1)...(19): siRNA sense strand
cugaugacauuguuucaaa

SEQ ID NO: 2057281 - RNA, 19 nt, Homo sapiens
  misc_RNA (1)...(19): siRNA sense strand
aaagagagcugaagaaaag

SEQ ID NO: 2057282 - RNA, 19 nt, Homo sapiens
  misc_RNA (1)...(19): siRNA sense strand
gcacaacugaauucuaaau

SEQ ID NO: 2057283 - RNA, 19 nt, Homo sapiens
  misc_RNA (1)...(19): siRNA sense strand
cauaauggaucuuguaagc

SEQ ID NO: 2057284 - RNA, 19 nt, Homo sapiens
  misc_RNA (1)...(19): siRNA sense strand
gaggcugguugaaacguaa

SEQ ID NO: 2057285 - RNA, 19 nt, Homo sapiens
  misc_RNA (1)...(19): siRNA sense strand
ggucauaggacacgaaauc

SEQ ID NO: 2057286 - RNA, 19 nt, Homo sapiens
  misc_RNA (1)...(19): siRNA sense strand
aaagauugcccaucgauga

SEQ ID NO: 2057287 - RNA, 19 nt, Homo sapiens
  misc_RNA (1)...(19): siRNA sense strand
gagaaccucuacucaaacu

SEQ ID NO: 2057288 - RNA, 19 nt, Homo sapiens
  misc_RNA (1)...(19): siRNA sense strand
guacagcauauguggauuu

SEQ ID NO: 2057289 - RNA, 19 nt, Homo sapiens
  misc_RNA (1)...(19): siRNA sense strand
gaugauaagaauucuguga

SEQ ID NO: 2057290 - RNA, 19 nt, Homo sapiens
  misc_RNA (1)...(19): siRNA sense strand
gaaccucuacucaaacugu

SEQ ID NO: 2057291 - RNA, 19 nt, Homo sapiens
  misc_RNA (1)...(19): siRNA sense strand
auccaaugcuucuguauaa

SEQ ID NO: 2057292 - RNA, 19 nt, Homo sapiens
  misc_RNA (1)...(19): siRNA sense strand
ccgcaagaauucauacaug

SEQ ID NO: 2057293 - RNA, 19 nt, Homo sapiens
  misc_RNA (1)...(19): siRNA sense strand
cuacaaagaagaugaauac

SEQ ID NO: 2057294 - RNA, 19 nt, Homo sapiens
  misc_RNA (1)...(19): siRNA sense strand
caugucaacugugaauauu

SEQ ID NO: 2057295 - RNA, 19 nt, Homo sapiens
  misc_RNA (1)...(19): siRNA sense strand
ugaggaagaugugguuguu

SEQ ID NO: 2057296 - RNA, 19 nt, Homo sapiens
  misc_RNA (1)...(19): siRNA sense strand
uaauggaggucuuggucaa

SEQ ID NO: 2057297 - RNA, 19 nt, Homo sapiens
  misc_RNA (1)...(19): siRNA sense strand
ggccuuagcaauuaaagaa

SEQ ID NO: 2057298 - RNA, 19 nt, Homo sapiens
  misc_RNA (1)...(19): siRNA sense strand
ggauggaugccgagacaaa

SEQ ID NO: 2057299 - RNA, 19 nt, Homo sapiens
  misc_RNA (1)...(19): siRNA sense strand
ucagaaagucagauggaua

SEQ ID NO: 2057300 - RNA, 19 nt, Homo sapiens
  misc_RNA (1)...(19): siRNA sense strand
uggagcagcuguagucaau

SEQ ID NO: 2057301 - RNA, 19 nt, Homo sapiens
  misc_RNA (1)...(19): siRNA sense strand
uacaaggaguccagaaaug

SEQ ID NO: 2057302 - RNA, 19 nt, Homo sapiens
  misc_RNA (1)...(19): siRNA sense strand
cagaaagucagauggauau

SEQ ID NO: 2057303 - RNA, 19 nt, Homo sapiens
  misc_RNA (1)...(19): siRNA sense strand
gcacaguccaggcaauuuc

SEQ ID NO: 2057304 - RNA, 19 nt, Homo sapiens
  misc_RNA (1)...(19): siRNA sense strand
uggcagaaacuuuaacaaa

SEQ ID NO: 2057305 - RNA, 19 nt, Homo sapiens
  misc_RNA (1)...(19): siRNA sense strand
gagcagcuguagucaaugc

SEQ ID NO: 2057306 - RNA, 19 nt, Homo sapiens
  misc_RNA (1)...(19): siRNA sense strand
ggucuuguauaaaugaauc

SEQ ID NO: 2057307 - RNA, 19 nt, Homo sapiens
  misc_RNA (1)...(19): siRNA sense strand
ugaagaagcuccgagaaaa

SEQ ID NO: 2057308 - RNA, 19 nt, Homo sapiens
  misc_RNA (1)...(19): siRNA sense strand
gagacguugugcaaacuau

SEQ ID NO: 2057309 - RNA, 19 nt, Homo sapiens
  misc_RNA (1)...(19): siRNA sense strand
cagcauauguggauuuuau

SEQ ID NO: 2057310 - RNA, 19 nt, Homo sapiens
  misc_RNA (1)...(19): siRNA sense strand
caaugcuucuguauaacaa

SEQ ID NO: 2057311 - RNA, 19 nt, Homo sapiens
  misc_RNA (1)...(19): siRNA sense strand
gacuugaccuaaaucacaa

SEQ ID NO: 2057312 - RNA, 19 nt, Homo sapiens
  misc_RNA (1)...(19): siRNA sense strand
gcauacagagccuaucaga

SEQ ID NO: 2057313 - RNA, 19 nt, Homo sapiens
  misc_RNA (1)...(19): siRNA sense strand
ugacaauggcagaaacuuu

SEQ ID NO: 2057314 - RNA, 19 nt, Homo sapiens
  misc_RNA (1)...(19): siRNA sense strand
gaauacuucgagaacauaa

SEQ ID NO: 2057315 - RNA, 19 nt, Homo sapiens
  misc_RNA (1)...(19): siRNA sense strand
gaugaauacuucgagaaca

SEQ ID NO: 2057316 - RNA, 19 nt, Homo sapiens
  misc_RNA (1)...(19): siRNA sense strand
ugucaacugugaauauuag

SEQ ID NO: 2057317 - RNA, 19 nt, Homo sapiens
  misc_RNA (1)...(19): siRNA sense strand
gcagaaagcaaaagcauug

SEQ ID NO: 2057318 - RNA, 19 nt, Homo sapiens
  misc_RNA (1)...(19): siRNA sense strand
ggagaaaacauugcugaua

SEQ ID NO: 2057319 - RNA, 19 nt, Homo sapiens
  misc_RNA (1)...(19): siRNA sense strand
aaagucagauggauauaac

SEQ ID NO: 2057320 - RNA, 19 nt, Homo sapiens
  misc_RNA (1)...(19): siRNA sense strand
caaacugaauaaugaguac

SEQ ID NO: 2057321 - RNA, 19 nt, Homo sapiens
  misc_RNA (1)...(19): siRNA sense strand
cggcuauccugaugacauu

SEQ ID NO: 2057322 - RNA, 19 nt, Homo sapiens
  misc_RNA (1)...(19): siRNA sense strand
gaagaugugguuguuuaug

SEQ ID NO: 2057323 - RNA, 19 nt, Homo sapiens
  misc_RNA (1)...(19): siRNA sense strand
gauaaguggagcagcugua

SEQ ID NO: 2057324 - RNA, 19 nt, Homo sapiens
  misc_RNA (1)...(19): siRNA sense strand
acagagccuaucagaauua

SEQ ID NO: 2057325 - RNA, 19 nt, Homo sapiens
  misc_RNA (1)...(19): siRNA sense strand
uacagagccuaucagaauu

SEQ ID NO: 2057326 - RNA, 19 nt, Homo sapiens
  misc_RNA (1)...(19): siRNA sense strand
gaaugcacuggaaucuaua

SEQ ID NO: 2057327 - RNA, 19 nt, Homo sapiens
  misc_RNA (1)...(19): siRNA sense strand
uuaauguccuggagauuca

SEQ ID NO: 2057328 - RNA, 19 nt, Homo sapiens
  misc_RNA (1)...(19): siRNA sense strand
ggcuaaaccugaagaucga

SEQ ID NO: 2057329 - RNA, 19 nt, Homo sapiens
  misc_RNA (1)...(19): siRNA sense strand
cagauugauucgucaggaa

SEQ ID NO: 2057330 - RNA, 19 nt, Homo sapiens
  misc_RNA (1)...(19): siRNA sense strand
uauaguagcagugcagaaa

SEQ ID NO: 2057331 - RNA, 19 nt, Homo sapiens
  misc_RNA (1)...(19): siRNA sense strand
ggauuugauugcacagauc

SEQ ID NO: 2057332 - RNA, 19 nt, Homo sapiens
  misc_RNA (1)...(19): siRNA sense strand
ggaagaugugguuguuuau

SEQ ID NO: 2057333 - RNA, 19 nt, Homo sapiens
  misc_RNA (1)...(19): siRNA sense strand
cagcuugcuuuggaaauga

SEQ ID NO: 2057334 - RNA, 19 nt, Homo sapiens
  misc_RNA (1)...(19): siRNA sense strand
caaacuguuaccagacaua

SEQ ID NO: 2057335 - RNA, 19 nt, Homo sapiens
  misc_RNA (1)...(19): siRNA sense strand
acccaaaacugaagauaua

SEQ ID NO: 2057336 - RNA, 19 nt, Homo sapiens
  misc_RNA (1)...(19): siRNA sense strand
ggugugguguggaaccuau

SEQ ID NO: 2057337 - RNA, 19 nt, Homo sapiens
  misc_RNA (1)...(19): siRNA sense strand
acucaacagucugcaagua

SEQ ID NO: 2057338 - RNA, 19 nt, Homo sapiens
  misc_RNA (1)...(19): siRNA sense strand
uguuuaugcuccagaauau

SEQ ID NO: 2057339 - RNA, 19 nt, Homo sapiens
  misc_RNA (1)...(19): siRNA sense strand
ccagcuugcuuuggaaaug

SEQ ID NO: 2057340 - RNA, 19 nt, Homo sapiens
  misc_RNA (1)...(19): siRNA sense strand
gggcaucggcauggucaua

SEQ ID NO: 2057341 - RNA, 19 nt, Homo sapiens
  misc_RNA (1)...(19): siRNA sense strand
augaguaccucgaguugaa

SEQ ID NO: 2057342 - RNA, 19 nt, Homo sapiens
  misc_RNA (1)...(19): siRNA sense strand
aaccuacgaugaugguauu

SEQ ID NO: 2057343 - RNA, 19 nt, Homo sapiens
  misc_RNA (1)...(19): siRNA sense strand
ggccagaguaugcgguuaa

SEQ ID NO: 2057344 - RNA, 19 nt, Homo sapiens
  misc_RNA (1)...(19): siRNA sense strand
ggacaaagaugaguggaua

SEQ ID NO: 2057345 - RNA, 19 nt, Homo sapiens
  misc_RNA (1)...(19): siRNA sense strand
gaaaucaugucaacuguga

SEQ ID NO: 2057346 - RNA, 19 nt, Homo sapiens
  misc_RNA (1)...(19): siRNA sense strand
gaaaaggccuuagcaauua

SEQ ID NO: 2057347 - RNA, 19 nt, Homo sapiens
  misc_RNA (1)...(19): siRNA sense strand
gcacuggaaucuauaaaga

SEQ ID NO: 2057348 - RNA, 19 nt, Homo sapiens
  misc_RNA (1)...(19): siRNA sense strand
gcacagauccgagaaguuu

SEQ ID NO: 2057349 - RNA, 19 nt, Homo sapiens
  misc_RNA (1)...(19): siRNA sense strand
ccagagaucuucaaaauuu

SEQ ID NO: 2057350 - RNA, 19 nt, Homo sapiens
  misc_RNA (1)...(19): siRNA sense strand
gacaauggcagaaacuuua

SEQ ID NO: 2057351 - RNA, 19 nt, Homo sapiens
  misc_RNA (1)...(19): siRNA sense strand
gaaaagaagugccggguuu

SEQ ID NO: 2057352 - RNA, 19 nt, Homo sapiens
  misc_RNA (1)...(19): siRNA sense strand
ggacagcaccuuaauggaa

SEQ ID NO: 2057353 - RNA, 19 nt, Homo sapiens
  misc_RNA (1)...(19): siRNA sense strand
gagaaaacauugcugauaa

SEQ ID NO: 2057354 - RNA, 19 nt, Homo sapiens
  misc_RNA (1)...(19): siRNA sense strand
ugaaugcacuggaaucuau

SEQ ID NO: 2057355 - RNA, 19 nt, Homo sapiens
  misc_RNA (1)...(19): siRNA sense strand
gaaauucagccaaaguaaa

SEQ ID NO: 2057356 - RNA, 19 nt, Homo sapiens
  misc_RNA (1)...(19): siRNA sense strand
gagaaaagguggacaaaga

SEQ ID NO: 2057357 - RNA, 19 nt, Homo sapiens
  misc_RNA (1)...(19): siRNA sense strand
aggaagaugugguuguuua

SEQ ID NO: 2057358 - RNA, 19 nt, Homo sapiens
  misc_RNA (1)...(19): siRNA sense strand
ccaggcaauuucaggauua

SEQ ID NO: 2057359 - RNA, 19 nt, Homo sapiens
  misc_RNA (1)...(19): siRNA sense strand
gaaagucagauggauauaa

SEQ ID NO: 2057360 - RNA, 19 nt, Homo sapiens
  misc_RNA (1)...(19): siRNA sense strand
guaaacaacugaagaagcu

SEQ ID NO: 2057361 - RNA, 19 nt, Homo sapiens
  misc_RNA (1)...(19): siRNA sense strand
gcacugaugauaagaauuc

SEQ ID NO: 2057362 - RNA, 19 nt, Homo sapiens
  misc_RNA (1)...(19): siRNA sense strand
gaaccuauaggccagagua

SEQ ID NO: 2057363 - RNA, 19 nt, Homo sapiens
  misc_RNA (1)...(19): siRNA sense strand
uggagaaccucuacucaaa

SEQ ID NO: 2057364 - RNA, 19 nt, Homo sapiens
  misc_RNA (1)...(19): siRNA sense strand
gagccuaucagaauuauau

SEQ ID NO: 2057365 - RNA, 19 nt, Homo sapiens
  misc_RNA (1)...(19): siRNA sense strand
uugcacaacugaauucuaa

SEQ ID NO: 2057366 - RNA, 19 nt, Homo sapiens
  misc_RNA (1)...(19): siRNA sense strand
gaaagauguccuucaagaa

SEQ ID NO: 2057367 - RNA, 19 nt, Homo sapiens
  misc_RNA (1)...(19): siRNA sense strand
gaacuacaaagaagaugaa

SEQ ID NO: 2057368 - RNA, 19 nt, Homo sapiens
  misc_RNA (1)...(19): siRNA sense strand
ggaggcugguugaaacgua

SEQ ID NO: 2057369 - RNA, 19 nt, Homo sapiens
  misc_RNA (1)...(19): siRNA sense strand
ugaccuaaaucacaaacaa

SEQ ID NO: 2057370 - RNA, 19 nt, Homo sapiens
  misc_RNA (1)...(19): siRNA sense strand
ggacuugaccuaaaucaca

SEQ ID NO: 2057371 - RNA, 19 nt, Homo sapiens
  misc_RNA (1)...(19): siRNA sense strand
gauccaaugcuucuguaua

SEQ ID NO: 2057372 - RNA, 19 nt, Homo sapiens
  misc_RNA (1)...(19): siRNA sense strand
gaaaugauccaaugcuucu

SEQ ID NO: 2057373 - RNA, 19 nt, Homo sapiens
  misc_RNA (1)...(19): siRNA sense strand
aaagaugaguggauaagug

SEQ ID NO: 2057374 - RNA, 19 nt, Homo sapiens
  misc_RNA (1)...(19): siRNA sense strand
caaaguaaacaacugaaga

SEQ ID NO: 2057375 - RNA, 19 nt, Homo sapiens
  misc_RNA (1)...(19): siRNA sense strand
gacagcaccuuaauggaau

SEQ ID NO: 2057376 - RNA, 19 nt, Homo sapiens
  misc_RNA (1)...(19): siRNA sense strand
cgacuuggccucccuucua

SEQ ID NO: 2057377 - RNA, 19 nt, Homo sapiens
  misc_RNA (1)...(19): siRNA sense strand
guaucaguauggaaacuuu

SEQ ID NO: 2057378 - RNA, 19 nt, Homo sapiens
  misc_RNA (1)...(19): siRNA sense strand
uagaugaccucacuuggau

SEQ ID NO: 2057379 - RNA, 19 nt, Homo sapiens
  misc_RNA (1)...(19): siRNA sense strand
auacagagccuaucagaau

SEQ ID NO: 2057380 - RNA, 19 nt, Homo sapiens
  misc_RNA (1)...(19): siRNA sense strand
cugaugacauuguuucaaa

SEQ ID NO: 2057381 - RNA, 19 nt, Homo sapiens
  misc_RNA (1)...(19): siRNA sense strand
aaagagagcugaagaaaag

SEQ ID NO: 2057382 - RNA, 19 nt, Homo sapiens
  misc_RNA (1)...(19): siRNA sense strand
gcacaacugaauucuaaau

SEQ ID NO: 2057383 - RNA, 19 nt, Homo sapiens
  misc_RNA (1)...(19): siRNA sense strand
cauaauggaucuuguaagc

SEQ ID NO: 2057384 - RNA, 19 nt, Homo sapiens
  misc_RNA (1)...(19): siRNA sense strand
gaggcugguugaaacguaa

SEQ ID NO: 2057385 - RNA, 19 nt, Homo sapiens
  misc_RNA (1)...(19): siRNA sense strand
ggucauaggacacgaaauc

SEQ ID NO: 2057386 - RNA, 19 nt, Homo sapiens
  misc_RNA (1)...(19): siRNA sense strand
aaagauugcccaucgauga

SEQ ID NO: 2057387 - RNA, 19 nt, Homo sapiens
  misc_RNA (1)...(19): siRNA sense strand
gagaaccucuacucaaacu

SEQ ID NO: 2057388 - RNA, 19 nt, Homo sapiens
  misc_RNA (1)...(19): siRNA sense strand
guacagcauauguggauuu

SEQ ID NO: 2057389 - RNA, 19 nt, Homo sapiens
  misc_RNA (1)...(19): siRNA sense strand
gaugauaagaauucuguga

SEQ ID NO: 2057390 - RNA, 19 nt, Homo sapiens
  misc_RNA (1)...(19): siRNA sense strand
gaaccucuacucaaacugu

SEQ ID NO: 2057391 - RNA, 19 nt, Homo sapiens
  misc_RNA (1)...(19): siRNA sense strand
auccaaugcuucuguauaa

SEQ ID NO: 2057392 - RNA, 19 nt, Homo sapiens
  misc_RNA (1)...(19): siRNA sense strand
ccgcaagaauucauacaug

SEQ ID NO: 2057393 - RNA, 19 nt, Homo sapiens
  misc_RNA (1)...(19): siRNA sense strand
cuacaaagaagaugaauac

SEQ ID NO: 2057394 - RNA, 19 nt, Homo sapiens
  misc_RNA (1)...(19): siRNA sense strand
caugucaacugugaauauu

SEQ ID NO: 2057395 - RNA, 19 nt, Homo sapiens
  misc_RNA (1)...(19): siRNA sense strand
ugaggaagaugugguuguu

SEQ ID NO: 2057396 - RNA, 19 nt, Homo sapiens
  misc_RNA (1)...(19): siRNA sense strand
uaauggaggucuuggucaa

SEQ ID NO: 2057397 - RNA, 19 nt, Homo sapiens
  misc_RNA (1)...(19): siRNA sense strand
ggccuuagcaauuaaagaa

SEQ ID NO: 2057398 - RNA, 19 nt, Homo sapiens
  misc_RNA (1)...(19): siRNA sense strand
ggauggaugccgagacaaa

SEQ ID NO: 2057399 - RNA, 19 nt, Homo sapiens
  misc_RNA (1)...(19): siRNA sense strand
ucagaaagucagauggaua

SEQ ID NO: 2057400 - RNA, 19 nt, Homo sapiens
  misc_RNA (1)...(19): siRNA sense strand
uggagcagcuguagucaau

SEQ ID NO: 2057401 - RNA, 19 nt, Homo sapiens
  misc_RNA (1)...(19): siRNA sense strand
uacaaggaguccagaaaug

SEQ ID NO: 2057402 - RNA, 19 nt, Homo sapiens
  misc_RNA (1)...(19): siRNA sense strand
cagaaagucagauggauau

SEQ ID NO: 2057403 - RNA, 19 nt, Homo sapiens
  misc_RNA (1)...(19): siRNA sense strand
gcacaguccaggcaauuuc

SEQ ID NO: 2057404 - RNA, 19 nt, Homo sapiens
  misc_RNA (1)...(19): siRNA sense strand
uggcagaaacuuuaacaaa

SEQ ID NO: 2057405 - RNA, 19 nt, Homo sapiens
  misc_RNA (1)...(19): siRNA sense strand
gagcagcuguagucaaugc

SEQ ID NO: 2057406 - RNA, 19 nt, Homo sapiens
  misc_RNA (1)...(19): siRNA sense strand
ggucuuguauaaaugaauc

SEQ ID NO: 2057407 - RNA, 19 nt, Homo sapiens
  misc_RNA (1)...(19): siRNA sense strand
ugaagaagcuccgagaaaa

SEQ ID NO: 2057408 - RNA, 19 nt, Homo sapiens
  misc_RNA (1)...(19): siRNA sense strand
gagacguugugcaaacuau

SEQ ID NO: 2057409 - RNA, 19 nt, Homo sapiens
  misc_RNA (1)...(19): siRNA sense strand
cagcauauguggauuuuau

SEQ ID NO: 2057410 - RNA, 19 nt, Homo sapiens
  misc_RNA (1)...(19): siRNA sense strand
caaugcuucuguauaacaa

SEQ ID NO: 2057411 - RNA, 19 nt, Homo sapiens
  misc_RNA (1)...(19): siRNA sense strand
gacuugaccuaaaucacaa

SEQ ID NO: 2057412 - RNA, 19 nt, Homo sapiens
  misc_RNA (1)...(19): siRNA sense strand
gcauacagagccuaucaga

SEQ ID NO: 2057413 - RNA, 19 nt, Homo sapiens
  misc_RNA (1)...(19): siRNA sense strand
ugacaauggcagaaacuuu

SEQ ID NO: 2057414 - RNA, 19 nt, Homo sapiens
  misc_RNA (1)...(19): siRNA sense strand
gaauacuucgagaacauaa

SEQ ID NO: 2057415 - RNA, 19 nt, Homo sapiens
  misc_RNA (1)...(19): siRNA sense strand
gaugaauacuucgagaaca

SEQ ID NO: 2057416 - RNA, 19 nt, Homo sapiens
  misc_RNA (1)...(19): siRNA sense strand
ugucaacugugaauauuag

SEQ ID NO: 2057417 - RNA, 19 nt, Homo sapiens
  misc_RNA (1)...(19): siRNA sense strand
gcagaaagcaaaagcauug

SEQ ID NO: 2057418 - RNA, 19 nt, Homo sapiens
  misc_RNA (1)...(19): siRNA sense strand
ggagaaaacauugcugaua

SEQ ID NO: 2057419 - RNA, 19 nt, Homo sapiens
  misc_RNA (1)...(19): siRNA sense strand
aaagucagauggauauaac

SEQ ID NO: 2057420 - RNA, 19 nt, Homo sapiens
  misc_RNA (1)...(19): siRNA sense strand
caaacugaauaaugaguac

SEQ ID NO: 2057421 - RNA, 19 nt, Homo sapiens
  misc_RNA (1)...(19): siRNA sense strand
cggcuauccugaugacauu

SEQ ID NO: 2057422 - RNA, 19 nt, Homo sapiens
  misc_RNA (1)...(19): siRNA sense strand
gaagaugugguuguuuaug

SEQ ID NO: 2057423 - RNA, 19 nt, Homo sapiens
  misc_RNA (1)...(19): siRNA sense strand
gauaaguggagcagcugua

SEQ ID NO: 2057424 - RNA, 19 nt, Homo sapiens
  misc_RNA (1)...(19): siRNA sense strand
acagagccuaucagaauua

SEQ ID NO: 2057425 - RNA, 19 nt, Homo sapiens
  misc_RNA (1)...(19): siRNA sense strand
uacagagccuaucagaauu

SEQ ID NO: 2057426 - RNA, 19 nt, Homo sapiens
  misc_RNA (1)...(19): siRNA sense strand
gaaugcacuggaaucuaua

SEQ ID NO: 2057427 - RNA, 19 nt, Homo sapiens
  misc_RNA (1)...(19): siRNA sense strand
uuaauguccuggagauuca

SEQ ID NO: 2057428 - RNA, 19 nt, Homo sapiens
  misc_RNA (1)...(19): siRNA sense strand
ggcuaaaccugaagaucga

SEQ ID NO: 2057429 - RNA, 19 nt, Homo sapiens
  misc_RNA (1)...(19): siRNA sense strand
cagauugauucgucaggaa

SEQ ID NO: 2057430 - RNA, 19 nt, Homo sapiens
  misc_RNA (1)...(19): siRNA sense strand
uauaguagcagugcagaaa

SEQ ID NO: 2057431 - RNA, 19 nt, Homo sapiens
  misc_RNA (1)...(19): siRNA sense strand
ggauuugauugcacagauc

SEQ ID NO: 2057432 - RNA, 19 nt, Homo sapiens
  misc_RNA (1)...(19): siRNA sense strand
ggaagaugugguuguuuau

SEQ ID NO: 2057433 - RNA, 19 nt, Homo sapiens
  misc_RNA (1)...(19): siRNA sense strand
cagcuugcuuuggaaauga

SEQ ID NO: 2057434 - RNA, 19 nt, Homo sapiens
  misc_RNA (1)...(19): siRNA sense strand
caaacuguuaccagacaua

SEQ ID NO: 2057435 - RNA, 19 nt, Homo sapiens
  misc_RNA (1)...(19): siRNA sense strand
acccaaaacugaagauaua

SEQ ID NO: 2057436 - RNA, 19 nt, Homo sapiens
  misc_RNA (1)...(19): siRNA sense strand
ggugugguguggaaccuau

SEQ ID NO: 2057437 - RNA, 19 nt, Homo sapiens
  misc_RNA (1)...(19): siRNA sense strand
acucaacagucugcaagua

SEQ ID NO: 2057438 - RNA, 19 nt, Homo sapiens
  misc_RNA (1)...(19): siRNA sense strand
uguuuaugcuccagaauau

SEQ ID NO: 2057439 - RNA, 19 nt, Homo sapiens
  misc_RNA (1)...(19): siRNA sense strand
ccagcuugcuuuggaaaug

SEQ ID NO: 2057440 - RNA, 19 nt, Homo sapiens
  misc_RNA (1)...(19): siRNA sense strand
gggcaucggcauggucaua

SEQ ID NO: 2057441 - RNA, 19 nt, Homo sapiens
  misc_RNA (1)...(19): siRNA sense strand
augaguaccucgaguugaa

SEQ ID NO: 2057442 - RNA, 19 nt, Homo sapiens
  misc_RNA (1)...(19): siRNA sense strand
aaccuacgaugaugguauu

SEQ ID NO: 2057443 - RNA, 19 nt, Homo sapiens
  misc_RNA (1)...(19): siRNA sense strand
ggccagaguaugcgguuaa

SEQ ID NO: 2057444 - RNA, 19 nt, Homo sapiens
  misc_RNA (1)...(19): siRNA sense strand
ggacaaagaugaguggaua

SEQ ID NO: 2057445 - RNA, 19 nt, Homo sapiens
  misc_RNA (1)...(19): siRNA sense strand
gaaaucaugucaacuguga

SEQ ID NO: 2057446 - RNA, 19 nt, Homo sapiens
  misc_RNA (1)...(19): siRNA sense strand
gaaaaggccuuagcaauua

SEQ ID NO: 2057447 - RNA, 19 nt, Homo sapiens
  misc_RNA (1)...(19): siRNA sense strand
gcacuggaaucuauaaaga

SEQ ID NO: 2057448 - RNA, 19 nt, Homo sapiens
  misc_RNA (1)...(19): siRNA sense strand
gcacagauccgagaaguuu

SEQ ID NO: 2057449 - RNA, 19 nt, Homo sapiens
  misc_RNA (1)...(19): siRNA sense strand
ccagagaucuucaaaauuu

SEQ ID NO: 2057450 - RNA, 19 nt, Homo sapiens
  misc_RNA (1)...(19): siRNA sense strand
gacaauggcagaaacuuua

SEQ ID NO: 2057451 - RNA, 19 nt, Homo sapiens
  misc_RNA (1)...(19): siRNA sense strand
gaaaagaagugccggguuu

SEQ ID NO: 2057452 - RNA, 19 nt, Homo sapiens
  misc_RNA (1)...(19): siRNA sense strand
ggacagcaccuuaauggaa

SEQ ID NO: 2057453 - RNA, 19 nt, Homo sapiens
  misc_RNA (1)...(19): siRNA sense strand
gagaaaacauugcugauaa

SEQ ID NO: 2057454 - RNA, 19 nt, Homo sapiens
  misc_RNA (1)...(19): siRNA sense strand
ugaaugcacuggaaucuau

SEQ ID NO: 2057455 - RNA, 19 nt, Homo sapiens
  misc_RNA (1)...(19): siRNA sense strand
gaaauucagccaaaguaaa

SEQ ID NO: 2057456 - RNA, 19 nt, Homo sapiens
  misc_RNA (1)...(19): siRNA sense strand
gagaaaagguggacaaaga

SEQ ID NO: 2057457 - RNA, 19 nt, Homo sapiens
  misc_RNA (1)...(19): siRNA sense strand
aggaagaugugguuguuua

SEQ ID NO: 2057458 - RNA, 19 nt, Homo sapiens
  misc_RNA (1)...(19): siRNA sense strand
ccaggcaauuucaggauua

SEQ ID NO: 2057459 - RNA, 19 nt, Homo sapiens
  misc_RNA (1)...(19): siRNA sense strand
gaaagucagauggauauaa

SEQ ID NO: 2057460 - RNA, 19 nt, Homo sapiens
  misc_RNA (1)...(19): siRNA sense strand
guaaacaacugaagaagcu

SEQ ID NO: 2057461 - RNA, 19 nt, Homo sapiens
  misc_RNA (1)...(19): siRNA sense strand
gcacugaugauaagaauuc

SEQ ID NO: 2057462 - RNA, 19 nt, Homo sapiens
  misc_RNA (1)...(19): siRNA sense strand
gaaccuauaggccagagua

SEQ ID NO: 2057463 - RNA, 19 nt, Homo sapiens
  misc_RNA (1)...(19): siRNA sense strand
uggagaaccucuacucaaa

SEQ ID NO: 2057464 - RNA, 19 nt, Homo sapiens
  misc_RNA (1)...(19): siRNA sense strand
gagccuaucagaauuauau

SEQ ID NO: 2057465 - RNA, 19 nt, Homo sapiens
  misc_RNA (1)...(19): siRNA sense strand
uugcacaacugaauucuaa

SEQ ID NO: 2057466 - RNA, 19 nt, Homo sapiens
  misc_RNA (1)...(19): siRNA sense strand
gaaagauguccuucaagaa

SEQ ID NO: 2057467 - RNA, 19 nt, Homo sapiens
  misc_RNA (1)...(19): siRNA sense strand
gaacuacaaagaagaugaa

SEQ ID NO: 2057468 - RNA, 19 nt, Homo sapiens
  misc_RNA (1)...(19): siRNA sense strand
ggaggcugguugaaacgua

SEQ ID NO: 2057469 - RNA, 19 nt, Homo sapiens
  misc_RNA (1)...(19): siRNA sense strand
ugaccuaaaucacaaacaa

SEQ ID NO: 2057470 - RNA, 19 nt, Homo sapiens
  misc_RNA (1)...(19): siRNA sense strand
ggacuugaccuaaaucaca

SEQ ID NO: 2057471 - RNA, 19 nt, Homo sapiens
  misc_RNA (1)...(19): siRNA sense strand
gauccaaugcuucuguaua

SEQ ID NO: 2057472 - RNA, 19 nt, Homo sapiens
  misc_RNA (1)...(19): siRNA sense strand
gaaaugauccaaugcuucu

SEQ ID NO: 2057473 - RNA, 19 nt, Homo sapiens
  misc_RNA (1)...(19): siRNA sense strand
aaagaugaguggauaagug

SEQ ID NO: 2057474 - RNA, 19 nt, Homo sapiens
  misc_RNA (1)...(19): siRNA sense strand
caaaguaaacaacugaaga

SEQ ID NO: 2057475 - RNA, 19 nt, Homo sapiens
  misc_RNA (1)...(19): siRNA sense strand
gacagcaccuuaauggaau

SEQ ID NO: 2057476 - RNA, 19 nt, Homo sapiens
  misc_RNA (1)...(19): siRNA sense strand
cgacuuggccucccuucua

SEQ ID NO: 2057477 - RNA, 19 nt, Homo sapiens
  misc_RNA (1)...(19): siRNA sense strand
guaucaguauggaaacuuu

SEQ ID NO: 2057478 - RNA, 19 nt, Homo sapiens
  misc_RNA (1)...(19): siRNA sense strand
uagaugaccucacuuggau

SEQ ID NO: 2057479 - RNA, 19 nt, Homo sapiens
  misc_RNA (1)...(19): siRNA sense strand
auacagagccuaucagaau

SEQ ID NO: 2057480 - RNA, 19 nt, Homo sapiens
  misc_RNA (1)...(19): siRNA sense strand
cugaugacauuguuucaaa

SEQ ID NO: 2057481 - RNA, 19 nt, Homo sapiens
  misc_RNA (1)...(19): siRNA sense strand
aaagagagcugaagaaaag

SEQ ID NO: 2057482 - RNA, 19 nt, Homo sapiens
  misc_RNA (1)...(19): siRNA sense strand
gcacaacugaauucuaaau

SEQ ID NO: 2057483 - RNA, 19 nt, Homo sapiens
  misc_RNA (1)...(19): siRNA sense strand
cauaauggaucuuguaagc

SEQ ID NO: 2057484 - RNA, 19 nt, Homo sapiens
  misc_RNA (1)...(19): siRNA sense strand
gaggcugguugaaacguaa

SEQ ID NO: 2057485 - RNA, 19 nt, Homo sapiens
  misc_RNA (1)...(19): siRNA sense strand
ggucauaggacacgaaauc

SEQ ID NO: 2057486 - RNA, 19 nt, Homo sapiens
  misc_RNA (1)...(19): siRNA sense strand
aaagauugcccaucgauga

SEQ ID NO: 2057487 - RNA, 19 nt, Homo sapiens
  misc_RNA (1)...(19): siRNA sense strand
gagaaccucuacucaaacu

SEQ ID NO: 2057488 - RNA, 19 nt, Homo sapiens
  misc_RNA (1)...(19): siRNA sense strand
guacagcauauguggauuu

SEQ ID NO: 2057489 - RNA, 19 nt, Homo sapiens
  misc_RNA (1)...(19): siRNA sense strand
gaugauaagaauucuguga

SEQ ID NO: 2057490 - RNA, 19 nt, Homo sapiens
  misc_RNA (1)...(19): siRNA sense strand
gaaccucuacucaaacugu

SEQ ID NO: 2057491 - RNA, 19 nt, Homo sapiens
  misc_RNA (1)...(19): siRNA sense strand
auccaaugcuucuguauaa

SEQ ID NO: 2057492 - RNA, 19 nt, Homo sapiens
  misc_RNA (1)...(19): siRNA sense strand
ccgcaagaauucauacaug

SEQ ID NO: 2057493 - RNA, 19 nt, Homo sapiens
  misc_RNA (1)...(19): siRNA sense strand
cuacaaagaagaugaauac

SEQ ID NO: 2057494 - RNA, 19 nt, Homo sapiens
  misc_RNA (1)...(19): siRNA sense strand
caugucaacugugaauauu

SEQ ID NO: 2057495 - RNA, 19 nt, Homo sapiens
  misc_RNA (1)...(19): siRNA sense strand
ugaggaagaugugguuguu

SEQ ID NO: 2057496 - RNA, 19 nt, Homo sapiens
  misc_RNA (1)...(19): siRNA sense strand
uaauggaggucuuggucaa

SEQ ID NO: 2057497 - RNA, 19 nt, Homo sapiens
  misc_RNA (1)...(19): siRNA sense strand
ggccuuagcaauuaaagaa

SEQ ID NO: 2057498 - RNA, 19 nt, Homo sapiens
  misc_RNA (1)...(19): siRNA sense strand
ggauggaugccgagacaaa

SEQ ID NO: 2057499 - RNA, 19 nt, Homo sapiens
  misc_RNA (1)...(19): siRNA sense strand
ucagaaagucagauggaua

SEQ ID NO: 2057500 - RNA, 19 nt, Homo sapiens
  misc_RNA (1)...(19): siRNA sense strand
uggagcagcuguagucaau

SEQ ID NO: 2057501 - RNA, 19 nt, Homo sapiens
  misc_RNA (1)...(19): siRNA sense strand
uacaaggaguccagaaaug

SEQ ID NO: 2057502 - RNA, 19 nt, Homo sapiens
  misc_RNA (1)...(19): siRNA sense strand
cagaaagucagauggauau

SEQ ID NO: 2057503 - RNA, 19 nt, Homo sapiens
  misc_RNA (1)...(19): siRNA sense strand
gcacaguccaggcaauuuc

SEQ ID NO: 2057504 - RNA, 19 nt, Homo sapiens
  misc_RNA (1)...(19): siRNA sense strand
uggcagaaacuuuaacaaa

SEQ ID NO: 2057505 - RNA, 19 nt, Homo sapiens
  misc_RNA (1)...(19): siRNA sense strand
gagcagcuguagucaaugc

SEQ ID NO: 2057506 - RNA, 19 nt, Homo sapiens
  misc_RNA (1)...(19): siRNA sense strand
ggucuuguauaaaugaauc

SEQ ID NO: 2057507 - RNA, 19 nt, Homo sapiens
  misc_RNA (1)...(19): siRNA sense strand
ugaagaagcuccgagaaaa

SEQ ID NO: 2057508 - RNA, 19 nt, Homo sapiens
  misc_RNA (1)...(19): siRNA sense strand
gagacguugugcaaacuau

SEQ ID NO: 2057509 - RNA, 19 nt, Homo sapiens
  misc_RNA (1)...(19): siRNA sense strand
cagcauauguggauuuuau

SEQ ID NO: 2057510 - RNA, 19 nt, Homo sapiens
  misc_RNA (1)...(19): siRNA sense strand
caaugcuucuguauaacaa

SEQ ID NO: 2057511 - RNA, 19 nt, Homo sapiens
  misc_RNA (1)...(19): siRNA sense strand
gacuugaccuaaaucacaa

SEQ ID NO: 2057512 - RNA, 19 nt, Homo sapiens
  misc_RNA (1)...(19): siRNA sense strand
gcauacagagccuaucaga

SEQ ID NO: 2057513 - RNA, 19 nt, Homo sapiens
  misc_RNA (1)...(19): siRNA sense strand
ugacaauggcagaaacuuu

SEQ ID NO: 2057514 - RNA, 19 nt, Homo sapiens
  misc_RNA (1)...(19): siRNA sense strand
gaauacuucgagaacauaa

SEQ ID NO: 2057515 - RNA, 19 nt, Homo sapiens
  misc_RNA (1)...(19): siRNA sense strand
gaugaauacuucgagaaca

SEQ ID NO: 2057516 - RNA, 19 nt, Homo sapiens
  misc_RNA (1)...(19): siRNA sense strand
ugucaacugugaauauuag

SEQ ID NO: 2057517 - RNA, 19 nt, Homo sapiens
  misc_RNA (1)...(19): siRNA sense strand
gcagaaagcaaaagcauug

SEQ ID NO: 2057518 - RNA, 19 nt, Homo sapiens
  misc_RNA (1)...(19): siRNA sense strand
ggagaaaacauugcugaua

SEQ ID NO: 2057519 - RNA, 19 nt, Homo sapiens
  misc_RNA (1)...(19): siRNA sense strand
aaagucagauggauauaac

SEQ ID NO: 2057520 - RNA, 19 nt, Homo sapiens
  misc_RNA (1)...(19): siRNA sense strand
caaacugaauaaugaguac

SEQ ID NO: 2057521 - RNA, 19 nt, Homo sapiens
  misc_RNA (1)...(19): siRNA sense strand
cggcuauccugaugacauu

SEQ ID NO: 2057522 - RNA, 19 nt, Homo sapiens
  misc_RNA (1)...(19): siRNA sense strand
gaagaugugguuguuuaug

SEQ ID NO: 2057523 - RNA, 19 nt, Homo sapiens
  misc_RNA (1)...(19): siRNA sense strand
gauaaguggagcagcugua

SEQ ID NO: 2057524 - RNA, 19 nt, Homo sapiens
  misc_RNA (1)...(19): siRNA sense strand
acagagccuaucagaauua

SEQ ID NO: 2057525 - RNA, 19 nt, Homo sapiens
  misc_RNA (1)...(19): siRNA sense strand
uacagagccuaucagaauu

SEQ ID NO: 2057526 - RNA, 19 nt, Homo sapiens
  misc_RNA (1)...(19): siRNA sense strand
gaaugcacuggaaucuaua

SEQ ID NO: 2057527 - RNA, 19 nt, Homo sapiens
  misc_RNA (1)...(19): siRNA sense strand
uuaauguccuggagauuca

SEQ ID NO: 2057528 - RNA, 19 nt, Homo sapiens
  misc_RNA (1)...(19): siRNA sense strand
ggcuaaaccugaagaucga

SEQ ID NO: 2057529 - RNA, 19 nt, Homo sapiens
  misc_RNA (1)...(19): siRNA sense strand
cagauugauucgucaggaa

SEQ ID NO: 2057530 - RNA, 19 nt, Homo sapiens
  misc_RNA (1)...(19): siRNA sense strand
uauaguagcagugcagaaa

SEQ ID NO: 2057531 - RNA, 19 nt, Homo sapiens
  misc_RNA (1)...(19): siRNA sense strand
ggauuugauugcacagauc

SEQ ID NO: 2057532 - RNA, 19 nt, Homo sapiens
  misc_RNA (1)...(19): siRNA sense strand
ggaagaugugguuguuuau

SEQ ID NO: 2057533 - RNA, 19 nt, Homo sapiens
  misc_RNA (1)...(19): siRNA sense strand
cagcuugcuuuggaaauga

SEQ ID NO: 2057534 - RNA, 19 nt, Homo sapiens
  misc_RNA (1)...(19): siRNA sense strand
caaacuguuaccagacaua

SEQ ID NO: 2057535 - RNA, 19 nt, Homo sapiens
  misc_RNA (1)...(19): siRNA sense strand
acccaaaacugaagauaua

SEQ ID NO: 2057536 - RNA, 19 nt, Homo sapiens
  misc_RNA (1)...(19): siRNA sense strand
ggugugguguggaaccuau

SEQ ID NO: 2057537 - RNA, 19 nt, Homo sapiens
  misc_RNA (1)...(19): siRNA sense strand
acucaacagucugcaagua

SEQ ID NO: 2057538 - RNA, 19 nt, Homo sapiens
  misc_RNA (1)...(19): siRNA sense strand
uguuuaugcuccagaauau

SEQ ID NO: 2057539 - RNA, 19 nt, Homo sapiens
  misc_RNA (1)...(19): siRNA sense strand
ccagcuugcuuuggaaaug

SEQ ID NO: 2057540 - RNA, 19 nt, Homo sapiens
  misc_RNA (1)...(19): siRNA sense strand
gggcaucggcauggucaua

SEQ ID NO: 2057541 - RNA, 19 nt, Homo sapiens
  misc_RNA (1)...(19): siRNA sense strand
augaguaccucgaguugaa

SEQ ID NO: 2057542 - RNA, 19 nt, Homo sapiens
  misc_RNA (1)...(19): siRNA sense strand
aaccuacgaugaugguauu

SEQ ID NO: 2057543 - RNA, 19 nt, Homo sapiens
  misc_RNA (1)...(19): siRNA sense strand
ggccagaguaugcgguuaa

SEQ ID NO: 2057544 - RNA, 19 nt, Homo sapiens
  misc_RNA (1)...(19): siRNA sense strand
ggacaaagaugaguggaua

SEQ ID NO: 2057545 - RNA, 19 nt, Homo sapiens
  misc_RNA (1)...(19): siRNA sense strand
gaaaucaugucaacuguga

SEQ ID NO: 2057546 - RNA, 19 nt, Homo sapiens
  misc_RNA (1)...(19): siRNA sense strand
gaaaaggccuuagcaauua

SEQ ID NO: 2057547 - RNA, 19 nt, Homo sapiens
  misc_RNA (1)...(19): siRNA sense strand
gcacuggaaucuauaaaga

SEQ ID NO: 2057548 - RNA, 19 nt, Homo sapiens
  misc_RNA (1)...(19): siRNA sense strand
gcacagauccgagaaguuu

SEQ ID NO: 2057549 - RNA, 19 nt, Homo sapiens
  misc_RNA (1)...(19): siRNA sense strand
ccagagaucuucaaaauuu

SEQ ID NO: 2057550 - RNA, 19 nt, Homo sapiens
  misc_RNA (1)...(19): siRNA sense strand
gacaauggcagaaacuuua

SEQ ID NO: 2057551 - RNA, 19 nt, Homo sapiens
  misc_RNA (1)...(19): siRNA sense strand
gaaaagaagugccggguuu

SEQ ID NO: 2057552 - RNA, 19 nt, Homo sapiens
  misc_RNA (1)...(19): siRNA sense strand
ggacagcaccuuaauggaa

SEQ ID NO: 2057553 - RNA, 19 nt, Homo sapiens
  misc_RNA (1)...(19): siRNA sense strand
gagaaaacauugcugauaa

SEQ ID NO: 2057554 - RNA, 19 nt, Homo sapiens
  misc_RNA (1)...(19): siRNA sense strand
ugaaugcacuggaaucuau

SEQ ID NO: 2057555 - RNA, 19 nt, Homo sapiens
  misc_RNA (1)...(19): siRNA sense strand
gaaauucagccaaaguaaa

SEQ ID NO: 2057556 - RNA, 19 nt, Homo sapiens
  misc_RNA (1)...(19): siRNA sense strand
gagaaaagguggacaaaga

SEQ ID NO: 2057557 - RNA, 19 nt, Homo sapiens
  misc_RNA (1)...(19): siRNA sense strand
aggaagaugugguuguuua

SEQ ID NO: 2057558 - RNA, 19 nt, Homo sapiens
  misc_RNA (1)...(19): siRNA sense strand
ccaggcaauuucaggauua

SEQ ID NO: 2057559 - RNA, 19 nt, Homo sapiens
  misc_RNA (1)...(19): siRNA sense strand
gaaagucagauggauauaa

SEQ ID NO: 2057560 - RNA, 19 nt, Homo sapiens
  misc_RNA (1)...(19): siRNA sense strand
guaaacaacugaagaagcu

SEQ ID NO: 2057561 - RNA, 19 nt, Homo sapiens
  misc_RNA (1)...(19): siRNA sense strand
gcacugaugauaagaauuc

SEQ ID NO: 2057562 - RNA, 19 nt, Homo sapiens
  misc_RNA (1)...(19): siRNA sense strand
gaaccuauaggccagagua

SEQ ID NO: 2057563 - RNA, 19 nt, Homo sapiens
  misc_RNA (1)...(19): siRNA sense strand
uggagaaccucuacucaaa

SEQ ID NO: 2057564 - RNA, 19 nt, Homo sapiens
  misc_RNA (1)...(19): siRNA sense strand
gagccuaucagaauuauau

SEQ ID NO: 2057565 - RNA, 19 nt, Homo sapiens
  misc_RNA (1)...(19): siRNA sense strand
uugcacaacugaauucuaa

SEQ ID NO: 2057566 - RNA, 19 nt, Homo sapiens
  misc_RNA (1)...(19): siRNA sense strand
gaaagauguccuucaagaa

SEQ ID NO: 2057567 - RNA, 19 nt, Homo sapiens
  misc_RNA (1)...(19): siRNA sense strand
gaacuacaaagaagaugaa

SEQ ID NO: 2057568 - RNA, 19 nt, Homo sapiens
  misc_RNA (1)...(19): siRNA sense strand
ggaggcugguugaaacgua

SEQ ID NO: 2057569 - RNA, 19 nt, Homo sapiens
  misc_RNA (1)...(19): siRNA sense strand
ugaccuaaaucacaaacaa

SEQ ID NO: 2057570 - RNA, 19 nt, Homo sapiens
  misc_RNA (1)...(19): siRNA sense strand
ggacuugaccuaaaucaca

SEQ ID NO: 2057571 - RNA, 19 nt, Homo sapiens
  misc_RNA (1)...(19): siRNA sense strand
gauccaaugcuucuguaua

SEQ ID NO: 2057572 - RNA, 19 nt, Homo sapiens
  misc_RNA (1)...(19): siRNA sense strand
gaaaugauccaaugcuucu

SEQ ID NO: 2057573 - RNA, 19 nt, Homo sapiens
  misc_RNA (1)...(19): siRNA sense strand
aaagaugaguggauaagug

SEQ ID NO: 2057574 - RNA, 19 nt, Homo sapiens
  misc_RNA (1)...(19): siRNA sense strand
caaaguaaacaacugaaga

SEQ ID NO: 2057575 - RNA, 19 nt, Homo sapiens
  misc_RNA (1)...(19): siRNA sense strand
gacagcaccuuaauggaau

SEQ ID NO: 2057576 - RNA, 19 nt, Homo sapiens
  misc_RNA (1)...(19): siRNA sense strand
cgacuuggccucccuucua

SEQ ID NO: 2057577 - RNA, 19 nt, Homo sapiens
  misc_RNA (1)...(19): siRNA sense strand
guaucaguauggaaacuuu

SEQ ID NO: 2057578 - RNA, 19 nt, Homo sapiens
  misc_RNA (1)...(19): siRNA sense strand
uagaugaccucacuuggau

SEQ ID NO: 2057579 - RNA, 19 nt, Homo sapiens
  misc_RNA (1)...(19): siRNA sense strand
auacagagccuaucagaau

SEQ ID NO: 2057580 - RNA, 19 nt, Homo sapiens
  misc_RNA (1)...(19): siRNA sense strand
cugaugacauuguuucaaa

SEQ ID NO: 2057581 - RNA, 19 nt, Homo sapiens
  misc_RNA (1)...(19): siRNA sense strand
aaagagagcugaagaaaag

SEQ ID NO: 2057582 - RNA, 19 nt, Homo sapiens
  misc_RNA (1)...(19): siRNA sense strand
gcacaacugaauucuaaau

SEQ ID NO: 2057583 - RNA, 19 nt, Homo sapiens
  misc_RNA (1)...(19): siRNA sense strand
cauaauggaucuuguaagc

SEQ ID NO: 2057584 - RNA, 19 nt, Homo sapiens
  misc_RNA (1)...(19): siRNA sense strand
gaggcugguugaaacguaa

SEQ ID NO: 2057585 - RNA, 19 nt, Homo sapiens
  misc_RNA (1)...(19): siRNA sense strand
ggucauaggacacgaaauc

SEQ ID NO: 2057586 - RNA, 19 nt, Homo sapiens
  misc_RNA (1)...(19): siRNA sense strand
aaagauugcccaucgauga

SEQ ID NO: 2057587 - RNA, 19 nt, Homo sapiens
  misc_RNA (1)...(19): siRNA sense strand
gagaaccucuacucaaacu

SEQ ID NO: 2057588 - RNA, 19 nt, Homo sapiens
  misc_RNA (1)...(19): siRNA sense strand
guacagcauauguggauuu

SEQ ID NO: 2057589 - RNA, 19 nt, Homo sapiens
  misc_RNA (1)...(19): siRNA sense strand
gaugauaagaauucuguga

SEQ ID NO: 2057590 - RNA, 19 nt, Homo sapiens
  misc_RNA (1)...(19): siRNA sense strand
gaaccucuacucaaacugu

SEQ ID NO: 2057591 - RNA, 19 nt, Homo sapiens
  misc_RNA (1)...(19): siRNA sense strand
auccaaugcuucuguauaa

SEQ ID NO: 2057592 - RNA, 19 nt, Homo sapiens
  misc_RNA (1)...(19): siRNA sense strand
ccgcaagaauucauacaug

SEQ ID NO: 2057593 - RNA, 19 nt, Homo sapiens
  misc_RNA (1)...(19): siRNA sense strand
cuacaaagaagaugaauac

SEQ ID NO: 2057594 - RNA, 19 nt, Homo sapiens
  misc_RNA (1)...(19): siRNA sense strand
caugucaacugugaauauu

SEQ ID NO: 2057595 - RNA, 19 nt, Homo sapiens
  misc_RNA (1)...(19): siRNA sense strand
ugaggaagaugugguuguu

SEQ ID NO: 2057596 - RNA, 19 nt, Homo sapiens
  misc_RNA (1)...(19): siRNA sense strand
uaauggaggucuuggucaa

SEQ ID NO: 2057597 - RNA, 19 nt, Homo sapiens
  misc_RNA (1)...(19): siRNA sense strand
ggccuuagcaauuaaagaa

SEQ ID NO: 2057598 - RNA, 19 nt, Homo sapiens
  misc_RNA (1)...(19): siRNA sense strand
ggauggaugccgagacaaa

SEQ ID NO: 2057599 - RNA, 19 nt, Homo sapiens
  misc_RNA (1)...(19): siRNA sense strand
ucagaaagucagauggaua

SEQ ID NO: 2057600 - RNA, 19 nt, Homo sapiens
  misc_RNA (1)...(19): siRNA sense strand
uggagcagcuguagucaau

SEQ ID NO: 2057601 - RNA, 19 nt, Homo sapiens
  misc_RNA (1)...(19): siRNA sense strand
uacaaggaguccagaaaug

SEQ ID NO: 2057602 - RNA, 19 nt, Homo sapiens
  misc_RNA (1)...(19): siRNA sense strand
cagaaagucagauggauau

SEQ ID NO: 2057603 - RNA, 19 nt, Homo sapiens
  misc_RNA (1)...(19): siRNA sense strand
gcacaguccaggcaauuuc

SEQ ID NO: 2057604 - RNA, 19 nt, Homo sapiens
  misc_RNA (1)...(19): siRNA sense strand
uggcagaaacuuuaacaaa

SEQ ID NO: 2057605 - RNA, 19 nt, Homo sapiens
  misc_RNA (1)...(19): siRNA sense strand
gagcagcuguagucaaugc

SEQ ID NO: 2057606 - RNA, 19 nt, Homo sapiens
  misc_RNA (1)...(19): siRNA sense strand
ggucuuguauaaaugaauc

SEQ ID NO: 2057607 - RNA, 19 nt, Homo sapiens
  misc_RNA (1)...(19): siRNA sense strand
ugaagaagcuccgagaaaa

SEQ ID NO: 2057608 - RNA, 19 nt, Homo sapiens
  misc_RNA (1)...(19): siRNA sense strand
gagacguugugcaaacuau

SEQ ID NO: 2057609 - RNA, 19 nt, Homo sapiens
  misc_RNA (1)...(19): siRNA sense strand
cagcauauguggauuuuau

SEQ ID NO: 2057610 - RNA, 19 nt, Homo sapiens
  misc_RNA (1)...(19): siRNA sense strand
caaugcuucuguauaacaa

SEQ ID NO: 2057611 - RNA, 19 nt, Homo sapiens
  misc_RNA (1)...(19): siRNA sense strand
gacuugaccuaaaucacaa

SEQ ID NO: 2057612 - RNA, 19 nt, Homo sapiens
  misc_RNA (1)...(19): siRNA sense strand
gcauacagagccuaucaga

SEQ ID NO: 2057613 - RNA, 19 nt, Homo sapiens
  misc_RNA (1)...(19): siRNA sense strand
ugacaauggcagaaacuuu

SEQ ID NO: 2057614 - RNA, 19 nt, Homo sapiens
  misc_RNA (1)...(19): siRNA sense strand
gaauacuucgagaacauaa

SEQ ID NO: 2057615 - RNA, 19 nt, Homo sapiens
  misc_RNA (1)...(19): siRNA sense strand
gaugaauacuucgagaaca

SEQ ID NO: 2057616 - RNA, 19 nt, Homo sapiens
  misc_RNA (1)...(19): siRNA sense strand
ugucaacugugaauauuag

SEQ ID NO: 2057617 - RNA, 19 nt, Homo sapiens
  misc_RNA (1)...(19): siRNA sense strand
gcagaaagcaaaagcauug

SEQ ID NO: 2057618 - RNA, 19 nt, Homo sapiens
  misc_RNA (1)...(19): siRNA sense strand
ggagaaaacauugcugaua

SEQ ID NO: 2057619 - RNA, 19 nt, Homo sapiens
  misc_RNA (1)...(19): siRNA sense strand
aaagucagauggauauaac

SEQ ID NO: 2057620 - RNA, 19 nt, Homo sapiens
  misc_RNA (1)...(19): siRNA sense strand
caaacugaauaaugaguac

SEQ ID NO: 2057621 - RNA, 19 nt, Homo sapiens
  misc_RNA (1)...(19): siRNA sense strand
cggcuauccugaugacauu

SEQ ID NO: 2057622 - RNA, 19 nt, Homo sapiens
  misc_RNA (1)...(19): siRNA sense strand
gaagaugugguuguuuaug

SEQ ID NO: 2057623 - RNA, 19 nt, Homo sapiens
  misc_RNA (1)...(19): siRNA sense strand
gauaaguggagcagcugua

SEQ ID NO: 2057624 - RNA, 19 nt, Homo sapiens
  misc_RNA (1)...(19): siRNA sense strand
acagagccuaucagaauua

SEQ ID NO: 2057625 - RNA, 19 nt, Homo sapiens
  misc_RNA (1)...(19): siRNA sense strand
uacagagccuaucagaauu

SEQ ID NO: 2057626 - RNA, 19 nt, Homo sapiens
  misc_RNA (1)...(19): siRNA sense strand
gaaugcacuggaaucuaua

SEQ ID NO: 2057627 - RNA, 19 nt, Homo sapiens
  misc_RNA (1)...(19): siRNA sense strand
uuaauguccuggagauuca

SEQ ID NO: 2057628 - RNA, 19 nt, Homo sapiens
  misc_RNA (1)...(19): siRNA sense strand
ggcuaaaccugaagaucga

SEQ ID NO: 2057629 - RNA, 19 nt, Homo sapiens
  misc_RNA (1)...(19): siRNA sense strand
cagauugauucgucaggaa

SEQ ID NO: 2057630 - RNA, 19 nt, Homo sapiens
  misc_RNA (1)...(19): siRNA sense strand
uauaguagcagugcagaaa

SEQ ID NO: 2057631 - RNA, 19 nt, Homo sapiens
  misc_RNA (1)...(19): siRNA sense strand
ggauuugauugcacagauc

SEQ ID NO: 2057632 - RNA, 19 nt, Homo sapiens
  misc_RNA (1)...(19): siRNA sense strand
ggaagaugugguuguuuau

SEQ ID NO: 2057633 - RNA, 19 nt, Homo sapiens
  misc_RNA (1)...(19): siRNA sense strand
cagcuugcuuuggaaauga

SEQ ID NO: 2057634 - RNA, 19 nt, Homo sapiens
  misc_RNA (1)...(19): siRNA sense strand
caaacuguuaccagacaua

SEQ ID NO: 2057635 - RNA, 19 nt, Homo sapiens
  misc_RNA (1)...(19): siRNA sense strand
acccaaaacugaagauaua

SEQ ID NO: 2057636 - RNA, 19 nt, Homo sapiens
  misc_RNA (1)...(19): siRNA sense strand
ggugugguguggaaccuau

SEQ ID NO: 2057637 - RNA, 19 nt, Homo sapiens
  misc_RNA (1)...(19): siRNA sense strand
acucaacagucugcaagua

SEQ ID NO: 2057638 - RNA, 19 nt, Homo sapiens
  misc_RNA (1)...(19): siRNA sense strand
uguuuaugcuccagaauau

SEQ ID NO: 2057639 - RNA, 19 nt, Homo sapiens
  misc_RNA (1)...(19): siRNA sense strand
ccagcuugcuuuggaaaug

SEQ ID NO: 2057640 - RNA, 19 nt, Homo sapiens
  misc_RNA (1)...(19): siRNA sense strand
gggcaucggcauggucaua

SEQ ID NO: 2057641 - RNA, 19 nt, Homo sapiens
  misc_RNA (1)...(19): siRNA sense strand
augaguaccucgaguugaa

SEQ ID NO: 2057642 - RNA, 19 nt, Homo sapiens
  misc_RNA (1)...(19): siRNA sense strand
aaccuacgaugaugguauu

SEQ ID NO: 2057643 - RNA, 19 nt, Homo sapiens
  misc_RNA (1)...(19): siRNA sense strand
ggccagaguaugcgguuaa

SEQ ID NO: 2057644 - RNA, 19 nt, Homo sapiens
  misc_RNA (1)...(19): siRNA sense strand
ggacaaagaugaguggaua

SEQ ID NO: 2057645 - RNA, 19 nt, Homo sapiens
  misc_RNA (1)...(19): siRNA sense strand
gaaaucaugucaacuguga

SEQ ID NO: 2057646 - RNA, 19 nt, Homo sapiens
  misc_RNA (1)...(19): siRNA sense strand
gaaaaggccuuagcaauua

SEQ ID NO: 2057647 - RNA, 19 nt, Homo sapiens
  misc_RNA (1)...(19): siRNA sense strand
gcacuggaaucuauaaaga

SEQ ID NO: 2057648 - RNA, 19 nt, Homo sapiens
  misc_RNA (1)...(19): siRNA sense strand
gcacagauccgagaaguuu

SEQ ID NO: 2057649 - RNA, 19 nt, Homo sapiens
  misc_RNA (1)...(19): siRNA sense strand
ccagagaucuucaaaauuu

SEQ ID NO: 2057650 - RNA, 19 nt, Homo sapiens
  misc_RNA (1)...(19): siRNA sense strand
gacaauggcagaaacuuua

SEQ ID NO: 2057651 - RNA, 19 nt, Homo sapiens
  misc_RNA (1)...(19): siRNA sense strand
gaaaagaagugccggguuu

SEQ ID NO: 2057652 - RNA, 19 nt, Homo sapiens
  misc_RNA (1)...(19): siRNA sense strand
ggacagcaccuuaauggaa

SEQ ID NO: 2057653 - RNA, 19 nt, Homo sapiens
  misc_RNA (1)...(19): siRNA sense strand
gagaaaacauugcugauaa

SEQ ID NO: 2057654 - RNA, 19 nt, Homo sapiens
  misc_RNA (1)...(19): siRNA sense strand
ugaaugcacuggaaucuau

SEQ ID NO: 2057655 - RNA, 19 nt, Homo sapiens
  misc_RNA (1)...(19): siRNA sense strand
gaaauucagccaaaguaaa

SEQ ID NO: 2057656 - RNA, 19 nt, Homo sapiens
  misc_RNA (1)...(19): siRNA sense strand
gagaaaagguggacaaaga

SEQ ID NO: 2057657 - RNA, 19 nt, Homo sapiens
  misc_RNA (1)...(19): siRNA sense strand
aggaagaugugguuguuua

SEQ ID NO: 2057658 - RNA, 19 nt, Homo sapiens
  misc_RNA (1)...(19): siRNA sense strand
ccaggcaauuucaggauua

SEQ ID NO: 2057659 - RNA, 19 nt, Homo sapiens
  misc_RNA (1)...(19): siRNA sense strand
gaaagucagauggauauaa

SEQ ID NO: 2057660 - RNA, 19 nt, Homo sapiens
  misc_RNA (1)...(19): siRNA sense strand
guaaacaacugaagaagcu

SEQ ID NO: 2057661 - RNA, 19 nt, Homo sapiens
  misc_RNA (1)...(19): siRNA sense strand
gcacugaugauaagaauuc

SEQ ID NO: 2057662 - RNA, 19 nt, Homo sapiens
  misc_RNA (1)...(19): siRNA sense strand
gaaccuauaggccagagua

SEQ ID NO: 2057663 - RNA, 19 nt, Homo sapiens
  misc_RNA (1)...(19): siRNA sense strand
uggagaaccucuacucaaa

SEQ ID NO: 2057664 - RNA, 19 nt, Homo sapiens
  misc_RNA (1)...(19): siRNA sense strand
gagccuaucagaauuauau

SEQ ID NO: 2057665 - RNA, 19 nt, Homo sapiens
  misc_RNA (1)...(19): siRNA sense strand
uugcacaacugaauucuaa

SEQ ID NO: 2057666 - RNA, 19 nt, Homo sapiens
  misc_RNA (1)...(19): siRNA sense strand
gaaagauguccuucaagaa

SEQ ID NO: 2057667 - RNA, 19 nt, Homo sapiens
  misc_RNA (1)...(19): siRNA sense strand
gaacuacaaagaagaugaa

SEQ ID NO: 2057668 - RNA, 19 nt, Homo sapiens
  misc_RNA (1)...(19): siRNA sense strand
ggaggcugguugaaacgua

SEQ ID NO: 2057669 - RNA, 19 nt, Homo sapiens
  misc_RNA (1)...(19): siRNA sense strand
ugaccuaaaucacaaacaa

SEQ ID NO: 2057670 - RNA, 19 nt, Homo sapiens
  misc_RNA (1)...(19): siRNA sense strand
ggacuugaccuaaaucaca

SEQ ID NO: 2057671 - RNA, 19 nt, Homo sapiens
  misc_RNA (1)...(19): siRNA sense strand
gauccaaugcuucuguaua

SEQ ID NO: 2057672 - RNA, 19 nt, Homo sapiens
  misc_RNA (1)...(19): siRNA sense strand
gaaaugauccaaugcuucu

SEQ ID NO: 2057673 - RNA, 19 nt, Homo sapiens
  misc_RNA (1)...(19): siRNA sense strand
aaagaugaguggauaagug

SEQ ID NO: 2057674 - RNA, 19 nt, Homo sapiens
  misc_RNA (1)...(19): siRNA sense strand
caaaguaaacaacugaaga

SEQ ID NO: 2057675 - RNA, 19 nt, Homo sapiens
  misc_RNA (1)...(19): siRNA sense strand
gacagcaccuuaauggaau

SEQ ID NO: 2057676 - RNA, 19 nt, Homo sapiens
  misc_RNA (1)...(19): siRNA sense strand
cgacuuggccucccuucua

SEQ ID NO: 2057677 - RNA, 19 nt, Homo sapiens
  misc_RNA (1)...(19): siRNA sense strand
guaucaguauggaaacuuu

SEQ ID NO: 2057678 - RNA, 19 nt, Homo sapiens
  misc_RNA (1)...(19): siRNA sense strand
uagaugaccucacuuggau

SEQ ID NO: 2057679 - RNA, 19 nt, Homo sapiens
  misc_RNA (1)...(19): siRNA sense strand
auacagagccuaucagaau

SEQ ID NO: 2057680 - RNA, 19 nt, Homo sapiens
  misc_RNA (1)...(19): siRNA sense strand
cugaugacauuguuucaaa

SEQ ID NO: 2057681 - RNA, 19 nt, Homo sapiens
  misc_RNA (1)...(19): siRNA sense strand
aaagagagcugaagaaaag

SEQ ID NO: 2057682 - RNA, 19 nt, Homo sapiens
  misc_RNA (1)...(19): siRNA sense strand
gcacaacugaauucuaaau

SEQ ID NO: 2057683 - RNA, 19 nt, Homo sapiens
  misc_RNA (1)...(19): siRNA sense strand
cauaauggaucuuguaagc

SEQ ID NO: 2057684 - RNA, 19 nt, Homo sapiens
  misc_RNA (1)...(19): siRNA sense strand
gaggcugguugaaacguaa

SEQ ID NO: 2057685 - RNA, 19 nt, Homo sapiens
  misc_RNA (1)...(19): siRNA sense strand
ggucauaggacacgaaauc

SEQ ID NO: 2057686 - RNA, 19 nt, Homo sapiens
  misc_RNA (1)...(19): siRNA sense strand
aaagauugcccaucgauga

SEQ ID NO: 2057687 - RNA, 19 nt, Homo sapiens
  misc_RNA (1)...(19): siRNA sense strand
gagaaccucuacucaaacu

SEQ ID NO: 2057688 - RNA, 19 nt, Homo sapiens
  misc_RNA (1)...(19): siRNA sense strand
guacagcauauguggauuu

SEQ ID NO: 2057689 - RNA, 19 nt, Homo sapiens
  misc_RNA (1)...(19): siRNA sense strand
gaugauaagaauucuguga

SEQ ID NO: 2057690 - RNA, 19 nt, Homo sapiens
  misc_RNA (1)...(19): siRNA sense strand
gaaccucuacucaaacugu

SEQ ID NO: 2057691 - RNA, 19 nt, Homo sapiens
  misc_RNA (1)...(19): siRNA sense strand
auccaaugcuucuguauaa

SEQ ID NO: 2057692 - RNA, 19 nt, Homo sapiens
  misc_RNA (1)...(19): siRNA sense strand
ccgcaagaauucauacaug

SEQ ID NO: 2057693 - RNA, 19 nt, Homo sapiens
  misc_RNA (1)...(19): siRNA sense strand
cuacaaagaagaugaauac

SEQ ID NO: 2057694 - RNA, 19 nt, Homo sapiens
  misc_RNA (1)...(19): siRNA sense strand
caugucaacugugaauauu

SEQ ID NO: 2057695 - RNA, 19 nt, Homo sapiens
  misc_RNA (1)...(19): siRNA sense strand
ugaggaagaugugguuguu

SEQ ID NO: 2057696 - RNA, 19 nt, Homo sapiens
  misc_RNA (1)...(19): siRNA sense strand
uaauggaggucuuggucaa

SEQ ID NO: 2057697 - RNA, 19 nt, Homo sapiens
  misc_RNA (1)...(19): siRNA sense strand
ggccuuagcaauuaaagaa

SEQ ID NO: 2057698 - RNA, 19 nt, Homo sapiens
  misc_RNA (1)...(19): siRNA sense strand
ggauggaugccgagacaaa

SEQ ID NO: 2057699 - RNA, 19 nt, Homo sapiens
  misc_RNA (1)...(19): siRNA sense strand
ucagaaagucagauggaua

SEQ ID NO: 2057700 - RNA, 19 nt, Homo sapiens
  misc_RNA (1)...(19): siRNA sense strand
uggagcagcuguagucaau

SEQ ID NO: 2057701 - RNA, 19 nt, Homo sapiens
  misc_RNA (1)...(19): siRNA sense strand
uacaaggaguccagaaaug

SEQ ID NO: 2057702 - RNA, 19 nt, Homo sapiens
  misc_RNA (1)...(19): siRNA sense strand
cagaaagucagauggauau

SEQ ID NO: 2057703 - RNA, 19 nt, Homo sapiens
  misc_RNA (1)...(19): siRNA sense strand
gcacaguccaggcaauuuc

SEQ ID NO: 2057704 - RNA, 19 nt, Homo sapiens
  misc_RNA (1)...(19): siRNA sense strand
uggcagaaacuuuaacaaa

SEQ ID NO: 2057705 - RNA, 19 nt, Homo sapiens
  misc_RNA (1)...(19): siRNA sense strand
gagcagcuguagucaaugc

SEQ ID NO: 2057706 - RNA, 19 nt, Homo sapiens
  misc_RNA (1)...(19): siRNA sense strand
ggucuuguauaaaugaauc

SEQ ID NO: 2057707 - RNA, 19 nt, Homo sapiens
  misc_RNA (1)...(19): siRNA sense strand
ugaagaagcuccgagaaaa

SEQ ID NO: 2057708 - RNA, 19 nt, Homo sapiens
  misc_RNA (1)...(19): siRNA sense strand
gagacguugugcaaacuau

SEQ ID NO: 2057709 - RNA, 19 nt, Homo sapiens
  misc_RNA (1)...(19): siRNA sense strand
cagcauauguggauuuuau

SEQ ID NO: 2057710 - RNA, 19 nt, Homo sapiens
  misc_RNA (1)...(19): siRNA sense strand
caaugcuucuguauaacaa

SEQ ID NO: 2057711 - RNA, 19 nt, Homo sapiens
  misc_RNA (1)...(19): siRNA sense strand
gacuugaccuaaaucacaa

SEQ ID NO: 2057712 - RNA, 19 nt, Homo sapiens
  misc_RNA (1)...(19): siRNA sense strand
gcauacagagccuaucaga

SEQ ID NO: 2057713 - RNA, 19 nt, Homo sapiens
  misc_RNA (1)...(19): siRNA sense strand
ugacaauggcagaaacuuu

SEQ ID NO: 2057714 - RNA, 19 nt, Homo sapiens
  misc_RNA (1)...(19): siRNA sense strand
gaauacuucgagaacauaa

SEQ ID NO: 2057715 - RNA, 19 nt, Homo sapiens
  misc_RNA (1)...(19): siRNA sense strand
gaugaauacuucgagaaca

SEQ ID NO: 2057716 - RNA, 19 nt, Homo sapiens
  misc_RNA (1)...(19): siRNA sense strand
ugucaacugugaauauuag

SEQ ID NO: 2057717 - RNA, 19 nt, Homo sapiens
  misc_RNA (1)...(19): siRNA sense strand
gcagaaagcaaaagcauug

SEQ ID NO: 2057718 - RNA, 19 nt, Homo sapiens
  misc_RNA (1)...(19): siRNA sense strand
ggagaaaacauugcugaua

SEQ ID NO: 2057719 - RNA, 19 nt, Homo sapiens
  misc_RNA (1)...(19): siRNA sense strand
aaagucagauggauauaac

SEQ ID NO: 2057720 - RNA, 19 nt, Homo sapiens
  misc_RNA (1)...(19): siRNA sense strand
caaacugaauaaugaguac

SEQ ID NO: 2057721 - RNA, 19 nt, Homo sapiens
  misc_RNA (1)...(19): siRNA sense strand
cggcuauccugaugacauu

SEQ ID NO: 2057722 - RNA, 19 nt, Homo sapiens
  misc_RNA (1)...(19): siRNA sense strand
gaagaugugguuguuuaug

SEQ ID NO: 2057723 - RNA, 19 nt, Homo sapiens
  misc_RNA (1)...(19): siRNA sense strand
gauaaguggagcagcugua

SEQ ID NO: 2057724 - RNA, 19 nt, Homo sapiens
  misc_RNA (1)...(19): siRNA sense strand
acagagccuaucagaauua

SEQ ID NO: 2057725 - RNA, 19 nt, Homo sapiens
  misc_RNA (1)...(19): siRNA sense strand
uacagagccuaucagaauu

SEQ ID NO: 2057726 - RNA, 19 nt, Homo sapiens
  misc_RNA (1)...(19): siRNA sense strand
gaaugcacuggaaucuaua

SEQ ID NO: 2057727 - RNA, 19 nt, Homo sapiens
  misc_RNA (1)...(19): siRNA sense strand
uuaauguccuggagauuca

SEQ ID NO: 2057728 - RNA, 19 nt, Homo sapiens
  misc_RNA (1)...(19): siRNA sense strand
ggcuaaaccugaagaucga

SEQ ID NO: 2057729 - RNA, 19 nt, Homo sapiens
  misc_RNA (1)...(19): siRNA sense strand
cagauugauucgucaggaa

SEQ ID NO: 2057730 - RNA, 19 nt, Homo sapiens
  misc_RNA (1)...(19): siRNA sense strand
uauaguagcagugcagaaa

SEQ ID NO: 2057731 - RNA, 19 nt, Homo sapiens
  misc_RNA (1)...(19): siRNA sense strand
ggauuugauugcacagauc

SEQ ID NO: 2057732 - RNA, 19 nt, Homo sapiens
  misc_RNA (1)...(19): siRNA sense strand
ggaagaugugguuguuuau

SEQ ID NO: 2057733 - RNA, 19 nt, Homo sapiens
  misc_RNA (1)...(19): siRNA sense strand
cagcuugcuuuggaaauga

SEQ ID NO: 2057734 - RNA, 19 nt, Homo sapiens
  misc_RNA (1)...(19): siRNA sense strand
caaacuguuaccagacaua

SEQ ID NO: 2057735 - RNA, 19 nt, Homo sapiens
  misc_RNA (1)...(19): siRNA sense strand
acccaaaacugaagauaua

SEQ ID NO: 2057736 - RNA, 19 nt, Homo sapiens
  misc_RNA (1)...(19): siRNA sense strand
ggugugguguggaaccuau

SEQ ID NO: 2057737 - RNA, 19 nt, Homo sapiens
  misc_RNA (1)...(19): siRNA sense strand
acucaacagucugcaagua

SEQ ID NO: 2057738 - RNA, 19 nt, Homo sapiens
  misc_RNA (1)...(19): siRNA sense strand
uguuuaugcuccagaauau

SEQ ID NO: 2057739 - RNA, 19 nt, Homo sapiens
  misc_RNA (1)...(19): siRNA sense strand
ccagcuugcuuuggaaaug

SEQ ID NO: 2057740 - RNA, 19 nt, Homo sapiens
  misc_RNA (1)...(19): siRNA sense strand
gggcaucggcauggucaua

SEQ ID NO: 2057741 - RNA, 19 nt, Homo sapiens
  misc_RNA (1)...(19): siRNA sense strand
augaguaccucgaguugaa

SEQ ID NO: 2057742 - RNA, 19 nt, Homo sapiens
  misc_RNA (1)...(19): siRNA sense strand
aaccuacgaugaugguauu

SEQ ID NO: 2057743 - RNA, 19 nt, Homo sapiens
  misc_RNA (1)...(19): siRNA sense strand
ggccagaguaugcgguuaa

SEQ ID NO: 2057744 - RNA, 19 nt, Homo sapiens
  misc_RNA (1)...(19): siRNA sense strand
ggacaaagaugaguggaua

SEQ ID NO: 2057745 - RNA, 19 nt, Homo sapiens
  misc_RNA (1)...(19): siRNA sense strand
gaaaucaugucaacuguga

SEQ ID NO: 2057746 - RNA, 19 nt, Homo sapiens
  misc_RNA (1)...(19): siRNA sense strand
gaaaaggccuuagcaauua

SEQ ID NO: 2057747 - RNA, 19 nt, Homo sapiens
  misc_RNA (1)...(19): siRNA sense strand
gcacuggaaucuauaaaga

SEQ ID NO: 2057748 - RNA, 19 nt, Homo sapiens
  misc_RNA (1)...(19): siRNA sense strand
gcacagauccgagaaguuu

SEQ ID NO: 2057749 - RNA, 19 nt, Homo sapiens
  misc_RNA (1)...(19): siRNA sense strand
ccagagaucuucaaaauuu

SEQ ID NO: 2057750 - RNA, 19 nt, Homo sapiens
  misc_RNA (1)...(19): siRNA sense strand
gacaauggcagaaacuuua

SEQ ID NO: 2057751 - RNA, 19 nt, Homo sapiens
  misc_RNA (1)...(19): siRNA sense strand
gaaaagaagugccggguuu

SEQ ID NO: 2057752 - RNA, 19 nt, Homo sapiens
  misc_RNA (1)...(19): siRNA sense strand
ggacagcaccuuaauggaa

SEQ ID NO: 2057753 - RNA, 19 nt, Homo sapiens
  misc_RNA (1)...(19): siRNA sense strand
gagaaaacauugcugauaa

SEQ ID NO: 2057754 - RNA, 19 nt, Homo sapiens
  misc_RNA (1)...(19): siRNA sense strand
ugaaugcacuggaaucuau

SEQ ID NO: 2057755 - RNA, 19 nt, Homo sapiens
  misc_RNA (1)...(19): siRNA sense strand
gaaauucagccaaaguaaa

SEQ ID NO: 2057756 - RNA, 19 nt, Homo sapiens
  misc_RNA (1)...(19): siRNA sense strand
gagaaaagguggacaaaga

SEQ ID NO: 2057757 - RNA, 19 nt, Homo sapiens
  misc_RNA (1)...(19): siRNA sense strand
aggaagaugugguuguuua

SEQ ID NO: 2057758 - RNA, 19 nt, Homo sapiens
  misc_RNA (1)...(19): siRNA sense strand
ccaggcaauuucaggauua

SEQ ID NO: 2057759 - RNA, 19 nt, Homo sapiens
  misc_RNA (1)...(19): siRNA sense strand
gaaagucagauggauauaa

SEQ ID NO: 2057760 - RNA, 19 nt, Homo sapiens
  misc_RNA (1)...(19): siRNA sense strand
guaaacaacugaagaagcu

SEQ ID NO: 2057761 - RNA, 19 nt, Homo sapiens
  misc_RNA (1)...(19): siRNA sense strand
gcacugaugauaagaauuc

SEQ ID NO: 2057762 - RNA, 19 nt, Homo sapiens
  misc_RNA (1)...(19): siRNA sense strand
gaaccuauaggccagagua

SEQ ID NO: 2057763 - RNA, 19 nt, Homo sapiens
  misc_RNA (1)...(19): siRNA sense strand
uggagaaccucuacucaaa

SEQ ID NO: 2057764 - RNA, 19 nt, Homo sapiens
  misc_RNA (1)...(19): siRNA sense strand
gagccuaucagaauuauau

SEQ ID NO: 2057765 - RNA, 19 nt, Homo sapiens
  misc_RNA (1)...(19): siRNA sense strand
uugcacaacugaauucuaa

SEQ ID NO: 2057766 - RNA, 19 nt, Homo sapiens
  misc_RNA (1)...(19): siRNA sense strand
gaaagauguccuucaagaa

SEQ ID NO: 2057767 - RNA, 19 nt, Homo sapiens
  misc_RNA (1)...(19): siRNA sense strand
gaacuacaaagaagaugaa

SEQ ID NO: 2057768 - RNA, 19 nt, Homo sapiens
  misc_RNA (1)...(19): siRNA sense strand
ggaggcugguugaaacgua

SEQ ID NO: 2057769 - RNA, 19 nt, Homo sapiens
  misc_RNA (1)...(19): siRNA sense strand
ugaccuaaaucacaaacaa

SEQ ID NO: 2057770 - RNA, 19 nt, Homo sapiens
  misc_RNA (1)...(19): siRNA sense strand
ggacuugaccuaaaucaca

SEQ ID NO: 2057771 - RNA, 19 nt, Homo sapiens
  misc_RNA (1)...(19): siRNA sense strand
gauccaaugcuucuguaua

SEQ ID NO: 2057772 - RNA, 19 nt, Homo sapiens
  misc_RNA (1)...(19): siRNA sense strand
gaaaugauccaaugcuucu

SEQ ID NO: 2057773 - RNA, 19 nt, Homo sapiens
  misc_RNA (1)...(19): siRNA sense strand
aaagaugaguggauaagug

SEQ ID NO: 2057774 - RNA, 19 nt, Homo sapiens
  misc_RNA (1)...(19): siRNA sense strand
caaaguaaacaacugaaga

SEQ ID NO: 2057775 - RNA, 19 nt, Homo sapiens
  misc_RNA (1)...(19): siRNA sense strand
gacagcaccuuaauggaau

SEQ ID NO: 2057776 - RNA, 19 nt, Homo sapiens
  misc_RNA (1)...(19): siRNA sense strand
cgacuuggccucccuucua

SEQ ID NO: 2057777 - RNA, 19 nt, Homo sapiens
  misc_RNA (1)...(19): siRNA sense strand
guaucaguauggaaacuuu

SEQ ID NO: 2057778 - RNA, 19 nt, Homo sapiens
  misc_RNA (1)...(19): siRNA sense strand
uagaugaccucacuuggau

SEQ ID NO: 2057779 - RNA, 19 nt, Homo sapiens
  misc_RNA (1)...(19): siRNA sense strand
auacagagccuaucagaau

SEQ ID NO: 2057780 - RNA, 19 nt, Homo sapiens
  misc_RNA (1)...(19): siRNA sense strand
cugaugacauuguuucaaa

SEQ ID NO: 2057781 - RNA, 19 nt, Homo sapiens
  misc_RNA (1)...(19): siRNA sense strand
aaagagagcugaagaaaag

SEQ ID NO: 2057782 - RNA, 19 nt, Homo sapiens
  misc_RNA (1)...(19): siRNA sense strand
gcacaacugaauucuaaau

SEQ ID NO: 2057783 - RNA, 19 nt, Homo sapiens
  misc_RNA (1)...(19): siRNA sense strand
cauaauggaucuuguaagc

SEQ ID NO: 2057784 - RNA, 19 nt, Homo sapiens
  misc_RNA (1)...(19): siRNA sense strand
gaggcugguugaaacguaa

SEQ ID NO: 2057785 - RNA, 19 nt, Homo sapiens
  misc_RNA (1)...(19): siRNA sense strand
ggucauaggacacgaaauc

SEQ ID NO: 2057786 - RNA, 19 nt, Homo sapiens
  misc_RNA (1)...(19): siRNA sense strand
aaagauugcccaucgauga

SEQ ID NO: 2057787 - RNA, 19 nt, Homo sapiens
  misc_RNA (1)...(19): siRNA sense strand
gagaaccucuacucaaacu

SEQ ID NO: 2057788 - RNA, 19 nt, Homo sapiens
  misc_RNA (1)...(19): siRNA sense strand
guacagcauauguggauuu

SEQ ID NO: 2057789 - RNA, 19 nt, Homo sapiens
  misc_RNA (1)...(19): siRNA sense strand
gaugauaagaauucuguga

SEQ ID NO: 2057790 - RNA, 19 nt, Homo sapiens
  misc_RNA (1)...(19): siRNA sense strand
gaaccucuacucaaacugu

SEQ ID NO: 2057791 - RNA, 19 nt, Homo sapiens
  misc_RNA (1)...(19): siRNA sense strand
auccaaugcuucuguauaa

SEQ ID NO: 2057792 - RNA, 19 nt, Homo sapiens
  misc_RNA (1)...(19): siRNA sense strand
ccgcaagaauucauacaug

SEQ ID NO: 2057793 - RNA, 19 nt, Homo sapiens
  misc_RNA (1)...(19): siRNA sense strand
cuacaaagaagaugaauac

SEQ ID NO: 2057794 - RNA, 19 nt, Homo sapiens
  misc_RNA (1)...(19): siRNA sense strand
caugucaacugugaauauu

SEQ ID NO: 2057795 - RNA, 19 nt, Homo sapiens
  misc_RNA (1)...(19): siRNA sense strand
ugaggaagaugugguuguu

SEQ ID NO: 2057796 - RNA, 19 nt, Homo sapiens
  misc_RNA (1)...(19): siRNA sense strand
uaauggaggucuuggucaa

SEQ ID NO: 2057797 - RNA, 19 nt, Homo sapiens
  misc_RNA (1)...(19): siRNA sense strand
ggccuuagcaauuaaagaa

SEQ ID NO: 2057798 - RNA, 19 nt, Homo sapiens
  misc_RNA (1)...(19): siRNA sense strand
ggauggaugccgagacaaa

SEQ ID NO: 2057799 - RNA, 19 nt, Homo sapiens
  misc_RNA (1)...(19): siRNA sense strand
ucagaaagucagauggaua

SEQ ID NO: 2057800 - RNA, 19 nt, Homo sapiens
  misc_RNA (1)...(19): siRNA sense strand
uggagcagcuguagucaau

SEQ ID NO: 2057801 - RNA, 19 nt, Homo sapiens
  misc_RNA (1)...(19): siRNA sense strand
uacaaggaguccagaaaug

SEQ ID NO: 2057802 - RNA, 19 nt, Homo sapiens
  misc_RNA (1)...(19): siRNA sense strand
cagaaagucagauggauau

SEQ ID NO: 2057803 - RNA, 19 nt, Homo sapiens
  misc_RNA (1)...(19): siRNA sense strand
gcacaguccaggcaauuuc

SEQ ID NO: 2057804 - RNA, 19 nt, Homo sapiens
  misc_RNA (1)...(19): siRNA sense strand
uggcagaaacuuuaacaaa

SEQ ID NO: 2057805 - RNA, 19 nt, Homo sapiens
  misc_RNA (1)...(19): siRNA sense strand
gagcagcuguagucaaugc

SEQ ID NO: 2057806 - RNA, 19 nt, Homo sapiens
  misc_RNA (1)...(19): siRNA sense strand
ggucuuguauaaaugaauc

SEQ ID NO: 2057807 - RNA, 19 nt, Homo sapiens
  misc_RNA (1)...(19): siRNA sense strand
ugaagaagcuccgagaaaa

SEQ ID NO: 2057808 - RNA, 19 nt, Homo sapiens
  misc_RNA (1)...(19): siRNA sense strand
gagacguugugcaaacuau

SEQ ID NO: 2057809 - RNA, 19 nt, Homo sapiens
  misc_RNA (1)...(19): siRNA sense strand
cagcauauguggauuuuau

SEQ ID NO: 2057810 - RNA, 19 nt, Homo sapiens
  misc_RNA (1)...(19): siRNA sense strand
caaugcuucuguauaacaa

SEQ ID NO: 2057811 - RNA, 19 nt, Homo sapiens
  misc_RNA (1)...(19): siRNA sense strand
gacuugaccuaaaucacaa

SEQ ID NO: 2057812 - RNA, 19 nt, Homo sapiens
  misc_RNA (1)...(19): siRNA sense strand
gcauacagagccuaucaga

SEQ ID NO: 2057813 - RNA, 19 nt, Homo sapiens
  misc_RNA (1)...(19): siRNA sense strand
ugacaauggcagaaacuuu

SEQ ID NO: 2057814 - RNA, 19 nt, Homo sapiens
  misc_RNA (1)...(19): siRNA sense strand
gaauacuucgagaacauaa

SEQ ID NO: 2057815 - RNA, 19 nt, Homo sapiens
  misc_RNA (1)...(19): siRNA sense strand
gaugaauacuucgagaaca

SEQ ID NO: 2057816 - RNA, 19 nt, Homo sapiens
  misc_RNA (1)...(19): siRNA sense strand
ugucaacugugaauauuag

SEQ ID NO: 2057817 - RNA, 19 nt, Homo sapiens
  misc_RNA (1)...(19): siRNA sense strand
gcagaaagcaaaagcauug

SEQ ID NO: 2057818 - RNA, 19 nt, Homo sapiens
  misc_RNA (1)...(19): siRNA sense strand
ggagaaaacauugcugaua

SEQ ID NO: 2057819 - RNA, 19 nt, Homo sapiens
  misc_RNA (1)...(19): siRNA sense strand
aaagucagauggauauaac

SEQ ID NO: 2057820 - RNA, 19 nt, Homo sapiens
  misc_RNA (1)...(19): siRNA sense strand
caaacugaauaaugaguac

SEQ ID NO: 2057821 - RNA, 19 nt, Homo sapiens
  misc_RNA (1)...(19): siRNA sense strand
cggcuauccugaugacauu

SEQ ID NO: 2057822 - RNA, 19 nt, Homo sapiens
  misc_RNA (1)...(19): siRNA sense strand
gaagaugugguuguuuaug

SEQ ID NO: 2057823 - RNA, 19 nt, Homo sapiens
  misc_RNA (1)...(19): siRNA sense strand
gauaaguggagcagcugua

SEQ ID NO: 2057824 - RNA, 19 nt, Homo sapiens
  misc_RNA (1)...(19): siRNA sense strand
acagagccuaucagaauua

SEQ ID NO: 2057825 - RNA, 19 nt, Homo sapiens
  misc_RNA (1)...(19): siRNA sense strand
uacagagccuaucagaauu

SEQ ID NO: 2057826 - RNA, 19 nt, Homo sapiens
  misc_RNA (1)...(19): siRNA sense strand
gaaugcacuggaaucuaua

SEQ ID NO: 2057827 - RNA, 19 nt, Homo sapiens
  misc_RNA (1)...(19): siRNA sense strand
uuaauguccuggagauuca

SEQ ID NO: 2057828 - RNA, 19 nt, Homo sapiens
  misc_RNA (1)...(19): siRNA sense strand
ggcuaaaccugaagaucga

SEQ ID NO: 2057829 - RNA, 19 nt, Homo sapiens
  misc_RNA (1)...(19): siRNA sense strand
cagauugauucgucaggaa

SEQ ID NO: 2057830 - RNA, 19 nt, Homo sapiens
  misc_RNA (1)...(19): siRNA sense strand
uauaguagcagugcagaaa

SEQ ID NO: 2057831 - RNA, 19 nt, Homo sapiens
  misc_RNA (1)...(19): siRNA sense strand
ggauuugauugcacagauc

SEQ ID NO: 2057832 - RNA, 19 nt, Homo sapiens
  misc_RNA (1)...(19): siRNA sense strand
ggaagaugugguuguuuau

SEQ ID NO: 2057833 - RNA, 19 nt, Homo sapiens
  misc_RNA (1)...(19): siRNA sense strand
cagcuugcuuuggaaauga

SEQ ID NO: 2057834 - RNA, 19 nt, Homo sapiens
  misc_RNA (1)...(19): siRNA sense strand
caaacuguuaccagacaua

SEQ ID NO: 2057835 - RNA, 19 nt, Homo sapiens
  misc_RNA (1)...(19): siRNA sense strand
acccaaaacugaagauaua

SEQ ID NO: 2057836 - RNA, 19 nt, Homo sapiens
  misc_RNA (1)...(19): siRNA sense strand
ggugugguguggaaccuau

SEQ ID NO: 2057837 - RNA, 19 nt, Homo sapiens
  misc_RNA (1)...(19): siRNA sense strand
acucaacagucugcaagua

SEQ ID NO: 2057838 - RNA, 19 nt, Homo sapiens
  misc_RNA (1)...(19): siRNA sense strand
uguuuaugcuccagaauau

SEQ ID NO: 2057839 - RNA, 19 nt, Homo sapiens
  misc_RNA (1)...(19): siRNA sense strand
ccagcuugcuuuggaaaug

SEQ ID NO: 2057840 - RNA, 19 nt, Homo sapiens
  misc_RNA (1)...(19): siRNA sense strand
gggcaucggcauggucaua

SEQ ID NO: 2057841 - RNA, 19 nt, Homo sapiens
  misc_RNA (1)...(19): siRNA sense strand
augaguaccucgaguugaa

SEQ ID NO: 2057842 - RNA, 19 nt, Homo sapiens
  misc_RNA (1)...(19): siRNA sense strand
aaccuacgaugaugguauu

SEQ ID NO: 2057843 - RNA, 19 nt, Homo sapiens
  misc_RNA (1)...(19): siRNA sense strand
ggccagaguaugcgguuaa

SEQ ID NO: 2057844 - RNA, 19 nt, Homo sapiens
  misc_RNA (1)...(19): siRNA sense strand
ggacaaagaugaguggaua

SEQ ID NO: 2057845 - RNA, 19 nt, Homo sapiens
  misc_RNA (1)...(19): siRNA sense strand
gaaaucaugucaacuguga

SEQ ID NO: 2057846 - RNA, 19 nt, Homo sapiens
  misc_RNA (1)...(19): siRNA sense strand
gaaaaggccuuagcaauua

SEQ ID NO: 2057847 - RNA, 19 nt, Homo sapiens
  misc_RNA (1)...(19): siRNA sense strand
gcacuggaaucuauaaaga

SEQ ID NO: 2057848 - RNA, 19 nt, Homo sapiens
  misc_RNA (1)...(19): siRNA sense strand
gcacagauccgagaaguuu

SEQ ID NO: 2057849 - RNA, 19 nt, Homo sapiens
  misc_RNA (1)...(19): siRNA sense strand
ccagagaucuucaaaauuu

SEQ ID NO: 2057850 - RNA, 19 nt, Homo sapiens
  misc_RNA (1)...(19): siRNA sense strand
gacaauggcagaaacuuua

SEQ ID NO: 2057851 - RNA, 19 nt, Homo sapiens
  misc_RNA (1)...(19): siRNA sense strand
gaaaagaagugccggguuu

SEQ ID NO: 2057852 - RNA, 19 nt, Homo sapiens
  misc_RNA (1)...(19): siRNA sense strand
ggacagcaccuuaauggaa

SEQ ID NO: 2057853 - RNA, 19 nt, Homo sapiens
  misc_RNA (1)...(19): siRNA sense strand
gagaaaacauugcugauaa

SEQ ID NO: 2057854 - RNA, 19 nt, Homo sapiens
  misc_RNA (1)...(19): siRNA sense strand
ugaaugcacuggaaucuau

SEQ ID NO: 2057855 - RNA, 19 nt, Homo sapiens
  misc_RNA (1)...(19): siRNA sense strand
gaaauucagccaaaguaaa

SEQ ID NO: 2057856 - RNA, 19 nt, Homo sapiens
  misc_RNA (1)...(19): siRNA sense strand
gagaaaagguggacaaaga

SEQ ID NO: 2057857 - RNA, 19 nt, Homo sapiens
  misc_RNA (1)...(19): siRNA sense strand
aggaagaugugguuguuua

SEQ ID NO: 2057858 - RNA, 19 nt, Homo sapiens
  misc_RNA (1)...(19): siRNA sense strand
ccaggcaauuucaggauua

SEQ ID NO: 2057859 - RNA, 19 nt, Homo sapiens
  misc_RNA (1)...(19): siRNA sense strand
gaaagucagauggauauaa

SEQ ID NO: 2057860 - RNA, 19 nt, Homo sapiens
  misc_RNA (1)...(19): siRNA sense strand
guaaacaacugaagaagcu

SEQ ID NO: 2057861 - RNA, 19 nt, Homo sapiens
  misc_RNA (1)...(19): siRNA sense strand
gcacugaugauaagaauuc

SEQ ID NO: 2057862 - RNA, 19 nt, Homo sapiens
  misc_RNA (1)...(19): siRNA sense strand
gaaccuauaggccagagua

SEQ ID NO: 2057863 - RNA, 19 nt, Homo sapiens
  misc_RNA (1)...(19): siRNA sense strand
uggagaaccucuacucaaa

SEQ ID NO: 2057864 - RNA, 19 nt, Homo sapiens
  misc_RNA (1)...(19): siRNA sense strand
gagccuaucagaauuauau

SEQ ID NO: 2057865 - RNA, 19 nt, Homo sapiens
  misc_RNA (1)...(19): siRNA sense strand
uugcacaacugaauucuaa

SEQ ID NO: 2057866 - RNA, 19 nt, Homo sapiens
  misc_RNA (1)...(19): siRNA sense strand
gaaagauguccuucaagaa

SEQ ID NO: 2057867 - RNA, 19 nt, Homo sapiens
  misc_RNA (1)...(19): siRNA sense strand
gaacuacaaagaagaugaa

SEQ ID NO: 2057868 - RNA, 19 nt, Homo sapiens
  misc_RNA (1)...(19): siRNA sense strand
ggaggcugguugaaacgua

SEQ ID NO: 2057869 - RNA, 19 nt, Homo sapiens
  misc_RNA (1)...(19): siRNA sense strand
ugaccuaaaucacaaacaa

SEQ ID NO: 2057870 - RNA, 19 nt, Homo sapiens
  misc_RNA (1)...(19): siRNA sense strand
ggacuugaccuaaaucaca

SEQ ID NO: 2057871 - RNA, 19 nt, Homo sapiens
  misc_RNA (1)...(19): siRNA sense strand
gauccaaugcuucuguaua

SEQ ID NO: 2057872 - RNA, 19 nt, Homo sapiens
  misc_RNA (1)...(19): siRNA sense strand
gaaaugauccaaugcuucu

SEQ ID NO: 2057873 - RNA, 19 nt, Homo sapiens
  misc_RNA (1)...(19): siRNA sense strand
aaagaugaguggauaagug

SEQ ID NO: 2057874 - RNA, 19 nt, Homo sapiens
  misc_RNA (1)...(19): siRNA sense strand
caaaguaaacaacugaaga

SEQ ID NO: 2057875 - RNA, 19 nt, Homo sapiens
  misc_RNA (1)...(19): siRNA sense strand
gacagcaccuuaauggaau

SEQ ID NO: 2057876 - RNA, 19 nt, Homo sapiens
  misc_RNA (1)...(19): siRNA sense strand
cgacuuggccucccuucua

SEQ ID NO: 2057877 - RNA, 19 nt, Homo sapiens
  misc_RNA (1)...(19): siRNA sense strand
guaucaguauggaaacuuu

SEQ ID NO: 2057878 - RNA, 19 nt, Homo sapiens
  misc_RNA (1)...(19): siRNA sense strand
uagaugaccucacuuggau

SEQ ID NO: 2057879 - RNA, 19 nt, Homo sapiens
  misc_RNA (1)...(19): siRNA sense strand
auacagagccuaucagaau

SEQ ID NO: 2057880 - RNA, 19 nt, Homo sapiens
  misc_RNA (1)...(19): siRNA sense strand
cugaugacauuguuucaaa

SEQ ID NO: 2057881 - RNA, 19 nt, Homo sapiens
  misc_RNA (1)...(19): siRNA sense strand
aaagagagcugaagaaaag

SEQ ID NO: 2057882 - RNA, 19 nt, Homo sapiens
  misc_RNA (1)...(19): siRNA sense strand
gcacaacugaauucuaaau

SEQ ID NO: 2057883 - RNA, 19 nt, Homo sapiens
  misc_RNA (1)...(19): siRNA sense strand
cauaauggaucuuguaagc

SEQ ID NO: 2057884 - RNA, 19 nt, Homo sapiens
  misc_RNA (1)...(19): siRNA sense strand
gaggcugguugaaacguaa

SEQ ID NO: 2057885 - RNA, 19 nt, Homo sapiens
  misc_RNA (1)...(19): siRNA sense strand
ggucauaggacacgaaauc

SEQ ID NO: 2057886 - RNA, 19 nt, Homo sapiens
  misc_RNA (1)...(19): siRNA sense strand
aaagauugcccaucgauga

SEQ ID NO: 2057887 - RNA, 19 nt, Homo sapiens
  misc_RNA (1)...(19): siRNA sense strand
gagaaccucuacucaaacu

SEQ ID NO: 2057888 - RNA, 19 nt, Homo sapiens
  misc_RNA (1)...(19): siRNA sense strand
guacagcauauguggauuu

SEQ ID NO: 2057889 - RNA, 19 nt, Homo sapiens
  misc_RNA (1)...(19): siRNA sense strand
gaugauaagaauucuguga

SEQ ID NO: 2057890 - RNA, 19 nt, Homo sapiens
  misc_RNA (1)...(19): siRNA sense strand
gaaccucuacucaaacugu

SEQ ID NO: 2057891 - RNA, 19 nt, Homo sapiens
  misc_RNA (1)...(19): siRNA sense strand
auccaaugcuucuguauaa

SEQ ID NO: 2057892 - RNA, 19 nt, Homo sapiens
  misc_RNA (1)...(19): siRNA sense strand
ccgcaagaauucauacaug

SEQ ID NO: 2057893 - RNA, 19 nt, Homo sapiens
  misc_RNA (1)...(19): siRNA sense strand
cuacaaagaagaugaauac

SEQ ID NO: 2057894 - RNA, 19 nt, Homo sapiens
  misc_RNA (1)...(19): siRNA sense strand
caugucaacugugaauauu

SEQ ID NO: 2057895 - RNA, 19 nt, Homo sapiens
  misc_RNA (1)...(19): siRNA sense strand
ugaggaagaugugguuguu

SEQ ID NO: 2057896 - RNA, 19 nt, Homo sapiens
  misc_RNA (1)...(19): siRNA sense strand
uaauggaggucuuggucaa

SEQ ID NO: 2057897 - RNA, 19 nt, Homo sapiens
  misc_RNA (1)...(19): siRNA sense strand
ggccuuagcaauuaaagaa

SEQ ID NO: 2057898 - RNA, 19 nt, Homo sapiens
  misc_RNA (1)...(19): siRNA sense strand
ggauggaugccgagacaaa

SEQ ID NO: 2057899 - RNA, 19 nt, Homo sapiens
  misc_RNA (1)...(19): siRNA sense strand
ucagaaagucagauggaua

SEQ ID NO: 2057900 - RNA, 19 nt, Homo sapiens
  misc_RNA (1)...(19): siRNA sense strand
uggagcagcuguagucaau

SEQ ID NO: 2057901 - RNA, 19 nt, Homo sapiens
  misc_RNA (1)...(19): siRNA sense strand
uacaaggaguccagaaaug

SEQ ID NO: 2057902 - RNA, 19 nt, Homo sapiens
  misc_RNA (1)...(19): siRNA sense strand
cagaaagucagauggauau

SEQ ID NO: 2057903 - RNA, 19 nt, Homo sapiens
  misc_RNA (1)...(19): siRNA sense strand
gcacaguccaggcaauuuc

SEQ ID NO: 2057904 - RNA, 19 nt, Homo sapiens
  misc_RNA (1)...(19): siRNA sense strand
uggcagaaacuuuaacaaa

SEQ ID NO: 2057905 - RNA, 19 nt, Homo sapiens
  misc_RNA (1)...(19): siRNA sense strand
gagcagcuguagucaaugc

SEQ ID NO: 2057906 - RNA, 19 nt, Homo sapiens
  misc_RNA (1)...(19): siRNA sense strand
ggucuuguauaaaugaauc

SEQ ID NO: 2057907 - RNA, 19 nt, Homo sapiens
  misc_RNA (1)...(19): siRNA sense strand
ugaagaagcuccgagaaaa

SEQ ID NO: 2057908 - RNA, 19 nt, Homo sapiens
  misc_RNA (1)...(19): siRNA sense strand
gagacguugugcaaacuau

SEQ ID NO: 2057909 - RNA, 19 nt, Homo sapiens
  misc_RNA (1)...(19): siRNA sense strand
cagcauauguggauuuuau

SEQ ID NO: 2057910 - RNA, 19 nt, Homo sapiens
  misc_RNA (1)...(19): siRNA sense strand
caaugcuucuguauaacaa

SEQ ID NO: 2057911 - RNA, 19 nt, Homo sapiens
  misc_RNA (1)...(19): siRNA sense strand
gacuugaccuaaaucacaa

SEQ ID NO: 2057912 - RNA, 19 nt, Homo sapiens
  misc_RNA (1)...(19): siRNA sense strand
gcauacagagccuaucaga

SEQ ID NO: 2057913 - RNA, 19 nt, Homo sapiens
  misc_RNA (1)...(19): siRNA sense strand
ugacaauggcagaaacuuu

SEQ ID NO: 2057914 - RNA, 19 nt, Homo sapiens
  misc_RNA (1)...(19): siRNA sense strand
gaauacuucgagaacauaa

SEQ ID NO: 2057915 - RNA, 19 nt, Homo sapiens
  misc_RNA (1)...(19): siRNA sense strand
gaugaauacuucgagaaca

SEQ ID NO: 2057916 - RNA, 19 nt, Homo sapiens
  misc_RNA (1)...(19): siRNA sense strand
ugucaacugugaauauuag

SEQ ID NO: 2057917 - RNA, 19 nt, Homo sapiens
  misc_RNA (1)...(19): siRNA sense strand
gcagaaagcaaaagcauug

SEQ ID NO: 2057918 - RNA, 19 nt, Homo sapiens
  misc_RNA (1)...(19): siRNA sense strand
ggagaaaacauugcugaua

SEQ ID NO: 2057919 - RNA, 19 nt, Homo sapiens
  misc_RNA (1)...(19): siRNA sense strand
aaagucagauggauauaac

SEQ ID NO: 2057920 - RNA, 19 nt, Homo sapiens
  misc_RNA (1)...(19): siRNA sense strand
caaacugaauaaugaguac

SEQ ID NO: 2057921 - RNA, 19 nt, Homo sapiens
  misc_RNA (1)...(19): siRNA sense strand
cggcuauccugaugacauu

SEQ ID NO: 2057922 - RNA, 19 nt, Homo sapiens
  misc_RNA (1)...(19): siRNA sense strand
gaagaugugguuguuuaug

SEQ ID NO: 2057923 - RNA, 19 nt, Homo sapiens
  misc_RNA (1)...(19): siRNA sense strand
gauaaguggagcagcugua

SEQ ID NO: 2057924 - RNA, 19 nt, Homo sapiens
  misc_RNA (1)...(19): siRNA sense strand
acagagccuaucagaauua

SEQ ID NO: 2057925 - RNA, 19 nt, Homo sapiens
  misc_RNA (1)...(19): siRNA sense strand
uacagagccuaucagaauu

SEQ ID NO: 2057926 - RNA, 19 nt, Homo sapiens
  misc_RNA (1)...(19): siRNA sense strand
gaaugcacuggaaucuaua

SEQ ID NO: 2057927 - RNA, 19 nt, Homo sapiens
  misc_RNA (1)...(19): siRNA sense strand
uuaauguccuggagauuca

SEQ ID NO: 2057928 - RNA, 19 nt, Homo sapiens
  misc_RNA (1)...(19): siRNA sense strand
ggcuaaaccugaagaucga

SEQ ID NO: 2057929 - RNA, 19 nt, Homo sapiens
  misc_RNA (1)...(19): siRNA sense strand
cagauugauucgucaggaa

SEQ ID NO: 2057930 - RNA, 19 nt, Homo sapiens
  misc_RNA (1)...(19): siRNA sense strand
uauaguagcagugcagaaa

SEQ ID NO: 2057931 - RNA, 19 nt, Homo sapiens
  misc_RNA (1)...(19): siRNA sense strand
ggauuugauugcacagauc

SEQ ID NO: 2057932 - RNA, 19 nt, Homo sapiens
  misc_RNA (1)...(19): siRNA sense strand
ggaagaugugguuguuuau

SEQ ID NO: 2057933 - RNA, 19 nt, Homo sapiens
  misc_RNA (1)...(19): siRNA sense strand
cagcuugcuuuggaaauga

SEQ ID NO: 2057934 - RNA, 19 nt, Homo sapiens
  misc_RNA (1)...(19): siRNA sense strand
caaacuguuaccagacaua

SEQ ID NO: 2057935 - RNA, 19 nt, Homo sapiens
  misc_RNA (1)...(19): siRNA sense strand
acccaaaacugaagauaua

SEQ ID NO: 2057936 - RNA, 19 nt, Homo sapiens
  misc_RNA (1)...(19): siRNA sense strand
ggugugguguggaaccuau

SEQ ID NO: 2057937 - RNA, 19 nt, Homo sapiens
  misc_RNA (1)...(19): siRNA sense strand
acucaacagucugcaagua

SEQ ID NO: 2057938 - RNA, 19 nt, Homo sapiens
  misc_RNA (1)...(19): siRNA sense strand
uguuuaugcuccagaauau

SEQ ID NO: 2057939 - RNA, 19 nt, Homo sapiens
  misc_RNA (1)...(19): siRNA sense strand
ccagcuugcuuuggaaaug

SEQ ID NO: 2057940 - RNA, 19 nt, Homo sapiens
  misc_RNA (1)...(19): siRNA sense strand
gggcaucggcauggucaua

SEQ ID NO: 2057941 - RNA, 19 nt, Homo sapiens
  misc_RNA (1)...(19): siRNA sense strand
augaguaccucgaguugaa

SEQ ID NO: 2057942 - RNA, 19 nt, Homo sapiens
  misc_RNA (1)...(19): siRNA sense strand
aaccuacgaugaugguauu

SEQ ID NO: 2057943 - RNA, 19 nt, Homo sapiens
  misc_RNA (1)...(19): siRNA sense strand
ggccagaguaugcgguuaa

SEQ ID NO: 2057944 - RNA, 19 nt, Homo sapiens
  misc_RNA (1)...(19): siRNA sense strand
ggacaaagaugaguggaua

SEQ ID NO: 2057945 - RNA, 19 nt, Homo sapiens
  misc_RNA (1)...(19): siRNA sense strand
gaaaucaugucaacuguga

SEQ ID NO: 2057946 - RNA, 19 nt, Homo sapiens
  misc_RNA (1)...(19): siRNA sense strand
gaaaaggccuuagcaauua

SEQ ID NO: 2057947 - RNA, 19 nt, Homo sapiens
  misc_RNA (1)...(19): siRNA sense strand
gcacuggaaucuauaaaga

SEQ ID NO: 2057948 - RNA, 19 nt, Homo sapiens
  misc_RNA (1)...(19): siRNA sense strand
gcacagauccgagaaguuu

SEQ ID NO: 2057949 - RNA, 19 nt, Homo sapiens
  misc_RNA (1)...(19): siRNA sense strand
ccagagaucuucaaaauuu

SEQ ID NO: 2057950 - RNA, 19 nt, Homo sapiens
  misc_RNA (1)...(19): siRNA sense strand
gacaauggcagaaacuuua

SEQ ID NO: 2057951 - RNA, 19 nt, Homo sapiens
  misc_RNA (1)...(19): siRNA sense strand
gaaaagaagugccggguuu

SEQ ID NO: 2057952 - RNA, 19 nt, Homo sapiens
  misc_RNA (1)...(19): siRNA sense strand
ggacagcaccuuaauggaa

SEQ ID NO: 2057953 - RNA, 19 nt, Homo sapiens
  misc_RNA (1)...(19): siRNA sense strand
gagaaaacauugcugauaa

SEQ ID NO: 2057954 - RNA, 19 nt, Homo sapiens
  misc_RNA (1)...(19): siRNA sense strand
ugaaugcacuggaaucuau

SEQ ID NO: 2057955 - RNA, 19 nt, Homo sapiens
  misc_RNA (1)...(19): siRNA sense strand
gaaauucagccaaaguaaa

SEQ ID NO: 2057956 - RNA, 19 nt, Homo sapiens
  misc_RNA (1)...(19): siRNA sense strand
gagaaaagguggacaaaga

SEQ ID NO: 2057957 - RNA, 19 nt, Homo sapiens
  misc_RNA (1)...(19): siRNA sense strand
aggaagaugugguuguuua

SEQ ID NO: 2057958 - RNA, 19 nt, Homo sapiens
  misc_RNA (1)...(19): siRNA sense strand
ccaggcaauuucaggauua

SEQ ID NO: 2057959 - RNA, 19 nt, Homo sapiens
  misc_RNA (1)...(19): siRNA sense strand
gaaagucagauggauauaa

SEQ ID NO: 2057960 - RNA, 19 nt, Homo sapiens
  misc_RNA (1)...(19): siRNA sense strand
guaaacaacugaagaagcu

SEQ ID NO: 2057961 - RNA, 19 nt, Homo sapiens
  misc_RNA (1)...(19): siRNA sense strand
gcacugaugauaagaauuc

SEQ ID NO: 2057962 - RNA, 19 nt, Homo sapiens
  misc_RNA (1)...(19): siRNA sense strand
gaaccuauaggccagagua

SEQ ID NO: 2057963 - RNA, 19 nt, Homo sapiens
  misc_RNA (1)...(19): siRNA sense strand
uggagaaccucuacucaaa

SEQ ID NO: 2057964 - RNA, 19 nt, Homo sapiens
  misc_RNA (1)...(19): siRNA sense strand
gagccuaucagaauuauau

SEQ ID NO: 2057965 - RNA, 19 nt, Homo sapiens
  misc_RNA (1)...(19): siRNA sense strand
uugcacaacugaauucuaa

SEQ ID NO: 2057966 - RNA, 19 nt, Homo sapiens
  misc_RNA (1)...(19): siRNA sense strand
gaaagauguccuucaagaa

SEQ ID NO: 2057967 - RNA, 19 nt, Homo sapiens
  misc_RNA (1)...(19): siRNA sense strand
gaacuacaaagaagaugaa

SEQ ID NO: 2057968 - RNA, 19 nt, Homo sapiens
  misc_RNA (1)...(19): siRNA sense strand
ggaggcugguugaaacgua

SEQ ID NO: 2057969 - RNA, 19 nt, Homo sapiens
  misc_RNA (1)...(19): siRNA sense strand
ugaccuaaaucacaaacaa

SEQ ID NO: 2057970 - RNA, 19 nt, Homo sapiens
  misc_RNA (1)...(19): siRNA sense strand
ggacuugaccuaaaucaca

SEQ ID NO: 2057971 - RNA, 19 nt, Homo sapiens
  misc_RNA (1)...(19): siRNA sense strand
gauccaaugcuucuguaua

SEQ ID NO: 2057972 - RNA, 19 nt, Homo sapiens
  misc_RNA (1)...(19): siRNA sense strand
gaaaugauccaaugcuucu

SEQ ID NO: 2057973 - RNA, 19 nt, Homo sapiens
  misc_RNA (1)...(19): siRNA sense strand
aaagaugaguggauaagug

SEQ ID NO: 2057974 - RNA, 19 nt, Homo sapiens
  misc_RNA (1)...(19): siRNA sense strand
caaaguaaacaacugaaga

SEQ ID NO: 2057975 - RNA, 19 nt, Homo sapiens
  misc_RNA (1)...(19): siRNA sense strand
gacagcaccuuaauggaau

SEQ ID NO: 2057976 - RNA, 19 nt, Homo sapiens
  misc_RNA (1)...(19): siRNA sense strand
cgacuuggccucccuucua

SEQ ID NO: 2057977 - RNA, 19 nt, Homo sapiens
  misc_RNA (1)...(19): siRNA sense strand
guaucaguauggaaacuuu

SEQ ID NO: 2057978 - RNA, 19 nt, Homo sapiens
  misc_RNA (1)...(19): siRNA sense strand
uagaugaccucacuuggau

SEQ ID NO: 2057979 - RNA, 19 nt, Homo sapiens
  misc_RNA (1)...(19): siRNA sense strand
auacagagccuaucagaau

SEQ ID NO: 2057980 - RNA, 19 nt, Homo sapiens
  misc_RNA (1)...(19): siRNA sense strand
cugaugacauuguuucaaa

SEQ ID NO: 2057981 - RNA, 19 nt, Homo sapiens
  misc_RNA (1)...(19): siRNA sense strand
aaagagagcugaagaaaag

SEQ ID NO: 2057982 - RNA, 19 nt, Homo sapiens
  misc_RNA (1)...(19): siRNA sense strand
gcacaacugaauucuaaau

SEQ ID NO: 2057983 - RNA, 19 nt, Homo sapiens
  misc_RNA (1)...(19): siRNA sense strand
cauaauggaucuuguaagc

SEQ ID NO: 2057984 - RNA, 19 nt, Homo sapiens
  misc_RNA (1)...(19): siRNA sense strand
gaggcugguugaaacguaa

SEQ ID NO: 2057985 - RNA, 19 nt, Homo sapiens
  misc_RNA (1)...(19): siRNA sense strand
ggucauaggacacgaaauc

SEQ ID NO: 2057986 - RNA, 19 nt, Homo sapiens
  misc_RNA (1)...(19): siRNA sense strand
aaagauugcccaucgauga

SEQ ID NO: 2057987 - RNA, 19 nt, Homo sapiens
  misc_RNA (1)...(19): siRNA sense strand
gagaaccucuacucaaacu

SEQ ID NO: 2057988 - RNA, 19 nt, Homo sapiens
  misc_RNA (1)...(19): siRNA sense strand
guacagcauauguggauuu

SEQ ID NO: 2057989 - RNA, 19 nt, Homo sapiens
  misc_RNA (1)...(19): siRNA sense strand
gaugauaagaauucuguga

SEQ ID NO: 2057990 - RNA, 19 nt, Homo sapiens
  misc_RNA (1)...(19): siRNA sense strand
gaaccucuacucaaacugu

SEQ ID NO: 2057991 - RNA, 19 nt, Homo sapiens
  misc_RNA (1)...(19): siRNA sense strand
auccaaugcuucuguauaa

SEQ ID NO: 2057992 - RNA, 19 nt, Homo sapiens
  misc_RNA (1)...(19): siRNA sense strand
ccgcaagaauucauacaug

SEQ ID NO: 2057993 - RNA, 19 nt, Homo sapiens
  misc_RNA (1)...(19): siRNA sense strand
cuacaaagaagaugaauac

SEQ ID NO: 2057994 - RNA, 19 nt, Homo sapiens
  misc_RNA (1)...(19): siRNA sense strand
caugucaacugugaauauu

SEQ ID NO: 2057995 - RNA, 19 nt, Homo sapiens
  misc_RNA (1)...(19): siRNA sense strand
ugaggaagaugugguuguu

SEQ ID NO: 2057996 - RNA, 19 nt, Homo sapiens
  misc_RNA (1)...(19): siRNA sense strand
uaauggaggucuuggucaa

SEQ ID NO: 2057997 - RNA, 19 nt, Homo sapiens
  misc_RNA (1)...(19): siRNA sense strand
ggccuuagcaauuaaagaa

SEQ ID NO: 2057998 - RNA, 19 nt, Homo sapiens
  misc_RNA (1)...(19): siRNA sense strand
ggauggaugccgagacaaa

SEQ ID NO: 2057999 - RNA, 19 nt, Homo sapiens
  misc_RNA (1)...(19): siRNA sense strand
ucagaaagucagauggaua

SEQ ID NO: 2058000 - RNA, 19 nt, Homo sapiens
  misc_RNA (1)...(19): siRNA sense strand
uggagcagcuguagucaau

SEQ ID NO: 2058001 - RNA, 19 nt, Homo sapiens
  misc_RNA (1)...(19): siRNA sense strand
uacaaggaguccagaaaug

SEQ ID NO: 2058002 - RNA, 19 nt, Homo sapiens
  misc_RNA (1)...(19): siRNA sense strand
cagaaagucagauggauau

SEQ ID NO: 2058003 - RNA, 19 nt, Homo sapiens
  misc_RNA (1)...(19): siRNA sense strand
gcacaguccaggcaauuuc

SEQ ID NO: 2058004 - RNA, 19 nt, Homo sapiens
  misc_RNA (1)...(19): siRNA sense strand
uggcagaaacuuuaacaaa

SEQ ID NO: 2058005 - RNA, 19 nt, Homo sapiens
  misc_RNA (1)...(19): siRNA sense strand
gagcagcuguagucaaugc

SEQ ID NO: 2058006 - RNA, 19 nt, Homo sapiens
  misc_RNA (1)...(19): siRNA sense strand
ggucuuguauaaaugaauc

SEQ ID NO: 2058007 - RNA, 19 nt, Homo sapiens
  misc_RNA (1)...(19): siRNA sense strand
ugaagaagcuccgagaaaa

SEQ ID NO: 2058008 - RNA, 19 nt, Homo sapiens
  misc_RNA (1)...(19): siRNA sense strand
gagacguugugcaaacuau

SEQ ID NO: 2058009 - RNA, 19 nt, Homo sapiens
  misc_RNA (1)...(19): siRNA sense strand
cagcauauguggauuuuau

SEQ ID NO: 2058010 - RNA, 19 nt, Homo sapiens
  misc_RNA (1)...(19): siRNA sense strand
caaugcuucuguauaacaa

SEQ ID NO: 2058011 - RNA, 19 nt, Homo sapiens
  misc_RNA (1)...(19): siRNA sense strand
gacuugaccuaaaucacaa

SEQ ID NO: 2058012 - RNA, 19 nt, Homo sapiens
  misc_RNA (1)...(19): siRNA sense strand
gcauacagagccuaucaga

SEQ ID NO: 2058013 - RNA, 19 nt, Homo sapiens
  misc_RNA (1)...(19): siRNA sense strand
ugacaauggcagaaacuuu

SEQ ID NO: 2058014 - RNA, 19 nt, Homo sapiens
  misc_RNA (1)...(19): siRNA sense strand
gaauacuucgagaacauaa

SEQ ID NO: 2058015 - RNA, 19 nt, Homo sapiens
  misc_RNA (1)...(19): siRNA sense strand
gaugaauacuucgagaaca

SEQ ID NO: 2058016 - RNA, 19 nt, Homo sapiens
  misc_RNA (1)...(19): siRNA sense strand
ugucaacugugaauauuag

SEQ ID NO: 2058017 - RNA, 19 nt, Homo sapiens
  misc_RNA (1)...(19): siRNA sense strand
gcagaaagcaaaagcauug

SEQ ID NO: 2058018 - RNA, 19 nt, Homo sapiens
  misc_RNA (1)...(19): siRNA sense strand
ggagaaaacauugcugaua

SEQ ID NO: 2058019 - RNA, 19 nt, Homo sapiens
  misc_RNA (1)...(19): siRNA sense strand
aaagucagauggauauaac

SEQ ID NO: 2058020 - RNA, 19 nt, Homo sapiens
  misc_RNA (1)...(19): siRNA sense strand
caaacugaauaaugaguac

SEQ ID NO: 2058021 - RNA, 19 nt, Homo sapiens
  misc_RNA (1)...(19): siRNA sense strand
cggcuauccugaugacauu

SEQ ID NO: 2058022 - RNA, 19 nt, Homo sapiens
  misc_RNA (1)...(19): siRNA sense strand
gaagaugugguuguuuaug

SEQ ID NO: 2058023 - RNA, 19 nt, Homo sapiens
  misc_RNA (1)...(19): siRNA sense strand
gauaaguggagcagcugua

SEQ ID NO: 2058024 - RNA, 19 nt, Homo sapiens
  misc_RNA (1)...(19): siRNA sense strand
acagagccuaucagaauua

SEQ ID NO: 2058025 - RNA, 19 nt, Homo sapiens
  misc_RNA (1)...(19): siRNA sense strand
uacagagccuaucagaauu

SEQ ID NO: 2058026 - RNA, 19 nt, Homo sapiens
  misc_RNA (1)...(19): siRNA sense strand
gaaugcacuggaaucuaua

SEQ ID NO: 2058027 - RNA, 19 nt, Homo sapiens
  misc_RNA (1)...(19): siRNA sense strand
uuaauguccuggagauuca

SEQ ID NO: 2058028 - RNA, 19 nt, Homo sapiens
  misc_RNA (1)...(19): siRNA sense strand
ggcuaaaccugaagaucga

SEQ ID NO: 2058029 - RNA, 19 nt, Homo sapiens
  misc_RNA (1)...(19): siRNA sense strand
cagauugauucgucaggaa

SEQ ID NO: 2058030 - RNA, 19 nt, Homo sapiens
  misc_RNA (1)...(19): siRNA sense strand
uauaguagcagugcagaaa

SEQ ID NO: 2058031 - RNA, 19 nt, Homo sapiens
  misc_RNA (1)...(19): siRNA sense strand
ggauuugauugcacagauc

SEQ ID NO: 2058032 - RNA, 19 nt, Homo sapiens
  misc_RNA (1)...(19): siRNA sense strand
ggaagaugugguuguuuau

SEQ ID NO: 2058033 - RNA, 19 nt, Homo sapiens
  misc_RNA (1)...(19): siRNA sense strand
cagcuugcuuuggaaauga

SEQ ID NO: 2058034 - RNA, 19 nt, Homo sapiens
  misc_RNA (1)...(19): siRNA sense strand
caaacuguuaccagacaua

SEQ ID NO: 2058035 - RNA, 19 nt, Homo sapiens
  misc_RNA (1)...(19): siRNA sense strand
acccaaaacugaagauaua

SEQ ID NO: 2058036 - RNA, 19 nt, Homo sapiens
  misc_RNA (1)...(19): siRNA sense strand
ggugugguguggaaccuau

SEQ ID NO: 2058037 - RNA, 19 nt, Homo sapiens
  misc_RNA (1)...(19): siRNA sense strand
acucaacagucugcaagua

SEQ ID NO: 2058038 - RNA, 19 nt, Homo sapiens
  misc_RNA (1)...(19): siRNA sense strand
uguuuaugcuccagaauau

SEQ ID NO: 2058039 - RNA, 19 nt, Homo sapiens
  misc_RNA (1)...(19): siRNA sense strand
ccagcuugcuuuggaaaug

SEQ ID NO: 2058040 - RNA, 19 nt, Homo sapiens
  misc_RNA (1)...(19): siRNA sense strand
gggcaucggcauggucaua

SEQ ID NO: 2058041 - RNA, 19 nt, Homo sapiens
  misc_RNA (1)...(19): siRNA sense strand
augaguaccucgaguugaa

SEQ ID NO: 2058042 - RNA, 19 nt, Homo sapiens
  misc_RNA (1)...(19): siRNA sense strand
aaccuacgaugaugguauu

SEQ ID NO: 2058043 - RNA, 19 nt, Homo sapiens
  misc_RNA (1)...(19): siRNA sense strand
ggccagaguaugcgguuaa

SEQ ID NO: 2058044 - RNA, 19 nt, Homo sapiens
  misc_RNA (1)...(19): siRNA sense strand
ggacaaagaugaguggaua

SEQ ID NO: 2058045 - RNA, 19 nt, Homo sapiens
  misc_RNA (1)...(19): siRNA sense strand
gaaaucaugucaacuguga

SEQ ID NO: 2058046 - RNA, 19 nt, Homo sapiens
  misc_RNA (1)...(19): siRNA sense strand
gaaaaggccuuagcaauua

SEQ ID NO: 2058047 - RNA, 19 nt, Homo sapiens
  misc_RNA (1)...(19): siRNA sense strand
gcacuggaaucuauaaaga

SEQ ID NO: 2058048 - RNA, 19 nt, Homo sapiens
  misc_RNA (1)...(19): siRNA sense strand
gcacagauccgagaaguuu

SEQ ID NO: 2058049 - RNA, 19 nt, Homo sapiens
  misc_RNA (1)...(19): siRNA sense strand
ccagagaucuucaaaauuu

SEQ ID NO: 2058050 - RNA, 19 nt, Homo sapiens
  misc_RNA (1)...(19): siRNA sense strand
gacaauggcagaaacuuua

SEQ ID NO: 2058051 - RNA, 19 nt, Homo sapiens
  misc_RNA (1)...(19): siRNA sense strand
gaaaagaagugccggguuu

SEQ ID NO: 2058052 - RNA, 19 nt, Homo sapiens
  misc_RNA (1)...(19): siRNA sense strand
ggacagcaccuuaauggaa

SEQ ID NO: 2058053 - RNA, 19 nt, Homo sapiens
  misc_RNA (1)...(19): siRNA sense strand
gagaaaacauugcugauaa

SEQ ID NO: 2058054 - RNA, 19 nt, Homo sapiens
  misc_RNA (1)...(19): siRNA sense strand
ugaaugcacuggaaucuau

SEQ ID NO: 2058055 - RNA, 19 nt, Homo sapiens
  misc_RNA (1)...(19): siRNA sense strand
gaaauucagccaaaguaaa

SEQ ID NO: 2058056 - RNA, 19 nt, Homo sapiens
  misc_RNA (1)...(19): siRNA sense strand
gagaaaagguggacaaaga

SEQ ID NO: 2058057 - RNA, 19 nt, Homo sapiens
  misc_RNA (1)...(19): siRNA sense strand
aggaagaugugguuguuua

SEQ ID NO: 2058058 - RNA, 19 nt, Homo sapiens
  misc_RNA (1)...(19): siRNA sense strand
ccaggcaauuucaggauua

SEQ ID NO: 2058059 - RNA, 19 nt, Homo sapiens
  misc_RNA (1)...(19): siRNA sense strand
gaaagucagauggauauaa

SEQ ID NO: 2058060 - RNA, 19 nt, Homo sapiens
  misc_RNA (1)...(19): siRNA sense strand
guaaacaacugaagaagcu

SEQ ID NO: 2058061 - RNA, 19 nt, Homo sapiens
  misc_RNA (1)...(19): siRNA sense strand
gcacugaugauaagaauuc

SEQ ID NO: 2058062 - RNA, 19 nt, Homo sapiens
  misc_RNA (1)...(19): siRNA sense strand
gaaccuauaggccagagua

SEQ ID NO: 2058063 - RNA, 19 nt, Homo sapiens
  misc_RNA (1)...(19): siRNA sense strand
uggagaaccucuacucaaa

SEQ ID NO: 2058064 - RNA, 19 nt, Homo sapiens
  misc_RNA (1)...(19): siRNA sense strand
gagccuaucagaauuauau

SEQ ID NO: 2058065 - RNA, 19 nt, Homo sapiens
  misc_RNA (1)...(19): siRNA sense strand
uugcacaacugaauucuaa

SEQ ID NO: 2058066 - RNA, 19 nt, Homo sapiens
  misc_RNA (1)...(19): siRNA sense strand
gaaagauguccuucaagaa

SEQ ID NO: 2058067 - RNA, 19 nt, Homo sapiens
  misc_RNA (1)...(19): siRNA sense strand
gaacuacaaagaagaugaa

SEQ ID NO: 2058068 - RNA, 19 nt, Homo sapiens
  misc_RNA (1)...(19): siRNA sense strand
ggaggcugguugaaacgua

SEQ ID NO: 2058069 - RNA, 19 nt, Homo sapiens
  misc_RNA (1)...(19): siRNA sense strand
ugaccuaaaucacaaacaa

SEQ ID NO: 2058070 - RNA, 19 nt, Homo sapiens
  misc_RNA (1)...(19): siRNA sense strand
ggacuugaccuaaaucaca

SEQ ID NO: 2058071 - RNA, 19 nt, Homo sapiens
  misc_RNA (1)...(19): siRNA sense strand
gauccaaugcuucuguaua

SEQ ID NO: 2058072 - RNA, 19 nt, Homo sapiens
  misc_RNA (1)...(19): siRNA sense strand
gaaaugauccaaugcuucu

SEQ ID NO: 2058073 - RNA, 19 nt, Homo sapiens
  misc_RNA (1)...(19): siRNA sense strand
aaagaugaguggauaagug

SEQ ID NO: 2058074 - RNA, 19 nt, Homo sapiens
  misc_RNA (1)...(19): siRNA sense strand
caaaguaaacaacugaaga

SEQ ID NO: 2058075 - RNA, 19 nt, Homo sapiens
  misc_RNA (1)...(19): siRNA sense strand
gacagcaccuuaauggaau

SEQ ID NO: 2058076 - RNA, 19 nt, Homo sapiens
  misc_RNA (1)...(19): siRNA sense strand
cgacuuggccucccuucua

SEQ ID NO: 2058077 - RNA, 19 nt, Homo sapiens
  misc_RNA (1)...(19): siRNA sense strand
guaucaguauggaaacuuu

SEQ ID NO: 2058078 - RNA, 19 nt, Homo sapiens
  misc_RNA (1)...(19): siRNA sense strand
uagaugaccucacuuggau

SEQ ID NO: 2058079 - RNA, 19 nt, Homo sapiens
  misc_RNA (1)...(19): siRNA sense strand
auacagagccuaucagaau

SEQ ID NO: 2058080 - RNA, 19 nt, Homo sapiens
  misc_RNA (1)...(19): siRNA sense strand
cugaugacauuguuucaaa

SEQ ID NO: 2058081 - RNA, 19 nt, Homo sapiens
  misc_RNA (1)...(19): siRNA sense strand
aaagagagcugaagaaaag

SEQ ID NO: 2058082 - RNA, 19 nt, Homo sapiens
  misc_RNA (1)...(19): siRNA sense strand
gcacaacugaauucuaaau

SEQ ID NO: 2058083 - RNA, 19 nt, Homo sapiens
  misc_RNA (1)...(19): siRNA sense strand
cauaauggaucuuguaagc

SEQ ID NO: 2058084 - RNA, 19 nt, Homo sapiens
  misc_RNA (1)...(19): siRNA sense strand
gaggcugguugaaacguaa

SEQ ID NO: 2058085 - RNA, 19 nt, Homo sapiens
  misc_RNA (1)...(19): siRNA sense strand
ggucauaggacacgaaauc

SEQ ID NO: 2058086 - RNA, 19 nt, Homo sapiens
  misc_RNA (1)...(19): siRNA sense strand
aaagauugcccaucgauga

SEQ ID NO: 2058087 - RNA, 19 nt, Homo sapiens
  misc_RNA (1)...(19): siRNA sense strand
gagaaccucuacucaaacu

SEQ ID NO: 2058088 - RNA, 19 nt, Homo sapiens
  misc_RNA (1)...(19): siRNA sense strand
guacagcauauguggauuu

SEQ ID NO: 2058089 - RNA, 19 nt, Homo sapiens
  misc_RNA (1)...(19): siRNA sense strand
gaugauaagaauucuguga

SEQ ID NO: 2058090 - RNA, 19 nt, Homo sapiens
  misc_RNA (1)...(19): siRNA sense strand
gaaccucuacucaaacugu

SEQ ID NO: 2058091 - RNA, 19 nt, Homo sapiens
  misc_RNA (1)...(19): siRNA sense strand
auccaaugcuucuguauaa

SEQ ID NO: 2058092 - RNA, 19 nt, Homo sapiens
  misc_RNA (1)...(19): siRNA sense strand
ccgcaagaauucauacaug

SEQ ID NO: 2058093 - RNA, 19 nt, Homo sapiens
  misc_RNA (1)...(19): siRNA sense strand
cuacaaagaagaugaauac

SEQ ID NO: 2058094 - RNA, 19 nt, Homo sapiens
  misc_RNA (1)...(19): siRNA sense strand
caugucaacugugaauauu

SEQ ID NO: 2058095 - RNA, 19 nt, Homo sapiens
  misc_RNA (1)...(19): siRNA sense strand
ugaggaagaugugguuguu

SEQ ID NO: 2058096 - RNA, 19 nt, Homo sapiens
  misc_RNA (1)...(19): siRNA sense strand
uaauggaggucuuggucaa

SEQ ID NO: 2058097 - RNA, 19 nt, Homo sapiens
  misc_RNA (1)...(19): siRNA sense strand
ggccuuagcaauuaaagaa

SEQ ID NO: 2058098 - RNA, 19 nt, Homo sapiens
  misc_RNA (1)...(19): siRNA sense strand
ggauggaugccgagacaaa

SEQ ID NO: 2058099 - RNA, 19 nt, Homo sapiens
  misc_RNA (1)...(19): siRNA sense strand
ucagaaagucagauggaua

SEQ ID NO: 2058100 - RNA, 19 nt, Homo sapiens
  misc_RNA (1)...(19): siRNA sense strand
uggagcagcuguagucaau

SEQ ID NO: 2058101 - RNA, 19 nt, Homo sapiens
  misc_RNA (1)...(19): siRNA sense strand
uacaaggaguccagaaaug

SEQ ID NO: 2058102 - RNA, 19 nt, Homo sapiens
  misc_RNA (1)...(19): siRNA sense strand
cagaaagucagauggauau

SEQ ID NO: 2058103 - RNA, 19 nt, Homo sapiens
  misc_RNA (1)...(19): siRNA sense strand
gcacaguccaggcaauuuc

SEQ ID NO: 2058104 - RNA, 19 nt, Homo sapiens
  misc_RNA (1)...(19): siRNA sense strand
uggcagaaacuuuaacaaa

SEQ ID NO: 2058105 - RNA, 19 nt, Homo sapiens
  misc_RNA (1)...(19): siRNA sense strand
gagcagcuguagucaaugc

SEQ ID NO: 2058106 - RNA, 19 nt, Homo sapiens
  misc_RNA (1)...(19): siRNA sense strand
ggucuuguauaaaugaauc

SEQ ID NO: 2058107 - RNA, 19 nt, Homo sapiens
  misc_RNA (1)...(19): siRNA sense strand
ugaagaagcuccgagaaaa

SEQ ID NO: 2058108 - RNA, 19 nt, Homo sapiens
  misc_RNA (1)...(19): siRNA sense strand
gagacguugugcaaacuau

SEQ ID NO: 2058109 - RNA, 19 nt, Homo sapiens
  misc_RNA (1)...(19): siRNA sense strand
cagcauauguggauuuuau

SEQ ID NO: 2058110 - RNA, 19 nt, Homo sapiens
  misc_RNA (1)...(19): siRNA sense strand
caaugcuucuguauaacaa

SEQ ID NO: 2058111 - RNA, 19 nt, Homo sapiens
  misc_RNA (1)...(19): siRNA sense strand
gacuugaccuaaaucacaa

SEQ ID NO: 2058112 - RNA, 19 nt, Homo sapiens
  misc_RNA (1)...(19): siRNA sense strand
gcauacagagccuaucaga

SEQ ID NO: 2058113 - RNA, 19 nt, Homo sapiens
  misc_RNA (1)...(19): siRNA sense strand
ugacaauggcagaaacuuu

SEQ ID NO: 2058114 - RNA, 19 nt, Homo sapiens
  misc_RNA (1)...(19): siRNA sense strand
gaauacuucgagaacauaa

SEQ ID NO: 2058115 - RNA, 19 nt, Homo sapiens
  misc_RNA (1)...(19): siRNA sense strand
gaugaauacuucgagaaca

SEQ ID NO: 2058116 - RNA, 19 nt, Homo sapiens
  misc_RNA (1)...(19): siRNA sense strand
ugucaacugugaauauuag

SEQ ID NO: 2058117 - RNA, 19 nt, Homo sapiens
  misc_RNA (1)...(19): siRNA sense strand
gcagaaagcaaaagcauug

SEQ ID NO: 2058118 - RNA, 19 nt, Homo sapiens
  misc_RNA (1)...(19): siRNA sense strand
ggagaaaacauugcugaua

SEQ ID NO: 2058119 - RNA, 19 nt, Homo sapiens
  misc_RNA (1)...(19): siRNA sense strand
aaagucagauggauauaac

SEQ ID NO: 2058120 - RNA, 19 nt, Homo sapiens
  misc_RNA (1)...(19): siRNA sense strand
caaacugaauaaugaguac

SEQ ID NO: 2058121 - RNA, 19 nt, Homo sapiens
  misc_RNA (1)...(19): siRNA sense strand
cggcuauccugaugacauu

SEQ ID NO: 2058122 - RNA, 19 nt, Homo sapiens
  misc_RNA (1)...(19): siRNA sense strand
gaagaugugguuguuuaug

SEQ ID NO: 2058123 - RNA, 19 nt, Homo sapiens
  misc_RNA (1)...(19): siRNA sense strand
gauaaguggagcagcugua

SEQ ID NO: 2058124 - RNA, 19 nt, Homo sapiens
  misc_RNA (1)...(19): siRNA sense strand
acagagccuaucagaauua

SEQ ID NO: 2058125 - RNA, 19 nt, Homo sapiens
  misc_RNA (1)...(19): siRNA sense strand
uacagagccuaucagaauu

SEQ ID NO: 2058126 - RNA, 19 nt, Homo sapiens
  misc_RNA (1)...(19): siRNA sense strand
gaaugcacuggaaucuaua

SEQ ID NO: 2058127 - RNA, 19 nt, Homo sapiens
  misc_RNA (1)...(19): siRNA sense strand
uuaauguccuggagauuca

SEQ ID NO: 2058128 - RNA, 19 nt, Homo sapiens
  misc_RNA (1)...(19): siRNA sense strand
ggcuaaaccugaagaucga

SEQ ID NO: 2058129 - RNA, 19 nt, Homo sapiens
  misc_RNA (1)...(19): siRNA sense strand
cagauugauucgucaggaa

SEQ ID NO: 2058130 - RNA, 19 nt, Homo sapiens
  misc_RNA (1)...(19): siRNA sense strand
uauaguagcagugcagaaa

SEQ ID NO: 2058131 - RNA, 19 nt, Homo sapiens
  misc_RNA (1)...(19): siRNA sense strand
ggauuugauugcacagauc

SEQ ID NO: 2058132 - RNA, 19 nt, Homo sapiens
  misc_RNA (1)...(19): siRNA sense strand
ggaagaugugguuguuuau

SEQ ID NO: 2058133 - RNA, 19 nt, Homo sapiens
  misc_RNA (1)...(19): siRNA sense strand
cagcuugcuuuggaaauga

SEQ ID NO: 2058134 - RNA, 19 nt, Homo sapiens
  misc_RNA (1)...(19): siRNA sense strand
caaacuguuaccagacaua

SEQ ID NO: 2058135 - RNA, 19 nt, Homo sapiens
  misc_RNA (1)...(19): siRNA sense strand
acccaaaacugaagauaua

SEQ ID NO: 2058136 - RNA, 19 nt, Homo sapiens
  misc_RNA (1)...(19): siRNA sense strand
ggugugguguggaaccuau

SEQ ID NO: 2058137 - RNA, 19 nt, Homo sapiens
  misc_RNA (1)...(19): siRNA sense strand
acucaacagucugcaagua

SEQ ID NO: 2058138 - RNA, 19 nt, Homo sapiens
  misc_RNA (1)...(19): siRNA sense strand
uguuuaugcuccagaauau

SEQ ID NO: 2058139 - RNA, 19 nt, Homo sapiens
  misc_RNA (1)...(19): siRNA sense strand
ccagcuugcuuuggaaaug

SEQ ID NO: 2058140 - RNA, 19 nt, Homo sapiens
  misc_RNA (1)...(19): siRNA sense strand
gggcaucggcauggucaua

SEQ ID NO: 2058141 - RNA, 19 nt, Homo sapiens
  misc_RNA (1)...(19): siRNA sense strand
augaguaccucgaguugaa

SEQ ID NO: 2058142 - RNA, 19 nt, Homo sapiens
  misc_RNA (1)...(19): siRNA sense strand
aaccuacgaugaugguauu

SEQ ID NO: 2058143 - RNA, 19 nt, Homo sapiens
  misc_RNA (1)...(19): siRNA sense strand
ggccagaguaugcgguuaa

SEQ ID NO: 2058144 - RNA, 19 nt, Homo sapiens
  misc_RNA (1)...(19): siRNA sense strand
ggacagcucaccugaauau

SEQ ID NO: 2058145 - RNA, 19 nt, Homo sapiens
  misc_RNA (1)...(19): siRNA sense strand
gaagucaaauaaagacaga

SEQ ID NO: 2058146 - RNA, 19 nt, Homo sapiens
  misc_RNA (1)...(19): siRNA sense strand
gaaaggagucuaugugaca

SEQ ID NO: 2058147 - RNA, 19 nt, Homo sapiens
  misc_RNA (1)...(19): siRNA sense strand
aaagacagaugugaagaaa

SEQ ID NO: 2058148 - RNA, 19 nt, Homo sapiens
  misc_RNA (1)...(19): siRNA sense strand
cuacuuagcuuuccugacu

SEQ ID NO: 2058149 - RNA, 19 nt, Homo sapiens
  misc_RNA (1)...(19): siRNA sense strand
cagaaugccugucauccuu

SEQ ID NO: 2058150 - RNA, 19 nt, Homo sapiens
  misc_RNA (1)...(19): siRNA sense strand
gaucacaucggaauuagga

SEQ ID NO: 2058151 - RNA, 19 nt, Homo sapiens
  misc_RNA (1)...(19): siRNA sense strand
gaacguggaggcuguacuu

SEQ ID NO: 2058152 - RNA, 19 nt, Homo sapiens
  misc_RNA (1)...(19): siRNA sense strand
caagauguaguacgcauuu

SEQ ID NO: 2058153 - RNA, 19 nt, Homo sapiens
  misc_RNA (1)...(19): siRNA sense strand
uaaaguauuucccaugucu

SEQ ID NO: 2058154 - RNA, 19 nt, Homo sapiens
  misc_RNA (1)...(19): siRNA sense strand
gaugauaagcaaccugaaa

SEQ ID NO: 2058155 - RNA, 19 nt, Homo sapiens
  misc_RNA (1)...(19): siRNA sense strand
gcauaguucuguuucaucu

SEQ ID NO: 2058156 - RNA, 19 nt, Homo sapiens
  misc_RNA (1)...(19): siRNA sense strand
ugagaucacaucggaauua

SEQ ID NO: 2058157 - RNA, 19 nt, Homo sapiens
  misc_RNA (1)...(19): siRNA sense strand
ggugagccauuacaucaug

SEQ ID NO: 2058158 - RNA, 19 nt, Homo sapiens
  misc_RNA (1)...(19): siRNA sense strand
gaggcgaagucaaauaaag

SEQ ID NO: 2058159 - RNA, 19 nt, Homo sapiens
  misc_RNA (1)...(19): siRNA sense strand
ggaaucagaaugccuguca

SEQ ID NO: 2058160 - RNA, 19 nt, Homo sapiens
  misc_RNA (1)...(19): siRNA sense strand
gaaugccugucauccuuug

SEQ ID NO: 2058161 - RNA, 19 nt, Homo sapiens
  misc_RNA (1)...(19): siRNA sense strand
cuagagugcccaauucuuu

SEQ ID NO: 2058162 - RNA, 19 nt, Homo sapiens
  misc_RNA (1)...(19): siRNA sense strand
caaauggggugaucaucua

SEQ ID NO: 2058163 - RNA, 19 nt, Homo sapiens
  misc_RNA (1)...(19): siRNA sense strand
caaauaaagacagauguga

SEQ ID NO: 2058164 - RNA, 19 nt, Homo sapiens
  misc_RNA (1)...(19): siRNA sense strand
ugaaaggcauggaaauuuu

SEQ ID NO: 2058165 - RNA, 19 nt, Homo sapiens
  misc_RNA (1)...(19): siRNA sense strand
cagaaaggagucuauguga

SEQ ID NO: 2058166 - RNA, 19 nt, Homo sapiens
  misc_RNA (1)...(19): siRNA sense strand
agacagaugugaagaaagc

SEQ ID NO: 2058167 - RNA, 19 nt, Homo sapiens
  misc_RNA (1)...(19): siRNA sense strand
gagaucacaucggaauuag

SEQ ID NO: 2058168 - RNA, 19 nt, Homo sapiens
  misc_RNA (1)...(19): siRNA sense strand
uaaagacagaugugaagaa

SEQ ID NO: 2058169 - RNA, 19 nt, Homo sapiens
  misc_RNA (1)...(19): siRNA sense strand
uaaaugaagacaacugugu

SEQ ID NO: 2058170 - RNA, 19 nt, Homo sapiens
  misc_RNA (1)...(19): siRNA sense strand
acagcucaccugaauauaa

SEQ ID NO: 2058171 - RNA, 19 nt, Homo sapiens
  misc_RNA (1)...(19): siRNA sense strand
gcagagaagggagcaaaug

SEQ ID NO: 2058172 - RNA, 19 nt, Homo sapiens
  misc_RNA (1)...(19): siRNA sense strand
cguggaggcuguacuuuua

SEQ ID NO: 2058173 - RNA, 19 nt, Homo sapiens
  misc_RNA (1)...(19): siRNA sense strand
cagcucaccugaauauaac

SEQ ID NO: 2058174 - RNA, 19 nt, Homo sapiens
  misc_RNA (1)...(19): siRNA sense strand
gaucaucuacaacuaucaa

SEQ ID NO: 2058175 - RNA, 19 nt, Homo sapiens
  misc_RNA (1)...(19): siRNA sense strand
ggaguguucgggaaucauu

SEQ ID NO: 2058176 - RNA, 19 nt, Homo sapiens
  misc_RNA (1)...(19): siRNA sense strand
ggaugaggaauuagaccua

SEQ ID NO: 2058177 - RNA, 19 nt, Homo sapiens
  misc_RNA (1)...(19): siRNA sense strand
agaaggggaugaggaauua

SEQ ID NO: 2058178 - RNA, 19 nt, Homo sapiens
  misc_RNA (1)...(19): siRNA sense strand
ccaaacaggcagacucaug

SEQ ID NO: 2058179 - RNA, 19 nt, Homo sapiens
  misc_RNA (1)...(19): siRNA sense strand
caacguggcagcagagaag

SEQ ID NO: 2058180 - RNA, 19 nt, Homo sapiens
  misc_RNA (1)...(19): siRNA sense strand
aguaaaguauuucccaugu

SEQ ID NO: 2058181 - RNA, 19 nt, Homo sapiens
  misc_RNA (1)...(19): siRNA sense strand
caccuagagugcccaauuc

SEQ ID NO: 2058182 - RNA, 19 nt, Homo sapiens
  misc_RNA (1)...(19): siRNA sense strand
gcacucgauucagaaagga

SEQ ID NO: 2058183 - RNA, 19 nt, Homo sapiens
  misc_RNA (1)...(19): siRNA sense strand
guaaaguauuucccauguc

SEQ ID NO: 2058184 - RNA, 19 nt, Homo sapiens
  misc_RNA (1)...(19): siRNA sense strand
gguacgggcaguaaaguau

SEQ ID NO: 2058185 - RNA, 19 nt, Homo sapiens
  misc_RNA (1)...(19): siRNA sense strand
cugaaaggcauggaaauuu

SEQ ID NO: 2058186 - RNA, 19 nt, Homo sapiens
  misc_RNA (1)...(19): siRNA sense strand
uauagucgcggugaugaua

SEQ ID NO: 2058187 - RNA, 19 nt, Homo sapiens
  misc_RNA (1)...(19): siRNA sense strand
ugcagugggugagccauua

SEQ ID NO: 2058188 - RNA, 19 nt, Homo sapiens
  misc_RNA (1)...(19): siRNA sense strand
gcaagugugacauccugaa

SEQ ID NO: 2058189 - RNA, 19 nt, Homo sapiens
  misc_RNA (1)...(19): siRNA sense strand
uuggacagcucaccugaau

SEQ ID NO: 2058190 - RNA, 19 nt, Homo sapiens
  misc_RNA (1)...(19): siRNA sense strand
ugccacaauugccuacuuu

SEQ ID NO: 2058191 - RNA, 19 nt, Homo sapiens
  misc_RNA (1)...(19): siRNA sense strand
ucagaaaggagucuaugug

SEQ ID NO: 2058192 - RNA, 19 nt, Homo sapiens
  misc_RNA (1)...(19): siRNA sense strand
uacgggcaguaaaguauuu

SEQ ID NO: 2058193 - RNA, 19 nt, Homo sapiens
  misc_RNA (1)...(19): siRNA sense strand
gggugaucaucuacaacua

SEQ ID NO: 2058194 - RNA, 19 nt, Homo sapiens
  misc_RNA (1)...(19): siRNA sense strand
gugaucaucuacaacuauc

SEQ ID NO: 2058195 - RNA, 19 nt, Homo sapiens
  misc_RNA (1)...(19): siRNA sense strand
ggaggcgaagucaaauaaa

SEQ ID NO: 2058196 - RNA, 19 nt, Homo sapiens
  misc_RNA (1)...(19): siRNA sense strand
guacgggcaguaaaguauu

SEQ ID NO: 2058197 - RNA, 19 nt, Homo sapiens
  misc_RNA (1)...(19): siRNA sense strand
ggugaucaucuacaacuau

SEQ ID NO: 2058198 - RNA, 19 nt, Homo sapiens
  misc_RNA (1)...(19): siRNA sense strand
caagugugacauccugaaa

SEQ ID NO: 2058199 - RNA, 19 nt, Homo sapiens
  misc_RNA (1)...(19): siRNA sense strand
gaaggauggaaucagaaug

SEQ ID NO: 2058200 - RNA, 19 nt, Homo sapiens
  misc_RNA (1)...(19): siRNA sense strand
caagguacgggcaguaaag

SEQ ID NO: 2058201 - RNA, 19 nt, Homo sapiens
  misc_RNA (1)...(19): siRNA sense strand
agaccuaaaugaagacaac

SEQ ID NO: 2058202 - RNA, 19 nt, Homo sapiens
  misc_RNA (1)...(19): siRNA sense strand
ucaaauaaagacagaugug

SEQ ID NO: 2058203 - RNA, 19 nt, Homo sapiens
  misc_RNA (1)...(19): siRNA sense strand
ccacaauugccuacuuuua

SEQ ID NO: 2058204 - RNA, 19 nt, Homo sapiens
  misc_RNA (1)...(19): siRNA sense strand
acaccuagagugcccaauu

SEQ ID NO: 2058205 - RNA, 19 nt, Homo sapiens
  misc_RNA (1)...(19): siRNA sense strand
gugacauccugaaaacuua

SEQ ID NO: 2058206 - RNA, 19 nt, Homo sapiens
  misc_RNA (1)...(19): siRNA sense strand
caggaggcgaagucaaaua

SEQ ID NO: 2058207 - RNA, 19 nt, Homo sapiens
  misc_RNA (1)...(19): siRNA sense strand
gaaucagaaugccugucau

SEQ ID NO: 2058208 - RNA, 19 nt, Homo sapiens
  misc_RNA (1)...(19): siRNA sense strand
gaugugaagaaagcuauug

SEQ ID NO: 2058209 - RNA, 19 nt, Homo sapiens
  misc_RNA (1)...(19): siRNA sense strand
caucauguaucuauuuacc

SEQ ID NO: 2058210 - RNA, 19 nt, Homo sapiens
  misc_RNA (1)...(19): siRNA sense strand
gaggcuuaguaucuuucua

SEQ ID NO: 2058211 - RNA, 19 nt, Homo sapiens
  misc_RNA (1)...(19): siRNA sense strand
cagcagagaagggagcaaa

SEQ ID NO: 2058212 - RNA, 19 nt, Homo sapiens
  misc_RNA (1)...(19): siRNA sense strand
aggaggcgaagucaaauaa

SEQ ID NO: 2058213 - RNA, 19 nt, Homo sapiens
  misc_RNA (1)...(19): siRNA sense strand
ccugaaaggcauggaaauu

SEQ ID NO: 2058214 - RNA, 19 nt, Homo sapiens
  misc_RNA (1)...(19): siRNA sense strand
gcccaaacaggcagacuca

SEQ ID NO: 2058215 - RNA, 19 nt, Homo sapiens
  misc_RNA (1)...(19): siRNA sense strand
caaagaaggggaugaggaa

SEQ ID NO: 2058216 - RNA, 19 nt, Homo sapiens
  misc_RNA (1)...(19): siRNA sense strand
caaccugaaaggcauggaa

SEQ ID NO: 2058217 - RNA, 19 nt, Homo sapiens
  misc_RNA (1)...(19): siRNA sense strand
uauaacauuucagguugga

SEQ ID NO: 2058218 - RNA, 19 nt, Homo sapiens
  misc_RNA (1)...(19): siRNA sense strand
gguuggaaaugagaucaca

SEQ ID NO: 2058219 - RNA, 19 nt, Homo sapiens
  misc_RNA (1)...(19): siRNA sense strand
gauguaguacgcauuuuaa

SEQ ID NO: 2058220 - RNA, 19 nt, Homo sapiens
  misc_RNA (1)...(19): siRNA sense strand
gaaaggcauggaaauuuug

SEQ ID NO: 2058221 - RNA, 19 nt, Homo sapiens
  misc_RNA (1)...(19): siRNA sense strand
aaaugaagacaacuguguu

SEQ ID NO: 2058222 - RNA, 19 nt, Homo sapiens
  misc_RNA (1)...(19): siRNA sense strand
ugaaggauggaaucagaau

SEQ ID NO: 2058223 - RNA, 19 nt, Homo sapiens
  misc_RNA (1)...(19): siRNA sense strand
uagcuuuccugacucaaac

SEQ ID NO: 2058224 - RNA, 19 nt, Homo sapiens
  misc_RNA (1)...(19): siRNA sense strand
acucauggcuggcccucau

SEQ ID NO: 2058225 - RNA, 19 nt, Homo sapiens
  misc_RNA (1)...(19): siRNA sense strand
uuugaggcuuaguaucuuu

SEQ ID NO: 2058226 - RNA, 19 nt, Homo sapiens
  misc_RNA (1)...(19): siRNA sense strand
aauaaagacagaugugaag

SEQ ID NO: 2058227 - RNA, 19 nt, Homo sapiens
  misc_RNA (1)...(19): siRNA sense strand
ugggugagccauuacauca

SEQ ID NO: 2058228 - RNA, 19 nt, Homo sapiens
  misc_RNA (1)...(19): siRNA sense strand
caucuacaacuaucaaggu

SEQ ID NO: 2058229 - RNA, 19 nt, Homo sapiens
  misc_RNA (1)...(19): siRNA sense strand
cgacgcauaguucuguuuc

SEQ ID NO: 2058230 - RNA, 19 nt, Homo sapiens
  misc_RNA (1)...(19): siRNA sense strand
guaguacgcauuuuaacuu

SEQ ID NO: 2058231 - RNA, 19 nt, Homo sapiens
  misc_RNA (1)...(19): siRNA sense strand
gacgcauaguucuguuuca

SEQ ID NO: 2058232 - RNA, 19 nt, Homo sapiens
  misc_RNA (1)...(19): siRNA sense strand
ucgcggugaugauaagcaa

SEQ ID NO: 2058233 - RNA, 19 nt, Homo sapiens
  misc_RNA (1)...(19): siRNA sense strand
aaugagaucacaucggaau

SEQ ID NO: 2058234 - RNA, 19 nt, Homo sapiens
  misc_RNA (1)...(19): siRNA sense strand
aggagagaguggaguguuc

SEQ ID NO: 2058235 - RNA, 19 nt, Homo sapiens
  misc_RNA (1)...(19): siRNA sense strand
cagagaagggagcaaaugg

SEQ ID NO: 2058236 - RNA, 19 nt, Homo sapiens
  misc_RNA (1)...(19): siRNA sense strand
ggacuuuugaggcuuagua

SEQ ID NO: 2058237 - RNA, 19 nt, Homo sapiens
  misc_RNA (1)...(19): siRNA sense strand
aaauauagucgcggugaug

SEQ ID NO: 2058238 - RNA, 19 nt, Homo sapiens
  misc_RNA (1)...(19): siRNA sense strand
ucaagguacgggcaguaaa

SEQ ID NO: 2058239 - RNA, 19 nt, Homo sapiens
  misc_RNA (1)...(19): siRNA sense strand
guaucuuucuacuacuuag

SEQ ID NO: 2058240 - RNA, 19 nt, Homo sapiens
  misc_RNA (1)...(19): siRNA sense strand
uaaagaagcuuaccaagaa

SEQ ID NO: 2058241 - RNA, 19 nt, Homo sapiens
  misc_RNA (1)...(19): siRNA sense strand
ggaaagagcugagugaaac

SEQ ID NO: 2058242 - RNA, 19 nt, Homo sapiens
  misc_RNA (1)...(19): siRNA sense strand
cuacaucacucuucuggua

SEQ ID NO: 2058243 - RNA, 19 nt, Homo sapiens
  misc_RNA (1)...(19): siRNA sense strand
gauauguccugcacuacua

SEQ ID NO: 2058244 - RNA, 19 nt, Homo sapiens
  misc_RNA (1)...(19): siRNA sense strand
gaauauagccacugacuca

SEQ ID NO: 2058245 - RNA, 19 nt, Homo sapiens
  misc_RNA (1)...(19): siRNA sense strand
uaagaaaggugccaaacau

SEQ ID NO: 2058246 - RNA, 19 nt, Homo sapiens
  misc_RNA (1)...(19): siRNA sense strand
gagugaaacuuuagacuuc

SEQ ID NO: 2058247 - RNA, 19 nt, Homo sapiens
  misc_RNA (1)...(19): siRNA sense strand
ccaagaauauagccacuga

SEQ ID NO: 2058248 - RNA, 19 nt, Homo sapiens
  misc_RNA (1)...(19): siRNA sense strand
gagcaaagcauuccugaca

SEQ ID NO: 2058249 - RNA, 19 nt, Homo sapiens
  misc_RNA (1)...(19): siRNA sense strand
gcaaagcauuccugacaca

SEQ ID NO: 2058250 - RNA, 19 nt, Homo sapiens
  misc_RNA (1)...(19): siRNA sense strand
gacacaaccuucacaagug

SEQ ID NO: 2058251 - RNA, 19 nt, Homo sapiens
  misc_RNA (1)...(19): siRNA sense strand
ggacaacgaguacuucuuc

SEQ ID NO: 2058252 - RNA, 19 nt, Homo sapiens
  misc_RNA (1)...(19): siRNA sense strand
gaaggaaagagcugaguga

SEQ ID NO: 2058253 - RNA, 19 nt, Homo sapiens
  misc_RNA (1)...(19): siRNA sense strand
gggagaugauuucugguuu

SEQ ID NO: 2058254 - RNA, 19 nt, Homo sapiens
  misc_RNA (1)...(19): siRNA sense strand
ggacacagaagaccaggaa

SEQ ID NO: 2058255 - RNA, 19 nt, Homo sapiens
  misc_RNA (1)...(19): siRNA sense strand
caaggaagcagcuguuaga

SEQ ID NO: 2058256 - RNA, 19 nt, Homo sapiens
  misc_RNA (1)...(19): siRNA sense strand
guggugguguccaucauua

SEQ ID NO: 2058257 - RNA, 19 nt, Homo sapiens
  misc_RNA (1)...(19): siRNA sense strand
gaaagagcaaguacuagga

SEQ ID NO: 2058258 - RNA, 19 nt, Homo sapiens
  misc_RNA (1)...(19): siRNA sense strand
ugacaaucacccaguguua

SEQ ID NO: 2058259 - RNA, 19 nt, Homo sapiens
  misc_RNA (1)...(19): siRNA sense strand
gccacugacucauauauca

SEQ ID NO: 2058260 - RNA, 19 nt, Homo sapiens
  misc_RNA (1)...(19): siRNA sense strand
cuaaagaagcuuaccaaga

SEQ ID NO: 2058261 - RNA, 19 nt, Homo sapiens
  misc_RNA (1)...(19): siRNA sense strand
agagaaagagcaaguacua

SEQ ID NO: 2058262 - RNA, 19 nt, Homo sapiens
  misc_RNA (1)...(19): siRNA sense strand
uauagccacugacucauau

SEQ ID NO: 2058263 - RNA, 19 nt, Homo sapiens
  misc_RNA (1)...(19): siRNA sense strand
agagcugagugaaacuuua

SEQ ID NO: 2058264 - RNA, 19 nt, Homo sapiens
  misc_RNA (1)...(19): siRNA sense strand
cagaagaccaggaaaguca

SEQ ID NO: 2058265 - RNA, 19 nt, Homo sapiens
  misc_RNA (1)...(19): siRNA sense strand
cgacugaaaggcagagaaa

SEQ ID NO: 2058266 - RNA, 19 nt, Homo sapiens
  misc_RNA (1)...(19): siRNA sense strand
gugggaaucucuauauuuu

SEQ ID NO: 2058267 - RNA, 19 nt, Homo sapiens
  misc_RNA (1)...(19): siRNA sense strand
cuacugcuccuauuucuau

SEQ ID NO: 2058268 - RNA, 19 nt, Homo sapiens
  misc_RNA (1)...(19): siRNA sense strand
gcucgcaggcguuccgaua

SEQ ID NO: 2058269 - RNA, 19 nt, Homo sapiens
  misc_RNA (1)...(19): siRNA sense strand
gccaccaccucuaugacua

SEQ ID NO: 2058270 - RNA, 19 nt, Homo sapiens
  misc_RNA (1)...(19): siRNA sense strand
ucaagaaggacacagaaga

SEQ ID NO: 2058271 - RNA, 19 nt, Homo sapiens
  misc_RNA (1)...(19): siRNA sense strand
ggagaugauuucugguuuu

SEQ ID NO: 2058272 - RNA, 19 nt, Homo sapiens
  misc_RNA (1)...(19): siRNA sense strand
aguguuaacuugagagaug

SEQ ID NO: 2058273 - RNA, 19 nt, Homo sapiens
  misc_RNA (1)...(19): siRNA sense strand
uggaaauccuggaguaugu

SEQ ID NO: 2058274 - RNA, 19 nt, Homo sapiens
  misc_RNA (1)...(19): siRNA sense strand
ggaauauccuggagaaacc

SEQ ID NO: 2058275 - RNA, 19 nt, Homo sapiens
  misc_RNA (1)...(19): siRNA sense strand
gaaaggugccaaacaucau

SEQ ID NO: 2058276 - RNA, 19 nt, Homo sapiens
  misc_RNA (1)...(19): siRNA sense strand
ggccuugccuauugcuauu

SEQ ID NO: 2058277 - RNA, 19 nt, Homo sapiens
  misc_RNA (1)...(19): siRNA sense strand
ggccuucauguguauauua

SEQ ID NO: 2058278 - RNA, 19 nt, Homo sapiens
  misc_RNA (1)...(19): siRNA sense strand
ccaccucuaugacuacugu

SEQ ID NO: 2058279 - RNA, 19 nt, Homo sapiens
  misc_RNA (1)...(19): siRNA sense strand
gcagacauuccacaggauu

SEQ ID NO: 2058280 - RNA, 19 nt, Homo sapiens
  misc_RNA (1)...(19): siRNA sense strand
gaugucagcugaguuaagc

SEQ ID NO: 2058281 - RNA, 19 nt, Homo sapiens
  misc_RNA (1)...(19): siRNA sense strand
gaagcuuaccaagaauaua

SEQ ID NO: 2058282 - RNA, 19 nt, Homo sapiens
  misc_RNA (1)...(19): siRNA sense strand
ugacacaaccuucacaagu

SEQ ID NO: 2058283 - RNA, 19 nt, Homo sapiens
  misc_RNA (1)...(19): siRNA sense strand
ugaccucccuggacucuag

SEQ ID NO: 2058284 - RNA, 19 nt, Homo sapiens
  misc_RNA (1)...(19): siRNA sense strand
uaacuugagagaugucuau

SEQ ID NO: 2058285 - RNA, 19 nt, Homo sapiens
  misc_RNA (1)...(19): siRNA sense strand
ugacucauauaucaguguu

SEQ ID NO: 2058286 - RNA, 19 nt, Homo sapiens
  misc_RNA (1)...(19): siRNA sense strand
ccaggaaagucaacaugag

SEQ ID NO: 2058287 - RNA, 19 nt, Homo sapiens
  misc_RNA (1)...(19): siRNA sense strand
aaagucaacaugagaguga

SEQ ID NO: 2058288 - RNA, 19 nt, Homo sapiens
  misc_RNA (1)...(19): siRNA sense strand
ggcgucaucuccauuaucu

SEQ ID NO: 2058289 - RNA, 19 nt, Homo sapiens
  misc_RNA (1)...(19): siRNA sense strand
aaaggugccaaacaucaua

SEQ ID NO: 2058290 - RNA, 19 nt, Homo sapiens
  misc_RNA (1)...(19): siRNA sense strand
ggagaugcugcgacugaaa

SEQ ID NO: 2058291 - RNA, 19 nt, Homo sapiens
  misc_RNA (1)...(19): siRNA sense strand
gggaaucucuauauuuuca

SEQ ID NO: 2058292 - RNA, 19 nt, Homo sapiens
  misc_RNA (1)...(19): siRNA sense strand
ucuggaauauccuggagaa

SEQ ID NO: 2058293 - RNA, 19 nt, Homo sapiens
  misc_RNA (1)...(19): siRNA sense strand
aaagaagcuuaccaagaau

SEQ ID NO: 2058294 - RNA, 19 nt, Homo sapiens
  misc_RNA (1)...(19): siRNA sense strand
cgugggaaucucuauauuu

SEQ ID NO: 2058295 - RNA, 19 nt, Homo sapiens
  misc_RNA (1)...(19): siRNA sense strand
gccuucauguguauauuau

SEQ ID NO: 2058296 - RNA, 19 nt, Homo sapiens
  misc_RNA (1)...(19): siRNA sense strand
aacgaucgcuucucugcuu

SEQ ID NO: 2058297 - RNA, 19 nt, Homo sapiens
  misc_RNA (1)...(19): siRNA sense strand
gaguaugugugcauuagcu

SEQ ID NO: 2058298 - RNA, 19 nt, Homo sapiens
  misc_RNA (1)...(19): siRNA sense strand
uaucaguguuaacuugaga

SEQ ID NO: 2058299 - RNA, 19 nt, Homo sapiens
  misc_RNA (1)...(19): siRNA sense strand
gucuuggccuugccuauug

SEQ ID NO: 2058300 - RNA, 19 nt, Homo sapiens
  misc_RNA (1)...(19): siRNA sense strand
uccgauauguccugcacua

SEQ ID NO: 2058301 - RNA, 19 nt, Homo sapiens
  misc_RNA (1)...(19): siRNA sense strand
ugagugaaacuuuagacuu

SEQ ID NO: 2058302 - RNA, 19 nt, Homo sapiens
  misc_RNA (1)...(19): siRNA sense strand
gcagagaaagagcaaguac

SEQ ID NO: 2058303 - RNA, 19 nt, Homo sapiens
  misc_RNA (1)...(19): siRNA sense strand
cgaagaagucggccuacug

SEQ ID NO: 2058304 - RNA, 19 nt, Homo sapiens
  misc_RNA (1)...(19): siRNA sense strand
agaaaggugccaaacauca

SEQ ID NO: 2058305 - RNA, 19 nt, Homo sapiens
  misc_RNA (1)...(19): siRNA sense strand
aggugucgcuuccuaagaa

SEQ ID NO: 2058306 - RNA, 19 nt, Homo sapiens
  misc_RNA (1)...(19): siRNA sense strand
ggugucgcuuccuaagaaa

SEQ ID NO: 2058307 - RNA, 19 nt, Homo sapiens
  misc_RNA (1)...(19): siRNA sense strand
gcgugaagcccuaaagaag

SEQ ID NO: 2058308 - RNA, 19 nt, Homo sapiens
  misc_RNA (1)...(19): siRNA sense strand
cacccaguguuacgaagaa

SEQ ID NO: 2058309 - RNA, 19 nt, Homo sapiens
  misc_RNA (1)...(19): siRNA sense strand
cagacauuccacaggauua

SEQ ID NO: 2058310 - RNA, 19 nt, Homo sapiens
  misc_RNA (1)...(19): siRNA sense strand
gagcugagugaaacuuuag

SEQ ID NO: 2058311 - RNA, 19 nt, Homo sapiens
  misc_RNA (1)...(19): siRNA sense strand
ggaaagucaacaugagagu

SEQ ID NO: 2058312 - RNA, 19 nt, Homo sapiens
  misc_RNA (1)...(19): siRNA sense strand
gugaagcccuaaagaagcu

SEQ ID NO: 2058313 - RNA, 19 nt, Homo sapiens
  misc_RNA (1)...(19): siRNA sense strand
uauuaacgaucgcuucucu

SEQ ID NO: 2058314 - RNA, 19 nt, Homo sapiens
  misc_RNA (1)...(19): siRNA sense strand
ugacuacugugggauaugg

SEQ ID NO: 2058315 - RNA, 19 nt, Homo sapiens
  misc_RNA (1)...(19): siRNA sense strand
cuaaagcugggcagacauu

SEQ ID NO: 2058316 - RNA, 19 nt, Homo sapiens
  misc_RNA (1)...(19): siRNA sense strand
cgcaggagcuggagaacgu

SEQ ID NO: 2058317 - RNA, 19 nt, Homo sapiens
  misc_RNA (1)...(19): siRNA sense strand
gaaauccuggaguaugugu

SEQ ID NO: 2058318 - RNA, 19 nt, Homo sapiens
  misc_RNA (1)...(19): siRNA sense strand
ucgcaggcguuccgauaug

SEQ ID NO: 2058319 - RNA, 19 nt, Homo sapiens
  misc_RNA (1)...(19): siRNA sense strand
gaccaggaaagucaacaug

SEQ ID NO: 2058320 - RNA, 19 nt, Homo sapiens
  misc_RNA (1)...(19): siRNA sense strand
uaucgggaauucuugucuu

SEQ ID NO: 2058321 - RNA, 19 nt, Homo sapiens
  misc_RNA (1)...(19): siRNA sense strand
aaucguggccuucaugugu

SEQ ID NO: 2058322 - RNA, 19 nt, Homo sapiens
  misc_RNA (1)...(19): siRNA sense strand
caucuugcccuucuacauc

SEQ ID NO: 2058323 - RNA, 19 nt, Homo sapiens
  misc_RNA (1)...(19): siRNA sense strand
cgucaucuccauuaucuuc

SEQ ID NO: 2058324 - RNA, 19 nt, Homo sapiens
  misc_RNA (1)...(19): siRNA sense strand
caggaaagucaacaugaga

SEQ ID NO: 2058325 - RNA, 19 nt, Homo sapiens
  misc_RNA (1)...(19): siRNA sense strand
ugcaggagauccaguacug

SEQ ID NO: 2058326 - RNA, 19 nt, Homo sapiens
  misc_RNA (1)...(19): siRNA sense strand
gagaugauuucugguuuug

SEQ ID NO: 2058327 - RNA, 19 nt, Homo sapiens
  misc_RNA (1)...(19): siRNA sense strand
aagaagcuuaccaagaaua

SEQ ID NO: 2058328 - RNA, 19 nt, Homo sapiens
  misc_RNA (1)...(19): siRNA sense strand
gaaacuuuagacuucaaga

SEQ ID NO: 2058329 - RNA, 19 nt, Homo sapiens
  misc_RNA (1)...(19): siRNA sense strand
cuaagaaaggugccaaaca

SEQ ID NO: 2058330 - RNA, 19 nt, Homo sapiens
  misc_RNA (1)...(19): siRNA sense strand
gagaugcugcgacugaaag

SEQ ID NO: 2058331 - RNA, 19 nt, Homo sapiens
  misc_RNA (1)...(19): siRNA sense strand
ccacgcaggagcuggagaa

SEQ ID NO: 2058332 - RNA, 19 nt, Homo sapiens
  misc_RNA (1)...(19): siRNA sense strand
agaccuccuugccaucuug

SEQ ID NO: 2058333 - RNA, 19 nt, Homo sapiens
  misc_RNA (1)...(19): siRNA sense strand
aagcuuaccaagaauauag

SEQ ID NO: 2058334 - RNA, 19 nt, Homo sapiens
  misc_RNA (1)...(19): siRNA sense strand
agggacagauacuucagaa

SEQ ID NO: 2058335 - RNA, 19 nt, Homo sapiens
  misc_RNA (1)...(19): siRNA sense strand
ccuggacucuagugucuuc

SEQ ID NO: 2058336 - RNA, 19 nt, Homo sapiens
  misc_RNA (1)...(19): siRNA sense strand
ccgugggaaucucuauauu

SEQ ID NO: 2058337 - RNA, 19 nt, Homo sapiens
  misc_RNA (1)...(19): siRNA sense strand
caagaaggacacagaagac

SEQ ID NO: 2058338 - RNA, 19 nt, Homo sapiens
  misc_RNA (1)...(19): siRNA sense strand
ucauuaacauggcccugau

SEQ ID NO: 2058339 - RNA, 19 nt, Homo sapiens
  misc_RNA (1)...(19): siRNA sense strand
gagaaagagcaaguacuag

SEQ ID NO: 2058340 - RNA, 19 nt, Homo sapiens
  misc_RNA (1)...(19): siRNA sense strand
ggaaaugcuugauauaaug

SEQ ID NO: 2058341 - RNA, 19 nt, Homo sapiens
  misc_RNA (1)...(19): siRNA sense strand
gagcaaauuuaccaagaaa

SEQ ID NO: 2058342 - RNA, 19 nt, Homo sapiens
  misc_RNA (1)...(19): siRNA sense strand
gaggaaaugcuugauauaa

SEQ ID NO: 2058343 - RNA, 19 nt, Homo sapiens
  misc_RNA (1)...(19): siRNA sense strand
ccagugguguuguuaauga

SEQ ID NO: 2058344 - RNA, 19 nt, Homo sapiens
  misc_RNA (1)...(19): siRNA sense strand
gcaaauuuaccaagaaaga

SEQ ID NO: 2058345 - RNA, 19 nt, Homo sapiens
  misc_RNA (1)...(19): siRNA sense strand
gauaugauggguaaaugua

SEQ ID NO: 2058346 - RNA, 19 nt, Homo sapiens
  misc_RNA (1)...(19): siRNA sense strand
cuacaucacuaaagaggaa

SEQ ID NO: 2058347 - RNA, 19 nt, Homo sapiens
  misc_RNA (1)...(19): siRNA sense strand
gggagacucuacaacauau

SEQ ID NO: 2058348 - RNA, 19 nt, Homo sapiens
  misc_RNA (1)...(19): siRNA sense strand
guacauauccuguccucaa

SEQ ID NO: 2058349 - RNA, 19 nt, Homo sapiens
  misc_RNA (1)...(19): siRNA sense strand
aaacucaauugggcauuua

SEQ ID NO: 2058350 - RNA, 19 nt, Homo sapiens
  misc_RNA (1)...(19): siRNA sense strand
acagaggauuuaagaauga

SEQ ID NO: 2058351 - RNA, 19 nt, Homo sapiens
  misc_RNA (1)...(19): siRNA sense strand
uauacgauaugauggguaa

SEQ ID NO: 2058352 - RNA, 19 nt, Homo sapiens
  misc_RNA (1)...(19): siRNA sense strand
caauggagcugugaguuuc

SEQ ID NO: 2058353 - RNA, 19 nt, Homo sapiens
  misc_RNA (1)...(19): siRNA sense strand
aagaggaaaugcuugauau

SEQ ID NO: 2058354 - RNA, 19 nt, Homo sapiens
  misc_RNA (1)...(19): siRNA sense strand
cagagcaaauuuaccaaga

SEQ ID NO: 2058355 - RNA, 19 nt, Homo sapiens
  misc_RNA (1)...(19): siRNA sense strand
caagaaagagcuucagauc

SEQ ID NO: 2058356 - RNA, 19 nt, Homo sapiens
  misc_RNA (1)...(19): siRNA sense strand
gaaagagcuucagauccuu

SEQ ID NO: 2058357 - RNA, 19 nt, Homo sapiens
  misc_RNA (1)...(19): siRNA sense strand
agaaagagcuucagauccu

SEQ ID NO: 2058358 - RNA, 19 nt, Homo sapiens
  misc_RNA (1)...(19): siRNA sense strand
gaagcccagagcaaauuua

SEQ ID NO: 2058359 - RNA, 19 nt, Homo sapiens
  misc_RNA (1)...(19): siRNA sense strand
aaagaggaaaugcuugaua

SEQ ID NO: 2058360 - RNA, 19 nt, Homo sapiens
  misc_RNA (1)...(19): siRNA sense strand
uacagaggauuuaagaaug

SEQ ID NO: 2058361 - RNA, 19 nt, Homo sapiens
  misc_RNA (1)...(19): siRNA sense strand
cauauccuguccucaaaga

SEQ ID NO: 2058362 - RNA, 19 nt, Homo sapiens
  misc_RNA (1)...(19): siRNA sense strand
uuucgaggauuucaucaaa

SEQ ID NO: 2058363 - RNA, 19 nt, Homo sapiens
  misc_RNA (1)...(19): siRNA sense strand
agaagaugcucccagacaa

SEQ ID NO: 2058364 - RNA, 19 nt, Homo sapiens
  misc_RNA (1)...(19): siRNA sense strand
gagauuuacucgcaguucu

SEQ ID NO: 2058365 - RNA, 19 nt, Homo sapiens
  misc_RNA (1)...(19): siRNA sense strand
ggaagcccagagcaaauuu

SEQ ID NO: 2058366 - RNA, 19 nt, Homo sapiens
  misc_RNA (1)...(19): siRNA sense strand
agagcaaauuuaccaagaa

SEQ ID NO: 2058367 - RNA, 19 nt, Homo sapiens
  misc_RNA (1)...(19): siRNA sense strand
gcugugaguuucgaggauu

SEQ ID NO: 2058368 - RNA, 19 nt, Homo sapiens
  misc_RNA (1)...(19): siRNA sense strand
uacauauccuguccucaaa

SEQ ID NO: 2058369 - RNA, 19 nt, Homo sapiens
  misc_RNA (1)...(19): siRNA sense strand
cuaaagaggaaaugcuuga

SEQ ID NO: 2058370 - RNA, 19 nt, Homo sapiens
  misc_RNA (1)...(19): siRNA sense strand
gggcauuuaaucuguauga

SEQ ID NO: 2058371 - RNA, 19 nt, Homo sapiens
  misc_RNA (1)...(19): siRNA sense strand
acaauggagcugugaguuu

SEQ ID NO: 2058372 - RNA, 19 nt, Homo sapiens
  misc_RNA (1)...(19): siRNA sense strand
cagggagacucuacaacau

SEQ ID NO: 2058373 - RNA, 19 nt, Homo sapiens
  misc_RNA (1)...(19): siRNA sense strand
ccaugcagcucuuugaaaa

SEQ ID NO: 2058374 - RNA, 19 nt, Homo sapiens
  misc_RNA (1)...(19): siRNA sense strand
cuacaacauaugcacauuu

SEQ ID NO: 2058375 - RNA, 19 nt, Homo sapiens
  misc_RNA (1)...(19): siRNA sense strand
gcauuuaaucuguaugaca

SEQ ID NO: 2058376 - RNA, 19 nt, Homo sapiens
  misc_RNA (1)...(19): siRNA sense strand
agaggaaaugcuugauaua

SEQ ID NO: 2058377 - RNA, 19 nt, Homo sapiens
  misc_RNA (1)...(19): siRNA sense strand
ccacagggagacucuacaa

SEQ ID NO: 2058378 - RNA, 19 nt, Homo sapiens
  misc_RNA (1)...(19): siRNA sense strand
gauuuacucgcaguucuuu

SEQ ID NO: 2058379 - RNA, 19 nt, Homo sapiens
  misc_RNA (1)...(19): siRNA sense strand
uaugauggguaaauguaca

SEQ ID NO: 2058380 - RNA, 19 nt, Homo sapiens
  misc_RNA (1)...(19): siRNA sense strand
ucaauugggcauuuaaucu

SEQ ID NO: 2058381 - RNA, 19 nt, Homo sapiens
  misc_RNA (1)...(19): siRNA sense strand
cagaggauuuaagaaugaa

SEQ ID NO: 2058382 - RNA, 19 nt, Homo sapiens
  misc_RNA (1)...(19): siRNA sense strand
aagaaaccuucaaagagau

SEQ ID NO: 2058383 - RNA, 19 nt, Homo sapiens
  misc_RNA (1)...(19): siRNA sense strand
gaagaugcucccagacaac

SEQ ID NO: 2058384 - RNA, 19 nt, Homo sapiens
  misc_RNA (1)...(19): siRNA sense strand
ccaagaaagagcuucagau

SEQ ID NO: 2058385 - RNA, 19 nt, Homo sapiens
  misc_RNA (1)...(19): siRNA sense strand
caauugggcauuuaaucug

SEQ ID NO: 2058386 - RNA, 19 nt, Homo sapiens
  misc_RNA (1)...(19): siRNA sense strand
gaggauuuaagaaugaaug

SEQ ID NO: 2058387 - RNA, 19 nt, Homo sapiens
  misc_RNA (1)...(19): siRNA sense strand
gugguguuguuaaugaaga

SEQ ID NO: 2058388 - RNA, 19 nt, Homo sapiens
  misc_RNA (1)...(19): siRNA sense strand
gaaaccuucaaagagauuu

SEQ ID NO: 2058389 - RNA, 19 nt, Homo sapiens
  misc_RNA (1)...(19): siRNA sense strand
gcccagagcaaauuuacca

SEQ ID NO: 2058390 - RNA, 19 nt, Homo sapiens
  misc_RNA (1)...(19): siRNA sense strand
acagggagacucuacaaca

SEQ ID NO: 2058391 - RNA, 19 nt, Homo sapiens
  misc_RNA (1)...(19): siRNA sense strand
gcuccaugcagcucuuuga

SEQ ID NO: 2058392 - RNA, 19 nt, Homo sapiens
  misc_RNA (1)...(19): siRNA sense strand
gagcuucagauccuuuaca

SEQ ID NO: 2058393 - RNA, 19 nt, Homo sapiens
  misc_RNA (1)...(19): siRNA sense strand
agggagacucuacaacaua

SEQ ID NO: 2058394 - RNA, 19 nt, Homo sapiens
  misc_RNA (1)...(19): siRNA sense strand
ugauacagaccacaaugga

SEQ ID NO: 2058395 - RNA, 19 nt, Homo sapiens
  misc_RNA (1)...(19): siRNA sense strand
ggaagaugaacuggagaug

SEQ ID NO: 2058396 - RNA, 19 nt, Homo sapiens
  misc_RNA (1)...(19): siRNA sense strand
ucgaggauuucaucaaagg

SEQ ID NO: 2058397 - RNA, 19 nt, Homo sapiens
  misc_RNA (1)...(19): siRNA sense strand
gauggguaaauguacauau

SEQ ID NO: 2058398 - RNA, 19 nt, Homo sapiens
  misc_RNA (1)...(19): siRNA sense strand
aagaagaugcucccagaca

SEQ ID NO: 2058399 - RNA, 19 nt, Homo sapiens
  misc_RNA (1)...(19): siRNA sense strand
aaauaaagaugggguuguu

SEQ ID NO: 2058400 - RNA, 19 nt, Homo sapiens
  misc_RNA (1)...(19): siRNA sense strand
ucuacaacauaugcacauu

SEQ ID NO: 2058401 - RNA, 19 nt, Homo sapiens
  misc_RNA (1)...(19): siRNA sense strand
cagugguguuguuaaugaa

SEQ ID NO: 2058402 - RNA, 19 nt, Homo sapiens
  misc_RNA (1)...(19): siRNA sense strand
gaguuucgaggauuucauc

SEQ ID NO: 2058403 - RNA, 19 nt, Homo sapiens
  misc_RNA (1)...(19): siRNA sense strand
aauugggcauuuaaucugu

SEQ ID NO: 2058404 - RNA, 19 nt, Homo sapiens
  misc_RNA (1)...(19): siRNA sense strand
acgauaugauggguaaaug

SEQ ID NO: 2058405 - RNA, 19 nt, Homo sapiens
  misc_RNA (1)...(19): siRNA sense strand
uggaagcccagagcaaauu

SEQ ID NO: 2058406 - RNA, 19 nt, Homo sapiens
  misc_RNA (1)...(19): siRNA sense strand
ggaaaugcuugauauaaug

SEQ ID NO: 2058407 - RNA, 19 nt, Homo sapiens
  misc_RNA (1)...(19): siRNA sense strand
gagcaaauuuaccaagaaa

SEQ ID NO: 2058408 - RNA, 19 nt, Homo sapiens
  misc_RNA (1)...(19): siRNA sense strand
gaggaaaugcuugauauaa

SEQ ID NO: 2058409 - RNA, 19 nt, Homo sapiens
  misc_RNA (1)...(19): siRNA sense strand
ccagugguguuguuaauga

SEQ ID NO: 2058410 - RNA, 19 nt, Homo sapiens
  misc_RNA (1)...(19): siRNA sense strand
gcaaauuuaccaagaaaga

SEQ ID NO: 2058411 - RNA, 19 nt, Homo sapiens
  misc_RNA (1)...(19): siRNA sense strand
gauaugauggguaaaugua

SEQ ID NO: 2058412 - RNA, 19 nt, Homo sapiens
  misc_RNA (1)...(19): siRNA sense strand
cuacaucacuaaagaggaa

SEQ ID NO: 2058413 - RNA, 19 nt, Homo sapiens
  misc_RNA (1)...(19): siRNA sense strand
gggagacucuacaacauau

SEQ ID NO: 2058414 - RNA, 19 nt, Homo sapiens
  misc_RNA (1)...(19): siRNA sense strand
guacauauccuguccucaa

SEQ ID NO: 2058415 - RNA, 19 nt, Homo sapiens
  misc_RNA (1)...(19): siRNA sense strand
aaacucaauugggcauuua

SEQ ID NO: 2058416 - RNA, 19 nt, Homo sapiens
  misc_RNA (1)...(19): siRNA sense strand
acagaggauuuaagaauga

SEQ ID NO: 2058417 - RNA, 19 nt, Homo sapiens
  misc_RNA (1)...(19): siRNA sense strand
uauacgauaugauggguaa

SEQ ID NO: 2058418 - RNA, 19 nt, Homo sapiens
  misc_RNA (1)...(19): siRNA sense strand
caauggagcugugaguuuc

SEQ ID NO: 2058419 - RNA, 19 nt, Homo sapiens
  misc_RNA (1)...(19): siRNA sense strand
aagaggaaaugcuugauau

SEQ ID NO: 2058420 - RNA, 19 nt, Homo sapiens
  misc_RNA (1)...(19): siRNA sense strand
cagagcaaauuuaccaaga

SEQ ID NO: 2058421 - RNA, 19 nt, Homo sapiens
  misc_RNA (1)...(19): siRNA sense strand
caagaaagagcuucagauc

SEQ ID NO: 2058422 - RNA, 19 nt, Homo sapiens
  misc_RNA (1)...(19): siRNA sense strand
gaaagagcuucagauccuu

SEQ ID NO: 2058423 - RNA, 19 nt, Homo sapiens
  misc_RNA (1)...(19): siRNA sense strand
agaaagagcuucagauccu

SEQ ID NO: 2058424 - RNA, 19 nt, Homo sapiens
  misc_RNA (1)...(19): siRNA sense strand
gaagcccagagcaaauuua

SEQ ID NO: 2058425 - RNA, 19 nt, Homo sapiens
  misc_RNA (1)...(19): siRNA sense strand
aaagaggaaaugcuugaua

SEQ ID NO: 2058426 - RNA, 19 nt, Homo sapiens
  misc_RNA (1)...(19): siRNA sense strand
uacagaggauuuaagaaug

SEQ ID NO: 2058427 - RNA, 19 nt, Homo sapiens
  misc_RNA (1)...(19): siRNA sense strand
cauauccuguccucaaaga

SEQ ID NO: 2058428 - RNA, 19 nt, Homo sapiens
  misc_RNA (1)...(19): siRNA sense strand
uuucgaggauuucaucaaa

SEQ ID NO: 2058429 - RNA, 19 nt, Homo sapiens
  misc_RNA (1)...(19): siRNA sense strand
agaagaugcucccagacaa

SEQ ID NO: 2058430 - RNA, 19 nt, Homo sapiens
  misc_RNA (1)...(19): siRNA sense strand
gagauuuacucgcaguucu

SEQ ID NO: 2058431 - RNA, 19 nt, Homo sapiens
  misc_RNA (1)...(19): siRNA sense strand
ggaagcccagagcaaauuu

SEQ ID NO: 2058432 - RNA, 19 nt, Homo sapiens
  misc_RNA (1)...(19): siRNA sense strand
agagcaaauuuaccaagaa

SEQ ID NO: 2058433 - RNA, 19 nt, Homo sapiens
  misc_RNA (1)...(19): siRNA sense strand
gcugugaguuucgaggauu

SEQ ID NO: 2058434 - RNA, 19 nt, Homo sapiens
  misc_RNA (1)...(19): siRNA sense strand
uacauauccuguccucaaa

SEQ ID NO: 2058435 - RNA, 19 nt, Homo sapiens
  misc_RNA (1)...(19): siRNA sense strand
cuaaagaggaaaugcuuga

SEQ ID NO: 2058436 - RNA, 19 nt, Homo sapiens
  misc_RNA (1)...(19): siRNA sense strand
gggcauuuaaucuguauga

SEQ ID NO: 2058437 - RNA, 19 nt, Homo sapiens
  misc_RNA (1)...(19): siRNA sense strand
acaauggagcugugaguuu

SEQ ID NO: 2058438 - RNA, 19 nt, Homo sapiens
  misc_RNA (1)...(19): siRNA sense strand
cagggagacucuacaacau

SEQ ID NO: 2058439 - RNA, 19 nt, Homo sapiens
  misc_RNA (1)...(19): siRNA sense strand
ccaugcagcucuuugaaaa

SEQ ID NO: 2058440 - RNA, 19 nt, Homo sapiens
  misc_RNA (1)...(19): siRNA sense strand
cuacaacauaugcacauuu

SEQ ID NO: 2058441 - RNA, 19 nt, Homo sapiens
  misc_RNA (1)...(19): siRNA sense strand
gcauuuaaucuguaugaca

SEQ ID NO: 2058442 - RNA, 19 nt, Homo sapiens
  misc_RNA (1)...(19): siRNA sense strand
agaggaaaugcuugauaua

SEQ ID NO: 2058443 - RNA, 19 nt, Homo sapiens
  misc_RNA (1)...(19): siRNA sense strand
ccacagggagacucuacaa

SEQ ID NO: 2058444 - RNA, 19 nt, Homo sapiens
  misc_RNA (1)...(19): siRNA sense strand
gauuuacucgcaguucuuu

SEQ ID NO: 2058445 - RNA, 19 nt, Homo sapiens
  misc_RNA (1)...(19): siRNA sense strand
uaugauggguaaauguaca

SEQ ID NO: 2058446 - RNA, 19 nt, Homo sapiens
  misc_RNA (1)...(19): siRNA sense strand
ucaauugggcauuuaaucu

SEQ ID NO: 2058447 - RNA, 19 nt, Homo sapiens
  misc_RNA (1)...(19): siRNA sense strand
cagaggauuuaagaaugaa

SEQ ID NO: 2058448 - RNA, 19 nt, Homo sapiens
  misc_RNA (1)...(19): siRNA sense strand
aagaaaccuucaaagagau

SEQ ID NO: 2058449 - RNA, 19 nt, Homo sapiens
  misc_RNA (1)...(19): siRNA sense strand
gaagaugcucccagacaac

SEQ ID NO: 2058450 - RNA, 19 nt, Homo sapiens
  misc_RNA (1)...(19): siRNA sense strand
ccaagaaagagcuucagau

SEQ ID NO: 2058451 - RNA, 19 nt, Homo sapiens
  misc_RNA (1)...(19): siRNA sense strand
caauugggcauuuaaucug

SEQ ID NO: 2058452 - RNA, 19 nt, Homo sapiens
  misc_RNA (1)...(19): siRNA sense strand
gaggauuuaagaaugaaug

SEQ ID NO: 2058453 - RNA, 19 nt, Homo sapiens
  misc_RNA (1)...(19): siRNA sense strand
gugguguuguuaaugaaga

SEQ ID NO: 2058454 - RNA, 19 nt, Homo sapiens
  misc_RNA (1)...(19): siRNA sense strand
gaaaccuucaaagagauuu

SEQ ID NO: 2058455 - RNA, 19 nt, Homo sapiens
  misc_RNA (1)...(19): siRNA sense strand
gcccagagcaaauuuacca

SEQ ID NO: 2058456 - RNA, 19 nt, Homo sapiens
  misc_RNA (1)...(19): siRNA sense strand
acagggagacucuacaaca

SEQ ID NO: 2058457 - RNA, 19 nt, Homo sapiens
  misc_RNA (1)...(19): siRNA sense strand
gcuccaugcagcucuuuga

SEQ ID NO: 2058458 - RNA, 19 nt, Homo sapiens
  misc_RNA (1)...(19): siRNA sense strand
gagcuucagauccuuuaca

SEQ ID NO: 2058459 - RNA, 19 nt, Homo sapiens
  misc_RNA (1)...(19): siRNA sense strand
agggagacucuacaacaua

SEQ ID NO: 2058460 - RNA, 19 nt, Homo sapiens
  misc_RNA (1)...(19): siRNA sense strand
ugauacagaccacaaugga

SEQ ID NO: 2058461 - RNA, 19 nt, Homo sapiens
  misc_RNA (1)...(19): siRNA sense strand
ggaagaugaacuggagaug

SEQ ID NO: 2058462 - RNA, 19 nt, Homo sapiens
  misc_RNA (1)...(19): siRNA sense strand
ucgaggauuucaucaaagg

SEQ ID NO: 2058463 - RNA, 19 nt, Homo sapiens
  misc_RNA (1)...(19): siRNA sense strand
gauggguaaauguacauau

SEQ ID NO: 2058464 - RNA, 19 nt, Homo sapiens
  misc_RNA (1)...(19): siRNA sense strand
aagaagaugcucccagaca

SEQ ID NO: 2058465 - RNA, 19 nt, Homo sapiens
  misc_RNA (1)...(19): siRNA sense strand
aaauaaagaugggguuguu

SEQ ID NO: 2058466 - RNA, 19 nt, Homo sapiens
  misc_RNA (1)...(19): siRNA sense strand
ucuacaacauaugcacauu

SEQ ID NO: 2058467 - RNA, 19 nt, Homo sapiens
  misc_RNA (1)...(19): siRNA sense strand
cagugguguuguuaaugaa

SEQ ID NO: 2058468 - RNA, 19 nt, Homo sapiens
  misc_RNA (1)...(19): siRNA sense strand
gaguuucgaggauuucauc

SEQ ID NO: 2058469 - RNA, 19 nt, Homo sapiens
  misc_RNA (1)...(19): siRNA sense strand
aauugggcauuuaaucugu

SEQ ID NO: 2058470 - RNA, 19 nt, Homo sapiens
  misc_RNA (1)...(19): siRNA sense strand
acgauaugauggguaaaug

SEQ ID NO: 2058471 - RNA, 19 nt, Homo sapiens
  misc_RNA (1)...(19): siRNA sense strand
uggaagcccagagcaaauu

SEQ ID NO: 2058472 - RNA, 19 nt, Homo sapiens
  misc_RNA (1)...(19): siRNA sense strand
ggaaaugcuugauauaaug

SEQ ID NO: 2058473 - RNA, 19 nt, Homo sapiens
  misc_RNA (1)...(19): siRNA sense strand
gagcaaauuuaccaagaaa

SEQ ID NO: 2058474 - RNA, 19 nt, Homo sapiens
  misc_RNA (1)...(19): siRNA sense strand
gaggaaaugcuugauauaa

SEQ ID NO: 2058475 - RNA, 19 nt, Homo sapiens
  misc_RNA (1)...(19): siRNA sense strand
ccagugguguuguuaauga

SEQ ID NO: 2058476 - RNA, 19 nt, Homo sapiens
  misc_RNA (1)...(19): siRNA sense strand
gcaaauuuaccaagaaaga

SEQ ID NO: 2058477 - RNA, 19 nt, Homo sapiens
  misc_RNA (1)...(19): siRNA sense strand
gauaugauggguaaaugua

SEQ ID NO: 2058478 - RNA, 19 nt, Homo sapiens
  misc_RNA (1)...(19): siRNA sense strand
cuacaucacuaaagaggaa

SEQ ID NO: 2058479 - RNA, 19 nt, Homo sapiens
  misc_RNA (1)...(19): siRNA sense strand
gggagacucuacaacauau

SEQ ID NO: 2058480 - RNA, 19 nt, Homo sapiens
  misc_RNA (1)...(19): siRNA sense strand
guacauauccuguccucaa

SEQ ID NO: 2058481 - RNA, 19 nt, Homo sapiens
  misc_RNA (1)...(19): siRNA sense strand
aaacucaauugggcauuua

SEQ ID NO: 2058482 - RNA, 19 nt, Homo sapiens
  misc_RNA (1)...(19): siRNA sense strand
acagaggauuuaagaauga

SEQ ID NO: 2058483 - RNA, 19 nt, Homo sapiens
  misc_RNA (1)...(19): siRNA sense strand
uauacgauaugauggguaa

SEQ ID NO: 2058484 - RNA, 19 nt, Homo sapiens
  misc_RNA (1)...(19): siRNA sense strand
caauggagcugugaguuuc

SEQ ID NO: 2058485 - RNA, 19 nt, Homo sapiens
  misc_RNA (1)...(19): siRNA sense strand
aagaggaaaugcuugauau

SEQ ID NO: 2058486 - RNA, 19 nt, Homo sapiens
  misc_RNA (1)...(19): siRNA sense strand
cagagcaaauuuaccaaga

SEQ ID NO: 2058487 - RNA, 19 nt, Homo sapiens
  misc_RNA (1)...(19): siRNA sense strand
caagaaagagcuucagauc

SEQ ID NO: 2058488 - RNA, 19 nt, Homo sapiens
  misc_RNA (1)...(19): siRNA sense strand
gaaagagcuucagauccuu

SEQ ID NO: 2058489 - RNA, 19 nt, Homo sapiens
  misc_RNA (1)...(19): siRNA sense strand
agaaagagcuucagauccu

SEQ ID NO: 2058490 - RNA, 19 nt, Homo sapiens
  misc_RNA (1)...(19): siRNA sense strand
aaagaggaaaugcuugaua

SEQ ID NO: 2058491 - RNA, 19 nt, Homo sapiens
  misc_RNA (1)...(19): siRNA sense strand
gaagcccagagcaaauuua

SEQ ID NO: 2058492 - RNA, 19 nt, Homo sapiens
  misc_RNA (1)...(19): siRNA sense strand
uacagaggauuuaagaaug

SEQ ID NO: 2058493 - RNA, 19 nt, Homo sapiens
  misc_RNA (1)...(19): siRNA sense strand
cauauccuguccucaaaga

SEQ ID NO: 2058494 - RNA, 19 nt, Homo sapiens
  misc_RNA (1)...(19): siRNA sense strand
uuucgaggauuucaucaaa

SEQ ID NO: 2058495 - RNA, 19 nt, Homo sapiens
  misc_RNA (1)...(19): siRNA sense strand
agaagaugcucccagacaa

SEQ ID NO: 2058496 - RNA, 19 nt, Homo sapiens
  misc_RNA (1)...(19): siRNA sense strand
gagauuuacucgcaguucu

SEQ ID NO: 2058497 - RNA, 19 nt, Homo sapiens
  misc_RNA (1)...(19): siRNA sense strand
ggaagcccagagcaaauuu

SEQ ID NO: 2058498 - RNA, 19 nt, Homo sapiens
  misc_RNA (1)...(19): siRNA sense strand
agagcaaauuuaccaagaa

SEQ ID NO: 2058499 - RNA, 19 nt, Homo sapiens
  misc_RNA (1)...(19): siRNA sense strand
gcugugaguuucgaggauu

SEQ ID NO: 2058500 - RNA, 19 nt, Homo sapiens
  misc_RNA (1)...(19): siRNA sense strand
uacauauccuguccucaaa

SEQ ID NO: 2058501 - RNA, 19 nt, Homo sapiens
  misc_RNA (1)...(19): siRNA sense strand
cuaaagaggaaaugcuuga

SEQ ID NO: 2058502 - RNA, 19 nt, Homo sapiens
  misc_RNA (1)...(19): siRNA sense strand
gggcauuuaaucuguauga

SEQ ID NO: 2058503 - RNA, 19 nt, Homo sapiens
  misc_RNA (1)...(19): siRNA sense strand
acaauggagcugugaguuu

SEQ ID NO: 2058504 - RNA, 19 nt, Homo sapiens
  misc_RNA (1)...(19): siRNA sense strand
cagggagacucuacaacau

SEQ ID NO: 2058505 - RNA, 19 nt, Homo sapiens
  misc_RNA (1)...(19): siRNA sense strand
ccaugcagcucuuugaaaa

SEQ ID NO: 2058506 - RNA, 19 nt, Homo sapiens
  misc_RNA (1)...(19): siRNA sense strand
cuacaacauaugcacauuu

SEQ ID NO: 2058507 - RNA, 19 nt, Homo sapiens
  misc_RNA (1)...(19): siRNA sense strand
gcauuuaaucuguaugaca

SEQ ID NO: 2058508 - RNA, 19 nt, Homo sapiens
  misc_RNA (1)...(19): siRNA sense strand
agaggaaaugcuugauaua

SEQ ID NO: 2058509 - RNA, 19 nt, Homo sapiens
  misc_RNA (1)...(19): siRNA sense strand
ccacagggagacucuacaa

SEQ ID NO: 2058510 - RNA, 19 nt, Homo sapiens
  misc_RNA (1)...(19): siRNA sense strand
gauuuacucgcaguucuuu

SEQ ID NO: 2058511 - RNA, 19 nt, Homo sapiens
  misc_RNA (1)...(19): siRNA sense strand
uaugauggguaaauguaca

SEQ ID NO: 2058512 - RNA, 19 nt, Homo sapiens
  misc_RNA (1)...(19): siRNA sense strand
ucaauugggcauuuaaucu

SEQ ID NO: 2058513 - RNA, 19 nt, Homo sapiens
  misc_RNA (1)...(19): siRNA sense strand
cagaggauuuaagaaugaa

SEQ ID NO: 2058514 - RNA, 19 nt, Homo sapiens
  misc_RNA (1)...(19): siRNA sense strand
aagaaaccuucaaagagau

SEQ ID NO: 2058515 - RNA, 19 nt, Homo sapiens
  misc_RNA (1)...(19): siRNA sense strand
gaagaugcucccagacaac

SEQ ID NO: 2058516 - RNA, 19 nt, Homo sapiens
  misc_RNA (1)...(19): siRNA sense strand
ccaagaaagagcuucagau

SEQ ID NO: 2058517 - RNA, 19 nt, Homo sapiens
  misc_RNA (1)...(19): siRNA sense strand
gaggauuuaagaaugaaug

SEQ ID NO: 2058518 - RNA, 19 nt, Homo sapiens
  misc_RNA (1)...(19): siRNA sense strand
caauugggcauuuaaucug

SEQ ID NO: 2058519 - RNA, 19 nt, Homo sapiens
  misc_RNA (1)...(19): siRNA sense strand
gugguguuguuaaugaaga

SEQ ID NO: 2058520 - RNA, 19 nt, Homo sapiens
  misc_RNA (1)...(19): siRNA sense strand
gaaaccuucaaagagauuu

SEQ ID NO: 2058521 - RNA, 19 nt, Homo sapiens
  misc_RNA (1)...(19): siRNA sense strand
gcccagagcaaauuuacca

SEQ ID NO: 2058522 - RNA, 19 nt, Homo sapiens
  misc_RNA (1)...(19): siRNA sense strand
acagggagacucuacaaca

SEQ ID NO: 2058523 - RNA, 19 nt, Homo sapiens
  misc_RNA (1)...(19): siRNA sense strand
gcuccaugcagcucuuuga

SEQ ID NO: 2058524 - RNA, 19 nt, Homo sapiens
  misc_RNA (1)...(19): siRNA sense strand
gagcuucagauccuuuaca

SEQ ID NO: 2058525 - RNA, 19 nt, Homo sapiens
  misc_RNA (1)...(19): siRNA sense strand
agggagacucuacaacaua

SEQ ID NO: 2058526 - RNA, 19 nt, Homo sapiens
  misc_RNA (1)...(19): siRNA sense strand
ugauacagaccacaaugga

SEQ ID NO: 2058527 - RNA, 19 nt, Homo sapiens
  misc_RNA (1)...(19): siRNA sense strand
ucgaggauuucaucaaagg

SEQ ID NO: 2058528 - RNA, 19 nt, Homo sapiens
  misc_RNA (1)...(19): siRNA sense strand
gauggguaaauguacauau

SEQ ID NO: 2058529 - RNA, 19 nt, Homo sapiens
  misc_RNA (1)...(19): siRNA sense strand
aagaagaugcucccagaca

SEQ ID NO: 2058530 - RNA, 19 nt, Homo sapiens
  misc_RNA (1)...(19): siRNA sense strand
aaauaaagaugggguuguu

SEQ ID NO: 2058531 - RNA, 19 nt, Homo sapiens
  misc_RNA (1)...(19): siRNA sense strand
ucuacaacauaugcacauu

SEQ ID NO: 2058532 - RNA, 19 nt, Homo sapiens
  misc_RNA (1)...(19): siRNA sense strand
cagugguguuguuaaugaa

SEQ ID NO: 2058533 - RNA, 19 nt, Homo sapiens
  misc_RNA (1)...(19): siRNA sense strand
gaguuucgaggauuucauc

SEQ ID NO: 2058534 - RNA, 19 nt, Homo sapiens
  misc_RNA (1)...(19): siRNA sense strand
aauugggcauuuaaucugu

SEQ ID NO: 2058535 - RNA, 19 nt, Homo sapiens
  misc_RNA (1)...(19): siRNA sense strand
uggaagcccagagcaaauu

SEQ ID NO: 2058536 - RNA, 19 nt, Homo sapiens
  misc_RNA (1)...(19): siRNA sense strand
acgauaugauggguaaaug

SEQ ID NO: 2058537 - RNA, 19 nt, Homo sapiens
  misc_RNA (1)...(19): siRNA sense strand
ggaaaugcuugauauaaug

SEQ ID NO: 2058538 - RNA, 19 nt, Homo sapiens
  misc_RNA (1)...(19): siRNA sense strand
gagcaaauuuaccaagaaa

SEQ ID NO: 2058539 - RNA, 19 nt, Homo sapiens
  misc_RNA (1)...(19): siRNA sense strand
gaggaaaugcuugauauaa

SEQ ID NO: 2058540 - RNA, 19 nt, Homo sapiens
  misc_RNA (1)...(19): siRNA sense strand
ccagugguguuguuaauga

SEQ ID NO: 2058541 - RNA, 19 nt, Homo sapiens
  misc_RNA (1)...(19): siRNA sense strand
gcaaauuuaccaagaaaga

SEQ ID NO: 2058542 - RNA, 19 nt, Homo sapiens
  misc_RNA (1)...(19): siRNA sense strand
gauaugauggguaaaugua

SEQ ID NO: 2058543 - RNA, 19 nt, Homo sapiens
  misc_RNA (1)...(19): siRNA sense strand
cuacaucacuaaagaggaa

SEQ ID NO: 2058544 - RNA, 19 nt, Homo sapiens
  misc_RNA (1)...(19): siRNA sense strand
gggagacucuacaacauau

SEQ ID NO: 2058545 - RNA, 19 nt, Homo sapiens
  misc_RNA (1)...(19): siRNA sense strand
guacauauccuguccucaa

SEQ ID NO: 2058546 - RNA, 19 nt, Homo sapiens
  misc_RNA (1)...(19): siRNA sense strand
aaacucaauugggcauuua

SEQ ID NO: 2058547 - RNA, 19 nt, Homo sapiens
  misc_RNA (1)...(19): siRNA sense strand
acagaggauuuaagaauga

SEQ ID NO: 2058548 - RNA, 19 nt, Homo sapiens
  misc_RNA (1)...(19): siRNA sense strand
uauacgauaugauggguaa

SEQ ID NO: 2058549 - RNA, 19 nt, Homo sapiens
  misc_RNA (1)...(19): siRNA sense strand
caauggagcugugaguuuc

SEQ ID NO: 2058550 - RNA, 19 nt, Homo sapiens
  misc_RNA (1)...(19): siRNA sense strand
aagaggaaaugcuugauau

SEQ ID NO: 2058551 - RNA, 19 nt, Homo sapiens
  misc_RNA (1)...(19): siRNA sense strand
cagagcaaauuuaccaaga

SEQ ID NO: 2058552 - RNA, 19 nt, Homo sapiens
  misc_RNA (1)...(19): siRNA sense strand
caagaaagagcuucagauc

SEQ ID NO: 2058553 - RNA, 19 nt, Homo sapiens
  misc_RNA (1)...(19): siRNA sense strand
gaaagagcuucagauccuu

SEQ ID NO: 2058554 - RNA, 19 nt, Homo sapiens
  misc_RNA (1)...(19): siRNA sense strand
agaaagagcuucagauccu

SEQ ID NO: 2058555 - RNA, 19 nt, Homo sapiens
  misc_RNA (1)...(19): siRNA sense strand
gaagcccagagcaaauuua

SEQ ID NO: 2058556 - RNA, 19 nt, Homo sapiens
  misc_RNA (1)...(19): siRNA sense strand
aaagaggaaaugcuugaua

SEQ ID NO: 2058557 - RNA, 19 nt, Homo sapiens
  misc_RNA (1)...(19): siRNA sense strand
uacagaggauuuaagaaug

SEQ ID NO: 2058558 - RNA, 19 nt, Homo sapiens
  misc_RNA (1)...(19): siRNA sense strand
cauauccuguccucaaaga

SEQ ID NO: 2058559 - RNA, 19 nt, Homo sapiens
  misc_RNA (1)...(19): siRNA sense strand
uuucgaggauuucaucaaa

SEQ ID NO: 2058560 - RNA, 19 nt, Homo sapiens
  misc_RNA (1)...(19): siRNA sense strand
agaagaugcucccagacaa

SEQ ID NO: 2058561 - RNA, 19 nt, Homo sapiens
  misc_RNA (1)...(19): siRNA sense strand
gagauuuacucgcaguucu

SEQ ID NO: 2058562 - RNA, 19 nt, Homo sapiens
  misc_RNA (1)...(19): siRNA sense strand
ggaagcccagagcaaauuu

SEQ ID NO: 2058563 - RNA, 19 nt, Homo sapiens
  misc_RNA (1)...(19): siRNA sense strand
agagcaaauuuaccaagaa

SEQ ID NO: 2058564 - RNA, 19 nt, Homo sapiens
  misc_RNA (1)...(19): siRNA sense strand
gcugugaguuucgaggauu

SEQ ID NO: 2058565 - RNA, 19 nt, Homo sapiens
  misc_RNA (1)...(19): siRNA sense strand
uacauauccuguccucaaa

SEQ ID NO: 2058566 - RNA, 19 nt, Homo sapiens
  misc_RNA (1)...(19): siRNA sense strand
cuaaagaggaaaugcuuga

SEQ ID NO: 2058567 - RNA, 19 nt, Homo sapiens
  misc_RNA (1)...(19): siRNA sense strand
gggcauuuaaucuguauga

SEQ ID NO: 2058568 - RNA, 19 nt, Homo sapiens
  misc_RNA (1)...(19): siRNA sense strand
acaauggagcugugaguuu

SEQ ID NO: 2058569 - RNA, 19 nt, Homo sapiens
  misc_RNA (1)...(19): siRNA sense strand
cagggagacucuacaacau

SEQ ID NO: 2058570 - RNA, 19 nt, Homo sapiens
  misc_RNA (1)...(19): siRNA sense strand
ccaugcagcucuuugaaaa

SEQ ID NO: 2058571 - RNA, 19 nt, Homo sapiens
  misc_RNA (1)...(19): siRNA sense strand
cuacaacauaugcacauuu

SEQ ID NO: 2058572 - RNA, 19 nt, Homo sapiens
  misc_RNA (1)...(19): siRNA sense strand
gcauuuaaucuguaugaca

SEQ ID NO: 2058573 - RNA, 19 nt, Homo sapiens
  misc_RNA (1)...(19): siRNA sense strand
agaggaaaugcuugauaua

SEQ ID NO: 2058574 - RNA, 19 nt, Homo sapiens
  misc_RNA (1)...(19): siRNA sense strand
ccacagggagacucuacaa

SEQ ID NO: 2058575 - RNA, 19 nt, Homo sapiens
  misc_RNA (1)...(19): siRNA sense strand
gauuuacucgcaguucuuu

SEQ ID NO: 2058576 - RNA, 19 nt, Homo sapiens
  misc_RNA (1)...(19): siRNA sense strand
uaugauggguaaauguaca

SEQ ID NO: 2058577 - RNA, 19 nt, Homo sapiens
  misc_RNA (1)...(19): siRNA sense strand
ucaauugggcauuuaaucu

SEQ ID NO: 2058578 - RNA, 19 nt, Homo sapiens
  misc_RNA (1)...(19): siRNA sense strand
cagaggauuuaagaaugaa

SEQ ID NO: 2058579 - RNA, 19 nt, Homo sapiens
  misc_RNA (1)...(19): siRNA sense strand
aagaaaccuucaaagagau

SEQ ID NO: 2058580 - RNA, 19 nt, Homo sapiens
  misc_RNA (1)...(19): siRNA sense strand
gaagaugcucccagacaac

SEQ ID NO: 2058581 - RNA, 19 nt, Homo sapiens
  misc_RNA (1)...(19): siRNA sense strand
ccaagaaagagcuucagau

SEQ ID NO: 2058582 - RNA, 19 nt, Homo sapiens
  misc_RNA (1)...(19): siRNA sense strand
caauugggcauuuaaucug

SEQ ID NO: 2058583 - RNA, 19 nt, Homo sapiens
  misc_RNA (1)...(19): siRNA sense strand
gaggauuuaagaaugaaug

SEQ ID NO: 2058584 - RNA, 19 nt, Homo sapiens
  misc_RNA (1)...(19): siRNA sense strand
gugguguuguuaaugaaga

SEQ ID NO: 2058585 - RNA, 19 nt, Homo sapiens
  misc_RNA (1)...(19): siRNA sense strand
gaaaccuucaaagagauuu

SEQ ID NO: 2058586 - RNA, 19 nt, Homo sapiens
  misc_RNA (1)...(19): siRNA sense strand
gcccagagcaaauuuacca

SEQ ID NO: 2058587 - RNA, 19 nt, Homo sapiens
  misc_RNA (1)...(19): siRNA sense strand
acagggagacucuacaaca

SEQ ID NO: 2058588 - RNA, 19 nt, Homo sapiens
  misc_RNA (1)...(19): siRNA sense strand
gcuccaugcagcucuuuga

SEQ ID NO: 2058589 - RNA, 19 nt, Homo sapiens
  misc_RNA (1)...(19): siRNA sense strand
gagcuucagauccuuuaca

SEQ ID NO: 2058590 - RNA, 19 nt, Homo sapiens
  misc_RNA (1)...(19): siRNA sense strand
agggagacucuacaacaua

SEQ ID NO: 2058591 - RNA, 19 nt, Homo sapiens
  misc_RNA (1)...(19): siRNA sense strand
ugauacagaccacaaugga

SEQ ID NO: 2058592 - RNA, 19 nt, Homo sapiens
  misc_RNA (1)...(19): siRNA sense strand
ggaagaugaacuggagaug

SEQ ID NO: 2058593 - RNA, 19 nt, Homo sapiens
  misc_RNA (1)...(19): siRNA sense strand
ucgaggauuucaucaaagg

SEQ ID NO: 2058594 - RNA, 19 nt, Homo sapiens
  misc_RNA (1)...(19): siRNA sense strand
gauggguaaauguacauau

SEQ ID NO: 2058595 - RNA, 19 nt, Homo sapiens
  misc_RNA (1)...(19): siRNA sense strand
aagaagaugcucccagaca

SEQ ID NO: 2058596 - RNA, 19 nt, Homo sapiens
  misc_RNA (1)...(19): siRNA sense strand
aaauaaagaugggguuguu

SEQ ID NO: 2058597 - RNA, 19 nt, Homo sapiens
  misc_RNA (1)...(19): siRNA sense strand
ucuacaacauaugcacauu

SEQ ID NO: 2058598 - RNA, 19 nt, Homo sapiens
  misc_RNA (1)...(19): siRNA sense strand
cagugguguuguuaaugaa

SEQ ID NO: 2058599 - RNA, 19 nt, Homo sapiens
  misc_RNA (1)...(19): siRNA sense strand
gaguuucgaggauuucauc

SEQ ID NO: 2058600 - RNA, 19 nt, Homo sapiens
  misc_RNA (1)...(19): siRNA sense strand
aauugggcauuuaaucugu

SEQ ID NO: 2058601 - RNA, 19 nt, Homo sapiens
  misc_RNA (1)...(19): siRNA sense strand
acgauaugauggguaaaug

SEQ ID NO: 2058602 - RNA, 19 nt, Homo sapiens
  misc_RNA (1)...(19): siRNA sense strand
uggaagcccagagcaaauu

SEQ ID NO: 2058603 - RNA, 19 nt, Homo sapiens
  misc_RNA (1)...(19): siRNA sense strand
ggaaaugcuugauauaaug

SEQ ID NO: 2058604 - RNA, 19 nt, Homo sapiens
  misc_RNA (1)...(19): siRNA sense strand
gagcaaauuuaccaagaaa

SEQ ID NO: 2058605 - RNA, 19 nt, Homo sapiens
  misc_RNA (1)...(19): siRNA sense strand
gaggaaaugcuugauauaa

SEQ ID NO: 2058606 - RNA, 19 nt, Homo sapiens
  misc_RNA (1)...(19): siRNA sense strand
ccagugguguuguuaauga

SEQ ID NO: 2058607 - RNA, 19 nt, Homo sapiens
  misc_RNA (1)...(19): siRNA sense strand
gcaaauuuaccaagaaaga

SEQ ID NO: 2058608 - RNA, 19 nt, Homo sapiens
  misc_RNA (1)...(19): siRNA sense strand
gauaugauggguaaaugua

SEQ ID NO: 2058609 - RNA, 19 nt, Homo sapiens
  misc_RNA (1)...(19): siRNA sense strand
cuacaucacuaaagaggaa

SEQ ID NO: 2058610 - RNA, 19 nt, Homo sapiens
  misc_RNA (1)...(19): siRNA sense strand
gggagacucuacaacauau

SEQ ID NO: 2058611 - RNA, 19 nt, Homo sapiens
  misc_RNA (1)...(19): siRNA sense strand
guacauauccuguccucaa

SEQ ID NO: 2058612 - RNA, 19 nt, Homo sapiens
  misc_RNA (1)...(19): siRNA sense strand
aaacucaauugggcauuua

SEQ ID NO: 2058613 - RNA, 19 nt, Homo sapiens
  misc_RNA (1)...(19): siRNA sense strand
acagaggauuuaagaauga

SEQ ID NO: 2058614 - RNA, 19 nt, Homo sapiens
  misc_RNA (1)...(19): siRNA sense strand
uauacgauaugauggguaa

SEQ ID NO: 2058615 - RNA, 19 nt, Homo sapiens
  misc_RNA (1)...(19): siRNA sense strand
caauggagcugugaguuuc

SEQ ID NO: 2058616 - RNA, 19 nt, Homo sapiens
  misc_RNA (1)...(19): siRNA sense strand
aagaggaaaugcuugauau

SEQ ID NO: 2058617 - RNA, 19 nt, Homo sapiens
  misc_RNA (1)...(19): siRNA sense strand
cagagcaaauuuaccaaga

SEQ ID NO: 2058618 - RNA, 19 nt, Homo sapiens
  misc_RNA (1)...(19): siRNA sense strand
caagaaagagcuucagauc

SEQ ID NO: 2058619 - RNA, 19 nt, Homo sapiens
  misc_RNA (1)...(19): siRNA sense strand
gaaagagcuucagauccuu

SEQ ID NO: 2058620 - RNA, 19 nt, Homo sapiens
  misc_RNA (1)...(19): siRNA sense strand
agaaagagcuucagauccu

SEQ ID NO: 2058621 - RNA, 19 nt, Homo sapiens
  misc_RNA (1)...(19): siRNA sense strand
gaagcccagagcaaauuua

SEQ ID NO: 2058622 - RNA, 19 nt, Homo sapiens
  misc_RNA (1)...(19): siRNA sense strand
aaagaggaaaugcuugaua

SEQ ID NO: 2058623 - RNA, 19 nt, Homo sapiens
  misc_RNA (1)...(19): siRNA sense strand
uacagaggauuuaagaaug

SEQ ID NO: 2058624 - RNA, 19 nt, Homo sapiens
  misc_RNA (1)...(19): siRNA sense strand
cauauccuguccucaaaga

SEQ ID NO: 2058625 - RNA, 19 nt, Homo sapiens
  misc_RNA (1)...(19): siRNA sense strand
uuucgaggauuucaucaaa

SEQ ID NO: 2058626 - RNA, 19 nt, Homo sapiens
  misc_RNA (1)...(19): siRNA sense strand
agaagaugcucccagacaa

SEQ ID NO: 2058627 - RNA, 19 nt, Homo sapiens
  misc_RNA (1)...(19): siRNA sense strand
gagauuuacucgcaguucu

SEQ ID NO: 2058628 - RNA, 19 nt, Homo sapiens
  misc_RNA (1)...(19): siRNA sense strand
ggaagcccagagcaaauuu

SEQ ID NO: 2058629 - RNA, 19 nt, Homo sapiens
  misc_RNA (1)...(19): siRNA sense strand
agagcaaauuuaccaagaa

SEQ ID NO: 2058630 - RNA, 19 nt, Homo sapiens
  misc_RNA (1)...(19): siRNA sense strand
gcugugaguuucgaggauu

SEQ ID NO: 2058631 - RNA, 19 nt, Homo sapiens
  misc_RNA (1)...(19): siRNA sense strand
uacauauccuguccucaaa

SEQ ID NO: 2058632 - RNA, 19 nt, Homo sapiens
  misc_RNA (1)...(19): siRNA sense strand
cuaaagaggaaaugcuuga

SEQ ID NO: 2058633 - RNA, 19 nt, Homo sapiens
  misc_RNA (1)...(19): siRNA sense strand
gggcauuuaaucuguauga

SEQ ID NO: 2058634 - RNA, 19 nt, Homo sapiens
  misc_RNA (1)...(19): siRNA sense strand
acaauggagcugugaguuu

SEQ ID NO: 2058635 - RNA, 19 nt, Homo sapiens
  misc_RNA (1)...(19): siRNA sense strand
cagggagacucuacaacau

SEQ ID NO: 2058636 - RNA, 19 nt, Homo sapiens
  misc_RNA (1)...(19): siRNA sense strand
ccaugcagcucuuugaaaa

SEQ ID NO: 2058637 - RNA, 19 nt, Homo sapiens
  misc_RNA (1)...(19): siRNA sense strand
cuacaacauaugcacauuu

SEQ ID NO: 2058638 - RNA, 19 nt, Homo sapiens
  misc_RNA (1)...(19): siRNA sense strand
gcauuuaaucuguaugaca

SEQ ID NO: 2058639 - RNA, 19 nt, Homo sapiens
  misc_RNA (1)...(19): siRNA sense strand
agaggaaaugcuugauaua

SEQ ID NO: 2058640 - RNA, 19 nt, Homo sapiens
  misc_RNA (1)...(19): siRNA sense strand
ccacagggagacucuacaa

SEQ ID NO: 2058641 - RNA, 19 nt, Homo sapiens
  misc_RNA (1)...(19): siRNA sense strand
gauuuacucgcaguucuuu

SEQ ID NO: 2058642 - RNA, 19 nt, Homo sapiens
  misc_RNA (1)...(19): siRNA sense strand
uaugauggguaaauguaca

SEQ ID NO: 2058643 - RNA, 19 nt, Homo sapiens
  misc_RNA (1)...(19): siRNA sense strand
ucaauugggcauuuaaucu

SEQ ID NO: 2058644 - RNA, 19 nt, Homo sapiens
  misc_RNA (1)...(19): siRNA sense strand
cagaggauuuaagaaugaa

SEQ ID NO: 2058645 - RNA, 19 nt, Homo sapiens
  misc_RNA (1)...(19): siRNA sense strand
aagaaaccuucaaagagau

SEQ ID NO: 2058646 - RNA, 19 nt, Homo sapiens
  misc_RNA (1)...(19): siRNA sense strand
gaagaugcucccagacaac

SEQ ID NO: 2058647 - RNA, 19 nt, Homo sapiens
  misc_RNA (1)...(19): siRNA sense strand
ccaagaaagagcuucagau

SEQ ID NO: 2058648 - RNA, 19 nt, Homo sapiens
  misc_RNA (1)...(19): siRNA sense strand
caauugggcauuuaaucug

SEQ ID NO: 2058649 - RNA, 19 nt, Homo sapiens
  misc_RNA (1)...(19): siRNA sense strand
gaggauuuaagaaugaaug

SEQ ID NO: 2058650 - RNA, 19 nt, Homo sapiens
  misc_RNA (1)...(19): siRNA sense strand
gugguguuguuaaugaaga

SEQ ID NO: 2058651 - RNA, 19 nt, Homo sapiens
  misc_RNA (1)...(19): siRNA sense strand
gaaaccuucaaagagauuu

SEQ ID NO: 2058652 - RNA, 19 nt, Homo sapiens
  misc_RNA (1)...(19): siRNA sense strand
gcccagagcaaauuuacca

SEQ ID NO: 2058653 - RNA, 19 nt, Homo sapiens
  misc_RNA (1)...(19): siRNA sense strand
acagggagacucuacaaca

SEQ ID NO: 2058654 - RNA, 19 nt, Homo sapiens
  misc_RNA (1)...(19): siRNA sense strand
gcuccaugcagcucuuuga

SEQ ID NO: 2058655 - RNA, 19 nt, Homo sapiens
  misc_RNA (1)...(19): siRNA sense strand
gagcuucagauccuuuaca

SEQ ID NO: 2058656 - RNA, 19 nt, Homo sapiens
  misc_RNA (1)...(19): siRNA sense strand
agggagacucuacaacaua

SEQ ID NO: 2058657 - RNA, 19 nt, Homo sapiens
  misc_RNA (1)...(19): siRNA sense strand
ugauacagaccacaaugga

SEQ ID NO: 2058658 - RNA, 19 nt, Homo sapiens
  misc_RNA (1)...(19): siRNA sense strand
ggaagaugaacuggagaug

SEQ ID NO: 2058659 - RNA, 19 nt, Homo sapiens
  misc_RNA (1)...(19): siRNA sense strand
ucgaggauuucaucaaagg

SEQ ID NO: 2058660 - RNA, 19 nt, Homo sapiens
  misc_RNA (1)...(19): siRNA sense strand
gauggguaaauguacauau

SEQ ID NO: 2058661 - RNA, 19 nt, Homo sapiens
  misc_RNA (1)...(19): siRNA sense strand
aagaagaugcucccagaca

SEQ ID NO: 2058662 - RNA, 19 nt, Homo sapiens
  misc_RNA (1)...(19): siRNA sense strand
aaauaaagaugggguuguu

SEQ ID NO: 2058663 - RNA, 19 nt, Homo sapiens
  misc_RNA (1)...(19): siRNA sense strand
ucuacaacauaugcacauu

SEQ ID NO: 2058664 - RNA, 19 nt, Homo sapiens
  misc_RNA (1)...(19): siRNA sense strand
cagugguguuguuaaugaa

SEQ ID NO: 2058665 - RNA, 19 nt, Homo sapiens
  misc_RNA (1)...(19): siRNA sense strand
gaguuucgaggauuucauc

SEQ ID NO: 2058666 - RNA, 19 nt, Homo sapiens
  misc_RNA (1)...(19): siRNA sense strand
aauugggcauuuaaucugu

SEQ ID NO: 2058667 - RNA, 19 nt, Homo sapiens
  misc_RNA (1)...(19): siRNA sense strand
acgauaugauggguaaaug

SEQ ID NO: 2058668 - RNA, 19 nt, Homo sapiens
  misc_RNA (1)...(19): siRNA sense strand
uggaagcccagagcaaauu

SEQ ID NO: 2058669 - RNA, 19 nt, Homo sapiens
  misc_RNA (1)...(19): siRNA sense strand
ggaaaugcuugauauaaug

SEQ ID NO: 2058670 - RNA, 19 nt, Homo sapiens
  misc_RNA (1)...(19): siRNA sense strand
gagcaaauuuaccaagaaa

SEQ ID NO: 2058671 - RNA, 19 nt, Homo sapiens
  misc_RNA (1)...(19): siRNA sense strand
gaggaaaugcuugauauaa

SEQ ID NO: 2058672 - RNA, 19 nt, Homo sapiens
  misc_RNA (1)...(19): siRNA sense strand
ccagugguguuguuaauga

SEQ ID NO: 2058673 - RNA, 19 nt, Homo sapiens
  misc_RNA (1)...(19): siRNA sense strand
gcaaauuuaccaagaaaga

SEQ ID NO: 2058674 - RNA, 19 nt, Homo sapiens
  misc_RNA (1)...(19): siRNA sense strand
gauaugauggguaaaugua

SEQ ID NO: 2058675 - RNA, 19 nt, Homo sapiens
  misc_RNA (1)...(19): siRNA sense strand
cuacaucacuaaagaggaa

SEQ ID NO: 2058676 - RNA, 19 nt, Homo sapiens
  misc_RNA (1)...(19): siRNA sense strand
gggagacucuacaacauau

SEQ ID NO: 2058677 - RNA, 19 nt, Homo sapiens
  misc_RNA (1)...(19): siRNA sense strand
guacauauccuguccucaa

SEQ ID NO: 2058678 - RNA, 19 nt, Homo sapiens
  misc_RNA (1)...(19): siRNA sense strand
aaacucaauugggcauuua

SEQ ID NO: 2058679 - RNA, 19 nt, Homo sapiens
  misc_RNA (1)...(19): siRNA sense strand
acagaggauuuaagaauga

SEQ ID NO: 2058680 - RNA, 19 nt, Homo sapiens
  misc_RNA (1)...(19): siRNA sense strand
uauacgauaugauggguaa

SEQ ID NO: 2058681 - RNA, 19 nt, Homo sapiens
  misc_RNA (1)...(19): siRNA sense strand
caauggagcugugaguuuc

SEQ ID NO: 2058682 - RNA, 19 nt, Homo sapiens
  misc_RNA (1)...(19): siRNA sense strand
aagaggaaaugcuugauau

SEQ ID NO: 2058683 - RNA, 19 nt, Homo sapiens
  misc_RNA (1)...(19): siRNA sense strand
cagagcaaauuuaccaaga

SEQ ID NO: 2058684 - RNA, 19 nt, Homo sapiens
  misc_RNA (1)...(19): siRNA sense strand
caagaaagagcuucagauc

SEQ ID NO: 2058685 - RNA, 19 nt, Homo sapiens
  misc_RNA (1)...(19): siRNA sense strand
gaaagagcuucagauccuu

SEQ ID NO: 2058686 - RNA, 19 nt, Homo sapiens
  misc_RNA (1)...(19): siRNA sense strand
agaaagagcuucagauccu

SEQ ID NO: 2058687 - RNA, 19 nt, Homo sapiens
  misc_RNA (1)...(19): siRNA sense strand
gaagcccagagcaaauuua

SEQ ID NO: 2058688 - RNA, 19 nt, Homo sapiens
  misc_RNA (1)...(19): siRNA sense strand
aaagaggaaaugcuugaua

SEQ ID NO: 2058689 - RNA, 19 nt, Homo sapiens
  misc_RNA (1)...(19): siRNA sense strand
uacagaggauuuaagaaug

SEQ ID NO: 2058690 - RNA, 19 nt, Homo sapiens
  misc_RNA (1)...(19): siRNA sense strand
cauauccuguccucaaaga

SEQ ID NO: 2058691 - RNA, 19 nt, Homo sapiens
  misc_RNA (1)...(19): siRNA sense strand
uuucgaggauuucaucaaa

SEQ ID NO: 2058692 - RNA, 19 nt, Homo sapiens
  misc_RNA (1)...(19): siRNA sense strand
agaagaugcucccagacaa

SEQ ID NO: 2058693 - RNA, 19 nt, Homo sapiens
  misc_RNA (1)...(19): siRNA sense strand
gagauuuacucgcaguucu

SEQ ID NO: 2058694 - RNA, 19 nt, Homo sapiens
  misc_RNA (1)...(19): siRNA sense strand
ggaagcccagagcaaauuu

SEQ ID NO: 2058695 - RNA, 19 nt, Homo sapiens
  misc_RNA (1)...(19): siRNA sense strand
agagcaaauuuaccaagaa

SEQ ID NO: 2058696 - RNA, 19 nt, Homo sapiens
  misc_RNA (1)...(19): siRNA sense strand
gcugugaguuucgaggauu

SEQ ID NO: 2058697 - RNA, 19 nt, Homo sapiens
  misc_RNA (1)...(19): siRNA sense strand
uacauauccuguccucaaa

SEQ ID NO: 2058698 - RNA, 19 nt, Homo sapiens
  misc_RNA (1)...(19): siRNA sense strand
cuaaagaggaaaugcuuga

SEQ ID NO: 2058699 - RNA, 19 nt, Homo sapiens
  misc_RNA (1)...(19): siRNA sense strand
gggcauuuaaucuguauga

SEQ ID NO: 2058700 - RNA, 19 nt, Homo sapiens
  misc_RNA (1)...(19): siRNA sense strand
acaauggagcugugaguuu

SEQ ID NO: 2058701 - RNA, 19 nt, Homo sapiens
  misc_RNA (1)...(19): siRNA sense strand
cagggagacucuacaacau

SEQ ID NO: 2058702 - RNA, 19 nt, Homo sapiens
  misc_RNA (1)...(19): siRNA sense strand
ccaugcagcucuuugaaaa

SEQ ID NO: 2058703 - RNA, 19 nt, Homo sapiens
  misc_RNA (1)...(19): siRNA sense strand
cuacaacauaugcacauuu

SEQ ID NO: 2058704 - RNA, 19 nt, Homo sapiens
  misc_RNA (1)...(19): siRNA sense strand
gcauuuaaucuguaugaca

SEQ ID NO: 2058705 - RNA, 19 nt, Homo sapiens
  misc_RNA (1)...(19): siRNA sense strand
agaggaaaugcuugauaua

SEQ ID NO: 2058706 - RNA, 19 nt, Homo sapiens
  misc_RNA (1)...(19): siRNA sense strand
ccacagggagacucuacaa

SEQ ID NO: 2058707 - RNA, 19 nt, Homo sapiens
  misc_RNA (1)...(19): siRNA sense strand
gauuuacucgcaguucuuu

SEQ ID NO: 2058708 - RNA, 19 nt, Homo sapiens
  misc_RNA (1)...(19): siRNA sense strand
uaugauggguaaauguaca

SEQ ID NO: 2058709 - RNA, 19 nt, Homo sapiens
  misc_RNA (1)...(19): siRNA sense strand
ucaauugggcauuuaaucu

SEQ ID NO: 2058710 - RNA, 19 nt, Homo sapiens
  misc_RNA (1)...(19): siRNA sense strand
cagaggauuuaagaaugaa

SEQ ID NO: 2058711 - RNA, 19 nt, Homo sapiens
  misc_RNA (1)...(19): siRNA sense strand
aagaaaccuucaaagagau

SEQ ID NO: 2058712 - RNA, 19 nt, Homo sapiens
  misc_RNA (1)...(19): siRNA sense strand
gaagaugcucccagacaac

SEQ ID NO: 2058713 - RNA, 19 nt, Homo sapiens
  misc_RNA (1)...(19): siRNA sense strand
ccaagaaagagcuucagau

SEQ ID NO: 2058714 - RNA, 19 nt, Homo sapiens
  misc_RNA (1)...(19): siRNA sense strand
caauugggcauuuaaucug

SEQ ID NO: 2058715 - RNA, 19 nt, Homo sapiens
  misc_RNA (1)...(19): siRNA sense strand
gaggauuuaagaaugaaug

SEQ ID NO: 2058716 - RNA, 19 nt, Homo sapiens
  misc_RNA (1)...(19): siRNA sense strand
gugguguuguuaaugaaga

SEQ ID NO: 2058717 - RNA, 19 nt, Homo sapiens
  misc_RNA (1)...(19): siRNA sense strand
gaaaccuucaaagagauuu

SEQ ID NO: 2058718 - RNA, 19 nt, Homo sapiens
  misc_RNA (1)...(19): siRNA sense strand
gcccagagcaaauuuacca

SEQ ID NO: 2058719 - RNA, 19 nt, Homo sapiens
  misc_RNA (1)...(19): siRNA sense strand
acagggagacucuacaaca

SEQ ID NO: 2058720 - RNA, 19 nt, Homo sapiens
  misc_RNA (1)...(19): siRNA sense strand
gcuccaugcagcucuuuga

SEQ ID NO: 2058721 - RNA, 19 nt, Homo sapiens
  misc_RNA (1)...(19): siRNA sense strand
gagcuucagauccuuuaca

SEQ ID NO: 2058722 - RNA, 19 nt, Homo sapiens
  misc_RNA (1)...(19): siRNA sense strand
agggagacucuacaacaua

SEQ ID NO: 2058723 - RNA, 19 nt, Homo sapiens
  misc_RNA (1)...(19): siRNA sense strand
ugauacagaccacaaugga

SEQ ID NO: 2058724 - RNA, 19 nt, Homo sapiens
  misc_RNA (1)...(19): siRNA sense strand
ggaagaugaacuggagaug

SEQ ID NO: 2058725 - RNA, 19 nt, Homo sapiens
  misc_RNA (1)...(19): siRNA sense strand
ucgaggauuucaucaaagg

SEQ ID NO: 2058726 - RNA, 19 nt, Homo sapiens
  misc_RNA (1)...(19): siRNA sense strand
gauggguaaauguacauau

SEQ ID NO: 2058727 - RNA, 19 nt, Homo sapiens
  misc_RNA (1)...(19): siRNA sense strand
aagaagaugcucccagaca

SEQ ID NO: 2058728 - RNA, 19 nt, Homo sapiens
  misc_RNA (1)...(19): siRNA sense strand
aaauaaagaugggguuguu

SEQ ID NO: 2058729 - RNA, 19 nt, Homo sapiens
  misc_RNA (1)...(19): siRNA sense strand
ucuacaacauaugcacauu

SEQ ID NO: 2058730 - RNA, 19 nt, Homo sapiens
  misc_RNA (1)...(19): siRNA sense strand
cagugguguuguuaaugaa

SEQ ID NO: 2058731 - RNA, 19 nt, Homo sapiens
  misc_RNA (1)...(19): siRNA sense strand
gaguuucgaggauuucauc

SEQ ID NO: 2058732 - RNA, 19 nt, Homo sapiens
  misc_RNA (1)...(19): siRNA sense strand
aauugggcauuuaaucugu

SEQ ID NO: 2058733 - RNA, 19 nt, Homo sapiens
  misc_RNA (1)...(19): siRNA sense strand
acgauaugauggguaaaug

SEQ ID NO: 2058734 - RNA, 19 nt, Homo sapiens
  misc_RNA (1)...(19): siRNA sense strand
uggaagcccagagcaaauu

SEQ ID NO: 2058735 - RNA, 19 nt, Homo sapiens
  misc_RNA (1)...(19): siRNA sense strand
ggaaaugcuugauauaaug

SEQ ID NO: 2058736 - RNA, 19 nt, Homo sapiens
  misc_RNA (1)...(19): siRNA sense strand
gagcaaauuuaccaagaaa

SEQ ID NO: 2058737 - RNA, 19 nt, Homo sapiens
  misc_RNA (1)...(19): siRNA sense strand
gaggaaaugcuugauauaa

SEQ ID NO: 2058738 - RNA, 19 nt, Homo sapiens
  misc_RNA (1)...(19): siRNA sense strand
ccagugguguuguuaauga

SEQ ID NO: 2058739 - RNA, 19 nt, Homo sapiens
  misc_RNA (1)...(19): siRNA sense strand
gcaaauuuaccaagaaaga

SEQ ID NO: 2058740 - RNA, 19 nt, Homo sapiens
  misc_RNA (1)...(19): siRNA sense strand
gauaugauggguaaaugua

SEQ ID NO: 2058741 - RNA, 19 nt, Homo sapiens
  misc_RNA (1)...(19): siRNA sense strand
cuacaucacuaaagaggaa

SEQ ID NO: 2058742 - RNA, 19 nt, Homo sapiens
  misc_RNA (1)...(19): siRNA sense strand
gggagacucuacaacauau

SEQ ID NO: 2058743 - RNA, 19 nt, Homo sapiens
  misc_RNA (1)...(19): siRNA sense strand
guacauauccuguccucaa

SEQ ID NO: 2058744 - RNA, 19 nt, Homo sapiens
  misc_RNA (1)...(19): siRNA sense strand
aaacucaauugggcauuua

SEQ ID NO: 2058745 - RNA, 19 nt, Homo sapiens
  misc_RNA (1)...(19): siRNA sense strand
acagaggauuuaagaauga

SEQ ID NO: 2058746 - RNA, 19 nt, Homo sapiens
  misc_RNA (1)...(19): siRNA sense strand
uauacgauaugauggguaa

SEQ ID NO: 2058747 - RNA, 19 nt, Homo sapiens
  misc_RNA (1)...(19): siRNA sense strand
caauggagcugugaguuuc

SEQ ID NO: 2058748 - RNA, 19 nt, Homo sapiens
  misc_RNA (1)...(19): siRNA sense strand
aagaggaaaugcuugauau

SEQ ID NO: 2058749 - RNA, 19 nt, Homo sapiens
  misc_RNA (1)...(19): siRNA sense strand
cagagcaaauuuaccaaga

SEQ ID NO: 2058750 - RNA, 19 nt, Homo sapiens
  misc_RNA (1)...(19): siRNA sense strand
caagaaagagcuucagauc

SEQ ID NO: 2058751 - RNA, 19 nt, Homo sapiens
  misc_RNA (1)...(19): siRNA sense strand
gaaagagcuucagauccuu

SEQ ID NO: 2058752 - RNA, 19 nt, Homo sapiens
  misc_RNA (1)...(19): siRNA sense strand
agaaagagcuucagauccu

SEQ ID NO: 2058753 - RNA, 19 nt, Homo sapiens
  misc_RNA (1)...(19): siRNA sense strand
aaagaggaaaugcuugaua

SEQ ID NO: 2058754 - RNA, 19 nt, Homo sapiens
  misc_RNA (1)...(19): siRNA sense strand
gaagcccagagcaaauuua

SEQ ID NO: 2058755 - RNA, 19 nt, Homo sapiens
  misc_RNA (1)...(19): siRNA sense strand
uacagaggauuuaagaaug

SEQ ID NO: 2058756 - RNA, 19 nt, Homo sapiens
  misc_RNA (1)...(19): siRNA sense strand
cauauccuguccucaaaga

SEQ ID NO: 2058757 - RNA, 19 nt, Homo sapiens
  misc_RNA (1)...(19): siRNA sense strand
uuucgaggauuucaucaaa

SEQ ID NO: 2058758 - RNA, 19 nt, Homo sapiens
  misc_RNA (1)...(19): siRNA sense strand
agaagaugcucccagacaa

SEQ ID NO: 2058759 - RNA, 19 nt, Homo sapiens
  misc_RNA (1)...(19): siRNA sense strand
gagauuuacucgcaguucu

SEQ ID NO: 2058760 - RNA, 19 nt, Homo sapiens
  misc_RNA (1)...(19): siRNA sense strand
ggaagcccagagcaaauuu

SEQ ID NO: 2058761 - RNA, 19 nt, Homo sapiens
  misc_RNA (1)...(19): siRNA sense strand
agagcaaauuuaccaagaa

SEQ ID NO: 2058762 - RNA, 19 nt, Homo sapiens
  misc_RNA (1)...(19): siRNA sense strand
gcugugaguuucgaggauu

SEQ ID NO: 2058763 - RNA, 19 nt, Homo sapiens
  misc_RNA (1)...(19): siRNA sense strand
uacauauccuguccucaaa

SEQ ID NO: 2058764 - RNA, 19 nt, Homo sapiens
  misc_RNA (1)...(19): siRNA sense strand
cuaaagaggaaaugcuuga

SEQ ID NO: 2058765 - RNA, 19 nt, Homo sapiens
  misc_RNA (1)...(19): siRNA sense strand
gggcauuuaaucuguauga

SEQ ID NO: 2058766 - RNA, 19 nt, Homo sapiens
  misc_RNA (1)...(19): siRNA sense strand
acaauggagcugugaguuu

SEQ ID NO: 2058767 - RNA, 19 nt, Homo sapiens
  misc_RNA (1)...(19): siRNA sense strand
cagggagacucuacaacau

SEQ ID NO: 2058768 - RNA, 19 nt, Homo sapiens
  misc_RNA (1)...(19): siRNA sense strand
ccaugcagcucuuugaaaa

SEQ ID NO: 2058769 - RNA, 19 nt, Homo sapiens
  misc_RNA (1)...(19): siRNA sense strand
cuacaacauaugcacauuu

SEQ ID NO: 2058770 - RNA, 19 nt, Homo sapiens
  misc_RNA (1)...(19): siRNA sense strand
gcauuuaaucuguaugaca

SEQ ID NO: 2058771 - RNA, 19 nt, Homo sapiens
  misc_RNA (1)...(19): siRNA sense strand
agaggaaaugcuugauaua

SEQ ID NO: 2058772 - RNA, 19 nt, Homo sapiens
  misc_RNA (1)...(19): siRNA sense strand
ccacagggagacucuacaa

SEQ ID NO: 2058773 - RNA, 19 nt, Homo sapiens
  misc_RNA (1)...(19): siRNA sense strand
gauuuacucgcaguucuuu

SEQ ID NO: 2058774 - RNA, 19 nt, Homo sapiens
  misc_RNA (1)...(19): siRNA sense strand
uaugauggguaaauguaca

SEQ ID NO: 2058775 - RNA, 19 nt, Homo sapiens
  misc_RNA (1)...(19): siRNA sense strand
ucaauugggcauuuaaucu

SEQ ID NO: 2058776 - RNA, 19 nt, Homo sapiens
  misc_RNA (1)...(19): siRNA sense strand
cagaggauuuaagaaugaa

SEQ ID NO: 2058777 - RNA, 19 nt, Homo sapiens
  misc_RNA (1)...(19): siRNA sense strand
aagaaaccuucaaagagau

SEQ ID NO: 2058778 - RNA, 19 nt, Homo sapiens
  misc_RNA (1)...(19): siRNA sense strand
gaagaugcucccagacaac

SEQ ID NO: 2058779 - RNA, 19 nt, Homo sapiens
  misc_RNA (1)...(19): siRNA sense strand
ccaagaaagagcuucagau

SEQ ID NO: 2058780 - RNA, 19 nt, Homo sapiens
  misc_RNA (1)...(19): siRNA sense strand
gaggauuuaagaaugaaug

SEQ ID NO: 2058781 - RNA, 19 nt, Homo sapiens
  misc_RNA (1)...(19): siRNA sense strand
caauugggcauuuaaucug

SEQ ID NO: 2058782 - RNA, 19 nt, Homo sapiens
  misc_RNA (1)...(19): siRNA sense strand
gugguguuguuaaugaaga

SEQ ID NO: 2058783 - RNA, 19 nt, Homo sapiens
  misc_RNA (1)...(19): siRNA sense strand
gaaaccuucaaagagauuu

SEQ ID NO: 2058784 - RNA, 19 nt, Homo sapiens
  misc_RNA (1)...(19): siRNA sense strand
gcccagagcaaauuuacca

SEQ ID NO: 2058785 - RNA, 19 nt, Homo sapiens
  misc_RNA (1)...(19): siRNA sense strand
acagggagacucuacaaca

SEQ ID NO: 2058786 - RNA, 19 nt, Homo sapiens
  misc_RNA (1)...(19): siRNA sense strand
gcuccaugcagcucuuuga

SEQ ID NO: 2058787 - RNA, 19 nt, Homo sapiens
  misc_RNA (1)...(19): siRNA sense strand
gagcuucagauccuuuaca

SEQ ID NO: 2058788 - RNA, 19 nt, Homo sapiens
  misc_RNA (1)...(19): siRNA sense strand
agggagacucuacaacaua

SEQ ID NO: 2058789 - RNA, 19 nt, Homo sapiens
  misc_RNA (1)...(19): siRNA sense strand
ugauacagaccacaaugga

SEQ ID NO: 2058790 - RNA, 19 nt, Homo sapiens
  misc_RNA (1)...(19): siRNA sense strand
ucgaggauuucaucaaagg

SEQ ID NO: 2058791 - RNA, 19 nt, Homo sapiens
  misc_RNA (1)...(19): siRNA sense strand
gauggguaaauguacauau

SEQ ID NO: 2058792 - RNA, 19 nt, Homo sapiens
  misc_RNA (1)...(19): siRNA sense strand
aagaagaugcucccagaca

SEQ ID NO: 2058793 - RNA, 19 nt, Homo sapiens
  misc_RNA (1)...(19): siRNA sense strand
aaauaaagaugggguuguu

SEQ ID NO: 2058794 - RNA, 19 nt, Homo sapiens
  misc_RNA (1)...(19): siRNA sense strand
ucuacaacauaugcacauu

SEQ ID NO: 2058795 - RNA, 19 nt, Homo sapiens
  misc_RNA (1)...(19): siRNA sense strand
cagugguguuguuaaugaa

SEQ ID NO: 2058796 - RNA, 19 nt, Homo sapiens
  misc_RNA (1)...(19): siRNA sense strand
gaguuucgaggauuucauc

SEQ ID NO: 2058797 - RNA, 19 nt, Homo sapiens
  misc_RNA (1)...(19): siRNA sense strand
aauugggcauuuaaucugu

SEQ ID NO: 2058798 - RNA, 19 nt, Homo sapiens
  misc_RNA (1)...(19): siRNA sense strand
uggaagcccagagcaaauu

SEQ ID NO: 2058799 - RNA, 19 nt, Homo sapiens
  misc_RNA (1)...(19): siRNA sense strand
acgauaugauggguaaaug

SEQ ID NO: 2058800 - RNA, 19 nt, Homo sapiens
  misc_RNA (1)...(19): siRNA sense strand
ggaaaugcuugauauaaug

SEQ ID NO: 2058801 - RNA, 19 nt, Homo sapiens
  misc_RNA (1)...(19): siRNA sense strand
gagcaaauuuaccaagaaa

SEQ ID NO: 2058802 - RNA, 19 nt, Homo sapiens
  misc_RNA (1)...(19): siRNA sense strand
gaggaaaugcuugauauaa

SEQ ID NO: 2058803 - RNA, 19 nt, Homo sapiens
  misc_RNA (1)...(19): siRNA sense strand
ccagugguguuguuaauga

SEQ ID NO: 2058804 - RNA, 19 nt, Homo sapiens
  misc_RNA (1)...(19): siRNA sense strand
gcaaauuuaccaagaaaga

SEQ ID NO: 2058805 - RNA, 19 nt, Homo sapiens
  misc_RNA (1)...(19): siRNA sense strand
gauaugauggguaaaugua

SEQ ID NO: 2058806 - RNA, 19 nt, Homo sapiens
  misc_RNA (1)...(19): siRNA sense strand
cuacaucacuaaagaggaa

SEQ ID NO: 2058807 - RNA, 19 nt, Homo sapiens
  misc_RNA (1)...(19): siRNA sense strand
gggagacucuacaacauau

SEQ ID NO: 2058808 - RNA, 19 nt, Homo sapiens
  misc_RNA (1)...(19): siRNA sense strand
guacauauccuguccucaa

SEQ ID NO: 2058809 - RNA, 19 nt, Homo sapiens
  misc_RNA (1)...(19): siRNA sense strand
aaacucaauugggcauuua

SEQ ID NO: 2058810 - RNA, 19 nt, Homo sapiens
  misc_RNA (1)...(19): siRNA sense strand
acagaggauuuaagaauga

SEQ ID NO: 2058811 - RNA, 19 nt, Homo sapiens
  misc_RNA (1)...(19): siRNA sense strand
uauacgauaugauggguaa

SEQ ID NO: 2058812 - RNA, 19 nt, Homo sapiens
  misc_RNA (1)...(19): siRNA sense strand
caauggagcugugaguuuc

SEQ ID NO: 2058813 - RNA, 19 nt, Homo sapiens
  misc_RNA (1)...(19): siRNA sense strand
aagaggaaaugcuugauau

SEQ ID NO: 2058814 - RNA, 19 nt, Homo sapiens
  misc_RNA (1)...(19): siRNA sense strand
cagagcaaauuuaccaaga

SEQ ID NO: 2058815 - RNA, 19 nt, Homo sapiens
  misc_RNA (1)...(19): siRNA sense strand
caagaaagagcuucagauc

SEQ ID NO: 2058816 - RNA, 19 nt, Homo sapiens
  misc_RNA (1)...(19): siRNA sense strand
gaaagagcuucagauccuu

SEQ ID NO: 2058817 - RNA, 19 nt, Homo sapiens
  misc_RNA (1)...(19): siRNA sense strand
agaaagagcuucagauccu

SEQ ID NO: 2058818 - RNA, 19 nt, Homo sapiens
  misc_RNA (1)...(19): siRNA sense strand
gaagcccagagcaaauuua

SEQ ID NO: 2058819 - RNA, 19 nt, Homo sapiens
  misc_RNA (1)...(19): siRNA sense strand
aaagaggaaaugcuugaua

SEQ ID NO: 2058820 - RNA, 19 nt, Homo sapiens
  misc_RNA (1)...(19): siRNA sense strand
uacagaggauuuaagaaug

SEQ ID NO: 2058821 - RNA, 19 nt, Homo sapiens
  misc_RNA (1)...(19): siRNA sense strand
cauauccuguccucaaaga

SEQ ID NO: 2058822 - RNA, 19 nt, Homo sapiens
  misc_RNA (1)...(19): siRNA sense strand
uuucgaggauuucaucaaa

SEQ ID NO: 2058823 - RNA, 19 nt, Homo sapiens
  misc_RNA (1)...(19): siRNA sense strand
agaagaugcucccagacaa

SEQ ID NO: 2058824 - RNA, 19 nt, Homo sapiens
  misc_RNA (1)...(19): siRNA sense strand
gagauuuacucgcaguucu

SEQ ID NO: 2058825 - RNA, 19 nt, Homo sapiens
  misc_RNA (1)...(19): siRNA sense strand
ggaagcccagagcaaauuu

SEQ ID NO: 2058826 - RNA, 19 nt, Homo sapiens
  misc_RNA (1)...(19): siRNA sense strand
agagcaaauuuaccaagaa

SEQ ID NO: 2058827 - RNA, 19 nt, Homo sapiens
  misc_RNA (1)...(19): siRNA sense strand
gcugugaguuucgaggauu

SEQ ID NO: 2058828 - RNA, 19 nt, Homo sapiens
  misc_RNA (1)...(19): siRNA sense strand
uacauauccuguccucaaa

SEQ ID NO: 2058829 - RNA, 19 nt, Homo sapiens
  misc_RNA (1)...(19): siRNA sense strand
cuaaagaggaaaugcuuga

SEQ ID NO: 2058830 - RNA, 19 nt, Homo sapiens
  misc_RNA (1)...(19): siRNA sense strand
gggcauuuaaucuguauga

SEQ ID NO: 2058831 - RNA, 19 nt, Homo sapiens
  misc_RNA (1)...(19): siRNA sense strand
acaauggagcugugaguuu

SEQ ID NO: 2058832 - RNA, 19 nt, Homo sapiens
  misc_RNA (1)...(19): siRNA sense strand
cagggagacucuacaacau

SEQ ID NO: 2058833 - RNA, 19 nt, Homo sapiens
  misc_RNA (1)...(19): siRNA sense strand
ccaugcagcucuuugaaaa

SEQ ID NO: 2058834 - RNA, 19 nt, Homo sapiens
  misc_RNA (1)...(19): siRNA sense strand
cuacaacauaugcacauuu

SEQ ID NO: 2058835 - RNA, 19 nt, Homo sapiens
  misc_RNA (1)...(19): siRNA sense strand
gcauuuaaucuguaugaca

SEQ ID NO: 2058836 - RNA, 19 nt, Homo sapiens
  misc_RNA (1)...(19): siRNA sense strand
agaggaaaugcuugauaua

SEQ ID NO: 2058837 - RNA, 19 nt, Homo sapiens
  misc_RNA (1)...(19): siRNA sense strand
ccacagggagacucuacaa

SEQ ID NO: 2058838 - RNA, 19 nt, Homo sapiens
  misc_RNA (1)...(19): siRNA sense strand
gauuuacucgcaguucuuu

SEQ ID NO: 2058839 - RNA, 19 nt, Homo sapiens
  misc_RNA (1)...(19): siRNA sense strand
uaugauggguaaauguaca

SEQ ID NO: 2058840 - RNA, 19 nt, Homo sapiens
  misc_RNA (1)...(19): siRNA sense strand
ucaauugggcauuuaaucu

SEQ ID NO: 2058841 - RNA, 19 nt, Homo sapiens
  misc_RNA (1)...(19): siRNA sense strand
cagaggauuuaagaaugaa

SEQ ID NO: 2058842 - RNA, 19 nt, Homo sapiens
  misc_RNA (1)...(19): siRNA sense strand
aagaaaccuucaaagagau

SEQ ID NO: 2058843 - RNA, 19 nt, Homo sapiens
  misc_RNA (1)...(19): siRNA sense strand
gaagaugcucccagacaac

SEQ ID NO: 2058844 - RNA, 19 nt, Homo sapiens
  misc_RNA (1)...(19): siRNA sense strand
ccaagaaagagcuucagau

SEQ ID NO: 2058845 - RNA, 19 nt, Homo sapiens
  misc_RNA (1)...(19): siRNA sense strand
caauugggcauuuaaucug

SEQ ID NO: 2058846 - RNA, 19 nt, Homo sapiens
  misc_RNA (1)...(19): siRNA sense strand
gaggauuuaagaaugaaug

SEQ ID NO: 2058847 - RNA, 19 nt, Homo sapiens
  misc_RNA (1)...(19): siRNA sense strand
gugguguuguuaaugaaga

SEQ ID NO: 2058848 - RNA, 19 nt, Homo sapiens
  misc_RNA (1)...(19): siRNA sense strand
gaaaccuucaaagagauuu

SEQ ID NO: 2058849 - RNA, 19 nt, Homo sapiens
  misc_RNA (1)...(19): siRNA sense strand
gcccagagcaaauuuacca

SEQ ID NO: 2058850 - RNA, 19 nt, Homo sapiens
  misc_RNA (1)...(19): siRNA sense strand
acagggagacucuacaaca

SEQ ID NO: 2058851 - RNA, 19 nt, Homo sapiens
  misc_RNA (1)...(19): siRNA sense strand
gcuccaugcagcucuuuga

SEQ ID NO: 2058852 - RNA, 19 nt, Homo sapiens
  misc_RNA (1)...(19): siRNA sense strand
gagcuucagauccuuuaca

SEQ ID NO: 2058853 - RNA, 19 nt, Homo sapiens
  misc_RNA (1)...(19): siRNA sense strand
agggagacucuacaacaua

SEQ ID NO: 2058854 - RNA, 19 nt, Homo sapiens
  misc_RNA (1)...(19): siRNA sense strand
ugauacagaccacaaugga

SEQ ID NO: 2058855 - RNA, 19 nt, Homo sapiens
  misc_RNA (1)...(19): siRNA sense strand
ggaagaugaacuggagaug

SEQ ID NO: 2058856 - RNA, 19 nt, Homo sapiens
  misc_RNA (1)...(19): siRNA sense strand
ucgaggauuucaucaaagg

SEQ ID NO: 2058857 - RNA, 19 nt, Homo sapiens
  misc_RNA (1)...(19): siRNA sense strand
gauggguaaauguacauau

SEQ ID NO: 2058858 - RNA, 19 nt, Homo sapiens
  misc_RNA (1)...(19): siRNA sense strand
aagaagaugcucccagaca

SEQ ID NO: 2058859 - RNA, 19 nt, Homo sapiens
  misc_RNA (1)...(19): siRNA sense strand
aaauaaagaugggguuguu

SEQ ID NO: 2058860 - RNA, 19 nt, Homo sapiens
  misc_RNA (1)...(19): siRNA sense strand
ucuacaacauaugcacauu

SEQ ID NO: 2058861 - RNA, 19 nt, Homo sapiens
  misc_RNA (1)...(19): siRNA sense strand
cagugguguuguuaaugaa

SEQ ID NO: 2058862 - RNA, 19 nt, Homo sapiens
  misc_RNA (1)...(19): siRNA sense strand
gaguuucgaggauuucauc

SEQ ID NO: 2058863 - RNA, 19 nt, Homo sapiens
  misc_RNA (1)...(19): siRNA sense strand
aauugggcauuuaaucugu

SEQ ID NO: 2058864 - RNA, 19 nt, Homo sapiens
  misc_RNA (1)...(19): siRNA sense strand
acgauaugauggguaaaug

SEQ ID NO: 2058865 - RNA, 19 nt, Homo sapiens
  misc_RNA (1)...(19): siRNA sense strand
uggaagcccagagcaaauu

SEQ ID NO: 2058866 - RNA, 19 nt, Homo sapiens
  misc_RNA (1)...(19): siRNA sense strand
ggaaaugcuugauauaaug

SEQ ID NO: 2058867 - RNA, 19 nt, Homo sapiens
  misc_RNA (1)...(19): siRNA sense strand
gagcaaauuuaccaagaaa

SEQ ID NO: 2058868 - RNA, 19 nt, Homo sapiens
  misc_RNA (1)...(19): siRNA sense strand
gaggaaaugcuugauauaa

SEQ ID NO: 2058869 - RNA, 19 nt, Homo sapiens
  misc_RNA (1)...(19): siRNA sense strand
ccagugguguuguuaauga

SEQ ID NO: 2058870 - RNA, 19 nt, Homo sapiens
  misc_RNA (1)...(19): siRNA sense strand
gcaaauuuaccaagaaaga

SEQ ID NO: 2058871 - RNA, 19 nt, Homo sapiens
  misc_RNA (1)...(19): siRNA sense strand
gauaugauggguaaaugua

SEQ ID NO: 2058872 - RNA, 19 nt, Homo sapiens
  misc_RNA (1)...(19): siRNA sense strand
cuacaucacuaaagaggaa

SEQ ID NO: 2058873 - RNA, 19 nt, Homo sapiens
  misc_RNA (1)...(19): siRNA sense strand
gggagacucuacaacauau

SEQ ID NO: 2058874 - RNA, 19 nt, Homo sapiens
  misc_RNA (1)...(19): siRNA sense strand
guacauauccuguccucaa

SEQ ID NO: 2058875 - RNA, 19 nt, Homo sapiens
  misc_RNA (1)...(19): siRNA sense strand
aaacucaauugggcauuua

SEQ ID NO: 2058876 - RNA, 19 nt, Homo sapiens
  misc_RNA (1)...(19): siRNA sense strand
acagaggauuuaagaauga

SEQ ID NO: 2058877 - RNA, 19 nt, Homo sapiens
  misc_RNA (1)...(19): siRNA sense strand
uauacgauaugauggguaa

SEQ ID NO: 2058878 - RNA, 19 nt, Homo sapiens
  misc_RNA (1)...(19): siRNA sense strand
caauggagcugugaguuuc

SEQ ID NO: 2058879 - RNA, 19 nt, Homo sapiens
  misc_RNA (1)...(19): siRNA sense strand
aagaggaaaugcuugauau

SEQ ID NO: 2058880 - RNA, 19 nt, Homo sapiens
  misc_RNA (1)...(19): siRNA sense strand
cagagcaaauuuaccaaga

SEQ ID NO: 2058881 - RNA, 19 nt, Homo sapiens
  misc_RNA (1)...(19): siRNA sense strand
caagaaagagcuucagauc

SEQ ID NO: 2058882 - RNA, 19 nt, Homo sapiens
  misc_RNA (1)...(19): siRNA sense strand
gaaagagcuucagauccuu

SEQ ID NO: 2058883 - RNA, 19 nt, Homo sapiens
  misc_RNA (1)...(19): siRNA sense strand
agaaagagcuucagauccu

SEQ ID NO: 2058884 - RNA, 19 nt, Homo sapiens
  misc_RNA (1)...(19): siRNA sense strand
gaagcccagagcaaauuua

SEQ ID NO: 2058885 - RNA, 19 nt, Homo sapiens
  misc_RNA (1)...(19): siRNA sense strand
aaagaggaaaugcuugaua

SEQ ID NO: 2058886 - RNA, 19 nt, Homo sapiens
  misc_RNA (1)...(19): siRNA sense strand
uacagaggauuuaagaaug

SEQ ID NO: 2058887 - RNA, 19 nt, Homo sapiens
  misc_RNA (1)...(19): siRNA sense strand
cauauccuguccucaaaga

SEQ ID NO: 2058888 - RNA, 19 nt, Homo sapiens
  misc_RNA (1)...(19): siRNA sense strand
uuucgaggauuucaucaaa

SEQ ID NO: 2058889 - RNA, 19 nt, Homo sapiens
  misc_RNA (1)...(19): siRNA sense strand
agaagaugcucccagacaa

SEQ ID NO: 2058890 - RNA, 19 nt, Homo sapiens
  misc_RNA (1)...(19): siRNA sense strand
gagauuuacucgcaguucu

SEQ ID NO: 2058891 - RNA, 19 nt, Homo sapiens
  misc_RNA (1)...(19): siRNA sense strand
ggaagcccagagcaaauuu

SEQ ID NO: 2058892 - RNA, 19 nt, Homo sapiens
  misc_RNA (1)...(19): siRNA sense strand
agagcaaauuuaccaagaa

SEQ ID NO: 2058893 - RNA, 19 nt, Homo sapiens
  misc_RNA (1)...(19): siRNA sense strand
gcugugaguuucgaggauu

SEQ ID NO: 2058894 - RNA, 19 nt, Homo sapiens
  misc_RNA (1)...(19): siRNA sense strand
uacauauccuguccucaaa

SEQ ID NO: 2058895 - RNA, 19 nt, Homo sapiens
  misc_RNA (1)...(19): siRNA sense strand
cuaaagaggaaaugcuuga

SEQ ID NO: 2058896 - RNA, 19 nt, Homo sapiens
  misc_RNA (1)...(19): siRNA sense strand
gggcauuuaaucuguauga

SEQ ID NO: 2058897 - RNA, 19 nt, Homo sapiens
  misc_RNA (1)...(19): siRNA sense strand
acaauggagcugugaguuu

SEQ ID NO: 2058898 - RNA, 19 nt, Homo sapiens
  misc_RNA (1)...(19): siRNA sense strand
cagggagacucuacaacau

SEQ ID NO: 2058899 - RNA, 19 nt, Homo sapiens
  misc_RNA (1)...(19): siRNA sense strand
ccaugcagcucuuugaaaa

SEQ ID NO: 2058900 - RNA, 19 nt, Homo sapiens
  misc_RNA (1)...(19): siRNA sense strand
cuacaacauaugcacauuu

SEQ ID NO: 2058901 - RNA, 19 nt, Homo sapiens
  misc_RNA (1)...(19): siRNA sense strand
gcauuuaaucuguaugaca

SEQ ID NO: 2058902 - RNA, 19 nt, Homo sapiens
  misc_RNA (1)...(19): siRNA sense strand
agaggaaaugcuugauaua

SEQ ID NO: 2058903 - RNA, 19 nt, Homo sapiens
  misc_RNA (1)...(19): siRNA sense strand
ccacagggagacucuacaa

SEQ ID NO: 2058904 - RNA, 19 nt, Homo sapiens
  misc_RNA (1)...(19): siRNA sense strand
gauuuacucgcaguucuuu

SEQ ID NO: 2058905 - RNA, 19 nt, Homo sapiens
  misc_RNA (1)...(19): siRNA sense strand
uaugauggguaaauguaca

SEQ ID NO: 2058906 - RNA, 19 nt, Homo sapiens
  misc_RNA (1)...(19): siRNA sense strand
ucaauugggcauuuaaucu

SEQ ID NO: 2058907 - RNA, 19 nt, Homo sapiens
  misc_RNA (1)...(19): siRNA sense strand
cagaggauuuaagaaugaa

SEQ ID NO: 2058908 - RNA, 19 nt, Homo sapiens
  misc_RNA (1)...(19): siRNA sense strand
aagaaaccuucaaagagau

SEQ ID NO: 2058909 - RNA, 19 nt, Homo sapiens
  misc_RNA (1)...(19): siRNA sense strand
gaagaugcucccagacaac

SEQ ID NO: 2058910 - RNA, 19 nt, Homo sapiens
  misc_RNA (1)...(19): siRNA sense strand
ccaagaaagagcuucagau

SEQ ID NO: 2058911 - RNA, 19 nt, Homo sapiens
  misc_RNA (1)...(19): siRNA sense strand
caauugggcauuuaaucug

SEQ ID NO: 2058912 - RNA, 19 nt, Homo sapiens
  misc_RNA (1)...(19): siRNA sense strand
gaggauuuaagaaugaaug

SEQ ID NO: 2058913 - RNA, 19 nt, Homo sapiens
  misc_RNA (1)...(19): siRNA sense strand
gugguguuguuaaugaaga

SEQ ID NO: 2058914 - RNA, 19 nt, Homo sapiens
  misc_RNA (1)...(19): siRNA sense strand
gaaaccuucaaagagauuu

SEQ ID NO: 2058915 - RNA, 19 nt, Homo sapiens
  misc_RNA (1)...(19): siRNA sense strand
gcccagagcaaauuuacca

SEQ ID NO: 2058916 - RNA, 19 nt, Homo sapiens
  misc_RNA (1)...(19): siRNA sense strand
acagggagacucuacaaca

SEQ ID NO: 2058917 - RNA, 19 nt, Homo sapiens
  misc_RNA (1)...(19): siRNA sense strand
gcuccaugcagcucuuuga

SEQ ID NO: 2058918 - RNA, 19 nt, Homo sapiens
  misc_RNA (1)...(19): siRNA sense strand
gagcuucagauccuuuaca

SEQ ID NO: 2058919 - RNA, 19 nt, Homo sapiens
  misc_RNA (1)...(19): siRNA sense strand
agggagacucuacaacaua

SEQ ID NO: 2058920 - RNA, 19 nt, Homo sapiens
  misc_RNA (1)...(19): siRNA sense strand
ugauacagaccacaaugga

SEQ ID NO: 2058921 - RNA, 19 nt, Homo sapiens
  misc_RNA (1)...(19): siRNA sense strand
ggaagaugaacuggagaug

SEQ ID NO: 2058922 - RNA, 19 nt, Homo sapiens
  misc_RNA (1)...(19): siRNA sense strand
ucgaggauuucaucaaagg

SEQ ID NO: 2058923 - RNA, 19 nt, Homo sapiens
  misc_RNA (1)...(19): siRNA sense strand
gauggguaaauguacauau

SEQ ID NO: 2058924 - RNA, 19 nt, Homo sapiens
  misc_RNA (1)...(19): siRNA sense strand
aagaagaugcucccagaca

SEQ ID NO: 2058925 - RNA, 19 nt, Homo sapiens
  misc_RNA (1)...(19): siRNA sense strand
aaauaaagaugggguuguu

SEQ ID NO: 2058926 - RNA, 19 nt, Homo sapiens
  misc_RNA (1)...(19): siRNA sense strand
ucuacaacauaugcacauu

SEQ ID NO: 2058927 - RNA, 19 nt, Homo sapiens
  misc_RNA (1)...(19): siRNA sense strand
cagugguguuguuaaugaa

SEQ ID NO: 2058928 - RNA, 19 nt, Homo sapiens
  misc_RNA (1)...(19): siRNA sense strand
gaguuucgaggauuucauc

SEQ ID NO: 2058929 - RNA, 19 nt, Homo sapiens
  misc_RNA (1)...(19): siRNA sense strand
aauugggcauuuaaucugu

SEQ ID NO: 2058930 - RNA, 19 nt, Homo sapiens
  misc_RNA (1)...(19): siRNA sense strand
acgauaugauggguaaaug

SEQ ID NO: 2058931 - RNA, 19 nt, Homo sapiens
  misc_RNA (1)...(19): siRNA sense strand
uggaagcccagagcaaauu

SEQ ID NO: 2058932 - RNA, 19 nt, Homo sapiens
  misc_RNA (1)...(19): siRNA sense strand
ggaaaugcuugauauaaug

SEQ ID NO: 2058933 - RNA, 19 nt, Homo sapiens
  misc_RNA (1)...(19): siRNA sense strand
gagcaaauuuaccaagaaa

SEQ ID NO: 2058934 - RNA, 19 nt, Homo sapiens
  misc_RNA (1)...(19): siRNA sense strand
gaggaaaugcuugauauaa

SEQ ID NO: 2058935 - RNA, 19 nt, Homo sapiens
  misc_RNA (1)...(19): siRNA sense strand
ccagugguguuguuaauga

SEQ ID NO: 2058936 - RNA, 19 nt, Homo sapiens
  misc_RNA (1)...(19): siRNA sense strand
gcaaauuuaccaagaaaga

SEQ ID NO: 2058937 - RNA, 19 nt, Homo sapiens
  misc_RNA (1)...(19): siRNA sense strand
gauaugauggguaaaugua

SEQ ID NO: 2058938 - RNA, 19 nt, Homo sapiens
  misc_RNA (1)...(19): siRNA sense strand
cuacaucacuaaagaggaa

SEQ ID NO: 2058939 - RNA, 19 nt, Homo sapiens
  misc_RNA (1)...(19): siRNA sense strand
gggagacucuacaacauau

SEQ ID NO: 2058940 - RNA, 19 nt, Homo sapiens
  misc_RNA (1)...(19): siRNA sense strand
guacauauccuguccucaa

SEQ ID NO: 2058941 - RNA, 19 nt, Homo sapiens
  misc_RNA (1)...(19): siRNA sense strand
aaacucaauugggcauuua

SEQ ID NO: 2058942 - RNA, 19 nt, Homo sapiens
  misc_RNA (1)...(19): siRNA sense strand
acagaggauuuaagaauga

SEQ ID NO: 2058943 - RNA, 19 nt, Homo sapiens
  misc_RNA (1)...(19): siRNA sense strand
uauacgauaugauggguaa

SEQ ID NO: 2058944 - RNA, 19 nt, Homo sapiens
  misc_RNA (1)...(19): siRNA sense strand
caauggagcugugaguuuc

SEQ ID NO: 2058945 - RNA, 19 nt, Homo sapiens
  misc_RNA (1)...(19): siRNA sense strand
aagaggaaaugcuugauau

SEQ ID NO: 2058946 - RNA, 19 nt, Homo sapiens
  misc_RNA (1)...(19): siRNA sense strand
cagagcaaauuuaccaaga

SEQ ID NO: 2058947 - RNA, 19 nt, Homo sapiens
  misc_RNA (1)...(19): siRNA sense strand
caagaaagagcuucagauc

SEQ ID NO: 2058948 - RNA, 19 nt, Homo sapiens
  misc_RNA (1)...(19): siRNA sense strand
gaaagagcuucagauccuu

SEQ ID NO: 2058949 - RNA, 19 nt, Homo sapiens
  misc_RNA (1)...(19): siRNA sense strand
agaaagagcuucagauccu

SEQ ID NO: 2058950 - RNA, 19 nt, Homo sapiens
  misc_RNA (1)...(19): siRNA sense strand
gaagcccagagcaaauuua

SEQ ID NO: 2058951 - RNA, 19 nt, Homo sapiens
  misc_RNA (1)...(19): siRNA sense strand
aaagaggaaaugcuugaua

SEQ ID NO: 2058952 - RNA, 19 nt, Homo sapiens
  misc_RNA (1)...(19): siRNA sense strand
uacagaggauuuaagaaug

SEQ ID NO: 2058953 - RNA, 19 nt, Homo sapiens
  misc_RNA (1)...(19): siRNA sense strand
cauauccuguccucaaaga

SEQ ID NO: 2058954 - RNA, 19 nt, Homo sapiens
  misc_RNA (1)...(19): siRNA sense strand
uuucgaggauuucaucaaa

SEQ ID NO: 2058955 - RNA, 19 nt, Homo sapiens
  misc_RNA (1)...(19): siRNA sense strand
agaagaugcucccagacaa

SEQ ID NO: 2058956 - RNA, 19 nt, Homo sapiens
  misc_RNA (1)...(19): siRNA sense strand
gagauuuacucgcaguucu

SEQ ID NO: 2058957 - RNA, 19 nt, Homo sapiens
  misc_RNA (1)...(19): siRNA sense strand
ggaagcccagagcaaauuu

SEQ ID NO: 2058958 - RNA, 19 nt, Homo sapiens
  misc_RNA (1)...(19): siRNA sense strand
agagcaaauuuaccaagaa

SEQ ID NO: 2058959 - RNA, 19 nt, Homo sapiens
  misc_RNA (1)...(19): siRNA sense strand
gcugugaguuucgaggauu

SEQ ID NO: 2058960 - RNA, 19 nt, Homo sapiens
  misc_RNA (1)...(19): siRNA sense strand
uacauauccuguccucaaa

SEQ ID NO: 2058961 - RNA, 19 nt, Homo sapiens
  misc_RNA (1)...(19): siRNA sense strand
cuaaagaggaaaugcuuga

SEQ ID NO: 2058962 - RNA, 19 nt, Homo sapiens
  misc_RNA (1)...(19): siRNA sense strand
gggcauuuaaucuguauga

SEQ ID NO: 2058963 - RNA, 19 nt, Homo sapiens
  misc_RNA (1)...(19): siRNA sense strand
acaauggagcugugaguuu

SEQ ID NO: 2058964 - RNA, 19 nt, Homo sapiens
  misc_RNA (1)...(19): siRNA sense strand
cagggagacucuacaacau

SEQ ID NO: 2058965 - RNA, 19 nt, Homo sapiens
  misc_RNA (1)...(19): siRNA sense strand
ccaugcagcucuuugaaaa

SEQ ID NO: 2058966 - RNA, 19 nt, Homo sapiens
  misc_RNA (1)...(19): siRNA sense strand
cuacaacauaugcacauuu

SEQ ID NO: 2058967 - RNA, 19 nt, Homo sapiens
  misc_RNA (1)...(19): siRNA sense strand
gcauuuaaucuguaugaca

SEQ ID NO: 2058968 - RNA, 19 nt, Homo sapiens
  misc_RNA (1)...(19): siRNA sense strand
agaggaaaugcuugauaua

SEQ ID NO: 2058969 - RNA, 19 nt, Homo sapiens
  misc_RNA (1)...(19): siRNA sense strand
ccacagggagacucuacaa

SEQ ID NO: 2058970 - RNA, 19 nt, Homo sapiens
  misc_RNA (1)...(19): siRNA sense strand
gauuuacucgcaguucuuu

SEQ ID NO: 2058971 - RNA, 19 nt, Homo sapiens
  misc_RNA (1)...(19): siRNA sense strand
uaugauggguaaauguaca

SEQ ID NO: 2058972 - RNA, 19 nt, Homo sapiens
  misc_RNA (1)...(19): siRNA sense strand
ucaauugggcauuuaaucu

SEQ ID NO: 2058973 - RNA, 19 nt, Homo sapiens
  misc_RNA (1)...(19): siRNA sense strand
cagaggauuuaagaaugaa

SEQ ID NO: 2058974 - RNA, 19 nt, Homo sapiens
  misc_RNA (1)...(19): siRNA sense strand
aagaaaccuucaaagagau

SEQ ID NO: 2058975 - RNA, 19 nt, Homo sapiens
  misc_RNA (1)...(19): siRNA sense strand
gaagaugcucccagacaac

SEQ ID NO: 2058976 - RNA, 19 nt, Homo sapiens
  misc_RNA (1)...(19): siRNA sense strand
ccaagaaagagcuucagau

SEQ ID NO: 2058977 - RNA, 19 nt, Homo sapiens
  misc_RNA (1)...(19): siRNA sense strand
caauugggcauuuaaucug

SEQ ID NO: 2058978 - RNA, 19 nt, Homo sapiens
  misc_RNA (1)...(19): siRNA sense strand
gaggauuuaagaaugaaug

SEQ ID NO: 2058979 - RNA, 19 nt, Homo sapiens
  misc_RNA (1)...(19): siRNA sense strand
gugguguuguuaaugaaga

SEQ ID NO: 2058980 - RNA, 19 nt, Homo sapiens
  misc_RNA (1)...(19): siRNA sense strand
gaaaccuucaaagagauuu

SEQ ID NO: 2058981 - RNA, 19 nt, Homo sapiens
  misc_RNA (1)...(19): siRNA sense strand
gcccagagcaaauuuacca

SEQ ID NO: 2058982 - RNA, 19 nt, Homo sapiens
  misc_RNA (1)...(19): siRNA sense strand
acagggagacucuacaaca

SEQ ID NO: 2058983 - RNA, 19 nt, Homo sapiens
  misc_RNA (1)...(19): siRNA sense strand
gcuccaugcagcucuuuga

SEQ ID NO: 2058984 - RNA, 19 nt, Homo sapiens
  misc_RNA (1)...(19): siRNA sense strand
gagcuucagauccuuuaca

SEQ ID NO: 2058985 - RNA, 19 nt, Homo sapiens
  misc_RNA (1)...(19): siRNA sense strand
agggagacucuacaacaua

SEQ ID NO: 2058986 - RNA, 19 nt, Homo sapiens
  misc_RNA (1)...(19): siRNA sense strand
ugauacagaccacaaugga

SEQ ID NO: 2058987 - RNA, 19 nt, Homo sapiens
  misc_RNA (1)...(19): siRNA sense strand
ggaagaugaacuggagaug

SEQ ID NO: 2058988 - RNA, 19 nt, Homo sapiens
  misc_RNA (1)...(19): siRNA sense strand
ucgaggauuucaucaaagg

SEQ ID NO: 2058989 - RNA, 19 nt, Homo sapiens
  misc_RNA (1)...(19): siRNA sense strand
gauggguaaauguacauau

SEQ ID NO: 2058990 - RNA, 19 nt, Homo sapiens
  misc_RNA (1)...(19): siRNA sense strand
aagaagaugcucccagaca

SEQ ID NO: 2058991 - RNA, 19 nt, Homo sapiens
  misc_RNA (1)...(19): siRNA sense strand
aaauaaagaugggguuguu

SEQ ID NO: 2058992 - RNA, 19 nt, Homo sapiens
  misc_RNA (1)...(19): siRNA sense strand
ucuacaacauaugcacauu

SEQ ID NO: 2058993 - RNA, 19 nt, Homo sapiens
  misc_RNA (1)...(19): siRNA sense strand
cagugguguuguuaaugaa

SEQ ID NO: 2058994 - RNA, 19 nt, Homo sapiens
  misc_RNA (1)...(19): siRNA sense strand
gaguuucgaggauuucauc

SEQ ID NO: 2058995 - RNA, 19 nt, Homo sapiens
  misc_RNA (1)...(19): siRNA sense strand
aauugggcauuuaaucugu

SEQ ID NO: 2058996 - RNA, 19 nt, Homo sapiens
  misc_RNA (1)...(19): siRNA sense strand
acgauaugauggguaaaug

SEQ ID NO: 2058997 - RNA, 19 nt, Homo sapiens
  misc_RNA (1)...(19): siRNA sense strand
uggaagcccagagcaaauu

SEQ ID NO: 2058998 - RNA, 19 nt, Homo sapiens
  misc_RNA (1)...(19): siRNA sense strand
ggaaaugcuugauauaaug

SEQ ID NO: 2058999 - RNA, 19 nt, Homo sapiens
  misc_RNA (1)...(19): siRNA sense strand
gagcaaauuuaccaagaaa

SEQ ID NO: 2059000 - RNA, 19 nt, Homo sapiens
  misc_RNA (1)...(19): siRNA sense strand
gaggaaaugcuugauauaa

SEQ ID NO: 2059001 - RNA, 19 nt, Homo sapiens
  misc_RNA (1)...(19): siRNA sense strand
ccagugguguuguuaauga

SEQ ID NO: 2059002 - RNA, 19 nt, Homo sapiens
  misc_RNA (1)...(19): siRNA sense strand
gcaaauuuaccaagaaaga

SEQ ID NO: 2059003 - RNA, 19 nt, Homo sapiens
  misc_RNA (1)...(19): siRNA sense strand
gauaugauggguaaaugua

SEQ ID NO: 2059004 - RNA, 19 nt, Homo sapiens
  misc_RNA (1)...(19): siRNA sense strand
cuacaucacuaaagaggaa

SEQ ID NO: 2059005 - RNA, 19 nt, Homo sapiens
  misc_RNA (1)...(19): siRNA sense strand
gggagacucuacaacauau

SEQ ID NO: 2059006 - RNA, 19 nt, Homo sapiens
  misc_RNA (1)...(19): siRNA sense strand
guacauauccuguccucaa

SEQ ID NO: 2059007 - RNA, 19 nt, Homo sapiens
  misc_RNA (1)...(19): siRNA sense strand
aaacucaauugggcauuua

SEQ ID NO: 2059008 - RNA, 19 nt, Homo sapiens
  misc_RNA (1)...(19): siRNA sense strand
acagaggauuuaagaauga

SEQ ID NO: 2059009 - RNA, 19 nt, Homo sapiens
  misc_RNA (1)...(19): siRNA sense strand
uauacgauaugauggguaa

SEQ ID NO: 2059010 - RNA, 19 nt, Homo sapiens
  misc_RNA (1)...(19): siRNA sense strand
caauggagcugugaguuuc

SEQ ID NO: 2059011 - RNA, 19 nt, Homo sapiens
  misc_RNA (1)...(19): siRNA sense strand
aagaggaaaugcuugauau

SEQ ID NO: 2059012 - RNA, 19 nt, Homo sapiens
  misc_RNA (1)...(19): siRNA sense strand
cagagcaaauuuaccaaga

SEQ ID NO: 2059013 - RNA, 19 nt, Homo sapiens
  misc_RNA (1)...(19): siRNA sense strand
caagaaagagcuucagauc

SEQ ID NO: 2059014 - RNA, 19 nt, Homo sapiens
  misc_RNA (1)...(19): siRNA sense strand
gaaagagcuucagauccuu

SEQ ID NO: 2059015 - RNA, 19 nt, Homo sapiens
  misc_RNA (1)...(19): siRNA sense strand
agaaagagcuucagauccu

SEQ ID NO: 2059016 - RNA, 19 nt, Homo sapiens
  misc_RNA (1)...(19): siRNA sense strand
aaagaggaaaugcuugaua

SEQ ID NO: 2059017 - RNA, 19 nt, Homo sapiens
  misc_RNA (1)...(19): siRNA sense strand
gaagcccagagcaaauuua

SEQ ID NO: 2059018 - RNA, 19 nt, Homo sapiens
  misc_RNA (1)...(19): siRNA sense strand
uacagaggauuuaagaaug

SEQ ID NO: 2059019 - RNA, 19 nt, Homo sapiens
  misc_RNA (1)...(19): siRNA sense strand
cauauccuguccucaaaga

SEQ ID NO: 2059020 - RNA, 19 nt, Homo sapiens
  misc_RNA (1)...(19): siRNA sense strand
uuucgaggauuucaucaaa

SEQ ID NO: 2059021 - RNA, 19 nt, Homo sapiens
  misc_RNA (1)...(19): siRNA sense strand
agaagaugcucccagacaa

SEQ ID NO: 2059022 - RNA, 19 nt, Homo sapiens
  misc_RNA (1)...(19): siRNA sense strand
gagauuuacucgcaguucu

SEQ ID NO: 2059023 - RNA, 19 nt, Homo sapiens
  misc_RNA (1)...(19): siRNA sense strand
ggaagcccagagcaaauuu

SEQ ID NO: 2059024 - RNA, 19 nt, Homo sapiens
  misc_RNA (1)...(19): siRNA sense strand
agagcaaauuuaccaagaa

SEQ ID NO: 2059025 - RNA, 19 nt, Homo sapiens
  misc_RNA (1)...(19): siRNA sense strand
gcugugaguuucgaggauu

SEQ ID NO: 2059026 - RNA, 19 nt, Homo sapiens
  misc_RNA (1)...(19): siRNA sense strand
uacauauccuguccucaaa

SEQ ID NO: 2059027 - RNA, 19 nt, Homo sapiens
  misc_RNA (1)...(19): siRNA sense strand
cuaaagaggaaaugcuuga

SEQ ID NO: 2059028 - RNA, 19 nt, Homo sapiens
  misc_RNA (1)...(19): siRNA sense strand
gggcauuuaaucuguauga

SEQ ID NO: 2059029 - RNA, 19 nt, Homo sapiens
  misc_RNA (1)...(19): siRNA sense strand
acaauggagcugugaguuu

SEQ ID NO: 2059030 - RNA, 19 nt, Homo sapiens
  misc_RNA (1)...(19): siRNA sense strand
cagggagacucuacaacau

SEQ ID NO: 2059031 - RNA, 19 nt, Homo sapiens
  misc_RNA (1)...(19): siRNA sense strand
ccaugcagcucuuugaaaa

SEQ ID NO: 2059032 - RNA, 19 nt, Homo sapiens
  misc_RNA (1)...(19): siRNA sense strand
cuacaacauaugcacauuu

SEQ ID NO: 2059033 - RNA, 19 nt, Homo sapiens
  misc_RNA (1)...(19): siRNA sense strand
gcauuuaaucuguaugaca

SEQ ID NO: 2059034 - RNA, 19 nt, Homo sapiens
  misc_RNA (1)...(19): siRNA sense strand
agaggaaaugcuugauaua

SEQ ID NO: 2059035 - RNA, 19 nt, Homo sapiens
  misc_RNA (1)...(19): siRNA sense strand
ccacagggagacucuacaa

SEQ ID NO: 2059036 - RNA, 19 nt, Homo sapiens
  misc_RNA (1)...(19): siRNA sense strand
gauuuacucgcaguucuuu

SEQ ID NO: 2059037 - RNA, 19 nt, Homo sapiens
  misc_RNA (1)...(19): siRNA sense strand
uaugauggguaaauguaca

SEQ ID NO: 2059038 - RNA, 19 nt, Homo sapiens
  misc_RNA (1)...(19): siRNA sense strand
ucaauugggcauuuaaucu

SEQ ID NO: 2059039 - RNA, 19 nt, Homo sapiens
  misc_RNA (1)...(19): siRNA sense strand
cagaggauuuaagaaugaa

SEQ ID NO: 2059040 - RNA, 19 nt, Homo sapiens
  misc_RNA (1)...(19): siRNA sense strand
aagaaaccuucaaagagau

SEQ ID NO: 2059041 - RNA, 19 nt, Homo sapiens
  misc_RNA (1)...(19): siRNA sense strand
gaagaugcucccagacaac

SEQ ID NO: 2059042 - RNA, 19 nt, Homo sapiens
  misc_RNA (1)...(19): siRNA sense strand
ccaagaaagagcuucagau

SEQ ID NO: 2059043 - RNA, 19 nt, Homo sapiens
  misc_RNA (1)...(19): siRNA sense strand
gaggauuuaagaaugaaug

SEQ ID NO: 2059044 - RNA, 19 nt, Homo sapiens
  misc_RNA (1)...(19): siRNA sense strand
caauugggcauuuaaucug

SEQ ID NO: 2059045 - RNA, 19 nt, Homo sapiens
  misc_RNA (1)...(19): siRNA sense strand
gugguguuguuaaugaaga

SEQ ID NO: 2059046 - RNA, 19 nt, Homo sapiens
  misc_RNA (1)...(19): siRNA sense strand
gaaaccuucaaagagauuu

SEQ ID NO: 2059047 - RNA, 19 nt, Homo sapiens
  misc_RNA (1)...(19): siRNA sense strand
gcccagagcaaauuuacca

SEQ ID NO: 2059048 - RNA, 19 nt, Homo sapiens
  misc_RNA (1)...(19): siRNA sense strand
acagggagacucuacaaca

SEQ ID NO: 2059049 - RNA, 19 nt, Homo sapiens
  misc_RNA (1)...(19): siRNA sense strand
gcuccaugcagcucuuuga

SEQ ID NO: 2059050 - RNA, 19 nt, Homo sapiens
  misc_RNA (1)...(19): siRNA sense strand
gagcuucagauccuuuaca

SEQ ID NO: 2059051 - RNA, 19 nt, Homo sapiens
  misc_RNA (1)...(19): siRNA sense strand
agggagacucuacaacaua

SEQ ID NO: 2059052 - RNA, 19 nt, Homo sapiens
  misc_RNA (1)...(19): siRNA sense strand
ugauacagaccacaaugga

SEQ ID NO: 2059053 - RNA, 19 nt, Homo sapiens
  misc_RNA (1)...(19): siRNA sense strand
ucgaggauuucaucaaagg

SEQ ID NO: 2059054 - RNA, 19 nt, Homo sapiens
  misc_RNA (1)...(19): siRNA sense strand
gauggguaaauguacauau

SEQ ID NO: 2059055 - RNA, 19 nt, Homo sapiens
  misc_RNA (1)...(19): siRNA sense strand
aagaagaugcucccagaca

SEQ ID NO: 2059056 - RNA, 19 nt, Homo sapiens
  misc_RNA (1)...(19): siRNA sense strand
aaauaaagaugggguuguu

SEQ ID NO: 2059057 - RNA, 19 nt, Homo sapiens
  misc_RNA (1)...(19): siRNA sense strand
ucuacaacauaugcacauu

SEQ ID NO: 2059058 - RNA, 19 nt, Homo sapiens
  misc_RNA (1)...(19): siRNA sense strand
cagugguguuguuaaugaa

SEQ ID NO: 2059059 - RNA, 19 nt, Homo sapiens
  misc_RNA (1)...(19): siRNA sense strand
gaguuucgaggauuucauc

SEQ ID NO: 2059060 - RNA, 19 nt, Homo sapiens
  misc_RNA (1)...(19): siRNA sense strand
aauugggcauuuaaucugu

SEQ ID NO: 2059061 - RNA, 19 nt, Homo sapiens
  misc_RNA (1)...(19): siRNA sense strand
uggaagcccagagcaaauu

SEQ ID NO: 2059062 - RNA, 19 nt, Homo sapiens
  misc_RNA (1)...(19): siRNA sense strand
acgauaugauggguaaaug

SEQ ID NO: 2059063 - RNA, 19 nt, Homo sapiens
  misc_RNA (1)...(19): siRNA sense strand
ggaaaugcuugauauaaug

SEQ ID NO: 2059064 - RNA, 19 nt, Homo sapiens
  misc_RNA (1)...(19): siRNA sense strand
gagcaaauuuaccaagaaa

SEQ ID NO: 2059065 - RNA, 19 nt, Homo sapiens
  misc_RNA (1)...(19): siRNA sense strand
gaggaaaugcuugauauaa

SEQ ID NO: 2059066 - RNA, 19 nt, Homo sapiens
  misc_RNA (1)...(19): siRNA sense strand
ccagugguguuguuaauga

SEQ ID NO: 2059067 - RNA, 19 nt, Homo sapiens
  misc_RNA (1)...(19): siRNA sense strand
gcaaauuuaccaagaaaga

SEQ ID NO: 2059068 - RNA, 19 nt, Homo sapiens
  misc_RNA (1)...(19): siRNA sense strand
gauaugauggguaaaugua

SEQ ID NO: 2059069 - RNA, 19 nt, Homo sapiens
  misc_RNA (1)...(19): siRNA sense strand
cuacaucacuaaagaggaa

SEQ ID NO: 2059070 - RNA, 19 nt, Homo sapiens
  misc_RNA (1)...(19): siRNA sense strand
gggagacucuacaacauau

SEQ ID NO: 2059071 - RNA, 19 nt, Homo sapiens
  misc_RNA (1)...(19): siRNA sense strand
guacauauccuguccucaa

SEQ ID NO: 2059072 - RNA, 19 nt, Homo sapiens
  misc_RNA (1)...(19): siRNA sense strand
aaacucaauugggcauuua

SEQ ID NO: 2059073 - RNA, 19 nt, Homo sapiens
  misc_RNA (1)...(19): siRNA sense strand
acagaggauuuaagaauga

SEQ ID NO: 2059074 - RNA, 19 nt, Homo sapiens
  misc_RNA (1)...(19): siRNA sense strand
uauacgauaugauggguaa

SEQ ID NO: 2059075 - RNA, 19 nt, Homo sapiens
  misc_RNA (1)...(19): siRNA sense strand
caauggagcugugaguuuc

SEQ ID NO: 2059076 - RNA, 19 nt, Homo sapiens
  misc_RNA (1)...(19): siRNA sense strand
aagaggaaaugcuugauau

SEQ ID NO: 2059077 - RNA, 19 nt, Homo sapiens
  misc_RNA (1)...(19): siRNA sense strand
cagagcaaauuuaccaaga

SEQ ID NO: 2059078 - RNA, 19 nt, Homo sapiens
  misc_RNA (1)...(19): siRNA sense strand
caagaaagagcuucagauc

SEQ ID NO: 2059079 - RNA, 19 nt, Homo sapiens
  misc_RNA (1)...(19): siRNA sense strand
gaaagagcuucagauccuu

SEQ ID NO: 2059080 - RNA, 19 nt, Homo sapiens
  misc_RNA (1)...(19): siRNA sense strand
agaaagagcuucagauccu

SEQ ID NO: 2059081 - RNA, 19 nt, Homo sapiens
  misc_RNA (1)...(19): siRNA sense strand
gaagcccagagcaaauuua

SEQ ID NO: 2059082 - RNA, 19 nt, Homo sapiens
  misc_RNA (1)...(19): siRNA sense strand
aaagaggaaaugcuugaua

SEQ ID NO: 2059083 - RNA, 19 nt, Homo sapiens
  misc_RNA (1)...(19): siRNA sense strand
uacagaggauuuaagaaug

SEQ ID NO: 2059084 - RNA, 19 nt, Homo sapiens
  misc_RNA (1)...(19): siRNA sense strand
cauauccuguccucaaaga

SEQ ID NO: 2059085 - RNA, 19 nt, Homo sapiens
  misc_RNA (1)...(19): siRNA sense strand
uuucgaggauuucaucaaa

SEQ ID NO: 2059086 - RNA, 19 nt, Homo sapiens
  misc_RNA (1)...(19): siRNA sense strand
agaagaugcucccagacaa

SEQ ID NO: 2059087 - RNA, 19 nt, Homo sapiens
  misc_RNA (1)...(19): siRNA sense strand
gagauuuacucgcaguucu

SEQ ID NO: 2059088 - RNA, 19 nt, Homo sapiens
  misc_RNA (1)...(19): siRNA sense strand
ggaagcccagagcaaauuu

SEQ ID NO: 2059089 - RNA, 19 nt, Homo sapiens
  misc_RNA (1)...(19): siRNA sense strand
agagcaaauuuaccaagaa

SEQ ID NO: 2059090 - RNA, 19 nt, Homo sapiens
  misc_RNA (1)...(19): siRNA sense strand
gcugugaguuucgaggauu

SEQ ID NO: 2059091 - RNA, 19 nt, Homo sapiens
  misc_RNA (1)...(19): siRNA sense strand
uacauauccuguccucaaa

SEQ ID NO: 2059092 - RNA, 19 nt, Homo sapiens
  misc_RNA (1)...(19): siRNA sense strand
cuaaagaggaaaugcuuga

SEQ ID NO: 2059093 - RNA, 19 nt, Homo sapiens
  misc_RNA (1)...(19): siRNA sense strand
gggcauuuaaucuguauga

SEQ ID NO: 2059094 - RNA, 19 nt, Homo sapiens
  misc_RNA (1)...(19): siRNA sense strand
acaauggagcugugaguuu

SEQ ID NO: 2059095 - RNA, 19 nt, Homo sapiens
  misc_RNA (1)...(19): siRNA sense strand
cagggagacucuacaacau

SEQ ID NO: 2059096 - RNA, 19 nt, Homo sapiens
  misc_RNA (1)...(19): siRNA sense strand
ccaugcagcucuuugaaaa

SEQ ID NO: 2059097 - RNA, 19 nt, Homo sapiens
  misc_RNA (1)...(19): siRNA sense strand
cuacaacauaugcacauuu

SEQ ID NO: 2059098 - RNA, 19 nt, Homo sapiens
  misc_RNA (1)...(19): siRNA sense strand
gcauuuaaucuguaugaca

SEQ ID NO: 2059099 - RNA, 19 nt, Homo sapiens
  misc_RNA (1)...(19): siRNA sense strand
agaggaaaugcuugauaua

SEQ ID NO: 2059100 - RNA, 19 nt, Homo sapiens
  misc_RNA (1)...(19): siRNA sense strand
ccacagggagacucuacaa

SEQ ID NO: 2059101 - RNA, 19 nt, Homo sapiens
  misc_RNA (1)...(19): siRNA sense strand
gauuuacucgcaguucuuu

SEQ ID NO: 2059102 - RNA, 19 nt, Homo sapiens
  misc_RNA (1)...(19): siRNA sense strand
uaugauggguaaauguaca

SEQ ID NO: 2059103 - RNA, 19 nt, Homo sapiens
  misc_RNA (1)...(19): siRNA sense strand
ucaauugggcauuuaaucu

SEQ ID NO: 2059104 - RNA, 19 nt, Homo sapiens
  misc_RNA (1)...(19): siRNA sense strand
cagaggauuuaagaaugaa

SEQ ID NO: 2059105 - RNA, 19 nt, Homo sapiens
  misc_RNA (1)...(19): siRNA sense strand
aagaaaccuucaaagagau

SEQ ID NO: 2059106 - RNA, 19 nt, Homo sapiens
  misc_RNA (1)...(19): siRNA sense strand
gaagaugcucccagacaac

SEQ ID NO: 2059107 - RNA, 19 nt, Homo sapiens
  misc_RNA (1)...(19): siRNA sense strand
ccaagaaagagcuucagau

SEQ ID NO: 2059108 - RNA, 19 nt, Homo sapiens
  misc_RNA (1)...(19): siRNA sense strand
caauugggcauuuaaucug

SEQ ID NO: 2059109 - RNA, 19 nt, Homo sapiens
  misc_RNA (1)...(19): siRNA sense strand
gaggauuuaagaaugaaug

SEQ ID NO: 2059110 - RNA, 19 nt, Homo sapiens
  misc_RNA (1)...(19): siRNA sense strand
gugguguuguuaaugaaga

SEQ ID NO: 2059111 - RNA, 19 nt, Homo sapiens
  misc_RNA (1)...(19): siRNA sense strand
gaaaccuucaaagagauuu

SEQ ID NO: 2059112 - RNA, 19 nt, Homo sapiens
  misc_RNA (1)...(19): siRNA sense strand
gcccagagcaaauuuacca

SEQ ID NO: 2059113 - RNA, 19 nt, Homo sapiens
  misc_RNA (1)...(19): siRNA sense strand
acagggagacucuacaaca

SEQ ID NO: 2059114 - RNA, 19 nt, Homo sapiens
  misc_RNA (1)...(19): siRNA sense strand
gcuccaugcagcucuuuga

SEQ ID NO: 2059115 - RNA, 19 nt, Homo sapiens
  misc_RNA (1)...(19): siRNA sense strand
gagcuucagauccuuuaca

SEQ ID NO: 2059116 - RNA, 19 nt, Homo sapiens
  misc_RNA (1)...(19): siRNA sense strand
agggagacucuacaacaua

SEQ ID NO: 2059117 - RNA, 19 nt, Homo sapiens
  misc_RNA (1)...(19): siRNA sense strand
ugauacagaccacaaugga

SEQ ID NO: 2059118 - RNA, 19 nt, Homo sapiens
  misc_RNA (1)...(19): siRNA sense strand
ggaagaugaacuggagaug

SEQ ID NO: 2059119 - RNA, 19 nt, Homo sapiens
  misc_RNA (1)...(19): siRNA sense strand
ucgaggauuucaucaaagg

SEQ ID NO: 2059120 - RNA, 19 nt, Homo sapiens
  misc_RNA (1)...(19): siRNA sense strand
gauggguaaauguacauau

SEQ ID NO: 2059121 - RNA, 19 nt, Homo sapiens
  misc_RNA (1)...(19): siRNA sense strand
aagaagaugcucccagaca

SEQ ID NO: 2059122 - RNA, 19 nt, Homo sapiens
  misc_RNA (1)...(19): siRNA sense strand
aaauaaagaugggguuguu

SEQ ID NO: 2059123 - RNA, 19 nt, Homo sapiens
  misc_RNA (1)...(19): siRNA sense strand
ucuacaacauaugcacauu

SEQ ID NO: 2059124 - RNA, 19 nt, Homo sapiens
  misc_RNA (1)...(19): siRNA sense strand
cagugguguuguuaaugaa

SEQ ID NO: 2059125 - RNA, 19 nt, Homo sapiens
  misc_RNA (1)...(19): siRNA sense strand
gaguuucgaggauuucauc

SEQ ID NO: 2059126 - RNA, 19 nt, Homo sapiens
  misc_RNA (1)...(19): siRNA sense strand
aauugggcauuuaaucugu

SEQ ID NO: 2059127 - RNA, 19 nt, Homo sapiens
  misc_RNA (1)...(19): siRNA sense strand
acgauaugauggguaaaug

SEQ ID NO: 2059128 - RNA, 19 nt, Homo sapiens
  misc_RNA (1)...(19): siRNA sense strand
uggaagcccagagcaaauu

SEQ ID NO: 2059129 - RNA, 19 nt, Homo sapiens
  misc_RNA (1)...(19): siRNA sense strand
ggaaaugcuugauauaaug

SEQ ID NO: 2059130 - RNA, 19 nt, Homo sapiens
  misc_RNA (1)...(19): siRNA sense strand
gagcaaauuuaccaagaaa

SEQ ID NO: 2059131 - RNA, 19 nt, Homo sapiens
  misc_RNA (1)...(19): siRNA sense strand
gaggaaaugcuugauauaa

SEQ ID NO: 2059132 - RNA, 19 nt, Homo sapiens
  misc_RNA (1)...(19): siRNA sense strand
ccagugguguuguuaauga

SEQ ID NO: 2059133 - RNA, 19 nt, Homo sapiens
  misc_RNA (1)...(19): siRNA sense strand
gcaaauuuaccaagaaaga

SEQ ID NO: 2059134 - RNA, 19 nt, Homo sapiens
  misc_RNA (1)...(19): siRNA sense strand
gauaugauggguaaaugua

SEQ ID NO: 2059135 - RNA, 19 nt, Homo sapiens
  misc_RNA (1)...(19): siRNA sense strand
cuacaucacuaaagaggaa

SEQ ID NO: 2059136 - RNA, 19 nt, Homo sapiens
  misc_RNA (1)...(19): siRNA sense strand
gggagacucuacaacauau

SEQ ID NO: 2059137 - RNA, 19 nt, Homo sapiens
  misc_RNA (1)...(19): siRNA sense strand
guacauauccuguccucaa

SEQ ID NO: 2059138 - RNA, 19 nt, Homo sapiens
  misc_RNA (1)...(19): siRNA sense strand
aaacucaauugggcauuua

SEQ ID NO: 2059139 - RNA, 19 nt, Homo sapiens
  misc_RNA (1)...(19): siRNA sense strand
acagaggauuuaagaauga

SEQ ID NO: 2059140 - RNA, 19 nt, Homo sapiens
  misc_RNA (1)...(19): siRNA sense strand
uauacgauaugauggguaa

SEQ ID NO: 2059141 - RNA, 19 nt, Homo sapiens
  misc_RNA (1)...(19): siRNA sense strand
caauggagcugugaguuuc

SEQ ID NO: 2059142 - RNA, 19 nt, Homo sapiens
  misc_RNA (1)...(19): siRNA sense strand
aagaggaaaugcuugauau

SEQ ID NO: 2059143 - RNA, 19 nt, Homo sapiens
  misc_RNA (1)...(19): siRNA sense strand
cagagcaaauuuaccaaga

SEQ ID NO: 2059144 - RNA, 19 nt, Homo sapiens
  misc_RNA (1)...(19): siRNA sense strand
caagaaagagcuucagauc

SEQ ID NO: 2059145 - RNA, 19 nt, Homo sapiens
  misc_RNA (1)...(19): siRNA sense strand
gaaagagcuucagauccuu

SEQ ID NO: 2059146 - RNA, 19 nt, Homo sapiens
  misc_RNA (1)...(19): siRNA sense strand
agaaagagcuucagauccu

SEQ ID NO: 2059147 - RNA, 19 nt, Homo sapiens
  misc_RNA (1)...(19): siRNA sense strand
gaagcccagagcaaauuua

SEQ ID NO: 2059148 - RNA, 19 nt, Homo sapiens
  misc_RNA (1)...(19): siRNA sense strand
aaagaggaaaugcuugaua

SEQ ID NO: 2059149 - RNA, 19 nt, Homo sapiens
  misc_RNA (1)...(19): siRNA sense strand
uacagaggauuuaagaaug

SEQ ID NO: 2059150 - RNA, 19 nt, Homo sapiens
  misc_RNA (1)...(19): siRNA sense strand
cauauccuguccucaaaga

SEQ ID NO: 2059151 - RNA, 19 nt, Homo sapiens
  misc_RNA (1)...(19): siRNA sense strand
uuucgaggauuucaucaaa

SEQ ID NO: 2059152 - RNA, 19 nt, Homo sapiens
  misc_RNA (1)...(19): siRNA sense strand
agaagaugcucccagacaa

SEQ ID NO: 2059153 - RNA, 19 nt, Homo sapiens
  misc_RNA (1)...(19): siRNA sense strand
gagauuuacucgcaguucu

SEQ ID NO: 2059154 - RNA, 19 nt, Homo sapiens
  misc_RNA (1)...(19): siRNA sense strand
ggaagcccagagcaaauuu

SEQ ID NO: 2059155 - RNA, 19 nt, Homo sapiens
  misc_RNA (1)...(19): siRNA sense strand
agagcaaauuuaccaagaa

SEQ ID NO: 2059156 - RNA, 19 nt, Homo sapiens
  misc_RNA (1)...(19): siRNA sense strand
gcugugaguuucgaggauu

SEQ ID NO: 2059157 - RNA, 19 nt, Homo sapiens
  misc_RNA (1)...(19): siRNA sense strand
uacauauccuguccucaaa

SEQ ID NO: 2059158 - RNA, 19 nt, Homo sapiens
  misc_RNA (1)...(19): siRNA sense strand
cuaaagaggaaaugcuuga

SEQ ID NO: 2059159 - RNA, 19 nt, Homo sapiens
  misc_RNA (1)...(19): siRNA sense strand
gggcauuuaaucuguauga

SEQ ID NO: 2059160 - RNA, 19 nt, Homo sapiens
  misc_RNA (1)...(19): siRNA sense strand
acaauggagcugugaguuu

SEQ ID NO: 2059161 - RNA, 19 nt, Homo sapiens
  misc_RNA (1)...(19): siRNA sense strand
cagggagacucuacaacau

SEQ ID NO: 2059162 - RNA, 19 nt, Homo sapiens
  misc_RNA (1)...(19): siRNA sense strand
ccaugcagcucuuugaaaa

SEQ ID NO: 2059163 - RNA, 19 nt, Homo sapiens
  misc_RNA (1)...(19): siRNA sense strand
cuacaacauaugcacauuu

SEQ ID NO: 2059164 - RNA, 19 nt, Homo sapiens
  misc_RNA (1)...(19): siRNA sense strand
gcauuuaaucuguaugaca

SEQ ID NO: 2059165 - RNA, 19 nt, Homo sapiens
  misc_RNA (1)...(19): siRNA sense strand
agaggaaaugcuugauaua

SEQ ID NO: 2059166 - RNA, 19 nt, Homo sapiens
  misc_RNA (1)...(19): siRNA sense strand
ccacagggagacucuacaa

SEQ ID NO: 2059167 - RNA, 19 nt, Homo sapiens
  misc_RNA (1)...(19): siRNA sense strand
gauuuacucgcaguucuuu

SEQ ID NO: 2059168 - RNA, 19 nt, Homo sapiens
  misc_RNA (1)...(19): siRNA sense strand
uaugauggguaaauguaca

SEQ ID NO: 2059169 - RNA, 19 nt, Homo sapiens
  misc_RNA (1)...(19): siRNA sense strand
ucaauugggcauuuaaucu

SEQ ID NO: 2059170 - RNA, 19 nt, Homo sapiens
  misc_RNA (1)...(19): siRNA sense strand
cagaggauuuaagaaugaa

SEQ ID NO: 2059171 - RNA, 19 nt, Homo sapiens
  misc_RNA (1)...(19): siRNA sense strand
aagaaaccuucaaagagau

SEQ ID NO: 2059172 - RNA, 19 nt, Homo sapiens
  misc_RNA (1)...(19): siRNA sense strand
gaagaugcucccagacaac

SEQ ID NO: 2059173 - RNA, 19 nt, Homo sapiens
  misc_RNA (1)...(19): siRNA sense strand
ccaagaaagagcuucagau

SEQ ID NO: 2059174 - RNA, 19 nt, Homo sapiens
  misc_RNA (1)...(19): siRNA sense strand
caauugggcauuuaaucug

SEQ ID NO: 2059175 - RNA, 19 nt, Homo sapiens
  misc_RNA (1)...(19): siRNA sense strand
gaggauuuaagaaugaaug

SEQ ID NO: 2059176 - RNA, 19 nt, Homo sapiens
  misc_RNA (1)...(19): siRNA sense strand
gugguguuguuaaugaaga

SEQ ID NO: 2059177 - RNA, 19 nt, Homo sapiens
  misc_RNA (1)...(19): siRNA sense strand
gaaaccuucaaagagauuu

SEQ ID NO: 2059178 - RNA, 19 nt, Homo sapiens
  misc_RNA (1)...(19): siRNA sense strand
gcccagagcaaauuuacca

SEQ ID NO: 2059179 - RNA, 19 nt, Homo sapiens
  misc_RNA (1)...(19): siRNA sense strand
acagggagacucuacaaca

SEQ ID NO: 2059180 - RNA, 19 nt, Homo sapiens
  misc_RNA (1)...(19): siRNA sense strand
gcuccaugcagcucuuuga

SEQ ID NO: 2059181 - RNA, 19 nt, Homo sapiens
  misc_RNA (1)...(19): siRNA sense strand
gagcuucagauccuuuaca

SEQ ID NO: 2059182 - RNA, 19 nt, Homo sapiens
  misc_RNA (1)...(19): siRNA sense strand
agggagacucuacaacaua

SEQ ID NO: 2059183 - RNA, 19 nt, Homo sapiens
  misc_RNA (1)...(19): siRNA sense strand
ugauacagaccacaaugga

SEQ ID NO: 2059184 - RNA, 19 nt, Homo sapiens
  misc_RNA (1)...(19): siRNA sense strand
ggaagaugaacuggagaug

SEQ ID NO: 2059185 - RNA, 19 nt, Homo sapiens
  misc_RNA (1)...(19): siRNA sense strand
ucgaggauuucaucaaagg

SEQ ID NO: 2059186 - RNA, 19 nt, Homo sapiens
  misc_RNA (1)...(19): siRNA sense strand
gauggguaaauguacauau

SEQ ID NO: 2059187 - RNA, 19 nt, Homo sapiens
  misc_RNA (1)...(19): siRNA sense strand
aagaagaugcucccagaca

SEQ ID NO: 2059188 - RNA, 19 nt, Homo sapiens
  misc_RNA (1)...(19): siRNA sense strand
aaauaaagaugggguuguu

SEQ ID NO: 2059189 - RNA, 19 nt, Homo sapiens
  misc_RNA (1)...(19): siRNA sense strand
ucuacaacauaugcacauu

SEQ ID NO: 2059190 - RNA, 19 nt, Homo sapiens
  misc_RNA (1)...(19): siRNA sense strand
cagugguguuguuaaugaa

SEQ ID NO: 2059191 - RNA, 19 nt, Homo sapiens
  misc_RNA (1)...(19): siRNA sense strand
gaguuucgaggauuucauc

SEQ ID NO: 2059192 - RNA, 19 nt, Homo sapiens
  misc_RNA (1)...(19): siRNA sense strand
aauugggcauuuaaucugu

SEQ ID NO: 2059193 - RNA, 19 nt, Homo sapiens
  misc_RNA (1)...(19): siRNA sense strand
acgauaugauggguaaaug

SEQ ID NO: 2059194 - RNA, 19 nt, Homo sapiens
  misc_RNA (1)...(19): siRNA sense strand
uggaagcccagagcaaauu

SEQ ID NO: 2059195 - RNA, 19 nt, Homo sapiens
  misc_RNA (1)...(19): siRNA sense strand
ggaaaugcuugauauaaug

SEQ ID NO: 2059196 - RNA, 19 nt, Homo sapiens
  misc_RNA (1)...(19): siRNA sense strand
gagcaaauuuaccaagaaa

SEQ ID NO: 2059197 - RNA, 19 nt, Homo sapiens
  misc_RNA (1)...(19): siRNA sense strand
gaggaaaugcuugauauaa

SEQ ID NO: 2059198 - RNA, 19 nt, Homo sapiens
  misc_RNA (1)...(19): siRNA sense strand
ccagugguguuguuaauga

SEQ ID NO: 2059199 - RNA, 19 nt, Homo sapiens
  misc_RNA (1)...(19): siRNA sense strand
gcaaauuuaccaagaaaga

SEQ ID NO: 2059200 - RNA, 19 nt, Homo sapiens
  misc_RNA (1)...(19): siRNA sense strand
gauaugauggguaaaugua

SEQ ID NO: 2059201 - RNA, 19 nt, Homo sapiens
  misc_RNA (1)...(19): siRNA sense strand
cuacaucacuaaagaggaa

SEQ ID NO: 2059202 - RNA, 19 nt, Homo sapiens
  misc_RNA (1)...(19): siRNA sense strand
gggagacucuacaacauau

SEQ ID NO: 2059203 - RNA, 19 nt, Homo sapiens
  misc_RNA (1)...(19): siRNA sense strand
guacauauccuguccucaa

SEQ ID NO: 2059204 - RNA, 19 nt, Homo sapiens
  misc_RNA (1)...(19): siRNA sense strand
aaacucaauugggcauuua

SEQ ID NO: 2059205 - RNA, 19 nt, Homo sapiens
  misc_RNA (1)...(19): siRNA sense strand
acagaggauuuaagaauga

SEQ ID NO: 2059206 - RNA, 19 nt, Homo sapiens
  misc_RNA (1)...(19): siRNA sense strand
uauacgauaugauggguaa

SEQ ID NO: 2059207 - RNA, 19 nt, Homo sapiens
  misc_RNA (1)...(19): siRNA sense strand
caauggagcugugaguuuc

SEQ ID NO: 2059208 - RNA, 19 nt, Homo sapiens
  misc_RNA (1)...(19): siRNA sense strand
aagaggaaaugcuugauau

SEQ ID NO: 2059209 - RNA, 19 nt, Homo sapiens
  misc_RNA (1)...(19): siRNA sense strand
cagagcaaauuuaccaaga

SEQ ID NO: 2059210 - RNA, 19 nt, Homo sapiens
  misc_RNA (1)...(19): siRNA sense strand
caagaaagagcuucagauc

SEQ ID NO: 2059211 - RNA, 19 nt, Homo sapiens
  misc_RNA (1)...(19): siRNA sense strand
gaaagagcuucagauccuu

SEQ ID NO: 2059212 - RNA, 19 nt, Homo sapiens
  misc_RNA (1)...(19): siRNA sense strand
agaaagagcuucagauccu

SEQ ID NO: 2059213 - RNA, 19 nt, Homo sapiens
  misc_RNA (1)...(19): siRNA sense strand
gaagcccagagcaaauuua

SEQ ID NO: 2059214 - RNA, 19 nt, Homo sapiens
  misc_RNA (1)...(19): siRNA sense strand
aaagaggaaaugcuugaua

SEQ ID NO: 2059215 - RNA, 19 nt, Homo sapiens
  misc_RNA (1)...(19): siRNA sense strand
uacagaggauuuaagaaug

SEQ ID NO: 2059216 - RNA, 19 nt, Homo sapiens
  misc_RNA (1)...(19): siRNA sense strand
cauauccuguccucaaaga

SEQ ID NO: 2059217 - RNA, 19 nt, Homo sapiens
  misc_RNA (1)...(19): siRNA sense strand
uuucgaggauuucaucaaa

SEQ ID NO: 2059218 - RNA, 19 nt, Homo sapiens
  misc_RNA (1)...(19): siRNA sense strand
agaagaugcucccagacaa

SEQ ID NO: 2059219 - RNA, 19 nt, Homo sapiens
  misc_RNA (1)...(19): siRNA sense strand
gagauuuacucgcaguucu

SEQ ID NO: 2059220 - RNA, 19 nt, Homo sapiens
  misc_RNA (1)...(19): siRNA sense strand
ggaagcccagagcaaauuu

SEQ ID NO: 2059221 - RNA, 19 nt, Homo sapiens
  misc_RNA (1)...(19): siRNA sense strand
agagcaaauuuaccaagaa

SEQ ID NO: 2059222 - RNA, 19 nt, Homo sapiens
  misc_RNA (1)...(19): siRNA sense strand
gcugugaguuucgaggauu

SEQ ID NO: 2059223 - RNA, 19 nt, Homo sapiens
  misc_RNA (1)...(19): siRNA sense strand
uacauauccuguccucaaa

SEQ ID NO: 2059224 - RNA, 19 nt, Homo sapiens
  misc_RNA (1)...(19): siRNA sense strand
cuaaagaggaaaugcuuga

SEQ ID NO: 2059225 - RNA, 19 nt, Homo sapiens
  misc_RNA (1)...(19): siRNA sense strand
gggcauuuaaucuguauga

SEQ ID NO: 2059226 - RNA, 19 nt, Homo sapiens
  misc_RNA (1)...(19): siRNA sense strand
acaauggagcugugaguuu

SEQ ID NO: 2059227 - RNA, 19 nt, Homo sapiens
  misc_RNA (1)...(19): siRNA sense strand
cagggagacucuacaacau

SEQ ID NO: 2059228 - RNA, 19 nt, Homo sapiens
  misc_RNA (1)...(19): siRNA sense strand
ccaugcagcucuuugaaaa

SEQ ID NO: 2059229 - RNA, 19 nt, Homo sapiens
  misc_RNA (1)...(19): siRNA sense strand
cuacaacauaugcacauuu

SEQ ID NO: 2059230 - RNA, 19 nt, Homo sapiens
  misc_RNA (1)...(19): siRNA sense strand
gcauuuaaucuguaugaca

SEQ ID NO: 2059231 - RNA, 19 nt, Homo sapiens
  misc_RNA (1)...(19): siRNA sense strand
agaggaaaugcuugauaua

SEQ ID NO: 2059232 - RNA, 19 nt, Homo sapiens
  misc_RNA (1)...(19): siRNA sense strand
ccacagggagacucuacaa

SEQ ID NO: 2059233 - RNA, 19 nt, Homo sapiens
  misc_RNA (1)...(19): siRNA sense strand
gauuuacucgcaguucuuu

SEQ ID NO: 2059234 - RNA, 19 nt, Homo sapiens
  misc_RNA (1)...(19): siRNA sense strand
uaugauggguaaauguaca

SEQ ID NO: 2059235 - RNA, 19 nt, Homo sapiens
  misc_RNA (1)...(19): siRNA sense strand
ucaauugggcauuuaaucu

SEQ ID NO: 2059236 - RNA, 19 nt, Homo sapiens
  misc_RNA (1)...(19): siRNA sense strand
cagaggauuuaagaaugaa

SEQ ID NO: 2059237 - RNA, 19 nt, Homo sapiens
  misc_RNA (1)...(19): siRNA sense strand
aagaaaccuucaaagagau

SEQ ID NO: 2059238 - RNA, 19 nt, Homo sapiens
  misc_RNA (1)...(19): siRNA sense strand
gaagaugcucccagacaac

SEQ ID NO: 2059239 - RNA, 19 nt, Homo sapiens
  misc_RNA (1)...(19): siRNA sense strand
ccaagaaagagcuucagau

SEQ ID NO: 2059240 - RNA, 19 nt, Homo sapiens
  misc_RNA (1)...(19): siRNA sense strand
caauugggcauuuaaucug

SEQ ID NO: 2059241 - RNA, 19 nt, Homo sapiens
  misc_RNA (1)...(19): siRNA sense strand
gaggauuuaagaaugaaug

SEQ ID NO: 2059242 - RNA, 19 nt, Homo sapiens
  misc_RNA (1)...(19): siRNA sense strand
gugguguuguuaaugaaga

SEQ ID NO: 2059243 - RNA, 19 nt, Homo sapiens
  misc_RNA (1)...(19): siRNA sense strand
gaaaccuucaaagagauuu

SEQ ID NO: 2059244 - RNA, 19 nt, Homo sapiens
  misc_RNA (1)...(19): siRNA sense strand
gcccagagcaaauuuacca

SEQ ID NO: 2059245 - RNA, 19 nt, Homo sapiens
  misc_RNA (1)...(19): siRNA sense strand
acagggagacucuacaaca

SEQ ID NO: 2059246 - RNA, 19 nt, Homo sapiens
  misc_RNA (1)...(19): siRNA sense strand
gcuccaugcagcucuuuga

SEQ ID NO: 2059247 - RNA, 19 nt, Homo sapiens
  misc_RNA (1)...(19): siRNA sense strand
gagcuucagauccuuuaca

SEQ ID NO: 2059248 - RNA, 19 nt, Homo sapiens
  misc_RNA (1)...(19): siRNA sense strand
agggagacucuacaacaua

SEQ ID NO: 2059249 - RNA, 19 nt, Homo sapiens
  misc_RNA (1)...(19): siRNA sense strand
ugauacagaccacaaugga

SEQ ID NO: 2059250 - RNA, 19 nt, Homo sapiens
  misc_RNA (1)...(19): siRNA sense strand
ggaagaugaacuggagaug

SEQ ID NO: 2059251 - RNA, 19 nt, Homo sapiens
  misc_RNA (1)...(19): siRNA sense strand
ucgaggauuucaucaaagg

SEQ ID NO: 2059252 - RNA, 19 nt, Homo sapiens
  misc_RNA (1)...(19): siRNA sense strand
gauggguaaauguacauau

SEQ ID NO: 2059253 - RNA, 19 nt, Homo sapiens
  misc_RNA (1)...(19): siRNA sense strand
aagaagaugcucccagaca

SEQ ID NO: 2059254 - RNA, 19 nt, Homo sapiens
  misc_RNA (1)...(19): siRNA sense strand
aaauaaagaugggguuguu

SEQ ID NO: 2059255 - RNA, 19 nt, Homo sapiens
  misc_RNA (1)...(19): siRNA sense strand
ucuacaacauaugcacauu

SEQ ID NO: 2059256 - RNA, 19 nt, Homo sapiens
  misc_RNA (1)...(19): siRNA sense strand
cagugguguuguuaaugaa

SEQ ID NO: 2059257 - RNA, 19 nt, Homo sapiens
  misc_RNA (1)...(19): siRNA sense strand
gaguuucgaggauuucauc

SEQ ID NO: 2059258 - RNA, 19 nt, Homo sapiens
  misc_RNA (1)...(19): siRNA sense strand
aauugggcauuuaaucugu

SEQ ID NO: 2059259 - RNA, 19 nt, Homo sapiens
  misc_RNA (1)...(19): siRNA sense strand
acgauaugauggguaaaug

SEQ ID NO: 2059260 - RNA, 19 nt, Homo sapiens
  misc_RNA (1)...(19): siRNA sense strand
uggaagcccagagcaaauu

SEQ ID NO: 2059261 - RNA, 19 nt, Homo sapiens
  misc_RNA (1)...(19): siRNA sense strand
ggaaaugcuugauauaaug

SEQ ID NO: 2059262 - RNA, 19 nt, Homo sapiens
  misc_RNA (1)...(19): siRNA sense strand
gagcaaauuuaccaagaaa

SEQ ID NO: 2059263 - RNA, 19 nt, Homo sapiens
  misc_RNA (1)...(19): siRNA sense strand
gaggaaaugcuugauauaa

SEQ ID NO: 2059264 - RNA, 19 nt, Homo sapiens
  misc_RNA (1)...(19): siRNA sense strand
ccagugguguuguuaauga

SEQ ID NO: 2059265 - RNA, 19 nt, Homo sapiens
  misc_RNA (1)...(19): siRNA sense strand
gcaaauuuaccaagaaaga

SEQ ID NO: 2059266 - RNA, 19 nt, Homo sapiens
  misc_RNA (1)...(19): siRNA sense strand
gauaugauggguaaaugua

SEQ ID NO: 2059267 - RNA, 19 nt, Homo sapiens
  misc_RNA (1)...(19): siRNA sense strand
cuacaucacuaaagaggaa

SEQ ID NO: 2059268 - RNA, 19 nt, Homo sapiens
  misc_RNA (1)...(19): siRNA sense strand
gggagacucuacaacauau

SEQ ID NO: 2059269 - RNA, 19 nt, Homo sapiens
  misc_RNA (1)...(19): siRNA sense strand
guacauauccuguccucaa

SEQ ID NO: 2059270 - RNA, 19 nt, Homo sapiens
  misc_RNA (1)...(19): siRNA sense strand
aaacucaauugggcauuua

SEQ ID NO: 2059271 - RNA, 19 nt, Homo sapiens
  misc_RNA (1)...(19): siRNA sense strand
acagaggauuuaagaauga

SEQ ID NO: 2059272 - RNA, 19 nt, Homo sapiens
  misc_RNA (1)...(19): siRNA sense strand
uauacgauaugauggguaa

SEQ ID NO: 2059273 - RNA, 19 nt, Homo sapiens
  misc_RNA (1)...(19): siRNA sense strand
caauggagcugugaguuuc

SEQ ID NO: 2059274 - RNA, 19 nt, Homo sapiens
  misc_RNA (1)...(19): siRNA sense strand
aagaggaaaugcuugauau

SEQ ID NO: 2059275 - RNA, 19 nt, Homo sapiens
  misc_RNA (1)...(19): siRNA sense strand
cagagcaaauuuaccaaga

SEQ ID NO: 2059276 - RNA, 19 nt, Homo sapiens
  misc_RNA (1)...(19): siRNA sense strand
caagaaagagcuucagauc

SEQ ID NO: 2059277 - RNA, 19 nt, Homo sapiens
  misc_RNA (1)...(19): siRNA sense strand
gaaagagcuucagauccuu

SEQ ID NO: 2059278 - RNA, 19 nt, Homo sapiens
  misc_RNA (1)...(19): siRNA sense strand
agaaagagcuucagauccu

SEQ ID NO: 2059279 - RNA, 19 nt, Homo sapiens
  misc_RNA (1)...(19): siRNA sense strand
aaagaggaaaugcuugaua

SEQ ID NO: 2059280 - RNA, 19 nt, Homo sapiens
  misc_RNA (1)...(19): siRNA sense strand
gaagcccagagcaaauuua

SEQ ID NO: 2059281 - RNA, 19 nt, Homo sapiens
  misc_RNA (1)...(19): siRNA sense strand
uacagaggauuuaagaaug

SEQ ID NO: 2059282 - RNA, 19 nt, Homo sapiens
  misc_RNA (1)...(19): siRNA sense strand
cauauccuguccucaaaga

SEQ ID NO: 2059283 - RNA, 19 nt, Homo sapiens
  misc_RNA (1)...(19): siRNA sense strand
uuucgaggauuucaucaaa

SEQ ID NO: 2059284 - RNA, 19 nt, Homo sapiens
  misc_RNA (1)...(19): siRNA sense strand
agaagaugcucccagacaa

SEQ ID NO: 2059285 - RNA, 19 nt, Homo sapiens
  misc_RNA (1)...(19): siRNA sense strand
gagauuuacucgcaguucu

SEQ ID NO: 2059286 - RNA, 19 nt, Homo sapiens
  misc_RNA (1)...(19): siRNA sense strand
ggaagcccagagcaaauuu

SEQ ID NO: 2059287 - RNA, 19 nt, Homo sapiens
  misc_RNA (1)...(19): siRNA sense strand
agagcaaauuuaccaagaa

SEQ ID NO: 2059288 - RNA, 19 nt, Homo sapiens
  misc_RNA (1)...(19): siRNA sense strand
gcugugaguuucgaggauu

SEQ ID NO: 2059289 - RNA, 19 nt, Homo sapiens
  misc_RNA (1)...(19): siRNA sense strand
uacauauccuguccucaaa

SEQ ID NO: 2059290 - RNA, 19 nt, Homo sapiens
  misc_RNA (1)...(19): siRNA sense strand
cuaaagaggaaaugcuuga

SEQ ID NO: 2059291 - RNA, 19 nt, Homo sapiens
  misc_RNA (1)...(19): siRNA sense strand
gggcauuuaaucuguauga

SEQ ID NO: 2059292 - RNA, 19 nt, Homo sapiens
  misc_RNA (1)...(19): siRNA sense strand
acaauggagcugugaguuu

SEQ ID NO: 2059293 - RNA, 19 nt, Homo sapiens
  misc_RNA (1)...(19): siRNA sense strand
cagggagacucuacaacau

SEQ ID NO: 2059294 - RNA, 19 nt, Homo sapiens
  misc_RNA (1)...(19): siRNA sense strand
ccaugcagcucuuugaaaa

SEQ ID NO: 2059295 - RNA, 19 nt, Homo sapiens
  misc_RNA (1)...(19): siRNA sense strand
cuacaacauaugcacauuu

SEQ ID NO: 2059296 - RNA, 19 nt, Homo sapiens
  misc_RNA (1)...(19): siRNA sense strand
gcauuuaaucuguaugaca

SEQ ID NO: 2059297 - RNA, 19 nt, Homo sapiens
  misc_RNA (1)...(19): siRNA sense strand
agaggaaaugcuugauaua

SEQ ID NO: 2059298 - RNA, 19 nt, Homo sapiens
  misc_RNA (1)...(19): siRNA sense strand
ccacagggagacucuacaa

SEQ ID NO: 2059299 - RNA, 19 nt, Homo sapiens
  misc_RNA (1)...(19): siRNA sense strand
gauuuacucgcaguucuuu

SEQ ID NO: 2059300 - RNA, 19 nt, Homo sapiens
  misc_RNA (1)...(19): siRNA sense strand
uaugauggguaaauguaca

SEQ ID NO: 2059301 - RNA, 19 nt, Homo sapiens
  misc_RNA (1)...(19): siRNA sense strand
ucaauugggcauuuaaucu

SEQ ID NO: 2059302 - RNA, 19 nt, Homo sapiens
  misc_RNA (1)...(19): siRNA sense strand
cagaggauuuaagaaugaa

SEQ ID NO: 2059303 - RNA, 19 nt, Homo sapiens
  misc_RNA (1)...(19): siRNA sense strand
aagaaaccuucaaagagau

SEQ ID NO: 2059304 - RNA, 19 nt, Homo sapiens
  misc_RNA (1)...(19): siRNA sense strand
gaagaugcucccagacaac

SEQ ID NO: 2059305 - RNA, 19 nt, Homo sapiens
  misc_RNA (1)...(19): siRNA sense strand
ccaagaaagagcuucagau

SEQ ID NO: 2059306 - RNA, 19 nt, Homo sapiens
  misc_RNA (1)...(19): siRNA sense strand
gaggauuuaagaaugaaug

SEQ ID NO: 2059307 - RNA, 19 nt, Homo sapiens
  misc_RNA (1)...(19): siRNA sense strand
caauugggcauuuaaucug

SEQ ID NO: 2059308 - RNA, 19 nt, Homo sapiens
  misc_RNA (1)...(19): siRNA sense strand
gugguguuguuaaugaaga

SEQ ID NO: 2059309 - RNA, 19 nt, Homo sapiens
  misc_RNA (1)...(19): siRNA sense strand
gaaaccuucaaagagauuu

SEQ ID NO: 2059310 - RNA, 19 nt, Homo sapiens
  misc_RNA (1)...(19): siRNA sense strand
gcccagagcaaauuuacca

SEQ ID NO: 2059311 - RNA, 19 nt, Homo sapiens
  misc_RNA (1)...(19): siRNA sense strand
acagggagacucuacaaca

SEQ ID NO: 2059312 - RNA, 19 nt, Homo sapiens
  misc_RNA (1)...(19): siRNA sense strand
gcuccaugcagcucuuuga

SEQ ID NO: 2059313 - RNA, 19 nt, Homo sapiens
  misc_RNA (1)...(19): siRNA sense strand
gagcuucagauccuuuaca

SEQ ID NO: 2059314 - RNA, 19 nt, Homo sapiens
  misc_RNA (1)...(19): siRNA sense strand
agggagacucuacaacaua

SEQ ID NO: 2059315 - RNA, 19 nt, Homo sapiens
  misc_RNA (1)...(19): siRNA sense strand
ugauacagaccacaaugga

SEQ ID NO: 2059316 - RNA, 19 nt, Homo sapiens
  misc_RNA (1)...(19): siRNA sense strand
ucgaggauuucaucaaagg

SEQ ID NO: 2059317 - RNA, 19 nt, Homo sapiens
  misc_RNA (1)...(19): siRNA sense strand
gauggguaaauguacauau

SEQ ID NO: 2059318 - RNA, 19 nt, Homo sapiens
  misc_RNA (1)...(19): siRNA sense strand
aagaagaugcucccagaca

SEQ ID NO: 2059319 - RNA, 19 nt, Homo sapiens
  misc_RNA (1)...(19): siRNA sense strand
aaauaaagaugggguuguu

SEQ ID NO: 2059320 - RNA, 19 nt, Homo sapiens
  misc_RNA (1)...(19): siRNA sense strand
ucuacaacauaugcacauu

SEQ ID NO: 2059321 - RNA, 19 nt, Homo sapiens
  misc_RNA (1)...(19): siRNA sense strand
cagugguguuguuaaugaa

SEQ ID NO: 2059322 - RNA, 19 nt, Homo sapiens
  misc_RNA (1)...(19): siRNA sense strand
gaguuucgaggauuucauc

SEQ ID NO: 2059323 - RNA, 19 nt, Homo sapiens
  misc_RNA (1)...(19): siRNA sense strand
aauugggcauuuaaucugu

SEQ ID NO: 2059324 - RNA, 19 nt, Homo sapiens
  misc_RNA (1)...(19): siRNA sense strand
uggaagcccagagcaaauu

SEQ ID NO: 2059325 - RNA, 19 nt, Homo sapiens
  misc_RNA (1)...(19): siRNA sense strand
acgauaugauggguaaaug

SEQ ID NO: 2059326 - RNA, 19 nt, Homo sapiens
  misc_RNA (1)...(19): siRNA sense strand
ggaaaugcuugauauaaug

SEQ ID NO: 2059327 - RNA, 19 nt, Homo sapiens
  misc_RNA (1)...(19): siRNA sense strand
gagcaaauuuaccaagaaa

SEQ ID NO: 2059328 - RNA, 19 nt, Homo sapiens
  misc_RNA (1)...(19): siRNA sense strand
gaggaaaugcuugauauaa

SEQ ID NO: 2059329 - RNA, 19 nt, Homo sapiens
  misc_RNA (1)...(19): siRNA sense strand
ccagugguguuguuaauga

SEQ ID NO: 2059330 - RNA, 19 nt, Homo sapiens
  misc_RNA (1)...(19): siRNA sense strand
gcaaauuuaccaagaaaga

SEQ ID NO: 2059331 - RNA, 19 nt, Homo sapiens
  misc_RNA (1)...(19): siRNA sense strand
gauaugauggguaaaugua

SEQ ID NO: 2059332 - RNA, 19 nt, Homo sapiens
  misc_RNA (1)...(19): siRNA sense strand
cuacaucacuaaagaggaa

SEQ ID NO: 2059333 - RNA, 19 nt, Homo sapiens
  misc_RNA (1)...(19): siRNA sense strand
gggagacucuacaacauau

SEQ ID NO: 2059334 - RNA, 19 nt, Homo sapiens
  misc_RNA (1)...(19): siRNA sense strand
guacauauccuguccucaa

SEQ ID NO: 2059335 - RNA, 19 nt, Homo sapiens
  misc_RNA (1)...(19): siRNA sense strand
aaacucaauugggcauuua

SEQ ID NO: 2059336 - RNA, 19 nt, Homo sapiens
  misc_RNA (1)...(19): siRNA sense strand
acagaggauuuaagaauga

SEQ ID NO: 2059337 - RNA, 19 nt, Homo sapiens
  misc_RNA (1)...(19): siRNA sense strand
uauacgauaugauggguaa

SEQ ID NO: 2059338 - RNA, 19 nt, Homo sapiens
  misc_RNA (1)...(19): siRNA sense strand
caauggagcugugaguuuc

SEQ ID NO: 2059339 - RNA, 19 nt, Homo sapiens
  misc_RNA (1)...(19): siRNA sense strand
aagaggaaaugcuugauau

SEQ ID NO: 2059340 - RNA, 19 nt, Homo sapiens
  misc_RNA (1)...(19): siRNA sense strand
cagagcaaauuuaccaaga

SEQ ID NO: 2059341 - RNA, 19 nt, Homo sapiens
  misc_RNA (1)...(19): siRNA sense strand
caagaaagagcuucagauc

SEQ ID NO: 2059342 - RNA, 19 nt, Homo sapiens
  misc_RNA (1)...(19): siRNA sense strand
gaaagagcuucagauccuu

SEQ ID NO: 2059343 - RNA, 19 nt, Homo sapiens
  misc_RNA (1)...(19): siRNA sense strand
agaaagagcuucagauccu

SEQ ID NO: 2059344 - RNA, 19 nt, Homo sapiens
  misc_RNA (1)...(19): siRNA sense strand
gaagcccagagcaaauuua

SEQ ID NO: 2059345 - RNA, 19 nt, Homo sapiens
  misc_RNA (1)...(19): siRNA sense strand
aaagaggaaaugcuugaua

SEQ ID NO: 2059346 - RNA, 19 nt, Homo sapiens
  misc_RNA (1)...(19): siRNA sense strand
uacagaggauuuaagaaug

SEQ ID NO: 2059347 - RNA, 19 nt, Homo sapiens
  misc_RNA (1)...(19): siRNA sense strand
cauauccuguccucaaaga

SEQ ID NO: 2059348 - RNA, 19 nt, Homo sapiens
  misc_RNA (1)...(19): siRNA sense strand
uuucgaggauuucaucaaa

SEQ ID NO: 2059349 - RNA, 19 nt, Homo sapiens
  misc_RNA (1)...(19): siRNA sense strand
agaagaugcucccagacaa

SEQ ID NO: 2059350 - RNA, 19 nt, Homo sapiens
  misc_RNA (1)...(19): siRNA sense strand
gagauuuacucgcaguucu

SEQ ID NO: 2059351 - RNA, 19 nt, Homo sapiens
  misc_RNA (1)...(19): siRNA sense strand
ggaagcccagagcaaauuu

SEQ ID NO: 2059352 - RNA, 19 nt, Homo sapiens
  misc_RNA (1)...(19): siRNA sense strand
agagcaaauuuaccaagaa

SEQ ID NO: 2059353 - RNA, 19 nt, Homo sapiens
  misc_RNA (1)...(19): siRNA sense strand
gcugugaguuucgaggauu

SEQ ID NO: 2059354 - RNA, 19 nt, Homo sapiens
  misc_RNA (1)...(19): siRNA sense strand
uacauauccuguccucaaa

SEQ ID NO: 2059355 - RNA, 19 nt, Homo sapiens
  misc_RNA (1)...(19): siRNA sense strand
cuaaagaggaaaugcuuga

SEQ ID NO: 2059356 - RNA, 19 nt, Homo sapiens
  misc_RNA (1)...(19): siRNA sense strand
gggcauuuaaucuguauga

SEQ ID NO: 2059357 - RNA, 19 nt, Homo sapiens
  misc_RNA (1)...(19): siRNA sense strand
acaauggagcugugaguuu

SEQ ID NO: 2059358 - RNA, 19 nt, Homo sapiens
  misc_RNA (1)...(19): siRNA sense strand
cagggagacucuacaacau

SEQ ID NO: 2059359 - RNA, 19 nt, Homo sapiens
  misc_RNA (1)...(19): siRNA sense strand
ccaugcagcucuuugaaaa

SEQ ID NO: 2059360 - RNA, 19 nt, Homo sapiens
  misc_RNA (1)...(19): siRNA sense strand
cuacaacauaugcacauuu

SEQ ID NO: 2059361 - RNA, 19 nt, Homo sapiens
  misc_RNA (1)...(19): siRNA sense strand
gcauuuaaucuguaugaca

SEQ ID NO: 2059362 - RNA, 19 nt, Homo sapiens
  misc_RNA (1)...(19): siRNA sense strand
agaggaaaugcuugauaua

SEQ ID NO: 2059363 - RNA, 19 nt, Homo sapiens
  misc_RNA (1)...(19): siRNA sense strand
ccacagggagacucuacaa

SEQ ID NO: 2059364 - RNA, 19 nt, Homo sapiens
  misc_RNA (1)...(19): siRNA sense strand
gauuuacucgcaguucuuu

SEQ ID NO: 2059365 - RNA, 19 nt, Homo sapiens
  misc_RNA (1)...(19): siRNA sense strand
uaugauggguaaauguaca

SEQ ID NO: 2059366 - RNA, 19 nt, Homo sapiens
  misc_RNA (1)...(19): siRNA sense strand
ucaauugggcauuuaaucu

SEQ ID NO: 2059367 - RNA, 19 nt, Homo sapiens
  misc_RNA (1)...(19): siRNA sense strand
cagaggauuuaagaaugaa

SEQ ID NO: 2059368 - RNA, 19 nt, Homo sapiens
  misc_RNA (1)...(19): siRNA sense strand
aagaaaccuucaaagagau

SEQ ID NO: 2059369 - RNA, 19 nt, Homo sapiens
  misc_RNA (1)...(19): siRNA sense strand
gaagaugcucccagacaac

SEQ ID NO: 2059370 - RNA, 19 nt, Homo sapiens
  misc_RNA (1)...(19): siRNA sense strand
ccaagaaagagcuucagau

SEQ ID NO: 2059371 - RNA, 19 nt, Homo sapiens
  misc_RNA (1)...(19): siRNA sense strand
caauugggcauuuaaucug

SEQ ID NO: 2059372 - RNA, 19 nt, Homo sapiens
  misc_RNA (1)...(19): siRNA sense strand
gaggauuuaagaaugaaug

SEQ ID NO: 2059373 - RNA, 19 nt, Homo sapiens
  misc_RNA (1)...(19): siRNA sense strand
gugguguuguuaaugaaga

SEQ ID NO: 2059374 - RNA, 19 nt, Homo sapiens
  misc_RNA (1)...(19): siRNA sense strand
gaaaccuucaaagagauuu

SEQ ID NO: 2059375 - RNA, 19 nt, Homo sapiens
  misc_RNA (1)...(19): siRNA sense strand
gcccagagcaaauuuacca

SEQ ID NO: 2059376 - RNA, 19 nt, Homo sapiens
  misc_RNA (1)...(19): siRNA sense strand
acagggagacucuacaaca

SEQ ID NO: 2059377 - RNA, 19 nt, Homo sapiens
  misc_RNA (1)...(19): siRNA sense strand
gcuccaugcagcucuuuga

SEQ ID NO: 2059378 - RNA, 19 nt, Homo sapiens
  misc_RNA (1)...(19): siRNA sense strand
gagcuucagauccuuuaca

SEQ ID NO: 2059379 - RNA, 19 nt, Homo sapiens
  misc_RNA (1)...(19): siRNA sense strand
agggagacucuacaacaua

SEQ ID NO: 2059380 - RNA, 19 nt, Homo sapiens
  misc_RNA (1)...(19): siRNA sense strand
ugauacagaccacaaugga

SEQ ID NO: 2059381 - RNA, 19 nt, Homo sapiens
  misc_RNA (1)...(19): siRNA sense strand
ggaagaugaacuggagaug

SEQ ID NO: 2059382 - RNA, 19 nt, Homo sapiens
  misc_RNA (1)...(19): siRNA sense strand
ucgaggauuucaucaaagg

SEQ ID NO: 2059383 - RNA, 19 nt, Homo sapiens
  misc_RNA (1)...(19): siRNA sense strand
gauggguaaauguacauau

SEQ ID NO: 2059384 - RNA, 19 nt, Homo sapiens
  misc_RNA (1)...(19): siRNA sense strand
aagaagaugcucccagaca

SEQ ID NO: 2059385 - RNA, 19 nt, Homo sapiens
  misc_RNA (1)...(19): siRNA sense strand
aaauaaagaugggguuguu

SEQ ID NO: 2059386 - RNA, 19 nt, Homo sapiens
  misc_RNA (1)...(19): siRNA sense strand
ucuacaacauaugcacauu

SEQ ID NO: 2059387 - RNA, 19 nt, Homo sapiens
  misc_RNA (1)...(19): siRNA sense strand
cagugguguuguuaaugaa

SEQ ID NO: 2059388 - RNA, 19 nt, Homo sapiens
  misc_RNA (1)...(19): siRNA sense strand
gaguuucgaggauuucauc

SEQ ID NO: 2059389 - RNA, 19 nt, Homo sapiens
  misc_RNA (1)...(19): siRNA sense strand
aauugggcauuuaaucugu

SEQ ID NO: 2059390 - RNA, 19 nt, Homo sapiens
  misc_RNA (1)...(19): siRNA sense strand
acgauaugauggguaaaug

SEQ ID NO: 2059391 - RNA, 19 nt, Homo sapiens
  misc_RNA (1)...(19): siRNA sense strand
uggaagcccagagcaaauu

SEQ ID NO: 2059392 - RNA, 19 nt, Homo sapiens
  misc_RNA (1)...(19): siRNA sense strand
ggaccgggauuaucacuuu

SEQ ID NO: 2059393 - RNA, 19 nt, Homo sapiens
  misc_RNA (1)...(19): siRNA sense strand
gagaagauccuacaagcaa

SEQ ID NO: 2059394 - RNA, 19 nt, Homo sapiens
  misc_RNA (1)...(19): siRNA sense strand
gaggaaggcugcugcuguu

SEQ ID NO: 2059395 - RNA, 19 nt, Homo sapiens
  misc_RNA (1)...(19): siRNA sense strand
ggaugcagcugagugauga

SEQ ID NO: 2059396 - RNA, 19 nt, Homo sapiens
  misc_RNA (1)...(19): siRNA sense strand
gcaaggcuuucuacagugu

SEQ ID NO: 2059397 - RNA, 19 nt, Homo sapiens
  misc_RNA (1)...(19): siRNA sense strand
ggaggcagcugagaaaugc

SEQ ID NO: 2059398 - RNA, 19 nt, Homo sapiens
  misc_RNA (1)...(19): siRNA sense strand
gcugagaaaugcugugucu

SEQ ID NO: 2059399 - RNA, 19 nt, Homo sapiens
  misc_RNA (1)...(19): siRNA sense strand
gcagcugagugaugaggaa

SEQ ID NO: 2059400 - RNA, 19 nt, Homo sapiens
  misc_RNA (1)...(19): siRNA sense strand
aaauuaugcuccuaagugu

SEQ ID NO: 2059401 - RNA, 19 nt, Homo sapiens
  misc_RNA (1)...(19): siRNA sense strand
gaagauccuacaagcaaug

SEQ ID NO: 2059402 - RNA, 19 nt, Homo sapiens
  misc_RNA (1)...(19): siRNA sense strand
ggacaucgugagggugaua

SEQ ID NO: 2059403 - RNA, 19 nt, Homo sapiens
  misc_RNA (1)...(19): siRNA sense strand
uugcaaggcuuucuacagu

SEQ ID NO: 2059404 - RNA, 19 nt, Homo sapiens
  misc_RNA (1)...(19): siRNA sense strand
caauggcucuguguacugu

SEQ ID NO: 2059405 - RNA, 19 nt, Homo sapiens
  misc_RNA (1)...(19): siRNA sense strand
ugagaaaugcugugucugu

SEQ ID NO: 2059406 - RNA, 19 nt, Homo sapiens
  misc_RNA (1)...(19): siRNA sense strand
ggaaggcugcugcuguuuc

SEQ ID NO: 2059407 - RNA, 19 nt, Homo sapiens
  misc_RNA (1)...(19): siRNA sense strand
guacugugaggaagauuau

SEQ ID NO: 2059408 - RNA, 19 nt, Homo sapiens
  misc_RNA (1)...(19): siRNA sense strand
ugucuguggucacuugauu

SEQ ID NO: 2059409 - RNA, 19 nt, Homo sapiens
  misc_RNA (1)...(19): siRNA sense strand
gaaggcugcugcuguuucc

SEQ ID NO: 2059410 - RNA, 19 nt, Homo sapiens
  misc_RNA (1)...(19): siRNA sense strand
ccaaccaaguauacugugu

SEQ ID NO: 2059411 - RNA, 19 nt, Homo sapiens
  misc_RNA (1)...(19): siRNA sense strand
uauacugugucaccgacua

SEQ ID NO: 2059412 - RNA, 19 nt, Homo sapiens
  misc_RNA (1)...(19): siRNA sense strand
ggagaagauccuacaagca

SEQ ID NO: 2059413 - RNA, 19 nt, Homo sapiens
  misc_RNA (1)...(19): siRNA sense strand
ccauggaccgggauuauca

SEQ ID NO: 2059414 - RNA, 19 nt, Homo sapiens
  misc_RNA (1)...(19): siRNA sense strand
gggcgaacuuugcguugca

SEQ ID NO: 2059415 - RNA, 19 nt, Homo sapiens
  misc_RNA (1)...(19): siRNA sense strand
gaccgggauuaucacuuug

SEQ ID NO: 2059416 - RNA, 19 nt, Homo sapiens
  misc_RNA (1)...(19): siRNA sense strand
uguuuccgaugcauuguuu

SEQ ID NO: 2059417 - RNA, 19 nt, Homo sapiens
  misc_RNA (1)...(19): siRNA sense strand
agaagauccuacaagcaau

SEQ ID NO: 2059418 - RNA, 19 nt, Homo sapiens
  misc_RNA (1)...(19): siRNA sense strand
aaccaaguauacuguguca

SEQ ID NO: 2059419 - RNA, 19 nt, Homo sapiens
  misc_RNA (1)...(19): siRNA sense strand
cacuugcucugccaugguu

SEQ ID NO: 2059420 - RNA, 19 nt, Homo sapiens
  misc_RNA (1)...(19): siRNA sense strand
ugucaccgacuaccacaaa

SEQ ID NO: 2059421 - RNA, 19 nt, Homo sapiens
  misc_RNA (1)...(19): siRNA sense strand
uguacugugaggaagauua

SEQ ID NO: 2059422 - RNA, 19 nt, Homo sapiens
  misc_RNA (1)...(19): siRNA sense strand
ugagggugauauccaugga

SEQ ID NO: 2059423 - RNA, 19 nt, Homo sapiens
  misc_RNA (1)...(19): siRNA sense strand
aaaauuaugcuccuaagug

SEQ ID NO: 2059424 - RNA, 19 nt, Homo sapiens
  misc_RNA (1)...(19): siRNA sense strand
gucaauggcucuguguacu

SEQ ID NO: 2059425 - RNA, 19 nt, Homo sapiens
  misc_RNA (1)...(19): siRNA sense strand
gcggcucaaugcccgacaa

SEQ ID NO: 2059426 - RNA, 19 nt, Homo sapiens
  misc_RNA (1)...(19): siRNA sense strand
gcacuugcucugccauggu

SEQ ID NO: 2059427 - RNA, 19 nt, Homo sapiens
  misc_RNA (1)...(19): siRNA sense strand
ggaccgggauuaucacuuu

SEQ ID NO: 2059428 - RNA, 19 nt, Homo sapiens
  misc_RNA (1)...(19): siRNA sense strand
gaggaaggcugcugcuguu

SEQ ID NO: 2059429 - RNA, 19 nt, Homo sapiens
  misc_RNA (1)...(19): siRNA sense strand
ggaugcagcugagugauga

SEQ ID NO: 2059430 - RNA, 19 nt, Homo sapiens
  misc_RNA (1)...(19): siRNA sense strand
gcagcugagugaugaggaa

SEQ ID NO: 2059431 - RNA, 19 nt, Homo sapiens
  misc_RNA (1)...(19): siRNA sense strand
aaauuaugcuccuaagugu

SEQ ID NO: 2059432 - RNA, 19 nt, Homo sapiens
  misc_RNA (1)...(19): siRNA sense strand
ggacaucgugagggugaua

SEQ ID NO: 2059433 - RNA, 19 nt, Homo sapiens
  misc_RNA (1)...(19): siRNA sense strand
ggaaggcugcugcuguuuc

SEQ ID NO: 2059434 - RNA, 19 nt, Homo sapiens
  misc_RNA (1)...(19): siRNA sense strand
gaaggcugcugcuguuucc

SEQ ID NO: 2059435 - RNA, 19 nt, Homo sapiens
  misc_RNA (1)...(19): siRNA sense strand
ccaaccaaguauacugugu

SEQ ID NO: 2059436 - RNA, 19 nt, Homo sapiens
  misc_RNA (1)...(19): siRNA sense strand
uauacugugucaccgacua

SEQ ID NO: 2059437 - RNA, 19 nt, Homo sapiens
  misc_RNA (1)...(19): siRNA sense strand
ccauggaccgggauuauca

SEQ ID NO: 2059438 - RNA, 19 nt, Homo sapiens
  misc_RNA (1)...(19): siRNA sense strand
gaccgggauuaucacuuug

SEQ ID NO: 2059439 - RNA, 19 nt, Homo sapiens
  misc_RNA (1)...(19): siRNA sense strand
uguuuccgaugcauuguuu

SEQ ID NO: 2059440 - RNA, 19 nt, Homo sapiens
  misc_RNA (1)...(19): siRNA sense strand
aaccaaguauacuguguca

SEQ ID NO: 2059441 - RNA, 19 nt, Homo sapiens
  misc_RNA (1)...(19): siRNA sense strand
cacuugcucugccaugguu

SEQ ID NO: 2059442 - RNA, 19 nt, Homo sapiens
  misc_RNA (1)...(19): siRNA sense strand
ugucaccgacuaccacaaa

SEQ ID NO: 2059443 - RNA, 19 nt, Homo sapiens
  misc_RNA (1)...(19): siRNA sense strand
ugagggugauauccaugga

SEQ ID NO: 2059444 - RNA, 19 nt, Homo sapiens
  misc_RNA (1)...(19): siRNA sense strand
aaaauuaugcuccuaagug

SEQ ID NO: 2059445 - RNA, 19 nt, Homo sapiens
  misc_RNA (1)...(19): siRNA sense strand
gcacuugcucugccauggu

SEQ ID NO: 2059446 - RNA, 19 nt, Homo sapiens
  misc_RNA (1)...(19): siRNA sense strand
gcggcucaaugcccgacaa

SEQ ID NO: 2059447 - RNA, 19 nt, Homo sapiens
  misc_RNA (1)...(19): siRNA sense strand
ggaccgggauuaucacuuu

SEQ ID NO: 2059448 - RNA, 19 nt, Homo sapiens
  misc_RNA (1)...(19): siRNA sense strand
gagaagauccuacaagcaa

SEQ ID NO: 2059449 - RNA, 19 nt, Homo sapiens
  misc_RNA (1)...(19): siRNA sense strand
gaggaaggcugcugcuguu

SEQ ID NO: 2059450 - RNA, 19 nt, Homo sapiens
  misc_RNA (1)...(19): siRNA sense strand
ggaugcagcugagugauga

SEQ ID NO: 2059451 - RNA, 19 nt, Homo sapiens
  misc_RNA (1)...(19): siRNA sense strand
gcaaggcuuucuacagugu

SEQ ID NO: 2059452 - RNA, 19 nt, Homo sapiens
  misc_RNA (1)...(19): siRNA sense strand
ggaggcagcugagaaaugc

SEQ ID NO: 2059453 - RNA, 19 nt, Homo sapiens
  misc_RNA (1)...(19): siRNA sense strand
gcugagaaaugcugugucu

SEQ ID NO: 2059454 - RNA, 19 nt, Homo sapiens
  misc_RNA (1)...(19): siRNA sense strand
gcagcugagugaugaggaa

SEQ ID NO: 2059455 - RNA, 19 nt, Homo sapiens
  misc_RNA (1)...(19): siRNA sense strand
aaauuaugcuccuaagugu

SEQ ID NO: 2059456 - RNA, 19 nt, Homo sapiens
  misc_RNA (1)...(19): siRNA sense strand
gaagauccuacaagcaaug

SEQ ID NO: 2059457 - RNA, 19 nt, Homo sapiens
  misc_RNA (1)...(19): siRNA sense strand
ggacaucgugagggugaua

SEQ ID NO: 2059458 - RNA, 19 nt, Homo sapiens
  misc_RNA (1)...(19): siRNA sense strand
uugcaaggcuuucuacagu

SEQ ID NO: 2059459 - RNA, 19 nt, Homo sapiens
  misc_RNA (1)...(19): siRNA sense strand
caauggcucuguguacugu

SEQ ID NO: 2059460 - RNA, 19 nt, Homo sapiens
  misc_RNA (1)...(19): siRNA sense strand
ugagaaaugcugugucugu

SEQ ID NO: 2059461 - RNA, 19 nt, Homo sapiens
  misc_RNA (1)...(19): siRNA sense strand
ggaaggcugcugcuguuuc

SEQ ID NO: 2059462 - RNA, 19 nt, Homo sapiens
  misc_RNA (1)...(19): siRNA sense strand
guacugugaggaagauuau

SEQ ID NO: 2059463 - RNA, 19 nt, Homo sapiens
  misc_RNA (1)...(19): siRNA sense strand
ugucuguggucacuugauu

SEQ ID NO: 2059464 - RNA, 19 nt, Homo sapiens
  misc_RNA (1)...(19): siRNA sense strand
gaaggcugcugcuguuucc

SEQ ID NO: 2059465 - RNA, 19 nt, Homo sapiens
  misc_RNA (1)...(19): siRNA sense strand
ccaaccaaguauacugugu

SEQ ID NO: 2059466 - RNA, 19 nt, Homo sapiens
  misc_RNA (1)...(19): siRNA sense strand
uauacugugucaccgacua

SEQ ID NO: 2059467 - RNA, 19 nt, Homo sapiens
  misc_RNA (1)...(19): siRNA sense strand
ggagaagauccuacaagca

SEQ ID NO: 2059468 - RNA, 19 nt, Homo sapiens
  misc_RNA (1)...(19): siRNA sense strand
ccauggaccgggauuauca

SEQ ID NO: 2059469 - RNA, 19 nt, Homo sapiens
  misc_RNA (1)...(19): siRNA sense strand
gggcgaacuuugcguugca

SEQ ID NO: 2059470 - RNA, 19 nt, Homo sapiens
  misc_RNA (1)...(19): siRNA sense strand
gaccgggauuaucacuuug

SEQ ID NO: 2059471 - RNA, 19 nt, Homo sapiens
  misc_RNA (1)...(19): siRNA sense strand
uguuuccgaugcauuguuu

SEQ ID NO: 2059472 - RNA, 19 nt, Homo sapiens
  misc_RNA (1)...(19): siRNA sense strand
agaagauccuacaagcaau

SEQ ID NO: 2059473 - RNA, 19 nt, Homo sapiens
  misc_RNA (1)...(19): siRNA sense strand
aaccaaguauacuguguca

SEQ ID NO: 2059474 - RNA, 19 nt, Homo sapiens
  misc_RNA (1)...(19): siRNA sense strand
cacuugcucugccaugguu

SEQ ID NO: 2059475 - RNA, 19 nt, Homo sapiens
  misc_RNA (1)...(19): siRNA sense strand
ugucaccgacuaccacaaa

SEQ ID NO: 2059476 - RNA, 19 nt, Homo sapiens
  misc_RNA (1)...(19): siRNA sense strand
uguacugugaggaagauua

SEQ ID NO: 2059477 - RNA, 19 nt, Homo sapiens
  misc_RNA (1)...(19): siRNA sense strand
ugagggugauauccaugga

SEQ ID NO: 2059478 - RNA, 19 nt, Homo sapiens
  misc_RNA (1)...(19): siRNA sense strand
aaaauuaugcuccuaagug

SEQ ID NO: 2059479 - RNA, 19 nt, Homo sapiens
  misc_RNA (1)...(19): siRNA sense strand
gucaauggcucuguguacu

SEQ ID NO: 2059480 - RNA, 19 nt, Homo sapiens
  misc_RNA (1)...(19): siRNA sense strand
gcggcucaaugcccgacaa

SEQ ID NO: 2059481 - RNA, 19 nt, Homo sapiens
  misc_RNA (1)...(19): siRNA sense strand
gcacuugcucugccauggu

SEQ ID NO: 2059482 - RNA, 19 nt, Homo sapiens
  misc_RNA (1)...(19): siRNA sense strand
ggaccgggauuaucacuuu

SEQ ID NO: 2059483 - RNA, 19 nt, Homo sapiens
  misc_RNA (1)...(19): siRNA sense strand
gaggaaggcugcugcuguu

SEQ ID NO: 2059484 - RNA, 19 nt, Homo sapiens
  misc_RNA (1)...(19): siRNA sense strand
ggaugcagcugagugauga

SEQ ID NO: 2059485 - RNA, 19 nt, Homo sapiens
  misc_RNA (1)...(19): siRNA sense strand
gcagcugagugaugaggaa

SEQ ID NO: 2059486 - RNA, 19 nt, Homo sapiens
  misc_RNA (1)...(19): siRNA sense strand
aaauuaugcuccuaagugu

SEQ ID NO: 2059487 - RNA, 19 nt, Homo sapiens
  misc_RNA (1)...(19): siRNA sense strand
ggacaucgugagggugaua

SEQ ID NO: 2059488 - RNA, 19 nt, Homo sapiens
  misc_RNA (1)...(19): siRNA sense strand
ggaaggcugcugcuguuuc

SEQ ID NO: 2059489 - RNA, 19 nt, Homo sapiens
  misc_RNA (1)...(19): siRNA sense strand
gaaggcugcugcuguuucc

SEQ ID NO: 2059490 - RNA, 19 nt, Homo sapiens
  misc_RNA (1)...(19): siRNA sense strand
ccaaccaaguauacugugu

SEQ ID NO: 2059491 - RNA, 19 nt, Homo sapiens
  misc_RNA (1)...(19): siRNA sense strand
uauacugugucaccgacua

SEQ ID NO: 2059492 - RNA, 19 nt, Homo sapiens
  misc_RNA (1)...(19): siRNA sense strand
ccauggaccgggauuauca

SEQ ID NO: 2059493 - RNA, 19 nt, Homo sapiens
  misc_RNA (1)...(19): siRNA sense strand
gaccgggauuaucacuuug

SEQ ID NO: 2059494 - RNA, 19 nt, Homo sapiens
  misc_RNA (1)...(19): siRNA sense strand
uguuuccgaugcauuguuu

SEQ ID NO: 2059495 - RNA, 19 nt, Homo sapiens
  misc_RNA (1)...(19): siRNA sense strand
aaccaaguauacuguguca

SEQ ID NO: 2059496 - RNA, 19 nt, Homo sapiens
  misc_RNA (1)...(19): siRNA sense strand
cacuugcucugccaugguu

SEQ ID NO: 2059497 - RNA, 19 nt, Homo sapiens
  misc_RNA (1)...(19): siRNA sense strand
ugucaccgacuaccacaaa

SEQ ID NO: 2059498 - RNA, 19 nt, Homo sapiens
  misc_RNA (1)...(19): siRNA sense strand
ugagggugauauccaugga

SEQ ID NO: 2059499 - RNA, 19 nt, Homo sapiens
  misc_RNA (1)...(19): siRNA sense strand
aaaauuaugcuccuaagug

SEQ ID NO: 2059500 - RNA, 19 nt, Homo sapiens
  misc_RNA (1)...(19): siRNA sense strand
gcacuugcucugccauggu

SEQ ID NO: 2059501 - RNA, 19 nt, Homo sapiens
  misc_RNA (1)...(19): siRNA sense strand
gcggcucaaugcccgacaa

SEQ ID NO: 2059502 - RNA, 19 nt, Homo sapiens
  misc_RNA (1)...(19): siRNA sense strand
gaagagaucucauuauuuc

SEQ ID NO: 2059503 - RNA, 19 nt, Homo sapiens
  misc_RNA (1)...(19): siRNA sense strand
gcacuuccaucauuuauuu

SEQ ID NO: 2059504 - RNA, 19 nt, Homo sapiens
  misc_RNA (1)...(19): siRNA sense strand
caagugagcucauuucuga

SEQ ID NO: 2059505 - RNA, 19 nt, Homo sapiens
  misc_RNA (1)...(19): siRNA sense strand
uggaacagcuggcuuauua

SEQ ID NO: 2059506 - RNA, 19 nt, Homo sapiens
  misc_RNA (1)...(19): siRNA sense strand
gggcaaguauccuguuaua

SEQ ID NO: 2059507 - RNA, 19 nt, Homo sapiens
  misc_RNA (1)...(19): siRNA sense strand
gcaaguauccuguuauaga

SEQ ID NO: 2059508 - RNA, 19 nt, Homo sapiens
  misc_RNA (1)...(19): siRNA sense strand
gagaaaugauccuuuguug

SEQ ID NO: 2059509 - RNA, 19 nt, Homo sapiens
  misc_RNA (1)...(19): siRNA sense strand
ccgaagagaucucauuauu

SEQ ID NO: 2059510 - RNA, 19 nt, Homo sapiens
  misc_RNA (1)...(19): siRNA sense strand
gaauggaccgucuucaaua

SEQ ID NO: 2059511 - RNA, 19 nt, Homo sapiens
  misc_RNA (1)...(19): siRNA sense strand
ccucugggcucuccuauuu

SEQ ID NO: 2059512 - RNA, 19 nt, Homo sapiens
  misc_RNA (1)...(19): siRNA sense strand
aagaagaguuugcucauaa

SEQ ID NO: 2059513 - RNA, 19 nt, Homo sapiens
  misc_RNA (1)...(19): siRNA sense strand
uuucugagcuguuuaauga

SEQ ID NO: 2059514 - RNA, 19 nt, Homo sapiens
  misc_RNA (1)...(19): siRNA sense strand
gaauggaacagcuggcuua

SEQ ID NO: 2059515 - RNA, 19 nt, Homo sapiens
  misc_RNA (1)...(19): siRNA sense strand
ccuccaagcucugugauua

SEQ ID NO: 2059516 - RNA, 19 nt, Homo sapiens
  misc_RNA (1)...(19): siRNA sense strand
ugaacugacugguggcuua

SEQ ID NO: 2059517 - RNA, 19 nt, Homo sapiens
  misc_RNA (1)...(19): siRNA sense strand
gaagaggucagcuacuauu

SEQ ID NO: 2059518 - RNA, 19 nt, Homo sapiens
  misc_RNA (1)...(19): siRNA sense strand
caacaugggccuuaauuca

SEQ ID NO: 2059519 - RNA, 19 nt, Homo sapiens
  misc_RNA (1)...(19): siRNA sense strand
gaaaugauccuuuguugac

SEQ ID NO: 2059520 - RNA, 19 nt, Homo sapiens
  misc_RNA (1)...(19): siRNA sense strand
gauaggcaccgagagauua

SEQ ID NO: 2059521 - RNA, 19 nt, Homo sapiens
  misc_RNA (1)...(19): siRNA sense strand
aaagaagaguuugcucaua

SEQ ID NO: 2059522 - RNA, 19 nt, Homo sapiens
  misc_RNA (1)...(19): siRNA sense strand
gaagauguagagaccauaa

SEQ ID NO: 2059523 - RNA, 19 nt, Homo sapiens
  misc_RNA (1)...(19): siRNA sense strand
gaaccaagauccugauucc

SEQ ID NO: 2059524 - RNA, 19 nt, Homo sapiens
  misc_RNA (1)...(19): siRNA sense strand
gaauacaucgugccucuga

SEQ ID NO: 2059525 - RNA, 19 nt, Homo sapiens
  misc_RNA (1)...(19): siRNA sense strand
accgagagauuaccaauaa

SEQ ID NO: 2059526 - RNA, 19 nt, Homo sapiens
  misc_RNA (1)...(19): siRNA sense strand
ggaauggaccgucuucaau

SEQ ID NO: 2059527 - RNA, 19 nt, Homo sapiens
  misc_RNA (1)...(19): siRNA sense strand
gaacagccgccugguacua

SEQ ID NO: 2059528 - RNA, 19 nt, Homo sapiens
  misc_RNA (1)...(19): siRNA sense strand
ccaagauccugauuccauu

SEQ ID NO: 2059529 - RNA, 19 nt, Homo sapiens
  misc_RNA (1)...(19): siRNA sense strand
ggagaaaugauccuuuguu

SEQ ID NO: 2059530 - RNA, 19 nt, Homo sapiens
  misc_RNA (1)...(19): siRNA sense strand
acaaauacaggaagaauga

SEQ ID NO: 2059531 - RNA, 19 nt, Homo sapiens
  misc_RNA (1)...(19): siRNA sense strand
gagaaccguuucaacacaa

SEQ ID NO: 2059532 - RNA, 19 nt, Homo sapiens
  misc_RNA (1)...(19): siRNA sense strand
cgaagagaucucauuauuu

SEQ ID NO: 2059533 - RNA, 19 nt, Homo sapiens
  misc_RNA (1)...(19): siRNA sense strand
ggcaauggaugugaugaaa

SEQ ID NO: 2059534 - RNA, 19 nt, Homo sapiens
  misc_RNA (1)...(19): siRNA sense strand
uucguuagcugguuugaua

SEQ ID NO: 2059535 - RNA, 19 nt, Homo sapiens
  misc_RNA (1)...(19): siRNA sense strand
ccacauccgucucaaugga

SEQ ID NO: 2059536 - RNA, 19 nt, Homo sapiens
  misc_RNA (1)...(19): siRNA sense strand
uaucuugagugguuucauu

SEQ ID NO: 2059537 - RNA, 19 nt, Homo sapiens
  misc_RNA (1)...(19): siRNA sense strand
uauagcaggucgacuucua

SEQ ID NO: 2059538 - RNA, 19 nt, Homo sapiens
  misc_RNA (1)...(19): siRNA sense strand
gaccuaugaugauuucaau

SEQ ID NO: 2059539 - RNA, 19 nt, Homo sapiens
  misc_RNA (1)...(19): siRNA sense strand
aaggauguguuaaagcaua

SEQ ID NO: 2059540 - RNA, 19 nt, Homo sapiens
  misc_RNA (1)...(19): siRNA sense strand
agacaucucugcucauugg

SEQ ID NO: 2059541 - RNA, 19 nt, Homo sapiens
  misc_RNA (1)...(19): siRNA sense strand
guuagcacuuccaucauuu

SEQ ID NO: 2059542 - RNA, 19 nt, Homo sapiens
  misc_RNA (1)...(19): siRNA sense strand
aauaguuggucccagcuua

SEQ ID NO: 2059543 - RNA, 19 nt, Homo sapiens
  misc_RNA (1)...(19): siRNA sense strand
ugaaaaugcucgaaagaaa

SEQ ID NO: 2059544 - RNA, 19 nt, Homo sapiens
  misc_RNA (1)...(19): siRNA sense strand
caaguauccuguuauagag

SEQ ID NO: 2059545 - RNA, 19 nt, Homo sapiens
  misc_RNA (1)...(19): siRNA sense strand
gccacugcuucaacaaaua

SEQ ID NO: 2059546 - RNA, 19 nt, Homo sapiens
  misc_RNA (1)...(19): siRNA sense strand
gaucccuucuggccucuuu

SEQ ID NO: 2059547 - RNA, 19 nt, Homo sapiens
  misc_RNA (1)...(19): siRNA sense strand
gcacaagugagcucauuuc

SEQ ID NO: 2059548 - RNA, 19 nt, Homo sapiens
  misc_RNA (1)...(19): siRNA sense strand
uugccuacauagucaauua

SEQ ID NO: 2059549 - RNA, 19 nt, Homo sapiens
  misc_RNA (1)...(19): siRNA sense strand
guaaguggacucugguuau

SEQ ID NO: 2059550 - RNA, 19 nt, Homo sapiens
  misc_RNA (1)...(19): siRNA sense strand
gggagccuuugccuacaua

SEQ ID NO: 2059551 - RNA, 19 nt, Homo sapiens
  misc_RNA (1)...(19): siRNA sense strand
ccggagaaaugauccuuug

SEQ ID NO: 2059552 - RNA, 19 nt, Homo sapiens
  misc_RNA (1)...(19): siRNA sense strand
gguaaguggacucugguua

SEQ ID NO: 2059553 - RNA, 19 nt, Homo sapiens
  misc_RNA (1)...(19): siRNA sense strand
uugaagaggucagcuacua

SEQ ID NO: 2059554 - RNA, 19 nt, Homo sapiens
  misc_RNA (1)...(19): siRNA sense strand
uaaagcauauagcacagau

SEQ ID NO: 2059555 - RNA, 19 nt, Homo sapiens
  misc_RNA (1)...(19): siRNA sense strand
ggaugacuguuucucuugu

SEQ ID NO: 2059556 - RNA, 19 nt, Homo sapiens
  misc_RNA (1)...(19): siRNA sense strand
ggauaggcaccgagagauu

SEQ ID NO: 2059557 - RNA, 19 nt, Homo sapiens
  misc_RNA (1)...(19): siRNA sense strand
gucauaauguuugaacuga

SEQ ID NO: 2059558 - RNA, 19 nt, Homo sapiens
  misc_RNA (1)...(19): siRNA sense strand
caacaaauacaggaagaau

SEQ ID NO: 2059559 - RNA, 19 nt, Homo sapiens
  misc_RNA (1)...(19): siRNA sense strand
uguuagcacuuccaucauu

SEQ ID NO: 2059560 - RNA, 19 nt, Homo sapiens
  misc_RNA (1)...(19): siRNA sense strand
gaagaguuugcucauaaga

SEQ ID NO: 2059561 - RNA, 19 nt, Homo sapiens
  misc_RNA (1)...(19): siRNA sense strand
gaugacuguuucucuuguu

SEQ ID NO: 2059562 - RNA, 19 nt, Homo sapiens
  misc_RNA (1)...(19): siRNA sense strand
uucaauagcugguguaguc

SEQ ID NO: 2059563 - RNA, 19 nt, Homo sapiens
  misc_RNA (1)...(19): siRNA sense strand
ugagaaccguuucaacaca

SEQ ID NO: 2059564 - RNA, 19 nt, Homo sapiens
  misc_RNA (1)...(19): siRNA sense strand
gcgaaagaccacccaguug

SEQ ID NO: 2059565 - RNA, 19 nt, Homo sapiens
  misc_RNA (1)...(19): siRNA sense strand
ugguguaucuguagccuuu

SEQ ID NO: 2059566 - RNA, 19 nt, Homo sapiens
  misc_RNA (1)...(19): siRNA sense strand
ucuuugagcucgugccauu

SEQ ID NO: 2059567 - RNA, 19 nt, Homo sapiens
  misc_RNA (1)...(19): siRNA sense strand
uagagaccauaaucaguga

SEQ ID NO: 2059568 - RNA, 19 nt, Homo sapiens
  misc_RNA (1)...(19): siRNA sense strand
gagcaugucaccuuugaag

SEQ ID NO: 2059569 - RNA, 19 nt, Homo sapiens
  misc_RNA (1)...(19): siRNA sense strand
guaugacuguggaagaugu

SEQ ID NO: 2059570 - RNA, 19 nt, Homo sapiens
  misc_RNA (1)...(19): siRNA sense strand
ugacugguggcuuagaaua

SEQ ID NO: 2059571 - RNA, 19 nt, Homo sapiens
  misc_RNA (1)...(19): siRNA sense strand
caauguggcagcuggcuuu

SEQ ID NO: 2059572 - RNA, 19 nt, Homo sapiens
  misc_RNA (1)...(19): siRNA sense strand
ggaccuaugaugauuucaa

SEQ ID NO: 2059573 - RNA, 19 nt, Homo sapiens
  misc_RNA (1)...(19): siRNA sense strand
auagacaucucugcucauu

SEQ ID NO: 2059574 - RNA, 19 nt, Homo sapiens
  misc_RNA (1)...(19): siRNA sense strand
ugacucggaugacuguuuc

SEQ ID NO: 2059575 - RNA, 19 nt, Homo sapiens
  misc_RNA (1)...(19): siRNA sense strand
uaaguggacucugguuauc

SEQ ID NO: 2059576 - RNA, 19 nt, Homo sapiens
  misc_RNA (1)...(19): siRNA sense strand
aaaacuaucuugagugguu

SEQ ID NO: 2059577 - RNA, 19 nt, Homo sapiens
  misc_RNA (1)...(19): siRNA sense strand
gcucuggaaucccugagau

SEQ ID NO: 2059578 - RNA, 19 nt, Homo sapiens
  misc_RNA (1)...(19): siRNA sense strand
gcuuuaacacucauacuga

SEQ ID NO: 2059579 - RNA, 19 nt, Homo sapiens
  misc_RNA (1)...(19): siRNA sense strand
caugucaccuuugaagaga

SEQ ID NO: 2059580 - RNA, 19 nt, Homo sapiens
  misc_RNA (1)...(19): siRNA sense strand
uaugagaaccguuucaaca

SEQ ID NO: 2059581 - RNA, 19 nt, Homo sapiens
  misc_RNA (1)...(19): siRNA sense strand
cuugagugguuucauuauu

SEQ ID NO: 2059582 - RNA, 19 nt, Homo sapiens
  misc_RNA (1)...(19): siRNA sense strand
uagcacagauggcgaacca

SEQ ID NO: 2059583 - RNA, 19 nt, Homo sapiens
  misc_RNA (1)...(19): siRNA sense strand
guuguuagcacuuccauca

SEQ ID NO: 2059584 - RNA, 19 nt, Homo sapiens
  misc_RNA (1)...(19): siRNA sense strand
acucuacgcuccaucaauc

SEQ ID NO: 2059585 - RNA, 19 nt, Homo sapiens
  misc_RNA (1)...(19): siRNA sense strand
gaugacagacuuaaaagaa

SEQ ID NO: 2059586 - RNA, 19 nt, Homo sapiens
  misc_RNA (1)...(19): siRNA sense strand
ggagaucguaguggauauu

SEQ ID NO: 2059587 - RNA, 19 nt, Homo sapiens
  misc_RNA (1)...(19): siRNA sense strand
auaagacccuggcaaugga

SEQ ID NO: 2059588 - RNA, 19 nt, Homo sapiens
  misc_RNA (1)...(19): siRNA sense strand
gcccacauccgucucaaug

SEQ ID NO: 2059589 - RNA, 19 nt, Homo sapiens
  misc_RNA (1)...(19): siRNA sense strand
gugauuaugagaaccguuu

SEQ ID NO: 2059590 - RNA, 19 nt, Homo sapiens
  misc_RNA (1)...(19): siRNA sense strand
ugagugguuucauuauuag

SEQ ID NO: 2059591 - RNA, 19 nt, Homo sapiens
  misc_RNA (1)...(19): siRNA sense strand
guuuaaccaugaacauugu

SEQ ID NO: 2059592 - RNA, 19 nt, Homo sapiens
  misc_RNA (1)...(19): siRNA sense strand
ggucccagcuuaucaucag

SEQ ID NO: 2059593 - RNA, 19 nt, Homo sapiens
  misc_RNA (1)...(19): siRNA sense strand
gagaccauaaucagugaaa

SEQ ID NO: 2059594 - RNA, 19 nt, Homo sapiens
  misc_RNA (1)...(19): siRNA sense strand
gauguagagaccauaauca

SEQ ID NO: 2059595 - RNA, 19 nt, Homo sapiens
  misc_RNA (1)...(19): siRNA sense strand
gagucaacaugggccuuaa

SEQ ID NO: 2059596 - RNA, 19 nt, Homo sapiens
  misc_RNA (1)...(19): siRNA sense strand
cauaagacccuggcaaugg

SEQ ID NO: 2059597 - RNA, 19 nt, Homo sapiens
  misc_RNA (1)...(19): siRNA sense strand
cagcuggcuuuaacacuca

SEQ ID NO: 2059598 - RNA, 19 nt, Homo sapiens
  misc_RNA (1)...(19): siRNA sense strand
gcucugugauuaugagaac

SEQ ID NO: 2059599 - RNA, 19 nt, Homo sapiens
  misc_RNA (1)...(19): siRNA sense strand
gaggucagcuacuauuuuc

SEQ ID NO: 2059600 - RNA, 19 nt, Homo sapiens
  misc_RNA (1)...(19): siRNA sense strand
gagaucguaguggauauuu

SEQ ID NO: 2059601 - RNA, 19 nt, Homo sapiens
  misc_RNA (1)...(19): siRNA sense strand
cauaauguuugaacugacu

SEQ ID NO: 2059602 - RNA, 19 nt, Homo sapiens
  misc_RNA (1)...(19): siRNA sense strand
ucaaagggcugccggauuu

SEQ ID NO: 2059603 - RNA, 19 nt, Homo sapiens
  misc_RNA (1)...(19): siRNA sense strand
gggauuggguuccggauug

SEQ ID NO: 2059604 - RNA, 19 nt, Homo sapiens
  misc_RNA (1)...(19): siRNA sense strand
caaaguggccuucaucaca

SEQ ID NO: 2059605 - RNA, 19 nt, Homo sapiens
  misc_RNA (1)...(19): siRNA sense strand
gaaggaguuuggcagaauc

SEQ ID NO: 2059606 - RNA, 19 nt, Homo sapiens
  misc_RNA (1)...(19): siRNA sense strand
ggacaaaguggccuucauc

SEQ ID NO: 2059607 - RNA, 19 nt, Homo sapiens
  misc_RNA (1)...(19): siRNA sense strand
ugaaggaguuuggcagaau

SEQ ID NO: 2059608 - RNA, 19 nt, Homo sapiens
  misc_RNA (1)...(19): siRNA sense strand
ucgcauccuucucugcuaa

SEQ ID NO: 2059609 - RNA, 19 nt, Homo sapiens
  misc_RNA (1)...(19): siRNA sense strand
ugucucgugugcucuauga

SEQ ID NO: 2059610 - RNA, 19 nt, Homo sapiens
  misc_RNA (1)...(19): siRNA sense strand
ucaagaccgugauggacau

SEQ ID NO: 2059611 - RNA, 19 nt, Homo sapiens
  misc_RNA (1)...(19): siRNA sense strand
gggacaaaguggccuucau

SEQ ID NO: 2059612 - RNA, 19 nt, Homo sapiens
  misc_RNA (1)...(19): siRNA sense strand
gacaaaguggccuucauca

SEQ ID NO: 2059613 - RNA, 19 nt, Homo sapiens
  misc_RNA (1)...(19): siRNA sense strand
gauaccagcggcaccuuca

SEQ ID NO: 2059614 - RNA, 19 nt, Homo sapiens
  misc_RNA (1)...(19): siRNA sense strand
guuccggauugcugagauu

SEQ ID NO: 2059615 - RNA, 19 nt, Homo sapiens
  misc_RNA (1)...(19): siRNA sense strand
gcuggcgccuuguccuuca

SEQ ID NO: 2059616 - RNA, 19 nt, Homo sapiens
  misc_RNA (1)...(19): siRNA sense strand
auacggugauugccaguag

SEQ ID NO: 2059617 - RNA, 19 nt, Homo sapiens
  misc_RNA (1)...(19): siRNA sense strand
cagcggcaccuucaaugug

SEQ ID NO: 2059618 - RNA, 19 nt, Homo sapiens
  misc_RNA (1)...(19): siRNA sense strand
gucaaagggcugccggauu

SEQ ID NO: 2059619 - RNA, 19 nt, Homo sapiens
  misc_RNA (1)...(19): siRNA sense strand
accaggcucugaaggaguu

SEQ ID NO: 2059620 - RNA, 19 nt, Homo sapiens
  misc_RNA (1)...(19): siRNA sense strand
cugaaggaguuuggcagaa

SEQ ID NO: 2059621 - RNA, 19 nt, Homo sapiens
  misc_RNA (1)...(19): siRNA sense strand
guucccaaacggugucaaa

SEQ ID NO: 2059622 - RNA, 19 nt, Homo sapiens
  misc_RNA (1)...(19): siRNA sense strand
gaauguagaucaagcuaua

SEQ ID NO: 2059623 - RNA, 19 nt, Homo sapiens
  misc_RNA (1)...(19): siRNA sense strand
gaaauaugcuccugauaau

SEQ ID NO: 2059624 - RNA, 19 nt, Homo sapiens
  misc_RNA (1)...(19): siRNA sense strand
gaaacaaccaguacucaua

SEQ ID NO: 2059625 - RNA, 19 nt, Homo sapiens
  misc_RNA (1)...(19): siRNA sense strand
ggugguagaugcuucuuua

SEQ ID NO: 2059626 - RNA, 19 nt, Homo sapiens
  misc_RNA (1)...(19): siRNA sense strand
ggaagaaacuacugaauac

SEQ ID NO: 2059627 - RNA, 19 nt, Homo sapiens
  misc_RNA (1)...(19): siRNA sense strand
gaggaaagcucccaguaga

SEQ ID NO: 2059628 - RNA, 19 nt, Homo sapiens
  misc_RNA (1)...(19): siRNA sense strand
gacaaugaaugcuguguuu

SEQ ID NO: 2059629 - RNA, 19 nt, Homo sapiens
  misc_RNA (1)...(19): siRNA sense strand
ccacagagauuucuucaag

SEQ ID NO: 2059630 - RNA, 19 nt, Homo sapiens
  misc_RNA (1)...(19): siRNA sense strand
uagcagagcuggcugagaa

SEQ ID NO: 2059631 - RNA, 19 nt, Homo sapiens
  misc_RNA (1)...(19): siRNA sense strand
gaauguauggugagacuua

SEQ ID NO: 2059632 - RNA, 19 nt, Homo sapiens
  misc_RNA (1)...(19): siRNA sense strand
gaacugcccuugguugaga

SEQ ID NO: 2059633 - RNA, 19 nt, Homo sapiens
  misc_RNA (1)...(19): siRNA sense strand
ggacugaaagagacaaaua

SEQ ID NO: 2059634 - RNA, 19 nt, Homo sapiens
  misc_RNA (1)...(19): siRNA sense strand
caaggaaaccucuuagaaa

SEQ ID NO: 2059635 - RNA, 19 nt, Homo sapiens
  misc_RNA (1)...(19): siRNA sense strand
gcaaguaguuggaggaaag

SEQ ID NO: 2059636 - RNA, 19 nt, Homo sapiens
  misc_RNA (1)...(19): siRNA sense strand
cagaggaaguuauagcuaa

SEQ ID NO: 2059637 - RNA, 19 nt, Homo sapiens
  misc_RNA (1)...(19): siRNA sense strand
aaggaaaucuuacugguuu

SEQ ID NO: 2059638 - RNA, 19 nt, Homo sapiens
  misc_RNA (1)...(19): siRNA sense strand
ggaagucuguaauaaugaa

SEQ ID NO: 2059639 - RNA, 19 nt, Homo sapiens
  misc_RNA (1)...(19): siRNA sense strand
ucaaaggacaagugaauua

SEQ ID NO: 2059640 - RNA, 19 nt, Homo sapiens
  misc_RNA (1)...(19): siRNA sense strand
ugucaaauguggcauauga

SEQ ID NO: 2059641 - RNA, 19 nt, Homo sapiens
  misc_RNA (1)...(19): siRNA sense strand
caaguuagcccaacaagga

SEQ ID NO: 2059642 - RNA, 19 nt, Homo sapiens
  misc_RNA (1)...(19): siRNA sense strand
cuauaucagugucuucuua

SEQ ID NO: 2059643 - RNA, 19 nt, Homo sapiens
  misc_RNA (1)...(19): siRNA sense strand
ggucuaggaucagaaagua

SEQ ID NO: 2059644 - RNA, 19 nt, Homo sapiens
  misc_RNA (1)...(19): siRNA sense strand
gagaauucaucuggauaua

SEQ ID NO: 2059645 - RNA, 19 nt, Homo sapiens
  misc_RNA (1)...(19): siRNA sense strand
uuauuuggcuguuuccuua

SEQ ID NO: 2059646 - RNA, 19 nt, Homo sapiens
  misc_RNA (1)...(19): siRNA sense strand
gcuggaagguauaaagaaa

SEQ ID NO: 2059647 - RNA, 19 nt, Homo sapiens
  misc_RNA (1)...(19): siRNA sense strand
gagacaacaugcauuugaa

SEQ ID NO: 2059648 - RNA, 19 nt, Homo sapiens
  misc_RNA (1)...(19): siRNA sense strand
aacagaagaucagcaauua

SEQ ID NO: 2059649 - RNA, 19 nt, Homo sapiens
  misc_RNA (1)...(19): siRNA sense strand
gcaccaugguuacaaauuc

SEQ ID NO: 2059650 - RNA, 19 nt, Homo sapiens
  misc_RNA (1)...(19): siRNA sense strand
ugaaggcucuuaccuaugu

SEQ ID NO: 2059651 - RNA, 19 nt, Homo sapiens
  misc_RNA (1)...(19): siRNA sense strand
agaaauaugcuccugauaa

SEQ ID NO: 2059652 - RNA, 19 nt, Homo sapiens
  misc_RNA (1)...(19): siRNA sense strand
gaaacuaagacuccauauu

SEQ ID NO: 2059653 - RNA, 19 nt, Homo sapiens
  misc_RNA (1)...(19): siRNA sense strand
gcaguucagucuuaucuca

SEQ ID NO: 2059654 - RNA, 19 nt, Homo sapiens
  misc_RNA (1)...(19): siRNA sense strand
gugaaaugcuuggauauga

SEQ ID NO: 2059655 - RNA, 19 nt, Homo sapiens
  misc_RNA (1)...(19): siRNA sense strand
gaucagcaauuaagacucu

SEQ ID NO: 2059656 - RNA, 19 nt, Homo sapiens
  misc_RNA (1)...(19): siRNA sense strand
gaucaaaggacaagugaau

SEQ ID NO: 2059657 - RNA, 19 nt, Homo sapiens
  misc_RNA (1)...(19): siRNA sense strand
gcacuuccuucugcacuaa

SEQ ID NO: 2059658 - RNA, 19 nt, Homo sapiens
  misc_RNA (1)...(19): siRNA sense strand
ggaucaaucucaaguucuu

SEQ ID NO: 2059659 - RNA, 19 nt, Homo sapiens
  misc_RNA (1)...(19): siRNA sense strand
caggcgcacucuucuaaua

SEQ ID NO: 2059660 - RNA, 19 nt, Homo sapiens
  misc_RNA (1)...(19): siRNA sense strand
gaagagcugaguuaaauca

SEQ ID NO: 2059661 - RNA, 19 nt, Homo sapiens
  misc_RNA (1)...(19): siRNA sense strand
gaaggaauguauggugaga

SEQ ID NO: 2059662 - RNA, 19 nt, Homo sapiens
  misc_RNA (1)...(19): siRNA sense strand
ucuaugcaguucagucuua

SEQ ID NO: 2059663 - RNA, 19 nt, Homo sapiens
  misc_RNA (1)...(19): siRNA sense strand
gagcugaguuaaaucacaa

SEQ ID NO: 2059664 - RNA, 19 nt, Homo sapiens
  misc_RNA (1)...(19): siRNA sense strand
ggaacugaguagucugaaa

SEQ ID NO: 2059665 - RNA, 19 nt, Homo sapiens
  misc_RNA (1)...(19): siRNA sense strand
gaaaagcuguucuggcauu

SEQ ID NO: 2059666 - RNA, 19 nt, Homo sapiens
  misc_RNA (1)...(19): siRNA sense strand
guucuacucuuccugacua

SEQ ID NO: 2059667 - RNA, 19 nt, Homo sapiens
  misc_RNA (1)...(19): siRNA sense strand
gaaacuauaucagugucuu

SEQ ID NO: 2059668 - RNA, 19 nt, Homo sapiens
  misc_RNA (1)...(19): siRNA sense strand
cuaauacaguugagagauu

SEQ ID NO: 2059669 - RNA, 19 nt, Homo sapiens
  misc_RNA (1)...(19): siRNA sense strand
caacaccagaugacaauaa

SEQ ID NO: 2059670 - RNA, 19 nt, Homo sapiens
  misc_RNA (1)...(19): siRNA sense strand
ggacaagugaauuaaugua

SEQ ID NO: 2059671 - RNA, 19 nt, Homo sapiens
  misc_RNA (1)...(19): siRNA sense strand
acagagauuucuucaaguu

SEQ ID NO: 2059672 - RNA, 19 nt, Homo sapiens
  misc_RNA (1)...(19): siRNA sense strand
gcaaaugaugugaaacaaa

SEQ ID NO: 2059673 - RNA, 19 nt, Homo sapiens
  misc_RNA (1)...(19): siRNA sense strand
gaaggaaaucuuacugguu

SEQ ID NO: 2059674 - RNA, 19 nt, Homo sapiens
  misc_RNA (1)...(19): siRNA sense strand
uaagagugguuuggaauug

SEQ ID NO: 2059675 - RNA, 19 nt, Homo sapiens
  misc_RNA (1)...(19): siRNA sense strand
uguaugauguucuugauga

SEQ ID NO: 2059676 - RNA, 19 nt, Homo sapiens
  misc_RNA (1)...(19): siRNA sense strand
ucacagaacugcccuuggu

SEQ ID NO: 2059677 - RNA, 19 nt, Homo sapiens
  misc_RNA (1)...(19): siRNA sense strand
caaucaaccugcugggaaa

SEQ ID NO: 2059678 - RNA, 19 nt, Homo sapiens
  misc_RNA (1)...(19): siRNA sense strand
acgaagagcugaguuaaau

SEQ ID NO: 2059679 - RNA, 19 nt, Homo sapiens
  misc_RNA (1)...(19): siRNA sense strand
uaauaagagugguuuggaa

SEQ ID NO: 2059680 - RNA, 19 nt, Homo sapiens
  misc_RNA (1)...(19): siRNA sense strand
ucgaauacuuugcacgaua

SEQ ID NO: 2059681 - RNA, 19 nt, Homo sapiens
  misc_RNA (1)...(19): siRNA sense strand
ucacagcccucaccuccaa

SEQ ID NO: 2059682 - RNA, 19 nt, Homo sapiens
  misc_RNA (1)...(19): siRNA sense strand
uggaagaaacuacugaaua

SEQ ID NO: 2059683 - RNA, 19 nt, Homo sapiens
  misc_RNA (1)...(19): siRNA sense strand
gcacucuucuaauacaguu

SEQ ID NO: 2059684 - RNA, 19 nt, Homo sapiens
  misc_RNA (1)...(19): siRNA sense strand
aaacagaagaucagcaauu

SEQ ID NO: 2059685 - RNA, 19 nt, Homo sapiens
  misc_RNA (1)...(19): siRNA sense strand
caaagaagaguaugucauc

SEQ ID NO: 2059686 - RNA, 19 nt, Homo sapiens
  misc_RNA (1)...(19): siRNA sense strand
gcuauggaagucuguaaua

SEQ ID NO: 2059687 - RNA, 19 nt, Homo sapiens
  misc_RNA (1)...(19): siRNA sense strand
gaauacauacacucaaaug

SEQ ID NO: 2059688 - RNA, 19 nt, Homo sapiens
  misc_RNA (1)...(19): siRNA sense strand
aaacaaccaguacucauaa

SEQ ID NO: 2059689 - RNA, 19 nt, Homo sapiens
  misc_RNA (1)...(19): siRNA sense strand
gauacugucucucacaagu

SEQ ID NO: 2059690 - RNA, 19 nt, Homo sapiens
  misc_RNA (1)...(19): siRNA sense strand
ccaacaaggaaaccucuua

SEQ ID NO: 2059691 - RNA, 19 nt, Homo sapiens
  misc_RNA (1)...(19): siRNA sense strand
gcuaauaacaacauggaaa

SEQ ID NO: 2059692 - RNA, 19 nt, Homo sapiens
  misc_RNA (1)...(19): siRNA sense strand
gaucagaaaguacaaucaa

SEQ ID NO: 2059693 - RNA, 19 nt, Homo sapiens
  misc_RNA (1)...(19): siRNA sense strand
gcauuucucuugguucaga

SEQ ID NO: 2059694 - RNA, 19 nt, Homo sapiens
  misc_RNA (1)...(19): siRNA sense strand
gaauauuccuaccucuuag

SEQ ID NO: 2059695 - RNA, 19 nt, Homo sapiens
  misc_RNA (1)...(19): siRNA sense strand
gaacugaguagucugaaag

SEQ ID NO: 2059696 - RNA, 19 nt, Homo sapiens
  misc_RNA (1)...(19): siRNA sense strand
caaaggacaagugaauuaa

SEQ ID NO: 2059697 - RNA, 19 nt, Homo sapiens
  misc_RNA (1)...(19): siRNA sense strand
aagcuguucuggcauuaua

SEQ ID NO: 2059698 - RNA, 19 nt, Homo sapiens
  misc_RNA (1)...(19): siRNA sense strand
ggaaagcucccaguagaau

SEQ ID NO: 2059699 - RNA, 19 nt, Homo sapiens
  misc_RNA (1)...(19): siRNA sense strand
uacauacacucaaaugcua

SEQ ID NO: 2059700 - RNA, 19 nt, Homo sapiens
  misc_RNA (1)...(19): siRNA sense strand
caaccaguacucauaauau

SEQ ID NO: 2059701 - RNA, 19 nt, Homo sapiens
  misc_RNA (1)...(19): siRNA sense strand
gcuggcaucaucauuauuu

SEQ ID NO: 2059702 - RNA, 19 nt, Homo sapiens
  misc_RNA (1)...(19): siRNA sense strand
gaauuuaccauaucuuugg

SEQ ID NO: 2059703 - RNA, 19 nt, Homo sapiens
  misc_RNA (1)...(19): siRNA sense strand
gaaugacucugugucuuca

SEQ ID NO: 2059704 - RNA, 19 nt, Homo sapiens
  misc_RNA (1)...(19): siRNA sense strand
uguaaugcauccugauauu

SEQ ID NO: 2059705 - RNA, 19 nt, Homo sapiens
  misc_RNA (1)...(19): siRNA sense strand
gaugaauccuuacgaagag

SEQ ID NO: 2059706 - RNA, 19 nt, Homo sapiens
  misc_RNA (1)...(19): siRNA sense strand
caaauucagcucuugagaa

SEQ ID NO: 2059707 - RNA, 19 nt, Homo sapiens
  misc_RNA (1)...(19): siRNA sense strand
cuauggaagucuguaauaa

SEQ ID NO: 2059708 - RNA, 19 nt, Homo sapiens
  misc_RNA (1)...(19): siRNA sense strand
gucuacaccuucauuguuu

SEQ ID NO: 2059709 - RNA, 19 nt, Homo sapiens
  misc_RNA (1)...(19): siRNA sense strand
guagaucaagcuauaacua

SEQ ID NO: 2059710 - RNA, 19 nt, Homo sapiens
  misc_RNA (1)...(19): siRNA sense strand
gagaauguggaacuuauga

SEQ ID NO: 2059711 - RNA, 19 nt, Homo sapiens
  misc_RNA (1)...(19): siRNA sense strand
cgaaaugauuccagcuguu

SEQ ID NO: 2059712 - RNA, 19 nt, Homo sapiens
  misc_RNA (1)...(19): siRNA sense strand
gguuauccuucgcaaauga

SEQ ID NO: 2059713 - RNA, 19 nt, Homo sapiens
  misc_RNA (1)...(19): siRNA sense strand
cugaauacauacacucaaa

SEQ ID NO: 2059714 - RNA, 19 nt, Homo sapiens
  misc_RNA (1)...(19): siRNA sense strand
gcugcuggcaucaucauua

SEQ ID NO: 2059715 - RNA, 19 nt, Homo sapiens
  misc_RNA (1)...(19): siRNA sense strand
acaaaagccugguuaauug

SEQ ID NO: 2059716 - RNA, 19 nt, Homo sapiens
  misc_RNA (1)...(19): siRNA sense strand
ggagaauucaucuggauau

SEQ ID NO: 2059717 - RNA, 19 nt, Homo sapiens
  misc_RNA (1)...(19): siRNA sense strand
gaaaugauuccagcuguuc

SEQ ID NO: 2059718 - RNA, 19 nt, Homo sapiens
  misc_RNA (1)...(19): siRNA sense strand
acacucaaaugcuauggaa

SEQ ID NO: 2059719 - RNA, 19 nt, Homo sapiens
  misc_RNA (1)...(19): siRNA sense strand
gcauacagucuauucuauu

SEQ ID NO: 2059720 - RNA, 19 nt, Homo sapiens
  misc_RNA (1)...(19): siRNA sense strand
ucaauauagugugcagaua

SEQ ID NO: 2059721 - RNA, 19 nt, Homo sapiens
  misc_RNA (1)...(19): siRNA sense strand
cuaagacuccauauuauug

SEQ ID NO: 2059722 - RNA, 19 nt, Homo sapiens
  misc_RNA (1)...(19): siRNA sense strand
gaagaaggcuggcuggaau

SEQ ID NO: 2059723 - RNA, 19 nt, Homo sapiens
  misc_RNA (1)...(19): siRNA sense strand
caacagcagugaauugaaa

SEQ ID NO: 2059724 - RNA, 19 nt, Homo sapiens
  misc_RNA (1)...(19): siRNA sense strand
cagcauuuaucaagucuua

SEQ ID NO: 2059725 - RNA, 19 nt, Homo sapiens
  misc_RNA (1)...(19): siRNA sense strand
caugguggcuuucuucaaa

SEQ ID NO: 2059726 - RNA, 19 nt, Homo sapiens
  misc_RNA (1)...(19): siRNA sense strand
gcaggaagcaugagcugua

SEQ ID NO: 2059727 - RNA, 19 nt, Homo sapiens
  misc_RNA (1)...(19): siRNA sense strand
acaaagaguucaaguucaa

SEQ ID NO: 2059728 - RNA, 19 nt, Homo sapiens
  misc_RNA (1)...(19): siRNA sense strand
ggugacggcugcagaauuc

SEQ ID NO: 2059729 - RNA, 19 nt, Homo sapiens
  misc_RNA (1)...(19): siRNA sense strand
ccacaaagaguucaaguuc

SEQ ID NO: 2059730 - RNA, 19 nt, Homo sapiens
  misc_RNA (1)...(19): siRNA sense strand
caucucgguucuuuacuuu

SEQ ID NO: 2059731 - RNA, 19 nt, Homo sapiens
  misc_RNA (1)...(19): siRNA sense strand
ggacagcgccuuccucaac

SEQ ID NO: 2059732 - RNA, 19 nt, Homo sapiens
  misc_RNA (1)...(19): siRNA sense strand
uggcaggacuggaucauug

SEQ ID NO: 2059733 - RNA, 19 nt, Homo sapiens
  misc_RNA (1)...(19): siRNA sense strand
caauuacugugauggagaa

SEQ ID NO: 2059734 - RNA, 19 nt, Homo sapiens
  misc_RNA (1)...(19): siRNA sense strand
gaccuugguucaccuuaug

SEQ ID NO: 2059735 - RNA, 19 nt, Homo sapiens
  misc_RNA (1)...(19): siRNA sense strand
gggcuaugcugccaauuac

SEQ ID NO: 2059736 - RNA, 19 nt, Homo sapiens
  misc_RNA (1)...(19): siRNA sense strand
ggaagcaugagcuguaugu

SEQ ID NO: 2059737 - RNA, 19 nt, Homo sapiens
  misc_RNA (1)...(19): siRNA sense strand
gaaugcuccuucccacuca

SEQ ID NO: 2059738 - RNA, 19 nt, Homo sapiens
  misc_RNA (1)...(19): siRNA sense strand
cuacaaggacuguguuaug

SEQ ID NO: 2059739 - RNA, 19 nt, Homo sapiens
  misc_RNA (1)...(19): siRNA sense strand
ccacucaacgcacacauga

SEQ ID NO: 2059740 - RNA, 19 nt, Homo sapiens
  misc_RNA (1)...(19): siRNA sense strand
caagggcuaugcugccaau

SEQ ID NO: 2059741 - RNA, 19 nt, Homo sapiens
  misc_RNA (1)...(19): siRNA sense strand
ucucgguucuuuacuuuga

SEQ ID NO: 2059742 - RNA, 19 nt, Homo sapiens
  misc_RNA (1)...(19): siRNA sense strand
cacaaagaguucaaguuca

SEQ ID NO: 2059743 - RNA, 19 nt, Homo sapiens
  misc_RNA (1)...(19): siRNA sense strand
aaggcuggcuggaauuuga

SEQ ID NO: 2059744 - RNA, 19 nt, Homo sapiens
  misc_RNA (1)...(19): siRNA sense strand
uaaaugccaucucgguucu

SEQ ID NO: 2059745 - RNA, 19 nt, Homo sapiens
  misc_RNA (1)...(19): siRNA sense strand
uaucagcauuuaucaaguc

SEQ ID NO: 2059746 - RNA, 19 nt, Homo sapiens
  misc_RNA (1)...(19): siRNA sense strand
caaccaaccacgcgauugu

SEQ ID NO: 2059747 - RNA, 19 nt, Homo sapiens
  misc_RNA (1)...(19): siRNA sense strand
gcagagacggcccuuacga

SEQ ID NO: 2059748 - RNA, 19 nt, Homo sapiens
  misc_RNA (1)...(19): siRNA sense strand
ccaucucgguucuuuacuu

SEQ ID NO: 2059749 - RNA, 19 nt, Homo sapiens
  misc_RNA (1)...(19): siRNA sense strand
gcagaauuccgcaucuaca

SEQ ID NO: 2059750 - RNA, 19 nt, Homo sapiens
  misc_RNA (1)...(19): siRNA sense strand
uuacaacagcagugaauug

SEQ ID NO: 2059751 - RNA, 19 nt, Homo sapiens
  misc_RNA (1)...(19): siRNA sense strand
gauuacaacagcagugaau

SEQ ID NO: 2059752 - RNA, 19 nt, Homo sapiens
  misc_RNA (1)...(19): siRNA sense strand
gcauuuaucaagucuuaca

SEQ ID NO: 2059753 - RNA, 19 nt, Homo sapiens
  misc_RNA (1)...(19): siRNA sense strand
caggaagcaugagcuguau

SEQ ID NO: 2059754 - RNA, 19 nt, Homo sapiens
  misc_RNA (1)...(19): siRNA sense strand
uugugaaccugguggagua

SEQ ID NO: 2059755 - RNA, 19 nt, Homo sapiens
  misc_RNA (1)...(19): siRNA sense strand
acaggaauaugguuguaag

SEQ ID NO: 2059756 - RNA, 19 nt, Homo sapiens
  misc_RNA (1)...(19): siRNA sense strand
uacaaggacuguguuaugg

SEQ ID NO: 2059757 - RNA, 19 nt, Homo sapiens
  misc_RNA (1)...(19): siRNA sense strand
aguaugggccucagaagaa

SEQ ID NO: 2059758 - RNA, 19 nt, Homo sapiens
  misc_RNA (1)...(19): siRNA sense strand
aagcaugagcuguauguga

SEQ ID NO: 2059759 - RNA, 19 nt, Homo sapiens
  misc_RNA (1)...(19): siRNA sense strand
ggucuccagugcuucagau

SEQ ID NO: 2059760 - RNA, 19 nt, Homo sapiens
  misc_RNA (1)...(19): siRNA sense strand
gcaaccaaccacgcgauug

SEQ ID NO: 2059761 - RNA, 19 nt, Homo sapiens
  misc_RNA (1)...(19): siRNA sense strand
cagaauuccgcaucuacaa

SEQ ID NO: 2059762 - RNA, 19 nt, Homo sapiens
  misc_RNA (1)...(19): siRNA sense strand
agaccuugguucaccuuau

SEQ ID NO: 2059763 - RNA, 19 nt, Homo sapiens
  misc_RNA (1)...(19): siRNA sense strand
ucuccagugcuucagauua

SEQ ID NO: 2059764 - RNA, 19 nt, Homo sapiens
  misc_RNA (1)...(19): siRNA sense strand
gaaggcuggcuggaauuug

SEQ ID NO: 2059765 - RNA, 19 nt, Homo sapiens
  misc_RNA (1)...(19): siRNA sense strand
guucuuuacuuugaugaca

SEQ ID NO: 2059766 - RNA, 19 nt, Homo sapiens
  misc_RNA (1)...(19): siRNA sense strand
aaugccaucucgguucuuu

SEQ ID NO: 2059767 - RNA, 19 nt, Homo sapiens
  misc_RNA (1)...(19): siRNA sense strand
uuacugugauggagaaugc

SEQ ID NO: 2059768 - RNA, 19 nt, Homo sapiens
  misc_RNA (1)...(19): siRNA sense strand
agggcuaugcugccaauua

SEQ ID NO: 2059769 - RNA, 19 nt, Homo sapiens
  misc_RNA (1)...(19): siRNA sense strand
guaugugaguuuccaagac

SEQ ID NO: 2059770 - RNA, 19 nt, Homo sapiens
  misc_RNA (1)...(19): siRNA sense strand
uacaacagcagugaauuga

SEQ ID NO: 2059771 - RNA, 19 nt, Homo sapiens
  misc_RNA (1)...(19): siRNA sense strand
agaagaaggcuggcuggaa

SEQ ID NO: 2059772 - RNA, 19 nt, Homo sapiens
  misc_RNA (1)...(19): siRNA sense strand
gcuaugcugccaauuacug

SEQ ID NO: 2059773 - RNA, 19 nt, Homo sapiens
  misc_RNA (1)...(19): siRNA sense strand
guaugggccucagaagaag

SEQ ID NO: 2059774 - RNA, 19 nt, Homo sapiens
  misc_RNA (1)...(19): siRNA sense strand
ggaguacgacaaggaguuc

SEQ ID NO: 2059775 - RNA, 19 nt, Homo sapiens
  misc_RNA (1)...(19): siRNA sense strand
guucaacuuaucccagauu

SEQ ID NO: 2059776 - RNA, 19 nt, Homo sapiens
  misc_RNA (1)...(19): siRNA sense strand
ggucaugagcuuugugaac

SEQ ID NO: 2059777 - RNA, 19 nt, Homo sapiens
  misc_RNA (1)...(19): siRNA sense strand
caugagcuguaugugaguu

SEQ ID NO: 2059778 - RNA, 19 nt, Homo sapiens
  misc_RNA (1)...(19): siRNA sense strand
cagauuacaacagcaguga

SEQ ID NO: 2059779 - RNA, 19 nt, Homo sapiens
  misc_RNA (1)...(19): siRNA sense strand
cugcagaauuccgcaucua

SEQ ID NO: 2059780 - RNA, 19 nt, Homo sapiens
  misc_RNA (1)...(19): siRNA sense strand
cuagcaaucuguggguugu

SEQ ID NO: 2059781 - RNA, 19 nt, Homo sapiens
  misc_RNA (1)...(19): siRNA sense strand
acucaacgcacacaugaau

SEQ ID NO: 2059782 - RNA, 19 nt, Homo sapiens
  misc_RNA (1)...(19): siRNA sense strand
cagcugagcguggugacaa

SEQ ID NO: 2059783 - RNA, 19 nt, Homo sapiens
  misc_RNA (1)...(19): siRNA sense strand
caacuuaucccagauuccu

SEQ ID NO: 2059784 - RNA, 19 nt, Homo sapiens
  misc_RNA (1)...(19): siRNA sense strand
cuccagugcuucagauuac

SEQ ID NO: 2059785 - RNA, 19 nt, Homo sapiens
  misc_RNA (1)...(19): siRNA sense strand
caucacggccacuagcaau

SEQ ID NO: 2059786 - RNA, 19 nt, Homo sapiens
  misc_RNA (1)...(19): siRNA sense strand
gcaucuacaaggacugugu

SEQ ID NO: 2059787 - RNA, 19 nt, Homo sapiens
  misc_RNA (1)...(19): siRNA sense strand
gguggugacggcugcagaa

SEQ ID NO: 2059788 - RNA, 19 nt, Homo sapiens
  misc_RNA (1)...(19): siRNA sense strand
agaaggcuggcuggaauuu

SEQ ID NO: 2059789 - RNA, 19 nt, Homo sapiens
  misc_RNA (1)...(19): siRNA sense strand
agcgggagaugcagaagga

SEQ ID NO: 2059790 - RNA, 19 nt, Homo sapiens
  misc_RNA (1)...(19): siRNA sense strand
gcugcagaauuccgcaucu

SEQ ID NO: 2059791 - RNA, 19 nt, Homo sapiens
  misc_RNA (1)...(19): siRNA sense strand
gggagaugcagaaggagau

SEQ ID NO: 2059792 - RNA, 19 nt, Homo sapiens
  misc_RNA (1)...(19): siRNA sense strand
uaguaugggccucagaaga

SEQ ID NO: 2059793 - RNA, 19 nt, Homo sapiens
  misc_RNA (1)...(19): siRNA sense strand
gaagauggauauacucaau

SEQ ID NO: 2059794 - RNA, 19 nt, Homo sapiens
  misc_RNA (1)...(19): siRNA sense strand
caggauagcuguuguuuca

SEQ ID NO: 2059795 - RNA, 19 nt, Homo sapiens
  misc_RNA (1)...(19): siRNA sense strand
ggauagcuguuguuucaga

SEQ ID NO: 2059796 - RNA, 19 nt, Homo sapiens
  misc_RNA (1)...(19): siRNA sense strand
ucaaagcaauaccaggaua

SEQ ID NO: 2059797 - RNA, 19 nt, Homo sapiens
  misc_RNA (1)...(19): siRNA sense strand
ggaugaagauggauauacu

SEQ ID NO: 2059798 - RNA, 19 nt, Homo sapiens
  misc_RNA (1)...(19): siRNA sense strand
aaauuuggaugaagaugga

SEQ ID NO: 2059799 - RNA, 19 nt, Homo sapiens
  misc_RNA (1)...(19): siRNA sense strand
ucaauuacacuucgacucu

SEQ ID NO: 2059800 - RNA, 19 nt, Homo sapiens
  misc_RNA (1)...(19): siRNA sense strand
uagcuguuguuucagagaa

SEQ ID NO: 2059801 - RNA, 19 nt, Homo sapiens
  misc_RNA (1)...(19): siRNA sense strand
cuucgacucucaaagcaau

SEQ ID NO: 2059802 - RNA, 19 nt, Homo sapiens
  misc_RNA (1)...(19): siRNA sense strand
caaagcaauaccaggauag

SEQ ID NO: 2059803 - RNA, 19 nt, Homo sapiens
  misc_RNA (1)...(19): siRNA sense strand
ggauauacucaauuacacu

SEQ ID NO: 2059804 - RNA, 19 nt, Homo sapiens
  misc_RNA (1)...(19): siRNA sense strand
gaagauggauauacucaau

SEQ ID NO: 2059805 - RNA, 19 nt, Homo sapiens
  misc_RNA (1)...(19): siRNA sense strand
caggauagcuguuguuuca

SEQ ID NO: 2059806 - RNA, 19 nt, Homo sapiens
  misc_RNA (1)...(19): siRNA sense strand
ggauagcuguuguuucaga

SEQ ID NO: 2059807 - RNA, 19 nt, Homo sapiens
  misc_RNA (1)...(19): siRNA sense strand
ucaaagcaauaccaggaua

SEQ ID NO: 2059808 - RNA, 19 nt, Homo sapiens
  misc_RNA (1)...(19): siRNA sense strand
ggaugaagauggauauacu

SEQ ID NO: 2059809 - RNA, 19 nt, Homo sapiens
  misc_RNA (1)...(19): siRNA sense strand
aaauuuggaugaagaugga

SEQ ID NO: 2059810 - RNA, 19 nt, Homo sapiens
  misc_RNA (1)...(19): siRNA sense strand
ucaauuacacuucgacucu

SEQ ID NO: 2059811 - RNA, 19 nt, Homo sapiens
  misc_RNA (1)...(19): siRNA sense strand
uagcuguuguuucagagaa

SEQ ID NO: 2059812 - RNA, 19 nt, Homo sapiens
  misc_RNA (1)...(19): siRNA sense strand
cuucgacucucaaagcaau

SEQ ID NO: 2059813 - RNA, 19 nt, Homo sapiens
  misc_RNA (1)...(19): siRNA sense strand
caaagcaauaccaggauag

SEQ ID NO: 2059814 - RNA, 19 nt, Homo sapiens
  misc_RNA (1)...(19): siRNA sense strand
ggauauacucaauuacacu

SEQ ID NO: 2059815 - RNA, 19 nt, Homo sapiens
  misc_RNA (1)...(19): siRNA sense strand
gaagauggauauacucaau

SEQ ID NO: 2059816 - RNA, 19 nt, Homo sapiens
  misc_RNA (1)...(19): siRNA sense strand
caggauagcuguuguuuca

SEQ ID NO: 2059817 - RNA, 19 nt, Homo sapiens
  misc_RNA (1)...(19): siRNA sense strand
ggauagcuguuguuucaga

SEQ ID NO: 2059818 - RNA, 19 nt, Homo sapiens
  misc_RNA (1)...(19): siRNA sense strand
ucaaagcaauaccaggaua

SEQ ID NO: 2059819 - RNA, 19 nt, Homo sapiens
  misc_RNA (1)...(19): siRNA sense strand
ggaugaagauggauauacu

SEQ ID NO: 2059820 - RNA, 19 nt, Homo sapiens
  misc_RNA (1)...(19): siRNA sense strand
aaauuuggaugaagaugga

SEQ ID NO: 2059821 - RNA, 19 nt, Homo sapiens
  misc_RNA (1)...(19): siRNA sense strand
ucaauuacacuucgacucu

SEQ ID NO: 2059822 - RNA, 19 nt, Homo sapiens
  misc_RNA (1)...(19): siRNA sense strand
uagcuguuguuucagagaa

SEQ ID NO: 2059823 - RNA, 19 nt, Homo sapiens
  misc_RNA (1)...(19): siRNA sense strand
cuucgacucucaaagcaau

SEQ ID NO: 2059824 - RNA, 19 nt, Homo sapiens
  misc_RNA (1)...(19): siRNA sense strand
caaagcaauaccaggauag

SEQ ID NO: 2059825 - RNA, 19 nt, Homo sapiens
  misc_RNA (1)...(19): siRNA sense strand
ggauauacucaauuacacu

SEQ ID NO: 2059826 - RNA, 19 nt, Homo sapiens
  misc_RNA (1)...(19): siRNA sense strand
gaagauggauauacucaau

SEQ ID NO: 2059827 - RNA, 19 nt, Homo sapiens
  misc_RNA (1)...(19): siRNA sense strand
caggauagcuguuguuuca

SEQ ID NO: 2059828 - RNA, 19 nt, Homo sapiens
  misc_RNA (1)...(19): siRNA sense strand
ggauagcuguuguuucaga

SEQ ID NO: 2059829 - RNA, 19 nt, Homo sapiens
  misc_RNA (1)...(19): siRNA sense strand
ucaaagcaauaccaggaua

SEQ ID NO: 2059830 - RNA, 19 nt, Homo sapiens
  misc_RNA (1)...(19): siRNA sense strand
ggaugaagauggauauacu

SEQ ID NO: 2059831 - RNA, 19 nt, Homo sapiens
  misc_RNA (1)...(19): siRNA sense strand
aaauuuggaugaagaugga

SEQ ID NO: 2059832 - RNA, 19 nt, Homo sapiens
  misc_RNA (1)...(19): siRNA sense strand
ucaauuacacuucgacucu

SEQ ID NO: 2059833 - RNA, 19 nt, Homo sapiens
  misc_RNA (1)...(19): siRNA sense strand
uagcuguuguuucagagaa

SEQ ID NO: 2059834 - RNA, 19 nt, Homo sapiens
  misc_RNA (1)...(19): siRNA sense strand
cuucgacucucaaagcaau

SEQ ID NO: 2059835 - RNA, 19 nt, Homo sapiens
  misc_RNA (1)...(19): siRNA sense strand
caaagcaauaccaggauag

SEQ ID NO: 2059836 - RNA, 19 nt, Homo sapiens
  misc_RNA (1)...(19): siRNA sense strand
ggauauacucaauuacacu

SEQ ID NO: 2059837 - RNA, 19 nt, Homo sapiens
  misc_RNA (1)...(19): siRNA sense strand
gaagauggauauacucaau

SEQ ID NO: 2059838 - RNA, 19 nt, Homo sapiens
  misc_RNA (1)...(19): siRNA sense strand
caggauagcuguuguuuca

SEQ ID NO: 2059839 - RNA, 19 nt, Homo sapiens
  misc_RNA (1)...(19): siRNA sense strand
ggauagcuguuguuucaga

SEQ ID NO: 2059840 - RNA, 19 nt, Homo sapiens
  misc_RNA (1)...(19): siRNA sense strand
ucaaagcaauaccaggaua

SEQ ID NO: 2059841 - RNA, 19 nt, Homo sapiens
  misc_RNA (1)...(19): siRNA sense strand
ggaugaagauggauauacu

SEQ ID NO: 2059842 - RNA, 19 nt, Homo sapiens
  misc_RNA (1)...(19): siRNA sense strand
aaauuuggaugaagaugga

SEQ ID NO: 2059843 - RNA, 19 nt, Homo sapiens
  misc_RNA (1)...(19): siRNA sense strand
ucaauuacacuucgacucu

SEQ ID NO: 2059844 - RNA, 19 nt, Homo sapiens
  misc_RNA (1)...(19): siRNA sense strand
uagcuguuguuucagagaa

SEQ ID NO: 2059845 - RNA, 19 nt, Homo sapiens
  misc_RNA (1)...(19): siRNA sense strand
cuucgacucucaaagcaau

SEQ ID NO: 2059846 - RNA, 19 nt, Homo sapiens
  misc_RNA (1)...(19): siRNA sense strand
caaagcaauaccaggauag

SEQ ID NO: 2059847 - RNA, 19 nt, Homo sapiens
  misc_RNA (1)...(19): siRNA sense strand
ggauauacucaauuacacu

SEQ ID NO: 2059848 - RNA, 19 nt, Homo sapiens
  misc_RNA (1)...(19): siRNA sense strand
gaagauggauauacucaau

SEQ ID NO: 2059849 - RNA, 19 nt, Homo sapiens
  misc_RNA (1)...(19): siRNA sense strand
caggauagcuguuguuuca

SEQ ID NO: 2059850 - RNA, 19 nt, Homo sapiens
  misc_RNA (1)...(19): siRNA sense strand
ggauagcuguuguuucaga

SEQ ID NO: 2059851 - RNA, 19 nt, Homo sapiens
  misc_RNA (1)...(19): siRNA sense strand
ucaaagcaauaccaggaua

SEQ ID NO: 2059852 - RNA, 19 nt, Homo sapiens
  misc_RNA (1)...(19): siRNA sense strand
ggaugaagauggauauacu

SEQ ID NO: 2059853 - RNA, 19 nt, Homo sapiens
  misc_RNA (1)...(19): siRNA sense strand
aaauuuggaugaagaugga

SEQ ID NO: 2059854 - RNA, 19 nt, Homo sapiens
  misc_RNA (1)...(19): siRNA sense strand
ucaauuacacuucgacucu

SEQ ID NO: 2059855 - RNA, 19 nt, Homo sapiens
  misc_RNA (1)...(19): siRNA sense strand
uagcuguuguuucagagaa

SEQ ID NO: 2059856 - RNA, 19 nt, Homo sapiens
  misc_RNA (1)...(19): siRNA sense strand
cuucgacucucaaagcaau

SEQ ID NO: 2059857 - RNA, 19 nt, Homo sapiens
  misc_RNA (1)...(19): siRNA sense strand
caaagcaauaccaggauag

SEQ ID NO: 2059858 - RNA, 19 nt, Homo sapiens
  misc_RNA (1)...(19): siRNA sense strand
ggauauacucaauuacacu

SEQ ID NO: 2059859 - RNA, 19 nt, Homo sapiens
  misc_RNA (1)...(19): siRNA sense strand
gaagauggauauacucaau

SEQ ID NO: 2059860 - RNA, 19 nt, Homo sapiens
  misc_RNA (1)...(19): siRNA sense strand
caggauagcuguuguuuca

SEQ ID NO: 2059861 - RNA, 19 nt, Homo sapiens
  misc_RNA (1)...(19): siRNA sense strand
ggauagcuguuguuucaga

SEQ ID NO: 2059862 - RNA, 19 nt, Homo sapiens
  misc_RNA (1)...(19): siRNA sense strand
ucaaagcaauaccaggaua

SEQ ID NO: 2059863 - RNA, 19 nt, Homo sapiens
  misc_RNA (1)...(19): siRNA sense strand
ggaugaagauggauauacu

SEQ ID NO: 2059864 - RNA, 19 nt, Homo sapiens
  misc_RNA (1)...(19): siRNA sense strand
aaauuuggaugaagaugga

SEQ ID NO: 2059865 - RNA, 19 nt, Homo sapiens
  misc_RNA (1)...(19): siRNA sense strand
ucaauuacacuucgacucu

SEQ ID NO: 2059866 - RNA, 19 nt, Homo sapiens
  misc_RNA (1)...(19): siRNA sense strand
uagcuguuguuucagagaa

SEQ ID NO: 2059867 - RNA, 19 nt, Homo sapiens
  misc_RNA (1)...(19): siRNA sense strand
cuucgacucucaaagcaau

SEQ ID NO: 2059868 - RNA, 19 nt, Homo sapiens
  misc_RNA (1)...(19): siRNA sense strand
caaagcaauaccaggauag

SEQ ID NO: 2059869 - RNA, 19 nt, Homo sapiens
  misc_RNA (1)...(19): siRNA sense strand
ggauauacucaauuacacu

SEQ ID NO: 2059870 - RNA, 19 nt, Homo sapiens
  misc_RNA (1)...(19): siRNA sense strand
gaagauggauauacucaau

SEQ ID NO: 2059871 - RNA, 19 nt, Homo sapiens
  misc_RNA (1)...(19): siRNA sense strand
caggauagcuguuguuuca

SEQ ID NO: 2059872 - RNA, 19 nt, Homo sapiens
  misc_RNA (1)...(19): siRNA sense strand
ggauagcuguuguuucaga

SEQ ID NO: 2059873 - RNA, 19 nt, Homo sapiens
  misc_RNA (1)...(19): siRNA sense strand
ucaaagcaauaccaggaua

SEQ ID NO: 2059874 - RNA, 19 nt, Homo sapiens
  misc_RNA (1)...(19): siRNA sense strand
ggaugaagauggauauacu

SEQ ID NO: 2059875 - RNA, 19 nt, Homo sapiens
  misc_RNA (1)...(19): siRNA sense strand
aaauuuggaugaagaugga

SEQ ID NO: 2059876 - RNA, 19 nt, Homo sapiens
  misc_RNA (1)...(19): siRNA sense strand
ucaauuacacuucgacucu

SEQ ID NO: 2059877 - RNA, 19 nt, Homo sapiens
  misc_RNA (1)...(19): siRNA sense strand
uagcuguuguuucagagaa

SEQ ID NO: 2059878 - RNA, 19 nt, Homo sapiens
  misc_RNA (1)...(19): siRNA sense strand
cuucgacucucaaagcaau

SEQ ID NO: 2059879 - RNA, 19 nt, Homo sapiens
  misc_RNA (1)...(19): siRNA sense strand
caaagcaauaccaggauag

SEQ ID NO: 2059880 - RNA, 19 nt, Homo sapiens
  misc_RNA (1)...(19): siRNA sense strand
ggauauacucaauuacacu

SEQ ID NO: 2059881 - RNA, 19 nt, Homo sapiens
  misc_RNA (1)...(19): siRNA sense strand
gaagauggauauacucaau

SEQ ID NO: 2059882 - RNA, 19 nt, Homo sapiens
  misc_RNA (1)...(19): siRNA sense strand
caggauagcuguuguuuca

SEQ ID NO: 2059883 - RNA, 19 nt, Homo sapiens
  misc_RNA (1)...(19): siRNA sense strand
ggauagcuguuguuucaga

SEQ ID NO: 2059884 - RNA, 19 nt, Homo sapiens
  misc_RNA (1)...(19): siRNA sense strand
ucaaagcaauaccaggaua

SEQ ID NO: 2059885 - RNA, 19 nt, Homo sapiens
  misc_RNA (1)...(19): siRNA sense strand
ggaugaagauggauauacu

SEQ ID NO: 2059886 - RNA, 19 nt, Homo sapiens
  misc_RNA (1)...(19): siRNA sense strand
aaauuuggaugaagaugga

SEQ ID NO: 2059887 - RNA, 19 nt, Homo sapiens
  misc_RNA (1)...(19): siRNA sense strand
ucaauuacacuucgacucu

SEQ ID NO: 2059888 - RNA, 19 nt, Homo sapiens
  misc_RNA (1)...(19): siRNA sense strand
uagcuguuguuucagagaa

SEQ ID NO: 2059889 - RNA, 19 nt, Homo sapiens
  misc_RNA (1)...(19): siRNA sense strand
cuucgacucucaaagcaau

SEQ ID NO: 2059890 - RNA, 19 nt, Homo sapiens
  misc_RNA (1)...(19): siRNA sense strand
caaagcaauaccaggauag

SEQ ID NO: 2059891 - RNA, 19 nt, Homo sapiens
  misc_RNA (1)...(19): siRNA sense strand
ggauauacucaauuacacu

SEQ ID NO: 2059892 - RNA, 19 nt, Homo sapiens
  misc_RNA (1)...(19): siRNA sense strand
gaagauggauauacucaau

SEQ ID NO: 2059893 - RNA, 19 nt, Homo sapiens
  misc_RNA (1)...(19): siRNA sense strand
caggauagcuguuguuuca

SEQ ID NO: 2059894 - RNA, 19 nt, Homo sapiens
  misc_RNA (1)...(19): siRNA sense strand
ggauagcuguuguuucaga

SEQ ID NO: 2059895 - RNA, 19 nt, Homo sapiens
  misc_RNA (1)...(19): siRNA sense strand
ucaaagcaauaccaggaua

SEQ ID NO: 2059896 - RNA, 19 nt, Homo sapiens
  misc_RNA (1)...(19): siRNA sense strand
ggaugaagauggauauacu

SEQ ID NO: 2059897 - RNA, 19 nt, Homo sapiens
  misc_RNA (1)...(19): siRNA sense strand
aaauuuggaugaagaugga

SEQ ID NO: 2059898 - RNA, 19 nt, Homo sapiens
  misc_RNA (1)...(19): siRNA sense strand
ucaauuacacuucgacucu

SEQ ID NO: 2059899 - RNA, 19 nt, Homo sapiens
  misc_RNA (1)...(19): siRNA sense strand
uagcuguuguuucagagaa

SEQ ID NO: 2059900 - RNA, 19 nt, Homo sapiens
  misc_RNA (1)...(19): siRNA sense strand
cuucgacucucaaagcaau

SEQ ID NO: 2059901 - RNA, 19 nt, Homo sapiens
  misc_RNA (1)...(19): siRNA sense strand
caaagcaauaccaggauag

SEQ ID NO: 2059902 - RNA, 19 nt, Homo sapiens
  misc_RNA (1)...(19): siRNA sense strand
ggauauacucaauuacacu

SEQ ID NO: 2059903 - RNA, 19 nt, Homo sapiens
  misc_RNA (1)...(19): siRNA sense strand
gaagauggauauacucaau

SEQ ID NO: 2059904 - RNA, 19 nt, Homo sapiens
  misc_RNA (1)...(19): siRNA sense strand
caggauagcuguuguuuca

SEQ ID NO: 2059905 - RNA, 19 nt, Homo sapiens
  misc_RNA (1)...(19): siRNA sense strand
ggauagcuguuguuucaga

SEQ ID NO: 2059906 - RNA, 19 nt, Homo sapiens
  misc_RNA (1)...(19): siRNA sense strand
ucaaagcaauaccaggaua

SEQ ID NO: 2059907 - RNA, 19 nt, Homo sapiens
  misc_RNA (1)...(19): siRNA sense strand
ggaugaagauggauauacu

SEQ ID NO: 2059908 - RNA, 19 nt, Homo sapiens
  misc_RNA (1)...(19): siRNA sense strand
aaauuuggaugaagaugga

SEQ ID NO: 2059909 - RNA, 19 nt, Homo sapiens
  misc_RNA (1)...(19): siRNA sense strand
ucaauuacacuucgacucu

SEQ ID NO: 2059910 - RNA, 19 nt, Homo sapiens
  misc_RNA (1)...(19): siRNA sense strand
uagcuguuguuucagagaa

SEQ ID NO: 2059911 - RNA, 19 nt, Homo sapiens
  misc_RNA (1)...(19): siRNA sense strand
cuucgacucucaaagcaau

SEQ ID NO: 2059912 - RNA, 19 nt, Homo sapiens
  misc_RNA (1)...(19): siRNA sense strand
caaagcaauaccaggauag

SEQ ID NO: 2059913 - RNA, 19 nt, Homo sapiens
  misc_RNA (1)...(19): siRNA sense strand
ggauauacucaauuacacu

SEQ ID NO: 2059914 - RNA, 19 nt, Homo sapiens
  misc_RNA (1)...(19): siRNA sense strand
gaagauggauauacucaau

SEQ ID NO: 2059915 - RNA, 19 nt, Homo sapiens
  misc_RNA (1)...(19): siRNA sense strand
caggauagcuguuguuuca

SEQ ID NO: 2059916 - RNA, 19 nt, Homo sapiens
  misc_RNA (1)...(19): siRNA sense strand
ggauagcuguuguuucaga

SEQ ID NO: 2059917 - RNA, 19 nt, Homo sapiens
  misc_RNA (1)...(19): siRNA sense strand
ucaaagcaauaccaggaua

SEQ ID NO: 2059918 - RNA, 19 nt, Homo sapiens
  misc_RNA (1)...(19): siRNA sense strand
ggaugaagauggauauacu

SEQ ID NO: 2059919 - RNA, 19 nt, Homo sapiens
  misc_RNA (1)...(19): siRNA sense strand
aaauuuggaugaagaugga

SEQ ID NO: 2059920 - RNA, 19 nt, Homo sapiens
  misc_RNA (1)...(19): siRNA sense strand
ucaauuacacuucgacucu

SEQ ID NO: 2059921 - RNA, 19 nt, Homo sapiens
  misc_RNA (1)...(19): siRNA sense strand
uagcuguuguuucagagaa

SEQ ID NO: 2059922 - RNA, 19 nt, Homo sapiens
  misc_RNA (1)...(19): siRNA sense strand
cuucgacucucaaagcaau

SEQ ID NO: 2059923 - RNA, 19 nt, Homo sapiens
  misc_RNA (1)...(19): siRNA sense strand
caaagcaauaccaggauag

SEQ ID NO: 2059924 - RNA, 19 nt, Homo sapiens
  misc_RNA (1)...(19): siRNA sense strand
ggauauacucaauuacacu

SEQ ID NO: 2059925 - RNA, 19 nt, Homo sapiens
  misc_RNA (1)...(19): siRNA sense strand
gaagauggauauacucaau

SEQ ID NO: 2059926 - RNA, 19 nt, Homo sapiens
  misc_RNA (1)...(19): siRNA sense strand
caggauagcuguuguuuca

SEQ ID NO: 2059927 - RNA, 19 nt, Homo sapiens
  misc_RNA (1)...(19): siRNA sense strand
ggauagcuguuguuucaga

SEQ ID NO: 2059928 - RNA, 19 nt, Homo sapiens
  misc_RNA (1)...(19): siRNA sense strand
ucaaagcaauaccaggaua

SEQ ID NO: 2059929 - RNA, 19 nt, Homo sapiens
  misc_RNA (1)...(19): siRNA sense strand
ggaugaagauggauauacu

SEQ ID NO: 2059930 - RNA, 19 nt, Homo sapiens
  misc_RNA (1)...(19): siRNA sense strand
aaauuuggaugaagaugga

SEQ ID NO: 2059931 - RNA, 19 nt, Homo sapiens
  misc_RNA (1)...(19): siRNA sense strand
ucaauuacacuucgacucu

SEQ ID NO: 2059932 - RNA, 19 nt, Homo sapiens
  misc_RNA (1)...(19): siRNA sense strand
uagcuguuguuucagagaa

SEQ ID NO: 2059933 - RNA, 19 nt, Homo sapiens
  misc_RNA (1)...(19): siRNA sense strand
cuucgacucucaaagcaau

SEQ ID NO: 2059934 - RNA, 19 nt, Homo sapiens
  misc_RNA (1)...(19): siRNA sense strand
caaagcaauaccaggauag

SEQ ID NO: 2059935 - RNA, 19 nt, Homo sapiens
  misc_RNA (1)...(19): siRNA sense strand
ggauauacucaauuacacu

SEQ ID NO: 2059936 - RNA, 19 nt, Homo sapiens
  misc_RNA (1)...(19): siRNA sense strand
gaagauggauauacucaau

SEQ ID NO: 2059937 - RNA, 19 nt, Homo sapiens
  misc_RNA (1)...(19): siRNA sense strand
caggauagcuguuguuuca

SEQ ID NO: 2059938 - RNA, 19 nt, Homo sapiens
  misc_RNA (1)...(19): siRNA sense strand
ggauagcuguuguuucaga

SEQ ID NO: 2059939 - RNA, 19 nt, Homo sapiens
  misc_RNA (1)...(19): siRNA sense strand
ucaaagcaauaccaggaua

SEQ ID NO: 2059940 - RNA, 19 nt, Homo sapiens
  misc_RNA (1)...(19): siRNA sense strand
ggaugaagauggauauacu

SEQ ID NO: 2059941 - RNA, 19 nt, Homo sapiens
  misc_RNA (1)...(19): siRNA sense strand
aaauuuggaugaagaugga

SEQ ID NO: 2059942 - RNA, 19 nt, Homo sapiens
  misc_RNA (1)...(19): siRNA sense strand
ucaauuacacuucgacucu

SEQ ID NO: 2059943 - RNA, 19 nt, Homo sapiens
  misc_RNA (1)...(19): siRNA sense strand
uagcuguuguuucagagaa

SEQ ID NO: 2059944 - RNA, 19 nt, Homo sapiens
  misc_RNA (1)...(19): siRNA sense strand
cuucgacucucaaagcaau

SEQ ID NO: 2059945 - RNA, 19 nt, Homo sapiens
  misc_RNA (1)...(19): siRNA sense strand
caaagcaauaccaggauag

SEQ ID NO: 2059946 - RNA, 19 nt, Homo sapiens
  misc_RNA (1)...(19): siRNA sense strand
ggauauacucaauuacacu

SEQ ID NO: 2059947 - RNA, 19 nt, Homo sapiens
  misc_RNA (1)...(19): siRNA sense strand
gaagauggauauacucaau

SEQ ID NO: 2059948 - RNA, 19 nt, Homo sapiens
  misc_RNA (1)...(19): siRNA sense strand
caggauagcuguuguuuca

SEQ ID NO: 2059949 - RNA, 19 nt, Homo sapiens
  misc_RNA (1)...(19): siRNA sense strand
ggauagcuguuguuucaga

SEQ ID NO: 2059950 - RNA, 19 nt, Homo sapiens
  misc_RNA (1)...(19): siRNA sense strand
ucaaagcaauaccaggaua

SEQ ID NO: 2059951 - RNA, 19 nt, Homo sapiens
  misc_RNA (1)...(19): siRNA sense strand
ggaugaagauggauauacu

SEQ ID NO: 2059952 - RNA, 19 nt, Homo sapiens
  misc_RNA (1)...(19): siRNA sense strand
aaauuuggaugaagaugga

SEQ ID NO: 2059953 - RNA, 19 nt, Homo sapiens
  misc_RNA (1)...(19): siRNA sense strand
ucaauuacacuucgacucu

SEQ ID NO: 2059954 - RNA, 19 nt, Homo sapiens
  misc_RNA (1)...(19): siRNA sense strand
uagcuguuguuucagagaa

SEQ ID NO: 2059955 - RNA, 19 nt, Homo sapiens
  misc_RNA (1)...(19): siRNA sense strand
cuucgacucucaaagcaau

SEQ ID NO: 2059956 - RNA, 19 nt, Homo sapiens
  misc_RNA (1)...(19): siRNA sense strand
caaagcaauaccaggauag

SEQ ID NO: 2059957 - RNA, 19 nt, Homo sapiens
  misc_RNA (1)...(19): siRNA sense strand
ggauauacucaauuacacu

SEQ ID NO: 2059958 - RNA, 19 nt, Homo sapiens
  misc_RNA (1)...(19): siRNA sense strand
gaagauggauauacucaau

SEQ ID NO: 2059959 - RNA, 19 nt, Homo sapiens
  misc_RNA (1)...(19): siRNA sense strand
caggauagcuguuguuuca

SEQ ID NO: 2059960 - RNA, 19 nt, Homo sapiens
  misc_RNA (1)...(19): siRNA sense strand
ggauagcuguuguuucaga

SEQ ID NO: 2059961 - RNA, 19 nt, Homo sapiens
  misc_RNA (1)...(19): siRNA sense strand
ucaaagcaauaccaggaua

SEQ ID NO: 2059962 - RNA, 19 nt, Homo sapiens
  misc_RNA (1)...(19): siRNA sense strand
ggaugaagauggauauacu

SEQ ID NO: 2059963 - RNA, 19 nt, Homo sapiens
  misc_RNA (1)...(19): siRNA sense strand
aaauuuggaugaagaugga

SEQ ID NO: 2059964 - RNA, 19 nt, Homo sapiens
  misc_RNA (1)...(19): siRNA sense strand
ucaauuacacuucgacucu

SEQ ID NO: 2059965 - RNA, 19 nt, Homo sapiens
  misc_RNA (1)...(19): siRNA sense strand
uagcuguuguuucagagaa

SEQ ID NO: 2059966 - RNA, 19 nt, Homo sapiens
  misc_RNA (1)...(19): siRNA sense strand
cuucgacucucaaagcaau

SEQ ID NO: 2059967 - RNA, 19 nt, Homo sapiens
  misc_RNA (1)...(19): siRNA sense strand
caaagcaauaccaggauag

SEQ ID NO: 2059968 - RNA, 19 nt, Homo sapiens
  misc_RNA (1)...(19): siRNA sense strand
ggauauacucaauuacacu

SEQ ID NO: 2059969 - RNA, 19 nt, Homo sapiens
  misc_RNA (1)...(19): siRNA sense strand
gaagauggauauacucaau

SEQ ID NO: 2059970 - RNA, 19 nt, Homo sapiens
  misc_RNA (1)...(19): siRNA sense strand
caggauagcuguuguuuca

SEQ ID NO: 2059971 - RNA, 19 nt, Homo sapiens
  misc_RNA (1)...(19): siRNA sense strand
ggauagcuguuguuucaga

SEQ ID NO: 2059972 - RNA, 19 nt, Homo sapiens
  misc_RNA (1)...(19): siRNA sense strand
ucaaagcaauaccaggaua

SEQ ID NO: 2059973 - RNA, 19 nt, Homo sapiens
  misc_RNA (1)...(19): siRNA sense strand
ggaugaagauggauauacu

SEQ ID NO: 2059974 - RNA, 19 nt, Homo sapiens
  misc_RNA (1)...(19): siRNA sense strand
aaauuuggaugaagaugga

SEQ ID NO: 2059975 - RNA, 19 nt, Homo sapiens
  misc_RNA (1)...(19): siRNA sense strand
ucaauuacacuucgacucu

SEQ ID NO: 2059976 - RNA, 19 nt, Homo sapiens
  misc_RNA (1)...(19): siRNA sense strand
uagcuguuguuucagagaa

SEQ ID NO: 2059977 - RNA, 19 nt, Homo sapiens
  misc_RNA (1)...(19): siRNA sense strand
cuucgacucucaaagcaau

SEQ ID NO: 2059978 - RNA, 19 nt, Homo sapiens
  misc_RNA (1)...(19): siRNA sense strand
caaagcaauaccaggauag

SEQ ID NO: 2059979 - RNA, 19 nt, Homo sapiens
  misc_RNA (1)...(19): siRNA sense strand
ggauauacucaauuacacu

SEQ ID NO: 2059980 - RNA, 19 nt, Homo sapiens
  misc_RNA (1)...(19): siRNA sense strand
gaagauggauauacucaau

SEQ ID NO: 2059981 - RNA, 19 nt, Homo sapiens
  misc_RNA (1)...(19): siRNA sense strand
caggauagcuguuguuuca

SEQ ID NO: 2059982 - RNA, 19 nt, Homo sapiens
  misc_RNA (1)...(19): siRNA sense strand
ggauagcuguuguuucaga

SEQ ID NO: 2059983 - RNA, 19 nt, Homo sapiens
  misc_RNA (1)...(19): siRNA sense strand
ucaaagcaauaccaggaua

SEQ ID NO: 2059984 - RNA, 19 nt, Homo sapiens
  misc_RNA (1)...(19): siRNA sense strand
ggaugaagauggauauacu

SEQ ID NO: 2059985 - RNA, 19 nt, Homo sapiens
  misc_RNA (1)...(19): siRNA sense strand
aaauuuggaugaagaugga

SEQ ID NO: 2059986 - RNA, 19 nt, Homo sapiens
  misc_RNA (1)...(19): siRNA sense strand
ucaauuacacuucgacucu

SEQ ID NO: 2059987 - RNA, 19 nt, Homo sapiens
  misc_RNA (1)...(19): siRNA sense strand
uagcuguuguuucagagaa

SEQ ID NO: 2059988 - RNA, 19 nt, Homo sapiens
  misc_RNA (1)...(19): siRNA sense strand
cuucgacucucaaagcaau

SEQ ID NO: 2059989 - RNA, 19 nt, Homo sapiens
  misc_RNA (1)...(19): siRNA sense strand
caaagcaauaccaggauag

SEQ ID NO: 2059990 - RNA, 19 nt, Homo sapiens
  misc_RNA (1)...(19): siRNA sense strand
ggauauacucaauuacacu

SEQ ID NO: 2059991 - RNA, 19 nt, Homo sapiens
  misc_RNA (1)...(19): siRNA sense strand
gaagauggauauacucaau

SEQ ID NO: 2059992 - RNA, 19 nt, Homo sapiens
  misc_RNA (1)...(19): siRNA sense strand
caggauagcuguuguuuca

SEQ ID NO: 2059993 - RNA, 19 nt, Homo sapiens
  misc_RNA (1)...(19): siRNA sense strand
ggauagcuguuguuucaga

SEQ ID NO: 2059994 - RNA, 19 nt, Homo sapiens
  misc_RNA (1)...(19): siRNA sense strand
ucaaagcaauaccaggaua

SEQ ID NO: 2059995 - RNA, 19 nt, Homo sapiens
  misc_RNA (1)...(19): siRNA sense strand
ggaugaagauggauauacu

SEQ ID NO: 2059996 - RNA, 19 nt, Homo sapiens
  misc_RNA (1)...(19): siRNA sense strand
aaauuuggaugaagaugga

SEQ ID NO: 2059997 - RNA, 19 nt, Homo sapiens
  misc_RNA (1)...(19): siRNA sense strand
ucaauuacacuucgacucu

SEQ ID NO: 2059998 - RNA, 19 nt, Homo sapiens
  misc_RNA (1)...(19): siRNA sense strand
uagcuguuguuucagagaa

SEQ ID NO: 2059999 - RNA, 19 nt, Homo sapiens
  misc_RNA (1)...(19): siRNA sense strand
cuucgacucucaaagcaau

SEQ ID NO: 2060000 - RNA, 19 nt, Homo sapiens
  misc_RNA (1)...(19): siRNA sense strand
caaagcaauaccaggauag

SEQ ID NO: 2060001 - RNA, 19 nt, Homo sapiens
  misc_RNA (1)...(19): siRNA sense strand
ggauauacucaauuacacu

SEQ ID NO: 2060002 - RNA, 19 nt, Homo sapiens
  misc_RNA (1)...(19): siRNA sense strand
gaagauggauauacucaau

SEQ ID NO: 2060003 - RNA, 19 nt, Homo sapiens
  misc_RNA (1)...(19): siRNA sense strand
caggauagcuguuguuuca

SEQ ID NO: 2060004 - RNA, 19 nt, Homo sapiens
  misc_RNA (1)...(19): siRNA sense strand
ggauagcuguuguuucaga

SEQ ID NO: 2060005 - RNA, 19 nt, Homo sapiens
  misc_RNA (1)...(19): siRNA sense strand
ucaaagcaauaccaggaua

SEQ ID NO: 2060006 - RNA, 19 nt, Homo sapiens
  misc_RNA (1)...(19): siRNA sense strand
ggaugaagauggauauacu
